(19) United States
(12) Patent Application Publication
(10) Pub. No.: US 2022/0307057 A1
(43) Pub. Date: Sep. 29, 2022

(54) CRISPR COMPOSITIONS AND METHODS FOR PROMOTING GENE EDITING OF GATA2

(71) Applicants: David Baram, Tel Aviv (IL); Lior Izhar, Tel Aviv (IL); Asael Herman, Ness Ziona (IL); Rafi Emmanuel, Ramla (IL); Michal Golan Mashiach, Ness Ziona (IL); Joseph Georgeson, Rehovot (IL)

(72) Inventors: David Baram, Tel Aviv (IL); Lior Izhar, Tel Aviv (IL); Asael Herman, Ness Ziona (IL); Rafi Emmanuel, Ramla (IL); Michal Golan Mashiach, Ness Ziona (IL); Joseph Georgeson, Rehovot (IL)

(73) Assignee: EmendoBio Inc., Wilmington, DE (US)

(21) Appl. No.: 17/603,925

(22) PCT Filed: Apr. 14, 2020
(86) PCT No.: PCT/US2020/028161

§ 371 Date: Oct. 14, 2021

Related U.S. Application Data
(60) Provisional application No. 62/863,129, filed on Jun. 18, 2019.
(60) Provisional application No. 62/834,230, filed on Apr. 15, 2019.

(51) Int. Cl. C12N 15/90; A61K 35/28; C12N 15/11; C12N 9/22

(52) U.S. Cl. CPC C12N 15/907; A61K 35/28; C12N 15/11; C12N 9/22; C12N 2310/20

(57) ABSTRACT

RNA molecules comprising a guide sequence portion having 17-25 contiguous nucleotides containing nucleotides in the sequence set forth in any one of SEQ ID NOs: 1-44348 and compositions, methods, and uses thereof.

[0001] This application claims the benefit of U.S. Provisional Application Nos. 62/863,129, filed Jun. 18, 2019 and 62/834,230, filed Apr. 15, 2019, the contents of which are hereby incorporated by reference.

[0002] Throughout this application, various publications are referenced, including referenced in parenthesis. The disclosures of all publications mentioned in this application in their entireties are hereby incorporated by reference into this application in order to provide additional description of the art to which this invention pertains and of the features in the art which can be employed with this invention.

### REFERENCE TO SEQUENCE LISTING

[0003] This application incorporates-by-reference nucleotide sequences which are present in the file named “200414_90941-A-PCT_Sequence_Listing_AWG.txt”, which is 8,382 kilobytes in size, and which was created on Apr. 14, 2020 in the IBM-PC machine format, having an operating system compatibility with MS-Windows, which is contained in the text file filed Apr. 14, 2020 as part of this application.

### BACKGROUND OF INVENTION

[0004] There are several classes of DNA variation in the human genome, including insertions and deletions, differences in the copy number of repeated sequences, and single nucleotide polymorphisms (SNPs). A SNP is a DNA sequence variation occurring when a single nucleotide (adenine (A), thymine (T), cytosine (C), or guanine (G)) in the genome differs between human subjects or paired chromosomes in an individual. Over the years, the different types of DNA variations have been the focus of the research community either as markers to pinpoint traits or disease causation, or as potential causes of genetic disorders.

[0005] A genetic disorder is caused by one or more abnormalities in the genome. Genetic disorders may be regarded as either “dominant” or “recessive.” Recessive genetic disorders are those which require two copies (i.e., two alleles) of the abnormal/defective gene to be present. In contrast, a dominant genetic disorder involves a gene or genes which exhibit(s) dominance over a normal (functional/healthy) gene or genes. As such, in dominant genetic disorders only a single copy (i.e., an allele) of an abnormal gene is required to cause or contribute to the symptoms of a particular genetic disorder. Such mutations include, for example, gain-of-function mutations in which the altered gene product possesses a new molecular function or a new pattern of gene expression. Additional examples include dominant negative mutations, which have a gene product that acts antagonistically to the wild-type allele. Other examples include haploinsufficiency, which may be caused by a loss-of-function mutation in which a reduced dosage of a normal gene product is not sufficient to produce the normal phenotype.

### MonoMAC Syndrome

[0006] GATA2 is a zinc finger transcription factor essential for embryonic and definitive hematopoiesis as well as lymphatic angiogenesis. GATA2 deficiency is caused by a variety of mutations in the GATA2 gene and can have variable presentation, onset, and outcome. Patients are susceptible to mycobacterial, viral, and fungal infections, and can develop MDS, acute or chronic leukemias, lymphedema and pulmonary alveolar proteinosis. GATA2 deficiency has been referred to as MonoMAC syndrome haploinsufficiency (MonoMAC syndrome), for monocytopenia and Mycobacterium avium complex.

### SUMMARY OF THE INVENTION

[0007] Disclosed herein is an approach for repairing an allele bearing a disease-associated mutation (“mutant allele”) by utilizing an RNA-guided DNA nuclease to edit, correct, or modify the nucleic acid sequence of the mutant allele such as to express a functional protein. In some embodiments, the approach is for repairing an allele bearing a dominant disease-associated mutation. The method of the enclosed invention may utilize allele-specific or non-discriminatory guide sequences to target and correct a disease-associated mutation.

[0008] According to some embodiments, the present disclosure provides a method for differentiating between the mutant allele and the wild type allele of a gene in order to edit only the mutant allele. In some embodiments, the differentiation is based on designing a guide RNA that targets a difference in sequence between the mutant allele and the functional allele. Such difference may be due to a heterozygous SNP, or a heterozygous disease-causing mutation.

[0009] According to some embodiments, the method utilizes at least one naturally occurring nucleotide difference or polymorphism (e.g., single nucleotide polymorphism (SNP)) between two alleles of a gene, to target an allele of a gene bearing a mutation causing a disease phenotype and a particular sequence in the SNP position. For example, a mutant allele in a cell can be specifically targeted based on a SNP and/or mutation sequence relative to another functional or wild-type allele in the cell which lacks the SNP and/or mutation. In some embodiments, a particular sequence in the SNP position is utilized for distinguishing or discriminating between two alleles of a gene, with one allele bearing a mutation such that it encodes a mutated protein causing a disease phenotype (“mutant allele”), and the other allele encoding for a functional, normal, or wild type protein (“functional allele”), such as to target the mutant allele bearing both a particular sequence in the SNP position and a disease associated mutation. In some embodiments, the disease-associated mutation is targeted. In some embodiments, the method further comprises the step of allele cleavage by a CRISPR nuclease. The allele cleavage may be in the form of a double-strand break (DSB) or a single-strand break. In some embodiments, the method further comprises the step of correcting the allele such that the corrected allele results in an expression of a functional GATA2 protein. In some embodiments, the correction is performed by homology directed repair (HDR). In some embodiments, the allele is altered such that it no longer possesses dominant negative properties.

[0010] According to embodiments of the present invention, there is provided an RNA molecule comprising a guide sequence portion having 17-25 contiguous nucleotides containing nucleotides in the sequence set forth in any one of SEQ ID NOs: 1-44348.

[0011] According to some embodiments of the present invention, there is provided a composition comprising an RNA molecule comprising a guide sequence portion having 17-25 contiguous nucleotides containing nucleotides in the sequence set forth in any one of SEQ ID NOs: 1-44348 and a CRISPR nuclease. In some embodiments, the composition further comprises a nucleic acid template for homology-directed repair, alteration, or replacement of a target sequence of an allele comprising the disease-associated mutation.

[0012] According to some embodiments of the present invention, there is provided a method for repairing or correcting a mutant GATA2 allele in a cell, the method comprising delivering to the cell a composition comprising an RNA molecule comprising a guide sequence portion having 17-25 contiguous nucleotides containing nucleotides in the sequence set forth in any one of SEQ ID NOs: 1-44348 and a CRISPR nuclease. In some embodiments, a nucleic acid template is further provided to the cell for homology-directed repair, alteration, or replacement of a target sequence of the mutant GATA2 allele. In some embodiments, an endogenous template is utilized to repair, alter, or replace the target sequence of the mutant GATA2 allele. In some embodiments, non-templated repair alters the GATA2 allele.

[0013] According to some embodiments of the present invention, there is provided a method for treating, preventing, or ameliorating a condition in a subject having MonoMAC syndrome, the method comprising delivering to the subject a composition comprising an RNA molecule comprising a guide sequence portion having 17-25 contiguous nucleotides containing nucleotides in the sequence set forth in any one of SEQ ID NOs: 1-44348 and a CRISPR nuclease. In some embodiments, a nucleic acid template is further provided to the cell for homology-directed repair, alteration, or replacement of a target DNA sequence comprising the pathogenic mutation. In some embodiments, an endogenous template is utilized to repair, alter, or replace the target sequence of the mutant GATA2 allele. In some embodiments, a non-templated repair process alters the GATA2 allele.

[0014] In some embodiments, the method is performed ex-vivo and the cell is provided or explanted from an individual subject. In some embodiments, the method further comprises the step of introducing the resulting cell with the corrected, repaired, or modified mutant GATA2 allele, into the individual subject (e.g. autologous transplantation).

[0015] According to some embodiments of the present invention, there is provided use of a composition comprising an RNA molecule comprising a guide sequence portion having 17-25 contiguous nucleotides containing nucleotides in the sequence set forth in any one of SEQ ID NOs: 1-44348 and a CRISPR nuclease for repairing, correcting, or editing a mutant GATA2 allele in a cell, comprising delivering to the cell the composition comprising an RNA molecule comprising a guide sequence portion having 17-25 contiguous nucleotides containing nucleotides in the sequence set forth in any one of SEQ ID NOs: 1-44348 and a CRISPR nuclease.

[0016] According to embodiments of the present invention, there is provided a medicament comprising an RNA molecule comprising a guide sequence portion having 17-25 contiguous nucleotides containing nucleotides in the sequence set forth in any one of SEQ ID NOs: 1-44348 and a CRISPR nuclease for use in inactivating repairing/correcting/editing a mutant GATA2 allele in a cell, wherein the medicament is administered by delivering to the cell the composition comprising an RNA molecule comprising a guide sequence portion having 17-25 contiguous nucleotides containing nucleotides in the sequence set forth in any one of SEQ ID NOs: 1-44348 and a CRISPR nuclease. In some embodiments, the medicament further comprises a nucleic acid template.

[0017] According to some embodiments of the present invention, there is provided use of a composition comprising an RNA molecule comprising a guide sequence portion having 17-25 contiguous nucleotides containing nucleotides in the sequence set forth in any one of SEQ ID NOs: 1-44348 and a CRISPR nuclease for treating ameliorating or preventing MonoMAC syndrome, comprising delivering to cells of a subject having or at risk of having MonoMAC syndrome, the composition comprising an RNA molecule comprising a guide sequence portion having 17-25 contiguous nucleotides containing nucleotides in the sequence set forth in any one of SEQ ID NOs: 1-44348 and a CRISPR nuclease.

[0018] According to some embodiments of the present invention, there is provided a medicament comprising the composition comprising an RNA molecule comprising a guide sequence portion having 17-25 contiguous nucleotides containing nucleotides in the sequence set forth in any one of SEQ ID NOs: 1-44348 and a CRISPR nuclease for use in treating ameliorating or preventing MonoMAC syndrome, wherein the medicament is administered by delivering to a subject having or at risk of having MonoMAC syndrome the composition comprising an RNA molecule comprising a guide sequence portion having 17-25 contiguous nucleotides containing nucleotides in the sequence set forth in any one of SEQ ID NOs: 1-44348 and a CRISPR nuclease.

[0019] According to some embodiments of the present invention, there is provided a kit for correcting/repairing a mutant GATA2 allele in a cell, comprising an RNA molecule comprising a guide sequence portion having 17-25 contiguous nucleotides containing nucleotides in the sequence set forth in any one of SEQ ID NOs: 1-44348, a CRISPR nuclease, and optionally a tracrRNA molecule; and instructions for delivering the RNA molecule; CRISPR nuclease, and/or the tracrRNA to the cell. In some embodiment, the delivery is performed ex-vivo. In some embodiments, the delivery is performed within a subject's body. In some embodiments, the cells are HSC cell originated from the subject.

[0020] According to some embodiments of the present invention, there is provided a kit for treating MonoMAC syndrome in a subject, comprising an RNA molecule comprising a guide sequence portion having 17-25 contiguous nucleotides containing nucleotides in the sequence set forth in any one of SEQ ID NOs: 1-44348, a CRISPR nuclease, and optionally a tracrRNA molecule; and instructions for delivering the RNA molecule; CRISPR nuclease, and optionally the tracrRNA to a subject having or at risk of having MonoMAC syndrome. According to some embodiments of the present invention, there is provided a kit for treating MonoMAC syndrome in a subject, comprising an RNA molecule comprising a guide sequence portion having 17-25 contiguous nucleotides containing nucleotides in the sequence set forth in any one of SEQ ID NOs: 1-44348, a CRISPR nuclease, and optionally a tracrRNA molecule; and instructions for delivering the RNA molecule; CRISPR nuclease, and optionally the tracrRNA to cells of the subject having or at risk of having MonoMAC syndrome. In some embodiments, the cells are HSC cells obtained from the subject and the delivery is ex-vivo.

[0021] The present invention also provides a method for repairing, correcting, or modifying a gene bearing a dominant disease-associated mutation. The method utilizes at least one guide sequence for targeting a CRISPR nuclease to a target sequence in a non-coding region of a gene bearing a mutation causing a disease phenotype. In some embodiments, the targeting is to a non-coding region of each of two alleles of the gene, one allele bearing a mutation such that it encodes a mutated protein causing a disease phenotype (“mutant allele”), and the other allele encoding for a functional/normal/wild type protein (“functional allele”). In some embodiments, the target sequence is in a distance of up to 1000, 900, 800, 700, 600, 500, 400, 300, 200 base pairs from the edges of an exon bearing the mutation causing the disease phenotype. Each possibility represents a separate embodiment. In some embodiments, the method further comprises the step of allele cleavage by a CRISPR nuclease. The allele cleavage is selected from the group consisting of a double strand break (DSB) and a single strand break. In some embodiments, the method further comprises the step of correction of the allele such that the corrected allele results in an expression of a functional GATA2 protein. In some embodiments, the correction is performed by homology directed repair (HDR).

[0022] The present invention provides for a method for modifying in a cell a mutant allele of the GATA2 gene having a mutation associated with MonoMAC syndrome, the method comprising
[0023] introducing to the cell a composition comprising:
   [0024] a CRISPR nuclease or a nucleotide sequence encoding the CRISPR nuclease; and
   [0025] an RNA molecule comprising a guide sequence portion having 17-25 nucleotides or a nucleotide sequence encoding the same,
[0026] wherein a complex of the CRISPR nuclease and the RNA molecule affects a double strand break in a non-coding region of the GATA2 gene at a location that is 250 or fewer nucleotides from the first or the last nucleotide of a coding region of the GATA2 gene containing the mutation associated with MonoMAC syndrome.

[0027] The present invention also provides for a modified cell obtained by any of the methods of the present invention.

[0028] The present invention provides for a composition comprising the modified cells of the present invention and a pharmaceutically acceptable carrier.

[0029] The present invention also provides for an in vitro or ex vivo method of preparing the compositions of the present invention, comprising mixing the cells with the pharmaceutically acceptable carrier.

[0030] The present invention provides for a method of preparing in vitro or ex vivo a composition comprising modified cells, the method comprising:
[0031] a) isolating HSPCs from cells obtained from a subject with a GATA2 gene mutation related to MonoMAC syndrome and/or suffering from MonoMAC syndrome, and obtaining the cell from the subject;
[0032] b) introducing to the cells of step (a) a composition comprising:
   [0033] a CRISPR nuclease or a nucleotide sequence encoding the CRISPR nuclease; and
   [0034] an RNA molecule comprising a guide sequence portion having 17-25 nucleotides,
wherein a complex of the CRISPR nuclease and the RNA molecule affects a double strand break in a non-coding region of the GATA2 gene at a location that is 250 or fewer nucleotides from the first or the last nucleotide of a coding region of the GATA2 gene containing the mutation associated with MonoMAC syndrome,
   [0035] optionally, introducing to the cells a donor template for homology directed repair (HDR), alteration, or replacement of a target sequence of the GATA2 allele
so as to modify the mutant allele of the GATA2 gene in one or more cells thereby obtaining modified cells; optionally further comprising the step of
[0036] c) culture expanding the modified cells of step (b),
[0037] wherein the modified cells are capable of engraftment and giving rise to progeny cells after engraftment.

[0038] The present invention provides for use of a composition prepared in vitro by a method comprising:
[0039] a) isolating HSPCs from cells obtained from a subject with a GATA2 gene mutation related to MonoMAC syndrome and/or suffering from MonoMAC syndrome, and obtaining the cell from the subject;
[0040] b) introducing to the cells of step (a) a composition comprising:
   [0041] a CRISPR nuclease or a nucleotide sequence encoding the CRISPR nuclease; and
   [0042] an RNA molecule comprising a guide sequence portion having 17-25 nucleotides,
wherein a complex of the CRISPR nuclease and the RNA molecule affects a double strand break in a non-coding region of the GATA2 gene at a location that is 250 or fewer nucleotides from the first or the last nucleotide of a coding region of the GATA2 gene containing the mutation associated with MonoMAC syndrome,
   [0043] optionally, introducing to the cells a donor template for homology directed repair (HDR), alteration, or replacement of a target sequence of the GATA2 allele
so as to modify the mutant allele of the GATA2 gene in one or more cells thereby obtaining modified cells; optionally further comprising an additional step of
[0044] c) culture expanding the cells of step (b) wherein the modified cells are capable of engraftment and giving rise to progeny cells after engraftment; and
[0045] d) administering to the subject the cells of step (b) or step (c)
[0046] for treating the MonoMAC syndrome in the subject.

[0047] The present invention provides for a method of treating a subject afflicted with MonoMAC syndrome, comprising administration of a therapeutically effective amount of the modified cells, the compositions, or the compositions prepared by the methods of the present invention.

[0048] The present invention provides for a method for treating MonoMAC syndrome in a subject with a GATA2 gene mutation relating to MonoMAC syndrome in need thereof, the method comprising:
[0049] a) isolating HSPCs from cells obtained from the subject;
[0050] b) introducing to the cells of step (a) a composition comprising:
   [0051] a CRISPR nuclease or a nucleotide sequence encoding the CRISPR nuclease; and
   [0052] an RNA molecule comprising a guide sequence portion having 17-25 nucleotides,
wherein a complex of the CRISPR nuclease and the RNA molecule affects a double strand break in a non-coding region of the GATA2 gene at a location that is 250 or fewer nucleotides from the first or the last nucleotide of a coding region of the GATA2 gene containing the mutation associated with MonoMAC syndrome,
   [0053] optionally, introducing to the cells a donor template for homology directed repair (HDR), alteration, or replacement of a target sequence of the GATA2 allele
so as to modify the mutant allele of the GATA2 gene in one or more cells thereby obtaining modified cells; optionally further comprising an additional step of
[0054] c) culture expanding the cells of step (b) wherein the modified cells are capable of engraftment and giving rise to progeny cells after engraftment; and
[0055] d) administering to the subject the cells of step (b) or step (c)
[0056] thereby treating the MonoMAC syndrome in the subject.

[0057] The present invention provides for a method for treating MonoMAC syndrome in a subject with a GATA2 gene mutation relating to MonoMAC syndrome in need thereof, the method comprising
[0058] administering to the subject autologous modified cells or progeny of autologous modified cells, wherein the autologous modified cells are modified so as to have a correction of the mutant allele of the GATA2 gene from the mutant phenotype to a non-mutant phenotype,
   [0059] wherein said double strand break results from introduction to the cells of a composition comprising a CRISPR nuclease or sequence encoding the CRISPR nuclease and an RNA molecule wherein a complex of the CRISPR nuclease and the RNA molecule affects a double strand break in a non-coding region of the GATA2 gene at a location that is 250 or fewer nucleotides from the first or the last nucleotide of a coding region of the GATA2 gene containing the mutation associated with MonoMAC syndrome,
[0060] thereby treating the MonoMAC syndrome in the subject.

[0061] The present invention provides for an RNA molecule comprising a guide sequence portion having 17-25 contiguous nucleotides containing nucleotides in the sequence set forth in any one of SEQ ID NOs: 1-44348.

[0062] The present invention provides for a composition comprising the RNA molecules of the present invention and a donor template for homology directed repair (HDR), alteration, or replacement of a target sequence of the GATA2 allele.

[0063] The present invention provides for a method for modifying in a cell a mutant allele of the GATA2 gene, the method comprising delivering to the cell the RNA molecules of the present invention or the compositions of the present invention.

[0064] The present invention provides for a method for treating MonoMAC syndrome, the method comprising delivering to a subject having MonoMAC syndrome the RNA molecules of the present invention or the compositions of present invention, or cells modified by the RNA molecules of the present invention or the compositions of the present invention.

[0065] The present invention provides for use of the RNA molecules of the present invention, the compositions of the present invention, or the composition prepared by the methods of the present invention, for modifying in a cell a mutant GATA2 allele.

[0066] The present invention provides for a medicament comprising the RNA molecules of the present invention, the compositions of the present invention, or the composition prepared by the methods of the present invention for use in inactivating in a cell a mutant GATA2 allele, wherein the medicament is administered by delivering to the cell the RNA molecules of the present invention, the compositions of the present invention, or the composition prepared by the methods of the present invention.

[0067] The present invention provides for use of the methods of the present invention, the modified cells of the present invention, the compositions of the present invention, or the compositions prepared by the methods of the present invention, or the RNA molecules of the present invention for treating ameliorating or preventing MonoMAC syndrome in to a subject having or at risk of having MonoMAC syndrome.

[0068] The present invention provides for a medicament comprising the RNA molecules of the present invention, the compositions of the present invention, the compositions prepared by the methods of the present invention, or the modified cells of the present invention, for use in treating ameliorating or preventing MonoMAC syndrome, wherein the medicament is administered by delivering to a subject having or at risk of having MonoMAC syndrome the RNA molecules of the present invention, the compositions of the present invention, the compositions prepared by the methods of the present invention, or the modified cells of the present invention.

[0069] The present invention provides for a kit for inactivating a mutant GATA2 allele in a cell, comprising an RNA molecule of the present invention, a CRISPR nuclease or a nucleotide sequence encoding the CRISPR nuclease, and/or a tracrRNA molecule or a sequence encoding the tracrRNA; and instructions for delivering the RNA molecule; CRISPR nuclease or a sequence encoding the CRISPR nuclease, and/or the tracrRNA molecule or a sequence encoding the tracrRNA to the cell to modify the mutant GATA2 allele in the cell.

[0070] The present invention provides for a kit for treating MonoMAC syndrome in a subject, comprising an RNA molecule of the present invention, a CRISPR nuclease or a nucleotide sequence encoding the CRISPR nuclease, and/or a tracrRNA molecule or a sequence encoding the tracrRNA; and instructions for delivering the RNA molecule; CRISPR nuclease or sequence encoding the CRISPR nuclease, and/or tracrRNA molecule or sequence encoding the tracrRNA to a subject having or at risk of having MonoMAC syndrome so as to treat the MonoMAC syndrome.

[0071] The present invention provides for a kit for inactivating a mutant GATA2 allele in a cell, comprising the compositions of the present invention, the compositions prepared by the methods of the present invention, or the modified cells of the present invention, and instructions for delivering the composition to the cell so as to modify the GATA2 gene in the cell.

[0072] The present invention provides for a kit for treating MonoMAC syndrome in a subject, comprising the compositions of the present invention, the compositions prepared by the methods of the present invention, or the modified cells of the present invention, and instructions for delivering the compositions of the present inventions, the compositions prepared by the methods of the present invention, or the modified cells of the present invention, to a subject having or at risk of having MonoMAC syndrome so as to treat MonoMAC syndrome.

### BRIEF DESCRIPTION OF THE DRAWINGS

[0073] FIG. 1A-FIG. 1C: Schematic representations of GATA2 editing strategies. FIG. 1A represents an allele specific editing approach based on targeting a nuclease (scissors accompanied by an arrow indicating the target site) to a pathogenic mutation (white star) in an exon (e.g. Exon 3) of a mutant GATA2 allele. FIG. 1B represents an allele specific editing approach based on targeting a nuclease (scissors accompanied by an arrow indicating the target site) to a heterozygous SNP (black star) of a mutant GATA2 allele. FIG. 1C represents a bi-allelic editing approach based on utilizing non-discriminatory guides to target a nuclease (scissors accompanied by an arrow indicating the target site) to both mutant and functional GATA2 alleles at non-coding regions within 250 basepairs of an edge of an exon bearing a pathogenic mutation position.

[0074] FIG. 2: Activity screen of guides targeting GATA2 in HeLa cells. An OMNI-50 coding plasmid was co-transfected with each of the guide DNA plasmids. Cells were harvested 72 h post DNA transfection. Genomic DNA was extracted, relevant regions were amplified, and editing level was measured by capillary electrophoresis. The graph represents the average of % editing±STDV of three independent experiments. The guides used in the activity screen are listed in Table 1.

TABLE 1
Guides used in the activity screen of FIG. 2.

| Guide | Guide | | | | |
|---|---|---|---|---|---|
| Short | Long | | | | |
| Name | Name | Region | SNP/mutation | Guide Sequence | PAM |
| g1 | sgEnhancer 1 | Intron 4 of 5 | c.1017 + 572_ | GGAAACUUCGUGUAUCUGUUUC (SEQ ID NO: 11385) | CGG |
| g2 | sgEnhancer 2 | | C > T | GACUCUAAAAACUCGCAGAGUC (SEQ ID NO: 11382) | CGG |
| g3 | sg152_1 | Intron 4 of 5 | rs11717152_ | GAAGCCUGAUGUUAGAAUCAAC (SEQ ID NO: 29952) | GGG |
| g4 | sg152_2 | | T > G | AGAAGCCUGAUGUUAGAAUCAA (SEQ ID NO: 29932) | CGG |
| g5 | sg152_3 | | | CAAUCCCGUUGAUUCUAACAUC (SEQ ID NO: 29940) | AGG |
| g6 | sg606_1 | Intron 4 of 5 | rs1170860_ | GGGAGGGCAAGGCAGCGUCAGC (SEQ ID NO: 29699) | AGG |
| g7 | sg606_2 | | C > T | GGGCAAGGCAGCGUCAGCAGGC (SEQ ID NO: 29701) | TGG |
| g8 | sg606_3 | | | GACGCUGCCUUGCCCUCCCAGU (SEQ ID NO: 10598) | CGG |
| g9 | sg603_1 | Intron 5 of 5 | rs2713603_ | AAGCCCUUCUGGCACUCACUCA (SEQ ID NO: 29547) | GGG |
| g10 | sg603_2 | | C > T Alt | GAAGCCCUUCUGGCACUCACUC (SEQ ID NO: 29576) | AGG |
| g11 | sg603_3 | | | CUGCCCUGAGUGAGUGCCAGAA (SEQ ID NO: 29562) | GGG |
| g12 | sg603_4 | | | GCUGCCCUGAGUGAGUGCCAGA (SEQ ID NO: 29574) | AUG |
| g32 | sg604_1 | Intron 5 of 5 | rs2713604_ | GGCUAGGACAGGGUCUCGGGCU (SEQ ID NO: 29310) | AGG |
| g33 | sg604_2 | | T > C (A > G) Alt | GCUAGGACAGGGUCUCGGGCUA (SEQ ID NO: 29308) | GGG |
| g34 | sg604_3 | | | ACAGGGUCUCGGGCUAGGGAAG (SEQ ID NO: 29282) | TGG |
| g21 | sgR396Q_2 | Exon 6 of 6 | p.R396Q, c.1187G > A | GAAGAAGGAAGGGAUCCAGACU (SEQ ID NO: 6562) | CGG |
| g24 | sgR396Q_3/ | | p.R398W_c.1192_C > T | GGAAGGGAUCCAGACUCGGAAC (SEQ ID NO: 6427) | CGG |
| | sgR398W_2 | | | | |
| g25 | sgR398W 3 | | | CUUGGACUUGUUGGACAUCUUC (SEQ ID NO: 6417) | CGG |

### DETAILED DESCRIPTION

[0076] Unless otherwise defined, all technical and/or scientific terms used herein have the same meaning as commonly understood by one of ordinary skill in the art to which the invention pertains. Although methods and materials similar or equivalent to those described herein can be used in the practice or testing of embodiments of the invention, exemplary methods and/or materials are described below. In case of conflict, the patent specification, including definitions, will control. In addition, the materials, methods, and examples are illustrative only and are not intended to be necessarily limiting.

[0077] It should be understood that the terms “a” and “an” as used above and elsewhere herein refer to “one or more” of the enumerated components. It will be clear to one of ordinary skill in the art that the use of the singular includes the plural unless specifically stated otherwise. Therefore, the terms “a,” “an” and “at least one” are used interchangeably in this application.

[0078] For purposes of better understanding the present teachings and in no way limiting the scope of the teachings, unless otherwise indicated, all numbers expressing quantities, percentages or proportions, and other numerical values used in the specification and claims, are to be understood as being modified in all instances by the term “about.” Accordingly, unless indicated to the contrary, the numerical parameters set forth in the following specification and attached claims are approximations that may vary depending upon the desired properties sought to be obtained. At the very least, each numerical parameter should at least be construed in light of the number of reported significant digits and by applying ordinary rounding techniques.

[0079] Unless otherwise stated, adjectives such as “substantially” and “about” modifying a condition or relationship characteristic of a feature or features of an embodiment of the invention, are understood to mean that the condition or characteristic is defined to within tolerances that are acceptable for operation of the embodiment for an application for which it is intended. Unless otherwise indicated, the word “or” in the specification and claims is considered to be the inclusive “or” rather than the exclusive or, and indicates at least one of, or any combination of items it conjoins.

[0080] In the description and claims of the present application, each of the verbs, “comprise,” “include” and “have” and conjugates thereof, are used to indicate that the object or objects of the verb are not necessarily a complete listing of components, elements or parts of the subject or subjects of the verb. Other terms as used herein are meant to be defined by their well-known meanings in the art.

[0081] It is understood that where a numerical range is recited herein, the present invention contemplates each integer between, and including, the upper and lower limits, unless otherwise stated.

[0082] The “guide sequence portion” of an RNA molecule refers to a nucleotide sequence that is capable of hybridizing to a specific target DNA sequence, e.g., the guide sequence portion has a nucleotide sequence which is fully complementary to the DNA sequence being targeted along the length of the guide sequence portion. In some embodiments, the guide sequence portion is 17, 18, 19, 20, 21, 22, 23, 24, or 25 nucleotides in length, or approximately 17-25, 17-24, 17-22, 17-21, 18-25, 18-24, 18-23, 18-22, 18-21, 19-25, 19-24, 19-23, 19-22, 19-21, 19-20, 20-22, 18-20, 20-21, 21-22, or 17-20 nucleotides in length. The entire length of the guide sequence portion is fully complementary to the DNA sequence being targeted along the length of the guide sequence portion. The guide sequence portion may be part of an RNA molecule that can form a complex with a CRISPR nuclease with the guide sequence portion serving as the DNA targeting portion of the CRISPR complex. When the DNA molecule having the guide sequence portion is present contemporaneously with the CRISPR molecule the RNA molecule is capable of targeting the CRISPR nuclease to the specific target DNA sequence. Each possibility represents a separate embodiment. An RNA molecule can be custom designed to target any desired sequence.

[0083] In embodiments of the present invention, an RNA molecule comprises a guide sequence portion having 17-25 contiguous nucleotides containing nucleotides in the sequence set forth in any one of SEQ ID NOs: 1-44348. In some embodiments, the guide sequence portion has 17-25 contiguous nucleotides containing nucleotides in the sequence set forth in any one of SEQ ID NOs: 1-44348. In some embodiments, the aforementioned guides are allele-specific. In some embodiments, the aforementioned guides target a SNP position. In some embodiments, the aforementioned guides target a GATA2 pathogenic mutation. In some embodiments, the aforementioned guides target a non-coding region of both mutant and functional GATA2 alleles.

[0084] The term “targets” as used herein, refers to the preferential hybridization of a guide sequence portion of an RNA molecule to a nucleic acid which has a targeted nucleotide sequence. It is understood that the term “targets” encompasses variable hybridization efficiencies, such that there is preferential targeting of the nucleic acid having the targeted nucleotide sequence, but unintentional off-target hybridization in addition to on-target hybridization might also occur. It is understood that where an RNA molecule targets a sequence, a complex of the RNA molecule and a CRISPR nuclease molecule targets the sequence for nuclease activity.

[0085] In the context of targeting a DNA sequence that is present in a plurality of cells, it is understood that the targeting encompasses hybridization of the guide sequence portion of the RNA molecule with the sequence in one or more of the cells, and also encompasses hybridization of the RNA molecule with the target sequence in fewer than all of the cells in the plurality of cells. Accordingly, it is understood that where an RNA molecule targets a sequence in a plurality of cells, a complex of the RNA molecule and a CRISPR nuclease is understood to hybridize with the target sequence in one or more of the cells, and also may hybridize with the target sequence in fewer than all of the cells. Accordingly, it is understood that the complex of the RNA molecule and the CRISPR nuclease introduces a double strand break in relation to hybridization with the target sequence in one or more cells and may also introduce a double strand break in relation to hybridization with the target sequence in fewer than all of the cells. As used herein, the term “modified cells” refers to cells in which a double strand break is affected by a complex of an RNA molecule and the CRISPR nuclease as a result of hybridization with the target sequence, i.e. on-target hybridization. The term “modified cells” may further encompass cells in which a repair or correction of a mutation was affected following the double strand break.

[0086] As used herein, “contiguous nucleotides” set forth in a SEQ ID NO refers to nucleotides in a sequence of nucleotides in the order set forth in the SEQ ID NO without any intervening nucleotides.

[0087] The RNA molecule and or the guide sequence portion of the RNA molecule may contain modified nucleotides. Exemplary modifications to nucleotides/polynucleotides may be synthetic and encompass polynucleotides which contain nucleotides comprising bases other than the naturally occurring adenine, cytosine, thymine, uracil, or guanine bases. Modifications to polynucleotides include polynucleotides which contain synthetic, non-naturally occurring nucleosides e.g., locked nucleic acids. Modifications to polynucleotides may be utilized to increase or decrease stability of an RNA. An example of a modified polynucleotide is an mRNA containing 1-methyl pseudo-uridine. For examples of modified polynucleotides and their uses, see U.S. Pat. No. 8,278,036. PCT International Publication No. WO/2015/006747, and Weissman and Kariko, 2015, (9):1416-7, hereby incorporated by reference.

[0088] In embodiments of the present invention, the guide sequence portion may be 25 nucleotides in length and contain 20-22 contiguous nucleotides in the sequence set forth in any one of SEQ ID NOs: 1-44348. In embodiments of the present invention, the guide sequence portion may be less than 22 nucleotides in length. For example, in embodiments of the present invention the guide sequence portion may be 17, 18, 19, 20, or 21 nucleotides in length. In such embodiments the guide sequence portion may consist of 17, 18, 19, 20, or 21 nucleotides, respectively, in the sequence of 17-22 contiguous nucleotides set forth in any one of SEQ ID NOs: 1-44348. For example, a guide sequence portion having 17 nucleotides in the sequence of 17 contiguous nucleotides set forth in SEQ ID NO: 44349 may consist of any one of the following nucleotide sequences (nucleotides excluded from the contiguous sequence are marked in strike-through):

(SEQ ID NO: 44349)
AAACUGACACCUCAGGGACA
17 nucleotide guide sequence 1:
(SEQ ID NO: 44350) [symbol]
CUGACACCUCAGGGACA
17 nucleotide guide sequence 2:
(SEQ ID NO: 44351) [symbol]
ACUGACACCUCAGGGAC [symbol]
17 nucleotide guide sequence 3:
(SEQ ID NO: 44352) [symbol]
AACUGACACCUCAGGGA [symbol]
17 nucleotide guide sequence 4:
(SEQ ID NO: 44353)
AAACUGACACCUCAGGG

[symbol]

[0089] In embodiments of the present invention, the guide sequence portion may be greater than 20 nucleotides in length. For example, in embodiments of the present invention the guide sequence portion may be 21, 22, 23, 24 or 25 nucleotides in length. In such embodiments the guide sequence portion comprises 17-25 nucleotides containing the sequence of 20, 21 or 22 contiguous nucleotides set forth in any one of SEQ ID NOs: 1-44348 and additional nucleotides fully complimentary to a nucleotide or sequence of nucleotides adjacent to the 3′ end of the target sequence, 5′ end of the target sequence, or both.

[0090] In embodiments of the present invention, a CRISPR nuclease and an RNA molecule comprising a guide sequence portion form a CRISPR complex that binds to a target DNA sequence to affect cleavage of the target DNA sequence. CRISPR nucleases, e.g. Cpf1, may form a CRISPR complex comprising a CRISPR nuclease and RNA molecule without a further tracrRNA molecule. Alternatively, CRISPR nucleases, e.g. Cas9, may form a CRISPR complex between the CRISPR nuclease, an RNA molecule comprising a guide sequence portion of the present invention, and a tracrRNA molecule.

[0091] In embodiments of the present invention, the RNA molecule may further comprise the sequence of a tracrRNA molecule. Such embodiments may be designed as a synthetic fusion of the guide portion of the RNA molecule and the trans-activating crRNA (tracrRNA). See Jinek et al., Science (2012). Embodiments of the present invention may also form CRISPR complexes utilizing a separate tracrRNA molecule and a separate RNA molecule comprising a guide sequence portion. In such embodiments the tracrRNA molecule may hybridize with the RNA molecule via base-pairing and may be advantageous in certain applications of the invention described herein.

[0092] The term “tracr mate sequence” refers to a sequence sufficiently complementary to a tracrRNA molecule so as to hybridize to the tracrRNA via basepairing and promote the formation of a CRISPR complex. (See U.S. Pat. No. 8,906,616). In embodiments of the present invention, the RNA molecule may further comprise a portion having a tracr mate sequence.

[0093] According to embodiments of the present invention, an RNA molecule may be up to 500, 400, 300, 290, 280, 270, 260, 250, 240, 230, 220, 210, 200, 190, 180, 170, 160, 150, 140, 130, 120, 110, or 100 nucleotides in length. Each possibility represents a separate embodiment. In embodiments of the present invention, the RNA molecule may be 17 up to 300 nucleotides in length, 100 up to 300 nucleotides in length, 150 up to 300 nucleotides in length, 200 up to 300 nucleotides in length, 100 to 200 nucleotides in length, or 150 up to 250 nucleotides in length. Each possibility represents a separate embodiment.

[0094] A skilled artisan will appreciate that in each of the embodiments of the present invention, individually, each of the RNA molecules of the present invention are capable of complexing with a nuclease, e.g. a CRISPR nuclease, such as to associate with a target genomic DNA sequence of interest next to a protospacer adjacent motif (PAM). The nuclease then induces cleavage of target DNA to create a double-stranded break within the protospacer. Accordingly, in embodiments of the present invention, the guide sequences and RNA molecules of the present invention may target a location 1, 2, 3, 4, 5, 6, 7, 8, 9, 10, 11, 12, 13, 14, 15, 16, 17, 18, 19, 20, 21, 22, 23, 24, 25, 26, 27, or 28 nucleotides upstream or downstream from a PAM site.

[0095] Therefore, in embodiments of the present invention, the RNA molecules of the present invention in complex with a nuclease, e.g., a CRISPR nuclease, may affect a double strand break in alleles of a gene 1, 2, 3, 4, 5, 6, 7, 8, 9, 10, 11, 12, 13, 14, 15, 16, 17, 18, 19, 20, 21, 22, 23, 24, 25, 26, 27, 28 upstream or downstream from a target site.

[0096] A “gene,” for the purposes of the present disclosure, includes a DNA region encoding a gene product, as well as all DNA regions which regulate the production of the gene product, whether or not such regulatory sequences are adjacent to coding and/or transcribed sequences. Accordingly, a gene includes, but is not necessarily limited to, promoter sequences, terminators, translational regulatory sequences such as ribosome binding sites and internal ribosome entry sites, enhancers, silencers, insulators, boundary elements, replication origins, matrix attachment sites and locus control regions.

[0097] The term “single nucleotide polymorphism (SNP) position”, as used herein, refers to a position in which a single nucleotide DNA sequence variation occurs between members of a species, or between paired chromosomes in an individual. In the case that a SNP position exists at paired chromosomes in an individual, a SNP on one of the chromosomes is a “heterozygous SNP.” The term SNP position refers to the particular nucleic acid position where a specific variation occurs and encompasses both a sequence including the variation from the most frequently occurring base at the particular nucleic acid position (also referred to as “SNP” or alternative “ALT”) and a sequence including the most frequently occurring base at the particular nucleic acid position (also referred to as reference, or “REF”). Accordingly, the sequence of a SNP position may reflect a SNP (i.e. an alternative sequence variant relative to a consensus reference sequence within a population), or the reference sequence itself.

[0098] “Eukaryotic” cells include, but are not limited to, fungal cells (such as yeast), plant cells, animal cells, mammalian cells and human cells.

[0099] As used herein, the term “HSPC” refers to both hematopoietic stem cells and hematopoietic stem progenitor cells. Non-limiting examples of stem cells include a bone marrow cell, a myeloid progenitor cell, a multipotent progenitor cell, a lineage restricted progenitor cell.

[0100] As used herein, “progenitor cell” refers to a lineage cell that is derived from stem cell and retains mitotic capacity and multipotency (e.g., can differentiate or develop into more than one but not all types of mature lineage of cell). As used herein “hematopoiesis” or “hemopoiesis” refers to the formation and development of various types of blood cells (e.g., red blood cells, megakaryocytes, myeloid cells (e.g., monocytes, macrophages and neutrophil), and lymphocytes) and other formed elements in the body (e.g., in the bone marrow).

[0101] The term “nuclease” as used herein refers to an enzyme capable of cleaving the phosphodiester bonds between the nucleotide subunits of nucleic acid. A nuclease may be isolated or derived from a natural source. The natural source may be any living organism. Alternatively, a nuclease may be a modified or a synthetic protein which retains the phosphodiester bond cleaving activity. Gene modification can be achieved using a nuclease, for example a CRISPR nuclease.

[0102] The term “homology-directed repair” or “HDR” refers to a mechanism for repairing DNA damage in cells, for example, during repair of double-stranded and single-stranded breaks in DNA. HDR requires nucleotide sequence homology and uses a “nucleic acid template” (nucleic acid template or donor template used interchangeably herein) to repair the sequence where the double-strand or single strand break occurred (e.g., DNA target sequence). This results in the transfer of genetic information from, for example, the nucleic acid template to the DNA target sequence. HDR may result in alteration of the DNA target sequence (e.g., insertion, deletion, mutation) if the nucleic acid template sequence differs from the DNA target sequence and part or all of the nucleic acid template polynucleotide or oligonucleotide is incorporated into the DNA target sequence. In some embodiments, an entire nucleic acid template polynucleotide, a portion of the nucleic acid template polynucleotide, or a copy of the nucleic acid template is integrated at the site of the DNA target sequence. DNA repair pathways, including but not limited to HDR, play a role in targeted genome modification, which is a powerful tool that can be used to reverse the effect of pathogenic genetic variations and therefore has the potential to provide new therapies for human genetic diseases. Current genome engineering tools, including engineered zinc finger nucleases (ZFNs), transcription activator-like effector nucleases (TALENs), and most recently, RNA-guided DNA endonucleases such as CRISPR/Cas, produce sequence-specific DNA breaks in a genome.

[0103] The modification of the genomic sequence occurs at the next step and is the product of the activity cellular DNA repair mechanisms triggered in response to the newly formed DNA break. These mechanisms include, for example: (1) classical non-homologous end-joining (NHEJ) in which the two ends of the break are ligated together in a fast but also inaccurate manner (i.e. frequently resulting in mutation of the DNA at the cleavage site in the form of small insertion or deletions) and (2) homology-directed repair (HDR) in which an intact homologous DNA donor is used to replace the DNA surrounding the cleavage site in an accurate manner. In addition and as discussed above, HDR can also mediate the precise insertion of external or endogenous DNA at the break site.

[0104] The terms “nucleic acid template” and “donor”, refer to a nucleotide sequence that is inserted or copied into a genome. The nucleic acid template comprises a nucleotide sequence, e.g., of one or more nucleotides, that will be added to or will template a change in the target nucleic acid or may be used to modify the target sequence. A nucleic acid template sequence may be of any length, for example between 2 and 10,000 nucleotides in length (or any integer value there between or there above), preferably between about 100 and 1,000 nucleotides in length (or any integer there between), more preferably between about 200 and 500 nucleotides in length. A nucleic acid template may be a single stranded nucleic acid, a double stranded nucleic acid. In some embodiment, the nucleic acid template comprises a nucleotide sequence, e.g., of one or more nucleotides, that corresponds to wild type sequence of the target nucleic acid, e.g., of the target position. In some embodiments, the nucleic acid template comprises a ribonucleotide sequence, e.g., of one or more ribonucleotides, that corresponds to wild type sequence of the target nucleic acid, e.g., of the target position. In some embodiment, the nucleic acid template comprises modified ribonucleotides.

[0105] Insertion of an exogenous sequence (also called a “donor sequence,” donor template” or “donor”), for example, for correction of a mutant gene or for increased expression of a wild-type gene can also be carried out. It will be readily apparent that the donor sequence is typically not identical to the genomic sequence where it is placed. A donor sequence can contain a non-homologous sequence flanked by two regions of homology to allow for efficient HDR at the location of interest. Additionally, donor sequences can comprise a vector molecule containing sequences that are not homologous to the region of interest in cellular chromatin. A donor molecule can contain several, discontinuous regions of homology to cellular chromatin. For example, for targeted insertion of sequences not normally present in a region of interest, said sequences can be present in a donor nucleic acid molecule and flanked by regions of homology to sequence in the region of interest.

[0106] The donor polynucleotide can be DNA or RNA, single-stranded and/or double-stranded and can be introduced into a cell in linear or circular form. See, e.g., U.S. Patent Publication Nos. 2010/0047805; 2011/0281361; 2011/0207221; and 2019/0330620A1. The donor sequence may be encoded on the same molecule as a guide RNA sequence. See, for example, Anzalone et al. (2019) Nature 576:149-157. If introduced in linear form, the ends of the donor sequence can be protected (e.g., from exonucleolytic degradation) by methods known to those of skill in the art. For example, one or more dideoxynucleotide residues are added to the 3′ terminus of a linear molecule and/or self-complementary oligonucleotides are ligated to one or both ends. See, for example, Chang et al. (1987) Proc. Natl. Acad. Sci. USA 84:4959-4963; Nehls et al. (1996) Science 272:886-889. Additional methods for protecting exogenous polynucleotides from degradation include, but are not limited to, addition of terminal amino group(s) and the use of modified internucleotide linkages such as, for example, phosphorothioates, phosphoramidates, and O-methyl ribose or deoxyribose residues.

[0107] A donor sequence may also be an oligonucleotide and be used for gene correction or targeted alteration of an endogenous sequence. The oligonucleotide may be introduced to the cell on a vector, may be electroporated into the cell, or may be introduced via other methods known in the art. The oligonucleotide can be used to ‘correct’ a mutated sequence in an endogenous gene (e.g., the sickle mutation in beta globin), or may be used to insert sequences with a desired purpose into an endogenous locus.

[0108] A polynucleotide can be introduced into a cell as part of a vector molecule having additional sequences such as, for example, replication origins, promoters and genes encoding antibiotic resistance. Moreover, donor polynucleotides can be introduced as naked nucleic acid, as nucleic acid complexed with an agent such as a liposome or poloxamer, or can be delivered by viruses (e.g., adenovirus, AAV, herpesvirus, retrovirus, lentivirus and integrase defective lentivirus (IDLV)).

[0109] The donor may be inserted so that its expression is driven by the endogenous promoter at the integration site, namely the promoter that drives expression of the endogenous gene into which the donor is inserted. However, it will be apparent that the donor may comprise a promoter and/or enhancer, for example a constitutive promoter or an inducible or tissue specific promoter.

[0110] The donor molecule may be inserted into an endogenous gene such that all, some or none of the endogenous gene is expressed. For example, a transgene as described herein may be inserted into an endogenous locus such that some (N-terminal and/or C-terminal to the transgene) or none of the endogenous sequences are expressed, for example as a fusion with the transgene. In other embodiments, the transgene (e.g., with or without additional coding sequences such as for the endogenous gene) is integrated into any endogenous locus, for example a safe-harbor locus, for example a CCR5 gene, a CXCR4 gene, a PPP1R12c (also known as AAVS1) gene, an albumin gene or a Rosa gene. See, e.g., U.S. Pat. Nos. 7,951,925 and 8,110,379; U.S. Publication Nos. 20080159996; 201000218264; 20100291048; 20120017290; 20110265198; 20130137104; 20130122591; 20130177983 and 20130177960 and U.S. Provisional Application No. 61/823,689).

[0111] When endogenous sequences (endogenous or part of the transgene) are expressed with the transgene, the endogenous sequences may be full-length sequences (wild-type or mutant) or partial sequences. Preferably the endogenous sequences are functional. Non-limiting examples of the function of these full length or partial sequences include increasing the serum half-life of the polypeptide expressed by the transgene (e.g., therapeutic gene) and/or acting as a carrier.

[0112] Furthermore, although not required for expression, exogenous sequences may also include transcriptional or translational regulatory sequences, for example, promoters, enhancers, insulators, internal ribosome entry sites, sequences encoding 2A peptides and/or polyadenylation signals.

[0113] In certain embodiments, the donor molecule comprises a sequence selected from the group consisting of a gene encoding a protein (e.g., a coding sequence encoding a protein that is lacking in the cell or in the individual, or a portion thereof; or an alternate version of a gene encoding a protein, or a portion thereof), a regulatory sequence and/or a sequence that encodes a structural nucleic acid such as a microRNA or siRNA.

[0114] One aspect of the present disclosure provides a method for utilizing a guide sequence to target a CRISPR nuclease to affect a DSB to modify an allele of a gene bearing a disease associated mutation (‘mutant allele’). In some embodiments, at least one naturally occurring nucleotide difference or polymorphism (e.g., single nucleotide polymorphism (SNP)) and/or a disease associated mutation is utilized for targeting one of two alleles of a gene which is an allele bearing a mutation causing a disease phenotype (‘mutant allele’) rather than a functional/wildtype allele. In some embodiments, a SNP position is utilized for distinguishing/discriminating between two alleles of a gene, an allele bearing a disease associated mutation and a particular sequence (SNP/REF) in the SNP position, and a functional/wild type allele bearing a different sequence in the SNP position. In some embodiments, a disease associated mutation is utilized for distinguishing/discriminating between two alleles of a gene, an allele bearing the disease associated mutation, and a wildtype mutant allele not bearing the same disease associated mutation or bearing a different disease associated mutation. In other embodiments, a non-coding region of the gene common to both the mutant allele and the functional allele is targeted. In some embodiments, the method is for treating, ameliorating, or preventing a dominant haploinsufficiency genetic disorder. In some embodiments, the method further comprises the step of allele cleavage by a CRISPR nuclease. The allele cleavage is selected from the group consisting of: a double strand break (DSB) and a single strand break. In some embodiments, the allele cleavage is a DSB. In some embodiments, the method further comprises the step of correction of the allele such that the corrected allele results in expression of a functional protein. In some embodiments, the correction is performed by homology directed repair (HDR). In some embodiments, the method further comprises the step of editing/correcting/modifying a sequence of the mutant allele such as to allow expression of a functional protein. In some embodiments, the method further comprises the step of editing/correcting/modifying sequences of the two alleles such as to allow expression of a functional protein.

[0115] According to embodiments of the present invention, there is provided a method for modifying in a cell a mutant allele of the GATA2 gene having a mutation associated with MonoMAC syndrome, the method comprising

[0116] introducing to the cell a composition comprising:
[0117] a CRISPR nuclease or a nucleotide sequence encoding the CRISPR nuclease; and
[0118] an RNA molecule comprising a guide sequence portion having 17-25 nucleotides or a nucleotide sequence encoding the same,
   wherein a complex of the CRISPR nuclease and the RNA molecule affects a double strand break in the mutant allele of the GATA2 gene.

[0119] In some embodiments, the RNA molecule targets the CRISPR nuclease to the mutation associated with MonoMAC syndrome.

[0120] In some embodiments, the mutation associated with MonoMAC syndrome is any one of 3:128479475_T_C; 3:128479476_A_G; 3:128479846_C_A; 3:128479875_C_T; 3:128480135_T_A; 3:128480322_G_A; 3:128480449_G_A; 3:128480599_C_T; 3:128480829_G_A; 3:128480845_C_T; 3:128480918_C_T; 3:128480935_T_C; 3:128480946_G_A; 3:128481039_T_A; 3:128481047_G_A; 3:128481055_G_T; 3:128481060_C_T; 3:128481071_C_A; 3:128481077_G_T; 3:128481090_G_A; 3:128481092 G_A; 3:128481095_G_A; 3:128481102_G_A; 3:128481115_G_T; 3:128481131_G_A; 3:128481136_G_A; 3:128481142_C_T; 3:128481147_G_A; 3:128481150_C_A; 3:128481162_C_G; 3:128481176_C_G; 3:128481180_A_T; 3:128481188_G_A; 3:128481189_A_G; 3:128481199_C_T; 3:128481214_C_G; 3:128481219_C_T; 3:128481220_G_C; 3:128481224_C_T; 3:128481226_C_A; 3:128481230_G_A; 3:128481230_G_T; 3:128481232_C_A; 3:128481245_T_A; 3:128481262_C_T; 3:128481270_G_A; 3:128481275_C_T; 3:128481276_G_A; 3:128481283_G_C; 3:128481299_A_G; 3:128481302_G_T; 3:128481315_TAACC_T; 3:128481318_C_A; 3:128481819_A_G; 3:128481836_A_AGAGG; 3:128481841_C_T; 3:128481845_A_G; 3:128481849_G_T; 3:128481866_CGTTGGCGTTTCG_C; 3:128481872_C_T; 3:128481877_C_T; 3:128481878_G_A; 3:128481880_C_A; 3:128481881_G_A; 3:128481881_G_C; 3:128481887_A_C; 3:128481897_TGTCG_AAGGC; 3:128481898_G_T; 3:128481901_G_A; 3:128481908_A_G; 3:128481923_T_TGCCGGCTCTTCTGGCG; 3:128481924_G_A; 3:128481926_C_T; 3:128481927_G_A; 3:128481937_G_A; 3:128481937_G_GCGGC; 3:128481938_C_A; 3:128481938_C_T; 3:128481939_GGCCG_AAGGC; 3:128481942_C_T; 3:128481945_C_A; 3:128483288_G_A; 3:128483333_C_T; 3:128483347_C_T; 3:128483375_T_A; 3:128483868_G_A; 3:128483889_G_A; 3:128483905_CT_C; 3:128483906_T_C; 3:128483925_C_CATTGCACAGGT; 3:128483957_C_T; 3:128483973_C_CTGTGGCCCCACAGT; 3:128484010_A_C; 3:128485738_CT; 3:128485741_G_A; 3:128485746_G_A; 3:128485750_C_T; 3:128485758_AG_A; 3:128485766_A_T; 3:128485769_T_C; 3:128485779_T_TC; 3:128485780_C_A; 3:128485783_C_T; 3:128485789_A_C; 3:128485795_C_A; 3:128485798_G_A; 3:128485811_C_T; 3:128485819_T_TAGTCGTGGGC; 3:128485837 G_A; 3:128485837_G_C; 3:128485843_TC; 3:128485850_G_A; 3:128485855 G_A; 3:128485869_G_C; 3:128485871_G_A; 3:128485874_T_C; 3:128485891_A_G; 3:128485892_T_C; 3:128485892_T_G; 3:128485909_C_T; 3:128485910_G_A; 3:128485916_G_T; 3:128485924_C_T; 3:128485929_C_T; 3:128485937_T_G; 3:128485944_C_CGTCAG; 3:128485944_C_T; 3:128485962_C_A; 3:128485966_A_ACGC; 3:128485967_C_G; 3:128485970_CT; 3:128485973_C_T; 3:128485982_C_G; 3:128485998_A_AC; 3:128485999_C_T; 3:128486002_C_A; 3:128486004_C_CGCGGAAGA; 3:128486005_G_A; 3:128486006_C_T; 3:128486023_G_A; 3:128486030_C_T; 3:128486031_C_A; 3:128486038_G_C; 3:128486057_C_T; 3:128486059_T_G; 3:128486066_G_A; 3:128486072_T_G; 3:128486075_G_A; 3:128486103_G_T; 3:128486104_T_A; 3:128486117_G_A; 3:128486129_C_A; 3:128486141_C_T; 3:128486142_G_T; 3:128486143_C_T; 3:128486153_C_T; 3:128486173_G_A; 3:128486179_A_G; 3:128486185_A_G; 3:128486189 G_A; 3:128486201_C_T; 3:128486218_T_C; 3:128486227_G_T; 3:128486240_G_A; 3:128486252_A_AG; 3:128486260_T_C; 3:128486271_C_T; 3:128486284_A_AGG; 3:128486287_G_A; 3:128486288_C_A; 3:128486295_GC_G; 3:128486296_C_T; 3:128486298_CC_AA; 3:128486320_G_T; 3:128486355_T_GC; 3:128486356_C_G; 3:128486365_C_CG; 3:128486805_TC; 3:128486808_G_C; 3:128486826_C_T; 3:128486828_C_A; 3:128486850_G_A; 3:128486856_T_C; 3:128486872_A_C; 3:128486883_1_C; 3:128486890_A_T; 3:128486893_C_T; 3:128486896_C_T; 3:128486911_G_C; 3:128486931_A_G; 3:128486948_G_A; 3:128486956_G_T; 3:128486961_G_GACA; 3:128486967_G_C; 3:128486970_T_A; 3:128486973_T_G; 3:128486982_A_T; 3:128486992_G_A; 3:128487002_C_A; 3:128487004_A_G; 3:128487009_G_T; 3:128487016_CG_GC; 3:128487016_C_T; 3:128487021_G_T; 3:128487036_G_A; 3:128487073_G_C; 3:128492886_G_A; 3:128492959_A_C; 3:128493033_G_T; 3:128493046 G_A; 3:128493068_G_A.

[0121] In some embodiments, the guide sequence portion of the RNA molecule comprises a guide sequence of 17-25 contiguous nucleotides containing nucleotides in the sequence set forth in any one of SEQ ID NOs: 1-44348 which targets a mutation associated with MonoMAC syndrome.

[0122] In some embodiments, the RNA molecule targets the CRISPR nuclease to a SNP position of the mutant allele.

[0123] In some embodiments, the SNP position is in a non-coding region of the GATA2 gene at a location that is 250 or fewer nucleotides from the first or the last nucleotide of a coding region of the GATA2 gene containing the mutation associated with MonoMAC syndrome.

[0124] In some embodiments, the SNP position is located at any one of rs10934857; rs2713604; rs2713603; rs11708606; rs11717152; rs2659689; rs2713602; rs2335052; rs4577488; or rs1573858.

[0125] In some embodiments, the guide sequence portion of the RNA molecule comprises a guide sequence having 17-25 contiguous nucleotides containing nucleotides in the sequence set forth in any one of SEQ ID NOs: 1-44348 which targets a sequence in a SNP position of the mutant allele.

[0126] In some embodiments, the SNP position contains a heterozygous SNP.

[0127] According to embodiments of the present invention, the RNA molecule targets a particular sequence (SNP/REF) in a SNP position or a disease-causing mutation of a mutant allele.

[0128] In some embodiments, the SNP position is in a promoter region, the start codon, an untranslated region (UTR), an intron, an exon, a downstream sequence of a mutant allele. Each possibility represents a separate embodiment. In some embodiments, the SNP position is in a distance of less than 2000 nucleotides, 15000 nucleotides, 1000 nucleotides, 750 nucleotides, 500 nucleotides, 400 nucleotides, 300 nucleotides, 250 nucleotides, 200 nucleotides, 150 nucleotides, or 50 nucleotides from the disease-associated mutation. Each possibility represents a separate embodiment.

[0129] In some embodiments, a complex of the CRISPR nuclease and the RNA molecule affects a double strand break in a non-coding region common to both alleles of the GATA2 gene at a location that is 500, 450, 400, 350, 300, 250 or fewer nucleotides from the first or the last nucleotide of a coding region of the GATA2 gene containing the mutation associated with MonoMAC syndrome. Each possibility represents a separate embodiment.

[0130] In some embodiments, the coding region is any one of Exon 2, Exon 3, Exon 4, Exon 5, or Exon 6 of the GATA2 gene.

[0131] In some embodiments, the non-coding region is any one of the 3′UTR, Intron 1, Intron 2, Intron 3, Intron 4, or Intron 5 of the GATA2 gene.

[0132] In some embodiments, the non-coding region is any one of the 3:128480417-128480717; 3:128487000-128487300; 3:128486500-128486800; 3:128486375-128486675; 3:128485421-128485721; 3:128484028-128484328; 3:128483533-128483833; 3:128481949-128482249; 3:128481516-128481816; or 3:128481320-128481620.

[0133] In some embodiments, the guide sequence portion of the RNA molecule comprises 17-25 contiguous nucleotides containing nucleotides in the sequence set forth in any one of SEQ ID NOs: 1-44348 which targets a non-coding region of the GATA2 gene.

[0134] In some embodiments, further comprising introduction of a donor template for homology directed repair (HDR), alteration, or replacement of a desired sequence of the GATA2 allele. Accordingly, this method of modifying a GATA2 pathogenic mutation via HDR corrects the dominant haploinsufficiency disorder that manifests as MonoMAC syndrome.

[0135] In embodiments of the present invention, the target sequence is in the coding region bearing the mutation associated with MonoMAC syndrome or is the entire coding region bearing the mutation associated with MonoMAC syndrome.

[0136] In embodiments of the present invention, the modifying results in correction of the mutant allele of the GATA2 gene from the mutant phenotype to a non-mutant phenotype.

[0137] Embodiments of the present invention further comprise obtaining the cell with a GATA2 gene mutation associated with MonoMAC syndrome from a subject with a GATA2 gene mutation related to MonoMAC syndrome and/or suffering from MonoMAC syndrome.

[0138] Embodiments of the present invention further comprise first selecting a subject with a GATA2 gene mutation related to MonoMAC syndrome and/or suffering from MonoMAC syndrome.

[0139] Embodiments of the present invention further comprise obtaining the cell from the subject by mobilization and/or by apheresis.

[0140] Embodiments of the present invention further comprise obtaining the cell from the subject by bone marrow aspiration.

[0141] In embodiments of the present invention, the cell is prestimulated prior to introducing the composition to the cell.

[0142] Embodiments of the present invention further comprise culture expanding the cell to obtain cells.

[0143] In embodiments of the present invention, the cells are cultured with one or more of: stem cell factor (SCF), IL-3, and GM-CSF.

[0144] In embodiments of the present invention, the cells are cultured with at least one cytokine.

[0145] In embodiments of the present invention, the at least one cytokine is a recombinant human cytokine.

[0146] In embodiments of the present invention, the cell is among a plurality of cells, wherein the composition comprising the RNA molecule and/or donor template is introduced into at least the cell as well as other cells among the plurality of cells, and the mutant allele of the GATA2 gene is modified in at least the cell as well as in the other cells among the plurality of cells, thereby obtaining multiple modified cells.

[0147] In embodiments of the present invention, introducing the composition comprising the RNA molecule and/or introduction of the donor template comprises electroporation of the cell or cells.

[0148] The present invention provides for a modified cell obtained by the methods of the present invention.

[0149] The present invention provides for modified cells obtained from culture expanding the modified cell obtained by the methods of the present invention.

[0150] In embodiments of the present invention, the modified cell or cells are capable of engraftment.

[0151] In embodiments of the present invention, the modified cell or cells are capable of giving rise to progeny cells.

[0152] In embodiments of the present invention, the modified cell or cells are capable of giving rise to progeny cells after engraftment.

[0153] In embodiments of the present invention, the modified cell or cells are capable of giving rise to progeny cells after an autologous engraftment.

[0154] In embodiments of the present invention, the modified cell or cells are capable of giving rise to progeny cells for at least 12 months or at least 24 months after engraftment.

[0155] In embodiments of the present invention, the modified cell or cells are hematopoietic stem cells and/or progenitor cells (HSPCs).

[0156] In embodiments of the present invention, the modified cell or cells are CD34+ hematopoietic stem cells.

[0157] In embodiments of the present invention, the modified cell or cells are bone marrow cells or peripheral mononucleated cells (PMCs).

[0158] The present invention provides for a composition comprising the modified cells of the present invention and a pharmaceutically acceptable carrier.

[0159] In embodiments of the present invention, an in vitro or ex vivo method of preparing the compositions of the present invention, comprising mixing the cells with the pharmaceutically acceptable carrier.

[0160] The present invention provides for a method of preparing in vitro or ex vivo a composition comprising modified cells, the method comprising:
[0161] a) isolating HSPCs from cells obtained from a subject with a GATA2 gene mutation related to MonoMAC syndrome and/or suffering from MonoMAC syndrome, and obtaining the cell from the subject;
[0162] b) introducing to the cells of step (a) a composition comprising:
   [0163] a CRISPR nuclease or a nucleotide sequence encoding the CRISPR nuclease; and
   [0164] an RNA molecule comprising a guide sequence portion having 17-25 nucleotides,
wherein a complex of the CRISPR nuclease and the RNA molecule affects a double strand break in the mutant allele of the GATA2 gene according to any one of the methods of the invention,
   [0165] optionally, introducing to the cells a donor template for homology directed repair (HDR), alteration, or replacement of a target sequence of the GATA2 allele
so as to modify the mutant allele of the GATA2 gene in one or more cells thereby obtaining modified cells; optionally further comprising the step of
[0166] c) culture expanding the modified cells of step (b),
[0167] wherein the modified cells are capable of engraftment and giving rise to progeny cells after engraftment.

[0168] The present invention provides for use of a composition prepared in vitro by a method comprising:
[0169] a) isolating HSPCs from cells obtained from a subject with a GATA2 gene mutation related to MonoMAC syndrome and/or suffering from MonoMAC syndrome, and obtaining the cell from the subject;
[0170] b) introducing to the cells of step (a) a composition comprising:
   [0171] a CRISPR nuclease or a nucleotide sequence encoding the CRISPR nuclease; and
   [0172] an RNA molecule comprising a guide sequence portion having 17-25 nucleotides,
wherein a complex of the CRISPR nuclease and the RNA molecule affects a double strand break in the mutant allele of the GATA2 gene according to any one of the methods of the invention,
   [0173] optionally, introducing to the cells a donor template for homology directed repair (HDR), alteration, or replacement of a target sequence of the GATA2 allele
so as to modify the mutant allele of the GATA2 gene in one or more cells thereby obtaining modified cells; optionally further comprising an additional step of
[0174] c) culture expanding the cells of step (b) wherein the modified cells are capable of engraftment and giving rise to progeny cells after engraftment; and
[0175] d) administering to the subject the cells of step (b) or step (c)
[0176] for treating the MonoMAC syndrome in the subject.

[0177] The present invention provides for a method of treating a subject afflicted with MonoMAC syndrome, comprising administration of a therapeutically effective amount of the modified cells of the present invention, the compositions of the present invention, or the composition prepared by the methods of the present invention.

[0178] The present invention provides for a method for treating MonoMAC syndrome in a subject with a GATA2 gene mutation relating to MonoMAC syndrome in need thereof, the method comprising:
[0179] a) isolating HSPCs from cells obtained from the subject;
[0180] b) introducing to the cells of step (a) a composition comprising:
   [0181] a CRISPR nuclease or a nucleotide sequence encoding the CRISPR nuclease; and
   [0182] an RNA molecule comprising a guide sequence portion having 17-25 nucleotides,
wherein a complex of the CRISPR nuclease and the RNA molecule affects a double strand break in the mutant allele of the GATA2 gene according to any one of the methods of the invention,
   [0183] optionally, introducing to the cells a donor template for homology directed repair (HDR), alteration, or replacement of a target sequence of the GATA2 allele
so as to modify the mutant allele of the GATA2 gene in one or more cells thereby obtaining modified cells; optionally further comprising an additional step of
[0184] c) culture expanding the cells of step (b) wherein the modified cells are capable of engraftment and giving rise to progeny cells after engraftment; and
[0185] d) administering to the subject the cells of step (b) or step (c)
[0186] thereby treating the MonoMAC syndrome in the subject.

[0187] The present invention provides for a method for treating MonoMAC syndrome in a subject with a GATA2 gene mutation relating to MonoMAC syndrome in need thereof, the method comprising
[0188] administering to the subject autologous modified cells or progeny of autologous modified cells, wherein the autologous modified cells are modified so as to have a correction of the mutant allele of the GATA2 gene from the mutant phenotype to a non-mutant phenotype,
   [0189] wherein said double strand break results from introduction to the cells of a composition comprising a CRISPR nuclease or sequence encoding the CRISPR nuclease and an RNA molecule wherein a complex of the CRISPR nuclease and the RNA molecule affects a double strand break in the mutant allele of the GATA2 gene according to any one of the methods of the invention,
[0190] thereby treating the MonoMAC syndrome in the subject.

[0191] The present invention provides for an RNA molecule comprising a guide sequence portion having 17-25 contiguous nucleotides containing nucleotides in the sequence set forth in any one of SEQ ID NOs: 1-44348.

[0192] In embodiments of the present invention, the RNA molecule further comprises a portion having a sequence which binds to a CRISPR nuclease.

[0193] In embodiments of the present invention, the sequence which binds to a CRISPR nuclease is a tracrRNA sequence.

[0194] In embodiments of the present invention, the RNA molecule further comprises one or more linker portions.

[0195] In embodiments of the present invention, the RNA molecule further comprises a portion having a tracr mate sequence.

[0196] In embodiments of the present invention, the RNA molecule is up to 300 nucleotides in length.

[0197] According to embodiments of the present invention, the RNA molecule may be up to 300, 290, 280, 270, 260, 250, 240, 230, 220, 210, 200, 190, 180, 170, 160, 150, 140, 130, 120, 110, or 100 nucleotides in length. Each possibility represents a separate embodiment. In embodiments of the present invention, the RNA molecule may be 17 up to 300 nucleotides in length, 30 up to 300 nucleotides in length, 100 up to 300 nucleotides in length, 150 up to 300 nucleotides in length, 200 up to 300 nucleotides in length, 100 to 200 nucleotides in length, or 150 up to 250 nucleotides in length. Each possibility represents a separate embodiment.

[0198] The present invention provides for a composition comprising the RNA molecules of the present invention and a donor template for homology directed repair (HDR), alteration, or replacement of a target sequence of the GATA2 allele.

[0199] In embodiments of the present invention, the composition further comprisesone or more CRISPR nucleases or sequences encoding the one or more CRISPR nucleases, and/or one or more tracrRNA molecules or sequences encoding the one or more tracrRNA molecules.

[0200] The present invention provides for a method for modifying in a cell a mutant allele of the GATA2 gene, the method comprising delivering to the cell the RNA molecules of the present invention or the compositions of the present invention.

[0201] The present invention provides for a method for treating MonoMAC syndrome, the method comprising delivering to a subject having MonoMAC syndrome the RNA molecules of the present invention or the compositions of the present invention, or cells modified by the RNA molecules of the present invention or the compositions of the present invention.

[0202] In embodiments of the present invention, the one or more CRISPR nucleases and/or the tracrRNA and the RNA molecule are delivered to the subject and/or cells substantially at the same time or at different times.

[0203] In embodiments of the present invention, the modifying or treating results in a both alleles of the GATA2 gene encoding a functional protein.

[0204] The present invention provides for use of the RNA molecules of the present invention, the compositions of the present invention, or the composition prepared by the methods of the present invention, for modifying in a cell a mutant GATA2 allele.

[0205] The present invention provides for a medicament comprising the RNA molecules of the present invention, the compositions of the present invention, or the composition prepared by the methods of the present invention for use in inactivating in a cell a mutant GATA2 allele, wherein the medicament is administered by delivering to the cell the RNA molecules of the present invention, the compositions of the present invention, or the composition prepared by the methods of the present invention.

[0206] The present invention provides for use of the methods of the present invention, the modified cells of the present invention, the compositions of the present invention, or the compositions prepared by the methods of the present invention, or the RNA molecules of the present invention for treating ameliorating or preventing MonoMAC syndrome in to a subject having or at risk of having MonoMAC syndrome.

[0207] The present invention provides for a medicament comprising the RNA molecules of the present invention, the compositions of the present invention, the compositions prepared by the methods of the present invention, or the modified cells of the present invention, for use in treating ameliorating or preventing MonoMAC syndrome, wherein the medicament is administered by delivering to a subject having or at risk of having MonoMAC syndrome the RNA molecules of the present invention, the compositions of the present invention, the compositions prepared by the methods of the present invention, or the modified cells of the present invention.

[0208] The present invention provides for a kit for inactivating a mutant GATA2 allele in a cell, comprising an RNA molecule of the present invention, a CRISPR nuclease or a nucleotide sequence encoding the CRISPR nuclease, and/or a tracrRNA molecule or a sequence encoding the tracrRNA; and instructions for delivering the RNA molecule; CRISPR nuclease or a sequence encoding the CRISPR nuclease, and/or the tracrRNA molecule or a sequence encoding the tracrRNA to the cell to modify the mutant GATA2 allele in the cell.

[0209] The present invention provides for a kit for treating MonoMAC syndrome in a subject, comprising an RNA molecule of the present invention, a CRISPR nuclease or a nucleotide sequence encoding the CRISPR nuclease, and/or a tracrRNA molecule or a sequence encoding the tracrRNA; and instructions for delivering the RNA molecule; CRISPR nuclease or sequence encoding the CRISPR nuclease, and/or tracrRNA molecule or sequence encoding the tracrRNA to a subject having or at risk of having MonoMAC syndrome so as to treat the MonoMAC syndrome.

[0210] The present invention provides for a kit for inactivating a mutant GATA2 allele in a cell, comprising the compositions of the present invention, the compositions prepared by the methods of the present invention, or the modified cells of the present invention, and instructions for delivering the composition to the cell so as to modify the GATA2 gene in the cell.

[0211] The present invention provides for a kit for treating MonoMAC syndrome in a subject, comprising the compositions of the present invention, the compositions prepared by the methods of the present invention, or the modified cells of the present invention, and instructions for delivering the compositions of the present inventions, the compositions prepared by the methods of the present invention, or the modified cells of the present invention, to a subject having or at risk of having MonoMAC syndrome so as to treat MonoMAC syndrome.

[0212] According to some embodiments of the present invention, there is provided a kit for repairing/correcting/modifying a mutant MonoMAC syndrome allele in a cell(s), comprising an RNA molecule comprising a guide sequence portion having 17-25 contiguous nucleotides containing nucleotides in the sequence set forth in any one of SEQ ID NOs: 1-44348, a CRISPR nuclease, and/or a tracrRNA molecule; and instructions for delivering the RNA molecule; CRISPR nuclease, and/or the tracrRNA to the cell. In some embodiments, the kit further comprises, a nucleic acid template for homology-directed repair, alteration, or replacement of at least a portion of a target gene.

[0213] According to some embodiments of the present invention, there is provided a kit for treating MonoMAC syndrome in a subject, comprising an RNA molecule comprising a guide sequence portion having 17-25 contiguous nucleotides containing nucleotides in the sequence set forth in any one of SEQ ID NOs: 1-44348, a CRISPR nuclease, and/or a tracrRNA molecule; and instructions for delivering the RNA molecule; CRISPR nuclease, and/or the tracrRNA to a subject having or at risk of having MonoMAC syndrome. In some embodiments, the kit further comprises, a nucleic acid template for homology-directed repair, alteration, or replacement of at least a portion of a target gene.

[0214] The present invention provides for a method for selecting a subject for treatment of MonoMAC syndrome from a pool of subjects diagnosed with MonoMAC syndrome, comprising the steps of:
[0215] a) obtaining cells from each subject in the pool of subjects;
[0216] b) screening the cells of each subject for a GATA2 gene mutation related to MonoMAC syndrome and selecting only subjects with a GATA2 gene mutation related to MonoMAC syndrome;
[0217] c) screening by sequencing the cells of subjects selected in step (b) for heterozygosity at one or more polymorphic sites selected from the group consisting of rs10934857; rs2713604; rs2713603; rs11708606; rs11717152; rs2659689; rs2713602; rs2335052; rs4577488; or rs1573858; and
[0218] d) selecting for treatment only subjects with cells that are heterozygous at the one or of the more polymorphic sites.

[0219] According to some embodiments of the present invention, there is provided a method for treating MonoMAC syndrome, the method comprising delivering to a subject or cell(s) obtained from a subject having MonoMAC syndrome or at risk of MonoMAC syndrome a composition comprising an RNA molecule comprising a guide sequence portion having 17-25 contiguous nucleotides containing nucleotides in the sequence set forth in any one of SEQ ID NOs: 1-44348 and a CRISPR nuclease.

[0220] According to embodiments of the present invention, there is provided a medicament comprising an RNA molecule comprising a guide sequence portion having 17-25 contiguous nucleotides containing nucleotides in the sequence set forth in any one of SEQ ID NOs: 1-44348 and a CRISPR nuclease for use in repairing/correcting/modifying a mutant GATA2 allele in a cell, wherein the medicament is administered by delivering to the cell the composition comprising an RNA molecule comprising a guide sequence portion having 17-25 contiguous nucleotides containing nucleotides in the sequence set forth in any one of SEQ ID NOs: 1-44348 and a CRISPR nuclease.

[0221] According to some embodiments of the present invention, there is provided use of a composition comprising an RNA molecule comprising a guide sequence portion having 17-25 contiguous nucleotides containing nucleotides in the sequence set forth in any one of SEQ ID NOs: 1-44348 and a CRISPR nuclease for treating ameliorating or preventing MonoMAC syndrome, comprising delivering to a subject having or at risk of having MonoMAC syndrome the composition of comprising an RNA molecule comprising a guide sequence portion having 17-25 contiguous nucleotides containing nucleotides in the sequence set forth in any one of SEQ ID NOs: 1-44348 and a CRISPR nuclease.

[0222] According to some embodiments of the present invention, there is provided a medicament comprising the composition comprising an RNA molecule comprising a guide sequence portion having 17-25 contiguous nucleotides containing nucleotides in the sequence set forth in any one of SEQ ID NOs: 1-44348 and a CRISPR nuclease for use in treating ameliorating or preventing MonoMAC syndrome, wherein the medicament is administered by delivering to a subject having or at risk of having MonoMAC syndrome: the composition comprising an RNA molecule comprising a guide sequence portion having 17-25 contiguous nucleotides containing nucleotides in the sequence set forth in any one of SEQ ID NOs: 1-44348 and a CRISPR nuclease. In some embodiments, the medicament further comprises, a nucleic acid template for homology-directed repair, alteration, or replacement of at least a portion of a target gene.

[0223] The compositions and methods of the present disclosure may be utilized for treating, preventing, ameliorating, or slowing progression of MonoMAC syndrome.

[0224] In some embodiments, the method of repairing/correcting a mutant allele further comprises enhancing activity of the functional protein such as by providing a protein/peptide, a nucleic acid encoding a protein/peptide, or a small molecule such as a chemical compound, capable of activating/enhancing activity of the functional protein.

[0225] In embodiments of the present invention, the guide sequence portion of the RNA molecule comprises 17-25 contiguous nucleotides containing nucleotides in the sequence set forth in any one of SEQ ID NOs: 1-44348.

[0226] According to some embodiments of the present invention, there is provided a composition comprising an RNA molecule comprising a guide sequence portion having 17-25 contiguous nucleotides containing nucleotides in the sequence set forth in any one of SEQ ID NOs: 1-44348 and a CRISPR nuclease.

[0227] According to embodiments of the present invention, the composition may comprise a nucleic acid template for homology-directed repair, alteration, or replacement of a target DNA sequence comprising the pathogenic mutation (e.g., an allele bearing a disease-associated mutation, or an allele bearing a disease-associated mutation and a particular sequence SNP/REF in the SNP position).

[0228] According to some embodiments of the present invention, there is provided a method for repairing/correcting a mutant GATA2 allele in a cell, the method comprising delivering to the cell a composition comprising an RNA molecule comprising a guide sequence portion having 17-25 contiguous nucleotides containing nucleotides in the sequence set forth in any one of SEQ ID NOs: 1-44348 and a CRISPR nuclease.

[0229] In a non-limiting example, an RNA molecule comprising a guide sequence is utilized to direct a CRISPR nuclease to a mutant allele and create a double-strand break (DSB) and correction/repair of the mutant allele is further performed, such as by utilizing homology directed repair (HDR), which incorporates a homologous strand as a repair template.

[0230] According to embodiments of the present invention, the CRISPR nuclease and the RNA molecule or RNA molecules are delivered to the subject and/or cells obtained from the subject substantially at the same time or at different times.

[0231] According to embodiments of the present invention, the tracrRNA is delivered to the subject and/or cells obtained from the subject substantially at the same time or at different times as the CRISPR nuclease and RNA molecule or RNA molecules.

[0232] According to embodiments of the present invention, the nucleic acid template is delivered to the subject and/or cells obtained from the subject substantially at the same time or at different times as the CRISPR nuclease and RNA molecule or RNA molecules.

[0233] In some embodiments, there is provided a method comprising removing an exon containing a disease-causing mutation from a mutant allele, wherein the RNA molecule or a first and a second RNA molecules target regions flanking an entire exon or a portion of the exon or multiple exons or the entire open reading frame of a gene, or the entire gene. In some embodiments, the method includes exon skipping. In some embodiments, the method further comprises, utilizing a nucleic acid template for homology-directed repair, alteration, or replacement of the entire exon or a portion of the exon or multiple exons or the entire open reading frame of a gene, or the entire gene. Alternatively, repair of the mutant allele sequence is template free.

[0234] According to embodiments of the present invention, the method comprises subjecting the mutant allele to error prone non-homologous end joining (NHEJ) mechanism. According to preferred embodiments of the present invention, the method comprises correction or repair of a mutant allele with a template via a homology-directed repair mechanism after a targeted double-strand break in order to remove the haploinsufficiency manifestations of the mutant allele.

[0235] According to some embodiments of the present invention, there is provided use of a composition comprising an RNA molecule comprising a guide sequence portion having 17-25 contiguous nucleotides containing nucleotides in the sequence set forth in any one of SEQ ID NOs: 1-44348 and a CRISPR nuclease repairing/correcting/modifying a mutant GATA2 allele in a cell, comprising delivering to the cell the RNA molecule comprising a guide sequence portion having 17-25 contiguous nucleotides containing nucleotides in the sequence set forth in any one of SEQ ID NOs: 1-44348 and the CRISPR nuclease.

[0236] In embodiments of the present invention, the RNA molecule comprises a guide sequence portion having 17-25 contiguous nucleotides containing nucleotides in the sequence set forth in any one of SEQ ID NOs: 1-44348.

[0237] One aspect of the present invention also provides for a method for modifying in a cell a mutant allele of the GATA2 gene having a mutation associated with MonoMAC syndrome, the method comprising
[0238] introducing to the cell a composition comprising:
   [0239] a CRISPR nuclease or a nucleotide sequence encoding the CRISPR nuclease; and
   [0240] an RNA molecule comprising a guide sequence portion having 17-25 nucleotides or a nucleotide sequence encoding the same,
[0241] wherein a complex of the CRISPR nuclease and the RNA molecule affects a double strand break in a non-coding region of the GATA2 gene at a location that is 250 or fewer nucleotides from the first or the last nucleotide of a coding region of the GATA2 gene containing the mutation associated with MonoMAC syndrome.

[0242] One aspect of the present invention also provides for a method for modifying in a cell a mutant allele of the GATA2 gene having a mutation associated with MonoMAC syndrome, the method comprising
[0243] introducing to the cell a composition comprising:
   [0244] a CRISPR nuclease or a nucleotide sequence encoding the CRISPR nuclease; and
   [0245] an RNA molecule comprising a guide sequence portion having 17-25 nucleotides or a nucleotide sequence encoding the same,
[0246] wherein a complex of the CRISPR nuclease and the RNA molecule targets the CRISPR nuclease to the mutation associated with MonoMAC syndrome.

[0247] One aspect of the present invention also provides for a method for modifying in a cell a mutant allele of the GATA2 gene having a mutation associated with MonoMAC syndrome, the method comprising
[0248] introducing to the cell a composition comprising:
   [0249] a CRISPR nuclease or a nucleotide sequence encoding the CRISPR nuclease; and
   [0250] an RNA molecule comprising a guide sequence portion having 17-25 nucleotides or a nucleotide sequence encoding the same,
[0251] wherein a complex of the CRISPR nuclease and the RNA molecule targets the CRISPR nuclease to a SNP position of the mutant allele.

[0252] Embodiments of the present invention further comprise introduction of a donor template for homology directed repair (HDR), alteration, or replacement of a target sequence of the GATA2 allele. In some embodiments, the donor template for HDR (e.g., dsDNA or ssODN) is at least 10, 20, 30, 40, 50, 100, 200, 300, 400, 500, 600, 700, 800, 1,000, 1,250, 1,500, 2,000, 3,000, or 5,000 base pairs in length, at most 20, 30, 40, 50, 100, 200, 300, 400, 500, 600, 700, 800, 1,000, 1,250, 1,500, 2,000, 3,000, or 5,000 base pairs in length, or between 10 and 5000, 10 and 3000, 10 and 2000, 10 and 1000, 10 and 500, 10 and 400, 10 and 300, 10 and 200, 10 and 100, 10 and 60, 10 and 50, 20 and 5000, 20 and 3000, 20 and 2000, 20 and 1000, 20 and 500, 20 and 400, 20 and 300, 20 and 200, 20 and 100, 20 and 60, 20 and 50, 30 and 5000, 30 and 3000, 30 and 2000, 30 and 1000, 30 and 500, 30 and 400, 30 and 300, 30 and 200, 30 and 100, 30 and 60, or 30 and 50 base pairs in length. Each possibility represents a separate embodiment. In some embodiments, the donor template for HDR overlaps in sequence complementarity with regions upstream and downstream double-strand break site induced by a nuclease programmed by any one of the guides described herein. In some embodiments, the donor template for HDR comprises a sequence that overlaps in sequence complementarity with an entire exon or more.

[0253] According to some embodiments, the present disclosure provides an RNA sequence (‘RNA molecule’) which binds to/associates with and/or directs the RNA guided DNA nuclease e.g., CRISPR nuclease to a sequence comprising at least one nucleotide which differs between a mutant allele and a second allele (e.g., functional/wild type allele) of a gene of interest (i.e., a sequence of the mutant allele which is not present in the second allele).

[0254] In some embodiments, the method comprises the steps of: contacting a mutant allele of a gene of interest with an allele-specific RNA molecule and a CRISPR nuclease e.g., a Cas9 protein, wherein the allele-specific RNA molecule and the CRISPR nuclease e.g., Cas9 associate with a nucleotide sequence of the mutant allele of the gene of interest which differs by at least one nucleotide from a nucleotide sequence of a second allele of the gene of interest (i.e., a functional/wild type allele), thereby modifying the mutant allele.

### Treatment of MonoMAC Syndrome

[0255] GATA binding protein 2 (GATA2) is a key transcriptional regulator of hematopoiesis required for the development and maintenance of a healthy stem cell pool. Mutations in GATA2 lead to loss of dendritic cells (DCs), monocytes, B cells and Natural Killer (NK) lymphoid cells (DCML deficiency/MonoMAC). In addition, GATA2 mutations are associated with myelodysplastic syndrome (MDS) and acute myeloid leukemia (AML). These autosomal dominant mutations cause a reduction, and haploinsufficiency, in the cellular levels of the gene product. Therefore, therapeutic strategies to alleviate such conditions may include HDR-mediated approaches.

[0256] Editing strategies include (1) Correcting a pathogenic mutation in a cell by introducing a composition comprising a nuclease and a guide designed to specifically target each mutation, and a donor (e.g. ssODN, dsDNA (PCR product), or AAV) used to correct the mutation; and (2) Replacing the GATA2 exon harboring the pathogenic mutation. GATA2 (NM_032638) contains six exons (See FIG. 1A), five of which, Exons 2-6, encode the GATA2 protein. Pathogenic mutations are distributed along the gene. Accordingly, the second strategy would enable consolidation of all mutations located in a specific exon to a single composition or two compositions.

[0257] The second strategy of replacing exons harboring mutations can be accomplished, for example, in the following approaches: (1) Targeting a SNP that is linked to a mutation and located in the vicinity of an edge of an exon. In this approach, a composition comprising a nuclease and a guide are designed to specifically target the reference or the alternative form of the SNP according to which form is linked to the mutation. A long donor (e.g. a ssODN, dsDNA (PCR product) or AAV) will then be used to replace the mutated exon. For this approach, SNPs that are located up to 250 bps from the edge of an exon are prioritized (Table A) because they are close enough to the exon and the targeted mutation to enable efficient HDR.

[0258] A second approach to replace exons harboring mutations involves: (2) Non-discriminatory targeting of an intron region, such that the target is located in the vicinity of an edge of an exon. In this approach, a nuclease mediated double-strand break (DSB) will occur in both GATA2 alleles near an edge of an exon but without disrupting regulatory sequences such as splicing elements. A long donor that e.g., a ssODN, dsDNA (PCR product) or AAV will be used to replace the mutated exon. The rationale behind this approach is that DSBs in an intron are repaired either by HDR or NHEJ without disrupting regulatory elements, and thus would not interfere with the expression of the WT GATA2 allele.

[0259] In the second strategy of replacing the exon harboring the pathogenic mutation, the sequence of the donor(s) would cover the whole exon and may include synonymous mutations to increase the efficiency of the HDR process and the correction of mutations located at various distances from a DSB.

TABLE A
SNPs for use in GATA2 therapeutic strategies. The table presents the
distance of each SNP relative to the start and end of each exon.

| | | | | | Exon2 | | Exon 3 | |
|---|---|---|---|---|---|---|---|---|
| SNP | Position | | | | Start | End | Start | End |
| Position | GRCh37/hg19 | rsID | Ref. | Alt. | 128205919 | 128205646 | 128205201 | 128204570 |
| Exon_2 of 6 | Chr3: 128205860 | rs1573858 | G | C | 59 | −214 | −659 | −1290 |
| Intron_2 of 5 | Chr3: 128205519 | rs4577488 | G | A | 400 | 127 | −318 | −949 |
| Exon_3 of 6 | Chr3: 128204951 | rs2335052 | C | T | 968 | 695 | 250 | −381 |
| Intron_3 of 5 | Chr3: 128203035 | rs2713602 | A | G | 2884 | 2611 | 2166 | 1535 |
| Intron_3 of 5 | Chr3: 128203006 | rs2659689 | G | T | 2913 | 2640 | 2195 | 1564 |
| Intron_4 of 5 | Chr3: 128201013 | rs11717152 | A | C | 4906 | 4633 | 4188 | 3557 |
| Intron_4 of 5 | Chr3: 128200806 | rs11708606 | G | A | 5113 | 4840 | 4395 | 3764 |
| Intron_5 of 5 | Chr3: 128200534 | rs2713603 | G | A | 5385 | 5112 | 4667 | 4036 |
| Intron_5 of 5 | Chr3: 128200459 | rs2713604 | T | C | 5460 | 5187 | 4742 | 4111 |
| Exon_6 of 6 | Chr3: 128199662 | rs10934857 | G | A | 6257 | 5984 | 5539 | 4908 |

| | Exon 4 | | Exon 5 | | Exon 6 | |
|---|---|---|---|---|---|---|
| SNP | Start | End | Start | End | Start | Stop codon |
| Position | 128202848 | 128202703 | 128200787 | 128200662 | 128200161 | 128199862 |
| Exon_2 of 6 | −3012 | −3157 | −5073 | −5198 | −5699 | −5998 |
| Intron_2 of 5 | −2671 | −2816 | −4732 | −4857 | −5358 | −5657 |
| Exon_3 of 6 | −2103 | −2248 | −4164 | −4289 | −4790 | −5089 |
| Intron_3 of 5 | −187 | −332 | −2248 | −2373 | −2874 | −3173 |
| Intron_3 of 5 | −158 | −303 | −2219 | −2344 | −2845 | −3144 |
| Intron_4 of 5 | 1835 | 1690 | −226 | −351 | −852 | −1151 |
| Intron_4 of 5 | 2042 | 1897 | −19 | −144 | −645 | −944 |
| Intron_5 of 5 | 2314 | 2169 | 253 | 128 | −373 | −672 |
| Intron_5 of 5 | 2389 | 2244 | 328 | 203 | −298 | −597 |
| Exon_6 of 6 | 3186 | 3041 | 1125 | 1000 | 499 | 200 |

The gray boxes mark the SNPs relevant to replace each exon via HDR.
Positive values indicate that the SNP is located upstream to the exon and negative values indicate that the SNP is located downstream to the exon.

[0260] In embodiments of the present invention, the RNA molecules, compositions, methods, cells, kits, or medicaments are utilized for treating a subject having a disease phenotype resulting from the heterozygote GATA2 gene. In embodiments of the present invention, the disease is MonoMAC syndrome. In such embodiments, the method results in improvement, amelioration or prevention of the disease phenotype. Any one of, or combination of, the strategies for bi-allelelic cut and correction or allele-specific targeting based on a heterozygous SNP or mutation sequence disclosed herein may be used in the context of the invention.

[0261] In embodiments of the present invention, the RNA molecules, compositions, methods, cells, kits, or medicaments are utilized for treating a subject having a disease phenotype resulting from the GATA2 gene. In embodiments of the present invention, the disease is MonoMAC syndrome. In such embodiments, the method results in improvement, amelioration or prevention of the disease phenotype.

[0262] In embodiments of the present invention, the RNA molecules, compositions, methods, cells, kits, or medicaments of the present invention are utilized in combination with a second therapy for MonoMAC syndrome to treat the subject. In embodiments of the present invention, the RNA molecules, compositions, methods, kits, or medicaments of the present invention are administered prior to administration of the second therapy, during administration of the second therapy, and/or after administration of the second therapy.

[0263] In embodiments of the present invention, a cell with a GATA2 gene mutation associated with MonoMAC syndrome may be from a subject with the GATA2 gene mutation and/or afflicted with MonoMAC syndrome. Accordingly, selecting a cell with a GATA2 gene mutation may comprise selecting a subject with the GATA2 gene mutation. In further embodiments of the present invention, selecting a cell may comprise selecting a cell from a subject with the GATA2 gene mutation. In embodiments of the present invention, introducing the compositions of the subject invention to the cell may comprise introducing the compositions of the invention to the cell of a subject afflicted with the GATA2 gene mutation.

[0264] Accordingly, embodiments of the present invention encompass the screening of subjects or cells for the GATA2 gene. A person having ordinary skill in the art would readily understand methods of screening for mutations within the GATA2 gene in the art, by way of non-limiting examples, e.g., sequencing-by-synthesis, Sanger sequencing, karyotyping, Fluorescence In situ Hybridization, and/or microarray testing. In embodiments of the present invention, mutations within the GATA2 gene are screened by exon sequencing. In one embodiment of the invention, a subject is screened for heterozygous MonoMAC syndrome mutation or SNPs prior to treatment with a composition that includes guide sequences of the present invention.

[0265] In embodiments of the present invention, a subject diagnosed with MonoMAC syndrome is screened by exon sequencing to identify a GATA2 pathogenic mutation in the GATA2 gene.

[0266] It is understood that the CRISPR/Cas9 gene editing system enables targeting the nuclease to a target site in a sequence specific manner to address disease-causing mutations. Hematopoietic stem and progenitor cells (HSPCs) have therapeutic potential because of their ability to both self-renew and differentiate (Yu et al., Human Gene Therapy, 2016). Accordingly, embodiments of the present invention apply genome editing to HSPCs.

[0267] In embodiments of the present invention, an autologous therapy and utilizes autologous CD34+ hematopoietic stem cells from patients diagnosed with MonoMAC syndrome which are edited with CRISPR/Cas9. In embodiments of the present invention, CD34+ cells are isolated from bone marrow or peripheral blood mononucleated cells (PBMCs) following patient apheresis.

[0268] In some embodiments, an allele-specific or bi-allelic targeting RNA molecule and a CRISPR nuclease are introduced to a cell encoding the gene of interest. In some embodiments, the cell encoding the gene of interest is in a mammalian subject. In some embodiments, the cell encoding the gene of interest is a eukaryotic cell. In some embodiments, the cell encoding the gene of interest is a mammalian cell.

[0269] In some embodiments, a nucleic acid template is further introduced to the cell encoding the gene of interest for homology-directed repair, alteration, or replacement of a target sequence of the gene of interest to correct/repair the gene of interest such as to express a functional protein.

[0270] In some embodiments, the mutant allele desired to be targeted for correction or modification is an allele of the GATA2 gene. In some embodiments, the RNA molecule targets a SNP which co-exists with or is genetically linked to the disease-causing mutation associated with MonoMAC syndrome genetic disorder. In some embodiments, the RNA molecule targets a SNP which is highly prevalent in the population and exists in a mutant allele having the mutated sequence associated with MonoMAC syndrome genetic disorder and not in a second allele (e.g., functional allele) of an individual subject to be treated. In some embodiments, a disease-causing mutation within a mutated GATA2 allele is targeted. In some embodiments, a non-discriminatory guide sequence targets a non-coding region common to both GATA2 alleles up to 250 base pairs from an exon bearing a pathogenic mutation of interest.

[0271] In some embodiments, the method is utilized for treating a subject having a disease phenotype resulting from a mutation in the GATA2 gene. In such embodiments, the method results in improvement, amelioration or prevention of the disease phenotype.

[0272] Embodiments referred to above refer to a CRISPR nuclease, RNA molecule(s), and optionally tracrRNA being effective in a subject or cells at the same time. The CRISPR, RNA molecule(s), and optionally tracrRNA can be delivered substantially at the same time or can be delivered at different times but have effect at the same time. For example, this includes delivering the CRISPR nuclease to the subject or cells before the RNA molecule and/or tracr RNA is substantially extant in the subject or cells.

[0273] In one embodiment, the cell is a stem cell. In one embodiment, the cell is an embryonic stem cell. In some embodiment, the stem cell is a hematopoietic stem/progenitor cell (HSC). As used herein, the term HSC refers to both hematopoietic stem cells and hematopoietic stem progenitor cells. Non-limiting examples of stem cells include bone marrow cells, myeloid progenitor cells, a multipotent progenitor cells, a lineage restricted progenitor cells.

### Dominant Genetic Disorders

[0274] One of skill in the art will appreciate that all subjects with any type of heterozygote genetic disorder (e.g., dominant genetic disorder) may be subjected to the methods described herein. In one embodiment, the present invention may be used to target a gene involved in, associated with, or causative of a dominant genetic disorders such as, for example MonoMac syndrome. In some embodiments, the target gene is the GATA binding protein 2 (GATA2) gene (Entrez Gene, gene ID No: 2624) which is located on chromosome 3 and encodes a member of the GATA family of zinc-finger transcription factors. GATA2 pathogenic mutations may be corrected or modified by, for example, any one of the following strategies: (1) Utilizing a guide sequence targeting the pathogenic mutation itself to induce a DSB in proximity to the mutation in the mutant allele, and then using HDR for correction; (2) Utilizing a guide sequence targeting a SNP upstream or downstream of the pathogenic mutation, or upstream or downstream of an exon bearing the pathogenic mutation, and then using HDR for correction; or (3) Utilizing a non-discriminatory guide sequence that targets a non-coding region common to both alleles of the gene and is up to 250 base pairs from an exon bearing a pathogenic mutation to induce a DSB in the non-coding region of both alleles, and then using HDR for correction of the mutation and/or correction or replacement of the exon bearing the pathogenic mutation.

### CRISPR Nucleases and PAM Recognition

[0275] In some embodiments, the sequence specific nuclease is an RNA guided DNA nuclease. In some embodiments, the RNA sequence which guides the RNA guided DNA nuclease binds to and directs the RNA guided DNA nuclease to (1) a sequence comprising at least one nucleotide which differs between a mutant allele and its counterpart functional allele (e.g., SNP or a pathogenic MonoMAC syndrome mutation) or (2) to a non-coding region common to both alleles of a gene bearing the pathogenic mutation (i.e., both the functional allele and the allele bearing the pathogenic mutation). In additional embodiments, the RNA sequence which guides the RNA guided DNA nuclease binds to and directs the RNA guided DNA nuclease to a sequence at a distance of up to 1000 basepairs from an edge of an exon bearing a pathogenic mutation. In some embodiments, the CRISPR complex further comprises a tracrRNA. In some embodiments, the sequence specific nuclease is selected from CRISPR nucleases, or functional variants thereof. In a non-limiting example, in which the RNA guided DNA nuclease is a CRISPR protein, the at least one nucleotide which differs between a target allele (e.g., bearing a pathogenic mutation) and the other allele (e.g., bearing a different or the same pathogenic mutation) may be within the PAM site and/or proximal to the PAM site within the region that the RNA molecule is designed to hybridize to. In another non-limiting example, A skilled artisan will appreciate that RNA molecules can be engineered to bind to a target of choice in a genome by commonly known methods in the art.

[0276] In embodiments of the present invention, a type II CRISPR system utilizes a mature crRNA:tracrRNA complex directs a CRISPR nuclease, e.g. Cas9, to the target DNA via Watson-Crick base-pairing between the crRNA and the protospacer on the target DNA next to the protospacer adjacent motif (PAM), an additional requirement for target recognition. The CRISPR nuclease then mediates cleavage of target DNA to create a double-stranded break within the protospacer. A skilled artisan will appreciate that each of the engineered RNA molecule of the present invention is further designed such as to associate with a target genomic DNA sequence of interest next to a protospacer adjacent motif (PAM), e.g., a PAM matching the sequence relevant for the type of CRISPR nuclease utilized, such as for a non-limiting example, NGG or NAG, wherein “N” is any nucleobase, for Streptococcus pyogenes Cas9 WT (SpCAS9); NNGRRT for Staphylococcus aureus (SaCas9); NNNVRYM for Jejuni Cas9 WT; NGAN or NGNG for SpCas9-VQR variant; NGCG for SpCas9-VRER variant; NGAG for SpCas9-EQR variant; NNNNGATT for Neisseria meningitidis (NmCas9); or TTTV for Cpf1. RNA molecules of the present invention are each designed to form complexes in conjunction with one or more different CRISPR nucleases and designed to target polynucleotide sequences of interest utilizing one or more different PAM sequences respective to the CRISPR nuclease utilized.

[0277] RNA molecules of the present invention are each designed to form complexes in conjunction with one or more different CRISPR nucleases and designed to target polynucleotide sequences of interest utilizing one or more different PAM sequences respective to the CRISPR nuclease utilized. Non-limiting examples of suitable PAM sequences include NGG, NGAN, NGNG, NGAG, NGCG, NNGRRT, NNNNGATT, TTTV, NNNVRYM, NRTAM, NAG, NNYAAT, NRTAM, NRRAR, NGGNR, NRTAH, NGGNG, and NRRWC.

[0278] In some embodiments, an RNA-guided DNA nuclease e.g., a CRISPR nuclease, may be used to induce a double-strand DNA break at a desired location in the genome of a cell. The most commonly used RNA-guided DNA nucleases are derived from CRISPR systems, however, other RNA-guided DNA nucleases are also contemplated for use in the genome editing compositions and methods described herein. For instance, see U.S. Patent Publication No. 2015-0211023, incorporated herein by reference.

[0279] CRISPR systems that may be used in the practice of the invention vary greatly. CRISPR systems can be a type I, a type II, type III or Type V system. Non-limiting examples of suitable CRISPR proteins include Cas3, Cas4, Cas5, Cas5e (or CasD), Cas6, Cas6e, Cas6f, Cas7, Cas8a1, Cas8a2, Cas8b, Cas8c, Cas9, Cas10, Cas12a, Cas12b, Cas12c, Cas12d, Cas1Od, CasF, CasG, CasH, Csy1, Csy2, Csy3, Cse1 (or CasA), Cse2 (or CasB), Cse3 (or CasE), Cse4 (or CasC), Csc1, Csc2, Csa5, Csn2, Csm2, Csm3, Csm4, Csm5, Csm6, Cmr1, Cmr3, Cmr4, Cmr5, Cmr6, Csb1, Csb2, Csb3, Csx17, Csx14, Csx10, Csx16, CsaX, Csx3, Csz1, Csx15, Csf1, Csf2, Csf3, Csf4, and Cul966 (See Koonin 2017).

[0280] In some embodiments, the RNA-guided DNA nuclease is a CRISPR nuclease derived from a type II CRISPR system (e.g., Cas9). The CRISPR nuclease may be derived from Streptococcus pyogenes, Streptococcus thermophilus, Streptococcus sp., Staphylococcus aureus, Neisseria meningitidis, Treponema denticola, Nocardiopsis dassonvillei, Streptomyces pristinaespiralis, Streptomyces viridochromogenes, Streptomyces viridochromogenes, Streptosporangium roseum, Streptosporangium roseum, Alicyclobacillus acidocaldarius, Bacillus pseudomycoides, Bacillus selenitireducens, Exiguobacterium sibiricum, Lactobacillus delbrueckii, Lactobacillus salivarius, Microscilla marina, Burkholderiales bacterium, Polaromonas naphthalenivorans, Polaromonas sp., Crocosphaera watsonii, Cyanothece sp., Microcystis aeruginosa, Synechococcus sp., Acetohalobium arabaticum, Ammonifex degensii, Caldicelulosiruptor becscii, Candidatus Desulfbrudis, Clostridium botulinum, Clostridium difficile, Finegoldia magna, Natranaerobius thermophilus, Pelotomaculumthermopropionicum, Acidithiobacillus caldus, Acidithiobacillus ferrooxidans, Allochromatium vinosum, Marinobacter sp., Nitrosococcus halophilus, Nitrosococcus watsoni, Pseudoalteromonas haloplanktis, Ktedonobacter racemifer, Methanohalobium evestigatum, Anabaena variabilis, Nodularia spumigena, Nostoc sp., Arthrospira maxima, Arthrospira platensis, Arthrospira sp., Lyngbya sp., Microcoleus chthonoplastes, Oscillatoria sp., Petrotoga mobilis, Thermosipho africanus, Acaryochloris marina, Francisella cf. novicida Fx1, Alicyclobacillus acidoterrestris, Oleiphilus sp., Bacterium CG09_39_24, Deltaproteobacteria bacterium, or any species which encodes a CRISPR nuclease with a known PAM sequence. CRISPR nucleases encoded by uncultured bacteria may also be used in the context of the invention. (See Burstein et al. Nature, 2017). Variants of CRIPSR proteins having known PAM sequences e.g., SpCas9 D1135E variant, SpCas9 VQR variant, SpCas9 EQR variant, or SpCas9 VRER variant may also be used in the context of the invention.

[0281] Thus, an RNA guided DNA nuclease of a CRISPR system, such as a Cas9 protein or modified Cas9 or homolog or ortholog of Cas9, or other RNA guided DNA nucleases belonging to other types of CRISPR systems, such as Cpf1 and its homologs and orthologs, may be used in the compositions of the present invention.

[0282] In certain embodiments, the CRIPSR nuclease may be a “functional derivative” of a naturally occurring Cas protein. A “functional derivative” of a native sequence polypeptide is a compound having a qualitative biological property in common with a native sequence polypeptide. “Functional derivatives” include, but are not limited to, fragments of a native sequence and derivatives of a native sequence polypeptide and its fragments, provided that they have a biological activity in common with a corresponding native sequence polypeptide. A biological activity contemplated herein is the ability of the functional derivative to hydrolyze a DNA substrate into fragments. The term “derivative” encompasses both amino acid sequence variants of polypeptide, covalent modifications, and fusions thereof. Suitable derivatives of a Cas polypeptide or a fragment thereof include but are not limited to mutants, fusions, covalent modifications of Cas protein or a fragment thereof. Cas protein, which includes Cas protein or a fragment thereof, as well as derivatives of Cas protein or a fragment thereof, may be obtainable from a cell or synthesized chemically or by a combination of these two procedures. The cell may be a cell that naturally produces Cas protein, or a cell that naturally produces Cas protein and is genetically engineered to produce the endogenous Cas protein at a higher expression level or to produce a Cas protein from an exogenously introduced nucleic acid, which nucleic acid encodes a Cas that is same or different from the endogenous Cas. In some cases, the cell does not naturally produce Cas protein and is genetically engineered to produce a Cas protein.

[0283] In some embodiments, the CRISPR nuclease is Cpf1. Cpf1 is a single RNA-guided endonuclease which utilizes a T-rich protospacer-adjacent motif. Cpf1 cleaves DNA via a staggered DNA double-stranded break. Two Cpf1 enzymes from Acidaminococcus and Lachnospiraceae have been shown to carry out efficient genome-editing activity in human cells. See Zetsche et al., Cell (2015).

[0284] In some embodiments, the CRISPR nuclease comprises one or more nuclear localization sequences (NLS), cell penetrating peptide sequences, and/or affinity tags. The NLS may be fused to the CRISPR nuclease or may be an in internal NLS. In an embodiment, the CRISPR nuclease comprises one or more nuclear localization sequences of sufficient strength to drive accumulation of a CRISPR complex comprising the CRISPR nuclease in a detectable amount in the nucleus of a eukaryotic cell.

[0285] Thus, an RNA-guided DNA nuclease of a Type II CRISPR System, such as a Cas9 protein or modified Cas9 or homologs, orthologues, or variants of Cas9, or other RNA guided DNA nucleases belonging to other types of CRISPR systems, such as Cpf1 and its homologs, orthologues, or variants, may be used in the present invention.

[0286] In some embodiments, the guide molecule comprises one or more chemical modifications which imparts a new or improved property (e.g., improved stability from degradation, improved hybridization energetics, or improved binding properties with an RNA guided DNA nuclease). Suitable chemical modifications include, but are not limited to one or more of: modified bases, modified sugar moieties, or modified inter-nucleoside linkages. Non-limiting examples of suitable chemical modifications include: 4-acetylcytidine, 5-(carboxyhydroxymethyl)uridine, 2′-O-methylcytidine, 5-carboxymethylaminomethyl-2-thiouridine, 5-carboxymethylaminomethyluridine, dihydrouridine, 2′-O-methylpseudouridine, “beta, D-galactosylqueuosine”, 2′-O-methylguanosine, inosine, N6-isopentenyladenosine, 1-methyladenosine, 1-methylpseudouridine, 1-methylguanosine, 1-methylinosine, “2,2-dimethylguanosine”, 2-methyladenosine, 2-methylguanosine, 3-methylcytidine, 5-methylcytidine, N6-methyladenosine, 7-methylguanosine, 5-methylaminomethyluridine, 5-methoxyaminomethyl-2-thiouridine, “beta, D-mannosylqueuosine”, 5-methoxycarbonylmethyl-2-thiouridine, 5-methoxycarbonylmethyluridine, 5-methoxyuridine, 2-methylthio-N6-isopentenyladenosine, N-((9-beta-D-ribofuranosyl-2-methylthiopurine-6-yOcarbamoyOthreonine, N-((9-beta-D-ribofuranosylpurine-6-yl)N-methylcarbamoyl)threonine, uridine-5-oxyacetic acid-methylester, uridine-5-oxyacetic acid, wybutoxosine, queuosine, 2-thiocytidine, 5-methyl-2-thiouridine, 2-thiouridine, 4-thiouridine, 5-methyluridine, N-((9-beta-D-ribofuranosylpurine-6-yl)-carbamoyl)threonine, 2′-O-methyl-5-methyluridine, 2′-O-methyluridine, wybutosine, “3-(3-amino-3-carboxy-propyl)uridine, (acp3)u”, 2′-O-methyl (M), 3′-phosphorothioate (MS), 3′-thioPACE (MSP), pseudouridine, or 1-methyl pseudo-uridine. Each possibility represents a separate embodiment of the present invention.

[0287] Further non-limiting examples of suitable chemical modifications include: m¹A (1-methyladenosine); m²A (2-methyladenosine); Am (2′-O-methyladenosine); ms² m⁶A (2-methylthio-N⁶-methyladenosine); i⁶A (N⁶-isopentenyladenosine); ms²i6A (2-methylthio-N⁶isopentenyladeno sine); io⁶A (N⁶-(cis-hydroxyisopentenyl)adenosine); ms²io⁶A (2-methylthio-N⁶-(cis-hydroxyisopentenyl) adenosine); g⁶A (N⁶-glycinylcarbamoyladenosine); t⁶A (N⁶-threonylcarbamoyladenosine); ms²t⁶A (2-methylthio-N⁶-threonyl carbamoyladenosine); m⁶t⁶A (N⁶-methyl-N⁶-threonylcarbamoyladenosine); hn⁶A(N⁶-hydroxynorvalylcarbamoyladenosine); ms²hn⁶A (2-methylthio-N⁶-hydroxynorvalyl carbamoyladenosine); Ar(p) (2′-O-ribosyladenosine (phosphate)); I (inosine); m¹I (1-methylinosine); m¹Im (1,2′-O-dimethylinosine); m³C (3-methylcytidine); Cm (2′-O-methylcytidine); s²C (2-thiocytidine); ac⁴C (N⁴-acetylcytidine); f⁵C (5-formylcytidine); m⁵Cm (5,2′-O-dimethylcytidine); ac⁴Cm (N⁴-acetyl-2′-O-methylcytidine); k²C (lysidine); m¹G (1-methylguanosine); m²G (N²-methylguanosine); m⁷G (7-methylguanosine); Gm (2′-O-methylguanosine); m²₂G (N²,N²-dimethylguanosine); m²Gm (N^{2,2}′-O-dimethylguanosine); m²₂Gm (N²,N², 2′-O-trimethylguanosine); Gr(p) (2′-O-ribosylguanosine (phosphate)); yW (wybutosine); o₂yW (peroxywybutosine); OHyW (hydroxywybutosine); OHyW* (undermodified hydroxywybutosine); imG (wyosine); mimG (methylwyosine); Q (queuosine); oQ (epoxyqueuosine); galQ (galactosyl-queuosine); manQ (mannosyl-queuosine); preQ₀ (7-cyano-7-deazaguanosine); preQ₁ (7-aminomethyl-7-deazaguanosine); G⁺ (archaeosine); D (dihydrouridine); m⁵Um (5,2′-O-dimethyluridine); s⁴U (4-thiouridine); m⁵s²U (5-methyl-2-thiouridine); s²Um (2-thio-2′-O-methyluridine); acp³U (3-(3-amino-3-carboxypropyl)uridine); ho⁵U (5-hydroxyuridine); mo⁵U (5-methoxyuridine); cmo⁵U (uridine 5-oxyacetic acid); mcmo⁵U (uridine 5-oxyacetic acid methyl ester); chm⁵U (5-(carboxyhydroxymethyl)uridine)); mchm⁵U (5-(carboxyhydroxymethyl)uridine methyl ester); mcm⁵U (5-methoxycarbonylmethyluridine); mcm⁵Um (5-methoxycarbonylmethyl-2′-O-methyluridine); mcm⁵s²U (5-methoxycarbonylmethyl-2-thiouridine); nm⁵S²U (5-aminomethyl-2-thiouridine); mnm⁵U (5-methylaminomethyluridine); mnm⁵s²U (5-methylaminomethyl-2-thiouridine); mnm⁵se²U (5-methylaminomethyl-2-selenouridine); ncm⁵U (5-carbamoylmethyluridine); ncm⁵Um (5-carbamoylmethyl-2′-O-methyluridine); cmnm⁵U (5-carboxymethylaminomethyluridine); cmnm⁵Um (5-carboxymethylaminomethyl-2′-O-methyluridine); cmmm⁵s²U (5-carboxymethylaminomethyl-2-thiouridine); dimethyladenosine); Im (2′-O-methylinosine); m⁴C (N⁴-methylcytidine); m⁴Cm (N⁴,2′-O-dimethylcytidine); hm⁵C (5-hydroxymethylcytidine); m³U (3-methyluridine); cm⁵U (5-carboxymethyluridine); m⁶Am (N⁶,2′-O-dimethyladenosine); m⁶ ₂Am (N⁶,N⁶,O-2′-trimethyladenosine); m^{2,7}G (N²,7-dimethylguanosine); m2,2,7G (N²,N²,7-trimethylguanosine); m³Um (3,2′-O-dimethyluridine); m⁵D (5-methyldihydrouridine); f⁵Cm (5-formyl-2′-O-methylcytidine); m¹ Gm (1,2′-O-dimethylguanosine); m¹Am (1,2′-O-dimethyladenosine); τm⁵U (5-taurinomethyluridine); τm⁵s²U (5-taurinomethyl-2-thiouridine)); imG-14 (4-demethylwyosine); imG2 (isowyosine); or ac⁶A (N⁶-acetyladenosine). Each possibility represents a separate embodiment of the present invention. (See e.g. U.S. Pat. No. 9,750,824).

### Delivery to Cells

[0288] It is understood that in the methods embodied, the RNA molecules and compositions described herein may be delivered to a target cell or subject by any suitable means. The following embodiments provide non-limiting examples of methods of delivery of the RNA molecules and composition of the present invention.

[0289] In some embodiments, RNA molecule compositions of the present invention may be targeted to any cell which contains and/or expresses a mutant allele or a dominant negative allele, including any mammalian or plant cell. For example, in one embodiment the RNA molecule specifically targets a mutated GATA2 allele and the target cell is an HSC. The delivery to the cell may be performed in-vitro, ex-vivo, or in-vivo. Further, the nucleic acid compositions described herein may be delivered as one or more of DNA molecules, RNA molecules, Ribonucleoproteins (RNP), nucleic acid vectors, or any combination thereof. In another example, the RNA molecule targets non-coding region common to both alleles of the GATA2 gene and up to 250 base pairs from an exon bearing a pathogenic mutation position of interest. In such a scenario, a double-strand break is induced in the non-coding region of both alleles, and the mutation of interest can be corrected by DNA repair pathway (e.g. HDR).

[0290] In some embodiments, the RNA molecule comprises a chemical modification. Non-limiting examples of suitable chemical modifications include 2′-0-methyl (M), 2′-0-methyl, 3′phosphorothioate (MS) or 2′-0-methyl, 3′ thioPACE (MSP), pseudouridine, and 1-methyl pseudo-uridine. Each possibility represents a separate embodiment of the present invention.

[0291] Any suitable viral vector system may be used to deliver nucleic acid compositions e.g., the RNA molecule compositions of the subject invention. Conventional viral and non-viral based gene transfer methods can be used to introduce nucleic acids and target tissues. In certain embodiments, nucleic acids are administered for in vivo or ex vivo gene therapy uses. Non-viral vector delivery systems include naked nucleic acid, and nucleic acid complexed with a delivery vehicle such as a liposome or poloxamer. For a review of gene therapy procedures, see Anderson (1992) Science 256:808-813; Nabel and Feigner (1993) TIBTECH 11:211-217; Mitani and Caskey (1993) TIBTECH 11:162-166; Dillon (1993) TIBTECH 11:167-175; Miller (1992) Nature 357:455-460; Van Brunt (1988) Biotechnology 6(10):1149-1154; Vigne (1995) Restorative Neurology and Neuroscience 8:35-36; Kremer and Perricaudet (1995) British Medical Bulletin 51(1):31-44; Haddada et al. (1995) in Current Topics in Microbiology and Immunology Doerfler and Bohm (eds.); and Yu et al. (1994) Gene Therapy 1:13-26.

[0292] Methods of non-viral delivery of nucleic acids and/or proteins include electroporation, lipofection, microinjection, biolistics, particle gun acceleration, virosomes, liposomes, immunoliposomes, lipid nanoparticles (LNPs), polycation or lipid:nucleic acid conjugates, artificial virions, and agent-enhanced uptake of nucleic acids or can be delivered to plant cells by bacteria or viruses (e.g., Agrobacterium, Rhizobium sp. NGR234, Sinorhizoboiummeliloti, Mesorhizobium loti, tobacco mosaic virus, potato virus X, cauliflower mosaic virus and cassava vein mosaic virus). (See, e.g., Chung et al. (2006) Trends Plant Sci. 11(1):1-4). Sonoporation using, e.g., the Sonitron 2000 system (Rich-Mar), can also be used for delivery of nucleic acids. Cationic-lipid mediated delivery of proteins and/or nucleic acids is also contemplated as an in vivo or in vitro delivery method. (See Zuris et al. (2015) Nat. Biotechnol. 33(1):73-80; see also Coelho et al. (2013) N. Engl. J. Med. 369, 819-829; Judge et al. (2006) Mol. Ther. 13, 494-505; and Basha et al. (2011) Mol. Ther. 19, 2186-2200).

[0293] Additional exemplary nucleic acid delivery systems include those provided by Amaxa® Biosystems (Cologne, Germany), Maxcyte, Inc. (Rockville, Md.), BTX Molecular Delivery Systems (Holliston, Mass.) and Copernicus Therapeutics Inc., (see, e.g., U.S. Pat. No. 6,008,336). Lipofection is described in e.g., U.S. Pat. Nos. 5,049,386, 4,946,787; and 4,897,355, and lipofection reagents are sold commercially (e.g., Transfectam™, Lipofectin™ and Lipofectamine™ RNAiMAX). Cationic and neutral lipids that are suitable for efficient receptor-recognition lipofection of polynucleotides include those of Felgner et al. (WO 1991/017424 and WO 1991/016024). Delivery can be to cells (ex vivo administration) or target tissues (in vivo administration).

[0294] The preparation of lipid:nucleic acid complexes, including targeted liposomes such as immunolipid complexes, is well known to one of skill in the art (See, e.g., Crystal (1995) Science 270:404-410; Blaese (1995) Cancer Gene Ther. 2:291-297; Behr et al. (1994) Bioconjugate Chem. 5:382-389; Remy et al. (1994) Bioconjugate Chem. 5:647-654; Gao and Huang (1995) Gene Therapy 2:710-722; Ahmad and Allen (1992) Cancer Res. 52:4817-4820; U.S. Pat. Nos. 4,186,183, 4,217,344, 4,235,871, 4,261,975, 4,485,054, 4,501,728, 4,774,085, 4,837,028, and 4,946,787).

[0295] Additional methods of delivery include the use of packaging the nucleic acids to be delivered into EnGenelC delivery vehicles (EDVs). These EDVs are specifically delivered to target tissues using bispecific antibodies where one arm of the antibody has specificity for the target tissue and the other has specificity for the EDV. The antibody brings the EDVs to the target cell surface and then the EDV is brought into the cell by endocytosis. Once in the cell, the contents are released (See MacDiarmid et al (2009) Nature Biotechnology 27(7):643).

[0296] The use of RNA or DNA viral based systems for viral mediated delivery of nucleic acids take advantage of highly evolved processes for targeting a virus to specific cells in the body and trafficking the viral payload to the nucleus. Viral vectors can be administered directly to patients (in vivo) or they can be used to treat cells in vitro and the modified cells are administered to patients (ex vivo). Conventional viral based systems for the delivery of nucleic acids include, but are not limited to, retroviral, lentivirus, adenoviral, adeno-associated, vaccinia and herpes simplex virus vectors for gene transfer.

[0297] The tropism of a retrovirus can be altered by incorporating foreign envelope proteins, expanding the potential target population of target cells. Lentiviral vectors are retroviral vectors that are able to transduce or infect non-dividing cells and typically produce high viral titers. Selection of a retroviral gene transfer system depends on the target tissue. Retroviral vectors are comprised of cis-acting long terminal repeats with packaging capacity for up to 6-10 kb of foreign sequence. The minimum cis-acting LTRs are sufficient for replication and packaging of the vectors, which are then used to integrate the therapeutic gene into the target cell to provide permanent transgene expression. Widely used retroviral vectors include those based upon murine leukemia virus (MuLV), gibbon ape leukemia virus (GaLV), Simian Immunodeficiency virus (SIV), human immunodeficiency virus (HIV), and combinations thereof (See e.g., Buchschacher and Panganiban (1992) J. Virol. 66:2731-2739; Johann et al. (1992) J. Virol. 66:1635-1640; Sommerfelt et al. (1990) Virol. 176:58-59; Wilson et al. (1989) J. Virol. 63:2374-2378; Miller et al. (1991) J. Virol. 65:2220-2224; PCT/US1994/05700).

[0298] At least six viral vector approaches are currently available for gene transfer in clinical trials, which utilize approaches that involve complementation of defective vectors by genes inserted into helper cell lines to generate the transducing agent.

[0299] pLASN and MFG-S are examples of retroviral vectors that have been used in clinical trials (Dunbar et al. (1995) Blood 85:3048-305; Kohn et al. (1995) Nat. Med. 1:1017-102; Malech et al. (1997) PNAS 94:22 12133-12138). PA317/pLASN was the first therapeutic vector used in a gene therapy trial. (Blaese et al., Science (1995). Transduction efficiencies of 50% or greater have been observed for MFG-S packaged vectors. (Ellem et al. (1997) Immunol Immunother. 44(1):10-20; Dranoff et al. (1997) Hum. Gene Ther. 1:111-2).

[0300] Packaging cells are used to form virus particles that are capable of infecting a host cell. Such cells include 293 cells, which package adenovirus, AAV, and Psi-2 cells or PA317 cells, which package retrovirus. Viral vectors used in gene therapy are usually generated by a producer cell line that packages a nucleic acid vector into a viral particle. The vectors typically contain the minimal viral sequences required for packaging and subsequent integration into a host (if applicable), other viral sequences being replaced by an expression cassette encoding the protein to be expressed. The missing viral functions are supplied in trans by the packaging cell line. For example, AAV vectors used in gene therapy typically only possess inverted terminal repeat (ITR) sequences from the AAV genome which are required for packaging and integration into the host genome. Viral DNA is packaged in a cell line, which contains a helper plasmid encoding the other AAV genes, namely rep and cap, but lacking ITR sequences. The cell line is also infected with adenovirus as a helper. The helper virus promotes replication of the AAV vector and expression of AAV genes from the helper plasmid. The helper plasmid is not packaged in significant amounts due to a lack of ITR sequences. Contamination with adenovirus can be reduced by, e.g., heat treatment to which adenovirus is more sensitive than AAV. Additionally, AAV can be produced at clinical scale using baculovirus systems (see U.S. Pat. No. 7,479,554).

[0301] In many gene therapy applications, it is desirable that the gene therapy vector be delivered with a high degree of specificity to a particular tissue type. Accordingly, a viral vector can be modified to have specificity for a given cell type by expressing a ligand as a fusion protein with a viral coat protein on the outer surface of the virus. The ligand is chosen to have affinity for a receptor known to be present on the cell type of interest. For example, Han et al. (1995) Proc. Natl. Acad. Sci. USA 92:9747-9751, reported that Moloney murine leukemia virus can be modified to express human heregulin fused to gp70, and the recombinant virus infects certain human breast cancer cells expressing human epidermal growth factor receptor. This principle can be extended to other virus-target cell pairs, in which the target cell expresses a receptor and the virus expresses a fusion protein comprising a ligand for the cell-surface receptor. For example, filamentous phage can be engineered to display antibody fragments (e.g., FAB or Fv) having specific binding affinity for virtually any chosen cellular receptor. Although the above description applies primarily to viral vectors, the same principles can be applied to nonviral vectors. Such vectors can be engineered to contain specific uptake sequences which favor uptake by specific target cells.

[0302] Gene therapy vectors can be delivered in vivo by administration to an individual patient, typically by systemic administration (e.g., intravitreal, intravenous, intraperitoneal, intramuscular, subdermal, or intracranial infusion) or topical application, as described below. Alternatively, vectors can be delivered to cells ex vivo, such as cells explanted from an individual patient (e.g., lymphocytes, bone marrow aspirates, tissue biopsy) or universal donor hematopoietic stem cells, followed by reimplantation of the cells into a patient, usually after selection for cells which have incorporated the vector.

[0303] Ex vivo cell transfection for diagnostics, research, or for gene therapy (e.g., via re-infusion of the transfected cells into the host organism) is well known to those of skill in the art. In a preferred embodiment, cells are isolated from the subject organism, transfected with a nucleic acid composition, and re-infused back into the subject organism (e.g., patient). Various cell types suitable for ex vivo transfection are well known to those of skill in the art (See, e.g., Freshney et al. (1994) Culture of Animal Cells, A Manual of Basic Technique, 3rd ed, and the references cited therein for a discussion of how to isolate and culture cells from patients).

[0304] Suitable cells include, but are not limited to, eukaryotic cells and/or cell lines. Non-limiting examples of such cells or cell lines generated from such cells include COS, CHO (e.g., CHO-S, CHO-K1, CHO-DG44, CHO-DUXB11, CHO-DUKX, CHOK1SV), VERO, MDCK, WI38, V79, B14AF28-G3, BHK, HaK, NSO, SP2/0-Ag14, HeLa, HEK293 (e.g., HEK293-F, HEK293-H, HEK293-T), perC6 cells, any plant cell (differentiated or undifferentiated), as well as insect cells such as Spodopterafugiperda (Sf), or fungal cells such as Saccharomyces, Pichia and Schizosaccharomyces. In certain embodiments, the cell line is a CHO-K1, MDCK or HEK293 cell line. Additionally, primary cells may be isolated and used ex vivo for reintroduction into the subject to be treated following treatment with a guided nuclease system (e.g. CRISPR/Cas). Suitable primary cells include peripheral blood mononuclear cells (PBMC), and other blood cell subsets such as, but not limited to, CD4+ T cells or CD8+ T cells. Suitable cells also include stem cells such as, by way of example, embryonic stem cells, induced pluripotent stem cells, hematopoietic stem cells (CD34+), neuronal stem cells and mesenchymal stem cells.

[0305] In one embodiment, stem cells are used in ex vivo procedures for cell transfection and gene therapy. The advantage to using stem cells is that they can be differentiated into other cell types in vitro, or can be introduced into a mammal (such as the donor of the cells) where they will engraft in the bone marrow. Methods for differentiating CD34+ cells in vitro into clinically important immune cell types using cytokines such a GM-CSF, IFN-gamma, and TNF-alpha are known (as a non-limiting example see, Inaba et al., J. Exp. Med. 176:1693-1702 (1992)).

[0306] Stem cells are isolated for transduction and differentiation using known methods. For example, stem cells are isolated from bone marrow cells by panning the bone marrow cells with antibodies which bind unwanted cells, such as CD4+ and CD8+(T cells), CD45+(panB cells), GR-1 (granulocytes), and Tad (differentiated antigen presenting cells) (as a non-limiting example see Inaba et al. (1992) J. Exp. Med. 176:1693-1702). Stem cells that have been modified may also be used in some embodiments.

[0307] Typically, the cells are administered in a pharmaceutical composition comprising at least one pharmaceutically-acceptable carrier. The phrase “pharmaceutically acceptable” refers to those compounds, materials, compositions, and/or dosage forms which are, within the scope of sound medical judgment, suitable for use in contact with the tissues of human beings and animals without excessive toxicity, irritation, allergic response, or other problem or complication, commensurate with a reasonable benefit/risk ratio. The phrase “pharmaceutically acceptable carrier” as used herein means a pharmaceutically-acceptable material, composition or vehicle, such as a liquid or solid filler, diluent, excipient, or solvent encapsulating material.

[0308] Any one of the RNA molecule compositions described herein is suitable for genome editing in either mitotic cells or post-mitotic cells or any cell which is not actively dividing, e.g., arrested cells. Examples of post-mitotic cells which may be edited using an RNA molecule composition of the present invention include, but are not limited to, a hepatocyte cell.

[0309] Vectors (e.g., retroviruses, liposomes, etc.) containing therapeutic nucleic acid compositions can also be administered directly to an organism for transduction of cells in vivo. Administration is by any of the routes normally used for introducing a molecule into ultimate contact with blood or tissue cells including, but not limited to, injection, infusion, topical application (e.g., eye drops and cream) and electroporation. Suitable methods of administering such nucleic acids are available and well known to those of skill in the art, and, although more than one route can be used to administer a particular composition, a particular route can often provide a more immediate and more effective reaction than another route. According to some embodiments, the composition is delivered via IV injection.

[0310] Vectors suitable for introduction of transgenes into immune cells (e.g., T-cells) include non-integrating lentivirus vectors. See, e.g., U.S. Patent Publication No. 2009-0117617.

[0311] Pharmaceutically acceptable carriers are determined in part by the particular composition being administered, as well as by the particular method used to administer the composition. Accordingly, there is a wide variety of suitable formulations of pharmaceutical compositions available, as described below (See, e.g., Remington's Pharmaceutical Sciences, 17th ed., 1989).

[0312] In accordance with some embodiments, there is provided an RNA molecule which binds to/associates with and/or directs the RNA-guided DNA nuclease (e.g., a CRISPR nuclease) to a sequence comprising at least one nucleotide which differs between a mutant allele and a functional allele (e.g., SNP or a disease associated mutation) of a gene of interest (i.e., a sequence of the mutant allele which is not present in the functional allele, a sequence of one of the mutant alleles which is not present in the other mutant allele) or a sequence common to two mutant alleles of a gene of interest. The sequence may be within the disease associated mutation. The sequence may be upstream or downstream to the disease associated mutation. Any sequence difference between the mutant allele and the functional allele may be targeted by an RNA molecule of the present invention to inactivate the mutant allele, or otherwise disable its dominant disease-causing effects, while preserving the activity of the functional allele. In additional embodiments, there is provided an RNA molecule which binds to/associates with and/or directs the RNA guided DNA nuclease to a sequence in a non-coding region upstream or downstream to an exon baring a disease associated mutation.

[0313] The disclosed compositions and methods may also be used in the manufacture of a medicament for treating dominant genetic disorders in a patient.

Guide Sequences which Specifically Target a Mutant Allele

[0314] A given gene may contain thousands of SNPs. Utilizing a 24 base pair target window for targeting each SNP in a gene would require hundreds of thousands of guide sequences. Any given guide sequence when utilized to target a SNP may result in degradation of the guide sequence, limited activity, no activity, or off-target effects. Accordingly, suitable guide sequences are necessary for targeting a given gene. By on aspect of the present invention, a novel set of guide sequences have been identified for repairing/correcting/modifying a mutant allele of GATA2 gene to treat/ameliorate/prevent MonoMAC syndrome.

[0315] One aspect of the present disclosure provides guide sequences capable of specifically targeting a mutant allele while leaving a second allele (e.g., functional allele) unmodified. The guide sequences of the present invention are designed to, and are most likely to, specifically differentiate between a mutant allele and a functional allele. Of all possible guide sequences which target a mutant allele desired to be edited/corrected/modified/repaired, the specific guide sequences disclosed herein are specifically effective to function with the disclosed embodiments.

[0316] The present disclosure also provides guide sequences capable of specifically targeting a mutant allele. Of all possible guide sequences which target the mutant allele desired to be edited/corrected/modified/repaired, the specific guide sequences disclosed herein are specifically effective to function with the disclosed embodiments.

[0317] Briefly, the guide sequences may have properties as follows: (1) targets a SNP/insertion/deletion/indel with a prevalence of heterozygosity in the general population, in a specific ethnic population, or in a patient population above 1% or 10%; (2) targets a location of a SNP/insertion/deletion/indel proximal to a portion of the gene e.g., within 250 base pairs of a mutation or exon of the gene; and (3) targets a mutant allele which by targeting a founder or common pathogenic mutation for the disease/gene. In some embodiments, the SNP/insertion/deletion/indel heterozygosity rate in a population of interest is above 1%, 2%, 3%, 4%, 5%, 6%, 7%, 8%, 9%, 10%, 11%, 12%, 13%, 14%, or 15%. Each possibility represents a separate embodiment and may be combined at will.

[0318] Guide sequences of the present invention may target a SNP position in a distance of less than 2000 nucleotides, 1000 nucleotides, 500 nucleotides, 400 nucleotides, 300 nucleotides, 250 nucleotides, 200 nucleotides, 100 nucleotides from the disease-associated mutation, or within the disease associated mutation. Each possibility represents a separate embodiment.

[0319] Guide sequences of the present invention also may: (1) target a heterozygous sequence in a SNP position for the targeted gene; (2) target a SNP position with a prevalence of the SNP/insertion/deletion/indel in the general population, in a specific ethnic population, or in a patient population above 1% or 10%; (3) have a guanine-cytosine content of greater than 30% and less than 85%; (4) have no repeats of seven or more thymine/uracil, guanine, cytosine, or adenine residues; (6) have no off-target of zero mismatches in the genome identified by off-target analysis; and (7) preferably target Exons over Introns or be upstream of a SNP rather than downstream of a SNP.

[0320] In embodiments of the present invention, the SNP position may be upstream or downstream of the gene. In embodiments of the present invention, the SNP position is within 4,000, 2000, 1000, 500 base pairs upstream or downstream of the gene. Each possibility represents a separate embodiment.

[0321] The at least one nucleotide which differs between the mutant allele and the second allele (e.g., functional/wild type allele), may be upstream, downstream or within the sequence of the disease-causing mutation of the gene of interest. The at least one nucleotide which differs between the mutant allele and the second allele, may be within an exon or within an intron of the gene of interest.

[0322] In some embodiments, the at least one nucleotide is a single nucleotide polymorphism (SNP). In some embodiments, each of the nucleotide variants of the SNP may be expressed in the mutant allele (REF/SNP) and targeted by a guide sequence. In some embodiments, the SNP may be a founder or common pathogenic mutation.

[0323] Guide sequences may target a REF/ALT sequence of a SNP which has both (1) a high prevalence in the general population e.g., above 1% in the population; and (2) a high heterozygosity rate in the population, e.g., above 1%. Guide sequences may target a SNP that is globally distributed. A SNP may be a founder or common pathogenic mutation. In some embodiments, the heterozygosity rate in the population is above 1%, 2%, 3%, 4%, 5%, 6%, 7%, 8%, 9%, 10%, 11%, 12%, 13%, 14%, or 15%. Each possibility represents a separate embodiment.

[0324] In some embodiments, the at least one nucleotide which differs between the mutant allele and the functional allele is linked to/co-exists with the disease-causing mutation in high prevalence in a population. In one embodiment, the at least one nucleotide which differs between the mutant allele and the functional allele, is a disease-associated mutation. In some embodiments, the SNP is highly prevalent in the population. In such embodiments, “highly prevalent” refers to at least 10%, 11%, 12%, 13%, 14%, 15%, 20%, 30%, 40%, 50%, 60%, or 70% of a population. Each possibility represents a separate embodiment of the present invention.

[0325] Guide sequences of the present invention may satisfy any one of the above criteria and are most likely to differentiate between a mutant allele from its corresponding functional allele.

[0326] Strategies for HDR repair of a pathogenic mutation associated with MonoMAC syndrome may involve a guide sequence targeting the pathogenic mutation itself or alternatively a guide sequence targeting a SNP located upstream or downstream to the mutation to mediate a DSB in proximity to the mutation. The strategies may further include a sequence repair/correction step by utilizing a donor/template sequence that (e.g., a single-stranded donor oligonucleotides (ssODN), double-stranded Donor (PCR product), Minicircle or virus (rAAV or Lentivirus)). In some embodiments, a DSB is affected in a non-coding region of both alleles of a gene, and a donor template for HDR overlaps in sequence complementarity with an entire exon in which a pathogenic mutation is located.

[0327] In an exemplary strategy, a mutant allele bearing a disease associated mutation, such as a mutation selected at one of the following positions rs387906630, rs387906632, rs387906631, rs387906634, rs376003468, rs387906633, 3:128200118_C_T, and rs387906629, is targeted by guide sequences designed to target the disease associated mutation itself. Non-limiting examples of such guide sequences are indicated in Table 2.

[0328] In some embodiments, a mutant allele bearing a mutation is targeted by guide sequences designed to target REF/ALT sequences of SNPs located up to 200, 500, 1000, 1500, 2000 bases from the pathogenic mutation. Each possibility represents a separate embodiment. Non-limiting examples of suitable guide sequences are indicated in Table 2.

[0329] In an exemplary strategy, a mutant allele bearing a mutation may be targeted by guide sequences designed to target ALT/REF sequences in SNPs located upstream of the GATA2 gene, downstream of the GATA2 gene, in intron 1, intron 2, intron 3, intron 4, intron 5, exon 1, exon 2, exon 3, exon 4, exon 5, exon 6 of GATA2. Non-limiting examples of such guide sequences are indicated in Table 2.

[0330] In an exemplary strategy, a mutant allele bearing a mutation may be targeted by guide sequences designed to target ALT/REF sequences in SNPs located in intron 2 (e.g., r54577488), intron 3 (e.g., rs2713602 and 2659686), intron 4 (e.g., rs12488487, rs55686439, rs11717152, and r511708606), intron 5 (e.g., 2713603 and 2713604), exon 2 (e.g., r51573858), exon 3 (e.g., rs2335052 and r5387906630), exon 4 (e.g., r5387906632), exon 5 (e.g., rs387906631, rs376003468, rs387906633, and r5387906634), exon 6 (e.g., rs387906629, rs3803, rs10934857, 3:128200118_C_T). Non-limiting examples of such guide sequences are indicated in Table 2.

[0331] Although a large number of guide sequences can be designed to target a mutant allele, a subset within the sequences identified by SEQ ID NOs: 1-44348 were specifically designed to effectively implement the methods set forth herein and to effectively discriminate between alleles.

[0332] A subset of guide sequences for use as described in the embodiments herein were designed to associate with different SNPs or mutations within a sequence of a mutated GATA2 allele. Each engineered guide molecule is further designed such as to associate with a target genomic DNA sequence of interest that lies next to a protospacer adjacent motif (PAM), e.g., a PAM matching the sequence NGG or NAG, where “N” is any nucleobase. The guide sequences were designed to work in conjunction with one or more different CRISPR nucleases, including, but not limited to, e.g. SpCas9WT (PAM SEQ: NGG), SpCas9.VQR.1 (PAM SEQ: NGAN), SpCas9.VQR.2 (PAM SEQ: NGNG), SpCas9.EQR (PAM SEQ: NGAG), SpCas9.VRER (PAM SEQ: NGCG), SaCas9WT (PAM SEQ: NNGRRT), NmCas9WT (PAM SEQ: NNNNGATT), Cpf1 (PAM SEQ: TTTV), or JeCas9WT (PAM SEQ: NNNVRYM). RNA molecules of the present invention are each designed to form complexes in conjunction with one or more different CRISPR nucleases and designed to target polynucleotide sequences of interest utilizing one or more different PAM sequences respective to the CRISPR nuclease utilized.

Guide Sequences which Target a Sequence within a Non-Coding Region in a Proximity to an Exon Bearing a Pathogenic Mutation

[0333] The present disclosure also provides guide sequences capable of specifically targeting a CRISPR nuclease to induce a DSB at a location that is 500, 250, or fewer nucleotides from the first or the last nucleotide of a coding region of the GATA2 gene containing the mutation associated with MonoMAC syndrome desired to be edited/corrected/modified/repaired. The specific guide sequences disclosed herein are specifically effective to function with the disclosed embodiments.

[0334] Strategies for HDR repair of a pathogenic mutation associated with MonoMAC syndrome may involve a guide sequence targeting a sequence within a non-coding region of the gene, in a distance of up to 1000, 500, 250, or fewer nucleotides from the first or the last nucleotide of a coding region of the GATA2 gene containing the mutation associated with MonoMAC syndrome desired to be edited/corrected/modified/repaired. The strategies may further include a sequence repair/correction step by utilizing a donor/template sequence that (e.g., a single-stranded donor oligonucleotides (ssODN), double-stranded Donor (PCR product), Minicircle or virus (rAAV or Lentivirus)). In some embodiments, the donor/template sequence comprises a sequence complimentary to a region extending from the position of the DSB to a pathogenic mutation. In such embodiments, the donor/template sequence further comprises homology arms flanking the site of the DSB and the pathogenic mutation.

[0335] In some embodiments, the donor/template sequence comprises a sequence complimentary to a region comprising an entire exon. In some embodiments, the exon containing the pathogenic mutation, or a portion thereof which contains the pathogenic mutation, is corrected or replaced to remove the pathogenic mutation.

[0336] In some embodiments, a mutant allele bearing a mutation and functional allele are targeted by guide sequences designed to target a sequences located in a non-coding region up to 50, 100, 200, 300, 400, 500, 600, 700, 800, 900, 1000, bases from an edge of a coding region bearing the pathogenic mutation. Each possibility represents a separate embodiment. Non-limiting examples of suitable guide sequences that associate with different sequences in a non-coding region of a GATA2 gene are indicated in Table 2.

[0337] In the present invention, a novel set of guide sequences have been identified for repairing/correcting/modifying a mutant allele of GATA2 gene to treat, ameliorate, or prevent MonoMAC syndrome.

TABLE 2
Guide sequences designed for use as described in the embodiments herein. Each engineered
guide molecule is further designed such as to associate with a target genomic DNA
sequence of interest that lies next to a protospacer adjacent motif (PAM).

| | SEQ ID NOs of | SEQ ID NOs of | SEQ ID NOs of |
|---|---|---|---|
| Target | 20 base guides | 21 base guides | 22 base guides |
| 3:128479475_T_C | 1-45 | 46-89 | 90-136 |
| 3:128479476_A_G | 1-2, 11, 21, 137-177 | 50, 54, 178-219 | 95, 119, 123, 220-264 |
| 3:128479846_C_A | 265-310 | 311-358 | 359-408 |
| 3:128479875_C_T | 409-454 | 455-502 | 503-552 |
| 3:128480135_T_A | 553-582 | 583-612 | 613-644 |
| 3:128480322_G_A | 645-690 | 691-738 | 739-788 |
| 3:128480449_G_A | 789-834 | 835-882 | 883-932 |
| 3:128480599_C_T | 933-978 | 979-1026 | 1027-1076 |
| 3:128480829_G_A | 1077-1122 | 1123-1170 | 1171-1220 |
| 3:128480845_C_T | 1221-1266 | 1267-1314 | 1315-1364 |
| 3:128480918_C_T | 1365-1410 | 1411-1448 | 1449-1494 |
| 3:128480935_T_C | 1495-1540 | 1541-1586 | 1587-1636 |
| 3:128480946_G_A | 1637-1682 | 1683-1730 | 1731-1780 |
| 3:128481039_T_A | 1781-1826 | 1827-1872 | 1873-1921 |
| 3:128481047_G_A | 1922-1967 | 1968-2015 | 2016-2065 |
| 3:128481055_G_T | 2066-2111 | 2112-2159 | 2160-2209 |
| 3:128481060_C_T | 2210-2255 | 2256-2303 | 2304-2353 |
| 3:128481071_C_A | 2354-2399 | 2400-2447 | 2448-2497 |
| 3:128481077_G_T | 2498-2543 | 2544-2591 | 2592-2641 |
| 3:128481090_G_A | 2642-2687 | 2688-2735 | 2736-2785 |
| 3:128481092_G_A | 2642, 2664, 2671, | 2710, 2719, 2724, | 2743, 2755, 2769, |
| | 2786-2828 | 2829-2873 | 2874-2920 |
| 3:128481095_G_A | 2803, 2921-2965 | 2845, 2966-3012 | 2915, 3013-3061 |
| 3:128481102_G_A | 3062-3107 | 3108-3155 | 3156-3205 |
| 3:128481115_G_T | 3206-3251 | 3252-3299 | 3300-3349 |
| 3:128481131_G_A | 3350-3395 | 3396-3443 | 3444-3493 |
| 3:128481136_G_A | 3494-3539 | 3540-3587 | 3588-3637 |
| 3:128481142_C_T | 3638-3683 | 3684-3731 | 3732-3781 |
| 3:128481147_G_A | 3782-3827 | 3828-3875 | 3876-3925 |
| 3:128481150_C_A | 3802, 3926-3970 | 3859,3971-4016 | 3881,4017-4065 |
| 3:128481162_C_G | 4066-4111 | 4112-4159 | 4160-4209 |
| 3:128481176_C_G | 4210-4255 | 4256-4303 | 4304-4353 |
| 3:128481180_A_T | 4354-4399 | 4400-4447 | 4448-4497 |
| 3:128481188_G_A | 4498-4543 | 4544-4591 | 4592-4641 |
| 3:128481189_A_G | 4512, 4514, 4524, | 4570, 4576, 4581, | 4614, 4626, 4628, |
| | 4534, 4538, 4642- | 4585, 4590, 4683-4725 | 4631, 4640, 4726-4770 |
| | 4682 | | |
| 3:128481199_C_T | 4771-4816 | 4817-4864 | 4865-4914 |
| 3:128481214_C_G | 4915-4960 | 4961-5008 | 5009-5058 |
| 3:128481219_C_T | 5059-5104 | 5105-5152 | 5153-5202 |
| 3:128481220_G_C | 5060, 5069, 5073, | 5111, 5116, 5131, | 5159, 5173, 5179, |
| | 5083, 5085, 5203- | 5133, 5147, 5244-5286 | 5181, 5197, 5287-5331 |
| | 5243 | | |
| 3:128481224_C_T | 5332-5377 | 5378-5425 | 5426-5475 |
| 3:128481226_C_A | 5334, 5338, 5356, | 5386, 5394, 5403, | 5428, 5435, 5459, |
| | 5476-5518 | 5519-5563 | 5564-5610 |
| 3:128481230_G_A | 5611-5656 | 5657-5704 | 5705-5754 |
| 3:128481230_G_T | 5617, 5628, 5632, | 5673, 5679, 5689, | 5711, 5722, 5746, |
| | 5642, 5650, 5652, | 5697, 5699, 5703-5704, | 5748, 5752-5754, 5835- |
| | 5656, 5755-5793 | 5794-5834 | 5877 |
| 3:128481232_C_A | 5617, 5650, 5652, | 5673, 5689,5697, | 5711,5722, 5752, |
| | 5878-5920 | 5921-5965 | 5966-6012 |
| 3:128481245_T_A | 6013-6058 | 6059-6106 | 6107-6156 |
| 3:128481262_C_T | 6157-6202 | 6203-6250 | 6251-6300 |
| 3:128481270_G_A | 6301-6346 | 6347-6394 | 6395-6444 |
| 3:128481275_C_T | 6445-6490 | 6491-6538 | 6539-6588 |
| 3:128481276_G_A | 6445, 6450, 6466, | 6491, 6512-6513,6531, | 6544, 6551, 6561-6562, |
| | 6486, 6490, 6589- | 6538, 6630-6672 | 6581, 6673-6717 |
| | 6629 | | |
| 3:128481283_G_C | 6718-6763 | 6764-6811 | 6812-6861 |
| 3:128481299_A_G | 6862-6907 | 6908-6955 | 6956-7005 |
| 3:128481302_G_T | 6880, 7006-7050 | 6947, 7051-7097 | 6976, 7098-7146 |
| 3:128481315_TAACC_T | 7147-7192 | 7193-7240 | 7241-7290 |
| 3:128481318_C_A | 7147, 7164, 7181, | 7206, 7209, 7211, | 7256, 7277-7279, 7377- |
| | 7189, 7291-7332 | 7229, 7333-7376 | 7422 |
| 3:128481819_A_G | 7423-7464 | 7465-7506 | 7507-7550 |
| 3:128481836_A_AGAGG | 7551-7604 | 7605-7660 | 7661-7718 |
| 3:128481841_C_T | 7552, 7560, 7564, | 7607, 7615, 7618, | 7662, 7675, 7687, |
| | 7575, 7604, 7719- | 7630, 7640, 7760-7802 | 7697, 7700, 7803-7847 |
| | 7759 | | |
| 3:128481845_A_G | 7848-7893 | 7894-7941 | 7942-7991 |
| 3:128481849_G_T | 7992-8037 | 8038-8085 | 8086-8135 |
| 3:128481866_CGTTGGCGTTTCG_C | 7867, 8136-8180 | 7914, 8181-8227 | 7963, 8228-8276 |
| 3:128481872_C_T | 8277-8322 | 8323-8370 | 8371-8420 |
| 3:128481877_C_T | 8137, 8146, 8163, | 8182, 8205, 8210, | 8235, 8253, 8258, |
| | 8421-8463 | 8464-8508 | 8509-8555 |
| 3:128481878_G_A | 8137, 8146, 8158, | 8182, 8188, 8205, | 8235, 8253, 8258, |
| | 8163, 8422, 8431, | 8210, 8465, 8488, | 8260, 8515, 8535, |
| | 8556-8595 | 8596-8637 | 8638-8681 |
| 3:128481880_C_A | 8158, 8163, 8561, | 8188, 8205, 8607, | 8235, 8260, 8640, |
| | 8682-8724 | 8725-8769 | 8770-8816 |
| 3:128481881_G_A | 8158, 8687, 8704, | 8188, 8730, 8732, | 8260, 8775, 8777, |
| | 8711-8712, 8817- | 8749, 8756, 8858-8900 | 8782-8783, 8901-8945 |
| | 8857 | | |
| 3:128481881_G_C | 8158, 8687, 8704, | 8188, 8730, 8732, | 8260, 8775, 8777, |
| | 8711-8712, 8823, | 8749, 8756, 8869, | 8782-8783, 8929, 8937, |
| | 8845, 8946-8984 | 8886, 8985-9025 | 9026-9068 |
| 3:128481887_A_C | 9069-9114 | 9115-9162 | 9163-9212 |
| 3:128481897_TGTCG_AAGGC | 9213-9258 | 9259-9306 | 9307-9356 |
| 3:128481898_G_T | 9228, 9248, 9357- | 9295, 9303, 9401-9446 | 9353, 9356, 9447-9494 |
| | 9400 | | |
| 3:128481901_G_A | 9372,9495-9539 | 9414, 9540-9586 | 9451,9587-9635 |
| 3:128481908_A_G | 9636-9681 | 9682-9729 | 9730-9779 |
| 3:128481923_T_TGCCGGCTCTTCTGGCG | 9780-9857 | 9858-9935 | 9936-10017 |
| 3:12848I924_G_A | 9787, 9791, 9841, | 9865, 9870, 9872, | 9945, 9950, 9952-9953, |
| | 9844, 10018-10059 | 9919, 10060-10103 | 10104-10149 |
| 3:128481926_C_T | 9787, 9791, 9793- | 9870, 9872-9873, 9921, | 9952-9953, 9968, |
| | 9794, 10056, 10150- | 10083, 10191-10233 | 10003, 10145, 10234- |
| | 10190 | | 10278 |
| 3:128481927_G_A | 9791, 9793-9794, | 9872-9873, 9888, 9921, | 9953, 9959, 9968, |
| | 9843, 10154, 10174, | 10216, 10228, 10319- | 10003, 10258, 10273, |
| | 10279-10318 | 10360 | 10361-10404 |
| 3:128481937_G_A | 9780, 9801, 9817, | 9866, 9880, 9892, | 9938, 9972, 9987, |
| | 9827, 9852, 10405- | 9905, 9930, 10446- | 9992, 10012, 10489- |
| | 10445 | 10488 | 10533 |
| 3:128481937_G_GCGGC | 9790, 9801, 9804, | 9860, 9880, 9882, | 9936, 9940, 9960, |
| | 9812, 9817, 9827- | 9884, 9892, 9896, | 9962, 9964, 9972, |
| | 9828, 9832, 9834, | 9905-9906, 9910, 9912, | 9977, 9987-9988, 9992, |
| | 9836, 9849, 9852, | 9914, 9930, 9935, | 9994, 9996, 10012, |
| | 9857, 10534-10564 | 10565-10585 | 10586-10614 |
| 3:128481938_C_A | 9780, 9782, 9801, | 9858, 9866, 9892, | 9938, 9946, 9962, |
| | 9812, 9827, 9852, | 9905, 9910, 9930, | 9972, 9992, 10012, |
| | 10410, 10615-10653 | 10447, 10654-10694 | 10495, 10695-10737 |
| 3:128481938_C_T | 9780, 9782, 9801, | 9858, 9866, 9892, | 9938, 9946, 9962, |
| | 9812, 9827, 9852, | 9905, 9910, 9930, | 9972, 9992, 10012, |
| | 10410, 10738-10776 | 10447, 10777-10817 | 10495, 10818-10860 |
| 3:128481939_GGCCG_AAGGC | 9780, 9782, 9790, | 9858, 9860, 9866, | 9936, 9938, 9946, |
| | 10861-10903 | 10904-10948 | 10949-10995 |
| 3:128481942_C_T | 9832, 10534-10535, | 9882, 10565-10566, | 9940, 10586, 10589, |
| | 10543, 10555, | 10568, 10575, 11037- | 10598, 10611, 11080- |
| | 10996-11036 | 11079 | 11124 |
| 3:128481945_C_A | 9798, 9825, 9850, | 9903, 9928, 11072, | 10010, 11095, 11212- |
| | 11014, 11125-11166 | 11167-11211 | 11259 |
| 3:128483288_G_A | 11260-11305 | 11306-11353 | 11354-11403 |
| 3:128483333_C_T | 11404-11449 | 11450-11497 | 11498-11547 |
| 3:128483347_C_T | 11548-11593 | 11594-11641 | 11642-11691 |
| 3:128483375_T_A | 11692-11703 | 11704-11713 | 11714-11727 |
| 3:128483868_G_A | 11728-11773 | 11774-11821 | 11822-11871 |
| 3:128483889_G_A | 11872-11917 | 11918-11965 | 11966-12015 |
| 3:128483905_CT_C | 12016-12061 | 12062-12109 | 12110-12159 |
| 3:128483906_T_C | 12016, 12021, | 12062, 12068, 12070, | 12110, 12114, 12116, |
| | 12023, 12038, | 12085-12086, 12091, | 12118, 12133, 12135, |
| | 12041, 12043, | 12095, 12104, 12106, | 12144, 12152, 12156, |
| | 12045, 12056, | 12197-12235 | 12236-12276 |
| | 12058, 12160-12196 | | |
| 3:128483925_C_CATTGCACAGGT | 12277-12341 | 12342-12407 | 12408-12475 |
| 3:128483957_C_T | 12331, 12334, | 12396-12397, 12400, | 12420, 12463-12464, |
| | 12476-12515 | 12516-12550 | 12551-12589 |
| 3:128483973_C_CTGTGGCCCCACAGT | 12590-12663 | 12664-12739 | 12740-12817 |
| 3:128484010_A_C | 12818-12863 | 12739, 12864-12910 | 12805, 12817, 12911- |
| | | | 12958 |
| 3:128485738_C_T | 12959-13004 | 13005-13052 | 13053-13102 |
| 3:128485741_G_A | 12976, 13103-13147 | 13023, 13148-13194 | 13058, 13195-13243 |
| 3:128485746_G_A | 13244-13289 | 13290-13337 | 13338-13387 |
| 3:128485750_C_T | 13388-13433 | 13434-13481 | 13482-13531 |
| 3:128485758_AG_A | 12976-12977, | 13024-13025, 13030, | 13074-13075, 13620- |
| | 12982, 13532-13574 | 13575-13619 | 13667 |
| 3:128485766_A_T | 13668-13713 | 13714-13759 | 13760-13808 |
| 3:128485769_T_C | 13705, 13809-13845 | 13758, 13846-13879 | 13777, 13880-13920 |
| 3:128485779_T_TC | 13921-13968 | 13969-14016 | 14017-14068 |
| 3:128485780_C_A | 13922, 13926- | 13970, 13974-13976, | 14022-14024, 14058- |
| | 13928, 13930, | 14002, 14008-14009, | 14059, 14065-14066, |
| | 13956-13957, | 14108-14148 | 14149-14191 |
| | 14069-14107 | | |
| 3:128485783_C_T | 13928, 14192-14236 | 14009, 14237-14283 | 14066, 14284-14332 |
| 3:128485789_A_C | 14333-14369 | 14370-14386 | 14387-14408 |
| 3:128485795_C_A | 14409-14454 | 14455-14501 | 14502-14551 |
| 3:128485798_G_A | 14418, 14552-14596 | 14456, 14597-14643 | 14546, 14644-14692 |
| 3:128485811_C_T | 14693-14738 | 14739-14786 | 14787-14836 |
| 3:128485819_T_TAGTCGTGGGC | 14837-14902 | 14903-14968 | 14969-15038 |
| 3:128485837_G_A | 15039-15084 | 15085-15132 | 15133-15182 |
| 3:128485837_G_C | 15045, 15048, | 15094, 15096-15097, | 15138, 15145-15146, |
| | 15050-15051, | 15110, 15115, 15125, | 15158, 15165, 15175, |
| | 15064, 15069, | 15129, 15222-15260 | 15179, 15261-15303 |
| | 15083, 15183-15221 | | |
| 3:128485843_T_C | 14858, 14883, | 14907, 14960, 15347- | 14974, 15018, 15025, |
| | 14894, 15304-15346 | 15386 | 15387-15433 |
| 3:128485850_G_A | 14845, 14867, | 14911, 14934, 14941, | 15002, 15009, 15012, |
| | 15434-15477 | 15478-15522 | 15523-15569 |
| 3:128485855_G_A | 15570-15615 | 15616-15663 | 15664-15713 |
| 3:128485869_G_C | 15714-15759 | 15760-15807 | 15808-15857 |
| 3:128485871_G_A | 15721, 15745, | 15767, 15790, 15802, | 15813, 15825, 15852, |
| | 15757, 15858-15900 | 15901-15945 | 15946-15992 |
| 3:128485874_T_C | 15872, 15993-16037 | 15903, 16038-16084 | 15985, 16085-16133 |
| 3:128485891_A_G | 16134-16179 | 16180-16227 | 16228-16277 |
| 3:128485892_T_C | 16147, 16153, | 16191, 16194, 16200, | 16238, 16240, 16243, |
| | 16169, 16176, | 16218, 16227, 16319- | 16262, 16267, 16362- |
| | 16179, 16278-16318 | 16361 | 16406 |
| 3:128485892_T_G | 16147, 16153, | 16191, 16194, 16200, | 16238, 16240, 16243, |
| | 16169, 16176, | 16218, 16227, 16333, | 16262, 16267, 16400, |
| | 16179, 16292, | 16353, 16446-16486 | 16406, 16487-16529 |
| | 16317, 16407-16445 | | |
| 3:128485909_C_T | 16530-16575 | 16576-16623 | 16624-16673 |
| 3:128485910_G_A | 16538, 16542- | 16578, 16585, 16590, | 16625, 16627, 16648, |
| | 16543, 16552, | 16599, 16602, 16715- | 16651, 16670, 16758- |
| | 16573, 16674-16714 | 16757 | 16802 |
| 3:128485916_G_T | 16803-16848 | 16849-16896 | 16897-16946 |
| 3:128485924_C_T | 16947-16992 | 16993-17038 | 17039-17087 |
| 3:128485929_C_T | 17088-17133 | 17134-17181 | 17182-17231 |
| 3:128485937_T_G | 17232-17277 | 17278-17325 | 17326-17375 |
| 3:128485944_C_CGTCAG | 17376-17431 | 17432-17489 | 17490-17549 |
| 3:128485944_C_T | 17376, 17387, | 17443, 17454, 17469, | 17512, 17522, 17528, |
| | 17412, 17419, | 17476, 17592-17635 | 17535, 17636-17681 |
| | 17550-17591 | | |
| 3:128485962_C_A | 17682-17727 | 17728-17775 | 17776-17825 |
| 3:128485966_A_ACGC | 17384, 17391, | 17440, 17447, 17479, | 17505, 17531, 17538, |
| | 17416, 17709, | 17738, 17762, 17873- | 17786, 17807, 17922- |
| | 17714, 17826-17872 | 17921 | 17972 |
| 3:128485967_C_G | 17391, 17415, | 17456, 17472, 17479, | 17514, 17531, 17931, |
| | 17422, 17841- | 17888-17889, 17893, | 17938-17939, 17957, |
| | 17842, 17846, | 17907, 18012-18052 | 18053-18096 |
| | 17858,17973-18011 | | |
| 3:128485970_C_T | 17384, 17416, | 17440, 17447, 17473, | 17498, 17505, 17538, |
| | 17835, 17841, | 17882, 17887, 17907, | 17931, 17937, 17956, |
| | 17859, 18097-18137 | 18138-18179 | 18180-18223 |
| 3:128485973_C_T | 18110, 18224-18268 | 18167, 18269-18315 | 17532, 18220, 18316- |
| | | | 18363 |
| 3:128485982_C_G | 18364-18409 | 18410-18457 | 18458-18507 |
| 3:128485998_A_AC | 18508-18555 | 18556-18605 | 18606-18657 |
| 3:128485999_C_T | 18511, 18514, | 18562, 18564, 18575, | 18614, 18625, 18642, |
| | 18516, 18521, | 18592, 18596, 18599, | 18646, 18651, 18655, |
| | 18543, 18547, | 18604, 18697-18737 | 18657, 18738-18780 |
| | 18550, 18658-18696 | | |
| 3:128486002_C_A | 18547, 18781-18825 | 18575, 18826-18872 | 18651, 18873-18921 |
| 3:128486004_C_CGCGGAAGA | 18801, 18814, | 18845, 18860, 18868, | 18892, 18904, 18909, |
| | 18821, 18922-18980 | 18981-19037 | 19038-19100 |
| 3:128486005_G_A | 18814, 18949, | 18845, 19010, 19020, | 18904, 19071, 19083, |
| | 18964, 18979, | 19036, 19143-19186 | 19099, 19187-19232 |
| | 19101-19142 | | |
| 3:128486006_C_T | 18949, 18953, | 19010, 19020, 19022, | 19071, 19083, 19087, |
| | 18964, 18979, | 19036, 19160, 19181, | 19099, 19211, 19226, |
| | 19118, 19124, | 19273-19314 | 19315-19358 |
| | 19233-19272 | | |
| 3:128486023_G_A | 19359-19404 | 19405-19452 | 18615, 19453-19501 |
| 3:128486030_C_T | 18922, 18926, | 18981, 19011, 19023, | 19064, 19073, 19084, |
| | 18955, 19502-19544 | 19545-19589 | 19590-19636 |
| 3:128486031_C_A | 18922, 18926, | 18981, 18986, 19011, | 19038, 19073, 19084, |
| | 18957, 19517, | 19565, 19585-19586, | 19611, 19629, 19633, |
| | 19521, 19541, | 19677-19718 | 19719-19762 |
| | 19637-19676 | | |
| 3:128486038_G_C | 19763-19808 | 19809-19856 | 19857-19906 |
| 3:128486057_C_T | 19907-19952 | 19953-20000 | 20001-20050 |
| 3:128486059_T_G | 19931, 19943, | 19996, 19998-19999, | 20031, 20043, 20049, |
| | 19949, 20051-20093 | 20094-20138 | 20139-20185 |
| 3:128486066_G_A | 20186-20231 | 20232-20279 | 20280-20329 |
| 3:128486072_T_G | 20330-20375 | 20376-20419 | 20420-20467 |
| 3:128486075_G_A | 20341, 20468-20512 | 20408, 20513-20559 | 20439, 20560-20608 |
| 3:128486103_G_T | 20609-20654 | 20655-20702 | 20703-20752 |
| 3:128486104_T_A | 20632-20633, | 20666, 20679, 20686, | 20705, 20714, 20731, |
| | 20635, 20645, | 20693, 20700, 20794- | 20735, 20750, 20837- |
| | 20652, 20753-20793 | 20836 | 20881 |
| 3:128486117_G_A | 20882-20927 | 20928-20975 | 20976-21025 |
| 3:128486129_C_A | 21026-21071 | 21072-21119 | 21120-21169 |
| 3:128486141_C_T | 21170-21214 | 21215-21256 | 21257-21302 |
| 3:128486142_G_T | 21190, 21206- | 21250, 21254, 21343- | 21294, 21296, 21383- |
| | 21207, 21212, | 21382 | 21426 |
| | 21303-21342 | | |
| 3:128486143_C_T | 21190, 21206, | 21254, 21363, 21468- | 21296, 21425, 21508- |
| | 21309, 21427-21467 | 21507 | 21551 |
| 3:128486153_C_T | 21552-21597 | 21598-21633 | 21634-21678 |
| 3:128486173_G_A | 21679-21722 | 21723-21767 | 21768-21814 |
| 3:128486179_A_G | 21815-21860 | 21861-21908 | 21909-21958 |
| 3:128486185_A_G | 21959-22004 | 22005-22050 | 22051-22100 |
| 3:128486189_G_A | 22101-22146 | 22147-22194 | 22195-22244 |
| 3:128486201_C_T | 22245-22290 | 22291-22338 | 22339-22388 |
| 3:128486218_T_C | 22389-22434 | 22435-22482 | 22483-22532 |
| 3:128486227_G_T | 22533-22578 | 22579-22626 | 22627-22676 |
| 3:128486240_G_A | 22677-22722 | 22723-22770 | 22771-22820 |
| 3:128486252_A_AG | 22821-22868 | 22869-22918 | 22919-22970 |
| 3:128486260_T_C | 22971-23012 | 23013-23051 | 23052-23095 |
| 3:128486271_C_T | 23096-23141 | 23142-23189 | 23190-23239 |
| 3:128486284_A_AGG | 23240-23289 | 23290-23341 | 23342-23395 |
| 3:128486287_G_A | 23273, 23279, | 23312, 23330, 23336- | 23359, 23365, 23389, |
| | 23286, 23288- | 23337, 23339, 23437- | 23393, 23395, 23480- |
| | 23289, 23396-23436 | 23479 | 23524 |
| 3:128486288_C_A | 23279, 23288- | 23312, 23337, 23339, | 23359, 23365, 23389, |
| | 23289, 23415, | 23452, 23479, 23566- | 23494, 23522, 23608- |
| | 23432, 23525-23565 | 23607 | 23652 |
| 3:128486295_GC_G | 23244, 23283, | 23697-23744 | 23209, 23745-23793 |
| | 23653-23696 | | |
| 3:128486296_C_T | 23655, 23661, | 23700, 23703, 23708, | 23748, 23751, 23753, |
| | 23674, 23685- | 23721,23733-23735, | 23758, 23767, 23782- |
| | 23687, 23696, | 23833-23873 | 23783, 23874-23916 |
| | 23794-23832 | | |
| 3:128486298_CC_AA | 23661, 23671, | 23706, 23708, 23721, | 23748, 23753, 23756, |
| | 23680, 23685, | 23727, 23959-24002 | 23770, 24003-24048 |
| | 23917-23958 | | |
| 3:128486320_G_T | 24049-24094 | 24095-24142 | 24143-24192 |
| 3:128486355_T_GC | 24193-24233 | 24234-24264 | 24265-24300 |
| 3:128486356_C_G | 24215, 24222- | 24236, 24247, 24250, | 24265, 24269, 24281, |
| | 24224, 24227, | 24257-24258,24261- | 24284, 24291-24292, |
| | 24230-24233, | 24264, 24335-24358 | 24294, 24298-24300, |
| | 24301-24334 | | 24359-24386 |
| 3:128486365_C_CG | 24387-24426 | 24427-24456 | 24457-24492 |
| 3:128486805_T_C | 24493-24534 | 24535-24556 | 24557-24590 |
| 3:128486808_G_C | 24525, 24591-24635 | 24543, 24636-24682 | 24579, 24683-24731 |
| 3:128486826_C_T | 24732-24769 | 24770-24801 | 24802-24837 |
| 3:128486828_C_A | 24732, 24737, | 24800, 24873-24902 | 24833, 24903-24939 |
| | 24753, 24838-24872 | | |
| 3:128486850_G_A | 24940-24984 | 24985-25029 | 25030-25076 |
| 3:128486856_T_C | 25077-25122 | 25123-25170 | 25171-25220 |
| 3:128486872_A_C | 25221-25266 | 25267-25314 | 25315-25364 |
| 3:128486883_T_C | 25365-25410 | 25411-25458 | 25459-25508 |
| 3:128486890_A_T | 25509-25554 | 25555-25602 | 25603-25652 |
| 3:128486893_C_T | 25551, 25653-25697 | 25574, 25698-25744 | 25635, 25745-25793 |
| 3:128486896_C_T | 25694, 25794-25838 | 25718, 25839-25885 | 25778, 25886-25934 |
| 3:128486911_G_C | 25935-25980 | 25981-26028 | 26029-26078 |
| 3:128486931_A_G | 26079-26124 | 26125-26172 | 26173-26222 |
| 3:128486948_G_A | 26223-26268 | 26269-26316 | 26317-26366 |
| 3:128486956_G_T | 26367-26412 | 26413-26460 | 26461-26510 |
| 3:128486961_G_GACA | 26511-26562 | 26563-26615 | 26616-26671 |
| 3:128486967_G_C | 26532, 26672-26716 | 26580, 26717-26763 | 26648, 26764-26812 |
| 3:128486970_T_A | 26701, 26813-26857 | 26733, 26858-26904 | 26776, 26905-26953 |
| 3:128486973_T_G | 26819, 26954-26998 | 26859, 26999-27045 | 26912, 27046-27094 |
| 3:128486982_A_T | 27095-27140 | 27141-27186 | 27187-27235 |
| 3:128486992_G_A | 27236-27281 | 27282-27329 | 27330-27379 |
| 3:128487002_C_A | 27380-27421 | 27422-27463 | 27464-27507 |
| 3:128487004_A_G | 27382, 27508-27525 | 27428, 27526 | 27504, 27527-27530 |
| 3:128487009_G_T | 27531-27576 | 27577-27613 | 27614-27657 |
| 3:128487016_CG_GC | 27658-27691 | 27692-27715 | 27716-27743 |
| 3:128487016_C_T | 27666, 27668- | 27707, 27711-27712, | 27738-27740, 27817- |
| | 27669, 27679- | 27784-27816 | 27855 |
| | 27680, 27688, | | |
| | 27744-27783 | | |
| 3:128487021_G_T | 27856-27900 | 27901-27936 | 27937-27978 |
| 3:128487036_G_A | 27979-28016 | 28017-28041 | 28042-28075 |
| 3:128487073_G_C | 28076-28121 | 28122-28163 | 28164-28211 |
| 3:128492886_G_A | 28212-28257 | 28258-28305 | 28306-28355 |
| 3:128492959_A_C | 28356-28383 | 28384-28407 | 28408-28433 |
| 3:128493033_G_T | 28434-28473 | 28474-28506 | 28507-28544 |
| 3:128493046_G_A | 28545-28582 | 28583-28616 | 28617-28653 |
| 3:128493068_G_A | 28654-28699 | 28700-28747 | 28748-28797 |
| 3:128480819_G_A | 1078, 1085, 1094, | 1124, 1131, 1136, | 1179, 1184, 1186, |
| rs10934857 REF | 28798-28840 | 28841-28885 | 28886-28932 |
| 3:128480819_G_A | 28803, 28805- | 28846, 28848, 28852, | 28892, 28898, 28909, |
| rs10934857 SNP | 28806, 28809, | 28868-28869, 28872, | 28914, 28918, 28929- |
| | 28825-28826, | 28883, 28972-29012 | 28930, 29013-29055 |
| | 28832, 28933-28971 | | |
| 3:128481616_T_C | 29056-29101 | 29102-29149 | 29150-29199 |
| rs2713604 REF | | | |
| 3:128481616_T_C | 29063-29064, | 29104, 29110-29111, | 29152, 29158-29159, |
| rs2713604 SNP | 29069, 29078, | 29125, 29131-29132, | 29179, 29182, 29185, |
| | 29084, 29086, | 29134, 29239-29279 | 29191, 29280-29322 |
| | 29100, 29200-29238 | | |
| 3:128481691_G_A | 29323-29368 | 29369-29416 | 29417-29466 |
| rs2713603 REF | | | |
| 3:128481691_G_A | 29324, 29340, | 29382, 29387, 29390, | 29426, 29431, 29450, |
| rs2713603 SNP | 29343, 29354, | 29401, 29404, 29408, | 29453, 29457, 29463, |
| | 29357, 29361, | 29414, 29506-29546 | 29466, 29547-29589 |
| | 29367, 29467-29505 | | |
| 3:128481963_G_A | 10534, 10539, | 10565, 10571, 10575, | 9940, 9994, 10593, |
| rs11708606 REF | 11014, 11142, | 10577, 11072, 11185, | 10598, 10600, 10611, |
| | 11153, 11161, | 11197, 11208, 29630- | 11095, 11231, 11243, |
| | 29590-29629 | 29669 | 11256, 29670-29709 |
| 3:128481963_G_A | 10539, 29602, | 10571, 10577, 29642, | 9994, 10593, 10600, |
| rs11708606 SNP | 29604, 29607, | 29644, 29654, 29659, | 29693, 29698, 29702, |
| | 29614, 29619, | 29663, 29749-29789 | 29709, 29790-29832 |
| | 29625, 29710-29748 | | |
| 3:128482170_A_C | 29833-29878 | 29879-29926 | 29927-29976 |
| rsll717152 REF | | | |
| 3:128482170_A_C | 29839, 29850- | 29882, 29898, 29901, | 29927, 29931, 29947, |
| rs11717152 SNP | 29851, 29862, | 29910, 29914, 29917, | 29950, 29959, 29967, |
| | 29866, 29869, | 29922, 30016-30056 | 29972, 30057-30099 |
| | 29874, 29977-30015 | | |
| 3:128484163_G_T | 30100-30145 | 30146-30193 | 30194-30243 |
| rs2659689 REF | | | |
| 3:128484163_G_T | 30105, 30109, | 30147, 30152, 30156, | 30194, 30196, 30205, |
| rs2659689 SNP | 30114, 30116, | 30161-30162, 30164, | 30210-30212,30214, |
| | 30120, 30131, | 30168, 30283-30323 | 30324-30366 |
| | 30140, 30244-30282 | | |
| 3:128484192_A_G | 30367-30412 | 30413-30460 | 30461-30510 |
| rs2713602 REF | | | |
| 3:128484192_A_G | 30385, 30394, | 30431, 30444, 30449, | 30471, 30498-30499, |
| rs2713602 SNP | 30398, 30404- | 30452, 30455, 30458, | 30502, 30505, 30508, |
| | 30405, 30408, | 30460, 30550-30590 | 30510, 30591-30633 |
| | 30411, 30511-30549 | | |
| 3:128486108_C_T | 20632, 20635, | 20679, 20682, 20686, | 20727, 20731, 20735, |
| rs2335052 REF | 20638, 20652, | 20700, 20817, 20931, | 20750, 20874, 20999, |
| | 20778, 20885, | 20950, 20959, 21084, | 21008, 21012, 21143, |
| | 20904, 20908, | 21094, 21101, 30670- | 21150, 21154, 30707- |
| | 21038, 21048, | 30706 | 30745 |
| | 30634-30669 | | |
| 3:128486108_C_T | 30634-30636, | 30670-30671, 30690, | 30707, 30717,30728, |
| rs2335052 SNP | 30652, 30656, | 30694-30695, 30699, | 30732, 30736, 30738, |
| | 30658, 30667, | 30704, 30785-30825 | 30743, 30826-30868 |
| | 30746-30784 | | |
| 3:128486676_G_A | 30869-30914 | 30915-30962 | 30963-31012 |
| rs4577488 REF | | | |
| 3:128486676_G_A | 30875, 30882, | 30918, 30922, 30931, | 30966, 30970, 30982, |
| rs4577488 SNP | 30884, 30894, | 30934, 30944, 30950, | 30990, 30999, 31005- |
| | 30896, 30902, | 30956, 31052-31092 | 31006, 31093-31135 |
| | 30908, 31013-31051 | | |
| 3:128487017_G_C | 27511, 27536, | 27582, 27586, 27588, | 27620, 27625, 27627, |
| rs1573858 REF | 27541, 27564, | 27612, 27707, 27712, | 27642, 27739-27740, |
| | 27575, 27666, | 27903, 27905, 27907, | 27942, 27944, 27959, |
| | 27668-27669, | 28030, 28036, 28040, | 28061, 28068, 28075, |
| | 27679-27680, | 31153-31162 | 31163-31176 |
| | 27759, 27858, | | |
| | 27861, 27896, | | |
| | 28000, 28002, | | |
| | 28014, 31136-31152 | | |
| 3:128487017_G_C | 27666, 27668- | 27707,27712, 31155, | 27739-27740, 31171, |
| rs1573858 SNP | 27670, 27679- | 31203-31221 | 31222-31244 |
| | 27680, 31140, | | |
| | 31144, 31177-31202 | | |
| 3′ UTR | 796, 801-802, 813, | 842, 847, 849, 853, | 886, 891, 896, 898, |
| 3:128480417-128480717 | 818, 820, 822, 935, | 861, 866, 870, 986, | 903, 911, 916, 1036- |
| | 940, 942, 944, 949, | 988-989, 991, 996-997, | 1038, 1040-1041, 1047, |
| | 965, 968, 31245- | 1016, 31741-32218 | 1066, 32219-32705 |
| | 31740 | | |
| Intron 1 | 27511, 27536, | 27582, 27586, 27588, | 27620, 27625, 27627, |
| 3:128487000-128487300 | 27541, 27564, | 27612, 27903, 27905, | 27642, 27942, 27944, |
| | 27575, 27666, | 27907, 28017, 28030, | 27959, 28042, 28048, |
| | 27668-27669, | 28036, 28040, 28125, | 28061, 28068, 28075, |
| | 27679, 27759, | 28128, 28130, 28138, | 28167, 28170, 28172, |
| | 27858, 27861, | 28151, 28153, 28157, | 28175, 28185, 28198, |
| | 27865, 27868, | 31155-31162, 33186- | 28204, 31163, 31166- |
| | 27880, 27896, | 33617 | 31169, 31172-31176, |
| | 27981, 27986, | | 33618-34070 |
| | 27990-27991, | | |
| | 28000, 28002, | | |
| | 28014, 28079, | | |
| | 28085, 28096, | | |
| | 28109, 28111, | | |
| | 28113, 28115, | | |
| | 31136-31138, | | |
| | 31140-31152, | | |
| | 32706-33185 | | |
| Intron 2 | 34071-34634 | 34635-35192 | 35193-35750 |
| 3:128486500-128486800 | | | |
| Intron 2 | 30869-30914, | 30915-30962, 34635- | 30963-31012, 35193- |
| 3:128486375-128486675 | 34071-34072, | 34636, 34640, 34642- | 35194, 35198, 35200- |
| | 34077, 34079- | 34644, 34648-34657, | 35202, 35207-35216, |
| | 34081, 34086- | 34659, 34661-34666, | 35218, 35220-35225, |
| | 34095, 34097, | 34669-34674, 34677- | 35228-35233, 35236- |
| | 34099-34104, | 34679, 34684, 34686- | 35238, 35243, 35245- |
| | 34107-34112, | 34689, 34693, 34695- | 35248, 35252, 35254- |
| | 34115-34117, | 34696, 34702, 34705, | 35255, 35261, 35264, |
| | 34122, 34124- | 34708, 34711-34717, | 35267, 35270-35276, |
| | 34127, 34131, | 34720-34721, 34726- | 35279-35280, 35285- |
| | 34133-34134, | 34727, 34729-34731, | 35286, 35288-35290, |
| | 34140, 34143, | 34733, 34735-34740, | 35292, 35294-35299, |
| | 34146, 34149- | 34742, 34746, 34750- | 35301, 35308-35309, |
| | 34155, 34158- | 34751, 34754-34756, | 35312, 35314-35315, |
| | 34159, 34164- | 34758, 34761-34763, | 35317, 35320-35322, |
| | 34165, 34167- | 34765-34766, 34768- | 35324-35325, 35327- |
| | 34169, 34171, | 34769, 34771-34774, | 35328, 35330-35333, |
| | 34173-34178, | 34778-34779, 34782- | 35337-35338, 35341- |
| | 34180, 34184, | 34788, 34792, 34794- | 35347, 35351, 35353- |
| | 34188-34189, | 34796, 34798, 34801- | 35355, 35357, 35360- |
| | 34192, 34194- | 34803, 34805-34808, | 35362, 35364-35367, |
| | 34195, 34197, | 34811, 34813-34814, | 35370, 35372-35373, |
| | 34200-34202, | 34816-34817, 34819- | 35375-35376, 35378- |
| | 34204-34205, | 34821, 34823, 34825- | 35380, 35382, 35384- |
| | 34207-34208, | 34827, 34830, 34832, | 35386, 35389, 35391, |
| | 34210-34213, | 34834, 34838-34842, | 35393, 35397-35401, |
| | 34217-34218, | 34844-34845, 34848, | 35403-35404, 35407, |
| | 34221-34227, | 34850, 34854-34859, | 35409, 35412-35417, |
| | 34231, 34233- | 34861, 34863-34864, | 35419, 35421-35422, |
| | 34235, 34237, | 34866, 34868, 34871, | 35424, 35426, 35429, |
| | 34240-34242, | 34875, 34877, 34880, | 35433, 35435, 35438, |
| | 34244-34247, | 34882, 34884, 34886, | 35440, 35442, 35444, |
| | 34250, 34252- | 34888, 34891-34892, | 35446, 35449-35450, |
| | 34253, 34255- | 34894, 34897, 34899- | 35452, 35455, 35457- |
| | 34256, 34258- | 34906, 34910-34911, | 35464, 35468-35469, |
| | 34260, 34262, | 34915-34921, 34923- | 35473-35479, 35481- |
| | 34264-34266, | 34924, 34926-34928, | 35482, 35484-35486, |
| | 34269, 34271, | 34931, 34936, 34938, | 35489, 35494, 35496, |
| | 34273, 34277- | 34942-34944, 34952- | 35500-35502, 35510- |
| | 34281, 34283- | 34953, 34955, 34958, | 35511, 35513, 35516, |
| | 34284, 34287, | 34960-34961, 34963, | 35518-35519, 35521, |
| | 34289, 34293- | 34965, 34967, 34969- | 35523, 35525, 35527- |
| | 34298, 34300, | 34970, 34975-34977, | 35528, 35533-35535, |
| | 34302-34303, | 34979, 34981-34987, | 35537, 35539-35545, |
| | 34305, 34307, | 34989-34991, 34993, | 35547-35549, 35551, |
| | 34310, 34314, | 34998, 35001-35004, | 35556, 35559-35562, |
| | 34316, 34319, | 35007-35008, 35010- | 35565-35566, 35568- |
| | 34321, 34323, | 35011, 35013, 35017, | 35569, 35571, 35575, |
| | 34326, 34328, | 35021, 35025, 35028- | 35579, 35583, 35586- |
| | 34331-34332, | 35030, 35032-35035, | 35588, 35590-35593, |
| | 34334, 34337, | 35038-35041, 35044- | 35596-35599, 35602- |
| | 34339-34346, | 35046, 35048-35049, | 35604, 35606-35607, |
| | 34350-34351, | 35051, 35054, 35056- | 35609, 35612, 35614- |
| | 34355-34361, | 35057, 35059-35060, | 35615, 35617-35618, |
| | 34363-34364, | 35062, 35064-35065, | 35620, 35622-35623, |
| | 34366-34368, | 35067-35069, 35072- | 35625-35627, 35630- |
| | 34371, 34376, | 35075, 35077, 35079- | 35633, 35635, 35637- |
| | 34378, 34382- | 35083, 35086, 35090- | 35641, 35644, 35648- |
| | 34384, 34392- | 35091, 35093, 35095, | 35649, 35651, 35653, |
| | 34393, 34395, | 35097-35098, 35102, | 35655-35656, 35660, |
| | 34398, 34400- | 35104-35105, 35107, | 35662-35663, 35665, |
| | 34401, 34403, | 35109, 35112-35116, | 35667, 35670-35674, |
| | 34405, 34407, | 35118, 35121, 35124, | 35676, 35679, 35682, |
| | 34409-34410, | 35127, 35130, 35132, | 35685, 35688, 35690, |
| | 34415-34417, | 35135, 35138-35139, | 35693, 35696-35697, |
| | 34419, 34421- | 35141, 35144-35147, | 35699, 35702-35705, |
| | 34427, 34429- | 35149-35150, 35152, | 35707-35708, 35710, |
| | 34431, 34433, | 35155, 35157-35158, | 35713, 35715-35716, |
| | 34438, 34441- | 35160, 35162-35164, | 35718, 35720-35722, |
| | 34444, 34447- | 35166-35167, 35169, | 35724-35725, 35729- |
| | 34448, 34450- | 35171-35177, 35179, | 35735, 35737, 35742, |
| | 34451, 34453, | 35184, 35186-35187, | 35744-35745, 35747, |
| | 34457, 34461, | 35189, 35927-36080 | 36081-36240 |
| | 34465, 34468- | | |
| | 34470, 34472- | | |
| | 34475, 34478- | | |
| | 34481, 34484- | | |
| | 34486, 34488- | | |
| | 34489, 34491, | | |
| | 34494, 34496- | | |
| | 34497, 34499- | | |
| | 34500, 34502, | | |
| | 34504-34505, | | |
| | 34507-34509, | | |
| | 34512-34515, | | |
| | 34517, 34519- | | |
| | 34523, 34525- | | |
| | 34526, 34530- | | |
| | 34531, 34533, | | |
| | 34536, 34538- | | |
| | 34539, 34543, | | |
| | 34545-34546, | | |
| | 34548, 34550, | | |
| | 34553-34558, | | |
| | 34560, 34563, | | |
| | 34566, 34569, | | |
| | 34572, 34574, | | |
| | 34577, 34580- | | |
| | 34581, 34583, | | |
| | 34586-34589, | | |
| | 34591-34592, | | |
| | 34594, 34597, | | |
| | 34599-34600, | | |
| | 34602, 34604- | | |
| | 34606, 34608- | | |
| | 34609, 34611, | | |
| | 34613-34619, | | |
| | 34621, 34626, | | |
| | 34628-34629, | | |
| | 34631, 35751-35926 | | |
| Intron 3 | 30100-30145, | 30146-30193, 30413- | 30194-30243, 30461- |
| 3:128485421-128485721 | 30367-30412, | 30460, 36695-37130 | 30510, 37131-37564 |
| | 36241-36694 | | |
| Intron 3 | 37565-38118 | 38119-38662 | 38663-39208 |
| 3:128484028-128484328 | | | |
| Intron 4 | 11153, 29590, | 11208, 29630, 29632- | 11231, 29670, 29672- |
| 3:128483533-128483833 | 29592-29601, | 29641, 29643-29646, | 29681, 29683-29685, |
| | 29603-29606, | 29648-29669, 29879- | 29687-29709, 29927- |
| | 29608-29629, | 29926, 39659-40078 | 29976, 40079-40512 |
| | 29833-29878, | | |
| | 39209-39658 | | |
| Intron 4 | 40513-41026 | 41027-41508 | 41509-42002 |
| 3:128481949-128482249 | | | |
| Intron 5 | 7147, 7160, 7164, | 7206, 7211, 7227, | 7255-7256, 7277, 7279, |
| 3:128481516-128481816 | 7181, 29062-29063, | 7229, 29104, 29110, | 29152, 29158, 29169, |
| | 29069, 29074, | 29116, 29121, 29129, | 29177, 29180, 29184, |
| | 29082, 29084, | 29132, 29136, 29146, | 29191, 29196, 43047- |
| | 29088, 29098, | 42527-43046 | 43562 |
| | 42003-42526 | | |
| Intron 5 | 29056-29101, | 29102-29149, 29369- | 29150-29199, 29417- |
| 3:128481320-128481620 | 29323-29368, | 29416, 42527, 42538, | 29466, 43057, 43063, |
| | 42003-42004, | 42544, 42556-42559, | 43075-43078, 43083, |
| | 42010, 42016, | 42564, 42566, 42568, | 43085, 43087, 43095- |
| | 42022, 42034- | 42576-42577, 42591, | 43096, 43110, 43113, |
| | 42037, 42042, | 42594, 42603-42604, | 43122-43123, 43125, |
| | 42044, 42046, | 42606, 42615-42616, | 43134-43135, 43150, |
| | 42054-42055, | 42631, 42636-42638, | 43155-43157, 43159, |
| | 42069, 42072, | 42640, 42647-42648, | 43166-43167, 43176, |
| | 42081-42082, | 42657, 42659, 42666- | 43178, 43185-43186, |
| | 42084, 42093- | 42667, 42670, 42674- | 43189, 43193-43194, |
| | 42094, 42109, | 42675, 42681-42682, | 43200-43201, 43214- |
| | 42114-42116, | 42695-42697, 42701, | 43216, 43220, 43222- |
| | 42118, 42125- | 42703-42704, 42710, | 43223, 43229, 43231- |
| | 42126, 42135, | 42712-42713, 42715, | 43232, 43234, 43236, |
| | 42137, 42144- | 42717, 42724, 42727, | 43243, 43246, 43249, |
| | 42145, 42148- | 42730, 42736, 42738, | 43255, 43257, 43264, |
| | 42149, 42153- | 42745, 42749, 42754, | 43268, 43273-43275, |
| | 42154, 42160- | 42756-42757, 42760, | 43278, 43280-43281, |
| | 42161, 42174- | 42762-42763, 42765, | 43283, 43287, 43289, |
| | 42176, 42180, | 42769, 42771, 42774, | 43292, 43296-43297, |
| | 42182-42183, | 42778-42779, 42785, | 43303, 43310, 43317, |
| | 42189, 42191- | 42792, 42799, 42803, | 43321, 43325, 43336, |
| | 42192, 42194, | 42807, 42818, 42821, | 43339, 43341-43342, |
| | 42196, 42203, | 42823-42825, 42828, | 43345, 43350-43351, |
| | 42206, 42209, | 42833-42834, 42842, | 43359, 43362, 43366- |
| | 42215, 42217, | 42845, 42849-42850, | 43367, 43369, 43376, |
| | 42224, 42228, | 42852, 42859, 42866, | 43383, 43386, 43392, |
| | 42233, 42235- | 42869, 42875, 42877, | 43394, 43400, 43402, |
| | 42236, 42239, | 42883, 42885, 42887, | 43404, 43408, 43412, |
| | 42241-42242, | 42891, 42895, 42899, | 43416, 43418-43419, |
| | 42244, 42248, | 42901-42902, 42917, | 43434, 43437, 43447, |
| | 42250, 42253, | 42920, 42930, 42934, | 43453, 43458-43459, |
| | 42257-42258, | 42936, 42941-42942, | 43461, 43465, 43475, |
| | 42264, 42271, | 42944-42945, 42949, | 43483, 43491-43493, |
| | 42278, 42282, | 42959, 42967, 42975- | 43499, 43504-43506, |
| | 42286, 42297, | 42977, 42983, 42988- | 43509, 43511-43512, |
| | 42300, 42302- | 42990, 42993, 42995- | 43517, 43521-43522, |
| | 42304, 42307, | 42996, 43001, 43005- | 43528, 43534, 43539- |
| | 42312-42313, | 43006, 43012, 43018, | 43540, 43542, 43551, |
| | 42321, 42324, | 43023-43024, 43026, | 43555, 43557, 43559- |
| | 42328-42329, | 43035, 43039, 43041, | 43560, 43562, 44091- |
| | 42331, 42338, | 43043-43044, 43046, | 44348 |
| | 42345, 42348, | 43831-44090 | |
| | 42354, 42356, | | |
| | 42362, 42364, | | |
| | 42366, 42370, | | |
| | 42374, 42378, | | |
| | 42380-42381, | | |
| | 42396, 42399, | | |
| | 42409, 42413, | | |
| | 42415, 42420- | | |
| | 42421, 42423- | | |
| | 42424, 42428, | | |
| | 42438, 42446, | | |
| | 42454, 42456- | | |
| | 42457, 42463, | | |
| | 42468-42470, | | |
| | 42473, 42475- | | |
| | 42476, 42481, | | |
| | 42485-42486, | | |
| | 42491-42492, | | |
| | 42498, 42503- | | |
| | 42504, 42506, | | |
| | 42515, 42519, | | |
| | 42521, 42523- | | |
| | 42524, 42526, | | |
| | 43563-43830 | | |

[0338] The SNP ID NOs indicated in Table 2 are based on NCBI's 2018 database of Single Nucleotide Polymorphisms (dbSNP). For variants/mutations with no available rs number, variant/mutation characteristics are indicated based on gnomAD v3 database and UCSC Genome Browser assembly ID: hg38, sequencing/assembly provider ID: Genome reference consortium Human GRCh38.p12(GCA_00001405.27) Assembly date December 2013 initial release December 2017 patch release 12. The introns, exons, and other transcript regions indicated in Table 2 correspond to the GATA2 transcript consequence NM_032638.

[0339] For the foregoing embodiments, each embodiment disclosed herein is contemplated as being applicable to each of the other disclosed embodiments. For example, it is understood that any of the RNA molecules or compositions of the present invention may be utilized in any of the methods of the present invention.

### EXPERIMENTAL DETAILS

### Example 1: GATA2 Correction Analysis

[0340] Guide sequences comprising 17-25 contiguous nucleotides containing nucleotides in the sequence set forth in any one of SEQ ID NOs: 1-44348 are screened for high on target activity. On target activity is determined by DNA capillary electrophoresis analysis.

[0341] According to DNA capillary electrophoresis analysis, guide sequences comprising 17-25 contiguous nucleotides containing nucleotides in the sequence set forth in any one of SEQ ID NOs: 1-44348 are tested for ability to correct the GATA2 gene.

### Example 2: GATA2 Guide Activity Screen

[0342] To choose optimal guides for HDR strategies targeting three SNPs bounding Exon 5 and three mutations targeting Exon 6 or Intron 4 of GATA2 gene, 18 distinct DNA guides were screened for high on-target activity in HeLa cells (See Table 2 for guide sequences).

[0343] According to GATA2 genotyping, of HeLa cells were found to be homozygous for the reference form of the SNPs rs11717152 and rs11708606, therefore these regions were tested with guides targeting the reference sequence. Furthermore, HeLa cells are homozygous to the alternative form of SNPs rs2713603 and rs2713604, and were tested using guides targeting the alternative sequence (Table B). HeLa cells do not harbor the mutations p.R396Q, p.R398W or c.1017+572_C>T in GATA2, however, mutations are located in the PAM sequence of the listed guides, thus the activity of the guides can be tested in this cell model.

TABLE B
GATA2 genotyping in HeLa cells

| | | | |
|---|---|---|---|
| rs11717152 | rs11708606 | rs2713603 | rs2713604 |
| A > C (T > G) | G > A (C > T) | G > A (C > T) | T > C (A > G) |
| AA | GG | AA | CC |

[0344] For assessing the activity of the guides, an OMNI-50 nuclease coding plasmid (64 ng) was co-transfected with each of the guide DNA plasmids (20 ng) in 96 well plate format using jetOPTIMUS reagent (Polyplus). Cells were harvested 72 h post transfection. Genomic DNA was extracted and the genomic regions flanking the SNPs and the mutations were amplified by PCR and the level of editing was measured by capillary electrophoresis. The graph in FIG. 2 represents the average of % editing±STDV of three independent experiments. The results indicate that the activity of the guides is variable.

### REFERENCES

[0345] 1. Ahmad and Allen (1992) “Antibody-mediated Specific Binging and Cytotoxicity of Lipsome-entrapped Doxorubicin to Lung Cancer Cells in Vitro”, Cancer Research 52:4817-20.
[0346] 2. Anderson (1992) “Human gene therapy”, Science 256:808-13.
[0347] 3. Basha et al. (2011) “Influence of Cationic Lipid Composition on Gene Silencing Properties of Lipid Nanoparticle Formulations of siRNA in Antigen-Presenting Cells”, Mol. Ther. 19(12):2186-200.
[0348] 4. Behr (1994) Gene transfer with synthetic cationic amphiphiles: Prospects for gene therapy”, Bioconjuage Chem 5:382-89.
[0349] 5. Blaese (1995) “Vectors in cancer therapy: how will they deliver”, Cancer Gene Ther. 2:291-97.
[0350] 6. Blaese et al. (1995) “T lympocyte-directed gene therapy for ADA-SCID: initial trial results after 4 years”, Science 270(5235):475-80.
[0351] 7. Buchschacher and Panganiban (1992) “Human immunodeficiency virus vectors for inducible expression of foreign genes”, J. Virol. 66:2731-39.
[0352] 8. Burstein et al. (2017) “New CRISPR-Cas systems from uncultivated microbes”, Nature 542:237-41.
[0353] 9. Chung et al. (2006) “Agrobacterium is not alone: gene transfer to plants by viruses and other bacteria”, Trends Plant Sci. 11(1):1-4.
[0354] 10. Crystal (1995) “Transfer of genes to humans: early lessons and obstacles to success”, Science 270(5235):404-10.
[0355] 11. Dillon (1993) “Regulation gene expression in gene therapy” Trends in Biotechnology 11(5):167-173.
[0356] 12. Dranoff et al. (1997) “A phase I study of vaccination with autologous, irradiated melanoma cells engineered to secrete human granulocyte macrophage colony stimulating factor”, Hum. Gene Ther. 8(1):111-23.
[0357] 13. Dunbar et al. (1995) “Retrovirally marked CD34-enriched peripheral blood and bone marrow cells contribute to long-term engraftment after autologous transplantation”, Blood 85:3048-57.
[0358] 14. Ellem et al. (1997) “A case report: immune responses and clinical course of the first human use of ganulocyte/macrophage-colony-stimulating-factor-tranduced autologous melanoma cells for immunotherapy”, Cancer Immunol Immunother 44:10-20.
[0359] 15. Gao and Huang (1995) “Cationic liposome-mediated gene transfer” Gene Ther. 2(10):710-22.
[0360] 16. Haddada et al. (1995) “Gene Therapy Using Adenovirus Vectors”, in: The Molecular Repertoire of Adenoviruses III: Biology and Pathogenesis, ed. Doerfler and Bohm, pp. 297-306.
[0361] 17. Han et al. (1995) “Ligand-directed retro-viral targeting of human breast cancer cells”, Proc Natl Acad Sci U.S.A. 92(21):9747-51.
[0362] 18. Inaba et al. (1992) “Generation of large numbers of dendritic cells from mouse bone marrow cultures supplemented with granulocyte/macrophage colony-stimulating factor”, J Exp Med. 176(6):1693-702.
[0363] 19. Jinek et al. (2012) “A programmable dual-RNA-guided DNA endonuclease in adaptive bacterial immunity,” Science 337(6096):816-21.
[0364] 20. Johan et al. (1992) “GLVR1, a receptor for gibbon ape leukemia virus, is homologous to a phosphate permease of Neurospora crassa and is expressed at high levels in the brain and thymus”, J Virol 66(3):1635-40.
[0365] 21. Judge et al. (2006) “Design of noninflammatory synthetic siRNA mediating potent gene silencing in vivo”, Mol Ther. 13(3):494-505.
[0366] 22. Kohn et al. (1995) “Engraftment of gene-modified umbilical cord blood cells in neonates with adnosine deaminase deficiency”, Nature Medicine 1:1017-23.
[0367] 23. Kremer and Perricaudet (1995) “Adenovirus and adeno-associated virus mediated gene transfer”, Br. Med. Bull. 51(1):31-44.
[0368] 24. Macdiarmid et al. (2009) “Sequential treatment of drug-resistant tumors with targeted minicells containing siRNA or a cytotoxic drug”, Nat Biotehcnol. 27(7):643-51.
[0369] 25. Malech et al. (1997) “Prolonged production of NADPH oxidase-corrected granulocyes after gene therapy of chronic granulomatous disease”, PNAS 94(22):12133-38.
[0370] 26. Miller et al. (1991) “Construction and properties of retrovirus packaging cells based on gibbon ape leukemia virus”, J Virol. 65(5):2220-24.
[0371] 27. Miller (1992) “Human gene therapy comes of age”, Nature 357:455-60.
[0372] 28. Mitani and Caskey (1993) “Delivering therapeutic genes—matching approach and application”, Trends in Biotechnology 11(5):162-66.
[0373] 29. Nabel and Feigner (1993) “Direct gene transfer for immunotherapy and immunization”, Trends in Biotechnology 11(5):211-15.
[0374] 30. Remy et al. (1994) “Gene Transfer with a Series of Lipphilic DNA-Binding Molecules”, Bioconjugate Chem. 5(6):647-54.
[0375] 31. Sommerfelt et al. (1990) “Localization of the receptor gene for type D simian retroviruses on human chromosome 19”, J. Virol. 64(12):6214-20.
[0376] 32. Van Brunt (1988) “Molecular framing: transgenic animals as bioactors” Biotechnology 6:1149-54.
[0377] 33. Vigne et al. (1995) “Third-generation adenovectors for gene therapy”, Restorative Neurology and Neuroscience 8(1,2): 35-36.
[0378] 34. Wilson et al. (1989) “Formation of infectious hybrid virion with gibbon ape leukemia virus and human T-cell leukemia virus retroviral envelope glycoproteins and the gag and pol proteins of Moloney murine leukemia virus”, J. Virol. 63:2374-78.
[0379] 35. Yu et al. (1994) “Progress towards gene therapy for HIV infection”, Gene Ther. 1(1):13-26.
[0380] 36. Yu et al. (2016) “Gene editing of human hematopoietic stem and progenitor cells: Promise and potential hurdles”, Hum Gene Ther. 27(10):729-740.
[0381] 37. Zetsche et al. (2015) “Cpf1 is a single RNA-guided endonuclease of a class 2 CRIPSR-Cas system” Cell 163(3):759-71.
[0382] 38. Zuris et al. (2015) “Cationic lipid-mediated delivery of proteins enables efficient protein based genome editing in vitro and in vivo” Nat Biotechnol. 33(1):73-80.

The application's sequence listing, which the Patent Office published only in electronic form, follows.

SEQUENCE LISTING (44353 sequences)

SEQ ID NO: 1 - RNA, 20 nt, Artificial Sequence
  GATA2 Guide RNA
aaaaaauguaugcuauccuc

SEQ ID NO: 2 - RNA, 20 nt, Artificial Sequence
  GATA2 Guide RNA
aaaaauguaugcuauccucu

SEQ ID NO: 3 - RNA, 20 nt, Artificial Sequence
  GATA2 Guide RNA
aaaauguaugcuauccucuu

SEQ ID NO: 4 - RNA, 20 nt, Artificial Sequence
  GATA2 Guide RNA
aaaggaacaagaggauagca

SEQ ID NO: 5 - RNA, 20 nt, Artificial Sequence
  GATA2 Guide RNA
aaauguaugcuauccucuug

SEQ ID NO: 6 - RNA, 20 nt, Artificial Sequence
  GATA2 Guide RNA
aacaagaggauagcauacau

SEQ ID NO: 7 - RNA, 20 nt, Artificial Sequence
  GATA2 Guide RNA
aacaguacucacuuuaaagg

SEQ ID NO: 8 - RNA, 20 nt, Artificial Sequence
  GATA2 Guide RNA
aaggaacaagaggauagcau

SEQ ID NO: 9 - RNA, 20 nt, Artificial Sequence
  GATA2 Guide RNA
aauguaugcuauccucuugu

SEQ ID NO: 10 - RNA, 20 nt, Artificial Sequence
  GATA2 Guide RNA
acaagaggauagcauacauu

SEQ ID NO: 11 - RNA, 20 nt, Artificial Sequence
  GATA2 Guide RNA
acaguacucacuuuaaagga

SEQ ID NO: 12 - RNA, 20 nt, Artificial Sequence
  GATA2 Guide RNA
acucacuuuaaaggaacaag

SEQ ID NO: 13 - RNA, 20 nt, Artificial Sequence
  GATA2 Guide RNA
acuuuaaaggaacaagagga

SEQ ID NO: 14 - RNA, 20 nt, Artificial Sequence
  GATA2 Guide RNA
aggaacaagaggauagcaua

SEQ ID NO: 15 - RNA, 20 nt, Artificial Sequence
  GATA2 Guide RNA
aguacucacuuuaaaggaac

SEQ ID NO: 16 - RNA, 20 nt, Artificial Sequence
  GATA2 Guide RNA
auccucuuguuccuuuaaag

SEQ ID NO: 17 - RNA, 20 nt, Artificial Sequence
  GATA2 Guide RNA
augcuauccucuuguuccuu

SEQ ID NO: 18 - RNA, 20 nt, Artificial Sequence
  GATA2 Guide RNA
auguaugcuauccucuuguu

SEQ ID NO: 19 - RNA, 20 nt, Artificial Sequence
  GATA2 Guide RNA
caagaggauagcauacauuu

SEQ ID NO: 20 - RNA, 20 nt, Artificial Sequence
  GATA2 Guide RNA
cacuuuaaaggaacaagagg

SEQ ID NO: 21 - RNA, 20 nt, Artificial Sequence
  GATA2 Guide RNA
caguacucacuuuaaaggaa

SEQ ID NO: 22 - RNA, 20 nt, Artificial Sequence
  GATA2 Guide RNA
ccucuuguuccuuuaaagug

SEQ ID NO: 23 - RNA, 20 nt, Artificial Sequence
  GATA2 Guide RNA
cuauccucuuguuccuuuaa

SEQ ID NO: 24 - RNA, 20 nt, Artificial Sequence
  GATA2 Guide RNA
cucacuuuaaaggaacaaga

SEQ ID NO: 25 - RNA, 20 nt, Artificial Sequence
  GATA2 Guide RNA
cucuuguuccuuuaaaguga

SEQ ID NO: 26 - RNA, 20 nt, Artificial Sequence
  GATA2 Guide RNA
cuuguuccuuuaaagugagu

SEQ ID NO: 27 - RNA, 20 nt, Artificial Sequence
  GATA2 Guide RNA
cuuuaaaggaacaagaggau

SEQ ID NO: 28 - RNA, 20 nt, Artificial Sequence
  GATA2 Guide RNA
gaacaagaggauagcauaca

SEQ ID NO: 29 - RNA, 20 nt, Artificial Sequence
  GATA2 Guide RNA
gcuauccucuuguuccuuua

SEQ ID NO: 30 - RNA, 20 nt, Artificial Sequence
  GATA2 Guide RNA
ggaacaagaggauagcauac

SEQ ID NO: 31 - RNA, 20 nt, Artificial Sequence
  GATA2 Guide RNA
guacucacuuuaaaggaaca

SEQ ID NO: 32 - RNA, 20 nt, Artificial Sequence
  GATA2 Guide RNA
guaugcuauccucuuguucc

SEQ ID NO: 33 - RNA, 20 nt, Artificial Sequence
  GATA2 Guide RNA
uaaaggaacaagaggauagc

SEQ ID NO: 34 - RNA, 20 nt, Artificial Sequence
  GATA2 Guide RNA
uacucacuuuaaaggaacaa

SEQ ID NO: 35 - RNA, 20 nt, Artificial Sequence
  GATA2 Guide RNA
uauccucuuguuccuuuaaa

SEQ ID NO: 36 - RNA, 20 nt, Artificial Sequence
  GATA2 Guide RNA
uaugcuauccucuuguuccu

SEQ ID NO: 37 - RNA, 20 nt, Artificial Sequence
  GATA2 Guide RNA
ucacuuuaaaggaacaagag

SEQ ID NO: 38 - RNA, 20 nt, Artificial Sequence
  GATA2 Guide RNA
uccucuuguuccuuuaaagu

SEQ ID NO: 39 - RNA, 20 nt, Artificial Sequence
  GATA2 Guide RNA
ucuuguuccuuuaaagugag

SEQ ID NO: 40 - RNA, 20 nt, Artificial Sequence
  GATA2 Guide RNA
ugcuauccucuuguuccuuu

SEQ ID NO: 41 - RNA, 20 nt, Artificial Sequence
  GATA2 Guide RNA
uguaugcuauccucuuguuc

SEQ ID NO: 42 - RNA, 20 nt, Artificial Sequence
  GATA2 Guide RNA
uguuccuuuaaagugaguac

SEQ ID NO: 43 - RNA, 20 nt, Artificial Sequence
  GATA2 Guide RNA
uuaaaggaacaagaggauag

SEQ ID NO: 44 - RNA, 20 nt, Artificial Sequence
  GATA2 Guide RNA
uuguuccuuuaaagugagua

SEQ ID NO: 45 - RNA, 20 nt, Artificial Sequence
  GATA2 Guide RNA
uuuaaaggaacaagaggaua

SEQ ID NO: 46 - RNA, 21 nt, Artificial Sequence
  GATA2 Guide RNA
aaaauguaugcuauccucuug

SEQ ID NO: 47 - RNA, 21 nt, Artificial Sequence
  GATA2 Guide RNA
aaaggaacaagaggauagcau

SEQ ID NO: 48 - RNA, 21 nt, Artificial Sequence
  GATA2 Guide RNA
aaauguaugcuauccucuugu

SEQ ID NO: 49 - RNA, 21 nt, Artificial Sequence
  GATA2 Guide RNA
aacaagaggauagcauacauu

SEQ ID NO: 50 - RNA, 21 nt, Artificial Sequence
  GATA2 Guide RNA
aacaguacucacuuuaaagga

SEQ ID NO: 51 - RNA, 21 nt, Artificial Sequence
  GATA2 Guide RNA
aaggaacaagaggauagcaua

SEQ ID NO: 52 - RNA, 21 nt, Artificial Sequence
  GATA2 Guide RNA
aauguaugcuauccucuuguu

SEQ ID NO: 53 - RNA, 21 nt, Artificial Sequence
  GATA2 Guide RNA
acaagaggauagcauacauuu

SEQ ID NO: 54 - RNA, 21 nt, Artificial Sequence
  GATA2 Guide RNA
acaguacucacuuuaaaggaa

SEQ ID NO: 55 - RNA, 21 nt, Artificial Sequence
  GATA2 Guide RNA
acucacuuuaaaggaacaaga

SEQ ID NO: 56 - RNA, 21 nt, Artificial Sequence
  GATA2 Guide RNA
acuuuaaaggaacaagaggau

SEQ ID NO: 57 - RNA, 21 nt, Artificial Sequence
  GATA2 Guide RNA
aggaacaagaggauagcauac

SEQ ID NO: 58 - RNA, 21 nt, Artificial Sequence
  GATA2 Guide RNA
aguacucacuuuaaaggaaca

SEQ ID NO: 59 - RNA, 21 nt, Artificial Sequence
  GATA2 Guide RNA
auccucuuguuccuuuaaagu

SEQ ID NO: 60 - RNA, 21 nt, Artificial Sequence
  GATA2 Guide RNA
augcuauccucuuguuccuuu

SEQ ID NO: 61 - RNA, 21 nt, Artificial Sequence
  GATA2 Guide RNA
auguaugcuauccucuuguuc

SEQ ID NO: 62 - RNA, 21 nt, Artificial Sequence
  GATA2 Guide RNA
caagaggauagcauacauuuu

SEQ ID NO: 63 - RNA, 21 nt, Artificial Sequence
  GATA2 Guide RNA
cacuuuaaaggaacaagagga

SEQ ID NO: 64 - RNA, 21 nt, Artificial Sequence
  GATA2 Guide RNA
caguacucacuuuaaaggaac

SEQ ID NO: 65 - RNA, 21 nt, Artificial Sequence
  GATA2 Guide RNA
ccucuuguuccuuuaaaguga

SEQ ID NO: 66 - RNA, 21 nt, Artificial Sequence
  GATA2 Guide RNA
cuauccucuuguuccuuuaaa

SEQ ID NO: 67 - RNA, 21 nt, Artificial Sequence
  GATA2 Guide RNA
cucacuuuaaaggaacaagag

SEQ ID NO: 68 - RNA, 21 nt, Artificial Sequence
  GATA2 Guide RNA
cucuuguuccuuuaaagugag

SEQ ID NO: 69 - RNA, 21 nt, Artificial Sequence
  GATA2 Guide RNA
cuuguuccuuuaaagugagua

SEQ ID NO: 70 - RNA, 21 nt, Artificial Sequence
  GATA2 Guide RNA
cuuuaaaggaacaagaggaua

SEQ ID NO: 71 - RNA, 21 nt, Artificial Sequence
  GATA2 Guide RNA
gaacaagaggauagcauacau

SEQ ID NO: 72 - RNA, 21 nt, Artificial Sequence
  GATA2 Guide RNA
gcuauccucuuguuccuuuaa

SEQ ID NO: 73 - RNA, 21 nt, Artificial Sequence
  GATA2 Guide RNA
ggaacaagaggauagcauaca

SEQ ID NO: 74 - RNA, 21 nt, Artificial Sequence
  GATA2 Guide RNA
guacucacuuuaaaggaacaa

SEQ ID NO: 75 - RNA, 21 nt, Artificial Sequence
  GATA2 Guide RNA
guaugcuauccucuuguuccu

SEQ ID NO: 76 - RNA, 21 nt, Artificial Sequence
  GATA2 Guide RNA
uaaaggaacaagaggauagca

SEQ ID NO: 77 - RNA, 21 nt, Artificial Sequence
  GATA2 Guide RNA
uaacaguacucacuuuaaagg

SEQ ID NO: 78 - RNA, 21 nt, Artificial Sequence
  GATA2 Guide RNA
uacucacuuuaaaggaacaag

SEQ ID NO: 79 - RNA, 21 nt, Artificial Sequence
  GATA2 Guide RNA
uauccucuuguuccuuuaaag

SEQ ID NO: 80 - RNA, 21 nt, Artificial Sequence
  GATA2 Guide RNA
uaugcuauccucuuguuccuu

SEQ ID NO: 81 - RNA, 21 nt, Artificial Sequence
  GATA2 Guide RNA
ucacuuuaaaggaacaagagg

SEQ ID NO: 82 - RNA, 21 nt, Artificial Sequence
  GATA2 Guide RNA
uccucuuguuccuuuaaagug

SEQ ID NO: 83 - RNA, 21 nt, Artificial Sequence
  GATA2 Guide RNA
ucuuguuccuuuaaagugagu

SEQ ID NO: 84 - RNA, 21 nt, Artificial Sequence
  GATA2 Guide RNA
ugcuauccucuuguuccuuua

SEQ ID NO: 85 - RNA, 21 nt, Artificial Sequence
  GATA2 Guide RNA
uguaugcuauccucuuguucc

SEQ ID NO: 86 - RNA, 21 nt, Artificial Sequence
  GATA2 Guide RNA
uguuccuuuaaagugaguacu

SEQ ID NO: 87 - RNA, 21 nt, Artificial Sequence
  GATA2 Guide RNA
uuaaaggaacaagaggauagc

SEQ ID NO: 88 - RNA, 21 nt, Artificial Sequence
  GATA2 Guide RNA
uuguuccuuuaaagugaguac

SEQ ID NO: 89 - RNA, 21 nt, Artificial Sequence
  GATA2 Guide RNA
uuuaaaggaacaagaggauag

SEQ ID NO: 90 - RNA, 22 nt, Artificial Sequence
  GATA2 Guide RNA
aaaaauguaugcuauccucuug

SEQ ID NO: 91 - RNA, 22 nt, Artificial Sequence
  GATA2 Guide RNA
aaaauguaugcuauccucuugu

SEQ ID NO: 92 - RNA, 22 nt, Artificial Sequence
  GATA2 Guide RNA
aaaggaacaagaggauagcaua

SEQ ID NO: 93 - RNA, 22 nt, Artificial Sequence
  GATA2 Guide RNA
aaauguaugcuauccucuuguu

SEQ ID NO: 94 - RNA, 22 nt, Artificial Sequence
  GATA2 Guide RNA
aacaagaggauagcauacauuu

SEQ ID NO: 95 - RNA, 22 nt, Artificial Sequence
  GATA2 Guide RNA
aacaguacucacuuuaaaggaa

SEQ ID NO: 96 - RNA, 22 nt, Artificial Sequence
  GATA2 Guide RNA
aaggaacaagaggauagcauac

SEQ ID NO: 97 - RNA, 22 nt, Artificial Sequence
  GATA2 Guide RNA
aauguaugcuauccucuuguuc

SEQ ID NO: 98 - RNA, 22 nt, Artificial Sequence
  GATA2 Guide RNA
acaagaggauagcauacauuuu

SEQ ID NO: 99 - RNA, 22 nt, Artificial Sequence
  GATA2 Guide RNA
acaguacucacuuuaaaggaac

SEQ ID NO: 100 - RNA, 22 nt, Artificial Sequence
  GATA2 Guide RNA
acucacuuuaaaggaacaagag

SEQ ID NO: 101 - RNA, 22 nt, Artificial Sequence
  GATA2 Guide RNA
acuuuaaaggaacaagaggaua

SEQ ID NO: 102 - RNA, 22 nt, Artificial Sequence
  GATA2 Guide RNA
aggaacaagaggauagcauaca

SEQ ID NO: 103 - RNA, 22 nt, Artificial Sequence
  GATA2 Guide RNA
aguacucacuuuaaaggaacaa

SEQ ID NO: 104 - RNA, 22 nt, Artificial Sequence
  GATA2 Guide RNA
auccucuuguuccuuuaaagug

SEQ ID NO: 105 - RNA, 22 nt, Artificial Sequence
  GATA2 Guide RNA
augcuauccucuuguuccuuua

SEQ ID NO: 106 - RNA, 22 nt, Artificial Sequence
  GATA2 Guide RNA
auguaugcuauccucuuguucc

SEQ ID NO: 107 - RNA, 22 nt, Artificial Sequence
  GATA2 Guide RNA
caagaggauagcauacauuuuu

SEQ ID NO: 108 - RNA, 22 nt, Artificial Sequence
  GATA2 Guide RNA
cacuuuaaaggaacaagaggau

SEQ ID NO: 109 - RNA, 22 nt, Artificial Sequence
  GATA2 Guide RNA
caguacucacuuuaaaggaaca

SEQ ID NO: 110 - RNA, 22 nt, Artificial Sequence
  GATA2 Guide RNA
ccucuuguuccuuuaaagugag

SEQ ID NO: 111 - RNA, 22 nt, Artificial Sequence
  GATA2 Guide RNA
cuauccucuuguuccuuuaaag

SEQ ID NO: 112 - RNA, 22 nt, Artificial Sequence
  GATA2 Guide RNA
cucacuuuaaaggaacaagagg

SEQ ID NO: 113 - RNA, 22 nt, Artificial Sequence
  GATA2 Guide RNA
cucuuguuccuuuaaagugagu

SEQ ID NO: 114 - RNA, 22 nt, Artificial Sequence
  GATA2 Guide RNA
cuuguuccuuuaaagugaguac

SEQ ID NO: 115 - RNA, 22 nt, Artificial Sequence
  GATA2 Guide RNA
cuuuaaaggaacaagaggauag

SEQ ID NO: 116 - RNA, 22 nt, Artificial Sequence
  GATA2 Guide RNA
gaacaagaggauagcauacauu

SEQ ID NO: 117 - RNA, 22 nt, Artificial Sequence
  GATA2 Guide RNA
gcuauccucuuguuccuuuaaa

SEQ ID NO: 118 - RNA, 22 nt, Artificial Sequence
  GATA2 Guide RNA
ggaacaagaggauagcauacau

SEQ ID NO: 119 - RNA, 22 nt, Artificial Sequence
  GATA2 Guide RNA
guaaaaaauguaugcuauccuc

SEQ ID NO: 120 - RNA, 22 nt, Artificial Sequence
  GATA2 Guide RNA
guacucacuuuaaaggaacaag

SEQ ID NO: 121 - RNA, 22 nt, Artificial Sequence
  GATA2 Guide RNA
guaugcuauccucuuguuccuu

SEQ ID NO: 122 - RNA, 22 nt, Artificial Sequence
  GATA2 Guide RNA
uaaaggaacaagaggauagcau

SEQ ID NO: 123 - RNA, 22 nt, Artificial Sequence
  GATA2 Guide RNA
uaacaguacucacuuuaaagga

SEQ ID NO: 124 - RNA, 22 nt, Artificial Sequence
  GATA2 Guide RNA
uacucacuuuaaaggaacaaga

SEQ ID NO: 125 - RNA, 22 nt, Artificial Sequence
  GATA2 Guide RNA
uauccucuuguuccuuuaaagu

SEQ ID NO: 126 - RNA, 22 nt, Artificial Sequence
  GATA2 Guide RNA
uaugcuauccucuuguuccuuu

SEQ ID NO: 127 - RNA, 22 nt, Artificial Sequence
  GATA2 Guide RNA
ucacuuuaaaggaacaagagga

SEQ ID NO: 128 - RNA, 22 nt, Artificial Sequence
  GATA2 Guide RNA
uccucuuguuccuuuaaaguga

SEQ ID NO: 129 - RNA, 22 nt, Artificial Sequence
  GATA2 Guide RNA
ucuuguuccuuuaaagugagua

SEQ ID NO: 130 - RNA, 22 nt, Artificial Sequence
  GATA2 Guide RNA
ugcuauccucuuguuccuuuaa

SEQ ID NO: 131 - RNA, 22 nt, Artificial Sequence
  GATA2 Guide RNA
uguaugcuauccucuuguuccu

SEQ ID NO: 132 - RNA, 22 nt, Artificial Sequence
  GATA2 Guide RNA
uguuccuuuaaagugaguacug

SEQ ID NO: 133 - RNA, 22 nt, Artificial Sequence
  GATA2 Guide RNA
uuaaaggaacaagaggauagca

SEQ ID NO: 134 - RNA, 22 nt, Artificial Sequence
  GATA2 Guide RNA
uuaacaguacucacuuuaaagg

SEQ ID NO: 135 - RNA, 22 nt, Artificial Sequence
  GATA2 Guide RNA
uuguuccuuuaaagugaguacu

SEQ ID NO: 136 - RNA, 22 nt, Artificial Sequence
  GATA2 Guide RNA
uuuaaaggaacaagaggauagc

SEQ ID NO: 137 - RNA, 20 nt, Artificial Sequence
  GATA2 Guide RNA
aaaauguaugcuauccucuc

SEQ ID NO: 138 - RNA, 20 nt, Artificial Sequence
  GATA2 Guide RNA
aaaggaaugagaggauagca

SEQ ID NO: 139 - RNA, 20 nt, Artificial Sequence
  GATA2 Guide RNA
aaauguaugcuauccucuca

SEQ ID NO: 140 - RNA, 20 nt, Artificial Sequence
  GATA2 Guide RNA
aaggaaugagaggauagcau

SEQ ID NO: 141 - RNA, 20 nt, Artificial Sequence
  GATA2 Guide RNA
aaugagaggauagcauacau

SEQ ID NO: 142 - RNA, 20 nt, Artificial Sequence
  GATA2 Guide RNA
aauguaugcuauccucucau

SEQ ID NO: 143 - RNA, 20 nt, Artificial Sequence
  GATA2 Guide RNA
acucacuuuaaaggaaugag

SEQ ID NO: 144 - RNA, 20 nt, Artificial Sequence
  GATA2 Guide RNA
acuuuaaaggaaugagagga

SEQ ID NO: 145 - RNA, 20 nt, Artificial Sequence
  GATA2 Guide RNA
aggaaugagaggauagcaua

SEQ ID NO: 146 - RNA, 20 nt, Artificial Sequence
  GATA2 Guide RNA
aguacucacuuuaaaggaau

SEQ ID NO: 147 - RNA, 20 nt, Artificial Sequence
  GATA2 Guide RNA
auccucucauuccuuuaaag

SEQ ID NO: 148 - RNA, 20 nt, Artificial Sequence
  GATA2 Guide RNA
augagaggauagcauacauu

SEQ ID NO: 149 - RNA, 20 nt, Artificial Sequence
  GATA2 Guide RNA
augcuauccucucauuccuu

SEQ ID NO: 150 - RNA, 20 nt, Artificial Sequence
  GATA2 Guide RNA
auguaugcuauccucucauu

SEQ ID NO: 151 - RNA, 20 nt, Artificial Sequence
  GATA2 Guide RNA
cacuuuaaaggaaugagagg

SEQ ID NO: 152 - RNA, 20 nt, Artificial Sequence
  GATA2 Guide RNA
ccucucauuccuuuaaagug

SEQ ID NO: 153 - RNA, 20 nt, Artificial Sequence
  GATA2 Guide RNA
cuauccucucauuccuuuaa

SEQ ID NO: 154 - RNA, 20 nt, Artificial Sequence
  GATA2 Guide RNA
cucacuuuaaaggaaugaga

SEQ ID NO: 155 - RNA, 20 nt, Artificial Sequence
  GATA2 Guide RNA
cucauuccuuuaaagugagu

SEQ ID NO: 156 - RNA, 20 nt, Artificial Sequence
  GATA2 Guide RNA
cucucauuccuuuaaaguga

SEQ ID NO: 157 - RNA, 20 nt, Artificial Sequence
  GATA2 Guide RNA
cuuuaaaggaaugagaggau

SEQ ID NO: 158 - RNA, 20 nt, Artificial Sequence
  GATA2 Guide RNA
gaaugagaggauagcauaca

SEQ ID NO: 159 - RNA, 20 nt, Artificial Sequence
  GATA2 Guide RNA
gagaggauagcauacauuuu

SEQ ID NO: 160 - RNA, 20 nt, Artificial Sequence
  GATA2 Guide RNA
gcuauccucucauuccuuua

SEQ ID NO: 161 - RNA, 20 nt, Artificial Sequence
  GATA2 Guide RNA
ggaaugagaggauagcauac

SEQ ID NO: 162 - RNA, 20 nt, Artificial Sequence
  GATA2 Guide RNA
guaaaaaauguaugcuaucc

SEQ ID NO: 163 - RNA, 20 nt, Artificial Sequence
  GATA2 Guide RNA
guacucacuuuaaaggaaug

SEQ ID NO: 164 - RNA, 20 nt, Artificial Sequence
  GATA2 Guide RNA
guaugcuauccucucauucc

SEQ ID NO: 165 - RNA, 20 nt, Artificial Sequence
  GATA2 Guide RNA
uaaaggaaugagaggauagc

SEQ ID NO: 166 - RNA, 20 nt, Artificial Sequence
  GATA2 Guide RNA
uacucacuuuaaaggaauga

SEQ ID NO: 167 - RNA, 20 nt, Artificial Sequence
  GATA2 Guide RNA
uauccucucauuccuuuaaa

SEQ ID NO: 168 - RNA, 20 nt, Artificial Sequence
  GATA2 Guide RNA
uaugcuauccucucauuccu

SEQ ID NO: 169 - RNA, 20 nt, Artificial Sequence
  GATA2 Guide RNA
ucacuuuaaaggaaugagag

SEQ ID NO: 170 - RNA, 20 nt, Artificial Sequence
  GATA2 Guide RNA
ucauuccuuuaaagugagua

SEQ ID NO: 171 - RNA, 20 nt, Artificial Sequence
  GATA2 Guide RNA
uccucucauuccuuuaaagu

SEQ ID NO: 172 - RNA, 20 nt, Artificial Sequence
  GATA2 Guide RNA
ucucauuccuuuaaagugag

SEQ ID NO: 173 - RNA, 20 nt, Artificial Sequence
  GATA2 Guide RNA
ugagaggauagcauacauuu

SEQ ID NO: 174 - RNA, 20 nt, Artificial Sequence
  GATA2 Guide RNA
ugcuauccucucauuccuuu

SEQ ID NO: 175 - RNA, 20 nt, Artificial Sequence
  GATA2 Guide RNA
uguaugcuauccucucauuc

SEQ ID NO: 176 - RNA, 20 nt, Artificial Sequence
  GATA2 Guide RNA
uuaaaggaaugagaggauag

SEQ ID NO: 177 - RNA, 20 nt, Artificial Sequence
  GATA2 Guide RNA
uuuaaaggaaugagaggaua

SEQ ID NO: 178 - RNA, 21 nt, Artificial Sequence
  GATA2 Guide RNA
aaaaauguaugcuauccucuc

SEQ ID NO: 179 - RNA, 21 nt, Artificial Sequence
  GATA2 Guide RNA
aaaauguaugcuauccucuca

SEQ ID NO: 180 - RNA, 21 nt, Artificial Sequence
  GATA2 Guide RNA
aaaggaaugagaggauagcau

SEQ ID NO: 181 - RNA, 21 nt, Artificial Sequence
  GATA2 Guide RNA
aaauguaugcuauccucucau

SEQ ID NO: 182 - RNA, 21 nt, Artificial Sequence
  GATA2 Guide RNA
aaggaaugagaggauagcaua

SEQ ID NO: 183 - RNA, 21 nt, Artificial Sequence
  GATA2 Guide RNA
aaugagaggauagcauacauu

SEQ ID NO: 184 - RNA, 21 nt, Artificial Sequence
  GATA2 Guide RNA
aauguaugcuauccucucauu

SEQ ID NO: 185 - RNA, 21 nt, Artificial Sequence
  GATA2 Guide RNA
acucacuuuaaaggaaugaga

SEQ ID NO: 186 - RNA, 21 nt, Artificial Sequence
  GATA2 Guide RNA
acuuuaaaggaaugagaggau

SEQ ID NO: 187 - RNA, 21 nt, Artificial Sequence
  GATA2 Guide RNA
aggaaugagaggauagcauac

SEQ ID NO: 188 - RNA, 21 nt, Artificial Sequence
  GATA2 Guide RNA
aguacucacuuuaaaggaaug

SEQ ID NO: 189 - RNA, 21 nt, Artificial Sequence
  GATA2 Guide RNA
auccucucauuccuuuaaagu

SEQ ID NO: 190 - RNA, 21 nt, Artificial Sequence
  GATA2 Guide RNA
augagaggauagcauacauuu

SEQ ID NO: 191 - RNA, 21 nt, Artificial Sequence
  GATA2 Guide RNA
augcuauccucucauuccuuu

SEQ ID NO: 192 - RNA, 21 nt, Artificial Sequence
  GATA2 Guide RNA
auguaugcuauccucucauuc

SEQ ID NO: 193 - RNA, 21 nt, Artificial Sequence
  GATA2 Guide RNA
cacuuuaaaggaaugagagga

SEQ ID NO: 194 - RNA, 21 nt, Artificial Sequence
  GATA2 Guide RNA
caguacucacuuuaaaggaau

SEQ ID NO: 195 - RNA, 21 nt, Artificial Sequence
  GATA2 Guide RNA
ccucucauuccuuuaaaguga

SEQ ID NO: 196 - RNA, 21 nt, Artificial Sequence
  GATA2 Guide RNA
cuauccucucauuccuuuaaa

SEQ ID NO: 197 - RNA, 21 nt, Artificial Sequence
  GATA2 Guide RNA
cucacuuuaaaggaaugagag

SEQ ID NO: 198 - RNA, 21 nt, Artificial Sequence
  GATA2 Guide RNA
cucauuccuuuaaagugagua

SEQ ID NO: 199 - RNA, 21 nt, Artificial Sequence
  GATA2 Guide RNA
cucucauuccuuuaaagugag

SEQ ID NO: 200 - RNA, 21 nt, Artificial Sequence
  GATA2 Guide RNA
cuuuaaaggaaugagaggaua

SEQ ID NO: 201 - RNA, 21 nt, Artificial Sequence
  GATA2 Guide RNA
gaaugagaggauagcauacau

SEQ ID NO: 202 - RNA, 21 nt, Artificial Sequence
  GATA2 Guide RNA
gagaggauagcauacauuuuu

SEQ ID NO: 203 - RNA, 21 nt, Artificial Sequence
  GATA2 Guide RNA
gcuauccucucauuccuuuaa

SEQ ID NO: 204 - RNA, 21 nt, Artificial Sequence
  GATA2 Guide RNA
ggaaugagaggauagcauaca

SEQ ID NO: 205 - RNA, 21 nt, Artificial Sequence
  GATA2 Guide RNA
guacucacuuuaaaggaauga

SEQ ID NO: 206 - RNA, 21 nt, Artificial Sequence
  GATA2 Guide RNA
guaugcuauccucucauuccu

SEQ ID NO: 207 - RNA, 21 nt, Artificial Sequence
  GATA2 Guide RNA
uaaaggaaugagaggauagca

SEQ ID NO: 208 - RNA, 21 nt, Artificial Sequence
  GATA2 Guide RNA
uacucacuuuaaaggaaugag

SEQ ID NO: 209 - RNA, 21 nt, Artificial Sequence
  GATA2 Guide RNA
uauccucucauuccuuuaaag

SEQ ID NO: 210 - RNA, 21 nt, Artificial Sequence
  GATA2 Guide RNA
uaugcuauccucucauuccuu

SEQ ID NO: 211 - RNA, 21 nt, Artificial Sequence
  GATA2 Guide RNA
ucacuuuaaaggaaugagagg

SEQ ID NO: 212 - RNA, 21 nt, Artificial Sequence
  GATA2 Guide RNA
ucauuccuuuaaagugaguac

SEQ ID NO: 213 - RNA, 21 nt, Artificial Sequence
  GATA2 Guide RNA
uccucucauuccuuuaaagug

SEQ ID NO: 214 - RNA, 21 nt, Artificial Sequence
  GATA2 Guide RNA
ucucauuccuuuaaagugagu

SEQ ID NO: 215 - RNA, 21 nt, Artificial Sequence
  GATA2 Guide RNA
ugagaggauagcauacauuuu

SEQ ID NO: 216 - RNA, 21 nt, Artificial Sequence
  GATA2 Guide RNA
ugcuauccucucauuccuuua

SEQ ID NO: 217 - RNA, 21 nt, Artificial Sequence
  GATA2 Guide RNA
uguaugcuauccucucauucc

SEQ ID NO: 218 - RNA, 21 nt, Artificial Sequence
  GATA2 Guide RNA
uuaaaggaaugagaggauagc

SEQ ID NO: 219 - RNA, 21 nt, Artificial Sequence
  GATA2 Guide RNA
uuuaaaggaaugagaggauag

SEQ ID NO: 220 - RNA, 22 nt, Artificial Sequence
  GATA2 Guide RNA
aaaaaauguaugcuauccucuc

SEQ ID NO: 221 - RNA, 22 nt, Artificial Sequence
  GATA2 Guide RNA
aaaaauguaugcuauccucuca

SEQ ID NO: 222 - RNA, 22 nt, Artificial Sequence
  GATA2 Guide RNA
aaaauguaugcuauccucucau

SEQ ID NO: 223 - RNA, 22 nt, Artificial Sequence
  GATA2 Guide RNA
aaaggaaugagaggauagcaua

SEQ ID NO: 224 - RNA, 22 nt, Artificial Sequence
  GATA2 Guide RNA
aaauguaugcuauccucucauu

SEQ ID NO: 225 - RNA, 22 nt, Artificial Sequence
  GATA2 Guide RNA
aaggaaugagaggauagcauac

SEQ ID NO: 226 - RNA, 22 nt, Artificial Sequence
  GATA2 Guide RNA
aaugagaggauagcauacauuu

SEQ ID NO: 227 - RNA, 22 nt, Artificial Sequence
  GATA2 Guide RNA
aauguaugcuauccucucauuc

SEQ ID NO: 228 - RNA, 22 nt, Artificial Sequence
  GATA2 Guide RNA
acaguacucacuuuaaaggaau

SEQ ID NO: 229 - RNA, 22 nt, Artificial Sequence
  GATA2 Guide RNA
acucacuuuaaaggaaugagag

SEQ ID NO: 230 - RNA, 22 nt, Artificial Sequence
  GATA2 Guide RNA
acuuuaaaggaaugagaggaua

SEQ ID NO: 231 - RNA, 22 nt, Artificial Sequence
  GATA2 Guide RNA
aggaaugagaggauagcauaca

SEQ ID NO: 232 - RNA, 22 nt, Artificial Sequence
  GATA2 Guide RNA
aguacucacuuuaaaggaauga

SEQ ID NO: 233 - RNA, 22 nt, Artificial Sequence
  GATA2 Guide RNA
auccucucauuccuuuaaagug

SEQ ID NO: 234 - RNA, 22 nt, Artificial Sequence
  GATA2 Guide RNA
augagaggauagcauacauuuu

SEQ ID NO: 235 - RNA, 22 nt, Artificial Sequence
  GATA2 Guide RNA
augcuauccucucauuccuuua

SEQ ID NO: 236 - RNA, 22 nt, Artificial Sequence
  GATA2 Guide RNA
auguaugcuauccucucauucc

SEQ ID NO: 237 - RNA, 22 nt, Artificial Sequence
  GATA2 Guide RNA
cacuuuaaaggaaugagaggau

SEQ ID NO: 238 - RNA, 22 nt, Artificial Sequence
  GATA2 Guide RNA
caguacucacuuuaaaggaaug

SEQ ID NO: 239 - RNA, 22 nt, Artificial Sequence
  GATA2 Guide RNA
ccucucauuccuuuaaagugag

SEQ ID NO: 240 - RNA, 22 nt, Artificial Sequence
  GATA2 Guide RNA
cuauccucucauuccuuuaaag

SEQ ID NO: 241 - RNA, 22 nt, Artificial Sequence
  GATA2 Guide RNA
cucacuuuaaaggaaugagagg

SEQ ID NO: 242 - RNA, 22 nt, Artificial Sequence
  GATA2 Guide RNA
cucauuccuuuaaagugaguac

SEQ ID NO: 243 - RNA, 22 nt, Artificial Sequence
  GATA2 Guide RNA
cucucauuccuuuaaagugagu

SEQ ID NO: 244 - RNA, 22 nt, Artificial Sequence
  GATA2 Guide RNA
cuguaaaaaauguaugcuaucc

SEQ ID NO: 245 - RNA, 22 nt, Artificial Sequence
  GATA2 Guide RNA
cuuuaaaggaaugagaggauag

SEQ ID NO: 246 - RNA, 22 nt, Artificial Sequence
  GATA2 Guide RNA
gaaugagaggauagcauacauu

SEQ ID NO: 247 - RNA, 22 nt, Artificial Sequence
  GATA2 Guide RNA
gagaggauagcauacauuuuuu

SEQ ID NO: 248 - RNA, 22 nt, Artificial Sequence
  GATA2 Guide RNA
gcuauccucucauuccuuuaaa

SEQ ID NO: 249 - RNA, 22 nt, Artificial Sequence
  GATA2 Guide RNA
ggaaugagaggauagcauacau

SEQ ID NO: 250 - RNA, 22 nt, Artificial Sequence
  GATA2 Guide RNA
guacucacuuuaaaggaaugag

SEQ ID NO: 251 - RNA, 22 nt, Artificial Sequence
  GATA2 Guide RNA
guaugcuauccucucauuccuu

SEQ ID NO: 252 - RNA, 22 nt, Artificial Sequence
  GATA2 Guide RNA
uaaaggaaugagaggauagcau

SEQ ID NO: 253 - RNA, 22 nt, Artificial Sequence
  GATA2 Guide RNA
uacucacuuuaaaggaaugaga

SEQ ID NO: 254 - RNA, 22 nt, Artificial Sequence
  GATA2 Guide RNA
uauccucucauuccuuuaaagu

SEQ ID NO: 255 - RNA, 22 nt, Artificial Sequence
  GATA2 Guide RNA
uaugcuauccucucauuccuuu

SEQ ID NO: 256 - RNA, 22 nt, Artificial Sequence
  GATA2 Guide RNA
ucacuuuaaaggaaugagagga

SEQ ID NO: 257 - RNA, 22 nt, Artificial Sequence
  GATA2 Guide RNA
ucauuccuuuaaagugaguacu

SEQ ID NO: 258 - RNA, 22 nt, Artificial Sequence
  GATA2 Guide RNA
uccucucauuccuuuaaaguga

SEQ ID NO: 259 - RNA, 22 nt, Artificial Sequence
  GATA2 Guide RNA
ucucauuccuuuaaagugagua

SEQ ID NO: 260 - RNA, 22 nt, Artificial Sequence
  GATA2 Guide RNA
ugagaggauagcauacauuuuu

SEQ ID NO: 261 - RNA, 22 nt, Artificial Sequence
  GATA2 Guide RNA
ugcuauccucucauuccuuuaa

SEQ ID NO: 262 - RNA, 22 nt, Artificial Sequence
  GATA2 Guide RNA
uguaugcuauccucucauuccu

SEQ ID NO: 263 - RNA, 22 nt, Artificial Sequence
  GATA2 Guide RNA
uuaaaggaaugagaggauagca

SEQ ID NO: 264 - RNA, 22 nt, Artificial Sequence
  GATA2 Guide RNA
uuuaaaggaaugagaggauagc

SEQ ID NO: 265 - RNA, 20 nt, Artificial Sequence
  GATA2 Guide RNA
aaagcuggaccugagaccac

SEQ ID NO: 266 - RNA, 20 nt, Artificial Sequence
  GATA2 Guide RNA
aagcuggaccugagaccaca

SEQ ID NO: 267 - RNA, 20 nt, Artificial Sequence
  GATA2 Guide RNA
acagcagggacacagccucu

SEQ ID NO: 268 - RNA, 20 nt, Artificial Sequence
  GATA2 Guide RNA
accacagcagggacacagcc

SEQ ID NO: 269 - RNA, 20 nt, Artificial Sequence
  GATA2 Guide RNA
accugagaccacagcaggga

SEQ ID NO: 270 - RNA, 20 nt, Artificial Sequence
  GATA2 Guide RNA
agaccacagcagggacacag

SEQ ID NO: 271 - RNA, 20 nt, Artificial Sequence
  GATA2 Guide RNA
agaggcugugucccugcugu

SEQ ID NO: 272 - RNA, 20 nt, Artificial Sequence
  GATA2 Guide RNA
agcuggaccugagaccacag

SEQ ID NO: 273 - RNA, 20 nt, Artificial Sequence
  GATA2 Guide RNA
aggcugugucccugcugugg

SEQ ID NO: 274 - RNA, 20 nt, Artificial Sequence
  GATA2 Guide RNA
agggagaggcugugucccug

SEQ ID NO: 275 - RNA, 20 nt, Artificial Sequence
  GATA2 Guide RNA
aguaaagcuggaccugagac

SEQ ID NO: 276 - RNA, 20 nt, Artificial Sequence
  GATA2 Guide RNA
cacagcagggacacagccuc

SEQ ID NO: 277 - RNA, 20 nt, Artificial Sequence
  GATA2 Guide RNA
caguaaagcuggaccugaga

SEQ ID NO: 278 - RNA, 20 nt, Artificial Sequence
  GATA2 Guide RNA
ccacagcagggacacagccu

SEQ ID NO: 279 - RNA, 20 nt, Artificial Sequence
  GATA2 Guide RNA
cccugcuguggucucagguc

SEQ ID NO: 280 - RNA, 20 nt, Artificial Sequence
  GATA2 Guide RNA
ccugagaccacagcagggac

SEQ ID NO: 281 - RNA, 20 nt, Artificial Sequence
  GATA2 Guide RNA
ccugcuguggucucaggucc

SEQ ID NO: 282 - RNA, 20 nt, Artificial Sequence
  GATA2 Guide RNA
cugagaccacagcagggaca

SEQ ID NO: 283 - RNA, 20 nt, Artificial Sequence
  GATA2 Guide RNA
cugcuguggucucaggucca

SEQ ID NO: 284 - RNA, 20 nt, Artificial Sequence
  GATA2 Guide RNA
cuggaccugagaccacagca

SEQ ID NO: 285 - RNA, 20 nt, Artificial Sequence
  GATA2 Guide RNA
cuguggucucagguccagcu

SEQ ID NO: 286 - RNA, 20 nt, Artificial Sequence
  GATA2 Guide RNA
cugugucccugcuguggucu

SEQ ID NO: 287 - RNA, 20 nt, Artificial Sequence
  GATA2 Guide RNA
gaccacagcagggacacagc

SEQ ID NO: 288 - RNA, 20 nt, Artificial Sequence
  GATA2 Guide RNA
gaccugagaccacagcaggg

SEQ ID NO: 289 - RNA, 20 nt, Artificial Sequence
  GATA2 Guide RNA
gagaccacagcagggacaca

SEQ ID NO: 290 - RNA, 20 nt, Artificial Sequence
  GATA2 Guide RNA
gagaggcugugucccugcug

SEQ ID NO: 291 - RNA, 20 nt, Artificial Sequence
  GATA2 Guide RNA
gaggcugugucccugcugug

SEQ ID NO: 292 - RNA, 20 nt, Artificial Sequence
  GATA2 Guide RNA
gcuggaccugagaccacagc

SEQ ID NO: 293 - RNA, 20 nt, Artificial Sequence
  GATA2 Guide RNA
gcuguggucucagguccagc

SEQ ID NO: 294 - RNA, 20 nt, Artificial Sequence
  GATA2 Guide RNA
gcugugucccugcugugguc

SEQ ID NO: 295 - RNA, 20 nt, Artificial Sequence
  GATA2 Guide RNA
ggaccugagaccacagcagg

SEQ ID NO: 296 - RNA, 20 nt, Artificial Sequence
  GATA2 Guide RNA
ggagaggcugugucccugcu

SEQ ID NO: 297 - RNA, 20 nt, Artificial Sequence
  GATA2 Guide RNA
ggcugugucccugcuguggu

SEQ ID NO: 298 - RNA, 20 nt, Artificial Sequence
  GATA2 Guide RNA
gggagaggcugugucccugc

SEQ ID NO: 299 - RNA, 20 nt, Artificial Sequence
  GATA2 Guide RNA
guaaagcuggaccugagacc

SEQ ID NO: 300 - RNA, 20 nt, Artificial Sequence
  GATA2 Guide RNA
gucccugcuguggucucagg

SEQ ID NO: 301 - RNA, 20 nt, Artificial Sequence
  GATA2 Guide RNA
guggucucagguccagcuuu

SEQ ID NO: 302 - RNA, 20 nt, Artificial Sequence
  GATA2 Guide RNA
gugucccugcuguggucuca

SEQ ID NO: 303 - RNA, 20 nt, Artificial Sequence
  GATA2 Guide RNA
uaaagcuggaccugagacca

SEQ ID NO: 304 - RNA, 20 nt, Artificial Sequence
  GATA2 Guide RNA
ucccugcuguggucucaggu

SEQ ID NO: 305 - RNA, 20 nt, Artificial Sequence
  GATA2 Guide RNA
ugagaccacagcagggacac

SEQ ID NO: 306 - RNA, 20 nt, Artificial Sequence
  GATA2 Guide RNA
ugcuguggucucagguccag

SEQ ID NO: 307 - RNA, 20 nt, Artificial Sequence
  GATA2 Guide RNA
uggaccugagaccacagcag

SEQ ID NO: 308 - RNA, 20 nt, Artificial Sequence
  GATA2 Guide RNA
ugucccugcuguggucucag

SEQ ID NO: 309 - RNA, 20 nt, Artificial Sequence
  GATA2 Guide RNA
uguggucucagguccagcuu

SEQ ID NO: 310 - RNA, 20 nt, Artificial Sequence
  GATA2 Guide RNA
ugugucccugcuguggucuc

SEQ ID NO: 311 - RNA, 21 nt, Artificial Sequence
  GATA2 Guide RNA
aaagcuggaccugagaccaca

SEQ ID NO: 312 - RNA, 21 nt, Artificial Sequence
  GATA2 Guide RNA
aagcuggaccugagaccacag

SEQ ID NO: 313 - RNA, 21 nt, Artificial Sequence
  GATA2 Guide RNA
acagcagggacacagccucuc

SEQ ID NO: 314 - RNA, 21 nt, Artificial Sequence
  GATA2 Guide RNA
acaguaaagcuggaccugaga

SEQ ID NO: 315 - RNA, 21 nt, Artificial Sequence
  GATA2 Guide RNA
accacagcagggacacagccu

SEQ ID NO: 316 - RNA, 21 nt, Artificial Sequence
  GATA2 Guide RNA
accugagaccacagcagggac

SEQ ID NO: 317 - RNA, 21 nt, Artificial Sequence
  GATA2 Guide RNA
agaccacagcagggacacagc

SEQ ID NO: 318 - RNA, 21 nt, Artificial Sequence
  GATA2 Guide RNA
agaggcugugucccugcugug

SEQ ID NO: 319 - RNA, 21 nt, Artificial Sequence
  GATA2 Guide RNA
agcuggaccugagaccacagc

SEQ ID NO: 320 - RNA, 21 nt, Artificial Sequence
  GATA2 Guide RNA
aggcugugucccugcuguggu

SEQ ID NO: 321 - RNA, 21 nt, Artificial Sequence
  GATA2 Guide RNA
agggagaggcugugucccugc

SEQ ID NO: 322 - RNA, 21 nt, Artificial Sequence
  GATA2 Guide RNA
aguaaagcuggaccugagacc

SEQ ID NO: 323 - RNA, 21 nt, Artificial Sequence
  GATA2 Guide RNA
cacagcagggacacagccucu

SEQ ID NO: 324 - RNA, 21 nt, Artificial Sequence
  GATA2 Guide RNA
cagggagaggcugugucccug

SEQ ID NO: 325 - RNA, 21 nt, Artificial Sequence
  GATA2 Guide RNA
caguaaagcuggaccugagac

SEQ ID NO: 326 - RNA, 21 nt, Artificial Sequence
  GATA2 Guide RNA
ccacagcagggacacagccuc

SEQ ID NO: 327 - RNA, 21 nt, Artificial Sequence
  GATA2 Guide RNA
cccugcuguggucucaggucc

SEQ ID NO: 328 - RNA, 21 nt, Artificial Sequence
  GATA2 Guide RNA
ccugagaccacagcagggaca

SEQ ID NO: 329 - RNA, 21 nt, Artificial Sequence
  GATA2 Guide RNA
ccugcuguggucucaggucca

SEQ ID NO: 330 - RNA, 21 nt, Artificial Sequence
  GATA2 Guide RNA
cugagaccacagcagggacac

SEQ ID NO: 331 - RNA, 21 nt, Artificial Sequence
  GATA2 Guide RNA
cugcuguggucucagguccag

SEQ ID NO: 332 - RNA, 21 nt, Artificial Sequence
  GATA2 Guide RNA
cuggaccugagaccacagcag

SEQ ID NO: 333 - RNA, 21 nt, Artificial Sequence
  GATA2 Guide RNA
cuguggucucagguccagcuu

SEQ ID NO: 334 - RNA, 21 nt, Artificial Sequence
  GATA2 Guide RNA
cugugucccugcuguggucuc

SEQ ID NO: 335 - RNA, 21 nt, Artificial Sequence
  GATA2 Guide RNA
gaccacagcagggacacagcc

SEQ ID NO: 336 - RNA, 21 nt, Artificial Sequence
  GATA2 Guide RNA
gaccugagaccacagcaggga

SEQ ID NO: 337 - RNA, 21 nt, Artificial Sequence
  GATA2 Guide RNA
gagaccacagcagggacacag

SEQ ID NO: 338 - RNA, 21 nt, Artificial Sequence
  GATA2 Guide RNA
gagaggcugugucccugcugu

SEQ ID NO: 339 - RNA, 21 nt, Artificial Sequence
  GATA2 Guide RNA
gaggcugugucccugcugugg

SEQ ID NO: 340 - RNA, 21 nt, Artificial Sequence
  GATA2 Guide RNA
gcuggaccugagaccacagca

SEQ ID NO: 341 - RNA, 21 nt, Artificial Sequence
  GATA2 Guide RNA
gcuguggucucagguccagcu

SEQ ID NO: 342 - RNA, 21 nt, Artificial Sequence
  GATA2 Guide RNA
gcugugucccugcuguggucu

SEQ ID NO: 343 - RNA, 21 nt, Artificial Sequence
  GATA2 Guide RNA
ggaccugagaccacagcaggg

SEQ ID NO: 344 - RNA, 21 nt, Artificial Sequence
  GATA2 Guide RNA
ggagaggcugugucccugcug

SEQ ID NO: 345 - RNA, 21 nt, Artificial Sequence
  GATA2 Guide RNA
ggcugugucccugcugugguc

SEQ ID NO: 346 - RNA, 21 nt, Artificial Sequence
  GATA2 Guide RNA
gggagaggcugugucccugcu

SEQ ID NO: 347 - RNA, 21 nt, Artificial Sequence
  GATA2 Guide RNA
guaaagcuggaccugagacca

SEQ ID NO: 348 - RNA, 21 nt, Artificial Sequence
  GATA2 Guide RNA
gucccugcuguggucucaggu

SEQ ID NO: 349 - RNA, 21 nt, Artificial Sequence
  GATA2 Guide RNA
guggucucagguccagcuuua

SEQ ID NO: 350 - RNA, 21 nt, Artificial Sequence
  GATA2 Guide RNA
gugucccugcuguggucucag

SEQ ID NO: 351 - RNA, 21 nt, Artificial Sequence
  GATA2 Guide RNA
uaaagcuggaccugagaccac

SEQ ID NO: 352 - RNA, 21 nt, Artificial Sequence
  GATA2 Guide RNA
ucccugcuguggucucagguc

SEQ ID NO: 353 - RNA, 21 nt, Artificial Sequence
  GATA2 Guide RNA
ugagaccacagcagggacaca

SEQ ID NO: 354 - RNA, 21 nt, Artificial Sequence
  GATA2 Guide RNA
ugcuguggucucagguccagc

SEQ ID NO: 355 - RNA, 21 nt, Artificial Sequence
  GATA2 Guide RNA
uggaccugagaccacagcagg

SEQ ID NO: 356 - RNA, 21 nt, Artificial Sequence
  GATA2 Guide RNA
ugucccugcuguggucucagg

SEQ ID NO: 357 - RNA, 21 nt, Artificial Sequence
  GATA2 Guide RNA
uguggucucagguccagcuuu

SEQ ID NO: 358 - RNA, 21 nt, Artificial Sequence
  GATA2 Guide RNA
ugugucccugcuguggucuca

SEQ ID NO: 359 - RNA, 22 nt, Artificial Sequence
  GATA2 Guide RNA
aaagcuggaccugagaccacag

SEQ ID NO: 360 - RNA, 22 nt, Artificial Sequence
  GATA2 Guide RNA
aagcuggaccugagaccacagc

SEQ ID NO: 361 - RNA, 22 nt, Artificial Sequence
  GATA2 Guide RNA
acagcagggacacagccucucc

SEQ ID NO: 362 - RNA, 22 nt, Artificial Sequence
  GATA2 Guide RNA
acaguaaagcuggaccugagac

SEQ ID NO: 363 - RNA, 22 nt, Artificial Sequence
  GATA2 Guide RNA
accacagcagggacacagccuc

SEQ ID NO: 364 - RNA, 22 nt, Artificial Sequence
  GATA2 Guide RNA
accugagaccacagcagggaca

SEQ ID NO: 365 - RNA, 22 nt, Artificial Sequence
  GATA2 Guide RNA
agaccacagcagggacacagcc

SEQ ID NO: 366 - RNA, 22 nt, Artificial Sequence
  GATA2 Guide RNA
agaggcugugucccugcugugg

SEQ ID NO: 367 - RNA, 22 nt, Artificial Sequence
  GATA2 Guide RNA
agcuggaccugagaccacagca

SEQ ID NO: 368 - RNA, 22 nt, Artificial Sequence
  GATA2 Guide RNA
aggcugugucccugcugugguc

SEQ ID NO: 369 - RNA, 22 nt, Artificial Sequence
  GATA2 Guide RNA
agggagaggcugugucccugcu

SEQ ID NO: 370 - RNA, 22 nt, Artificial Sequence
  GATA2 Guide RNA
aguaaagcuggaccugagacca

SEQ ID NO: 371 - RNA, 22 nt, Artificial Sequence
  GATA2 Guide RNA
cacagcagggacacagccucuc

SEQ ID NO: 372 - RNA, 22 nt, Artificial Sequence
  GATA2 Guide RNA
cacaguaaagcuggaccugaga

SEQ ID NO: 373 - RNA, 22 nt, Artificial Sequence
  GATA2 Guide RNA
cagggagaggcugugucccugc

SEQ ID NO: 374 - RNA, 22 nt, Artificial Sequence
  GATA2 Guide RNA
caguaaagcuggaccugagacc

SEQ ID NO: 375 - RNA, 22 nt, Artificial Sequence
  GATA2 Guide RNA
ccacagcagggacacagccucu

SEQ ID NO: 376 - RNA, 22 nt, Artificial Sequence
  GATA2 Guide RNA
ccagggagaggcugugucccug

SEQ ID NO: 377 - RNA, 22 nt, Artificial Sequence
  GATA2 Guide RNA
cccugcuguggucucaggucca

SEQ ID NO: 378 - RNA, 22 nt, Artificial Sequence
  GATA2 Guide RNA
ccugagaccacagcagggacac

SEQ ID NO: 379 - RNA, 22 nt, Artificial Sequence
  GATA2 Guide RNA
ccugcuguggucucagguccag

SEQ ID NO: 380 - RNA, 22 nt, Artificial Sequence
  GATA2 Guide RNA
cugagaccacagcagggacaca

SEQ ID NO: 381 - RNA, 22 nt, Artificial Sequence
  GATA2 Guide RNA
cugcuguggucucagguccagc

SEQ ID NO: 382 - RNA, 22 nt, Artificial Sequence
  GATA2 Guide RNA
cuggaccugagaccacagcagg

SEQ ID NO: 383 - RNA, 22 nt, Artificial Sequence
  GATA2 Guide RNA
cuguggucucagguccagcuuu

SEQ ID NO: 384 - RNA, 22 nt, Artificial Sequence
  GATA2 Guide RNA
cugugucccugcuguggucuca

SEQ ID NO: 385 - RNA, 22 nt, Artificial Sequence
  GATA2 Guide RNA
gaccacagcagggacacagccu

SEQ ID NO: 386 - RNA, 22 nt, Artificial Sequence
  GATA2 Guide RNA
gaccugagaccacagcagggac

SEQ ID NO: 387 - RNA, 22 nt, Artificial Sequence
  GATA2 Guide RNA
gagaccacagcagggacacagc

SEQ ID NO: 388 - RNA, 22 nt, Artificial Sequence
  GATA2 Guide RNA
gagaggcugugucccugcugug

SEQ ID NO: 389 - RNA, 22 nt, Artificial Sequence
  GATA2 Guide RNA
gaggcugugucccugcuguggu

SEQ ID NO: 390 - RNA, 22 nt, Artificial Sequence
  GATA2 Guide RNA
gcuggaccugagaccacagcag

SEQ ID NO: 391 - RNA, 22 nt, Artificial Sequence
  GATA2 Guide RNA
gcuguggucucagguccagcuu

SEQ ID NO: 392 - RNA, 22 nt, Artificial Sequence
  GATA2 Guide RNA
gcugugucccugcuguggucuc

SEQ ID NO: 393 - RNA, 22 nt, Artificial Sequence
  GATA2 Guide RNA
ggaccugagaccacagcaggga

SEQ ID NO: 394 - RNA, 22 nt, Artificial Sequence
  GATA2 Guide RNA
ggagaggcugugucccugcugu

SEQ ID NO: 395 - RNA, 22 nt, Artificial Sequence
  GATA2 Guide RNA
ggcugugucccugcuguggucu

SEQ ID NO: 396 - RNA, 22 nt, Artificial Sequence
  GATA2 Guide RNA
gggagaggcugugucccugcug

SEQ ID NO: 397 - RNA, 22 nt, Artificial Sequence
  GATA2 Guide RNA
guaaagcuggaccugagaccac

SEQ ID NO: 398 - RNA, 22 nt, Artificial Sequence
  GATA2 Guide RNA
gucccugcuguggucucagguc

SEQ ID NO: 399 - RNA, 22 nt, Artificial Sequence
  GATA2 Guide RNA
guggucucagguccagcuuuac

SEQ ID NO: 400 - RNA, 22 nt, Artificial Sequence
  GATA2 Guide RNA
gugucccugcuguggucucagg

SEQ ID NO: 401 - RNA, 22 nt, Artificial Sequence
  GATA2 Guide RNA
uaaagcuggaccugagaccaca

SEQ ID NO: 402 - RNA, 22 nt, Artificial Sequence
  GATA2 Guide RNA
ucccugcuguggucucaggucc

SEQ ID NO: 403 - RNA, 22 nt, Artificial Sequence
  GATA2 Guide RNA
ugagaccacagcagggacacag

SEQ ID NO: 404 - RNA, 22 nt, Artificial Sequence
  GATA2 Guide RNA
ugcuguggucucagguccagcu

SEQ ID NO: 405 - RNA, 22 nt, Artificial Sequence
  GATA2 Guide RNA
uggaccugagaccacagcaggg

SEQ ID NO: 406 - RNA, 22 nt, Artificial Sequence
  GATA2 Guide RNA
ugucccugcuguggucucaggu

SEQ ID NO: 407 - RNA, 22 nt, Artificial Sequence
  GATA2 Guide RNA
uguggucucagguccagcuuua

SEQ ID NO: 408 - RNA, 22 nt, Artificial Sequence
  GATA2 Guide RNA
ugugucccugcuguggucucag

SEQ ID NO: 409 - RNA, 20 nt, Artificial Sequence
  GATA2 Guide RNA
aagacccagggagaggcugu

SEQ ID NO: 410 - RNA, 20 nt, Artificial Sequence
  GATA2 Guide RNA
acacagccucucccuggguc

SEQ ID NO: 411 - RNA, 20 nt, Artificial Sequence
  GATA2 Guide RNA
acagccucucccugggucuu

SEQ ID NO: 412 - RNA, 20 nt, Artificial Sequence
  GATA2 Guide RNA
accaagacccagggagaggc

SEQ ID NO: 413 - RNA, 20 nt, Artificial Sequence
  GATA2 Guide RNA
agccucucccugggucuugg

SEQ ID NO: 414 - RNA, 20 nt, Artificial Sequence
  GATA2 Guide RNA
aggaccaagacccagggaga

SEQ ID NO: 415 - RNA, 20 nt, Artificial Sequence
  GATA2 Guide RNA
aggucaggaccaagacccag

SEQ ID NO: 416 - RNA, 20 nt, Artificial Sequence
  GATA2 Guide RNA
aguugggggcaggucaggac

SEQ ID NO: 417 - RNA, 20 nt, Artificial Sequence
  GATA2 Guide RNA
caagacccagggagaggcug

SEQ ID NO: 418 - RNA, 20 nt, Artificial Sequence
  GATA2 Guide RNA
cacagccucucccugggucu

SEQ ID NO: 419 - RNA, 20 nt, Artificial Sequence
  GATA2 Guide RNA
cagccucucccugggucuug

SEQ ID NO: 420 - RNA, 20 nt, Artificial Sequence
  GATA2 Guide RNA
caggaccaagacccagggag

SEQ ID NO: 421 - RNA, 20 nt, Artificial Sequence
  GATA2 Guide RNA
caggucaggaccaagaccca

SEQ ID NO: 422 - RNA, 20 nt, Artificial Sequence
  GATA2 Guide RNA
ccaagacccagggagaggcu

SEQ ID NO: 423 - RNA, 20 nt, Artificial Sequence
  GATA2 Guide RNA
cccugggucuugguccugac

SEQ ID NO: 424 - RNA, 20 nt, Artificial Sequence
  GATA2 Guide RNA
ccucucccugggucuugguc

SEQ ID NO: 425 - RNA, 20 nt, Artificial Sequence
  GATA2 Guide RNA
ccugggucuugguccugacc

SEQ ID NO: 426 - RNA, 20 nt, Artificial Sequence
  GATA2 Guide RNA
cucccugggucuugguccug

SEQ ID NO: 427 - RNA, 20 nt, Artificial Sequence
  GATA2 Guide RNA
cucucccugggucuuggucc

SEQ ID NO: 428 - RNA, 20 nt, Artificial Sequence
  GATA2 Guide RNA
cugggucuugguccugaccu

SEQ ID NO: 429 - RNA, 20 nt, Artificial Sequence
  GATA2 Guide RNA
cuugguccugaccugccccc

SEQ ID NO: 430 - RNA, 20 nt, Artificial Sequence
  GATA2 Guide RNA
gacacagccucucccugggu

SEQ ID NO: 431 - RNA, 20 nt, Artificial Sequence
  GATA2 Guide RNA
gaccaagacccagggagagg

SEQ ID NO: 432 - RNA, 20 nt, Artificial Sequence
  GATA2 Guide RNA
gaguugggggcaggucagga

SEQ ID NO: 433 - RNA, 20 nt, Artificial Sequence
  GATA2 Guide RNA
gcaggucaggaccaagaccc

SEQ ID NO: 434 - RNA, 20 nt, Artificial Sequence
  GATA2 Guide RNA
gccucucccugggucuuggu

SEQ ID NO: 435 - RNA, 20 nt, Artificial Sequence
  GATA2 Guide RNA
ggacacagccucucccuggg

SEQ ID NO: 436 - RNA, 20 nt, Artificial Sequence
  GATA2 Guide RNA
ggaccaagacccagggagag

SEQ ID NO: 437 - RNA, 20 nt, Artificial Sequence
  GATA2 Guide RNA
ggcaggucaggaccaagacc

SEQ ID NO: 438 - RNA, 20 nt, Artificial Sequence
  GATA2 Guide RNA
gggcaggucaggaccaagac

SEQ ID NO: 439 - RNA, 20 nt, Artificial Sequence
  GATA2 Guide RNA
ggggcaggucaggaccaaga

SEQ ID NO: 440 - RNA, 20 nt, Artificial Sequence
  GATA2 Guide RNA
gggggcaggucaggaccaag

SEQ ID NO: 441 - RNA, 20 nt, Artificial Sequence
  GATA2 Guide RNA
gggucuugguccugaccugc

SEQ ID NO: 442 - RNA, 20 nt, Artificial Sequence
  GATA2 Guide RNA
ggucaggaccaagacccagg

SEQ ID NO: 443 - RNA, 20 nt, Artificial Sequence
  GATA2 Guide RNA
ggucuugguccugaccugcc

SEQ ID NO: 444 - RNA, 20 nt, Artificial Sequence
  GATA2 Guide RNA
gucaggaccaagacccaggg

SEQ ID NO: 445 - RNA, 20 nt, Artificial Sequence
  GATA2 Guide RNA
gucuugguccugaccugccc

SEQ ID NO: 446 - RNA, 20 nt, Artificial Sequence
  GATA2 Guide RNA
guugggggcaggucaggacc

SEQ ID NO: 447 - RNA, 20 nt, Artificial Sequence
  GATA2 Guide RNA
ucaggaccaagacccaggga

SEQ ID NO: 448 - RNA, 20 nt, Artificial Sequence
  GATA2 Guide RNA
ucccugggucuugguccuga

SEQ ID NO: 449 - RNA, 20 nt, Artificial Sequence
  GATA2 Guide RNA
ucucccugggucuugguccu

SEQ ID NO: 450 - RNA, 20 nt, Artificial Sequence
  GATA2 Guide RNA
ucuugguccugaccugcccc

SEQ ID NO: 451 - RNA, 20 nt, Artificial Sequence
  GATA2 Guide RNA
ugggggcaggucaggaccaa

SEQ ID NO: 452 - RNA, 20 nt, Artificial Sequence
  GATA2 Guide RNA
ugggucuugguccugaccug

SEQ ID NO: 453 - RNA, 20 nt, Artificial Sequence
  GATA2 Guide RNA
uugggggcaggucaggacca

SEQ ID NO: 454 - RNA, 20 nt, Artificial Sequence
  GATA2 Guide RNA
uugguccugaccugccccca

SEQ ID NO: 455 - RNA, 21 nt, Artificial Sequence
  GATA2 Guide RNA
aagacccagggagaggcugug

SEQ ID NO: 456 - RNA, 21 nt, Artificial Sequence
  GATA2 Guide RNA
acacagccucucccugggucu

SEQ ID NO: 457 - RNA, 21 nt, Artificial Sequence
  GATA2 Guide RNA
acagccucucccugggucuug

SEQ ID NO: 458 - RNA, 21 nt, Artificial Sequence
  GATA2 Guide RNA
accaagacccagggagaggcu

SEQ ID NO: 459 - RNA, 21 nt, Artificial Sequence
  GATA2 Guide RNA
agccucucccugggucuuggu

SEQ ID NO: 460 - RNA, 21 nt, Artificial Sequence
  GATA2 Guide RNA
aggaccaagacccagggagag

SEQ ID NO: 461 - RNA, 21 nt, Artificial Sequence
  GATA2 Guide RNA
aggucaggaccaagacccagg

SEQ ID NO: 462 - RNA, 21 nt, Artificial Sequence
  GATA2 Guide RNA
aguugggggcaggucaggacc

SEQ ID NO: 463 - RNA, 21 nt, Artificial Sequence
  GATA2 Guide RNA
caagacccagggagaggcugu

SEQ ID NO: 464 - RNA, 21 nt, Artificial Sequence
  GATA2 Guide RNA
cacagccucucccugggucuu

SEQ ID NO: 465 - RNA, 21 nt, Artificial Sequence
  GATA2 Guide RNA
cagccucucccugggucuugg

SEQ ID NO: 466 - RNA, 21 nt, Artificial Sequence
  GATA2 Guide RNA
caggaccaagacccagggaga

SEQ ID NO: 467 - RNA, 21 nt, Artificial Sequence
  GATA2 Guide RNA
caggucaggaccaagacccag

SEQ ID NO: 468 - RNA, 21 nt, Artificial Sequence
  GATA2 Guide RNA
ccaagacccagggagaggcug

SEQ ID NO: 469 - RNA, 21 nt, Artificial Sequence
  GATA2 Guide RNA
cccugggucuugguccugacc

SEQ ID NO: 470 - RNA, 21 nt, Artificial Sequence
  GATA2 Guide RNA
ccucucccugggucuuggucc

SEQ ID NO: 471 - RNA, 21 nt, Artificial Sequence
  GATA2 Guide RNA
ccugggucuugguccugaccu

SEQ ID NO: 472 - RNA, 21 nt, Artificial Sequence
  GATA2 Guide RNA
cucccugggucuugguccuga

SEQ ID NO: 473 - RNA, 21 nt, Artificial Sequence
  GATA2 Guide RNA
cucucccugggucuugguccu

SEQ ID NO: 474 - RNA, 21 nt, Artificial Sequence
  GATA2 Guide RNA
cugggucuugguccugaccug

SEQ ID NO: 475 - RNA, 21 nt, Artificial Sequence
  GATA2 Guide RNA
cuugguccugaccugccccca

SEQ ID NO: 476 - RNA, 21 nt, Artificial Sequence
  GATA2 Guide RNA
gacacagccucucccuggguc

SEQ ID NO: 477 - RNA, 21 nt, Artificial Sequence
  GATA2 Guide RNA
gaccaagacccagggagaggc

SEQ ID NO: 478 - RNA, 21 nt, Artificial Sequence
  GATA2 Guide RNA
gaguugggggcaggucaggac

SEQ ID NO: 479 - RNA, 21 nt, Artificial Sequence
  GATA2 Guide RNA
gcaggucaggaccaagaccca

SEQ ID NO: 480 - RNA, 21 nt, Artificial Sequence
  GATA2 Guide RNA
gccucucccugggucuugguc

SEQ ID NO: 481 - RNA, 21 nt, Artificial Sequence
  GATA2 Guide RNA
ggacacagccucucccugggu

SEQ ID NO: 482 - RNA, 21 nt, Artificial Sequence
  GATA2 Guide RNA
ggaccaagacccagggagagg

SEQ ID NO: 483 - RNA, 21 nt, Artificial Sequence
  GATA2 Guide RNA
ggaguugggggcaggucagga

SEQ ID NO: 484 - RNA, 21 nt, Artificial Sequence
  GATA2 Guide RNA
ggcaggucaggaccaagaccc

SEQ ID NO: 485 - RNA, 21 nt, Artificial Sequence
  GATA2 Guide RNA
gggacacagccucucccuggg

SEQ ID NO: 486 - RNA, 21 nt, Artificial Sequence
  GATA2 Guide RNA
gggcaggucaggaccaagacc

SEQ ID NO: 487 - RNA, 21 nt, Artificial Sequence
  GATA2 Guide RNA
ggggcaggucaggaccaagac

SEQ ID NO: 488 - RNA, 21 nt, Artificial Sequence
  GATA2 Guide RNA
gggggcaggucaggaccaaga

SEQ ID NO: 489 - RNA, 21 nt, Artificial Sequence
  GATA2 Guide RNA
gggucuugguccugaccugcc

SEQ ID NO: 490 - RNA, 21 nt, Artificial Sequence
  GATA2 Guide RNA
ggucaggaccaagacccaggg

SEQ ID NO: 491 - RNA, 21 nt, Artificial Sequence
  GATA2 Guide RNA
ggucuugguccugaccugccc

SEQ ID NO: 492 - RNA, 21 nt, Artificial Sequence
  GATA2 Guide RNA
gucaggaccaagacccaggga

SEQ ID NO: 493 - RNA, 21 nt, Artificial Sequence
  GATA2 Guide RNA
gucuugguccugaccugcccc

SEQ ID NO: 494 - RNA, 21 nt, Artificial Sequence
  GATA2 Guide RNA
guugggggcaggucaggacca

SEQ ID NO: 495 - RNA, 21 nt, Artificial Sequence
  GATA2 Guide RNA
ucaggaccaagacccagggag

SEQ ID NO: 496 - RNA, 21 nt, Artificial Sequence
  GATA2 Guide RNA
ucccugggucuugguccugac

SEQ ID NO: 497 - RNA, 21 nt, Artificial Sequence
  GATA2 Guide RNA
ucucccugggucuugguccug

SEQ ID NO: 498 - RNA, 21 nt, Artificial Sequence
  GATA2 Guide RNA
ucuugguccugaccugccccc

SEQ ID NO: 499 - RNA, 21 nt, Artificial Sequence
  GATA2 Guide RNA
ugggggcaggucaggaccaag

SEQ ID NO: 500 - RNA, 21 nt, Artificial Sequence
  GATA2 Guide RNA
ugggucuugguccugaccugc

SEQ ID NO: 501 - RNA, 21 nt, Artificial Sequence
  GATA2 Guide RNA
uugggggcaggucaggaccaa

SEQ ID NO: 502 - RNA, 21 nt, Artificial Sequence
  GATA2 Guide RNA
uugguccugaccugcccccaa

SEQ ID NO: 503 - RNA, 22 nt, Artificial Sequence
  GATA2 Guide RNA
aagacccagggagaggcugugu

SEQ ID NO: 504 - RNA, 22 nt, Artificial Sequence
  GATA2 Guide RNA
acacagccucucccugggucuu

SEQ ID NO: 505 - RNA, 22 nt, Artificial Sequence
  GATA2 Guide RNA
acagccucucccugggucuugg

SEQ ID NO: 506 - RNA, 22 nt, Artificial Sequence
  GATA2 Guide RNA
accaagacccagggagaggcug

SEQ ID NO: 507 - RNA, 22 nt, Artificial Sequence
  GATA2 Guide RNA
agccucucccugggucuugguc

SEQ ID NO: 508 - RNA, 22 nt, Artificial Sequence
  GATA2 Guide RNA
aggaccaagacccagggagagg

SEQ ID NO: 509 - RNA, 22 nt, Artificial Sequence
  GATA2 Guide RNA
aggaguugggggcaggucagga

SEQ ID NO: 510 - RNA, 22 nt, Artificial Sequence
  GATA2 Guide RNA
agggacacagccucucccuggg

SEQ ID NO: 511 - RNA, 22 nt, Artificial Sequence
  GATA2 Guide RNA
aggucaggaccaagacccaggg

SEQ ID NO: 512 - RNA, 22 nt, Artificial Sequence
  GATA2 Guide RNA
aguugggggcaggucaggacca

SEQ ID NO: 513 - RNA, 22 nt, Artificial Sequence
  GATA2 Guide RNA
caagacccagggagaggcugug

SEQ ID NO: 514 - RNA, 22 nt, Artificial Sequence
  GATA2 Guide RNA
cacagccucucccugggucuug

SEQ ID NO: 515 - RNA, 22 nt, Artificial Sequence
  GATA2 Guide RNA
cagccucucccugggucuuggu

SEQ ID NO: 516 - RNA, 22 nt, Artificial Sequence
  GATA2 Guide RNA
caggaccaagacccagggagag

SEQ ID NO: 517 - RNA, 22 nt, Artificial Sequence
  GATA2 Guide RNA
caggucaggaccaagacccagg

SEQ ID NO: 518 - RNA, 22 nt, Artificial Sequence
  GATA2 Guide RNA
ccaagacccagggagaggcugu

SEQ ID NO: 519 - RNA, 22 nt, Artificial Sequence
  GATA2 Guide RNA
cccugggucuugguccugaccu

SEQ ID NO: 520 - RNA, 22 nt, Artificial Sequence
  GATA2 Guide RNA
ccucucccugggucuugguccu

SEQ ID NO: 521 - RNA, 22 nt, Artificial Sequence
  GATA2 Guide RNA
ccugggucuugguccugaccug

SEQ ID NO: 522 - RNA, 22 nt, Artificial Sequence
  GATA2 Guide RNA
cucccugggucuugguccugac

SEQ ID NO: 523 - RNA, 22 nt, Artificial Sequence
  GATA2 Guide RNA
cucucccugggucuugguccug

SEQ ID NO: 524 - RNA, 22 nt, Artificial Sequence
  GATA2 Guide RNA
cugggucuugguccugaccugc

SEQ ID NO: 525 - RNA, 22 nt, Artificial Sequence
  GATA2 Guide RNA
cuugguccugaccugcccccaa

SEQ ID NO: 526 - RNA, 22 nt, Artificial Sequence
  GATA2 Guide RNA
gacacagccucucccugggucu

SEQ ID NO: 527 - RNA, 22 nt, Artificial Sequence
  GATA2 Guide RNA
gaccaagacccagggagaggcu

SEQ ID NO: 528 - RNA, 22 nt, Artificial Sequence
  GATA2 Guide RNA
gaguugggggcaggucaggacc

SEQ ID NO: 529 - RNA, 22 nt, Artificial Sequence
  GATA2 Guide RNA
gcaggucaggaccaagacccag

SEQ ID NO: 530 - RNA, 22 nt, Artificial Sequence
  GATA2 Guide RNA
gccucucccugggucuuggucc

SEQ ID NO: 531 - RNA, 22 nt, Artificial Sequence
  GATA2 Guide RNA
ggacacagccucucccuggguc

SEQ ID NO: 532 - RNA, 22 nt, Artificial Sequence
  GATA2 Guide RNA
ggaccaagacccagggagaggc

SEQ ID NO: 533 - RNA, 22 nt, Artificial Sequence
  GATA2 Guide RNA
ggaguugggggcaggucaggac

SEQ ID NO: 534 - RNA, 22 nt, Artificial Sequence
  GATA2 Guide RNA
ggcaggucaggaccaagaccca

SEQ ID NO: 535 - RNA, 22 nt, Artificial Sequence
  GATA2 Guide RNA
gggacacagccucucccugggu

SEQ ID NO: 536 - RNA, 22 nt, Artificial Sequence
  GATA2 Guide RNA
gggcaggucaggaccaagaccc

SEQ ID NO: 537 - RNA, 22 nt, Artificial Sequence
  GATA2 Guide RNA
ggggcaggucaggaccaagacc

SEQ ID NO: 538 - RNA, 22 nt, Artificial Sequence
  GATA2 Guide RNA
gggggcaggucaggaccaagac

SEQ ID NO: 539 - RNA, 22 nt, Artificial Sequence
  GATA2 Guide RNA
gggucuugguccugaccugccc

SEQ ID NO: 540 - RNA, 22 nt, Artificial Sequence
  GATA2 Guide RNA
ggucaggaccaagacccaggga

SEQ ID NO: 541 - RNA, 22 nt, Artificial Sequence
  GATA2 Guide RNA
ggucuugguccugaccugcccc

SEQ ID NO: 542 - RNA, 22 nt, Artificial Sequence
  GATA2 Guide RNA
gucaggaccaagacccagggag

SEQ ID NO: 543 - RNA, 22 nt, Artificial Sequence
  GATA2 Guide RNA
gucuugguccugaccugccccc

SEQ ID NO: 544 - RNA, 22 nt, Artificial Sequence
  GATA2 Guide RNA
guugggggcaggucaggaccaa

SEQ ID NO: 545 - RNA, 22 nt, Artificial Sequence
  GATA2 Guide RNA
ucaggaccaagacccagggaga

SEQ ID NO: 546 - RNA, 22 nt, Artificial Sequence
  GATA2 Guide RNA
ucccugggucuugguccugacc

SEQ ID NO: 547 - RNA, 22 nt, Artificial Sequence
  GATA2 Guide RNA
ucucccugggucuugguccuga

SEQ ID NO: 548 - RNA, 22 nt, Artificial Sequence
  GATA2 Guide RNA
ucuugguccugaccugccccca

SEQ ID NO: 549 - RNA, 22 nt, Artificial Sequence
  GATA2 Guide RNA
ugggggcaggucaggaccaaga

SEQ ID NO: 550 - RNA, 22 nt, Artificial Sequence
  GATA2 Guide RNA
ugggucuugguccugaccugcc

SEQ ID NO: 551 - RNA, 22 nt, Artificial Sequence
  GATA2 Guide RNA
uugggggcaggucaggaccaag

SEQ ID NO: 552 - RNA, 22 nt, Artificial Sequence
  GATA2 Guide RNA
uugguccugaccugcccccaac

SEQ ID NO: 553 - RNA, 20 nt, Artificial Sequence
  GATA2 Guide RNA
aaaacaauuaacacaucagc

SEQ ID NO: 554 - RNA, 20 nt, Artificial Sequence
  GATA2 Guide RNA
aaacaauuaacacaucagcg

SEQ ID NO: 555 - RNA, 20 nt, Artificial Sequence
  GATA2 Guide RNA
aacaauuaacacaucagcga

SEQ ID NO: 556 - RNA, 20 nt, Artificial Sequence
  GATA2 Guide RNA
aacacaucagcgaguuaagc

SEQ ID NO: 557 - RNA, 20 nt, Artificial Sequence
  GATA2 Guide RNA
aacucgcugauguguuaauu

SEQ ID NO: 558 - RNA, 20 nt, Artificial Sequence
  GATA2 Guide RNA
aauuaacacaucagcgaguu

SEQ ID NO: 559 - RNA, 20 nt, Artificial Sequence
  GATA2 Guide RNA
acaauuaacacaucagcgag

SEQ ID NO: 560 - RNA, 20 nt, Artificial Sequence
  GATA2 Guide RNA
acacaucagcgaguuaagcc

SEQ ID NO: 561 - RNA, 20 nt, Artificial Sequence
  GATA2 Guide RNA
acaucagcgaguuaagccua

SEQ ID NO: 562 - RNA, 20 nt, Artificial Sequence
  GATA2 Guide RNA
acucgcugauguguuaauug

SEQ ID NO: 563 - RNA, 20 nt, Artificial Sequence
  GATA2 Guide RNA
aggcuuaacucgcugaugug

SEQ ID NO: 564 - RNA, 20 nt, Artificial Sequence
  GATA2 Guide RNA
auaggcuuaacucgcugaug

SEQ ID NO: 565 - RNA, 20 nt, Artificial Sequence
  GATA2 Guide RNA
auuaacacaucagcgaguua

SEQ ID NO: 566 - RNA, 20 nt, Artificial Sequence
  GATA2 Guide RNA
caauuaacacaucagcgagu

SEQ ID NO: 567 - RNA, 20 nt, Artificial Sequence
  GATA2 Guide RNA
cacaucagcgaguuaagccu

SEQ ID NO: 568 - RNA, 20 nt, Artificial Sequence
  GATA2 Guide RNA
cauaggcuuaacucgcugau

SEQ ID NO: 569 - RNA, 20 nt, Artificial Sequence
  GATA2 Guide RNA
cgcugauguguuaauuguuu

SEQ ID NO: 570 - RNA, 20 nt, Artificial Sequence
  GATA2 Guide RNA
cucgcugauguguuaauugu

SEQ ID NO: 571 - RNA, 20 nt, Artificial Sequence
  GATA2 Guide RNA
cuuaacucgcugauguguua

SEQ ID NO: 572 - RNA, 20 nt, Artificial Sequence
  GATA2 Guide RNA
gcauaggcuuaacucgcuga

SEQ ID NO: 573 - RNA, 20 nt, Artificial Sequence
  GATA2 Guide RNA
gcugauguguuaauuguuuu

SEQ ID NO: 574 - RNA, 20 nt, Artificial Sequence
  GATA2 Guide RNA
gcuuaacucgcugauguguu

SEQ ID NO: 575 - RNA, 20 nt, Artificial Sequence
  GATA2 Guide RNA
ggcuuaacucgcugaugugu

SEQ ID NO: 576 - RNA, 20 nt, Artificial Sequence
  GATA2 Guide RNA
uaacacaucagcgaguuaag

SEQ ID NO: 577 - RNA, 20 nt, Artificial Sequence
  GATA2 Guide RNA
uaacucgcugauguguuaau

SEQ ID NO: 578 - RNA, 20 nt, Artificial Sequence
  GATA2 Guide RNA
uaggcuuaacucgcugaugu

SEQ ID NO: 579 - RNA, 20 nt, Artificial Sequence
  GATA2 Guide RNA
ucgcugauguguuaauuguu

SEQ ID NO: 580 - RNA, 20 nt, Artificial Sequence
  GATA2 Guide RNA
ugcauaggcuuaacucgcug

SEQ ID NO: 581 - RNA, 20 nt, Artificial Sequence
  GATA2 Guide RNA
uuaacacaucagcgaguuaa

SEQ ID NO: 582 - RNA, 20 nt, Artificial Sequence
  GATA2 Guide RNA
uuaacucgcugauguguuaa

SEQ ID NO: 583 - RNA, 21 nt, Artificial Sequence
  GATA2 Guide RNA
aaaacaauuaacacaucagcg

SEQ ID NO: 584 - RNA, 21 nt, Artificial Sequence
  GATA2 Guide RNA
aaacaauuaacacaucagcga

SEQ ID NO: 585 - RNA, 21 nt, Artificial Sequence
  GATA2 Guide RNA
aacaauuaacacaucagcgag

SEQ ID NO: 586 - RNA, 21 nt, Artificial Sequence
  GATA2 Guide RNA
aacacaucagcgaguuaagcc

SEQ ID NO: 587 - RNA, 21 nt, Artificial Sequence
  GATA2 Guide RNA
aacucgcugauguguuaauug

SEQ ID NO: 588 - RNA, 21 nt, Artificial Sequence
  GATA2 Guide RNA
aauuaacacaucagcgaguua

SEQ ID NO: 589 - RNA, 21 nt, Artificial Sequence
  GATA2 Guide RNA
acaauuaacacaucagcgagu

SEQ ID NO: 590 - RNA, 21 nt, Artificial Sequence
  GATA2 Guide RNA
acacaucagcgaguuaagccu

SEQ ID NO: 591 - RNA, 21 nt, Artificial Sequence
  GATA2 Guide RNA
acaucagcgaguuaagccuau

SEQ ID NO: 592 - RNA, 21 nt, Artificial Sequence
  GATA2 Guide RNA
acucgcugauguguuaauugu

SEQ ID NO: 593 - RNA, 21 nt, Artificial Sequence
  GATA2 Guide RNA
aggcuuaacucgcugaugugu

SEQ ID NO: 594 - RNA, 21 nt, Artificial Sequence
  GATA2 Guide RNA
auaggcuuaacucgcugaugu

SEQ ID NO: 595 - RNA, 21 nt, Artificial Sequence
  GATA2 Guide RNA
augcauaggcuuaacucgcug

SEQ ID NO: 596 - RNA, 21 nt, Artificial Sequence
  GATA2 Guide RNA
auuaacacaucagcgaguuaa

SEQ ID NO: 597 - RNA, 21 nt, Artificial Sequence
  GATA2 Guide RNA
caauuaacacaucagcgaguu

SEQ ID NO: 598 - RNA, 21 nt, Artificial Sequence
  GATA2 Guide RNA
cacaucagcgaguuaagccua

SEQ ID NO: 599 - RNA, 21 nt, Artificial Sequence
  GATA2 Guide RNA
cauaggcuuaacucgcugaug

SEQ ID NO: 600 - RNA, 21 nt, Artificial Sequence
  GATA2 Guide RNA
cgcugauguguuaauuguuuu

SEQ ID NO: 601 - RNA, 21 nt, Artificial Sequence
  GATA2 Guide RNA
cucgcugauguguuaauuguu

SEQ ID NO: 602 - RNA, 21 nt, Artificial Sequence
  GATA2 Guide RNA
cuuaacucgcugauguguuaa

SEQ ID NO: 603 - RNA, 21 nt, Artificial Sequence
  GATA2 Guide RNA
gcauaggcuuaacucgcugau

SEQ ID NO: 604 - RNA, 21 nt, Artificial Sequence
  GATA2 Guide RNA
gcuuaacucgcugauguguua

SEQ ID NO: 605 - RNA, 21 nt, Artificial Sequence
  GATA2 Guide RNA
ggcuuaacucgcugauguguu

SEQ ID NO: 606 - RNA, 21 nt, Artificial Sequence
  GATA2 Guide RNA
uaacacaucagcgaguuaagc

SEQ ID NO: 607 - RNA, 21 nt, Artificial Sequence
  GATA2 Guide RNA
uaacucgcugauguguuaauu

SEQ ID NO: 608 - RNA, 21 nt, Artificial Sequence
  GATA2 Guide RNA
uaggcuuaacucgcugaugug

SEQ ID NO: 609 - RNA, 21 nt, Artificial Sequence
  GATA2 Guide RNA
ucgcugauguguuaauuguuu

SEQ ID NO: 610 - RNA, 21 nt, Artificial Sequence
  GATA2 Guide RNA
ugcauaggcuuaacucgcuga

SEQ ID NO: 611 - RNA, 21 nt, Artificial Sequence
  GATA2 Guide RNA
uuaacacaucagcgaguuaag

SEQ ID NO: 612 - RNA, 21 nt, Artificial Sequence
  GATA2 Guide RNA
uuaacucgcugauguguuaau

SEQ ID NO: 613 - RNA, 22 nt, Artificial Sequence
  GATA2 Guide RNA
aaaacaauuaacacaucagcga

SEQ ID NO: 614 - RNA, 22 nt, Artificial Sequence
  GATA2 Guide RNA
aaacaauuaacacaucagcgag

SEQ ID NO: 615 - RNA, 22 nt, Artificial Sequence
  GATA2 Guide RNA
aacaauuaacacaucagcgagu

SEQ ID NO: 616 - RNA, 22 nt, Artificial Sequence
  GATA2 Guide RNA
aacacaucagcgaguuaagccu

SEQ ID NO: 617 - RNA, 22 nt, Artificial Sequence
  GATA2 Guide RNA
aacucgcugauguguuaauugu

SEQ ID NO: 618 - RNA, 22 nt, Artificial Sequence
  GATA2 Guide RNA
aaugcauaggcuuaacucgcug

SEQ ID NO: 619 - RNA, 22 nt, Artificial Sequence
  GATA2 Guide RNA
aauuaacacaucagcgaguuaa

SEQ ID NO: 620 - RNA, 22 nt, Artificial Sequence
  GATA2 Guide RNA
acaauuaacacaucagcgaguu

SEQ ID NO: 621 - RNA, 22 nt, Artificial Sequence
  GATA2 Guide RNA
acacaucagcgaguuaagccua

SEQ ID NO: 622 - RNA, 22 nt, Artificial Sequence
  GATA2 Guide RNA
acaucagcgaguuaagccuaug

SEQ ID NO: 623 - RNA, 22 nt, Artificial Sequence
  GATA2 Guide RNA
acucgcugauguguuaauuguu

SEQ ID NO: 624 - RNA, 22 nt, Artificial Sequence
  GATA2 Guide RNA
aggcuuaacucgcugauguguu

SEQ ID NO: 625 - RNA, 22 nt, Artificial Sequence
  GATA2 Guide RNA
auaggcuuaacucgcugaugug

SEQ ID NO: 626 - RNA, 22 nt, Artificial Sequence
  GATA2 Guide RNA
augcauaggcuuaacucgcuga

SEQ ID NO: 627 - RNA, 22 nt, Artificial Sequence
  GATA2 Guide RNA
auuaacacaucagcgaguuaag

SEQ ID NO: 628 - RNA, 22 nt, Artificial Sequence
  GATA2 Guide RNA
caauuaacacaucagcgaguua

SEQ ID NO: 629 - RNA, 22 nt, Artificial Sequence
  GATA2 Guide RNA
cacaucagcgaguuaagccuau

SEQ ID NO: 630 - RNA, 22 nt, Artificial Sequence
  GATA2 Guide RNA
cauaggcuuaacucgcugaugu

SEQ ID NO: 631 - RNA, 22 nt, Artificial Sequence
  GATA2 Guide RNA
cgcugauguguuaauuguuuua

SEQ ID NO: 632 - RNA, 22 nt, Artificial Sequence
  GATA2 Guide RNA
cucgcugauguguuaauuguuu

SEQ ID NO: 633 - RNA, 22 nt, Artificial Sequence
  GATA2 Guide RNA
cuuaacucgcugauguguuaau

SEQ ID NO: 634 - RNA, 22 nt, Artificial Sequence
  GATA2 Guide RNA
gcauaggcuuaacucgcugaug

SEQ ID NO: 635 - RNA, 22 nt, Artificial Sequence
  GATA2 Guide RNA
gcuuaacucgcugauguguuaa

SEQ ID NO: 636 - RNA, 22 nt, Artificial Sequence
  GATA2 Guide RNA
ggcuuaacucgcugauguguua

SEQ ID NO: 637 - RNA, 22 nt, Artificial Sequence
  GATA2 Guide RNA
uaaaacaauuaacacaucagcg

SEQ ID NO: 638 - RNA, 22 nt, Artificial Sequence
  GATA2 Guide RNA
uaacacaucagcgaguuaagcc

SEQ ID NO: 639 - RNA, 22 nt, Artificial Sequence
  GATA2 Guide RNA
uaacucgcugauguguuaauug

SEQ ID NO: 640 - RNA, 22 nt, Artificial Sequence
  GATA2 Guide RNA
uaggcuuaacucgcugaugugu

SEQ ID NO: 641 - RNA, 22 nt, Artificial Sequence
  GATA2 Guide RNA
ucgcugauguguuaauuguuuu

SEQ ID NO: 642 - RNA, 22 nt, Artificial Sequence
  GATA2 Guide RNA
ugcauaggcuuaacucgcugau

SEQ ID NO: 643 - RNA, 22 nt, Artificial Sequence
  GATA2 Guide RNA
uuaacacaucagcgaguuaagc

SEQ ID NO: 644 - RNA, 22 nt, Artificial Sequence
  GATA2 Guide RNA
uuaacucgcugauguguuaauu

SEQ ID NO: 645 - RNA, 20 nt, Artificial Sequence
  GATA2 Guide RNA
aaacgucucccagauugcuc

SEQ ID NO: 646 - RNA, 20 nt, Artificial Sequence
  GATA2 Guide RNA
aaagccaagggagcaaucug

SEQ ID NO: 647 - RNA, 20 nt, Artificial Sequence
  GATA2 Guide RNA
aaaggggaaacgucucccag

SEQ ID NO: 648 - RNA, 20 nt, Artificial Sequence
  GATA2 Guide RNA
aacgucucccagauugcucc

SEQ ID NO: 649 - RNA, 20 nt, Artificial Sequence
  GATA2 Guide RNA
aagccaagggagcaaucugg

SEQ ID NO: 650 - RNA, 20 nt, Artificial Sequence
  GATA2 Guide RNA
aagggagcaaucugggagac

SEQ ID NO: 651 - RNA, 20 nt, Artificial Sequence
  GATA2 Guide RNA
aaggggaaacgucucccaga

SEQ ID NO: 652 - RNA, 20 nt, Artificial Sequence
  GATA2 Guide RNA
aaucugggagacguuucccc

SEQ ID NO: 653 - RNA, 20 nt, Artificial Sequence
  GATA2 Guide RNA
acgucucccagauugcuccc

SEQ ID NO: 654 - RNA, 20 nt, Artificial Sequence
  GATA2 Guide RNA
agauugcucccuuggcuuug

SEQ ID NO: 655 - RNA, 20 nt, Artificial Sequence
  GATA2 Guide RNA
agcaaucugggagacguuuc

SEQ ID NO: 656 - RNA, 20 nt, Artificial Sequence
  GATA2 Guide RNA
agccaagggagcaaucuggg

SEQ ID NO: 657 - RNA, 20 nt, Artificial Sequence
  GATA2 Guide RNA
agggagcaaucugggagacg

SEQ ID NO: 658 - RNA, 20 nt, Artificial Sequence
  GATA2 Guide RNA
aggggaaacgucucccagau

SEQ ID NO: 659 - RNA, 20 nt, Artificial Sequence
  GATA2 Guide RNA
auugcucccuuggcuuugag

SEQ ID NO: 660 - RNA, 20 nt, Artificial Sequence
  GATA2 Guide RNA
caaagccaagggagcaaucu

SEQ ID NO: 661 - RNA, 20 nt, Artificial Sequence
  GATA2 Guide RNA
caagggagcaaucugggaga

SEQ ID NO: 662 - RNA, 20 nt, Artificial Sequence
  GATA2 Guide RNA
caaucugggagacguuuccc

SEQ ID NO: 663 - RNA, 20 nt, Artificial Sequence
  GATA2 Guide RNA
cagauugcucccuuggcuuu

SEQ ID NO: 664 - RNA, 20 nt, Artificial Sequence
  GATA2 Guide RNA
ccaagggagcaaucugggag

SEQ ID NO: 665 - RNA, 20 nt, Artificial Sequence
  GATA2 Guide RNA
ccagauugcucccuuggcuu

SEQ ID NO: 666 - RNA, 20 nt, Artificial Sequence
  GATA2 Guide RNA
cccagauugcucccuuggcu

SEQ ID NO: 667 - RNA, 20 nt, Artificial Sequence
  GATA2 Guide RNA
ccucaaagccaagggagcaa

SEQ ID NO: 668 - RNA, 20 nt, Artificial Sequence
  GATA2 Guide RNA
cggccucaaagccaagggag

SEQ ID NO: 669 - RNA, 20 nt, Artificial Sequence
  GATA2 Guide RNA
cgucucccagauugcucccu

SEQ ID NO: 670 - RNA, 20 nt, Artificial Sequence
  GATA2 Guide RNA
cucaaagccaagggagcaau

SEQ ID NO: 671 - RNA, 20 nt, Artificial Sequence
  GATA2 Guide RNA
cucccagauugcucccuugg

SEQ ID NO: 672 - RNA, 20 nt, Artificial Sequence
  GATA2 Guide RNA
gaaacgucucccagauugcu

SEQ ID NO: 673 - RNA, 20 nt, Artificial Sequence
  GATA2 Guide RNA
gaaaggggaaacgucuccca

SEQ ID NO: 674 - RNA, 20 nt, Artificial Sequence
  GATA2 Guide RNA
gagcaaucugggagacguuu

SEQ ID NO: 675 - RNA, 20 nt, Artificial Sequence
  GATA2 Guide RNA
gauugcucccuuggcuuuga

SEQ ID NO: 676 - RNA, 20 nt, Artificial Sequence
  GATA2 Guide RNA
gcaaucugggagacguuucc

SEQ ID NO: 677 - RNA, 20 nt, Artificial Sequence
  GATA2 Guide RNA
gccaagggagcaaucuggga

SEQ ID NO: 678 - RNA, 20 nt, Artificial Sequence
  GATA2 Guide RNA
gccucaaagccaagggagca

SEQ ID NO: 679 - RNA, 20 nt, Artificial Sequence
  GATA2 Guide RNA
ggaaacgucucccagauugc

SEQ ID NO: 680 - RNA, 20 nt, Artificial Sequence
  GATA2 Guide RNA
ggagcaaucugggagacguu

SEQ ID NO: 681 - RNA, 20 nt, Artificial Sequence
  GATA2 Guide RNA
ggccucaaagccaagggagc

SEQ ID NO: 682 - RNA, 20 nt, Artificial Sequence
  GATA2 Guide RNA
gggaaacgucucccagauug

SEQ ID NO: 683 - RNA, 20 nt, Artificial Sequence
  GATA2 Guide RNA
gggagcaaucugggagacgu

SEQ ID NO: 684 - RNA, 20 nt, Artificial Sequence
  GATA2 Guide RNA
ggggaaacgucucccagauu

SEQ ID NO: 685 - RNA, 20 nt, Artificial Sequence
  GATA2 Guide RNA
gucucccagauugcucccuu

SEQ ID NO: 686 - RNA, 20 nt, Artificial Sequence
  GATA2 Guide RNA
ucaaagccaagggagcaauc

SEQ ID NO: 687 - RNA, 20 nt, Artificial Sequence
  GATA2 Guide RNA
ucccagauugcucccuuggc

SEQ ID NO: 688 - RNA, 20 nt, Artificial Sequence
  GATA2 Guide RNA
ucggccucaaagccaaggga

SEQ ID NO: 689 - RNA, 20 nt, Artificial Sequence
  GATA2 Guide RNA
ucucccagauugcucccuug

SEQ ID NO: 690 - RNA, 20 nt, Artificial Sequence
  GATA2 Guide RNA
uugcucccuuggcuuugagg

SEQ ID NO: 691 - RNA, 21 nt, Artificial Sequence
  GATA2 Guide RNA
aaacgucucccagauugcucc

SEQ ID NO: 692 - RNA, 21 nt, Artificial Sequence
  GATA2 Guide RNA
aaagccaagggagcaaucugg

SEQ ID NO: 693 - RNA, 21 nt, Artificial Sequence
  GATA2 Guide RNA
aaaggggaaacgucucccaga

SEQ ID NO: 694 - RNA, 21 nt, Artificial Sequence
  GATA2 Guide RNA
aacgucucccagauugcuccc

SEQ ID NO: 695 - RNA, 21 nt, Artificial Sequence
  GATA2 Guide RNA
aagccaagggagcaaucuggg

SEQ ID NO: 696 - RNA, 21 nt, Artificial Sequence
  GATA2 Guide RNA
aagggagcaaucugggagacg

SEQ ID NO: 697 - RNA, 21 nt, Artificial Sequence
  GATA2 Guide RNA
aaggggaaacgucucccagau

SEQ ID NO: 698 - RNA, 21 nt, Artificial Sequence
  GATA2 Guide RNA
aaucugggagacguuuccccu

SEQ ID NO: 699 - RNA, 21 nt, Artificial Sequence
  GATA2 Guide RNA
acgucucccagauugcucccu

SEQ ID NO: 700 - RNA, 21 nt, Artificial Sequence
  GATA2 Guide RNA
agauugcucccuuggcuuuga

SEQ ID NO: 701 - RNA, 21 nt, Artificial Sequence
  GATA2 Guide RNA
agcaaucugggagacguuucc

SEQ ID NO: 702 - RNA, 21 nt, Artificial Sequence
  GATA2 Guide RNA
agccaagggagcaaucuggga

SEQ ID NO: 703 - RNA, 21 nt, Artificial Sequence
  GATA2 Guide RNA
agggagcaaucugggagacgu

SEQ ID NO: 704 - RNA, 21 nt, Artificial Sequence
  GATA2 Guide RNA
aggggaaacgucucccagauu

SEQ ID NO: 705 - RNA, 21 nt, Artificial Sequence
  GATA2 Guide RNA
auugcucccuuggcuuugagg

SEQ ID NO: 706 - RNA, 21 nt, Artificial Sequence
  GATA2 Guide RNA
caaagccaagggagcaaucug

SEQ ID NO: 707 - RNA, 21 nt, Artificial Sequence
  GATA2 Guide RNA
caagggagcaaucugggagac

SEQ ID NO: 708 - RNA, 21 nt, Artificial Sequence
  GATA2 Guide RNA
caaucugggagacguuucccc

SEQ ID NO: 709 - RNA, 21 nt, Artificial Sequence
  GATA2 Guide RNA
cagauugcucccuuggcuuug

SEQ ID NO: 710 - RNA, 21 nt, Artificial Sequence
  GATA2 Guide RNA
ccaagggagcaaucugggaga

SEQ ID NO: 711 - RNA, 21 nt, Artificial Sequence
  GATA2 Guide RNA
ccagauugcucccuuggcuuu

SEQ ID NO: 712 - RNA, 21 nt, Artificial Sequence
  GATA2 Guide RNA
cccagauugcucccuuggcuu

SEQ ID NO: 713 - RNA, 21 nt, Artificial Sequence
  GATA2 Guide RNA
ccucaaagccaagggagcaau

SEQ ID NO: 714 - RNA, 21 nt, Artificial Sequence
  GATA2 Guide RNA
cggccucaaagccaagggagc

SEQ ID NO: 715 - RNA, 21 nt, Artificial Sequence
  GATA2 Guide RNA
cgucucccagauugcucccuu

SEQ ID NO: 716 - RNA, 21 nt, Artificial Sequence
  GATA2 Guide RNA
cucaaagccaagggagcaauc

SEQ ID NO: 717 - RNA, 21 nt, Artificial Sequence
  GATA2 Guide RNA
cucccagauugcucccuuggc

SEQ ID NO: 718 - RNA, 21 nt, Artificial Sequence
  GATA2 Guide RNA
gaaacgucucccagauugcuc

SEQ ID NO: 719 - RNA, 21 nt, Artificial Sequence
  GATA2 Guide RNA
gaaaggggaaacgucucccag

SEQ ID NO: 720 - RNA, 21 nt, Artificial Sequence
  GATA2 Guide RNA
gagcaaucugggagacguuuc

SEQ ID NO: 721 - RNA, 21 nt, Artificial Sequence
  GATA2 Guide RNA
gauugcucccuuggcuuugag

SEQ ID NO: 722 - RNA, 21 nt, Artificial Sequence
  GATA2 Guide RNA
gcaaucugggagacguuuccc

SEQ ID NO: 723 - RNA, 21 nt, Artificial Sequence
  GATA2 Guide RNA
gccaagggagcaaucugggag

SEQ ID NO: 724 - RNA, 21 nt, Artificial Sequence
  GATA2 Guide RNA
gccucaaagccaagggagcaa

SEQ ID NO: 725 - RNA, 21 nt, Artificial Sequence
  GATA2 Guide RNA
ggaaacgucucccagauugcu

SEQ ID NO: 726 - RNA, 21 nt, Artificial Sequence
  GATA2 Guide RNA
ggagcaaucugggagacguuu

SEQ ID NO: 727 - RNA, 21 nt, Artificial Sequence
  GATA2 Guide RNA
ggccucaaagccaagggagca

SEQ ID NO: 728 - RNA, 21 nt, Artificial Sequence
  GATA2 Guide RNA
gggaaacgucucccagauugc

SEQ ID NO: 729 - RNA, 21 nt, Artificial Sequence
  GATA2 Guide RNA
gggagcaaucugggagacguu

SEQ ID NO: 730 - RNA, 21 nt, Artificial Sequence
  GATA2 Guide RNA
ggggaaacgucucccagauug

SEQ ID NO: 731 - RNA, 21 nt, Artificial Sequence
  GATA2 Guide RNA
gucucccagauugcucccuug

SEQ ID NO: 732 - RNA, 21 nt, Artificial Sequence
  GATA2 Guide RNA
ucaaagccaagggagcaaucu

SEQ ID NO: 733 - RNA, 21 nt, Artificial Sequence
  GATA2 Guide RNA
ucccagauugcucccuuggcu

SEQ ID NO: 734 - RNA, 21 nt, Artificial Sequence
  GATA2 Guide RNA
ucggccucaaagccaagggag

SEQ ID NO: 735 - RNA, 21 nt, Artificial Sequence
  GATA2 Guide RNA
ucucccagauugcucccuugg

SEQ ID NO: 736 - RNA, 21 nt, Artificial Sequence
  GATA2 Guide RNA
ugaaaggggaaacgucuccca

SEQ ID NO: 737 - RNA, 21 nt, Artificial Sequence
  GATA2 Guide RNA
uucggccucaaagccaaggga

SEQ ID NO: 738 - RNA, 21 nt, Artificial Sequence
  GATA2 Guide RNA
uugcucccuuggcuuugaggc

SEQ ID NO: 739 - RNA, 22 nt, Artificial Sequence
  GATA2 Guide RNA
aaacgucucccagauugcuccc

SEQ ID NO: 740 - RNA, 22 nt, Artificial Sequence
  GATA2 Guide RNA
aaagccaagggagcaaucuggg

SEQ ID NO: 741 - RNA, 22 nt, Artificial Sequence
  GATA2 Guide RNA
aaaggggaaacgucucccagau

SEQ ID NO: 742 - RNA, 22 nt, Artificial Sequence
  GATA2 Guide RNA
aacgucucccagauugcucccu

SEQ ID NO: 743 - RNA, 22 nt, Artificial Sequence
  GATA2 Guide RNA
aagccaagggagcaaucuggga

SEQ ID NO: 744 - RNA, 22 nt, Artificial Sequence
  GATA2 Guide RNA
aagggagcaaucugggagacgu

SEQ ID NO: 745 - RNA, 22 nt, Artificial Sequence
  GATA2 Guide RNA
aaggggaaacgucucccagauu

SEQ ID NO: 746 - RNA, 22 nt, Artificial Sequence
  GATA2 Guide RNA
aaucugggagacguuuccccuu

SEQ ID NO: 747 - RNA, 22 nt, Artificial Sequence
  GATA2 Guide RNA
acgucucccagauugcucccuu

SEQ ID NO: 748 - RNA, 22 nt, Artificial Sequence
  GATA2 Guide RNA
agauugcucccuuggcuuugag

SEQ ID NO: 749 - RNA, 22 nt, Artificial Sequence
  GATA2 Guide RNA
agcaaucugggagacguuuccc

SEQ ID NO: 750 - RNA, 22 nt, Artificial Sequence
  GATA2 Guide RNA
agccaagggagcaaucugggag

SEQ ID NO: 751 - RNA, 22 nt, Artificial Sequence
  GATA2 Guide RNA
agggagcaaucugggagacguu

SEQ ID NO: 752 - RNA, 22 nt, Artificial Sequence
  GATA2 Guide RNA
aggggaaacgucucccagauug

SEQ ID NO: 753 - RNA, 22 nt, Artificial Sequence
  GATA2 Guide RNA
auugcucccuuggcuuugaggc

SEQ ID NO: 754 - RNA, 22 nt, Artificial Sequence
  GATA2 Guide RNA
caaagccaagggagcaaucugg

SEQ ID NO: 755 - RNA, 22 nt, Artificial Sequence
  GATA2 Guide RNA
caagggagcaaucugggagacg

SEQ ID NO: 756 - RNA, 22 nt, Artificial Sequence
  GATA2 Guide RNA
caaucugggagacguuuccccu

SEQ ID NO: 757 - RNA, 22 nt, Artificial Sequence
  GATA2 Guide RNA
cagauugcucccuuggcuuuga

SEQ ID NO: 758 - RNA, 22 nt, Artificial Sequence
  GATA2 Guide RNA
ccaagggagcaaucugggagac

SEQ ID NO: 759 - RNA, 22 nt, Artificial Sequence
  GATA2 Guide RNA
ccagauugcucccuuggcuuug

SEQ ID NO: 760 - RNA, 22 nt, Artificial Sequence
  GATA2 Guide RNA
cccagauugcucccuuggcuuu

SEQ ID NO: 761 - RNA, 22 nt, Artificial Sequence
  GATA2 Guide RNA
ccucaaagccaagggagcaauc

SEQ ID NO: 762 - RNA, 22 nt, Artificial Sequence
  GATA2 Guide RNA
cggccucaaagccaagggagca

SEQ ID NO: 763 - RNA, 22 nt, Artificial Sequence
  GATA2 Guide RNA
cgucucccagauugcucccuug

SEQ ID NO: 764 - RNA, 22 nt, Artificial Sequence
  GATA2 Guide RNA
cucaaagccaagggagcaaucu

SEQ ID NO: 765 - RNA, 22 nt, Artificial Sequence
  GATA2 Guide RNA
cucccagauugcucccuuggcu

SEQ ID NO: 766 - RNA, 22 nt, Artificial Sequence
  GATA2 Guide RNA
cuucggccucaaagccaaggga

SEQ ID NO: 767 - RNA, 22 nt, Artificial Sequence
  GATA2 Guide RNA
gaaacgucucccagauugcucc

SEQ ID NO: 768 - RNA, 22 nt, Artificial Sequence
  GATA2 Guide RNA
gaaaggggaaacgucucccaga

SEQ ID NO: 769 - RNA, 22 nt, Artificial Sequence
  GATA2 Guide RNA
gagcaaucugggagacguuucc

SEQ ID NO: 770 - RNA, 22 nt, Artificial Sequence
  GATA2 Guide RNA
gauugcucccuuggcuuugagg

SEQ ID NO: 771 - RNA, 22 nt, Artificial Sequence
  GATA2 Guide RNA
gcaaucugggagacguuucccc

SEQ ID NO: 772 - RNA, 22 nt, Artificial Sequence
  GATA2 Guide RNA
gccaagggagcaaucugggaga

SEQ ID NO: 773 - RNA, 22 nt, Artificial Sequence
  GATA2 Guide RNA
gccucaaagccaagggagcaau

SEQ ID NO: 774 - RNA, 22 nt, Artificial Sequence
  GATA2 Guide RNA
ggaaacgucucccagauugcuc

SEQ ID NO: 775 - RNA, 22 nt, Artificial Sequence
  GATA2 Guide RNA
ggagcaaucugggagacguuuc

SEQ ID NO: 776 - RNA, 22 nt, Artificial Sequence
  GATA2 Guide RNA
ggccucaaagccaagggagcaa

SEQ ID NO: 777 - RNA, 22 nt, Artificial Sequence
  GATA2 Guide RNA
gggaaacgucucccagauugcu

SEQ ID NO: 778 - RNA, 22 nt, Artificial Sequence
  GATA2 Guide RNA
gggagcaaucugggagacguuu

SEQ ID NO: 779 - RNA, 22 nt, Artificial Sequence
  GATA2 Guide RNA
ggggaaacgucucccagauugc

SEQ ID NO: 780 - RNA, 22 nt, Artificial Sequence
  GATA2 Guide RNA
gucucccagauugcucccuugg

SEQ ID NO: 781 - RNA, 22 nt, Artificial Sequence
  GATA2 Guide RNA
ucaaagccaagggagcaaucug

SEQ ID NO: 782 - RNA, 22 nt, Artificial Sequence
  GATA2 Guide RNA
ucccagauugcucccuuggcuu

SEQ ID NO: 783 - RNA, 22 nt, Artificial Sequence
  GATA2 Guide RNA
ucggccucaaagccaagggagc

SEQ ID NO: 784 - RNA, 22 nt, Artificial Sequence
  GATA2 Guide RNA
ucucccagauugcucccuuggc

SEQ ID NO: 785 - RNA, 22 nt, Artificial Sequence
  GATA2 Guide RNA
ugaaaggggaaacgucucccag

SEQ ID NO: 786 - RNA, 22 nt, Artificial Sequence
  GATA2 Guide RNA
uucggccucaaagccaagggag

SEQ ID NO: 787 - RNA, 22 nt, Artificial Sequence
  GATA2 Guide RNA
uugaaaggggaaacgucuccca

SEQ ID NO: 788 - RNA, 22 nt, Artificial Sequence
  GATA2 Guide RNA
uugcucccuuggcuuugaggcc

SEQ ID NO: 789 - RNA, 20 nt, Artificial Sequence
  GATA2 Guide RNA
aaagcagacaccagcucacc

SEQ ID NO: 790 - RNA, 20 nt, Artificial Sequence
  GATA2 Guide RNA
aagcagacaccagcucaccc

SEQ ID NO: 791 - RNA, 20 nt, Artificial Sequence
  GATA2 Guide RNA
acaccagcucacccucccug

SEQ ID NO: 792 - RNA, 20 nt, Artificial Sequence
  GATA2 Guide RNA
agacaccagcucacccuccc

SEQ ID NO: 793 - RNA, 20 nt, Artificial Sequence
  GATA2 Guide RNA
agcagacaccagcucacccu

SEQ ID NO: 794 - RNA, 20 nt, Artificial Sequence
  GATA2 Guide RNA
agcuggugucugcuuugacg

SEQ ID NO: 795 - RNA, 20 nt, Artificial Sequence
  GATA2 Guide RNA
agggagggugagcugguguc

SEQ ID NO: 796 - RNA, 20 nt, Artificial Sequence
  GATA2 Guide RNA
agggccuggcccgucaaagc

SEQ ID NO: 797 - RNA, 20 nt, Artificial Sequence
  GATA2 Guide RNA
agggugagcuggugucugcu

SEQ ID NO: 798 - RNA, 20 nt, Artificial Sequence
  GATA2 Guide RNA
caaagcagacaccagcucac

SEQ ID NO: 799 - RNA, 20 nt, Artificial Sequence
  GATA2 Guide RNA
cagacaccagcucacccucc

SEQ ID NO: 800 - RNA, 20 nt, Artificial Sequence
  GATA2 Guide RNA
cagggagggugagcuggugu

SEQ ID NO: 801 - RNA, 20 nt, Artificial Sequence
  GATA2 Guide RNA
ccagggagggugagcuggug

SEQ ID NO: 802 - RNA, 20 nt, Artificial Sequence
  GATA2 Guide RNA
cccagggagggugagcuggu

SEQ ID NO: 803 - RNA, 20 nt, Artificial Sequence
  GATA2 Guide RNA
cccgucaaagcagacaccag

SEQ ID NO: 804 - RNA, 20 nt, Artificial Sequence
  GATA2 Guide RNA
ccgucaaagcagacaccagc

SEQ ID NO: 805 - RNA, 20 nt, Artificial Sequence
  GATA2 Guide RNA
ccuggcccgucaaagcagac

SEQ ID NO: 806 - RNA, 20 nt, Artificial Sequence
  GATA2 Guide RNA
cgucaaagcagacaccagcu

SEQ ID NO: 807 - RNA, 20 nt, Artificial Sequence
  GATA2 Guide RNA
cuggcccgucaaagcagaca

SEQ ID NO: 808 - RNA, 20 nt, Artificial Sequence
  GATA2 Guide RNA
cuggugucugcuuugacggg

SEQ ID NO: 809 - RNA, 20 nt, Artificial Sequence
  GATA2 Guide RNA
gacaccagcucacccucccu

SEQ ID NO: 810 - RNA, 20 nt, Artificial Sequence
  GATA2 Guide RNA
gagcuggugucugcuuugac

SEQ ID NO: 811 - RNA, 20 nt, Artificial Sequence
  GATA2 Guide RNA
gagggugagcuggugucugc

SEQ ID NO: 812 - RNA, 20 nt, Artificial Sequence
  GATA2 Guide RNA
gcagacaccagcucacccuc

SEQ ID NO: 813 - RNA, 20 nt, Artificial Sequence
  GATA2 Guide RNA
gcccagggagggugagcugg

SEQ ID NO: 814 - RNA, 20 nt, Artificial Sequence
  GATA2 Guide RNA
gcccgucaaagcagacacca

SEQ ID NO: 815 - RNA, 20 nt, Artificial Sequence
  GATA2 Guide RNA
gccuggcccgucaaagcaga

SEQ ID NO: 816 - RNA, 20 nt, Artificial Sequence
  GATA2 Guide RNA
gcuggugucugcuuugacgg

SEQ ID NO: 817 - RNA, 20 nt, Artificial Sequence
  GATA2 Guide RNA
ggagggugagcuggugucug

SEQ ID NO: 818 - RNA, 20 nt, Artificial Sequence
  GATA2 Guide RNA
ggcccagggagggugagcug

SEQ ID NO: 819 - RNA, 20 nt, Artificial Sequence
  GATA2 Guide RNA
ggcccgucaaagcagacacc

SEQ ID NO: 820 - RNA, 20 nt, Artificial Sequence
  GATA2 Guide RNA
ggccuggcccgucaaagcag

SEQ ID NO: 821 - RNA, 20 nt, Artificial Sequence
  GATA2 Guide RNA
gggagggugagcuggugucu

SEQ ID NO: 822 - RNA, 20 nt, Artificial Sequence
  GATA2 Guide RNA
gggccuggcccgucaaagca

SEQ ID NO: 823 - RNA, 20 nt, Artificial Sequence
  GATA2 Guide RNA
gggugagcuggugucugcuu

SEQ ID NO: 824 - RNA, 20 nt, Artificial Sequence
  GATA2 Guide RNA
ggugagcuggugucugcuuu

SEQ ID NO: 825 - RNA, 20 nt, Artificial Sequence
  GATA2 Guide RNA
ggugucugcuuugacgggcc

SEQ ID NO: 826 - RNA, 20 nt, Artificial Sequence
  GATA2 Guide RNA
gucaaagcagacaccagcuc

SEQ ID NO: 827 - RNA, 20 nt, Artificial Sequence
  GATA2 Guide RNA
gucugcuuugacgggccagg

SEQ ID NO: 828 - RNA, 20 nt, Artificial Sequence
  GATA2 Guide RNA
gugagcuggugucugcuuug

SEQ ID NO: 829 - RNA, 20 nt, Artificial Sequence
  GATA2 Guide RNA
gugucugcuuugacgggcca

SEQ ID NO: 830 - RNA, 20 nt, Artificial Sequence
  GATA2 Guide RNA
ucaaagcagacaccagcuca

SEQ ID NO: 831 - RNA, 20 nt, Artificial Sequence
  GATA2 Guide RNA
ugagcuggugucugcuuuga

SEQ ID NO: 832 - RNA, 20 nt, Artificial Sequence
  GATA2 Guide RNA
uggcccgucaaagcagacac

SEQ ID NO: 833 - RNA, 20 nt, Artificial Sequence
  GATA2 Guide RNA
uggugucugcuuugacgggc

SEQ ID NO: 834 - RNA, 20 nt, Artificial Sequence
  GATA2 Guide RNA
ugucugcuuugacgggccag

SEQ ID NO: 835 - RNA, 21 nt, Artificial Sequence
  GATA2 Guide RNA
aaagcagacaccagcucaccc

SEQ ID NO: 836 - RNA, 21 nt, Artificial Sequence
  GATA2 Guide RNA
aagcagacaccagcucacccu

SEQ ID NO: 837 - RNA, 21 nt, Artificial Sequence
  GATA2 Guide RNA
acaccagcucacccucccugg

SEQ ID NO: 838 - RNA, 21 nt, Artificial Sequence
  GATA2 Guide RNA
agacaccagcucacccucccu

SEQ ID NO: 839 - RNA, 21 nt, Artificial Sequence
  GATA2 Guide RNA
agcagacaccagcucacccuc

SEQ ID NO: 840 - RNA, 21 nt, Artificial Sequence
  GATA2 Guide RNA
agcuggugucugcuuugacgg

SEQ ID NO: 841 - RNA, 21 nt, Artificial Sequence
  GATA2 Guide RNA
agggagggugagcuggugucu

SEQ ID NO: 842 - RNA, 21 nt, Artificial Sequence
  GATA2 Guide RNA
agggccuggcccgucaaagca

SEQ ID NO: 843 - RNA, 21 nt, Artificial Sequence
  GATA2 Guide RNA
agggugagcuggugucugcuu

SEQ ID NO: 844 - RNA, 21 nt, Artificial Sequence
  GATA2 Guide RNA
caaagcagacaccagcucacc

SEQ ID NO: 845 - RNA, 21 nt, Artificial Sequence
  GATA2 Guide RNA
cagacaccagcucacccuccc

SEQ ID NO: 846 - RNA, 21 nt, Artificial Sequence
  GATA2 Guide RNA
cagggagggugagcugguguc

SEQ ID NO: 847 - RNA, 21 nt, Artificial Sequence
  GATA2 Guide RNA
cagggccuggcccgucaaagc

SEQ ID NO: 848 - RNA, 21 nt, Artificial Sequence
  GATA2 Guide RNA
ccagggagggugagcuggugu

SEQ ID NO: 849 - RNA, 21 nt, Artificial Sequence
  GATA2 Guide RNA
cccagggagggugagcuggug

SEQ ID NO: 850 - RNA, 21 nt, Artificial Sequence
  GATA2 Guide RNA
cccgucaaagcagacaccagc

SEQ ID NO: 851 - RNA, 21 nt, Artificial Sequence
  GATA2 Guide RNA
ccgucaaagcagacaccagcu

SEQ ID NO: 852 - RNA, 21 nt, Artificial Sequence
  GATA2 Guide RNA
ccuggcccgucaaagcagaca

SEQ ID NO: 853 - RNA, 21 nt, Artificial Sequence
  GATA2 Guide RNA
cggcccagggagggugagcug

SEQ ID NO: 854 - RNA, 21 nt, Artificial Sequence
  GATA2 Guide RNA
cgucaaagcagacaccagcuc

SEQ ID NO: 855 - RNA, 21 nt, Artificial Sequence
  GATA2 Guide RNA
cuggcccgucaaagcagacac

SEQ ID NO: 856 - RNA, 21 nt, Artificial Sequence
  GATA2 Guide RNA
cuggugucugcuuugacgggc

SEQ ID NO: 857 - RNA, 21 nt, Artificial Sequence
  GATA2 Guide RNA
gacaccagcucacccucccug

SEQ ID NO: 858 - RNA, 21 nt, Artificial Sequence
  GATA2 Guide RNA
gagcuggugucugcuuugacg

SEQ ID NO: 859 - RNA, 21 nt, Artificial Sequence
  GATA2 Guide RNA
gagggugagcuggugucugcu

SEQ ID NO: 860 - RNA, 21 nt, Artificial Sequence
  GATA2 Guide RNA
gcagacaccagcucacccucc

SEQ ID NO: 861 - RNA, 21 nt, Artificial Sequence
  GATA2 Guide RNA
gcccagggagggugagcuggu

SEQ ID NO: 862 - RNA, 21 nt, Artificial Sequence
  GATA2 Guide RNA
gcccgucaaagcagacaccag

SEQ ID NO: 863 - RNA, 21 nt, Artificial Sequence
  GATA2 Guide RNA
gccuggcccgucaaagcagac

SEQ ID NO: 864 - RNA, 21 nt, Artificial Sequence
  GATA2 Guide RNA
gcuggugucugcuuugacggg

SEQ ID NO: 865 - RNA, 21 nt, Artificial Sequence
  GATA2 Guide RNA
ggagggugagcuggugucugc

SEQ ID NO: 866 - RNA, 21 nt, Artificial Sequence
  GATA2 Guide RNA
ggcccagggagggugagcugg

SEQ ID NO: 867 - RNA, 21 nt, Artificial Sequence
  GATA2 Guide RNA
ggcccgucaaagcagacacca

SEQ ID NO: 868 - RNA, 21 nt, Artificial Sequence
  GATA2 Guide RNA
ggccuggcccgucaaagcaga

SEQ ID NO: 869 - RNA, 21 nt, Artificial Sequence
  GATA2 Guide RNA
gggagggugagcuggugucug

SEQ ID NO: 870 - RNA, 21 nt, Artificial Sequence
  GATA2 Guide RNA
gggccuggcccgucaaagcag

SEQ ID NO: 871 - RNA, 21 nt, Artificial Sequence
  GATA2 Guide RNA
gggugagcuggugucugcuuu

SEQ ID NO: 872 - RNA, 21 nt, Artificial Sequence
  GATA2 Guide RNA
ggugagcuggugucugcuuug

SEQ ID NO: 873 - RNA, 21 nt, Artificial Sequence
  GATA2 Guide RNA
ggugucugcuuugacgggcca

SEQ ID NO: 874 - RNA, 21 nt, Artificial Sequence
  GATA2 Guide RNA
gucaaagcagacaccagcuca

SEQ ID NO: 875 - RNA, 21 nt, Artificial Sequence
  GATA2 Guide RNA
gucugcuuugacgggccaggc

SEQ ID NO: 876 - RNA, 21 nt, Artificial Sequence
  GATA2 Guide RNA
gugagcuggugucugcuuuga

SEQ ID NO: 877 - RNA, 21 nt, Artificial Sequence
  GATA2 Guide RNA
gugucugcuuugacgggccag

SEQ ID NO: 878 - RNA, 21 nt, Artificial Sequence
  GATA2 Guide RNA
ucaaagcagacaccagcucac

SEQ ID NO: 879 - RNA, 21 nt, Artificial Sequence
  GATA2 Guide RNA
ugagcuggugucugcuuugac

SEQ ID NO: 880 - RNA, 21 nt, Artificial Sequence
  GATA2 Guide RNA
uggcccgucaaagcagacacc

SEQ ID NO: 881 - RNA, 21 nt, Artificial Sequence
  GATA2 Guide RNA
uggugucugcuuugacgggcc

SEQ ID NO: 882 - RNA, 21 nt, Artificial Sequence
  GATA2 Guide RNA
ugucugcuuugacgggccagg

SEQ ID NO: 883 - RNA, 22 nt, Artificial Sequence
  GATA2 Guide RNA
aaagcagacaccagcucacccu

SEQ ID NO: 884 - RNA, 22 nt, Artificial Sequence
  GATA2 Guide RNA
aagcagacaccagcucacccuc

SEQ ID NO: 885 - RNA, 22 nt, Artificial Sequence
  GATA2 Guide RNA
acaccagcucacccucccuggg

SEQ ID NO: 886 - RNA, 22 nt, Artificial Sequence
  GATA2 Guide RNA
acggcccagggagggugagcug

SEQ ID NO: 887 - RNA, 22 nt, Artificial Sequence
  GATA2 Guide RNA
agacaccagcucacccucccug

SEQ ID NO: 888 - RNA, 22 nt, Artificial Sequence
  GATA2 Guide RNA
agcagacaccagcucacccucc

SEQ ID NO: 889 - RNA, 22 nt, Artificial Sequence
  GATA2 Guide RNA
agcuggugucugcuuugacggg

SEQ ID NO: 890 - RNA, 22 nt, Artificial Sequence
  GATA2 Guide RNA
agggagggugagcuggugucug

SEQ ID NO: 891 - RNA, 22 nt, Artificial Sequence
  GATA2 Guide RNA
agggccuggcccgucaaagcag

SEQ ID NO: 892 - RNA, 22 nt, Artificial Sequence
  GATA2 Guide RNA
agggugagcuggugucugcuuu

SEQ ID NO: 893 - RNA, 22 nt, Artificial Sequence
  GATA2 Guide RNA
caaagcagacaccagcucaccc

SEQ ID NO: 894 - RNA, 22 nt, Artificial Sequence
  GATA2 Guide RNA
cagacaccagcucacccucccu

SEQ ID NO: 895 - RNA, 22 nt, Artificial Sequence
  GATA2 Guide RNA
cagggagggugagcuggugucu

SEQ ID NO: 896 - RNA, 22 nt, Artificial Sequence
  GATA2 Guide RNA
cagggccuggcccgucaaagca

SEQ ID NO: 897 - RNA, 22 nt, Artificial Sequence
  GATA2 Guide RNA
ccagggagggugagcugguguc

SEQ ID NO: 898 - RNA, 22 nt, Artificial Sequence
  GATA2 Guide RNA
ccagggccuggcccgucaaagc

SEQ ID NO: 899 - RNA, 22 nt, Artificial Sequence
  GATA2 Guide RNA
cccagggagggugagcuggugu

SEQ ID NO: 900 - RNA, 22 nt, Artificial Sequence
  GATA2 Guide RNA
cccgucaaagcagacaccagcu

SEQ ID NO: 901 - RNA, 22 nt, Artificial Sequence
  GATA2 Guide RNA
ccgucaaagcagacaccagcuc

SEQ ID NO: 902 - RNA, 22 nt, Artificial Sequence
  GATA2 Guide RNA
ccuggcccgucaaagcagacac

SEQ ID NO: 903 - RNA, 22 nt, Artificial Sequence
  GATA2 Guide RNA
cggcccagggagggugagcugg

SEQ ID NO: 904 - RNA, 22 nt, Artificial Sequence
  GATA2 Guide RNA
cgucaaagcagacaccagcuca

SEQ ID NO: 905 - RNA, 22 nt, Artificial Sequence
  GATA2 Guide RNA
cuggcccgucaaagcagacacc

SEQ ID NO: 906 - RNA, 22 nt, Artificial Sequence
  GATA2 Guide RNA
cuggugucugcuuugacgggcc

SEQ ID NO: 907 - RNA, 22 nt, Artificial Sequence
  GATA2 Guide RNA
gacaccagcucacccucccugg

SEQ ID NO: 908 - RNA, 22 nt, Artificial Sequence
  GATA2 Guide RNA
gagcuggugucugcuuugacgg

SEQ ID NO: 909 - RNA, 22 nt, Artificial Sequence
  GATA2 Guide RNA
gagggugagcuggugucugcuu

SEQ ID NO: 910 - RNA, 22 nt, Artificial Sequence
  GATA2 Guide RNA
gcagacaccagcucacccuccc

SEQ ID NO: 911 - RNA, 22 nt, Artificial Sequence
  GATA2 Guide RNA
gcccagggagggugagcuggug

SEQ ID NO: 912 - RNA, 22 nt, Artificial Sequence
  GATA2 Guide RNA
gcccgucaaagcagacaccagc

SEQ ID NO: 913 - RNA, 22 nt, Artificial Sequence
  GATA2 Guide RNA
gccuggcccgucaaagcagaca

SEQ ID NO: 914 - RNA, 22 nt, Artificial Sequence
  GATA2 Guide RNA
gcuggugucugcuuugacgggc

SEQ ID NO: 915 - RNA, 22 nt, Artificial Sequence
  GATA2 Guide RNA
ggagggugagcuggugucugcu

SEQ ID NO: 916 - RNA, 22 nt, Artificial Sequence
  GATA2 Guide RNA
ggcccagggagggugagcuggu

SEQ ID NO: 917 - RNA, 22 nt, Artificial Sequence
  GATA2 Guide RNA
ggcccgucaaagcagacaccag

SEQ ID NO: 918 - RNA, 22 nt, Artificial Sequence
  GATA2 Guide RNA
ggccuggcccgucaaagcagac

SEQ ID NO: 919 - RNA, 22 nt, Artificial Sequence
  GATA2 Guide RNA
gggagggugagcuggugucugc

SEQ ID NO: 920 - RNA, 22 nt, Artificial Sequence
  GATA2 Guide RNA
gggccuggcccgucaaagcaga

SEQ ID NO: 921 - RNA, 22 nt, Artificial Sequence
  GATA2 Guide RNA
gggugagcuggugucugcuuug

SEQ ID NO: 922 - RNA, 22 nt, Artificial Sequence
  GATA2 Guide RNA
ggugagcuggugucugcuuuga

SEQ ID NO: 923 - RNA, 22 nt, Artificial Sequence
  GATA2 Guide RNA
ggugucugcuuugacgggccag

SEQ ID NO: 924 - RNA, 22 nt, Artificial Sequence
  GATA2 Guide RNA
gucaaagcagacaccagcucac

SEQ ID NO: 925 - RNA, 22 nt, Artificial Sequence
  GATA2 Guide RNA
gucugcuuugacgggccaggcc

SEQ ID NO: 926 - RNA, 22 nt, Artificial Sequence
  GATA2 Guide RNA
gugagcuggugucugcuuugac

SEQ ID NO: 927 - RNA, 22 nt, Artificial Sequence
  GATA2 Guide RNA
gugucugcuuugacgggccagg

SEQ ID NO: 928 - RNA, 22 nt, Artificial Sequence
  GATA2 Guide RNA
ucaaagcagacaccagcucacc

SEQ ID NO: 929 - RNA, 22 nt, Artificial Sequence
  GATA2 Guide RNA
ugagcuggugucugcuuugacg

SEQ ID NO: 930 - RNA, 22 nt, Artificial Sequence
  GATA2 Guide RNA
uggcccgucaaagcagacacca

SEQ ID NO: 931 - RNA, 22 nt, Artificial Sequence
  GATA2 Guide RNA
uggugucugcuuugacgggcca

SEQ ID NO: 932 - RNA, 22 nt, Artificial Sequence
  GATA2 Guide RNA
ugucugcuuugacgggccaggc

SEQ ID NO: 933 - RNA, 20 nt, Artificial Sequence
  GATA2 Guide RNA
aaguggaccugccaaucccg

SEQ ID NO: 934 - RNA, 20 nt, Artificial Sequence
  GATA2 Guide RNA
accugccaaucccgaggaag

SEQ ID NO: 935 - RNA, 20 nt, Artificial Sequence
  GATA2 Guide RNA
agagcccuggcaaguggacc

SEQ ID NO: 936 - RNA, 20 nt, Artificial Sequence
  GATA2 Guide RNA
agcccuggcaaguggaccug

SEQ ID NO: 937 - RNA, 20 nt, Artificial Sequence
  GATA2 Guide RNA
aguggaccugccaaucccga

SEQ ID NO: 938 - RNA, 20 nt, Artificial Sequence
  GATA2 Guide RNA
auuggcagguccacuugcca

SEQ ID NO: 939 - RNA, 20 nt, Artificial Sequence
  GATA2 Guide RNA
caaguggaccugccaauccc

SEQ ID NO: 940 - RNA, 20 nt, Artificial Sequence
  GATA2 Guide RNA
cagagcccuggcaaguggac

SEQ ID NO: 941 - RNA, 20 nt, Artificial Sequence
  GATA2 Guide RNA
cagguccacuugccagggcu

SEQ ID NO: 942 - RNA, 20 nt, Artificial Sequence
  GATA2 Guide RNA
ccagagcccuggcaagugga

SEQ ID NO: 943 - RNA, 20 nt, Artificial Sequence
  GATA2 Guide RNA
cccuggcaaguggaccugcc

SEQ ID NO: 944 - RNA, 20 nt, Artificial Sequence
  GATA2 Guide RNA
ccgguucuuccucgggauug

SEQ ID NO: 945 - RNA, 20 nt, Artificial Sequence
  GATA2 Guide RNA
ccucgggauuggcaggucca

SEQ ID NO: 946 - RNA, 20 nt, Artificial Sequence
  GATA2 Guide RNA
ccugccaaucccgaggaaga

SEQ ID NO: 947 - RNA, 20 nt, Artificial Sequence
  GATA2 Guide RNA
ccuggcaaguggaccugcca

SEQ ID NO: 948 - RNA, 20 nt, Artificial Sequence
  GATA2 Guide RNA
cgggauuggcagguccacuu

SEQ ID NO: 949 - RNA, 20 nt, Artificial Sequence
  GATA2 Guide RNA
cgguucuuccucgggauugg

SEQ ID NO: 950 - RNA, 20 nt, Artificial Sequence
  GATA2 Guide RNA
cucgggauuggcagguccac

SEQ ID NO: 951 - RNA, 20 nt, Artificial Sequence
  GATA2 Guide RNA
cugccaaucccgaggaagaa

SEQ ID NO: 952 - RNA, 20 nt, Artificial Sequence
  GATA2 Guide RNA
cuggcaaguggaccugccaa

SEQ ID NO: 953 - RNA, 20 nt, Artificial Sequence
  GATA2 Guide RNA
cuuccucgggauuggcaggu

SEQ ID NO: 954 - RNA, 20 nt, Artificial Sequence
  GATA2 Guide RNA
gaccugccaaucccgaggaa

SEQ ID NO: 955 - RNA, 20 nt, Artificial Sequence
  GATA2 Guide RNA
gagcccuggcaaguggaccu

SEQ ID NO: 956 - RNA, 20 nt, Artificial Sequence
  GATA2 Guide RNA
gauuggcagguccacuugcc

SEQ ID NO: 957 - RNA, 20 nt, Artificial Sequence
  GATA2 Guide RNA
gcaaguggaccugccaaucc

SEQ ID NO: 958 - RNA, 20 nt, Artificial Sequence
  GATA2 Guide RNA
gcagguccacuugccagggc

SEQ ID NO: 959 - RNA, 20 nt, Artificial Sequence
  GATA2 Guide RNA
gcccuggcaaguggaccugc

SEQ ID NO: 960 - RNA, 20 nt, Artificial Sequence
  GATA2 Guide RNA
ggaccugccaaucccgagga

SEQ ID NO: 961 - RNA, 20 nt, Artificial Sequence
  GATA2 Guide RNA
ggauuggcagguccacuugc

SEQ ID NO: 962 - RNA, 20 nt, Artificial Sequence
  GATA2 Guide RNA
ggcaaguggaccugccaauc

SEQ ID NO: 963 - RNA, 20 nt, Artificial Sequence
  GATA2 Guide RNA
ggcagguccacuugccaggg

SEQ ID NO: 964 - RNA, 20 nt, Artificial Sequence
  GATA2 Guide RNA
gggauuggcagguccacuug

SEQ ID NO: 965 - RNA, 20 nt, Artificial Sequence
  GATA2 Guide RNA
gguucuuccucgggauuggc

SEQ ID NO: 966 - RNA, 20 nt, Artificial Sequence
  GATA2 Guide RNA
guggaccugccaaucccgag

SEQ ID NO: 967 - RNA, 20 nt, Artificial Sequence
  GATA2 Guide RNA
guucuuccucgggauuggca

SEQ ID NO: 968 - RNA, 20 nt, Artificial Sequence
  GATA2 Guide RNA
uccgguucuuccucgggauu

SEQ ID NO: 969 - RNA, 20 nt, Artificial Sequence
  GATA2 Guide RNA
uccucgggauuggcaggucc

SEQ ID NO: 970 - RNA, 20 nt, Artificial Sequence
  GATA2 Guide RNA
ucgggauuggcagguccacu

SEQ ID NO: 971 - RNA, 20 nt, Artificial Sequence
  GATA2 Guide RNA
ucuuccucgggauuggcagg

SEQ ID NO: 972 - RNA, 20 nt, Artificial Sequence
  GATA2 Guide RNA
ugccaaucccgaggaagaac

SEQ ID NO: 973 - RNA, 20 nt, Artificial Sequence
  GATA2 Guide RNA
uggaccugccaaucccgagg

SEQ ID NO: 974 - RNA, 20 nt, Artificial Sequence
  GATA2 Guide RNA
uggcaaguggaccugccaau

SEQ ID NO: 975 - RNA, 20 nt, Artificial Sequence
  GATA2 Guide RNA
uggcagguccacuugccagg

SEQ ID NO: 976 - RNA, 20 nt, Artificial Sequence
  GATA2 Guide RNA
uuccucgggauuggcagguc

SEQ ID NO: 977 - RNA, 20 nt, Artificial Sequence
  GATA2 Guide RNA
uucuuccucgggauuggcag

SEQ ID NO: 978 - RNA, 20 nt, Artificial Sequence
  GATA2 Guide RNA
uuggcagguccacuugccag

SEQ ID NO: 979 - RNA, 21 nt, Artificial Sequence
  GATA2 Guide RNA
aaguggaccugccaaucccga

SEQ ID NO: 980 - RNA, 21 nt, Artificial Sequence
  GATA2 Guide RNA
accugccaaucccgaggaaga

SEQ ID NO: 981 - RNA, 21 nt, Artificial Sequence
  GATA2 Guide RNA
agagcccuggcaaguggaccu

SEQ ID NO: 982 - RNA, 21 nt, Artificial Sequence
  GATA2 Guide RNA
agcccuggcaaguggaccugc

SEQ ID NO: 983 - RNA, 21 nt, Artificial Sequence
  GATA2 Guide RNA
aguggaccugccaaucccgag

SEQ ID NO: 984 - RNA, 21 nt, Artificial Sequence
  GATA2 Guide RNA
auuggcagguccacuugccag

SEQ ID NO: 985 - RNA, 21 nt, Artificial Sequence
  GATA2 Guide RNA
caaguggaccugccaaucccg

SEQ ID NO: 986 - RNA, 21 nt, Artificial Sequence
  GATA2 Guide RNA
cagagcccuggcaaguggacc

SEQ ID NO: 987 - RNA, 21 nt, Artificial Sequence
  GATA2 Guide RNA
cagguccacuugccagggcuc

SEQ ID NO: 988 - RNA, 21 nt, Artificial Sequence
  GATA2 Guide RNA
ccagagcccuggcaaguggac

SEQ ID NO: 989 - RNA, 21 nt, Artificial Sequence
  GATA2 Guide RNA
cccagagcccuggcaagugga

SEQ ID NO: 990 - RNA, 21 nt, Artificial Sequence
  GATA2 Guide RNA
cccuggcaaguggaccugcca

SEQ ID NO: 991 - RNA, 21 nt, Artificial Sequence
  GATA2 Guide RNA
ccgguucuuccucgggauugg

SEQ ID NO: 992 - RNA, 21 nt, Artificial Sequence
  GATA2 Guide RNA
ccucgggauuggcagguccac

SEQ ID NO: 993 - RNA, 21 nt, Artificial Sequence
  GATA2 Guide RNA
ccugccaaucccgaggaagaa

SEQ ID NO: 994 - RNA, 21 nt, Artificial Sequence
  GATA2 Guide RNA
ccuggcaaguggaccugccaa

SEQ ID NO: 995 - RNA, 21 nt, Artificial Sequence
  GATA2 Guide RNA
cgggauuggcagguccacuug

SEQ ID NO: 996 - RNA, 21 nt, Artificial Sequence
  GATA2 Guide RNA
cgguucuuccucgggauuggc

SEQ ID NO: 997 - RNA, 21 nt, Artificial Sequence
  GATA2 Guide RNA
cuccgguucuuccucgggauu

SEQ ID NO: 998 - RNA, 21 nt, Artificial Sequence
  GATA2 Guide RNA
cucgggauuggcagguccacu

SEQ ID NO: 999 - RNA, 21 nt, Artificial Sequence
  GATA2 Guide RNA
cugccaaucccgaggaagaac

SEQ ID NO: 1000 - RNA, 21 nt, Artificial Sequence
  GATA2 Guide RNA
cuggcaaguggaccugccaau

SEQ ID NO: 1001 - RNA, 21 nt, Artificial Sequence
  GATA2 Guide RNA
cuuccucgggauuggcagguc

SEQ ID NO: 1002 - RNA, 21 nt, Artificial Sequence
  GATA2 Guide RNA
gaccugccaaucccgaggaag

SEQ ID NO: 1003 - RNA, 21 nt, Artificial Sequence
  GATA2 Guide RNA
gagcccuggcaaguggaccug

SEQ ID NO: 1004 - RNA, 21 nt, Artificial Sequence
  GATA2 Guide RNA
gauuggcagguccacuugcca

SEQ ID NO: 1005 - RNA, 21 nt, Artificial Sequence
  GATA2 Guide RNA
gcaaguggaccugccaauccc

SEQ ID NO: 1006 - RNA, 21 nt, Artificial Sequence
  GATA2 Guide RNA
gcagguccacuugccagggcu

SEQ ID NO: 1007 - RNA, 21 nt, Artificial Sequence
  GATA2 Guide RNA
gcccuggcaaguggaccugcc

SEQ ID NO: 1008 - RNA, 21 nt, Artificial Sequence
  GATA2 Guide RNA
ggaccugccaaucccgaggaa

SEQ ID NO: 1009 - RNA, 21 nt, Artificial Sequence
  GATA2 Guide RNA
ggauuggcagguccacuugcc

SEQ ID NO: 1010 - RNA, 21 nt, Artificial Sequence
  GATA2 Guide RNA
ggcaaguggaccugccaaucc

SEQ ID NO: 1011 - RNA, 21 nt, Artificial Sequence
  GATA2 Guide RNA
ggcagguccacuugccagggc

SEQ ID NO: 1012 - RNA, 21 nt, Artificial Sequence
  GATA2 Guide RNA
gggauuggcagguccacuugc

SEQ ID NO: 1013 - RNA, 21 nt, Artificial Sequence
  GATA2 Guide RNA
gguucuuccucgggauuggca

SEQ ID NO: 1014 - RNA, 21 nt, Artificial Sequence
  GATA2 Guide RNA
guggaccugccaaucccgagg

SEQ ID NO: 1015 - RNA, 21 nt, Artificial Sequence
  GATA2 Guide RNA
guucuuccucgggauuggcag

SEQ ID NO: 1016 - RNA, 21 nt, Artificial Sequence
  GATA2 Guide RNA
uccgguucuuccucgggauug

SEQ ID NO: 1017 - RNA, 21 nt, Artificial Sequence
  GATA2 Guide RNA
uccucgggauuggcaggucca

SEQ ID NO: 1018 - RNA, 21 nt, Artificial Sequence
  GATA2 Guide RNA
ucgggauuggcagguccacuu

SEQ ID NO: 1019 - RNA, 21 nt, Artificial Sequence
  GATA2 Guide RNA
ucuuccucgggauuggcaggu

SEQ ID NO: 1020 - RNA, 21 nt, Artificial Sequence
  GATA2 Guide RNA
ugccaaucccgaggaagaacc

SEQ ID NO: 1021 - RNA, 21 nt, Artificial Sequence
  GATA2 Guide RNA
uggaccugccaaucccgagga

SEQ ID NO: 1022 - RNA, 21 nt, Artificial Sequence
  GATA2 Guide RNA
uggcaaguggaccugccaauc

SEQ ID NO: 1023 - RNA, 21 nt, Artificial Sequence
  GATA2 Guide RNA
uggcagguccacuugccaggg

SEQ ID NO: 1024 - RNA, 21 nt, Artificial Sequence
  GATA2 Guide RNA
uuccucgggauuggcaggucc

SEQ ID NO: 1025 - RNA, 21 nt, Artificial Sequence
  GATA2 Guide RNA
uucuuccucgggauuggcagg

SEQ ID NO: 1026 - RNA, 21 nt, Artificial Sequence
  GATA2 Guide RNA
uuggcagguccacuugccagg

SEQ ID NO: 1027 - RNA, 22 nt, Artificial Sequence
  GATA2 Guide RNA
aaguggaccugccaaucccgag

SEQ ID NO: 1028 - RNA, 22 nt, Artificial Sequence
  GATA2 Guide RNA
accugccaaucccgaggaagaa

SEQ ID NO: 1029 - RNA, 22 nt, Artificial Sequence
  GATA2 Guide RNA
agagcccuggcaaguggaccug

SEQ ID NO: 1030 - RNA, 22 nt, Artificial Sequence
  GATA2 Guide RNA
agcccuggcaaguggaccugcc

SEQ ID NO: 1031 - RNA, 22 nt, Artificial Sequence
  GATA2 Guide RNA
aguggaccugccaaucccgagg

SEQ ID NO: 1032 - RNA, 22 nt, Artificial Sequence
  GATA2 Guide RNA
auuggcagguccacuugccagg

SEQ ID NO: 1033 - RNA, 22 nt, Artificial Sequence
  GATA2 Guide RNA
caaguggaccugccaaucccga

SEQ ID NO: 1034 - RNA, 22 nt, Artificial Sequence
  GATA2 Guide RNA
cagagcccuggcaaguggaccu

SEQ ID NO: 1035 - RNA, 22 nt, Artificial Sequence
  GATA2 Guide RNA
cagguccacuugccagggcucu

SEQ ID NO: 1036 - RNA, 22 nt, Artificial Sequence
  GATA2 Guide RNA
ccagagcccuggcaaguggacc

SEQ ID NO: 1037 - RNA, 22 nt, Artificial Sequence
  GATA2 Guide RNA
cccagagcccuggcaaguggac

SEQ ID NO: 1038 - RNA, 22 nt, Artificial Sequence
  GATA2 Guide RNA
ccccagagcccuggcaagugga

SEQ ID NO: 1039 - RNA, 22 nt, Artificial Sequence
  GATA2 Guide RNA
cccuggcaaguggaccugccaa

SEQ ID NO: 1040 - RNA, 22 nt, Artificial Sequence
  GATA2 Guide RNA
ccgguucuuccucgggauuggc

SEQ ID NO: 1041 - RNA, 22 nt, Artificial Sequence
  GATA2 Guide RNA
ccuccgguucuuccucgggauu

SEQ ID NO: 1042 - RNA, 22 nt, Artificial Sequence
  GATA2 Guide RNA
ccucgggauuggcagguccacu

SEQ ID NO: 1043 - RNA, 22 nt, Artificial Sequence
  GATA2 Guide RNA
ccugccaaucccgaggaagaac

SEQ ID NO: 1044 - RNA, 22 nt, Artificial Sequence
  GATA2 Guide RNA
ccuggcaaguggaccugccaau

SEQ ID NO: 1045 - RNA, 22 nt, Artificial Sequence
  GATA2 Guide RNA
cgggauuggcagguccacuugc

SEQ ID NO: 1046 - RNA, 22 nt, Artificial Sequence
  GATA2 Guide RNA
cgguucuuccucgggauuggca

SEQ ID NO: 1047 - RNA, 22 nt, Artificial Sequence
  GATA2 Guide RNA
cuccgguucuuccucgggauug

SEQ ID NO: 1048 - RNA, 22 nt, Artificial Sequence
  GATA2 Guide RNA
cucgggauuggcagguccacuu

SEQ ID NO: 1049 - RNA, 22 nt, Artificial Sequence
  GATA2 Guide RNA
cugccaaucccgaggaagaacc

SEQ ID NO: 1050 - RNA, 22 nt, Artificial Sequence
  GATA2 Guide RNA
cuggcaaguggaccugccaauc

SEQ ID NO: 1051 - RNA, 22 nt, Artificial Sequence
  GATA2 Guide RNA
cuuccucgggauuggcaggucc

SEQ ID NO: 1052 - RNA, 22 nt, Artificial Sequence
  GATA2 Guide RNA
gaccugccaaucccgaggaaga

SEQ ID NO: 1053 - RNA, 22 nt, Artificial Sequence
  GATA2 Guide RNA
gagcccuggcaaguggaccugc

SEQ ID NO: 1054 - RNA, 22 nt, Artificial Sequence
  GATA2 Guide RNA
gauuggcagguccacuugccag

SEQ ID NO: 1055 - RNA, 22 nt, Artificial Sequence
  GATA2 Guide RNA
gcaaguggaccugccaaucccg

SEQ ID NO: 1056 - RNA, 22 nt, Artificial Sequence
  GATA2 Guide RNA
gcagguccacuugccagggcuc

SEQ ID NO: 1057 - RNA, 22 nt, Artificial Sequence
  GATA2 Guide RNA
gcccuggcaaguggaccugcca

SEQ ID NO: 1058 - RNA, 22 nt, Artificial Sequence
  GATA2 Guide RNA
ggaccugccaaucccgaggaag

SEQ ID NO: 1059 - RNA, 22 nt, Artificial Sequence
  GATA2 Guide RNA
ggauuggcagguccacuugcca

SEQ ID NO: 1060 - RNA, 22 nt, Artificial Sequence
  GATA2 Guide RNA
ggcaaguggaccugccaauccc

SEQ ID NO: 1061 - RNA, 22 nt, Artificial Sequence
  GATA2 Guide RNA
ggcagguccacuugccagggcu

SEQ ID NO: 1062 - RNA, 22 nt, Artificial Sequence
  GATA2 Guide RNA
gggauuggcagguccacuugcc

SEQ ID NO: 1063 - RNA, 22 nt, Artificial Sequence
  GATA2 Guide RNA
gguucuuccucgggauuggcag

SEQ ID NO: 1064 - RNA, 22 nt, Artificial Sequence
  GATA2 Guide RNA
guggaccugccaaucccgagga

SEQ ID NO: 1065 - RNA, 22 nt, Artificial Sequence
  GATA2 Guide RNA
guucuuccucgggauuggcagg

SEQ ID NO: 1066 - RNA, 22 nt, Artificial Sequence
  GATA2 Guide RNA
uccgguucuuccucgggauugg

SEQ ID NO: 1067 - RNA, 22 nt, Artificial Sequence
  GATA2 Guide RNA
uccucgggauuggcagguccac

SEQ ID NO: 1068 - RNA, 22 nt, Artificial Sequence
  GATA2 Guide RNA
ucgggauuggcagguccacuug

SEQ ID NO: 1069 - RNA, 22 nt, Artificial Sequence
  GATA2 Guide RNA
ucuuccucgggauuggcagguc

SEQ ID NO: 1070 - RNA, 22 nt, Artificial Sequence
  GATA2 Guide RNA
ugccaaucccgaggaagaaccg

SEQ ID NO: 1071 - RNA, 22 nt, Artificial Sequence
  GATA2 Guide RNA
uggaccugccaaucccgaggaa

SEQ ID NO: 1072 - RNA, 22 nt, Artificial Sequence
  GATA2 Guide RNA
uggcaaguggaccugccaaucc

SEQ ID NO: 1073 - RNA, 22 nt, Artificial Sequence
  GATA2 Guide RNA
uggcagguccacuugccagggc

SEQ ID NO: 1074 - RNA, 22 nt, Artificial Sequence
  GATA2 Guide RNA
uuccucgggauuggcaggucca

SEQ ID NO: 1075 - RNA, 22 nt, Artificial Sequence
  GATA2 Guide RNA
uucuuccucgggauuggcaggu

SEQ ID NO: 1076 - RNA, 22 nt, Artificial Sequence
  GATA2 Guide RNA
uuggcagguccacuugccaggg

SEQ ID NO: 1077 - RNA, 20 nt, Artificial Sequence
  GATA2 Guide RNA
accgcugagaggcugccucu

SEQ ID NO: 1078 - RNA, 20 nt, Artificial Sequence
  GATA2 Guide RNA
accugggcagcggucaggug

SEQ ID NO: 1079 - RNA, 20 nt, Artificial Sequence
  GATA2 Guide RNA
agaggcagccucucagcggu

SEQ ID NO: 1080 - RNA, 20 nt, Artificial Sequence
  GATA2 Guide RNA
agaggcugccucugcaccug

SEQ ID NO: 1081 - RNA, 20 nt, Artificial Sequence
  GATA2 Guide RNA
agcggucaggugcagaggca

SEQ ID NO: 1082 - RNA, 20 nt, Artificial Sequence
  GATA2 Guide RNA
aggcugccucugcaccugac

SEQ ID NO: 1083 - RNA, 20 nt, Artificial Sequence
  GATA2 Guide RNA
aggugcagaggcagccucuc

SEQ ID NO: 1084 - RNA, 20 nt, Artificial Sequence
  GATA2 Guide RNA
caccgcugagaggcugccuc

SEQ ID NO: 1085 - RNA, 20 nt, Artificial Sequence
  GATA2 Guide RNA
caccugggcagcggucaggu

SEQ ID NO: 1086 - RNA, 20 nt, Artificial Sequence
  GATA2 Guide RNA
cagaggcagccucucagcgg

SEQ ID NO: 1087 - RNA, 20 nt, Artificial Sequence
  GATA2 Guide RNA
cagcggucaggugcagaggc

SEQ ID NO: 1088 - RNA, 20 nt, Artificial Sequence
  GATA2 Guide RNA
caggugcagaggcagccucu

SEQ ID NO: 1089 - RNA, 20 nt, Artificial Sequence
  GATA2 Guide RNA
ccaccgcugagaggcugccu

SEQ ID NO: 1090 - RNA, 20 nt, Artificial Sequence
  GATA2 Guide RNA
cccaccgcugagaggcugcc

SEQ ID NO: 1091 - RNA, 20 nt, Artificial Sequence
  GATA2 Guide RNA
ccccaccgcugagaggcugc

SEQ ID NO: 1092 - RNA, 20 nt, Artificial Sequence
  GATA2 Guide RNA
ccgcugagaggcugccucug

SEQ ID NO: 1093 - RNA, 20 nt, Artificial Sequence
  GATA2 Guide RNA
ccucugcaccugaccgcugc

SEQ ID NO: 1094 - RNA, 20 nt, Artificial Sequence
  GATA2 Guide RNA
ccugggcagcggucaggugc

SEQ ID NO: 1095 - RNA, 20 nt, Artificial Sequence
  GATA2 Guide RNA
cgcugagaggcugccucugc

SEQ ID NO: 1096 - RNA, 20 nt, Artificial Sequence
  GATA2 Guide RNA
cggucaggugcagaggcagc

SEQ ID NO: 1097 - RNA, 20 nt, Artificial Sequence
  GATA2 Guide RNA
cucugcaccugaccgcugcc

SEQ ID NO: 1098 - RNA, 20 nt, Artificial Sequence
  GATA2 Guide RNA
cugagaggcugccucugcac

SEQ ID NO: 1099 - RNA, 20 nt, Artificial Sequence
  GATA2 Guide RNA
cugcaccugaccgcugccca

SEQ ID NO: 1100 - RNA, 20 nt, Artificial Sequence
  GATA2 Guide RNA
cugccucugcaccugaccgc

SEQ ID NO: 1101 - RNA, 20 nt, Artificial Sequence
  GATA2 Guide RNA
cugggcagcggucaggugca

SEQ ID NO: 1102 - RNA, 20 nt, Artificial Sequence
  GATA2 Guide RNA
gagaggcugccucugcaccu

SEQ ID NO: 1103 - RNA, 20 nt, Artificial Sequence
  GATA2 Guide RNA
gaggcugccucugcaccuga

SEQ ID NO: 1104 - RNA, 20 nt, Artificial Sequence
  GATA2 Guide RNA
gcagaggcagccucucagcg

SEQ ID NO: 1105 - RNA, 20 nt, Artificial Sequence
  GATA2 Guide RNA
gcagcggucaggugcagagg

SEQ ID NO: 1106 - RNA, 20 nt, Artificial Sequence
  GATA2 Guide RNA
gccucugcaccugaccgcug

SEQ ID NO: 1107 - RNA, 20 nt, Artificial Sequence
  GATA2 Guide RNA
gcggucaggugcagaggcag

SEQ ID NO: 1108 - RNA, 20 nt, Artificial Sequence
  GATA2 Guide RNA
gcugagaggcugccucugca

SEQ ID NO: 1109 - RNA, 20 nt, Artificial Sequence
  GATA2 Guide RNA
gcugccucugcaccugaccg

SEQ ID NO: 1110 - RNA, 20 nt, Artificial Sequence
  GATA2 Guide RNA
ggcagcggucaggugcagag

SEQ ID NO: 1111 - RNA, 20 nt, Artificial Sequence
  GATA2 Guide RNA
ggcugccucugcaccugacc

SEQ ID NO: 1112 - RNA, 20 nt, Artificial Sequence
  GATA2 Guide RNA
gggcagcggucaggugcaga

SEQ ID NO: 1113 - RNA, 20 nt, Artificial Sequence
  GATA2 Guide RNA
ggucaggugcagaggcagcc

SEQ ID NO: 1114 - RNA, 20 nt, Artificial Sequence
  GATA2 Guide RNA
ggugcagaggcagccucuca

SEQ ID NO: 1115 - RNA, 20 nt, Artificial Sequence
  GATA2 Guide RNA
gucaggugcagaggcagccu

SEQ ID NO: 1116 - RNA, 20 nt, Artificial Sequence
  GATA2 Guide RNA
gugcagaggcagccucucag

SEQ ID NO: 1117 - RNA, 20 nt, Artificial Sequence
  GATA2 Guide RNA
ucaggugcagaggcagccuc

SEQ ID NO: 1118 - RNA, 20 nt, Artificial Sequence
  GATA2 Guide RNA
ucugcaccugaccgcugccc

SEQ ID NO: 1119 - RNA, 20 nt, Artificial Sequence
  GATA2 Guide RNA
ugagaggcugccucugcacc

SEQ ID NO: 1120 - RNA, 20 nt, Artificial Sequence
  GATA2 Guide RNA
ugcagaggcagccucucagc

SEQ ID NO: 1121 - RNA, 20 nt, Artificial Sequence
  GATA2 Guide RNA
ugccucugcaccugaccgcu

SEQ ID NO: 1122 - RNA, 20 nt, Artificial Sequence
  GATA2 Guide RNA
ugggcagcggucaggugcag

SEQ ID NO: 1123 - RNA, 21 nt, Artificial Sequence
  GATA2 Guide RNA
accgcugagaggcugccucug

SEQ ID NO: 1124 - RNA, 21 nt, Artificial Sequence
  GATA2 Guide RNA
accugggcagcggucaggugc

SEQ ID NO: 1125 - RNA, 21 nt, Artificial Sequence
  GATA2 Guide RNA
agaggcagccucucagcggug

SEQ ID NO: 1126 - RNA, 21 nt, Artificial Sequence
  GATA2 Guide RNA
agaggcugccucugcaccuga

SEQ ID NO: 1127 - RNA, 21 nt, Artificial Sequence
  GATA2 Guide RNA
agcggucaggugcagaggcag

SEQ ID NO: 1128 - RNA, 21 nt, Artificial Sequence
  GATA2 Guide RNA
aggcugccucugcaccugacc

SEQ ID NO: 1129 - RNA, 21 nt, Artificial Sequence
  GATA2 Guide RNA
aggugcagaggcagccucuca

SEQ ID NO: 1130 - RNA, 21 nt, Artificial Sequence
  GATA2 Guide RNA
caccgcugagaggcugccucu

SEQ ID NO: 1131 - RNA, 21 nt, Artificial Sequence
  GATA2 Guide RNA
caccugggcagcggucaggug

SEQ ID NO: 1132 - RNA, 21 nt, Artificial Sequence
  GATA2 Guide RNA
cagaggcagccucucagcggu

SEQ ID NO: 1133 - RNA, 21 nt, Artificial Sequence
  GATA2 Guide RNA
cagcggucaggugcagaggca

SEQ ID NO: 1134 - RNA, 21 nt, Artificial Sequence
  GATA2 Guide RNA
caggugcagaggcagccucuc

SEQ ID NO: 1135 - RNA, 21 nt, Artificial Sequence
  GATA2 Guide RNA
ccaccgcugagaggcugccuc

SEQ ID NO: 1136 - RNA, 21 nt, Artificial Sequence
  GATA2 Guide RNA
ccaccugggcagcggucaggu

SEQ ID NO: 1137 - RNA, 21 nt, Artificial Sequence
  GATA2 Guide RNA
cccaccgcugagaggcugccu

SEQ ID NO: 1138 - RNA, 21 nt, Artificial Sequence
  GATA2 Guide RNA
ccccaccgcugagaggcugcc

SEQ ID NO: 1139 - RNA, 21 nt, Artificial Sequence
  GATA2 Guide RNA
ccgcugagaggcugccucugc

SEQ ID NO: 1140 - RNA, 21 nt, Artificial Sequence
  GATA2 Guide RNA
ccucugcaccugaccgcugcc

SEQ ID NO: 1141 - RNA, 21 nt, Artificial Sequence
  GATA2 Guide RNA
ccugggcagcggucaggugca

SEQ ID NO: 1142 - RNA, 21 nt, Artificial Sequence
  GATA2 Guide RNA
cgcugagaggcugccucugca

SEQ ID NO: 1143 - RNA, 21 nt, Artificial Sequence
  GATA2 Guide RNA
cggucaggugcagaggcagcc

SEQ ID NO: 1144 - RNA, 21 nt, Artificial Sequence
  GATA2 Guide RNA
cucugcaccugaccgcugccc

SEQ ID NO: 1145 - RNA, 21 nt, Artificial Sequence
  GATA2 Guide RNA
cugagaggcugccucugcacc

SEQ ID NO: 1146 - RNA, 21 nt, Artificial Sequence
  GATA2 Guide RNA
cugcaccugaccgcugcccag

SEQ ID NO: 1147 - RNA, 21 nt, Artificial Sequence
  GATA2 Guide RNA
cugccucugcaccugaccgcu

SEQ ID NO: 1148 - RNA, 21 nt, Artificial Sequence
  GATA2 Guide RNA
cugggcagcggucaggugcag

SEQ ID NO: 1149 - RNA, 21 nt, Artificial Sequence
  GATA2 Guide RNA
gagaggcugccucugcaccug

SEQ ID NO: 1150 - RNA, 21 nt, Artificial Sequence
  GATA2 Guide RNA
gaggcugccucugcaccugac

SEQ ID NO: 1151 - RNA, 21 nt, Artificial Sequence
  GATA2 Guide RNA
gcagaggcagccucucagcgg

SEQ ID NO: 1152 - RNA, 21 nt, Artificial Sequence
  GATA2 Guide RNA
gcagcggucaggugcagaggc

SEQ ID NO: 1153 - RNA, 21 nt, Artificial Sequence
  GATA2 Guide RNA
gccucugcaccugaccgcugc

SEQ ID NO: 1154 - RNA, 21 nt, Artificial Sequence
  GATA2 Guide RNA
gcggucaggugcagaggcagc

SEQ ID NO: 1155 - RNA, 21 nt, Artificial Sequence
  GATA2 Guide RNA
gcugagaggcugccucugcac

SEQ ID NO: 1156 - RNA, 21 nt, Artificial Sequence
  GATA2 Guide RNA
gcugccucugcaccugaccgc

SEQ ID NO: 1157 - RNA, 21 nt, Artificial Sequence
  GATA2 Guide RNA
ggcagcggucaggugcagagg

SEQ ID NO: 1158 - RNA, 21 nt, Artificial Sequence
  GATA2 Guide RNA
ggcugccucugcaccugaccg

SEQ ID NO: 1159 - RNA, 21 nt, Artificial Sequence
  GATA2 Guide RNA
gggcagcggucaggugcagag

SEQ ID NO: 1160 - RNA, 21 nt, Artificial Sequence
  GATA2 Guide RNA
ggucaggugcagaggcagccu

SEQ ID NO: 1161 - RNA, 21 nt, Artificial Sequence
  GATA2 Guide RNA
ggugcagaggcagccucucag

SEQ ID NO: 1162 - RNA, 21 nt, Artificial Sequence
  GATA2 Guide RNA
gucaggugcagaggcagccuc

SEQ ID NO: 1163 - RNA, 21 nt, Artificial Sequence
  GATA2 Guide RNA
gugcagaggcagccucucagc

SEQ ID NO: 1164 - RNA, 21 nt, Artificial Sequence
  GATA2 Guide RNA
ucaggugcagaggcagccucu

SEQ ID NO: 1165 - RNA, 21 nt, Artificial Sequence
  GATA2 Guide RNA
uccccaccgcugagaggcugc

SEQ ID NO: 1166 - RNA, 21 nt, Artificial Sequence
  GATA2 Guide RNA
ucugcaccugaccgcugccca

SEQ ID NO: 1167 - RNA, 21 nt, Artificial Sequence
  GATA2 Guide RNA
ugagaggcugccucugcaccu

SEQ ID NO: 1168 - RNA, 21 nt, Artificial Sequence
  GATA2 Guide RNA
ugcagaggcagccucucagcg

SEQ ID NO: 1169 - RNA, 21 nt, Artificial Sequence
  GATA2 Guide RNA
ugccucugcaccugaccgcug

SEQ ID NO: 1170 - RNA, 21 nt, Artificial Sequence
  GATA2 Guide RNA
ugggcagcggucaggugcaga

SEQ ID NO: 1171 - RNA, 22 nt, Artificial Sequence
  GATA2 Guide RNA
accgcugagaggcugccucugc

SEQ ID NO: 1172 - RNA, 22 nt, Artificial Sequence
  GATA2 Guide RNA
accugggcagcggucaggugca

SEQ ID NO: 1173 - RNA, 22 nt, Artificial Sequence
  GATA2 Guide RNA
agaggcagccucucagcggugg

SEQ ID NO: 1174 - RNA, 22 nt, Artificial Sequence
  GATA2 Guide RNA
agaggcugccucugcaccugac

SEQ ID NO: 1175 - RNA, 22 nt, Artificial Sequence
  GATA2 Guide RNA
agcggucaggugcagaggcagc

SEQ ID NO: 1176 - RNA, 22 nt, Artificial Sequence
  GATA2 Guide RNA
aggcugccucugcaccugaccg

SEQ ID NO: 1177 - RNA, 22 nt, Artificial Sequence
  GATA2 Guide RNA
aggugcagaggcagccucucag

SEQ ID NO: 1178 - RNA, 22 nt, Artificial Sequence
  GATA2 Guide RNA
caccgcugagaggcugccucug

SEQ ID NO: 1179 - RNA, 22 nt, Artificial Sequence
  GATA2 Guide RNA
caccugggcagcggucaggugc

SEQ ID NO: 1180 - RNA, 22 nt, Artificial Sequence
  GATA2 Guide RNA
cagaggcagccucucagcggug

SEQ ID NO: 1181 - RNA, 22 nt, Artificial Sequence
  GATA2 Guide RNA
cagcggucaggugcagaggcag

SEQ ID NO: 1182 - RNA, 22 nt, Artificial Sequence
  GATA2 Guide RNA
caggugcagaggcagccucuca

SEQ ID NO: 1183 - RNA, 22 nt, Artificial Sequence
  GATA2 Guide RNA
ccaccgcugagaggcugccucu

SEQ ID NO: 1184 - RNA, 22 nt, Artificial Sequence
  GATA2 Guide RNA
ccaccugggcagcggucaggug

SEQ ID NO: 1185 - RNA, 22 nt, Artificial Sequence
  GATA2 Guide RNA
cccaccgcugagaggcugccuc

SEQ ID NO: 1186 - RNA, 22 nt, Artificial Sequence
  GATA2 Guide RNA
cccaccugggcagcggucaggu

SEQ ID NO: 1187 - RNA, 22 nt, Artificial Sequence
  GATA2 Guide RNA
ccccaccgcugagaggcugccu

SEQ ID NO: 1188 - RNA, 22 nt, Artificial Sequence
  GATA2 Guide RNA
ccgcugagaggcugccucugca

SEQ ID NO: 1189 - RNA, 22 nt, Artificial Sequence
  GATA2 Guide RNA
ccucugcaccugaccgcugccc

SEQ ID NO: 1190 - RNA, 22 nt, Artificial Sequence
  GATA2 Guide RNA
ccugggcagcggucaggugcag

SEQ ID NO: 1191 - RNA, 22 nt, Artificial Sequence
  GATA2 Guide RNA
cgcugagaggcugccucugcac

SEQ ID NO: 1192 - RNA, 22 nt, Artificial Sequence
  GATA2 Guide RNA
cggucaggugcagaggcagccu

SEQ ID NO: 1193 - RNA, 22 nt, Artificial Sequence
  GATA2 Guide RNA
cucugcaccugaccgcugccca

SEQ ID NO: 1194 - RNA, 22 nt, Artificial Sequence
  GATA2 Guide RNA
cugagaggcugccucugcaccu

SEQ ID NO: 1195 - RNA, 22 nt, Artificial Sequence
  GATA2 Guide RNA
cugcaccugaccgcugcccagg

SEQ ID NO: 1196 - RNA, 22 nt, Artificial Sequence
  GATA2 Guide RNA
cugccucugcaccugaccgcug

SEQ ID NO: 1197 - RNA, 22 nt, Artificial Sequence
  GATA2 Guide RNA
cugggcagcggucaggugcaga

SEQ ID NO: 1198 - RNA, 22 nt, Artificial Sequence
  GATA2 Guide RNA
gagaggcugccucugcaccuga

SEQ ID NO: 1199 - RNA, 22 nt, Artificial Sequence
  GATA2 Guide RNA
gaggcugccucugcaccugacc

SEQ ID NO: 1200 - RNA, 22 nt, Artificial Sequence
  GATA2 Guide RNA
gcagaggcagccucucagcggu

SEQ ID NO: 1201 - RNA, 22 nt, Artificial Sequence
  GATA2 Guide RNA
gcagcggucaggugcagaggca

SEQ ID NO: 1202 - RNA, 22 nt, Artificial Sequence
  GATA2 Guide RNA
gccucugcaccugaccgcugcc

SEQ ID NO: 1203 - RNA, 22 nt, Artificial Sequence
  GATA2 Guide RNA
gcggucaggugcagaggcagcc

SEQ ID NO: 1204 - RNA, 22 nt, Artificial Sequence
  GATA2 Guide RNA
gcugagaggcugccucugcacc

SEQ ID NO: 1205 - RNA, 22 nt, Artificial Sequence
  GATA2 Guide RNA
gcugccucugcaccugaccgcu

SEQ ID NO: 1206 - RNA, 22 nt, Artificial Sequence
  GATA2 Guide RNA
ggcagcggucaggugcagaggc

SEQ ID NO: 1207 - RNA, 22 nt, Artificial Sequence
  GATA2 Guide RNA
ggcugccucugcaccugaccgc

SEQ ID NO: 1208 - RNA, 22 nt, Artificial Sequence
  GATA2 Guide RNA
gggcagcggucaggugcagagg

SEQ ID NO: 1209 - RNA, 22 nt, Artificial Sequence
  GATA2 Guide RNA
ggucaggugcagaggcagccuc

SEQ ID NO: 1210 - RNA, 22 nt, Artificial Sequence
  GATA2 Guide RNA
ggugcagaggcagccucucagc

SEQ ID NO: 1211 - RNA, 22 nt, Artificial Sequence
  GATA2 Guide RNA
gucaggugcagaggcagccucu

SEQ ID NO: 1212 - RNA, 22 nt, Artificial Sequence
  GATA2 Guide RNA
gugcagaggcagccucucagcg

SEQ ID NO: 1213 - RNA, 22 nt, Artificial Sequence
  GATA2 Guide RNA
ucaggugcagaggcagccucuc

SEQ ID NO: 1214 - RNA, 22 nt, Artificial Sequence
  GATA2 Guide RNA
uccccaccgcugagaggcugcc

SEQ ID NO: 1215 - RNA, 22 nt, Artificial Sequence
  GATA2 Guide RNA
ucugcaccugaccgcugcccag

SEQ ID NO: 1216 - RNA, 22 nt, Artificial Sequence
  GATA2 Guide RNA
ugagaggcugccucugcaccug

SEQ ID NO: 1217 - RNA, 22 nt, Artificial Sequence
  GATA2 Guide RNA
ugcagaggcagccucucagcgg

SEQ ID NO: 1218 - RNA, 22 nt, Artificial Sequence
  GATA2 Guide RNA
ugccucugcaccugaccgcugc

SEQ ID NO: 1219 - RNA, 22 nt, Artificial Sequence
  GATA2 Guide RNA
ugggcagcggucaggugcagag

SEQ ID NO: 1220 - RNA, 22 nt, Artificial Sequence
  GATA2 Guide RNA
uuccccaccgcugagaggcugc

SEQ ID NO: 1221 - RNA, 20 nt, Artificial Sequence
  GATA2 Guide RNA
aauguuccccaccacugaga

SEQ ID NO: 1222 - RNA, 20 nt, Artificial Sequence
  GATA2 Guide RNA
accacugagaggcugccucc

SEQ ID NO: 1223 - RNA, 20 nt, Artificial Sequence
  GATA2 Guide RNA
acugugaauguuccccacca

SEQ ID NO: 1224 - RNA, 20 nt, Artificial Sequence
  GATA2 Guide RNA
agccucucagugguggggaa

SEQ ID NO: 1225 - RNA, 20 nt, Artificial Sequence
  GATA2 Guide RNA
aggcagccucucaguggugg

SEQ ID NO: 1226 - RNA, 20 nt, Artificial Sequence
  GATA2 Guide RNA
aggugcggaggcagccucuc

SEQ ID NO: 1227 - RNA, 20 nt, Artificial Sequence
  GATA2 Guide RNA
agugguggggaacauucaca

SEQ ID NO: 1228 - RNA, 20 nt, Artificial Sequence
  GATA2 Guide RNA
aguuacugugaauguucccc

SEQ ID NO: 1229 - RNA, 20 nt, Artificial Sequence
  GATA2 Guide RNA
auguuccccaccacugagag

SEQ ID NO: 1230 - RNA, 20 nt, Artificial Sequence
  GATA2 Guide RNA
caccacugagaggcugccuc

SEQ ID NO: 1231 - RNA, 20 nt, Artificial Sequence
  GATA2 Guide RNA
cacugagaggcugccuccgc

SEQ ID NO: 1232 - RNA, 20 nt, Artificial Sequence
  GATA2 Guide RNA
cagccucucaguggugggga

SEQ ID NO: 1233 - RNA, 20 nt, Artificial Sequence
  GATA2 Guide RNA
cagugguggggaacauucac

SEQ ID NO: 1234 - RNA, 20 nt, Artificial Sequence
  GATA2 Guide RNA
ccaccacugagaggcugccu

SEQ ID NO: 1235 - RNA, 20 nt, Artificial Sequence
  GATA2 Guide RNA
ccacugagaggcugccuccg

SEQ ID NO: 1236 - RNA, 20 nt, Artificial Sequence
  GATA2 Guide RNA
cccaccacugagaggcugcc

SEQ ID NO: 1237 - RNA, 20 nt, Artificial Sequence
  GATA2 Guide RNA
ccccaccacugagaggcugc

SEQ ID NO: 1238 - RNA, 20 nt, Artificial Sequence
  GATA2 Guide RNA
ccucucagugguggggaaca

SEQ ID NO: 1239 - RNA, 20 nt, Artificial Sequence
  GATA2 Guide RNA
cggaggcagccucucagugg

SEQ ID NO: 1240 - RNA, 20 nt, Artificial Sequence
  GATA2 Guide RNA
cucagugguggggaacauuc

SEQ ID NO: 1241 - RNA, 20 nt, Artificial Sequence
  GATA2 Guide RNA
cucucagugguggggaacau

SEQ ID NO: 1242 - RNA, 20 nt, Artificial Sequence
  GATA2 Guide RNA
cugugaauguuccccaccac

SEQ ID NO: 1243 - RNA, 20 nt, Artificial Sequence
  GATA2 Guide RNA
gaauguuccccaccacugag

SEQ ID NO: 1244 - RNA, 20 nt, Artificial Sequence
  GATA2 Guide RNA
gaggcagccucucaguggug

SEQ ID NO: 1245 - RNA, 20 nt, Artificial Sequence
  GATA2 Guide RNA
gcagccucucaguggugggg

SEQ ID NO: 1246 - RNA, 20 nt, Artificial Sequence
  GATA2 Guide RNA
gccucucagugguggggaac

SEQ ID NO: 1247 - RNA, 20 nt, Artificial Sequence
  GATA2 Guide RNA
gcggaggcagccucucagug

SEQ ID NO: 1248 - RNA, 20 nt, Artificial Sequence
  GATA2 Guide RNA
ggaggcagccucucaguggu

SEQ ID NO: 1249 - RNA, 20 nt, Artificial Sequence
  GATA2 Guide RNA
ggcagccucucagugguggg

SEQ ID NO: 1250 - RNA, 20 nt, Artificial Sequence
  GATA2 Guide RNA
ggugcggaggcagccucuca

SEQ ID NO: 1251 - RNA, 20 nt, Artificial Sequence
  GATA2 Guide RNA
gugaauguuccccaccacug

SEQ ID NO: 1252 - RNA, 20 nt, Artificial Sequence
  GATA2 Guide RNA
gugcggaggcagccucucag

SEQ ID NO: 1253 - RNA, 20 nt, Artificial Sequence
  GATA2 Guide RNA
gugguggggaacauucacag

SEQ ID NO: 1254 - RNA, 20 nt, Artificial Sequence
  GATA2 Guide RNA
guuacugugaauguucccca

SEQ ID NO: 1255 - RNA, 20 nt, Artificial Sequence
  GATA2 Guide RNA
guuccccaccacugagaggc

SEQ ID NO: 1256 - RNA, 20 nt, Artificial Sequence
  GATA2 Guide RNA
uacugugaauguuccccacc

SEQ ID NO: 1257 - RNA, 20 nt, Artificial Sequence
  GATA2 Guide RNA
ucagugguggggaacauuca

SEQ ID NO: 1258 - RNA, 20 nt, Artificial Sequence
  GATA2 Guide RNA
uccccaccacugagaggcug

SEQ ID NO: 1259 - RNA, 20 nt, Artificial Sequence
  GATA2 Guide RNA
ucucagugguggggaacauu

SEQ ID NO: 1260 - RNA, 20 nt, Artificial Sequence
  GATA2 Guide RNA
ugaauguuccccaccacuga

SEQ ID NO: 1261 - RNA, 20 nt, Artificial Sequence
  GATA2 Guide RNA
ugcggaggcagccucucagu

SEQ ID NO: 1262 - RNA, 20 nt, Artificial Sequence
  GATA2 Guide RNA
ugguggggaacauucacagu

SEQ ID NO: 1263 - RNA, 20 nt, Artificial Sequence
  GATA2 Guide RNA
ugugaauguuccccaccacu

SEQ ID NO: 1264 - RNA, 20 nt, Artificial Sequence
  GATA2 Guide RNA
uguuccccaccacugagagg

SEQ ID NO: 1265 - RNA, 20 nt, Artificial Sequence
  GATA2 Guide RNA
uuacugugaauguuccccac

SEQ ID NO: 1266 - RNA, 20 nt, Artificial Sequence
  GATA2 Guide RNA
uuccccaccacugagaggcu

SEQ ID NO: 1267 - RNA, 21 nt, Artificial Sequence
  GATA2 Guide RNA
aauguuccccaccacugagag

SEQ ID NO: 1268 - RNA, 21 nt, Artificial Sequence
  GATA2 Guide RNA
accacugagaggcugccuccg

SEQ ID NO: 1269 - RNA, 21 nt, Artificial Sequence
  GATA2 Guide RNA
acugugaauguuccccaccac

SEQ ID NO: 1270 - RNA, 21 nt, Artificial Sequence
  GATA2 Guide RNA
agccucucagugguggggaac

SEQ ID NO: 1271 - RNA, 21 nt, Artificial Sequence
  GATA2 Guide RNA
aggcagccucucagugguggg

SEQ ID NO: 1272 - RNA, 21 nt, Artificial Sequence
  GATA2 Guide RNA
aggugcggaggcagccucuca

SEQ ID NO: 1273 - RNA, 21 nt, Artificial Sequence
  GATA2 Guide RNA
agugguggggaacauucacag

SEQ ID NO: 1274 - RNA, 21 nt, Artificial Sequence
  GATA2 Guide RNA
aguuacugugaauguucccca

SEQ ID NO: 1275 - RNA, 21 nt, Artificial Sequence
  GATA2 Guide RNA
auguuccccaccacugagagg

SEQ ID NO: 1276 - RNA, 21 nt, Artificial Sequence
  GATA2 Guide RNA
caccacugagaggcugccucc

SEQ ID NO: 1277 - RNA, 21 nt, Artificial Sequence
  GATA2 Guide RNA
cacugagaggcugccuccgca

SEQ ID NO: 1278 - RNA, 21 nt, Artificial Sequence
  GATA2 Guide RNA
cagccucucagugguggggaa

SEQ ID NO: 1279 - RNA, 21 nt, Artificial Sequence
  GATA2 Guide RNA
caggugcggaggcagccucuc

SEQ ID NO: 1280 - RNA, 21 nt, Artificial Sequence
  GATA2 Guide RNA
cagugguggggaacauucaca

SEQ ID NO: 1281 - RNA, 21 nt, Artificial Sequence
  GATA2 Guide RNA
caguuacugugaauguucccc

SEQ ID NO: 1282 - RNA, 21 nt, Artificial Sequence
  GATA2 Guide RNA
ccaccacugagaggcugccuc

SEQ ID NO: 1283 - RNA, 21 nt, Artificial Sequence
  GATA2 Guide RNA
ccacugagaggcugccuccgc

SEQ ID NO: 1284 - RNA, 21 nt, Artificial Sequence
  GATA2 Guide RNA
cccaccacugagaggcugccu

SEQ ID NO: 1285 - RNA, 21 nt, Artificial Sequence
  GATA2 Guide RNA
ccccaccacugagaggcugcc

SEQ ID NO: 1286 - RNA, 21 nt, Artificial Sequence
  GATA2 Guide RNA
ccucucagugguggggaacau

SEQ ID NO: 1287 - RNA, 21 nt, Artificial Sequence
  GATA2 Guide RNA
cggaggcagccucucaguggu

SEQ ID NO: 1288 - RNA, 21 nt, Artificial Sequence
  GATA2 Guide RNA
cucagugguggggaacauuca

SEQ ID NO: 1289 - RNA, 21 nt, Artificial Sequence
  GATA2 Guide RNA
cucucagugguggggaacauu

SEQ ID NO: 1290 - RNA, 21 nt, Artificial Sequence
  GATA2 Guide RNA
cugugaauguuccccaccacu

SEQ ID NO: 1291 - RNA, 21 nt, Artificial Sequence
  GATA2 Guide RNA
gaauguuccccaccacugaga

SEQ ID NO: 1292 - RNA, 21 nt, Artificial Sequence
  GATA2 Guide RNA
gaggcagccucucaguggugg

SEQ ID NO: 1293 - RNA, 21 nt, Artificial Sequence
  GATA2 Guide RNA
gcagccucucaguggugggga

SEQ ID NO: 1294 - RNA, 21 nt, Artificial Sequence
  GATA2 Guide RNA
gccucucagugguggggaaca

SEQ ID NO: 1295 - RNA, 21 nt, Artificial Sequence
  GATA2 Guide RNA
gcggaggcagccucucagugg

SEQ ID NO: 1296 - RNA, 21 nt, Artificial Sequence
  GATA2 Guide RNA
ggaggcagccucucaguggug

SEQ ID NO: 1297 - RNA, 21 nt, Artificial Sequence
  GATA2 Guide RNA
ggcagccucucaguggugggg

SEQ ID NO: 1298 - RNA, 21 nt, Artificial Sequence
  GATA2 Guide RNA
ggugcggaggcagccucucag

SEQ ID NO: 1299 - RNA, 21 nt, Artificial Sequence
  GATA2 Guide RNA
gugaauguuccccaccacuga

SEQ ID NO: 1300 - RNA, 21 nt, Artificial Sequence
  GATA2 Guide RNA
gugcggaggcagccucucagu

SEQ ID NO: 1301 - RNA, 21 nt, Artificial Sequence
  GATA2 Guide RNA
gugguggggaacauucacagu

SEQ ID NO: 1302 - RNA, 21 nt, Artificial Sequence
  GATA2 Guide RNA
guuacugugaauguuccccac

SEQ ID NO: 1303 - RNA, 21 nt, Artificial Sequence
  GATA2 Guide RNA
guuccccaccacugagaggcu

SEQ ID NO: 1304 - RNA, 21 nt, Artificial Sequence
  GATA2 Guide RNA
uacugugaauguuccccacca

SEQ ID NO: 1305 - RNA, 21 nt, Artificial Sequence
  GATA2 Guide RNA
ucagugguggggaacauucac

SEQ ID NO: 1306 - RNA, 21 nt, Artificial Sequence
  GATA2 Guide RNA
uccccaccacugagaggcugc

SEQ ID NO: 1307 - RNA, 21 nt, Artificial Sequence
  GATA2 Guide RNA
ucucagugguggggaacauuc

SEQ ID NO: 1308 - RNA, 21 nt, Artificial Sequence
  GATA2 Guide RNA
ugaauguuccccaccacugag

SEQ ID NO: 1309 - RNA, 21 nt, Artificial Sequence
  GATA2 Guide RNA
ugcggaggcagccucucagug

SEQ ID NO: 1310 - RNA, 21 nt, Artificial Sequence
  GATA2 Guide RNA
ugguggggaacauucacagua

SEQ ID NO: 1311 - RNA, 21 nt, Artificial Sequence
  GATA2 Guide RNA
ugugaauguuccccaccacug

SEQ ID NO: 1312 - RNA, 21 nt, Artificial Sequence
  GATA2 Guide RNA
uguuccccaccacugagaggc

SEQ ID NO: 1313 - RNA, 21 nt, Artificial Sequence
  GATA2 Guide RNA
uuacugugaauguuccccacc

SEQ ID NO: 1314 - RNA, 21 nt, Artificial Sequence
  GATA2 Guide RNA
uuccccaccacugagaggcug

SEQ ID NO: 1315 - RNA, 22 nt, Artificial Sequence
  GATA2 Guide RNA
aauguuccccaccacugagagg

SEQ ID NO: 1316 - RNA, 22 nt, Artificial Sequence
  GATA2 Guide RNA
accacugagaggcugccuccgc

SEQ ID NO: 1317 - RNA, 22 nt, Artificial Sequence
  GATA2 Guide RNA
acugugaauguuccccaccacu

SEQ ID NO: 1318 - RNA, 22 nt, Artificial Sequence
  GATA2 Guide RNA
agccucucagugguggggaaca

SEQ ID NO: 1319 - RNA, 22 nt, Artificial Sequence
  GATA2 Guide RNA
aggcagccucucaguggugggg

SEQ ID NO: 1320 - RNA, 22 nt, Artificial Sequence
  GATA2 Guide RNA
aggugcggaggcagccucucag

SEQ ID NO: 1321 - RNA, 22 nt, Artificial Sequence
  GATA2 Guide RNA
agugguggggaacauucacagu

SEQ ID NO: 1322 - RNA, 22 nt, Artificial Sequence
  GATA2 Guide RNA
aguuacugugaauguuccccac

SEQ ID NO: 1323 - RNA, 22 nt, Artificial Sequence
  GATA2 Guide RNA
auguuccccaccacugagaggc

SEQ ID NO: 1324 - RNA, 22 nt, Artificial Sequence
  GATA2 Guide RNA
caccacugagaggcugccuccg

SEQ ID NO: 1325 - RNA, 22 nt, Artificial Sequence
  GATA2 Guide RNA
cacugagaggcugccuccgcac

SEQ ID NO: 1326 - RNA, 22 nt, Artificial Sequence
  GATA2 Guide RNA
cagccucucagugguggggaac

SEQ ID NO: 1327 - RNA, 22 nt, Artificial Sequence
  GATA2 Guide RNA
caggugcggaggcagccucuca

SEQ ID NO: 1328 - RNA, 22 nt, Artificial Sequence
  GATA2 Guide RNA
cagugguggggaacauucacag

SEQ ID NO: 1329 - RNA, 22 nt, Artificial Sequence
  GATA2 Guide RNA
caguuacugugaauguucccca

SEQ ID NO: 1330 - RNA, 22 nt, Artificial Sequence
  GATA2 Guide RNA
ccaccacugagaggcugccucc

SEQ ID NO: 1331 - RNA, 22 nt, Artificial Sequence
  GATA2 Guide RNA
ccacugagaggcugccuccgca

SEQ ID NO: 1332 - RNA, 22 nt, Artificial Sequence
  GATA2 Guide RNA
cccaccacugagaggcugccuc

SEQ ID NO: 1333 - RNA, 22 nt, Artificial Sequence
  GATA2 Guide RNA
ccccaccacugagaggcugccu

SEQ ID NO: 1334 - RNA, 22 nt, Artificial Sequence
  GATA2 Guide RNA
ccucucagugguggggaacauu

SEQ ID NO: 1335 - RNA, 22 nt, Artificial Sequence
  GATA2 Guide RNA
cggaggcagccucucaguggug

SEQ ID NO: 1336 - RNA, 22 nt, Artificial Sequence
  GATA2 Guide RNA
cucagugguggggaacauucac

SEQ ID NO: 1337 - RNA, 22 nt, Artificial Sequence
  GATA2 Guide RNA
cucucagugguggggaacauuc

SEQ ID NO: 1338 - RNA, 22 nt, Artificial Sequence
  GATA2 Guide RNA
cugugaauguuccccaccacug

SEQ ID NO: 1339 - RNA, 22 nt, Artificial Sequence
  GATA2 Guide RNA
gaauguuccccaccacugagag

SEQ ID NO: 1340 - RNA, 22 nt, Artificial Sequence
  GATA2 Guide RNA
gaggcagccucucagugguggg

SEQ ID NO: 1341 - RNA, 22 nt, Artificial Sequence
  GATA2 Guide RNA
gcagccucucagugguggggaa

SEQ ID NO: 1342 - RNA, 22 nt, Artificial Sequence
  GATA2 Guide RNA
gcaguuacugugaauguucccc

SEQ ID NO: 1343 - RNA, 22 nt, Artificial Sequence
  GATA2 Guide RNA
gccucucagugguggggaacau

SEQ ID NO: 1344 - RNA, 22 nt, Artificial Sequence
  GATA2 Guide RNA
gcggaggcagccucucaguggu

SEQ ID NO: 1345 - RNA, 22 nt, Artificial Sequence
  GATA2 Guide RNA
ggaggcagccucucaguggugg

SEQ ID NO: 1346 - RNA, 22 nt, Artificial Sequence
  GATA2 Guide RNA
ggcagccucucaguggugggga

SEQ ID NO: 1347 - RNA, 22 nt, Artificial Sequence
  GATA2 Guide RNA
ggugcggaggcagccucucagu

SEQ ID NO: 1348 - RNA, 22 nt, Artificial Sequence
  GATA2 Guide RNA
gugaauguuccccaccacugag

SEQ ID NO: 1349 - RNA, 22 nt, Artificial Sequence
  GATA2 Guide RNA
gugcggaggcagccucucagug

SEQ ID NO: 1350 - RNA, 22 nt, Artificial Sequence
  GATA2 Guide RNA
gugguggggaacauucacagua

SEQ ID NO: 1351 - RNA, 22 nt, Artificial Sequence
  GATA2 Guide RNA
guuacugugaauguuccccacc

SEQ ID NO: 1352 - RNA, 22 nt, Artificial Sequence
  GATA2 Guide RNA
guuccccaccacugagaggcug

SEQ ID NO: 1353 - RNA, 22 nt, Artificial Sequence
  GATA2 Guide RNA
uacugugaauguuccccaccac

SEQ ID NO: 1354 - RNA, 22 nt, Artificial Sequence
  GATA2 Guide RNA
ucaggugcggaggcagccucuc

SEQ ID NO: 1355 - RNA, 22 nt, Artificial Sequence
  GATA2 Guide RNA
ucagugguggggaacauucaca

SEQ ID NO: 1356 - RNA, 22 nt, Artificial Sequence
  GATA2 Guide RNA
uccccaccacugagaggcugcc

SEQ ID NO: 1357 - RNA, 22 nt, Artificial Sequence
  GATA2 Guide RNA
ucucagugguggggaacauuca

SEQ ID NO: 1358 - RNA, 22 nt, Artificial Sequence
  GATA2 Guide RNA
ugaauguuccccaccacugaga

SEQ ID NO: 1359 - RNA, 22 nt, Artificial Sequence
  GATA2 Guide RNA
ugcggaggcagccucucagugg

SEQ ID NO: 1360 - RNA, 22 nt, Artificial Sequence
  GATA2 Guide RNA
ugguggggaacauucacaguaa

SEQ ID NO: 1361 - RNA, 22 nt, Artificial Sequence
  GATA2 Guide RNA
ugugaauguuccccaccacuga

SEQ ID NO: 1362 - RNA, 22 nt, Artificial Sequence
  GATA2 Guide RNA
uguuccccaccacugagaggcu

SEQ ID NO: 1363 - RNA, 22 nt, Artificial Sequence
  GATA2 Guide RNA
uuacugugaauguuccccacca

SEQ ID NO: 1364 - RNA, 22 nt, Artificial Sequence
  GATA2 Guide RNA
uuccccaccacugagaggcugc

SEQ ID NO: 1365 - RNA, 20 nt, Artificial Sequence
  GATA2 Guide RNA
acaccacuccugccagccca

SEQ ID NO: 1366 - RNA, 20 nt, Artificial Sequence
  GATA2 Guide RNA
accacuccugccagcccagc

SEQ ID NO: 1367 - RNA, 20 nt, Artificial Sequence
  GATA2 Guide RNA
acuccugccagcccagcucg

SEQ ID NO: 1368 - RNA, 20 nt, Artificial Sequence
  GATA2 Guide RNA
agagggggugcugggccgag

SEQ ID NO: 1369 - RNA, 20 nt, Artificial Sequence
  GATA2 Guide RNA
agcccagcucggcccagcac

SEQ ID NO: 1370 - RNA, 20 nt, Artificial Sequence
  GATA2 Guide RNA
agcugggcuggcaggagugg

SEQ ID NO: 1371 - RNA, 20 nt, Artificial Sequence
  GATA2 Guide RNA
agggggugcugggccgagcu

SEQ ID NO: 1372 - RNA, 20 nt, Artificial Sequence
  GATA2 Guide RNA
caccacuccugccagcccag

SEQ ID NO: 1373 - RNA, 20 nt, Artificial Sequence
  GATA2 Guide RNA
cacuccugccagcccagcuc

SEQ ID NO: 1374 - RNA, 20 nt, Artificial Sequence
  GATA2 Guide RNA
cagcccagcucggcccagca

SEQ ID NO: 1375 - RNA, 20 nt, Artificial Sequence
  GATA2 Guide RNA
cagcucggcccagcaccccc

SEQ ID NO: 1376 - RNA, 20 nt, Artificial Sequence
  GATA2 Guide RNA
ccacuccugccagcccagcu

SEQ ID NO: 1377 - RNA, 20 nt, Artificial Sequence
  GATA2 Guide RNA
ccagcccagcucggcccagc

SEQ ID NO: 1378 - RNA, 20 nt, Artificial Sequence
  GATA2 Guide RNA
ccagcucggcccagcacccc

SEQ ID NO: 1379 - RNA, 20 nt, Artificial Sequence
  GATA2 Guide RNA
cccagcucggcccagcaccc

SEQ ID NO: 1380 - RNA, 20 nt, Artificial Sequence
  GATA2 Guide RNA
ccgacaccacuccugccagc

SEQ ID NO: 1381 - RNA, 20 nt, Artificial Sequence
  GATA2 Guide RNA
ccgagcugggcuggcaggag

SEQ ID NO: 1382 - RNA, 20 nt, Artificial Sequence
  GATA2 Guide RNA
ccugccagcccagcucggcc

SEQ ID NO: 1383 - RNA, 20 nt, Artificial Sequence
  GATA2 Guide RNA
cgacaccacuccugccagcc

SEQ ID NO: 1384 - RNA, 20 nt, Artificial Sequence
  GATA2 Guide RNA
cgagcugggcuggcaggagu

SEQ ID NO: 1385 - RNA, 20 nt, Artificial Sequence
  GATA2 Guide RNA
cuccugccagcccagcucgg

SEQ ID NO: 1386 - RNA, 20 nt, Artificial Sequence
  GATA2 Guide RNA
cugccagcccagcucggccc

SEQ ID NO: 1387 - RNA, 20 nt, Artificial Sequence
  GATA2 Guide RNA
cugggccgagcugggcuggc

SEQ ID NO: 1388 - RNA, 20 nt, Artificial Sequence
  GATA2 Guide RNA
cugggcuggcaggaguggug

SEQ ID NO: 1389 - RNA, 20 nt, Artificial Sequence
  GATA2 Guide RNA
gacaccacuccugccagccc

SEQ ID NO: 1390 - RNA, 20 nt, Artificial Sequence
  GATA2 Guide RNA
gagagggggugcugggccga

SEQ ID NO: 1391 - RNA, 20 nt, Artificial Sequence
  GATA2 Guide RNA
gagcugggcuggcaggagug

SEQ ID NO: 1392 - RNA, 20 nt, Artificial Sequence
  GATA2 Guide RNA
gagggggugcugggccgagc

SEQ ID NO: 1393 - RNA, 20 nt, Artificial Sequence
  GATA2 Guide RNA
gccagcccagcucggcccag

SEQ ID NO: 1394 - RNA, 20 nt, Artificial Sequence
  GATA2 Guide RNA
gcccagcucggcccagcacc

SEQ ID NO: 1395 - RNA, 20 nt, Artificial Sequence
  GATA2 Guide RNA
gccgacaccacuccugccag

SEQ ID NO: 1396 - RNA, 20 nt, Artificial Sequence
  GATA2 Guide RNA
gccgagcugggcuggcagga

SEQ ID NO: 1397 - RNA, 20 nt, Artificial Sequence
  GATA2 Guide RNA
gcugggccgagcugggcugg

SEQ ID NO: 1398 - RNA, 20 nt, Artificial Sequence
  GATA2 Guide RNA
gcugggcuggcaggaguggu

SEQ ID NO: 1399 - RNA, 20 nt, Artificial Sequence
  GATA2 Guide RNA
ggccgagcugggcuggcagg

SEQ ID NO: 1400 - RNA, 20 nt, Artificial Sequence
  GATA2 Guide RNA
gggccgagcugggcuggcag

SEQ ID NO: 1401 - RNA, 20 nt, Artificial Sequence
  GATA2 Guide RNA
gggggugcugggccgagcug

SEQ ID NO: 1402 - RNA, 20 nt, Artificial Sequence
  GATA2 Guide RNA
ggggugcugggccgagcugg

SEQ ID NO: 1403 - RNA, 20 nt, Artificial Sequence
  GATA2 Guide RNA
gggugcugggccgagcuggg

SEQ ID NO: 1404 - RNA, 20 nt, Artificial Sequence
  GATA2 Guide RNA
ggugcugggccgagcugggc

SEQ ID NO: 1405 - RNA, 20 nt, Artificial Sequence
  GATA2 Guide RNA
gugcugggccgagcugggcu

SEQ ID NO: 1406 - RNA, 20 nt, Artificial Sequence
  GATA2 Guide RNA
uccugccagcccagcucggc

SEQ ID NO: 1407 - RNA, 20 nt, Artificial Sequence
  GATA2 Guide RNA
ugccagcccagcucggccca

SEQ ID NO: 1408 - RNA, 20 nt, Artificial Sequence
  GATA2 Guide RNA
ugcugggccgagcugggcug

SEQ ID NO: 1409 - RNA, 20 nt, Artificial Sequence
  GATA2 Guide RNA
ugggccgagcugggcuggca

SEQ ID NO: 1410 - RNA, 20 nt, Artificial Sequence
  GATA2 Guide RNA
ugggcuggcaggaguggugu

SEQ ID NO: 1411 - RNA, 21 nt, Artificial Sequence
  GATA2 Guide RNA
acaccacuccugccagcccag

SEQ ID NO: 1412 - RNA, 21 nt, Artificial Sequence
  GATA2 Guide RNA
accacuccugccagcccagcu

SEQ ID NO: 1413 - RNA, 21 nt, Artificial Sequence
  GATA2 Guide RNA
acuccugccagcccagcucgg

SEQ ID NO: 1414 - RNA, 21 nt, Artificial Sequence
  GATA2 Guide RNA
agagggggugcugggccgagc

SEQ ID NO: 1415 - RNA, 21 nt, Artificial Sequence
  GATA2 Guide RNA
agcccagcucggcccagcacc

SEQ ID NO: 1416 - RNA, 21 nt, Artificial Sequence
  GATA2 Guide RNA
agcugggcuggcaggaguggu

SEQ ID NO: 1417 - RNA, 21 nt, Artificial Sequence
  GATA2 Guide RNA
agggggugcugggccgagcug

SEQ ID NO: 1418 - RNA, 21 nt, Artificial Sequence
  GATA2 Guide RNA
caccacuccugccagcccagc

SEQ ID NO: 1419 - RNA, 21 nt, Artificial Sequence
  GATA2 Guide RNA
cacuccugccagcccagcucg

SEQ ID NO: 1420 - RNA, 21 nt, Artificial Sequence
  GATA2 Guide RNA
cagcccagcucggcccagcac

SEQ ID NO: 1421 - RNA, 21 nt, Artificial Sequence
  GATA2 Guide RNA
cagcucggcccagcacccccu

SEQ ID NO: 1422 - RNA, 21 nt, Artificial Sequence
  GATA2 Guide RNA
ccacuccugccagcccagcuc

SEQ ID NO: 1423 - RNA, 21 nt, Artificial Sequence
  GATA2 Guide RNA
ccagcccagcucggcccagca

SEQ ID NO: 1424 - RNA, 21 nt, Artificial Sequence
  GATA2 Guide RNA
ccgacaccacuccugccagcc

SEQ ID NO: 1425 - RNA, 21 nt, Artificial Sequence
  GATA2 Guide RNA
ccgagcugggcuggcaggagu

SEQ ID NO: 1426 - RNA, 21 nt, Artificial Sequence
  GATA2 Guide RNA
cgacaccacuccugccagccc

SEQ ID NO: 1427 - RNA, 21 nt, Artificial Sequence
  GATA2 Guide RNA
cgagcugggcuggcaggagug

SEQ ID NO: 1428 - RNA, 21 nt, Artificial Sequence
  GATA2 Guide RNA
cuccugccagcccagcucggc

SEQ ID NO: 1429 - RNA, 21 nt, Artificial Sequence
  GATA2 Guide RNA
cugccagcccagcucggccca

SEQ ID NO: 1430 - RNA, 21 nt, Artificial Sequence
  GATA2 Guide RNA
cugggccgagcugggcuggca

SEQ ID NO: 1431 - RNA, 21 nt, Artificial Sequence
  GATA2 Guide RNA
cugggcuggcaggaguggugu

SEQ ID NO: 1432 - RNA, 21 nt, Artificial Sequence
  GATA2 Guide RNA
gacaccacuccugccagccca

SEQ ID NO: 1433 - RNA, 21 nt, Artificial Sequence
  GATA2 Guide RNA
gagagggggugcugggccgag

SEQ ID NO: 1434 - RNA, 21 nt, Artificial Sequence
  GATA2 Guide RNA
gagcugggcuggcaggagugg

SEQ ID NO: 1435 - RNA, 21 nt, Artificial Sequence
  GATA2 Guide RNA
gagggggugcugggccgagcu

SEQ ID NO: 1436 - RNA, 21 nt, Artificial Sequence
  GATA2 Guide RNA
gccgacaccacuccugccagc

SEQ ID NO: 1437 - RNA, 21 nt, Artificial Sequence
  GATA2 Guide RNA
gccgagcugggcuggcaggag

SEQ ID NO: 1438 - RNA, 21 nt, Artificial Sequence
  GATA2 Guide RNA
gcugggcuggcaggaguggug

SEQ ID NO: 1439 - RNA, 21 nt, Artificial Sequence
  GATA2 Guide RNA
ggagagggggugcugggccga

SEQ ID NO: 1440 - RNA, 21 nt, Artificial Sequence
  GATA2 Guide RNA
ggccgacaccacuccugccag

SEQ ID NO: 1441 - RNA, 21 nt, Artificial Sequence
  GATA2 Guide RNA
ggccgagcugggcuggcagga

SEQ ID NO: 1442 - RNA, 21 nt, Artificial Sequence
  GATA2 Guide RNA
ggugcugggccgagcugggcu

SEQ ID NO: 1443 - RNA, 21 nt, Artificial Sequence
  GATA2 Guide RNA
gugcugggccgagcugggcug

SEQ ID NO: 1444 - RNA, 21 nt, Artificial Sequence
  GATA2 Guide RNA
uccugccagcccagcucggcc

SEQ ID NO: 1445 - RNA, 21 nt, Artificial Sequence
  GATA2 Guide RNA
ugccagcccagcucggcccag

SEQ ID NO: 1446 - RNA, 21 nt, Artificial Sequence
  GATA2 Guide RNA
ugcugggccgagcugggcugg

SEQ ID NO: 1447 - RNA, 21 nt, Artificial Sequence
  GATA2 Guide RNA
ugggccgagcugggcuggcag

SEQ ID NO: 1448 - RNA, 21 nt, Artificial Sequence
  GATA2 Guide RNA
ugggcuggcaggagugguguc

SEQ ID NO: 1449 - RNA, 22 nt, Artificial Sequence
  GATA2 Guide RNA
acaccacuccugccagcccagc

SEQ ID NO: 1450 - RNA, 22 nt, Artificial Sequence
  GATA2 Guide RNA
accacuccugccagcccagcuc

SEQ ID NO: 1451 - RNA, 22 nt, Artificial Sequence
  GATA2 Guide RNA
acuccugccagcccagcucggc

SEQ ID NO: 1452 - RNA, 22 nt, Artificial Sequence
  GATA2 Guide RNA
agagggggugcugggccgagcu

SEQ ID NO: 1453 - RNA, 22 nt, Artificial Sequence
  GATA2 Guide RNA
agcccagcucggcccagcaccc

SEQ ID NO: 1454 - RNA, 22 nt, Artificial Sequence
  GATA2 Guide RNA
agcugggcuggcaggaguggug

SEQ ID NO: 1455 - RNA, 22 nt, Artificial Sequence
  GATA2 Guide RNA
aggagagggggugcugggccga

SEQ ID NO: 1456 - RNA, 22 nt, Artificial Sequence
  GATA2 Guide RNA
aggccgacaccacuccugccag

SEQ ID NO: 1457 - RNA, 22 nt, Artificial Sequence
  GATA2 Guide RNA
agggggugcugggccgagcugg

SEQ ID NO: 1458 - RNA, 22 nt, Artificial Sequence
  GATA2 Guide RNA
caccacuccugccagcccagcu

SEQ ID NO: 1459 - RNA, 22 nt, Artificial Sequence
  GATA2 Guide RNA
cacuccugccagcccagcucgg

SEQ ID NO: 1460 - RNA, 22 nt, Artificial Sequence
  GATA2 Guide RNA
cagcccagcucggcccagcacc

SEQ ID NO: 1461 - RNA, 22 nt, Artificial Sequence
  GATA2 Guide RNA
cagcucggcccagcacccccuc

SEQ ID NO: 1462 - RNA, 22 nt, Artificial Sequence
  GATA2 Guide RNA
ccacuccugccagcccagcucg

SEQ ID NO: 1463 - RNA, 22 nt, Artificial Sequence
  GATA2 Guide RNA
ccagcccagcucggcccagcac

SEQ ID NO: 1464 - RNA, 22 nt, Artificial Sequence
  GATA2 Guide RNA
ccagcucggcccagcacccccu

SEQ ID NO: 1465 - RNA, 22 nt, Artificial Sequence
  GATA2 Guide RNA
ccgacaccacuccugccagccc

SEQ ID NO: 1466 - RNA, 22 nt, Artificial Sequence
  GATA2 Guide RNA
ccgagcugggcuggcaggagug

SEQ ID NO: 1467 - RNA, 22 nt, Artificial Sequence
  GATA2 Guide RNA
ccugccagcccagcucggccca

SEQ ID NO: 1468 - RNA, 22 nt, Artificial Sequence
  GATA2 Guide RNA
cgacaccacuccugccagccca

SEQ ID NO: 1469 - RNA, 22 nt, Artificial Sequence
  GATA2 Guide RNA
cgagcugggcuggcaggagugg

SEQ ID NO: 1470 - RNA, 22 nt, Artificial Sequence
  GATA2 Guide RNA
cuccugccagcccagcucggcc

SEQ ID NO: 1471 - RNA, 22 nt, Artificial Sequence
  GATA2 Guide RNA
cugccagcccagcucggcccag

SEQ ID NO: 1472 - RNA, 22 nt, Artificial Sequence
  GATA2 Guide RNA
cugggccgagcugggcuggcag

SEQ ID NO: 1473 - RNA, 22 nt, Artificial Sequence
  GATA2 Guide RNA
cugggcuggcaggagugguguc

SEQ ID NO: 1474 - RNA, 22 nt, Artificial Sequence
  GATA2 Guide RNA
gacaccacuccugccagcccag

SEQ ID NO: 1475 - RNA, 22 nt, Artificial Sequence
  GATA2 Guide RNA
gagagggggugcugggccgagc

SEQ ID NO: 1476 - RNA, 22 nt, Artificial Sequence
  GATA2 Guide RNA
gagcugggcuggcaggaguggu

SEQ ID NO: 1477 - RNA, 22 nt, Artificial Sequence
  GATA2 Guide RNA
gagggggugcugggccgagcug

SEQ ID NO: 1478 - RNA, 22 nt, Artificial Sequence
  GATA2 Guide RNA
gccagcccagcucggcccagca

SEQ ID NO: 1479 - RNA, 22 nt, Artificial Sequence
  GATA2 Guide RNA
gccgacaccacuccugccagcc

SEQ ID NO: 1480 - RNA, 22 nt, Artificial Sequence
  GATA2 Guide RNA
gccgagcugggcuggcaggagu

SEQ ID NO: 1481 - RNA, 22 nt, Artificial Sequence
  GATA2 Guide RNA
gcugggccgagcugggcuggca

SEQ ID NO: 1482 - RNA, 22 nt, Artificial Sequence
  GATA2 Guide RNA
gcugggcuggcaggaguggugu

SEQ ID NO: 1483 - RNA, 22 nt, Artificial Sequence
  GATA2 Guide RNA
ggagagggggugcugggccgag

SEQ ID NO: 1484 - RNA, 22 nt, Artificial Sequence
  GATA2 Guide RNA
ggccgacaccacuccugccagc

SEQ ID NO: 1485 - RNA, 22 nt, Artificial Sequence
  GATA2 Guide RNA
ggccgagcugggcuggcaggag

SEQ ID NO: 1486 - RNA, 22 nt, Artificial Sequence
  GATA2 Guide RNA
gggccgagcugggcuggcagga

SEQ ID NO: 1487 - RNA, 22 nt, Artificial Sequence
  GATA2 Guide RNA
gggugcugggccgagcugggcu

SEQ ID NO: 1488 - RNA, 22 nt, Artificial Sequence
  GATA2 Guide RNA
ggugcugggccgagcugggcug

SEQ ID NO: 1489 - RNA, 22 nt, Artificial Sequence
  GATA2 Guide RNA
gugcugggccgagcugggcugg

SEQ ID NO: 1490 - RNA, 22 nt, Artificial Sequence
  GATA2 Guide RNA
uccugccagcccagcucggccc

SEQ ID NO: 1491 - RNA, 22 nt, Artificial Sequence
  GATA2 Guide RNA
ugccagcccagcucggcccagc

SEQ ID NO: 1492 - RNA, 22 nt, Artificial Sequence
  GATA2 Guide RNA
ugcugggccgagcugggcuggc

SEQ ID NO: 1493 - RNA, 22 nt, Artificial Sequence
  GATA2 Guide RNA
ugggccgagcugggcuggcagg

SEQ ID NO: 1494 - RNA, 22 nt, Artificial Sequence
  GATA2 Guide RNA
ugggcuggcaggaguggugucg

SEQ ID NO: 1495 - RNA, 20 nt, Artificial Sequence
  GATA2 Guide RNA
aaggccgacgccacuccugc

SEQ ID NO: 1496 - RNA, 20 nt, Artificial Sequence
  GATA2 Guide RNA
acgccacuccugccagcccg

SEQ ID NO: 1497 - RNA, 20 nt, Artificial Sequence
  GATA2 Guide RNA
agcauuucccgaaggccgac

SEQ ID NO: 1498 - RNA, 20 nt, Artificial Sequence
  GATA2 Guide RNA
agccgggcuggcaggagugg

SEQ ID NO: 1499 - RNA, 20 nt, Artificial Sequence
  GATA2 Guide RNA
aggaguggcgucggccuucg

SEQ ID NO: 1500 - RNA, 20 nt, Artificial Sequence
  GATA2 Guide RNA
aggccgacgccacuccugcc

SEQ ID NO: 1501 - RNA, 20 nt, Artificial Sequence
  GATA2 Guide RNA
aguggcgucggccuucggga

SEQ ID NO: 1502 - RNA, 20 nt, Artificial Sequence
  GATA2 Guide RNA
auuucccgaaggccgacgcc

SEQ ID NO: 1503 - RNA, 20 nt, Artificial Sequence
  GATA2 Guide RNA
cagcauuucccgaaggccga

SEQ ID NO: 1504 - RNA, 20 nt, Artificial Sequence
  GATA2 Guide RNA
caggaguggcgucggccuuc

SEQ ID NO: 1505 - RNA, 20 nt, Artificial Sequence
  GATA2 Guide RNA
cauuucccgaaggccgacgc

SEQ ID NO: 1506 - RNA, 20 nt, Artificial Sequence
  GATA2 Guide RNA
ccagcauuucccgaaggccg

SEQ ID NO: 1507 - RNA, 20 nt, Artificial Sequence
  GATA2 Guide RNA
cccagcauuucccgaaggcc

SEQ ID NO: 1508 - RNA, 20 nt, Artificial Sequence
  GATA2 Guide RNA
cccgaaggccgacgccacuc

SEQ ID NO: 1509 - RNA, 20 nt, Artificial Sequence
  GATA2 Guide RNA
ccgaaggccgacgccacucc

SEQ ID NO: 1510 - RNA, 20 nt, Artificial Sequence
  GATA2 Guide RNA
ccgacgccacuccugccagc

SEQ ID NO: 1511 - RNA, 20 nt, Artificial Sequence
  GATA2 Guide RNA
ccgggcuggcaggaguggcg

SEQ ID NO: 1512 - RNA, 20 nt, Artificial Sequence
  GATA2 Guide RNA
cgaaggccgacgccacuccu

SEQ ID NO: 1513 - RNA, 20 nt, Artificial Sequence
  GATA2 Guide RNA
cgacgccacuccugccagcc

SEQ ID NO: 1514 - RNA, 20 nt, Artificial Sequence
  GATA2 Guide RNA
cgagccgggcuggcaggagu

SEQ ID NO: 1515 - RNA, 20 nt, Artificial Sequence
  GATA2 Guide RNA
cgccacuccugccagcccgg

SEQ ID NO: 1516 - RNA, 20 nt, Artificial Sequence
  GATA2 Guide RNA
cgggcuggcaggaguggcgu

SEQ ID NO: 1517 - RNA, 20 nt, Artificial Sequence
  GATA2 Guide RNA
cgucggccuucgggaaaugc

SEQ ID NO: 1518 - RNA, 20 nt, Artificial Sequence
  GATA2 Guide RNA
cuggcaggaguggcgucggc

SEQ ID NO: 1519 - RNA, 20 nt, Artificial Sequence
  GATA2 Guide RNA
gaaggccgacgccacuccug

SEQ ID NO: 1520 - RNA, 20 nt, Artificial Sequence
  GATA2 Guide RNA
gacgccacuccugccagccc

SEQ ID NO: 1521 - RNA, 20 nt, Artificial Sequence
  GATA2 Guide RNA
gagccgggcuggcaggagug

SEQ ID NO: 1522 - RNA, 20 nt, Artificial Sequence
  GATA2 Guide RNA
gaguggcgucggccuucggg

SEQ ID NO: 1523 - RNA, 20 nt, Artificial Sequence
  GATA2 Guide RNA
gcaggaguggcgucggccuu

SEQ ID NO: 1524 - RNA, 20 nt, Artificial Sequence
  GATA2 Guide RNA
gcauuucccgaaggccgacg

SEQ ID NO: 1525 - RNA, 20 nt, Artificial Sequence
  GATA2 Guide RNA
gccgacgccacuccugccag

SEQ ID NO: 1526 - RNA, 20 nt, Artificial Sequence
  GATA2 Guide RNA
gccgggcuggcaggaguggc

SEQ ID NO: 1527 - RNA, 20 nt, Artificial Sequence
  GATA2 Guide RNA
gcgucggccuucgggaaaug

SEQ ID NO: 1528 - RNA, 20 nt, Artificial Sequence
  GATA2 Guide RNA
gcuggcaggaguggcgucgg

SEQ ID NO: 1529 - RNA, 20 nt, Artificial Sequence
  GATA2 Guide RNA
ggaguggcgucggccuucgg

SEQ ID NO: 1530 - RNA, 20 nt, Artificial Sequence
  GATA2 Guide RNA
ggcaggaguggcgucggccu

SEQ ID NO: 1531 - RNA, 20 nt, Artificial Sequence
  GATA2 Guide RNA
ggccgacgccacuccugcca

SEQ ID NO: 1532 - RNA, 20 nt, Artificial Sequence
  GATA2 Guide RNA
ggcgucggccuucgggaaau

SEQ ID NO: 1533 - RNA, 20 nt, Artificial Sequence
  GATA2 Guide RNA
ggcuggcaggaguggcgucg

SEQ ID NO: 1534 - RNA, 20 nt, Artificial Sequence
  GATA2 Guide RNA
gggcuggcaggaguggcguc

SEQ ID NO: 1535 - RNA, 20 nt, Artificial Sequence
  GATA2 Guide RNA
guggcgucggccuucgggaa

SEQ ID NO: 1536 - RNA, 20 nt, Artificial Sequence
  GATA2 Guide RNA
ucccgaaggccgacgccacu

SEQ ID NO: 1537 - RNA, 20 nt, Artificial Sequence
  GATA2 Guide RNA
uggcaggaguggcgucggcc

SEQ ID NO: 1538 - RNA, 20 nt, Artificial Sequence
  GATA2 Guide RNA
uggcgucggccuucgggaaa

SEQ ID NO: 1539 - RNA, 20 nt, Artificial Sequence
  GATA2 Guide RNA
uucccgaaggccgacgccac

SEQ ID NO: 1540 - RNA, 20 nt, Artificial Sequence
  GATA2 Guide RNA
uuucccgaaggccgacgcca

SEQ ID NO: 1541 - RNA, 21 nt, Artificial Sequence
  GATA2 Guide RNA
aaggccgacgccacuccugcc

SEQ ID NO: 1542 - RNA, 21 nt, Artificial Sequence
  GATA2 Guide RNA
acgccacuccugccagcccgg

SEQ ID NO: 1543 - RNA, 21 nt, Artificial Sequence
  GATA2 Guide RNA
agcauuucccgaaggccgacg

SEQ ID NO: 1544 - RNA, 21 nt, Artificial Sequence
  GATA2 Guide RNA
agccgggcuggcaggaguggc

SEQ ID NO: 1545 - RNA, 21 nt, Artificial Sequence
  GATA2 Guide RNA
aggaguggcgucggccuucgg

SEQ ID NO: 1546 - RNA, 21 nt, Artificial Sequence
  GATA2 Guide RNA
aggccgacgccacuccugcca

SEQ ID NO: 1547 - RNA, 21 nt, Artificial Sequence
  GATA2 Guide RNA
aguggcgucggccuucgggaa

SEQ ID NO: 1548 - RNA, 21 nt, Artificial Sequence
  GATA2 Guide RNA
auuucccgaaggccgacgcca

SEQ ID NO: 1549 - RNA, 21 nt, Artificial Sequence
  GATA2 Guide RNA
cagcauuucccgaaggccgac

SEQ ID NO: 1550 - RNA, 21 nt, Artificial Sequence
  GATA2 Guide RNA
caggaguggcgucggccuucg

SEQ ID NO: 1551 - RNA, 21 nt, Artificial Sequence
  GATA2 Guide RNA
cauuucccgaaggccgacgcc

SEQ ID NO: 1552 - RNA, 21 nt, Artificial Sequence
  GATA2 Guide RNA
ccagcauuucccgaaggccga

SEQ ID NO: 1553 - RNA, 21 nt, Artificial Sequence
  GATA2 Guide RNA
cccagcauuucccgaaggccg

SEQ ID NO: 1554 - RNA, 21 nt, Artificial Sequence
  GATA2 Guide RNA
cccgaaggccgacgccacucc

SEQ ID NO: 1555 - RNA, 21 nt, Artificial Sequence
  GATA2 Guide RNA
ccgaaggccgacgccacuccu

SEQ ID NO: 1556 - RNA, 21 nt, Artificial Sequence
  GATA2 Guide RNA
ccgacgccacuccugccagcc

SEQ ID NO: 1557 - RNA, 21 nt, Artificial Sequence
  GATA2 Guide RNA
ccgagccgggcuggcaggagu

SEQ ID NO: 1558 - RNA, 21 nt, Artificial Sequence
  GATA2 Guide RNA
ccgggcuggcaggaguggcgu

SEQ ID NO: 1559 - RNA, 21 nt, Artificial Sequence
  GATA2 Guide RNA
cgaaggccgacgccacuccug

SEQ ID NO: 1560 - RNA, 21 nt, Artificial Sequence
  GATA2 Guide RNA
cgacgccacuccugccagccc

SEQ ID NO: 1561 - RNA, 21 nt, Artificial Sequence
  GATA2 Guide RNA
cgagccgggcuggcaggagug

SEQ ID NO: 1562 - RNA, 21 nt, Artificial Sequence
  GATA2 Guide RNA
cgggcuggcaggaguggcguc

SEQ ID NO: 1563 - RNA, 21 nt, Artificial Sequence
  GATA2 Guide RNA
cgucggccuucgggaaaugcu

SEQ ID NO: 1564 - RNA, 21 nt, Artificial Sequence
  GATA2 Guide RNA
cuggcaggaguggcgucggcc

SEQ ID NO: 1565 - RNA, 21 nt, Artificial Sequence
  GATA2 Guide RNA
gaaggccgacgccacuccugc

SEQ ID NO: 1566 - RNA, 21 nt, Artificial Sequence
  GATA2 Guide RNA
gacgccacuccugccagcccg

SEQ ID NO: 1567 - RNA, 21 nt, Artificial Sequence
  GATA2 Guide RNA
gagccgggcuggcaggagugg

SEQ ID NO: 1568 - RNA, 21 nt, Artificial Sequence
  GATA2 Guide RNA
gaguggcgucggccuucggga

SEQ ID NO: 1569 - RNA, 21 nt, Artificial Sequence
  GATA2 Guide RNA
gcaggaguggcgucggccuuc

SEQ ID NO: 1570 - RNA, 21 nt, Artificial Sequence
  GATA2 Guide RNA
gcauuucccgaaggccgacgc

SEQ ID NO: 1571 - RNA, 21 nt, Artificial Sequence
  GATA2 Guide RNA
gcccagcauuucccgaaggcc

SEQ ID NO: 1572 - RNA, 21 nt, Artificial Sequence
  GATA2 Guide RNA
gccgacgccacuccugccagc

SEQ ID NO: 1573 - RNA, 21 nt, Artificial Sequence
  GATA2 Guide RNA
gcgucggccuucgggaaaugc

SEQ ID NO: 1574 - RNA, 21 nt, Artificial Sequence
  GATA2 Guide RNA
gcuggcaggaguggcgucggc

SEQ ID NO: 1575 - RNA, 21 nt, Artificial Sequence
  GATA2 Guide RNA
ggaguggcgucggccuucggg

SEQ ID NO: 1576 - RNA, 21 nt, Artificial Sequence
  GATA2 Guide RNA
ggcaggaguggcgucggccuu

SEQ ID NO: 1577 - RNA, 21 nt, Artificial Sequence
  GATA2 Guide RNA
ggccgacgccacuccugccag

SEQ ID NO: 1578 - RNA, 21 nt, Artificial Sequence
  GATA2 Guide RNA
ggcgucggccuucgggaaaug

SEQ ID NO: 1579 - RNA, 21 nt, Artificial Sequence
  GATA2 Guide RNA
ggcuggcaggaguggcgucgg

SEQ ID NO: 1580 - RNA, 21 nt, Artificial Sequence
  GATA2 Guide RNA
gggcuggcaggaguggcgucg

SEQ ID NO: 1581 - RNA, 21 nt, Artificial Sequence
  GATA2 Guide RNA
guggcgucggccuucgggaaa

SEQ ID NO: 1582 - RNA, 21 nt, Artificial Sequence
  GATA2 Guide RNA
ucccgaaggccgacgccacuc

SEQ ID NO: 1583 - RNA, 21 nt, Artificial Sequence
  GATA2 Guide RNA
uggcaggaguggcgucggccu

SEQ ID NO: 1584 - RNA, 21 nt, Artificial Sequence
  GATA2 Guide RNA
uggcgucggccuucgggaaau

SEQ ID NO: 1585 - RNA, 21 nt, Artificial Sequence
  GATA2 Guide RNA
uucccgaaggccgacgccacu

SEQ ID NO: 1586 - RNA, 21 nt, Artificial Sequence
  GATA2 Guide RNA
uuucccgaaggccgacgccac

SEQ ID NO: 1587 - RNA, 22 nt, Artificial Sequence
  GATA2 Guide RNA
aaggccgacgccacuccugcca

SEQ ID NO: 1588 - RNA, 22 nt, Artificial Sequence
  GATA2 Guide RNA
acgccacuccugccagcccggc

SEQ ID NO: 1589 - RNA, 22 nt, Artificial Sequence
  GATA2 Guide RNA
agcauuucccgaaggccgacgc

SEQ ID NO: 1590 - RNA, 22 nt, Artificial Sequence
  GATA2 Guide RNA
agcccagcauuucccgaaggcc

SEQ ID NO: 1591 - RNA, 22 nt, Artificial Sequence
  GATA2 Guide RNA
agccgggcuggcaggaguggcg

SEQ ID NO: 1592 - RNA, 22 nt, Artificial Sequence
  GATA2 Guide RNA
aggaguggcgucggccuucggg

SEQ ID NO: 1593 - RNA, 22 nt, Artificial Sequence
  GATA2 Guide RNA
aggccgacgccacuccugccag

SEQ ID NO: 1594 - RNA, 22 nt, Artificial Sequence
  GATA2 Guide RNA
aguggcgucggccuucgggaaa

SEQ ID NO: 1595 - RNA, 22 nt, Artificial Sequence
  GATA2 Guide RNA
auuucccgaaggccgacgccac

SEQ ID NO: 1596 - RNA, 22 nt, Artificial Sequence
  GATA2 Guide RNA
cagcauuucccgaaggccgacg

SEQ ID NO: 1597 - RNA, 22 nt, Artificial Sequence
  GATA2 Guide RNA
caggaguggcgucggccuucgg

SEQ ID NO: 1598 - RNA, 22 nt, Artificial Sequence
  GATA2 Guide RNA
cauuucccgaaggccgacgcca

SEQ ID NO: 1599 - RNA, 22 nt, Artificial Sequence
  GATA2 Guide RNA
ccagcauuucccgaaggccgac

SEQ ID NO: 1600 - RNA, 22 nt, Artificial Sequence
  GATA2 Guide RNA
cccagcauuucccgaaggccga

SEQ ID NO: 1601 - RNA, 22 nt, Artificial Sequence
  GATA2 Guide RNA
cccgaaggccgacgccacuccu

SEQ ID NO: 1602 - RNA, 22 nt, Artificial Sequence
  GATA2 Guide RNA
ccgaaggccgacgccacuccug

SEQ ID NO: 1603 - RNA, 22 nt, Artificial Sequence
  GATA2 Guide RNA
ccgacgccacuccugccagccc

SEQ ID NO: 1604 - RNA, 22 nt, Artificial Sequence
  GATA2 Guide RNA
ccgagccgggcuggcaggagug

SEQ ID NO: 1605 - RNA, 22 nt, Artificial Sequence
  GATA2 Guide RNA
ccgggcuggcaggaguggcguc

SEQ ID NO: 1606 - RNA, 22 nt, Artificial Sequence
  GATA2 Guide RNA
cgaaggccgacgccacuccugc

SEQ ID NO: 1607 - RNA, 22 nt, Artificial Sequence
  GATA2 Guide RNA
cgacgccacuccugccagcccg

SEQ ID NO: 1608 - RNA, 22 nt, Artificial Sequence
  GATA2 Guide RNA
cgagccgggcuggcaggagugg

SEQ ID NO: 1609 - RNA, 22 nt, Artificial Sequence
  GATA2 Guide RNA
cgccacuccugccagcccggcu

SEQ ID NO: 1610 - RNA, 22 nt, Artificial Sequence
  GATA2 Guide RNA
cgggcuggcaggaguggcgucg

SEQ ID NO: 1611 - RNA, 22 nt, Artificial Sequence
  GATA2 Guide RNA
cgucggccuucgggaaaugcug

SEQ ID NO: 1612 - RNA, 22 nt, Artificial Sequence
  GATA2 Guide RNA
cuggcaggaguggcgucggccu

SEQ ID NO: 1613 - RNA, 22 nt, Artificial Sequence
  GATA2 Guide RNA
gaaggccgacgccacuccugcc

SEQ ID NO: 1614 - RNA, 22 nt, Artificial Sequence
  GATA2 Guide RNA
gacgccacuccugccagcccgg

SEQ ID NO: 1615 - RNA, 22 nt, Artificial Sequence
  GATA2 Guide RNA
gagccgggcuggcaggaguggc

SEQ ID NO: 1616 - RNA, 22 nt, Artificial Sequence
  GATA2 Guide RNA
gaguggcgucggccuucgggaa

SEQ ID NO: 1617 - RNA, 22 nt, Artificial Sequence
  GATA2 Guide RNA
gcaggaguggcgucggccuucg

SEQ ID NO: 1618 - RNA, 22 nt, Artificial Sequence
  GATA2 Guide RNA
gcauuucccgaaggccgacgcc

SEQ ID NO: 1619 - RNA, 22 nt, Artificial Sequence
  GATA2 Guide RNA
gcccagcauuucccgaaggccg

SEQ ID NO: 1620 - RNA, 22 nt, Artificial Sequence
  GATA2 Guide RNA
gccgacgccacuccugccagcc

SEQ ID NO: 1621 - RNA, 22 nt, Artificial Sequence
  GATA2 Guide RNA
gccgagccgggcuggcaggagu

SEQ ID NO: 1622 - RNA, 22 nt, Artificial Sequence
  GATA2 Guide RNA
gccgggcuggcaggaguggcgu

SEQ ID NO: 1623 - RNA, 22 nt, Artificial Sequence
  GATA2 Guide RNA
gcgucggccuucgggaaaugcu

SEQ ID NO: 1624 - RNA, 22 nt, Artificial Sequence
  GATA2 Guide RNA
gcuggcaggaguggcgucggcc

SEQ ID NO: 1625 - RNA, 22 nt, Artificial Sequence
  GATA2 Guide RNA
ggaguggcgucggccuucggga

SEQ ID NO: 1626 - RNA, 22 nt, Artificial Sequence
  GATA2 Guide RNA
ggcaggaguggcgucggccuuc

SEQ ID NO: 1627 - RNA, 22 nt, Artificial Sequence
  GATA2 Guide RNA
ggccgacgccacuccugccagc

SEQ ID NO: 1628 - RNA, 22 nt, Artificial Sequence
  GATA2 Guide RNA
ggcgucggccuucgggaaaugc

SEQ ID NO: 1629 - RNA, 22 nt, Artificial Sequence
  GATA2 Guide RNA
ggcuggcaggaguggcgucggc

SEQ ID NO: 1630 - RNA, 22 nt, Artificial Sequence
  GATA2 Guide RNA
gggcuggcaggaguggcgucgg

SEQ ID NO: 1631 - RNA, 22 nt, Artificial Sequence
  GATA2 Guide RNA
guggcgucggccuucgggaaau

SEQ ID NO: 1632 - RNA, 22 nt, Artificial Sequence
  GATA2 Guide RNA
ucccgaaggccgacgccacucc

SEQ ID NO: 1633 - RNA, 22 nt, Artificial Sequence
  GATA2 Guide RNA
uggcaggaguggcgucggccuu

SEQ ID NO: 1634 - RNA, 22 nt, Artificial Sequence
  GATA2 Guide RNA
uggcgucggccuucgggaaaug

SEQ ID NO: 1635 - RNA, 22 nt, Artificial Sequence
  GATA2 Guide RNA
uucccgaaggccgacgccacuc

SEQ ID NO: 1636 - RNA, 22 nt, Artificial Sequence
  GATA2 Guide RNA
uuucccgaaggccgacgccacu

SEQ ID NO: 1637 - RNA, 20 nt, Artificial Sequence
  GATA2 Guide RNA
acccuuagcagcccagcauu

SEQ ID NO: 1638 - RNA, 20 nt, Artificial Sequence
  GATA2 Guide RNA
agcagcccagcauuuccuga

SEQ ID NO: 1639 - RNA, 20 nt, Artificial Sequence
  GATA2 Guide RNA
agcauuuccugaaggccgac

SEQ ID NO: 1640 - RNA, 20 nt, Artificial Sequence
  GATA2 Guide RNA
agcccagcauuuccugaagg

SEQ ID NO: 1641 - RNA, 20 nt, Artificial Sequence
  GATA2 Guide RNA
aggaaaugcugggcugcuaa

SEQ ID NO: 1642 - RNA, 20 nt, Artificial Sequence
  GATA2 Guide RNA
aggaguggugucggccuuca

SEQ ID NO: 1643 - RNA, 20 nt, Artificial Sequence
  GATA2 Guide RNA
aguggugucggccuucagga

SEQ ID NO: 1644 - RNA, 20 nt, Artificial Sequence
  GATA2 Guide RNA
auuuccugaaggccgacacc

SEQ ID NO: 1645 - RNA, 20 nt, Artificial Sequence
  GATA2 Guide RNA
cagcauuuccugaaggccga

SEQ ID NO: 1646 - RNA, 20 nt, Artificial Sequence
  GATA2 Guide RNA
cagcccagcauuuccugaag

SEQ ID NO: 1647 - RNA, 20 nt, Artificial Sequence
  GATA2 Guide RNA
caggaaaugcugggcugcua

SEQ ID NO: 1648 - RNA, 20 nt, Artificial Sequence
  GATA2 Guide RNA
caggaguggugucggccuuc

SEQ ID NO: 1649 - RNA, 20 nt, Artificial Sequence
  GATA2 Guide RNA
cauuuccugaaggccgacac

SEQ ID NO: 1650 - RNA, 20 nt, Artificial Sequence
  GATA2 Guide RNA
ccagcauuuccugaaggccg

SEQ ID NO: 1651 - RNA, 20 nt, Artificial Sequence
  GATA2 Guide RNA
cccagcauuuccugaaggcc

SEQ ID NO: 1652 - RNA, 20 nt, Artificial Sequence
  GATA2 Guide RNA
cccuuagcagcccagcauuu

SEQ ID NO: 1653 - RNA, 20 nt, Artificial Sequence
  GATA2 Guide RNA
ccugaaggccgacaccacuc

SEQ ID NO: 1654 - RNA, 20 nt, Artificial Sequence
  GATA2 Guide RNA
ccuuagcagcccagcauuuc

SEQ ID NO: 1655 - RNA, 20 nt, Artificial Sequence
  GATA2 Guide RNA
ccuucaggaaaugcugggcu

SEQ ID NO: 1656 - RNA, 20 nt, Artificial Sequence
  GATA2 Guide RNA
cggccuucaggaaaugcugg

SEQ ID NO: 1657 - RNA, 20 nt, Artificial Sequence
  GATA2 Guide RNA
cugaaggccgacaccacucc

SEQ ID NO: 1658 - RNA, 20 nt, Artificial Sequence
  GATA2 Guide RNA
cuuagcagcccagcauuucc

SEQ ID NO: 1659 - RNA, 20 nt, Artificial Sequence
  GATA2 Guide RNA
cuucaggaaaugcugggcug

SEQ ID NO: 1660 - RNA, 20 nt, Artificial Sequence
  GATA2 Guide RNA
gaguggugucggccuucagg

SEQ ID NO: 1661 - RNA, 20 nt, Artificial Sequence
  GATA2 Guide RNA
gcagcccagcauuuccugaa

SEQ ID NO: 1662 - RNA, 20 nt, Artificial Sequence
  GATA2 Guide RNA
gcaggaguggugucggccuu

SEQ ID NO: 1663 - RNA, 20 nt, Artificial Sequence
  GATA2 Guide RNA
gcauuuccugaaggccgaca

SEQ ID NO: 1664 - RNA, 20 nt, Artificial Sequence
  GATA2 Guide RNA
gcccagcauuuccugaaggc

SEQ ID NO: 1665 - RNA, 20 nt, Artificial Sequence
  GATA2 Guide RNA
gccuucaggaaaugcugggc

SEQ ID NO: 1666 - RNA, 20 nt, Artificial Sequence
  GATA2 Guide RNA
ggaguggugucggccuucag

SEQ ID NO: 1667 - RNA, 20 nt, Artificial Sequence
  GATA2 Guide RNA
ggcaggaguggugucggccu

SEQ ID NO: 1668 - RNA, 20 nt, Artificial Sequence
  GATA2 Guide RNA
ggccuucaggaaaugcuggg

SEQ ID NO: 1669 - RNA, 20 nt, Artificial Sequence
  GATA2 Guide RNA
ggugucggccuucaggaaau

SEQ ID NO: 1670 - RNA, 20 nt, Artificial Sequence
  GATA2 Guide RNA
gucggccuucaggaaaugcu

SEQ ID NO: 1671 - RNA, 20 nt, Artificial Sequence
  GATA2 Guide RNA
guggugucggccuucaggaa

SEQ ID NO: 1672 - RNA, 20 nt, Artificial Sequence
  GATA2 Guide RNA
gugucggccuucaggaaaug

SEQ ID NO: 1673 - RNA, 20 nt, Artificial Sequence
  GATA2 Guide RNA
uagcagcccagcauuuccug

SEQ ID NO: 1674 - RNA, 20 nt, Artificial Sequence
  GATA2 Guide RNA
ucaggaaaugcugggcugcu

SEQ ID NO: 1675 - RNA, 20 nt, Artificial Sequence
  GATA2 Guide RNA
uccugaaggccgacaccacu

SEQ ID NO: 1676 - RNA, 20 nt, Artificial Sequence
  GATA2 Guide RNA
ucggccuucaggaaaugcug

SEQ ID NO: 1677 - RNA, 20 nt, Artificial Sequence
  GATA2 Guide RNA
uggugucggccuucaggaaa

SEQ ID NO: 1678 - RNA, 20 nt, Artificial Sequence
  GATA2 Guide RNA
ugucggccuucaggaaaugc

SEQ ID NO: 1679 - RNA, 20 nt, Artificial Sequence
  GATA2 Guide RNA
uuagcagcccagcauuuccu

SEQ ID NO: 1680 - RNA, 20 nt, Artificial Sequence
  GATA2 Guide RNA
uucaggaaaugcugggcugc

SEQ ID NO: 1681 - RNA, 20 nt, Artificial Sequence
  GATA2 Guide RNA
uuccugaaggccgacaccac

SEQ ID NO: 1682 - RNA, 20 nt, Artificial Sequence
  GATA2 Guide RNA
uuuccugaaggccgacacca

SEQ ID NO: 1683 - RNA, 21 nt, Artificial Sequence
  GATA2 Guide RNA
aacccuuagcagcccagcauu

SEQ ID NO: 1684 - RNA, 21 nt, Artificial Sequence
  GATA2 Guide RNA
acccuuagcagcccagcauuu

SEQ ID NO: 1685 - RNA, 21 nt, Artificial Sequence
  GATA2 Guide RNA
agcagcccagcauuuccugaa

SEQ ID NO: 1686 - RNA, 21 nt, Artificial Sequence
  GATA2 Guide RNA
agcauuuccugaaggccgaca

SEQ ID NO: 1687 - RNA, 21 nt, Artificial Sequence
  GATA2 Guide RNA
agcccagcauuuccugaaggc

SEQ ID NO: 1688 - RNA, 21 nt, Artificial Sequence
  GATA2 Guide RNA
aggaaaugcugggcugcuaag

SEQ ID NO: 1689 - RNA, 21 nt, Artificial Sequence
  GATA2 Guide RNA
aggaguggugucggccuucag

SEQ ID NO: 1690 - RNA, 21 nt, Artificial Sequence
  GATA2 Guide RNA
aguggugucggccuucaggaa

SEQ ID NO: 1691 - RNA, 21 nt, Artificial Sequence
  GATA2 Guide RNA
auuuccugaaggccgacacca

SEQ ID NO: 1692 - RNA, 21 nt, Artificial Sequence
  GATA2 Guide RNA
cagcauuuccugaaggccgac

SEQ ID NO: 1693 - RNA, 21 nt, Artificial Sequence
  GATA2 Guide RNA
cagcccagcauuuccugaagg

SEQ ID NO: 1694 - RNA, 21 nt, Artificial Sequence
  GATA2 Guide RNA
caggaaaugcugggcugcuaa

SEQ ID NO: 1695 - RNA, 21 nt, Artificial Sequence
  GATA2 Guide RNA
caggaguggugucggccuuca

SEQ ID NO: 1696 - RNA, 21 nt, Artificial Sequence
  GATA2 Guide RNA
cauuuccugaaggccgacacc

SEQ ID NO: 1697 - RNA, 21 nt, Artificial Sequence
  GATA2 Guide RNA
ccagcauuuccugaaggccga

SEQ ID NO: 1698 - RNA, 21 nt, Artificial Sequence
  GATA2 Guide RNA
cccagcauuuccugaaggccg

SEQ ID NO: 1699 - RNA, 21 nt, Artificial Sequence
  GATA2 Guide RNA
cccuuagcagcccagcauuuc

SEQ ID NO: 1700 - RNA, 21 nt, Artificial Sequence
  GATA2 Guide RNA
ccugaaggccgacaccacucc

SEQ ID NO: 1701 - RNA, 21 nt, Artificial Sequence
  GATA2 Guide RNA
ccuuagcagcccagcauuucc

SEQ ID NO: 1702 - RNA, 21 nt, Artificial Sequence
  GATA2 Guide RNA
ccuucaggaaaugcugggcug

SEQ ID NO: 1703 - RNA, 21 nt, Artificial Sequence
  GATA2 Guide RNA
cggccuucaggaaaugcuggg

SEQ ID NO: 1704 - RNA, 21 nt, Artificial Sequence
  GATA2 Guide RNA
cugaaggccgacaccacuccu

SEQ ID NO: 1705 - RNA, 21 nt, Artificial Sequence
  GATA2 Guide RNA
cuuagcagcccagcauuuccu

SEQ ID NO: 1706 - RNA, 21 nt, Artificial Sequence
  GATA2 Guide RNA
cuucaggaaaugcugggcugc

SEQ ID NO: 1707 - RNA, 21 nt, Artificial Sequence
  GATA2 Guide RNA
gaguggugucggccuucagga

SEQ ID NO: 1708 - RNA, 21 nt, Artificial Sequence
  GATA2 Guide RNA
gcagcccagcauuuccugaag

SEQ ID NO: 1709 - RNA, 21 nt, Artificial Sequence
  GATA2 Guide RNA
gcaggaguggugucggccuuc

SEQ ID NO: 1710 - RNA, 21 nt, Artificial Sequence
  GATA2 Guide RNA
gcauuuccugaaggccgacac

SEQ ID NO: 1711 - RNA, 21 nt, Artificial Sequence
  GATA2 Guide RNA
gcccagcauuuccugaaggcc

SEQ ID NO: 1712 - RNA, 21 nt, Artificial Sequence
  GATA2 Guide RNA
gccuucaggaaaugcugggcu

SEQ ID NO: 1713 - RNA, 21 nt, Artificial Sequence
  GATA2 Guide RNA
ggaguggugucggccuucagg

SEQ ID NO: 1714 - RNA, 21 nt, Artificial Sequence
  GATA2 Guide RNA
ggcaggaguggugucggccuu

SEQ ID NO: 1715 - RNA, 21 nt, Artificial Sequence
  GATA2 Guide RNA
ggccuucaggaaaugcugggc

SEQ ID NO: 1716 - RNA, 21 nt, Artificial Sequence
  GATA2 Guide RNA
ggugucggccuucaggaaaug

SEQ ID NO: 1717 - RNA, 21 nt, Artificial Sequence
  GATA2 Guide RNA
gucggccuucaggaaaugcug

SEQ ID NO: 1718 - RNA, 21 nt, Artificial Sequence
  GATA2 Guide RNA
guggugucggccuucaggaaa

SEQ ID NO: 1719 - RNA, 21 nt, Artificial Sequence
  GATA2 Guide RNA
gugucggccuucaggaaaugc

SEQ ID NO: 1720 - RNA, 21 nt, Artificial Sequence
  GATA2 Guide RNA
uagcagcccagcauuuccuga

SEQ ID NO: 1721 - RNA, 21 nt, Artificial Sequence
  GATA2 Guide RNA
ucaggaaaugcugggcugcua

SEQ ID NO: 1722 - RNA, 21 nt, Artificial Sequence
  GATA2 Guide RNA
uccugaaggccgacaccacuc

SEQ ID NO: 1723 - RNA, 21 nt, Artificial Sequence
  GATA2 Guide RNA
ucggccuucaggaaaugcugg

SEQ ID NO: 1724 - RNA, 21 nt, Artificial Sequence
  GATA2 Guide RNA
uggcaggaguggugucggccu

SEQ ID NO: 1725 - RNA, 21 nt, Artificial Sequence
  GATA2 Guide RNA
uggugucggccuucaggaaau

SEQ ID NO: 1726 - RNA, 21 nt, Artificial Sequence
  GATA2 Guide RNA
ugucggccuucaggaaaugcu

SEQ ID NO: 1727 - RNA, 21 nt, Artificial Sequence
  GATA2 Guide RNA
uuagcagcccagcauuuccug

SEQ ID NO: 1728 - RNA, 21 nt, Artificial Sequence
  GATA2 Guide RNA
uucaggaaaugcugggcugcu

SEQ ID NO: 1729 - RNA, 21 nt, Artificial Sequence
  GATA2 Guide RNA
uuccugaaggccgacaccacu

SEQ ID NO: 1730 - RNA, 21 nt, Artificial Sequence
  GATA2 Guide RNA
uuuccugaaggccgacaccac

SEQ ID NO: 1731 - RNA, 22 nt, Artificial Sequence
  GATA2 Guide RNA
aaacccuuagcagcccagcauu

SEQ ID NO: 1732 - RNA, 22 nt, Artificial Sequence
  GATA2 Guide RNA
aacccuuagcagcccagcauuu

SEQ ID NO: 1733 - RNA, 22 nt, Artificial Sequence
  GATA2 Guide RNA
acccuuagcagcccagcauuuc

SEQ ID NO: 1734 - RNA, 22 nt, Artificial Sequence
  GATA2 Guide RNA
agcagcccagcauuuccugaag

SEQ ID NO: 1735 - RNA, 22 nt, Artificial Sequence
  GATA2 Guide RNA
agcauuuccugaaggccgacac

SEQ ID NO: 1736 - RNA, 22 nt, Artificial Sequence
  GATA2 Guide RNA
agcccagcauuuccugaaggcc

SEQ ID NO: 1737 - RNA, 22 nt, Artificial Sequence
  GATA2 Guide RNA
aggaaaugcugggcugcuaagg

SEQ ID NO: 1738 - RNA, 22 nt, Artificial Sequence
  GATA2 Guide RNA
aggaguggugucggccuucagg

SEQ ID NO: 1739 - RNA, 22 nt, Artificial Sequence
  GATA2 Guide RNA
aguggugucggccuucaggaaa

SEQ ID NO: 1740 - RNA, 22 nt, Artificial Sequence
  GATA2 Guide RNA
auuuccugaaggccgacaccac

SEQ ID NO: 1741 - RNA, 22 nt, Artificial Sequence
  GATA2 Guide RNA
cagcauuuccugaaggccgaca

SEQ ID NO: 1742 - RNA, 22 nt, Artificial Sequence
  GATA2 Guide RNA
cagcccagcauuuccugaaggc

SEQ ID NO: 1743 - RNA, 22 nt, Artificial Sequence
  GATA2 Guide RNA
caggaaaugcugggcugcuaag

SEQ ID NO: 1744 - RNA, 22 nt, Artificial Sequence
  GATA2 Guide RNA
caggaguggugucggccuucag

SEQ ID NO: 1745 - RNA, 22 nt, Artificial Sequence
  GATA2 Guide RNA
cauuuccugaaggccgacacca

SEQ ID NO: 1746 - RNA, 22 nt, Artificial Sequence
  GATA2 Guide RNA
ccagcauuuccugaaggccgac

SEQ ID NO: 1747 - RNA, 22 nt, Artificial Sequence
  GATA2 Guide RNA
cccagcauuuccugaaggccga

SEQ ID NO: 1748 - RNA, 22 nt, Artificial Sequence
  GATA2 Guide RNA
cccuuagcagcccagcauuucc

SEQ ID NO: 1749 - RNA, 22 nt, Artificial Sequence
  GATA2 Guide RNA
ccugaaggccgacaccacuccu

SEQ ID NO: 1750 - RNA, 22 nt, Artificial Sequence
  GATA2 Guide RNA
ccuuagcagcccagcauuuccu

SEQ ID NO: 1751 - RNA, 22 nt, Artificial Sequence
  GATA2 Guide RNA
ccuucaggaaaugcugggcugc

SEQ ID NO: 1752 - RNA, 22 nt, Artificial Sequence
  GATA2 Guide RNA
cggccuucaggaaaugcugggc

SEQ ID NO: 1753 - RNA, 22 nt, Artificial Sequence
  GATA2 Guide RNA
cugaaggccgacaccacuccug

SEQ ID NO: 1754 - RNA, 22 nt, Artificial Sequence
  GATA2 Guide RNA
cuggcaggaguggugucggccu

SEQ ID NO: 1755 - RNA, 22 nt, Artificial Sequence
  GATA2 Guide RNA
cuuagcagcccagcauuuccug

SEQ ID NO: 1756 - RNA, 22 nt, Artificial Sequence
  GATA2 Guide RNA
cuucaggaaaugcugggcugcu

SEQ ID NO: 1757 - RNA, 22 nt, Artificial Sequence
  GATA2 Guide RNA
gaguggugucggccuucaggaa

SEQ ID NO: 1758 - RNA, 22 nt, Artificial Sequence
  GATA2 Guide RNA
gcagcccagcauuuccugaagg

SEQ ID NO: 1759 - RNA, 22 nt, Artificial Sequence
  GATA2 Guide RNA
gcaggaguggugucggccuuca

SEQ ID NO: 1760 - RNA, 22 nt, Artificial Sequence
  GATA2 Guide RNA
gcauuuccugaaggccgacacc

SEQ ID NO: 1761 - RNA, 22 nt, Artificial Sequence
  GATA2 Guide RNA
gcccagcauuuccugaaggccg

SEQ ID NO: 1762 - RNA, 22 nt, Artificial Sequence
  GATA2 Guide RNA
gccuucaggaaaugcugggcug

SEQ ID NO: 1763 - RNA, 22 nt, Artificial Sequence
  GATA2 Guide RNA
ggaguggugucggccuucagga

SEQ ID NO: 1764 - RNA, 22 nt, Artificial Sequence
  GATA2 Guide RNA
ggcaggaguggugucggccuuc

SEQ ID NO: 1765 - RNA, 22 nt, Artificial Sequence
  GATA2 Guide RNA
ggccuucaggaaaugcugggcu

SEQ ID NO: 1766 - RNA, 22 nt, Artificial Sequence
  GATA2 Guide RNA
ggugucggccuucaggaaaugc

SEQ ID NO: 1767 - RNA, 22 nt, Artificial Sequence
  GATA2 Guide RNA
gucggccuucaggaaaugcugg

SEQ ID NO: 1768 - RNA, 22 nt, Artificial Sequence
  GATA2 Guide RNA
guggugucggccuucaggaaau

SEQ ID NO: 1769 - RNA, 22 nt, Artificial Sequence
  GATA2 Guide RNA
gugucggccuucaggaaaugcu

SEQ ID NO: 1770 - RNA, 22 nt, Artificial Sequence
  GATA2 Guide RNA
uagcagcccagcauuuccugaa

SEQ ID NO: 1771 - RNA, 22 nt, Artificial Sequence
  GATA2 Guide RNA
ucaggaaaugcugggcugcuaa

SEQ ID NO: 1772 - RNA, 22 nt, Artificial Sequence
  GATA2 Guide RNA
uccugaaggccgacaccacucc

SEQ ID NO: 1773 - RNA, 22 nt, Artificial Sequence
  GATA2 Guide RNA
ucggccuucaggaaaugcuggg

SEQ ID NO: 1774 - RNA, 22 nt, Artificial Sequence
  GATA2 Guide RNA
uggcaggaguggugucggccuu

SEQ ID NO: 1775 - RNA, 22 nt, Artificial Sequence
  GATA2 Guide RNA
uggugucggccuucaggaaaug

SEQ ID NO: 1776 - RNA, 22 nt, Artificial Sequence
  GATA2 Guide RNA
ugucggccuucaggaaaugcug

SEQ ID NO: 1777 - RNA, 22 nt, Artificial Sequence
  GATA2 Guide RNA
uuagcagcccagcauuuccuga

SEQ ID NO: 1778 - RNA, 22 nt, Artificial Sequence
  GATA2 Guide RNA
uucaggaaaugcugggcugcua

SEQ ID NO: 1779 - RNA, 22 nt, Artificial Sequence
  GATA2 Guide RNA
uuccugaaggccgacaccacuc

SEQ ID NO: 1780 - RNA, 22 nt, Artificial Sequence
  GATA2 Guide RNA
uuuccugaaggccgacaccacu

SEQ ID NO: 1781 - RNA, 20 nt, Artificial Sequence
  GATA2 Guide RNA
aagcuggacgggugggggug

SEQ ID NO: 1782 - RNA, 20 nt, Artificial Sequence
  GATA2 Guide RNA
accaagcuggacgggugggg

SEQ ID NO: 1783 - RNA, 20 nt, Artificial Sequence
  GATA2 Guide RNA
acccccacccguccagcuug

SEQ ID NO: 1784 - RNA, 20 nt, Artificial Sequence
  GATA2 Guide RNA
acccguccagcuuggugacc

SEQ ID NO: 1785 - RNA, 20 nt, Artificial Sequence
  GATA2 Guide RNA
agcccauggcggucaccaag

SEQ ID NO: 1786 - RNA, 20 nt, Artificial Sequence
  GATA2 Guide RNA
agcuggacgggugggggugg

SEQ ID NO: 1787 - RNA, 20 nt, Artificial Sequence
  GATA2 Guide RNA
agcuuggugaccgccauggg

SEQ ID NO: 1788 - RNA, 20 nt, Artificial Sequence
  GATA2 Guide RNA
auggcggucaccaagcugga

SEQ ID NO: 1789 - RNA, 20 nt, Artificial Sequence
  GATA2 Guide RNA
caagcuggacgggugggggu

SEQ ID NO: 1790 - RNA, 20 nt, Artificial Sequence
  GATA2 Guide RNA
caccaagcuggacggguggg

SEQ ID NO: 1791 - RNA, 20 nt, Artificial Sequence
  GATA2 Guide RNA
cacccccacccguccagcuu

SEQ ID NO: 1792 - RNA, 20 nt, Artificial Sequence
  GATA2 Guide RNA
cacccguccagcuuggugac

SEQ ID NO: 1793 - RNA, 20 nt, Artificial Sequence
  GATA2 Guide RNA
cagcuuggugaccgccaugg

SEQ ID NO: 1794 - RNA, 20 nt, Artificial Sequence
  GATA2 Guide RNA
cauggcggucaccaagcugg

SEQ ID NO: 1795 - RNA, 20 nt, Artificial Sequence
  GATA2 Guide RNA
ccaagcuggacggguggggg

SEQ ID NO: 1796 - RNA, 20 nt, Artificial Sequence
  GATA2 Guide RNA
ccacccccacccguccagcu

SEQ ID NO: 1797 - RNA, 20 nt, Artificial Sequence
  GATA2 Guide RNA
ccacccguccagcuugguga

SEQ ID NO: 1798 - RNA, 20 nt, Artificial Sequence
  GATA2 Guide RNA
ccagcuuggugaccgccaug

SEQ ID NO: 1799 - RNA, 20 nt, Artificial Sequence
  GATA2 Guide RNA
ccauggcggucaccaagcug

SEQ ID NO: 1800 - RNA, 20 nt, Artificial Sequence
  GATA2 Guide RNA
cccacccguccagcuuggug

SEQ ID NO: 1801 - RNA, 20 nt, Artificial Sequence
  GATA2 Guide RNA
cccauggcggucaccaagcu

SEQ ID NO: 1802 - RNA, 20 nt, Artificial Sequence
  GATA2 Guide RNA
ccccacccguccagcuuggu

SEQ ID NO: 1803 - RNA, 20 nt, Artificial Sequence
  GATA2 Guide RNA
cccccacccguccagcuugg

SEQ ID NO: 1804 - RNA, 20 nt, Artificial Sequence
  GATA2 Guide RNA
cccguccagcuuggugaccg

SEQ ID NO: 1805 - RNA, 20 nt, Artificial Sequence
  GATA2 Guide RNA
cccuagcccauggcggucac

SEQ ID NO: 1806 - RNA, 20 nt, Artificial Sequence
  GATA2 Guide RNA
ccguccagcuuggugaccgc

SEQ ID NO: 1807 - RNA, 20 nt, Artificial Sequence
  GATA2 Guide RNA
ccuagcccauggcggucacc

SEQ ID NO: 1808 - RNA, 20 nt, Artificial Sequence
  GATA2 Guide RNA
cggccacccccacccgucca

SEQ ID NO: 1809 - RNA, 20 nt, Artificial Sequence
  GATA2 Guide RNA
cggucaccaagcuggacggg

SEQ ID NO: 1810 - RNA, 20 nt, Artificial Sequence
  GATA2 Guide RNA
cguccagcuuggugaccgcc

SEQ ID NO: 1811 - RNA, 20 nt, Artificial Sequence
  GATA2 Guide RNA
cuagcccauggcggucacca

SEQ ID NO: 1812 - RNA, 20 nt, Artificial Sequence
  GATA2 Guide RNA
cuuggugaccgccaugggcu

SEQ ID NO: 1813 - RNA, 20 nt, Artificial Sequence
  GATA2 Guide RNA
gccacccccacccguccagc

SEQ ID NO: 1814 - RNA, 20 nt, Artificial Sequence
  GATA2 Guide RNA
gcccauggcggucaccaagc

SEQ ID NO: 1815 - RNA, 20 nt, Artificial Sequence
  GATA2 Guide RNA
gcggucaccaagcuggacgg

SEQ ID NO: 1816 - RNA, 20 nt, Artificial Sequence
  GATA2 Guide RNA
gcuuggugaccgccaugggc

SEQ ID NO: 1817 - RNA, 20 nt, Artificial Sequence
  GATA2 Guide RNA
ggccacccccacccguccag

SEQ ID NO: 1818 - RNA, 20 nt, Artificial Sequence
  GATA2 Guide RNA
ggcggucaccaagcuggacg

SEQ ID NO: 1819 - RNA, 20 nt, Artificial Sequence
  GATA2 Guide RNA
ggucaccaagcuggacgggu

SEQ ID NO: 1820 - RNA, 20 nt, Artificial Sequence
  GATA2 Guide RNA
gucaccaagcuggacgggug

SEQ ID NO: 1821 - RNA, 20 nt, Artificial Sequence
  GATA2 Guide RNA
guccagcuuggugaccgcca

SEQ ID NO: 1822 - RNA, 20 nt, Artificial Sequence
  GATA2 Guide RNA
uagcccauggcggucaccaa

SEQ ID NO: 1823 - RNA, 20 nt, Artificial Sequence
  GATA2 Guide RNA
ucaccaagcuggacgggugg

SEQ ID NO: 1824 - RNA, 20 nt, Artificial Sequence
  GATA2 Guide RNA
uccagcuuggugaccgccau

SEQ ID NO: 1825 - RNA, 20 nt, Artificial Sequence
  GATA2 Guide RNA
ucggccacccccacccgucc

SEQ ID NO: 1826 - RNA, 20 nt, Artificial Sequence
  GATA2 Guide RNA
uggcggucaccaagcuggac

SEQ ID NO: 1827 - RNA, 21 nt, Artificial Sequence
  GATA2 Guide RNA
aagcuggacgggugggggugg

SEQ ID NO: 1828 - RNA, 21 nt, Artificial Sequence
  GATA2 Guide RNA
accaagcuggacggguggggg

SEQ ID NO: 1829 - RNA, 21 nt, Artificial Sequence
  GATA2 Guide RNA
acccccacccguccagcuugg

SEQ ID NO: 1830 - RNA, 21 nt, Artificial Sequence
  GATA2 Guide RNA
acccguccagcuuggugaccg

SEQ ID NO: 1831 - RNA, 21 nt, Artificial Sequence
  GATA2 Guide RNA
agcccauggcggucaccaagc

SEQ ID NO: 1832 - RNA, 21 nt, Artificial Sequence
  GATA2 Guide RNA
agcuggacggguggggguggc

SEQ ID NO: 1833 - RNA, 21 nt, Artificial Sequence
  GATA2 Guide RNA
agcuuggugaccgccaugggc

SEQ ID NO: 1834 - RNA, 21 nt, Artificial Sequence
  GATA2 Guide RNA
auggcggucaccaagcuggac

SEQ ID NO: 1835 - RNA, 21 nt, Artificial Sequence
  GATA2 Guide RNA
caagcuggacgggugggggug

SEQ ID NO: 1836 - RNA, 21 nt, Artificial Sequence
  GATA2 Guide RNA
caccaagcuggacgggugggg

SEQ ID NO: 1837 - RNA, 21 nt, Artificial Sequence
  GATA2 Guide RNA
cacccccacccguccagcuug

SEQ ID NO: 1838 - RNA, 21 nt, Artificial Sequence
  GATA2 Guide RNA
cacccguccagcuuggugacc

SEQ ID NO: 1839 - RNA, 21 nt, Artificial Sequence
  GATA2 Guide RNA
cagcuuggugaccgccauggg

SEQ ID NO: 1840 - RNA, 21 nt, Artificial Sequence
  GATA2 Guide RNA
cauggcggucaccaagcugga

SEQ ID NO: 1841 - RNA, 21 nt, Artificial Sequence
  GATA2 Guide RNA
ccaagcuggacgggugggggu

SEQ ID NO: 1842 - RNA, 21 nt, Artificial Sequence
  GATA2 Guide RNA
ccacccccacccguccagcuu

SEQ ID NO: 1843 - RNA, 21 nt, Artificial Sequence
  GATA2 Guide RNA
ccacccguccagcuuggugac

SEQ ID NO: 1844 - RNA, 21 nt, Artificial Sequence
  GATA2 Guide RNA
ccagcuuggugaccgccaugg

SEQ ID NO: 1845 - RNA, 21 nt, Artificial Sequence
  GATA2 Guide RNA
ccauggcggucaccaagcugg

SEQ ID NO: 1846 - RNA, 21 nt, Artificial Sequence
  GATA2 Guide RNA
cccacccguccagcuugguga

SEQ ID NO: 1847 - RNA, 21 nt, Artificial Sequence
  GATA2 Guide RNA
cccauggcggucaccaagcug

SEQ ID NO: 1848 - RNA, 21 nt, Artificial Sequence
  GATA2 Guide RNA
ccccacccguccagcuuggug

SEQ ID NO: 1849 - RNA, 21 nt, Artificial Sequence
  GATA2 Guide RNA
cccccacccguccagcuuggu

SEQ ID NO: 1850 - RNA, 21 nt, Artificial Sequence
  GATA2 Guide RNA
cccguccagcuuggugaccgc

SEQ ID NO: 1851 - RNA, 21 nt, Artificial Sequence
  GATA2 Guide RNA
cccuagcccauggcggucacc

SEQ ID NO: 1852 - RNA, 21 nt, Artificial Sequence
  GATA2 Guide RNA
ccguccagcuuggugaccgcc

SEQ ID NO: 1853 - RNA, 21 nt, Artificial Sequence
  GATA2 Guide RNA
ccuagcccauggcggucacca

SEQ ID NO: 1854 - RNA, 21 nt, Artificial Sequence
  GATA2 Guide RNA
cggucaccaagcuggacgggu

SEQ ID NO: 1855 - RNA, 21 nt, Artificial Sequence
  GATA2 Guide RNA
cguccagcuuggugaccgcca

SEQ ID NO: 1856 - RNA, 21 nt, Artificial Sequence
  GATA2 Guide RNA
cuagcccauggcggucaccaa

SEQ ID NO: 1857 - RNA, 21 nt, Artificial Sequence
  GATA2 Guide RNA
cuuggugaccgccaugggcua

SEQ ID NO: 1858 - RNA, 21 nt, Artificial Sequence
  GATA2 Guide RNA
gccacccccacccguccagcu

SEQ ID NO: 1859 - RNA, 21 nt, Artificial Sequence
  GATA2 Guide RNA
gcccauggcggucaccaagcu

SEQ ID NO: 1860 - RNA, 21 nt, Artificial Sequence
  GATA2 Guide RNA
gcggucaccaagcuggacggg

SEQ ID NO: 1861 - RNA, 21 nt, Artificial Sequence
  GATA2 Guide RNA
gcuuggugaccgccaugggcu

SEQ ID NO: 1862 - RNA, 21 nt, Artificial Sequence
  GATA2 Guide RNA
ggcggucaccaagcuggacgg

SEQ ID NO: 1863 - RNA, 21 nt, Artificial Sequence
  GATA2 Guide RNA
ggucaccaagcuggacgggug

SEQ ID NO: 1864 - RNA, 21 nt, Artificial Sequence
  GATA2 Guide RNA
gucaccaagcuggacgggugg

SEQ ID NO: 1865 - RNA, 21 nt, Artificial Sequence
  GATA2 Guide RNA
guccagcuuggugaccgccau

SEQ ID NO: 1866 - RNA, 21 nt, Artificial Sequence
  GATA2 Guide RNA
uagcccauggcggucaccaag

SEQ ID NO: 1867 - RNA, 21 nt, Artificial Sequence
  GATA2 Guide RNA
ucaccaagcuggacggguggg

SEQ ID NO: 1868 - RNA, 21 nt, Artificial Sequence
  GATA2 Guide RNA
uccagcuuggugaccgccaug

SEQ ID NO: 1869 - RNA, 21 nt, Artificial Sequence
  GATA2 Guide RNA
ucccuagcccauggcggucac

SEQ ID NO: 1870 - RNA, 21 nt, Artificial Sequence
  GATA2 Guide RNA
ucggccacccccacccgucca

SEQ ID NO: 1871 - RNA, 21 nt, Artificial Sequence
  GATA2 Guide RNA
uggcggucaccaagcuggacg

SEQ ID NO: 1872 - RNA, 21 nt, Artificial Sequence
  GATA2 Guide RNA
uucggccacccccacccgucc

SEQ ID NO: 1873 - RNA, 22 nt, Artificial Sequence
  GATA2 Guide RNA
aagcuggacggguggggguggc

SEQ ID NO: 1874 - RNA, 22 nt, Artificial Sequence
  GATA2 Guide RNA
accaagcuggacgggugggggu

SEQ ID NO: 1875 - RNA, 22 nt, Artificial Sequence
  GATA2 Guide RNA
acccccacccguccagcuuggu

SEQ ID NO: 1876 - RNA, 22 nt, Artificial Sequence
  GATA2 Guide RNA
acccguccagcuuggugaccgc

SEQ ID NO: 1877 - RNA, 22 nt, Artificial Sequence
  GATA2 Guide RNA
agcccauggcggucaccaagcu

SEQ ID NO: 1878 - RNA, 22 nt, Artificial Sequence
  GATA2 Guide RNA
agcuggacggguggggguggcc

SEQ ID NO: 1879 - RNA, 22 nt, Artificial Sequence
  GATA2 Guide RNA
agcuuggugaccgccaugggcu

SEQ ID NO: 1880 - RNA, 22 nt, Artificial Sequence
  GATA2 Guide RNA
auggcggucaccaagcuggacg

SEQ ID NO: 1881 - RNA, 22 nt, Artificial Sequence
  GATA2 Guide RNA
caagcuggacgggugggggugg

SEQ ID NO: 1882 - RNA, 22 nt, Artificial Sequence
  GATA2 Guide RNA
caccaagcuggacggguggggg

SEQ ID NO: 1883 - RNA, 22 nt, Artificial Sequence
  GATA2 Guide RNA
cacccccacccguccagcuugg

SEQ ID NO: 1884 - RNA, 22 nt, Artificial Sequence
  GATA2 Guide RNA
cacccguccagcuuggugaccg

SEQ ID NO: 1885 - RNA, 22 nt, Artificial Sequence
  GATA2 Guide RNA
cagcuuggugaccgccaugggc

SEQ ID NO: 1886 - RNA, 22 nt, Artificial Sequence
  GATA2 Guide RNA
cauggcggucaccaagcuggac

SEQ ID NO: 1887 - RNA, 22 nt, Artificial Sequence
  GATA2 Guide RNA
ccaagcuggacgggugggggug

SEQ ID NO: 1888 - RNA, 22 nt, Artificial Sequence
  GATA2 Guide RNA
ccacccccacccguccagcuug

SEQ ID NO: 1889 - RNA, 22 nt, Artificial Sequence
  GATA2 Guide RNA
ccacccguccagcuuggugacc

SEQ ID NO: 1890 - RNA, 22 nt, Artificial Sequence
  GATA2 Guide RNA
ccagcuuggugaccgccauggg

SEQ ID NO: 1891 - RNA, 22 nt, Artificial Sequence
  GATA2 Guide RNA
ccauggcggucaccaagcugga

SEQ ID NO: 1892 - RNA, 22 nt, Artificial Sequence
  GATA2 Guide RNA
cccacccguccagcuuggugac

SEQ ID NO: 1893 - RNA, 22 nt, Artificial Sequence
  GATA2 Guide RNA
cccauggcggucaccaagcugg

SEQ ID NO: 1894 - RNA, 22 nt, Artificial Sequence
  GATA2 Guide RNA
ccccacccguccagcuugguga

SEQ ID NO: 1895 - RNA, 22 nt, Artificial Sequence
  GATA2 Guide RNA
cccccacccguccagcuuggug

SEQ ID NO: 1896 - RNA, 22 nt, Artificial Sequence
  GATA2 Guide RNA
cccguccagcuuggugaccgcc

SEQ ID NO: 1897 - RNA, 22 nt, Artificial Sequence
  GATA2 Guide RNA
cccuagcccauggcggucacca

SEQ ID NO: 1898 - RNA, 22 nt, Artificial Sequence
  GATA2 Guide RNA
ccguccagcuuggugaccgcca

SEQ ID NO: 1899 - RNA, 22 nt, Artificial Sequence
  GATA2 Guide RNA
ccuagcccauggcggucaccaa

SEQ ID NO: 1900 - RNA, 22 nt, Artificial Sequence
  GATA2 Guide RNA
cggucaccaagcuggacgggug

SEQ ID NO: 1901 - RNA, 22 nt, Artificial Sequence
  GATA2 Guide RNA
cguccagcuuggugaccgccau

SEQ ID NO: 1902 - RNA, 22 nt, Artificial Sequence
  GATA2 Guide RNA
cuagcccauggcggucaccaag

SEQ ID NO: 1903 - RNA, 22 nt, Artificial Sequence
  GATA2 Guide RNA
cuucggccacccccacccgucc

SEQ ID NO: 1904 - RNA, 22 nt, Artificial Sequence
  GATA2 Guide RNA
cuuggugaccgccaugggcuag

SEQ ID NO: 1905 - RNA, 22 nt, Artificial Sequence
  GATA2 Guide RNA
gccacccccacccguccagcuu

SEQ ID NO: 1906 - RNA, 22 nt, Artificial Sequence
  GATA2 Guide RNA
gcccauggcggucaccaagcug

SEQ ID NO: 1907 - RNA, 22 nt, Artificial Sequence
  GATA2 Guide RNA
gcggucaccaagcuggacgggu

SEQ ID NO: 1908 - RNA, 22 nt, Artificial Sequence
  GATA2 Guide RNA
gcuuggugaccgccaugggcua

SEQ ID NO: 1909 - RNA, 22 nt, Artificial Sequence
  GATA2 Guide RNA
ggccacccccacccguccagcu

SEQ ID NO: 1910 - RNA, 22 nt, Artificial Sequence
  GATA2 Guide RNA
ggcggucaccaagcuggacggg

SEQ ID NO: 1911 - RNA, 22 nt, Artificial Sequence
  GATA2 Guide RNA
ggucaccaagcuggacgggugg

SEQ ID NO: 1912 - RNA, 22 nt, Artificial Sequence
  GATA2 Guide RNA
gucaccaagcuggacggguggg

SEQ ID NO: 1913 - RNA, 22 nt, Artificial Sequence
  GATA2 Guide RNA
guccagcuuggugaccgccaug

SEQ ID NO: 1914 - RNA, 22 nt, Artificial Sequence
  GATA2 Guide RNA
uagcccauggcggucaccaagc

SEQ ID NO: 1915 - RNA, 22 nt, Artificial Sequence
  GATA2 Guide RNA
ucaccaagcuggacgggugggg

SEQ ID NO: 1916 - RNA, 22 nt, Artificial Sequence
  GATA2 Guide RNA
uccagcuuggugaccgccaugg

SEQ ID NO: 1917 - RNA, 22 nt, Artificial Sequence
  GATA2 Guide RNA
ucccuagcccauggcggucacc

SEQ ID NO: 1918 - RNA, 22 nt, Artificial Sequence
  GATA2 Guide RNA
ucggccacccccacccguccag

SEQ ID NO: 1919 - RNA, 22 nt, Artificial Sequence
  GATA2 Guide RNA
uggcggucaccaagcuggacgg

SEQ ID NO: 1920 - RNA, 22 nt, Artificial Sequence
  GATA2 Guide RNA
uucccuagcccauggcggucac

SEQ ID NO: 1921 - RNA, 22 nt, Artificial Sequence
  GATA2 Guide RNA
uucggccacccccacccgucca

SEQ ID NO: 1922 - RNA, 20 nt, Artificial Sequence
  GATA2 Guide RNA
acagguggggguggccgaag

SEQ ID NO: 1923 - RNA, 20 nt, Artificial Sequence
  GATA2 Guide RNA
accaugcuggacaggugggg

SEQ ID NO: 1924 - RNA, 20 nt, Artificial Sequence
  GATA2 Guide RNA
acccccaccuguccagcaug

SEQ ID NO: 1925 - RNA, 20 nt, Artificial Sequence
  GATA2 Guide RNA
accuguccagcauggugacc

SEQ ID NO: 1926 - RNA, 20 nt, Artificial Sequence
  GATA2 Guide RNA
agguggggguggccgaagga

SEQ ID NO: 1927 - RNA, 20 nt, Artificial Sequence
  GATA2 Guide RNA
augcuggacaggugggggug

SEQ ID NO: 1928 - RNA, 20 nt, Artificial Sequence
  GATA2 Guide RNA
auggcggucaccaugcugga

SEQ ID NO: 1929 - RNA, 20 nt, Artificial Sequence
  GATA2 Guide RNA
caccaugcuggacagguggg

SEQ ID NO: 1930 - RNA, 20 nt, Artificial Sequence
  GATA2 Guide RNA
cacccccaccuguccagcau

SEQ ID NO: 1931 - RNA, 20 nt, Artificial Sequence
  GATA2 Guide RNA
caccuguccagcauggugac

SEQ ID NO: 1932 - RNA, 20 nt, Artificial Sequence
  GATA2 Guide RNA
cagguggggguggccgaagg

SEQ ID NO: 1933 - RNA, 20 nt, Artificial Sequence
  GATA2 Guide RNA
caugcuggacaggugggggu

SEQ ID NO: 1934 - RNA, 20 nt, Artificial Sequence
  GATA2 Guide RNA
cauggcggucaccaugcugg

SEQ ID NO: 1935 - RNA, 20 nt, Artificial Sequence
  GATA2 Guide RNA
ccacccccaccuguccagca

SEQ ID NO: 1936 - RNA, 20 nt, Artificial Sequence
  GATA2 Guide RNA
ccaccuguccagcaugguga

SEQ ID NO: 1937 - RNA, 20 nt, Artificial Sequence
  GATA2 Guide RNA
ccaugcuggacagguggggg

SEQ ID NO: 1938 - RNA, 20 nt, Artificial Sequence
  GATA2 Guide RNA
cccaccuguccagcauggug

SEQ ID NO: 1939 - RNA, 20 nt, Artificial Sequence
  GATA2 Guide RNA
ccccaccuguccagcauggu

SEQ ID NO: 1940 - RNA, 20 nt, Artificial Sequence
  GATA2 Guide RNA
cccccaccuguccagcaugg

SEQ ID NO: 1941 - RNA, 20 nt, Artificial Sequence
  GATA2 Guide RNA
ccucuccuucggccaccccc

SEQ ID NO: 1942 - RNA, 20 nt, Artificial Sequence
  GATA2 Guide RNA
ccuguccagcauggugaccg

SEQ ID NO: 1943 - RNA, 20 nt, Artificial Sequence
  GATA2 Guide RNA
ccuucggccacccccaccug

SEQ ID NO: 1944 - RNA, 20 nt, Artificial Sequence
  GATA2 Guide RNA
cggccacccccaccugucca

SEQ ID NO: 1945 - RNA, 20 nt, Artificial Sequence
  GATA2 Guide RNA
cggucaccaugcuggacagg

SEQ ID NO: 1946 - RNA, 20 nt, Artificial Sequence
  GATA2 Guide RNA
cuccuucggccacccccacc

SEQ ID NO: 1947 - RNA, 20 nt, Artificial Sequence
  GATA2 Guide RNA
cucuccuucggccaccccca

SEQ ID NO: 1948 - RNA, 20 nt, Artificial Sequence
  GATA2 Guide RNA
cuggacagguggggguggcc

SEQ ID NO: 1949 - RNA, 20 nt, Artificial Sequence
  GATA2 Guide RNA
cuguccagcauggugaccgc

SEQ ID NO: 1950 - RNA, 20 nt, Artificial Sequence
  GATA2 Guide RNA
cuucggccacccccaccugu

SEQ ID NO: 1951 - RNA, 20 nt, Artificial Sequence
  GATA2 Guide RNA
gacagguggggguggccgaa

SEQ ID NO: 1952 - RNA, 20 nt, Artificial Sequence
  GATA2 Guide RNA
gccacccccaccuguccagc

SEQ ID NO: 1953 - RNA, 20 nt, Artificial Sequence
  GATA2 Guide RNA
gcggucaccaugcuggacag

SEQ ID NO: 1954 - RNA, 20 nt, Artificial Sequence
  GATA2 Guide RNA
gcuggacagguggggguggc

SEQ ID NO: 1955 - RNA, 20 nt, Artificial Sequence
  GATA2 Guide RNA
ggacagguggggguggccga

SEQ ID NO: 1956 - RNA, 20 nt, Artificial Sequence
  GATA2 Guide RNA
ggccacccccaccuguccag

SEQ ID NO: 1957 - RNA, 20 nt, Artificial Sequence
  GATA2 Guide RNA
ggcggucaccaugcuggaca

SEQ ID NO: 1958 - RNA, 20 nt, Artificial Sequence
  GATA2 Guide RNA
ggucaccaugcuggacaggu

SEQ ID NO: 1959 - RNA, 20 nt, Artificial Sequence
  GATA2 Guide RNA
gucaccaugcuggacaggug

SEQ ID NO: 1960 - RNA, 20 nt, Artificial Sequence
  GATA2 Guide RNA
ucaccaugcuggacaggugg

SEQ ID NO: 1961 - RNA, 20 nt, Artificial Sequence
  GATA2 Guide RNA
uccuucggccacccccaccu

SEQ ID NO: 1962 - RNA, 20 nt, Artificial Sequence
  GATA2 Guide RNA
ucggccacccccaccugucc

SEQ ID NO: 1963 - RNA, 20 nt, Artificial Sequence
  GATA2 Guide RNA
ucuccuucggccacccccac

SEQ ID NO: 1964 - RNA, 20 nt, Artificial Sequence
  GATA2 Guide RNA
ugcuggacaggugggggugg

SEQ ID NO: 1965 - RNA, 20 nt, Artificial Sequence
  GATA2 Guide RNA
uggacagguggggguggccg

SEQ ID NO: 1966 - RNA, 20 nt, Artificial Sequence
  GATA2 Guide RNA
uggcggucaccaugcuggac

SEQ ID NO: 1967 - RNA, 20 nt, Artificial Sequence
  GATA2 Guide RNA
uucggccacccccaccuguc

SEQ ID NO: 1968 - RNA, 21 nt, Artificial Sequence
  GATA2 Guide RNA
acagguggggguggccgaagg

SEQ ID NO: 1969 - RNA, 21 nt, Artificial Sequence
  GATA2 Guide RNA
accaugcuggacagguggggg

SEQ ID NO: 1970 - RNA, 21 nt, Artificial Sequence
  GATA2 Guide RNA
acccccaccuguccagcaugg

SEQ ID NO: 1971 - RNA, 21 nt, Artificial Sequence
  GATA2 Guide RNA
accuguccagcauggugaccg

SEQ ID NO: 1972 - RNA, 21 nt, Artificial Sequence
  GATA2 Guide RNA
agguggggguggccgaaggag

SEQ ID NO: 1973 - RNA, 21 nt, Artificial Sequence
  GATA2 Guide RNA
augcuggacaggugggggugg

SEQ ID NO: 1974 - RNA, 21 nt, Artificial Sequence
  GATA2 Guide RNA
auggcggucaccaugcuggac

SEQ ID NO: 1975 - RNA, 21 nt, Artificial Sequence
  GATA2 Guide RNA
caccaugcuggacaggugggg

SEQ ID NO: 1976 - RNA, 21 nt, Artificial Sequence
  GATA2 Guide RNA
cacccccaccuguccagcaug

SEQ ID NO: 1977 - RNA, 21 nt, Artificial Sequence
  GATA2 Guide RNA
caccuguccagcauggugacc

SEQ ID NO: 1978 - RNA, 21 nt, Artificial Sequence
  GATA2 Guide RNA
cagguggggguggccgaagga

SEQ ID NO: 1979 - RNA, 21 nt, Artificial Sequence
  GATA2 Guide RNA
caugcuggacaggugggggug

SEQ ID NO: 1980 - RNA, 21 nt, Artificial Sequence
  GATA2 Guide RNA
cauggcggucaccaugcugga

SEQ ID NO: 1981 - RNA, 21 nt, Artificial Sequence
  GATA2 Guide RNA
ccacccccaccuguccagcau

SEQ ID NO: 1982 - RNA, 21 nt, Artificial Sequence
  GATA2 Guide RNA
ccaccuguccagcauggugac

SEQ ID NO: 1983 - RNA, 21 nt, Artificial Sequence
  GATA2 Guide RNA
ccaugcuggacaggugggggu

SEQ ID NO: 1984 - RNA, 21 nt, Artificial Sequence
  GATA2 Guide RNA
ccauggcggucaccaugcugg

SEQ ID NO: 1985 - RNA, 21 nt, Artificial Sequence
  GATA2 Guide RNA
cccaccuguccagcaugguga

SEQ ID NO: 1986 - RNA, 21 nt, Artificial Sequence
  GATA2 Guide RNA
ccccaccuguccagcauggug

SEQ ID NO: 1987 - RNA, 21 nt, Artificial Sequence
  GATA2 Guide RNA
cccccaccuguccagcauggu

SEQ ID NO: 1988 - RNA, 21 nt, Artificial Sequence
  GATA2 Guide RNA
ccucuccuucggccaccccca

SEQ ID NO: 1989 - RNA, 21 nt, Artificial Sequence
  GATA2 Guide RNA
ccuguccagcauggugaccgc

SEQ ID NO: 1990 - RNA, 21 nt, Artificial Sequence
  GATA2 Guide RNA
ccuucggccacccccaccugu

SEQ ID NO: 1991 - RNA, 21 nt, Artificial Sequence
  GATA2 Guide RNA
cggccacccccaccuguccag

SEQ ID NO: 1992 - RNA, 21 nt, Artificial Sequence
  GATA2 Guide RNA
cggucaccaugcuggacaggu

SEQ ID NO: 1993 - RNA, 21 nt, Artificial Sequence
  GATA2 Guide RNA
cuccuucggccacccccaccu

SEQ ID NO: 1994 - RNA, 21 nt, Artificial Sequence
  GATA2 Guide RNA
cucuccuucggccacccccac

SEQ ID NO: 1995 - RNA, 21 nt, Artificial Sequence
  GATA2 Guide RNA
cuggacagguggggguggccg

SEQ ID NO: 1996 - RNA, 21 nt, Artificial Sequence
  GATA2 Guide RNA
cuguccagcauggugaccgcc

SEQ ID NO: 1997 - RNA, 21 nt, Artificial Sequence
  GATA2 Guide RNA
cuucggccacccccaccuguc

SEQ ID NO: 1998 - RNA, 21 nt, Artificial Sequence
  GATA2 Guide RNA
gacagguggggguggccgaag

SEQ ID NO: 1999 - RNA, 21 nt, Artificial Sequence
  GATA2 Guide RNA
gccacccccaccuguccagca

SEQ ID NO: 2000 - RNA, 21 nt, Artificial Sequence
  GATA2 Guide RNA
gccucuccuucggccaccccc

SEQ ID NO: 2001 - RNA, 21 nt, Artificial Sequence
  GATA2 Guide RNA
gcggucaccaugcuggacagg

SEQ ID NO: 2002 - RNA, 21 nt, Artificial Sequence
  GATA2 Guide RNA
gcuggacagguggggguggcc

SEQ ID NO: 2003 - RNA, 21 nt, Artificial Sequence
  GATA2 Guide RNA
ggacagguggggguggccgaa

SEQ ID NO: 2004 - RNA, 21 nt, Artificial Sequence
  GATA2 Guide RNA
ggccacccccaccuguccagc

SEQ ID NO: 2005 - RNA, 21 nt, Artificial Sequence
  GATA2 Guide RNA
ggcggucaccaugcuggacag

SEQ ID NO: 2006 - RNA, 21 nt, Artificial Sequence
  GATA2 Guide RNA
ggucaccaugcuggacaggug

SEQ ID NO: 2007 - RNA, 21 nt, Artificial Sequence
  GATA2 Guide RNA
gucaccaugcuggacaggugg

SEQ ID NO: 2008 - RNA, 21 nt, Artificial Sequence
  GATA2 Guide RNA
ucaccaugcuggacagguggg

SEQ ID NO: 2009 - RNA, 21 nt, Artificial Sequence
  GATA2 Guide RNA
uccuucggccacccccaccug

SEQ ID NO: 2010 - RNA, 21 nt, Artificial Sequence
  GATA2 Guide RNA
ucggccacccccaccugucca

SEQ ID NO: 2011 - RNA, 21 nt, Artificial Sequence
  GATA2 Guide RNA
ucuccuucggccacccccacc

SEQ ID NO: 2012 - RNA, 21 nt, Artificial Sequence
  GATA2 Guide RNA
ugcuggacagguggggguggc

SEQ ID NO: 2013 - RNA, 21 nt, Artificial Sequence
  GATA2 Guide RNA
uggacagguggggguggccga

SEQ ID NO: 2014 - RNA, 21 nt, Artificial Sequence
  GATA2 Guide RNA
uggcggucaccaugcuggaca

SEQ ID NO: 2015 - RNA, 21 nt, Artificial Sequence
  GATA2 Guide RNA
uucggccacccccaccugucc

SEQ ID NO: 2016 - RNA, 22 nt, Artificial Sequence
  GATA2 Guide RNA
acagguggggguggccgaagga

SEQ ID NO: 2017 - RNA, 22 nt, Artificial Sequence
  GATA2 Guide RNA
accaugcuggacaggugggggu

SEQ ID NO: 2018 - RNA, 22 nt, Artificial Sequence
  GATA2 Guide RNA
acccccaccuguccagcauggu

SEQ ID NO: 2019 - RNA, 22 nt, Artificial Sequence
  GATA2 Guide RNA
accuguccagcauggugaccgc

SEQ ID NO: 2020 - RNA, 22 nt, Artificial Sequence
  GATA2 Guide RNA
agccucuccuucggccaccccc

SEQ ID NO: 2021 - RNA, 22 nt, Artificial Sequence
  GATA2 Guide RNA
agguggggguggccgaaggaga

SEQ ID NO: 2022 - RNA, 22 nt, Artificial Sequence
  GATA2 Guide RNA
augcuggacagguggggguggc

SEQ ID NO: 2023 - RNA, 22 nt, Artificial Sequence
  GATA2 Guide RNA
auggcggucaccaugcuggaca

SEQ ID NO: 2024 - RNA, 22 nt, Artificial Sequence
  GATA2 Guide RNA
caccaugcuggacagguggggg

SEQ ID NO: 2025 - RNA, 22 nt, Artificial Sequence
  GATA2 Guide RNA
cacccccaccuguccagcaugg

SEQ ID NO: 2026 - RNA, 22 nt, Artificial Sequence
  GATA2 Guide RNA
caccuguccagcauggugaccg

SEQ ID NO: 2027 - RNA, 22 nt, Artificial Sequence
  GATA2 Guide RNA
cagguggggguggccgaaggag

SEQ ID NO: 2028 - RNA, 22 nt, Artificial Sequence
  GATA2 Guide RNA
caugcuggacaggugggggugg

SEQ ID NO: 2029 - RNA, 22 nt, Artificial Sequence
  GATA2 Guide RNA
cauggcggucaccaugcuggac

SEQ ID NO: 2030 - RNA, 22 nt, Artificial Sequence
  GATA2 Guide RNA
ccacccccaccuguccagcaug

SEQ ID NO: 2031 - RNA, 22 nt, Artificial Sequence
  GATA2 Guide RNA
ccaccuguccagcauggugacc

SEQ ID NO: 2032 - RNA, 22 nt, Artificial Sequence
  GATA2 Guide RNA
ccaugcuggacaggugggggug

SEQ ID NO: 2033 - RNA, 22 nt, Artificial Sequence
  GATA2 Guide RNA
ccauggcggucaccaugcugga

SEQ ID NO: 2034 - RNA, 22 nt, Artificial Sequence
  GATA2 Guide RNA
cccaccuguccagcauggugac

SEQ ID NO: 2035 - RNA, 22 nt, Artificial Sequence
  GATA2 Guide RNA
cccauggcggucaccaugcugg

SEQ ID NO: 2036 - RNA, 22 nt, Artificial Sequence
  GATA2 Guide RNA
ccccaccuguccagcaugguga

SEQ ID NO: 2037 - RNA, 22 nt, Artificial Sequence
  GATA2 Guide RNA
cccccaccuguccagcauggug

SEQ ID NO: 2038 - RNA, 22 nt, Artificial Sequence
  GATA2 Guide RNA
ccucuccuucggccacccccac

SEQ ID NO: 2039 - RNA, 22 nt, Artificial Sequence
  GATA2 Guide RNA
ccuguccagcauggugaccgcc

SEQ ID NO: 2040 - RNA, 22 nt, Artificial Sequence
  GATA2 Guide RNA
ccuucggccacccccaccuguc

SEQ ID NO: 2041 - RNA, 22 nt, Artificial Sequence
  GATA2 Guide RNA
cggccacccccaccuguccagc

SEQ ID NO: 2042 - RNA, 22 nt, Artificial Sequence
  GATA2 Guide RNA
cggucaccaugcuggacaggug

SEQ ID NO: 2043 - RNA, 22 nt, Artificial Sequence
  GATA2 Guide RNA
cuccuucggccacccccaccug

SEQ ID NO: 2044 - RNA, 22 nt, Artificial Sequence
  GATA2 Guide RNA
cucuccuucggccacccccacc

SEQ ID NO: 2045 - RNA, 22 nt, Artificial Sequence
  GATA2 Guide RNA
cuggacagguggggguggccga

SEQ ID NO: 2046 - RNA, 22 nt, Artificial Sequence
  GATA2 Guide RNA
cuguccagcauggugaccgcca

SEQ ID NO: 2047 - RNA, 22 nt, Artificial Sequence
  GATA2 Guide RNA
cuucggccacccccaccugucc

SEQ ID NO: 2048 - RNA, 22 nt, Artificial Sequence
  GATA2 Guide RNA
gacagguggggguggccgaagg

SEQ ID NO: 2049 - RNA, 22 nt, Artificial Sequence
  GATA2 Guide RNA
gccacccccaccuguccagcau

SEQ ID NO: 2050 - RNA, 22 nt, Artificial Sequence
  GATA2 Guide RNA
gccucuccuucggccaccccca

SEQ ID NO: 2051 - RNA, 22 nt, Artificial Sequence
  GATA2 Guide RNA
gcggucaccaugcuggacaggu

SEQ ID NO: 2052 - RNA, 22 nt, Artificial Sequence
  GATA2 Guide RNA
gcuggacagguggggguggccg

SEQ ID NO: 2053 - RNA, 22 nt, Artificial Sequence
  GATA2 Guide RNA
ggacagguggggguggccgaag

SEQ ID NO: 2054 - RNA, 22 nt, Artificial Sequence
  GATA2 Guide RNA
ggccacccccaccuguccagca

SEQ ID NO: 2055 - RNA, 22 nt, Artificial Sequence
  GATA2 Guide RNA
ggcggucaccaugcuggacagg

SEQ ID NO: 2056 - RNA, 22 nt, Artificial Sequence
  GATA2 Guide RNA
ggucaccaugcuggacaggugg

SEQ ID NO: 2057 - RNA, 22 nt, Artificial Sequence
  GATA2 Guide RNA
gucaccaugcuggacagguggg

SEQ ID NO: 2058 - RNA, 22 nt, Artificial Sequence
  GATA2 Guide RNA
ucaccaugcuggacaggugggg

SEQ ID NO: 2059 - RNA, 22 nt, Artificial Sequence
  GATA2 Guide RNA
uccuucggccacccccaccugu

SEQ ID NO: 2060 - RNA, 22 nt, Artificial Sequence
  GATA2 Guide RNA
ucggccacccccaccuguccag

SEQ ID NO: 2061 - RNA, 22 nt, Artificial Sequence
  GATA2 Guide RNA
ucuccuucggccacccccaccu

SEQ ID NO: 2062 - RNA, 22 nt, Artificial Sequence
  GATA2 Guide RNA
ugcuggacagguggggguggcc

SEQ ID NO: 2063 - RNA, 22 nt, Artificial Sequence
  GATA2 Guide RNA
uggacagguggggguggccgaa

SEQ ID NO: 2064 - RNA, 22 nt, Artificial Sequence
  GATA2 Guide RNA
uggcggucaccaugcuggacag

SEQ ID NO: 2065 - RNA, 22 nt, Artificial Sequence
  GATA2 Guide RNA
uucggccacccccaccugucca

SEQ ID NO: 2066 - RNA, 20 nt, Artificial Sequence
  GATA2 Guide RNA
aaccccacccguccagcaug

SEQ ID NO: 2067 - RNA, 20 nt, Artificial Sequence
  GATA2 Guide RNA
accaugcuggacgggugggg

SEQ ID NO: 2068 - RNA, 20 nt, Artificial Sequence
  GATA2 Guide RNA
acgggugggguuggccgaag

SEQ ID NO: 2069 - RNA, 20 nt, Artificial Sequence
  GATA2 Guide RNA
agccucuccuucggccaacc

SEQ ID NO: 2070 - RNA, 20 nt, Artificial Sequence
  GATA2 Guide RNA
augcuggacgggugggguug

SEQ ID NO: 2071 - RNA, 20 nt, Artificial Sequence
  GATA2 Guide RNA
caaccccacccguccagcau

SEQ ID NO: 2072 - RNA, 20 nt, Artificial Sequence
  GATA2 Guide RNA
caccaugcuggacggguggg

SEQ ID NO: 2073 - RNA, 20 nt, Artificial Sequence
  GATA2 Guide RNA
cagccucuccuucggccaac

SEQ ID NO: 2074 - RNA, 20 nt, Artificial Sequence
  GATA2 Guide RNA
caugcuggacgggugggguu

SEQ ID NO: 2075 - RNA, 20 nt, Artificial Sequence
  GATA2 Guide RNA
ccaaccccacccguccagca

SEQ ID NO: 2076 - RNA, 20 nt, Artificial Sequence
  GATA2 Guide RNA
ccagccucuccuucggccaa

SEQ ID NO: 2077 - RNA, 20 nt, Artificial Sequence
  GATA2 Guide RNA
ccaugcuggacggguggggu

SEQ ID NO: 2078 - RNA, 20 nt, Artificial Sequence
  GATA2 Guide RNA
ccuccagccucuccuucggc

SEQ ID NO: 2079 - RNA, 20 nt, Artificial Sequence
  GATA2 Guide RNA
ccucuccuucggccaacccc

SEQ ID NO: 2080 - RNA, 20 nt, Artificial Sequence
  GATA2 Guide RNA
ccuucggccaaccccacccg

SEQ ID NO: 2081 - RNA, 20 nt, Artificial Sequence
  GATA2 Guide RNA
cggccaaccccacccgucca

SEQ ID NO: 2082 - RNA, 20 nt, Artificial Sequence
  GATA2 Guide RNA
cgggugggguuggccgaagg

SEQ ID NO: 2083 - RNA, 20 nt, Artificial Sequence
  GATA2 Guide RNA
cuccagccucuccuucggcc

SEQ ID NO: 2084 - RNA, 20 nt, Artificial Sequence
  GATA2 Guide RNA
cuccuucggccaaccccacc

SEQ ID NO: 2085 - RNA, 20 nt, Artificial Sequence
  GATA2 Guide RNA
cucuccuucggccaacccca

SEQ ID NO: 2086 - RNA, 20 nt, Artificial Sequence
  GATA2 Guide RNA
cuggacgggugggguuggcc

SEQ ID NO: 2087 - RNA, 20 nt, Artificial Sequence
  GATA2 Guide RNA
cuucggccaaccccacccgu

SEQ ID NO: 2088 - RNA, 20 nt, Artificial Sequence
  GATA2 Guide RNA
gacgggugggguuggccgaa

SEQ ID NO: 2089 - RNA, 20 nt, Artificial Sequence
  GATA2 Guide RNA
gccaaccccacccguccagc

SEQ ID NO: 2090 - RNA, 20 nt, Artificial Sequence
  GATA2 Guide RNA
gccucuccuucggccaaccc

SEQ ID NO: 2091 - RNA, 20 nt, Artificial Sequence
  GATA2 Guide RNA
gcuggacgggugggguuggc

SEQ ID NO: 2092 - RNA, 20 nt, Artificial Sequence
  GATA2 Guide RNA
ggacgggugggguuggccga

SEQ ID NO: 2093 - RNA, 20 nt, Artificial Sequence
  GATA2 Guide RNA
ggccaaccccacccguccag

SEQ ID NO: 2094 - RNA, 20 nt, Artificial Sequence
  GATA2 Guide RNA
gggguuggccgaaggagagg

SEQ ID NO: 2095 - RNA, 20 nt, Artificial Sequence
  GATA2 Guide RNA
gggugggguuggccgaagga

SEQ ID NO: 2096 - RNA, 20 nt, Artificial Sequence
  GATA2 Guide RNA
ggguuggccgaaggagaggc

SEQ ID NO: 2097 - RNA, 20 nt, Artificial Sequence
  GATA2 Guide RNA
ggugggguuggccgaaggag

SEQ ID NO: 2098 - RNA, 20 nt, Artificial Sequence
  GATA2 Guide RNA
gguuggccgaaggagaggcu

SEQ ID NO: 2099 - RNA, 20 nt, Artificial Sequence
  GATA2 Guide RNA
gugggguuggccgaaggaga

SEQ ID NO: 2100 - RNA, 20 nt, Artificial Sequence
  GATA2 Guide RNA
guuggccgaaggagaggcug

SEQ ID NO: 2101 - RNA, 20 nt, Artificial Sequence
  GATA2 Guide RNA
ucaccaugcuggacgggugg

SEQ ID NO: 2102 - RNA, 20 nt, Artificial Sequence
  GATA2 Guide RNA
uccagccucuccuucggcca

SEQ ID NO: 2103 - RNA, 20 nt, Artificial Sequence
  GATA2 Guide RNA
uccuccagccucuccuucgg

SEQ ID NO: 2104 - RNA, 20 nt, Artificial Sequence
  GATA2 Guide RNA
uccuucggccaaccccaccc

SEQ ID NO: 2105 - RNA, 20 nt, Artificial Sequence
  GATA2 Guide RNA
ucggccaaccccacccgucc

SEQ ID NO: 2106 - RNA, 20 nt, Artificial Sequence
  GATA2 Guide RNA
ucuccuucggccaaccccac

SEQ ID NO: 2107 - RNA, 20 nt, Artificial Sequence
  GATA2 Guide RNA
ugcuggacgggugggguugg

SEQ ID NO: 2108 - RNA, 20 nt, Artificial Sequence
  GATA2 Guide RNA
uggacgggugggguuggccg

SEQ ID NO: 2109 - RNA, 20 nt, Artificial Sequence
  GATA2 Guide RNA
ugggguuggccgaaggagag

SEQ ID NO: 2110 - RNA, 20 nt, Artificial Sequence
  GATA2 Guide RNA
uucggccaaccccacccguc

SEQ ID NO: 2111 - RNA, 20 nt, Artificial Sequence
  GATA2 Guide RNA
uuggccgaaggagaggcugg

SEQ ID NO: 2112 - RNA, 21 nt, Artificial Sequence
  GATA2 Guide RNA
aaccccacccguccagcaugg

SEQ ID NO: 2113 - RNA, 21 nt, Artificial Sequence
  GATA2 Guide RNA
accaugcuggacggguggggu

SEQ ID NO: 2114 - RNA, 21 nt, Artificial Sequence
  GATA2 Guide RNA
acgggugggguuggccgaagg

SEQ ID NO: 2115 - RNA, 21 nt, Artificial Sequence
  GATA2 Guide RNA
agccucuccuucggccaaccc

SEQ ID NO: 2116 - RNA, 21 nt, Artificial Sequence
  GATA2 Guide RNA
augcuggacgggugggguugg

SEQ ID NO: 2117 - RNA, 21 nt, Artificial Sequence
  GATA2 Guide RNA
caaccccacccguccagcaug

SEQ ID NO: 2118 - RNA, 21 nt, Artificial Sequence
  GATA2 Guide RNA
caccaugcuggacgggugggg

SEQ ID NO: 2119 - RNA, 21 nt, Artificial Sequence
  GATA2 Guide RNA
cagccucuccuucggccaacc

SEQ ID NO: 2120 - RNA, 21 nt, Artificial Sequence
  GATA2 Guide RNA
caugcuggacgggugggguug

SEQ ID NO: 2121 - RNA, 21 nt, Artificial Sequence
  GATA2 Guide RNA
ccaaccccacccguccagcau

SEQ ID NO: 2122 - RNA, 21 nt, Artificial Sequence
  GATA2 Guide RNA
ccagccucuccuucggccaac

SEQ ID NO: 2123 - RNA, 21 nt, Artificial Sequence
  GATA2 Guide RNA
ccaugcuggacgggugggguu

SEQ ID NO: 2124 - RNA, 21 nt, Artificial Sequence
  GATA2 Guide RNA
ccuccagccucuccuucggcc

SEQ ID NO: 2125 - RNA, 21 nt, Artificial Sequence
  GATA2 Guide RNA
ccucuccuucggccaacccca

SEQ ID NO: 2126 - RNA, 21 nt, Artificial Sequence
  GATA2 Guide RNA
ccuucggccaaccccacccgu

SEQ ID NO: 2127 - RNA, 21 nt, Artificial Sequence
  GATA2 Guide RNA
cggccaaccccacccguccag

SEQ ID NO: 2128 - RNA, 21 nt, Artificial Sequence
  GATA2 Guide RNA
cgggugggguuggccgaagga

SEQ ID NO: 2129 - RNA, 21 nt, Artificial Sequence
  GATA2 Guide RNA
cuccagccucuccuucggcca

SEQ ID NO: 2130 - RNA, 21 nt, Artificial Sequence
  GATA2 Guide RNA
cuccuccagccucuccuucgg

SEQ ID NO: 2131 - RNA, 21 nt, Artificial Sequence
  GATA2 Guide RNA
cuccuucggccaaccccaccc

SEQ ID NO: 2132 - RNA, 21 nt, Artificial Sequence
  GATA2 Guide RNA
cucuccuucggccaaccccac

SEQ ID NO: 2133 - RNA, 21 nt, Artificial Sequence
  GATA2 Guide RNA
cuggacgggugggguuggccg

SEQ ID NO: 2134 - RNA, 21 nt, Artificial Sequence
  GATA2 Guide RNA
cuucggccaaccccacccguc

SEQ ID NO: 2135 - RNA, 21 nt, Artificial Sequence
  GATA2 Guide RNA
gacgggugggguuggccgaag

SEQ ID NO: 2136 - RNA, 21 nt, Artificial Sequence
  GATA2 Guide RNA
gccaaccccacccguccagca

SEQ ID NO: 2137 - RNA, 21 nt, Artificial Sequence
  GATA2 Guide RNA
gccucuccuucggccaacccc

SEQ ID NO: 2138 - RNA, 21 nt, Artificial Sequence
  GATA2 Guide RNA
gcuggacgggugggguuggcc

SEQ ID NO: 2139 - RNA, 21 nt, Artificial Sequence
  GATA2 Guide RNA
ggacgggugggguuggccgaa

SEQ ID NO: 2140 - RNA, 21 nt, Artificial Sequence
  GATA2 Guide RNA
ggccaaccccacccguccagc

SEQ ID NO: 2141 - RNA, 21 nt, Artificial Sequence
  GATA2 Guide RNA
gggguuggccgaaggagaggc

SEQ ID NO: 2142 - RNA, 21 nt, Artificial Sequence
  GATA2 Guide RNA
gggugggguuggccgaaggag

SEQ ID NO: 2143 - RNA, 21 nt, Artificial Sequence
  GATA2 Guide RNA
ggguuggccgaaggagaggcu

SEQ ID NO: 2144 - RNA, 21 nt, Artificial Sequence
  GATA2 Guide RNA
ggugggguuggccgaaggaga

SEQ ID NO: 2145 - RNA, 21 nt, Artificial Sequence
  GATA2 Guide RNA
gguuggccgaaggagaggcug

SEQ ID NO: 2146 - RNA, 21 nt, Artificial Sequence
  GATA2 Guide RNA
gucaccaugcuggacgggugg

SEQ ID NO: 2147 - RNA, 21 nt, Artificial Sequence
  GATA2 Guide RNA
gugggguuggccgaaggagag

SEQ ID NO: 2148 - RNA, 21 nt, Artificial Sequence
  GATA2 Guide RNA
guuggccgaaggagaggcugg

SEQ ID NO: 2149 - RNA, 21 nt, Artificial Sequence
  GATA2 Guide RNA
ucaccaugcuggacggguggg

SEQ ID NO: 2150 - RNA, 21 nt, Artificial Sequence
  GATA2 Guide RNA
uccagccucuccuucggccaa

SEQ ID NO: 2151 - RNA, 21 nt, Artificial Sequence
  GATA2 Guide RNA
uccuccagccucuccuucggc

SEQ ID NO: 2152 - RNA, 21 nt, Artificial Sequence
  GATA2 Guide RNA
uccuucggccaaccccacccg

SEQ ID NO: 2153 - RNA, 21 nt, Artificial Sequence
  GATA2 Guide RNA
ucggccaaccccacccgucca

SEQ ID NO: 2154 - RNA, 21 nt, Artificial Sequence
  GATA2 Guide RNA
ucuccuucggccaaccccacc

SEQ ID NO: 2155 - RNA, 21 nt, Artificial Sequence
  GATA2 Guide RNA
ugcuggacgggugggguuggc

SEQ ID NO: 2156 - RNA, 21 nt, Artificial Sequence
  GATA2 Guide RNA
uggacgggugggguuggccga

SEQ ID NO: 2157 - RNA, 21 nt, Artificial Sequence
  GATA2 Guide RNA
ugggguuggccgaaggagagg

SEQ ID NO: 2158 - RNA, 21 nt, Artificial Sequence
  GATA2 Guide RNA
uucggccaaccccacccgucc

SEQ ID NO: 2159 - RNA, 21 nt, Artificial Sequence
  GATA2 Guide RNA
uuggccgaaggagaggcugga

SEQ ID NO: 2160 - RNA, 22 nt, Artificial Sequence
  GATA2 Guide RNA
aaccccacccguccagcauggu

SEQ ID NO: 2161 - RNA, 22 nt, Artificial Sequence
  GATA2 Guide RNA
accaugcuggacgggugggguu

SEQ ID NO: 2162 - RNA, 22 nt, Artificial Sequence
  GATA2 Guide RNA
acgggugggguuggccgaagga

SEQ ID NO: 2163 - RNA, 22 nt, Artificial Sequence
  GATA2 Guide RNA
agccucuccuucggccaacccc

SEQ ID NO: 2164 - RNA, 22 nt, Artificial Sequence
  GATA2 Guide RNA
augcuggacgggugggguuggc

SEQ ID NO: 2165 - RNA, 22 nt, Artificial Sequence
  GATA2 Guide RNA
caaccccacccguccagcaugg

SEQ ID NO: 2166 - RNA, 22 nt, Artificial Sequence
  GATA2 Guide RNA
caccaugcuggacggguggggu

SEQ ID NO: 2167 - RNA, 22 nt, Artificial Sequence
  GATA2 Guide RNA
cagccucuccuucggccaaccc

SEQ ID NO: 2168 - RNA, 22 nt, Artificial Sequence
  GATA2 Guide RNA
caugcuggacgggugggguugg

SEQ ID NO: 2169 - RNA, 22 nt, Artificial Sequence
  GATA2 Guide RNA
ccaaccccacccguccagcaug

SEQ ID NO: 2170 - RNA, 22 nt, Artificial Sequence
  GATA2 Guide RNA
ccagccucuccuucggccaacc

SEQ ID NO: 2171 - RNA, 22 nt, Artificial Sequence
  GATA2 Guide RNA
ccaugcuggacgggugggguug

SEQ ID NO: 2172 - RNA, 22 nt, Artificial Sequence
  GATA2 Guide RNA
ccuccagccucuccuucggcca

SEQ ID NO: 2173 - RNA, 22 nt, Artificial Sequence
  GATA2 Guide RNA
ccuccuccagccucuccuucgg

SEQ ID NO: 2174 - RNA, 22 nt, Artificial Sequence
  GATA2 Guide RNA
ccucuccuucggccaaccccac

SEQ ID NO: 2175 - RNA, 22 nt, Artificial Sequence
  GATA2 Guide RNA
ccuucggccaaccccacccguc

SEQ ID NO: 2176 - RNA, 22 nt, Artificial Sequence
  GATA2 Guide RNA
cggccaaccccacccguccagc

SEQ ID NO: 2177 - RNA, 22 nt, Artificial Sequence
  GATA2 Guide RNA
cgggugggguuggccgaaggag

SEQ ID NO: 2178 - RNA, 22 nt, Artificial Sequence
  GATA2 Guide RNA
cuccagccucuccuucggccaa

SEQ ID NO: 2179 - RNA, 22 nt, Artificial Sequence
  GATA2 Guide RNA
cuccuccagccucuccuucggc

SEQ ID NO: 2180 - RNA, 22 nt, Artificial Sequence
  GATA2 Guide RNA
cuccuucggccaaccccacccg

SEQ ID NO: 2181 - RNA, 22 nt, Artificial Sequence
  GATA2 Guide RNA
cucuccuucggccaaccccacc

SEQ ID NO: 2182 - RNA, 22 nt, Artificial Sequence
  GATA2 Guide RNA
cuggacgggugggguuggccga

SEQ ID NO: 2183 - RNA, 22 nt, Artificial Sequence
  GATA2 Guide RNA
cuucggccaaccccacccgucc

SEQ ID NO: 2184 - RNA, 22 nt, Artificial Sequence
  GATA2 Guide RNA
gacgggugggguuggccgaagg

SEQ ID NO: 2185 - RNA, 22 nt, Artificial Sequence
  GATA2 Guide RNA
gccaaccccacccguccagcau

SEQ ID NO: 2186 - RNA, 22 nt, Artificial Sequence
  GATA2 Guide RNA
gccucuccuucggccaacccca

SEQ ID NO: 2187 - RNA, 22 nt, Artificial Sequence
  GATA2 Guide RNA
gcuggacgggugggguuggccg

SEQ ID NO: 2188 - RNA, 22 nt, Artificial Sequence
  GATA2 Guide RNA
ggacgggugggguuggccgaag

SEQ ID NO: 2189 - RNA, 22 nt, Artificial Sequence
  GATA2 Guide RNA
ggccaaccccacccguccagca

SEQ ID NO: 2190 - RNA, 22 nt, Artificial Sequence
  GATA2 Guide RNA
gggguuggccgaaggagaggcu

SEQ ID NO: 2191 - RNA, 22 nt, Artificial Sequence
  GATA2 Guide RNA
gggugggguuggccgaaggaga

SEQ ID NO: 2192 - RNA, 22 nt, Artificial Sequence
  GATA2 Guide RNA
ggguuggccgaaggagaggcug

SEQ ID NO: 2193 - RNA, 22 nt, Artificial Sequence
  GATA2 Guide RNA
ggucaccaugcuggacgggugg

SEQ ID NO: 2194 - RNA, 22 nt, Artificial Sequence
  GATA2 Guide RNA
ggugggguuggccgaaggagag

SEQ ID NO: 2195 - RNA, 22 nt, Artificial Sequence
  GATA2 Guide RNA
gguuggccgaaggagaggcugg

SEQ ID NO: 2196 - RNA, 22 nt, Artificial Sequence
  GATA2 Guide RNA
gucaccaugcuggacggguggg

SEQ ID NO: 2197 - RNA, 22 nt, Artificial Sequence
  GATA2 Guide RNA
gugggguuggccgaaggagagg

SEQ ID NO: 2198 - RNA, 22 nt, Artificial Sequence
  GATA2 Guide RNA
guuggccgaaggagaggcugga

SEQ ID NO: 2199 - RNA, 22 nt, Artificial Sequence
  GATA2 Guide RNA
ucaccaugcuggacgggugggg

SEQ ID NO: 2200 - RNA, 22 nt, Artificial Sequence
  GATA2 Guide RNA
uccagccucuccuucggccaac

SEQ ID NO: 2201 - RNA, 22 nt, Artificial Sequence
  GATA2 Guide RNA
uccuccagccucuccuucggcc

SEQ ID NO: 2202 - RNA, 22 nt, Artificial Sequence
  GATA2 Guide RNA
uccuucggccaaccccacccgu

SEQ ID NO: 2203 - RNA, 22 nt, Artificial Sequence
  GATA2 Guide RNA
ucggccaaccccacccguccag

SEQ ID NO: 2204 - RNA, 22 nt, Artificial Sequence
  GATA2 Guide RNA
ucuccuucggccaaccccaccc

SEQ ID NO: 2205 - RNA, 22 nt, Artificial Sequence
  GATA2 Guide RNA
ugcuggacgggugggguuggcc

SEQ ID NO: 2206 - RNA, 22 nt, Artificial Sequence
  GATA2 Guide RNA
uggacgggugggguuggccgaa

SEQ ID NO: 2207 - RNA, 22 nt, Artificial Sequence
  GATA2 Guide RNA
ugggguuggccgaaggagaggc

SEQ ID NO: 2208 - RNA, 22 nt, Artificial Sequence
  GATA2 Guide RNA
uucggccaaccccacccgucca

SEQ ID NO: 2209 - RNA, 22 nt, Artificial Sequence
  GATA2 Guide RNA
uuggccgaaggagaggcuggag

SEQ ID NO: 2210 - RNA, 20 nt, Artificial Sequence
  GATA2 Guide RNA
accccuccuccagccucucc

SEQ ID NO: 2211 - RNA, 20 nt, Artificial Sequence
  GATA2 Guide RNA
acggguggggguggcugaag

SEQ ID NO: 2212 - RNA, 20 nt, Artificial Sequence
  GATA2 Guide RNA
agccucuccuucagccaccc

SEQ ID NO: 2213 - RNA, 20 nt, Artificial Sequence
  GATA2 Guide RNA
augcuggacgggugggggug

SEQ ID NO: 2214 - RNA, 20 nt, Artificial Sequence
  GATA2 Guide RNA
cagccacccccacccgucca

SEQ ID NO: 2215 - RNA, 20 nt, Artificial Sequence
  GATA2 Guide RNA
cagccucuccuucagccacc

SEQ ID NO: 2216 - RNA, 20 nt, Artificial Sequence
  GATA2 Guide RNA
ccagccucuccuucagccac

SEQ ID NO: 2217 - RNA, 20 nt, Artificial Sequence
  GATA2 Guide RNA
ccccuccuccagccucuccu

SEQ ID NO: 2218 - RNA, 20 nt, Artificial Sequence
  GATA2 Guide RNA
cccuccuccagccucuccuu

SEQ ID NO: 2219 - RNA, 20 nt, Artificial Sequence
  GATA2 Guide RNA
ccuccagccucuccuucagc

SEQ ID NO: 2220 - RNA, 20 nt, Artificial Sequence
  GATA2 Guide RNA
ccuccuccagccucuccuuc

SEQ ID NO: 2221 - RNA, 20 nt, Artificial Sequence
  GATA2 Guide RNA
ccucuccuucagccaccccc

SEQ ID NO: 2222 - RNA, 20 nt, Artificial Sequence
  GATA2 Guide RNA
ccuucagccacccccacccg

SEQ ID NO: 2223 - RNA, 20 nt, Artificial Sequence
  GATA2 Guide RNA
cggguggggguggcugaagg

SEQ ID NO: 2224 - RNA, 20 nt, Artificial Sequence
  GATA2 Guide RNA
cuccagccucuccuucagcc

SEQ ID NO: 2225 - RNA, 20 nt, Artificial Sequence
  GATA2 Guide RNA
cuccuccagccucuccuuca

SEQ ID NO: 2226 - RNA, 20 nt, Artificial Sequence
  GATA2 Guide RNA
cuccuucagccacccccacc

SEQ ID NO: 2227 - RNA, 20 nt, Artificial Sequence
  GATA2 Guide RNA
cucuccuucagccaccccca

SEQ ID NO: 2228 - RNA, 20 nt, Artificial Sequence
  GATA2 Guide RNA
cugaaggagaggcuggagga

SEQ ID NO: 2229 - RNA, 20 nt, Artificial Sequence
  GATA2 Guide RNA
cuggacggguggggguggcu

SEQ ID NO: 2230 - RNA, 20 nt, Artificial Sequence
  GATA2 Guide RNA
cuucagccacccccacccgu

SEQ ID NO: 2231 - RNA, 20 nt, Artificial Sequence
  GATA2 Guide RNA
gacggguggggguggcugaa

SEQ ID NO: 2232 - RNA, 20 nt, Artificial Sequence
  GATA2 Guide RNA
gccucuccuucagccacccc

SEQ ID NO: 2233 - RNA, 20 nt, Artificial Sequence
  GATA2 Guide RNA
gcugaaggagaggcuggagg

SEQ ID NO: 2234 - RNA, 20 nt, Artificial Sequence
  GATA2 Guide RNA
gcuggacggguggggguggc

SEQ ID NO: 2235 - RNA, 20 nt, Artificial Sequence
  GATA2 Guide RNA
ggacggguggggguggcuga

SEQ ID NO: 2236 - RNA, 20 nt, Artificial Sequence
  GATA2 Guide RNA
ggcugaaggagaggcuggag

SEQ ID NO: 2237 - RNA, 20 nt, Artificial Sequence
  GATA2 Guide RNA
ggggguggcugaaggagagg

SEQ ID NO: 2238 - RNA, 20 nt, Artificial Sequence
  GATA2 Guide RNA
gggguggcugaaggagaggc

SEQ ID NO: 2239 - RNA, 20 nt, Artificial Sequence
  GATA2 Guide RNA
ggguggcugaaggagaggcu

SEQ ID NO: 2240 - RNA, 20 nt, Artificial Sequence
  GATA2 Guide RNA
ggguggggguggcugaagga

SEQ ID NO: 2241 - RNA, 20 nt, Artificial Sequence
  GATA2 Guide RNA
gguggcugaaggagaggcug

SEQ ID NO: 2242 - RNA, 20 nt, Artificial Sequence
  GATA2 Guide RNA
gguggggguggcugaaggag

SEQ ID NO: 2243 - RNA, 20 nt, Artificial Sequence
  GATA2 Guide RNA
guggcugaaggagaggcugg

SEQ ID NO: 2244 - RNA, 20 nt, Artificial Sequence
  GATA2 Guide RNA
guggggguggcugaaggaga

SEQ ID NO: 2245 - RNA, 20 nt, Artificial Sequence
  GATA2 Guide RNA
ucagccacccccacccgucc

SEQ ID NO: 2246 - RNA, 20 nt, Artificial Sequence
  GATA2 Guide RNA
uccagccucuccuucagcca

SEQ ID NO: 2247 - RNA, 20 nt, Artificial Sequence
  GATA2 Guide RNA
uccuccagccucuccuucag

SEQ ID NO: 2248 - RNA, 20 nt, Artificial Sequence
  GATA2 Guide RNA
uccuucagccacccccaccc

SEQ ID NO: 2249 - RNA, 20 nt, Artificial Sequence
  GATA2 Guide RNA
ucuccuucagccacccccac

SEQ ID NO: 2250 - RNA, 20 nt, Artificial Sequence
  GATA2 Guide RNA
ugaaggagaggcuggaggag

SEQ ID NO: 2251 - RNA, 20 nt, Artificial Sequence
  GATA2 Guide RNA
ugcuggacgggugggggugg

SEQ ID NO: 2252 - RNA, 20 nt, Artificial Sequence
  GATA2 Guide RNA
uggacggguggggguggcug

SEQ ID NO: 2253 - RNA, 20 nt, Artificial Sequence
  GATA2 Guide RNA
uggcugaaggagaggcugga

SEQ ID NO: 2254 - RNA, 20 nt, Artificial Sequence
  GATA2 Guide RNA
uggggguggcugaaggagag

SEQ ID NO: 2255 - RNA, 20 nt, Artificial Sequence
  GATA2 Guide RNA
uucagccacccccacccguc

SEQ ID NO: 2256 - RNA, 21 nt, Artificial Sequence
  GATA2 Guide RNA
accccuccuccagccucuccu

SEQ ID NO: 2257 - RNA, 21 nt, Artificial Sequence
  GATA2 Guide RNA
acggguggggguggcugaagg

SEQ ID NO: 2258 - RNA, 21 nt, Artificial Sequence
  GATA2 Guide RNA
agccucuccuucagccacccc

SEQ ID NO: 2259 - RNA, 21 nt, Artificial Sequence
  GATA2 Guide RNA
augcuggacgggugggggugg

SEQ ID NO: 2260 - RNA, 21 nt, Artificial Sequence
  GATA2 Guide RNA
caccccuccuccagccucucc

SEQ ID NO: 2261 - RNA, 21 nt, Artificial Sequence
  GATA2 Guide RNA
cagccacccccacccguccag

SEQ ID NO: 2262 - RNA, 21 nt, Artificial Sequence
  GATA2 Guide RNA
cagccucuccuucagccaccc

SEQ ID NO: 2263 - RNA, 21 nt, Artificial Sequence
  GATA2 Guide RNA
caugcuggacgggugggggug

SEQ ID NO: 2264 - RNA, 21 nt, Artificial Sequence
  GATA2 Guide RNA
ccagccucuccuucagccacc

SEQ ID NO: 2265 - RNA, 21 nt, Artificial Sequence
  GATA2 Guide RNA
ccccuccuccagccucuccuu

SEQ ID NO: 2266 - RNA, 21 nt, Artificial Sequence
  GATA2 Guide RNA
cccuccuccagccucuccuuc

SEQ ID NO: 2267 - RNA, 21 nt, Artificial Sequence
  GATA2 Guide RNA
ccuccagccucuccuucagcc

SEQ ID NO: 2268 - RNA, 21 nt, Artificial Sequence
  GATA2 Guide RNA
ccuccuccagccucuccuuca

SEQ ID NO: 2269 - RNA, 21 nt, Artificial Sequence
  GATA2 Guide RNA
ccucuccuucagccaccccca

SEQ ID NO: 2270 - RNA, 21 nt, Artificial Sequence
  GATA2 Guide RNA
ccuucagccacccccacccgu

SEQ ID NO: 2271 - RNA, 21 nt, Artificial Sequence
  GATA2 Guide RNA
cggguggggguggcugaagga

SEQ ID NO: 2272 - RNA, 21 nt, Artificial Sequence
  GATA2 Guide RNA
cuccagccucuccuucagcca

SEQ ID NO: 2273 - RNA, 21 nt, Artificial Sequence
  GATA2 Guide RNA
cuccuccagccucuccuucag

SEQ ID NO: 2274 - RNA, 21 nt, Artificial Sequence
  GATA2 Guide RNA
cuccuucagccacccccaccc

SEQ ID NO: 2275 - RNA, 21 nt, Artificial Sequence
  GATA2 Guide RNA
cucuccuucagccacccccac

SEQ ID NO: 2276 - RNA, 21 nt, Artificial Sequence
  GATA2 Guide RNA
cugaaggagaggcuggaggag

SEQ ID NO: 2277 - RNA, 21 nt, Artificial Sequence
  GATA2 Guide RNA
cuggacggguggggguggcug

SEQ ID NO: 2278 - RNA, 21 nt, Artificial Sequence
  GATA2 Guide RNA
cuucagccacccccacccguc

SEQ ID NO: 2279 - RNA, 21 nt, Artificial Sequence
  GATA2 Guide RNA
gacggguggggguggcugaag

SEQ ID NO: 2280 - RNA, 21 nt, Artificial Sequence
  GATA2 Guide RNA
gccucuccuucagccaccccc

SEQ ID NO: 2281 - RNA, 21 nt, Artificial Sequence
  GATA2 Guide RNA
gcugaaggagaggcuggagga

SEQ ID NO: 2282 - RNA, 21 nt, Artificial Sequence
  GATA2 Guide RNA
gcuggacggguggggguggcu

SEQ ID NO: 2283 - RNA, 21 nt, Artificial Sequence
  GATA2 Guide RNA
ggacggguggggguggcugaa

SEQ ID NO: 2284 - RNA, 21 nt, Artificial Sequence
  GATA2 Guide RNA
ggcugaaggagaggcuggagg

SEQ ID NO: 2285 - RNA, 21 nt, Artificial Sequence
  GATA2 Guide RNA
ggggguggcugaaggagaggc

SEQ ID NO: 2286 - RNA, 21 nt, Artificial Sequence
  GATA2 Guide RNA
gggguggcugaaggagaggcu

SEQ ID NO: 2287 - RNA, 21 nt, Artificial Sequence
  GATA2 Guide RNA
ggguggcugaaggagaggcug

SEQ ID NO: 2288 - RNA, 21 nt, Artificial Sequence
  GATA2 Guide RNA
ggguggggguggcugaaggag

SEQ ID NO: 2289 - RNA, 21 nt, Artificial Sequence
  GATA2 Guide RNA
gguggcugaaggagaggcugg

SEQ ID NO: 2290 - RNA, 21 nt, Artificial Sequence
  GATA2 Guide RNA
gguggggguggcugaaggaga

SEQ ID NO: 2291 - RNA, 21 nt, Artificial Sequence
  GATA2 Guide RNA
guggcugaaggagaggcugga

SEQ ID NO: 2292 - RNA, 21 nt, Artificial Sequence
  GATA2 Guide RNA
guggggguggcugaaggagag

SEQ ID NO: 2293 - RNA, 21 nt, Artificial Sequence
  GATA2 Guide RNA
ucagccacccccacccgucca

SEQ ID NO: 2294 - RNA, 21 nt, Artificial Sequence
  GATA2 Guide RNA
uccagccucuccuucagccac

SEQ ID NO: 2295 - RNA, 21 nt, Artificial Sequence
  GATA2 Guide RNA
uccuccagccucuccuucagc

SEQ ID NO: 2296 - RNA, 21 nt, Artificial Sequence
  GATA2 Guide RNA
uccuucagccacccccacccg

SEQ ID NO: 2297 - RNA, 21 nt, Artificial Sequence
  GATA2 Guide RNA
ucuccuucagccacccccacc

SEQ ID NO: 2298 - RNA, 21 nt, Artificial Sequence
  GATA2 Guide RNA
ugaaggagaggcuggaggagg

SEQ ID NO: 2299 - RNA, 21 nt, Artificial Sequence
  GATA2 Guide RNA
ugcuggacggguggggguggc

SEQ ID NO: 2300 - RNA, 21 nt, Artificial Sequence
  GATA2 Guide RNA
uggacggguggggguggcuga

SEQ ID NO: 2301 - RNA, 21 nt, Artificial Sequence
  GATA2 Guide RNA
uggcugaaggagaggcuggag

SEQ ID NO: 2302 - RNA, 21 nt, Artificial Sequence
  GATA2 Guide RNA
uggggguggcugaaggagagg

SEQ ID NO: 2303 - RNA, 21 nt, Artificial Sequence
  GATA2 Guide RNA
uucagccacccccacccgucc

SEQ ID NO: 2304 - RNA, 22 nt, Artificial Sequence
  GATA2 Guide RNA
accccuccuccagccucuccuu

SEQ ID NO: 2305 - RNA, 22 nt, Artificial Sequence
  GATA2 Guide RNA
acggguggggguggcugaagga

SEQ ID NO: 2306 - RNA, 22 nt, Artificial Sequence
  GATA2 Guide RNA
agccucuccuucagccaccccc

SEQ ID NO: 2307 - RNA, 22 nt, Artificial Sequence
  GATA2 Guide RNA
augcuggacggguggggguggc

SEQ ID NO: 2308 - RNA, 22 nt, Artificial Sequence
  GATA2 Guide RNA
caccccuccuccagccucuccu

SEQ ID NO: 2309 - RNA, 22 nt, Artificial Sequence
  GATA2 Guide RNA
cagccacccccacccguccagc

SEQ ID NO: 2310 - RNA, 22 nt, Artificial Sequence
  GATA2 Guide RNA
cagccucuccuucagccacccc

SEQ ID NO: 2311 - RNA, 22 nt, Artificial Sequence
  GATA2 Guide RNA
caugcuggacgggugggggugg

SEQ ID NO: 2312 - RNA, 22 nt, Artificial Sequence
  GATA2 Guide RNA
ccaccccuccuccagccucucc

SEQ ID NO: 2313 - RNA, 22 nt, Artificial Sequence
  GATA2 Guide RNA
ccagccucuccuucagccaccc

SEQ ID NO: 2314 - RNA, 22 nt, Artificial Sequence
  GATA2 Guide RNA
ccaugcuggacgggugggggug

SEQ ID NO: 2315 - RNA, 22 nt, Artificial Sequence
  GATA2 Guide RNA
ccccuccuccagccucuccuuc

SEQ ID NO: 2316 - RNA, 22 nt, Artificial Sequence
  GATA2 Guide RNA
cccuccuccagccucuccuuca

SEQ ID NO: 2317 - RNA, 22 nt, Artificial Sequence
  GATA2 Guide RNA
ccuccagccucuccuucagcca

SEQ ID NO: 2318 - RNA, 22 nt, Artificial Sequence
  GATA2 Guide RNA
ccuccuccagccucuccuucag

SEQ ID NO: 2319 - RNA, 22 nt, Artificial Sequence
  GATA2 Guide RNA
ccucuccuucagccacccccac

SEQ ID NO: 2320 - RNA, 22 nt, Artificial Sequence
  GATA2 Guide RNA
ccuucagccacccccacccguc

SEQ ID NO: 2321 - RNA, 22 nt, Artificial Sequence
  GATA2 Guide RNA
cggguggggguggcugaaggag

SEQ ID NO: 2322 - RNA, 22 nt, Artificial Sequence
  GATA2 Guide RNA
cuccagccucuccuucagccac

SEQ ID NO: 2323 - RNA, 22 nt, Artificial Sequence
  GATA2 Guide RNA
cuccuccagccucuccuucagc

SEQ ID NO: 2324 - RNA, 22 nt, Artificial Sequence
  GATA2 Guide RNA
cuccuucagccacccccacccg

SEQ ID NO: 2325 - RNA, 22 nt, Artificial Sequence
  GATA2 Guide RNA
cucuccuucagccacccccacc

SEQ ID NO: 2326 - RNA, 22 nt, Artificial Sequence
  GATA2 Guide RNA
cugaaggagaggcuggaggagg

SEQ ID NO: 2327 - RNA, 22 nt, Artificial Sequence
  GATA2 Guide RNA
cuggacggguggggguggcuga

SEQ ID NO: 2328 - RNA, 22 nt, Artificial Sequence
  GATA2 Guide RNA
cuucagccacccccacccgucc

SEQ ID NO: 2329 - RNA, 22 nt, Artificial Sequence
  GATA2 Guide RNA
gacggguggggguggcugaagg

SEQ ID NO: 2330 - RNA, 22 nt, Artificial Sequence
  GATA2 Guide RNA
gccucuccuucagccaccccca

SEQ ID NO: 2331 - RNA, 22 nt, Artificial Sequence
  GATA2 Guide RNA
gcugaaggagaggcuggaggag

SEQ ID NO: 2332 - RNA, 22 nt, Artificial Sequence
  GATA2 Guide RNA
gcuggacggguggggguggcug

SEQ ID NO: 2333 - RNA, 22 nt, Artificial Sequence
  GATA2 Guide RNA
ggacggguggggguggcugaag

SEQ ID NO: 2334 - RNA, 22 nt, Artificial Sequence
  GATA2 Guide RNA
ggcugaaggagaggcuggagga

SEQ ID NO: 2335 - RNA, 22 nt, Artificial Sequence
  GATA2 Guide RNA
ggggguggcugaaggagaggcu

SEQ ID NO: 2336 - RNA, 22 nt, Artificial Sequence
  GATA2 Guide RNA
gggguggcugaaggagaggcug

SEQ ID NO: 2337 - RNA, 22 nt, Artificial Sequence
  GATA2 Guide RNA
ggguggcugaaggagaggcugg

SEQ ID NO: 2338 - RNA, 22 nt, Artificial Sequence
  GATA2 Guide RNA
ggguggggguggcugaaggaga

SEQ ID NO: 2339 - RNA, 22 nt, Artificial Sequence
  GATA2 Guide RNA
gguggcugaaggagaggcugga

SEQ ID NO: 2340 - RNA, 22 nt, Artificial Sequence
  GATA2 Guide RNA
gguggggguggcugaaggagag

SEQ ID NO: 2341 - RNA, 22 nt, Artificial Sequence
  GATA2 Guide RNA
guggcugaaggagaggcuggag

SEQ ID NO: 2342 - RNA, 22 nt, Artificial Sequence
  GATA2 Guide RNA
guggggguggcugaaggagagg

SEQ ID NO: 2343 - RNA, 22 nt, Artificial Sequence
  GATA2 Guide RNA
ucagccacccccacccguccag

SEQ ID NO: 2344 - RNA, 22 nt, Artificial Sequence
  GATA2 Guide RNA
uccagccucuccuucagccacc

SEQ ID NO: 2345 - RNA, 22 nt, Artificial Sequence
  GATA2 Guide RNA
uccuccagccucuccuucagcc

SEQ ID NO: 2346 - RNA, 22 nt, Artificial Sequence
  GATA2 Guide RNA
uccuucagccacccccacccgu

SEQ ID NO: 2347 - RNA, 22 nt, Artificial Sequence
  GATA2 Guide RNA
ucuccuucagccacccccaccc

SEQ ID NO: 2348 - RNA, 22 nt, Artificial Sequence
  GATA2 Guide RNA
ugaaggagaggcuggaggaggg

SEQ ID NO: 2349 - RNA, 22 nt, Artificial Sequence
  GATA2 Guide RNA
ugcuggacggguggggguggcu

SEQ ID NO: 2350 - RNA, 22 nt, Artificial Sequence
  GATA2 Guide RNA
uggacggguggggguggcugaa

SEQ ID NO: 2351 - RNA, 22 nt, Artificial Sequence
  GATA2 Guide RNA
uggcugaaggagaggcuggagg

SEQ ID NO: 2352 - RNA, 22 nt, Artificial Sequence
  GATA2 Guide RNA
uggggguggcugaaggagaggc

SEQ ID NO: 2353 - RNA, 22 nt, Artificial Sequence
  GATA2 Guide RNA
uucagccacccccacccgucca

SEQ ID NO: 2354 - RNA, 20 nt, Artificial Sequence
  GATA2 Guide RNA
aaggagaggauggaggaggg

SEQ ID NO: 2355 - RNA, 20 nt, Artificial Sequence
  GATA2 Guide RNA
accccuccuccauccucucc

SEQ ID NO: 2356 - RNA, 20 nt, Artificial Sequence
  GATA2 Guide RNA
acgcccauccaccccuccuc

SEQ ID NO: 2357 - RNA, 20 nt, Artificial Sequence
  GATA2 Guide RNA
agaggauggaggaggggugg

SEQ ID NO: 2358 - RNA, 20 nt, Artificial Sequence
  GATA2 Guide RNA
aggagaggauggaggagggg

SEQ ID NO: 2359 - RNA, 20 nt, Artificial Sequence
  GATA2 Guide RNA
aggauggaggagggguggau

SEQ ID NO: 2360 - RNA, 20 nt, Artificial Sequence
  GATA2 Guide RNA
auccaccccuccuccauccu

SEQ ID NO: 2361 - RNA, 20 nt, Artificial Sequence
  GATA2 Guide RNA
auccucuccuucggccaccc

SEQ ID NO: 2362 - RNA, 20 nt, Artificial Sequence
  GATA2 Guide RNA
auggaggagggguggauggg

SEQ ID NO: 2363 - RNA, 20 nt, Artificial Sequence
  GATA2 Guide RNA
caccccuccuccauccucuc

SEQ ID NO: 2364 - RNA, 20 nt, Artificial Sequence
  GATA2 Guide RNA
cauccaccccuccuccaucc

SEQ ID NO: 2365 - RNA, 20 nt, Artificial Sequence
  GATA2 Guide RNA
cauccucuccuucggccacc

SEQ ID NO: 2366 - RNA, 20 nt, Artificial Sequence
  GATA2 Guide RNA
ccaccccuccuccauccucu

SEQ ID NO: 2367 - RNA, 20 nt, Artificial Sequence
  GATA2 Guide RNA
ccauccaccccuccuccauc

SEQ ID NO: 2368 - RNA, 20 nt, Artificial Sequence
  GATA2 Guide RNA
ccauccucuccuucggccac

SEQ ID NO: 2369 - RNA, 20 nt, Artificial Sequence
  GATA2 Guide RNA
cccauccaccccuccuccau

SEQ ID NO: 2370 - RNA, 20 nt, Artificial Sequence
  GATA2 Guide RNA
ccccuccuccauccucuccu

SEQ ID NO: 2371 - RNA, 20 nt, Artificial Sequence
  GATA2 Guide RNA
cccuccuccauccucuccuu

SEQ ID NO: 2372 - RNA, 20 nt, Artificial Sequence
  GATA2 Guide RNA
ccgaaggagaggauggagga

SEQ ID NO: 2373 - RNA, 20 nt, Artificial Sequence
  GATA2 Guide RNA
ccuccauccucuccuucggc

SEQ ID NO: 2374 - RNA, 20 nt, Artificial Sequence
  GATA2 Guide RNA
ccuccuccauccucuccuuc

SEQ ID NO: 2375 - RNA, 20 nt, Artificial Sequence
  GATA2 Guide RNA
cgaaggagaggauggaggag

SEQ ID NO: 2376 - RNA, 20 nt, Artificial Sequence
  GATA2 Guide RNA
cgcccauccaccccuccucc

SEQ ID NO: 2377 - RNA, 20 nt, Artificial Sequence
  GATA2 Guide RNA
cuccauccucuccuucggcc

SEQ ID NO: 2378 - RNA, 20 nt, Artificial Sequence
  GATA2 Guide RNA
cuccuccauccucuccuucg

SEQ ID NO: 2379 - RNA, 20 nt, Artificial Sequence
  GATA2 Guide RNA
gaaggagaggauggaggagg

SEQ ID NO: 2380 - RNA, 20 nt, Artificial Sequence
  GATA2 Guide RNA
gacgcccauccaccccuccu

SEQ ID NO: 2381 - RNA, 20 nt, Artificial Sequence
  GATA2 Guide RNA
gagaggauggaggaggggug

SEQ ID NO: 2382 - RNA, 20 nt, Artificial Sequence
  GATA2 Guide RNA
gaggauggaggaggggugga

SEQ ID NO: 2383 - RNA, 20 nt, Artificial Sequence
  GATA2 Guide RNA
gauggaggagggguggaugg

SEQ ID NO: 2384 - RNA, 20 nt, Artificial Sequence
  GATA2 Guide RNA
gcccauccaccccuccucca

SEQ ID NO: 2385 - RNA, 20 nt, Artificial Sequence
  GATA2 Guide RNA
gccgaaggagaggauggagg

SEQ ID NO: 2386 - RNA, 20 nt, Artificial Sequence
  GATA2 Guide RNA
ggagaggauggaggaggggu

SEQ ID NO: 2387 - RNA, 20 nt, Artificial Sequence
  GATA2 Guide RNA
ggauggaggagggguggaug

SEQ ID NO: 2388 - RNA, 20 nt, Artificial Sequence
  GATA2 Guide RNA
ggccgaaggagaggauggag

SEQ ID NO: 2389 - RNA, 20 nt, Artificial Sequence
  GATA2 Guide RNA
ggggguggccgaaggagagg

SEQ ID NO: 2390 - RNA, 20 nt, Artificial Sequence
  GATA2 Guide RNA
gggguggccgaaggagagga

SEQ ID NO: 2391 - RNA, 20 nt, Artificial Sequence
  GATA2 Guide RNA
ggguggccgaaggagaggau

SEQ ID NO: 2392 - RNA, 20 nt, Artificial Sequence
  GATA2 Guide RNA
gguggccgaaggagaggaug

SEQ ID NO: 2393 - RNA, 20 nt, Artificial Sequence
  GATA2 Guide RNA
guggccgaaggagaggaugg

SEQ ID NO: 2394 - RNA, 20 nt, Artificial Sequence
  GATA2 Guide RNA
guggggguggccgaaggaga

SEQ ID NO: 2395 - RNA, 20 nt, Artificial Sequence
  GATA2 Guide RNA
uccaccccuccuccauccuc

SEQ ID NO: 2396 - RNA, 20 nt, Artificial Sequence
  GATA2 Guide RNA
uccauccucuccuucggcca

SEQ ID NO: 2397 - RNA, 20 nt, Artificial Sequence
  GATA2 Guide RNA
uccuccauccucuccuucgg

SEQ ID NO: 2398 - RNA, 20 nt, Artificial Sequence
  GATA2 Guide RNA
uggccgaaggagaggaugga

SEQ ID NO: 2399 - RNA, 20 nt, Artificial Sequence
  GATA2 Guide RNA
uggggguggccgaaggagag

SEQ ID NO: 2400 - RNA, 21 nt, Artificial Sequence
  GATA2 Guide RNA
aaggagaggauggaggagggg

SEQ ID NO: 2401 - RNA, 21 nt, Artificial Sequence
  GATA2 Guide RNA
accccuccuccauccucuccu

SEQ ID NO: 2402 - RNA, 21 nt, Artificial Sequence
  GATA2 Guide RNA
acgcccauccaccccuccucc

SEQ ID NO: 2403 - RNA, 21 nt, Artificial Sequence
  GATA2 Guide RNA
agaggauggaggaggggugga

SEQ ID NO: 2404 - RNA, 21 nt, Artificial Sequence
  GATA2 Guide RNA
aggagaggauggaggaggggu

SEQ ID NO: 2405 - RNA, 21 nt, Artificial Sequence
  GATA2 Guide RNA
aggauggaggagggguggaug

SEQ ID NO: 2406 - RNA, 21 nt, Artificial Sequence
  GATA2 Guide RNA
auccaccccuccuccauccuc

SEQ ID NO: 2407 - RNA, 21 nt, Artificial Sequence
  GATA2 Guide RNA
auccucuccuucggccacccc

SEQ ID NO: 2408 - RNA, 21 nt, Artificial Sequence
  GATA2 Guide RNA
auggaggagggguggaugggc

SEQ ID NO: 2409 - RNA, 21 nt, Artificial Sequence
  GATA2 Guide RNA
caccccuccuccauccucucc

SEQ ID NO: 2410 - RNA, 21 nt, Artificial Sequence
  GATA2 Guide RNA
cauccaccccuccuccauccu

SEQ ID NO: 2411 - RNA, 21 nt, Artificial Sequence
  GATA2 Guide RNA
cauccucuccuucggccaccc

SEQ ID NO: 2412 - RNA, 21 nt, Artificial Sequence
  GATA2 Guide RNA
ccaccccuccuccauccucuc

SEQ ID NO: 2413 - RNA, 21 nt, Artificial Sequence
  GATA2 Guide RNA
ccauccaccccuccuccaucc

SEQ ID NO: 2414 - RNA, 21 nt, Artificial Sequence
  GATA2 Guide RNA
ccauccucuccuucggccacc

SEQ ID NO: 2415 - RNA, 21 nt, Artificial Sequence
  GATA2 Guide RNA
cccauccaccccuccuccauc

SEQ ID NO: 2416 - RNA, 21 nt, Artificial Sequence
  GATA2 Guide RNA
ccccuccuccauccucuccuu

SEQ ID NO: 2417 - RNA, 21 nt, Artificial Sequence
  GATA2 Guide RNA
cccuccuccauccucuccuuc

SEQ ID NO: 2418 - RNA, 21 nt, Artificial Sequence
  GATA2 Guide RNA
ccgaaggagaggauggaggag

SEQ ID NO: 2419 - RNA, 21 nt, Artificial Sequence
  GATA2 Guide RNA
ccuccauccucuccuucggcc

SEQ ID NO: 2420 - RNA, 21 nt, Artificial Sequence
  GATA2 Guide RNA
ccuccuccauccucuccuucg

SEQ ID NO: 2421 - RNA, 21 nt, Artificial Sequence
  GATA2 Guide RNA
cgaaggagaggauggaggagg

SEQ ID NO: 2422 - RNA, 21 nt, Artificial Sequence
  GATA2 Guide RNA
cgacgcccauccaccccuccu

SEQ ID NO: 2423 - RNA, 21 nt, Artificial Sequence
  GATA2 Guide RNA
cgcccauccaccccuccucca

SEQ ID NO: 2424 - RNA, 21 nt, Artificial Sequence
  GATA2 Guide RNA
cuccauccucuccuucggcca

SEQ ID NO: 2425 - RNA, 21 nt, Artificial Sequence
  GATA2 Guide RNA
cuccuccauccucuccuucgg

SEQ ID NO: 2426 - RNA, 21 nt, Artificial Sequence
  GATA2 Guide RNA
gaaggagaggauggaggaggg

SEQ ID NO: 2427 - RNA, 21 nt, Artificial Sequence
  GATA2 Guide RNA
gacgcccauccaccccuccuc

SEQ ID NO: 2428 - RNA, 21 nt, Artificial Sequence
  GATA2 Guide RNA
gagaggauggaggaggggugg

SEQ ID NO: 2429 - RNA, 21 nt, Artificial Sequence
  GATA2 Guide RNA
gaggauggaggagggguggau

SEQ ID NO: 2430 - RNA, 21 nt, Artificial Sequence
  GATA2 Guide RNA
gauggaggagggguggauggg

SEQ ID NO: 2431 - RNA, 21 nt, Artificial Sequence
  GATA2 Guide RNA
gcccauccaccccuccuccau

SEQ ID NO: 2432 - RNA, 21 nt, Artificial Sequence
  GATA2 Guide RNA
gccgaaggagaggauggagga

SEQ ID NO: 2433 - RNA, 21 nt, Artificial Sequence
  GATA2 Guide RNA
ggagaggauggaggaggggug

SEQ ID NO: 2434 - RNA, 21 nt, Artificial Sequence
  GATA2 Guide RNA
ggauggaggagggguggaugg

SEQ ID NO: 2435 - RNA, 21 nt, Artificial Sequence
  GATA2 Guide RNA
ggccgaaggagaggauggagg

SEQ ID NO: 2436 - RNA, 21 nt, Artificial Sequence
  GATA2 Guide RNA
ggggguggccgaaggagagga

SEQ ID NO: 2437 - RNA, 21 nt, Artificial Sequence
  GATA2 Guide RNA
gggguggccgaaggagaggau

SEQ ID NO: 2438 - RNA, 21 nt, Artificial Sequence
  GATA2 Guide RNA
ggguggccgaaggagaggaug

SEQ ID NO: 2439 - RNA, 21 nt, Artificial Sequence
  GATA2 Guide RNA
gguggccgaaggagaggaugg

SEQ ID NO: 2440 - RNA, 21 nt, Artificial Sequence
  GATA2 Guide RNA
gguggggguggccgaaggaga

SEQ ID NO: 2441 - RNA, 21 nt, Artificial Sequence
  GATA2 Guide RNA
guggccgaaggagaggaugga

SEQ ID NO: 2442 - RNA, 21 nt, Artificial Sequence
  GATA2 Guide RNA
guggggguggccgaaggagag

SEQ ID NO: 2443 - RNA, 21 nt, Artificial Sequence
  GATA2 Guide RNA
uccaccccuccuccauccucu

SEQ ID NO: 2444 - RNA, 21 nt, Artificial Sequence
  GATA2 Guide RNA
uccauccucuccuucggccac

SEQ ID NO: 2445 - RNA, 21 nt, Artificial Sequence
  GATA2 Guide RNA
uccuccauccucuccuucggc

SEQ ID NO: 2446 - RNA, 21 nt, Artificial Sequence
  GATA2 Guide RNA
uggccgaaggagaggauggag

SEQ ID NO: 2447 - RNA, 21 nt, Artificial Sequence
  GATA2 Guide RNA
uggggguggccgaaggagagg

SEQ ID NO: 2448 - RNA, 22 nt, Artificial Sequence
  GATA2 Guide RNA
aaggagaggauggaggaggggu

SEQ ID NO: 2449 - RNA, 22 nt, Artificial Sequence
  GATA2 Guide RNA
accccuccuccauccucuccuu

SEQ ID NO: 2450 - RNA, 22 nt, Artificial Sequence
  GATA2 Guide RNA
acgcccauccaccccuccucca

SEQ ID NO: 2451 - RNA, 22 nt, Artificial Sequence
  GATA2 Guide RNA
agaggauggaggagggguggau

SEQ ID NO: 2452 - RNA, 22 nt, Artificial Sequence
  GATA2 Guide RNA
aggagaggauggaggaggggug

SEQ ID NO: 2453 - RNA, 22 nt, Artificial Sequence
  GATA2 Guide RNA
aggauggaggagggguggaugg

SEQ ID NO: 2454 - RNA, 22 nt, Artificial Sequence
  GATA2 Guide RNA
auccaccccuccuccauccucu

SEQ ID NO: 2455 - RNA, 22 nt, Artificial Sequence
  GATA2 Guide RNA
auccucuccuucggccaccccc

SEQ ID NO: 2456 - RNA, 22 nt, Artificial Sequence
  GATA2 Guide RNA
auggaggagggguggaugggcg

SEQ ID NO: 2457 - RNA, 22 nt, Artificial Sequence
  GATA2 Guide RNA
caccccuccuccauccucuccu

SEQ ID NO: 2458 - RNA, 22 nt, Artificial Sequence
  GATA2 Guide RNA
cauccaccccuccuccauccuc

SEQ ID NO: 2459 - RNA, 22 nt, Artificial Sequence
  GATA2 Guide RNA
cauccucuccuucggccacccc

SEQ ID NO: 2460 - RNA, 22 nt, Artificial Sequence
  GATA2 Guide RNA
ccaccccuccuccauccucucc

SEQ ID NO: 2461 - RNA, 22 nt, Artificial Sequence
  GATA2 Guide RNA
ccauccaccccuccuccauccu

SEQ ID NO: 2462 - RNA, 22 nt, Artificial Sequence
  GATA2 Guide RNA
ccauccucuccuucggccaccc

SEQ ID NO: 2463 - RNA, 22 nt, Artificial Sequence
  GATA2 Guide RNA
cccauccaccccuccuccaucc

SEQ ID NO: 2464 - RNA, 22 nt, Artificial Sequence
  GATA2 Guide RNA
ccccuccuccauccucuccuuc

SEQ ID NO: 2465 - RNA, 22 nt, Artificial Sequence
  GATA2 Guide RNA
cccuccuccauccucuccuucg

SEQ ID NO: 2466 - RNA, 22 nt, Artificial Sequence
  GATA2 Guide RNA
ccgaaggagaggauggaggagg

SEQ ID NO: 2467 - RNA, 22 nt, Artificial Sequence
  GATA2 Guide RNA
ccgacgcccauccaccccuccu

SEQ ID NO: 2468 - RNA, 22 nt, Artificial Sequence
  GATA2 Guide RNA
ccuccauccucuccuucggcca

SEQ ID NO: 2469 - RNA, 22 nt, Artificial Sequence
  GATA2 Guide RNA
ccuccuccauccucuccuucgg

SEQ ID NO: 2470 - RNA, 22 nt, Artificial Sequence
  GATA2 Guide RNA
cgaaggagaggauggaggaggg

SEQ ID NO: 2471 - RNA, 22 nt, Artificial Sequence
  GATA2 Guide RNA
cgacgcccauccaccccuccuc

SEQ ID NO: 2472 - RNA, 22 nt, Artificial Sequence
  GATA2 Guide RNA
cgcccauccaccccuccuccau

SEQ ID NO: 2473 - RNA, 22 nt, Artificial Sequence
  GATA2 Guide RNA
cuccauccucuccuucggccac

SEQ ID NO: 2474 - RNA, 22 nt, Artificial Sequence
  GATA2 Guide RNA
cuccuccauccucuccuucggc

SEQ ID NO: 2475 - RNA, 22 nt, Artificial Sequence
  GATA2 Guide RNA
gaaggagaggauggaggagggg

SEQ ID NO: 2476 - RNA, 22 nt, Artificial Sequence
  GATA2 Guide RNA
gacgcccauccaccccuccucc

SEQ ID NO: 2477 - RNA, 22 nt, Artificial Sequence
  GATA2 Guide RNA
gagaggauggaggaggggugga

SEQ ID NO: 2478 - RNA, 22 nt, Artificial Sequence
  GATA2 Guide RNA
gaggauggaggagggguggaug

SEQ ID NO: 2479 - RNA, 22 nt, Artificial Sequence
  GATA2 Guide RNA
gauggaggagggguggaugggc

SEQ ID NO: 2480 - RNA, 22 nt, Artificial Sequence
  GATA2 Guide RNA
gcccauccaccccuccuccauc

SEQ ID NO: 2481 - RNA, 22 nt, Artificial Sequence
  GATA2 Guide RNA
gccgaaggagaggauggaggag

SEQ ID NO: 2482 - RNA, 22 nt, Artificial Sequence
  GATA2 Guide RNA
ggagaggauggaggaggggugg

SEQ ID NO: 2483 - RNA, 22 nt, Artificial Sequence
  GATA2 Guide RNA
ggauggaggagggguggauggg

SEQ ID NO: 2484 - RNA, 22 nt, Artificial Sequence
  GATA2 Guide RNA
ggccgaaggagaggauggagga

SEQ ID NO: 2485 - RNA, 22 nt, Artificial Sequence
  GATA2 Guide RNA
ggggguggccgaaggagaggau

SEQ ID NO: 2486 - RNA, 22 nt, Artificial Sequence
  GATA2 Guide RNA
gggguggccgaaggagaggaug

SEQ ID NO: 2487 - RNA, 22 nt, Artificial Sequence
  GATA2 Guide RNA
ggguggccgaaggagaggaugg

SEQ ID NO: 2488 - RNA, 22 nt, Artificial Sequence
  GATA2 Guide RNA
ggguggggguggccgaaggaga

SEQ ID NO: 2489 - RNA, 22 nt, Artificial Sequence
  GATA2 Guide RNA
gguggccgaaggagaggaugga

SEQ ID NO: 2490 - RNA, 22 nt, Artificial Sequence
  GATA2 Guide RNA
gguggggguggccgaaggagag

SEQ ID NO: 2491 - RNA, 22 nt, Artificial Sequence
  GATA2 Guide RNA
guggccgaaggagaggauggag

SEQ ID NO: 2492 - RNA, 22 nt, Artificial Sequence
  GATA2 Guide RNA
guggggguggccgaaggagagg

SEQ ID NO: 2493 - RNA, 22 nt, Artificial Sequence
  GATA2 Guide RNA
uccaccccuccuccauccucuc

SEQ ID NO: 2494 - RNA, 22 nt, Artificial Sequence
  GATA2 Guide RNA
uccauccucuccuucggccacc

SEQ ID NO: 2495 - RNA, 22 nt, Artificial Sequence
  GATA2 Guide RNA
uccuccauccucuccuucggcc

SEQ ID NO: 2496 - RNA, 22 nt, Artificial Sequence
  GATA2 Guide RNA
uggccgaaggagaggauggagg

SEQ ID NO: 2497 - RNA, 22 nt, Artificial Sequence
  GATA2 Guide RNA
uggggguggccgaaggagagga

SEQ ID NO: 2498 - RNA, 20 nt, Artificial Sequence
  GATA2 Guide RNA
aaggagaggcuggaguaggg

SEQ ID NO: 2499 - RNA, 20 nt, Artificial Sequence
  GATA2 Guide RNA
accccuacuccagccucucc

SEQ ID NO: 2500 - RNA, 20 nt, Artificial Sequence
  GATA2 Guide RNA
acgcccauccaccccuacuc

SEQ ID NO: 2501 - RNA, 20 nt, Artificial Sequence
  GATA2 Guide RNA
acuccgacgcccauccaccc

SEQ ID NO: 2502 - RNA, 20 nt, Artificial Sequence
  GATA2 Guide RNA
agaggcuggaguaggggugg

SEQ ID NO: 2503 - RNA, 20 nt, Artificial Sequence
  GATA2 Guide RNA
aggagaggcuggaguagggg

SEQ ID NO: 2504 - RNA, 20 nt, Artificial Sequence
  GATA2 Guide RNA
aggcuggaguagggguggau

SEQ ID NO: 2505 - RNA, 20 nt, Artificial Sequence
  GATA2 Guide RNA
aguagggguggaugggcguc

SEQ ID NO: 2506 - RNA, 20 nt, Artificial Sequence
  GATA2 Guide RNA
auccaccccuacuccagccu

SEQ ID NO: 2507 - RNA, 20 nt, Artificial Sequence
  GATA2 Guide RNA
caccccuacuccagccucuc

SEQ ID NO: 2508 - RNA, 20 nt, Artificial Sequence
  GATA2 Guide RNA
cacuccgacgcccauccacc

SEQ ID NO: 2509 - RNA, 20 nt, Artificial Sequence
  GATA2 Guide RNA
cauccaccccuacuccagcc

SEQ ID NO: 2510 - RNA, 20 nt, Artificial Sequence
  GATA2 Guide RNA
ccaccccuacuccagccucu

SEQ ID NO: 2511 - RNA, 20 nt, Artificial Sequence
  GATA2 Guide RNA
ccauccaccccuacuccagc

SEQ ID NO: 2512 - RNA, 20 nt, Artificial Sequence
  GATA2 Guide RNA
cccauccaccccuacuccag

SEQ ID NO: 2513 - RNA, 20 nt, Artificial Sequence
  GATA2 Guide RNA
ccccuacuccagccucuccu

SEQ ID NO: 2514 - RNA, 20 nt, Artificial Sequence
  GATA2 Guide RNA
cccuacuccagccucuccuu

SEQ ID NO: 2515 - RNA, 20 nt, Artificial Sequence
  GATA2 Guide RNA
ccgaaggagaggcuggagua

SEQ ID NO: 2516 - RNA, 20 nt, Artificial Sequence
  GATA2 Guide RNA
ccgacgcccauccaccccua

SEQ ID NO: 2517 - RNA, 20 nt, Artificial Sequence
  GATA2 Guide RNA
ccuacuccagccucuccuuc

SEQ ID NO: 2518 - RNA, 20 nt, Artificial Sequence
  GATA2 Guide RNA
cgaaggagaggcuggaguag

SEQ ID NO: 2519 - RNA, 20 nt, Artificial Sequence
  GATA2 Guide RNA
cgacgcccauccaccccuac

SEQ ID NO: 2520 - RNA, 20 nt, Artificial Sequence
  GATA2 Guide RNA
cgcccauccaccccuacucc

SEQ ID NO: 2521 - RNA, 20 nt, Artificial Sequence
  GATA2 Guide RNA
cuacuccagccucuccuucg

SEQ ID NO: 2522 - RNA, 20 nt, Artificial Sequence
  GATA2 Guide RNA
cuccgacgcccauccacccc

SEQ ID NO: 2523 - RNA, 20 nt, Artificial Sequence
  GATA2 Guide RNA
cuggaguagggguggauggg

SEQ ID NO: 2524 - RNA, 20 nt, Artificial Sequence
  GATA2 Guide RNA
gaaggagaggcuggaguagg

SEQ ID NO: 2525 - RNA, 20 nt, Artificial Sequence
  GATA2 Guide RNA
gacgcccauccaccccuacu

SEQ ID NO: 2526 - RNA, 20 nt, Artificial Sequence
  GATA2 Guide RNA
gagaggcuggaguaggggug

SEQ ID NO: 2527 - RNA, 20 nt, Artificial Sequence
  GATA2 Guide RNA
gaggcuggaguaggggugga

SEQ ID NO: 2528 - RNA, 20 nt, Artificial Sequence
  GATA2 Guide RNA
gaguagggguggaugggcgu

SEQ ID NO: 2529 - RNA, 20 nt, Artificial Sequence
  GATA2 Guide RNA
gcccauccaccccuacucca

SEQ ID NO: 2530 - RNA, 20 nt, Artificial Sequence
  GATA2 Guide RNA
gccgaaggagaggcuggagu

SEQ ID NO: 2531 - RNA, 20 nt, Artificial Sequence
  GATA2 Guide RNA
gcuggaguagggguggaugg

SEQ ID NO: 2532 - RNA, 20 nt, Artificial Sequence
  GATA2 Guide RNA
ggagaggcuggaguaggggu

SEQ ID NO: 2533 - RNA, 20 nt, Artificial Sequence
  GATA2 Guide RNA
ggaguagggguggaugggcg

SEQ ID NO: 2534 - RNA, 20 nt, Artificial Sequence
  GATA2 Guide RNA
ggccgaaggagaggcuggag

SEQ ID NO: 2535 - RNA, 20 nt, Artificial Sequence
  GATA2 Guide RNA
ggcuggaguagggguggaug

SEQ ID NO: 2536 - RNA, 20 nt, Artificial Sequence
  GATA2 Guide RNA
guagggguggaugggcgucg

SEQ ID NO: 2537 - RNA, 20 nt, Artificial Sequence
  GATA2 Guide RNA
guggccgaaggagaggcugg

SEQ ID NO: 2538 - RNA, 20 nt, Artificial Sequence
  GATA2 Guide RNA
uacuccagccucuccuucgg

SEQ ID NO: 2539 - RNA, 20 nt, Artificial Sequence
  GATA2 Guide RNA
uagggguggaugggcgucgg

SEQ ID NO: 2540 - RNA, 20 nt, Artificial Sequence
  GATA2 Guide RNA
uccaccccuacuccagccuc

SEQ ID NO: 2541 - RNA, 20 nt, Artificial Sequence
  GATA2 Guide RNA
uccgacgcccauccaccccu

SEQ ID NO: 2542 - RNA, 20 nt, Artificial Sequence
  GATA2 Guide RNA
uggaguagggguggaugggc

SEQ ID NO: 2543 - RNA, 20 nt, Artificial Sequence
  GATA2 Guide RNA
uggccgaaggagaggcugga

SEQ ID NO: 2544 - RNA, 21 nt, Artificial Sequence
  GATA2 Guide RNA
aaggagaggcuggaguagggg

SEQ ID NO: 2545 - RNA, 21 nt, Artificial Sequence
  GATA2 Guide RNA
accccuacuccagccucuccu

SEQ ID NO: 2546 - RNA, 21 nt, Artificial Sequence
  GATA2 Guide RNA
acgcccauccaccccuacucc

SEQ ID NO: 2547 - RNA, 21 nt, Artificial Sequence
  GATA2 Guide RNA
acuccgacgcccauccacccc

SEQ ID NO: 2548 - RNA, 21 nt, Artificial Sequence
  GATA2 Guide RNA
agaggcuggaguaggggugga

SEQ ID NO: 2549 - RNA, 21 nt, Artificial Sequence
  GATA2 Guide RNA
aggagaggcuggaguaggggu

SEQ ID NO: 2550 - RNA, 21 nt, Artificial Sequence
  GATA2 Guide RNA
aggcuggaguagggguggaug

SEQ ID NO: 2551 - RNA, 21 nt, Artificial Sequence
  GATA2 Guide RNA
aguagggguggaugggcgucg

SEQ ID NO: 2552 - RNA, 21 nt, Artificial Sequence
  GATA2 Guide RNA
auccaccccuacuccagccuc

SEQ ID NO: 2553 - RNA, 21 nt, Artificial Sequence
  GATA2 Guide RNA
caccccuacuccagccucucc

SEQ ID NO: 2554 - RNA, 21 nt, Artificial Sequence
  GATA2 Guide RNA
cacuccgacgcccauccaccc

SEQ ID NO: 2555 - RNA, 21 nt, Artificial Sequence
  GATA2 Guide RNA
cauccaccccuacuccagccu

SEQ ID NO: 2556 - RNA, 21 nt, Artificial Sequence
  GATA2 Guide RNA
ccaccccuacuccagccucuc

SEQ ID NO: 2557 - RNA, 21 nt, Artificial Sequence
  GATA2 Guide RNA
ccacuccgacgcccauccacc

SEQ ID NO: 2558 - RNA, 21 nt, Artificial Sequence
  GATA2 Guide RNA
ccauccaccccuacuccagcc

SEQ ID NO: 2559 - RNA, 21 nt, Artificial Sequence
  GATA2 Guide RNA
cccauccaccccuacuccagc

SEQ ID NO: 2560 - RNA, 21 nt, Artificial Sequence
  GATA2 Guide RNA
ccccuacuccagccucuccuu

SEQ ID NO: 2561 - RNA, 21 nt, Artificial Sequence
  GATA2 Guide RNA
cccuacuccagccucuccuuc

SEQ ID NO: 2562 - RNA, 21 nt, Artificial Sequence
  GATA2 Guide RNA
ccgaaggagaggcuggaguag

SEQ ID NO: 2563 - RNA, 21 nt, Artificial Sequence
  GATA2 Guide RNA
ccgacgcccauccaccccuac

SEQ ID NO: 2564 - RNA, 21 nt, Artificial Sequence
  GATA2 Guide RNA
ccuacuccagccucuccuucg

SEQ ID NO: 2565 - RNA, 21 nt, Artificial Sequence
  GATA2 Guide RNA
cgaaggagaggcuggaguagg

SEQ ID NO: 2566 - RNA, 21 nt, Artificial Sequence
  GATA2 Guide RNA
cgacgcccauccaccccuacu

SEQ ID NO: 2567 - RNA, 21 nt, Artificial Sequence
  GATA2 Guide RNA
cgcccauccaccccuacucca

SEQ ID NO: 2568 - RNA, 21 nt, Artificial Sequence
  GATA2 Guide RNA
cuacuccagccucuccuucgg

SEQ ID NO: 2569 - RNA, 21 nt, Artificial Sequence
  GATA2 Guide RNA
cuccgacgcccauccaccccu

SEQ ID NO: 2570 - RNA, 21 nt, Artificial Sequence
  GATA2 Guide RNA
cuggaguagggguggaugggc

SEQ ID NO: 2571 - RNA, 21 nt, Artificial Sequence
  GATA2 Guide RNA
gaaggagaggcuggaguaggg

SEQ ID NO: 2572 - RNA, 21 nt, Artificial Sequence
  GATA2 Guide RNA
gacgcccauccaccccuacuc

SEQ ID NO: 2573 - RNA, 21 nt, Artificial Sequence
  GATA2 Guide RNA
gagaggcuggaguaggggugg

SEQ ID NO: 2574 - RNA, 21 nt, Artificial Sequence
  GATA2 Guide RNA
gaggcuggaguagggguggau

SEQ ID NO: 2575 - RNA, 21 nt, Artificial Sequence
  GATA2 Guide RNA
gaguagggguggaugggcguc

SEQ ID NO: 2576 - RNA, 21 nt, Artificial Sequence
  GATA2 Guide RNA
gcccauccaccccuacuccag

SEQ ID NO: 2577 - RNA, 21 nt, Artificial Sequence
  GATA2 Guide RNA
gccgaaggagaggcuggagua

SEQ ID NO: 2578 - RNA, 21 nt, Artificial Sequence
  GATA2 Guide RNA
gcuggaguagggguggauggg

SEQ ID NO: 2579 - RNA, 21 nt, Artificial Sequence
  GATA2 Guide RNA
ggagaggcuggaguaggggug

SEQ ID NO: 2580 - RNA, 21 nt, Artificial Sequence
  GATA2 Guide RNA
ggaguagggguggaugggcgu

SEQ ID NO: 2581 - RNA, 21 nt, Artificial Sequence
  GATA2 Guide RNA
ggccgaaggagaggcuggagu

SEQ ID NO: 2582 - RNA, 21 nt, Artificial Sequence
  GATA2 Guide RNA
ggcuggaguagggguggaugg

SEQ ID NO: 2583 - RNA, 21 nt, Artificial Sequence
  GATA2 Guide RNA
gguggccgaaggagaggcugg

SEQ ID NO: 2584 - RNA, 21 nt, Artificial Sequence
  GATA2 Guide RNA
guagggguggaugggcgucgg

SEQ ID NO: 2585 - RNA, 21 nt, Artificial Sequence
  GATA2 Guide RNA
guggccgaaggagaggcugga

SEQ ID NO: 2586 - RNA, 21 nt, Artificial Sequence
  GATA2 Guide RNA
uacuccagccucuccuucggc

SEQ ID NO: 2587 - RNA, 21 nt, Artificial Sequence
  GATA2 Guide RNA
uagggguggaugggcgucgga

SEQ ID NO: 2588 - RNA, 21 nt, Artificial Sequence
  GATA2 Guide RNA
uccaccccuacuccagccucu

SEQ ID NO: 2589 - RNA, 21 nt, Artificial Sequence
  GATA2 Guide RNA
uccgacgcccauccaccccua

SEQ ID NO: 2590 - RNA, 21 nt, Artificial Sequence
  GATA2 Guide RNA
uggaguagggguggaugggcg

SEQ ID NO: 2591 - RNA, 21 nt, Artificial Sequence
  GATA2 Guide RNA
uggccgaaggagaggcuggag

SEQ ID NO: 2592 - RNA, 22 nt, Artificial Sequence
  GATA2 Guide RNA
aaggagaggcuggaguaggggu

SEQ ID NO: 2593 - RNA, 22 nt, Artificial Sequence
  GATA2 Guide RNA
accccuacuccagccucuccuu

SEQ ID NO: 2594 - RNA, 22 nt, Artificial Sequence
  GATA2 Guide RNA
acgcccauccaccccuacucca

SEQ ID NO: 2595 - RNA, 22 nt, Artificial Sequence
  GATA2 Guide RNA
acuccgacgcccauccaccccu

SEQ ID NO: 2596 - RNA, 22 nt, Artificial Sequence
  GATA2 Guide RNA
agaggcuggaguagggguggau

SEQ ID NO: 2597 - RNA, 22 nt, Artificial Sequence
  GATA2 Guide RNA
aggagaggcuggaguaggggug

SEQ ID NO: 2598 - RNA, 22 nt, Artificial Sequence
  GATA2 Guide RNA
aggcuggaguagggguggaugg

SEQ ID NO: 2599 - RNA, 22 nt, Artificial Sequence
  GATA2 Guide RNA
aguagggguggaugggcgucgg

SEQ ID NO: 2600 - RNA, 22 nt, Artificial Sequence
  GATA2 Guide RNA
auccaccccuacuccagccucu

SEQ ID NO: 2601 - RNA, 22 nt, Artificial Sequence
  GATA2 Guide RNA
caccccuacuccagccucuccu

SEQ ID NO: 2602 - RNA, 22 nt, Artificial Sequence
  GATA2 Guide RNA
cacuccgacgcccauccacccc

SEQ ID NO: 2603 - RNA, 22 nt, Artificial Sequence
  GATA2 Guide RNA
cauccaccccuacuccagccuc

SEQ ID NO: 2604 - RNA, 22 nt, Artificial Sequence
  GATA2 Guide RNA
ccaccccuacuccagccucucc

SEQ ID NO: 2605 - RNA, 22 nt, Artificial Sequence
  GATA2 Guide RNA
ccacuccgacgcccauccaccc

SEQ ID NO: 2606 - RNA, 22 nt, Artificial Sequence
  GATA2 Guide RNA
ccauccaccccuacuccagccu

SEQ ID NO: 2607 - RNA, 22 nt, Artificial Sequence
  GATA2 Guide RNA
cccacuccgacgcccauccacc

SEQ ID NO: 2608 - RNA, 22 nt, Artificial Sequence
  GATA2 Guide RNA
cccauccaccccuacuccagcc

SEQ ID NO: 2609 - RNA, 22 nt, Artificial Sequence
  GATA2 Guide RNA
ccccuacuccagccucuccuuc

SEQ ID NO: 2610 - RNA, 22 nt, Artificial Sequence
  GATA2 Guide RNA
cccuacuccagccucuccuucg

SEQ ID NO: 2611 - RNA, 22 nt, Artificial Sequence
  GATA2 Guide RNA
ccgaaggagaggcuggaguagg

SEQ ID NO: 2612 - RNA, 22 nt, Artificial Sequence
  GATA2 Guide RNA
ccgacgcccauccaccccuacu

SEQ ID NO: 2613 - RNA, 22 nt, Artificial Sequence
  GATA2 Guide RNA
ccuacuccagccucuccuucgg

SEQ ID NO: 2614 - RNA, 22 nt, Artificial Sequence
  GATA2 Guide RNA
cgaaggagaggcuggaguaggg

SEQ ID NO: 2615 - RNA, 22 nt, Artificial Sequence
  GATA2 Guide RNA
cgacgcccauccaccccuacuc

SEQ ID NO: 2616 - RNA, 22 nt, Artificial Sequence
  GATA2 Guide RNA
cgcccauccaccccuacuccag

SEQ ID NO: 2617 - RNA, 22 nt, Artificial Sequence
  GATA2 Guide RNA
cuacuccagccucuccuucggc

SEQ ID NO: 2618 - RNA, 22 nt, Artificial Sequence
  GATA2 Guide RNA
cuccgacgcccauccaccccua

SEQ ID NO: 2619 - RNA, 22 nt, Artificial Sequence
  GATA2 Guide RNA
cuggaguagggguggaugggcg

SEQ ID NO: 2620 - RNA, 22 nt, Artificial Sequence
  GATA2 Guide RNA
gaaggagaggcuggaguagggg

SEQ ID NO: 2621 - RNA, 22 nt, Artificial Sequence
  GATA2 Guide RNA
gacgcccauccaccccuacucc

SEQ ID NO: 2622 - RNA, 22 nt, Artificial Sequence
  GATA2 Guide RNA
gagaggcuggaguaggggugga

SEQ ID NO: 2623 - RNA, 22 nt, Artificial Sequence
  GATA2 Guide RNA
gaggcuggaguagggguggaug

SEQ ID NO: 2624 - RNA, 22 nt, Artificial Sequence
  GATA2 Guide RNA
gaguagggguggaugggcgucg

SEQ ID NO: 2625 - RNA, 22 nt, Artificial Sequence
  GATA2 Guide RNA
gcccauccaccccuacuccagc

SEQ ID NO: 2626 - RNA, 22 nt, Artificial Sequence
  GATA2 Guide RNA
gccgaaggagaggcuggaguag

SEQ ID NO: 2627 - RNA, 22 nt, Artificial Sequence
  GATA2 Guide RNA
gcuggaguagggguggaugggc

SEQ ID NO: 2628 - RNA, 22 nt, Artificial Sequence
  GATA2 Guide RNA
ggagaggcuggaguaggggugg

SEQ ID NO: 2629 - RNA, 22 nt, Artificial Sequence
  GATA2 Guide RNA
ggaguagggguggaugggcguc

SEQ ID NO: 2630 - RNA, 22 nt, Artificial Sequence
  GATA2 Guide RNA
ggccgaaggagaggcuggagua

SEQ ID NO: 2631 - RNA, 22 nt, Artificial Sequence
  GATA2 Guide RNA
ggcuggaguagggguggauggg

SEQ ID NO: 2632 - RNA, 22 nt, Artificial Sequence
  GATA2 Guide RNA
ggguggccgaaggagaggcugg

SEQ ID NO: 2633 - RNA, 22 nt, Artificial Sequence
  GATA2 Guide RNA
gguggccgaaggagaggcugga

SEQ ID NO: 2634 - RNA, 22 nt, Artificial Sequence
  GATA2 Guide RNA
guagggguggaugggcgucgga

SEQ ID NO: 2635 - RNA, 22 nt, Artificial Sequence
  GATA2 Guide RNA
guggccgaaggagaggcuggag

SEQ ID NO: 2636 - RNA, 22 nt, Artificial Sequence
  GATA2 Guide RNA
uacuccagccucuccuucggcc

SEQ ID NO: 2637 - RNA, 22 nt, Artificial Sequence
  GATA2 Guide RNA
uagggguggaugggcgucggag

SEQ ID NO: 2638 - RNA, 22 nt, Artificial Sequence
  GATA2 Guide RNA
uccaccccuacuccagccucuc

SEQ ID NO: 2639 - RNA, 22 nt, Artificial Sequence
  GATA2 Guide RNA
uccgacgcccauccaccccuac

SEQ ID NO: 2640 - RNA, 22 nt, Artificial Sequence
  GATA2 Guide RNA
uggaguagggguggaugggcgu

SEQ ID NO: 2641 - RNA, 22 nt, Artificial Sequence
  GATA2 Guide RNA
uggccgaaggagaggcuggagu

SEQ ID NO: 2642 - RNA, 20 nt, Artificial Sequence
  GATA2 Guide RNA
acacauccugcccacuccga

SEQ ID NO: 2643 - RNA, 20 nt, Artificial Sequence
  GATA2 Guide RNA
acauccugcccacuccgacg

SEQ ID NO: 2644 - RNA, 20 nt, Artificial Sequence
  GATA2 Guide RNA
acguccauccaccccuccuc

SEQ ID NO: 2645 - RNA, 20 nt, Artificial Sequence
  GATA2 Guide RNA
acgucggagugggcaggaug

SEQ ID NO: 2646 - RNA, 20 nt, Artificial Sequence
  GATA2 Guide RNA
acuccgacguccauccaccc

SEQ ID NO: 2647 - RNA, 20 nt, Artificial Sequence
  GATA2 Guide RNA
aggagggguggauggacguc

SEQ ID NO: 2648 - RNA, 20 nt, Artificial Sequence
  GATA2 Guide RNA
aggcuggaggagggguggau

SEQ ID NO: 2649 - RNA, 20 nt, Artificial Sequence
  GATA2 Guide RNA
agggguggauggacgucgga

SEQ ID NO: 2650 - RNA, 20 nt, Artificial Sequence
  GATA2 Guide RNA
auccugcccacuccgacguc

SEQ ID NO: 2651 - RNA, 20 nt, Artificial Sequence
  GATA2 Guide RNA
auggacgucggagugggcag

SEQ ID NO: 2652 - RNA, 20 nt, Artificial Sequence
  GATA2 Guide RNA
cacauccugcccacuccgac

SEQ ID NO: 2653 - RNA, 20 nt, Artificial Sequence
  GATA2 Guide RNA
cacuccgacguccauccacc

SEQ ID NO: 2654 - RNA, 20 nt, Artificial Sequence
  GATA2 Guide RNA
cauccugcccacuccgacgu

SEQ ID NO: 2655 - RNA, 20 nt, Artificial Sequence
  GATA2 Guide RNA
ccacuccgacguccauccac

SEQ ID NO: 2656 - RNA, 20 nt, Artificial Sequence
  GATA2 Guide RNA
cccacuccgacguccaucca

SEQ ID NO: 2657 - RNA, 20 nt, Artificial Sequence
  GATA2 Guide RNA
ccgacguccauccaccccuc

SEQ ID NO: 2658 - RNA, 20 nt, Artificial Sequence
  GATA2 Guide RNA
ccugcccacuccgacgucca

SEQ ID NO: 2659 - RNA, 20 nt, Artificial Sequence
  GATA2 Guide RNA
cgacguccauccaccccucc

SEQ ID NO: 2660 - RNA, 20 nt, Artificial Sequence
  GATA2 Guide RNA
cguccauccaccccuccucc

SEQ ID NO: 2661 - RNA, 20 nt, Artificial Sequence
  GATA2 Guide RNA
cuccgacguccauccacccc

SEQ ID NO: 2662 - RNA, 20 nt, Artificial Sequence
  GATA2 Guide RNA
cugcccacuccgacguccau

SEQ ID NO: 2663 - RNA, 20 nt, Artificial Sequence
  GATA2 Guide RNA
cuggaggagggguggaugga

SEQ ID NO: 2664 - RNA, 20 nt, Artificial Sequence
  GATA2 Guide RNA
gacacauccugcccacuccg

SEQ ID NO: 2665 - RNA, 20 nt, Artificial Sequence
  GATA2 Guide RNA
gacguccauccaccccuccu

SEQ ID NO: 2666 - RNA, 20 nt, Artificial Sequence
  GATA2 Guide RNA
gacgucggagugggcaggau

SEQ ID NO: 2667 - RNA, 20 nt, Artificial Sequence
  GATA2 Guide RNA
gaggagggguggauggacgu

SEQ ID NO: 2668 - RNA, 20 nt, Artificial Sequence
  GATA2 Guide RNA
gagggguggauggacgucgg

SEQ ID NO: 2669 - RNA, 20 nt, Artificial Sequence
  GATA2 Guide RNA
gauggacgucggagugggca

SEQ ID NO: 2670 - RNA, 20 nt, Artificial Sequence
  GATA2 Guide RNA
gcccacuccgacguccaucc

SEQ ID NO: 2671 - RNA, 20 nt, Artificial Sequence
  GATA2 Guide RNA
gcuggaggagggguggaugg

SEQ ID NO: 2672 - RNA, 20 nt, Artificial Sequence
  GATA2 Guide RNA
ggacgucggagugggcagga

SEQ ID NO: 2673 - RNA, 20 nt, Artificial Sequence
  GATA2 Guide RNA
ggaggagggguggauggacg

SEQ ID NO: 2674 - RNA, 20 nt, Artificial Sequence
  GATA2 Guide RNA
ggagggguggauggacgucg

SEQ ID NO: 2675 - RNA, 20 nt, Artificial Sequence
  GATA2 Guide RNA
ggauggacgucggagugggc

SEQ ID NO: 2676 - RNA, 20 nt, Artificial Sequence
  GATA2 Guide RNA
ggcuggaggagggguggaug

SEQ ID NO: 2677 - RNA, 20 nt, Artificial Sequence
  GATA2 Guide RNA
gggguggauggacgucggag

SEQ ID NO: 2678 - RNA, 20 nt, Artificial Sequence
  GATA2 Guide RNA
ggguggauggacgucggagu

SEQ ID NO: 2679 - RNA, 20 nt, Artificial Sequence
  GATA2 Guide RNA
gguggauggacgucggagug

SEQ ID NO: 2680 - RNA, 20 nt, Artificial Sequence
  GATA2 Guide RNA
guccauccaccccuccucca

SEQ ID NO: 2681 - RNA, 20 nt, Artificial Sequence
  GATA2 Guide RNA
guggauggacgucggagugg

SEQ ID NO: 2682 - RNA, 20 nt, Artificial Sequence
  GATA2 Guide RNA
uccgacguccauccaccccu

SEQ ID NO: 2683 - RNA, 20 nt, Artificial Sequence
  GATA2 Guide RNA
uccugcccacuccgacgucc

SEQ ID NO: 2684 - RNA, 20 nt, Artificial Sequence
  GATA2 Guide RNA
ugcccacuccgacguccauc

SEQ ID NO: 2685 - RNA, 20 nt, Artificial Sequence
  GATA2 Guide RNA
uggacgucggagugggcagg

SEQ ID NO: 2686 - RNA, 20 nt, Artificial Sequence
  GATA2 Guide RNA
uggaggagggguggauggac

SEQ ID NO: 2687 - RNA, 20 nt, Artificial Sequence
  GATA2 Guide RNA
uggauggacgucggaguggg

SEQ ID NO: 2688 - RNA, 21 nt, Artificial Sequence
  GATA2 Guide RNA
acacauccugcccacuccgac

SEQ ID NO: 2689 - RNA, 21 nt, Artificial Sequence
  GATA2 Guide RNA
acauccugcccacuccgacgu

SEQ ID NO: 2690 - RNA, 21 nt, Artificial Sequence
  GATA2 Guide RNA
acguccauccaccccuccucc

SEQ ID NO: 2691 - RNA, 21 nt, Artificial Sequence
  GATA2 Guide RNA
acgucggagugggcaggaugu

SEQ ID NO: 2692 - RNA, 21 nt, Artificial Sequence
  GATA2 Guide RNA
acuccgacguccauccacccc

SEQ ID NO: 2693 - RNA, 21 nt, Artificial Sequence
  GATA2 Guide RNA
aggagggguggauggacgucg

SEQ ID NO: 2694 - RNA, 21 nt, Artificial Sequence
  GATA2 Guide RNA
aggcuggaggagggguggaug

SEQ ID NO: 2695 - RNA, 21 nt, Artificial Sequence
  GATA2 Guide RNA
agggguggauggacgucggag

SEQ ID NO: 2696 - RNA, 21 nt, Artificial Sequence
  GATA2 Guide RNA
auccugcccacuccgacgucc

SEQ ID NO: 2697 - RNA, 21 nt, Artificial Sequence
  GATA2 Guide RNA
auggacgucggagugggcagg

SEQ ID NO: 2698 - RNA, 21 nt, Artificial Sequence
  GATA2 Guide RNA
cacauccugcccacuccgacg

SEQ ID NO: 2699 - RNA, 21 nt, Artificial Sequence
  GATA2 Guide RNA
cacuccgacguccauccaccc

SEQ ID NO: 2700 - RNA, 21 nt, Artificial Sequence
  GATA2 Guide RNA
cauccugcccacuccgacguc

SEQ ID NO: 2701 - RNA, 21 nt, Artificial Sequence
  GATA2 Guide RNA
ccacuccgacguccauccacc

SEQ ID NO: 2702 - RNA, 21 nt, Artificial Sequence
  GATA2 Guide RNA
cccacuccgacguccauccac

SEQ ID NO: 2703 - RNA, 21 nt, Artificial Sequence
  GATA2 Guide RNA
ccgacguccauccaccccucc

SEQ ID NO: 2704 - RNA, 21 nt, Artificial Sequence
  GATA2 Guide RNA
ccugcccacuccgacguccau

SEQ ID NO: 2705 - RNA, 21 nt, Artificial Sequence
  GATA2 Guide RNA
cgacguccauccaccccuccu

SEQ ID NO: 2706 - RNA, 21 nt, Artificial Sequence
  GATA2 Guide RNA
cguccauccaccccuccucca

SEQ ID NO: 2707 - RNA, 21 nt, Artificial Sequence
  GATA2 Guide RNA
cuccgacguccauccaccccu

SEQ ID NO: 2708 - RNA, 21 nt, Artificial Sequence
  GATA2 Guide RNA
cugcccacuccgacguccauc

SEQ ID NO: 2709 - RNA, 21 nt, Artificial Sequence
  GATA2 Guide RNA
cuggaggagggguggauggac

SEQ ID NO: 2710 - RNA, 21 nt, Artificial Sequence
  GATA2 Guide RNA
gacacauccugcccacuccga

SEQ ID NO: 2711 - RNA, 21 nt, Artificial Sequence
  GATA2 Guide RNA
gacguccauccaccccuccuc

SEQ ID NO: 2712 - RNA, 21 nt, Artificial Sequence
  GATA2 Guide RNA
gacgucggagugggcaggaug

SEQ ID NO: 2713 - RNA, 21 nt, Artificial Sequence
  GATA2 Guide RNA
gaggagggguggauggacguc

SEQ ID NO: 2714 - RNA, 21 nt, Artificial Sequence
  GATA2 Guide RNA
gaggcuggaggagggguggau

SEQ ID NO: 2715 - RNA, 21 nt, Artificial Sequence
  GATA2 Guide RNA
gagggguggauggacgucgga

SEQ ID NO: 2716 - RNA, 21 nt, Artificial Sequence
  GATA2 Guide RNA
gauggacgucggagugggcag

SEQ ID NO: 2717 - RNA, 21 nt, Artificial Sequence
  GATA2 Guide RNA
gcccacuccgacguccaucca

SEQ ID NO: 2718 - RNA, 21 nt, Artificial Sequence
  GATA2 Guide RNA
gcuggaggagggguggaugga

SEQ ID NO: 2719 - RNA, 21 nt, Artificial Sequence
  GATA2 Guide RNA
ggacacauccugcccacuccg

SEQ ID NO: 2720 - RNA, 21 nt, Artificial Sequence
  GATA2 Guide RNA
ggacgucggagugggcaggau

SEQ ID NO: 2721 - RNA, 21 nt, Artificial Sequence
  GATA2 Guide RNA
ggaggagggguggauggacgu

SEQ ID NO: 2722 - RNA, 21 nt, Artificial Sequence
  GATA2 Guide RNA
ggagggguggauggacgucgg

SEQ ID NO: 2723 - RNA, 21 nt, Artificial Sequence
  GATA2 Guide RNA
ggauggacgucggagugggca

SEQ ID NO: 2724 - RNA, 21 nt, Artificial Sequence
  GATA2 Guide RNA
ggcuggaggagggguggaugg

SEQ ID NO: 2725 - RNA, 21 nt, Artificial Sequence
  GATA2 Guide RNA
gggguggauggacgucggagu

SEQ ID NO: 2726 - RNA, 21 nt, Artificial Sequence
  GATA2 Guide RNA
ggguggauggacgucggagug

SEQ ID NO: 2727 - RNA, 21 nt, Artificial Sequence
  GATA2 Guide RNA
gguggauggacgucggagugg

SEQ ID NO: 2728 - RNA, 21 nt, Artificial Sequence
  GATA2 Guide RNA
guccauccaccccuccuccag

SEQ ID NO: 2729 - RNA, 21 nt, Artificial Sequence
  GATA2 Guide RNA
guggauggacgucggaguggg

SEQ ID NO: 2730 - RNA, 21 nt, Artificial Sequence
  GATA2 Guide RNA
uccgacguccauccaccccuc

SEQ ID NO: 2731 - RNA, 21 nt, Artificial Sequence
  GATA2 Guide RNA
uccugcccacuccgacgucca

SEQ ID NO: 2732 - RNA, 21 nt, Artificial Sequence
  GATA2 Guide RNA
ugcccacuccgacguccaucc

SEQ ID NO: 2733 - RNA, 21 nt, Artificial Sequence
  GATA2 Guide RNA
uggacgucggagugggcagga

SEQ ID NO: 2734 - RNA, 21 nt, Artificial Sequence
  GATA2 Guide RNA
uggaggagggguggauggacg

SEQ ID NO: 2735 - RNA, 21 nt, Artificial Sequence
  GATA2 Guide RNA
uggauggacgucggagugggc

SEQ ID NO: 2736 - RNA, 22 nt, Artificial Sequence
  GATA2 Guide RNA
acacauccugcccacuccgacg

SEQ ID NO: 2737 - RNA, 22 nt, Artificial Sequence
  GATA2 Guide RNA
acauccugcccacuccgacguc

SEQ ID NO: 2738 - RNA, 22 nt, Artificial Sequence
  GATA2 Guide RNA
acguccauccaccccuccucca

SEQ ID NO: 2739 - RNA, 22 nt, Artificial Sequence
  GATA2 Guide RNA
acgucggagugggcaggaugug

SEQ ID NO: 2740 - RNA, 22 nt, Artificial Sequence
  GATA2 Guide RNA
acuccgacguccauccaccccu

SEQ ID NO: 2741 - RNA, 22 nt, Artificial Sequence
  GATA2 Guide RNA
agaggcuggaggagggguggau

SEQ ID NO: 2742 - RNA, 22 nt, Artificial Sequence
  GATA2 Guide RNA
aggagggguggauggacgucgg

SEQ ID NO: 2743 - RNA, 22 nt, Artificial Sequence
  GATA2 Guide RNA
aggcuggaggagggguggaugg

SEQ ID NO: 2744 - RNA, 22 nt, Artificial Sequence
  GATA2 Guide RNA
agggguggauggacgucggagu

SEQ ID NO: 2745 - RNA, 22 nt, Artificial Sequence
  GATA2 Guide RNA
auccugcccacuccgacgucca

SEQ ID NO: 2746 - RNA, 22 nt, Artificial Sequence
  GATA2 Guide RNA
auggacgucggagugggcagga

SEQ ID NO: 2747 - RNA, 22 nt, Artificial Sequence
  GATA2 Guide RNA
cacauccugcccacuccgacgu

SEQ ID NO: 2748 - RNA, 22 nt, Artificial Sequence
  GATA2 Guide RNA
cacuccgacguccauccacccc

SEQ ID NO: 2749 - RNA, 22 nt, Artificial Sequence
  GATA2 Guide RNA
cauccugcccacuccgacgucc

SEQ ID NO: 2750 - RNA, 22 nt, Artificial Sequence
  GATA2 Guide RNA
ccacuccgacguccauccaccc

SEQ ID NO: 2751 - RNA, 22 nt, Artificial Sequence
  GATA2 Guide RNA
cccacuccgacguccauccacc

SEQ ID NO: 2752 - RNA, 22 nt, Artificial Sequence
  GATA2 Guide RNA
ccgacguccauccaccccuccu

SEQ ID NO: 2753 - RNA, 22 nt, Artificial Sequence
  GATA2 Guide RNA
ccugcccacuccgacguccauc

SEQ ID NO: 2754 - RNA, 22 nt, Artificial Sequence
  GATA2 Guide RNA
cgacguccauccaccccuccuc

SEQ ID NO: 2755 - RNA, 22 nt, Artificial Sequence
  GATA2 Guide RNA
cggacacauccugcccacuccg

SEQ ID NO: 2756 - RNA, 22 nt, Artificial Sequence
  GATA2 Guide RNA
cguccauccaccccuccuccag

SEQ ID NO: 2757 - RNA, 22 nt, Artificial Sequence
  GATA2 Guide RNA
cuccgacguccauccaccccuc

SEQ ID NO: 2758 - RNA, 22 nt, Artificial Sequence
  GATA2 Guide RNA
cugcccacuccgacguccaucc

SEQ ID NO: 2759 - RNA, 22 nt, Artificial Sequence
  GATA2 Guide RNA
cuggaggagggguggauggacg

SEQ ID NO: 2760 - RNA, 22 nt, Artificial Sequence
  GATA2 Guide RNA
gacacauccugcccacuccgac

SEQ ID NO: 2761 - RNA, 22 nt, Artificial Sequence
  GATA2 Guide RNA
gacguccauccaccccuccucc

SEQ ID NO: 2762 - RNA, 22 nt, Artificial Sequence
  GATA2 Guide RNA
gacgucggagugggcaggaugu

SEQ ID NO: 2763 - RNA, 22 nt, Artificial Sequence
  GATA2 Guide RNA
gaggagggguggauggacgucg

SEQ ID NO: 2764 - RNA, 22 nt, Artificial Sequence
  GATA2 Guide RNA
gaggcuggaggagggguggaug

SEQ ID NO: 2765 - RNA, 22 nt, Artificial Sequence
  GATA2 Guide RNA
gagggguggauggacgucggag

SEQ ID NO: 2766 - RNA, 22 nt, Artificial Sequence
  GATA2 Guide RNA
gauggacgucggagugggcagg

SEQ ID NO: 2767 - RNA, 22 nt, Artificial Sequence
  GATA2 Guide RNA
gcccacuccgacguccauccac

SEQ ID NO: 2768 - RNA, 22 nt, Artificial Sequence
  GATA2 Guide RNA
gcuggaggagggguggauggac

SEQ ID NO: 2769 - RNA, 22 nt, Artificial Sequence
  GATA2 Guide RNA
ggacacauccugcccacuccga

SEQ ID NO: 2770 - RNA, 22 nt, Artificial Sequence
  GATA2 Guide RNA
ggacgucggagugggcaggaug

SEQ ID NO: 2771 - RNA, 22 nt, Artificial Sequence
  GATA2 Guide RNA
ggaggagggguggauggacguc

SEQ ID NO: 2772 - RNA, 22 nt, Artificial Sequence
  GATA2 Guide RNA
ggagggguggauggacgucgga

SEQ ID NO: 2773 - RNA, 22 nt, Artificial Sequence
  GATA2 Guide RNA
ggauggacgucggagugggcag

SEQ ID NO: 2774 - RNA, 22 nt, Artificial Sequence
  GATA2 Guide RNA
ggcuggaggagggguggaugga

SEQ ID NO: 2775 - RNA, 22 nt, Artificial Sequence
  GATA2 Guide RNA
gggguggauggacgucggagug

SEQ ID NO: 2776 - RNA, 22 nt, Artificial Sequence
  GATA2 Guide RNA
ggguggauggacgucggagugg

SEQ ID NO: 2777 - RNA, 22 nt, Artificial Sequence
  GATA2 Guide RNA
gguggauggacgucggaguggg

SEQ ID NO: 2778 - RNA, 22 nt, Artificial Sequence
  GATA2 Guide RNA
guccauccaccccuccuccagc

SEQ ID NO: 2779 - RNA, 22 nt, Artificial Sequence
  GATA2 Guide RNA
guggauggacgucggagugggc

SEQ ID NO: 2780 - RNA, 22 nt, Artificial Sequence
  GATA2 Guide RNA
uccgacguccauccaccccucc

SEQ ID NO: 2781 - RNA, 22 nt, Artificial Sequence
  GATA2 Guide RNA
uccugcccacuccgacguccau

SEQ ID NO: 2782 - RNA, 22 nt, Artificial Sequence
  GATA2 Guide RNA
ugcccacuccgacguccaucca

SEQ ID NO: 2783 - RNA, 22 nt, Artificial Sequence
  GATA2 Guide RNA
uggacgucggagugggcaggau

SEQ ID NO: 2784 - RNA, 22 nt, Artificial Sequence
  GATA2 Guide RNA
uggaggagggguggauggacgu

SEQ ID NO: 2785 - RNA, 22 nt, Artificial Sequence
  GATA2 Guide RNA
uggauggacgucggagugggca

SEQ ID NO: 2786 - RNA, 20 nt, Artificial Sequence
  GATA2 Guide RNA
acauccugcccacuccgaug

SEQ ID NO: 2787 - RNA, 20 nt, Artificial Sequence
  GATA2 Guide RNA
acuccgaugcccauccaccc

SEQ ID NO: 2788 - RNA, 20 nt, Artificial Sequence
  GATA2 Guide RNA
aggagggguggaugggcauc

SEQ ID NO: 2789 - RNA, 20 nt, Artificial Sequence
  GATA2 Guide RNA
agggguggaugggcaucgga

SEQ ID NO: 2790 - RNA, 20 nt, Artificial Sequence
  GATA2 Guide RNA
auccugcccacuccgaugcc

SEQ ID NO: 2791 - RNA, 20 nt, Artificial Sequence
  GATA2 Guide RNA
aucggagugggcaggaugug

SEQ ID NO: 2792 - RNA, 20 nt, Artificial Sequence
  GATA2 Guide RNA
augcccauccaccccuccuc

SEQ ID NO: 2793 - RNA, 20 nt, Artificial Sequence
  GATA2 Guide RNA
augggcaucggagugggcag

SEQ ID NO: 2794 - RNA, 20 nt, Artificial Sequence
  GATA2 Guide RNA
cacauccugcccacuccgau

SEQ ID NO: 2795 - RNA, 20 nt, Artificial Sequence
  GATA2 Guide RNA
cacuccgaugcccauccacc

SEQ ID NO: 2796 - RNA, 20 nt, Artificial Sequence
  GATA2 Guide RNA
cauccugcccacuccgaugc

SEQ ID NO: 2797 - RNA, 20 nt, Artificial Sequence
  GATA2 Guide RNA
caucggagugggcaggaugu

SEQ ID NO: 2798 - RNA, 20 nt, Artificial Sequence
  GATA2 Guide RNA
ccacuccgaugcccauccac

SEQ ID NO: 2799 - RNA, 20 nt, Artificial Sequence
  GATA2 Guide RNA
cccacuccgaugcccaucca

SEQ ID NO: 2800 - RNA, 20 nt, Artificial Sequence
  GATA2 Guide RNA
ccgaugcccauccaccccuc

SEQ ID NO: 2801 - RNA, 20 nt, Artificial Sequence
  GATA2 Guide RNA
ccugcccacuccgaugccca

SEQ ID NO: 2802 - RNA, 20 nt, Artificial Sequence
  GATA2 Guide RNA
cgaugcccauccaccccucc

SEQ ID NO: 2803 - RNA, 20 nt, Artificial Sequence
  GATA2 Guide RNA
cggacacauccugcccacuc

SEQ ID NO: 2804 - RNA, 20 nt, Artificial Sequence
  GATA2 Guide RNA
cuccgaugcccauccacccc

SEQ ID NO: 2805 - RNA, 20 nt, Artificial Sequence
  GATA2 Guide RNA
cugcccacuccgaugcccau

SEQ ID NO: 2806 - RNA, 20 nt, Artificial Sequence
  GATA2 Guide RNA
cuggaggagggguggauggg

SEQ ID NO: 2807 - RNA, 20 nt, Artificial Sequence
  GATA2 Guide RNA
gaggagggguggaugggcau

SEQ ID NO: 2808 - RNA, 20 nt, Artificial Sequence
  GATA2 Guide RNA
gagggguggaugggcaucgg

SEQ ID NO: 2809 - RNA, 20 nt, Artificial Sequence
  GATA2 Guide RNA
gaugcccauccaccccuccu

SEQ ID NO: 2810 - RNA, 20 nt, Artificial Sequence
  GATA2 Guide RNA
gaugggcaucggagugggca

SEQ ID NO: 2811 - RNA, 20 nt, Artificial Sequence
  GATA2 Guide RNA
gcaucggagugggcaggaug

SEQ ID NO: 2812 - RNA, 20 nt, Artificial Sequence
  GATA2 Guide RNA
gcccacuccgaugcccaucc

SEQ ID NO: 2813 - RNA, 20 nt, Artificial Sequence
  GATA2 Guide RNA
ggacacauccugcccacucc

SEQ ID NO: 2814 - RNA, 20 nt, Artificial Sequence
  GATA2 Guide RNA
ggaggagggguggaugggca

SEQ ID NO: 2815 - RNA, 20 nt, Artificial Sequence
  GATA2 Guide RNA
ggagggguggaugggcaucg

SEQ ID NO: 2816 - RNA, 20 nt, Artificial Sequence
  GATA2 Guide RNA
ggaugggcaucggagugggc

SEQ ID NO: 2817 - RNA, 20 nt, Artificial Sequence
  GATA2 Guide RNA
ggcaucggagugggcaggau

SEQ ID NO: 2818 - RNA, 20 nt, Artificial Sequence
  GATA2 Guide RNA
gggcaucggagugggcagga

SEQ ID NO: 2819 - RNA, 20 nt, Artificial Sequence
  GATA2 Guide RNA
gggguggaugggcaucggag

SEQ ID NO: 2820 - RNA, 20 nt, Artificial Sequence
  GATA2 Guide RNA
ggguggaugggcaucggagu

SEQ ID NO: 2821 - RNA, 20 nt, Artificial Sequence
  GATA2 Guide RNA
gguggaugggcaucggagug

SEQ ID NO: 2822 - RNA, 20 nt, Artificial Sequence
  GATA2 Guide RNA
guggaugggcaucggagugg

SEQ ID NO: 2823 - RNA, 20 nt, Artificial Sequence
  GATA2 Guide RNA
uccgaugcccauccaccccu

SEQ ID NO: 2824 - RNA, 20 nt, Artificial Sequence
  GATA2 Guide RNA
uccugcccacuccgaugccc

SEQ ID NO: 2825 - RNA, 20 nt, Artificial Sequence
  GATA2 Guide RNA
ugcccacuccgaugcccauc

SEQ ID NO: 2826 - RNA, 20 nt, Artificial Sequence
  GATA2 Guide RNA
uggaggagggguggaugggc

SEQ ID NO: 2827 - RNA, 20 nt, Artificial Sequence
  GATA2 Guide RNA
uggaugggcaucggaguggg

SEQ ID NO: 2828 - RNA, 20 nt, Artificial Sequence
  GATA2 Guide RNA
ugggcaucggagugggcagg

SEQ ID NO: 2829 - RNA, 21 nt, Artificial Sequence
  GATA2 Guide RNA
acacauccugcccacuccgau

SEQ ID NO: 2830 - RNA, 21 nt, Artificial Sequence
  GATA2 Guide RNA
acauccugcccacuccgaugc

SEQ ID NO: 2831 - RNA, 21 nt, Artificial Sequence
  GATA2 Guide RNA
acuccgaugcccauccacccc

SEQ ID NO: 2832 - RNA, 21 nt, Artificial Sequence
  GATA2 Guide RNA
aggagggguggaugggcaucg

SEQ ID NO: 2833 - RNA, 21 nt, Artificial Sequence
  GATA2 Guide RNA
agggguggaugggcaucggag

SEQ ID NO: 2834 - RNA, 21 nt, Artificial Sequence
  GATA2 Guide RNA
auccugcccacuccgaugccc

SEQ ID NO: 2835 - RNA, 21 nt, Artificial Sequence
  GATA2 Guide RNA
aucggagugggcaggaugugu

SEQ ID NO: 2836 - RNA, 21 nt, Artificial Sequence
  GATA2 Guide RNA
augcccauccaccccuccucc

SEQ ID NO: 2837 - RNA, 21 nt, Artificial Sequence
  GATA2 Guide RNA
augggcaucggagugggcagg

SEQ ID NO: 2838 - RNA, 21 nt, Artificial Sequence
  GATA2 Guide RNA
cacauccugcccacuccgaug

SEQ ID NO: 2839 - RNA, 21 nt, Artificial Sequence
  GATA2 Guide RNA
cacuccgaugcccauccaccc

SEQ ID NO: 2840 - RNA, 21 nt, Artificial Sequence
  GATA2 Guide RNA
cauccugcccacuccgaugcc

SEQ ID NO: 2841 - RNA, 21 nt, Artificial Sequence
  GATA2 Guide RNA
caucggagugggcaggaugug

SEQ ID NO: 2842 - RNA, 21 nt, Artificial Sequence
  GATA2 Guide RNA
ccacuccgaugcccauccacc

SEQ ID NO: 2843 - RNA, 21 nt, Artificial Sequence
  GATA2 Guide RNA
cccacuccgaugcccauccac

SEQ ID NO: 2844 - RNA, 21 nt, Artificial Sequence
  GATA2 Guide RNA
ccgaugcccauccaccccucc

SEQ ID NO: 2845 - RNA, 21 nt, Artificial Sequence
  GATA2 Guide RNA
ccggacacauccugcccacuc

SEQ ID NO: 2846 - RNA, 21 nt, Artificial Sequence
  GATA2 Guide RNA
ccugcccacuccgaugcccau

SEQ ID NO: 2847 - RNA, 21 nt, Artificial Sequence
  GATA2 Guide RNA
cgaugcccauccaccccuccu

SEQ ID NO: 2848 - RNA, 21 nt, Artificial Sequence
  GATA2 Guide RNA
cggacacauccugcccacucc

SEQ ID NO: 2849 - RNA, 21 nt, Artificial Sequence
  GATA2 Guide RNA
cuccgaugcccauccaccccu

SEQ ID NO: 2850 - RNA, 21 nt, Artificial Sequence
  GATA2 Guide RNA
cugcccacuccgaugcccauc

SEQ ID NO: 2851 - RNA, 21 nt, Artificial Sequence
  GATA2 Guide RNA
cuggaggagggguggaugggc

SEQ ID NO: 2852 - RNA, 21 nt, Artificial Sequence
  GATA2 Guide RNA
gaggagggguggaugggcauc

SEQ ID NO: 2853 - RNA, 21 nt, Artificial Sequence
  GATA2 Guide RNA
gagggguggaugggcaucgga

SEQ ID NO: 2854 - RNA, 21 nt, Artificial Sequence
  GATA2 Guide RNA
gaugcccauccaccccuccuc

SEQ ID NO: 2855 - RNA, 21 nt, Artificial Sequence
  GATA2 Guide RNA
gaugggcaucggagugggcag

SEQ ID NO: 2856 - RNA, 21 nt, Artificial Sequence
  GATA2 Guide RNA
gcaucggagugggcaggaugu

SEQ ID NO: 2857 - RNA, 21 nt, Artificial Sequence
  GATA2 Guide RNA
gcccacuccgaugcccaucca

SEQ ID NO: 2858 - RNA, 21 nt, Artificial Sequence
  GATA2 Guide RNA
gcuggaggagggguggauggg

SEQ ID NO: 2859 - RNA, 21 nt, Artificial Sequence
  GATA2 Guide RNA
ggaggagggguggaugggcau

SEQ ID NO: 2860 - RNA, 21 nt, Artificial Sequence
  GATA2 Guide RNA
ggagggguggaugggcaucgg

SEQ ID NO: 2861 - RNA, 21 nt, Artificial Sequence
  GATA2 Guide RNA
ggaugggcaucggagugggca

SEQ ID NO: 2862 - RNA, 21 nt, Artificial Sequence
  GATA2 Guide RNA
ggcaucggagugggcaggaug

SEQ ID NO: 2863 - RNA, 21 nt, Artificial Sequence
  GATA2 Guide RNA
gggcaucggagugggcaggau

SEQ ID NO: 2864 - RNA, 21 nt, Artificial Sequence
  GATA2 Guide RNA
gggguggaugggcaucggagu

SEQ ID NO: 2865 - RNA, 21 nt, Artificial Sequence
  GATA2 Guide RNA
ggguggaugggcaucggagug

SEQ ID NO: 2866 - RNA, 21 nt, Artificial Sequence
  GATA2 Guide RNA
gguggaugggcaucggagugg

SEQ ID NO: 2867 - RNA, 21 nt, Artificial Sequence
  GATA2 Guide RNA
guggaugggcaucggaguggg

SEQ ID NO: 2868 - RNA, 21 nt, Artificial Sequence
  GATA2 Guide RNA
uccgaugcccauccaccccuc

SEQ ID NO: 2869 - RNA, 21 nt, Artificial Sequence
  GATA2 Guide RNA
uccugcccacuccgaugccca

SEQ ID NO: 2870 - RNA, 21 nt, Artificial Sequence
  GATA2 Guide RNA
ugcccacuccgaugcccaucc

SEQ ID NO: 2871 - RNA, 21 nt, Artificial Sequence
  GATA2 Guide RNA
uggaggagggguggaugggca

SEQ ID NO: 2872 - RNA, 21 nt, Artificial Sequence
  GATA2 Guide RNA
uggaugggcaucggagugggc

SEQ ID NO: 2873 - RNA, 21 nt, Artificial Sequence
  GATA2 Guide RNA
ugggcaucggagugggcagga

SEQ ID NO: 2874 - RNA, 22 nt, Artificial Sequence
  GATA2 Guide RNA
acacauccugcccacuccgaug

SEQ ID NO: 2875 - RNA, 22 nt, Artificial Sequence
  GATA2 Guide RNA
acauccugcccacuccgaugcc

SEQ ID NO: 2876 - RNA, 22 nt, Artificial Sequence
  GATA2 Guide RNA
acuccgaugcccauccaccccu

SEQ ID NO: 2877 - RNA, 22 nt, Artificial Sequence
  GATA2 Guide RNA
aggagggguggaugggcaucgg

SEQ ID NO: 2878 - RNA, 22 nt, Artificial Sequence
  GATA2 Guide RNA
agggguggaugggcaucggagu

SEQ ID NO: 2879 - RNA, 22 nt, Artificial Sequence
  GATA2 Guide RNA
auccugcccacuccgaugccca

SEQ ID NO: 2880 - RNA, 22 nt, Artificial Sequence
  GATA2 Guide RNA
aucggagugggcaggauguguc

SEQ ID NO: 2881 - RNA, 22 nt, Artificial Sequence
  GATA2 Guide RNA
augcccauccaccccuccucca

SEQ ID NO: 2882 - RNA, 22 nt, Artificial Sequence
  GATA2 Guide RNA
augggcaucggagugggcagga

SEQ ID NO: 2883 - RNA, 22 nt, Artificial Sequence
  GATA2 Guide RNA
cacauccugcccacuccgaugc

SEQ ID NO: 2884 - RNA, 22 nt, Artificial Sequence
  GATA2 Guide RNA
cacuccgaugcccauccacccc

SEQ ID NO: 2885 - RNA, 22 nt, Artificial Sequence
  GATA2 Guide RNA
cauccugcccacuccgaugccc

SEQ ID NO: 2886 - RNA, 22 nt, Artificial Sequence
  GATA2 Guide RNA
caucggagugggcaggaugugu

SEQ ID NO: 2887 - RNA, 22 nt, Artificial Sequence
  GATA2 Guide RNA
ccacuccgaugcccauccaccc

SEQ ID NO: 2888 - RNA, 22 nt, Artificial Sequence
  GATA2 Guide RNA
cccacuccgaugcccauccacc

SEQ ID NO: 2889 - RNA, 22 nt, Artificial Sequence
  GATA2 Guide RNA
ccgaugcccauccaccccuccu

SEQ ID NO: 2890 - RNA, 22 nt, Artificial Sequence
  GATA2 Guide RNA
ccggacacauccugcccacucc

SEQ ID NO: 2891 - RNA, 22 nt, Artificial Sequence
  GATA2 Guide RNA
ccugcccacuccgaugcccauc

SEQ ID NO: 2892 - RNA, 22 nt, Artificial Sequence
  GATA2 Guide RNA
cgaugcccauccaccccuccuc

SEQ ID NO: 2893 - RNA, 22 nt, Artificial Sequence
  GATA2 Guide RNA
cuccgaugcccauccaccccuc

SEQ ID NO: 2894 - RNA, 22 nt, Artificial Sequence
  GATA2 Guide RNA
cugcccacuccgaugcccaucc

SEQ ID NO: 2895 - RNA, 22 nt, Artificial Sequence
  GATA2 Guide RNA
cuggaggagggguggaugggca

SEQ ID NO: 2896 - RNA, 22 nt, Artificial Sequence
  GATA2 Guide RNA
gacacauccugcccacuccgau

SEQ ID NO: 2897 - RNA, 22 nt, Artificial Sequence
  GATA2 Guide RNA
gaggagggguggaugggcaucg

SEQ ID NO: 2898 - RNA, 22 nt, Artificial Sequence
  GATA2 Guide RNA
gagggguggaugggcaucggag

SEQ ID NO: 2899 - RNA, 22 nt, Artificial Sequence
  GATA2 Guide RNA
gaugcccauccaccccuccucc

SEQ ID NO: 2900 - RNA, 22 nt, Artificial Sequence
  GATA2 Guide RNA
gaugggcaucggagugggcagg

SEQ ID NO: 2901 - RNA, 22 nt, Artificial Sequence
  GATA2 Guide RNA
gcaucggagugggcaggaugug

SEQ ID NO: 2902 - RNA, 22 nt, Artificial Sequence
  GATA2 Guide RNA
gcccacuccgaugcccauccac

SEQ ID NO: 2903 - RNA, 22 nt, Artificial Sequence
  GATA2 Guide RNA
gcuggaggagggguggaugggc

SEQ ID NO: 2904 - RNA, 22 nt, Artificial Sequence
  GATA2 Guide RNA
ggaggagggguggaugggcauc

SEQ ID NO: 2905 - RNA, 22 nt, Artificial Sequence
  GATA2 Guide RNA
ggagggguggaugggcaucgga

SEQ ID NO: 2906 - RNA, 22 nt, Artificial Sequence
  GATA2 Guide RNA
ggaugggcaucggagugggcag

SEQ ID NO: 2907 - RNA, 22 nt, Artificial Sequence
  GATA2 Guide RNA
ggcaucggagugggcaggaugu

SEQ ID NO: 2908 - RNA, 22 nt, Artificial Sequence
  GATA2 Guide RNA
ggcuggaggagggguggauggg

SEQ ID NO: 2909 - RNA, 22 nt, Artificial Sequence
  GATA2 Guide RNA
gggcaucggagugggcaggaug

SEQ ID NO: 2910 - RNA, 22 nt, Artificial Sequence
  GATA2 Guide RNA
gggguggaugggcaucggagug

SEQ ID NO: 2911 - RNA, 22 nt, Artificial Sequence
  GATA2 Guide RNA
ggguggaugggcaucggagugg

SEQ ID NO: 2912 - RNA, 22 nt, Artificial Sequence
  GATA2 Guide RNA
gguggaugggcaucggaguggg

SEQ ID NO: 2913 - RNA, 22 nt, Artificial Sequence
  GATA2 Guide RNA
guggaugggcaucggagugggc

SEQ ID NO: 2914 - RNA, 22 nt, Artificial Sequence
  GATA2 Guide RNA
uccgaugcccauccaccccucc

SEQ ID NO: 2915 - RNA, 22 nt, Artificial Sequence
  GATA2 Guide RNA
uccggacacauccugcccacuc

SEQ ID NO: 2916 - RNA, 22 nt, Artificial Sequence
  GATA2 Guide RNA
uccugcccacuccgaugcccau

SEQ ID NO: 2917 - RNA, 22 nt, Artificial Sequence
  GATA2 Guide RNA
ugcccacuccgaugcccaucca

SEQ ID NO: 2918 - RNA, 22 nt, Artificial Sequence
  GATA2 Guide RNA
uggaggagggguggaugggcau

SEQ ID NO: 2919 - RNA, 22 nt, Artificial Sequence
  GATA2 Guide RNA
uggaugggcaucggagugggca

SEQ ID NO: 2920 - RNA, 22 nt, Artificial Sequence
  GATA2 Guide RNA
ugggcaucggagugggcaggau

SEQ ID NO: 2921 - RNA, 20 nt, Artificial Sequence
  GATA2 Guide RNA
acacauccugcccacucuga

SEQ ID NO: 2922 - RNA, 20 nt, Artificial Sequence
  GATA2 Guide RNA
acauccugcccacucugacg

SEQ ID NO: 2923 - RNA, 20 nt, Artificial Sequence
  GATA2 Guide RNA
acucugacgcccauccaccc

SEQ ID NO: 2924 - RNA, 20 nt, Artificial Sequence
  GATA2 Guide RNA
agagugggcaggaugugucc

SEQ ID NO: 2925 - RNA, 20 nt, Artificial Sequence
  GATA2 Guide RNA
aggagggguggaugggcguc

SEQ ID NO: 2926 - RNA, 20 nt, Artificial Sequence
  GATA2 Guide RNA
agggguggaugggcgucaga

SEQ ID NO: 2927 - RNA, 20 nt, Artificial Sequence
  GATA2 Guide RNA
auccugcccacucugacgcc

SEQ ID NO: 2928 - RNA, 20 nt, Artificial Sequence
  GATA2 Guide RNA
augggcgucagagugggcag

SEQ ID NO: 2929 - RNA, 20 nt, Artificial Sequence
  GATA2 Guide RNA
cacauccugcccacucugac

SEQ ID NO: 2930 - RNA, 20 nt, Artificial Sequence
  GATA2 Guide RNA
cacucugacgcccauccacc

SEQ ID NO: 2931 - RNA, 20 nt, Artificial Sequence
  GATA2 Guide RNA
cagagugggcaggauguguc

SEQ ID NO: 2932 - RNA, 20 nt, Artificial Sequence
  GATA2 Guide RNA
cauccugcccacucugacgc

SEQ ID NO: 2933 - RNA, 20 nt, Artificial Sequence
  GATA2 Guide RNA
ccacucugacgcccauccac

SEQ ID NO: 2934 - RNA, 20 nt, Artificial Sequence
  GATA2 Guide RNA
cccacucugacgcccaucca

SEQ ID NO: 2935 - RNA, 20 nt, Artificial Sequence
  GATA2 Guide RNA
ccggacacauccugcccacu

SEQ ID NO: 2936 - RNA, 20 nt, Artificial Sequence
  GATA2 Guide RNA
ccugcccacucugacgccca

SEQ ID NO: 2937 - RNA, 20 nt, Artificial Sequence
  GATA2 Guide RNA
cgucagagugggcaggaugu

SEQ ID NO: 2938 - RNA, 20 nt, Artificial Sequence
  GATA2 Guide RNA
cuccggacacauccugccca

SEQ ID NO: 2939 - RNA, 20 nt, Artificial Sequence
  GATA2 Guide RNA
cucugacgcccauccacccc

SEQ ID NO: 2940 - RNA, 20 nt, Artificial Sequence
  GATA2 Guide RNA
cugacgcccauccaccccuc

SEQ ID NO: 2941 - RNA, 20 nt, Artificial Sequence
  GATA2 Guide RNA
cugcccacucugacgcccau

SEQ ID NO: 2942 - RNA, 20 nt, Artificial Sequence
  GATA2 Guide RNA
gacacauccugcccacucug

SEQ ID NO: 2943 - RNA, 20 nt, Artificial Sequence
  GATA2 Guide RNA
gaggagggguggaugggcgu

SEQ ID NO: 2944 - RNA, 20 nt, Artificial Sequence
  GATA2 Guide RNA
gagggguggaugggcgucag

SEQ ID NO: 2945 - RNA, 20 nt, Artificial Sequence
  GATA2 Guide RNA
gaugggcgucagagugggca

SEQ ID NO: 2946 - RNA, 20 nt, Artificial Sequence
  GATA2 Guide RNA
gcccacucugacgcccaucc

SEQ ID NO: 2947 - RNA, 20 nt, Artificial Sequence
  GATA2 Guide RNA
gcgucagagugggcaggaug

SEQ ID NO: 2948 - RNA, 20 nt, Artificial Sequence
  GATA2 Guide RNA
ggacacauccugcccacucu

SEQ ID NO: 2949 - RNA, 20 nt, Artificial Sequence
  GATA2 Guide RNA
ggaggagggguggaugggcg

SEQ ID NO: 2950 - RNA, 20 nt, Artificial Sequence
  GATA2 Guide RNA
ggagggguggaugggcguca

SEQ ID NO: 2951 - RNA, 20 nt, Artificial Sequence
  GATA2 Guide RNA
ggaugggcgucagagugggc

SEQ ID NO: 2952 - RNA, 20 nt, Artificial Sequence
  GATA2 Guide RNA
ggcgucagagugggcaggau

SEQ ID NO: 2953 - RNA, 20 nt, Artificial Sequence
  GATA2 Guide RNA
gggcgucagagugggcagga

SEQ ID NO: 2954 - RNA, 20 nt, Artificial Sequence
  GATA2 Guide RNA
gggguggaugggcgucagag

SEQ ID NO: 2955 - RNA, 20 nt, Artificial Sequence
  GATA2 Guide RNA
ggguggaugggcgucagagu

SEQ ID NO: 2956 - RNA, 20 nt, Artificial Sequence
  GATA2 Guide RNA
gguggaugggcgucagagug

SEQ ID NO: 2957 - RNA, 20 nt, Artificial Sequence
  GATA2 Guide RNA
gucagagugggcaggaugug

SEQ ID NO: 2958 - RNA, 20 nt, Artificial Sequence
  GATA2 Guide RNA
guggaugggcgucagagugg

SEQ ID NO: 2959 - RNA, 20 nt, Artificial Sequence
  GATA2 Guide RNA
ucagagugggcaggaugugu

SEQ ID NO: 2960 - RNA, 20 nt, Artificial Sequence
  GATA2 Guide RNA
uccggacacauccugcccac

SEQ ID NO: 2961 - RNA, 20 nt, Artificial Sequence
  GATA2 Guide RNA
uccugcccacucugacgccc

SEQ ID NO: 2962 - RNA, 20 nt, Artificial Sequence
  GATA2 Guide RNA
ucugacgcccauccaccccu

SEQ ID NO: 2963 - RNA, 20 nt, Artificial Sequence
  GATA2 Guide RNA
ugcccacucugacgcccauc

SEQ ID NO: 2964 - RNA, 20 nt, Artificial Sequence
  GATA2 Guide RNA
uggaugggcgucagaguggg

SEQ ID NO: 2965 - RNA, 20 nt, Artificial Sequence
  GATA2 Guide RNA
ugggcgucagagugggcagg

SEQ ID NO: 2966 - RNA, 21 nt, Artificial Sequence
  GATA2 Guide RNA
acacauccugcccacucugac

SEQ ID NO: 2967 - RNA, 21 nt, Artificial Sequence
  GATA2 Guide RNA
acauccugcccacucugacgc

SEQ ID NO: 2968 - RNA, 21 nt, Artificial Sequence
  GATA2 Guide RNA
acuccggacacauccugccca

SEQ ID NO: 2969 - RNA, 21 nt, Artificial Sequence
  GATA2 Guide RNA
acucugacgcccauccacccc

SEQ ID NO: 2970 - RNA, 21 nt, Artificial Sequence
  GATA2 Guide RNA
agagugggcaggauguguccg

SEQ ID NO: 2971 - RNA, 21 nt, Artificial Sequence
  GATA2 Guide RNA
aggagggguggaugggcguca

SEQ ID NO: 2972 - RNA, 21 nt, Artificial Sequence
  GATA2 Guide RNA
agggguggaugggcgucagag

SEQ ID NO: 2973 - RNA, 21 nt, Artificial Sequence
  GATA2 Guide RNA
auccugcccacucugacgccc

SEQ ID NO: 2974 - RNA, 21 nt, Artificial Sequence
  GATA2 Guide RNA
augggcgucagagugggcagg

SEQ ID NO: 2975 - RNA, 21 nt, Artificial Sequence
  GATA2 Guide RNA
cacauccugcccacucugacg

SEQ ID NO: 2976 - RNA, 21 nt, Artificial Sequence
  GATA2 Guide RNA
cacucugacgcccauccaccc

SEQ ID NO: 2977 - RNA, 21 nt, Artificial Sequence
  GATA2 Guide RNA
cagagugggcaggaugugucc

SEQ ID NO: 2978 - RNA, 21 nt, Artificial Sequence
  GATA2 Guide RNA
cauccugcccacucugacgcc

SEQ ID NO: 2979 - RNA, 21 nt, Artificial Sequence
  GATA2 Guide RNA
ccacucugacgcccauccacc

SEQ ID NO: 2980 - RNA, 21 nt, Artificial Sequence
  GATA2 Guide RNA
cccacucugacgcccauccac

SEQ ID NO: 2981 - RNA, 21 nt, Artificial Sequence
  GATA2 Guide RNA
ccugcccacucugacgcccau

SEQ ID NO: 2982 - RNA, 21 nt, Artificial Sequence
  GATA2 Guide RNA
cggacacauccugcccacucu

SEQ ID NO: 2983 - RNA, 21 nt, Artificial Sequence
  GATA2 Guide RNA
cgucagagugggcaggaugug

SEQ ID NO: 2984 - RNA, 21 nt, Artificial Sequence
  GATA2 Guide RNA
cuccggacacauccugcccac

SEQ ID NO: 2985 - RNA, 21 nt, Artificial Sequence
  GATA2 Guide RNA
cucugacgcccauccaccccu

SEQ ID NO: 2986 - RNA, 21 nt, Artificial Sequence
  GATA2 Guide RNA
cugacgcccauccaccccucc

SEQ ID NO: 2987 - RNA, 21 nt, Artificial Sequence
  GATA2 Guide RNA
cugcccacucugacgcccauc

SEQ ID NO: 2988 - RNA, 21 nt, Artificial Sequence
  GATA2 Guide RNA
gacacauccugcccacucuga

SEQ ID NO: 2989 - RNA, 21 nt, Artificial Sequence
  GATA2 Guide RNA
gaggagggguggaugggcguc

SEQ ID NO: 2990 - RNA, 21 nt, Artificial Sequence
  GATA2 Guide RNA
gagggguggaugggcgucaga

SEQ ID NO: 2991 - RNA, 21 nt, Artificial Sequence
  GATA2 Guide RNA
gaugggcgucagagugggcag

SEQ ID NO: 2992 - RNA, 21 nt, Artificial Sequence
  GATA2 Guide RNA
gcccacucugacgcccaucca

SEQ ID NO: 2993 - RNA, 21 nt, Artificial Sequence
  GATA2 Guide RNA
gcgucagagugggcaggaugu

SEQ ID NO: 2994 - RNA, 21 nt, Artificial Sequence
  GATA2 Guide RNA
ggacacauccugcccacucug

SEQ ID NO: 2995 - RNA, 21 nt, Artificial Sequence
  GATA2 Guide RNA
ggaggagggguggaugggcgu

SEQ ID NO: 2996 - RNA, 21 nt, Artificial Sequence
  GATA2 Guide RNA
ggagggguggaugggcgucag

SEQ ID NO: 2997 - RNA, 21 nt, Artificial Sequence
  GATA2 Guide RNA
ggaugggcgucagagugggca

SEQ ID NO: 2998 - RNA, 21 nt, Artificial Sequence
  GATA2 Guide RNA
ggcgucagagugggcaggaug

SEQ ID NO: 2999 - RNA, 21 nt, Artificial Sequence
  GATA2 Guide RNA
gggcgucagagugggcaggau

SEQ ID NO: 3000 - RNA, 21 nt, Artificial Sequence
  GATA2 Guide RNA
gggguggaugggcgucagagu

SEQ ID NO: 3001 - RNA, 21 nt, Artificial Sequence
  GATA2 Guide RNA
ggguggaugggcgucagagug

SEQ ID NO: 3002 - RNA, 21 nt, Artificial Sequence
  GATA2 Guide RNA
gguggaugggcgucagagugg

SEQ ID NO: 3003 - RNA, 21 nt, Artificial Sequence
  GATA2 Guide RNA
gucagagugggcaggaugugu

SEQ ID NO: 3004 - RNA, 21 nt, Artificial Sequence
  GATA2 Guide RNA
guggaugggcgucagaguggg

SEQ ID NO: 3005 - RNA, 21 nt, Artificial Sequence
  GATA2 Guide RNA
ucagagugggcaggauguguc

SEQ ID NO: 3006 - RNA, 21 nt, Artificial Sequence
  GATA2 Guide RNA
uccggacacauccugcccacu

SEQ ID NO: 3007 - RNA, 21 nt, Artificial Sequence
  GATA2 Guide RNA
uccugcccacucugacgccca

SEQ ID NO: 3008 - RNA, 21 nt, Artificial Sequence
  GATA2 Guide RNA
ucugacgcccauccaccccuc

SEQ ID NO: 3009 - RNA, 21 nt, Artificial Sequence
  GATA2 Guide RNA
ugcccacucugacgcccaucc

SEQ ID NO: 3010 - RNA, 21 nt, Artificial Sequence
  GATA2 Guide RNA
uggaggagggguggaugggcg

SEQ ID NO: 3011 - RNA, 21 nt, Artificial Sequence
  GATA2 Guide RNA
uggaugggcgucagagugggc

SEQ ID NO: 3012 - RNA, 21 nt, Artificial Sequence
  GATA2 Guide RNA
ugggcgucagagugggcagga

SEQ ID NO: 3013 - RNA, 22 nt, Artificial Sequence
  GATA2 Guide RNA
acacauccugcccacucugacg

SEQ ID NO: 3014 - RNA, 22 nt, Artificial Sequence
  GATA2 Guide RNA
acauccugcccacucugacgcc

SEQ ID NO: 3015 - RNA, 22 nt, Artificial Sequence
  GATA2 Guide RNA
acuccggacacauccugcccac

SEQ ID NO: 3016 - RNA, 22 nt, Artificial Sequence
  GATA2 Guide RNA
acucugacgcccauccaccccu

SEQ ID NO: 3017 - RNA, 22 nt, Artificial Sequence
  GATA2 Guide RNA
agagugggcaggauguguccgg

SEQ ID NO: 3018 - RNA, 22 nt, Artificial Sequence
  GATA2 Guide RNA
aggagggguggaugggcgucag

SEQ ID NO: 3019 - RNA, 22 nt, Artificial Sequence
  GATA2 Guide RNA
agggguggaugggcgucagagu

SEQ ID NO: 3020 - RNA, 22 nt, Artificial Sequence
  GATA2 Guide RNA
auccugcccacucugacgccca

SEQ ID NO: 3021 - RNA, 22 nt, Artificial Sequence
  GATA2 Guide RNA
augggcgucagagugggcagga

SEQ ID NO: 3022 - RNA, 22 nt, Artificial Sequence
  GATA2 Guide RNA
cacauccugcccacucugacgc

SEQ ID NO: 3023 - RNA, 22 nt, Artificial Sequence
  GATA2 Guide RNA
cacuccggacacauccugccca

SEQ ID NO: 3024 - RNA, 22 nt, Artificial Sequence
  GATA2 Guide RNA
cacucugacgcccauccacccc

SEQ ID NO: 3025 - RNA, 22 nt, Artificial Sequence
  GATA2 Guide RNA
cagagugggcaggauguguccg

SEQ ID NO: 3026 - RNA, 22 nt, Artificial Sequence
  GATA2 Guide RNA
cauccugcccacucugacgccc

SEQ ID NO: 3027 - RNA, 22 nt, Artificial Sequence
  GATA2 Guide RNA
ccacucugacgcccauccaccc

SEQ ID NO: 3028 - RNA, 22 nt, Artificial Sequence
  GATA2 Guide RNA
cccacucugacgcccauccacc

SEQ ID NO: 3029 - RNA, 22 nt, Artificial Sequence
  GATA2 Guide RNA
ccggacacauccugcccacucu

SEQ ID NO: 3030 - RNA, 22 nt, Artificial Sequence
  GATA2 Guide RNA
ccugcccacucugacgcccauc

SEQ ID NO: 3031 - RNA, 22 nt, Artificial Sequence
  GATA2 Guide RNA
cggacacauccugcccacucug

SEQ ID NO: 3032 - RNA, 22 nt, Artificial Sequence
  GATA2 Guide RNA
cgucagagugggcaggaugugu

SEQ ID NO: 3033 - RNA, 22 nt, Artificial Sequence
  GATA2 Guide RNA
cuccggacacauccugcccacu

SEQ ID NO: 3034 - RNA, 22 nt, Artificial Sequence
  GATA2 Guide RNA
cucugacgcccauccaccccuc

SEQ ID NO: 3035 - RNA, 22 nt, Artificial Sequence
  GATA2 Guide RNA
cugacgcccauccaccccuccu

SEQ ID NO: 3036 - RNA, 22 nt, Artificial Sequence
  GATA2 Guide RNA
cugcccacucugacgcccaucc

SEQ ID NO: 3037 - RNA, 22 nt, Artificial Sequence
  GATA2 Guide RNA
cuggaggagggguggaugggcg

SEQ ID NO: 3038 - RNA, 22 nt, Artificial Sequence
  GATA2 Guide RNA
gacacauccugcccacucugac

SEQ ID NO: 3039 - RNA, 22 nt, Artificial Sequence
  GATA2 Guide RNA
gaggagggguggaugggcguca

SEQ ID NO: 3040 - RNA, 22 nt, Artificial Sequence
  GATA2 Guide RNA
gagggguggaugggcgucagag

SEQ ID NO: 3041 - RNA, 22 nt, Artificial Sequence
  GATA2 Guide RNA
gaugggcgucagagugggcagg

SEQ ID NO: 3042 - RNA, 22 nt, Artificial Sequence
  GATA2 Guide RNA
gcccacucugacgcccauccac

SEQ ID NO: 3043 - RNA, 22 nt, Artificial Sequence
  GATA2 Guide RNA
gcgucagagugggcaggaugug

SEQ ID NO: 3044 - RNA, 22 nt, Artificial Sequence
  GATA2 Guide RNA
ggacacauccugcccacucuga

SEQ ID NO: 3045 - RNA, 22 nt, Artificial Sequence
  GATA2 Guide RNA
ggaggagggguggaugggcguc

SEQ ID NO: 3046 - RNA, 22 nt, Artificial Sequence
  GATA2 Guide RNA
ggagggguggaugggcgucaga

SEQ ID NO: 3047 - RNA, 22 nt, Artificial Sequence
  GATA2 Guide RNA
ggaugggcgucagagugggcag

SEQ ID NO: 3048 - RNA, 22 nt, Artificial Sequence
  GATA2 Guide RNA
ggcgucagagugggcaggaugu

SEQ ID NO: 3049 - RNA, 22 nt, Artificial Sequence
  GATA2 Guide RNA
gggcgucagagugggcaggaug

SEQ ID NO: 3050 - RNA, 22 nt, Artificial Sequence
  GATA2 Guide RNA
gggguggaugggcgucagagug

SEQ ID NO: 3051 - RNA, 22 nt, Artificial Sequence
  GATA2 Guide RNA
ggguggaugggcgucagagugg

SEQ ID NO: 3052 - RNA, 22 nt, Artificial Sequence
  GATA2 Guide RNA
gguggaugggcgucagaguggg

SEQ ID NO: 3053 - RNA, 22 nt, Artificial Sequence
  GATA2 Guide RNA
gucagagugggcaggauguguc

SEQ ID NO: 3054 - RNA, 22 nt, Artificial Sequence
  GATA2 Guide RNA
guggaugggcgucagagugggc

SEQ ID NO: 3055 - RNA, 22 nt, Artificial Sequence
  GATA2 Guide RNA
ucagagugggcaggaugugucc

SEQ ID NO: 3056 - RNA, 22 nt, Artificial Sequence
  GATA2 Guide RNA
uccugcccacucugacgcccau

SEQ ID NO: 3057 - RNA, 22 nt, Artificial Sequence
  GATA2 Guide RNA
ucugacgcccauccaccccucc

SEQ ID NO: 3058 - RNA, 22 nt, Artificial Sequence
  GATA2 Guide RNA
ugcccacucugacgcccaucca

SEQ ID NO: 3059 - RNA, 22 nt, Artificial Sequence
  GATA2 Guide RNA
uggaggagggguggaugggcgu

SEQ ID NO: 3060 - RNA, 22 nt, Artificial Sequence
  GATA2 Guide RNA
uggaugggcgucagagugggca

SEQ ID NO: 3061 - RNA, 22 nt, Artificial Sequence
  GATA2 Guide RNA
ugggcgucagagugggcaggau

SEQ ID NO: 3062 - RNA, 20 nt, Artificial Sequence
  GATA2 Guide RNA
acacauccuguccacuccga

SEQ ID NO: 3063 - RNA, 20 nt, Artificial Sequence
  GATA2 Guide RNA
acaggauguguccggagugg

SEQ ID NO: 3064 - RNA, 20 nt, Artificial Sequence
  GATA2 Guide RNA
acauccuguccacuccgacg

SEQ ID NO: 3065 - RNA, 20 nt, Artificial Sequence
  GATA2 Guide RNA
acuccggacacauccugucc

SEQ ID NO: 3066 - RNA, 20 nt, Artificial Sequence
  GATA2 Guide RNA
agccacuccggacacauccu

SEQ ID NO: 3067 - RNA, 20 nt, Artificial Sequence
  GATA2 Guide RNA
aguggacaggauguguccgg

SEQ ID NO: 3068 - RNA, 20 nt, Artificial Sequence
  GATA2 Guide RNA
auccuguccacuccgacgcc

SEQ ID NO: 3069 - RNA, 20 nt, Artificial Sequence
  GATA2 Guide RNA
augggcgucggaguggacag

SEQ ID NO: 3070 - RNA, 20 nt, Artificial Sequence
  GATA2 Guide RNA
cacauccuguccacuccgac

SEQ ID NO: 3071 - RNA, 20 nt, Artificial Sequence
  GATA2 Guide RNA
cacuccggacacauccuguc

SEQ ID NO: 3072 - RNA, 20 nt, Artificial Sequence
  GATA2 Guide RNA
cagccacuccggacacaucc

SEQ ID NO: 3073 - RNA, 20 nt, Artificial Sequence
  GATA2 Guide RNA
cauccuguccacuccgacgc

SEQ ID NO: 3074 - RNA, 20 nt, Artificial Sequence
  GATA2 Guide RNA
ccacuccggacacauccugu

SEQ ID NO: 3075 - RNA, 20 nt, Artificial Sequence
  GATA2 Guide RNA
ccggacacauccuguccacu

SEQ ID NO: 3076 - RNA, 20 nt, Artificial Sequence
  GATA2 Guide RNA
ccuguccacuccgacgccca

SEQ ID NO: 3077 - RNA, 20 nt, Artificial Sequence
  GATA2 Guide RNA
cggacacauccuguccacuc

SEQ ID NO: 3078 - RNA, 20 nt, Artificial Sequence
  GATA2 Guide RNA
cggaguggacaggauguguc

SEQ ID NO: 3079 - RNA, 20 nt, Artificial Sequence
  GATA2 Guide RNA
cgucggaguggacaggaugu

SEQ ID NO: 3080 - RNA, 20 nt, Artificial Sequence
  GATA2 Guide RNA
cuccggacacauccugucca

SEQ ID NO: 3081 - RNA, 20 nt, Artificial Sequence
  GATA2 Guide RNA
cuguccacuccgacgcccau

SEQ ID NO: 3082 - RNA, 20 nt, Artificial Sequence
  GATA2 Guide RNA
gacacauccuguccacuccg

SEQ ID NO: 3083 - RNA, 20 nt, Artificial Sequence
  GATA2 Guide RNA
gacaggauguguccggagug

SEQ ID NO: 3084 - RNA, 20 nt, Artificial Sequence
  GATA2 Guide RNA
gaguggacaggauguguccg

SEQ ID NO: 3085 - RNA, 20 nt, Artificial Sequence
  GATA2 Guide RNA
gaugggcgucggaguggaca

SEQ ID NO: 3086 - RNA, 20 nt, Artificial Sequence
  GATA2 Guide RNA
gccacuccggacacauccug

SEQ ID NO: 3087 - RNA, 20 nt, Artificial Sequence
  GATA2 Guide RNA
gcgucggaguggacaggaug

SEQ ID NO: 3088 - RNA, 20 nt, Artificial Sequence
  GATA2 Guide RNA
ggacacauccuguccacucc

SEQ ID NO: 3089 - RNA, 20 nt, Artificial Sequence
  GATA2 Guide RNA
ggacaggauguguccggagu

SEQ ID NO: 3090 - RNA, 20 nt, Artificial Sequence
  GATA2 Guide RNA
ggaguggacaggaugugucc

SEQ ID NO: 3091 - RNA, 20 nt, Artificial Sequence
  GATA2 Guide RNA
ggaugggcgucggaguggac

SEQ ID NO: 3092 - RNA, 20 nt, Artificial Sequence
  GATA2 Guide RNA
ggcgucggaguggacaggau

SEQ ID NO: 3093 - RNA, 20 nt, Artificial Sequence
  GATA2 Guide RNA
gggcgucggaguggacagga

SEQ ID NO: 3094 - RNA, 20 nt, Artificial Sequence
  GATA2 Guide RNA
ggguggaugggcgucggagu

SEQ ID NO: 3095 - RNA, 20 nt, Artificial Sequence
  GATA2 Guide RNA
gguggaugggcgucggagug

SEQ ID NO: 3096 - RNA, 20 nt, Artificial Sequence
  GATA2 Guide RNA
guccacuccgacgcccaucc

SEQ ID NO: 3097 - RNA, 20 nt, Artificial Sequence
  GATA2 Guide RNA
gucggaguggacaggaugug

SEQ ID NO: 3098 - RNA, 20 nt, Artificial Sequence
  GATA2 Guide RNA
guggacaggauguguccgga

SEQ ID NO: 3099 - RNA, 20 nt, Artificial Sequence
  GATA2 Guide RNA
guggaugggcgucggagugg

SEQ ID NO: 3100 - RNA, 20 nt, Artificial Sequence
  GATA2 Guide RNA
ucagccacuccggacacauc

SEQ ID NO: 3101 - RNA, 20 nt, Artificial Sequence
  GATA2 Guide RNA
uccggacacauccuguccac

SEQ ID NO: 3102 - RNA, 20 nt, Artificial Sequence
  GATA2 Guide RNA
uccuguccacuccgacgccc

SEQ ID NO: 3103 - RNA, 20 nt, Artificial Sequence
  GATA2 Guide RNA
ucggaguggacaggaugugu

SEQ ID NO: 3104 - RNA, 20 nt, Artificial Sequence
  GATA2 Guide RNA
uggacaggauguguccggag

SEQ ID NO: 3105 - RNA, 20 nt, Artificial Sequence
  GATA2 Guide RNA
uggaugggcgucggagugga

SEQ ID NO: 3106 - RNA, 20 nt, Artificial Sequence
  GATA2 Guide RNA
ugggcgucggaguggacagg

SEQ ID NO: 3107 - RNA, 20 nt, Artificial Sequence
  GATA2 Guide RNA
uguccacuccgacgcccauc

SEQ ID NO: 3108 - RNA, 21 nt, Artificial Sequence
  GATA2 Guide RNA
acacauccuguccacuccgac

SEQ ID NO: 3109 - RNA, 21 nt, Artificial Sequence
  GATA2 Guide RNA
acaggauguguccggaguggc

SEQ ID NO: 3110 - RNA, 21 nt, Artificial Sequence
  GATA2 Guide RNA
acauccuguccacuccgacgc

SEQ ID NO: 3111 - RNA, 21 nt, Artificial Sequence
  GATA2 Guide RNA
acuccggacacauccugucca

SEQ ID NO: 3112 - RNA, 21 nt, Artificial Sequence
  GATA2 Guide RNA
agccacuccggacacauccug

SEQ ID NO: 3113 - RNA, 21 nt, Artificial Sequence
  GATA2 Guide RNA
aguggacaggauguguccgga

SEQ ID NO: 3114 - RNA, 21 nt, Artificial Sequence
  GATA2 Guide RNA
auccuguccacuccgacgccc

SEQ ID NO: 3115 - RNA, 21 nt, Artificial Sequence
  GATA2 Guide RNA
augggcgucggaguggacagg

SEQ ID NO: 3116 - RNA, 21 nt, Artificial Sequence
  GATA2 Guide RNA
cacauccuguccacuccgacg

SEQ ID NO: 3117 - RNA, 21 nt, Artificial Sequence
  GATA2 Guide RNA
cacuccggacacauccugucc

SEQ ID NO: 3118 - RNA, 21 nt, Artificial Sequence
  GATA2 Guide RNA
cagccacuccggacacauccu

SEQ ID NO: 3119 - RNA, 21 nt, Artificial Sequence
  GATA2 Guide RNA
cauccuguccacuccgacgcc

SEQ ID NO: 3120 - RNA, 21 nt, Artificial Sequence
  GATA2 Guide RNA
ccacuccggacacauccuguc

SEQ ID NO: 3121 - RNA, 21 nt, Artificial Sequence
  GATA2 Guide RNA
ccggacacauccuguccacuc

SEQ ID NO: 3122 - RNA, 21 nt, Artificial Sequence
  GATA2 Guide RNA
ccuguccacuccgacgcccau

SEQ ID NO: 3123 - RNA, 21 nt, Artificial Sequence
  GATA2 Guide RNA
cggacacauccuguccacucc

SEQ ID NO: 3124 - RNA, 21 nt, Artificial Sequence
  GATA2 Guide RNA
cggaguggacaggaugugucc

SEQ ID NO: 3125 - RNA, 21 nt, Artificial Sequence
  GATA2 Guide RNA
cgucggaguggacaggaugug

SEQ ID NO: 3126 - RNA, 21 nt, Artificial Sequence
  GATA2 Guide RNA
cuccggacacauccuguccac

SEQ ID NO: 3127 - RNA, 21 nt, Artificial Sequence
  GATA2 Guide RNA
cuguccacuccgacgcccauc

SEQ ID NO: 3128 - RNA, 21 nt, Artificial Sequence
  GATA2 Guide RNA
gacacauccuguccacuccga

SEQ ID NO: 3129 - RNA, 21 nt, Artificial Sequence
  GATA2 Guide RNA
gacaggauguguccggagugg

SEQ ID NO: 3130 - RNA, 21 nt, Artificial Sequence
  GATA2 Guide RNA
gaguggacaggauguguccgg

SEQ ID NO: 3131 - RNA, 21 nt, Artificial Sequence
  GATA2 Guide RNA
gaugggcgucggaguggacag

SEQ ID NO: 3132 - RNA, 21 nt, Artificial Sequence
  GATA2 Guide RNA
gccacuccggacacauccugu

SEQ ID NO: 3133 - RNA, 21 nt, Artificial Sequence
  GATA2 Guide RNA
gcgucggaguggacaggaugu

SEQ ID NO: 3134 - RNA, 21 nt, Artificial Sequence
  GATA2 Guide RNA
ggacacauccuguccacuccg

SEQ ID NO: 3135 - RNA, 21 nt, Artificial Sequence
  GATA2 Guide RNA
ggacaggauguguccggagug

SEQ ID NO: 3136 - RNA, 21 nt, Artificial Sequence
  GATA2 Guide RNA
ggaguggacaggauguguccg

SEQ ID NO: 3137 - RNA, 21 nt, Artificial Sequence
  GATA2 Guide RNA
ggaugggcgucggaguggaca

SEQ ID NO: 3138 - RNA, 21 nt, Artificial Sequence
  GATA2 Guide RNA
ggcgucggaguggacaggaug

SEQ ID NO: 3139 - RNA, 21 nt, Artificial Sequence
  GATA2 Guide RNA
gggcgucggaguggacaggau

SEQ ID NO: 3140 - RNA, 21 nt, Artificial Sequence
  GATA2 Guide RNA
gggguggaugggcgucggagu

SEQ ID NO: 3141 - RNA, 21 nt, Artificial Sequence
  GATA2 Guide RNA
ggguggaugggcgucggagug

SEQ ID NO: 3142 - RNA, 21 nt, Artificial Sequence
  GATA2 Guide RNA
gguggaugggcgucggagugg

SEQ ID NO: 3143 - RNA, 21 nt, Artificial Sequence
  GATA2 Guide RNA
guccacuccgacgcccaucca

SEQ ID NO: 3144 - RNA, 21 nt, Artificial Sequence
  GATA2 Guide RNA
gucggaguggacaggaugugu

SEQ ID NO: 3145 - RNA, 21 nt, Artificial Sequence
  GATA2 Guide RNA
guggacaggauguguccggag

SEQ ID NO: 3146 - RNA, 21 nt, Artificial Sequence
  GATA2 Guide RNA
guggaugggcgucggagugga

SEQ ID NO: 3147 - RNA, 21 nt, Artificial Sequence
  GATA2 Guide RNA
ucagccacuccggacacaucc

SEQ ID NO: 3148 - RNA, 21 nt, Artificial Sequence
  GATA2 Guide RNA
uccggacacauccuguccacu

SEQ ID NO: 3149 - RNA, 21 nt, Artificial Sequence
  GATA2 Guide RNA
uccuguccacuccgacgccca

SEQ ID NO: 3150 - RNA, 21 nt, Artificial Sequence
  GATA2 Guide RNA
ucggaguggacaggauguguc

SEQ ID NO: 3151 - RNA, 21 nt, Artificial Sequence
  GATA2 Guide RNA
uggacaggauguguccggagu

SEQ ID NO: 3152 - RNA, 21 nt, Artificial Sequence
  GATA2 Guide RNA
uggaugggcgucggaguggac

SEQ ID NO: 3153 - RNA, 21 nt, Artificial Sequence
  GATA2 Guide RNA
ugggcgucggaguggacagga

SEQ ID NO: 3154 - RNA, 21 nt, Artificial Sequence
  GATA2 Guide RNA
uguccacuccgacgcccaucc

SEQ ID NO: 3155 - RNA, 21 nt, Artificial Sequence
  GATA2 Guide RNA
uucagccacuccggacacauc

SEQ ID NO: 3156 - RNA, 22 nt, Artificial Sequence
  GATA2 Guide RNA
acacauccuguccacuccgacg

SEQ ID NO: 3157 - RNA, 22 nt, Artificial Sequence
  GATA2 Guide RNA
acaggauguguccggaguggcu

SEQ ID NO: 3158 - RNA, 22 nt, Artificial Sequence
  GATA2 Guide RNA
acauccuguccacuccgacgcc

SEQ ID NO: 3159 - RNA, 22 nt, Artificial Sequence
  GATA2 Guide RNA
acuccggacacauccuguccac

SEQ ID NO: 3160 - RNA, 22 nt, Artificial Sequence
  GATA2 Guide RNA
agccacuccggacacauccugu

SEQ ID NO: 3161 - RNA, 22 nt, Artificial Sequence
  GATA2 Guide RNA
agggguggaugggcgucggagu

SEQ ID NO: 3162 - RNA, 22 nt, Artificial Sequence
  GATA2 Guide RNA
aguggacaggauguguccggag

SEQ ID NO: 3163 - RNA, 22 nt, Artificial Sequence
  GATA2 Guide RNA
auccuguccacuccgacgccca

SEQ ID NO: 3164 - RNA, 22 nt, Artificial Sequence
  GATA2 Guide RNA
augggcgucggaguggacagga

SEQ ID NO: 3165 - RNA, 22 nt, Artificial Sequence
  GATA2 Guide RNA
cacauccuguccacuccgacgc

SEQ ID NO: 3166 - RNA, 22 nt, Artificial Sequence
  GATA2 Guide RNA
cacuccggacacauccugucca

SEQ ID NO: 3167 - RNA, 22 nt, Artificial Sequence
  GATA2 Guide RNA
cagccacuccggacacauccug

SEQ ID NO: 3168 - RNA, 22 nt, Artificial Sequence
  GATA2 Guide RNA
cauccuguccacuccgacgccc

SEQ ID NO: 3169 - RNA, 22 nt, Artificial Sequence
  GATA2 Guide RNA
ccacuccggacacauccugucc

SEQ ID NO: 3170 - RNA, 22 nt, Artificial Sequence
  GATA2 Guide RNA
ccggacacauccuguccacucc

SEQ ID NO: 3171 - RNA, 22 nt, Artificial Sequence
  GATA2 Guide RNA
ccuguccacuccgacgcccauc

SEQ ID NO: 3172 - RNA, 22 nt, Artificial Sequence
  GATA2 Guide RNA
cggacacauccuguccacuccg

SEQ ID NO: 3173 - RNA, 22 nt, Artificial Sequence
  GATA2 Guide RNA
cggaguggacaggauguguccg

SEQ ID NO: 3174 - RNA, 22 nt, Artificial Sequence
  GATA2 Guide RNA
cgucggaguggacaggaugugu

SEQ ID NO: 3175 - RNA, 22 nt, Artificial Sequence
  GATA2 Guide RNA
cuccggacacauccuguccacu

SEQ ID NO: 3176 - RNA, 22 nt, Artificial Sequence
  GATA2 Guide RNA
cuguccacuccgacgcccaucc

SEQ ID NO: 3177 - RNA, 22 nt, Artificial Sequence
  GATA2 Guide RNA
cuucagccacuccggacacauc

SEQ ID NO: 3178 - RNA, 22 nt, Artificial Sequence
  GATA2 Guide RNA
gacacauccuguccacuccgac

SEQ ID NO: 3179 - RNA, 22 nt, Artificial Sequence
  GATA2 Guide RNA
gacaggauguguccggaguggc

SEQ ID NO: 3180 - RNA, 22 nt, Artificial Sequence
  GATA2 Guide RNA
gaguggacaggauguguccgga

SEQ ID NO: 3181 - RNA, 22 nt, Artificial Sequence
  GATA2 Guide RNA
gaugggcgucggaguggacagg

SEQ ID NO: 3182 - RNA, 22 nt, Artificial Sequence
  GATA2 Guide RNA
gccacuccggacacauccuguc

SEQ ID NO: 3183 - RNA, 22 nt, Artificial Sequence
  GATA2 Guide RNA
gcgucggaguggacaggaugug

SEQ ID NO: 3184 - RNA, 22 nt, Artificial Sequence
  GATA2 Guide RNA
ggacacauccuguccacuccga

SEQ ID NO: 3185 - RNA, 22 nt, Artificial Sequence
  GATA2 Guide RNA
ggacaggauguguccggagugg

SEQ ID NO: 3186 - RNA, 22 nt, Artificial Sequence
  GATA2 Guide RNA
ggaguggacaggauguguccgg

SEQ ID NO: 3187 - RNA, 22 nt, Artificial Sequence
  GATA2 Guide RNA
ggaugggcgucggaguggacag

SEQ ID NO: 3188 - RNA, 22 nt, Artificial Sequence
  GATA2 Guide RNA
ggcgucggaguggacaggaugu

SEQ ID NO: 3189 - RNA, 22 nt, Artificial Sequence
  GATA2 Guide RNA
gggcgucggaguggacaggaug

SEQ ID NO: 3190 - RNA, 22 nt, Artificial Sequence
  GATA2 Guide RNA
gggguggaugggcgucggagug

SEQ ID NO: 3191 - RNA, 22 nt, Artificial Sequence
  GATA2 Guide RNA
ggguggaugggcgucggagugg

SEQ ID NO: 3192 - RNA, 22 nt, Artificial Sequence
  GATA2 Guide RNA
gguggaugggcgucggagugga

SEQ ID NO: 3193 - RNA, 22 nt, Artificial Sequence
  GATA2 Guide RNA
guccacuccgacgcccauccac

SEQ ID NO: 3194 - RNA, 22 nt, Artificial Sequence
  GATA2 Guide RNA
gucggaguggacaggauguguc

SEQ ID NO: 3195 - RNA, 22 nt, Artificial Sequence
  GATA2 Guide RNA
guggacaggauguguccggagu

SEQ ID NO: 3196 - RNA, 22 nt, Artificial Sequence
  GATA2 Guide RNA
guggaugggcgucggaguggac

SEQ ID NO: 3197 - RNA, 22 nt, Artificial Sequence
  GATA2 Guide RNA
ucagccacuccggacacauccu

SEQ ID NO: 3198 - RNA, 22 nt, Artificial Sequence
  GATA2 Guide RNA
uccggacacauccuguccacuc

SEQ ID NO: 3199 - RNA, 22 nt, Artificial Sequence
  GATA2 Guide RNA
uccuguccacuccgacgcccau

SEQ ID NO: 3200 - RNA, 22 nt, Artificial Sequence
  GATA2 Guide RNA
ucggaguggacaggaugugucc

SEQ ID NO: 3201 - RNA, 22 nt, Artificial Sequence
  GATA2 Guide RNA
uggacaggauguguccggagug

SEQ ID NO: 3202 - RNA, 22 nt, Artificial Sequence
  GATA2 Guide RNA
uggaugggcgucggaguggaca

SEQ ID NO: 3203 - RNA, 22 nt, Artificial Sequence
  GATA2 Guide RNA
ugggcgucggaguggacaggau

SEQ ID NO: 3204 - RNA, 22 nt, Artificial Sequence
  GATA2 Guide RNA
uguccacuccgacgcccaucca

SEQ ID NO: 3205 - RNA, 22 nt, Artificial Sequence
  GATA2 Guide RNA
uucagccacuccggacacaucc

SEQ ID NO: 3206 - RNA, 20 nt, Artificial Sequence
  GATA2 Guide RNA
accucccgcccuucagccac

SEQ ID NO: 3207 - RNA, 20 nt, Artificial Sequence
  GATA2 Guide RNA
acucaggacacauccugccc

SEQ ID NO: 3208 - RNA, 20 nt, Artificial Sequence
  GATA2 Guide RNA
agccacucaggacacauccu

SEQ ID NO: 3209 - RNA, 20 nt, Artificial Sequence
  GATA2 Guide RNA
aggauguguccugaguggcu

SEQ ID NO: 3210 - RNA, 20 nt, Artificial Sequence
  GATA2 Guide RNA
agugggcaggauguguccug

SEQ ID NO: 3211 - RNA, 20 nt, Artificial Sequence
  GATA2 Guide RNA
auguguccugaguggcugaa

SEQ ID NO: 3212 - RNA, 20 nt, Artificial Sequence
  GATA2 Guide RNA
caccucccgcccuucagcca

SEQ ID NO: 3213 - RNA, 20 nt, Artificial Sequence
  GATA2 Guide RNA
cacucaggacacauccugcc

SEQ ID NO: 3214 - RNA, 20 nt, Artificial Sequence
  GATA2 Guide RNA
cagccacucaggacacaucc

SEQ ID NO: 3215 - RNA, 20 nt, Artificial Sequence
  GATA2 Guide RNA
caggacacauccugcccacu

SEQ ID NO: 3216 - RNA, 20 nt, Artificial Sequence
  GATA2 Guide RNA
caggauguguccugaguggc

SEQ ID NO: 3217 - RNA, 20 nt, Artificial Sequence
  GATA2 Guide RNA
ccacucaggacacauccugc

SEQ ID NO: 3218 - RNA, 20 nt, Artificial Sequence
  GATA2 Guide RNA
cccgcccuucagccacucag

SEQ ID NO: 3219 - RNA, 20 nt, Artificial Sequence
  GATA2 Guide RNA
cccuucagccacucaggaca

SEQ ID NO: 3220 - RNA, 20 nt, Artificial Sequence
  GATA2 Guide RNA
ccgcccuucagccacucagg

SEQ ID NO: 3221 - RNA, 20 nt, Artificial Sequence
  GATA2 Guide RNA
ccucccgcccuucagccacu

SEQ ID NO: 3222 - RNA, 20 nt, Artificial Sequence
  GATA2 Guide RNA
ccugaguggcugaagggcgg

SEQ ID NO: 3223 - RNA, 20 nt, Artificial Sequence
  GATA2 Guide RNA
ccuucagccacucaggacac

SEQ ID NO: 3224 - RNA, 20 nt, Artificial Sequence
  GATA2 Guide RNA
cgcccuucagccacucagga

SEQ ID NO: 3225 - RNA, 20 nt, Artificial Sequence
  GATA2 Guide RNA
cggagugggcaggauguguc

SEQ ID NO: 3226 - RNA, 20 nt, Artificial Sequence
  GATA2 Guide RNA
cucaggacacauccugccca

SEQ ID NO: 3227 - RNA, 20 nt, Artificial Sequence
  GATA2 Guide RNA
cucccgcccuucagccacuc

SEQ ID NO: 3228 - RNA, 20 nt, Artificial Sequence
  GATA2 Guide RNA
cugaguggcugaagggcggg

SEQ ID NO: 3229 - RNA, 20 nt, Artificial Sequence
  GATA2 Guide RNA
cuucagccacucaggacaca

SEQ ID NO: 3230 - RNA, 20 nt, Artificial Sequence
  GATA2 Guide RNA
gagugggcaggauguguccu

SEQ ID NO: 3231 - RNA, 20 nt, Artificial Sequence
  GATA2 Guide RNA
gauguguccugaguggcuga

SEQ ID NO: 3232 - RNA, 20 nt, Artificial Sequence
  GATA2 Guide RNA
gcaggauguguccugagugg

SEQ ID NO: 3233 - RNA, 20 nt, Artificial Sequence
  GATA2 Guide RNA
gccacucaggacacauccug

SEQ ID NO: 3234 - RNA, 20 nt, Artificial Sequence
  GATA2 Guide RNA
gcccuucagccacucaggac

SEQ ID NO: 3235 - RNA, 20 nt, Artificial Sequence
  GATA2 Guide RNA
ggagugggcaggaugugucc

SEQ ID NO: 3236 - RNA, 20 nt, Artificial Sequence
  GATA2 Guide RNA
ggauguguccugaguggcug

SEQ ID NO: 3237 - RNA, 20 nt, Artificial Sequence
  GATA2 Guide RNA
ggcaggauguguccugagug

SEQ ID NO: 3238 - RNA, 20 nt, Artificial Sequence
  GATA2 Guide RNA
gggcaggauguguccugagu

SEQ ID NO: 3239 - RNA, 20 nt, Artificial Sequence
  GATA2 Guide RNA
guccugaguggcugaagggc

SEQ ID NO: 3240 - RNA, 20 nt, Artificial Sequence
  GATA2 Guide RNA
gugggcaggauguguccuga

SEQ ID NO: 3241 - RNA, 20 nt, Artificial Sequence
  GATA2 Guide RNA
guguccugaguggcugaagg

SEQ ID NO: 3242 - RNA, 20 nt, Artificial Sequence
  GATA2 Guide RNA
ucagccacucaggacacauc

SEQ ID NO: 3243 - RNA, 20 nt, Artificial Sequence
  GATA2 Guide RNA
ucaggacacauccugcccac

SEQ ID NO: 3244 - RNA, 20 nt, Artificial Sequence
  GATA2 Guide RNA
ucccgcccuucagccacuca

SEQ ID NO: 3245 - RNA, 20 nt, Artificial Sequence
  GATA2 Guide RNA
uccugaguggcugaagggcg

SEQ ID NO: 3246 - RNA, 20 nt, Artificial Sequence
  GATA2 Guide RNA
ucggagugggcaggaugugu

SEQ ID NO: 3247 - RNA, 20 nt, Artificial Sequence
  GATA2 Guide RNA
ugaguggcugaagggcggga

SEQ ID NO: 3248 - RNA, 20 nt, Artificial Sequence
  GATA2 Guide RNA
ugggcaggauguguccugag

SEQ ID NO: 3249 - RNA, 20 nt, Artificial Sequence
  GATA2 Guide RNA
uguccugaguggcugaaggg

SEQ ID NO: 3250 - RNA, 20 nt, Artificial Sequence
  GATA2 Guide RNA
uguguccugaguggcugaag

SEQ ID NO: 3251 - RNA, 20 nt, Artificial Sequence
  GATA2 Guide RNA
uucagccacucaggacacau

SEQ ID NO: 3252 - RNA, 21 nt, Artificial Sequence
  GATA2 Guide RNA
accucccgcccuucagccacu

SEQ ID NO: 3253 - RNA, 21 nt, Artificial Sequence
  GATA2 Guide RNA
acucaggacacauccugccca

SEQ ID NO: 3254 - RNA, 21 nt, Artificial Sequence
  GATA2 Guide RNA
agccacucaggacacauccug

SEQ ID NO: 3255 - RNA, 21 nt, Artificial Sequence
  GATA2 Guide RNA
aggauguguccugaguggcug

SEQ ID NO: 3256 - RNA, 21 nt, Artificial Sequence
  GATA2 Guide RNA
agugggcaggauguguccuga

SEQ ID NO: 3257 - RNA, 21 nt, Artificial Sequence
  GATA2 Guide RNA
auguguccugaguggcugaag

SEQ ID NO: 3258 - RNA, 21 nt, Artificial Sequence
  GATA2 Guide RNA
caccucccgcccuucagccac

SEQ ID NO: 3259 - RNA, 21 nt, Artificial Sequence
  GATA2 Guide RNA
cacucaggacacauccugccc

SEQ ID NO: 3260 - RNA, 21 nt, Artificial Sequence
  GATA2 Guide RNA
cagccacucaggacacauccu

SEQ ID NO: 3261 - RNA, 21 nt, Artificial Sequence
  GATA2 Guide RNA
caggacacauccugcccacuc

SEQ ID NO: 3262 - RNA, 21 nt, Artificial Sequence
  GATA2 Guide RNA
caggauguguccugaguggcu

SEQ ID NO: 3263 - RNA, 21 nt, Artificial Sequence
  GATA2 Guide RNA
ccaccucccgcccuucagcca

SEQ ID NO: 3264 - RNA, 21 nt, Artificial Sequence
  GATA2 Guide RNA
ccacucaggacacauccugcc

SEQ ID NO: 3265 - RNA, 21 nt, Artificial Sequence
  GATA2 Guide RNA
cccgcccuucagccacucagg

SEQ ID NO: 3266 - RNA, 21 nt, Artificial Sequence
  GATA2 Guide RNA
cccuucagccacucaggacac

SEQ ID NO: 3267 - RNA, 21 nt, Artificial Sequence
  GATA2 Guide RNA
ccgcccuucagccacucagga

SEQ ID NO: 3268 - RNA, 21 nt, Artificial Sequence
  GATA2 Guide RNA
ccucccgcccuucagccacuc

SEQ ID NO: 3269 - RNA, 21 nt, Artificial Sequence
  GATA2 Guide RNA
ccugaguggcugaagggcggg

SEQ ID NO: 3270 - RNA, 21 nt, Artificial Sequence
  GATA2 Guide RNA
ccuucagccacucaggacaca

SEQ ID NO: 3271 - RNA, 21 nt, Artificial Sequence
  GATA2 Guide RNA
cgcccuucagccacucaggac

SEQ ID NO: 3272 - RNA, 21 nt, Artificial Sequence
  GATA2 Guide RNA
cggagugggcaggaugugucc

SEQ ID NO: 3273 - RNA, 21 nt, Artificial Sequence
  GATA2 Guide RNA
cucaggacacauccugcccac

SEQ ID NO: 3274 - RNA, 21 nt, Artificial Sequence
  GATA2 Guide RNA
cucccgcccuucagccacuca

SEQ ID NO: 3275 - RNA, 21 nt, Artificial Sequence
  GATA2 Guide RNA
cugaguggcugaagggcggga

SEQ ID NO: 3276 - RNA, 21 nt, Artificial Sequence
  GATA2 Guide RNA
cuucagccacucaggacacau

SEQ ID NO: 3277 - RNA, 21 nt, Artificial Sequence
  GATA2 Guide RNA
gagugggcaggauguguccug

SEQ ID NO: 3278 - RNA, 21 nt, Artificial Sequence
  GATA2 Guide RNA
gauguguccugaguggcugaa

SEQ ID NO: 3279 - RNA, 21 nt, Artificial Sequence
  GATA2 Guide RNA
gcaggauguguccugaguggc

SEQ ID NO: 3280 - RNA, 21 nt, Artificial Sequence
  GATA2 Guide RNA
gccacucaggacacauccugc

SEQ ID NO: 3281 - RNA, 21 nt, Artificial Sequence
  GATA2 Guide RNA
gcccuucagccacucaggaca

SEQ ID NO: 3282 - RNA, 21 nt, Artificial Sequence
  GATA2 Guide RNA
ggagugggcaggauguguccu

SEQ ID NO: 3283 - RNA, 21 nt, Artificial Sequence
  GATA2 Guide RNA
ggauguguccugaguggcuga

SEQ ID NO: 3284 - RNA, 21 nt, Artificial Sequence
  GATA2 Guide RNA
ggcaggauguguccugagugg

SEQ ID NO: 3285 - RNA, 21 nt, Artificial Sequence
  GATA2 Guide RNA
gggcaggauguguccugagug

SEQ ID NO: 3286 - RNA, 21 nt, Artificial Sequence
  GATA2 Guide RNA
guccugaguggcugaagggcg

SEQ ID NO: 3287 - RNA, 21 nt, Artificial Sequence
  GATA2 Guide RNA
gucggagugggcaggaugugu

SEQ ID NO: 3288 - RNA, 21 nt, Artificial Sequence
  GATA2 Guide RNA
gugggcaggauguguccugag

SEQ ID NO: 3289 - RNA, 21 nt, Artificial Sequence
  GATA2 Guide RNA
guguccugaguggcugaaggg

SEQ ID NO: 3290 - RNA, 21 nt, Artificial Sequence
  GATA2 Guide RNA
ucagccacucaggacacaucc

SEQ ID NO: 3291 - RNA, 21 nt, Artificial Sequence
  GATA2 Guide RNA
ucaggacacauccugcccacu

SEQ ID NO: 3292 - RNA, 21 nt, Artificial Sequence
  GATA2 Guide RNA
ucccgcccuucagccacucag

SEQ ID NO: 3293 - RNA, 21 nt, Artificial Sequence
  GATA2 Guide RNA
uccugaguggcugaagggcgg

SEQ ID NO: 3294 - RNA, 21 nt, Artificial Sequence
  GATA2 Guide RNA
ucggagugggcaggauguguc

SEQ ID NO: 3295 - RNA, 21 nt, Artificial Sequence
  GATA2 Guide RNA
ugaguggcugaagggcgggag

SEQ ID NO: 3296 - RNA, 21 nt, Artificial Sequence
  GATA2 Guide RNA
ugggcaggauguguccugagu

SEQ ID NO: 3297 - RNA, 21 nt, Artificial Sequence
  GATA2 Guide RNA
uguccugaguggcugaagggc

SEQ ID NO: 3298 - RNA, 21 nt, Artificial Sequence
  GATA2 Guide RNA
uguguccugaguggcugaagg

SEQ ID NO: 3299 - RNA, 21 nt, Artificial Sequence
  GATA2 Guide RNA
uucagccacucaggacacauc

SEQ ID NO: 3300 - RNA, 22 nt, Artificial Sequence
  GATA2 Guide RNA
accucccgcccuucagccacuc

SEQ ID NO: 3301 - RNA, 22 nt, Artificial Sequence
  GATA2 Guide RNA
acucaggacacauccugcccac

SEQ ID NO: 3302 - RNA, 22 nt, Artificial Sequence
  GATA2 Guide RNA
agccacucaggacacauccugc

SEQ ID NO: 3303 - RNA, 22 nt, Artificial Sequence
  GATA2 Guide RNA
aggauguguccugaguggcuga

SEQ ID NO: 3304 - RNA, 22 nt, Artificial Sequence
  GATA2 Guide RNA
agugggcaggauguguccugag

SEQ ID NO: 3305 - RNA, 22 nt, Artificial Sequence
  GATA2 Guide RNA
auguguccugaguggcugaagg

SEQ ID NO: 3306 - RNA, 22 nt, Artificial Sequence
  GATA2 Guide RNA
caccucccgcccuucagccacu

SEQ ID NO: 3307 - RNA, 22 nt, Artificial Sequence
  GATA2 Guide RNA
cacucaggacacauccugccca

SEQ ID NO: 3308 - RNA, 22 nt, Artificial Sequence
  GATA2 Guide RNA
cagccacucaggacacauccug

SEQ ID NO: 3309 - RNA, 22 nt, Artificial Sequence
  GATA2 Guide RNA
caggacacauccugcccacucc

SEQ ID NO: 3310 - RNA, 22 nt, Artificial Sequence
  GATA2 Guide RNA
caggauguguccugaguggcug

SEQ ID NO: 3311 - RNA, 22 nt, Artificial Sequence
  GATA2 Guide RNA
ccaccucccgcccuucagccac

SEQ ID NO: 3312 - RNA, 22 nt, Artificial Sequence
  GATA2 Guide RNA
ccacucaggacacauccugccc

SEQ ID NO: 3313 - RNA, 22 nt, Artificial Sequence
  GATA2 Guide RNA
cccgcccuucagccacucagga

SEQ ID NO: 3314 - RNA, 22 nt, Artificial Sequence
  GATA2 Guide RNA
cccuucagccacucaggacaca

SEQ ID NO: 3315 - RNA, 22 nt, Artificial Sequence
  GATA2 Guide RNA
ccgcccuucagccacucaggac

SEQ ID NO: 3316 - RNA, 22 nt, Artificial Sequence
  GATA2 Guide RNA
ccucccgcccuucagccacuca

SEQ ID NO: 3317 - RNA, 22 nt, Artificial Sequence
  GATA2 Guide RNA
ccugaguggcugaagggcggga

SEQ ID NO: 3318 - RNA, 22 nt, Artificial Sequence
  GATA2 Guide RNA
ccuucagccacucaggacacau

SEQ ID NO: 3319 - RNA, 22 nt, Artificial Sequence
  GATA2 Guide RNA
cgcccuucagccacucaggaca

SEQ ID NO: 3320 - RNA, 22 nt, Artificial Sequence
  GATA2 Guide RNA
cggagugggcaggauguguccu

SEQ ID NO: 3321 - RNA, 22 nt, Artificial Sequence
  GATA2 Guide RNA
cgucggagugggcaggaugugu

SEQ ID NO: 3322 - RNA, 22 nt, Artificial Sequence
  GATA2 Guide RNA
cucaggacacauccugcccacu

SEQ ID NO: 3323 - RNA, 22 nt, Artificial Sequence
  GATA2 Guide RNA
cucccgcccuucagccacucag

SEQ ID NO: 3324 - RNA, 22 nt, Artificial Sequence
  GATA2 Guide RNA
cugaguggcugaagggcgggag

SEQ ID NO: 3325 - RNA, 22 nt, Artificial Sequence
  GATA2 Guide RNA
cuucagccacucaggacacauc

SEQ ID NO: 3326 - RNA, 22 nt, Artificial Sequence
  GATA2 Guide RNA
gagugggcaggauguguccuga

SEQ ID NO: 3327 - RNA, 22 nt, Artificial Sequence
  GATA2 Guide RNA
gauguguccugaguggcugaag

SEQ ID NO: 3328 - RNA, 22 nt, Artificial Sequence
  GATA2 Guide RNA
gcaggauguguccugaguggcu

SEQ ID NO: 3329 - RNA, 22 nt, Artificial Sequence
  GATA2 Guide RNA
gccaccucccgcccuucagcca

SEQ ID NO: 3330 - RNA, 22 nt, Artificial Sequence
  GATA2 Guide RNA
gccacucaggacacauccugcc

SEQ ID NO: 3331 - RNA, 22 nt, Artificial Sequence
  GATA2 Guide RNA
gcccuucagccacucaggacac

SEQ ID NO: 3332 - RNA, 22 nt, Artificial Sequence
  GATA2 Guide RNA
ggagugggcaggauguguccug

SEQ ID NO: 3333 - RNA, 22 nt, Artificial Sequence
  GATA2 Guide RNA
ggauguguccugaguggcugaa

SEQ ID NO: 3334 - RNA, 22 nt, Artificial Sequence
  GATA2 Guide RNA
ggcaggauguguccugaguggc

SEQ ID NO: 3335 - RNA, 22 nt, Artificial Sequence
  GATA2 Guide RNA
gggcaggauguguccugagugg

SEQ ID NO: 3336 - RNA, 22 nt, Artificial Sequence
  GATA2 Guide RNA
guccugaguggcugaagggcgg

SEQ ID NO: 3337 - RNA, 22 nt, Artificial Sequence
  GATA2 Guide RNA
gucggagugggcaggauguguc

SEQ ID NO: 3338 - RNA, 22 nt, Artificial Sequence
  GATA2 Guide RNA
gugggcaggauguguccugagu

SEQ ID NO: 3339 - RNA, 22 nt, Artificial Sequence
  GATA2 Guide RNA
guguccugaguggcugaagggc

SEQ ID NO: 3340 - RNA, 22 nt, Artificial Sequence
  GATA2 Guide RNA
ucagccacucaggacacauccu

SEQ ID NO: 3341 - RNA, 22 nt, Artificial Sequence
  GATA2 Guide RNA
ucaggacacauccugcccacuc

SEQ ID NO: 3342 - RNA, 22 nt, Artificial Sequence
  GATA2 Guide RNA
ucccgcccuucagccacucagg

SEQ ID NO: 3343 - RNA, 22 nt, Artificial Sequence
  GATA2 Guide RNA
uccugaguggcugaagggcggg

SEQ ID NO: 3344 - RNA, 22 nt, Artificial Sequence
  GATA2 Guide RNA
ucggagugggcaggaugugucc

SEQ ID NO: 3345 - RNA, 22 nt, Artificial Sequence
  GATA2 Guide RNA
ugaguggcugaagggcgggagg

SEQ ID NO: 3346 - RNA, 22 nt, Artificial Sequence
  GATA2 Guide RNA
ugggcaggauguguccugagug

SEQ ID NO: 3347 - RNA, 22 nt, Artificial Sequence
  GATA2 Guide RNA
uguccugaguggcugaagggcg

SEQ ID NO: 3348 - RNA, 22 nt, Artificial Sequence
  GATA2 Guide RNA
uguguccugaguggcugaaggg

SEQ ID NO: 3349 - RNA, 22 nt, Artificial Sequence
  GATA2 Guide RNA
uucagccacucaggacacaucc

SEQ ID NO: 3350 - RNA, 20 nt, Artificial Sequence
  GATA2 Guide RNA
aagggcaggagguggcccac

SEQ ID NO: 3351 - RNA, 20 nt, Artificial Sequence
  GATA2 Guide RNA
accuccugcccuucagccac

SEQ ID NO: 3352 - RNA, 20 nt, Artificial Sequence
  GATA2 Guide RNA
accugugggccaccuccugc

SEQ ID NO: 3353 - RNA, 20 nt, Artificial Sequence
  GATA2 Guide RNA
aggagguggcccacaggugc

SEQ ID NO: 3354 - RNA, 20 nt, Artificial Sequence
  GATA2 Guide RNA
agggcaggagguggcccaca

SEQ ID NO: 3355 - RNA, 20 nt, Artificial Sequence
  GATA2 Guide RNA
aguggcugaagggcaggagg

SEQ ID NO: 3356 - RNA, 20 nt, Artificial Sequence
  GATA2 Guide RNA
auggcaccugugggccaccu

SEQ ID NO: 3357 - RNA, 20 nt, Artificial Sequence
  GATA2 Guide RNA
caccuccugcccuucagcca

SEQ ID NO: 3358 - RNA, 20 nt, Artificial Sequence
  GATA2 Guide RNA
caccugugggccaccuccug

SEQ ID NO: 3359 - RNA, 20 nt, Artificial Sequence
  GATA2 Guide RNA
caggagguggcccacaggug

SEQ ID NO: 3360 - RNA, 20 nt, Artificial Sequence
  GATA2 Guide RNA
cauggcaccugugggccacc

SEQ ID NO: 3361 - RNA, 20 nt, Artificial Sequence
  GATA2 Guide RNA
ccaccuccugcccuucagcc

SEQ ID NO: 3362 - RNA, 20 nt, Artificial Sequence
  GATA2 Guide RNA
ccggaguggcugaagggcag

SEQ ID NO: 3363 - RNA, 20 nt, Artificial Sequence
  GATA2 Guide RNA
ccuccugcccuucagccacu

SEQ ID NO: 3364 - RNA, 20 nt, Artificial Sequence
  GATA2 Guide RNA
ccugcccuucagccacuccg

SEQ ID NO: 3365 - RNA, 20 nt, Artificial Sequence
  GATA2 Guide RNA
ccugugggccaccuccugcc

SEQ ID NO: 3366 - RNA, 20 nt, Artificial Sequence
  GATA2 Guide RNA
cggaguggcugaagggcagg

SEQ ID NO: 3367 - RNA, 20 nt, Artificial Sequence
  GATA2 Guide RNA
cuccugcccuucagccacuc

SEQ ID NO: 3368 - RNA, 20 nt, Artificial Sequence
  GATA2 Guide RNA
cugaagggcaggagguggcc

SEQ ID NO: 3369 - RNA, 20 nt, Artificial Sequence
  GATA2 Guide RNA
cugcccuucagccacuccgg

SEQ ID NO: 3370 - RNA, 20 nt, Artificial Sequence
  GATA2 Guide RNA
cugugggccaccuccugccc

SEQ ID NO: 3371 - RNA, 20 nt, Artificial Sequence
  GATA2 Guide RNA
gaagggcaggagguggccca

SEQ ID NO: 3372 - RNA, 20 nt, Artificial Sequence
  GATA2 Guide RNA
gaguggcugaagggcaggag

SEQ ID NO: 3373 - RNA, 20 nt, Artificial Sequence
  GATA2 Guide RNA
gcaccugugggccaccuccu

SEQ ID NO: 3374 - RNA, 20 nt, Artificial Sequence
  GATA2 Guide RNA
gcaggagguggcccacaggu

SEQ ID NO: 3375 - RNA, 20 nt, Artificial Sequence
  GATA2 Guide RNA
gccaccuccugcccuucagc

SEQ ID NO: 3376 - RNA, 20 nt, Artificial Sequence
  GATA2 Guide RNA
gcugaagggcaggagguggc

SEQ ID NO: 3377 - RNA, 20 nt, Artificial Sequence
  GATA2 Guide RNA
ggaguggcugaagggcagga

SEQ ID NO: 3378 - RNA, 20 nt, Artificial Sequence
  GATA2 Guide RNA
ggcaccugugggccaccucc

SEQ ID NO: 3379 - RNA, 20 nt, Artificial Sequence
  GATA2 Guide RNA
ggcaggagguggcccacagg

SEQ ID NO: 3380 - RNA, 20 nt, Artificial Sequence
  GATA2 Guide RNA
ggccaccuccugcccuucag

SEQ ID NO: 3381 - RNA, 20 nt, Artificial Sequence
  GATA2 Guide RNA
ggcugaagggcaggaggugg

SEQ ID NO: 3382 - RNA, 20 nt, Artificial Sequence
  GATA2 Guide RNA
gggcaggagguggcccacag

SEQ ID NO: 3383 - RNA, 20 nt, Artificial Sequence
  GATA2 Guide RNA
gggccaccuccugcccuuca

SEQ ID NO: 3384 - RNA, 20 nt, Artificial Sequence
  GATA2 Guide RNA
guccggaguggcugaagggc

SEQ ID NO: 3385 - RNA, 20 nt, Artificial Sequence
  GATA2 Guide RNA
guggcugaagggcaggaggu

SEQ ID NO: 3386 - RNA, 20 nt, Artificial Sequence
  GATA2 Guide RNA
gugggccaccuccugcccuu

SEQ ID NO: 3387 - RNA, 20 nt, Artificial Sequence
  GATA2 Guide RNA
guguccggaguggcugaagg

SEQ ID NO: 3388 - RNA, 20 nt, Artificial Sequence
  GATA2 Guide RNA
uccggaguggcugaagggca

SEQ ID NO: 3389 - RNA, 20 nt, Artificial Sequence
  GATA2 Guide RNA
uccugcccuucagccacucc

SEQ ID NO: 3390 - RNA, 20 nt, Artificial Sequence
  GATA2 Guide RNA
ugaagggcaggagguggccc

SEQ ID NO: 3391 - RNA, 20 nt, Artificial Sequence
  GATA2 Guide RNA
uggcaccugugggccaccuc

SEQ ID NO: 3392 - RNA, 20 nt, Artificial Sequence
  GATA2 Guide RNA
uggcugaagggcaggaggug

SEQ ID NO: 3393 - RNA, 20 nt, Artificial Sequence
  GATA2 Guide RNA
ugggccaccuccugcccuuc

SEQ ID NO: 3394 - RNA, 20 nt, Artificial Sequence
  GATA2 Guide RNA
uguccggaguggcugaaggg

SEQ ID NO: 3395 - RNA, 20 nt, Artificial Sequence
  GATA2 Guide RNA
ugugggccaccuccugcccu

SEQ ID NO: 3396 - RNA, 21 nt, Artificial Sequence
  GATA2 Guide RNA
aagggcaggagguggcccaca

SEQ ID NO: 3397 - RNA, 21 nt, Artificial Sequence
  GATA2 Guide RNA
acauggcaccugugggccacc

SEQ ID NO: 3398 - RNA, 21 nt, Artificial Sequence
  GATA2 Guide RNA
accuccugcccuucagccacu

SEQ ID NO: 3399 - RNA, 21 nt, Artificial Sequence
  GATA2 Guide RNA
accugugggccaccuccugcc

SEQ ID NO: 3400 - RNA, 21 nt, Artificial Sequence
  GATA2 Guide RNA
aggagguggcccacaggugcc

SEQ ID NO: 3401 - RNA, 21 nt, Artificial Sequence
  GATA2 Guide RNA
agggcaggagguggcccacag

SEQ ID NO: 3402 - RNA, 21 nt, Artificial Sequence
  GATA2 Guide RNA
aguggcugaagggcaggaggu

SEQ ID NO: 3403 - RNA, 21 nt, Artificial Sequence
  GATA2 Guide RNA
auggcaccugugggccaccuc

SEQ ID NO: 3404 - RNA, 21 nt, Artificial Sequence
  GATA2 Guide RNA
caccuccugcccuucagccac

SEQ ID NO: 3405 - RNA, 21 nt, Artificial Sequence
  GATA2 Guide RNA
caccugugggccaccuccugc

SEQ ID NO: 3406 - RNA, 21 nt, Artificial Sequence
  GATA2 Guide RNA
caggagguggcccacaggugc

SEQ ID NO: 3407 - RNA, 21 nt, Artificial Sequence
  GATA2 Guide RNA
cauggcaccugugggccaccu

SEQ ID NO: 3408 - RNA, 21 nt, Artificial Sequence
  GATA2 Guide RNA
ccaccuccugcccuucagcca

SEQ ID NO: 3409 - RNA, 21 nt, Artificial Sequence
  GATA2 Guide RNA
ccggaguggcugaagggcagg

SEQ ID NO: 3410 - RNA, 21 nt, Artificial Sequence
  GATA2 Guide RNA
ccuccugcccuucagccacuc

SEQ ID NO: 3411 - RNA, 21 nt, Artificial Sequence
  GATA2 Guide RNA
ccugcccuucagccacuccgg

SEQ ID NO: 3412 - RNA, 21 nt, Artificial Sequence
  GATA2 Guide RNA
ccugugggccaccuccugccc

SEQ ID NO: 3413 - RNA, 21 nt, Artificial Sequence
  GATA2 Guide RNA
cggaguggcugaagggcagga

SEQ ID NO: 3414 - RNA, 21 nt, Artificial Sequence
  GATA2 Guide RNA
cuccugcccuucagccacucc

SEQ ID NO: 3415 - RNA, 21 nt, Artificial Sequence
  GATA2 Guide RNA
cugaagggcaggagguggccc

SEQ ID NO: 3416 - RNA, 21 nt, Artificial Sequence
  GATA2 Guide RNA
cugcccuucagccacuccgga

SEQ ID NO: 3417 - RNA, 21 nt, Artificial Sequence
  GATA2 Guide RNA
cugugggccaccuccugcccu

SEQ ID NO: 3418 - RNA, 21 nt, Artificial Sequence
  GATA2 Guide RNA
gaagggcaggagguggcccac

SEQ ID NO: 3419 - RNA, 21 nt, Artificial Sequence
  GATA2 Guide RNA
gaguggcugaagggcaggagg

SEQ ID NO: 3420 - RNA, 21 nt, Artificial Sequence
  GATA2 Guide RNA
gcaccugugggccaccuccug

SEQ ID NO: 3421 - RNA, 21 nt, Artificial Sequence
  GATA2 Guide RNA
gcaggagguggcccacaggug

SEQ ID NO: 3422 - RNA, 21 nt, Artificial Sequence
  GATA2 Guide RNA
gccaccuccugcccuucagcc

SEQ ID NO: 3423 - RNA, 21 nt, Artificial Sequence
  GATA2 Guide RNA
gcugaagggcaggagguggcc

SEQ ID NO: 3424 - RNA, 21 nt, Artificial Sequence
  GATA2 Guide RNA
ggaguggcugaagggcaggag

SEQ ID NO: 3425 - RNA, 21 nt, Artificial Sequence
  GATA2 Guide RNA
ggcaccugugggccaccuccu

SEQ ID NO: 3426 - RNA, 21 nt, Artificial Sequence
  GATA2 Guide RNA
ggcaggagguggcccacaggu

SEQ ID NO: 3427 - RNA, 21 nt, Artificial Sequence
  GATA2 Guide RNA
ggccaccuccugcccuucagc

SEQ ID NO: 3428 - RNA, 21 nt, Artificial Sequence
  GATA2 Guide RNA
ggcugaagggcaggagguggc

SEQ ID NO: 3429 - RNA, 21 nt, Artificial Sequence
  GATA2 Guide RNA
gggcaggagguggcccacagg

SEQ ID NO: 3430 - RNA, 21 nt, Artificial Sequence
  GATA2 Guide RNA
gggccaccuccugcccuucag

SEQ ID NO: 3431 - RNA, 21 nt, Artificial Sequence
  GATA2 Guide RNA
guccggaguggcugaagggca

SEQ ID NO: 3432 - RNA, 21 nt, Artificial Sequence
  GATA2 Guide RNA
guggcugaagggcaggaggug

SEQ ID NO: 3433 - RNA, 21 nt, Artificial Sequence
  GATA2 Guide RNA
gugggccaccuccugcccuuc

SEQ ID NO: 3434 - RNA, 21 nt, Artificial Sequence
  GATA2 Guide RNA
guguccggaguggcugaaggg

SEQ ID NO: 3435 - RNA, 21 nt, Artificial Sequence
  GATA2 Guide RNA
uccggaguggcugaagggcag

SEQ ID NO: 3436 - RNA, 21 nt, Artificial Sequence
  GATA2 Guide RNA
uccugcccuucagccacuccg

SEQ ID NO: 3437 - RNA, 21 nt, Artificial Sequence
  GATA2 Guide RNA
ugaagggcaggagguggccca

SEQ ID NO: 3438 - RNA, 21 nt, Artificial Sequence
  GATA2 Guide RNA
uggcaccugugggccaccucc

SEQ ID NO: 3439 - RNA, 21 nt, Artificial Sequence
  GATA2 Guide RNA
uggcugaagggcaggaggugg

SEQ ID NO: 3440 - RNA, 21 nt, Artificial Sequence
  GATA2 Guide RNA
ugggccaccuccugcccuuca

SEQ ID NO: 3441 - RNA, 21 nt, Artificial Sequence
  GATA2 Guide RNA
uguccggaguggcugaagggc

SEQ ID NO: 3442 - RNA, 21 nt, Artificial Sequence
  GATA2 Guide RNA
ugugggccaccuccugcccuu

SEQ ID NO: 3443 - RNA, 21 nt, Artificial Sequence
  GATA2 Guide RNA
uguguccggaguggcugaagg

SEQ ID NO: 3444 - RNA, 22 nt, Artificial Sequence
  GATA2 Guide RNA
aagggcaggagguggcccacag

SEQ ID NO: 3445 - RNA, 22 nt, Artificial Sequence
  GATA2 Guide RNA
acauggcaccugugggccaccu

SEQ ID NO: 3446 - RNA, 22 nt, Artificial Sequence
  GATA2 Guide RNA
accuccugcccuucagccacuc

SEQ ID NO: 3447 - RNA, 22 nt, Artificial Sequence
  GATA2 Guide RNA
accugugggccaccuccugccc

SEQ ID NO: 3448 - RNA, 22 nt, Artificial Sequence
  GATA2 Guide RNA
aggagguggcccacaggugcca

SEQ ID NO: 3449 - RNA, 22 nt, Artificial Sequence
  GATA2 Guide RNA
agggcaggagguggcccacagg

SEQ ID NO: 3450 - RNA, 22 nt, Artificial Sequence
  GATA2 Guide RNA
aguggcugaagggcaggaggug

SEQ ID NO: 3451 - RNA, 22 nt, Artificial Sequence
  GATA2 Guide RNA
auggcaccugugggccaccucc

SEQ ID NO: 3452 - RNA, 22 nt, Artificial Sequence
  GATA2 Guide RNA
auguguccggaguggcugaagg

SEQ ID NO: 3453 - RNA, 22 nt, Artificial Sequence
  GATA2 Guide RNA
cacauggcaccugugggccacc

SEQ ID NO: 3454 - RNA, 22 nt, Artificial Sequence
  GATA2 Guide RNA
caccuccugcccuucagccacu

SEQ ID NO: 3455 - RNA, 22 nt, Artificial Sequence
  GATA2 Guide RNA
caccugugggccaccuccugcc

SEQ ID NO: 3456 - RNA, 22 nt, Artificial Sequence
  GATA2 Guide RNA
caggagguggcccacaggugcc

SEQ ID NO: 3457 - RNA, 22 nt, Artificial Sequence
  GATA2 Guide RNA
cauggcaccugugggccaccuc

SEQ ID NO: 3458 - RNA, 22 nt, Artificial Sequence
  GATA2 Guide RNA
ccaccuccugcccuucagccac

SEQ ID NO: 3459 - RNA, 22 nt, Artificial Sequence
  GATA2 Guide RNA
ccggaguggcugaagggcagga

SEQ ID NO: 3460 - RNA, 22 nt, Artificial Sequence
  GATA2 Guide RNA
ccuccugcccuucagccacucc

SEQ ID NO: 3461 - RNA, 22 nt, Artificial Sequence
  GATA2 Guide RNA
ccugcccuucagccacuccgga

SEQ ID NO: 3462 - RNA, 22 nt, Artificial Sequence
  GATA2 Guide RNA
ccugugggccaccuccugcccu

SEQ ID NO: 3463 - RNA, 22 nt, Artificial Sequence
  GATA2 Guide RNA
cggaguggcugaagggcaggag

SEQ ID NO: 3464 - RNA, 22 nt, Artificial Sequence
  GATA2 Guide RNA
cuccugcccuucagccacuccg

SEQ ID NO: 3465 - RNA, 22 nt, Artificial Sequence
  GATA2 Guide RNA
cugaagggcaggagguggccca

SEQ ID NO: 3466 - RNA, 22 nt, Artificial Sequence
  GATA2 Guide RNA
cugcccuucagccacuccggac

SEQ ID NO: 3467 - RNA, 22 nt, Artificial Sequence
  GATA2 Guide RNA
cugugggccaccuccugcccuu

SEQ ID NO: 3468 - RNA, 22 nt, Artificial Sequence
  GATA2 Guide RNA
gaagggcaggagguggcccaca

SEQ ID NO: 3469 - RNA, 22 nt, Artificial Sequence
  GATA2 Guide RNA
gaguggcugaagggcaggaggu

SEQ ID NO: 3470 - RNA, 22 nt, Artificial Sequence
  GATA2 Guide RNA
gcaccugugggccaccuccugc

SEQ ID NO: 3471 - RNA, 22 nt, Artificial Sequence
  GATA2 Guide RNA
gcaggagguggcccacaggugc

SEQ ID NO: 3472 - RNA, 22 nt, Artificial Sequence
  GATA2 Guide RNA
gccaccuccugcccuucagcca

SEQ ID NO: 3473 - RNA, 22 nt, Artificial Sequence
  GATA2 Guide RNA
gcugaagggcaggagguggccc

SEQ ID NO: 3474 - RNA, 22 nt, Artificial Sequence
  GATA2 Guide RNA
ggaguggcugaagggcaggagg

SEQ ID NO: 3475 - RNA, 22 nt, Artificial Sequence
  GATA2 Guide RNA
ggcaccugugggccaccuccug

SEQ ID NO: 3476 - RNA, 22 nt, Artificial Sequence
  GATA2 Guide RNA
ggcaggagguggcccacaggug

SEQ ID NO: 3477 - RNA, 22 nt, Artificial Sequence
  GATA2 Guide RNA
ggccaccuccugcccuucagcc

SEQ ID NO: 3478 - RNA, 22 nt, Artificial Sequence
  GATA2 Guide RNA
ggcugaagggcaggagguggcc

SEQ ID NO: 3479 - RNA, 22 nt, Artificial Sequence
  GATA2 Guide RNA
gggcaggagguggcccacaggu

SEQ ID NO: 3480 - RNA, 22 nt, Artificial Sequence
  GATA2 Guide RNA
gggccaccuccugcccuucagc

SEQ ID NO: 3481 - RNA, 22 nt, Artificial Sequence
  GATA2 Guide RNA
guccggaguggcugaagggcag

SEQ ID NO: 3482 - RNA, 22 nt, Artificial Sequence
  GATA2 Guide RNA
guggcugaagggcaggaggugg

SEQ ID NO: 3483 - RNA, 22 nt, Artificial Sequence
  GATA2 Guide RNA
gugggccaccuccugcccuuca

SEQ ID NO: 3484 - RNA, 22 nt, Artificial Sequence
  GATA2 Guide RNA
guguccggaguggcugaagggc

SEQ ID NO: 3485 - RNA, 22 nt, Artificial Sequence
  GATA2 Guide RNA
uccggaguggcugaagggcagg

SEQ ID NO: 3486 - RNA, 22 nt, Artificial Sequence
  GATA2 Guide RNA
uccugcccuucagccacuccgg

SEQ ID NO: 3487 - RNA, 22 nt, Artificial Sequence
  GATA2 Guide RNA
ugaagggcaggagguggcccac

SEQ ID NO: 3488 - RNA, 22 nt, Artificial Sequence
  GATA2 Guide RNA
uggcaccugugggccaccuccu

SEQ ID NO: 3489 - RNA, 22 nt, Artificial Sequence
  GATA2 Guide RNA
uggcugaagggcaggagguggc

SEQ ID NO: 3490 - RNA, 22 nt, Artificial Sequence
  GATA2 Guide RNA
ugggccaccuccugcccuucag

SEQ ID NO: 3491 - RNA, 22 nt, Artificial Sequence
  GATA2 Guide RNA
uguccggaguggcugaagggca

SEQ ID NO: 3492 - RNA, 22 nt, Artificial Sequence
  GATA2 Guide RNA
ugugggccaccuccugcccuuc

SEQ ID NO: 3493 - RNA, 22 nt, Artificial Sequence
  GATA2 Guide RNA
uguguccggaguggcugaaggg

SEQ ID NO: 3494 - RNA, 20 nt, Artificial Sequence
  GATA2 Guide RNA
aagggcgggagauggcccac

SEQ ID NO: 3495 - RNA, 20 nt, Artificial Sequence
  GATA2 Guide RNA
acacauggcaccugugggcc

SEQ ID NO: 3496 - RNA, 20 nt, Artificial Sequence
  GATA2 Guide RNA
acauggcaccugugggccau

SEQ ID NO: 3497 - RNA, 20 nt, Artificial Sequence
  GATA2 Guide RNA
accugugggccaucucccgc

SEQ ID NO: 3498 - RNA, 20 nt, Artificial Sequence
  GATA2 Guide RNA
agauggcccacaggugccau

SEQ ID NO: 3499 - RNA, 20 nt, Artificial Sequence
  GATA2 Guide RNA
agggcgggagauggcccaca

SEQ ID NO: 3500 - RNA, 20 nt, Artificial Sequence
  GATA2 Guide RNA
aguggcugaagggcgggaga

SEQ ID NO: 3501 - RNA, 20 nt, Artificial Sequence
  GATA2 Guide RNA
aucucccgcccuucagccac

SEQ ID NO: 3502 - RNA, 20 nt, Artificial Sequence
  GATA2 Guide RNA
auggcaccugugggccaucu

SEQ ID NO: 3503 - RNA, 20 nt, Artificial Sequence
  GATA2 Guide RNA
auggcccacaggugccaugu

SEQ ID NO: 3504 - RNA, 20 nt, Artificial Sequence
  GATA2 Guide RNA
cacauggcaccugugggcca

SEQ ID NO: 3505 - RNA, 20 nt, Artificial Sequence
  GATA2 Guide RNA
caccugugggccaucucccg

SEQ ID NO: 3506 - RNA, 20 nt, Artificial Sequence
  GATA2 Guide RNA
caucucccgcccuucagcca

SEQ ID NO: 3507 - RNA, 20 nt, Artificial Sequence
  GATA2 Guide RNA
cauggcaccugugggccauc

SEQ ID NO: 3508 - RNA, 20 nt, Artificial Sequence
  GATA2 Guide RNA
ccaucucccgcccuucagcc

SEQ ID NO: 3509 - RNA, 20 nt, Artificial Sequence
  GATA2 Guide RNA
ccugugggccaucucccgcc

SEQ ID NO: 3510 - RNA, 20 nt, Artificial Sequence
  GATA2 Guide RNA
cggaguggcugaagggcggg

SEQ ID NO: 3511 - RNA, 20 nt, Artificial Sequence
  GATA2 Guide RNA
cgggagauggcccacaggug

SEQ ID NO: 3512 - RNA, 20 nt, Artificial Sequence
  GATA2 Guide RNA
cugaagggcgggagauggcc

SEQ ID NO: 3513 - RNA, 20 nt, Artificial Sequence
  GATA2 Guide RNA
cugugggccaucucccgccc

SEQ ID NO: 3514 - RNA, 20 nt, Artificial Sequence
  GATA2 Guide RNA
gaagggcgggagauggccca

SEQ ID NO: 3515 - RNA, 20 nt, Artificial Sequence
  GATA2 Guide RNA
gacacauggcaccugugggc

SEQ ID NO: 3516 - RNA, 20 nt, Artificial Sequence
  GATA2 Guide RNA
gagauggcccacaggugcca

SEQ ID NO: 3517 - RNA, 20 nt, Artificial Sequence
  GATA2 Guide RNA
gaguggcugaagggcgggag

SEQ ID NO: 3518 - RNA, 20 nt, Artificial Sequence
  GATA2 Guide RNA
gauggcccacaggugccaug

SEQ ID NO: 3519 - RNA, 20 nt, Artificial Sequence
  GATA2 Guide RNA
gcaccugugggccaucuccc

SEQ ID NO: 3520 - RNA, 20 nt, Artificial Sequence
  GATA2 Guide RNA
gccaucucccgcccuucagc

SEQ ID NO: 3521 - RNA, 20 nt, Artificial Sequence
  GATA2 Guide RNA
gcgggagauggcccacaggu

SEQ ID NO: 3522 - RNA, 20 nt, Artificial Sequence
  GATA2 Guide RNA
gcugaagggcgggagauggc

SEQ ID NO: 3523 - RNA, 20 nt, Artificial Sequence
  GATA2 Guide RNA
ggacacauggcaccuguggg

SEQ ID NO: 3524 - RNA, 20 nt, Artificial Sequence
  GATA2 Guide RNA
ggagauggcccacaggugcc

SEQ ID NO: 3525 - RNA, 20 nt, Artificial Sequence
  GATA2 Guide RNA
ggaguggcugaagggcggga

SEQ ID NO: 3526 - RNA, 20 nt, Artificial Sequence
  GATA2 Guide RNA
ggcaccugugggccaucucc

SEQ ID NO: 3527 - RNA, 20 nt, Artificial Sequence
  GATA2 Guide RNA
ggccaucucccgcccuucag

SEQ ID NO: 3528 - RNA, 20 nt, Artificial Sequence
  GATA2 Guide RNA
ggcgggagauggcccacagg

SEQ ID NO: 3529 - RNA, 20 nt, Artificial Sequence
  GATA2 Guide RNA
ggcugaagggcgggagaugg

SEQ ID NO: 3530 - RNA, 20 nt, Artificial Sequence
  GATA2 Guide RNA
gggagauggcccacaggugc

SEQ ID NO: 3531 - RNA, 20 nt, Artificial Sequence
  GATA2 Guide RNA
gggccaucucccgcccuuca

SEQ ID NO: 3532 - RNA, 20 nt, Artificial Sequence
  GATA2 Guide RNA
gggcgggagauggcccacag

SEQ ID NO: 3533 - RNA, 20 nt, Artificial Sequence
  GATA2 Guide RNA
guggcugaagggcgggagau

SEQ ID NO: 3534 - RNA, 20 nt, Artificial Sequence
  GATA2 Guide RNA
gugggccaucucccgcccuu

SEQ ID NO: 3535 - RNA, 20 nt, Artificial Sequence
  GATA2 Guide RNA
ugaagggcgggagauggccc

SEQ ID NO: 3536 - RNA, 20 nt, Artificial Sequence
  GATA2 Guide RNA
uggcaccugugggccaucuc

SEQ ID NO: 3537 - RNA, 20 nt, Artificial Sequence
  GATA2 Guide RNA
uggcugaagggcgggagaug

SEQ ID NO: 3538 - RNA, 20 nt, Artificial Sequence
  GATA2 Guide RNA
ugggccaucucccgcccuuc

SEQ ID NO: 3539 - RNA, 20 nt, Artificial Sequence
  GATA2 Guide RNA
ugugggccaucucccgcccu

SEQ ID NO: 3540 - RNA, 21 nt, Artificial Sequence
  GATA2 Guide RNA
aagggcgggagauggcccaca

SEQ ID NO: 3541 - RNA, 21 nt, Artificial Sequence
  GATA2 Guide RNA
acacauggcaccugugggcca

SEQ ID NO: 3542 - RNA, 21 nt, Artificial Sequence
  GATA2 Guide RNA
acauggcaccugugggccauc

SEQ ID NO: 3543 - RNA, 21 nt, Artificial Sequence
  GATA2 Guide RNA
accugugggccaucucccgcc

SEQ ID NO: 3544 - RNA, 21 nt, Artificial Sequence
  GATA2 Guide RNA
agauggcccacaggugccaug

SEQ ID NO: 3545 - RNA, 21 nt, Artificial Sequence
  GATA2 Guide RNA
agggcgggagauggcccacag

SEQ ID NO: 3546 - RNA, 21 nt, Artificial Sequence
  GATA2 Guide RNA
aguggcugaagggcgggagau

SEQ ID NO: 3547 - RNA, 21 nt, Artificial Sequence
  GATA2 Guide RNA
aucucccgcccuucagccacu

SEQ ID NO: 3548 - RNA, 21 nt, Artificial Sequence
  GATA2 Guide RNA
auggcaccugugggccaucuc

SEQ ID NO: 3549 - RNA, 21 nt, Artificial Sequence
  GATA2 Guide RNA
auggcccacaggugccaugug

SEQ ID NO: 3550 - RNA, 21 nt, Artificial Sequence
  GATA2 Guide RNA
cacauggcaccugugggccau

SEQ ID NO: 3551 - RNA, 21 nt, Artificial Sequence
  GATA2 Guide RNA
caccugugggccaucucccgc

SEQ ID NO: 3552 - RNA, 21 nt, Artificial Sequence
  GATA2 Guide RNA
caucucccgcccuucagccac

SEQ ID NO: 3553 - RNA, 21 nt, Artificial Sequence
  GATA2 Guide RNA
cauggcaccugugggccaucu

SEQ ID NO: 3554 - RNA, 21 nt, Artificial Sequence
  GATA2 Guide RNA
ccaucucccgcccuucagcca

SEQ ID NO: 3555 - RNA, 21 nt, Artificial Sequence
  GATA2 Guide RNA
ccggaguggcugaagggcggg

SEQ ID NO: 3556 - RNA, 21 nt, Artificial Sequence
  GATA2 Guide RNA
ccugugggccaucucccgccc

SEQ ID NO: 3557 - RNA, 21 nt, Artificial Sequence
  GATA2 Guide RNA
cggaguggcugaagggcggga

SEQ ID NO: 3558 - RNA, 21 nt, Artificial Sequence
  GATA2 Guide RNA
cgggagauggcccacaggugc

SEQ ID NO: 3559 - RNA, 21 nt, Artificial Sequence
  GATA2 Guide RNA
cugaagggcgggagauggccc

SEQ ID NO: 3560 - RNA, 21 nt, Artificial Sequence
  GATA2 Guide RNA
cugugggccaucucccgcccu

SEQ ID NO: 3561 - RNA, 21 nt, Artificial Sequence
  GATA2 Guide RNA
gaagggcgggagauggcccac

SEQ ID NO: 3562 - RNA, 21 nt, Artificial Sequence
  GATA2 Guide RNA
gacacauggcaccugugggcc

SEQ ID NO: 3563 - RNA, 21 nt, Artificial Sequence
  GATA2 Guide RNA
gagauggcccacaggugccau

SEQ ID NO: 3564 - RNA, 21 nt, Artificial Sequence
  GATA2 Guide RNA
gaguggcugaagggcgggaga

SEQ ID NO: 3565 - RNA, 21 nt, Artificial Sequence
  GATA2 Guide RNA
gauggcccacaggugccaugu

SEQ ID NO: 3566 - RNA, 21 nt, Artificial Sequence
  GATA2 Guide RNA
gcaccugugggccaucucccg

SEQ ID NO: 3567 - RNA, 21 nt, Artificial Sequence
  GATA2 Guide RNA
gccaucucccgcccuucagcc

SEQ ID NO: 3568 - RNA, 21 nt, Artificial Sequence
  GATA2 Guide RNA
gcgggagauggcccacaggug

SEQ ID NO: 3569 - RNA, 21 nt, Artificial Sequence
  GATA2 Guide RNA
gcugaagggcgggagauggcc

SEQ ID NO: 3570 - RNA, 21 nt, Artificial Sequence
  GATA2 Guide RNA
ggacacauggcaccugugggc

SEQ ID NO: 3571 - RNA, 21 nt, Artificial Sequence
  GATA2 Guide RNA
ggagauggcccacaggugcca

SEQ ID NO: 3572 - RNA, 21 nt, Artificial Sequence
  GATA2 Guide RNA
ggaguggcugaagggcgggag

SEQ ID NO: 3573 - RNA, 21 nt, Artificial Sequence
  GATA2 Guide RNA
ggcaccugugggccaucuccc

SEQ ID NO: 3574 - RNA, 21 nt, Artificial Sequence
  GATA2 Guide RNA
ggccaucucccgcccuucagc

SEQ ID NO: 3575 - RNA, 21 nt, Artificial Sequence
  GATA2 Guide RNA
ggcgggagauggcccacaggu

SEQ ID NO: 3576 - RNA, 21 nt, Artificial Sequence
  GATA2 Guide RNA
ggcugaagggcgggagauggc

SEQ ID NO: 3577 - RNA, 21 nt, Artificial Sequence
  GATA2 Guide RNA
gggagauggcccacaggugcc

SEQ ID NO: 3578 - RNA, 21 nt, Artificial Sequence
  GATA2 Guide RNA
gggccaucucccgcccuucag

SEQ ID NO: 3579 - RNA, 21 nt, Artificial Sequence
  GATA2 Guide RNA
gggcgggagauggcccacagg

SEQ ID NO: 3580 - RNA, 21 nt, Artificial Sequence
  GATA2 Guide RNA
guggcugaagggcgggagaug

SEQ ID NO: 3581 - RNA, 21 nt, Artificial Sequence
  GATA2 Guide RNA
gugggccaucucccgcccuuc

SEQ ID NO: 3582 - RNA, 21 nt, Artificial Sequence
  GATA2 Guide RNA
ugaagggcgggagauggccca

SEQ ID NO: 3583 - RNA, 21 nt, Artificial Sequence
  GATA2 Guide RNA
uggacacauggcaccuguggg

SEQ ID NO: 3584 - RNA, 21 nt, Artificial Sequence
  GATA2 Guide RNA
uggcaccugugggccaucucc

SEQ ID NO: 3585 - RNA, 21 nt, Artificial Sequence
  GATA2 Guide RNA
uggcugaagggcgggagaugg

SEQ ID NO: 3586 - RNA, 21 nt, Artificial Sequence
  GATA2 Guide RNA
ugggccaucucccgcccuuca

SEQ ID NO: 3587 - RNA, 21 nt, Artificial Sequence
  GATA2 Guide RNA
ugugggccaucucccgcccuu

SEQ ID NO: 3588 - RNA, 22 nt, Artificial Sequence
  GATA2 Guide RNA
aagggcgggagauggcccacag

SEQ ID NO: 3589 - RNA, 22 nt, Artificial Sequence
  GATA2 Guide RNA
acacauggcaccugugggccau

SEQ ID NO: 3590 - RNA, 22 nt, Artificial Sequence
  GATA2 Guide RNA
acauggcaccugugggccaucu

SEQ ID NO: 3591 - RNA, 22 nt, Artificial Sequence
  GATA2 Guide RNA
accugugggccaucucccgccc

SEQ ID NO: 3592 - RNA, 22 nt, Artificial Sequence
  GATA2 Guide RNA
agauggcccacaggugccaugu

SEQ ID NO: 3593 - RNA, 22 nt, Artificial Sequence
  GATA2 Guide RNA
agggcgggagauggcccacagg

SEQ ID NO: 3594 - RNA, 22 nt, Artificial Sequence
  GATA2 Guide RNA
aguggcugaagggcgggagaug

SEQ ID NO: 3595 - RNA, 22 nt, Artificial Sequence
  GATA2 Guide RNA
aucucccgcccuucagccacuc

SEQ ID NO: 3596 - RNA, 22 nt, Artificial Sequence
  GATA2 Guide RNA
auggcaccugugggccaucucc

SEQ ID NO: 3597 - RNA, 22 nt, Artificial Sequence
  GATA2 Guide RNA
auggcccacaggugccaugugu

SEQ ID NO: 3598 - RNA, 22 nt, Artificial Sequence
  GATA2 Guide RNA
cacauggcaccugugggccauc

SEQ ID NO: 3599 - RNA, 22 nt, Artificial Sequence
  GATA2 Guide RNA
caccugugggccaucucccgcc

SEQ ID NO: 3600 - RNA, 22 nt, Artificial Sequence
  GATA2 Guide RNA
caucucccgcccuucagccacu

SEQ ID NO: 3601 - RNA, 22 nt, Artificial Sequence
  GATA2 Guide RNA
cauggcaccugugggccaucuc

SEQ ID NO: 3602 - RNA, 22 nt, Artificial Sequence
  GATA2 Guide RNA
ccaucucccgcccuucagccac

SEQ ID NO: 3603 - RNA, 22 nt, Artificial Sequence
  GATA2 Guide RNA
ccggaguggcugaagggcggga

SEQ ID NO: 3604 - RNA, 22 nt, Artificial Sequence
  GATA2 Guide RNA
ccugugggccaucucccgcccu

SEQ ID NO: 3605 - RNA, 22 nt, Artificial Sequence
  GATA2 Guide RNA
cggaguggcugaagggcgggag

SEQ ID NO: 3606 - RNA, 22 nt, Artificial Sequence
  GATA2 Guide RNA
cgggagauggcccacaggugcc

SEQ ID NO: 3607 - RNA, 22 nt, Artificial Sequence
  GATA2 Guide RNA
cugaagggcgggagauggccca

SEQ ID NO: 3608 - RNA, 22 nt, Artificial Sequence
  GATA2 Guide RNA
cuggacacauggcaccuguggg

SEQ ID NO: 3609 - RNA, 22 nt, Artificial Sequence
  GATA2 Guide RNA
cugugggccaucucccgcccuu

SEQ ID NO: 3610 - RNA, 22 nt, Artificial Sequence
  GATA2 Guide RNA
gaagggcgggagauggcccaca

SEQ ID NO: 3611 - RNA, 22 nt, Artificial Sequence
  GATA2 Guide RNA
gacacauggcaccugugggcca

SEQ ID NO: 3612 - RNA, 22 nt, Artificial Sequence
  GATA2 Guide RNA
gagauggcccacaggugccaug

SEQ ID NO: 3613 - RNA, 22 nt, Artificial Sequence
  GATA2 Guide RNA
gaguggcugaagggcgggagau

SEQ ID NO: 3614 - RNA, 22 nt, Artificial Sequence
  GATA2 Guide RNA
gauggcccacaggugccaugug

SEQ ID NO: 3615 - RNA, 22 nt, Artificial Sequence
  GATA2 Guide RNA
gcaccugugggccaucucccgc

SEQ ID NO: 3616 - RNA, 22 nt, Artificial Sequence
  GATA2 Guide RNA
gccaucucccgcccuucagcca

SEQ ID NO: 3617 - RNA, 22 nt, Artificial Sequence
  GATA2 Guide RNA
gcgggagauggcccacaggugc

SEQ ID NO: 3618 - RNA, 22 nt, Artificial Sequence
  GATA2 Guide RNA
gcugaagggcgggagauggccc

SEQ ID NO: 3619 - RNA, 22 nt, Artificial Sequence
  GATA2 Guide RNA
ggacacauggcaccugugggcc

SEQ ID NO: 3620 - RNA, 22 nt, Artificial Sequence
  GATA2 Guide RNA
ggagauggcccacaggugccau

SEQ ID NO: 3621 - RNA, 22 nt, Artificial Sequence
  GATA2 Guide RNA
ggaguggcugaagggcgggaga

SEQ ID NO: 3622 - RNA, 22 nt, Artificial Sequence
  GATA2 Guide RNA
ggcaccugugggccaucucccg

SEQ ID NO: 3623 - RNA, 22 nt, Artificial Sequence
  GATA2 Guide RNA
ggccaucucccgcccuucagcc

SEQ ID NO: 3624 - RNA, 22 nt, Artificial Sequence
  GATA2 Guide RNA
ggcgggagauggcccacaggug

SEQ ID NO: 3625 - RNA, 22 nt, Artificial Sequence
  GATA2 Guide RNA
ggcugaagggcgggagauggcc

SEQ ID NO: 3626 - RNA, 22 nt, Artificial Sequence
  GATA2 Guide RNA
gggagauggcccacaggugcca

SEQ ID NO: 3627 - RNA, 22 nt, Artificial Sequence
  GATA2 Guide RNA
gggccaucucccgcccuucagc

SEQ ID NO: 3628 - RNA, 22 nt, Artificial Sequence
  GATA2 Guide RNA
gggcgggagauggcccacaggu

SEQ ID NO: 3629 - RNA, 22 nt, Artificial Sequence
  GATA2 Guide RNA
guggcugaagggcgggagaugg

SEQ ID NO: 3630 - RNA, 22 nt, Artificial Sequence
  GATA2 Guide RNA
gugggccaucucccgcccuuca

SEQ ID NO: 3631 - RNA, 22 nt, Artificial Sequence
  GATA2 Guide RNA
uccggaguggcugaagggcggg

SEQ ID NO: 3632 - RNA, 22 nt, Artificial Sequence
  GATA2 Guide RNA
ugaagggcgggagauggcccac

SEQ ID NO: 3633 - RNA, 22 nt, Artificial Sequence
  GATA2 Guide RNA
uggacacauggcaccugugggc

SEQ ID NO: 3634 - RNA, 22 nt, Artificial Sequence
  GATA2 Guide RNA
uggcaccugugggccaucuccc

SEQ ID NO: 3635 - RNA, 22 nt, Artificial Sequence
  GATA2 Guide RNA
uggcugaagggcgggagauggc

SEQ ID NO: 3636 - RNA, 22 nt, Artificial Sequence
  GATA2 Guide RNA
ugggccaucucccgcccuucag

SEQ ID NO: 3637 - RNA, 22 nt, Artificial Sequence
  GATA2 Guide RNA
ugugggccaucucccgcccuuc

SEQ ID NO: 3638 - RNA, 20 nt, Artificial Sequence
  GATA2 Guide RNA
aagggcgggagguggccuac

SEQ ID NO: 3639 - RNA, 20 nt, Artificial Sequence
  GATA2 Guide RNA
acacauggcaccuguaggcc

SEQ ID NO: 3640 - RNA, 20 nt, Artificial Sequence
  GATA2 Guide RNA
acauggcaccuguaggccac

SEQ ID NO: 3641 - RNA, 20 nt, Artificial Sequence
  GATA2 Guide RNA
accuguaggccaccucccgc

SEQ ID NO: 3642 - RNA, 20 nt, Artificial Sequence
  GATA2 Guide RNA
agggcgggagguggccuaca

SEQ ID NO: 3643 - RNA, 20 nt, Artificial Sequence
  GATA2 Guide RNA
agguggccuacaggugccau

SEQ ID NO: 3644 - RNA, 20 nt, Artificial Sequence
  GATA2 Guide RNA
auggcaccuguaggccaccu

SEQ ID NO: 3645 - RNA, 20 nt, Artificial Sequence
  GATA2 Guide RNA
cacauggcaccuguaggcca

SEQ ID NO: 3646 - RNA, 20 nt, Artificial Sequence
  GATA2 Guide RNA
caccuguaggccaccucccg

SEQ ID NO: 3647 - RNA, 20 nt, Artificial Sequence
  GATA2 Guide RNA
cauggcaccuguaggccacc

SEQ ID NO: 3648 - RNA, 20 nt, Artificial Sequence
  GATA2 Guide RNA
ccuacaggugccaugugucc

SEQ ID NO: 3649 - RNA, 20 nt, Artificial Sequence
  GATA2 Guide RNA
ccuguaggccaccucccgcc

SEQ ID NO: 3650 - RNA, 20 nt, Artificial Sequence
  GATA2 Guide RNA
cgggagguggccuacaggug

SEQ ID NO: 3651 - RNA, 20 nt, Artificial Sequence
  GATA2 Guide RNA
cuacaggugccaugugucca

SEQ ID NO: 3652 - RNA, 20 nt, Artificial Sequence
  GATA2 Guide RNA
cugaagggcgggagguggcc

SEQ ID NO: 3653 - RNA, 20 nt, Artificial Sequence
  GATA2 Guide RNA
cuggacacauggcaccugua

SEQ ID NO: 3654 - RNA, 20 nt, Artificial Sequence
  GATA2 Guide RNA
cuggcuggacacauggcacc

SEQ ID NO: 3655 - RNA, 20 nt, Artificial Sequence
  GATA2 Guide RNA
cuguaggccaccucccgccc

SEQ ID NO: 3656 - RNA, 20 nt, Artificial Sequence
  GATA2 Guide RNA
gaagggcgggagguggccua

SEQ ID NO: 3657 - RNA, 20 nt, Artificial Sequence
  GATA2 Guide RNA
gacacauggcaccuguaggc

SEQ ID NO: 3658 - RNA, 20 nt, Artificial Sequence
  GATA2 Guide RNA
gagguggccuacaggugcca

SEQ ID NO: 3659 - RNA, 20 nt, Artificial Sequence
  GATA2 Guide RNA
gcaccuguaggccaccuccc

SEQ ID NO: 3660 - RNA, 20 nt, Artificial Sequence
  GATA2 Guide RNA
gccuacaggugccauguguc

SEQ ID NO: 3661 - RNA, 20 nt, Artificial Sequence
  GATA2 Guide RNA
gcgggagguggccuacaggu

SEQ ID NO: 3662 - RNA, 20 nt, Artificial Sequence
  GATA2 Guide RNA
gcugaagggcgggagguggc

SEQ ID NO: 3663 - RNA, 20 nt, Artificial Sequence
  GATA2 Guide RNA
gcuggacacauggcaccugu

SEQ ID NO: 3664 - RNA, 20 nt, Artificial Sequence
  GATA2 Guide RNA
ggacacauggcaccuguagg

SEQ ID NO: 3665 - RNA, 20 nt, Artificial Sequence
  GATA2 Guide RNA
ggagguggccuacaggugcc

SEQ ID NO: 3666 - RNA, 20 nt, Artificial Sequence
  GATA2 Guide RNA
ggcaccuguaggccaccucc

SEQ ID NO: 3667 - RNA, 20 nt, Artificial Sequence
  GATA2 Guide RNA
ggccuacaggugccaugugu

SEQ ID NO: 3668 - RNA, 20 nt, Artificial Sequence
  GATA2 Guide RNA
ggcgggagguggccuacagg

SEQ ID NO: 3669 - RNA, 20 nt, Artificial Sequence
  GATA2 Guide RNA
ggcugaagggcgggaggugg

SEQ ID NO: 3670 - RNA, 20 nt, Artificial Sequence
  GATA2 Guide RNA
ggcuggacacauggcaccug

SEQ ID NO: 3671 - RNA, 20 nt, Artificial Sequence
  GATA2 Guide RNA
gggagguggccuacaggugc

SEQ ID NO: 3672 - RNA, 20 nt, Artificial Sequence
  GATA2 Guide RNA
gggcgggagguggccuacag

SEQ ID NO: 3673 - RNA, 20 nt, Artificial Sequence
  GATA2 Guide RNA
gguggccuacaggugccaug

SEQ ID NO: 3674 - RNA, 20 nt, Artificial Sequence
  GATA2 Guide RNA
guaggccaccucccgcccuu

SEQ ID NO: 3675 - RNA, 20 nt, Artificial Sequence
  GATA2 Guide RNA
guggccuacaggugccaugu

SEQ ID NO: 3676 - RNA, 20 nt, Artificial Sequence
  GATA2 Guide RNA
uacaggugccauguguccag

SEQ ID NO: 3677 - RNA, 20 nt, Artificial Sequence
  GATA2 Guide RNA
uaggccaccucccgcccuuc

SEQ ID NO: 3678 - RNA, 20 nt, Artificial Sequence
  GATA2 Guide RNA
ugaagggcgggagguggccu

SEQ ID NO: 3679 - RNA, 20 nt, Artificial Sequence
  GATA2 Guide RNA
uggacacauggcaccuguag

SEQ ID NO: 3680 - RNA, 20 nt, Artificial Sequence
  GATA2 Guide RNA
uggcaccuguaggccaccuc

SEQ ID NO: 3681 - RNA, 20 nt, Artificial Sequence
  GATA2 Guide RNA
uggccuacaggugccaugug

SEQ ID NO: 3682 - RNA, 20 nt, Artificial Sequence
  GATA2 Guide RNA
uggcuggacacauggcaccu

SEQ ID NO: 3683 - RNA, 20 nt, Artificial Sequence
  GATA2 Guide RNA
uguaggccaccucccgcccu

SEQ ID NO: 3684 - RNA, 21 nt, Artificial Sequence
  GATA2 Guide RNA
aagggcgggagguggccuaca

SEQ ID NO: 3685 - RNA, 21 nt, Artificial Sequence
  GATA2 Guide RNA
acacauggcaccuguaggcca

SEQ ID NO: 3686 - RNA, 21 nt, Artificial Sequence
  GATA2 Guide RNA
acauggcaccuguaggccacc

SEQ ID NO: 3687 - RNA, 21 nt, Artificial Sequence
  GATA2 Guide RNA
accuguaggccaccucccgcc

SEQ ID NO: 3688 - RNA, 21 nt, Artificial Sequence
  GATA2 Guide RNA
agggcgggagguggccuacag

SEQ ID NO: 3689 - RNA, 21 nt, Artificial Sequence
  GATA2 Guide RNA
agguggccuacaggugccaug

SEQ ID NO: 3690 - RNA, 21 nt, Artificial Sequence
  GATA2 Guide RNA
auggcaccuguaggccaccuc

SEQ ID NO: 3691 - RNA, 21 nt, Artificial Sequence
  GATA2 Guide RNA
cacauggcaccuguaggccac

SEQ ID NO: 3692 - RNA, 21 nt, Artificial Sequence
  GATA2 Guide RNA
caccuguaggccaccucccgc

SEQ ID NO: 3693 - RNA, 21 nt, Artificial Sequence
  GATA2 Guide RNA
cauggcaccuguaggccaccu

SEQ ID NO: 3694 - RNA, 21 nt, Artificial Sequence
  GATA2 Guide RNA
ccuacaggugccaugugucca

SEQ ID NO: 3695 - RNA, 21 nt, Artificial Sequence
  GATA2 Guide RNA
ccuggcuggacacauggcacc

SEQ ID NO: 3696 - RNA, 21 nt, Artificial Sequence
  GATA2 Guide RNA
ccuguaggccaccucccgccc

SEQ ID NO: 3697 - RNA, 21 nt, Artificial Sequence
  GATA2 Guide RNA
cgggagguggccuacaggugc

SEQ ID NO: 3698 - RNA, 21 nt, Artificial Sequence
  GATA2 Guide RNA
cuacaggugccauguguccag

SEQ ID NO: 3699 - RNA, 21 nt, Artificial Sequence
  GATA2 Guide RNA
cugaagggcgggagguggccu

SEQ ID NO: 3700 - RNA, 21 nt, Artificial Sequence
  GATA2 Guide RNA
cuggacacauggcaccuguag

SEQ ID NO: 3701 - RNA, 21 nt, Artificial Sequence
  GATA2 Guide RNA
cuggcuggacacauggcaccu

SEQ ID NO: 3702 - RNA, 21 nt, Artificial Sequence
  GATA2 Guide RNA
cuguaggccaccucccgcccu

SEQ ID NO: 3703 - RNA, 21 nt, Artificial Sequence
  GATA2 Guide RNA
gaagggcgggagguggccuac

SEQ ID NO: 3704 - RNA, 21 nt, Artificial Sequence
  GATA2 Guide RNA
gacacauggcaccuguaggcc

SEQ ID NO: 3705 - RNA, 21 nt, Artificial Sequence
  GATA2 Guide RNA
gagguggccuacaggugccau

SEQ ID NO: 3706 - RNA, 21 nt, Artificial Sequence
  GATA2 Guide RNA
gcaccuguaggccaccucccg

SEQ ID NO: 3707 - RNA, 21 nt, Artificial Sequence
  GATA2 Guide RNA
gccuacaggugccaugugucc

SEQ ID NO: 3708 - RNA, 21 nt, Artificial Sequence
  GATA2 Guide RNA
gcgggagguggccuacaggug

SEQ ID NO: 3709 - RNA, 21 nt, Artificial Sequence
  GATA2 Guide RNA
gcugaagggcgggagguggcc

SEQ ID NO: 3710 - RNA, 21 nt, Artificial Sequence
  GATA2 Guide RNA
gcuggacacauggcaccugua

SEQ ID NO: 3711 - RNA, 21 nt, Artificial Sequence
  GATA2 Guide RNA
ggacacauggcaccuguaggc

SEQ ID NO: 3712 - RNA, 21 nt, Artificial Sequence
  GATA2 Guide RNA
ggagguggccuacaggugcca

SEQ ID NO: 3713 - RNA, 21 nt, Artificial Sequence
  GATA2 Guide RNA
ggcaccuguaggccaccuccc

SEQ ID NO: 3714 - RNA, 21 nt, Artificial Sequence
  GATA2 Guide RNA
ggccuacaggugccauguguc

SEQ ID NO: 3715 - RNA, 21 nt, Artificial Sequence
  GATA2 Guide RNA
ggcgggagguggccuacaggu

SEQ ID NO: 3716 - RNA, 21 nt, Artificial Sequence
  GATA2 Guide RNA
ggcugaagggcgggagguggc

SEQ ID NO: 3717 - RNA, 21 nt, Artificial Sequence
  GATA2 Guide RNA
ggcuggacacauggcaccugu

SEQ ID NO: 3718 - RNA, 21 nt, Artificial Sequence
  GATA2 Guide RNA
gggagguggccuacaggugcc

SEQ ID NO: 3719 - RNA, 21 nt, Artificial Sequence
  GATA2 Guide RNA
gggcgggagguggccuacagg

SEQ ID NO: 3720 - RNA, 21 nt, Artificial Sequence
  GATA2 Guide RNA
gguggccuacaggugccaugu

SEQ ID NO: 3721 - RNA, 21 nt, Artificial Sequence
  GATA2 Guide RNA
guaggccaccucccgcccuuc

SEQ ID NO: 3722 - RNA, 21 nt, Artificial Sequence
  GATA2 Guide RNA
guggccuacaggugccaugug

SEQ ID NO: 3723 - RNA, 21 nt, Artificial Sequence
  GATA2 Guide RNA
uacaggugccauguguccagc

SEQ ID NO: 3724 - RNA, 21 nt, Artificial Sequence
  GATA2 Guide RNA
uaggccaccucccgcccuuca

SEQ ID NO: 3725 - RNA, 21 nt, Artificial Sequence
  GATA2 Guide RNA
ugaagggcgggagguggccua

SEQ ID NO: 3726 - RNA, 21 nt, Artificial Sequence
  GATA2 Guide RNA
uggacacauggcaccuguagg

SEQ ID NO: 3727 - RNA, 21 nt, Artificial Sequence
  GATA2 Guide RNA
uggcaccuguaggccaccucc

SEQ ID NO: 3728 - RNA, 21 nt, Artificial Sequence
  GATA2 Guide RNA
uggccuacaggugccaugugu

SEQ ID NO: 3729 - RNA, 21 nt, Artificial Sequence
  GATA2 Guide RNA
uggcugaagggcgggaggugg

SEQ ID NO: 3730 - RNA, 21 nt, Artificial Sequence
  GATA2 Guide RNA
uggcuggacacauggcaccug

SEQ ID NO: 3731 - RNA, 21 nt, Artificial Sequence
  GATA2 Guide RNA
uguaggccaccucccgcccuu

SEQ ID NO: 3732 - RNA, 22 nt, Artificial Sequence
  GATA2 Guide RNA
aagggcgggagguggccuacag

SEQ ID NO: 3733 - RNA, 22 nt, Artificial Sequence
  GATA2 Guide RNA
acacauggcaccuguaggccac

SEQ ID NO: 3734 - RNA, 22 nt, Artificial Sequence
  GATA2 Guide RNA
acauggcaccuguaggccaccu

SEQ ID NO: 3735 - RNA, 22 nt, Artificial Sequence
  GATA2 Guide RNA
accuguaggccaccucccgccc

SEQ ID NO: 3736 - RNA, 22 nt, Artificial Sequence
  GATA2 Guide RNA
agggcgggagguggccuacagg

SEQ ID NO: 3737 - RNA, 22 nt, Artificial Sequence
  GATA2 Guide RNA
agguggccuacaggugccaugu

SEQ ID NO: 3738 - RNA, 22 nt, Artificial Sequence
  GATA2 Guide RNA
auggcaccuguaggccaccucc

SEQ ID NO: 3739 - RNA, 22 nt, Artificial Sequence
  GATA2 Guide RNA
cacauggcaccuguaggccacc

SEQ ID NO: 3740 - RNA, 22 nt, Artificial Sequence
  GATA2 Guide RNA
caccuguaggccaccucccgcc

SEQ ID NO: 3741 - RNA, 22 nt, Artificial Sequence
  GATA2 Guide RNA
cauggcaccuguaggccaccuc

SEQ ID NO: 3742 - RNA, 22 nt, Artificial Sequence
  GATA2 Guide RNA
cccuggcuggacacauggcacc

SEQ ID NO: 3743 - RNA, 22 nt, Artificial Sequence
  GATA2 Guide RNA
ccuacaggugccauguguccag

SEQ ID NO: 3744 - RNA, 22 nt, Artificial Sequence
  GATA2 Guide RNA
ccuggcuggacacauggcaccu

SEQ ID NO: 3745 - RNA, 22 nt, Artificial Sequence
  GATA2 Guide RNA
ccuguaggccaccucccgcccu

SEQ ID NO: 3746 - RNA, 22 nt, Artificial Sequence
  GATA2 Guide RNA
cgggagguggccuacaggugcc

SEQ ID NO: 3747 - RNA, 22 nt, Artificial Sequence
  GATA2 Guide RNA
cuacaggugccauguguccagc

SEQ ID NO: 3748 - RNA, 22 nt, Artificial Sequence
  GATA2 Guide RNA
cugaagggcgggagguggccua

SEQ ID NO: 3749 - RNA, 22 nt, Artificial Sequence
  GATA2 Guide RNA
cuggacacauggcaccuguagg

SEQ ID NO: 3750 - RNA, 22 nt, Artificial Sequence
  GATA2 Guide RNA
cuggcuggacacauggcaccug

SEQ ID NO: 3751 - RNA, 22 nt, Artificial Sequence
  GATA2 Guide RNA
cuguaggccaccucccgcccuu

SEQ ID NO: 3752 - RNA, 22 nt, Artificial Sequence
  GATA2 Guide RNA
gaagggcgggagguggccuaca

SEQ ID NO: 3753 - RNA, 22 nt, Artificial Sequence
  GATA2 Guide RNA
gacacauggcaccuguaggcca

SEQ ID NO: 3754 - RNA, 22 nt, Artificial Sequence
  GATA2 Guide RNA
gagguggccuacaggugccaug

SEQ ID NO: 3755 - RNA, 22 nt, Artificial Sequence
  GATA2 Guide RNA
gcaccuguaggccaccucccgc

SEQ ID NO: 3756 - RNA, 22 nt, Artificial Sequence
  GATA2 Guide RNA
gccuacaggugccaugugucca

SEQ ID NO: 3757 - RNA, 22 nt, Artificial Sequence
  GATA2 Guide RNA
gcgggagguggccuacaggugc

SEQ ID NO: 3758 - RNA, 22 nt, Artificial Sequence
  GATA2 Guide RNA
gcugaagggcgggagguggccu

SEQ ID NO: 3759 - RNA, 22 nt, Artificial Sequence
  GATA2 Guide RNA
gcuggacacauggcaccuguag

SEQ ID NO: 3760 - RNA, 22 nt, Artificial Sequence
  GATA2 Guide RNA
ggacacauggcaccuguaggcc

SEQ ID NO: 3761 - RNA, 22 nt, Artificial Sequence
  GATA2 Guide RNA
ggagguggccuacaggugccau

SEQ ID NO: 3762 - RNA, 22 nt, Artificial Sequence
  GATA2 Guide RNA
ggcaccuguaggccaccucccg

SEQ ID NO: 3763 - RNA, 22 nt, Artificial Sequence
  GATA2 Guide RNA
ggccuacaggugccaugugucc

SEQ ID NO: 3764 - RNA, 22 nt, Artificial Sequence
  GATA2 Guide RNA
ggcgggagguggccuacaggug

SEQ ID NO: 3765 - RNA, 22 nt, Artificial Sequence
  GATA2 Guide RNA
ggcugaagggcgggagguggcc

SEQ ID NO: 3766 - RNA, 22 nt, Artificial Sequence
  GATA2 Guide RNA
ggcuggacacauggcaccugua

SEQ ID NO: 3767 - RNA, 22 nt, Artificial Sequence
  GATA2 Guide RNA
gggagguggccuacaggugcca

SEQ ID NO: 3768 - RNA, 22 nt, Artificial Sequence
  GATA2 Guide RNA
gggcgggagguggccuacaggu

SEQ ID NO: 3769 - RNA, 22 nt, Artificial Sequence
  GATA2 Guide RNA
gguggccuacaggugccaugug

SEQ ID NO: 3770 - RNA, 22 nt, Artificial Sequence
  GATA2 Guide RNA
guaggccaccucccgcccuuca

SEQ ID NO: 3771 - RNA, 22 nt, Artificial Sequence
  GATA2 Guide RNA
guggccuacaggugccaugugu

SEQ ID NO: 3772 - RNA, 22 nt, Artificial Sequence
  GATA2 Guide RNA
guggcugaagggcgggaggugg

SEQ ID NO: 3773 - RNA, 22 nt, Artificial Sequence
  GATA2 Guide RNA
uacaggugccauguguccagcc

SEQ ID NO: 3774 - RNA, 22 nt, Artificial Sequence
  GATA2 Guide RNA
uaggccaccucccgcccuucag

SEQ ID NO: 3775 - RNA, 22 nt, Artificial Sequence
  GATA2 Guide RNA
ugaagggcgggagguggccuac

SEQ ID NO: 3776 - RNA, 22 nt, Artificial Sequence
  GATA2 Guide RNA
uggacacauggcaccuguaggc

SEQ ID NO: 3777 - RNA, 22 nt, Artificial Sequence
  GATA2 Guide RNA
uggcaccuguaggccaccuccc

SEQ ID NO: 3778 - RNA, 22 nt, Artificial Sequence
  GATA2 Guide RNA
uggccuacaggugccauguguc

SEQ ID NO: 3779 - RNA, 22 nt, Artificial Sequence
  GATA2 Guide RNA
uggcugaagggcgggagguggc

SEQ ID NO: 3780 - RNA, 22 nt, Artificial Sequence
  GATA2 Guide RNA
uggcuggacacauggcaccugu

SEQ ID NO: 3781 - RNA, 22 nt, Artificial Sequence
  GATA2 Guide RNA
uguaggccaccucccgcccuuc

SEQ ID NO: 3782 - RNA, 20 nt, Artificial Sequence
  GATA2 Guide RNA
aagggcgggagguggcccac

SEQ ID NO: 3783 - RNA, 20 nt, Artificial Sequence
  GATA2 Guide RNA
acacauggcaucugugggcc

SEQ ID NO: 3784 - RNA, 20 nt, Artificial Sequence
  GATA2 Guide RNA
acagaugccauguguccagc

SEQ ID NO: 3785 - RNA, 20 nt, Artificial Sequence
  GATA2 Guide RNA
acauggcaucugugggccac

SEQ ID NO: 3786 - RNA, 20 nt, Artificial Sequence
  GATA2 Guide RNA
agaugccauguguccagcca

SEQ ID NO: 3787 - RNA, 20 nt, Artificial Sequence
  GATA2 Guide RNA
agggcgggagguggcccaca

SEQ ID NO: 3788 - RNA, 20 nt, Artificial Sequence
  GATA2 Guide RNA
agguggcccacagaugccau

SEQ ID NO: 3789 - RNA, 20 nt, Artificial Sequence
  GATA2 Guide RNA
aucugugggccaccucccgc

SEQ ID NO: 3790 - RNA, 20 nt, Artificial Sequence
  GATA2 Guide RNA
augccauguguccagccagg

SEQ ID NO: 3791 - RNA, 20 nt, Artificial Sequence
  GATA2 Guide RNA
auggcaucugugggccaccu

SEQ ID NO: 3792 - RNA, 20 nt, Artificial Sequence
  GATA2 Guide RNA
cacagaugccauguguccag

SEQ ID NO: 3793 - RNA, 20 nt, Artificial Sequence
  GATA2 Guide RNA
cacauggcaucugugggcca

SEQ ID NO: 3794 - RNA, 20 nt, Artificial Sequence
  GATA2 Guide RNA
cagaugccauguguccagcc

SEQ ID NO: 3795 - RNA, 20 nt, Artificial Sequence
  GATA2 Guide RNA
caucugugggccaccucccg

SEQ ID NO: 3796 - RNA, 20 nt, Artificial Sequence
  GATA2 Guide RNA
cauggcaucugugggccacc

SEQ ID NO: 3797 - RNA, 20 nt, Artificial Sequence
  GATA2 Guide RNA
ccacagaugccaugugucca

SEQ ID NO: 3798 - RNA, 20 nt, Artificial Sequence
  GATA2 Guide RNA
cccacagaugccaugugucc

SEQ ID NO: 3799 - RNA, 20 nt, Artificial Sequence
  GATA2 Guide RNA
cccuggcuggacacauggca

SEQ ID NO: 3800 - RNA, 20 nt, Artificial Sequence
  GATA2 Guide RNA
ccuggcuggacacauggcau

SEQ ID NO: 3801 - RNA, 20 nt, Artificial Sequence
  GATA2 Guide RNA
cgggagguggcccacagaug

SEQ ID NO: 3802 - RNA, 20 nt, Artificial Sequence
  GATA2 Guide RNA
cugcccuggcuggacacaug

SEQ ID NO: 3803 - RNA, 20 nt, Artificial Sequence
  GATA2 Guide RNA
cuggacacauggcaucugug

SEQ ID NO: 3804 - RNA, 20 nt, Artificial Sequence
  GATA2 Guide RNA
cuggcuggacacauggcauc

SEQ ID NO: 3805 - RNA, 20 nt, Artificial Sequence
  GATA2 Guide RNA
gacacauggcaucugugggc

SEQ ID NO: 3806 - RNA, 20 nt, Artificial Sequence
  GATA2 Guide RNA
gagguggcccacagaugcca

SEQ ID NO: 3807 - RNA, 20 nt, Artificial Sequence
  GATA2 Guide RNA
gaugccauguguccagccag

SEQ ID NO: 3808 - RNA, 20 nt, Artificial Sequence
  GATA2 Guide RNA
gcaucugugggccaccuccc

SEQ ID NO: 3809 - RNA, 20 nt, Artificial Sequence
  GATA2 Guide RNA
gcccacagaugccauguguc

SEQ ID NO: 3810 - RNA, 20 nt, Artificial Sequence
  GATA2 Guide RNA
gcccuggcuggacacauggc

SEQ ID NO: 3811 - RNA, 20 nt, Artificial Sequence
  GATA2 Guide RNA
gcgggagguggcccacagau

SEQ ID NO: 3812 - RNA, 20 nt, Artificial Sequence
  GATA2 Guide RNA
gcuggacacauggcaucugu

SEQ ID NO: 3813 - RNA, 20 nt, Artificial Sequence
  GATA2 Guide RNA
ggacacauggcaucuguggg

SEQ ID NO: 3814 - RNA, 20 nt, Artificial Sequence
  GATA2 Guide RNA
ggagguggcccacagaugcc

SEQ ID NO: 3815 - RNA, 20 nt, Artificial Sequence
  GATA2 Guide RNA
ggcaucugugggccaccucc

SEQ ID NO: 3816 - RNA, 20 nt, Artificial Sequence
  GATA2 Guide RNA
ggcccacagaugccaugugu

SEQ ID NO: 3817 - RNA, 20 nt, Artificial Sequence
  GATA2 Guide RNA
ggcgggagguggcccacaga

SEQ ID NO: 3818 - RNA, 20 nt, Artificial Sequence
  GATA2 Guide RNA
ggcuggacacauggcaucug

SEQ ID NO: 3819 - RNA, 20 nt, Artificial Sequence
  GATA2 Guide RNA
gggagguggcccacagaugc

SEQ ID NO: 3820 - RNA, 20 nt, Artificial Sequence
  GATA2 Guide RNA
gggcgggagguggcccacag

SEQ ID NO: 3821 - RNA, 20 nt, Artificial Sequence
  GATA2 Guide RNA
gguggcccacagaugccaug

SEQ ID NO: 3822 - RNA, 20 nt, Artificial Sequence
  GATA2 Guide RNA
guggcccacagaugccaugu

SEQ ID NO: 3823 - RNA, 20 nt, Artificial Sequence
  GATA2 Guide RNA
ugcccuggcuggacacaugg

SEQ ID NO: 3824 - RNA, 20 nt, Artificial Sequence
  GATA2 Guide RNA
uggacacauggcaucugugg

SEQ ID NO: 3825 - RNA, 20 nt, Artificial Sequence
  GATA2 Guide RNA
uggcaucugugggccaccuc

SEQ ID NO: 3826 - RNA, 20 nt, Artificial Sequence
  GATA2 Guide RNA
uggcccacagaugccaugug

SEQ ID NO: 3827 - RNA, 20 nt, Artificial Sequence
  GATA2 Guide RNA
uggcuggacacauggcaucu

SEQ ID NO: 3828 - RNA, 21 nt, Artificial Sequence
  GATA2 Guide RNA
aagggcgggagguggcccaca

SEQ ID NO: 3829 - RNA, 21 nt, Artificial Sequence
  GATA2 Guide RNA
acacauggcaucugugggcca

SEQ ID NO: 3830 - RNA, 21 nt, Artificial Sequence
  GATA2 Guide RNA
acagaugccauguguccagcc

SEQ ID NO: 3831 - RNA, 21 nt, Artificial Sequence
  GATA2 Guide RNA
acauggcaucugugggccacc

SEQ ID NO: 3832 - RNA, 21 nt, Artificial Sequence
  GATA2 Guide RNA
agaugccauguguccagccag

SEQ ID NO: 3833 - RNA, 21 nt, Artificial Sequence
  GATA2 Guide RNA
agggcgggagguggcccacag

SEQ ID NO: 3834 - RNA, 21 nt, Artificial Sequence
  GATA2 Guide RNA
agguggcccacagaugccaug

SEQ ID NO: 3835 - RNA, 21 nt, Artificial Sequence
  GATA2 Guide RNA
aucugugggccaccucccgcc

SEQ ID NO: 3836 - RNA, 21 nt, Artificial Sequence
  GATA2 Guide RNA
augccauguguccagccaggg

SEQ ID NO: 3837 - RNA, 21 nt, Artificial Sequence
  GATA2 Guide RNA
auggcaucugugggccaccuc

SEQ ID NO: 3838 - RNA, 21 nt, Artificial Sequence
  GATA2 Guide RNA
cacagaugccauguguccagc

SEQ ID NO: 3839 - RNA, 21 nt, Artificial Sequence
  GATA2 Guide RNA
cacauggcaucugugggccac

SEQ ID NO: 3840 - RNA, 21 nt, Artificial Sequence
  GATA2 Guide RNA
cagaugccauguguccagcca

SEQ ID NO: 3841 - RNA, 21 nt, Artificial Sequence
  GATA2 Guide RNA
caucugugggccaccucccgc

SEQ ID NO: 3842 - RNA, 21 nt, Artificial Sequence
  GATA2 Guide RNA
cauggcaucugugggccaccu

SEQ ID NO: 3843 - RNA, 21 nt, Artificial Sequence
  GATA2 Guide RNA
ccacagaugccauguguccag

SEQ ID NO: 3844 - RNA, 21 nt, Artificial Sequence
  GATA2 Guide RNA
cccacagaugccaugugucca

SEQ ID NO: 3845 - RNA, 21 nt, Artificial Sequence
  GATA2 Guide RNA
cccuggcuggacacauggcau

SEQ ID NO: 3846 - RNA, 21 nt, Artificial Sequence
  GATA2 Guide RNA
ccuggcuggacacauggcauc

SEQ ID NO: 3847 - RNA, 21 nt, Artificial Sequence
  GATA2 Guide RNA
cgggagguggcccacagaugc

SEQ ID NO: 3848 - RNA, 21 nt, Artificial Sequence
  GATA2 Guide RNA
cugcccuggcuggacacaugg

SEQ ID NO: 3849 - RNA, 21 nt, Artificial Sequence
  GATA2 Guide RNA
cuggacacauggcaucugugg

SEQ ID NO: 3850 - RNA, 21 nt, Artificial Sequence
  GATA2 Guide RNA
cuggcuggacacauggcaucu

SEQ ID NO: 3851 - RNA, 21 nt, Artificial Sequence
  GATA2 Guide RNA
gaagggcgggagguggcccac

SEQ ID NO: 3852 - RNA, 21 nt, Artificial Sequence
  GATA2 Guide RNA
gacacauggcaucugugggcc

SEQ ID NO: 3853 - RNA, 21 nt, Artificial Sequence
  GATA2 Guide RNA
gagguggcccacagaugccau

SEQ ID NO: 3854 - RNA, 21 nt, Artificial Sequence
  GATA2 Guide RNA
gaugccauguguccagccagg

SEQ ID NO: 3855 - RNA, 21 nt, Artificial Sequence
  GATA2 Guide RNA
gcaucugugggccaccucccg

SEQ ID NO: 3856 - RNA, 21 nt, Artificial Sequence
  GATA2 Guide RNA
gcccacagaugccaugugucc

SEQ ID NO: 3857 - RNA, 21 nt, Artificial Sequence
  GATA2 Guide RNA
gcccuggcuggacacauggca

SEQ ID NO: 3858 - RNA, 21 nt, Artificial Sequence
  GATA2 Guide RNA
gcgggagguggcccacagaug

SEQ ID NO: 3859 - RNA, 21 nt, Artificial Sequence
  GATA2 Guide RNA
gcugcccuggcuggacacaug

SEQ ID NO: 3860 - RNA, 21 nt, Artificial Sequence
  GATA2 Guide RNA
gcuggacacauggcaucugug

SEQ ID NO: 3861 - RNA, 21 nt, Artificial Sequence
  GATA2 Guide RNA
ggacacauggcaucugugggc

SEQ ID NO: 3862 - RNA, 21 nt, Artificial Sequence
  GATA2 Guide RNA
ggagguggcccacagaugcca

SEQ ID NO: 3863 - RNA, 21 nt, Artificial Sequence
  GATA2 Guide RNA
ggcaucugugggccaccuccc

SEQ ID NO: 3864 - RNA, 21 nt, Artificial Sequence
  GATA2 Guide RNA
ggcccacagaugccauguguc

SEQ ID NO: 3865 - RNA, 21 nt, Artificial Sequence
  GATA2 Guide RNA
ggcgggagguggcccacagau

SEQ ID NO: 3866 - RNA, 21 nt, Artificial Sequence
  GATA2 Guide RNA
ggcuggacacauggcaucugu

SEQ ID NO: 3867 - RNA, 21 nt, Artificial Sequence
  GATA2 Guide RNA
gggagguggcccacagaugcc

SEQ ID NO: 3868 - RNA, 21 nt, Artificial Sequence
  GATA2 Guide RNA
gggcgggagguggcccacaga

SEQ ID NO: 3869 - RNA, 21 nt, Artificial Sequence
  GATA2 Guide RNA
gguggcccacagaugccaugu

SEQ ID NO: 3870 - RNA, 21 nt, Artificial Sequence
  GATA2 Guide RNA
guggcccacagaugccaugug

SEQ ID NO: 3871 - RNA, 21 nt, Artificial Sequence
  GATA2 Guide RNA
ugcccuggcuggacacauggc

SEQ ID NO: 3872 - RNA, 21 nt, Artificial Sequence
  GATA2 Guide RNA
uggacacauggcaucuguggg

SEQ ID NO: 3873 - RNA, 21 nt, Artificial Sequence
  GATA2 Guide RNA
uggcaucugugggccaccucc

SEQ ID NO: 3874 - RNA, 21 nt, Artificial Sequence
  GATA2 Guide RNA
uggcccacagaugccaugugu

SEQ ID NO: 3875 - RNA, 21 nt, Artificial Sequence
  GATA2 Guide RNA
uggcuggacacauggcaucug

SEQ ID NO: 3876 - RNA, 22 nt, Artificial Sequence
  GATA2 Guide RNA
aagggcgggagguggcccacag

SEQ ID NO: 3877 - RNA, 22 nt, Artificial Sequence
  GATA2 Guide RNA
acacauggcaucugugggccac

SEQ ID NO: 3878 - RNA, 22 nt, Artificial Sequence
  GATA2 Guide RNA
acagaugccauguguccagcca

SEQ ID NO: 3879 - RNA, 22 nt, Artificial Sequence
  GATA2 Guide RNA
acauggcaucugugggccaccu

SEQ ID NO: 3880 - RNA, 22 nt, Artificial Sequence
  GATA2 Guide RNA
agaugccauguguccagccagg

SEQ ID NO: 3881 - RNA, 22 nt, Artificial Sequence
  GATA2 Guide RNA
agcugcccuggcuggacacaug

SEQ ID NO: 3882 - RNA, 22 nt, Artificial Sequence
  GATA2 Guide RNA
agggcgggagguggcccacaga

SEQ ID NO: 3883 - RNA, 22 nt, Artificial Sequence
  GATA2 Guide RNA
agguggcccacagaugccaugu

SEQ ID NO: 3884 - RNA, 22 nt, Artificial Sequence
  GATA2 Guide RNA
aucugugggccaccucccgccc

SEQ ID NO: 3885 - RNA, 22 nt, Artificial Sequence
  GATA2 Guide RNA
augccauguguccagccagggc

SEQ ID NO: 3886 - RNA, 22 nt, Artificial Sequence
  GATA2 Guide RNA
auggcaucugugggccaccucc

SEQ ID NO: 3887 - RNA, 22 nt, Artificial Sequence
  GATA2 Guide RNA
cacagaugccauguguccagcc

SEQ ID NO: 3888 - RNA, 22 nt, Artificial Sequence
  GATA2 Guide RNA
cacauggcaucugugggccacc

SEQ ID NO: 3889 - RNA, 22 nt, Artificial Sequence
  GATA2 Guide RNA
cagaugccauguguccagccag

SEQ ID NO: 3890 - RNA, 22 nt, Artificial Sequence
  GATA2 Guide RNA
caucugugggccaccucccgcc

SEQ ID NO: 3891 - RNA, 22 nt, Artificial Sequence
  GATA2 Guide RNA
cauggcaucugugggccaccuc

SEQ ID NO: 3892 - RNA, 22 nt, Artificial Sequence
  GATA2 Guide RNA
ccacagaugccauguguccagc

SEQ ID NO: 3893 - RNA, 22 nt, Artificial Sequence
  GATA2 Guide RNA
cccacagaugccauguguccag

SEQ ID NO: 3894 - RNA, 22 nt, Artificial Sequence
  GATA2 Guide RNA
cccuggcuggacacauggcauc

SEQ ID NO: 3895 - RNA, 22 nt, Artificial Sequence
  GATA2 Guide RNA
ccuggcuggacacauggcaucu

SEQ ID NO: 3896 - RNA, 22 nt, Artificial Sequence
  GATA2 Guide RNA
cgggagguggcccacagaugcc

SEQ ID NO: 3897 - RNA, 22 nt, Artificial Sequence
  GATA2 Guide RNA
cugcccuggcuggacacauggc

SEQ ID NO: 3898 - RNA, 22 nt, Artificial Sequence
  GATA2 Guide RNA
cuggacacauggcaucuguggg

SEQ ID NO: 3899 - RNA, 22 nt, Artificial Sequence
  GATA2 Guide RNA
cuggcuggacacauggcaucug

SEQ ID NO: 3900 - RNA, 22 nt, Artificial Sequence
  GATA2 Guide RNA
gaagggcgggagguggcccaca

SEQ ID NO: 3901 - RNA, 22 nt, Artificial Sequence
  GATA2 Guide RNA
gacacauggcaucugugggcca

SEQ ID NO: 3902 - RNA, 22 nt, Artificial Sequence
  GATA2 Guide RNA
gagguggcccacagaugccaug

SEQ ID NO: 3903 - RNA, 22 nt, Artificial Sequence
  GATA2 Guide RNA
gaugccauguguccagccaggg

SEQ ID NO: 3904 - RNA, 22 nt, Artificial Sequence
  GATA2 Guide RNA
gcaucugugggccaccucccgc

SEQ ID NO: 3905 - RNA, 22 nt, Artificial Sequence
  GATA2 Guide RNA
gcccacagaugccaugugucca

SEQ ID NO: 3906 - RNA, 22 nt, Artificial Sequence
  GATA2 Guide RNA
gcccuggcuggacacauggcau

SEQ ID NO: 3907 - RNA, 22 nt, Artificial Sequence
  GATA2 Guide RNA
gcgggagguggcccacagaugc

SEQ ID NO: 3908 - RNA, 22 nt, Artificial Sequence
  GATA2 Guide RNA
gcugcccuggcuggacacaugg

SEQ ID NO: 3909 - RNA, 22 nt, Artificial Sequence
  GATA2 Guide RNA
gcuggacacauggcaucugugg

SEQ ID NO: 3910 - RNA, 22 nt, Artificial Sequence
  GATA2 Guide RNA
ggacacauggcaucugugggcc

SEQ ID NO: 3911 - RNA, 22 nt, Artificial Sequence
  GATA2 Guide RNA
ggagguggcccacagaugccau

SEQ ID NO: 3912 - RNA, 22 nt, Artificial Sequence
  GATA2 Guide RNA
ggcaucugugggccaccucccg

SEQ ID NO: 3913 - RNA, 22 nt, Artificial Sequence
  GATA2 Guide RNA
ggcccacagaugccaugugucc

SEQ ID NO: 3914 - RNA, 22 nt, Artificial Sequence
  GATA2 Guide RNA
ggcgggagguggcccacagaug

SEQ ID NO: 3915 - RNA, 22 nt, Artificial Sequence
  GATA2 Guide RNA
ggcuggacacauggcaucugug

SEQ ID NO: 3916 - RNA, 22 nt, Artificial Sequence
  GATA2 Guide RNA
gggagguggcccacagaugcca

SEQ ID NO: 3917 - RNA, 22 nt, Artificial Sequence
  GATA2 Guide RNA
gggcgggagguggcccacagau

SEQ ID NO: 3918 - RNA, 22 nt, Artificial Sequence
  GATA2 Guide RNA
gguggcccacagaugccaugug

SEQ ID NO: 3919 - RNA, 22 nt, Artificial Sequence
  GATA2 Guide RNA
guggcccacagaugccaugugu

SEQ ID NO: 3920 - RNA, 22 nt, Artificial Sequence
  GATA2 Guide RNA
ugaagggcgggagguggcccac

SEQ ID NO: 3921 - RNA, 22 nt, Artificial Sequence
  GATA2 Guide RNA
ugcccuggcuggacacauggca

SEQ ID NO: 3922 - RNA, 22 nt, Artificial Sequence
  GATA2 Guide RNA
uggacacauggcaucugugggc

SEQ ID NO: 3923 - RNA, 22 nt, Artificial Sequence
  GATA2 Guide RNA
uggcaucugugggccaccuccc

SEQ ID NO: 3924 - RNA, 22 nt, Artificial Sequence
  GATA2 Guide RNA
uggcccacagaugccauguguc

SEQ ID NO: 3925 - RNA, 22 nt, Artificial Sequence
  GATA2 Guide RNA
uggcuggacacauggcaucugu

SEQ ID NO: 3926 - RNA, 20 nt, Artificial Sequence
  GATA2 Guide RNA
acacaugucaccugugggcc

SEQ ID NO: 3927 - RNA, 20 nt, Artificial Sequence
  GATA2 Guide RNA
acaggugacauguguccagc

SEQ ID NO: 3928 - RNA, 20 nt, Artificial Sequence
  GATA2 Guide RNA
acaugucaccugugggccac

SEQ ID NO: 3929 - RNA, 20 nt, Artificial Sequence
  GATA2 Guide RNA
acauguguccagccagggca

SEQ ID NO: 3930 - RNA, 20 nt, Artificial Sequence
  GATA2 Guide RNA
agcugcccuggcuggacaca

SEQ ID NO: 3931 - RNA, 20 nt, Artificial Sequence
  GATA2 Guide RNA
aggugacauguguccagcca

SEQ ID NO: 3932 - RNA, 20 nt, Artificial Sequence
  GATA2 Guide RNA
agguggcccacaggugacau

SEQ ID NO: 3933 - RNA, 20 nt, Artificial Sequence
  GATA2 Guide RNA
augucaccugugggccaccu

SEQ ID NO: 3934 - RNA, 20 nt, Artificial Sequence
  GATA2 Guide RNA
cacaggugacauguguccag

SEQ ID NO: 3935 - RNA, 20 nt, Artificial Sequence
  GATA2 Guide RNA
cacaugucaccugugggcca

SEQ ID NO: 3936 - RNA, 20 nt, Artificial Sequence
  GATA2 Guide RNA
cagcugcccuggcuggacac

SEQ ID NO: 3937 - RNA, 20 nt, Artificial Sequence
  GATA2 Guide RNA
caggugacauguguccagcc

SEQ ID NO: 3938 - RNA, 20 nt, Artificial Sequence
  GATA2 Guide RNA
caugucaccugugggccacc

SEQ ID NO: 3939 - RNA, 20 nt, Artificial Sequence
  GATA2 Guide RNA
ccacaggugacaugugucca

SEQ ID NO: 3940 - RNA, 20 nt, Artificial Sequence
  GATA2 Guide RNA
cccacaggugacaugugucc

SEQ ID NO: 3941 - RNA, 20 nt, Artificial Sequence
  GATA2 Guide RNA
cccuggcuggacacauguca

SEQ ID NO: 3942 - RNA, 20 nt, Artificial Sequence
  GATA2 Guide RNA
ccuggcuggacacaugucac

SEQ ID NO: 3943 - RNA, 20 nt, Artificial Sequence
  GATA2 Guide RNA
cgggagguggcccacaggug

SEQ ID NO: 3944 - RNA, 20 nt, Artificial Sequence
  GATA2 Guide RNA
cuggacacaugucaccugug

SEQ ID NO: 3945 - RNA, 20 nt, Artificial Sequence
  GATA2 Guide RNA
cuggcuggacacaugucacc

SEQ ID NO: 3946 - RNA, 20 nt, Artificial Sequence
  GATA2 Guide RNA
gacacaugucaccugugggc

SEQ ID NO: 3947 - RNA, 20 nt, Artificial Sequence
  GATA2 Guide RNA
gacauguguccagccagggc

SEQ ID NO: 3948 - RNA, 20 nt, Artificial Sequence
  GATA2 Guide RNA
gagguggcccacaggugaca

SEQ ID NO: 3949 - RNA, 20 nt, Artificial Sequence
  GATA2 Guide RNA
gcccacaggugacauguguc

SEQ ID NO: 3950 - RNA, 20 nt, Artificial Sequence
  GATA2 Guide RNA
gcccuggcuggacacauguc

SEQ ID NO: 3951 - RNA, 20 nt, Artificial Sequence
  GATA2 Guide RNA
gcgggagguggcccacaggu

SEQ ID NO: 3952 - RNA, 20 nt, Artificial Sequence
  GATA2 Guide RNA
gcugcccuggcuggacacau

SEQ ID NO: 3953 - RNA, 20 nt, Artificial Sequence
  GATA2 Guide RNA
gcuggacacaugucaccugu

SEQ ID NO: 3954 - RNA, 20 nt, Artificial Sequence
  GATA2 Guide RNA
ggacacaugucaccuguggg

SEQ ID NO: 3955 - RNA, 20 nt, Artificial Sequence
  GATA2 Guide RNA
ggagguggcccacaggugac

SEQ ID NO: 3956 - RNA, 20 nt, Artificial Sequence
  GATA2 Guide RNA
ggcccacaggugacaugugu

SEQ ID NO: 3957 - RNA, 20 nt, Artificial Sequence
  GATA2 Guide RNA
ggcgggagguggcccacagg

SEQ ID NO: 3958 - RNA, 20 nt, Artificial Sequence
  GATA2 Guide RNA
ggcuggacacaugucaccug

SEQ ID NO: 3959 - RNA, 20 nt, Artificial Sequence
  GATA2 Guide RNA
gggagguggcccacagguga

SEQ ID NO: 3960 - RNA, 20 nt, Artificial Sequence
  GATA2 Guide RNA
ggugacauguguccagccag

SEQ ID NO: 3961 - RNA, 20 nt, Artificial Sequence
  GATA2 Guide RNA
gguggcccacaggugacaug

SEQ ID NO: 3962 - RNA, 20 nt, Artificial Sequence
  GATA2 Guide RNA
gucaccugugggccaccucc

SEQ ID NO: 3963 - RNA, 20 nt, Artificial Sequence
  GATA2 Guide RNA
gugacauguguccagccagg

SEQ ID NO: 3964 - RNA, 20 nt, Artificial Sequence
  GATA2 Guide RNA
guggcccacaggugacaugu

SEQ ID NO: 3965 - RNA, 20 nt, Artificial Sequence
  GATA2 Guide RNA
ugacauguguccagccaggg

SEQ ID NO: 3966 - RNA, 20 nt, Artificial Sequence
  GATA2 Guide RNA
ugcccuggcuggacacaugu

SEQ ID NO: 3967 - RNA, 20 nt, Artificial Sequence
  GATA2 Guide RNA
uggacacaugucaccugugg

SEQ ID NO: 3968 - RNA, 20 nt, Artificial Sequence
  GATA2 Guide RNA
uggcccacaggugacaugug

SEQ ID NO: 3969 - RNA, 20 nt, Artificial Sequence
  GATA2 Guide RNA
uggcuggacacaugucaccu

SEQ ID NO: 3970 - RNA, 20 nt, Artificial Sequence
  GATA2 Guide RNA
ugucaccugugggccaccuc

SEQ ID NO: 3971 - RNA, 21 nt, Artificial Sequence
  GATA2 Guide RNA
acacaugucaccugugggcca

SEQ ID NO: 3972 - RNA, 21 nt, Artificial Sequence
  GATA2 Guide RNA
acaggugacauguguccagcc

SEQ ID NO: 3973 - RNA, 21 nt, Artificial Sequence
  GATA2 Guide RNA
acaugucaccugugggccacc

SEQ ID NO: 3974 - RNA, 21 nt, Artificial Sequence
  GATA2 Guide RNA
acauguguccagccagggcag

SEQ ID NO: 3975 - RNA, 21 nt, Artificial Sequence
  GATA2 Guide RNA
agcugcccuggcuggacacau

SEQ ID NO: 3976 - RNA, 21 nt, Artificial Sequence
  GATA2 Guide RNA
aggugacauguguccagccag

SEQ ID NO: 3977 - RNA, 21 nt, Artificial Sequence
  GATA2 Guide RNA
agguggcccacaggugacaug

SEQ ID NO: 3978 - RNA, 21 nt, Artificial Sequence
  GATA2 Guide RNA
augucaccugugggccaccuc

SEQ ID NO: 3979 - RNA, 21 nt, Artificial Sequence
  GATA2 Guide RNA
cacaggugacauguguccagc

SEQ ID NO: 3980 - RNA, 21 nt, Artificial Sequence
  GATA2 Guide RNA
cacaugucaccugugggccac

SEQ ID NO: 3981 - RNA, 21 nt, Artificial Sequence
  GATA2 Guide RNA
cagcugcccuggcuggacaca

SEQ ID NO: 3982 - RNA, 21 nt, Artificial Sequence
  GATA2 Guide RNA
caggugacauguguccagcca

SEQ ID NO: 3983 - RNA, 21 nt, Artificial Sequence
  GATA2 Guide RNA
caugucaccugugggccaccu

SEQ ID NO: 3984 - RNA, 21 nt, Artificial Sequence
  GATA2 Guide RNA
ccacaggugacauguguccag

SEQ ID NO: 3985 - RNA, 21 nt, Artificial Sequence
  GATA2 Guide RNA
cccacaggugacaugugucca

SEQ ID NO: 3986 - RNA, 21 nt, Artificial Sequence
  GATA2 Guide RNA
cccuggcuggacacaugucac

SEQ ID NO: 3987 - RNA, 21 nt, Artificial Sequence
  GATA2 Guide RNA
ccuggcuggacacaugucacc

SEQ ID NO: 3988 - RNA, 21 nt, Artificial Sequence
  GATA2 Guide RNA
cgggagguggcccacagguga

SEQ ID NO: 3989 - RNA, 21 nt, Artificial Sequence
  GATA2 Guide RNA
cugcccuggcuggacacaugu

SEQ ID NO: 3990 - RNA, 21 nt, Artificial Sequence
  GATA2 Guide RNA
cuggacacaugucaccugugg

SEQ ID NO: 3991 - RNA, 21 nt, Artificial Sequence
  GATA2 Guide RNA
cuggcuggacacaugucaccu

SEQ ID NO: 3992 - RNA, 21 nt, Artificial Sequence
  GATA2 Guide RNA
gacacaugucaccugugggcc

SEQ ID NO: 3993 - RNA, 21 nt, Artificial Sequence
  GATA2 Guide RNA
gacauguguccagccagggca

SEQ ID NO: 3994 - RNA, 21 nt, Artificial Sequence
  GATA2 Guide RNA
gagguggcccacaggugacau

SEQ ID NO: 3995 - RNA, 21 nt, Artificial Sequence
  GATA2 Guide RNA
gcagcugcccuggcuggacac

SEQ ID NO: 3996 - RNA, 21 nt, Artificial Sequence
  GATA2 Guide RNA
gcccacaggugacaugugucc

SEQ ID NO: 3997 - RNA, 21 nt, Artificial Sequence
  GATA2 Guide RNA
gcccuggcuggacacauguca

SEQ ID NO: 3998 - RNA, 21 nt, Artificial Sequence
  GATA2 Guide RNA
gcgggagguggcccacaggug

SEQ ID NO: 3999 - RNA, 21 nt, Artificial Sequence
  GATA2 Guide RNA
gcuggacacaugucaccugug

SEQ ID NO: 4000 - RNA, 21 nt, Artificial Sequence
  GATA2 Guide RNA
ggacacaugucaccugugggc

SEQ ID NO: 4001 - RNA, 21 nt, Artificial Sequence
  GATA2 Guide RNA
ggagguggcccacaggugaca

SEQ ID NO: 4002 - RNA, 21 nt, Artificial Sequence
  GATA2 Guide RNA
ggcccacaggugacauguguc

SEQ ID NO: 4003 - RNA, 21 nt, Artificial Sequence
  GATA2 Guide RNA
ggcgggagguggcccacaggu

SEQ ID NO: 4004 - RNA, 21 nt, Artificial Sequence
  GATA2 Guide RNA
ggcuggacacaugucaccugu

SEQ ID NO: 4005 - RNA, 21 nt, Artificial Sequence
  GATA2 Guide RNA
gggagguggcccacaggugac

SEQ ID NO: 4006 - RNA, 21 nt, Artificial Sequence
  GATA2 Guide RNA
ggugacauguguccagccagg

SEQ ID NO: 4007 - RNA, 21 nt, Artificial Sequence
  GATA2 Guide RNA
gguggcccacaggugacaugu

SEQ ID NO: 4008 - RNA, 21 nt, Artificial Sequence
  GATA2 Guide RNA
gucaccugugggccaccuccc

SEQ ID NO: 4009 - RNA, 21 nt, Artificial Sequence
  GATA2 Guide RNA
gugacauguguccagccaggg

SEQ ID NO: 4010 - RNA, 21 nt, Artificial Sequence
  GATA2 Guide RNA
guggcccacaggugacaugug

SEQ ID NO: 4011 - RNA, 21 nt, Artificial Sequence
  GATA2 Guide RNA
ugacauguguccagccagggc

SEQ ID NO: 4012 - RNA, 21 nt, Artificial Sequence
  GATA2 Guide RNA
ugcccuggcuggacacauguc

SEQ ID NO: 4013 - RNA, 21 nt, Artificial Sequence
  GATA2 Guide RNA
uggacacaugucaccuguggg

SEQ ID NO: 4014 - RNA, 21 nt, Artificial Sequence
  GATA2 Guide RNA
uggcccacaggugacaugugu

SEQ ID NO: 4015 - RNA, 21 nt, Artificial Sequence
  GATA2 Guide RNA
uggcuggacacaugucaccug

SEQ ID NO: 4016 - RNA, 21 nt, Artificial Sequence
  GATA2 Guide RNA
ugucaccugugggccaccucc

SEQ ID NO: 4017 - RNA, 22 nt, Artificial Sequence
  GATA2 Guide RNA
acacaugucaccugugggccac

SEQ ID NO: 4018 - RNA, 22 nt, Artificial Sequence
  GATA2 Guide RNA
acaggugacauguguccagcca

SEQ ID NO: 4019 - RNA, 22 nt, Artificial Sequence
  GATA2 Guide RNA
acaugucaccugugggccaccu

SEQ ID NO: 4020 - RNA, 22 nt, Artificial Sequence
  GATA2 Guide RNA
acauguguccagccagggcagc

SEQ ID NO: 4021 - RNA, 22 nt, Artificial Sequence
  GATA2 Guide RNA
agggcgggagguggcccacagg

SEQ ID NO: 4022 - RNA, 22 nt, Artificial Sequence
  GATA2 Guide RNA
aggugacauguguccagccagg

SEQ ID NO: 4023 - RNA, 22 nt, Artificial Sequence
  GATA2 Guide RNA
agguggcccacaggugacaugu

SEQ ID NO: 4024 - RNA, 22 nt, Artificial Sequence
  GATA2 Guide RNA
augucaccugugggccaccucc

SEQ ID NO: 4025 - RNA, 22 nt, Artificial Sequence
  GATA2 Guide RNA
cacaggugacauguguccagcc

SEQ ID NO: 4026 - RNA, 22 nt, Artificial Sequence
  GATA2 Guide RNA
cacaugucaccugugggccacc

SEQ ID NO: 4027 - RNA, 22 nt, Artificial Sequence
  GATA2 Guide RNA
cagcugcccuggcuggacacau

SEQ ID NO: 4028 - RNA, 22 nt, Artificial Sequence
  GATA2 Guide RNA
caggugacauguguccagccag

SEQ ID NO: 4029 - RNA, 22 nt, Artificial Sequence
  GATA2 Guide RNA
caugucaccugugggccaccuc

SEQ ID NO: 4030 - RNA, 22 nt, Artificial Sequence
  GATA2 Guide RNA
ccacaggugacauguguccagc

SEQ ID NO: 4031 - RNA, 22 nt, Artificial Sequence
  GATA2 Guide RNA
cccacaggugacauguguccag

SEQ ID NO: 4032 - RNA, 22 nt, Artificial Sequence
  GATA2 Guide RNA
cccuggcuggacacaugucacc

SEQ ID NO: 4033 - RNA, 22 nt, Artificial Sequence
  GATA2 Guide RNA
ccuggcuggacacaugucaccu

SEQ ID NO: 4034 - RNA, 22 nt, Artificial Sequence
  GATA2 Guide RNA
cgggagguggcccacaggugac

SEQ ID NO: 4035 - RNA, 22 nt, Artificial Sequence
  GATA2 Guide RNA
cugcccuggcuggacacauguc

SEQ ID NO: 4036 - RNA, 22 nt, Artificial Sequence
  GATA2 Guide RNA
cuggacacaugucaccuguggg

SEQ ID NO: 4037 - RNA, 22 nt, Artificial Sequence
  GATA2 Guide RNA
cuggcuggacacaugucaccug

SEQ ID NO: 4038 - RNA, 22 nt, Artificial Sequence
  GATA2 Guide RNA
gacacaugucaccugugggcca

SEQ ID NO: 4039 - RNA, 22 nt, Artificial Sequence
  GATA2 Guide RNA
gacauguguccagccagggcag

SEQ ID NO: 4040 - RNA, 22 nt, Artificial Sequence
  GATA2 Guide RNA
gagguggcccacaggugacaug

SEQ ID NO: 4041 - RNA, 22 nt, Artificial Sequence
  GATA2 Guide RNA
gcagcugcccuggcuggacaca

SEQ ID NO: 4042 - RNA, 22 nt, Artificial Sequence
  GATA2 Guide RNA
gcccacaggugacaugugucca

SEQ ID NO: 4043 - RNA, 22 nt, Artificial Sequence
  GATA2 Guide RNA
gcccuggcuggacacaugucac

SEQ ID NO: 4044 - RNA, 22 nt, Artificial Sequence
  GATA2 Guide RNA
gcgggagguggcccacagguga

SEQ ID NO: 4045 - RNA, 22 nt, Artificial Sequence
  GATA2 Guide RNA
gcugcccuggcuggacacaugu

SEQ ID NO: 4046 - RNA, 22 nt, Artificial Sequence
  GATA2 Guide RNA
gcuggacacaugucaccugugg

SEQ ID NO: 4047 - RNA, 22 nt, Artificial Sequence
  GATA2 Guide RNA
ggacacaugucaccugugggcc

SEQ ID NO: 4048 - RNA, 22 nt, Artificial Sequence
  GATA2 Guide RNA
ggagguggcccacaggugacau

SEQ ID NO: 4049 - RNA, 22 nt, Artificial Sequence
  GATA2 Guide RNA
ggcccacaggugacaugugucc

SEQ ID NO: 4050 - RNA, 22 nt, Artificial Sequence
  GATA2 Guide RNA
ggcgggagguggcccacaggug

SEQ ID NO: 4051 - RNA, 22 nt, Artificial Sequence
  GATA2 Guide RNA
ggcuggacacaugucaccugug

SEQ ID NO: 4052 - RNA, 22 nt, Artificial Sequence
  GATA2 Guide RNA
gggagguggcccacaggugaca

SEQ ID NO: 4053 - RNA, 22 nt, Artificial Sequence
  GATA2 Guide RNA
gggcgggagguggcccacaggu

SEQ ID NO: 4054 - RNA, 22 nt, Artificial Sequence
  GATA2 Guide RNA
ggugacauguguccagccaggg

SEQ ID NO: 4055 - RNA, 22 nt, Artificial Sequence
  GATA2 Guide RNA
gguggcccacaggugacaugug

SEQ ID NO: 4056 - RNA, 22 nt, Artificial Sequence
  GATA2 Guide RNA
gucaccugugggccaccucccg

SEQ ID NO: 4057 - RNA, 22 nt, Artificial Sequence
  GATA2 Guide RNA
gugacauguguccagccagggc

SEQ ID NO: 4058 - RNA, 22 nt, Artificial Sequence
  GATA2 Guide RNA
guggcccacaggugacaugugu

SEQ ID NO: 4059 - RNA, 22 nt, Artificial Sequence
  GATA2 Guide RNA
ugacauguguccagccagggca

SEQ ID NO: 4060 - RNA, 22 nt, Artificial Sequence
  GATA2 Guide RNA
ugcagcugcccuggcuggacac

SEQ ID NO: 4061 - RNA, 22 nt, Artificial Sequence
  GATA2 Guide RNA
ugcccuggcuggacacauguca

SEQ ID NO: 4062 - RNA, 22 nt, Artificial Sequence
  GATA2 Guide RNA
uggacacaugucaccugugggc

SEQ ID NO: 4063 - RNA, 22 nt, Artificial Sequence
  GATA2 Guide RNA
uggcccacaggugacauguguc

SEQ ID NO: 4064 - RNA, 22 nt, Artificial Sequence
  GATA2 Guide RNA
uggcuggacacaugucaccugu

SEQ ID NO: 4065 - RNA, 22 nt, Artificial Sequence
  GATA2 Guide RNA
ugucaccugugggccaccuccc

SEQ ID NO: 4066 - RNA, 20 nt, Artificial Sequence
  GATA2 Guide RNA
acaggugccauguguccagg

SEQ ID NO: 4067 - RNA, 20 nt, Artificial Sequence
  GATA2 Guide RNA
agcugcccugccuggacaca

SEQ ID NO: 4068 - RNA, 20 nt, Artificial Sequence
  GATA2 Guide RNA
aggcagggcagcugcacuga

SEQ ID NO: 4069 - RNA, 20 nt, Artificial Sequence
  GATA2 Guide RNA
aggugccauguguccaggca

SEQ ID NO: 4070 - RNA, 20 nt, Artificial Sequence
  GATA2 Guide RNA
agugcagcugcccugccugg

SEQ ID NO: 4071 - RNA, 20 nt, Artificial Sequence
  GATA2 Guide RNA
auguguccaggcagggcagc

SEQ ID NO: 4072 - RNA, 20 nt, Artificial Sequence
  GATA2 Guide RNA
cacaggugccauguguccag

SEQ ID NO: 4073 - RNA, 20 nt, Artificial Sequence
  GATA2 Guide RNA
cagcugcccugccuggacac

SEQ ID NO: 4074 - RNA, 20 nt, Artificial Sequence
  GATA2 Guide RNA
caggcagggcagcugcacug

SEQ ID NO: 4075 - RNA, 20 nt, Artificial Sequence
  GATA2 Guide RNA
caggugccauguguccaggc

SEQ ID NO: 4076 - RNA, 20 nt, Artificial Sequence
  GATA2 Guide RNA
cagugcagcugcccugccug

SEQ ID NO: 4077 - RNA, 20 nt, Artificial Sequence
  GATA2 Guide RNA
cauguguccaggcagggcag

SEQ ID NO: 4078 - RNA, 20 nt, Artificial Sequence
  GATA2 Guide RNA
ccacaggugccaugugucca

SEQ ID NO: 4079 - RNA, 20 nt, Artificial Sequence
  GATA2 Guide RNA
ccaggcagggcagcugcacu

SEQ ID NO: 4080 - RNA, 20 nt, Artificial Sequence
  GATA2 Guide RNA
ccauguguccaggcagggca

SEQ ID NO: 4081 - RNA, 20 nt, Artificial Sequence
  GATA2 Guide RNA
cccacaggugccaugugucc

SEQ ID NO: 4082 - RNA, 20 nt, Artificial Sequence
  GATA2 Guide RNA
cccccuucagugcagcugcc

SEQ ID NO: 4083 - RNA, 20 nt, Artificial Sequence
  GATA2 Guide RNA
ccccuucagugcagcugccc

SEQ ID NO: 4084 - RNA, 20 nt, Artificial Sequence
  GATA2 Guide RNA
cccugccuggacacauggca

SEQ ID NO: 4085 - RNA, 20 nt, Artificial Sequence
  GATA2 Guide RNA
cccuucagugcagcugcccu

SEQ ID NO: 4086 - RNA, 20 nt, Artificial Sequence
  GATA2 Guide RNA
ccugccuggacacauggcac

SEQ ID NO: 4087 - RNA, 20 nt, Artificial Sequence
  GATA2 Guide RNA
ccuucagugcagcugcccug

SEQ ID NO: 4088 - RNA, 20 nt, Artificial Sequence
  GATA2 Guide RNA
cugcccugccuggacacaug

SEQ ID NO: 4089 - RNA, 20 nt, Artificial Sequence
  GATA2 Guide RNA
cugccuggacacauggcacc

SEQ ID NO: 4090 - RNA, 20 nt, Artificial Sequence
  GATA2 Guide RNA
cuucagugcagcugcccugc

SEQ ID NO: 4091 - RNA, 20 nt, Artificial Sequence
  GATA2 Guide RNA
gcagcugcccugccuggaca

SEQ ID NO: 4092 - RNA, 20 nt, Artificial Sequence
  GATA2 Guide RNA
gcagggcagcugcacugaag

SEQ ID NO: 4093 - RNA, 20 nt, Artificial Sequence
  GATA2 Guide RNA
gccauguguccaggcagggc

SEQ ID NO: 4094 - RNA, 20 nt, Artificial Sequence
  GATA2 Guide RNA
gcccugccuggacacauggc

SEQ ID NO: 4095 - RNA, 20 nt, Artificial Sequence
  GATA2 Guide RNA
gccuggacacauggcaccug

SEQ ID NO: 4096 - RNA, 20 nt, Artificial Sequence
  GATA2 Guide RNA
gcugcccugccuggacacau

SEQ ID NO: 4097 - RNA, 20 nt, Artificial Sequence
  GATA2 Guide RNA
ggcagggcagcugcacugaa

SEQ ID NO: 4098 - RNA, 20 nt, Artificial Sequence
  GATA2 Guide RNA
ggugccauguguccaggcag

SEQ ID NO: 4099 - RNA, 20 nt, Artificial Sequence
  GATA2 Guide RNA
guccaggcagggcagcugca

SEQ ID NO: 4100 - RNA, 20 nt, Artificial Sequence
  GATA2 Guide RNA
gugcagcugcccugccugga

SEQ ID NO: 4101 - RNA, 20 nt, Artificial Sequence
  GATA2 Guide RNA
gugccauguguccaggcagg

SEQ ID NO: 4102 - RNA, 20 nt, Artificial Sequence
  GATA2 Guide RNA
guguccaggcagggcagcug

SEQ ID NO: 4103 - RNA, 20 nt, Artificial Sequence
  GATA2 Guide RNA
ucagugcagcugcccugccu

SEQ ID NO: 4104 - RNA, 20 nt, Artificial Sequence
  GATA2 Guide RNA
uccaggcagggcagcugcac

SEQ ID NO: 4105 - RNA, 20 nt, Artificial Sequence
  GATA2 Guide RNA
ugcagcugcccugccuggac

SEQ ID NO: 4106 - RNA, 20 nt, Artificial Sequence
  GATA2 Guide RNA
ugccauguguccaggcaggg

SEQ ID NO: 4107 - RNA, 20 nt, Artificial Sequence
  GATA2 Guide RNA
ugcccugccuggacacaugg

SEQ ID NO: 4108 - RNA, 20 nt, Artificial Sequence
  GATA2 Guide RNA
ugccuggacacauggcaccu

SEQ ID NO: 4109 - RNA, 20 nt, Artificial Sequence
  GATA2 Guide RNA
uguccaggcagggcagcugc

SEQ ID NO: 4110 - RNA, 20 nt, Artificial Sequence
  GATA2 Guide RNA
uguguccaggcagggcagcu

SEQ ID NO: 4111 - RNA, 20 nt, Artificial Sequence
  GATA2 Guide RNA
uucagugcagcugcccugcc

SEQ ID NO: 4112 - RNA, 21 nt, Artificial Sequence
  GATA2 Guide RNA
acaggugccauguguccaggc

SEQ ID NO: 4113 - RNA, 21 nt, Artificial Sequence
  GATA2 Guide RNA
agcugcccugccuggacacau

SEQ ID NO: 4114 - RNA, 21 nt, Artificial Sequence
  GATA2 Guide RNA
aggcagggcagcugcacugaa

SEQ ID NO: 4115 - RNA, 21 nt, Artificial Sequence
  GATA2 Guide RNA
aggugccauguguccaggcag

SEQ ID NO: 4116 - RNA, 21 nt, Artificial Sequence
  GATA2 Guide RNA
agugcagcugcccugccugga

SEQ ID NO: 4117 - RNA, 21 nt, Artificial Sequence
  GATA2 Guide RNA
auguguccaggcagggcagcu

SEQ ID NO: 4118 - RNA, 21 nt, Artificial Sequence
  GATA2 Guide RNA
cacaggugccauguguccagg

SEQ ID NO: 4119 - RNA, 21 nt, Artificial Sequence
  GATA2 Guide RNA
cagcugcccugccuggacaca

SEQ ID NO: 4120 - RNA, 21 nt, Artificial Sequence
  GATA2 Guide RNA
caggcagggcagcugcacuga

SEQ ID NO: 4121 - RNA, 21 nt, Artificial Sequence
  GATA2 Guide RNA
caggugccauguguccaggca

SEQ ID NO: 4122 - RNA, 21 nt, Artificial Sequence
  GATA2 Guide RNA
cagugcagcugcccugccugg

SEQ ID NO: 4123 - RNA, 21 nt, Artificial Sequence
  GATA2 Guide RNA
cauguguccaggcagggcagc

SEQ ID NO: 4124 - RNA, 21 nt, Artificial Sequence
  GATA2 Guide RNA
ccacaggugccauguguccag

SEQ ID NO: 4125 - RNA, 21 nt, Artificial Sequence
  GATA2 Guide RNA
ccaggcagggcagcugcacug

SEQ ID NO: 4126 - RNA, 21 nt, Artificial Sequence
  GATA2 Guide RNA
ccauguguccaggcagggcag

SEQ ID NO: 4127 - RNA, 21 nt, Artificial Sequence
  GATA2 Guide RNA
cccacaggugccaugugucca

SEQ ID NO: 4128 - RNA, 21 nt, Artificial Sequence
  GATA2 Guide RNA
cccccuucagugcagcugccc

SEQ ID NO: 4129 - RNA, 21 nt, Artificial Sequence
  GATA2 Guide RNA
ccccuucagugcagcugcccu

SEQ ID NO: 4130 - RNA, 21 nt, Artificial Sequence
  GATA2 Guide RNA
cccugccuggacacauggcac

SEQ ID NO: 4131 - RNA, 21 nt, Artificial Sequence
  GATA2 Guide RNA
cccuucagugcagcugcccug

SEQ ID NO: 4132 - RNA, 21 nt, Artificial Sequence
  GATA2 Guide RNA
ccugccuggacacauggcacc

SEQ ID NO: 4133 - RNA, 21 nt, Artificial Sequence
  GATA2 Guide RNA
ccuucagugcagcugcccugc

SEQ ID NO: 4134 - RNA, 21 nt, Artificial Sequence
  GATA2 Guide RNA
cugcccugccuggacacaugg

SEQ ID NO: 4135 - RNA, 21 nt, Artificial Sequence
  GATA2 Guide RNA
cugccuggacacauggcaccu

SEQ ID NO: 4136 - RNA, 21 nt, Artificial Sequence
  GATA2 Guide RNA
cuucagugcagcugcccugcc

SEQ ID NO: 4137 - RNA, 21 nt, Artificial Sequence
  GATA2 Guide RNA
gcagcugcccugccuggacac

SEQ ID NO: 4138 - RNA, 21 nt, Artificial Sequence
  GATA2 Guide RNA
gcagggcagcugcacugaagg

SEQ ID NO: 4139 - RNA, 21 nt, Artificial Sequence
  GATA2 Guide RNA
gccauguguccaggcagggca

SEQ ID NO: 4140 - RNA, 21 nt, Artificial Sequence
  GATA2 Guide RNA
gcccacaggugccaugugucc

SEQ ID NO: 4141 - RNA, 21 nt, Artificial Sequence
  GATA2 Guide RNA
gcccugccuggacacauggca

SEQ ID NO: 4142 - RNA, 21 nt, Artificial Sequence
  GATA2 Guide RNA
gccuggacacauggcaccugu

SEQ ID NO: 4143 - RNA, 21 nt, Artificial Sequence
  GATA2 Guide RNA
gcugcccugccuggacacaug

SEQ ID NO: 4144 - RNA, 21 nt, Artificial Sequence
  GATA2 Guide RNA
ggcagggcagcugcacugaag

SEQ ID NO: 4145 - RNA, 21 nt, Artificial Sequence
  GATA2 Guide RNA
ggugccauguguccaggcagg

SEQ ID NO: 4146 - RNA, 21 nt, Artificial Sequence
  GATA2 Guide RNA
guccaggcagggcagcugcac

SEQ ID NO: 4147 - RNA, 21 nt, Artificial Sequence
  GATA2 Guide RNA
gugcagcugcccugccuggac

SEQ ID NO: 4148 - RNA, 21 nt, Artificial Sequence
  GATA2 Guide RNA
gugccauguguccaggcaggg

SEQ ID NO: 4149 - RNA, 21 nt, Artificial Sequence
  GATA2 Guide RNA
guguccaggcagggcagcugc

SEQ ID NO: 4150 - RNA, 21 nt, Artificial Sequence
  GATA2 Guide RNA
ucagugcagcugcccugccug

SEQ ID NO: 4151 - RNA, 21 nt, Artificial Sequence
  GATA2 Guide RNA
uccaggcagggcagcugcacu

SEQ ID NO: 4152 - RNA, 21 nt, Artificial Sequence
  GATA2 Guide RNA
ucccccuucagugcagcugcc

SEQ ID NO: 4153 - RNA, 21 nt, Artificial Sequence
  GATA2 Guide RNA
ugcagcugcccugccuggaca

SEQ ID NO: 4154 - RNA, 21 nt, Artificial Sequence
  GATA2 Guide RNA
ugccauguguccaggcagggc

SEQ ID NO: 4155 - RNA, 21 nt, Artificial Sequence
  GATA2 Guide RNA
ugcccugccuggacacauggc

SEQ ID NO: 4156 - RNA, 21 nt, Artificial Sequence
  GATA2 Guide RNA
ugccuggacacauggcaccug

SEQ ID NO: 4157 - RNA, 21 nt, Artificial Sequence
  GATA2 Guide RNA
uguccaggcagggcagcugca

SEQ ID NO: 4158 - RNA, 21 nt, Artificial Sequence
  GATA2 Guide RNA
uguguccaggcagggcagcug

SEQ ID NO: 4159 - RNA, 21 nt, Artificial Sequence
  GATA2 Guide RNA
uucagugcagcugcccugccu

SEQ ID NO: 4160 - RNA, 22 nt, Artificial Sequence
  GATA2 Guide RNA
acaggugccauguguccaggca

SEQ ID NO: 4161 - RNA, 22 nt, Artificial Sequence
  GATA2 Guide RNA
agcugcccugccuggacacaug

SEQ ID NO: 4162 - RNA, 22 nt, Artificial Sequence
  GATA2 Guide RNA
aggcagggcagcugcacugaag

SEQ ID NO: 4163 - RNA, 22 nt, Artificial Sequence
  GATA2 Guide RNA
aggugccauguguccaggcagg

SEQ ID NO: 4164 - RNA, 22 nt, Artificial Sequence
  GATA2 Guide RNA
agugcagcugcccugccuggac

SEQ ID NO: 4165 - RNA, 22 nt, Artificial Sequence
  GATA2 Guide RNA
aucccccuucagugcagcugcc

SEQ ID NO: 4166 - RNA, 22 nt, Artificial Sequence
  GATA2 Guide RNA
auguguccaggcagggcagcug

SEQ ID NO: 4167 - RNA, 22 nt, Artificial Sequence
  GATA2 Guide RNA
cacaggugccauguguccaggc

SEQ ID NO: 4168 - RNA, 22 nt, Artificial Sequence
  GATA2 Guide RNA
cagcugcccugccuggacacau

SEQ ID NO: 4169 - RNA, 22 nt, Artificial Sequence
  GATA2 Guide RNA
caggcagggcagcugcacugaa

SEQ ID NO: 4170 - RNA, 22 nt, Artificial Sequence
  GATA2 Guide RNA
caggugccauguguccaggcag

SEQ ID NO: 4171 - RNA, 22 nt, Artificial Sequence
  GATA2 Guide RNA
cagugcagcugcccugccugga

SEQ ID NO: 4172 - RNA, 22 nt, Artificial Sequence
  GATA2 Guide RNA
cauguguccaggcagggcagcu

SEQ ID NO: 4173 - RNA, 22 nt, Artificial Sequence
  GATA2 Guide RNA
ccacaggugccauguguccagg

SEQ ID NO: 4174 - RNA, 22 nt, Artificial Sequence
  GATA2 Guide RNA
ccaggcagggcagcugcacuga

SEQ ID NO: 4175 - RNA, 22 nt, Artificial Sequence
  GATA2 Guide RNA
ccauguguccaggcagggcagc

SEQ ID NO: 4176 - RNA, 22 nt, Artificial Sequence
  GATA2 Guide RNA
cccacaggugccauguguccag

SEQ ID NO: 4177 - RNA, 22 nt, Artificial Sequence
  GATA2 Guide RNA
cccccuucagugcagcugcccu

SEQ ID NO: 4178 - RNA, 22 nt, Artificial Sequence
  GATA2 Guide RNA
ccccuucagugcagcugcccug

SEQ ID NO: 4179 - RNA, 22 nt, Artificial Sequence
  GATA2 Guide RNA
cccugccuggacacauggcacc

SEQ ID NO: 4180 - RNA, 22 nt, Artificial Sequence
  GATA2 Guide RNA
cccuucagugcagcugcccugc

SEQ ID NO: 4181 - RNA, 22 nt, Artificial Sequence
  GATA2 Guide RNA
ccugccuggacacauggcaccu

SEQ ID NO: 4182 - RNA, 22 nt, Artificial Sequence
  GATA2 Guide RNA
ccuucagugcagcugcccugcc

SEQ ID NO: 4183 - RNA, 22 nt, Artificial Sequence
  GATA2 Guide RNA
cugcccugccuggacacauggc

SEQ ID NO: 4184 - RNA, 22 nt, Artificial Sequence
  GATA2 Guide RNA
cugccuggacacauggcaccug

SEQ ID NO: 4185 - RNA, 22 nt, Artificial Sequence
  GATA2 Guide RNA
cuucagugcagcugcccugccu

SEQ ID NO: 4186 - RNA, 22 nt, Artificial Sequence
  GATA2 Guide RNA
gcagcugcccugccuggacaca

SEQ ID NO: 4187 - RNA, 22 nt, Artificial Sequence
  GATA2 Guide RNA
gcagggcagcugcacugaaggg

SEQ ID NO: 4188 - RNA, 22 nt, Artificial Sequence
  GATA2 Guide RNA
gccauguguccaggcagggcag

SEQ ID NO: 4189 - RNA, 22 nt, Artificial Sequence
  GATA2 Guide RNA
gcccacaggugccaugugucca

SEQ ID NO: 4190 - RNA, 22 nt, Artificial Sequence
  GATA2 Guide RNA
gcccugccuggacacauggcac

SEQ ID NO: 4191 - RNA, 22 nt, Artificial Sequence
  GATA2 Guide RNA
gccuggacacauggcaccugug

SEQ ID NO: 4192 - RNA, 22 nt, Artificial Sequence
  GATA2 Guide RNA
gcugcccugccuggacacaugg

SEQ ID NO: 4193 - RNA, 22 nt, Artificial Sequence
  GATA2 Guide RNA
ggcagggcagcugcacugaagg

SEQ ID NO: 4194 - RNA, 22 nt, Artificial Sequence
  GATA2 Guide RNA
ggcccacaggugccaugugucc

SEQ ID NO: 4195 - RNA, 22 nt, Artificial Sequence
  GATA2 Guide RNA
ggugccauguguccaggcaggg

SEQ ID NO: 4196 - RNA, 22 nt, Artificial Sequence
  GATA2 Guide RNA
guccaggcagggcagcugcacu

SEQ ID NO: 4197 - RNA, 22 nt, Artificial Sequence
  GATA2 Guide RNA
gugcagcugcccugccuggaca

SEQ ID NO: 4198 - RNA, 22 nt, Artificial Sequence
  GATA2 Guide RNA
gugccauguguccaggcagggc

SEQ ID NO: 4199 - RNA, 22 nt, Artificial Sequence
  GATA2 Guide RNA
guguccaggcagggcagcugca

SEQ ID NO: 4200 - RNA, 22 nt, Artificial Sequence
  GATA2 Guide RNA
ucagugcagcugcccugccugg

SEQ ID NO: 4201 - RNA, 22 nt, Artificial Sequence
  GATA2 Guide RNA
uccaggcagggcagcugcacug

SEQ ID NO: 4202 - RNA, 22 nt, Artificial Sequence
  GATA2 Guide RNA
ucccccuucagugcagcugccc

SEQ ID NO: 4203 - RNA, 22 nt, Artificial Sequence
  GATA2 Guide RNA
ugcagcugcccugccuggacac

SEQ ID NO: 4204 - RNA, 22 nt, Artificial Sequence
  GATA2 Guide RNA
ugccauguguccaggcagggca

SEQ ID NO: 4205 - RNA, 22 nt, Artificial Sequence
  GATA2 Guide RNA
ugcccugccuggacacauggca

SEQ ID NO: 4206 - RNA, 22 nt, Artificial Sequence
  GATA2 Guide RNA
ugccuggacacauggcaccugu

SEQ ID NO: 4207 - RNA, 22 nt, Artificial Sequence
  GATA2 Guide RNA
uguccaggcagggcagcugcac

SEQ ID NO: 4208 - RNA, 22 nt, Artificial Sequence
  GATA2 Guide RNA
uguguccaggcagggcagcugc

SEQ ID NO: 4209 - RNA, 22 nt, Artificial Sequence
  GATA2 Guide RNA
uucagugcagcugcccugccug

SEQ ID NO: 4210 - RNA, 20 nt, Artificial Sequence
  GATA2 Guide RNA
aagucaucccccuucacugc

SEQ ID NO: 4211 - RNA, 20 nt, Artificial Sequence
  GATA2 Guide RNA
acugcagcugcccuggcugg

SEQ ID NO: 4212 - RNA, 20 nt, Artificial Sequence
  GATA2 Guide RNA
agaagucaucccccuucacu

SEQ ID NO: 4213 - RNA, 20 nt, Artificial Sequence
  GATA2 Guide RNA
agccagggcagcugcaguga

SEQ ID NO: 4214 - RNA, 20 nt, Artificial Sequence
  GATA2 Guide RNA
agcugcagugaagggggaug

SEQ ID NO: 4215 - RNA, 20 nt, Artificial Sequence
  GATA2 Guide RNA
aggagaagucaucccccuuc

SEQ ID NO: 4216 - RNA, 20 nt, Artificial Sequence
  GATA2 Guide RNA
agggcagcugcagugaaggg

SEQ ID NO: 4217 - RNA, 20 nt, Artificial Sequence
  GATA2 Guide RNA
agucaucccccuucacugca

SEQ ID NO: 4218 - RNA, 20 nt, Artificial Sequence
  GATA2 Guide RNA
agugaagggggaugacuucu

SEQ ID NO: 4219 - RNA, 20 nt, Artificial Sequence
  GATA2 Guide RNA
aucccccuucacugcagcug

SEQ ID NO: 4220 - RNA, 20 nt, Artificial Sequence
  GATA2 Guide RNA
cacugcagcugcccuggcug

SEQ ID NO: 4221 - RNA, 20 nt, Artificial Sequence
  GATA2 Guide RNA
cagccagggcagcugcagug

SEQ ID NO: 4222 - RNA, 20 nt, Artificial Sequence
  GATA2 Guide RNA
cagcugcagugaagggggau

SEQ ID NO: 4223 - RNA, 20 nt, Artificial Sequence
  GATA2 Guide RNA
caggagaagucaucccccuu

SEQ ID NO: 4224 - RNA, 20 nt, Artificial Sequence
  GATA2 Guide RNA
cagggcagcugcagugaagg

SEQ ID NO: 4225 - RNA, 20 nt, Artificial Sequence
  GATA2 Guide RNA
cagugaagggggaugacuuc

SEQ ID NO: 4226 - RNA, 20 nt, Artificial Sequence
  GATA2 Guide RNA
caucccccuucacugcagcu

SEQ ID NO: 4227 - RNA, 20 nt, Artificial Sequence
  GATA2 Guide RNA
ccagccagggcagcugcagu

SEQ ID NO: 4228 - RNA, 20 nt, Artificial Sequence
  GATA2 Guide RNA
ccagggcagcugcagugaag

SEQ ID NO: 4229 - RNA, 20 nt, Artificial Sequence
  GATA2 Guide RNA
cccccuucacugcagcugcc

SEQ ID NO: 4230 - RNA, 20 nt, Artificial Sequence
  GATA2 Guide RNA
ccccuucacugcagcugccc

SEQ ID NO: 4231 - RNA, 20 nt, Artificial Sequence
  GATA2 Guide RNA
cccuucacugcagcugcccu

SEQ ID NO: 4232 - RNA, 20 nt, Artificial Sequence
  GATA2 Guide RNA
ccuucacugcagcugcccug

SEQ ID NO: 4233 - RNA, 20 nt, Artificial Sequence
  GATA2 Guide RNA
cugcagugaagggggaugac

SEQ ID NO: 4234 - RNA, 20 nt, Artificial Sequence
  GATA2 Guide RNA
cuucacugcagcugcccugg

SEQ ID NO: 4235 - RNA, 20 nt, Artificial Sequence
  GATA2 Guide RNA
gaagucaucccccuucacug

SEQ ID NO: 4236 - RNA, 20 nt, Artificial Sequence
  GATA2 Guide RNA
gagaagucaucccccuucac

SEQ ID NO: 4237 - RNA, 20 nt, Artificial Sequence
  GATA2 Guide RNA
gcagcugcagugaaggggga

SEQ ID NO: 4238 - RNA, 20 nt, Artificial Sequence
  GATA2 Guide RNA
gcaggagaagucaucccccu

SEQ ID NO: 4239 - RNA, 20 nt, Artificial Sequence
  GATA2 Guide RNA
gcagugaagggggaugacuu

SEQ ID NO: 4240 - RNA, 20 nt, Artificial Sequence
  GATA2 Guide RNA
gccagggcagcugcagugaa

SEQ ID NO: 4241 - RNA, 20 nt, Artificial Sequence
  GATA2 Guide RNA
gcugcagugaagggggauga

SEQ ID NO: 4242 - RNA, 20 nt, Artificial Sequence
  GATA2 Guide RNA
ggagaagucaucccccuuca

SEQ ID NO: 4243 - RNA, 20 nt, Artificial Sequence
  GATA2 Guide RNA
ggcagcugcagugaaggggg

SEQ ID NO: 4244 - RNA, 20 nt, Artificial Sequence
  GATA2 Guide RNA
gggcagcugcagugaagggg

SEQ ID NO: 4245 - RNA, 20 nt, Artificial Sequence
  GATA2 Guide RNA
gucaucccccuucacugcag

SEQ ID NO: 4246 - RNA, 20 nt, Artificial Sequence
  GATA2 Guide RNA
guccagccagggcagcugca

SEQ ID NO: 4247 - RNA, 20 nt, Artificial Sequence
  GATA2 Guide RNA
gugaagggggaugacuucuc

SEQ ID NO: 4248 - RNA, 20 nt, Artificial Sequence
  GATA2 Guide RNA
guguccagccagggcagcug

SEQ ID NO: 4249 - RNA, 20 nt, Artificial Sequence
  GATA2 Guide RNA
ucacugcagcugcccuggcu

SEQ ID NO: 4250 - RNA, 20 nt, Artificial Sequence
  GATA2 Guide RNA
ucaucccccuucacugcagc

SEQ ID NO: 4251 - RNA, 20 nt, Artificial Sequence
  GATA2 Guide RNA
uccagccagggcagcugcag

SEQ ID NO: 4252 - RNA, 20 nt, Artificial Sequence
  GATA2 Guide RNA
ucccccuucacugcagcugc

SEQ ID NO: 4253 - RNA, 20 nt, Artificial Sequence
  GATA2 Guide RNA
ugcagugaagggggaugacu

SEQ ID NO: 4254 - RNA, 20 nt, Artificial Sequence
  GATA2 Guide RNA
uguccagccagggcagcugc

SEQ ID NO: 4255 - RNA, 20 nt, Artificial Sequence
  GATA2 Guide RNA
uucacugcagcugcccuggc

SEQ ID NO: 4256 - RNA, 21 nt, Artificial Sequence
  GATA2 Guide RNA
aagucaucccccuucacugca

SEQ ID NO: 4257 - RNA, 21 nt, Artificial Sequence
  GATA2 Guide RNA
acugcagcugcccuggcugga

SEQ ID NO: 4258 - RNA, 21 nt, Artificial Sequence
  GATA2 Guide RNA
agaagucaucccccuucacug

SEQ ID NO: 4259 - RNA, 21 nt, Artificial Sequence
  GATA2 Guide RNA
agccagggcagcugcagugaa

SEQ ID NO: 4260 - RNA, 21 nt, Artificial Sequence
  GATA2 Guide RNA
agcugcagugaagggggauga

SEQ ID NO: 4261 - RNA, 21 nt, Artificial Sequence
  GATA2 Guide RNA
aggagaagucaucccccuuca

SEQ ID NO: 4262 - RNA, 21 nt, Artificial Sequence
  GATA2 Guide RNA
agggcagcugcagugaagggg

SEQ ID NO: 4263 - RNA, 21 nt, Artificial Sequence
  GATA2 Guide RNA
agucaucccccuucacugcag

SEQ ID NO: 4264 - RNA, 21 nt, Artificial Sequence
  GATA2 Guide RNA
agugaagggggaugacuucuc

SEQ ID NO: 4265 - RNA, 21 nt, Artificial Sequence
  GATA2 Guide RNA
aucccccuucacugcagcugc

SEQ ID NO: 4266 - RNA, 21 nt, Artificial Sequence
  GATA2 Guide RNA
cacugcagcugcccuggcugg

SEQ ID NO: 4267 - RNA, 21 nt, Artificial Sequence
  GATA2 Guide RNA
cagccagggcagcugcaguga

SEQ ID NO: 4268 - RNA, 21 nt, Artificial Sequence
  GATA2 Guide RNA
cagcugcagugaagggggaug

SEQ ID NO: 4269 - RNA, 21 nt, Artificial Sequence
  GATA2 Guide RNA
caggagaagucaucccccuuc

SEQ ID NO: 4270 - RNA, 21 nt, Artificial Sequence
  GATA2 Guide RNA
cagggcagcugcagugaaggg

SEQ ID NO: 4271 - RNA, 21 nt, Artificial Sequence
  GATA2 Guide RNA
cagugaagggggaugacuucu

SEQ ID NO: 4272 - RNA, 21 nt, Artificial Sequence
  GATA2 Guide RNA
caucccccuucacugcagcug

SEQ ID NO: 4273 - RNA, 21 nt, Artificial Sequence
  GATA2 Guide RNA
ccagccagggcagcugcagug

SEQ ID NO: 4274 - RNA, 21 nt, Artificial Sequence
  GATA2 Guide RNA
ccagggcagcugcagugaagg

SEQ ID NO: 4275 - RNA, 21 nt, Artificial Sequence
  GATA2 Guide RNA
cccccuucacugcagcugccc

SEQ ID NO: 4276 - RNA, 21 nt, Artificial Sequence
  GATA2 Guide RNA
ccccuucacugcagcugcccu

SEQ ID NO: 4277 - RNA, 21 nt, Artificial Sequence
  GATA2 Guide RNA
cccuucacugcagcugcccug

SEQ ID NO: 4278 - RNA, 21 nt, Artificial Sequence
  GATA2 Guide RNA
ccuucacugcagcugcccugg

SEQ ID NO: 4279 - RNA, 21 nt, Artificial Sequence
  GATA2 Guide RNA
cugcagugaagggggaugacu

SEQ ID NO: 4280 - RNA, 21 nt, Artificial Sequence
  GATA2 Guide RNA
cuucacugcagcugcccuggc

SEQ ID NO: 4281 - RNA, 21 nt, Artificial Sequence
  GATA2 Guide RNA
gaagucaucccccuucacugc

SEQ ID NO: 4282 - RNA, 21 nt, Artificial Sequence
  GATA2 Guide RNA
gagaagucaucccccuucacu

SEQ ID NO: 4283 - RNA, 21 nt, Artificial Sequence
  GATA2 Guide RNA
gcagcugcagugaagggggau

SEQ ID NO: 4284 - RNA, 21 nt, Artificial Sequence
  GATA2 Guide RNA
gcaggagaagucaucccccuu

SEQ ID NO: 4285 - RNA, 21 nt, Artificial Sequence
  GATA2 Guide RNA
gcagugaagggggaugacuuc

SEQ ID NO: 4286 - RNA, 21 nt, Artificial Sequence
  GATA2 Guide RNA
gccagggcagcugcagugaag

SEQ ID NO: 4287 - RNA, 21 nt, Artificial Sequence
  GATA2 Guide RNA
gcugcagugaagggggaugac

SEQ ID NO: 4288 - RNA, 21 nt, Artificial Sequence
  GATA2 Guide RNA
ggagaagucaucccccuucac

SEQ ID NO: 4289 - RNA, 21 nt, Artificial Sequence
  GATA2 Guide RNA
ggcagcugcagugaaggggga

SEQ ID NO: 4290 - RNA, 21 nt, Artificial Sequence
  GATA2 Guide RNA
gggcagcugcagugaaggggg

SEQ ID NO: 4291 - RNA, 21 nt, Artificial Sequence
  GATA2 Guide RNA
gucaucccccuucacugcagc

SEQ ID NO: 4292 - RNA, 21 nt, Artificial Sequence
  GATA2 Guide RNA
guccagccagggcagcugcag

SEQ ID NO: 4293 - RNA, 21 nt, Artificial Sequence
  GATA2 Guide RNA
gugaagggggaugacuucucc

SEQ ID NO: 4294 - RNA, 21 nt, Artificial Sequence
  GATA2 Guide RNA
guguccagccagggcagcugc

SEQ ID NO: 4295 - RNA, 21 nt, Artificial Sequence
  GATA2 Guide RNA
ucacugcagcugcccuggcug

SEQ ID NO: 4296 - RNA, 21 nt, Artificial Sequence
  GATA2 Guide RNA
ucaucccccuucacugcagcu

SEQ ID NO: 4297 - RNA, 21 nt, Artificial Sequence
  GATA2 Guide RNA
uccagccagggcagcugcagu

SEQ ID NO: 4298 - RNA, 21 nt, Artificial Sequence
  GATA2 Guide RNA
ucccccuucacugcagcugcc

SEQ ID NO: 4299 - RNA, 21 nt, Artificial Sequence
  GATA2 Guide RNA
ugcaggagaagucaucccccu

SEQ ID NO: 4300 - RNA, 21 nt, Artificial Sequence
  GATA2 Guide RNA
ugcagugaagggggaugacuu

SEQ ID NO: 4301 - RNA, 21 nt, Artificial Sequence
  GATA2 Guide RNA
uguccagccagggcagcugca

SEQ ID NO: 4302 - RNA, 21 nt, Artificial Sequence
  GATA2 Guide RNA
uguguccagccagggcagcug

SEQ ID NO: 4303 - RNA, 21 nt, Artificial Sequence
  GATA2 Guide RNA
uucacugcagcugcccuggcu

SEQ ID NO: 4304 - RNA, 22 nt, Artificial Sequence
  GATA2 Guide RNA
aagucaucccccuucacugcag

SEQ ID NO: 4305 - RNA, 22 nt, Artificial Sequence
  GATA2 Guide RNA
acugcagcugcccuggcuggac

SEQ ID NO: 4306 - RNA, 22 nt, Artificial Sequence
  GATA2 Guide RNA
agaagucaucccccuucacugc

SEQ ID NO: 4307 - RNA, 22 nt, Artificial Sequence
  GATA2 Guide RNA
agccagggcagcugcagugaag

SEQ ID NO: 4308 - RNA, 22 nt, Artificial Sequence
  GATA2 Guide RNA
agcugcagugaagggggaugac

SEQ ID NO: 4309 - RNA, 22 nt, Artificial Sequence
  GATA2 Guide RNA
aggagaagucaucccccuucac

SEQ ID NO: 4310 - RNA, 22 nt, Artificial Sequence
  GATA2 Guide RNA
agggcagcugcagugaaggggg

SEQ ID NO: 4311 - RNA, 22 nt, Artificial Sequence
  GATA2 Guide RNA
agucaucccccuucacugcagc

SEQ ID NO: 4312 - RNA, 22 nt, Artificial Sequence
  GATA2 Guide RNA
agugaagggggaugacuucucc

SEQ ID NO: 4313 - RNA, 22 nt, Artificial Sequence
  GATA2 Guide RNA
aucccccuucacugcagcugcc

SEQ ID NO: 4314 - RNA, 22 nt, Artificial Sequence
  GATA2 Guide RNA
augcaggagaagucaucccccu

SEQ ID NO: 4315 - RNA, 22 nt, Artificial Sequence
  GATA2 Guide RNA
auguguccagccagggcagcug

SEQ ID NO: 4316 - RNA, 22 nt, Artificial Sequence
  GATA2 Guide RNA
cacugcagcugcccuggcugga

SEQ ID NO: 4317 - RNA, 22 nt, Artificial Sequence
  GATA2 Guide RNA
cagccagggcagcugcagugaa

SEQ ID NO: 4318 - RNA, 22 nt, Artificial Sequence
  GATA2 Guide RNA
cagcugcagugaagggggauga

SEQ ID NO: 4319 - RNA, 22 nt, Artificial Sequence
  GATA2 Guide RNA
caggagaagucaucccccuuca

SEQ ID NO: 4320 - RNA, 22 nt, Artificial Sequence
  GATA2 Guide RNA
cagggcagcugcagugaagggg

SEQ ID NO: 4321 - RNA, 22 nt, Artificial Sequence
  GATA2 Guide RNA
cagugaagggggaugacuucuc

SEQ ID NO: 4322 - RNA, 22 nt, Artificial Sequence
  GATA2 Guide RNA
caucccccuucacugcagcugc

SEQ ID NO: 4323 - RNA, 22 nt, Artificial Sequence
  GATA2 Guide RNA
ccagccagggcagcugcaguga

SEQ ID NO: 4324 - RNA, 22 nt, Artificial Sequence
  GATA2 Guide RNA
ccagggcagcugcagugaaggg

SEQ ID NO: 4325 - RNA, 22 nt, Artificial Sequence
  GATA2 Guide RNA
cccccuucacugcagcugcccu

SEQ ID NO: 4326 - RNA, 22 nt, Artificial Sequence
  GATA2 Guide RNA
ccccuucacugcagcugcccug

SEQ ID NO: 4327 - RNA, 22 nt, Artificial Sequence
  GATA2 Guide RNA
cccuucacugcagcugcccugg

SEQ ID NO: 4328 - RNA, 22 nt, Artificial Sequence
  GATA2 Guide RNA
ccuucacugcagcugcccuggc

SEQ ID NO: 4329 - RNA, 22 nt, Artificial Sequence
  GATA2 Guide RNA
cugcagugaagggggaugacuu

SEQ ID NO: 4330 - RNA, 22 nt, Artificial Sequence
  GATA2 Guide RNA
cuucacugcagcugcccuggcu

SEQ ID NO: 4331 - RNA, 22 nt, Artificial Sequence
  GATA2 Guide RNA
gaagucaucccccuucacugca

SEQ ID NO: 4332 - RNA, 22 nt, Artificial Sequence
  GATA2 Guide RNA
gagaagucaucccccuucacug

SEQ ID NO: 4333 - RNA, 22 nt, Artificial Sequence
  GATA2 Guide RNA
gcagcugcagugaagggggaug

SEQ ID NO: 4334 - RNA, 22 nt, Artificial Sequence
  GATA2 Guide RNA
gcaggagaagucaucccccuuc

SEQ ID NO: 4335 - RNA, 22 nt, Artificial Sequence
  GATA2 Guide RNA
gcagugaagggggaugacuucu

SEQ ID NO: 4336 - RNA, 22 nt, Artificial Sequence
  GATA2 Guide RNA
gccagggcagcugcagugaagg

SEQ ID NO: 4337 - RNA, 22 nt, Artificial Sequence
  GATA2 Guide RNA
gcugcagugaagggggaugacu

SEQ ID NO: 4338 - RNA, 22 nt, Artificial Sequence
  GATA2 Guide RNA
ggagaagucaucccccuucacu

SEQ ID NO: 4339 - RNA, 22 nt, Artificial Sequence
  GATA2 Guide RNA
ggcagcugcagugaagggggau

SEQ ID NO: 4340 - RNA, 22 nt, Artificial Sequence
  GATA2 Guide RNA
gggcagcugcagugaaggggga

SEQ ID NO: 4341 - RNA, 22 nt, Artificial Sequence
  GATA2 Guide RNA
gucaucccccuucacugcagcu

SEQ ID NO: 4342 - RNA, 22 nt, Artificial Sequence
  GATA2 Guide RNA
guccagccagggcagcugcagu

SEQ ID NO: 4343 - RNA, 22 nt, Artificial Sequence
  GATA2 Guide RNA
gugaagggggaugacuucuccu

SEQ ID NO: 4344 - RNA, 22 nt, Artificial Sequence
  GATA2 Guide RNA
guguccagccagggcagcugca

SEQ ID NO: 4345 - RNA, 22 nt, Artificial Sequence
  GATA2 Guide RNA
ucacugcagcugcccuggcugg

SEQ ID NO: 4346 - RNA, 22 nt, Artificial Sequence
  GATA2 Guide RNA
ucaucccccuucacugcagcug

SEQ ID NO: 4347 - RNA, 22 nt, Artificial Sequence
  GATA2 Guide RNA
uccagccagggcagcugcagug

SEQ ID NO: 4348 - RNA, 22 nt, Artificial Sequence
  GATA2 Guide RNA
ucccccuucacugcagcugccc

SEQ ID NO: 4349 - RNA, 22 nt, Artificial Sequence
  GATA2 Guide RNA
ugcaggagaagucaucccccuu

SEQ ID NO: 4350 - RNA, 22 nt, Artificial Sequence
  GATA2 Guide RNA
ugcagugaagggggaugacuuc

SEQ ID NO: 4351 - RNA, 22 nt, Artificial Sequence
  GATA2 Guide RNA
uguccagccagggcagcugcag

SEQ ID NO: 4352 - RNA, 22 nt, Artificial Sequence
  GATA2 Guide RNA
uguguccagccagggcagcugc

SEQ ID NO: 4353 - RNA, 22 nt, Artificial Sequence
  GATA2 Guide RNA
uucacugcagcugcccuggcug

SEQ ID NO: 4354 - RNA, 20 nt, Artificial Sequence
  GATA2 Guide RNA
aagucaucccccaucagugc

SEQ ID NO: 4355 - RNA, 20 nt, Artificial Sequence
  GATA2 Guide RNA
acugaugggggaugacuucu

SEQ ID NO: 4356 - RNA, 20 nt, Artificial Sequence
  GATA2 Guide RNA
agaagucaucccccaucagu

SEQ ID NO: 4357 - RNA, 20 nt, Artificial Sequence
  GATA2 Guide RNA
agccagggcagcugcacuga

SEQ ID NO: 4358 - RNA, 20 nt, Artificial Sequence
  GATA2 Guide RNA
agcugcacugaugggggaug

SEQ ID NO: 4359 - RNA, 20 nt, Artificial Sequence
  GATA2 Guide RNA
aggagaagucaucccccauc

SEQ ID NO: 4360 - RNA, 20 nt, Artificial Sequence
  GATA2 Guide RNA
agggcagcugcacugauggg

SEQ ID NO: 4361 - RNA, 20 nt, Artificial Sequence
  GATA2 Guide RNA
agucaucccccaucagugca

SEQ ID NO: 4362 - RNA, 20 nt, Artificial Sequence
  GATA2 Guide RNA
aucccccaucagugcagcug

SEQ ID NO: 4363 - RNA, 20 nt, Artificial Sequence
  GATA2 Guide RNA
augcaggagaagucaucccc

SEQ ID NO: 4364 - RNA, 20 nt, Artificial Sequence
  GATA2 Guide RNA
augggggaugacuucuccug

SEQ ID NO: 4365 - RNA, 20 nt, Artificial Sequence
  GATA2 Guide RNA
cacugaugggggaugacuuc

SEQ ID NO: 4366 - RNA, 20 nt, Artificial Sequence
  GATA2 Guide RNA
cagccagggcagcugcacug

SEQ ID NO: 4367 - RNA, 20 nt, Artificial Sequence
  GATA2 Guide RNA
cagcugcacugaugggggau

SEQ ID NO: 4368 - RNA, 20 nt, Artificial Sequence
  GATA2 Guide RNA
caggagaagucaucccccau

SEQ ID NO: 4369 - RNA, 20 nt, Artificial Sequence
  GATA2 Guide RNA
cagggcagcugcacugaugg

SEQ ID NO: 4370 - RNA, 20 nt, Artificial Sequence
  GATA2 Guide RNA
caucagugcagcugcccugg

SEQ ID NO: 4371 - RNA, 20 nt, Artificial Sequence
  GATA2 Guide RNA
caucccccaucagugcagcu

SEQ ID NO: 4372 - RNA, 20 nt, Artificial Sequence
  GATA2 Guide RNA
caugcaggagaagucauccc

SEQ ID NO: 4373 - RNA, 20 nt, Artificial Sequence
  GATA2 Guide RNA
ccagccagggcagcugcacu

SEQ ID NO: 4374 - RNA, 20 nt, Artificial Sequence
  GATA2 Guide RNA
ccagggcagcugcacugaug

SEQ ID NO: 4375 - RNA, 20 nt, Artificial Sequence
  GATA2 Guide RNA
ccaucagugcagcugcccug

SEQ ID NO: 4376 - RNA, 20 nt, Artificial Sequence
  GATA2 Guide RNA
cccaucagugcagcugcccu

SEQ ID NO: 4377 - RNA, 20 nt, Artificial Sequence
  GATA2 Guide RNA
ccccaucagugcagcugccc

SEQ ID NO: 4378 - RNA, 20 nt, Artificial Sequence
  GATA2 Guide RNA
cccccaucagugcagcugcc

SEQ ID NO: 4379 - RNA, 20 nt, Artificial Sequence
  GATA2 Guide RNA
cugaugggggaugacuucuc

SEQ ID NO: 4380 - RNA, 20 nt, Artificial Sequence
  GATA2 Guide RNA
cugcacugaugggggaugac

SEQ ID NO: 4381 - RNA, 20 nt, Artificial Sequence
  GATA2 Guide RNA
gaagucaucccccaucagug

SEQ ID NO: 4382 - RNA, 20 nt, Artificial Sequence
  GATA2 Guide RNA
gagaagucaucccccaucag

SEQ ID NO: 4383 - RNA, 20 nt, Artificial Sequence
  GATA2 Guide RNA
gaugggggaugacuucuccu

SEQ ID NO: 4384 - RNA, 20 nt, Artificial Sequence
  GATA2 Guide RNA
gcacugaugggggaugacuu

SEQ ID NO: 4385 - RNA, 20 nt, Artificial Sequence
  GATA2 Guide RNA
gcagcugcacugauggggga

SEQ ID NO: 4386 - RNA, 20 nt, Artificial Sequence
  GATA2 Guide RNA
gcaggagaagucauccccca

SEQ ID NO: 4387 - RNA, 20 nt, Artificial Sequence
  GATA2 Guide RNA
gcaugcaggagaagucaucc

SEQ ID NO: 4388 - RNA, 20 nt, Artificial Sequence
  GATA2 Guide RNA
gccagggcagcugcacugau

SEQ ID NO: 4389 - RNA, 20 nt, Artificial Sequence
  GATA2 Guide RNA
gcugcacugaugggggauga

SEQ ID NO: 4390 - RNA, 20 nt, Artificial Sequence
  GATA2 Guide RNA
ggagaagucaucccccauca

SEQ ID NO: 4391 - RNA, 20 nt, Artificial Sequence
  GATA2 Guide RNA
ggcagcugcacugauggggg

SEQ ID NO: 4392 - RNA, 20 nt, Artificial Sequence
  GATA2 Guide RNA
gggcagcugcacugaugggg

SEQ ID NO: 4393 - RNA, 20 nt, Artificial Sequence
  GATA2 Guide RNA
gucaucccccaucagugcag

SEQ ID NO: 4394 - RNA, 20 nt, Artificial Sequence
  GATA2 Guide RNA
ucaucccccaucagugcagc

SEQ ID NO: 4395 - RNA, 20 nt, Artificial Sequence
  GATA2 Guide RNA
ucccccaucagugcagcugc

SEQ ID NO: 4396 - RNA, 20 nt, Artificial Sequence
  GATA2 Guide RNA
ugaugggggaugacuucucc

SEQ ID NO: 4397 - RNA, 20 nt, Artificial Sequence
  GATA2 Guide RNA
ugcacugaugggggaugacu

SEQ ID NO: 4398 - RNA, 20 nt, Artificial Sequence
  GATA2 Guide RNA
ugcaggagaagucauccccc

SEQ ID NO: 4399 - RNA, 20 nt, Artificial Sequence
  GATA2 Guide RNA
ugggggaugacuucuccugc

SEQ ID NO: 4400 - RNA, 21 nt, Artificial Sequence
  GATA2 Guide RNA
aagucaucccccaucagugca

SEQ ID NO: 4401 - RNA, 21 nt, Artificial Sequence
  GATA2 Guide RNA
acugaugggggaugacuucuc

SEQ ID NO: 4402 - RNA, 21 nt, Artificial Sequence
  GATA2 Guide RNA
agaagucaucccccaucagug

SEQ ID NO: 4403 - RNA, 21 nt, Artificial Sequence
  GATA2 Guide RNA
agccagggcagcugcacugau

SEQ ID NO: 4404 - RNA, 21 nt, Artificial Sequence
  GATA2 Guide RNA
agcugcacugaugggggauga

SEQ ID NO: 4405 - RNA, 21 nt, Artificial Sequence
  GATA2 Guide RNA
aggagaagucaucccccauca

SEQ ID NO: 4406 - RNA, 21 nt, Artificial Sequence
  GATA2 Guide RNA
agggcagcugcacugaugggg

SEQ ID NO: 4407 - RNA, 21 nt, Artificial Sequence
  GATA2 Guide RNA
agucaucccccaucagugcag

SEQ ID NO: 4408 - RNA, 21 nt, Artificial Sequence
  GATA2 Guide RNA
aucccccaucagugcagcugc

SEQ ID NO: 4409 - RNA, 21 nt, Artificial Sequence
  GATA2 Guide RNA
augcaggagaagucauccccc

SEQ ID NO: 4410 - RNA, 21 nt, Artificial Sequence
  GATA2 Guide RNA
augggggaugacuucuccugc

SEQ ID NO: 4411 - RNA, 21 nt, Artificial Sequence
  GATA2 Guide RNA
cacugaugggggaugacuucu

SEQ ID NO: 4412 - RNA, 21 nt, Artificial Sequence
  GATA2 Guide RNA
cagccagggcagcugcacuga

SEQ ID NO: 4413 - RNA, 21 nt, Artificial Sequence
  GATA2 Guide RNA
cagcugcacugaugggggaug

SEQ ID NO: 4414 - RNA, 21 nt, Artificial Sequence
  GATA2 Guide RNA
caggagaagucaucccccauc

SEQ ID NO: 4415 - RNA, 21 nt, Artificial Sequence
  GATA2 Guide RNA
cagggcagcugcacugauggg

SEQ ID NO: 4416 - RNA, 21 nt, Artificial Sequence
  GATA2 Guide RNA
caucagugcagcugcccuggc

SEQ ID NO: 4417 - RNA, 21 nt, Artificial Sequence
  GATA2 Guide RNA
caucccccaucagugcagcug

SEQ ID NO: 4418 - RNA, 21 nt, Artificial Sequence
  GATA2 Guide RNA
caugcaggagaagucaucccc

SEQ ID NO: 4419 - RNA, 21 nt, Artificial Sequence
  GATA2 Guide RNA
ccagccagggcagcugcacug

SEQ ID NO: 4420 - RNA, 21 nt, Artificial Sequence
  GATA2 Guide RNA
ccagggcagcugcacugaugg

SEQ ID NO: 4421 - RNA, 21 nt, Artificial Sequence
  GATA2 Guide RNA
ccaucagugcagcugcccugg

SEQ ID NO: 4422 - RNA, 21 nt, Artificial Sequence
  GATA2 Guide RNA
cccaucagugcagcugcccug

SEQ ID NO: 4423 - RNA, 21 nt, Artificial Sequence
  GATA2 Guide RNA
ccccaucagugcagcugcccu

SEQ ID NO: 4424 - RNA, 21 nt, Artificial Sequence
  GATA2 Guide RNA
cccccaucagugcagcugccc

SEQ ID NO: 4425 - RNA, 21 nt, Artificial Sequence
  GATA2 Guide RNA
cugaugggggaugacuucucc

SEQ ID NO: 4426 - RNA, 21 nt, Artificial Sequence
  GATA2 Guide RNA
cugcacugaugggggaugacu

SEQ ID NO: 4427 - RNA, 21 nt, Artificial Sequence
  GATA2 Guide RNA
gaagucaucccccaucagugc

SEQ ID NO: 4428 - RNA, 21 nt, Artificial Sequence
  GATA2 Guide RNA
gagaagucaucccccaucagu

SEQ ID NO: 4429 - RNA, 21 nt, Artificial Sequence
  GATA2 Guide RNA
gaugggggaugacuucuccug

SEQ ID NO: 4430 - RNA, 21 nt, Artificial Sequence
  GATA2 Guide RNA
gcacugaugggggaugacuuc

SEQ ID NO: 4431 - RNA, 21 nt, Artificial Sequence
  GATA2 Guide RNA
gcagcugcacugaugggggau

SEQ ID NO: 4432 - RNA, 21 nt, Artificial Sequence
  GATA2 Guide RNA
gcaggagaagucaucccccau

SEQ ID NO: 4433 - RNA, 21 nt, Artificial Sequence
  GATA2 Guide RNA
gcaugcaggagaagucauccc

SEQ ID NO: 4434 - RNA, 21 nt, Artificial Sequence
  GATA2 Guide RNA
gccagggcagcugcacugaug

SEQ ID NO: 4435 - RNA, 21 nt, Artificial Sequence
  GATA2 Guide RNA
gcugcacugaugggggaugac

SEQ ID NO: 4436 - RNA, 21 nt, Artificial Sequence
  GATA2 Guide RNA
ggagaagucaucccccaucag

SEQ ID NO: 4437 - RNA, 21 nt, Artificial Sequence
  GATA2 Guide RNA
ggcagcugcacugauggggga

SEQ ID NO: 4438 - RNA, 21 nt, Artificial Sequence
  GATA2 Guide RNA
gggcagcugcacugauggggg

SEQ ID NO: 4439 - RNA, 21 nt, Artificial Sequence
  GATA2 Guide RNA
gucaucccccaucagugcagc

SEQ ID NO: 4440 - RNA, 21 nt, Artificial Sequence
  GATA2 Guide RNA
ucaucccccaucagugcagcu

SEQ ID NO: 4441 - RNA, 21 nt, Artificial Sequence
  GATA2 Guide RNA
uccagccagggcagcugcacu

SEQ ID NO: 4442 - RNA, 21 nt, Artificial Sequence
  GATA2 Guide RNA
ucccccaucagugcagcugcc

SEQ ID NO: 4443 - RNA, 21 nt, Artificial Sequence
  GATA2 Guide RNA
ugaugggggaugacuucuccu

SEQ ID NO: 4444 - RNA, 21 nt, Artificial Sequence
  GATA2 Guide RNA
ugcacugaugggggaugacuu

SEQ ID NO: 4445 - RNA, 21 nt, Artificial Sequence
  GATA2 Guide RNA
ugcaggagaagucauccccca

SEQ ID NO: 4446 - RNA, 21 nt, Artificial Sequence
  GATA2 Guide RNA
ugcaugcaggagaagucaucc

SEQ ID NO: 4447 - RNA, 21 nt, Artificial Sequence
  GATA2 Guide RNA
ugggggaugacuucuccugca

SEQ ID NO: 4448 - RNA, 22 nt, Artificial Sequence
  GATA2 Guide RNA
aagucaucccccaucagugcag

SEQ ID NO: 4449 - RNA, 22 nt, Artificial Sequence
  GATA2 Guide RNA
acugaugggggaugacuucucc

SEQ ID NO: 4450 - RNA, 22 nt, Artificial Sequence
  GATA2 Guide RNA
agaagucaucccccaucagugc

SEQ ID NO: 4451 - RNA, 22 nt, Artificial Sequence
  GATA2 Guide RNA
agccagggcagcugcacugaug

SEQ ID NO: 4452 - RNA, 22 nt, Artificial Sequence
  GATA2 Guide RNA
agcugcacugaugggggaugac

SEQ ID NO: 4453 - RNA, 22 nt, Artificial Sequence
  GATA2 Guide RNA
aggagaagucaucccccaucag

SEQ ID NO: 4454 - RNA, 22 nt, Artificial Sequence
  GATA2 Guide RNA
agggcagcugcacugauggggg

SEQ ID NO: 4455 - RNA, 22 nt, Artificial Sequence
  GATA2 Guide RNA
agucaucccccaucagugcagc

SEQ ID NO: 4456 - RNA, 22 nt, Artificial Sequence
  GATA2 Guide RNA
aucccccaucagugcagcugcc

SEQ ID NO: 4457 - RNA, 22 nt, Artificial Sequence
  GATA2 Guide RNA
augcaggagaagucauccccca

SEQ ID NO: 4458 - RNA, 22 nt, Artificial Sequence
  GATA2 Guide RNA
augggggaugacuucuccugca

SEQ ID NO: 4459 - RNA, 22 nt, Artificial Sequence
  GATA2 Guide RNA
cacugaugggggaugacuucuc

SEQ ID NO: 4460 - RNA, 22 nt, Artificial Sequence
  GATA2 Guide RNA
cagccagggcagcugcacugau

SEQ ID NO: 4461 - RNA, 22 nt, Artificial Sequence
  GATA2 Guide RNA
cagcugcacugaugggggauga

SEQ ID NO: 4462 - RNA, 22 nt, Artificial Sequence
  GATA2 Guide RNA
caggagaagucaucccccauca

SEQ ID NO: 4463 - RNA, 22 nt, Artificial Sequence
  GATA2 Guide RNA
cagggcagcugcacugaugggg

SEQ ID NO: 4464 - RNA, 22 nt, Artificial Sequence
  GATA2 Guide RNA
caucagugcagcugcccuggcu

SEQ ID NO: 4465 - RNA, 22 nt, Artificial Sequence
  GATA2 Guide RNA
caucccccaucagugcagcugc

SEQ ID NO: 4466 - RNA, 22 nt, Artificial Sequence
  GATA2 Guide RNA
caugcaggagaagucauccccc

SEQ ID NO: 4467 - RNA, 22 nt, Artificial Sequence
  GATA2 Guide RNA
ccagccagggcagcugcacuga

SEQ ID NO: 4468 - RNA, 22 nt, Artificial Sequence
  GATA2 Guide RNA
ccagggcagcugcacugauggg

SEQ ID NO: 4469 - RNA, 22 nt, Artificial Sequence
  GATA2 Guide RNA
ccaucagugcagcugcccuggc

SEQ ID NO: 4470 - RNA, 22 nt, Artificial Sequence
  GATA2 Guide RNA
cccaucagugcagcugcccugg

SEQ ID NO: 4471 - RNA, 22 nt, Artificial Sequence
  GATA2 Guide RNA
ccccaucagugcagcugcccug

SEQ ID NO: 4472 - RNA, 22 nt, Artificial Sequence
  GATA2 Guide RNA
cccccaucagugcagcugcccu

SEQ ID NO: 4473 - RNA, 22 nt, Artificial Sequence
  GATA2 Guide RNA
cugaugggggaugacuucuccu

SEQ ID NO: 4474 - RNA, 22 nt, Artificial Sequence
  GATA2 Guide RNA
cugcacugaugggggaugacuu

SEQ ID NO: 4475 - RNA, 22 nt, Artificial Sequence
  GATA2 Guide RNA
gaagucaucccccaucagugca

SEQ ID NO: 4476 - RNA, 22 nt, Artificial Sequence
  GATA2 Guide RNA
gagaagucaucccccaucagug

SEQ ID NO: 4477 - RNA, 22 nt, Artificial Sequence
  GATA2 Guide RNA
gaugggggaugacuucuccugc

SEQ ID NO: 4478 - RNA, 22 nt, Artificial Sequence
  GATA2 Guide RNA
gcacugaugggggaugacuucu

SEQ ID NO: 4479 - RNA, 22 nt, Artificial Sequence
  GATA2 Guide RNA
gcagcugcacugaugggggaug

SEQ ID NO: 4480 - RNA, 22 nt, Artificial Sequence
  GATA2 Guide RNA
gcaggagaagucaucccccauc

SEQ ID NO: 4481 - RNA, 22 nt, Artificial Sequence
  GATA2 Guide RNA
gcaugcaggagaagucaucccc

SEQ ID NO: 4482 - RNA, 22 nt, Artificial Sequence
  GATA2 Guide RNA
gccagggcagcugcacugaugg

SEQ ID NO: 4483 - RNA, 22 nt, Artificial Sequence
  GATA2 Guide RNA
gcugcacugaugggggaugacu

SEQ ID NO: 4484 - RNA, 22 nt, Artificial Sequence
  GATA2 Guide RNA
ggagaagucaucccccaucagu

SEQ ID NO: 4485 - RNA, 22 nt, Artificial Sequence
  GATA2 Guide RNA
ggcagcugcacugaugggggau

SEQ ID NO: 4486 - RNA, 22 nt, Artificial Sequence
  GATA2 Guide RNA
gggcagcugcacugauggggga

SEQ ID NO: 4487 - RNA, 22 nt, Artificial Sequence
  GATA2 Guide RNA
gucaucccccaucagugcagcu

SEQ ID NO: 4488 - RNA, 22 nt, Artificial Sequence
  GATA2 Guide RNA
guccagccagggcagcugcacu

SEQ ID NO: 4489 - RNA, 22 nt, Artificial Sequence
  GATA2 Guide RNA
gugcaugcaggagaagucaucc

SEQ ID NO: 4490 - RNA, 22 nt, Artificial Sequence
  GATA2 Guide RNA
ucaucccccaucagugcagcug

SEQ ID NO: 4491 - RNA, 22 nt, Artificial Sequence
  GATA2 Guide RNA
uccagccagggcagcugcacug

SEQ ID NO: 4492 - RNA, 22 nt, Artificial Sequence
  GATA2 Guide RNA
ucccccaucagugcagcugccc

SEQ ID NO: 4493 - RNA, 22 nt, Artificial Sequence
  GATA2 Guide RNA
ugaugggggaugacuucuccug

SEQ ID NO: 4494 - RNA, 22 nt, Artificial Sequence
  GATA2 Guide RNA
ugcacugaugggggaugacuuc

SEQ ID NO: 4495 - RNA, 22 nt, Artificial Sequence
  GATA2 Guide RNA
ugcaggagaagucaucccccau

SEQ ID NO: 4496 - RNA, 22 nt, Artificial Sequence
  GATA2 Guide RNA
ugcaugcaggagaagucauccc

SEQ ID NO: 4497 - RNA, 22 nt, Artificial Sequence
  GATA2 Guide RNA
ugggggaugacuucuccugcau

SEQ ID NO: 4498 - RNA, 20 nt, Artificial Sequence
  GATA2 Guide RNA
aaagugcaugcaggagaagu

SEQ ID NO: 4499 - RNA, 20 nt, Artificial Sequence
  GATA2 Guide RNA
aacuucuccugcaugcacuu

SEQ ID NO: 4500 - RNA, 20 nt, Artificial Sequence
  GATA2 Guide RNA
aagggggauaacuucuccug

SEQ ID NO: 4501 - RNA, 20 nt, Artificial Sequence
  GATA2 Guide RNA
aagugcaugcaggagaaguu

SEQ ID NO: 4502 - RNA, 20 nt, Artificial Sequence
  GATA2 Guide RNA
aaguuaucccccuucagugc

SEQ ID NO: 4503 - RNA, 20 nt, Artificial Sequence
  GATA2 Guide RNA
acugaagggggauaacuucu

SEQ ID NO: 4504 - RNA, 20 nt, Artificial Sequence
  GATA2 Guide RNA
agaaguuaucccccuucagu

SEQ ID NO: 4505 - RNA, 20 nt, Artificial Sequence
  GATA2 Guide RNA
agcugcacugaagggggaua

SEQ ID NO: 4506 - RNA, 20 nt, Artificial Sequence
  GATA2 Guide RNA
aggagaaguuaucccccuuc

SEQ ID NO: 4507 - RNA, 20 nt, Artificial Sequence
  GATA2 Guide RNA
agggggauaacuucuccugc

SEQ ID NO: 4508 - RNA, 20 nt, Artificial Sequence
  GATA2 Guide RNA
agugcaugcaggagaaguua

SEQ ID NO: 4509 - RNA, 20 nt, Artificial Sequence
  GATA2 Guide RNA
aguuaucccccuucagugca

SEQ ID NO: 4510 - RNA, 20 nt, Artificial Sequence
  GATA2 Guide RNA
auaacuucuccugcaugcac

SEQ ID NO: 4511 - RNA, 20 nt, Artificial Sequence
  GATA2 Guide RNA
augcaggagaaguuaucccc

SEQ ID NO: 4512 - RNA, 20 nt, Artificial Sequence
  GATA2 Guide RNA
caaagugcaugcaggagaag

SEQ ID NO: 4513 - RNA, 20 nt, Artificial Sequence
  GATA2 Guide RNA
cacugaagggggauaacuuc

SEQ ID NO: 4514 - RNA, 20 nt, Artificial Sequence
  GATA2 Guide RNA
cagcugcacugaagggggau

SEQ ID NO: 4515 - RNA, 20 nt, Artificial Sequence
  GATA2 Guide RNA
caggagaaguuaucccccuu

SEQ ID NO: 4516 - RNA, 20 nt, Artificial Sequence
  GATA2 Guide RNA
caugcaggagaaguuauccc

SEQ ID NO: 4517 - RNA, 20 nt, Artificial Sequence
  GATA2 Guide RNA
cugaagggggauaacuucuc

SEQ ID NO: 4518 - RNA, 20 nt, Artificial Sequence
  GATA2 Guide RNA
cugcacugaagggggauaac

SEQ ID NO: 4519 - RNA, 20 nt, Artificial Sequence
  GATA2 Guide RNA
gaagggggauaacuucuccu

SEQ ID NO: 4520 - RNA, 20 nt, Artificial Sequence
  GATA2 Guide RNA
gaaguuaucccccuucagug

SEQ ID NO: 4521 - RNA, 20 nt, Artificial Sequence
  GATA2 Guide RNA
gagaaguuaucccccuucag

SEQ ID NO: 4522 - RNA, 20 nt, Artificial Sequence
  GATA2 Guide RNA
gauaacuucuccugcaugca

SEQ ID NO: 4523 - RNA, 20 nt, Artificial Sequence
  GATA2 Guide RNA
gcacugaagggggauaacuu

SEQ ID NO: 4524 - RNA, 20 nt, Artificial Sequence
  GATA2 Guide RNA
gcagcugcacugaaggggga

SEQ ID NO: 4525 - RNA, 20 nt, Artificial Sequence
  GATA2 Guide RNA
gcaggagaaguuaucccccu

SEQ ID NO: 4526 - RNA, 20 nt, Artificial Sequence
  GATA2 Guide RNA
gcaugcaggagaaguuaucc

SEQ ID NO: 4527 - RNA, 20 nt, Artificial Sequence
  GATA2 Guide RNA
gcugcacugaagggggauaa

SEQ ID NO: 4528 - RNA, 20 nt, Artificial Sequence
  GATA2 Guide RNA
ggagaaguuaucccccuuca

SEQ ID NO: 4529 - RNA, 20 nt, Artificial Sequence
  GATA2 Guide RNA
ggauaacuucuccugcaugc

SEQ ID NO: 4530 - RNA, 20 nt, Artificial Sequence
  GATA2 Guide RNA
ggcagcugcacugaaggggg

SEQ ID NO: 4531 - RNA, 20 nt, Artificial Sequence
  GATA2 Guide RNA
gggauaacuucuccugcaug

SEQ ID NO: 4532 - RNA, 20 nt, Artificial Sequence
  GATA2 Guide RNA
ggggauaacuucuccugcau

SEQ ID NO: 4533 - RNA, 20 nt, Artificial Sequence
  GATA2 Guide RNA
gggggauaacuucuccugca

SEQ ID NO: 4534 - RNA, 20 nt, Artificial Sequence
  GATA2 Guide RNA
gucaaagugcaugcaggaga

SEQ ID NO: 4535 - RNA, 20 nt, Artificial Sequence
  GATA2 Guide RNA
gugcaugcaggagaaguuau

SEQ ID NO: 4536 - RNA, 20 nt, Artificial Sequence
  GATA2 Guide RNA
guuaucccccuucagugcag

SEQ ID NO: 4537 - RNA, 20 nt, Artificial Sequence
  GATA2 Guide RNA
uaacuucuccugcaugcacu

SEQ ID NO: 4538 - RNA, 20 nt, Artificial Sequence
  GATA2 Guide RNA
ucaaagugcaugcaggagaa

SEQ ID NO: 4539 - RNA, 20 nt, Artificial Sequence
  GATA2 Guide RNA
ugaagggggauaacuucucc

SEQ ID NO: 4540 - RNA, 20 nt, Artificial Sequence
  GATA2 Guide RNA
ugcacugaagggggauaacu

SEQ ID NO: 4541 - RNA, 20 nt, Artificial Sequence
  GATA2 Guide RNA
ugcaggagaaguuauccccc

SEQ ID NO: 4542 - RNA, 20 nt, Artificial Sequence
  GATA2 Guide RNA
ugcaugcaggagaaguuauc

SEQ ID NO: 4543 - RNA, 20 nt, Artificial Sequence
  GATA2 Guide RNA
uuaucccccuucagugcagc

SEQ ID NO: 4544 - RNA, 21 nt, Artificial Sequence
  GATA2 Guide RNA
aaagugcaugcaggagaaguu

SEQ ID NO: 4545 - RNA, 21 nt, Artificial Sequence
  GATA2 Guide RNA
aacuucuccugcaugcacuuu

SEQ ID NO: 4546 - RNA, 21 nt, Artificial Sequence
  GATA2 Guide RNA
aagggggauaacuucuccugc

SEQ ID NO: 4547 - RNA, 21 nt, Artificial Sequence
  GATA2 Guide RNA
aagugcaugcaggagaaguua

SEQ ID NO: 4548 - RNA, 21 nt, Artificial Sequence
  GATA2 Guide RNA
aaguuaucccccuucagugca

SEQ ID NO: 4549 - RNA, 21 nt, Artificial Sequence
  GATA2 Guide RNA
acugaagggggauaacuucuc

SEQ ID NO: 4550 - RNA, 21 nt, Artificial Sequence
  GATA2 Guide RNA
agaaguuaucccccuucagug

SEQ ID NO: 4551 - RNA, 21 nt, Artificial Sequence
  GATA2 Guide RNA
agcugcacugaagggggauaa

SEQ ID NO: 4552 - RNA, 21 nt, Artificial Sequence
  GATA2 Guide RNA
aggagaaguuaucccccuuca

SEQ ID NO: 4553 - RNA, 21 nt, Artificial Sequence
  GATA2 Guide RNA
agggggauaacuucuccugca

SEQ ID NO: 4554 - RNA, 21 nt, Artificial Sequence
  GATA2 Guide RNA
agugcaugcaggagaaguuau

SEQ ID NO: 4555 - RNA, 21 nt, Artificial Sequence
  GATA2 Guide RNA
aguuaucccccuucagugcag

SEQ ID NO: 4556 - RNA, 21 nt, Artificial Sequence
  GATA2 Guide RNA
auaacuucuccugcaugcacu

SEQ ID NO: 4557 - RNA, 21 nt, Artificial Sequence
  GATA2 Guide RNA
augcaggagaaguuauccccc

SEQ ID NO: 4558 - RNA, 21 nt, Artificial Sequence
  GATA2 Guide RNA
caaagugcaugcaggagaagu

SEQ ID NO: 4559 - RNA, 21 nt, Artificial Sequence
  GATA2 Guide RNA
cacugaagggggauaacuucu

SEQ ID NO: 4560 - RNA, 21 nt, Artificial Sequence
  GATA2 Guide RNA
cagcugcacugaagggggaua

SEQ ID NO: 4561 - RNA, 21 nt, Artificial Sequence
  GATA2 Guide RNA
caggagaaguuaucccccuuc

SEQ ID NO: 4562 - RNA, 21 nt, Artificial Sequence
  GATA2 Guide RNA
caugcaggagaaguuaucccc

SEQ ID NO: 4563 - RNA, 21 nt, Artificial Sequence
  GATA2 Guide RNA
cugaagggggauaacuucucc

SEQ ID NO: 4564 - RNA, 21 nt, Artificial Sequence
  GATA2 Guide RNA
cugcacugaagggggauaacu

SEQ ID NO: 4565 - RNA, 21 nt, Artificial Sequence
  GATA2 Guide RNA
gaagggggauaacuucuccug

SEQ ID NO: 4566 - RNA, 21 nt, Artificial Sequence
  GATA2 Guide RNA
gaaguuaucccccuucagugc

SEQ ID NO: 4567 - RNA, 21 nt, Artificial Sequence
  GATA2 Guide RNA
gagaaguuaucccccuucagu

SEQ ID NO: 4568 - RNA, 21 nt, Artificial Sequence
  GATA2 Guide RNA
gauaacuucuccugcaugcac

SEQ ID NO: 4569 - RNA, 21 nt, Artificial Sequence
  GATA2 Guide RNA
gcacugaagggggauaacuuc

SEQ ID NO: 4570 - RNA, 21 nt, Artificial Sequence
  GATA2 Guide RNA
gcagcugcacugaagggggau

SEQ ID NO: 4571 - RNA, 21 nt, Artificial Sequence
  GATA2 Guide RNA
gcaggagaaguuaucccccuu

SEQ ID NO: 4572 - RNA, 21 nt, Artificial Sequence
  GATA2 Guide RNA
gcaugcaggagaaguuauccc

SEQ ID NO: 4573 - RNA, 21 nt, Artificial Sequence
  GATA2 Guide RNA
gcugcacugaagggggauaac

SEQ ID NO: 4574 - RNA, 21 nt, Artificial Sequence
  GATA2 Guide RNA
ggagaaguuaucccccuucag

SEQ ID NO: 4575 - RNA, 21 nt, Artificial Sequence
  GATA2 Guide RNA
ggauaacuucuccugcaugca

SEQ ID NO: 4576 - RNA, 21 nt, Artificial Sequence
  GATA2 Guide RNA
ggcagcugcacugaaggggga

SEQ ID NO: 4577 - RNA, 21 nt, Artificial Sequence
  GATA2 Guide RNA
gggauaacuucuccugcaugc

SEQ ID NO: 4578 - RNA, 21 nt, Artificial Sequence
  GATA2 Guide RNA
gggcagcugcacugaaggggg

SEQ ID NO: 4579 - RNA, 21 nt, Artificial Sequence
  GATA2 Guide RNA
ggggauaacuucuccugcaug

SEQ ID NO: 4580 - RNA, 21 nt, Artificial Sequence
  GATA2 Guide RNA
gggggauaacuucuccugcau

SEQ ID NO: 4581 - RNA, 21 nt, Artificial Sequence
  GATA2 Guide RNA
gucaaagugcaugcaggagaa

SEQ ID NO: 4582 - RNA, 21 nt, Artificial Sequence
  GATA2 Guide RNA
gugcaugcaggagaaguuauc

SEQ ID NO: 4583 - RNA, 21 nt, Artificial Sequence
  GATA2 Guide RNA
guuaucccccuucagugcagc

SEQ ID NO: 4584 - RNA, 21 nt, Artificial Sequence
  GATA2 Guide RNA
uaacuucuccugcaugcacuu

SEQ ID NO: 4585 - RNA, 21 nt, Artificial Sequence
  GATA2 Guide RNA
ucaaagugcaugcaggagaag

SEQ ID NO: 4586 - RNA, 21 nt, Artificial Sequence
  GATA2 Guide RNA
ugaagggggauaacuucuccu

SEQ ID NO: 4587 - RNA, 21 nt, Artificial Sequence
  GATA2 Guide RNA
ugcacugaagggggauaacuu

SEQ ID NO: 4588 - RNA, 21 nt, Artificial Sequence
  GATA2 Guide RNA
ugcaggagaaguuaucccccu

SEQ ID NO: 4589 - RNA, 21 nt, Artificial Sequence
  GATA2 Guide RNA
ugcaugcaggagaaguuaucc

SEQ ID NO: 4590 - RNA, 21 nt, Artificial Sequence
  GATA2 Guide RNA
ugucaaagugcaugcaggaga

SEQ ID NO: 4591 - RNA, 21 nt, Artificial Sequence
  GATA2 Guide RNA
uuaucccccuucagugcagcu

SEQ ID NO: 4592 - RNA, 22 nt, Artificial Sequence
  GATA2 Guide RNA
aaagugcaugcaggagaaguua

SEQ ID NO: 4593 - RNA, 22 nt, Artificial Sequence
  GATA2 Guide RNA
aacuucuccugcaugcacuuug

SEQ ID NO: 4594 - RNA, 22 nt, Artificial Sequence
  GATA2 Guide RNA
aagggggauaacuucuccugca

SEQ ID NO: 4595 - RNA, 22 nt, Artificial Sequence
  GATA2 Guide RNA
aagugcaugcaggagaaguuau

SEQ ID NO: 4596 - RNA, 22 nt, Artificial Sequence
  GATA2 Guide RNA
aaguuaucccccuucagugcag

SEQ ID NO: 4597 - RNA, 22 nt, Artificial Sequence
  GATA2 Guide RNA
acugaagggggauaacuucucc

SEQ ID NO: 4598 - RNA, 22 nt, Artificial Sequence
  GATA2 Guide RNA
agaaguuaucccccuucagugc

SEQ ID NO: 4599 - RNA, 22 nt, Artificial Sequence
  GATA2 Guide RNA
agcugcacugaagggggauaac

SEQ ID NO: 4600 - RNA, 22 nt, Artificial Sequence
  GATA2 Guide RNA
aggagaaguuaucccccuucag

SEQ ID NO: 4601 - RNA, 22 nt, Artificial Sequence
  GATA2 Guide RNA
agggcagcugcacugaaggggg

SEQ ID NO: 4602 - RNA, 22 nt, Artificial Sequence
  GATA2 Guide RNA
agggggauaacuucuccugcau

SEQ ID NO: 4603 - RNA, 22 nt, Artificial Sequence
  GATA2 Guide RNA
agugcaugcaggagaaguuauc

SEQ ID NO: 4604 - RNA, 22 nt, Artificial Sequence
  GATA2 Guide RNA
aguuaucccccuucagugcagc

SEQ ID NO: 4605 - RNA, 22 nt, Artificial Sequence
  GATA2 Guide RNA
auaacuucuccugcaugcacuu

SEQ ID NO: 4606 - RNA, 22 nt, Artificial Sequence
  GATA2 Guide RNA
augcaggagaaguuaucccccu

SEQ ID NO: 4607 - RNA, 22 nt, Artificial Sequence
  GATA2 Guide RNA
caaagugcaugcaggagaaguu

SEQ ID NO: 4608 - RNA, 22 nt, Artificial Sequence
  GATA2 Guide RNA
cacugaagggggauaacuucuc

SEQ ID NO: 4609 - RNA, 22 nt, Artificial Sequence
  GATA2 Guide RNA
cagcugcacugaagggggauaa

SEQ ID NO: 4610 - RNA, 22 nt, Artificial Sequence
  GATA2 Guide RNA
caggagaaguuaucccccuuca

SEQ ID NO: 4611 - RNA, 22 nt, Artificial Sequence
  GATA2 Guide RNA
caugcaggagaaguuauccccc

SEQ ID NO: 4612 - RNA, 22 nt, Artificial Sequence
  GATA2 Guide RNA
cugaagggggauaacuucuccu

SEQ ID NO: 4613 - RNA, 22 nt, Artificial Sequence
  GATA2 Guide RNA
cugcacugaagggggauaacuu

SEQ ID NO: 4614 - RNA, 22 nt, Artificial Sequence
  GATA2 Guide RNA
cugucaaagugcaugcaggaga

SEQ ID NO: 4615 - RNA, 22 nt, Artificial Sequence
  GATA2 Guide RNA
gaagggggauaacuucuccugc

SEQ ID NO: 4616 - RNA, 22 nt, Artificial Sequence
  GATA2 Guide RNA
gaaguuaucccccuucagugca

SEQ ID NO: 4617 - RNA, 22 nt, Artificial Sequence
  GATA2 Guide RNA
gagaaguuaucccccuucagug

SEQ ID NO: 4618 - RNA, 22 nt, Artificial Sequence
  GATA2 Guide RNA
gauaacuucuccugcaugcacu

SEQ ID NO: 4619 - RNA, 22 nt, Artificial Sequence
  GATA2 Guide RNA
gcacugaagggggauaacuucu

SEQ ID NO: 4620 - RNA, 22 nt, Artificial Sequence
  GATA2 Guide RNA
gcagcugcacugaagggggaua

SEQ ID NO: 4621 - RNA, 22 nt, Artificial Sequence
  GATA2 Guide RNA
gcaggagaaguuaucccccuuc

SEQ ID NO: 4622 - RNA, 22 nt, Artificial Sequence
  GATA2 Guide RNA
gcaugcaggagaaguuaucccc

SEQ ID NO: 4623 - RNA, 22 nt, Artificial Sequence
  GATA2 Guide RNA
gcugcacugaagggggauaacu

SEQ ID NO: 4624 - RNA, 22 nt, Artificial Sequence
  GATA2 Guide RNA
ggagaaguuaucccccuucagu

SEQ ID NO: 4625 - RNA, 22 nt, Artificial Sequence
  GATA2 Guide RNA
ggauaacuucuccugcaugcac

SEQ ID NO: 4626 - RNA, 22 nt, Artificial Sequence
  GATA2 Guide RNA
ggcagcugcacugaagggggau

SEQ ID NO: 4627 - RNA, 22 nt, Artificial Sequence
  GATA2 Guide RNA
gggauaacuucuccugcaugca

SEQ ID NO: 4628 - RNA, 22 nt, Artificial Sequence
  GATA2 Guide RNA
gggcagcugcacugaaggggga

SEQ ID NO: 4629 - RNA, 22 nt, Artificial Sequence
  GATA2 Guide RNA
ggggauaacuucuccugcaugc

SEQ ID NO: 4630 - RNA, 22 nt, Artificial Sequence
  GATA2 Guide RNA
gggggauaacuucuccugcaug

SEQ ID NO: 4631 - RNA, 22 nt, Artificial Sequence
  GATA2 Guide RNA
gucaaagugcaugcaggagaag

SEQ ID NO: 4632 - RNA, 22 nt, Artificial Sequence
  GATA2 Guide RNA
gugcaugcaggagaaguuaucc

SEQ ID NO: 4633 - RNA, 22 nt, Artificial Sequence
  GATA2 Guide RNA
guuaucccccuucagugcagcu

SEQ ID NO: 4634 - RNA, 22 nt, Artificial Sequence
  GATA2 Guide RNA
uaacuucuccugcaugcacuuu

SEQ ID NO: 4635 - RNA, 22 nt, Artificial Sequence
  GATA2 Guide RNA
ucaaagugcaugcaggagaagu

SEQ ID NO: 4636 - RNA, 22 nt, Artificial Sequence
  GATA2 Guide RNA
ugaagggggauaacuucuccug

SEQ ID NO: 4637 - RNA, 22 nt, Artificial Sequence
  GATA2 Guide RNA
ugcacugaagggggauaacuuc

SEQ ID NO: 4638 - RNA, 22 nt, Artificial Sequence
  GATA2 Guide RNA
ugcaggagaaguuaucccccuu

SEQ ID NO: 4639 - RNA, 22 nt, Artificial Sequence
  GATA2 Guide RNA
ugcaugcaggagaaguuauccc

SEQ ID NO: 4640 - RNA, 22 nt, Artificial Sequence
  GATA2 Guide RNA
ugucaaagugcaugcaggagaa

SEQ ID NO: 4641 - RNA, 22 nt, Artificial Sequence
  GATA2 Guide RNA
uuaucccccuucagugcagcug

SEQ ID NO: 4642 - RNA, 20 nt, Artificial Sequence
  GATA2 Guide RNA
aaagugcaugcaggagaagc

SEQ ID NO: 4643 - RNA, 20 nt, Artificial Sequence
  GATA2 Guide RNA
aagccaucccccuucagugc

SEQ ID NO: 4644 - RNA, 20 nt, Artificial Sequence
  GATA2 Guide RNA
aagggggauggcuucuccug

SEQ ID NO: 4645 - RNA, 20 nt, Artificial Sequence
  GATA2 Guide RNA
aagugcaugcaggagaagcc

SEQ ID NO: 4646 - RNA, 20 nt, Artificial Sequence
  GATA2 Guide RNA
acugaagggggauggcuucu

SEQ ID NO: 4647 - RNA, 20 nt, Artificial Sequence
  GATA2 Guide RNA
agaagccaucccccuucagu

SEQ ID NO: 4648 - RNA, 20 nt, Artificial Sequence
  GATA2 Guide RNA
agccaucccccuucagugca

SEQ ID NO: 4649 - RNA, 20 nt, Artificial Sequence
  GATA2 Guide RNA
agcugcacugaagggggaug

SEQ ID NO: 4650 - RNA, 20 nt, Artificial Sequence
  GATA2 Guide RNA
aggagaagccaucccccuuc

SEQ ID NO: 4651 - RNA, 20 nt, Artificial Sequence
  GATA2 Guide RNA
agggggauggcuucuccugc

SEQ ID NO: 4652 - RNA, 20 nt, Artificial Sequence
  GATA2 Guide RNA
agugcaugcaggagaagcca

SEQ ID NO: 4653 - RNA, 20 nt, Artificial Sequence
  GATA2 Guide RNA
augcaggagaagccaucccc

SEQ ID NO: 4654 - RNA, 20 nt, Artificial Sequence
  GATA2 Guide RNA
auggcuucuccugcaugcac

SEQ ID NO: 4655 - RNA, 20 nt, Artificial Sequence
  GATA2 Guide RNA
cacugaagggggauggcuuc

SEQ ID NO: 4656 - RNA, 20 nt, Artificial Sequence
  GATA2 Guide RNA
caggagaagccaucccccuu

SEQ ID NO: 4657 - RNA, 20 nt, Artificial Sequence
  GATA2 Guide RNA
caugcaggagaagccauccc

SEQ ID NO: 4658 - RNA, 20 nt, Artificial Sequence
  GATA2 Guide RNA
cugaagggggauggcuucuc

SEQ ID NO: 4659 - RNA, 20 nt, Artificial Sequence
  GATA2 Guide RNA
cugcacugaagggggauggc

SEQ ID NO: 4660 - RNA, 20 nt, Artificial Sequence
  GATA2 Guide RNA
gaagccaucccccuucagug

SEQ ID NO: 4661 - RNA, 20 nt, Artificial Sequence
  GATA2 Guide RNA
gaagggggauggcuucuccu

SEQ ID NO: 4662 - RNA, 20 nt, Artificial Sequence
  GATA2 Guide RNA
gagaagccaucccccuucag

SEQ ID NO: 4663 - RNA, 20 nt, Artificial Sequence
  GATA2 Guide RNA
gauggcuucuccugcaugca

SEQ ID NO: 4664 - RNA, 20 nt, Artificial Sequence
  GATA2 Guide RNA
gcacugaagggggauggcuu

SEQ ID NO: 4665 - RNA, 20 nt, Artificial Sequence
  GATA2 Guide RNA
gcaggagaagccaucccccu

SEQ ID NO: 4666 - RNA, 20 nt, Artificial Sequence
  GATA2 Guide RNA
gcaugcaggagaagccaucc

SEQ ID NO: 4667 - RNA, 20 nt, Artificial Sequence
  GATA2 Guide RNA
gccaucccccuucagugcag

SEQ ID NO: 4668 - RNA, 20 nt, Artificial Sequence
  GATA2 Guide RNA
gcugcacugaagggggaugg

SEQ ID NO: 4669 - RNA, 20 nt, Artificial Sequence
  GATA2 Guide RNA
gcuucuccugcaugcacuuu

SEQ ID NO: 4670 - RNA, 20 nt, Artificial Sequence
  GATA2 Guide RNA
ggagaagccaucccccuuca

SEQ ID NO: 4671 - RNA, 20 nt, Artificial Sequence
  GATA2 Guide RNA
ggauggcuucuccugcaugc

SEQ ID NO: 4672 - RNA, 20 nt, Artificial Sequence
  GATA2 Guide RNA
ggcuucuccugcaugcacuu

SEQ ID NO: 4673 - RNA, 20 nt, Artificial Sequence
  GATA2 Guide RNA
gggauggcuucuccugcaug

SEQ ID NO: 4674 - RNA, 20 nt, Artificial Sequence
  GATA2 Guide RNA
ggggauggcuucuccugcau

SEQ ID NO: 4675 - RNA, 20 nt, Artificial Sequence
  GATA2 Guide RNA
gggggauggcuucuccugca

SEQ ID NO: 4676 - RNA, 20 nt, Artificial Sequence
  GATA2 Guide RNA
gugcaugcaggagaagccau

SEQ ID NO: 4677 - RNA, 20 nt, Artificial Sequence
  GATA2 Guide RNA
ugaagggggauggcuucucc

SEQ ID NO: 4678 - RNA, 20 nt, Artificial Sequence
  GATA2 Guide RNA
ugcacugaagggggauggcu

SEQ ID NO: 4679 - RNA, 20 nt, Artificial Sequence
  GATA2 Guide RNA
ugcaggagaagccauccccc

SEQ ID NO: 4680 - RNA, 20 nt, Artificial Sequence
  GATA2 Guide RNA
ugcaugcaggagaagccauc

SEQ ID NO: 4681 - RNA, 20 nt, Artificial Sequence
  GATA2 Guide RNA
uggcuucuccugcaugcacu

SEQ ID NO: 4682 - RNA, 20 nt, Artificial Sequence
  GATA2 Guide RNA
ugucaaagugcaugcaggag

SEQ ID NO: 4683 - RNA, 21 nt, Artificial Sequence
  GATA2 Guide RNA
aaagugcaugcaggagaagcc

SEQ ID NO: 4684 - RNA, 21 nt, Artificial Sequence
  GATA2 Guide RNA
aagccaucccccuucagugca

SEQ ID NO: 4685 - RNA, 21 nt, Artificial Sequence
  GATA2 Guide RNA
aagggggauggcuucuccugc

SEQ ID NO: 4686 - RNA, 21 nt, Artificial Sequence
  GATA2 Guide RNA
aagugcaugcaggagaagcca

SEQ ID NO: 4687 - RNA, 21 nt, Artificial Sequence
  GATA2 Guide RNA
acugaagggggauggcuucuc

SEQ ID NO: 4688 - RNA, 21 nt, Artificial Sequence
  GATA2 Guide RNA
agaagccaucccccuucagug

SEQ ID NO: 4689 - RNA, 21 nt, Artificial Sequence
  GATA2 Guide RNA
agccaucccccuucagugcag

SEQ ID NO: 4690 - RNA, 21 nt, Artificial Sequence
  GATA2 Guide RNA
agcugcacugaagggggaugg

SEQ ID NO: 4691 - RNA, 21 nt, Artificial Sequence
  GATA2 Guide RNA
aggagaagccaucccccuuca

SEQ ID NO: 4692 - RNA, 21 nt, Artificial Sequence
  GATA2 Guide RNA
agggggauggcuucuccugca

SEQ ID NO: 4693 - RNA, 21 nt, Artificial Sequence
  GATA2 Guide RNA
agugcaugcaggagaagccau

SEQ ID NO: 4694 - RNA, 21 nt, Artificial Sequence
  GATA2 Guide RNA
augcaggagaagccauccccc

SEQ ID NO: 4695 - RNA, 21 nt, Artificial Sequence
  GATA2 Guide RNA
auggcuucuccugcaugcacu

SEQ ID NO: 4696 - RNA, 21 nt, Artificial Sequence
  GATA2 Guide RNA
caaagugcaugcaggagaagc

SEQ ID NO: 4697 - RNA, 21 nt, Artificial Sequence
  GATA2 Guide RNA
cacugaagggggauggcuucu

SEQ ID NO: 4698 - RNA, 21 nt, Artificial Sequence
  GATA2 Guide RNA
cagcugcacugaagggggaug

SEQ ID NO: 4699 - RNA, 21 nt, Artificial Sequence
  GATA2 Guide RNA
caggagaagccaucccccuuc

SEQ ID NO: 4700 - RNA, 21 nt, Artificial Sequence
  GATA2 Guide RNA
caugcaggagaagccaucccc

SEQ ID NO: 4701 - RNA, 21 nt, Artificial Sequence
  GATA2 Guide RNA
cugaagggggauggcuucucc

SEQ ID NO: 4702 - RNA, 21 nt, Artificial Sequence
  GATA2 Guide RNA
cugcacugaagggggauggcu

SEQ ID NO: 4703 - RNA, 21 nt, Artificial Sequence
  GATA2 Guide RNA
cugucaaagugcaugcaggag

SEQ ID NO: 4704 - RNA, 21 nt, Artificial Sequence
  GATA2 Guide RNA
gaagccaucccccuucagugc

SEQ ID NO: 4705 - RNA, 21 nt, Artificial Sequence
  GATA2 Guide RNA
gaagggggauggcuucuccug

SEQ ID NO: 4706 - RNA, 21 nt, Artificial Sequence
  GATA2 Guide RNA
gagaagccaucccccuucagu

SEQ ID NO: 4707 - RNA, 21 nt, Artificial Sequence
  GATA2 Guide RNA
gauggcuucuccugcaugcac

SEQ ID NO: 4708 - RNA, 21 nt, Artificial Sequence
  GATA2 Guide RNA
gcacugaagggggauggcuuc

SEQ ID NO: 4709 - RNA, 21 nt, Artificial Sequence
  GATA2 Guide RNA
gcaggagaagccaucccccuu

SEQ ID NO: 4710 - RNA, 21 nt, Artificial Sequence
  GATA2 Guide RNA
gcaugcaggagaagccauccc

SEQ ID NO: 4711 - RNA, 21 nt, Artificial Sequence
  GATA2 Guide RNA
gccaucccccuucagugcagc

SEQ ID NO: 4712 - RNA, 21 nt, Artificial Sequence
  GATA2 Guide RNA
gcugcacugaagggggauggc

SEQ ID NO: 4713 - RNA, 21 nt, Artificial Sequence
  GATA2 Guide RNA
gcuucuccugcaugcacuuug

SEQ ID NO: 4714 - RNA, 21 nt, Artificial Sequence
  GATA2 Guide RNA
ggagaagccaucccccuucag

SEQ ID NO: 4715 - RNA, 21 nt, Artificial Sequence
  GATA2 Guide RNA
ggauggcuucuccugcaugca

SEQ ID NO: 4716 - RNA, 21 nt, Artificial Sequence
  GATA2 Guide RNA
ggcuucuccugcaugcacuuu

SEQ ID NO: 4717 - RNA, 21 nt, Artificial Sequence
  GATA2 Guide RNA
gggauggcuucuccugcaugc

SEQ ID NO: 4718 - RNA, 21 nt, Artificial Sequence
  GATA2 Guide RNA
ggggauggcuucuccugcaug

SEQ ID NO: 4719 - RNA, 21 nt, Artificial Sequence
  GATA2 Guide RNA
gggggauggcuucuccugcau

SEQ ID NO: 4720 - RNA, 21 nt, Artificial Sequence
  GATA2 Guide RNA
gugcaugcaggagaagccauc

SEQ ID NO: 4721 - RNA, 21 nt, Artificial Sequence
  GATA2 Guide RNA
ugaagggggauggcuucuccu

SEQ ID NO: 4722 - RNA, 21 nt, Artificial Sequence
  GATA2 Guide RNA
ugcacugaagggggauggcuu

SEQ ID NO: 4723 - RNA, 21 nt, Artificial Sequence
  GATA2 Guide RNA
ugcaggagaagccaucccccu

SEQ ID NO: 4724 - RNA, 21 nt, Artificial Sequence
  GATA2 Guide RNA
ugcaugcaggagaagccaucc

SEQ ID NO: 4725 - RNA, 21 nt, Artificial Sequence
  GATA2 Guide RNA
uggcuucuccugcaugcacuu

SEQ ID NO: 4726 - RNA, 22 nt, Artificial Sequence
  GATA2 Guide RNA
aaagugcaugcaggagaagcca

SEQ ID NO: 4727 - RNA, 22 nt, Artificial Sequence
  GATA2 Guide RNA
aagccaucccccuucagugcag

SEQ ID NO: 4728 - RNA, 22 nt, Artificial Sequence
  GATA2 Guide RNA
aagggggauggcuucuccugca

SEQ ID NO: 4729 - RNA, 22 nt, Artificial Sequence
  GATA2 Guide RNA
aagugcaugcaggagaagccau

SEQ ID NO: 4730 - RNA, 22 nt, Artificial Sequence
  GATA2 Guide RNA
acugaagggggauggcuucucc

SEQ ID NO: 4731 - RNA, 22 nt, Artificial Sequence
  GATA2 Guide RNA
agaagccaucccccuucagugc

SEQ ID NO: 4732 - RNA, 22 nt, Artificial Sequence
  GATA2 Guide RNA
agccaucccccuucagugcagc

SEQ ID NO: 4733 - RNA, 22 nt, Artificial Sequence
  GATA2 Guide RNA
agcugcacugaagggggauggc

SEQ ID NO: 4734 - RNA, 22 nt, Artificial Sequence
  GATA2 Guide RNA
aggagaagccaucccccuucag

SEQ ID NO: 4735 - RNA, 22 nt, Artificial Sequence
  GATA2 Guide RNA
agggggauggcuucuccugcau

SEQ ID NO: 4736 - RNA, 22 nt, Artificial Sequence
  GATA2 Guide RNA
agugcaugcaggagaagccauc

SEQ ID NO: 4737 - RNA, 22 nt, Artificial Sequence
  GATA2 Guide RNA
augcaggagaagccaucccccu

SEQ ID NO: 4738 - RNA, 22 nt, Artificial Sequence
  GATA2 Guide RNA
auggcuucuccugcaugcacuu

SEQ ID NO: 4739 - RNA, 22 nt, Artificial Sequence
  GATA2 Guide RNA
caaagugcaugcaggagaagcc

SEQ ID NO: 4740 - RNA, 22 nt, Artificial Sequence
  GATA2 Guide RNA
cacugaagggggauggcuucuc

SEQ ID NO: 4741 - RNA, 22 nt, Artificial Sequence
  GATA2 Guide RNA
cagcugcacugaagggggaugg

SEQ ID NO: 4742 - RNA, 22 nt, Artificial Sequence
  GATA2 Guide RNA
caggagaagccaucccccuuca

SEQ ID NO: 4743 - RNA, 22 nt, Artificial Sequence
  GATA2 Guide RNA
caugcaggagaagccauccccc

SEQ ID NO: 4744 - RNA, 22 nt, Artificial Sequence
  GATA2 Guide RNA
cugaagggggauggcuucuccu

SEQ ID NO: 4745 - RNA, 22 nt, Artificial Sequence
  GATA2 Guide RNA
cugcacugaagggggauggcuu

SEQ ID NO: 4746 - RNA, 22 nt, Artificial Sequence
  GATA2 Guide RNA
gaagccaucccccuucagugca

SEQ ID NO: 4747 - RNA, 22 nt, Artificial Sequence
  GATA2 Guide RNA
gaagggggauggcuucuccugc

SEQ ID NO: 4748 - RNA, 22 nt, Artificial Sequence
  GATA2 Guide RNA
gagaagccaucccccuucagug

SEQ ID NO: 4749 - RNA, 22 nt, Artificial Sequence
  GATA2 Guide RNA
gauggcuucuccugcaugcacu

SEQ ID NO: 4750 - RNA, 22 nt, Artificial Sequence
  GATA2 Guide RNA
gcacugaagggggauggcuucu

SEQ ID NO: 4751 - RNA, 22 nt, Artificial Sequence
  GATA2 Guide RNA
gcagcugcacugaagggggaug

SEQ ID NO: 4752 - RNA, 22 nt, Artificial Sequence
  GATA2 Guide RNA
gcaggagaagccaucccccuuc

SEQ ID NO: 4753 - RNA, 22 nt, Artificial Sequence
  GATA2 Guide RNA
gcaugcaggagaagccaucccc

SEQ ID NO: 4754 - RNA, 22 nt, Artificial Sequence
  GATA2 Guide RNA
gccaucccccuucagugcagcu

SEQ ID NO: 4755 - RNA, 22 nt, Artificial Sequence
  GATA2 Guide RNA
gcugcacugaagggggauggcu

SEQ ID NO: 4756 - RNA, 22 nt, Artificial Sequence
  GATA2 Guide RNA
gcugucaaagugcaugcaggag

SEQ ID NO: 4757 - RNA, 22 nt, Artificial Sequence
  GATA2 Guide RNA
gcuucuccugcaugcacuuuga

SEQ ID NO: 4758 - RNA, 22 nt, Artificial Sequence
  GATA2 Guide RNA
ggagaagccaucccccuucagu

SEQ ID NO: 4759 - RNA, 22 nt, Artificial Sequence
  GATA2 Guide RNA
ggauggcuucuccugcaugcac

SEQ ID NO: 4760 - RNA, 22 nt, Artificial Sequence
  GATA2 Guide RNA
ggcuucuccugcaugcacuuug

SEQ ID NO: 4761 - RNA, 22 nt, Artificial Sequence
  GATA2 Guide RNA
gggauggcuucuccugcaugca

SEQ ID NO: 4762 - RNA, 22 nt, Artificial Sequence
  GATA2 Guide RNA
ggggauggcuucuccugcaugc

SEQ ID NO: 4763 - RNA, 22 nt, Artificial Sequence
  GATA2 Guide RNA
gggggauggcuucuccugcaug

SEQ ID NO: 4764 - RNA, 22 nt, Artificial Sequence
  GATA2 Guide RNA
gugcaugcaggagaagccaucc

SEQ ID NO: 4765 - RNA, 22 nt, Artificial Sequence
  GATA2 Guide RNA
ucaaagugcaugcaggagaagc

SEQ ID NO: 4766 - RNA, 22 nt, Artificial Sequence
  GATA2 Guide RNA
ugaagggggauggcuucuccug

SEQ ID NO: 4767 - RNA, 22 nt, Artificial Sequence
  GATA2 Guide RNA
ugcacugaagggggauggcuuc

SEQ ID NO: 4768 - RNA, 22 nt, Artificial Sequence
  GATA2 Guide RNA
ugcaggagaagccaucccccuu

SEQ ID NO: 4769 - RNA, 22 nt, Artificial Sequence
  GATA2 Guide RNA
ugcaugcaggagaagccauccc

SEQ ID NO: 4770 - RNA, 22 nt, Artificial Sequence
  GATA2 Guide RNA
uggcuucuccugcaugcacuuu

SEQ ID NO: 4771 - RNA, 20 nt, Artificial Sequence
  GATA2 Guide RNA
aaagugcauacaggagaagu

SEQ ID NO: 4772 - RNA, 20 nt, Artificial Sequence
  GATA2 Guide RNA
aagggggaugacuucuccug

SEQ ID NO: 4773 - RNA, 20 nt, Artificial Sequence
  GATA2 Guide RNA
aagugcauacaggagaaguc

SEQ ID NO: 4774 - RNA, 20 nt, Artificial Sequence
  GATA2 Guide RNA
acuucuccuguaugcacuuu

SEQ ID NO: 4775 - RNA, 20 nt, Artificial Sequence
  GATA2 Guide RNA
agcugucaaagugcauacag

SEQ ID NO: 4776 - RNA, 20 nt, Artificial Sequence
  GATA2 Guide RNA
aggagcugucaaagugcaua

SEQ ID NO: 4777 - RNA, 20 nt, Artificial Sequence
  GATA2 Guide RNA
agggggaugacuucuccugu

SEQ ID NO: 4778 - RNA, 20 nt, Artificial Sequence
  GATA2 Guide RNA
agugcauacaggagaaguca

SEQ ID NO: 4779 - RNA, 20 nt, Artificial Sequence
  GATA2 Guide RNA
auacaggagaagucaucccc

SEQ ID NO: 4780 - RNA, 20 nt, Artificial Sequence
  GATA2 Guide RNA
augacuucuccuguaugcac

SEQ ID NO: 4781 - RNA, 20 nt, Artificial Sequence
  GATA2 Guide RNA
caaagugcauacaggagaag

SEQ ID NO: 4782 - RNA, 20 nt, Artificial Sequence
  GATA2 Guide RNA
cauacaggagaagucauccc

SEQ ID NO: 4783 - RNA, 20 nt, Artificial Sequence
  GATA2 Guide RNA
ccuguaugcacuuugacagc

SEQ ID NO: 4784 - RNA, 20 nt, Artificial Sequence
  GATA2 Guide RNA
cgaggagcugucaaagugca

SEQ ID NO: 4785 - RNA, 20 nt, Artificial Sequence
  GATA2 Guide RNA
cuccuguaugcacuuugaca

SEQ ID NO: 4786 - RNA, 20 nt, Artificial Sequence
  GATA2 Guide RNA
cuguaugcacuuugacagcu

SEQ ID NO: 4787 - RNA, 20 nt, Artificial Sequence
  GATA2 Guide RNA
cugucaaagugcauacagga

SEQ ID NO: 4788 - RNA, 20 nt, Artificial Sequence
  GATA2 Guide RNA
cuucuccuguaugcacuuug

SEQ ID NO: 4789 - RNA, 20 nt, Artificial Sequence
  GATA2 Guide RNA
gaagggggaugacuucuccu

SEQ ID NO: 4790 - RNA, 20 nt, Artificial Sequence
  GATA2 Guide RNA
gacuucuccuguaugcacuu

SEQ ID NO: 4791 - RNA, 20 nt, Artificial Sequence
  GATA2 Guide RNA
gagcugucaaagugcauaca

SEQ ID NO: 4792 - RNA, 20 nt, Artificial Sequence
  GATA2 Guide RNA
gaggagcugucaaagugcau

SEQ ID NO: 4793 - RNA, 20 nt, Artificial Sequence
  GATA2 Guide RNA
gaugacuucuccuguaugca

SEQ ID NO: 4794 - RNA, 20 nt, Artificial Sequence
  GATA2 Guide RNA
gcauacaggagaagucaucc

SEQ ID NO: 4795 - RNA, 20 nt, Artificial Sequence
  GATA2 Guide RNA
gcugucaaagugcauacagg

SEQ ID NO: 4796 - RNA, 20 nt, Artificial Sequence
  GATA2 Guide RNA
ggagcugucaaagugcauac

SEQ ID NO: 4797 - RNA, 20 nt, Artificial Sequence
  GATA2 Guide RNA
ggaugacuucuccuguaugc

SEQ ID NO: 4798 - RNA, 20 nt, Artificial Sequence
  GATA2 Guide RNA
gggaugacuucuccuguaug

SEQ ID NO: 4799 - RNA, 20 nt, Artificial Sequence
  GATA2 Guide RNA
ggggaugacuucuccuguau

SEQ ID NO: 4800 - RNA, 20 nt, Artificial Sequence
  GATA2 Guide RNA
gggggaugacuucuccugua

SEQ ID NO: 4801 - RNA, 20 nt, Artificial Sequence
  GATA2 Guide RNA
guaugcacuuugacagcucc

SEQ ID NO: 4802 - RNA, 20 nt, Artificial Sequence
  GATA2 Guide RNA
gucaaagugcauacaggaga

SEQ ID NO: 4803 - RNA, 20 nt, Artificial Sequence
  GATA2 Guide RNA
gugcauacaggagaagucau

SEQ ID NO: 4804 - RNA, 20 nt, Artificial Sequence
  GATA2 Guide RNA
uacaggagaagucauccccc

SEQ ID NO: 4805 - RNA, 20 nt, Artificial Sequence
  GATA2 Guide RNA
uaugcacuuugacagcuccu

SEQ ID NO: 4806 - RNA, 20 nt, Artificial Sequence
  GATA2 Guide RNA
ucaaagugcauacaggagaa

SEQ ID NO: 4807 - RNA, 20 nt, Artificial Sequence
  GATA2 Guide RNA
uccuguaugcacuuugacag

SEQ ID NO: 4808 - RNA, 20 nt, Artificial Sequence
  GATA2 Guide RNA
ucgaggagcugucaaagugc

SEQ ID NO: 4809 - RNA, 20 nt, Artificial Sequence
  GATA2 Guide RNA
ucuccuguaugcacuuugac

SEQ ID NO: 4810 - RNA, 20 nt, Artificial Sequence
  GATA2 Guide RNA
ugaagggggaugacuucucc

SEQ ID NO: 4811 - RNA, 20 nt, Artificial Sequence
  GATA2 Guide RNA
ugacuucuccuguaugcacu

SEQ ID NO: 4812 - RNA, 20 nt, Artificial Sequence
  GATA2 Guide RNA
ugcauacaggagaagucauc

SEQ ID NO: 4813 - RNA, 20 nt, Artificial Sequence
  GATA2 Guide RNA
uguaugcacuuugacagcuc

SEQ ID NO: 4814 - RNA, 20 nt, Artificial Sequence
  GATA2 Guide RNA
ugucaaagugcauacaggag

SEQ ID NO: 4815 - RNA, 20 nt, Artificial Sequence
  GATA2 Guide RNA
uucgaggagcugucaaagug

SEQ ID NO: 4816 - RNA, 20 nt, Artificial Sequence
  GATA2 Guide RNA
uucuccuguaugcacuuuga

SEQ ID NO: 4817 - RNA, 21 nt, Artificial Sequence
  GATA2 Guide RNA
aaagugcauacaggagaaguc

SEQ ID NO: 4818 - RNA, 21 nt, Artificial Sequence
  GATA2 Guide RNA
aagggggaugacuucuccugu

SEQ ID NO: 4819 - RNA, 21 nt, Artificial Sequence
  GATA2 Guide RNA
aagugcauacaggagaaguca

SEQ ID NO: 4820 - RNA, 21 nt, Artificial Sequence
  GATA2 Guide RNA
acuucuccuguaugcacuuug

SEQ ID NO: 4821 - RNA, 21 nt, Artificial Sequence
  GATA2 Guide RNA
agcugucaaagugcauacagg

SEQ ID NO: 4822 - RNA, 21 nt, Artificial Sequence
  GATA2 Guide RNA
aggagcugucaaagugcauac

SEQ ID NO: 4823 - RNA, 21 nt, Artificial Sequence
  GATA2 Guide RNA
agggggaugacuucuccugua

SEQ ID NO: 4824 - RNA, 21 nt, Artificial Sequence
  GATA2 Guide RNA
agugcauacaggagaagucau

SEQ ID NO: 4825 - RNA, 21 nt, Artificial Sequence
  GATA2 Guide RNA
auacaggagaagucauccccc

SEQ ID NO: 4826 - RNA, 21 nt, Artificial Sequence
  GATA2 Guide RNA
augacuucuccuguaugcacu

SEQ ID NO: 4827 - RNA, 21 nt, Artificial Sequence
  GATA2 Guide RNA
caaagugcauacaggagaagu

SEQ ID NO: 4828 - RNA, 21 nt, Artificial Sequence
  GATA2 Guide RNA
cauacaggagaagucaucccc

SEQ ID NO: 4829 - RNA, 21 nt, Artificial Sequence
  GATA2 Guide RNA
ccuguaugcacuuugacagcu

SEQ ID NO: 4830 - RNA, 21 nt, Artificial Sequence
  GATA2 Guide RNA
cgaggagcugucaaagugcau

SEQ ID NO: 4831 - RNA, 21 nt, Artificial Sequence
  GATA2 Guide RNA
cuccuguaugcacuuugacag

SEQ ID NO: 4832 - RNA, 21 nt, Artificial Sequence
  GATA2 Guide RNA
cugaagggggaugacuucucc

SEQ ID NO: 4833 - RNA, 21 nt, Artificial Sequence
  GATA2 Guide RNA
cuguaugcacuuugacagcuc

SEQ ID NO: 4834 - RNA, 21 nt, Artificial Sequence
  GATA2 Guide RNA
cugucaaagugcauacaggag

SEQ ID NO: 4835 - RNA, 21 nt, Artificial Sequence
  GATA2 Guide RNA
cuucgaggagcugucaaagug

SEQ ID NO: 4836 - RNA, 21 nt, Artificial Sequence
  GATA2 Guide RNA
cuucuccuguaugcacuuuga

SEQ ID NO: 4837 - RNA, 21 nt, Artificial Sequence
  GATA2 Guide RNA
gaagggggaugacuucuccug

SEQ ID NO: 4838 - RNA, 21 nt, Artificial Sequence
  GATA2 Guide RNA
gacuucuccuguaugcacuuu

SEQ ID NO: 4839 - RNA, 21 nt, Artificial Sequence
  GATA2 Guide RNA
gagcugucaaagugcauacag

SEQ ID NO: 4840 - RNA, 21 nt, Artificial Sequence
  GATA2 Guide RNA
gaggagcugucaaagugcaua

SEQ ID NO: 4841 - RNA, 21 nt, Artificial Sequence
  GATA2 Guide RNA
gaugacuucuccuguaugcac

SEQ ID NO: 4842 - RNA, 21 nt, Artificial Sequence
  GATA2 Guide RNA
gcauacaggagaagucauccc

SEQ ID NO: 4843 - RNA, 21 nt, Artificial Sequence
  GATA2 Guide RNA
gcugucaaagugcauacagga

SEQ ID NO: 4844 - RNA, 21 nt, Artificial Sequence
  GATA2 Guide RNA
ggagcugucaaagugcauaca

SEQ ID NO: 4845 - RNA, 21 nt, Artificial Sequence
  GATA2 Guide RNA
ggaugacuucuccuguaugca

SEQ ID NO: 4846 - RNA, 21 nt, Artificial Sequence
  GATA2 Guide RNA
gggaugacuucuccuguaugc

SEQ ID NO: 4847 - RNA, 21 nt, Artificial Sequence
  GATA2 Guide RNA
ggggaugacuucuccuguaug

SEQ ID NO: 4848 - RNA, 21 nt, Artificial Sequence
  GATA2 Guide RNA
gggggaugacuucuccuguau

SEQ ID NO: 4849 - RNA, 21 nt, Artificial Sequence
  GATA2 Guide RNA
guaugcacuuugacagcuccu

SEQ ID NO: 4850 - RNA, 21 nt, Artificial Sequence
  GATA2 Guide RNA
gucaaagugcauacaggagaa

SEQ ID NO: 4851 - RNA, 21 nt, Artificial Sequence
  GATA2 Guide RNA
gugcauacaggagaagucauc

SEQ ID NO: 4852 - RNA, 21 nt, Artificial Sequence
  GATA2 Guide RNA
uacaggagaagucaucccccu

SEQ ID NO: 4853 - RNA, 21 nt, Artificial Sequence
  GATA2 Guide RNA
uaugcacuuugacagcuccuc

SEQ ID NO: 4854 - RNA, 21 nt, Artificial Sequence
  GATA2 Guide RNA
ucaaagugcauacaggagaag

SEQ ID NO: 4855 - RNA, 21 nt, Artificial Sequence
  GATA2 Guide RNA
uccuguaugcacuuugacagc

SEQ ID NO: 4856 - RNA, 21 nt, Artificial Sequence
  GATA2 Guide RNA
ucgaggagcugucaaagugca

SEQ ID NO: 4857 - RNA, 21 nt, Artificial Sequence
  GATA2 Guide RNA
ucuccuguaugcacuuugaca

SEQ ID NO: 4858 - RNA, 21 nt, Artificial Sequence
  GATA2 Guide RNA
ugaagggggaugacuucuccu

SEQ ID NO: 4859 - RNA, 21 nt, Artificial Sequence
  GATA2 Guide RNA
ugacuucuccuguaugcacuu

SEQ ID NO: 4860 - RNA, 21 nt, Artificial Sequence
  GATA2 Guide RNA
ugcauacaggagaagucaucc

SEQ ID NO: 4861 - RNA, 21 nt, Artificial Sequence
  GATA2 Guide RNA
uguaugcacuuugacagcucc

SEQ ID NO: 4862 - RNA, 21 nt, Artificial Sequence
  GATA2 Guide RNA
ugucaaagugcauacaggaga

SEQ ID NO: 4863 - RNA, 21 nt, Artificial Sequence
  GATA2 Guide RNA
uucgaggagcugucaaagugc

SEQ ID NO: 4864 - RNA, 21 nt, Artificial Sequence
  GATA2 Guide RNA
uucuccuguaugcacuuugac

SEQ ID NO: 4865 - RNA, 22 nt, Artificial Sequence
  GATA2 Guide RNA
aaagugcauacaggagaaguca

SEQ ID NO: 4866 - RNA, 22 nt, Artificial Sequence
  GATA2 Guide RNA
aagggggaugacuucuccugua

SEQ ID NO: 4867 - RNA, 22 nt, Artificial Sequence
  GATA2 Guide RNA
aagugcauacaggagaagucau

SEQ ID NO: 4868 - RNA, 22 nt, Artificial Sequence
  GATA2 Guide RNA
acugaagggggaugacuucucc

SEQ ID NO: 4869 - RNA, 22 nt, Artificial Sequence
  GATA2 Guide RNA
acuucuccuguaugcacuuuga

SEQ ID NO: 4870 - RNA, 22 nt, Artificial Sequence
  GATA2 Guide RNA
agcugucaaagugcauacagga

SEQ ID NO: 4871 - RNA, 22 nt, Artificial Sequence
  GATA2 Guide RNA
aggagcugucaaagugcauaca

SEQ ID NO: 4872 - RNA, 22 nt, Artificial Sequence
  GATA2 Guide RNA
agggggaugacuucuccuguau

SEQ ID NO: 4873 - RNA, 22 nt, Artificial Sequence
  GATA2 Guide RNA
agugcauacaggagaagucauc

SEQ ID NO: 4874 - RNA, 22 nt, Artificial Sequence
  GATA2 Guide RNA
auacaggagaagucaucccccu

SEQ ID NO: 4875 - RNA, 22 nt, Artificial Sequence
  GATA2 Guide RNA
augacuucuccuguaugcacuu

SEQ ID NO: 4876 - RNA, 22 nt, Artificial Sequence
  GATA2 Guide RNA
caaagugcauacaggagaaguc

SEQ ID NO: 4877 - RNA, 22 nt, Artificial Sequence
  GATA2 Guide RNA
cauacaggagaagucauccccc

SEQ ID NO: 4878 - RNA, 22 nt, Artificial Sequence
  GATA2 Guide RNA
ccuguaugcacuuugacagcuc

SEQ ID NO: 4879 - RNA, 22 nt, Artificial Sequence
  GATA2 Guide RNA
cgaggagcugucaaagugcaua

SEQ ID NO: 4880 - RNA, 22 nt, Artificial Sequence
  GATA2 Guide RNA
cuccuguaugcacuuugacagc

SEQ ID NO: 4881 - RNA, 22 nt, Artificial Sequence
  GATA2 Guide RNA
cugaagggggaugacuucuccu

SEQ ID NO: 4882 - RNA, 22 nt, Artificial Sequence
  GATA2 Guide RNA
cuguaugcacuuugacagcucc

SEQ ID NO: 4883 - RNA, 22 nt, Artificial Sequence
  GATA2 Guide RNA
cugucaaagugcauacaggaga

SEQ ID NO: 4884 - RNA, 22 nt, Artificial Sequence
  GATA2 Guide RNA
cuucgaggagcugucaaagugc

SEQ ID NO: 4885 - RNA, 22 nt, Artificial Sequence
  GATA2 Guide RNA
cuucuccuguaugcacuuugac

SEQ ID NO: 4886 - RNA, 22 nt, Artificial Sequence
  GATA2 Guide RNA
gaagggggaugacuucuccugu

SEQ ID NO: 4887 - RNA, 22 nt, Artificial Sequence
  GATA2 Guide RNA
gacuucuccuguaugcacuuug

SEQ ID NO: 4888 - RNA, 22 nt, Artificial Sequence
  GATA2 Guide RNA
gagcugucaaagugcauacagg

SEQ ID NO: 4889 - RNA, 22 nt, Artificial Sequence
  GATA2 Guide RNA
gaggagcugucaaagugcauac

SEQ ID NO: 4890 - RNA, 22 nt, Artificial Sequence
  GATA2 Guide RNA
gaugacuucuccuguaugcacu

SEQ ID NO: 4891 - RNA, 22 nt, Artificial Sequence
  GATA2 Guide RNA
gcauacaggagaagucaucccc

SEQ ID NO: 4892 - RNA, 22 nt, Artificial Sequence
  GATA2 Guide RNA
gcugucaaagugcauacaggag

SEQ ID NO: 4893 - RNA, 22 nt, Artificial Sequence
  GATA2 Guide RNA
gcuucgaggagcugucaaagug

SEQ ID NO: 4894 - RNA, 22 nt, Artificial Sequence
  GATA2 Guide RNA
ggagcugucaaagugcauacag

SEQ ID NO: 4895 - RNA, 22 nt, Artificial Sequence
  GATA2 Guide RNA
ggaugacuucuccuguaugcac

SEQ ID NO: 4896 - RNA, 22 nt, Artificial Sequence
  GATA2 Guide RNA
gggaugacuucuccuguaugca

SEQ ID NO: 4897 - RNA, 22 nt, Artificial Sequence
  GATA2 Guide RNA
ggggaugacuucuccuguaugc

SEQ ID NO: 4898 - RNA, 22 nt, Artificial Sequence
  GATA2 Guide RNA
gggggaugacuucuccuguaug

SEQ ID NO: 4899 - RNA, 22 nt, Artificial Sequence
  GATA2 Guide RNA
guaugcacuuugacagcuccuc

SEQ ID NO: 4900 - RNA, 22 nt, Artificial Sequence
  GATA2 Guide RNA
gucaaagugcauacaggagaag

SEQ ID NO: 4901 - RNA, 22 nt, Artificial Sequence
  GATA2 Guide RNA
gugcauacaggagaagucaucc

SEQ ID NO: 4902 - RNA, 22 nt, Artificial Sequence
  GATA2 Guide RNA
uacaggagaagucaucccccuu

SEQ ID NO: 4903 - RNA, 22 nt, Artificial Sequence
  GATA2 Guide RNA
uaugcacuuugacagcuccucg

SEQ ID NO: 4904 - RNA, 22 nt, Artificial Sequence
  GATA2 Guide RNA
ucaaagugcauacaggagaagu

SEQ ID NO: 4905 - RNA, 22 nt, Artificial Sequence
  GATA2 Guide RNA
uccuguaugcacuuugacagcu

SEQ ID NO: 4906 - RNA, 22 nt, Artificial Sequence
  GATA2 Guide RNA
ucgaggagcugucaaagugcau

SEQ ID NO: 4907 - RNA, 22 nt, Artificial Sequence
  GATA2 Guide RNA
ucuccuguaugcacuuugacag

SEQ ID NO: 4908 - RNA, 22 nt, Artificial Sequence
  GATA2 Guide RNA
ugaagggggaugacuucuccug

SEQ ID NO: 4909 - RNA, 22 nt, Artificial Sequence
  GATA2 Guide RNA
ugacuucuccuguaugcacuuu

SEQ ID NO: 4910 - RNA, 22 nt, Artificial Sequence
  GATA2 Guide RNA
ugcauacaggagaagucauccc

SEQ ID NO: 4911 - RNA, 22 nt, Artificial Sequence
  GATA2 Guide RNA
uguaugcacuuugacagcuccu

SEQ ID NO: 4912 - RNA, 22 nt, Artificial Sequence
  GATA2 Guide RNA
ugucaaagugcauacaggagaa

SEQ ID NO: 4913 - RNA, 22 nt, Artificial Sequence
  GATA2 Guide RNA
uucgaggagcugucaaagugca

SEQ ID NO: 4914 - RNA, 22 nt, Artificial Sequence
  GATA2 Guide RNA
uucuccuguaugcacuuugaca

SEQ ID NO: 4915 - RNA, 20 nt, Artificial Sequence
  GATA2 Guide RNA
aaaggggcggagugcuucga

SEQ ID NO: 4916 - RNA, 20 nt, Artificial Sequence
  GATA2 Guide RNA
aaggggcggagugcuucgag

SEQ ID NO: 4917 - RNA, 20 nt, Artificial Sequence
  GATA2 Guide RNA
acagguccucgaagcacucc

SEQ ID NO: 4918 - RNA, 20 nt, Artificial Sequence
  GATA2 Guide RNA
accugucaaagugcaugcag

SEQ ID NO: 4919 - RNA, 20 nt, Artificial Sequence
  GATA2 Guide RNA
acuuugacagguccucgaag

SEQ ID NO: 4920 - RNA, 20 nt, Artificial Sequence
  GATA2 Guide RNA
aggaccugucaaagugcaug

SEQ ID NO: 4921 - RNA, 20 nt, Artificial Sequence
  GATA2 Guide RNA
aggggcggagugcuucgagg

SEQ ID NO: 4922 - RNA, 20 nt, Artificial Sequence
  GATA2 Guide RNA
agguccucgaagcacuccgc

SEQ ID NO: 4923 - RNA, 20 nt, Artificial Sequence
  GATA2 Guide RNA
agugcuucgaggaccuguca

SEQ ID NO: 4924 - RNA, 20 nt, Artificial Sequence
  GATA2 Guide RNA
augcacuuugacagguccuc

SEQ ID NO: 4925 - RNA, 20 nt, Artificial Sequence
  GATA2 Guide RNA
cacuuugacagguccucgaa

SEQ ID NO: 4926 - RNA, 20 nt, Artificial Sequence
  GATA2 Guide RNA
cagguccucgaagcacuccg

SEQ ID NO: 4927 - RNA, 20 nt, Artificial Sequence
  GATA2 Guide RNA
caugcacuuugacagguccu

SEQ ID NO: 4928 - RNA, 20 nt, Artificial Sequence
  GATA2 Guide RNA
ccugcaugcacuuugacagg

SEQ ID NO: 4929 - RNA, 20 nt, Artificial Sequence
  GATA2 Guide RNA
cgaggaccugucaaagugca

SEQ ID NO: 4930 - RNA, 20 nt, Artificial Sequence
  GATA2 Guide RNA
cggagugcuucgaggaccug

SEQ ID NO: 4931 - RNA, 20 nt, Artificial Sequence
  GATA2 Guide RNA
cuccugcaugcacuuugaca

SEQ ID NO: 4932 - RNA, 20 nt, Artificial Sequence
  GATA2 Guide RNA
cugcaugcacuuugacaggu

SEQ ID NO: 4933 - RNA, 20 nt, Artificial Sequence
  GATA2 Guide RNA
cuucgaggaccugucaaagu

SEQ ID NO: 4934 - RNA, 20 nt, Artificial Sequence
  GATA2 Guide RNA
cuuugacagguccucgaagc

SEQ ID NO: 4935 - RNA, 20 nt, Artificial Sequence
  GATA2 Guide RNA
gacagguccucgaagcacuc

SEQ ID NO: 4936 - RNA, 20 nt, Artificial Sequence
  GATA2 Guide RNA
gaccugucaaagugcaugca

SEQ ID NO: 4937 - RNA, 20 nt, Artificial Sequence
  GATA2 Guide RNA
gaggaccugucaaagugcau

SEQ ID NO: 4938 - RNA, 20 nt, Artificial Sequence
  GATA2 Guide RNA
gagugcuucgaggaccuguc

SEQ ID NO: 4939 - RNA, 20 nt, Artificial Sequence
  GATA2 Guide RNA
gcacuuugacagguccucga

SEQ ID NO: 4940 - RNA, 20 nt, Artificial Sequence
  GATA2 Guide RNA
gcaugcacuuugacaggucc

SEQ ID NO: 4941 - RNA, 20 nt, Artificial Sequence
  GATA2 Guide RNA
gcggagugcuucgaggaccu

SEQ ID NO: 4942 - RNA, 20 nt, Artificial Sequence
  GATA2 Guide RNA
gcuucgaggaccugucaaag

SEQ ID NO: 4943 - RNA, 20 nt, Artificial Sequence
  GATA2 Guide RNA
ggaccugucaaagugcaugc

SEQ ID NO: 4944 - RNA, 20 nt, Artificial Sequence
  GATA2 Guide RNA
ggagugcuucgaggaccugu

SEQ ID NO: 4945 - RNA, 20 nt, Artificial Sequence
  GATA2 Guide RNA
ggcggagugcuucgaggacc

SEQ ID NO: 4946 - RNA, 20 nt, Artificial Sequence
  GATA2 Guide RNA
gggcggagugcuucgaggac

SEQ ID NO: 4947 - RNA, 20 nt, Artificial Sequence
  GATA2 Guide RNA
ggggcggagugcuucgagga

SEQ ID NO: 4948 - RNA, 20 nt, Artificial Sequence
  GATA2 Guide RNA
gguccucgaagcacuccgcc

SEQ ID NO: 4949 - RNA, 20 nt, Artificial Sequence
  GATA2 Guide RNA
guccucgaagcacuccgccc

SEQ ID NO: 4950 - RNA, 20 nt, Artificial Sequence
  GATA2 Guide RNA
gugcuucgaggaccugucaa

SEQ ID NO: 4951 - RNA, 20 nt, Artificial Sequence
  GATA2 Guide RNA
uccugcaugcacuuugacag

SEQ ID NO: 4952 - RNA, 20 nt, Artificial Sequence
  GATA2 Guide RNA
ucgaggaccugucaaagugc

SEQ ID NO: 4953 - RNA, 20 nt, Artificial Sequence
  GATA2 Guide RNA
ucuccugcaugcacuuugac

SEQ ID NO: 4954 - RNA, 20 nt, Artificial Sequence
  GATA2 Guide RNA
ugacagguccucgaagcacu

SEQ ID NO: 4955 - RNA, 20 nt, Artificial Sequence
  GATA2 Guide RNA
ugcacuuugacagguccucg

SEQ ID NO: 4956 - RNA, 20 nt, Artificial Sequence
  GATA2 Guide RNA
ugcaugcacuuugacagguc

SEQ ID NO: 4957 - RNA, 20 nt, Artificial Sequence
  GATA2 Guide RNA
ugcuucgaggaccugucaaa

SEQ ID NO: 4958 - RNA, 20 nt, Artificial Sequence
  GATA2 Guide RNA
uucgaggaccugucaaagug

SEQ ID NO: 4959 - RNA, 20 nt, Artificial Sequence
  GATA2 Guide RNA
uugacagguccucgaagcac

SEQ ID NO: 4960 - RNA, 20 nt, Artificial Sequence
  GATA2 Guide RNA
uuugacagguccucgaagca

SEQ ID NO: 4961 - RNA, 21 nt, Artificial Sequence
  GATA2 Guide RNA
aaaggggcggagugcuucgag

SEQ ID NO: 4962 - RNA, 21 nt, Artificial Sequence
  GATA2 Guide RNA
aaggggcggagugcuucgagg

SEQ ID NO: 4963 - RNA, 21 nt, Artificial Sequence
  GATA2 Guide RNA
acagguccucgaagcacuccg

SEQ ID NO: 4964 - RNA, 21 nt, Artificial Sequence
  GATA2 Guide RNA
accugucaaagugcaugcagg

SEQ ID NO: 4965 - RNA, 21 nt, Artificial Sequence
  GATA2 Guide RNA
acuuugacagguccucgaagc

SEQ ID NO: 4966 - RNA, 21 nt, Artificial Sequence
  GATA2 Guide RNA
aggaccugucaaagugcaugc

SEQ ID NO: 4967 - RNA, 21 nt, Artificial Sequence
  GATA2 Guide RNA
aggggcggagugcuucgagga

SEQ ID NO: 4968 - RNA, 21 nt, Artificial Sequence
  GATA2 Guide RNA
agguccucgaagcacuccgcc

SEQ ID NO: 4969 - RNA, 21 nt, Artificial Sequence
  GATA2 Guide RNA
agugcuucgaggaccugucaa

SEQ ID NO: 4970 - RNA, 21 nt, Artificial Sequence
  GATA2 Guide RNA
augcacuuugacagguccucg

SEQ ID NO: 4971 - RNA, 21 nt, Artificial Sequence
  GATA2 Guide RNA
cacuuugacagguccucgaag

SEQ ID NO: 4972 - RNA, 21 nt, Artificial Sequence
  GATA2 Guide RNA
cagguccucgaagcacuccgc

SEQ ID NO: 4973 - RNA, 21 nt, Artificial Sequence
  GATA2 Guide RNA
caugcacuuugacagguccuc

SEQ ID NO: 4974 - RNA, 21 nt, Artificial Sequence
  GATA2 Guide RNA
ccugcaugcacuuugacaggu

SEQ ID NO: 4975 - RNA, 21 nt, Artificial Sequence
  GATA2 Guide RNA
cgaggaccugucaaagugcau

SEQ ID NO: 4976 - RNA, 21 nt, Artificial Sequence
  GATA2 Guide RNA
cggagugcuucgaggaccugu

SEQ ID NO: 4977 - RNA, 21 nt, Artificial Sequence
  GATA2 Guide RNA
cuccugcaugcacuuugacag

SEQ ID NO: 4978 - RNA, 21 nt, Artificial Sequence
  GATA2 Guide RNA
cugcaugcacuuugacagguc

SEQ ID NO: 4979 - RNA, 21 nt, Artificial Sequence
  GATA2 Guide RNA
cuucgaggaccugucaaagug

SEQ ID NO: 4980 - RNA, 21 nt, Artificial Sequence
  GATA2 Guide RNA
cuuugacagguccucgaagca

SEQ ID NO: 4981 - RNA, 21 nt, Artificial Sequence
  GATA2 Guide RNA
gaaaggggcggagugcuucga

SEQ ID NO: 4982 - RNA, 21 nt, Artificial Sequence
  GATA2 Guide RNA
gacagguccucgaagcacucc

SEQ ID NO: 4983 - RNA, 21 nt, Artificial Sequence
  GATA2 Guide RNA
gaccugucaaagugcaugcag

SEQ ID NO: 4984 - RNA, 21 nt, Artificial Sequence
  GATA2 Guide RNA
gaggaccugucaaagugcaug

SEQ ID NO: 4985 - RNA, 21 nt, Artificial Sequence
  GATA2 Guide RNA
gagugcuucgaggaccuguca

SEQ ID NO: 4986 - RNA, 21 nt, Artificial Sequence
  GATA2 Guide RNA
gcacuuugacagguccucgaa

SEQ ID NO: 4987 - RNA, 21 nt, Artificial Sequence
  GATA2 Guide RNA
gcaugcacuuugacagguccu

SEQ ID NO: 4988 - RNA, 21 nt, Artificial Sequence
  GATA2 Guide RNA
gcggagugcuucgaggaccug

SEQ ID NO: 4989 - RNA, 21 nt, Artificial Sequence
  GATA2 Guide RNA
gcuucgaggaccugucaaagu

SEQ ID NO: 4990 - RNA, 21 nt, Artificial Sequence
  GATA2 Guide RNA
ggaccugucaaagugcaugca

SEQ ID NO: 4991 - RNA, 21 nt, Artificial Sequence
  GATA2 Guide RNA
ggagugcuucgaggaccuguc

SEQ ID NO: 4992 - RNA, 21 nt, Artificial Sequence
  GATA2 Guide RNA
ggcggagugcuucgaggaccu

SEQ ID NO: 4993 - RNA, 21 nt, Artificial Sequence
  GATA2 Guide RNA
gggcggagugcuucgaggacc

SEQ ID NO: 4994 - RNA, 21 nt, Artificial Sequence
  GATA2 Guide RNA
ggggcggagugcuucgaggac

SEQ ID NO: 4995 - RNA, 21 nt, Artificial Sequence
  GATA2 Guide RNA
gguccucgaagcacuccgccc

SEQ ID NO: 4996 - RNA, 21 nt, Artificial Sequence
  GATA2 Guide RNA
guccucgaagcacuccgcccc

SEQ ID NO: 4997 - RNA, 21 nt, Artificial Sequence
  GATA2 Guide RNA
gugcuucgaggaccugucaaa

SEQ ID NO: 4998 - RNA, 21 nt, Artificial Sequence
  GATA2 Guide RNA
uccugcaugcacuuugacagg

SEQ ID NO: 4999 - RNA, 21 nt, Artificial Sequence
  GATA2 Guide RNA
ucgaggaccugucaaagugca

SEQ ID NO: 5000 - RNA, 21 nt, Artificial Sequence
  GATA2 Guide RNA
ucuccugcaugcacuuugaca

SEQ ID NO: 5001 - RNA, 21 nt, Artificial Sequence
  GATA2 Guide RNA
ugacagguccucgaagcacuc

SEQ ID NO: 5002 - RNA, 21 nt, Artificial Sequence
  GATA2 Guide RNA
ugcacuuugacagguccucga

SEQ ID NO: 5003 - RNA, 21 nt, Artificial Sequence
  GATA2 Guide RNA
ugcaugcacuuugacaggucc

SEQ ID NO: 5004 - RNA, 21 nt, Artificial Sequence
  GATA2 Guide RNA
ugcuucgaggaccugucaaag

SEQ ID NO: 5005 - RNA, 21 nt, Artificial Sequence
  GATA2 Guide RNA
uucgaggaccugucaaagugc

SEQ ID NO: 5006 - RNA, 21 nt, Artificial Sequence
  GATA2 Guide RNA
uucuccugcaugcacuuugac

SEQ ID NO: 5007 - RNA, 21 nt, Artificial Sequence
  GATA2 Guide RNA
uugacagguccucgaagcacu

SEQ ID NO: 5008 - RNA, 21 nt, Artificial Sequence
  GATA2 Guide RNA
uuugacagguccucgaagcac

SEQ ID NO: 5009 - RNA, 22 nt, Artificial Sequence
  GATA2 Guide RNA
aaaggggcggagugcuucgagg

SEQ ID NO: 5010 - RNA, 22 nt, Artificial Sequence
  GATA2 Guide RNA
aaggggcggagugcuucgagga

SEQ ID NO: 5011 - RNA, 22 nt, Artificial Sequence
  GATA2 Guide RNA
acagguccucgaagcacuccgc

SEQ ID NO: 5012 - RNA, 22 nt, Artificial Sequence
  GATA2 Guide RNA
accugucaaagugcaugcagga

SEQ ID NO: 5013 - RNA, 22 nt, Artificial Sequence
  GATA2 Guide RNA
acuuugacagguccucgaagca

SEQ ID NO: 5014 - RNA, 22 nt, Artificial Sequence
  GATA2 Guide RNA
agaaaggggcggagugcuucga

SEQ ID NO: 5015 - RNA, 22 nt, Artificial Sequence
  GATA2 Guide RNA
aggaccugucaaagugcaugca

SEQ ID NO: 5016 - RNA, 22 nt, Artificial Sequence
  GATA2 Guide RNA
aggggcggagugcuucgaggac

SEQ ID NO: 5017 - RNA, 22 nt, Artificial Sequence
  GATA2 Guide RNA
agguccucgaagcacuccgccc

SEQ ID NO: 5018 - RNA, 22 nt, Artificial Sequence
  GATA2 Guide RNA
agugcuucgaggaccugucaaa

SEQ ID NO: 5019 - RNA, 22 nt, Artificial Sequence
  GATA2 Guide RNA
augcacuuugacagguccucga

SEQ ID NO: 5020 - RNA, 22 nt, Artificial Sequence
  GATA2 Guide RNA
cacuuugacagguccucgaagc

SEQ ID NO: 5021 - RNA, 22 nt, Artificial Sequence
  GATA2 Guide RNA
cagguccucgaagcacuccgcc

SEQ ID NO: 5022 - RNA, 22 nt, Artificial Sequence
  GATA2 Guide RNA
caugcacuuugacagguccucg

SEQ ID NO: 5023 - RNA, 22 nt, Artificial Sequence
  GATA2 Guide RNA
ccugcaugcacuuugacagguc

SEQ ID NO: 5024 - RNA, 22 nt, Artificial Sequence
  GATA2 Guide RNA
cgaggaccugucaaagugcaug

SEQ ID NO: 5025 - RNA, 22 nt, Artificial Sequence
  GATA2 Guide RNA
cggagugcuucgaggaccuguc

SEQ ID NO: 5026 - RNA, 22 nt, Artificial Sequence
  GATA2 Guide RNA
cuccugcaugcacuuugacagg

SEQ ID NO: 5027 - RNA, 22 nt, Artificial Sequence
  GATA2 Guide RNA
cugcaugcacuuugacaggucc

SEQ ID NO: 5028 - RNA, 22 nt, Artificial Sequence
  GATA2 Guide RNA
cuucgaggaccugucaaagugc

SEQ ID NO: 5029 - RNA, 22 nt, Artificial Sequence
  GATA2 Guide RNA
cuucuccugcaugcacuuugac

SEQ ID NO: 5030 - RNA, 22 nt, Artificial Sequence
  GATA2 Guide RNA
cuuugacagguccucgaagcac

SEQ ID NO: 5031 - RNA, 22 nt, Artificial Sequence
  GATA2 Guide RNA
gaaaggggcggagugcuucgag

SEQ ID NO: 5032 - RNA, 22 nt, Artificial Sequence
  GATA2 Guide RNA
gacagguccucgaagcacuccg

SEQ ID NO: 5033 - RNA, 22 nt, Artificial Sequence
  GATA2 Guide RNA
gaccugucaaagugcaugcagg

SEQ ID NO: 5034 - RNA, 22 nt, Artificial Sequence
  GATA2 Guide RNA
gaggaccugucaaagugcaugc

SEQ ID NO: 5035 - RNA, 22 nt, Artificial Sequence
  GATA2 Guide RNA
gagugcuucgaggaccugucaa

SEQ ID NO: 5036 - RNA, 22 nt, Artificial Sequence
  GATA2 Guide RNA
gcacuuugacagguccucgaag

SEQ ID NO: 5037 - RNA, 22 nt, Artificial Sequence
  GATA2 Guide RNA
gcaugcacuuugacagguccuc

SEQ ID NO: 5038 - RNA, 22 nt, Artificial Sequence
  GATA2 Guide RNA
gcggagugcuucgaggaccugu

SEQ ID NO: 5039 - RNA, 22 nt, Artificial Sequence
  GATA2 Guide RNA
gcuucgaggaccugucaaagug

SEQ ID NO: 5040 - RNA, 22 nt, Artificial Sequence
  GATA2 Guide RNA
ggaccugucaaagugcaugcag

SEQ ID NO: 5041 - RNA, 22 nt, Artificial Sequence
  GATA2 Guide RNA
ggagugcuucgaggaccuguca

SEQ ID NO: 5042 - RNA, 22 nt, Artificial Sequence
  GATA2 Guide RNA
ggcggagugcuucgaggaccug

SEQ ID NO: 5043 - RNA, 22 nt, Artificial Sequence
  GATA2 Guide RNA
gggcggagugcuucgaggaccu

SEQ ID NO: 5044 - RNA, 22 nt, Artificial Sequence
  GATA2 Guide RNA
ggggcggagugcuucgaggacc

SEQ ID NO: 5045 - RNA, 22 nt, Artificial Sequence
  GATA2 Guide RNA
gguccucgaagcacuccgcccc

SEQ ID NO: 5046 - RNA, 22 nt, Artificial Sequence
  GATA2 Guide RNA
guccucgaagcacuccgccccu

SEQ ID NO: 5047 - RNA, 22 nt, Artificial Sequence
  GATA2 Guide RNA
gugcuucgaggaccugucaaag

SEQ ID NO: 5048 - RNA, 22 nt, Artificial Sequence
  GATA2 Guide RNA
uccugcaugcacuuugacaggu

SEQ ID NO: 5049 - RNA, 22 nt, Artificial Sequence
  GATA2 Guide RNA
ucgaggaccugucaaagugcau

SEQ ID NO: 5050 - RNA, 22 nt, Artificial Sequence
  GATA2 Guide RNA
ucuccugcaugcacuuugacag

SEQ ID NO: 5051 - RNA, 22 nt, Artificial Sequence
  GATA2 Guide RNA
ugacagguccucgaagcacucc

SEQ ID NO: 5052 - RNA, 22 nt, Artificial Sequence
  GATA2 Guide RNA
ugcacuuugacagguccucgaa

SEQ ID NO: 5053 - RNA, 22 nt, Artificial Sequence
  GATA2 Guide RNA
ugcaugcacuuugacagguccu

SEQ ID NO: 5054 - RNA, 22 nt, Artificial Sequence
  GATA2 Guide RNA
ugcuucgaggaccugucaaagu

SEQ ID NO: 5055 - RNA, 22 nt, Artificial Sequence
  GATA2 Guide RNA
uucgaggaccugucaaagugca

SEQ ID NO: 5056 - RNA, 22 nt, Artificial Sequence
  GATA2 Guide RNA
uucuccugcaugcacuuugaca

SEQ ID NO: 5057 - RNA, 22 nt, Artificial Sequence
  GATA2 Guide RNA
uugacagguccucgaagcacuc

SEQ ID NO: 5058 - RNA, 22 nt, Artificial Sequence
  GATA2 Guide RNA
uuugacagguccucgaagcacu

SEQ ID NO: 5059 - RNA, 20 nt, Artificial Sequence
  GATA2 Guide RNA
aaaggggcggagugcuucaa

SEQ ID NO: 5060 - RNA, 20 nt, Artificial Sequence
  GATA2 Guide RNA
aagaaaggggcggagugcuu

SEQ ID NO: 5061 - RNA, 20 nt, Artificial Sequence
  GATA2 Guide RNA
aaggggcggagugcuucaag

SEQ ID NO: 5062 - RNA, 20 nt, Artificial Sequence
  GATA2 Guide RNA
acagcuccuugaagcacucc

SEQ ID NO: 5063 - RNA, 20 nt, Artificial Sequence
  GATA2 Guide RNA
acuuugacagcuccuugaag

SEQ ID NO: 5064 - RNA, 20 nt, Artificial Sequence
  GATA2 Guide RNA
agaaaggggcggagugcuuc

SEQ ID NO: 5065 - RNA, 20 nt, Artificial Sequence
  GATA2 Guide RNA
agcuccuugaagcacuccgc

SEQ ID NO: 5066 - RNA, 20 nt, Artificial Sequence
  GATA2 Guide RNA
aggggcggagugcuucaagg

SEQ ID NO: 5067 - RNA, 20 nt, Artificial Sequence
  GATA2 Guide RNA
agugcuucaaggagcuguca

SEQ ID NO: 5068 - RNA, 20 nt, Artificial Sequence
  GATA2 Guide RNA
augcacuuugacagcuccuu

SEQ ID NO: 5069 - RNA, 20 nt, Artificial Sequence
  GATA2 Guide RNA
caagaaaggggcggagugcu

SEQ ID NO: 5070 - RNA, 20 nt, Artificial Sequence
  GATA2 Guide RNA
caaggagcugucaaagugca

SEQ ID NO: 5071 - RNA, 20 nt, Artificial Sequence
  GATA2 Guide RNA
cacuuugacagcuccuugaa

SEQ ID NO: 5072 - RNA, 20 nt, Artificial Sequence
  GATA2 Guide RNA
cagcuccuugaagcacuccg

SEQ ID NO: 5073 - RNA, 20 nt, Artificial Sequence
  GATA2 Guide RNA
caugcacuuugacagcuccu

SEQ ID NO: 5074 - RNA, 20 nt, Artificial Sequence
  GATA2 Guide RNA
ccuugaagcacuccgccccu

SEQ ID NO: 5075 - RNA, 20 nt, Artificial Sequence
  GATA2 Guide RNA
cggagugcuucaaggagcug

SEQ ID NO: 5076 - RNA, 20 nt, Artificial Sequence
  GATA2 Guide RNA
cuccuugaagcacuccgccc

SEQ ID NO: 5077 - RNA, 20 nt, Artificial Sequence
  GATA2 Guide RNA
cuucaaggagcugucaaagu

SEQ ID NO: 5078 - RNA, 20 nt, Artificial Sequence
  GATA2 Guide RNA
cuugaagcacuccgccccuu

SEQ ID NO: 5079 - RNA, 20 nt, Artificial Sequence
  GATA2 Guide RNA
cuuugacagcuccuugaagc

SEQ ID NO: 5080 - RNA, 20 nt, Artificial Sequence
  GATA2 Guide RNA
gaaaggggcggagugcuuca

SEQ ID NO: 5081 - RNA, 20 nt, Artificial Sequence
  GATA2 Guide RNA
gacagcuccuugaagcacuc

SEQ ID NO: 5082 - RNA, 20 nt, Artificial Sequence
  GATA2 Guide RNA
gagugcuucaaggagcuguc

SEQ ID NO: 5083 - RNA, 20 nt, Artificial Sequence
  GATA2 Guide RNA
gcaagaaaggggcggagugc

SEQ ID NO: 5084 - RNA, 20 nt, Artificial Sequence
  GATA2 Guide RNA
gcacuuugacagcuccuuga

SEQ ID NO: 5085 - RNA, 20 nt, Artificial Sequence
  GATA2 Guide RNA
gcaugcacuuugacagcucc

SEQ ID NO: 5086 - RNA, 20 nt, Artificial Sequence
  GATA2 Guide RNA
gcggagugcuucaaggagcu

SEQ ID NO: 5087 - RNA, 20 nt, Artificial Sequence
  GATA2 Guide RNA
gcuccuugaagcacuccgcc

SEQ ID NO: 5088 - RNA, 20 nt, Artificial Sequence
  GATA2 Guide RNA
gcuucaaggagcugucaaag

SEQ ID NO: 5089 - RNA, 20 nt, Artificial Sequence
  GATA2 Guide RNA
ggagugcuucaaggagcugu

SEQ ID NO: 5090 - RNA, 20 nt, Artificial Sequence
  GATA2 Guide RNA
ggcggagugcuucaaggagc

SEQ ID NO: 5091 - RNA, 20 nt, Artificial Sequence
  GATA2 Guide RNA
gggcggagugcuucaaggag

SEQ ID NO: 5092 - RNA, 20 nt, Artificial Sequence
  GATA2 Guide RNA
ggggcggagugcuucaagga

SEQ ID NO: 5093 - RNA, 20 nt, Artificial Sequence
  GATA2 Guide RNA
gugcuucaaggagcugucaa

SEQ ID NO: 5094 - RNA, 20 nt, Artificial Sequence
  GATA2 Guide RNA
ucaaggagcugucaaagugc

SEQ ID NO: 5095 - RNA, 20 nt, Artificial Sequence
  GATA2 Guide RNA
uccuugaagcacuccgcccc

SEQ ID NO: 5096 - RNA, 20 nt, Artificial Sequence
  GATA2 Guide RNA
ugaagcacuccgccccuuuc

SEQ ID NO: 5097 - RNA, 20 nt, Artificial Sequence
  GATA2 Guide RNA
ugacagcuccuugaagcacu

SEQ ID NO: 5098 - RNA, 20 nt, Artificial Sequence
  GATA2 Guide RNA
ugcacuuugacagcuccuug

SEQ ID NO: 5099 - RNA, 20 nt, Artificial Sequence
  GATA2 Guide RNA
ugcaugcacuuugacagcuc

SEQ ID NO: 5100 - RNA, 20 nt, Artificial Sequence
  GATA2 Guide RNA
ugcuucaaggagcugucaaa

SEQ ID NO: 5101 - RNA, 20 nt, Artificial Sequence
  GATA2 Guide RNA
uucaaggagcugucaaagug

SEQ ID NO: 5102 - RNA, 20 nt, Artificial Sequence
  GATA2 Guide RNA
uugaagcacuccgccccuuu

SEQ ID NO: 5103 - RNA, 20 nt, Artificial Sequence
  GATA2 Guide RNA
uugacagcuccuugaagcac

SEQ ID NO: 5104 - RNA, 20 nt, Artificial Sequence
  GATA2 Guide RNA
uuugacagcuccuugaagca

SEQ ID NO: 5105 - RNA, 21 nt, Artificial Sequence
  GATA2 Guide RNA
aaaggggcggagugcuucaag

SEQ ID NO: 5106 - RNA, 21 nt, Artificial Sequence
  GATA2 Guide RNA
aagaaaggggcggagugcuuc

SEQ ID NO: 5107 - RNA, 21 nt, Artificial Sequence
  GATA2 Guide RNA
aaggggcggagugcuucaagg

SEQ ID NO: 5108 - RNA, 21 nt, Artificial Sequence
  GATA2 Guide RNA
acagcuccuugaagcacuccg

SEQ ID NO: 5109 - RNA, 21 nt, Artificial Sequence
  GATA2 Guide RNA
acuuugacagcuccuugaagc

SEQ ID NO: 5110 - RNA, 21 nt, Artificial Sequence
  GATA2 Guide RNA
agaaaggggcggagugcuuca

SEQ ID NO: 5111 - RNA, 21 nt, Artificial Sequence
  GATA2 Guide RNA
agcaagaaaggggcggagugc

SEQ ID NO: 5112 - RNA, 21 nt, Artificial Sequence
  GATA2 Guide RNA
agcuccuugaagcacuccgcc

SEQ ID NO: 5113 - RNA, 21 nt, Artificial Sequence
  GATA2 Guide RNA
aggggcggagugcuucaagga

SEQ ID NO: 5114 - RNA, 21 nt, Artificial Sequence
  GATA2 Guide RNA
agugcuucaaggagcugucaa

SEQ ID NO: 5115 - RNA, 21 nt, Artificial Sequence
  GATA2 Guide RNA
augcacuuugacagcuccuug

SEQ ID NO: 5116 - RNA, 21 nt, Artificial Sequence
  GATA2 Guide RNA
caagaaaggggcggagugcuu

SEQ ID NO: 5117 - RNA, 21 nt, Artificial Sequence
  GATA2 Guide RNA
caaggagcugucaaagugcau

SEQ ID NO: 5118 - RNA, 21 nt, Artificial Sequence
  GATA2 Guide RNA
cacuuugacagcuccuugaag

SEQ ID NO: 5119 - RNA, 21 nt, Artificial Sequence
  GATA2 Guide RNA
cagcuccuugaagcacuccgc

SEQ ID NO: 5120 - RNA, 21 nt, Artificial Sequence
  GATA2 Guide RNA
caugcacuuugacagcuccuu

SEQ ID NO: 5121 - RNA, 21 nt, Artificial Sequence
  GATA2 Guide RNA
ccuugaagcacuccgccccuu

SEQ ID NO: 5122 - RNA, 21 nt, Artificial Sequence
  GATA2 Guide RNA
cggagugcuucaaggagcugu

SEQ ID NO: 5123 - RNA, 21 nt, Artificial Sequence
  GATA2 Guide RNA
cuccuugaagcacuccgcccc

SEQ ID NO: 5124 - RNA, 21 nt, Artificial Sequence
  GATA2 Guide RNA
cugcaugcacuuugacagcuc

SEQ ID NO: 5125 - RNA, 21 nt, Artificial Sequence
  GATA2 Guide RNA
cuucaaggagcugucaaagug

SEQ ID NO: 5126 - RNA, 21 nt, Artificial Sequence
  GATA2 Guide RNA
cuugaagcacuccgccccuuu

SEQ ID NO: 5127 - RNA, 21 nt, Artificial Sequence
  GATA2 Guide RNA
cuuugacagcuccuugaagca

SEQ ID NO: 5128 - RNA, 21 nt, Artificial Sequence
  GATA2 Guide RNA
gaaaggggcggagugcuucaa

SEQ ID NO: 5129 - RNA, 21 nt, Artificial Sequence
  GATA2 Guide RNA
gacagcuccuugaagcacucc

SEQ ID NO: 5130 - RNA, 21 nt, Artificial Sequence
  GATA2 Guide RNA
gagugcuucaaggagcuguca

SEQ ID NO: 5131 - RNA, 21 nt, Artificial Sequence
  GATA2 Guide RNA
gcaagaaaggggcggagugcu

SEQ ID NO: 5132 - RNA, 21 nt, Artificial Sequence
  GATA2 Guide RNA
gcacuuugacagcuccuugaa

SEQ ID NO: 5133 - RNA, 21 nt, Artificial Sequence
  GATA2 Guide RNA
gcaugcacuuugacagcuccu

SEQ ID NO: 5134 - RNA, 21 nt, Artificial Sequence
  GATA2 Guide RNA
gcggagugcuucaaggagcug

SEQ ID NO: 5135 - RNA, 21 nt, Artificial Sequence
  GATA2 Guide RNA
gcuccuugaagcacuccgccc

SEQ ID NO: 5136 - RNA, 21 nt, Artificial Sequence
  GATA2 Guide RNA
gcuucaaggagcugucaaagu

SEQ ID NO: 5137 - RNA, 21 nt, Artificial Sequence
  GATA2 Guide RNA
ggagugcuucaaggagcuguc

SEQ ID NO: 5138 - RNA, 21 nt, Artificial Sequence
  GATA2 Guide RNA
ggcggagugcuucaaggagcu

SEQ ID NO: 5139 - RNA, 21 nt, Artificial Sequence
  GATA2 Guide RNA
gggcggagugcuucaaggagc

SEQ ID NO: 5140 - RNA, 21 nt, Artificial Sequence
  GATA2 Guide RNA
ggggcggagugcuucaaggag

SEQ ID NO: 5141 - RNA, 21 nt, Artificial Sequence
  GATA2 Guide RNA
gugcuucaaggagcugucaaa

SEQ ID NO: 5142 - RNA, 21 nt, Artificial Sequence
  GATA2 Guide RNA
ucaaggagcugucaaagugca

SEQ ID NO: 5143 - RNA, 21 nt, Artificial Sequence
  GATA2 Guide RNA
uccuugaagcacuccgccccu

SEQ ID NO: 5144 - RNA, 21 nt, Artificial Sequence
  GATA2 Guide RNA
ugaagcacuccgccccuuucu

SEQ ID NO: 5145 - RNA, 21 nt, Artificial Sequence
  GATA2 Guide RNA
ugacagcuccuugaagcacuc

SEQ ID NO: 5146 - RNA, 21 nt, Artificial Sequence
  GATA2 Guide RNA
ugcacuuugacagcuccuuga

SEQ ID NO: 5147 - RNA, 21 nt, Artificial Sequence
  GATA2 Guide RNA
ugcaugcacuuugacagcucc

SEQ ID NO: 5148 - RNA, 21 nt, Artificial Sequence
  GATA2 Guide RNA
ugcuucaaggagcugucaaag

SEQ ID NO: 5149 - RNA, 21 nt, Artificial Sequence
  GATA2 Guide RNA
uucaaggagcugucaaagugc

SEQ ID NO: 5150 - RNA, 21 nt, Artificial Sequence
  GATA2 Guide RNA
uugaagcacuccgccccuuuc

SEQ ID NO: 5151 - RNA, 21 nt, Artificial Sequence
  GATA2 Guide RNA
uugacagcuccuugaagcacu

SEQ ID NO: 5152 - RNA, 21 nt, Artificial Sequence
  GATA2 Guide RNA
uuugacagcuccuugaagcac

SEQ ID NO: 5153 - RNA, 22 nt, Artificial Sequence
  GATA2 Guide RNA
aaaggggcggagugcuucaagg

SEQ ID NO: 5154 - RNA, 22 nt, Artificial Sequence
  GATA2 Guide RNA
aagaaaggggcggagugcuuca

SEQ ID NO: 5155 - RNA, 22 nt, Artificial Sequence
  GATA2 Guide RNA
aaggggcggagugcuucaagga

SEQ ID NO: 5156 - RNA, 22 nt, Artificial Sequence
  GATA2 Guide RNA
acagcuccuugaagcacuccgc

SEQ ID NO: 5157 - RNA, 22 nt, Artificial Sequence
  GATA2 Guide RNA
acuuugacagcuccuugaagca

SEQ ID NO: 5158 - RNA, 22 nt, Artificial Sequence
  GATA2 Guide RNA
agaaaggggcggagugcuucaa

SEQ ID NO: 5159 - RNA, 22 nt, Artificial Sequence
  GATA2 Guide RNA
agcaagaaaggggcggagugcu

SEQ ID NO: 5160 - RNA, 22 nt, Artificial Sequence
  GATA2 Guide RNA
agcuccuugaagcacuccgccc

SEQ ID NO: 5161 - RNA, 22 nt, Artificial Sequence
  GATA2 Guide RNA
aggggcggagugcuucaaggag

SEQ ID NO: 5162 - RNA, 22 nt, Artificial Sequence
  GATA2 Guide RNA
agugcuucaaggagcugucaaa

SEQ ID NO: 5163 - RNA, 22 nt, Artificial Sequence
  GATA2 Guide RNA
augcacuuugacagcuccuuga

SEQ ID NO: 5164 - RNA, 22 nt, Artificial Sequence
  GATA2 Guide RNA
caagaaaggggcggagugcuuc

SEQ ID NO: 5165 - RNA, 22 nt, Artificial Sequence
  GATA2 Guide RNA
caaggagcugucaaagugcaug

SEQ ID NO: 5166 - RNA, 22 nt, Artificial Sequence
  GATA2 Guide RNA
cacuuugacagcuccuugaagc

SEQ ID NO: 5167 - RNA, 22 nt, Artificial Sequence
  GATA2 Guide RNA
cagcuccuugaagcacuccgcc

SEQ ID NO: 5168 - RNA, 22 nt, Artificial Sequence
  GATA2 Guide RNA
caugcacuuugacagcuccuug

SEQ ID NO: 5169 - RNA, 22 nt, Artificial Sequence
  GATA2 Guide RNA
ccugcaugcacuuugacagcuc

SEQ ID NO: 5170 - RNA, 22 nt, Artificial Sequence
  GATA2 Guide RNA
ccuugaagcacuccgccccuuu

SEQ ID NO: 5171 - RNA, 22 nt, Artificial Sequence
  GATA2 Guide RNA
cggagugcuucaaggagcuguc

SEQ ID NO: 5172 - RNA, 22 nt, Artificial Sequence
  GATA2 Guide RNA
cuccuugaagcacuccgccccu

SEQ ID NO: 5173 - RNA, 22 nt, Artificial Sequence
  GATA2 Guide RNA
cugcaugcacuuugacagcucc

SEQ ID NO: 5174 - RNA, 22 nt, Artificial Sequence
  GATA2 Guide RNA
cuucaaggagcugucaaagugc

SEQ ID NO: 5175 - RNA, 22 nt, Artificial Sequence
  GATA2 Guide RNA
cuugaagcacuccgccccuuuc

SEQ ID NO: 5176 - RNA, 22 nt, Artificial Sequence
  GATA2 Guide RNA
cuuugacagcuccuugaagcac

SEQ ID NO: 5177 - RNA, 22 nt, Artificial Sequence
  GATA2 Guide RNA
gaaaggggcggagugcuucaag

SEQ ID NO: 5178 - RNA, 22 nt, Artificial Sequence
  GATA2 Guide RNA
gacagcuccuugaagcacuccg

SEQ ID NO: 5179 - RNA, 22 nt, Artificial Sequence
  GATA2 Guide RNA
gagcaagaaaggggcggagugc

SEQ ID NO: 5180 - RNA, 22 nt, Artificial Sequence
  GATA2 Guide RNA
gagugcuucaaggagcugucaa

SEQ ID NO: 5181 - RNA, 22 nt, Artificial Sequence
  GATA2 Guide RNA
gcaagaaaggggcggagugcuu

SEQ ID NO: 5182 - RNA, 22 nt, Artificial Sequence
  GATA2 Guide RNA
gcacuuugacagcuccuugaag

SEQ ID NO: 5183 - RNA, 22 nt, Artificial Sequence
  GATA2 Guide RNA
gcaugcacuuugacagcuccuu

SEQ ID NO: 5184 - RNA, 22 nt, Artificial Sequence
  GATA2 Guide RNA
gcggagugcuucaaggagcugu

SEQ ID NO: 5185 - RNA, 22 nt, Artificial Sequence
  GATA2 Guide RNA
gcuccuugaagcacuccgcccc

SEQ ID NO: 5186 - RNA, 22 nt, Artificial Sequence
  GATA2 Guide RNA
gcuucaaggagcugucaaagug

SEQ ID NO: 5187 - RNA, 22 nt, Artificial Sequence
  GATA2 Guide RNA
ggagugcuucaaggagcuguca

SEQ ID NO: 5188 - RNA, 22 nt, Artificial Sequence
  GATA2 Guide RNA
ggcggagugcuucaaggagcug

SEQ ID NO: 5189 - RNA, 22 nt, Artificial Sequence
  GATA2 Guide RNA
gggcggagugcuucaaggagcu

SEQ ID NO: 5190 - RNA, 22 nt, Artificial Sequence
  GATA2 Guide RNA
ggggcggagugcuucaaggagc

SEQ ID NO: 5191 - RNA, 22 nt, Artificial Sequence
  GATA2 Guide RNA
gugcuucaaggagcugucaaag

SEQ ID NO: 5192 - RNA, 22 nt, Artificial Sequence
  GATA2 Guide RNA
ucaaggagcugucaaagugcau

SEQ ID NO: 5193 - RNA, 22 nt, Artificial Sequence
  GATA2 Guide RNA
uccuugaagcacuccgccccuu

SEQ ID NO: 5194 - RNA, 22 nt, Artificial Sequence
  GATA2 Guide RNA
ugaagcacuccgccccuuucuu

SEQ ID NO: 5195 - RNA, 22 nt, Artificial Sequence
  GATA2 Guide RNA
ugacagcuccuugaagcacucc

SEQ ID NO: 5196 - RNA, 22 nt, Artificial Sequence
  GATA2 Guide RNA
ugcacuuugacagcuccuugaa

SEQ ID NO: 5197 - RNA, 22 nt, Artificial Sequence
  GATA2 Guide RNA
ugcaugcacuuugacagcuccu

SEQ ID NO: 5198 - RNA, 22 nt, Artificial Sequence
  GATA2 Guide RNA
ugcuucaaggagcugucaaagu

SEQ ID NO: 5199 - RNA, 22 nt, Artificial Sequence
  GATA2 Guide RNA
uucaaggagcugucaaagugca

SEQ ID NO: 5200 - RNA, 22 nt, Artificial Sequence
  GATA2 Guide RNA
uugaagcacuccgccccuuucu

SEQ ID NO: 5201 - RNA, 22 nt, Artificial Sequence
  GATA2 Guide RNA
uugacagcuccuugaagcacuc

SEQ ID NO: 5202 - RNA, 22 nt, Artificial Sequence
  GATA2 Guide RNA
uuugacagcuccuugaagcacu

SEQ ID NO: 5203 - RNA, 20 nt, Artificial Sequence
  GATA2 Guide RNA
aaaggggcggagugcuugga

SEQ ID NO: 5204 - RNA, 20 nt, Artificial Sequence
  GATA2 Guide RNA
aaggggcggagugcuuggag

SEQ ID NO: 5205 - RNA, 20 nt, Artificial Sequence
  GATA2 Guide RNA
acagcuccuccaagcacucc

SEQ ID NO: 5206 - RNA, 20 nt, Artificial Sequence
  GATA2 Guide RNA
acuuugacagcuccuccaag

SEQ ID NO: 5207 - RNA, 20 nt, Artificial Sequence
  GATA2 Guide RNA
agaaaggggcggagugcuug

SEQ ID NO: 5208 - RNA, 20 nt, Artificial Sequence
  GATA2 Guide RNA
agcaagaaaggggcggagug

SEQ ID NO: 5209 - RNA, 20 nt, Artificial Sequence
  GATA2 Guide RNA
agcuccuccaagcacuccgc

SEQ ID NO: 5210 - RNA, 20 nt, Artificial Sequence
  GATA2 Guide RNA
aggggcggagugcuuggagg

SEQ ID NO: 5211 - RNA, 20 nt, Artificial Sequence
  GATA2 Guide RNA
agugcuuggaggagcuguca

SEQ ID NO: 5212 - RNA, 20 nt, Artificial Sequence
  GATA2 Guide RNA
augcacuuugacagcuccuc

SEQ ID NO: 5213 - RNA, 20 nt, Artificial Sequence
  GATA2 Guide RNA
caagcacuccgccccuuucu

SEQ ID NO: 5214 - RNA, 20 nt, Artificial Sequence
  GATA2 Guide RNA
cacuuugacagcuccuccaa

SEQ ID NO: 5215 - RNA, 20 nt, Artificial Sequence
  GATA2 Guide RNA
cagcuccuccaagcacuccg

SEQ ID NO: 5216 - RNA, 20 nt, Artificial Sequence
  GATA2 Guide RNA
ccaagcacuccgccccuuuc

SEQ ID NO: 5217 - RNA, 20 nt, Artificial Sequence
  GATA2 Guide RNA
ccuccaagcacuccgccccu

SEQ ID NO: 5218 - RNA, 20 nt, Artificial Sequence
  GATA2 Guide RNA
cggagugcuuggaggagcug

SEQ ID NO: 5219 - RNA, 20 nt, Artificial Sequence
  GATA2 Guide RNA
cuccaagcacuccgccccuu

SEQ ID NO: 5220 - RNA, 20 nt, Artificial Sequence
  GATA2 Guide RNA
cuccuccaagcacuccgccc

SEQ ID NO: 5221 - RNA, 20 nt, Artificial Sequence
  GATA2 Guide RNA
cuuggaggagcugucaaagu

SEQ ID NO: 5222 - RNA, 20 nt, Artificial Sequence
  GATA2 Guide RNA
cuuugacagcuccuccaagc

SEQ ID NO: 5223 - RNA, 20 nt, Artificial Sequence
  GATA2 Guide RNA
gaaaggggcggagugcuugg

SEQ ID NO: 5224 - RNA, 20 nt, Artificial Sequence
  GATA2 Guide RNA
gacagcuccuccaagcacuc

SEQ ID NO: 5225 - RNA, 20 nt, Artificial Sequence
  GATA2 Guide RNA
gagugcuuggaggagcuguc

SEQ ID NO: 5226 - RNA, 20 nt, Artificial Sequence
  GATA2 Guide RNA
gcacuuugacagcuccucca

SEQ ID NO: 5227 - RNA, 20 nt, Artificial Sequence
  GATA2 Guide RNA
gcggagugcuuggaggagcu

SEQ ID NO: 5228 - RNA, 20 nt, Artificial Sequence
  GATA2 Guide RNA
gcuccuccaagcacuccgcc

SEQ ID NO: 5229 - RNA, 20 nt, Artificial Sequence
  GATA2 Guide RNA
gcuuggaggagcugucaaag

SEQ ID NO: 5230 - RNA, 20 nt, Artificial Sequence
  GATA2 Guide RNA
ggagugcuuggaggagcugu

SEQ ID NO: 5231 - RNA, 20 nt, Artificial Sequence
  GATA2 Guide RNA
ggcggagugcuuggaggagc

SEQ ID NO: 5232 - RNA, 20 nt, Artificial Sequence
  GATA2 Guide RNA
gggcggagugcuuggaggag

SEQ ID NO: 5233 - RNA, 20 nt, Artificial Sequence
  GATA2 Guide RNA
ggggcggagugcuuggagga

SEQ ID NO: 5234 - RNA, 20 nt, Artificial Sequence
  GATA2 Guide RNA
gugcuuggaggagcugucaa

SEQ ID NO: 5235 - RNA, 20 nt, Artificial Sequence
  GATA2 Guide RNA
uccaagcacuccgccccuuu

SEQ ID NO: 5236 - RNA, 20 nt, Artificial Sequence
  GATA2 Guide RNA
uccuccaagcacuccgcccc

SEQ ID NO: 5237 - RNA, 20 nt, Artificial Sequence
  GATA2 Guide RNA
ugacagcuccuccaagcacu

SEQ ID NO: 5238 - RNA, 20 nt, Artificial Sequence
  GATA2 Guide RNA
ugcacuuugacagcuccucc

SEQ ID NO: 5239 - RNA, 20 nt, Artificial Sequence
  GATA2 Guide RNA
ugcuuggaggagcugucaaa

SEQ ID NO: 5240 - RNA, 20 nt, Artificial Sequence
  GATA2 Guide RNA
uggaggagcugucaaagugc

SEQ ID NO: 5241 - RNA, 20 nt, Artificial Sequence
  GATA2 Guide RNA
uugacagcuccuccaagcac

SEQ ID NO: 5242 - RNA, 20 nt, Artificial Sequence
  GATA2 Guide RNA
uuggaggagcugucaaagug

SEQ ID NO: 5243 - RNA, 20 nt, Artificial Sequence
  GATA2 Guide RNA
uuugacagcuccuccaagca

SEQ ID NO: 5244 - RNA, 21 nt, Artificial Sequence
  GATA2 Guide RNA
aaaggggcggagugcuuggag

SEQ ID NO: 5245 - RNA, 21 nt, Artificial Sequence
  GATA2 Guide RNA
aagaaaggggcggagugcuug

SEQ ID NO: 5246 - RNA, 21 nt, Artificial Sequence
  GATA2 Guide RNA
aaggggcggagugcuuggagg

SEQ ID NO: 5247 - RNA, 21 nt, Artificial Sequence
  GATA2 Guide RNA
acagcuccuccaagcacuccg

SEQ ID NO: 5248 - RNA, 21 nt, Artificial Sequence
  GATA2 Guide RNA
acuuugacagcuccuccaagc

SEQ ID NO: 5249 - RNA, 21 nt, Artificial Sequence
  GATA2 Guide RNA
agaaaggggcggagugcuugg

SEQ ID NO: 5250 - RNA, 21 nt, Artificial Sequence
  GATA2 Guide RNA
agcuccuccaagcacuccgcc

SEQ ID NO: 5251 - RNA, 21 nt, Artificial Sequence
  GATA2 Guide RNA
aggggcggagugcuuggagga

SEQ ID NO: 5252 - RNA, 21 nt, Artificial Sequence
  GATA2 Guide RNA
agugcuuggaggagcugucaa

SEQ ID NO: 5253 - RNA, 21 nt, Artificial Sequence
  GATA2 Guide RNA
augcacuuugacagcuccucc

SEQ ID NO: 5254 - RNA, 21 nt, Artificial Sequence
  GATA2 Guide RNA
caagcacuccgccccuuucuu

SEQ ID NO: 5255 - RNA, 21 nt, Artificial Sequence
  GATA2 Guide RNA
cacuuugacagcuccuccaag

SEQ ID NO: 5256 - RNA, 21 nt, Artificial Sequence
  GATA2 Guide RNA
cagcuccuccaagcacuccgc

SEQ ID NO: 5257 - RNA, 21 nt, Artificial Sequence
  GATA2 Guide RNA
caugcacuuugacagcuccuc

SEQ ID NO: 5258 - RNA, 21 nt, Artificial Sequence
  GATA2 Guide RNA
ccaagcacuccgccccuuucu

SEQ ID NO: 5259 - RNA, 21 nt, Artificial Sequence
  GATA2 Guide RNA
ccuccaagcacuccgccccuu

SEQ ID NO: 5260 - RNA, 21 nt, Artificial Sequence
  GATA2 Guide RNA
cggagugcuuggaggagcugu

SEQ ID NO: 5261 - RNA, 21 nt, Artificial Sequence
  GATA2 Guide RNA
cuccaagcacuccgccccuuu

SEQ ID NO: 5262 - RNA, 21 nt, Artificial Sequence
  GATA2 Guide RNA
cuccuccaagcacuccgcccc

SEQ ID NO: 5263 - RNA, 21 nt, Artificial Sequence
  GATA2 Guide RNA
cuuggaggagcugucaaagug

SEQ ID NO: 5264 - RNA, 21 nt, Artificial Sequence
  GATA2 Guide RNA
cuuugacagcuccuccaagca

SEQ ID NO: 5265 - RNA, 21 nt, Artificial Sequence
  GATA2 Guide RNA
gaaaggggcggagugcuugga

SEQ ID NO: 5266 - RNA, 21 nt, Artificial Sequence
  GATA2 Guide RNA
gacagcuccuccaagcacucc

SEQ ID NO: 5267 - RNA, 21 nt, Artificial Sequence
  GATA2 Guide RNA
gagcaagaaaggggcggagug

SEQ ID NO: 5268 - RNA, 21 nt, Artificial Sequence
  GATA2 Guide RNA
gagugcuuggaggagcuguca

SEQ ID NO: 5269 - RNA, 21 nt, Artificial Sequence
  GATA2 Guide RNA
gcacuuugacagcuccuccaa

SEQ ID NO: 5270 - RNA, 21 nt, Artificial Sequence
  GATA2 Guide RNA
gcggagugcuuggaggagcug

SEQ ID NO: 5271 - RNA, 21 nt, Artificial Sequence
  GATA2 Guide RNA
gcuccuccaagcacuccgccc

SEQ ID NO: 5272 - RNA, 21 nt, Artificial Sequence
  GATA2 Guide RNA
gcuuggaggagcugucaaagu

SEQ ID NO: 5273 - RNA, 21 nt, Artificial Sequence
  GATA2 Guide RNA
ggagugcuuggaggagcuguc

SEQ ID NO: 5274 - RNA, 21 nt, Artificial Sequence
  GATA2 Guide RNA
ggcggagugcuuggaggagcu

SEQ ID NO: 5275 - RNA, 21 nt, Artificial Sequence
  GATA2 Guide RNA
gggcggagugcuuggaggagc

SEQ ID NO: 5276 - RNA, 21 nt, Artificial Sequence
  GATA2 Guide RNA
ggggcggagugcuuggaggag

SEQ ID NO: 5277 - RNA, 21 nt, Artificial Sequence
  GATA2 Guide RNA
gugcuuggaggagcugucaaa

SEQ ID NO: 5278 - RNA, 21 nt, Artificial Sequence
  GATA2 Guide RNA
uccaagcacuccgccccuuuc

SEQ ID NO: 5279 - RNA, 21 nt, Artificial Sequence
  GATA2 Guide RNA
uccuccaagcacuccgccccu

SEQ ID NO: 5280 - RNA, 21 nt, Artificial Sequence
  GATA2 Guide RNA
ugacagcuccuccaagcacuc

SEQ ID NO: 5281 - RNA, 21 nt, Artificial Sequence
  GATA2 Guide RNA
ugcacuuugacagcuccucca

SEQ ID NO: 5282 - RNA, 21 nt, Artificial Sequence
  GATA2 Guide RNA
ugcuuggaggagcugucaaag

SEQ ID NO: 5283 - RNA, 21 nt, Artificial Sequence
  GATA2 Guide RNA
uggaggagcugucaaagugca

SEQ ID NO: 5284 - RNA, 21 nt, Artificial Sequence
  GATA2 Guide RNA
uugacagcuccuccaagcacu

SEQ ID NO: 5285 - RNA, 21 nt, Artificial Sequence
  GATA2 Guide RNA
uuggaggagcugucaaagugc

SEQ ID NO: 5286 - RNA, 21 nt, Artificial Sequence
  GATA2 Guide RNA
uuugacagcuccuccaagcac

SEQ ID NO: 5287 - RNA, 22 nt, Artificial Sequence
  GATA2 Guide RNA
aaaggggcggagugcuuggagg

SEQ ID NO: 5288 - RNA, 22 nt, Artificial Sequence
  GATA2 Guide RNA
aagaaaggggcggagugcuugg

SEQ ID NO: 5289 - RNA, 22 nt, Artificial Sequence
  GATA2 Guide RNA
aaggggcggagugcuuggagga

SEQ ID NO: 5290 - RNA, 22 nt, Artificial Sequence
  GATA2 Guide RNA
acagcuccuccaagcacuccgc

SEQ ID NO: 5291 - RNA, 22 nt, Artificial Sequence
  GATA2 Guide RNA
acuuugacagcuccuccaagca

SEQ ID NO: 5292 - RNA, 22 nt, Artificial Sequence
  GATA2 Guide RNA
agaaaggggcggagugcuugga

SEQ ID NO: 5293 - RNA, 22 nt, Artificial Sequence
  GATA2 Guide RNA
agagcaagaaaggggcggagug

SEQ ID NO: 5294 - RNA, 22 nt, Artificial Sequence
  GATA2 Guide RNA
agcuccuccaagcacuccgccc

SEQ ID NO: 5295 - RNA, 22 nt, Artificial Sequence
  GATA2 Guide RNA
aggggcggagugcuuggaggag

SEQ ID NO: 5296 - RNA, 22 nt, Artificial Sequence
  GATA2 Guide RNA
agugcuuggaggagcugucaaa

SEQ ID NO: 5297 - RNA, 22 nt, Artificial Sequence
  GATA2 Guide RNA
augcacuuugacagcuccucca

SEQ ID NO: 5298 - RNA, 22 nt, Artificial Sequence
  GATA2 Guide RNA
caagaaaggggcggagugcuug

SEQ ID NO: 5299 - RNA, 22 nt, Artificial Sequence
  GATA2 Guide RNA
caagcacuccgccccuuucuug

SEQ ID NO: 5300 - RNA, 22 nt, Artificial Sequence
  GATA2 Guide RNA
cacuuugacagcuccuccaagc

SEQ ID NO: 5301 - RNA, 22 nt, Artificial Sequence
  GATA2 Guide RNA
cagcuccuccaagcacuccgcc

SEQ ID NO: 5302 - RNA, 22 nt, Artificial Sequence
  GATA2 Guide RNA
caugcacuuugacagcuccucc

SEQ ID NO: 5303 - RNA, 22 nt, Artificial Sequence
  GATA2 Guide RNA
ccaagcacuccgccccuuucuu

SEQ ID NO: 5304 - RNA, 22 nt, Artificial Sequence
  GATA2 Guide RNA
ccuccaagcacuccgccccuuu

SEQ ID NO: 5305 - RNA, 22 nt, Artificial Sequence
  GATA2 Guide RNA
cggagugcuuggaggagcuguc

SEQ ID NO: 5306 - RNA, 22 nt, Artificial Sequence
  GATA2 Guide RNA
cuccaagcacuccgccccuuuc

SEQ ID NO: 5307 - RNA, 22 nt, Artificial Sequence
  GATA2 Guide RNA
cuccuccaagcacuccgccccu

SEQ ID NO: 5308 - RNA, 22 nt, Artificial Sequence
  GATA2 Guide RNA
cuuggaggagcugucaaagugc

SEQ ID NO: 5309 - RNA, 22 nt, Artificial Sequence
  GATA2 Guide RNA
cuuugacagcuccuccaagcac

SEQ ID NO: 5310 - RNA, 22 nt, Artificial Sequence
  GATA2 Guide RNA
gaaaggggcggagugcuuggag

SEQ ID NO: 5311 - RNA, 22 nt, Artificial Sequence
  GATA2 Guide RNA
gacagcuccuccaagcacuccg

SEQ ID NO: 5312 - RNA, 22 nt, Artificial Sequence
  GATA2 Guide RNA
gagugcuuggaggagcugucaa

SEQ ID NO: 5313 - RNA, 22 nt, Artificial Sequence
  GATA2 Guide RNA
gcacuuugacagcuccuccaag

SEQ ID NO: 5314 - RNA, 22 nt, Artificial Sequence
  GATA2 Guide RNA
gcaugcacuuugacagcuccuc

SEQ ID NO: 5315 - RNA, 22 nt, Artificial Sequence
  GATA2 Guide RNA
gcggagugcuuggaggagcugu

SEQ ID NO: 5316 - RNA, 22 nt, Artificial Sequence
  GATA2 Guide RNA
gcuccuccaagcacuccgcccc

SEQ ID NO: 5317 - RNA, 22 nt, Artificial Sequence
  GATA2 Guide RNA
gcuuggaggagcugucaaagug

SEQ ID NO: 5318 - RNA, 22 nt, Artificial Sequence
  GATA2 Guide RNA
ggagugcuuggaggagcuguca

SEQ ID NO: 5319 - RNA, 22 nt, Artificial Sequence
  GATA2 Guide RNA
ggcggagugcuuggaggagcug

SEQ ID NO: 5320 - RNA, 22 nt, Artificial Sequence
  GATA2 Guide RNA
gggcggagugcuuggaggagcu

SEQ ID NO: 5321 - RNA, 22 nt, Artificial Sequence
  GATA2 Guide RNA
ggggcggagugcuuggaggagc

SEQ ID NO: 5322 - RNA, 22 nt, Artificial Sequence
  GATA2 Guide RNA
gugcuuggaggagcugucaaag

SEQ ID NO: 5323 - RNA, 22 nt, Artificial Sequence
  GATA2 Guide RNA
uccaagcacuccgccccuuucu

SEQ ID NO: 5324 - RNA, 22 nt, Artificial Sequence
  GATA2 Guide RNA
uccuccaagcacuccgccccuu

SEQ ID NO: 5325 - RNA, 22 nt, Artificial Sequence
  GATA2 Guide RNA
ugacagcuccuccaagcacucc

SEQ ID NO: 5326 - RNA, 22 nt, Artificial Sequence
  GATA2 Guide RNA
ugcacuuugacagcuccuccaa

SEQ ID NO: 5327 - RNA, 22 nt, Artificial Sequence
  GATA2 Guide RNA
ugcuuggaggagcugucaaagu

SEQ ID NO: 5328 - RNA, 22 nt, Artificial Sequence
  GATA2 Guide RNA
uggaggagcugucaaagugcau

SEQ ID NO: 5329 - RNA, 22 nt, Artificial Sequence
  GATA2 Guide RNA
uugacagcuccuccaagcacuc

SEQ ID NO: 5330 - RNA, 22 nt, Artificial Sequence
  GATA2 Guide RNA
uuggaggagcugucaaagugca

SEQ ID NO: 5331 - RNA, 22 nt, Artificial Sequence
  GATA2 Guide RNA
uuugacagcuccuccaagcacu

SEQ ID NO: 5332 - RNA, 20 nt, Artificial Sequence
  GATA2 Guide RNA
aaaggggcggaguacuucga

SEQ ID NO: 5333 - RNA, 20 nt, Artificial Sequence
  GATA2 Guide RNA
aagaaaggggcggaguacuu

SEQ ID NO: 5334 - RNA, 20 nt, Artificial Sequence
  GATA2 Guide RNA
aagagcaagaaaggggcgga

SEQ ID NO: 5335 - RNA, 20 nt, Artificial Sequence
  GATA2 Guide RNA
aaggggcggaguacuucgag

SEQ ID NO: 5336 - RNA, 20 nt, Artificial Sequence
  GATA2 Guide RNA
aaguacuccgccccuuucuu

SEQ ID NO: 5337 - RNA, 20 nt, Artificial Sequence
  GATA2 Guide RNA
acagcuccucgaaguacucc

SEQ ID NO: 5338 - RNA, 20 nt, Artificial Sequence
  GATA2 Guide RNA
acuuugacagcuccucgaag

SEQ ID NO: 5339 - RNA, 20 nt, Artificial Sequence
  GATA2 Guide RNA
agaaaggggcggaguacuuc

SEQ ID NO: 5340 - RNA, 20 nt, Artificial Sequence
  GATA2 Guide RNA
agagcaagaaaggggcggag

SEQ ID NO: 5341 - RNA, 20 nt, Artificial Sequence
  GATA2 Guide RNA
agcaagaaaggggcggagua

SEQ ID NO: 5342 - RNA, 20 nt, Artificial Sequence
  GATA2 Guide RNA
agcuccucgaaguacuccgc

SEQ ID NO: 5343 - RNA, 20 nt, Artificial Sequence
  GATA2 Guide RNA
aggggcggaguacuucgagg

SEQ ID NO: 5344 - RNA, 20 nt, Artificial Sequence
  GATA2 Guide RNA
aguacuccgccccuuucuug

SEQ ID NO: 5345 - RNA, 20 nt, Artificial Sequence
  GATA2 Guide RNA
aguacuucgaggagcuguca

SEQ ID NO: 5346 - RNA, 20 nt, Artificial Sequence
  GATA2 Guide RNA
caagaaaggggcggaguacu

SEQ ID NO: 5347 - RNA, 20 nt, Artificial Sequence
  GATA2 Guide RNA
cacuuugacagcuccucgaa

SEQ ID NO: 5348 - RNA, 20 nt, Artificial Sequence
  GATA2 Guide RNA
cagcuccucgaaguacuccg

SEQ ID NO: 5349 - RNA, 20 nt, Artificial Sequence
  GATA2 Guide RNA
ccucgaaguacuccgccccu

SEQ ID NO: 5350 - RNA, 20 nt, Artificial Sequence
  GATA2 Guide RNA
cgaaguacuccgccccuuuc

SEQ ID NO: 5351 - RNA, 20 nt, Artificial Sequence
  GATA2 Guide RNA
cggaguacuucgaggagcug

SEQ ID NO: 5352 - RNA, 20 nt, Artificial Sequence
  GATA2 Guide RNA
cuccucgaaguacuccgccc

SEQ ID NO: 5353 - RNA, 20 nt, Artificial Sequence
  GATA2 Guide RNA
cucgaaguacuccgccccuu

SEQ ID NO: 5354 - RNA, 20 nt, Artificial Sequence
  GATA2 Guide RNA
cuuugacagcuccucgaagu

SEQ ID NO: 5355 - RNA, 20 nt, Artificial Sequence
  GATA2 Guide RNA
gaaaggggcggaguacuucg

SEQ ID NO: 5356 - RNA, 20 nt, Artificial Sequence
  GATA2 Guide RNA
gaagagcaagaaaggggcgg

SEQ ID NO: 5357 - RNA, 20 nt, Artificial Sequence
  GATA2 Guide RNA
gaaguacuccgccccuuucu

SEQ ID NO: 5358 - RNA, 20 nt, Artificial Sequence
  GATA2 Guide RNA
gacagcuccucgaaguacuc

SEQ ID NO: 5359 - RNA, 20 nt, Artificial Sequence
  GATA2 Guide RNA
gagcaagaaaggggcggagu

SEQ ID NO: 5360 - RNA, 20 nt, Artificial Sequence
  GATA2 Guide RNA
gaguacuucgaggagcuguc

SEQ ID NO: 5361 - RNA, 20 nt, Artificial Sequence
  GATA2 Guide RNA
gcaagaaaggggcggaguac

SEQ ID NO: 5362 - RNA, 20 nt, Artificial Sequence
  GATA2 Guide RNA
gcacuuugacagcuccucga

SEQ ID NO: 5363 - RNA, 20 nt, Artificial Sequence
  GATA2 Guide RNA
gcggaguacuucgaggagcu

SEQ ID NO: 5364 - RNA, 20 nt, Artificial Sequence
  GATA2 Guide RNA
gcuccucgaaguacuccgcc

SEQ ID NO: 5365 - RNA, 20 nt, Artificial Sequence
  GATA2 Guide RNA
ggaguacuucgaggagcugu

SEQ ID NO: 5366 - RNA, 20 nt, Artificial Sequence
  GATA2 Guide RNA
ggcggaguacuucgaggagc

SEQ ID NO: 5367 - RNA, 20 nt, Artificial Sequence
  GATA2 Guide RNA
gggcggaguacuucgaggag

SEQ ID NO: 5368 - RNA, 20 nt, Artificial Sequence
  GATA2 Guide RNA
ggggcggaguacuucgagga

SEQ ID NO: 5369 - RNA, 20 nt, Artificial Sequence
  GATA2 Guide RNA
guacuccgccccuuucuugc

SEQ ID NO: 5370 - RNA, 20 nt, Artificial Sequence
  GATA2 Guide RNA
guacuucgaggagcugucaa

SEQ ID NO: 5371 - RNA, 20 nt, Artificial Sequence
  GATA2 Guide RNA
uacuccgccccuuucuugcu

SEQ ID NO: 5372 - RNA, 20 nt, Artificial Sequence
  GATA2 Guide RNA
uacuucgaggagcugucaaa

SEQ ID NO: 5373 - RNA, 20 nt, Artificial Sequence
  GATA2 Guide RNA
uccucgaaguacuccgcccc

SEQ ID NO: 5374 - RNA, 20 nt, Artificial Sequence
  GATA2 Guide RNA
ucgaaguacuccgccccuuu

SEQ ID NO: 5375 - RNA, 20 nt, Artificial Sequence
  GATA2 Guide RNA
ugacagcuccucgaaguacu

SEQ ID NO: 5376 - RNA, 20 nt, Artificial Sequence
  GATA2 Guide RNA
uugacagcuccucgaaguac

SEQ ID NO: 5377 - RNA, 20 nt, Artificial Sequence
  GATA2 Guide RNA
uuugacagcuccucgaagua

SEQ ID NO: 5378 - RNA, 21 nt, Artificial Sequence
  GATA2 Guide RNA
aaaggggcggaguacuucgag

SEQ ID NO: 5379 - RNA, 21 nt, Artificial Sequence
  GATA2 Guide RNA
aagaaaggggcggaguacuuc

SEQ ID NO: 5380 - RNA, 21 nt, Artificial Sequence
  GATA2 Guide RNA
aagagcaagaaaggggcggag

SEQ ID NO: 5381 - RNA, 21 nt, Artificial Sequence
  GATA2 Guide RNA
aaggggcggaguacuucgagg

SEQ ID NO: 5382 - RNA, 21 nt, Artificial Sequence
  GATA2 Guide RNA
aaguacuccgccccuuucuug

SEQ ID NO: 5383 - RNA, 21 nt, Artificial Sequence
  GATA2 Guide RNA
acagcuccucgaaguacuccg

SEQ ID NO: 5384 - RNA, 21 nt, Artificial Sequence
  GATA2 Guide RNA
acuuugacagcuccucgaagu

SEQ ID NO: 5385 - RNA, 21 nt, Artificial Sequence
  GATA2 Guide RNA
agaaaggggcggaguacuucg

SEQ ID NO: 5386 - RNA, 21 nt, Artificial Sequence
  GATA2 Guide RNA
agaagagcaagaaaggggcgg

SEQ ID NO: 5387 - RNA, 21 nt, Artificial Sequence
  GATA2 Guide RNA
agagcaagaaaggggcggagu

SEQ ID NO: 5388 - RNA, 21 nt, Artificial Sequence
  GATA2 Guide RNA
agcaagaaaggggcggaguac

SEQ ID NO: 5389 - RNA, 21 nt, Artificial Sequence
  GATA2 Guide RNA
agcuccucgaaguacuccgcc

SEQ ID NO: 5390 - RNA, 21 nt, Artificial Sequence
  GATA2 Guide RNA
aggggcggaguacuucgagga

SEQ ID NO: 5391 - RNA, 21 nt, Artificial Sequence
  GATA2 Guide RNA
aguacuccgccccuuucuugc

SEQ ID NO: 5392 - RNA, 21 nt, Artificial Sequence
  GATA2 Guide RNA
aguacuucgaggagcugucaa

SEQ ID NO: 5393 - RNA, 21 nt, Artificial Sequence
  GATA2 Guide RNA
caagaaaggggcggaguacuu

SEQ ID NO: 5394 - RNA, 21 nt, Artificial Sequence
  GATA2 Guide RNA
cacuuugacagcuccucgaag

SEQ ID NO: 5395 - RNA, 21 nt, Artificial Sequence
  GATA2 Guide RNA
cagcuccucgaaguacuccgc

SEQ ID NO: 5396 - RNA, 21 nt, Artificial Sequence
  GATA2 Guide RNA
ccucgaaguacuccgccccuu

SEQ ID NO: 5397 - RNA, 21 nt, Artificial Sequence
  GATA2 Guide RNA
cgaaguacuccgccccuuucu

SEQ ID NO: 5398 - RNA, 21 nt, Artificial Sequence
  GATA2 Guide RNA
cggaguacuucgaggagcugu

SEQ ID NO: 5399 - RNA, 21 nt, Artificial Sequence
  GATA2 Guide RNA
cuccucgaaguacuccgcccc

SEQ ID NO: 5400 - RNA, 21 nt, Artificial Sequence
  GATA2 Guide RNA
cucgaaguacuccgccccuuu

SEQ ID NO: 5401 - RNA, 21 nt, Artificial Sequence
  GATA2 Guide RNA
cuuugacagcuccucgaagua

SEQ ID NO: 5402 - RNA, 21 nt, Artificial Sequence
  GATA2 Guide RNA
gaaaggggcggaguacuucga

SEQ ID NO: 5403 - RNA, 21 nt, Artificial Sequence
  GATA2 Guide RNA
gaagagcaagaaaggggcgga

SEQ ID NO: 5404 - RNA, 21 nt, Artificial Sequence
  GATA2 Guide RNA
gaaguacuccgccccuuucuu

SEQ ID NO: 5405 - RNA, 21 nt, Artificial Sequence
  GATA2 Guide RNA
gacagcuccucgaaguacucc

SEQ ID NO: 5406 - RNA, 21 nt, Artificial Sequence
  GATA2 Guide RNA
gagcaagaaaggggcggagua

SEQ ID NO: 5407 - RNA, 21 nt, Artificial Sequence
  GATA2 Guide RNA
gaguacuucgaggagcuguca

SEQ ID NO: 5408 - RNA, 21 nt, Artificial Sequence
  GATA2 Guide RNA
gcaagaaaggggcggaguacu

SEQ ID NO: 5409 - RNA, 21 nt, Artificial Sequence
  GATA2 Guide RNA
gcacuuugacagcuccucgaa

SEQ ID NO: 5410 - RNA, 21 nt, Artificial Sequence
  GATA2 Guide RNA
gcggaguacuucgaggagcug

SEQ ID NO: 5411 - RNA, 21 nt, Artificial Sequence
  GATA2 Guide RNA
gcuccucgaaguacuccgccc

SEQ ID NO: 5412 - RNA, 21 nt, Artificial Sequence
  GATA2 Guide RNA
ggaguacuucgaggagcuguc

SEQ ID NO: 5413 - RNA, 21 nt, Artificial Sequence
  GATA2 Guide RNA
ggcggaguacuucgaggagcu

SEQ ID NO: 5414 - RNA, 21 nt, Artificial Sequence
  GATA2 Guide RNA
gggcggaguacuucgaggagc

SEQ ID NO: 5415 - RNA, 21 nt, Artificial Sequence
  GATA2 Guide RNA
ggggcggaguacuucgaggag

SEQ ID NO: 5416 - RNA, 21 nt, Artificial Sequence
  GATA2 Guide RNA
guacuccgccccuuucuugcu

SEQ ID NO: 5417 - RNA, 21 nt, Artificial Sequence
  GATA2 Guide RNA
guacuucgaggagcugucaaa

SEQ ID NO: 5418 - RNA, 21 nt, Artificial Sequence
  GATA2 Guide RNA
uacuccgccccuuucuugcuc

SEQ ID NO: 5419 - RNA, 21 nt, Artificial Sequence
  GATA2 Guide RNA
uacuucgaggagcugucaaag

SEQ ID NO: 5420 - RNA, 21 nt, Artificial Sequence
  GATA2 Guide RNA
uccucgaaguacuccgccccu

SEQ ID NO: 5421 - RNA, 21 nt, Artificial Sequence
  GATA2 Guide RNA
ucgaaguacuccgccccuuuc

SEQ ID NO: 5422 - RNA, 21 nt, Artificial Sequence
  GATA2 Guide RNA
ugacagcuccucgaaguacuc

SEQ ID NO: 5423 - RNA, 21 nt, Artificial Sequence
  GATA2 Guide RNA
ugcacuuugacagcuccucga

SEQ ID NO: 5424 - RNA, 21 nt, Artificial Sequence
  GATA2 Guide RNA
uugacagcuccucgaaguacu

SEQ ID NO: 5425 - RNA, 21 nt, Artificial Sequence
  GATA2 Guide RNA
uuugacagcuccucgaaguac

SEQ ID NO: 5426 - RNA, 22 nt, Artificial Sequence
  GATA2 Guide RNA
aaaggggcggaguacuucgagg

SEQ ID NO: 5427 - RNA, 22 nt, Artificial Sequence
  GATA2 Guide RNA
aagaaaggggcggaguacuucg

SEQ ID NO: 5428 - RNA, 22 nt, Artificial Sequence
  GATA2 Guide RNA
aagaagagcaagaaaggggcgg

SEQ ID NO: 5429 - RNA, 22 nt, Artificial Sequence
  GATA2 Guide RNA
aagagcaagaaaggggcggagu

SEQ ID NO: 5430 - RNA, 22 nt, Artificial Sequence
  GATA2 Guide RNA
aaggggcggaguacuucgagga

SEQ ID NO: 5431 - RNA, 22 nt, Artificial Sequence
  GATA2 Guide RNA
aaguacuccgccccuuucuugc

SEQ ID NO: 5432 - RNA, 22 nt, Artificial Sequence
  GATA2 Guide RNA
acagcuccucgaaguacuccgc

SEQ ID NO: 5433 - RNA, 22 nt, Artificial Sequence
  GATA2 Guide RNA
acuuugacagcuccucgaagua

SEQ ID NO: 5434 - RNA, 22 nt, Artificial Sequence
  GATA2 Guide RNA
agaaaggggcggaguacuucga

SEQ ID NO: 5435 - RNA, 22 nt, Artificial Sequence
  GATA2 Guide RNA
agaagagcaagaaaggggcgga

SEQ ID NO: 5436 - RNA, 22 nt, Artificial Sequence
  GATA2 Guide RNA
agagcaagaaaggggcggagua

SEQ ID NO: 5437 - RNA, 22 nt, Artificial Sequence
  GATA2 Guide RNA
agcaagaaaggggcggaguacu

SEQ ID NO: 5438 - RNA, 22 nt, Artificial Sequence
  GATA2 Guide RNA
agcuccucgaaguacuccgccc

SEQ ID NO: 5439 - RNA, 22 nt, Artificial Sequence
  GATA2 Guide RNA
aggggcggaguacuucgaggag

SEQ ID NO: 5440 - RNA, 22 nt, Artificial Sequence
  GATA2 Guide RNA
aguacuccgccccuuucuugcu

SEQ ID NO: 5441 - RNA, 22 nt, Artificial Sequence
  GATA2 Guide RNA
aguacuucgaggagcugucaaa

SEQ ID NO: 5442 - RNA, 22 nt, Artificial Sequence
  GATA2 Guide RNA
augcacuuugacagcuccucga

SEQ ID NO: 5443 - RNA, 22 nt, Artificial Sequence
  GATA2 Guide RNA
caagaaaggggcggaguacuuc

SEQ ID NO: 5444 - RNA, 22 nt, Artificial Sequence
  GATA2 Guide RNA
cacuuugacagcuccucgaagu

SEQ ID NO: 5445 - RNA, 22 nt, Artificial Sequence
  GATA2 Guide RNA
cagcuccucgaaguacuccgcc

SEQ ID NO: 5446 - RNA, 22 nt, Artificial Sequence
  GATA2 Guide RNA
ccucgaaguacuccgccccuuu

SEQ ID NO: 5447 - RNA, 22 nt, Artificial Sequence
  GATA2 Guide RNA
cgaaguacuccgccccuuucuu

SEQ ID NO: 5448 - RNA, 22 nt, Artificial Sequence
  GATA2 Guide RNA
cggaguacuucgaggagcuguc

SEQ ID NO: 5449 - RNA, 22 nt, Artificial Sequence
  GATA2 Guide RNA
cuccucgaaguacuccgccccu

SEQ ID NO: 5450 - RNA, 22 nt, Artificial Sequence
  GATA2 Guide RNA
cucgaaguacuccgccccuuuc

SEQ ID NO: 5451 - RNA, 22 nt, Artificial Sequence
  GATA2 Guide RNA
cuuugacagcuccucgaaguac

SEQ ID NO: 5452 - RNA, 22 nt, Artificial Sequence
  GATA2 Guide RNA
gaaaggggcggaguacuucgag

SEQ ID NO: 5453 - RNA, 22 nt, Artificial Sequence
  GATA2 Guide RNA
gaagagcaagaaaggggcggag

SEQ ID NO: 5454 - RNA, 22 nt, Artificial Sequence
  GATA2 Guide RNA
gaaguacuccgccccuuucuug

SEQ ID NO: 5455 - RNA, 22 nt, Artificial Sequence
  GATA2 Guide RNA
gacagcuccucgaaguacuccg

SEQ ID NO: 5456 - RNA, 22 nt, Artificial Sequence
  GATA2 Guide RNA
gagcaagaaaggggcggaguac

SEQ ID NO: 5457 - RNA, 22 nt, Artificial Sequence
  GATA2 Guide RNA
gaguacuucgaggagcugucaa

SEQ ID NO: 5458 - RNA, 22 nt, Artificial Sequence
  GATA2 Guide RNA
gcaagaaaggggcggaguacuu

SEQ ID NO: 5459 - RNA, 22 nt, Artificial Sequence
  GATA2 Guide RNA
gcacuuugacagcuccucgaag

SEQ ID NO: 5460 - RNA, 22 nt, Artificial Sequence
  GATA2 Guide RNA
gcggaguacuucgaggagcugu

SEQ ID NO: 5461 - RNA, 22 nt, Artificial Sequence
  GATA2 Guide RNA
gcuccucgaaguacuccgcccc

SEQ ID NO: 5462 - RNA, 22 nt, Artificial Sequence
  GATA2 Guide RNA
ggaguacuucgaggagcuguca

SEQ ID NO: 5463 - RNA, 22 nt, Artificial Sequence
  GATA2 Guide RNA
ggcggaguacuucgaggagcug

SEQ ID NO: 5464 - RNA, 22 nt, Artificial Sequence
  GATA2 Guide RNA
gggcggaguacuucgaggagcu

SEQ ID NO: 5465 - RNA, 22 nt, Artificial Sequence
  GATA2 Guide RNA
ggggcggaguacuucgaggagc

SEQ ID NO: 5466 - RNA, 22 nt, Artificial Sequence
  GATA2 Guide RNA
guacuccgccccuuucuugcuc

SEQ ID NO: 5467 - RNA, 22 nt, Artificial Sequence
  GATA2 Guide RNA
guacuucgaggagcugucaaag

SEQ ID NO: 5468 - RNA, 22 nt, Artificial Sequence
  GATA2 Guide RNA
uacuccgccccuuucuugcucu

SEQ ID NO: 5469 - RNA, 22 nt, Artificial Sequence
  GATA2 Guide RNA
uacuucgaggagcugucaaagu

SEQ ID NO: 5470 - RNA, 22 nt, Artificial Sequence
  GATA2 Guide RNA
uccucgaaguacuccgccccuu

SEQ ID NO: 5471 - RNA, 22 nt, Artificial Sequence
  GATA2 Guide RNA
ucgaaguacuccgccccuuucu

SEQ ID NO: 5472 - RNA, 22 nt, Artificial Sequence
  GATA2 Guide RNA
ugacagcuccucgaaguacucc

SEQ ID NO: 5473 - RNA, 22 nt, Artificial Sequence
  GATA2 Guide RNA
ugcacuuugacagcuccucgaa

SEQ ID NO: 5474 - RNA, 22 nt, Artificial Sequence
  GATA2 Guide RNA
uugacagcuccucgaaguacuc

SEQ ID NO: 5475 - RNA, 22 nt, Artificial Sequence
  GATA2 Guide RNA
uuugacagcuccucgaaguacu

SEQ ID NO: 5476 - RNA, 20 nt, Artificial Sequence
  GATA2 Guide RNA
aaaggggcggauugcuucga

SEQ ID NO: 5477 - RNA, 20 nt, Artificial Sequence
  GATA2 Guide RNA
aagaaaggggcggauugcuu

SEQ ID NO: 5478 - RNA, 20 nt, Artificial Sequence
  GATA2 Guide RNA
aagaagagcaagaaaggggc

SEQ ID NO: 5479 - RNA, 20 nt, Artificial Sequence
  GATA2 Guide RNA
aagcaauccgccccuuucuu

SEQ ID NO: 5480 - RNA, 20 nt, Artificial Sequence
  GATA2 Guide RNA
aaggggcggauugcuucgag

SEQ ID NO: 5481 - RNA, 20 nt, Artificial Sequence
  GATA2 Guide RNA
aauccgccccuuucuugcuc

SEQ ID NO: 5482 - RNA, 20 nt, Artificial Sequence
  GATA2 Guide RNA
acagcuccucgaagcaaucc

SEQ ID NO: 5483 - RNA, 20 nt, Artificial Sequence
  GATA2 Guide RNA
agaaaggggcggauugcuuc

SEQ ID NO: 5484 - RNA, 20 nt, Artificial Sequence
  GATA2 Guide RNA
agaagagcaagaaaggggcg

SEQ ID NO: 5485 - RNA, 20 nt, Artificial Sequence
  GATA2 Guide RNA
agagcaagaaaggggcggau

SEQ ID NO: 5486 - RNA, 20 nt, Artificial Sequence
  GATA2 Guide RNA
agcaagaaaggggcggauug

SEQ ID NO: 5487 - RNA, 20 nt, Artificial Sequence
  GATA2 Guide RNA
agcaauccgccccuuucuug

SEQ ID NO: 5488 - RNA, 20 nt, Artificial Sequence
  GATA2 Guide RNA
agcuccucgaagcaauccgc

SEQ ID NO: 5489 - RNA, 20 nt, Artificial Sequence
  GATA2 Guide RNA
aggggcggauugcuucgagg

SEQ ID NO: 5490 - RNA, 20 nt, Artificial Sequence
  GATA2 Guide RNA
auccgccccuuucuugcucu

SEQ ID NO: 5491 - RNA, 20 nt, Artificial Sequence
  GATA2 Guide RNA
auugcuucgaggagcuguca

SEQ ID NO: 5492 - RNA, 20 nt, Artificial Sequence
  GATA2 Guide RNA
caagaaaggggcggauugcu

SEQ ID NO: 5493 - RNA, 20 nt, Artificial Sequence
  GATA2 Guide RNA
caauccgccccuuucuugcu

SEQ ID NO: 5494 - RNA, 20 nt, Artificial Sequence
  GATA2 Guide RNA
cagcuccucgaagcaauccg

SEQ ID NO: 5495 - RNA, 20 nt, Artificial Sequence
  GATA2 Guide RNA
ccucgaagcaauccgccccu

SEQ ID NO: 5496 - RNA, 20 nt, Artificial Sequence
  GATA2 Guide RNA
cgaagcaauccgccccuuuc

SEQ ID NO: 5497 - RNA, 20 nt, Artificial Sequence
  GATA2 Guide RNA
cggauugcuucgaggagcug

SEQ ID NO: 5498 - RNA, 20 nt, Artificial Sequence
  GATA2 Guide RNA
cuccucgaagcaauccgccc

SEQ ID NO: 5499 - RNA, 20 nt, Artificial Sequence
  GATA2 Guide RNA
cucgaagcaauccgccccuu

SEQ ID NO: 5500 - RNA, 20 nt, Artificial Sequence
  GATA2 Guide RNA
cuuugacagcuccucgaagc

SEQ ID NO: 5501 - RNA, 20 nt, Artificial Sequence
  GATA2 Guide RNA
gaaaggggcggauugcuucg

SEQ ID NO: 5502 - RNA, 20 nt, Artificial Sequence
  GATA2 Guide RNA
gaagcaauccgccccuuucu

SEQ ID NO: 5503 - RNA, 20 nt, Artificial Sequence
  GATA2 Guide RNA
gacagcuccucgaagcaauc

SEQ ID NO: 5504 - RNA, 20 nt, Artificial Sequence
  GATA2 Guide RNA
gagcaagaaaggggcggauu

SEQ ID NO: 5505 - RNA, 20 nt, Artificial Sequence
  GATA2 Guide RNA
gauugcuucgaggagcuguc

SEQ ID NO: 5506 - RNA, 20 nt, Artificial Sequence
  GATA2 Guide RNA
gcaagaaaggggcggauugc

SEQ ID NO: 5507 - RNA, 20 nt, Artificial Sequence
  GATA2 Guide RNA
gcaauccgccccuuucuugc

SEQ ID NO: 5508 - RNA, 20 nt, Artificial Sequence
  GATA2 Guide RNA
gcggauugcuucgaggagcu

SEQ ID NO: 5509 - RNA, 20 nt, Artificial Sequence
  GATA2 Guide RNA
gcuccucgaagcaauccgcc

SEQ ID NO: 5510 - RNA, 20 nt, Artificial Sequence
  GATA2 Guide RNA
ggauugcuucgaggagcugu

SEQ ID NO: 5511 - RNA, 20 nt, Artificial Sequence
  GATA2 Guide RNA
ggcggauugcuucgaggagc

SEQ ID NO: 5512 - RNA, 20 nt, Artificial Sequence
  GATA2 Guide RNA
gggcggauugcuucgaggag

SEQ ID NO: 5513 - RNA, 20 nt, Artificial Sequence
  GATA2 Guide RNA
ggggcggauugcuucgagga

SEQ ID NO: 5514 - RNA, 20 nt, Artificial Sequence
  GATA2 Guide RNA
uccucgaagcaauccgcccc

SEQ ID NO: 5515 - RNA, 20 nt, Artificial Sequence
  GATA2 Guide RNA
ucgaagcaauccgccccuuu

SEQ ID NO: 5516 - RNA, 20 nt, Artificial Sequence
  GATA2 Guide RNA
ugacagcuccucgaagcaau

SEQ ID NO: 5517 - RNA, 20 nt, Artificial Sequence
  GATA2 Guide RNA
uugacagcuccucgaagcaa

SEQ ID NO: 5518 - RNA, 20 nt, Artificial Sequence
  GATA2 Guide RNA
uuugacagcuccucgaagca

SEQ ID NO: 5519 - RNA, 21 nt, Artificial Sequence
  GATA2 Guide RNA
aaaggggcggauugcuucgag

SEQ ID NO: 5520 - RNA, 21 nt, Artificial Sequence
  GATA2 Guide RNA
aagaaaggggcggauugcuuc

SEQ ID NO: 5521 - RNA, 21 nt, Artificial Sequence
  GATA2 Guide RNA
aagaagagcaagaaaggggcg

SEQ ID NO: 5522 - RNA, 21 nt, Artificial Sequence
  GATA2 Guide RNA
aagagcaagaaaggggcggau

SEQ ID NO: 5523 - RNA, 21 nt, Artificial Sequence
  GATA2 Guide RNA
aagcaauccgccccuuucuug

SEQ ID NO: 5524 - RNA, 21 nt, Artificial Sequence
  GATA2 Guide RNA
aaggggcggauugcuucgagg

SEQ ID NO: 5525 - RNA, 21 nt, Artificial Sequence
  GATA2 Guide RNA
aauccgccccuuucuugcucu

SEQ ID NO: 5526 - RNA, 21 nt, Artificial Sequence
  GATA2 Guide RNA
acagcuccucgaagcaauccg

SEQ ID NO: 5527 - RNA, 21 nt, Artificial Sequence
  GATA2 Guide RNA
acuuugacagcuccucgaagc

SEQ ID NO: 5528 - RNA, 21 nt, Artificial Sequence
  GATA2 Guide RNA
agaaaggggcggauugcuucg

SEQ ID NO: 5529 - RNA, 21 nt, Artificial Sequence
  GATA2 Guide RNA
agagcaagaaaggggcggauu

SEQ ID NO: 5530 - RNA, 21 nt, Artificial Sequence
  GATA2 Guide RNA
agcaagaaaggggcggauugc

SEQ ID NO: 5531 - RNA, 21 nt, Artificial Sequence
  GATA2 Guide RNA
agcaauccgccccuuucuugc

SEQ ID NO: 5532 - RNA, 21 nt, Artificial Sequence
  GATA2 Guide RNA
agcuccucgaagcaauccgcc

SEQ ID NO: 5533 - RNA, 21 nt, Artificial Sequence
  GATA2 Guide RNA
aggggcggauugcuucgagga

SEQ ID NO: 5534 - RNA, 21 nt, Artificial Sequence
  GATA2 Guide RNA
auccgccccuuucuugcucuu

SEQ ID NO: 5535 - RNA, 21 nt, Artificial Sequence
  GATA2 Guide RNA
auugcuucgaggagcugucaa

SEQ ID NO: 5536 - RNA, 21 nt, Artificial Sequence
  GATA2 Guide RNA
caagaaaggggcggauugcuu

SEQ ID NO: 5537 - RNA, 21 nt, Artificial Sequence
  GATA2 Guide RNA
caagaagagcaagaaaggggc

SEQ ID NO: 5538 - RNA, 21 nt, Artificial Sequence
  GATA2 Guide RNA
caauccgccccuuucuugcuc

SEQ ID NO: 5539 - RNA, 21 nt, Artificial Sequence
  GATA2 Guide RNA
cagcuccucgaagcaauccgc

SEQ ID NO: 5540 - RNA, 21 nt, Artificial Sequence
  GATA2 Guide RNA
ccucgaagcaauccgccccuu

SEQ ID NO: 5541 - RNA, 21 nt, Artificial Sequence
  GATA2 Guide RNA
cgaagcaauccgccccuuucu

SEQ ID NO: 5542 - RNA, 21 nt, Artificial Sequence
  GATA2 Guide RNA
cggauugcuucgaggagcugu

SEQ ID NO: 5543 - RNA, 21 nt, Artificial Sequence
  GATA2 Guide RNA
cuccucgaagcaauccgcccc

SEQ ID NO: 5544 - RNA, 21 nt, Artificial Sequence
  GATA2 Guide RNA
cucgaagcaauccgccccuuu

SEQ ID NO: 5545 - RNA, 21 nt, Artificial Sequence
  GATA2 Guide RNA
cuuugacagcuccucgaagca

SEQ ID NO: 5546 - RNA, 21 nt, Artificial Sequence
  GATA2 Guide RNA
gaaaggggcggauugcuucga

SEQ ID NO: 5547 - RNA, 21 nt, Artificial Sequence
  GATA2 Guide RNA
gaagcaauccgccccuuucuu

SEQ ID NO: 5548 - RNA, 21 nt, Artificial Sequence
  GATA2 Guide RNA
gacagcuccucgaagcaaucc

SEQ ID NO: 5549 - RNA, 21 nt, Artificial Sequence
  GATA2 Guide RNA
gagcaagaaaggggcggauug

SEQ ID NO: 5550 - RNA, 21 nt, Artificial Sequence
  GATA2 Guide RNA
gauugcuucgaggagcuguca

SEQ ID NO: 5551 - RNA, 21 nt, Artificial Sequence
  GATA2 Guide RNA
gcaagaaaggggcggauugcu

SEQ ID NO: 5552 - RNA, 21 nt, Artificial Sequence
  GATA2 Guide RNA
gcaauccgccccuuucuugcu

SEQ ID NO: 5553 - RNA, 21 nt, Artificial Sequence
  GATA2 Guide RNA
gcggauugcuucgaggagcug

SEQ ID NO: 5554 - RNA, 21 nt, Artificial Sequence
  GATA2 Guide RNA
gcuccucgaagcaauccgccc

SEQ ID NO: 5555 - RNA, 21 nt, Artificial Sequence
  GATA2 Guide RNA
ggauugcuucgaggagcuguc

SEQ ID NO: 5556 - RNA, 21 nt, Artificial Sequence
  GATA2 Guide RNA
ggcggauugcuucgaggagcu

SEQ ID NO: 5557 - RNA, 21 nt, Artificial Sequence
  GATA2 Guide RNA
gggcggauugcuucgaggagc

SEQ ID NO: 5558 - RNA, 21 nt, Artificial Sequence
  GATA2 Guide RNA
ggggcggauugcuucgaggag

SEQ ID NO: 5559 - RNA, 21 nt, Artificial Sequence
  GATA2 Guide RNA
uccucgaagcaauccgccccu

SEQ ID NO: 5560 - RNA, 21 nt, Artificial Sequence
  GATA2 Guide RNA
ucgaagcaauccgccccuuuc

SEQ ID NO: 5561 - RNA, 21 nt, Artificial Sequence
  GATA2 Guide RNA
ugacagcuccucgaagcaauc

SEQ ID NO: 5562 - RNA, 21 nt, Artificial Sequence
  GATA2 Guide RNA
uugacagcuccucgaagcaau

SEQ ID NO: 5563 - RNA, 21 nt, Artificial Sequence
  GATA2 Guide RNA
uuugacagcuccucgaagcaa

SEQ ID NO: 5564 - RNA, 22 nt, Artificial Sequence
  GATA2 Guide RNA
aaaggggcggauugcuucgagg

SEQ ID NO: 5565 - RNA, 22 nt, Artificial Sequence
  GATA2 Guide RNA
aagaaaggggcggauugcuucg

SEQ ID NO: 5566 - RNA, 22 nt, Artificial Sequence
  GATA2 Guide RNA
aagagcaagaaaggggcggauu

SEQ ID NO: 5567 - RNA, 22 nt, Artificial Sequence
  GATA2 Guide RNA
aagcaauccgccccuuucuugc

SEQ ID NO: 5568 - RNA, 22 nt, Artificial Sequence
  GATA2 Guide RNA
aaggggcggauugcuucgagga

SEQ ID NO: 5569 - RNA, 22 nt, Artificial Sequence
  GATA2 Guide RNA
aauccgccccuuucuugcucuu

SEQ ID NO: 5570 - RNA, 22 nt, Artificial Sequence
  GATA2 Guide RNA
acagcuccucgaagcaauccgc

SEQ ID NO: 5571 - RNA, 22 nt, Artificial Sequence
  GATA2 Guide RNA
acuuugacagcuccucgaagca

SEQ ID NO: 5572 - RNA, 22 nt, Artificial Sequence
  GATA2 Guide RNA
agaaaggggcggauugcuucga

SEQ ID NO: 5573 - RNA, 22 nt, Artificial Sequence
  GATA2 Guide RNA
agagcaagaaaggggcggauug

SEQ ID NO: 5574 - RNA, 22 nt, Artificial Sequence
  GATA2 Guide RNA
agcaagaaaggggcggauugcu

SEQ ID NO: 5575 - RNA, 22 nt, Artificial Sequence
  GATA2 Guide RNA
agcaauccgccccuuucuugcu

SEQ ID NO: 5576 - RNA, 22 nt, Artificial Sequence
  GATA2 Guide RNA
agcuccucgaagcaauccgccc

SEQ ID NO: 5577 - RNA, 22 nt, Artificial Sequence
  GATA2 Guide RNA
aggggcggauugcuucgaggag

SEQ ID NO: 5578 - RNA, 22 nt, Artificial Sequence
  GATA2 Guide RNA
auccgccccuuucuugcucuuc

SEQ ID NO: 5579 - RNA, 22 nt, Artificial Sequence
  GATA2 Guide RNA
auugcuucgaggagcugucaaa

SEQ ID NO: 5580 - RNA, 22 nt, Artificial Sequence
  GATA2 Guide RNA
caagaaaggggcggauugcuuc

SEQ ID NO: 5581 - RNA, 22 nt, Artificial Sequence
  GATA2 Guide RNA
caagaagagcaagaaaggggcg

SEQ ID NO: 5582 - RNA, 22 nt, Artificial Sequence
  GATA2 Guide RNA
caauccgccccuuucuugcucu

SEQ ID NO: 5583 - RNA, 22 nt, Artificial Sequence
  GATA2 Guide RNA
cacuuugacagcuccucgaagc

SEQ ID NO: 5584 - RNA, 22 nt, Artificial Sequence
  GATA2 Guide RNA
cagcuccucgaagcaauccgcc

SEQ ID NO: 5585 - RNA, 22 nt, Artificial Sequence
  GATA2 Guide RNA
ccaagaagagcaagaaaggggc

SEQ ID NO: 5586 - RNA, 22 nt, Artificial Sequence
  GATA2 Guide RNA
ccucgaagcaauccgccccuuu

SEQ ID NO: 5587 - RNA, 22 nt, Artificial Sequence
  GATA2 Guide RNA
cgaagcaauccgccccuuucuu

SEQ ID NO: 5588 - RNA, 22 nt, Artificial Sequence
  GATA2 Guide RNA
cggauugcuucgaggagcuguc

SEQ ID NO: 5589 - RNA, 22 nt, Artificial Sequence
  GATA2 Guide RNA
cuccucgaagcaauccgccccu

SEQ ID NO: 5590 - RNA, 22 nt, Artificial Sequence
  GATA2 Guide RNA
cucgaagcaauccgccccuuuc

SEQ ID NO: 5591 - RNA, 22 nt, Artificial Sequence
  GATA2 Guide RNA
cuuugacagcuccucgaagcaa

SEQ ID NO: 5592 - RNA, 22 nt, Artificial Sequence
  GATA2 Guide RNA
gaaaggggcggauugcuucgag

SEQ ID NO: 5593 - RNA, 22 nt, Artificial Sequence
  GATA2 Guide RNA
gaagagcaagaaaggggcggau

SEQ ID NO: 5594 - RNA, 22 nt, Artificial Sequence
  GATA2 Guide RNA
gaagcaauccgccccuuucuug

SEQ ID NO: 5595 - RNA, 22 nt, Artificial Sequence
  GATA2 Guide RNA
gacagcuccucgaagcaauccg

SEQ ID NO: 5596 - RNA, 22 nt, Artificial Sequence
  GATA2 Guide RNA
gagcaagaaaggggcggauugc

SEQ ID NO: 5597 - RNA, 22 nt, Artificial Sequence
  GATA2 Guide RNA
gauugcuucgaggagcugucaa

SEQ ID NO: 5598 - RNA, 22 nt, Artificial Sequence
  GATA2 Guide RNA
gcaagaaaggggcggauugcuu

SEQ ID NO: 5599 - RNA, 22 nt, Artificial Sequence
  GATA2 Guide RNA
gcaauccgccccuuucuugcuc

SEQ ID NO: 5600 - RNA, 22 nt, Artificial Sequence
  GATA2 Guide RNA
gcggauugcuucgaggagcugu

SEQ ID NO: 5601 - RNA, 22 nt, Artificial Sequence
  GATA2 Guide RNA
gcuccucgaagcaauccgcccc

SEQ ID NO: 5602 - RNA, 22 nt, Artificial Sequence
  GATA2 Guide RNA
ggauugcuucgaggagcuguca

SEQ ID NO: 5603 - RNA, 22 nt, Artificial Sequence
  GATA2 Guide RNA
ggcggauugcuucgaggagcug

SEQ ID NO: 5604 - RNA, 22 nt, Artificial Sequence
  GATA2 Guide RNA
gggcggauugcuucgaggagcu

SEQ ID NO: 5605 - RNA, 22 nt, Artificial Sequence
  GATA2 Guide RNA
ggggcggauugcuucgaggagc

SEQ ID NO: 5606 - RNA, 22 nt, Artificial Sequence
  GATA2 Guide RNA
uccucgaagcaauccgccccuu

SEQ ID NO: 5607 - RNA, 22 nt, Artificial Sequence
  GATA2 Guide RNA
ucgaagcaauccgccccuuucu

SEQ ID NO: 5608 - RNA, 22 nt, Artificial Sequence
  GATA2 Guide RNA
ugacagcuccucgaagcaaucc

SEQ ID NO: 5609 - RNA, 22 nt, Artificial Sequence
  GATA2 Guide RNA
uugacagcuccucgaagcaauc

SEQ ID NO: 5610 - RNA, 22 nt, Artificial Sequence
  GATA2 Guide RNA
uuugacagcuccucgaagcaau

SEQ ID NO: 5611 - RNA, 20 nt, Artificial Sequence
  GATA2 Guide RNA
aaagggguggagugcuucga

SEQ ID NO: 5612 - RNA, 20 nt, Artificial Sequence
  GATA2 Guide RNA
aagaaagggguggagugcuu

SEQ ID NO: 5613 - RNA, 20 nt, Artificial Sequence
  GATA2 Guide RNA
aagaagagcaagaaaggggu

SEQ ID NO: 5614 - RNA, 20 nt, Artificial Sequence
  GATA2 Guide RNA
aagagcaagaaaggggugga

SEQ ID NO: 5615 - RNA, 20 nt, Artificial Sequence
  GATA2 Guide RNA
aagcacuccaccccuuucuu

SEQ ID NO: 5616 - RNA, 20 nt, Artificial Sequence
  GATA2 Guide RNA
aagggguggagugcuucgag

SEQ ID NO: 5617 - RNA, 20 nt, Artificial Sequence
  GATA2 Guide RNA
acagcuccucgaagcacucc

SEQ ID NO: 5618 - RNA, 20 nt, Artificial Sequence
  GATA2 Guide RNA
accccuuucuugcucuucuu

SEQ ID NO: 5619 - RNA, 20 nt, Artificial Sequence
  GATA2 Guide RNA
acuccaccccuuucuugcuc

SEQ ID NO: 5620 - RNA, 20 nt, Artificial Sequence
  GATA2 Guide RNA
agaaagggguggagugcuuc

SEQ ID NO: 5621 - RNA, 20 nt, Artificial Sequence
  GATA2 Guide RNA
agaagagcaagaaaggggug

SEQ ID NO: 5622 - RNA, 20 nt, Artificial Sequence
  GATA2 Guide RNA
agagcaagaaagggguggag

SEQ ID NO: 5623 - RNA, 20 nt, Artificial Sequence
  GATA2 Guide RNA
agcaagaaagggguggagug

SEQ ID NO: 5624 - RNA, 20 nt, Artificial Sequence
  GATA2 Guide RNA
agcacuccaccccuuucuug

SEQ ID NO: 5625 - RNA, 20 nt, Artificial Sequence
  GATA2 Guide RNA
agcuccucgaagcacuccac

SEQ ID NO: 5626 - RNA, 20 nt, Artificial Sequence
  GATA2 Guide RNA
agggguggagugcuucgagg

SEQ ID NO: 5627 - RNA, 20 nt, Artificial Sequence
  GATA2 Guide RNA
caagaaagggguggagugcu

SEQ ID NO: 5628 - RNA, 20 nt, Artificial Sequence
  GATA2 Guide RNA
caagaagagcaagaaagggg

SEQ ID NO: 5629 - RNA, 20 nt, Artificial Sequence
  GATA2 Guide RNA
caccccuuucuugcucuucu

SEQ ID NO: 5630 - RNA, 20 nt, Artificial Sequence
  GATA2 Guide RNA
cacuccaccccuuucuugcu

SEQ ID NO: 5631 - RNA, 20 nt, Artificial Sequence
  GATA2 Guide RNA
cagcuccucgaagcacucca

SEQ ID NO: 5632 - RNA, 20 nt, Artificial Sequence
  GATA2 Guide RNA
ccaagaagagcaagaaaggg

SEQ ID NO: 5633 - RNA, 20 nt, Artificial Sequence
  GATA2 Guide RNA
ccaccccuuucuugcucuuc

SEQ ID NO: 5634 - RNA, 20 nt, Artificial Sequence
  GATA2 Guide RNA
ccucgaagcacuccaccccu

SEQ ID NO: 5635 - RNA, 20 nt, Artificial Sequence
  GATA2 Guide RNA
cgaagcacuccaccccuuuc

SEQ ID NO: 5636 - RNA, 20 nt, Artificial Sequence
  GATA2 Guide RNA
cuccaccccuuucuugcucu

SEQ ID NO: 5637 - RNA, 20 nt, Artificial Sequence
  GATA2 Guide RNA
cuccucgaagcacuccaccc

SEQ ID NO: 5638 - RNA, 20 nt, Artificial Sequence
  GATA2 Guide RNA
cucgaagcacuccaccccuu

SEQ ID NO: 5639 - RNA, 20 nt, Artificial Sequence
  GATA2 Guide RNA
gaaagggguggagugcuucg

SEQ ID NO: 5640 - RNA, 20 nt, Artificial Sequence
  GATA2 Guide RNA
gaagagcaagaaaggggugg

SEQ ID NO: 5641 - RNA, 20 nt, Artificial Sequence
  GATA2 Guide RNA
gaagcacuccaccccuuucu

SEQ ID NO: 5642 - RNA, 20 nt, Artificial Sequence
  GATA2 Guide RNA
gacagcuccucgaagcacuc

SEQ ID NO: 5643 - RNA, 20 nt, Artificial Sequence
  GATA2 Guide RNA
gagcaagaaagggguggagu

SEQ ID NO: 5644 - RNA, 20 nt, Artificial Sequence
  GATA2 Guide RNA
gcaagaaagggguggagugc

SEQ ID NO: 5645 - RNA, 20 nt, Artificial Sequence
  GATA2 Guide RNA
gcacuccaccccuuucuugc

SEQ ID NO: 5646 - RNA, 20 nt, Artificial Sequence
  GATA2 Guide RNA
gcuccucgaagcacuccacc

SEQ ID NO: 5647 - RNA, 20 nt, Artificial Sequence
  GATA2 Guide RNA
gggguggagugcuucgagga

SEQ ID NO: 5648 - RNA, 20 nt, Artificial Sequence
  GATA2 Guide RNA
ggguggagugcuucgaggag

SEQ ID NO: 5649 - RNA, 20 nt, Artificial Sequence
  GATA2 Guide RNA
gguggagugcuucgaggagc

SEQ ID NO: 5650 - RNA, 20 nt, Artificial Sequence
  GATA2 Guide RNA
guccaagaagagcaagaaag

SEQ ID NO: 5651 - RNA, 20 nt, Artificial Sequence
  GATA2 Guide RNA
guggagugcuucgaggagcu

SEQ ID NO: 5652 - RNA, 20 nt, Artificial Sequence
  GATA2 Guide RNA
uccaagaagagcaagaaagg

SEQ ID NO: 5653 - RNA, 20 nt, Artificial Sequence
  GATA2 Guide RNA
uccaccccuuucuugcucuu

SEQ ID NO: 5654 - RNA, 20 nt, Artificial Sequence
  GATA2 Guide RNA
uccucgaagcacuccacccc

SEQ ID NO: 5655 - RNA, 20 nt, Artificial Sequence
  GATA2 Guide RNA
ucgaagcacuccaccccuuu

SEQ ID NO: 5656 - RNA, 20 nt, Artificial Sequence
  GATA2 Guide RNA
ugacagcuccucgaagcacu

SEQ ID NO: 5657 - RNA, 21 nt, Artificial Sequence
  GATA2 Guide RNA
aaagggguggagugcuucgag

SEQ ID NO: 5658 - RNA, 21 nt, Artificial Sequence
  GATA2 Guide RNA
aagaaagggguggagugcuuc

SEQ ID NO: 5659 - RNA, 21 nt, Artificial Sequence
  GATA2 Guide RNA
aagaagagcaagaaaggggug

SEQ ID NO: 5660 - RNA, 21 nt, Artificial Sequence
  GATA2 Guide RNA
aagagcaagaaagggguggag

SEQ ID NO: 5661 - RNA, 21 nt, Artificial Sequence
  GATA2 Guide RNA
aagcacuccaccccuuucuug

SEQ ID NO: 5662 - RNA, 21 nt, Artificial Sequence
  GATA2 Guide RNA
aagggguggagugcuucgagg

SEQ ID NO: 5663 - RNA, 21 nt, Artificial Sequence
  GATA2 Guide RNA
acagcuccucgaagcacucca

SEQ ID NO: 5664 - RNA, 21 nt, Artificial Sequence
  GATA2 Guide RNA
accccuuucuugcucuucuug

SEQ ID NO: 5665 - RNA, 21 nt, Artificial Sequence
  GATA2 Guide RNA
acuccaccccuuucuugcucu

SEQ ID NO: 5666 - RNA, 21 nt, Artificial Sequence
  GATA2 Guide RNA
agaaagggguggagugcuucg

SEQ ID NO: 5667 - RNA, 21 nt, Artificial Sequence
  GATA2 Guide RNA
agaagagcaagaaaggggugg

SEQ ID NO: 5668 - RNA, 21 nt, Artificial Sequence
  GATA2 Guide RNA
agagcaagaaagggguggagu

SEQ ID NO: 5669 - RNA, 21 nt, Artificial Sequence
  GATA2 Guide RNA
agcaagaaagggguggagugc

SEQ ID NO: 5670 - RNA, 21 nt, Artificial Sequence
  GATA2 Guide RNA
agcacuccaccccuuucuugc

SEQ ID NO: 5671 - RNA, 21 nt, Artificial Sequence
  GATA2 Guide RNA
agcuccucgaagcacuccacc

SEQ ID NO: 5672 - RNA, 21 nt, Artificial Sequence
  GATA2 Guide RNA
agggguggagugcuucgagga

SEQ ID NO: 5673 - RNA, 21 nt, Artificial Sequence
  GATA2 Guide RNA
aguccaagaagagcaagaaag

SEQ ID NO: 5674 - RNA, 21 nt, Artificial Sequence
  GATA2 Guide RNA
caagaaagggguggagugcuu

SEQ ID NO: 5675 - RNA, 21 nt, Artificial Sequence
  GATA2 Guide RNA
caagaagagcaagaaaggggu

SEQ ID NO: 5676 - RNA, 21 nt, Artificial Sequence
  GATA2 Guide RNA
caccccuuucuugcucuucuu

SEQ ID NO: 5677 - RNA, 21 nt, Artificial Sequence
  GATA2 Guide RNA
cacuccaccccuuucuugcuc

SEQ ID NO: 5678 - RNA, 21 nt, Artificial Sequence
  GATA2 Guide RNA
cagcuccucgaagcacuccac

SEQ ID NO: 5679 - RNA, 21 nt, Artificial Sequence
  GATA2 Guide RNA
ccaagaagagcaagaaagggg

SEQ ID NO: 5680 - RNA, 21 nt, Artificial Sequence
  GATA2 Guide RNA
ccaccccuuucuugcucuucu

SEQ ID NO: 5681 - RNA, 21 nt, Artificial Sequence
  GATA2 Guide RNA
ccucgaagcacuccaccccuu

SEQ ID NO: 5682 - RNA, 21 nt, Artificial Sequence
  GATA2 Guide RNA
cgaagcacuccaccccuuucu

SEQ ID NO: 5683 - RNA, 21 nt, Artificial Sequence
  GATA2 Guide RNA
cuccaccccuuucuugcucuu

SEQ ID NO: 5684 - RNA, 21 nt, Artificial Sequence
  GATA2 Guide RNA
cuccucgaagcacuccacccc

SEQ ID NO: 5685 - RNA, 21 nt, Artificial Sequence
  GATA2 Guide RNA
cucgaagcacuccaccccuuu

SEQ ID NO: 5686 - RNA, 21 nt, Artificial Sequence
  GATA2 Guide RNA
gaaagggguggagugcuucga

SEQ ID NO: 5687 - RNA, 21 nt, Artificial Sequence
  GATA2 Guide RNA
gaagagcaagaaaggggugga

SEQ ID NO: 5688 - RNA, 21 nt, Artificial Sequence
  GATA2 Guide RNA
gaagcacuccaccccuuucuu

SEQ ID NO: 5689 - RNA, 21 nt, Artificial Sequence
  GATA2 Guide RNA
gacagcuccucgaagcacucc

SEQ ID NO: 5690 - RNA, 21 nt, Artificial Sequence
  GATA2 Guide RNA
gagcaagaaagggguggagug

SEQ ID NO: 5691 - RNA, 21 nt, Artificial Sequence
  GATA2 Guide RNA
gcaagaaagggguggagugcu

SEQ ID NO: 5692 - RNA, 21 nt, Artificial Sequence
  GATA2 Guide RNA
gcacuccaccccuuucuugcu

SEQ ID NO: 5693 - RNA, 21 nt, Artificial Sequence
  GATA2 Guide RNA
gcuccucgaagcacuccaccc

SEQ ID NO: 5694 - RNA, 21 nt, Artificial Sequence
  GATA2 Guide RNA
gggguggagugcuucgaggag

SEQ ID NO: 5695 - RNA, 21 nt, Artificial Sequence
  GATA2 Guide RNA
ggguggagugcuucgaggagc

SEQ ID NO: 5696 - RNA, 21 nt, Artificial Sequence
  GATA2 Guide RNA
gguggagugcuucgaggagcu

SEQ ID NO: 5697 - RNA, 21 nt, Artificial Sequence
  GATA2 Guide RNA
guccaagaagagcaagaaagg

SEQ ID NO: 5698 - RNA, 21 nt, Artificial Sequence
  GATA2 Guide RNA
guggagugcuucgaggagcug

SEQ ID NO: 5699 - RNA, 21 nt, Artificial Sequence
  GATA2 Guide RNA
uccaagaagagcaagaaaggg

SEQ ID NO: 5700 - RNA, 21 nt, Artificial Sequence
  GATA2 Guide RNA
uccaccccuuucuugcucuuc

SEQ ID NO: 5701 - RNA, 21 nt, Artificial Sequence
  GATA2 Guide RNA
uccucgaagcacuccaccccu

SEQ ID NO: 5702 - RNA, 21 nt, Artificial Sequence
  GATA2 Guide RNA
ucgaagcacuccaccccuuuc

SEQ ID NO: 5703 - RNA, 21 nt, Artificial Sequence
  GATA2 Guide RNA
ugacagcuccucgaagcacuc

SEQ ID NO: 5704 - RNA, 21 nt, Artificial Sequence
  GATA2 Guide RNA
uugacagcuccucgaagcacu

SEQ ID NO: 5705 - RNA, 22 nt, Artificial Sequence
  GATA2 Guide RNA
aaagggguggagugcuucgagg

SEQ ID NO: 5706 - RNA, 22 nt, Artificial Sequence
  GATA2 Guide RNA
aagaaagggguggagugcuucg

SEQ ID NO: 5707 - RNA, 22 nt, Artificial Sequence
  GATA2 Guide RNA
aagaagagcaagaaaggggugg

SEQ ID NO: 5708 - RNA, 22 nt, Artificial Sequence
  GATA2 Guide RNA
aagagcaagaaagggguggagu

SEQ ID NO: 5709 - RNA, 22 nt, Artificial Sequence
  GATA2 Guide RNA
aagcacuccaccccuuucuugc

SEQ ID NO: 5710 - RNA, 22 nt, Artificial Sequence
  GATA2 Guide RNA
aagggguggagugcuucgagga

SEQ ID NO: 5711 - RNA, 22 nt, Artificial Sequence
  GATA2 Guide RNA
aaguccaagaagagcaagaaag

SEQ ID NO: 5712 - RNA, 22 nt, Artificial Sequence
  GATA2 Guide RNA
acagcuccucgaagcacuccac

SEQ ID NO: 5713 - RNA, 22 nt, Artificial Sequence
  GATA2 Guide RNA
accccuuucuugcucuucuugg

SEQ ID NO: 5714 - RNA, 22 nt, Artificial Sequence
  GATA2 Guide RNA
acuccaccccuuucuugcucuu

SEQ ID NO: 5715 - RNA, 22 nt, Artificial Sequence
  GATA2 Guide RNA
agaaagggguggagugcuucga

SEQ ID NO: 5716 - RNA, 22 nt, Artificial Sequence
  GATA2 Guide RNA
agaagagcaagaaaggggugga

SEQ ID NO: 5717 - RNA, 22 nt, Artificial Sequence
  GATA2 Guide RNA
agagcaagaaagggguggagug

SEQ ID NO: 5718 - RNA, 22 nt, Artificial Sequence
  GATA2 Guide RNA
agcaagaaagggguggagugcu

SEQ ID NO: 5719 - RNA, 22 nt, Artificial Sequence
  GATA2 Guide RNA
agcacuccaccccuuucuugcu

SEQ ID NO: 5720 - RNA, 22 nt, Artificial Sequence
  GATA2 Guide RNA
agcuccucgaagcacuccaccc

SEQ ID NO: 5721 - RNA, 22 nt, Artificial Sequence
  GATA2 Guide RNA
agggguggagugcuucgaggag

SEQ ID NO: 5722 - RNA, 22 nt, Artificial Sequence
  GATA2 Guide RNA
aguccaagaagagcaagaaagg

SEQ ID NO: 5723 - RNA, 22 nt, Artificial Sequence
  GATA2 Guide RNA
caagaaagggguggagugcuuc

SEQ ID NO: 5724 - RNA, 22 nt, Artificial Sequence
  GATA2 Guide RNA
caagaagagcaagaaaggggug

SEQ ID NO: 5725 - RNA, 22 nt, Artificial Sequence
  GATA2 Guide RNA
caccccuuucuugcucuucuug

SEQ ID NO: 5726 - RNA, 22 nt, Artificial Sequence
  GATA2 Guide RNA
cacuccaccccuuucuugcucu

SEQ ID NO: 5727 - RNA, 22 nt, Artificial Sequence
  GATA2 Guide RNA
cagcuccucgaagcacuccacc

SEQ ID NO: 5728 - RNA, 22 nt, Artificial Sequence
  GATA2 Guide RNA
ccaagaagagcaagaaaggggu

SEQ ID NO: 5729 - RNA, 22 nt, Artificial Sequence
  GATA2 Guide RNA
ccaccccuuucuugcucuucuu

SEQ ID NO: 5730 - RNA, 22 nt, Artificial Sequence
  GATA2 Guide RNA
ccucgaagcacuccaccccuuu

SEQ ID NO: 5731 - RNA, 22 nt, Artificial Sequence
  GATA2 Guide RNA
cgaagcacuccaccccuuucuu

SEQ ID NO: 5732 - RNA, 22 nt, Artificial Sequence
  GATA2 Guide RNA
cuccaccccuuucuugcucuuc

SEQ ID NO: 5733 - RNA, 22 nt, Artificial Sequence
  GATA2 Guide RNA
cuccucgaagcacuccaccccu

SEQ ID NO: 5734 - RNA, 22 nt, Artificial Sequence
  GATA2 Guide RNA
cucgaagcacuccaccccuuuc

SEQ ID NO: 5735 - RNA, 22 nt, Artificial Sequence
  GATA2 Guide RNA
gaaagggguggagugcuucgag

SEQ ID NO: 5736 - RNA, 22 nt, Artificial Sequence
  GATA2 Guide RNA
gaagagcaagaaagggguggag

SEQ ID NO: 5737 - RNA, 22 nt, Artificial Sequence
  GATA2 Guide RNA
gaagcacuccaccccuuucuug

SEQ ID NO: 5738 - RNA, 22 nt, Artificial Sequence
  GATA2 Guide RNA
gacagcuccucgaagcacucca

SEQ ID NO: 5739 - RNA, 22 nt, Artificial Sequence
  GATA2 Guide RNA
gagcaagaaagggguggagugc

SEQ ID NO: 5740 - RNA, 22 nt, Artificial Sequence
  GATA2 Guide RNA
gcaagaaagggguggagugcuu

SEQ ID NO: 5741 - RNA, 22 nt, Artificial Sequence
  GATA2 Guide RNA
gcacuccaccccuuucuugcuc

SEQ ID NO: 5742 - RNA, 22 nt, Artificial Sequence
  GATA2 Guide RNA
gcuccucgaagcacuccacccc

SEQ ID NO: 5743 - RNA, 22 nt, Artificial Sequence
  GATA2 Guide RNA
gggguggagugcuucgaggagc

SEQ ID NO: 5744 - RNA, 22 nt, Artificial Sequence
  GATA2 Guide RNA
ggguggagugcuucgaggagcu

SEQ ID NO: 5745 - RNA, 22 nt, Artificial Sequence
  GATA2 Guide RNA
gguggagugcuucgaggagcug

SEQ ID NO: 5746 - RNA, 22 nt, Artificial Sequence
  GATA2 Guide RNA
guccaagaagagcaagaaaggg

SEQ ID NO: 5747 - RNA, 22 nt, Artificial Sequence
  GATA2 Guide RNA
guggagugcuucgaggagcugu

SEQ ID NO: 5748 - RNA, 22 nt, Artificial Sequence
  GATA2 Guide RNA
uccaagaagagcaagaaagggg

SEQ ID NO: 5749 - RNA, 22 nt, Artificial Sequence
  GATA2 Guide RNA
uccaccccuuucuugcucuucu

SEQ ID NO: 5750 - RNA, 22 nt, Artificial Sequence
  GATA2 Guide RNA
uccucgaagcacuccaccccuu

SEQ ID NO: 5751 - RNA, 22 nt, Artificial Sequence
  GATA2 Guide RNA
ucgaagcacuccaccccuuucu

SEQ ID NO: 5752 - RNA, 22 nt, Artificial Sequence
  GATA2 Guide RNA
ugacagcuccucgaagcacucc

SEQ ID NO: 5753 - RNA, 22 nt, Artificial Sequence
  GATA2 Guide RNA
uugacagcuccucgaagcacuc

SEQ ID NO: 5754 - RNA, 22 nt, Artificial Sequence
  GATA2 Guide RNA
uuugacagcuccucgaagcacu

SEQ ID NO: 5755 - RNA, 20 nt, Artificial Sequence
  GATA2 Guide RNA
aaaggggaggagugcuucga

SEQ ID NO: 5756 - RNA, 20 nt, Artificial Sequence
  GATA2 Guide RNA
aagaaaggggaggagugcuu

SEQ ID NO: 5757 - RNA, 20 nt, Artificial Sequence
  GATA2 Guide RNA
aagaagagcaagaaagggga

SEQ ID NO: 5758 - RNA, 20 nt, Artificial Sequence
  GATA2 Guide RNA
aagagcaagaaaggggagga

SEQ ID NO: 5759 - RNA, 20 nt, Artificial Sequence
  GATA2 Guide RNA
aagcacuccuccccuuucuu

SEQ ID NO: 5760 - RNA, 20 nt, Artificial Sequence
  GATA2 Guide RNA
aaggggaggagugcuucgag

SEQ ID NO: 5761 - RNA, 20 nt, Artificial Sequence
  GATA2 Guide RNA
acuccuccccuuucuugcuc

SEQ ID NO: 5762 - RNA, 20 nt, Artificial Sequence
  GATA2 Guide RNA
agaaaggggaggagugcuuc

SEQ ID NO: 5763 - RNA, 20 nt, Artificial Sequence
  GATA2 Guide RNA
agaagagcaagaaaggggag

SEQ ID NO: 5764 - RNA, 20 nt, Artificial Sequence
  GATA2 Guide RNA
agagcaagaaaggggaggag

SEQ ID NO: 5765 - RNA, 20 nt, Artificial Sequence
  GATA2 Guide RNA
agcaagaaaggggaggagug

SEQ ID NO: 5766 - RNA, 20 nt, Artificial Sequence
  GATA2 Guide RNA
agcacuccuccccuuucuug

SEQ ID NO: 5767 - RNA, 20 nt, Artificial Sequence
  GATA2 Guide RNA
agcuccucgaagcacuccuc

SEQ ID NO: 5768 - RNA, 20 nt, Artificial Sequence
  GATA2 Guide RNA
aggggaggagugcuucgagg

SEQ ID NO: 5769 - RNA, 20 nt, Artificial Sequence
  GATA2 Guide RNA
caagaaaggggaggagugcu

SEQ ID NO: 5770 - RNA, 20 nt, Artificial Sequence
  GATA2 Guide RNA
cacuccuccccuuucuugcu

SEQ ID NO: 5771 - RNA, 20 nt, Artificial Sequence
  GATA2 Guide RNA
cagcuccucgaagcacuccu

SEQ ID NO: 5772 - RNA, 20 nt, Artificial Sequence
  GATA2 Guide RNA
ccuccccuuucuugcucuuc

SEQ ID NO: 5773 - RNA, 20 nt, Artificial Sequence
  GATA2 Guide RNA
ccucgaagcacuccuccccu

SEQ ID NO: 5774 - RNA, 20 nt, Artificial Sequence
  GATA2 Guide RNA
cgaagcacuccuccccuuuc

SEQ ID NO: 5775 - RNA, 20 nt, Artificial Sequence
  GATA2 Guide RNA
cuccccuuucuugcucuucu

SEQ ID NO: 5776 - RNA, 20 nt, Artificial Sequence
  GATA2 Guide RNA
cuccuccccuuucuugcucu

SEQ ID NO: 5777 - RNA, 20 nt, Artificial Sequence
  GATA2 Guide RNA
cuccucgaagcacuccuccc

SEQ ID NO: 5778 - RNA, 20 nt, Artificial Sequence
  GATA2 Guide RNA
cucgaagcacuccuccccuu

SEQ ID NO: 5779 - RNA, 20 nt, Artificial Sequence
  GATA2 Guide RNA
gaaaggggaggagugcuucg

SEQ ID NO: 5780 - RNA, 20 nt, Artificial Sequence
  GATA2 Guide RNA
gaagagcaagaaaggggagg

SEQ ID NO: 5781 - RNA, 20 nt, Artificial Sequence
  GATA2 Guide RNA
gaagcacuccuccccuuucu

SEQ ID NO: 5782 - RNA, 20 nt, Artificial Sequence
  GATA2 Guide RNA
gagcaagaaaggggaggagu

SEQ ID NO: 5783 - RNA, 20 nt, Artificial Sequence
  GATA2 Guide RNA
gaggagugcuucgaggagcu

SEQ ID NO: 5784 - RNA, 20 nt, Artificial Sequence
  GATA2 Guide RNA
gcaagaaaggggaggagugc

SEQ ID NO: 5785 - RNA, 20 nt, Artificial Sequence
  GATA2 Guide RNA
gcacuccuccccuuucuugc

SEQ ID NO: 5786 - RNA, 20 nt, Artificial Sequence
  GATA2 Guide RNA
gcuccucgaagcacuccucc

SEQ ID NO: 5787 - RNA, 20 nt, Artificial Sequence
  GATA2 Guide RNA
ggaggagugcuucgaggagc

SEQ ID NO: 5788 - RNA, 20 nt, Artificial Sequence
  GATA2 Guide RNA
gggaggagugcuucgaggag

SEQ ID NO: 5789 - RNA, 20 nt, Artificial Sequence
  GATA2 Guide RNA
ggggaggagugcuucgagga

SEQ ID NO: 5790 - RNA, 20 nt, Artificial Sequence
  GATA2 Guide RNA
uccccuuucuugcucuucuu

SEQ ID NO: 5791 - RNA, 20 nt, Artificial Sequence
  GATA2 Guide RNA
uccuccccuuucuugcucuu

SEQ ID NO: 5792 - RNA, 20 nt, Artificial Sequence
  GATA2 Guide RNA
uccucgaagcacuccucccc

SEQ ID NO: 5793 - RNA, 20 nt, Artificial Sequence
  GATA2 Guide RNA
ucgaagcacuccuccccuuu

SEQ ID NO: 5794 - RNA, 21 nt, Artificial Sequence
  GATA2 Guide RNA
aaaggggaggagugcuucgag

SEQ ID NO: 5795 - RNA, 21 nt, Artificial Sequence
  GATA2 Guide RNA
aagaaaggggaggagugcuuc

SEQ ID NO: 5796 - RNA, 21 nt, Artificial Sequence
  GATA2 Guide RNA
aagaagagcaagaaaggggag

SEQ ID NO: 5797 - RNA, 21 nt, Artificial Sequence
  GATA2 Guide RNA
aagagcaagaaaggggaggag

SEQ ID NO: 5798 - RNA, 21 nt, Artificial Sequence
  GATA2 Guide RNA
aagcacuccuccccuuucuug

SEQ ID NO: 5799 - RNA, 21 nt, Artificial Sequence
  GATA2 Guide RNA
aaggggaggagugcuucgagg

SEQ ID NO: 5800 - RNA, 21 nt, Artificial Sequence
  GATA2 Guide RNA
acagcuccucgaagcacuccu

SEQ ID NO: 5801 - RNA, 21 nt, Artificial Sequence
  GATA2 Guide RNA
acuccuccccuuucuugcucu

SEQ ID NO: 5802 - RNA, 21 nt, Artificial Sequence
  GATA2 Guide RNA
agaaaggggaggagugcuucg

SEQ ID NO: 5803 - RNA, 21 nt, Artificial Sequence
  GATA2 Guide RNA
agaagagcaagaaaggggagg

SEQ ID NO: 5804 - RNA, 21 nt, Artificial Sequence
  GATA2 Guide RNA
agagcaagaaaggggaggagu

SEQ ID NO: 5805 - RNA, 21 nt, Artificial Sequence
  GATA2 Guide RNA
agcaagaaaggggaggagugc

SEQ ID NO: 5806 - RNA, 21 nt, Artificial Sequence
  GATA2 Guide RNA
agcacuccuccccuuucuugc

SEQ ID NO: 5807 - RNA, 21 nt, Artificial Sequence
  GATA2 Guide RNA
agcuccucgaagcacuccucc

SEQ ID NO: 5808 - RNA, 21 nt, Artificial Sequence
  GATA2 Guide RNA
aggggaggagugcuucgagga

SEQ ID NO: 5809 - RNA, 21 nt, Artificial Sequence
  GATA2 Guide RNA
caagaaaggggaggagugcuu

SEQ ID NO: 5810 - RNA, 21 nt, Artificial Sequence
  GATA2 Guide RNA
caagaagagcaagaaagggga

SEQ ID NO: 5811 - RNA, 21 nt, Artificial Sequence
  GATA2 Guide RNA
cacuccuccccuuucuugcuc

SEQ ID NO: 5812 - RNA, 21 nt, Artificial Sequence
  GATA2 Guide RNA
cagcuccucgaagcacuccuc

SEQ ID NO: 5813 - RNA, 21 nt, Artificial Sequence
  GATA2 Guide RNA
ccuccccuuucuugcucuucu

SEQ ID NO: 5814 - RNA, 21 nt, Artificial Sequence
  GATA2 Guide RNA
ccucgaagcacuccuccccuu

SEQ ID NO: 5815 - RNA, 21 nt, Artificial Sequence
  GATA2 Guide RNA
cgaagcacuccuccccuuucu

SEQ ID NO: 5816 - RNA, 21 nt, Artificial Sequence
  GATA2 Guide RNA
cuccccuuucuugcucuucuu

SEQ ID NO: 5817 - RNA, 21 nt, Artificial Sequence
  GATA2 Guide RNA
cuccuccccuuucuugcucuu

SEQ ID NO: 5818 - RNA, 21 nt, Artificial Sequence
  GATA2 Guide RNA
cuccucgaagcacuccucccc

SEQ ID NO: 5819 - RNA, 21 nt, Artificial Sequence
  GATA2 Guide RNA
cucgaagcacuccuccccuuu

SEQ ID NO: 5820 - RNA, 21 nt, Artificial Sequence
  GATA2 Guide RNA
gaaaggggaggagugcuucga

SEQ ID NO: 5821 - RNA, 21 nt, Artificial Sequence
  GATA2 Guide RNA
gaagagcaagaaaggggagga

SEQ ID NO: 5822 - RNA, 21 nt, Artificial Sequence
  GATA2 Guide RNA
gaagcacuccuccccuuucuu

SEQ ID NO: 5823 - RNA, 21 nt, Artificial Sequence
  GATA2 Guide RNA
gagcaagaaaggggaggagug

SEQ ID NO: 5824 - RNA, 21 nt, Artificial Sequence
  GATA2 Guide RNA
gaggagugcuucgaggagcug

SEQ ID NO: 5825 - RNA, 21 nt, Artificial Sequence
  GATA2 Guide RNA
gcaagaaaggggaggagugcu

SEQ ID NO: 5826 - RNA, 21 nt, Artificial Sequence
  GATA2 Guide RNA
gcacuccuccccuuucuugcu

SEQ ID NO: 5827 - RNA, 21 nt, Artificial Sequence
  GATA2 Guide RNA
gcuccucgaagcacuccuccc

SEQ ID NO: 5828 - RNA, 21 nt, Artificial Sequence
  GATA2 Guide RNA
ggaggagugcuucgaggagcu

SEQ ID NO: 5829 - RNA, 21 nt, Artificial Sequence
  GATA2 Guide RNA
gggaggagugcuucgaggagc

SEQ ID NO: 5830 - RNA, 21 nt, Artificial Sequence
  GATA2 Guide RNA
ggggaggagugcuucgaggag

SEQ ID NO: 5831 - RNA, 21 nt, Artificial Sequence
  GATA2 Guide RNA
uccccuuucuugcucuucuug

SEQ ID NO: 5832 - RNA, 21 nt, Artificial Sequence
  GATA2 Guide RNA
uccuccccuuucuugcucuuc

SEQ ID NO: 5833 - RNA, 21 nt, Artificial Sequence
  GATA2 Guide RNA
uccucgaagcacuccuccccu

SEQ ID NO: 5834 - RNA, 21 nt, Artificial Sequence
  GATA2 Guide RNA
ucgaagcacuccuccccuuuc

SEQ ID NO: 5835 - RNA, 22 nt, Artificial Sequence
  GATA2 Guide RNA
aaaggggaggagugcuucgagg

SEQ ID NO: 5836 - RNA, 22 nt, Artificial Sequence
  GATA2 Guide RNA
aagaaaggggaggagugcuucg

SEQ ID NO: 5837 - RNA, 22 nt, Artificial Sequence
  GATA2 Guide RNA
aagaagagcaagaaaggggagg

SEQ ID NO: 5838 - RNA, 22 nt, Artificial Sequence
  GATA2 Guide RNA
aagagcaagaaaggggaggagu

SEQ ID NO: 5839 - RNA, 22 nt, Artificial Sequence
  GATA2 Guide RNA
aagcacuccuccccuuucuugc

SEQ ID NO: 5840 - RNA, 22 nt, Artificial Sequence
  GATA2 Guide RNA
aaggggaggagugcuucgagga

SEQ ID NO: 5841 - RNA, 22 nt, Artificial Sequence
  GATA2 Guide RNA
acagcuccucgaagcacuccuc

SEQ ID NO: 5842 - RNA, 22 nt, Artificial Sequence
  GATA2 Guide RNA
acuccuccccuuucuugcucuu

SEQ ID NO: 5843 - RNA, 22 nt, Artificial Sequence
  GATA2 Guide RNA
agaaaggggaggagugcuucga

SEQ ID NO: 5844 - RNA, 22 nt, Artificial Sequence
  GATA2 Guide RNA
agaagagcaagaaaggggagga

SEQ ID NO: 5845 - RNA, 22 nt, Artificial Sequence
  GATA2 Guide RNA
agagcaagaaaggggaggagug

SEQ ID NO: 5846 - RNA, 22 nt, Artificial Sequence
  GATA2 Guide RNA
agcaagaaaggggaggagugcu

SEQ ID NO: 5847 - RNA, 22 nt, Artificial Sequence
  GATA2 Guide RNA
agcacuccuccccuuucuugcu

SEQ ID NO: 5848 - RNA, 22 nt, Artificial Sequence
  GATA2 Guide RNA
agcuccucgaagcacuccuccc

SEQ ID NO: 5849 - RNA, 22 nt, Artificial Sequence
  GATA2 Guide RNA
aggggaggagugcuucgaggag

SEQ ID NO: 5850 - RNA, 22 nt, Artificial Sequence
  GATA2 Guide RNA
caagaaaggggaggagugcuuc

SEQ ID NO: 5851 - RNA, 22 nt, Artificial Sequence
  GATA2 Guide RNA
caagaagagcaagaaaggggag

SEQ ID NO: 5852 - RNA, 22 nt, Artificial Sequence
  GATA2 Guide RNA
cacuccuccccuuucuugcucu

SEQ ID NO: 5853 - RNA, 22 nt, Artificial Sequence
  GATA2 Guide RNA
cagcuccucgaagcacuccucc

SEQ ID NO: 5854 - RNA, 22 nt, Artificial Sequence
  GATA2 Guide RNA
ccaagaagagcaagaaagggga

SEQ ID NO: 5855 - RNA, 22 nt, Artificial Sequence
  GATA2 Guide RNA
ccuccccuuucuugcucuucuu

SEQ ID NO: 5856 - RNA, 22 nt, Artificial Sequence
  GATA2 Guide RNA
ccucgaagcacuccuccccuuu

SEQ ID NO: 5857 - RNA, 22 nt, Artificial Sequence
  GATA2 Guide RNA
cgaagcacuccuccccuuucuu

SEQ ID NO: 5858 - RNA, 22 nt, Artificial Sequence
  GATA2 Guide RNA
cuccccuuucuugcucuucuug

SEQ ID NO: 5859 - RNA, 22 nt, Artificial Sequence
  GATA2 Guide RNA
cuccuccccuuucuugcucuuc

SEQ ID NO: 5860 - RNA, 22 nt, Artificial Sequence
  GATA2 Guide RNA
cuccucgaagcacuccuccccu

SEQ ID NO: 5861 - RNA, 22 nt, Artificial Sequence
  GATA2 Guide RNA
cucgaagcacuccuccccuuuc

SEQ ID NO: 5862 - RNA, 22 nt, Artificial Sequence
  GATA2 Guide RNA
gaaaggggaggagugcuucgag

SEQ ID NO: 5863 - RNA, 22 nt, Artificial Sequence
  GATA2 Guide RNA
gaagagcaagaaaggggaggag

SEQ ID NO: 5864 - RNA, 22 nt, Artificial Sequence
  GATA2 Guide RNA
gaagcacuccuccccuuucuug

SEQ ID NO: 5865 - RNA, 22 nt, Artificial Sequence
  GATA2 Guide RNA
gacagcuccucgaagcacuccu

SEQ ID NO: 5866 - RNA, 22 nt, Artificial Sequence
  GATA2 Guide RNA
gagcaagaaaggggaggagugc

SEQ ID NO: 5867 - RNA, 22 nt, Artificial Sequence
  GATA2 Guide RNA
gaggagugcuucgaggagcugu

SEQ ID NO: 5868 - RNA, 22 nt, Artificial Sequence
  GATA2 Guide RNA
gcaagaaaggggaggagugcuu

SEQ ID NO: 5869 - RNA, 22 nt, Artificial Sequence
  GATA2 Guide RNA
gcacuccuccccuuucuugcuc

SEQ ID NO: 5870 - RNA, 22 nt, Artificial Sequence
  GATA2 Guide RNA
gcuccucgaagcacuccucccc

SEQ ID NO: 5871 - RNA, 22 nt, Artificial Sequence
  GATA2 Guide RNA
ggaggagugcuucgaggagcug

SEQ ID NO: 5872 - RNA, 22 nt, Artificial Sequence
  GATA2 Guide RNA
gggaggagugcuucgaggagcu

SEQ ID NO: 5873 - RNA, 22 nt, Artificial Sequence
  GATA2 Guide RNA
ggggaggagugcuucgaggagc

SEQ ID NO: 5874 - RNA, 22 nt, Artificial Sequence
  GATA2 Guide RNA
uccccuuucuugcucuucuugg

SEQ ID NO: 5875 - RNA, 22 nt, Artificial Sequence
  GATA2 Guide RNA
uccuccccuuucuugcucuucu

SEQ ID NO: 5876 - RNA, 22 nt, Artificial Sequence
  GATA2 Guide RNA
uccucgaagcacuccuccccuu

SEQ ID NO: 5877 - RNA, 22 nt, Artificial Sequence
  GATA2 Guide RNA
ucgaagcacuccuccccuuucu

SEQ ID NO: 5878 - RNA, 20 nt, Artificial Sequence
  GATA2 Guide RNA
aaaggugcggagugcuucga

SEQ ID NO: 5879 - RNA, 20 nt, Artificial Sequence
  GATA2 Guide RNA
aagaaaggugcggagugcuu

SEQ ID NO: 5880 - RNA, 20 nt, Artificial Sequence
  GATA2 Guide RNA
aagaagagcaagaaaggugc

SEQ ID NO: 5881 - RNA, 20 nt, Artificial Sequence
  GATA2 Guide RNA
aagagcaagaaaggugcgga

SEQ ID NO: 5882 - RNA, 20 nt, Artificial Sequence
  GATA2 Guide RNA
aagcacuccgcaccuuucuu

SEQ ID NO: 5883 - RNA, 20 nt, Artificial Sequence
  GATA2 Guide RNA
aaggugcggagugcuucgag

SEQ ID NO: 5884 - RNA, 20 nt, Artificial Sequence
  GATA2 Guide RNA
aaguccaagaagagcaagaa

SEQ ID NO: 5885 - RNA, 20 nt, Artificial Sequence
  GATA2 Guide RNA
accuuucuugcucuucuugg

SEQ ID NO: 5886 - RNA, 20 nt, Artificial Sequence
  GATA2 Guide RNA
acuccgcaccuuucuugcuc

SEQ ID NO: 5887 - RNA, 20 nt, Artificial Sequence
  GATA2 Guide RNA
agaaaggugcggagugcuuc

SEQ ID NO: 5888 - RNA, 20 nt, Artificial Sequence
  GATA2 Guide RNA
agaagagcaagaaaggugcg

SEQ ID NO: 5889 - RNA, 20 nt, Artificial Sequence
  GATA2 Guide RNA
agagcaagaaaggugcggag

SEQ ID NO: 5890 - RNA, 20 nt, Artificial Sequence
  GATA2 Guide RNA
agcaagaaaggugcggagug

SEQ ID NO: 5891 - RNA, 20 nt, Artificial Sequence
  GATA2 Guide RNA
agcacuccgcaccuuucuug

SEQ ID NO: 5892 - RNA, 20 nt, Artificial Sequence
  GATA2 Guide RNA
agcuccucgaagcacuccgc

SEQ ID NO: 5893 - RNA, 20 nt, Artificial Sequence
  GATA2 Guide RNA
aggugcggagugcuucgagg

SEQ ID NO: 5894 - RNA, 20 nt, Artificial Sequence
  GATA2 Guide RNA
aguccaagaagagcaagaaa

SEQ ID NO: 5895 - RNA, 20 nt, Artificial Sequence
  GATA2 Guide RNA
caagaaaggugcggagugcu

SEQ ID NO: 5896 - RNA, 20 nt, Artificial Sequence
  GATA2 Guide RNA
caagaagagcaagaaaggug

SEQ ID NO: 5897 - RNA, 20 nt, Artificial Sequence
  GATA2 Guide RNA
caccuuucuugcucuucuug

SEQ ID NO: 5898 - RNA, 20 nt, Artificial Sequence
  GATA2 Guide RNA
cacuccgcaccuuucuugcu

SEQ ID NO: 5899 - RNA, 20 nt, Artificial Sequence
  GATA2 Guide RNA
cagcuccucgaagcacuccg

SEQ ID NO: 5900 - RNA, 20 nt, Artificial Sequence
  GATA2 Guide RNA
ccaagaagagcaagaaaggu

SEQ ID NO: 5901 - RNA, 20 nt, Artificial Sequence
  GATA2 Guide RNA
ccgcaccuuucuugcucuuc

SEQ ID NO: 5902 - RNA, 20 nt, Artificial Sequence
  GATA2 Guide RNA
ccucgaagcacuccgcaccu

SEQ ID NO: 5903 - RNA, 20 nt, Artificial Sequence
  GATA2 Guide RNA
cgaagcacuccgcaccuuuc

SEQ ID NO: 5904 - RNA, 20 nt, Artificial Sequence
  GATA2 Guide RNA
cgcaccuuucuugcucuucu

SEQ ID NO: 5905 - RNA, 20 nt, Artificial Sequence
  GATA2 Guide RNA
cuccgcaccuuucuugcucu

SEQ ID NO: 5906 - RNA, 20 nt, Artificial Sequence
  GATA2 Guide RNA
cuccucgaagcacuccgcac

SEQ ID NO: 5907 - RNA, 20 nt, Artificial Sequence
  GATA2 Guide RNA
cucgaagcacuccgcaccuu

SEQ ID NO: 5908 - RNA, 20 nt, Artificial Sequence
  GATA2 Guide RNA
gaaaggugcggagugcuucg

SEQ ID NO: 5909 - RNA, 20 nt, Artificial Sequence
  GATA2 Guide RNA
gaagagcaagaaaggugcgg

SEQ ID NO: 5910 - RNA, 20 nt, Artificial Sequence
  GATA2 Guide RNA
gaagcacuccgcaccuuucu

SEQ ID NO: 5911 - RNA, 20 nt, Artificial Sequence
  GATA2 Guide RNA
gagcaagaaaggugcggagu

SEQ ID NO: 5912 - RNA, 20 nt, Artificial Sequence
  GATA2 Guide RNA
gcaagaaaggugcggagugc

SEQ ID NO: 5913 - RNA, 20 nt, Artificial Sequence
  GATA2 Guide RNA
gcaccuuucuugcucuucuu

SEQ ID NO: 5914 - RNA, 20 nt, Artificial Sequence
  GATA2 Guide RNA
gcacuccgcaccuuucuugc

SEQ ID NO: 5915 - RNA, 20 nt, Artificial Sequence
  GATA2 Guide RNA
gcuccucgaagcacuccgca

SEQ ID NO: 5916 - RNA, 20 nt, Artificial Sequence
  GATA2 Guide RNA
ggugcggagugcuucgagga

SEQ ID NO: 5917 - RNA, 20 nt, Artificial Sequence
  GATA2 Guide RNA
gugcggagugcuucgaggag

SEQ ID NO: 5918 - RNA, 20 nt, Artificial Sequence
  GATA2 Guide RNA
uccgcaccuuucuugcucuu

SEQ ID NO: 5919 - RNA, 20 nt, Artificial Sequence
  GATA2 Guide RNA
uccucgaagcacuccgcacc

SEQ ID NO: 5920 - RNA, 20 nt, Artificial Sequence
  GATA2 Guide RNA
ucgaagcacuccgcaccuuu

SEQ ID NO: 5921 - RNA, 21 nt, Artificial Sequence
  GATA2 Guide RNA
aaaggugcggagugcuucgag

SEQ ID NO: 5922 - RNA, 21 nt, Artificial Sequence
  GATA2 Guide RNA
aagaaaggugcggagugcuuc

SEQ ID NO: 5923 - RNA, 21 nt, Artificial Sequence
  GATA2 Guide RNA
aagaagagcaagaaaggugcg

SEQ ID NO: 5924 - RNA, 21 nt, Artificial Sequence
  GATA2 Guide RNA
aagagcaagaaaggugcggag

SEQ ID NO: 5925 - RNA, 21 nt, Artificial Sequence
  GATA2 Guide RNA
aagcacuccgcaccuuucuug

SEQ ID NO: 5926 - RNA, 21 nt, Artificial Sequence
  GATA2 Guide RNA
aaggugcggagugcuucgagg

SEQ ID NO: 5927 - RNA, 21 nt, Artificial Sequence
  GATA2 Guide RNA
aaguccaagaagagcaagaaa

SEQ ID NO: 5928 - RNA, 21 nt, Artificial Sequence
  GATA2 Guide RNA
acagcuccucgaagcacuccg

SEQ ID NO: 5929 - RNA, 21 nt, Artificial Sequence
  GATA2 Guide RNA
accuuucuugcucuucuugga

SEQ ID NO: 5930 - RNA, 21 nt, Artificial Sequence
  GATA2 Guide RNA
acuccgcaccuuucuugcucu

SEQ ID NO: 5931 - RNA, 21 nt, Artificial Sequence
  GATA2 Guide RNA
agaaaggugcggagugcuucg

SEQ ID NO: 5932 - RNA, 21 nt, Artificial Sequence
  GATA2 Guide RNA
agaagagcaagaaaggugcgg

SEQ ID NO: 5933 - RNA, 21 nt, Artificial Sequence
  GATA2 Guide RNA
agagcaagaaaggugcggagu

SEQ ID NO: 5934 - RNA, 21 nt, Artificial Sequence
  GATA2 Guide RNA
agcaagaaaggugcggagugc

SEQ ID NO: 5935 - RNA, 21 nt, Artificial Sequence
  GATA2 Guide RNA
agcacuccgcaccuuucuugc

SEQ ID NO: 5936 - RNA, 21 nt, Artificial Sequence
  GATA2 Guide RNA
agcuccucgaagcacuccgca

SEQ ID NO: 5937 - RNA, 21 nt, Artificial Sequence
  GATA2 Guide RNA
aggugcggagugcuucgagga

SEQ ID NO: 5938 - RNA, 21 nt, Artificial Sequence
  GATA2 Guide RNA
caagaaaggugcggagugcuu

SEQ ID NO: 5939 - RNA, 21 nt, Artificial Sequence
  GATA2 Guide RNA
caagaagagcaagaaaggugc

SEQ ID NO: 5940 - RNA, 21 nt, Artificial Sequence
  GATA2 Guide RNA
caaguccaagaagagcaagaa

SEQ ID NO: 5941 - RNA, 21 nt, Artificial Sequence
  GATA2 Guide RNA
caccuuucuugcucuucuugg

SEQ ID NO: 5942 - RNA, 21 nt, Artificial Sequence
  GATA2 Guide RNA
cacuccgcaccuuucuugcuc

SEQ ID NO: 5943 - RNA, 21 nt, Artificial Sequence
  GATA2 Guide RNA
cagcuccucgaagcacuccgc

SEQ ID NO: 5944 - RNA, 21 nt, Artificial Sequence
  GATA2 Guide RNA
ccaagaagagcaagaaaggug

SEQ ID NO: 5945 - RNA, 21 nt, Artificial Sequence
  GATA2 Guide RNA
ccgcaccuuucuugcucuucu

SEQ ID NO: 5946 - RNA, 21 nt, Artificial Sequence
  GATA2 Guide RNA
ccucgaagcacuccgcaccuu

SEQ ID NO: 5947 - RNA, 21 nt, Artificial Sequence
  GATA2 Guide RNA
cgaagcacuccgcaccuuucu

SEQ ID NO: 5948 - RNA, 21 nt, Artificial Sequence
  GATA2 Guide RNA
cgcaccuuucuugcucuucuu

SEQ ID NO: 5949 - RNA, 21 nt, Artificial Sequence
  GATA2 Guide RNA
cuccgcaccuuucuugcucuu

SEQ ID NO: 5950 - RNA, 21 nt, Artificial Sequence
  GATA2 Guide RNA
cuccucgaagcacuccgcacc

SEQ ID NO: 5951 - RNA, 21 nt, Artificial Sequence
  GATA2 Guide RNA
cucgaagcacuccgcaccuuu

SEQ ID NO: 5952 - RNA, 21 nt, Artificial Sequence
  GATA2 Guide RNA
gaaaggugcggagugcuucga

SEQ ID NO: 5953 - RNA, 21 nt, Artificial Sequence
  GATA2 Guide RNA
gaagagcaagaaaggugcgga

SEQ ID NO: 5954 - RNA, 21 nt, Artificial Sequence
  GATA2 Guide RNA
gaagcacuccgcaccuuucuu

SEQ ID NO: 5955 - RNA, 21 nt, Artificial Sequence
  GATA2 Guide RNA
gagcaagaaaggugcggagug

SEQ ID NO: 5956 - RNA, 21 nt, Artificial Sequence
  GATA2 Guide RNA
gcaagaaaggugcggagugcu

SEQ ID NO: 5957 - RNA, 21 nt, Artificial Sequence
  GATA2 Guide RNA
gcaccuuucuugcucuucuug

SEQ ID NO: 5958 - RNA, 21 nt, Artificial Sequence
  GATA2 Guide RNA
gcacuccgcaccuuucuugcu

SEQ ID NO: 5959 - RNA, 21 nt, Artificial Sequence
  GATA2 Guide RNA
gcuccucgaagcacuccgcac

SEQ ID NO: 5960 - RNA, 21 nt, Artificial Sequence
  GATA2 Guide RNA
ggugcggagugcuucgaggag

SEQ ID NO: 5961 - RNA, 21 nt, Artificial Sequence
  GATA2 Guide RNA
gugcggagugcuucgaggagc

SEQ ID NO: 5962 - RNA, 21 nt, Artificial Sequence
  GATA2 Guide RNA
uccaagaagagcaagaaaggu

SEQ ID NO: 5963 - RNA, 21 nt, Artificial Sequence
  GATA2 Guide RNA
uccgcaccuuucuugcucuuc

SEQ ID NO: 5964 - RNA, 21 nt, Artificial Sequence
  GATA2 Guide RNA
uccucgaagcacuccgcaccu

SEQ ID NO: 5965 - RNA, 21 nt, Artificial Sequence
  GATA2 Guide RNA
ucgaagcacuccgcaccuuuc

SEQ ID NO: 5966 - RNA, 22 nt, Artificial Sequence
  GATA2 Guide RNA
aaaggugcggagugcuucgagg

SEQ ID NO: 5967 - RNA, 22 nt, Artificial Sequence
  GATA2 Guide RNA
aagaaaggugcggagugcuucg

SEQ ID NO: 5968 - RNA, 22 nt, Artificial Sequence
  GATA2 Guide RNA
aagaagagcaagaaaggugcgg

SEQ ID NO: 5969 - RNA, 22 nt, Artificial Sequence
  GATA2 Guide RNA
aagagcaagaaaggugcggagu

SEQ ID NO: 5970 - RNA, 22 nt, Artificial Sequence
  GATA2 Guide RNA
aagcacuccgcaccuuucuugc

SEQ ID NO: 5971 - RNA, 22 nt, Artificial Sequence
  GATA2 Guide RNA
aaggugcggagugcuucgagga

SEQ ID NO: 5972 - RNA, 22 nt, Artificial Sequence
  GATA2 Guide RNA
acaaguccaagaagagcaagaa

SEQ ID NO: 5973 - RNA, 22 nt, Artificial Sequence
  GATA2 Guide RNA
acagcuccucgaagcacuccgc

SEQ ID NO: 5974 - RNA, 22 nt, Artificial Sequence
  GATA2 Guide RNA
accuuucuugcucuucuuggac

SEQ ID NO: 5975 - RNA, 22 nt, Artificial Sequence
  GATA2 Guide RNA
acuccgcaccuuucuugcucuu

SEQ ID NO: 5976 - RNA, 22 nt, Artificial Sequence
  GATA2 Guide RNA
agaaaggugcggagugcuucga

SEQ ID NO: 5977 - RNA, 22 nt, Artificial Sequence
  GATA2 Guide RNA
agaagagcaagaaaggugcgga

SEQ ID NO: 5978 - RNA, 22 nt, Artificial Sequence
  GATA2 Guide RNA
agagcaagaaaggugcggagug

SEQ ID NO: 5979 - RNA, 22 nt, Artificial Sequence
  GATA2 Guide RNA
agcaagaaaggugcggagugcu

SEQ ID NO: 5980 - RNA, 22 nt, Artificial Sequence
  GATA2 Guide RNA
agcacuccgcaccuuucuugcu

SEQ ID NO: 5981 - RNA, 22 nt, Artificial Sequence
  GATA2 Guide RNA
agcuccucgaagcacuccgcac

SEQ ID NO: 5982 - RNA, 22 nt, Artificial Sequence
  GATA2 Guide RNA
aggugcggagugcuucgaggag

SEQ ID NO: 5983 - RNA, 22 nt, Artificial Sequence
  GATA2 Guide RNA
caagaaaggugcggagugcuuc

SEQ ID NO: 5984 - RNA, 22 nt, Artificial Sequence
  GATA2 Guide RNA
caagaagagcaagaaaggugcg

SEQ ID NO: 5985 - RNA, 22 nt, Artificial Sequence
  GATA2 Guide RNA
caaguccaagaagagcaagaaa

SEQ ID NO: 5986 - RNA, 22 nt, Artificial Sequence
  GATA2 Guide RNA
caccuuucuugcucuucuugga

SEQ ID NO: 5987 - RNA, 22 nt, Artificial Sequence
  GATA2 Guide RNA
cacuccgcaccuuucuugcucu

SEQ ID NO: 5988 - RNA, 22 nt, Artificial Sequence
  GATA2 Guide RNA
cagcuccucgaagcacuccgca

SEQ ID NO: 5989 - RNA, 22 nt, Artificial Sequence
  GATA2 Guide RNA
ccaagaagagcaagaaaggugc

SEQ ID NO: 5990 - RNA, 22 nt, Artificial Sequence
  GATA2 Guide RNA
ccgcaccuuucuugcucuucuu

SEQ ID NO: 5991 - RNA, 22 nt, Artificial Sequence
  GATA2 Guide RNA
ccucgaagcacuccgcaccuuu

SEQ ID NO: 5992 - RNA, 22 nt, Artificial Sequence
  GATA2 Guide RNA
cgaagcacuccgcaccuuucuu

SEQ ID NO: 5993 - RNA, 22 nt, Artificial Sequence
  GATA2 Guide RNA
cgcaccuuucuugcucuucuug

SEQ ID NO: 5994 - RNA, 22 nt, Artificial Sequence
  GATA2 Guide RNA
cuccgcaccuuucuugcucuuc

SEQ ID NO: 5995 - RNA, 22 nt, Artificial Sequence
  GATA2 Guide RNA
cuccucgaagcacuccgcaccu

SEQ ID NO: 5996 - RNA, 22 nt, Artificial Sequence
  GATA2 Guide RNA
cucgaagcacuccgcaccuuuc

SEQ ID NO: 5997 - RNA, 22 nt, Artificial Sequence
  GATA2 Guide RNA
gaaaggugcggagugcuucgag

SEQ ID NO: 5998 - RNA, 22 nt, Artificial Sequence
  GATA2 Guide RNA
gaagagcaagaaaggugcggag

SEQ ID NO: 5999 - RNA, 22 nt, Artificial Sequence
  GATA2 Guide RNA
gaagcacuccgcaccuuucuug

SEQ ID NO: 6000 - RNA, 22 nt, Artificial Sequence
  GATA2 Guide RNA
gacagcuccucgaagcacuccg

SEQ ID NO: 6001 - RNA, 22 nt, Artificial Sequence
  GATA2 Guide RNA
gagcaagaaaggugcggagugc

SEQ ID NO: 6002 - RNA, 22 nt, Artificial Sequence
  GATA2 Guide RNA
gcaagaaaggugcggagugcuu

SEQ ID NO: 6003 - RNA, 22 nt, Artificial Sequence
  GATA2 Guide RNA
gcaccuuucuugcucuucuugg

SEQ ID NO: 6004 - RNA, 22 nt, Artificial Sequence
  GATA2 Guide RNA
gcacuccgcaccuuucuugcuc

SEQ ID NO: 6005 - RNA, 22 nt, Artificial Sequence
  GATA2 Guide RNA
gcuccucgaagcacuccgcacc

SEQ ID NO: 6006 - RNA, 22 nt, Artificial Sequence
  GATA2 Guide RNA
ggugcggagugcuucgaggagc

SEQ ID NO: 6007 - RNA, 22 nt, Artificial Sequence
  GATA2 Guide RNA
guccaagaagagcaagaaaggu

SEQ ID NO: 6008 - RNA, 22 nt, Artificial Sequence
  GATA2 Guide RNA
gugcggagugcuucgaggagcu

SEQ ID NO: 6009 - RNA, 22 nt, Artificial Sequence
  GATA2 Guide RNA
uccaagaagagcaagaaaggug

SEQ ID NO: 6010 - RNA, 22 nt, Artificial Sequence
  GATA2 Guide RNA
uccgcaccuuucuugcucuucu

SEQ ID NO: 6011 - RNA, 22 nt, Artificial Sequence
  GATA2 Guide RNA
uccucgaagcacuccgcaccuu

SEQ ID NO: 6012 - RNA, 22 nt, Artificial Sequence
  GATA2 Guide RNA
ucgaagcacuccgcaccuuucu

SEQ ID NO: 6013 - RNA, 20 nt, Artificial Sequence
  GATA2 Guide RNA
aacaaguccaagaugagcaa

SEQ ID NO: 6014 - RNA, 20 nt, Artificial Sequence
  GATA2 Guide RNA
aagaugagcaagaaaggggc

SEQ ID NO: 6015 - RNA, 20 nt, Artificial Sequence
  GATA2 Guide RNA
aagauguccaacaaguccaa

SEQ ID NO: 6016 - RNA, 20 nt, Artificial Sequence
  GATA2 Guide RNA
aaguccaagaugagcaagaa

SEQ ID NO: 6017 - RNA, 20 nt, Artificial Sequence
  GATA2 Guide RNA
acaaguccaagaugagcaag

SEQ ID NO: 6018 - RNA, 20 nt, Artificial Sequence
  GATA2 Guide RNA
acuccgccccuuucuugcuc

SEQ ID NO: 6019 - RNA, 20 nt, Artificial Sequence
  GATA2 Guide RNA
agaugagcaagaaaggggcg

SEQ ID NO: 6020 - RNA, 20 nt, Artificial Sequence
  GATA2 Guide RNA
agauguccaacaaguccaag

SEQ ID NO: 6021 - RNA, 20 nt, Artificial Sequence
  GATA2 Guide RNA
aguccaagaugagcaagaaa

SEQ ID NO: 6022 - RNA, 20 nt, Artificial Sequence
  GATA2 Guide RNA
aucuuggacuuguuggacau

SEQ ID NO: 6023 - RNA, 20 nt, Artificial Sequence
  GATA2 Guide RNA
augagcaagaaaggggcgga

SEQ ID NO: 6024 - RNA, 20 nt, Artificial Sequence
  GATA2 Guide RNA
auguccaacaaguccaagau

SEQ ID NO: 6025 - RNA, 20 nt, Artificial Sequence
  GATA2 Guide RNA
caacaaguccaagaugagca

SEQ ID NO: 6026 - RNA, 20 nt, Artificial Sequence
  GATA2 Guide RNA
caagaugagcaagaaagggg

SEQ ID NO: 6027 - RNA, 20 nt, Artificial Sequence
  GATA2 Guide RNA
caaguccaagaugagcaaga

SEQ ID NO: 6028 - RNA, 20 nt, Artificial Sequence
  GATA2 Guide RNA
cacuccgccccuuucuugcu

SEQ ID NO: 6029 - RNA, 20 nt, Artificial Sequence
  GATA2 Guide RNA
caucuuggacuuguuggaca

SEQ ID NO: 6030 - RNA, 20 nt, Artificial Sequence
  GATA2 Guide RNA
ccaacaaguccaagaugagc

SEQ ID NO: 6031 - RNA, 20 nt, Artificial Sequence
  GATA2 Guide RNA
ccaagaugagcaagaaaggg

SEQ ID NO: 6032 - RNA, 20 nt, Artificial Sequence
  GATA2 Guide RNA
ccccuuucuugcucaucuug

SEQ ID NO: 6033 - RNA, 20 nt, Artificial Sequence
  GATA2 Guide RNA
cccuuucuugcucaucuugg

SEQ ID NO: 6034 - RNA, 20 nt, Artificial Sequence
  GATA2 Guide RNA
ccgccccuuucuugcucauc

SEQ ID NO: 6035 - RNA, 20 nt, Artificial Sequence
  GATA2 Guide RNA
ccuuucuugcucaucuugga

SEQ ID NO: 6036 - RNA, 20 nt, Artificial Sequence
  GATA2 Guide RNA
cgccccuuucuugcucaucu

SEQ ID NO: 6037 - RNA, 20 nt, Artificial Sequence
  GATA2 Guide RNA
cucaucuuggacuuguugga

SEQ ID NO: 6038 - RNA, 20 nt, Artificial Sequence
  GATA2 Guide RNA
cuccgccccuuucuugcuca

SEQ ID NO: 6039 - RNA, 20 nt, Artificial Sequence
  GATA2 Guide RNA
cuugcucaucuuggacuugu

SEQ ID NO: 6040 - RNA, 20 nt, Artificial Sequence
  GATA2 Guide RNA
cuuucuugcucaucuuggac

SEQ ID NO: 6041 - RNA, 20 nt, Artificial Sequence
  GATA2 Guide RNA
gaagauguccaacaagucca

SEQ ID NO: 6042 - RNA, 20 nt, Artificial Sequence
  GATA2 Guide RNA
gaugagcaagaaaggggcgg

SEQ ID NO: 6043 - RNA, 20 nt, Artificial Sequence
  GATA2 Guide RNA
gauguccaacaaguccaaga

SEQ ID NO: 6044 - RNA, 20 nt, Artificial Sequence
  GATA2 Guide RNA
gcacuccgccccuuucuugc

SEQ ID NO: 6045 - RNA, 20 nt, Artificial Sequence
  GATA2 Guide RNA
gccccuuucuugcucaucuu

SEQ ID NO: 6046 - RNA, 20 nt, Artificial Sequence
  GATA2 Guide RNA
gcucaucuuggacuuguugg

SEQ ID NO: 6047 - RNA, 20 nt, Artificial Sequence
  GATA2 Guide RNA
guccaacaaguccaagauga

SEQ ID NO: 6048 - RNA, 20 nt, Artificial Sequence
  GATA2 Guide RNA
guccaagaugagcaagaaag

SEQ ID NO: 6049 - RNA, 20 nt, Artificial Sequence
  GATA2 Guide RNA
ucaucuuggacuuguuggac

SEQ ID NO: 6050 - RNA, 20 nt, Artificial Sequence
  GATA2 Guide RNA
uccaacaaguccaagaugag

SEQ ID NO: 6051 - RNA, 20 nt, Artificial Sequence
  GATA2 Guide RNA
uccaagaugagcaagaaagg

SEQ ID NO: 6052 - RNA, 20 nt, Artificial Sequence
  GATA2 Guide RNA
uccgccccuuucuugcucau

SEQ ID NO: 6053 - RNA, 20 nt, Artificial Sequence
  GATA2 Guide RNA
ucuugcucaucuuggacuug

SEQ ID NO: 6054 - RNA, 20 nt, Artificial Sequence
  GATA2 Guide RNA
ugcucaucuuggacuuguug

SEQ ID NO: 6055 - RNA, 20 nt, Artificial Sequence
  GATA2 Guide RNA
uguccaacaaguccaagaug

SEQ ID NO: 6056 - RNA, 20 nt, Artificial Sequence
  GATA2 Guide RNA
uucuugcucaucuuggacuu

SEQ ID NO: 6057 - RNA, 20 nt, Artificial Sequence
  GATA2 Guide RNA
uugcucaucuuggacuuguu

SEQ ID NO: 6058 - RNA, 20 nt, Artificial Sequence
  GATA2 Guide RNA
uuucuugcucaucuuggacu

SEQ ID NO: 6059 - RNA, 21 nt, Artificial Sequence
  GATA2 Guide RNA
aacaaguccaagaugagcaag

SEQ ID NO: 6060 - RNA, 21 nt, Artificial Sequence
  GATA2 Guide RNA
aagaugagcaagaaaggggcg

SEQ ID NO: 6061 - RNA, 21 nt, Artificial Sequence
  GATA2 Guide RNA
aagauguccaacaaguccaag

SEQ ID NO: 6062 - RNA, 21 nt, Artificial Sequence
  GATA2 Guide RNA
aaguccaagaugagcaagaaa

SEQ ID NO: 6063 - RNA, 21 nt, Artificial Sequence
  GATA2 Guide RNA
acaaguccaagaugagcaaga

SEQ ID NO: 6064 - RNA, 21 nt, Artificial Sequence
  GATA2 Guide RNA
acuccgccccuuucuugcuca

SEQ ID NO: 6065 - RNA, 21 nt, Artificial Sequence
  GATA2 Guide RNA
agaugagcaagaaaggggcgg

SEQ ID NO: 6066 - RNA, 21 nt, Artificial Sequence
  GATA2 Guide RNA
agauguccaacaaguccaaga

SEQ ID NO: 6067 - RNA, 21 nt, Artificial Sequence
  GATA2 Guide RNA
agcacuccgccccuuucuugc

SEQ ID NO: 6068 - RNA, 21 nt, Artificial Sequence
  GATA2 Guide RNA
aguccaagaugagcaagaaag

SEQ ID NO: 6069 - RNA, 21 nt, Artificial Sequence
  GATA2 Guide RNA
aucuuggacuuguuggacauc

SEQ ID NO: 6070 - RNA, 21 nt, Artificial Sequence
  GATA2 Guide RNA
augagcaagaaaggggcggag

SEQ ID NO: 6071 - RNA, 21 nt, Artificial Sequence
  GATA2 Guide RNA
auguccaacaaguccaagaug

SEQ ID NO: 6072 - RNA, 21 nt, Artificial Sequence
  GATA2 Guide RNA
caacaaguccaagaugagcaa

SEQ ID NO: 6073 - RNA, 21 nt, Artificial Sequence
  GATA2 Guide RNA
caagaugagcaagaaaggggc

SEQ ID NO: 6074 - RNA, 21 nt, Artificial Sequence
  GATA2 Guide RNA
caaguccaagaugagcaagaa

SEQ ID NO: 6075 - RNA, 21 nt, Artificial Sequence
  GATA2 Guide RNA
cacuccgccccuuucuugcuc

SEQ ID NO: 6076 - RNA, 21 nt, Artificial Sequence
  GATA2 Guide RNA
caucuuggacuuguuggacau

SEQ ID NO: 6077 - RNA, 21 nt, Artificial Sequence
  GATA2 Guide RNA
ccaacaaguccaagaugagca

SEQ ID NO: 6078 - RNA, 21 nt, Artificial Sequence
  GATA2 Guide RNA
ccaagaugagcaagaaagggg

SEQ ID NO: 6079 - RNA, 21 nt, Artificial Sequence
  GATA2 Guide RNA
ccccuuucuugcucaucuugg

SEQ ID NO: 6080 - RNA, 21 nt, Artificial Sequence
  GATA2 Guide RNA
cccuuucuugcucaucuugga

SEQ ID NO: 6081 - RNA, 21 nt, Artificial Sequence
  GATA2 Guide RNA
ccgccccuuucuugcucaucu

SEQ ID NO: 6082 - RNA, 21 nt, Artificial Sequence
  GATA2 Guide RNA
ccuuucuugcucaucuuggac

SEQ ID NO: 6083 - RNA, 21 nt, Artificial Sequence
  GATA2 Guide RNA
cgccccuuucuugcucaucuu

SEQ ID NO: 6084 - RNA, 21 nt, Artificial Sequence
  GATA2 Guide RNA
cucaucuuggacuuguuggac

SEQ ID NO: 6085 - RNA, 21 nt, Artificial Sequence
  GATA2 Guide RNA
cuccgccccuuucuugcucau

SEQ ID NO: 6086 - RNA, 21 nt, Artificial Sequence
  GATA2 Guide RNA
cuugcucaucuuggacuuguu

SEQ ID NO: 6087 - RNA, 21 nt, Artificial Sequence
  GATA2 Guide RNA
cuuucuugcucaucuuggacu

SEQ ID NO: 6088 - RNA, 21 nt, Artificial Sequence
  GATA2 Guide RNA
gaagauguccaacaaguccaa

SEQ ID NO: 6089 - RNA, 21 nt, Artificial Sequence
  GATA2 Guide RNA
gaugagcaagaaaggggcgga

SEQ ID NO: 6090 - RNA, 21 nt, Artificial Sequence
  GATA2 Guide RNA
gauguccaacaaguccaagau

SEQ ID NO: 6091 - RNA, 21 nt, Artificial Sequence
  GATA2 Guide RNA
gcacuccgccccuuucuugcu

SEQ ID NO: 6092 - RNA, 21 nt, Artificial Sequence
  GATA2 Guide RNA
gccccuuucuugcucaucuug

SEQ ID NO: 6093 - RNA, 21 nt, Artificial Sequence
  GATA2 Guide RNA
gcucaucuuggacuuguugga

SEQ ID NO: 6094 - RNA, 21 nt, Artificial Sequence
  GATA2 Guide RNA
ggaagauguccaacaagucca

SEQ ID NO: 6095 - RNA, 21 nt, Artificial Sequence
  GATA2 Guide RNA
guccaacaaguccaagaugag

SEQ ID NO: 6096 - RNA, 21 nt, Artificial Sequence
  GATA2 Guide RNA
guccaagaugagcaagaaagg

SEQ ID NO: 6097 - RNA, 21 nt, Artificial Sequence
  GATA2 Guide RNA
ucaucuuggacuuguuggaca

SEQ ID NO: 6098 - RNA, 21 nt, Artificial Sequence
  GATA2 Guide RNA
uccaacaaguccaagaugagc

SEQ ID NO: 6099 - RNA, 21 nt, Artificial Sequence
  GATA2 Guide RNA
uccaagaugagcaagaaaggg

SEQ ID NO: 6100 - RNA, 21 nt, Artificial Sequence
  GATA2 Guide RNA
uccgccccuuucuugcucauc

SEQ ID NO: 6101 - RNA, 21 nt, Artificial Sequence
  GATA2 Guide RNA
ucuugcucaucuuggacuugu

SEQ ID NO: 6102 - RNA, 21 nt, Artificial Sequence
  GATA2 Guide RNA
ugcucaucuuggacuuguugg

SEQ ID NO: 6103 - RNA, 21 nt, Artificial Sequence
  GATA2 Guide RNA
uguccaacaaguccaagauga

SEQ ID NO: 6104 - RNA, 21 nt, Artificial Sequence
  GATA2 Guide RNA
uucuugcucaucuuggacuug

SEQ ID NO: 6105 - RNA, 21 nt, Artificial Sequence
  GATA2 Guide RNA
uugcucaucuuggacuuguug

SEQ ID NO: 6106 - RNA, 21 nt, Artificial Sequence
  GATA2 Guide RNA
uuucuugcucaucuuggacuu

SEQ ID NO: 6107 - RNA, 22 nt, Artificial Sequence
  GATA2 Guide RNA
aacaaguccaagaugagcaaga

SEQ ID NO: 6108 - RNA, 22 nt, Artificial Sequence
  GATA2 Guide RNA
aagaugagcaagaaaggggcgg

SEQ ID NO: 6109 - RNA, 22 nt, Artificial Sequence
  GATA2 Guide RNA
aagauguccaacaaguccaaga

SEQ ID NO: 6110 - RNA, 22 nt, Artificial Sequence
  GATA2 Guide RNA
aagcacuccgccccuuucuugc

SEQ ID NO: 6111 - RNA, 22 nt, Artificial Sequence
  GATA2 Guide RNA
aaguccaagaugagcaagaaag

SEQ ID NO: 6112 - RNA, 22 nt, Artificial Sequence
  GATA2 Guide RNA
acaaguccaagaugagcaagaa

SEQ ID NO: 6113 - RNA, 22 nt, Artificial Sequence
  GATA2 Guide RNA
acuccgccccuuucuugcucau

SEQ ID NO: 6114 - RNA, 22 nt, Artificial Sequence
  GATA2 Guide RNA
agaugagcaagaaaggggcgga

SEQ ID NO: 6115 - RNA, 22 nt, Artificial Sequence
  GATA2 Guide RNA
agauguccaacaaguccaagau

SEQ ID NO: 6116 - RNA, 22 nt, Artificial Sequence
  GATA2 Guide RNA
agcacuccgccccuuucuugcu

SEQ ID NO: 6117 - RNA, 22 nt, Artificial Sequence
  GATA2 Guide RNA
aguccaagaugagcaagaaagg

SEQ ID NO: 6118 - RNA, 22 nt, Artificial Sequence
  GATA2 Guide RNA
aucuuggacuuguuggacaucu

SEQ ID NO: 6119 - RNA, 22 nt, Artificial Sequence
  GATA2 Guide RNA
augagcaagaaaggggcggagu

SEQ ID NO: 6120 - RNA, 22 nt, Artificial Sequence
  GATA2 Guide RNA
auguccaacaaguccaagauga

SEQ ID NO: 6121 - RNA, 22 nt, Artificial Sequence
  GATA2 Guide RNA
caacaaguccaagaugagcaag

SEQ ID NO: 6122 - RNA, 22 nt, Artificial Sequence
  GATA2 Guide RNA
caagaugagcaagaaaggggcg

SEQ ID NO: 6123 - RNA, 22 nt, Artificial Sequence
  GATA2 Guide RNA
caaguccaagaugagcaagaaa

SEQ ID NO: 6124 - RNA, 22 nt, Artificial Sequence
  GATA2 Guide RNA
cacuccgccccuuucuugcuca

SEQ ID NO: 6125 - RNA, 22 nt, Artificial Sequence
  GATA2 Guide RNA
caucuuggacuuguuggacauc

SEQ ID NO: 6126 - RNA, 22 nt, Artificial Sequence
  GATA2 Guide RNA
ccaacaaguccaagaugagcaa

SEQ ID NO: 6127 - RNA, 22 nt, Artificial Sequence
  GATA2 Guide RNA
ccaagaugagcaagaaaggggc

SEQ ID NO: 6128 - RNA, 22 nt, Artificial Sequence
  GATA2 Guide RNA
ccccuuucuugcucaucuugga

SEQ ID NO: 6129 - RNA, 22 nt, Artificial Sequence
  GATA2 Guide RNA
cccuuucuugcucaucuuggac

SEQ ID NO: 6130 - RNA, 22 nt, Artificial Sequence
  GATA2 Guide RNA
ccgccccuuucuugcucaucuu

SEQ ID NO: 6131 - RNA, 22 nt, Artificial Sequence
  GATA2 Guide RNA
ccuuucuugcucaucuuggacu

SEQ ID NO: 6132 - RNA, 22 nt, Artificial Sequence
  GATA2 Guide RNA
cgccccuuucuugcucaucuug

SEQ ID NO: 6133 - RNA, 22 nt, Artificial Sequence
  GATA2 Guide RNA
cggaagauguccaacaagucca

SEQ ID NO: 6134 - RNA, 22 nt, Artificial Sequence
  GATA2 Guide RNA
cucaucuuggacuuguuggaca

SEQ ID NO: 6135 - RNA, 22 nt, Artificial Sequence
  GATA2 Guide RNA
cuccgccccuuucuugcucauc

SEQ ID NO: 6136 - RNA, 22 nt, Artificial Sequence
  GATA2 Guide RNA
cuugcucaucuuggacuuguug

SEQ ID NO: 6137 - RNA, 22 nt, Artificial Sequence
  GATA2 Guide RNA
cuuucuugcucaucuuggacuu

SEQ ID NO: 6138 - RNA, 22 nt, Artificial Sequence
  GATA2 Guide RNA
gaagauguccaacaaguccaag

SEQ ID NO: 6139 - RNA, 22 nt, Artificial Sequence
  GATA2 Guide RNA
gaugagcaagaaaggggcggag

SEQ ID NO: 6140 - RNA, 22 nt, Artificial Sequence
  GATA2 Guide RNA
gauguccaacaaguccaagaug

SEQ ID NO: 6141 - RNA, 22 nt, Artificial Sequence
  GATA2 Guide RNA
gcacuccgccccuuucuugcuc

SEQ ID NO: 6142 - RNA, 22 nt, Artificial Sequence
  GATA2 Guide RNA
gccccuuucuugcucaucuugg

SEQ ID NO: 6143 - RNA, 22 nt, Artificial Sequence
  GATA2 Guide RNA
gcucaucuuggacuuguuggac

SEQ ID NO: 6144 - RNA, 22 nt, Artificial Sequence
  GATA2 Guide RNA
ggaagauguccaacaaguccaa

SEQ ID NO: 6145 - RNA, 22 nt, Artificial Sequence
  GATA2 Guide RNA
guccaacaaguccaagaugagc

SEQ ID NO: 6146 - RNA, 22 nt, Artificial Sequence
  GATA2 Guide RNA
guccaagaugagcaagaaaggg

SEQ ID NO: 6147 - RNA, 22 nt, Artificial Sequence
  GATA2 Guide RNA
ucaucuuggacuuguuggacau

SEQ ID NO: 6148 - RNA, 22 nt, Artificial Sequence
  GATA2 Guide RNA
uccaacaaguccaagaugagca

SEQ ID NO: 6149 - RNA, 22 nt, Artificial Sequence
  GATA2 Guide RNA
uccaagaugagcaagaaagggg

SEQ ID NO: 6150 - RNA, 22 nt, Artificial Sequence
  GATA2 Guide RNA
uccgccccuuucuugcucaucu

SEQ ID NO: 6151 - RNA, 22 nt, Artificial Sequence
  GATA2 Guide RNA
ucuugcucaucuuggacuuguu

SEQ ID NO: 6152 - RNA, 22 nt, Artificial Sequence
  GATA2 Guide RNA
ugcucaucuuggacuuguugga

SEQ ID NO: 6153 - RNA, 22 nt, Artificial Sequence
  GATA2 Guide RNA
uguccaacaaguccaagaugag

SEQ ID NO: 6154 - RNA, 22 nt, Artificial Sequence
  GATA2 Guide RNA
uucuugcucaucuuggacuugu

SEQ ID NO: 6155 - RNA, 22 nt, Artificial Sequence
  GATA2 Guide RNA
uugcucaucuuggacuuguugg

SEQ ID NO: 6156 - RNA, 22 nt, Artificial Sequence
  GATA2 Guide RNA
uuucuugcucaucuuggacuug

SEQ ID NO: 6157 - RNA, 20 nt, Artificial Sequence
  GATA2 Guide RNA
aaccggaagauauccaacaa

SEQ ID NO: 6158 - RNA, 20 nt, Artificial Sequence
  GATA2 Guide RNA
aagauauccaacaaguccaa

SEQ ID NO: 6159 - RNA, 20 nt, Artificial Sequence
  GATA2 Guide RNA
accggaagauauccaacaag

SEQ ID NO: 6160 - RNA, 20 nt, Artificial Sequence
  GATA2 Guide RNA
acucggaaccggaagauauc

SEQ ID NO: 6161 - RNA, 20 nt, Artificial Sequence
  GATA2 Guide RNA
acuuguuggauaucuuccgg

SEQ ID NO: 6162 - RNA, 20 nt, Artificial Sequence
  GATA2 Guide RNA
agacucggaaccggaagaua

SEQ ID NO: 6163 - RNA, 20 nt, Artificial Sequence
  GATA2 Guide RNA
agauauccaacaaguccaag

SEQ ID NO: 6164 - RNA, 20 nt, Artificial Sequence
  GATA2 Guide RNA
auauccaacaaguccaagaa

SEQ ID NO: 6165 - RNA, 20 nt, Artificial Sequence
  GATA2 Guide RNA
auaucuuccgguuccgaguc

SEQ ID NO: 6166 - RNA, 20 nt, Artificial Sequence
  GATA2 Guide RNA
auccagacucggaaccggaa

SEQ ID NO: 6167 - RNA, 20 nt, Artificial Sequence
  GATA2 Guide RNA
cagacucggaaccggaagau

SEQ ID NO: 6168 - RNA, 20 nt, Artificial Sequence
  GATA2 Guide RNA
ccagacucggaaccggaaga

SEQ ID NO: 6169 - RNA, 20 nt, Artificial Sequence
  GATA2 Guide RNA
ccggaagauauccaacaagu

SEQ ID NO: 6170 - RNA, 20 nt, Artificial Sequence
  GATA2 Guide RNA
cggaaccggaagauauccaa

SEQ ID NO: 6171 - RNA, 20 nt, Artificial Sequence
  GATA2 Guide RNA
cggaagauauccaacaaguc

SEQ ID NO: 6172 - RNA, 20 nt, Artificial Sequence
  GATA2 Guide RNA
cucggaaccggaagauaucc

SEQ ID NO: 6173 - RNA, 20 nt, Artificial Sequence
  GATA2 Guide RNA
cucuucuuggacuuguugga

SEQ ID NO: 6174 - RNA, 20 nt, Artificial Sequence
  GATA2 Guide RNA
cuucuuggacuuguuggaua

SEQ ID NO: 6175 - RNA, 20 nt, Artificial Sequence
  GATA2 Guide RNA
cuuggacuuguuggauaucu

SEQ ID NO: 6176 - RNA, 20 nt, Artificial Sequence
  GATA2 Guide RNA
cuuguuggauaucuuccggu

SEQ ID NO: 6177 - RNA, 20 nt, Artificial Sequence
  GATA2 Guide RNA
gaaccggaagauauccaaca

SEQ ID NO: 6178 - RNA, 20 nt, Artificial Sequence
  GATA2 Guide RNA
gaagauauccaacaagucca

SEQ ID NO: 6179 - RNA, 20 nt, Artificial Sequence
  GATA2 Guide RNA
gacucggaaccggaagauau

SEQ ID NO: 6180 - RNA, 20 nt, Artificial Sequence
  GATA2 Guide RNA
gacuuguuggauaucuuccg

SEQ ID NO: 6181 - RNA, 20 nt, Artificial Sequence
  GATA2 Guide RNA
gauauccaacaaguccaaga

SEQ ID NO: 6182 - RNA, 20 nt, Artificial Sequence
  GATA2 Guide RNA
gauaucuuccgguuccgagu

SEQ ID NO: 6183 - RNA, 20 nt, Artificial Sequence
  GATA2 Guide RNA
gcucuucuuggacuuguugg

SEQ ID NO: 6184 - RNA, 20 nt, Artificial Sequence
  GATA2 Guide RNA
ggaaccggaagauauccaac

SEQ ID NO: 6185 - RNA, 20 nt, Artificial Sequence
  GATA2 Guide RNA
ggaagauauccaacaagucc

SEQ ID NO: 6186 - RNA, 20 nt, Artificial Sequence
  GATA2 Guide RNA
ggacuuguuggauaucuucc

SEQ ID NO: 6187 - RNA, 20 nt, Artificial Sequence
  GATA2 Guide RNA
ggauaucuuccgguuccgag

SEQ ID NO: 6188 - RNA, 20 nt, Artificial Sequence
  GATA2 Guide RNA
guuggauaucuuccgguucc

SEQ ID NO: 6189 - RNA, 20 nt, Artificial Sequence
  GATA2 Guide RNA
uauccaacaaguccaagaag

SEQ ID NO: 6190 - RNA, 20 nt, Artificial Sequence
  GATA2 Guide RNA
uaucuuccgguuccgagucu

SEQ ID NO: 6191 - RNA, 20 nt, Artificial Sequence
  GATA2 Guide RNA
uccagacucggaaccggaag

SEQ ID NO: 6192 - RNA, 20 nt, Artificial Sequence
  GATA2 Guide RNA
ucggaaccggaagauaucca

SEQ ID NO: 6193 - RNA, 20 nt, Artificial Sequence
  GATA2 Guide RNA
ucuucuuggacuuguuggau

SEQ ID NO: 6194 - RNA, 20 nt, Artificial Sequence
  GATA2 Guide RNA
ucuuggacuuguuggauauc

SEQ ID NO: 6195 - RNA, 20 nt, Artificial Sequence
  GATA2 Guide RNA
ugcucuucuuggacuuguug

SEQ ID NO: 6196 - RNA, 20 nt, Artificial Sequence
  GATA2 Guide RNA
uggacuuguuggauaucuuc

SEQ ID NO: 6197 - RNA, 20 nt, Artificial Sequence
  GATA2 Guide RNA
uggauaucuuccgguuccga

SEQ ID NO: 6198 - RNA, 20 nt, Artificial Sequence
  GATA2 Guide RNA
uguuggauaucuuccgguuc

SEQ ID NO: 6199 - RNA, 20 nt, Artificial Sequence
  GATA2 Guide RNA
uucuuggacuuguuggauau

SEQ ID NO: 6200 - RNA, 20 nt, Artificial Sequence
  GATA2 Guide RNA
uuggacuuguuggauaucuu

SEQ ID NO: 6201 - RNA, 20 nt, Artificial Sequence
  GATA2 Guide RNA
uuggauaucuuccgguuccg

SEQ ID NO: 6202 - RNA, 20 nt, Artificial Sequence
  GATA2 Guide RNA
uuguuggauaucuuccgguu

SEQ ID NO: 6203 - RNA, 21 nt, Artificial Sequence
  GATA2 Guide RNA
aaccggaagauauccaacaag

SEQ ID NO: 6204 - RNA, 21 nt, Artificial Sequence
  GATA2 Guide RNA
aagauauccaacaaguccaag

SEQ ID NO: 6205 - RNA, 21 nt, Artificial Sequence
  GATA2 Guide RNA
accggaagauauccaacaagu

SEQ ID NO: 6206 - RNA, 21 nt, Artificial Sequence
  GATA2 Guide RNA
acucggaaccggaagauaucc

SEQ ID NO: 6207 - RNA, 21 nt, Artificial Sequence
  GATA2 Guide RNA
acuuguuggauaucuuccggu

SEQ ID NO: 6208 - RNA, 21 nt, Artificial Sequence
  GATA2 Guide RNA
agacucggaaccggaagauau

SEQ ID NO: 6209 - RNA, 21 nt, Artificial Sequence
  GATA2 Guide RNA
agauauccaacaaguccaaga

SEQ ID NO: 6210 - RNA, 21 nt, Artificial Sequence
  GATA2 Guide RNA
auauccaacaaguccaagaag

SEQ ID NO: 6211 - RNA, 21 nt, Artificial Sequence
  GATA2 Guide RNA
auaucuuccgguuccgagucu

SEQ ID NO: 6212 - RNA, 21 nt, Artificial Sequence
  GATA2 Guide RNA
auccagacucggaaccggaag

SEQ ID NO: 6213 - RNA, 21 nt, Artificial Sequence
  GATA2 Guide RNA
cagacucggaaccggaagaua

SEQ ID NO: 6214 - RNA, 21 nt, Artificial Sequence
  GATA2 Guide RNA
ccagacucggaaccggaagau

SEQ ID NO: 6215 - RNA, 21 nt, Artificial Sequence
  GATA2 Guide RNA
ccggaagauauccaacaaguc

SEQ ID NO: 6216 - RNA, 21 nt, Artificial Sequence
  GATA2 Guide RNA
cggaaccggaagauauccaac

SEQ ID NO: 6217 - RNA, 21 nt, Artificial Sequence
  GATA2 Guide RNA
cggaagauauccaacaagucc

SEQ ID NO: 6218 - RNA, 21 nt, Artificial Sequence
  GATA2 Guide RNA
cucggaaccggaagauaucca

SEQ ID NO: 6219 - RNA, 21 nt, Artificial Sequence
  GATA2 Guide RNA
cucuucuuggacuuguuggau

SEQ ID NO: 6220 - RNA, 21 nt, Artificial Sequence
  GATA2 Guide RNA
cuucuuggacuuguuggauau

SEQ ID NO: 6221 - RNA, 21 nt, Artificial Sequence
  GATA2 Guide RNA
cuuggacuuguuggauaucuu

SEQ ID NO: 6222 - RNA, 21 nt, Artificial Sequence
  GATA2 Guide RNA
cuuguuggauaucuuccgguu

SEQ ID NO: 6223 - RNA, 21 nt, Artificial Sequence
  GATA2 Guide RNA
gaaccggaagauauccaacaa

SEQ ID NO: 6224 - RNA, 21 nt, Artificial Sequence
  GATA2 Guide RNA
gaagauauccaacaaguccaa

SEQ ID NO: 6225 - RNA, 21 nt, Artificial Sequence
  GATA2 Guide RNA
gacucggaaccggaagauauc

SEQ ID NO: 6226 - RNA, 21 nt, Artificial Sequence
  GATA2 Guide RNA
gacuuguuggauaucuuccgg

SEQ ID NO: 6227 - RNA, 21 nt, Artificial Sequence
  GATA2 Guide RNA
gauauccaacaaguccaagaa

SEQ ID NO: 6228 - RNA, 21 nt, Artificial Sequence
  GATA2 Guide RNA
gauaucuuccgguuccgaguc

SEQ ID NO: 6229 - RNA, 21 nt, Artificial Sequence
  GATA2 Guide RNA
gauccagacucggaaccggaa

SEQ ID NO: 6230 - RNA, 21 nt, Artificial Sequence
  GATA2 Guide RNA
gcucuucuuggacuuguugga

SEQ ID NO: 6231 - RNA, 21 nt, Artificial Sequence
  GATA2 Guide RNA
ggaaccggaagauauccaaca

SEQ ID NO: 6232 - RNA, 21 nt, Artificial Sequence
  GATA2 Guide RNA
ggaagauauccaacaagucca

SEQ ID NO: 6233 - RNA, 21 nt, Artificial Sequence
  GATA2 Guide RNA
ggacuuguuggauaucuuccg

SEQ ID NO: 6234 - RNA, 21 nt, Artificial Sequence
  GATA2 Guide RNA
ggauaucuuccgguuccgagu

SEQ ID NO: 6235 - RNA, 21 nt, Artificial Sequence
  GATA2 Guide RNA
guuggauaucuuccgguuccg

SEQ ID NO: 6236 - RNA, 21 nt, Artificial Sequence
  GATA2 Guide RNA
uauccaacaaguccaagaaga

SEQ ID NO: 6237 - RNA, 21 nt, Artificial Sequence
  GATA2 Guide RNA
uaucuuccgguuccgagucug

SEQ ID NO: 6238 - RNA, 21 nt, Artificial Sequence
  GATA2 Guide RNA
uccagacucggaaccggaaga

SEQ ID NO: 6239 - RNA, 21 nt, Artificial Sequence
  GATA2 Guide RNA
ucggaaccggaagauauccaa

SEQ ID NO: 6240 - RNA, 21 nt, Artificial Sequence
  GATA2 Guide RNA
ucuucuuggacuuguuggaua

SEQ ID NO: 6241 - RNA, 21 nt, Artificial Sequence
  GATA2 Guide RNA
ucuuggacuuguuggauaucu

SEQ ID NO: 6242 - RNA, 21 nt, Artificial Sequence
  GATA2 Guide RNA
ugcucuucuuggacuuguugg

SEQ ID NO: 6243 - RNA, 21 nt, Artificial Sequence
  GATA2 Guide RNA
uggacuuguuggauaucuucc

SEQ ID NO: 6244 - RNA, 21 nt, Artificial Sequence
  GATA2 Guide RNA
uggauaucuuccgguuccgag

SEQ ID NO: 6245 - RNA, 21 nt, Artificial Sequence
  GATA2 Guide RNA
uguuggauaucuuccgguucc

SEQ ID NO: 6246 - RNA, 21 nt, Artificial Sequence
  GATA2 Guide RNA
uucuuggacuuguuggauauc

SEQ ID NO: 6247 - RNA, 21 nt, Artificial Sequence
  GATA2 Guide RNA
uugcucuucuuggacuuguug

SEQ ID NO: 6248 - RNA, 21 nt, Artificial Sequence
  GATA2 Guide RNA
uuggacuuguuggauaucuuc

SEQ ID NO: 6249 - RNA, 21 nt, Artificial Sequence
  GATA2 Guide RNA
uuggauaucuuccgguuccga

SEQ ID NO: 6250 - RNA, 21 nt, Artificial Sequence
  GATA2 Guide RNA
uuguuggauaucuuccgguuc

SEQ ID NO: 6251 - RNA, 22 nt, Artificial Sequence
  GATA2 Guide RNA
aaccggaagauauccaacaagu

SEQ ID NO: 6252 - RNA, 22 nt, Artificial Sequence
  GATA2 Guide RNA
aagauauccaacaaguccaaga

SEQ ID NO: 6253 - RNA, 22 nt, Artificial Sequence
  GATA2 Guide RNA
accggaagauauccaacaaguc

SEQ ID NO: 6254 - RNA, 22 nt, Artificial Sequence
  GATA2 Guide RNA
acucggaaccggaagauaucca

SEQ ID NO: 6255 - RNA, 22 nt, Artificial Sequence
  GATA2 Guide RNA
acuuguuggauaucuuccgguu

SEQ ID NO: 6256 - RNA, 22 nt, Artificial Sequence
  GATA2 Guide RNA
agacucggaaccggaagauauc

SEQ ID NO: 6257 - RNA, 22 nt, Artificial Sequence
  GATA2 Guide RNA
agauauccaacaaguccaagaa

SEQ ID NO: 6258 - RNA, 22 nt, Artificial Sequence
  GATA2 Guide RNA
auauccaacaaguccaagaaga

SEQ ID NO: 6259 - RNA, 22 nt, Artificial Sequence
  GATA2 Guide RNA
auaucuuccgguuccgagucug

SEQ ID NO: 6260 - RNA, 22 nt, Artificial Sequence
  GATA2 Guide RNA
auccagacucggaaccggaaga

SEQ ID NO: 6261 - RNA, 22 nt, Artificial Sequence
  GATA2 Guide RNA
cagacucggaaccggaagauau

SEQ ID NO: 6262 - RNA, 22 nt, Artificial Sequence
  GATA2 Guide RNA
ccagacucggaaccggaagaua

SEQ ID NO: 6263 - RNA, 22 nt, Artificial Sequence
  GATA2 Guide RNA
ccggaagauauccaacaagucc

SEQ ID NO: 6264 - RNA, 22 nt, Artificial Sequence
  GATA2 Guide RNA
cggaaccggaagauauccaaca

SEQ ID NO: 6265 - RNA, 22 nt, Artificial Sequence
  GATA2 Guide RNA
cggaagauauccaacaagucca

SEQ ID NO: 6266 - RNA, 22 nt, Artificial Sequence
  GATA2 Guide RNA
cucggaaccggaagauauccaa

SEQ ID NO: 6267 - RNA, 22 nt, Artificial Sequence
  GATA2 Guide RNA
cucuucuuggacuuguuggaua

SEQ ID NO: 6268 - RNA, 22 nt, Artificial Sequence
  GATA2 Guide RNA
cuucuuggacuuguuggauauc

SEQ ID NO: 6269 - RNA, 22 nt, Artificial Sequence
  GATA2 Guide RNA
cuugcucuucuuggacuuguug

SEQ ID NO: 6270 - RNA, 22 nt, Artificial Sequence
  GATA2 Guide RNA
cuuggacuuguuggauaucuuc

SEQ ID NO: 6271 - RNA, 22 nt, Artificial Sequence
  GATA2 Guide RNA
cuuguuggauaucuuccgguuc

SEQ ID NO: 6272 - RNA, 22 nt, Artificial Sequence
  GATA2 Guide RNA
gaaccggaagauauccaacaag

SEQ ID NO: 6273 - RNA, 22 nt, Artificial Sequence
  GATA2 Guide RNA
gaagauauccaacaaguccaag

SEQ ID NO: 6274 - RNA, 22 nt, Artificial Sequence
  GATA2 Guide RNA
gacucggaaccggaagauaucc

SEQ ID NO: 6275 - RNA, 22 nt, Artificial Sequence
  GATA2 Guide RNA
gacuuguuggauaucuuccggu

SEQ ID NO: 6276 - RNA, 22 nt, Artificial Sequence
  GATA2 Guide RNA
gauauccaacaaguccaagaag

SEQ ID NO: 6277 - RNA, 22 nt, Artificial Sequence
  GATA2 Guide RNA
gauaucuuccgguuccgagucu

SEQ ID NO: 6278 - RNA, 22 nt, Artificial Sequence
  GATA2 Guide RNA
gauccagacucggaaccggaag

SEQ ID NO: 6279 - RNA, 22 nt, Artificial Sequence
  GATA2 Guide RNA
gcucuucuuggacuuguuggau

SEQ ID NO: 6280 - RNA, 22 nt, Artificial Sequence
  GATA2 Guide RNA
ggaaccggaagauauccaacaa

SEQ ID NO: 6281 - RNA, 22 nt, Artificial Sequence
  GATA2 Guide RNA
ggaagauauccaacaaguccaa

SEQ ID NO: 6282 - RNA, 22 nt, Artificial Sequence
  GATA2 Guide RNA
ggacuuguuggauaucuuccgg

SEQ ID NO: 6283 - RNA, 22 nt, Artificial Sequence
  GATA2 Guide RNA
ggauaucuuccgguuccgaguc

SEQ ID NO: 6284 - RNA, 22 nt, Artificial Sequence
  GATA2 Guide RNA
ggauccagacucggaaccggaa

SEQ ID NO: 6285 - RNA, 22 nt, Artificial Sequence
  GATA2 Guide RNA
guuggauaucuuccgguuccga

SEQ ID NO: 6286 - RNA, 22 nt, Artificial Sequence
  GATA2 Guide RNA
uauccaacaaguccaagaagag

SEQ ID NO: 6287 - RNA, 22 nt, Artificial Sequence
  GATA2 Guide RNA
uaucuuccgguuccgagucugg

SEQ ID NO: 6288 - RNA, 22 nt, Artificial Sequence
  GATA2 Guide RNA
uccagacucggaaccggaagau

SEQ ID NO: 6289 - RNA, 22 nt, Artificial Sequence
  GATA2 Guide RNA
ucggaaccggaagauauccaac

SEQ ID NO: 6290 - RNA, 22 nt, Artificial Sequence
  GATA2 Guide RNA
ucuucuuggacuuguuggauau

SEQ ID NO: 6291 - RNA, 22 nt, Artificial Sequence
  GATA2 Guide RNA
ucuuggacuuguuggauaucuu

SEQ ID NO: 6292 - RNA, 22 nt, Artificial Sequence
  GATA2 Guide RNA
ugcucuucuuggacuuguugga

SEQ ID NO: 6293 - RNA, 22 nt, Artificial Sequence
  GATA2 Guide RNA
uggacuuguuggauaucuuccg

SEQ ID NO: 6294 - RNA, 22 nt, Artificial Sequence
  GATA2 Guide RNA
uggauaucuuccgguuccgagu

SEQ ID NO: 6295 - RNA, 22 nt, Artificial Sequence
  GATA2 Guide RNA
uguuggauaucuuccgguuccg

SEQ ID NO: 6296 - RNA, 22 nt, Artificial Sequence
  GATA2 Guide RNA
uucuuggacuuguuggauaucu

SEQ ID NO: 6297 - RNA, 22 nt, Artificial Sequence
  GATA2 Guide RNA
uugcucuucuuggacuuguugg

SEQ ID NO: 6298 - RNA, 22 nt, Artificial Sequence
  GATA2 Guide RNA
uuggacuuguuggauaucuucc

SEQ ID NO: 6299 - RNA, 22 nt, Artificial Sequence
  GATA2 Guide RNA
uuggauaucuuccgguuccgag

SEQ ID NO: 6300 - RNA, 22 nt, Artificial Sequence
  GATA2 Guide RNA
uuguuggauaucuuccgguucc

SEQ ID NO: 6301 - RNA, 20 nt, Artificial Sequence
  GATA2 Guide RNA
aacuggaagauguccaacaa

SEQ ID NO: 6302 - RNA, 20 nt, Artificial Sequence
  GATA2 Guide RNA
aagggauccagacucggaac

SEQ ID NO: 6303 - RNA, 20 nt, Artificial Sequence
  GATA2 Guide RNA
acaucuuccaguuccgaguc

SEQ ID NO: 6304 - RNA, 20 nt, Artificial Sequence
  GATA2 Guide RNA
acucggaacuggaagauguc

SEQ ID NO: 6305 - RNA, 20 nt, Artificial Sequence
  GATA2 Guide RNA
acuggaagauguccaacaag

SEQ ID NO: 6306 - RNA, 20 nt, Artificial Sequence
  GATA2 Guide RNA
acuuguuggacaucuuccag

SEQ ID NO: 6307 - RNA, 20 nt, Artificial Sequence
  GATA2 Guide RNA
agacucggaacuggaagaug

SEQ ID NO: 6308 - RNA, 20 nt, Artificial Sequence
  GATA2 Guide RNA
aggaagggauccagacucgg

SEQ ID NO: 6309 - RNA, 20 nt, Artificial Sequence
  GATA2 Guide RNA
agggauccagacucggaacu

SEQ ID NO: 6310 - RNA, 20 nt, Artificial Sequence
  GATA2 Guide RNA
aguuccgagucuggaucccu

SEQ ID NO: 6311 - RNA, 20 nt, Artificial Sequence
  GATA2 Guide RNA
auccagacucggaacuggaa

SEQ ID NO: 6312 - RNA, 20 nt, Artificial Sequence
  GATA2 Guide RNA
aucuuccaguuccgagucug

SEQ ID NO: 6313 - RNA, 20 nt, Artificial Sequence
  GATA2 Guide RNA
cagacucggaacuggaagau

SEQ ID NO: 6314 - RNA, 20 nt, Artificial Sequence
  GATA2 Guide RNA
caguuccgagucuggauccc

SEQ ID NO: 6315 - RNA, 20 nt, Artificial Sequence
  GATA2 Guide RNA
caucuuccaguuccgagucu

SEQ ID NO: 6316 - RNA, 20 nt, Artificial Sequence
  GATA2 Guide RNA
ccagacucggaacuggaaga

SEQ ID NO: 6317 - RNA, 20 nt, Artificial Sequence
  GATA2 Guide RNA
ccaguuccgagucuggaucc

SEQ ID NO: 6318 - RNA, 20 nt, Artificial Sequence
  GATA2 Guide RNA
cggaacuggaagauguccaa

SEQ ID NO: 6319 - RNA, 20 nt, Artificial Sequence
  GATA2 Guide RNA
cucggaacuggaagaugucc

SEQ ID NO: 6320 - RNA, 20 nt, Artificial Sequence
  GATA2 Guide RNA
cuggaagauguccaacaagu

SEQ ID NO: 6321 - RNA, 20 nt, Artificial Sequence
  GATA2 Guide RNA
cuuccaguuccgagucugga

SEQ ID NO: 6322 - RNA, 20 nt, Artificial Sequence
  GATA2 Guide RNA
cuuguuggacaucuuccagu

SEQ ID NO: 6323 - RNA, 20 nt, Artificial Sequence
  GATA2 Guide RNA
gaacuggaagauguccaaca

SEQ ID NO: 6324 - RNA, 20 nt, Artificial Sequence
  GATA2 Guide RNA
gaagggauccagacucggaa

SEQ ID NO: 6325 - RNA, 20 nt, Artificial Sequence
  GATA2 Guide RNA
gacaucuuccaguuccgagu

SEQ ID NO: 6326 - RNA, 20 nt, Artificial Sequence
  GATA2 Guide RNA
gacucggaacuggaagaugu

SEQ ID NO: 6327 - RNA, 20 nt, Artificial Sequence
  GATA2 Guide RNA
gacuuguuggacaucuucca

SEQ ID NO: 6328 - RNA, 20 nt, Artificial Sequence
  GATA2 Guide RNA
gauccagacucggaacugga

SEQ ID NO: 6329 - RNA, 20 nt, Artificial Sequence
  GATA2 Guide RNA
ggaacuggaagauguccaac

SEQ ID NO: 6330 - RNA, 20 nt, Artificial Sequence
  GATA2 Guide RNA
ggaagggauccagacucgga

SEQ ID NO: 6331 - RNA, 20 nt, Artificial Sequence
  GATA2 Guide RNA
ggacaucuuccaguuccgag

SEQ ID NO: 6332 - RNA, 20 nt, Artificial Sequence
  GATA2 Guide RNA
ggacuuguuggacaucuucc

SEQ ID NO: 6333 - RNA, 20 nt, Artificial Sequence
  GATA2 Guide RNA
ggauccagacucggaacugg

SEQ ID NO: 6334 - RNA, 20 nt, Artificial Sequence
  GATA2 Guide RNA
gggauccagacucggaacug

SEQ ID NO: 6335 - RNA, 20 nt, Artificial Sequence
  GATA2 Guide RNA
guuggacaucuuccaguucc

SEQ ID NO: 6336 - RNA, 20 nt, Artificial Sequence
  GATA2 Guide RNA
uccagacucggaacuggaag

SEQ ID NO: 6337 - RNA, 20 nt, Artificial Sequence
  GATA2 Guide RNA
uccaguuccgagucuggauc

SEQ ID NO: 6338 - RNA, 20 nt, Artificial Sequence
  GATA2 Guide RNA
ucggaacuggaagaugucca

SEQ ID NO: 6339 - RNA, 20 nt, Artificial Sequence
  GATA2 Guide RNA
ucuuccaguuccgagucugg

SEQ ID NO: 6340 - RNA, 20 nt, Artificial Sequence
  GATA2 Guide RNA
uggacaucuuccaguuccga

SEQ ID NO: 6341 - RNA, 20 nt, Artificial Sequence
  GATA2 Guide RNA
uggacuuguuggacaucuuc

SEQ ID NO: 6342 - RNA, 20 nt, Artificial Sequence
  GATA2 Guide RNA
uguuggacaucuuccaguuc

SEQ ID NO: 6343 - RNA, 20 nt, Artificial Sequence
  GATA2 Guide RNA
uuccaguuccgagucuggau

SEQ ID NO: 6344 - RNA, 20 nt, Artificial Sequence
  GATA2 Guide RNA
uuggacaucuuccaguuccg

SEQ ID NO: 6345 - RNA, 20 nt, Artificial Sequence
  GATA2 Guide RNA
uuggacuuguuggacaucuu

SEQ ID NO: 6346 - RNA, 20 nt, Artificial Sequence
  GATA2 Guide RNA
uuguuggacaucuuccaguu

SEQ ID NO: 6347 - RNA, 21 nt, Artificial Sequence
  GATA2 Guide RNA
aacuggaagauguccaacaag

SEQ ID NO: 6348 - RNA, 21 nt, Artificial Sequence
  GATA2 Guide RNA
aaggaagggauccagacucgg

SEQ ID NO: 6349 - RNA, 21 nt, Artificial Sequence
  GATA2 Guide RNA
aagggauccagacucggaacu

SEQ ID NO: 6350 - RNA, 21 nt, Artificial Sequence
  GATA2 Guide RNA
acaucuuccaguuccgagucu

SEQ ID NO: 6351 - RNA, 21 nt, Artificial Sequence
  GATA2 Guide RNA
acucggaacuggaagaugucc

SEQ ID NO: 6352 - RNA, 21 nt, Artificial Sequence
  GATA2 Guide RNA
acuggaagauguccaacaagu

SEQ ID NO: 6353 - RNA, 21 nt, Artificial Sequence
  GATA2 Guide RNA
acuuguuggacaucuuccagu

SEQ ID NO: 6354 - RNA, 21 nt, Artificial Sequence
  GATA2 Guide RNA
agacucggaacuggaagaugu

SEQ ID NO: 6355 - RNA, 21 nt, Artificial Sequence
  GATA2 Guide RNA
aggaagggauccagacucgga

SEQ ID NO: 6356 - RNA, 21 nt, Artificial Sequence
  GATA2 Guide RNA
agggauccagacucggaacug

SEQ ID NO: 6357 - RNA, 21 nt, Artificial Sequence
  GATA2 Guide RNA
aguuccgagucuggaucccuu

SEQ ID NO: 6358 - RNA, 21 nt, Artificial Sequence
  GATA2 Guide RNA
auccagacucggaacuggaag

SEQ ID NO: 6359 - RNA, 21 nt, Artificial Sequence
  GATA2 Guide RNA
aucuuccaguuccgagucugg

SEQ ID NO: 6360 - RNA, 21 nt, Artificial Sequence
  GATA2 Guide RNA
cagacucggaacuggaagaug

SEQ ID NO: 6361 - RNA, 21 nt, Artificial Sequence
  GATA2 Guide RNA
caguuccgagucuggaucccu

SEQ ID NO: 6362 - RNA, 21 nt, Artificial Sequence
  GATA2 Guide RNA
caucuuccaguuccgagucug

SEQ ID NO: 6363 - RNA, 21 nt, Artificial Sequence
  GATA2 Guide RNA
ccagacucggaacuggaagau

SEQ ID NO: 6364 - RNA, 21 nt, Artificial Sequence
  GATA2 Guide RNA
ccaguuccgagucuggauccc

SEQ ID NO: 6365 - RNA, 21 nt, Artificial Sequence
  GATA2 Guide RNA
cggaacuggaagauguccaac

SEQ ID NO: 6366 - RNA, 21 nt, Artificial Sequence
  GATA2 Guide RNA
cucggaacuggaagaugucca

SEQ ID NO: 6367 - RNA, 21 nt, Artificial Sequence
  GATA2 Guide RNA
cuggaagauguccaacaaguc

SEQ ID NO: 6368 - RNA, 21 nt, Artificial Sequence
  GATA2 Guide RNA
cuuccaguuccgagucuggau

SEQ ID NO: 6369 - RNA, 21 nt, Artificial Sequence
  GATA2 Guide RNA
cuuggacuuguuggacaucuu

SEQ ID NO: 6370 - RNA, 21 nt, Artificial Sequence
  GATA2 Guide RNA
cuuguuggacaucuuccaguu

SEQ ID NO: 6371 - RNA, 21 nt, Artificial Sequence
  GATA2 Guide RNA
gaacuggaagauguccaacaa

SEQ ID NO: 6372 - RNA, 21 nt, Artificial Sequence
  GATA2 Guide RNA
gaagggauccagacucggaac

SEQ ID NO: 6373 - RNA, 21 nt, Artificial Sequence
  GATA2 Guide RNA
gacaucuuccaguuccgaguc

SEQ ID NO: 6374 - RNA, 21 nt, Artificial Sequence
  GATA2 Guide RNA
gacucggaacuggaagauguc

SEQ ID NO: 6375 - RNA, 21 nt, Artificial Sequence
  GATA2 Guide RNA
gacuuguuggacaucuuccag

SEQ ID NO: 6376 - RNA, 21 nt, Artificial Sequence
  GATA2 Guide RNA
gauccagacucggaacuggaa

SEQ ID NO: 6377 - RNA, 21 nt, Artificial Sequence
  GATA2 Guide RNA
ggaacuggaagauguccaaca

SEQ ID NO: 6378 - RNA, 21 nt, Artificial Sequence
  GATA2 Guide RNA
ggaagggauccagacucggaa

SEQ ID NO: 6379 - RNA, 21 nt, Artificial Sequence
  GATA2 Guide RNA
ggacaucuuccaguuccgagu

SEQ ID NO: 6380 - RNA, 21 nt, Artificial Sequence
  GATA2 Guide RNA
ggacuuguuggacaucuucca

SEQ ID NO: 6381 - RNA, 21 nt, Artificial Sequence
  GATA2 Guide RNA
ggauccagacucggaacugga

SEQ ID NO: 6382 - RNA, 21 nt, Artificial Sequence
  GATA2 Guide RNA
gggauccagacucggaacugg

SEQ ID NO: 6383 - RNA, 21 nt, Artificial Sequence
  GATA2 Guide RNA
guuggacaucuuccaguuccg

SEQ ID NO: 6384 - RNA, 21 nt, Artificial Sequence
  GATA2 Guide RNA
uccagacucggaacuggaaga

SEQ ID NO: 6385 - RNA, 21 nt, Artificial Sequence
  GATA2 Guide RNA
uccaguuccgagucuggaucc

SEQ ID NO: 6386 - RNA, 21 nt, Artificial Sequence
  GATA2 Guide RNA
ucggaacuggaagauguccaa

SEQ ID NO: 6387 - RNA, 21 nt, Artificial Sequence
  GATA2 Guide RNA
ucuuccaguuccgagucugga

SEQ ID NO: 6388 - RNA, 21 nt, Artificial Sequence
  GATA2 Guide RNA
uggacaucuuccaguuccgag

SEQ ID NO: 6389 - RNA, 21 nt, Artificial Sequence
  GATA2 Guide RNA
uggacuuguuggacaucuucc

SEQ ID NO: 6390 - RNA, 21 nt, Artificial Sequence
  GATA2 Guide RNA
uguuggacaucuuccaguucc

SEQ ID NO: 6391 - RNA, 21 nt, Artificial Sequence
  GATA2 Guide RNA
uuccaguuccgagucuggauc

SEQ ID NO: 6392 - RNA, 21 nt, Artificial Sequence
  GATA2 Guide RNA
uuggacaucuuccaguuccga

SEQ ID NO: 6393 - RNA, 21 nt, Artificial Sequence
  GATA2 Guide RNA
uuggacuuguuggacaucuuc

SEQ ID NO: 6394 - RNA, 21 nt, Artificial Sequence
  GATA2 Guide RNA
uuguuggacaucuuccaguuc

SEQ ID NO: 6395 - RNA, 22 nt, Artificial Sequence
  GATA2 Guide RNA
aacuggaagauguccaacaagu

SEQ ID NO: 6396 - RNA, 22 nt, Artificial Sequence
  GATA2 Guide RNA
aaggaagggauccagacucgga

SEQ ID NO: 6397 - RNA, 22 nt, Artificial Sequence
  GATA2 Guide RNA
aagggauccagacucggaacug

SEQ ID NO: 6398 - RNA, 22 nt, Artificial Sequence
  GATA2 Guide RNA
acaucuuccaguuccgagucug

SEQ ID NO: 6399 - RNA, 22 nt, Artificial Sequence
  GATA2 Guide RNA
acucggaacuggaagaugucca

SEQ ID NO: 6400 - RNA, 22 nt, Artificial Sequence
  GATA2 Guide RNA
acuggaagauguccaacaaguc

SEQ ID NO: 6401 - RNA, 22 nt, Artificial Sequence
  GATA2 Guide RNA
acuuguuggacaucuuccaguu

SEQ ID NO: 6402 - RNA, 22 nt, Artificial Sequence
  GATA2 Guide RNA
agacucggaacuggaagauguc

SEQ ID NO: 6403 - RNA, 22 nt, Artificial Sequence
  GATA2 Guide RNA
aggaagggauccagacucggaa

SEQ ID NO: 6404 - RNA, 22 nt, Artificial Sequence
  GATA2 Guide RNA
agggauccagacucggaacugg

SEQ ID NO: 6405 - RNA, 22 nt, Artificial Sequence
  GATA2 Guide RNA
aguuccgagucuggaucccuuc

SEQ ID NO: 6406 - RNA, 22 nt, Artificial Sequence
  GATA2 Guide RNA
auccagacucggaacuggaaga

SEQ ID NO: 6407 - RNA, 22 nt, Artificial Sequence
  GATA2 Guide RNA
aucuuccaguuccgagucugga

SEQ ID NO: 6408 - RNA, 22 nt, Artificial Sequence
  GATA2 Guide RNA
cagacucggaacuggaagaugu

SEQ ID NO: 6409 - RNA, 22 nt, Artificial Sequence
  GATA2 Guide RNA
caguuccgagucuggaucccuu

SEQ ID NO: 6410 - RNA, 22 nt, Artificial Sequence
  GATA2 Guide RNA
caucuuccaguuccgagucugg

SEQ ID NO: 6411 - RNA, 22 nt, Artificial Sequence
  GATA2 Guide RNA
ccagacucggaacuggaagaug

SEQ ID NO: 6412 - RNA, 22 nt, Artificial Sequence
  GATA2 Guide RNA
ccaguuccgagucuggaucccu

SEQ ID NO: 6413 - RNA, 22 nt, Artificial Sequence
  GATA2 Guide RNA
cggaacuggaagauguccaaca

SEQ ID NO: 6414 - RNA, 22 nt, Artificial Sequence
  GATA2 Guide RNA
cucggaacuggaagauguccaa

SEQ ID NO: 6415 - RNA, 22 nt, Artificial Sequence
  GATA2 Guide RNA
cuggaagauguccaacaagucc

SEQ ID NO: 6416 - RNA, 22 nt, Artificial Sequence
  GATA2 Guide RNA
cuuccaguuccgagucuggauc

SEQ ID NO: 6417 - RNA, 22 nt, Artificial Sequence
  GATA2 Guide RNA
cuuggacuuguuggacaucuuc

SEQ ID NO: 6418 - RNA, 22 nt, Artificial Sequence
  GATA2 Guide RNA
cuuguuggacaucuuccaguuc

SEQ ID NO: 6419 - RNA, 22 nt, Artificial Sequence
  GATA2 Guide RNA
gaacuggaagauguccaacaag

SEQ ID NO: 6420 - RNA, 22 nt, Artificial Sequence
  GATA2 Guide RNA
gaaggaagggauccagacucgg

SEQ ID NO: 6421 - RNA, 22 nt, Artificial Sequence
  GATA2 Guide RNA
gaagggauccagacucggaacu

SEQ ID NO: 6422 - RNA, 22 nt, Artificial Sequence
  GATA2 Guide RNA
gacaucuuccaguuccgagucu

SEQ ID NO: 6423 - RNA, 22 nt, Artificial Sequence
  GATA2 Guide RNA
gacucggaacuggaagaugucc

SEQ ID NO: 6424 - RNA, 22 nt, Artificial Sequence
  GATA2 Guide RNA
gacuuguuggacaucuuccagu

SEQ ID NO: 6425 - RNA, 22 nt, Artificial Sequence
  GATA2 Guide RNA
gauccagacucggaacuggaag

SEQ ID NO: 6426 - RNA, 22 nt, Artificial Sequence
  GATA2 Guide RNA
ggaacuggaagauguccaacaa

SEQ ID NO: 6427 - RNA, 22 nt, Artificial Sequence
  GATA2 Guide RNA
ggaagggauccagacucggaac

SEQ ID NO: 6428 - RNA, 22 nt, Artificial Sequence
  GATA2 Guide RNA
ggacaucuuccaguuccgaguc

SEQ ID NO: 6429 - RNA, 22 nt, Artificial Sequence
  GATA2 Guide RNA
ggacuuguuggacaucuuccag

SEQ ID NO: 6430 - RNA, 22 nt, Artificial Sequence
  GATA2 Guide RNA
ggauccagacucggaacuggaa

SEQ ID NO: 6431 - RNA, 22 nt, Artificial Sequence
  GATA2 Guide RNA
gggauccagacucggaacugga

SEQ ID NO: 6432 - RNA, 22 nt, Artificial Sequence
  GATA2 Guide RNA
guuggacaucuuccaguuccga

SEQ ID NO: 6433 - RNA, 22 nt, Artificial Sequence
  GATA2 Guide RNA
uccagacucggaacuggaagau

SEQ ID NO: 6434 - RNA, 22 nt, Artificial Sequence
  GATA2 Guide RNA
uccaguuccgagucuggauccc

SEQ ID NO: 6435 - RNA, 22 nt, Artificial Sequence
  GATA2 Guide RNA
ucggaacuggaagauguccaac

SEQ ID NO: 6436 - RNA, 22 nt, Artificial Sequence
  GATA2 Guide RNA
ucuuccaguuccgagucuggau

SEQ ID NO: 6437 - RNA, 22 nt, Artificial Sequence
  GATA2 Guide RNA
ucuuggacuuguuggacaucuu

SEQ ID NO: 6438 - RNA, 22 nt, Artificial Sequence
  GATA2 Guide RNA
uggacaucuuccaguuccgagu

SEQ ID NO: 6439 - RNA, 22 nt, Artificial Sequence
  GATA2 Guide RNA
uggacuuguuggacaucuucca

SEQ ID NO: 6440 - RNA, 22 nt, Artificial Sequence
  GATA2 Guide RNA
uguuggacaucuuccaguuccg

SEQ ID NO: 6441 - RNA, 22 nt, Artificial Sequence
  GATA2 Guide RNA
uuccaguuccgagucuggaucc

SEQ ID NO: 6442 - RNA, 22 nt, Artificial Sequence
  GATA2 Guide RNA
uuggacaucuuccaguuccgag

SEQ ID NO: 6443 - RNA, 22 nt, Artificial Sequence
  GATA2 Guide RNA
uuggacuuguuggacaucuucc

SEQ ID NO: 6444 - RNA, 22 nt, Artificial Sequence
  GATA2 Guide RNA
uuguuggacaucuuccaguucc

SEQ ID NO: 6445 - RNA, 20 nt, Artificial Sequence
  GATA2 Guide RNA
aagaaggaagggauccagac

SEQ ID NO: 6446 - RNA, 20 nt, Artificial Sequence
  GATA2 Guide RNA
aaggaagggauccagacuca

SEQ ID NO: 6447 - RNA, 20 nt, Artificial Sequence
  GATA2 Guide RNA
aagggauccagacucagaac

SEQ ID NO: 6448 - RNA, 20 nt, Artificial Sequence
  GATA2 Guide RNA
acaucuuccgguucugaguc

SEQ ID NO: 6449 - RNA, 20 nt, Artificial Sequence
  GATA2 Guide RNA
acucagaaccggaagauguc

SEQ ID NO: 6450 - RNA, 20 nt, Artificial Sequence
  GATA2 Guide RNA
agaaggaagggauccagacu

SEQ ID NO: 6451 - RNA, 20 nt, Artificial Sequence
  GATA2 Guide RNA
agacucagaaccggaagaug

SEQ ID NO: 6452 - RNA, 20 nt, Artificial Sequence
  GATA2 Guide RNA
aggaagggauccagacucag

SEQ ID NO: 6453 - RNA, 20 nt, Artificial Sequence
  GATA2 Guide RNA
agggauccagacucagaacc

SEQ ID NO: 6454 - RNA, 20 nt, Artificial Sequence
  GATA2 Guide RNA
auccagacucagaaccggaa

SEQ ID NO: 6455 - RNA, 20 nt, Artificial Sequence
  GATA2 Guide RNA
aucuuccgguucugagucug

SEQ ID NO: 6456 - RNA, 20 nt, Artificial Sequence
  GATA2 Guide RNA
cagaaccggaagauguccaa

SEQ ID NO: 6457 - RNA, 20 nt, Artificial Sequence
  GATA2 Guide RNA
cagacucagaaccggaagau

SEQ ID NO: 6458 - RNA, 20 nt, Artificial Sequence
  GATA2 Guide RNA
caucuuccgguucugagucu

SEQ ID NO: 6459 - RNA, 20 nt, Artificial Sequence
  GATA2 Guide RNA
ccagacucagaaccggaaga

SEQ ID NO: 6460 - RNA, 20 nt, Artificial Sequence
  GATA2 Guide RNA
ccgguucugagucuggaucc

SEQ ID NO: 6461 - RNA, 20 nt, Artificial Sequence
  GATA2 Guide RNA
cgguucugagucuggauccc

SEQ ID NO: 6462 - RNA, 20 nt, Artificial Sequence
  GATA2 Guide RNA
cucagaaccggaagaugucc

SEQ ID NO: 6463 - RNA, 20 nt, Artificial Sequence
  GATA2 Guide RNA
cugagucuggaucccuuccu

SEQ ID NO: 6464 - RNA, 20 nt, Artificial Sequence
  GATA2 Guide RNA
cuuccgguucugagucugga

SEQ ID NO: 6465 - RNA, 20 nt, Artificial Sequence
  GATA2 Guide RNA
cuuguuggacaucuuccggu

SEQ ID NO: 6466 - RNA, 20 nt, Artificial Sequence
  GATA2 Guide RNA
gaagaaggaagggauccaga

SEQ ID NO: 6467 - RNA, 20 nt, Artificial Sequence
  GATA2 Guide RNA
gaaggaagggauccagacuc

SEQ ID NO: 6468 - RNA, 20 nt, Artificial Sequence
  GATA2 Guide RNA
gaagggauccagacucagaa

SEQ ID NO: 6469 - RNA, 20 nt, Artificial Sequence
  GATA2 Guide RNA
gacaucuuccgguucugagu

SEQ ID NO: 6470 - RNA, 20 nt, Artificial Sequence
  GATA2 Guide RNA
gacucagaaccggaagaugu

SEQ ID NO: 6471 - RNA, 20 nt, Artificial Sequence
  GATA2 Guide RNA
gauccagacucagaaccgga

SEQ ID NO: 6472 - RNA, 20 nt, Artificial Sequence
  GATA2 Guide RNA
ggaagggauccagacucaga

SEQ ID NO: 6473 - RNA, 20 nt, Artificial Sequence
  GATA2 Guide RNA
ggacaucuuccgguucugag

SEQ ID NO: 6474 - RNA, 20 nt, Artificial Sequence
  GATA2 Guide RNA
ggauccagacucagaaccgg

SEQ ID NO: 6475 - RNA, 20 nt, Artificial Sequence
  GATA2 Guide RNA
gggauccagacucagaaccg

SEQ ID NO: 6476 - RNA, 20 nt, Artificial Sequence
  GATA2 Guide RNA
gguucugagucuggaucccu

SEQ ID NO: 6477 - RNA, 20 nt, Artificial Sequence
  GATA2 Guide RNA
guucugagucuggaucccuu

SEQ ID NO: 6478 - RNA, 20 nt, Artificial Sequence
  GATA2 Guide RNA
guuggacaucuuccgguucu

SEQ ID NO: 6479 - RNA, 20 nt, Artificial Sequence
  GATA2 Guide RNA
ucagaaccggaagaugucca

SEQ ID NO: 6480 - RNA, 20 nt, Artificial Sequence
  GATA2 Guide RNA
uccagacucagaaccggaag

SEQ ID NO: 6481 - RNA, 20 nt, Artificial Sequence
  GATA2 Guide RNA
uccgguucugagucuggauc

SEQ ID NO: 6482 - RNA, 20 nt, Artificial Sequence
  GATA2 Guide RNA
ucugagucuggaucccuucc

SEQ ID NO: 6483 - RNA, 20 nt, Artificial Sequence
  GATA2 Guide RNA
ucuuccgguucugagucugg

SEQ ID NO: 6484 - RNA, 20 nt, Artificial Sequence
  GATA2 Guide RNA
ugagucuggaucccuuccuu

SEQ ID NO: 6485 - RNA, 20 nt, Artificial Sequence
  GATA2 Guide RNA
uggacaucuuccgguucuga

SEQ ID NO: 6486 - RNA, 20 nt, Artificial Sequence
  GATA2 Guide RNA
uguuggacaucuuccgguuc

SEQ ID NO: 6487 - RNA, 20 nt, Artificial Sequence
  GATA2 Guide RNA
uuccgguucugagucuggau

SEQ ID NO: 6488 - RNA, 20 nt, Artificial Sequence
  GATA2 Guide RNA
uucugagucuggaucccuuc

SEQ ID NO: 6489 - RNA, 20 nt, Artificial Sequence
  GATA2 Guide RNA
uuggacaucuuccgguucug

SEQ ID NO: 6490 - RNA, 20 nt, Artificial Sequence
  GATA2 Guide RNA
uuguuggacaucuuccgguu

SEQ ID NO: 6491 - RNA, 21 nt, Artificial Sequence
  GATA2 Guide RNA
aagaaggaagggauccagacu

SEQ ID NO: 6492 - RNA, 21 nt, Artificial Sequence
  GATA2 Guide RNA
aaggaagggauccagacucag

SEQ ID NO: 6493 - RNA, 21 nt, Artificial Sequence
  GATA2 Guide RNA
aagggauccagacucagaacc

SEQ ID NO: 6494 - RNA, 21 nt, Artificial Sequence
  GATA2 Guide RNA
acaucuuccgguucugagucu

SEQ ID NO: 6495 - RNA, 21 nt, Artificial Sequence
  GATA2 Guide RNA
acucagaaccggaagaugucc

SEQ ID NO: 6496 - RNA, 21 nt, Artificial Sequence
  GATA2 Guide RNA
acuuguuggacaucuuccggu

SEQ ID NO: 6497 - RNA, 21 nt, Artificial Sequence
  GATA2 Guide RNA
agaaggaagggauccagacuc

SEQ ID NO: 6498 - RNA, 21 nt, Artificial Sequence
  GATA2 Guide RNA
agacucagaaccggaagaugu

SEQ ID NO: 6499 - RNA, 21 nt, Artificial Sequence
  GATA2 Guide RNA
aggaagggauccagacucaga

SEQ ID NO: 6500 - RNA, 21 nt, Artificial Sequence
  GATA2 Guide RNA
agggauccagacucagaaccg

SEQ ID NO: 6501 - RNA, 21 nt, Artificial Sequence
  GATA2 Guide RNA
auccagacucagaaccggaag

SEQ ID NO: 6502 - RNA, 21 nt, Artificial Sequence
  GATA2 Guide RNA
aucuuccgguucugagucugg

SEQ ID NO: 6503 - RNA, 21 nt, Artificial Sequence
  GATA2 Guide RNA
cagaaccggaagauguccaac

SEQ ID NO: 6504 - RNA, 21 nt, Artificial Sequence
  GATA2 Guide RNA
cagacucagaaccggaagaug

SEQ ID NO: 6505 - RNA, 21 nt, Artificial Sequence
  GATA2 Guide RNA
caucuuccgguucugagucug

SEQ ID NO: 6506 - RNA, 21 nt, Artificial Sequence
  GATA2 Guide RNA
ccagacucagaaccggaagau

SEQ ID NO: 6507 - RNA, 21 nt, Artificial Sequence
  GATA2 Guide RNA
ccgguucugagucuggauccc

SEQ ID NO: 6508 - RNA, 21 nt, Artificial Sequence
  GATA2 Guide RNA
cgguucugagucuggaucccu

SEQ ID NO: 6509 - RNA, 21 nt, Artificial Sequence
  GATA2 Guide RNA
cucagaaccggaagaugucca

SEQ ID NO: 6510 - RNA, 21 nt, Artificial Sequence
  GATA2 Guide RNA
cugagucuggaucccuuccuu

SEQ ID NO: 6511 - RNA, 21 nt, Artificial Sequence
  GATA2 Guide RNA
cuuccgguucugagucuggau

SEQ ID NO: 6512 - RNA, 21 nt, Artificial Sequence
  GATA2 Guide RNA
cuuguuggacaucuuccgguu

SEQ ID NO: 6513 - RNA, 21 nt, Artificial Sequence
  GATA2 Guide RNA
gaagaaggaagggauccagac

SEQ ID NO: 6514 - RNA, 21 nt, Artificial Sequence
  GATA2 Guide RNA
gaaggaagggauccagacuca

SEQ ID NO: 6515 - RNA, 21 nt, Artificial Sequence
  GATA2 Guide RNA
gaagggauccagacucagaac

SEQ ID NO: 6516 - RNA, 21 nt, Artificial Sequence
  GATA2 Guide RNA
gacaucuuccgguucugaguc

SEQ ID NO: 6517 - RNA, 21 nt, Artificial Sequence
  GATA2 Guide RNA
gacucagaaccggaagauguc

SEQ ID NO: 6518 - RNA, 21 nt, Artificial Sequence
  GATA2 Guide RNA
gauccagacucagaaccggaa

SEQ ID NO: 6519 - RNA, 21 nt, Artificial Sequence
  GATA2 Guide RNA
ggaagggauccagacucagaa

SEQ ID NO: 6520 - RNA, 21 nt, Artificial Sequence
  GATA2 Guide RNA
ggacaucuuccgguucugagu

SEQ ID NO: 6521 - RNA, 21 nt, Artificial Sequence
  GATA2 Guide RNA
ggauccagacucagaaccgga

SEQ ID NO: 6522 - RNA, 21 nt, Artificial Sequence
  GATA2 Guide RNA
gggauccagacucagaaccgg

SEQ ID NO: 6523 - RNA, 21 nt, Artificial Sequence
  GATA2 Guide RNA
gguucugagucuggaucccuu

SEQ ID NO: 6524 - RNA, 21 nt, Artificial Sequence
  GATA2 Guide RNA
guucugagucuggaucccuuc

SEQ ID NO: 6525 - RNA, 21 nt, Artificial Sequence
  GATA2 Guide RNA
guuggacaucuuccgguucug

SEQ ID NO: 6526 - RNA, 21 nt, Artificial Sequence
  GATA2 Guide RNA
ucagaaccggaagauguccaa

SEQ ID NO: 6527 - RNA, 21 nt, Artificial Sequence
  GATA2 Guide RNA
uccagacucagaaccggaaga

SEQ ID NO: 6528 - RNA, 21 nt, Artificial Sequence
  GATA2 Guide RNA
uccgguucugagucuggaucc

SEQ ID NO: 6529 - RNA, 21 nt, Artificial Sequence
  GATA2 Guide RNA
ucugagucuggaucccuuccu

SEQ ID NO: 6530 - RNA, 21 nt, Artificial Sequence
  GATA2 Guide RNA
ucuuccgguucugagucugga

SEQ ID NO: 6531 - RNA, 21 nt, Artificial Sequence
  GATA2 Guide RNA
ugaagaaggaagggauccaga

SEQ ID NO: 6532 - RNA, 21 nt, Artificial Sequence
  GATA2 Guide RNA
ugagucuggaucccuuccuuc

SEQ ID NO: 6533 - RNA, 21 nt, Artificial Sequence
  GATA2 Guide RNA
uggacaucuuccgguucugag

SEQ ID NO: 6534 - RNA, 21 nt, Artificial Sequence
  GATA2 Guide RNA
uguuggacaucuuccgguucu

SEQ ID NO: 6535 - RNA, 21 nt, Artificial Sequence
  GATA2 Guide RNA
uuccgguucugagucuggauc

SEQ ID NO: 6536 - RNA, 21 nt, Artificial Sequence
  GATA2 Guide RNA
uucugagucuggaucccuucc

SEQ ID NO: 6537 - RNA, 21 nt, Artificial Sequence
  GATA2 Guide RNA
uuggacaucuuccgguucuga

SEQ ID NO: 6538 - RNA, 21 nt, Artificial Sequence
  GATA2 Guide RNA
uuguuggacaucuuccgguuc

SEQ ID NO: 6539 - RNA, 22 nt, Artificial Sequence
  GATA2 Guide RNA
aagaaggaagggauccagacuc

SEQ ID NO: 6540 - RNA, 22 nt, Artificial Sequence
  GATA2 Guide RNA
aaggaagggauccagacucaga

SEQ ID NO: 6541 - RNA, 22 nt, Artificial Sequence
  GATA2 Guide RNA
aagggauccagacucagaaccg

SEQ ID NO: 6542 - RNA, 22 nt, Artificial Sequence
  GATA2 Guide RNA
acaucuuccgguucugagucug

SEQ ID NO: 6543 - RNA, 22 nt, Artificial Sequence
  GATA2 Guide RNA
acucagaaccggaagaugucca

SEQ ID NO: 6544 - RNA, 22 nt, Artificial Sequence
  GATA2 Guide RNA
acuuguuggacaucuuccgguu

SEQ ID NO: 6545 - RNA, 22 nt, Artificial Sequence
  GATA2 Guide RNA
agaaggaagggauccagacuca

SEQ ID NO: 6546 - RNA, 22 nt, Artificial Sequence
  GATA2 Guide RNA
agacucagaaccggaagauguc

SEQ ID NO: 6547 - RNA, 22 nt, Artificial Sequence
  GATA2 Guide RNA
aggaagggauccagacucagaa

SEQ ID NO: 6548 - RNA, 22 nt, Artificial Sequence
  GATA2 Guide RNA
agggauccagacucagaaccgg

SEQ ID NO: 6549 - RNA, 22 nt, Artificial Sequence
  GATA2 Guide RNA
auccagacucagaaccggaaga

SEQ ID NO: 6550 - RNA, 22 nt, Artificial Sequence
  GATA2 Guide RNA
aucuuccgguucugagucugga

SEQ ID NO: 6551 - RNA, 22 nt, Artificial Sequence
  GATA2 Guide RNA
augaagaaggaagggauccaga

SEQ ID NO: 6552 - RNA, 22 nt, Artificial Sequence
  GATA2 Guide RNA
cagaaccggaagauguccaaca

SEQ ID NO: 6553 - RNA, 22 nt, Artificial Sequence
  GATA2 Guide RNA
cagacucagaaccggaagaugu

SEQ ID NO: 6554 - RNA, 22 nt, Artificial Sequence
  GATA2 Guide RNA
caucuuccgguucugagucugg

SEQ ID NO: 6555 - RNA, 22 nt, Artificial Sequence
  GATA2 Guide RNA
ccagacucagaaccggaagaug

SEQ ID NO: 6556 - RNA, 22 nt, Artificial Sequence
  GATA2 Guide RNA
ccgguucugagucuggaucccu

SEQ ID NO: 6557 - RNA, 22 nt, Artificial Sequence
  GATA2 Guide RNA
cgguucugagucuggaucccuu

SEQ ID NO: 6558 - RNA, 22 nt, Artificial Sequence
  GATA2 Guide RNA
cucagaaccggaagauguccaa

SEQ ID NO: 6559 - RNA, 22 nt, Artificial Sequence
  GATA2 Guide RNA
cugagucuggaucccuuccuuc

SEQ ID NO: 6560 - RNA, 22 nt, Artificial Sequence
  GATA2 Guide RNA
cuuccgguucugagucuggauc

SEQ ID NO: 6561 - RNA, 22 nt, Artificial Sequence
  GATA2 Guide RNA
cuuguuggacaucuuccgguuc

SEQ ID NO: 6562 - RNA, 22 nt, Artificial Sequence
  GATA2 Guide RNA
gaagaaggaagggauccagacu

SEQ ID NO: 6563 - RNA, 22 nt, Artificial Sequence
  GATA2 Guide RNA
gaaggaagggauccagacucag

SEQ ID NO: 6564 - RNA, 22 nt, Artificial Sequence
  GATA2 Guide RNA
gaagggauccagacucagaacc

SEQ ID NO: 6565 - RNA, 22 nt, Artificial Sequence
  GATA2 Guide RNA
gacaucuuccgguucugagucu

SEQ ID NO: 6566 - RNA, 22 nt, Artificial Sequence
  GATA2 Guide RNA
gacucagaaccggaagaugucc

SEQ ID NO: 6567 - RNA, 22 nt, Artificial Sequence
  GATA2 Guide RNA
gacuuguuggacaucuuccggu

SEQ ID NO: 6568 - RNA, 22 nt, Artificial Sequence
  GATA2 Guide RNA
gauccagacucagaaccggaag

SEQ ID NO: 6569 - RNA, 22 nt, Artificial Sequence
  GATA2 Guide RNA
ggaagggauccagacucagaac

SEQ ID NO: 6570 - RNA, 22 nt, Artificial Sequence
  GATA2 Guide RNA
ggacaucuuccgguucugaguc

SEQ ID NO: 6571 - RNA, 22 nt, Artificial Sequence
  GATA2 Guide RNA
ggauccagacucagaaccggaa

SEQ ID NO: 6572 - RNA, 22 nt, Artificial Sequence
  GATA2 Guide RNA
gggauccagacucagaaccgga

SEQ ID NO: 6573 - RNA, 22 nt, Artificial Sequence
  GATA2 Guide RNA
gguucugagucuggaucccuuc

SEQ ID NO: 6574 - RNA, 22 nt, Artificial Sequence
  GATA2 Guide RNA
guucugagucuggaucccuucc

SEQ ID NO: 6575 - RNA, 22 nt, Artificial Sequence
  GATA2 Guide RNA
guuggacaucuuccgguucuga

SEQ ID NO: 6576 - RNA, 22 nt, Artificial Sequence
  GATA2 Guide RNA
ucagaaccggaagauguccaac

SEQ ID NO: 6577 - RNA, 22 nt, Artificial Sequence
  GATA2 Guide RNA
uccagacucagaaccggaagau

SEQ ID NO: 6578 - RNA, 22 nt, Artificial Sequence
  GATA2 Guide RNA
uccgguucugagucuggauccc

SEQ ID NO: 6579 - RNA, 22 nt, Artificial Sequence
  GATA2 Guide RNA
ucugagucuggaucccuuccuu

SEQ ID NO: 6580 - RNA, 22 nt, Artificial Sequence
  GATA2 Guide RNA
ucuuccgguucugagucuggau

SEQ ID NO: 6581 - RNA, 22 nt, Artificial Sequence
  GATA2 Guide RNA
ugaagaaggaagggauccagac

SEQ ID NO: 6582 - RNA, 22 nt, Artificial Sequence
  GATA2 Guide RNA
ugagucuggaucccuuccuucu

SEQ ID NO: 6583 - RNA, 22 nt, Artificial Sequence
  GATA2 Guide RNA
uggacaucuuccgguucugagu

SEQ ID NO: 6584 - RNA, 22 nt, Artificial Sequence
  GATA2 Guide RNA
uguuggacaucuuccgguucug

SEQ ID NO: 6585 - RNA, 22 nt, Artificial Sequence
  GATA2 Guide RNA
uuccgguucugagucuggaucc

SEQ ID NO: 6586 - RNA, 22 nt, Artificial Sequence
  GATA2 Guide RNA
uucugagucuggaucccuuccu

SEQ ID NO: 6587 - RNA, 22 nt, Artificial Sequence
  GATA2 Guide RNA
uuggacaucuuccgguucugag

SEQ ID NO: 6588 - RNA, 22 nt, Artificial Sequence
  GATA2 Guide RNA
uuguuggacaucuuccgguucu

SEQ ID NO: 6589 - RNA, 20 nt, Artificial Sequence
  GATA2 Guide RNA
aaggaagggauccagacuug

SEQ ID NO: 6590 - RNA, 20 nt, Artificial Sequence
  GATA2 Guide RNA
aagggauccagacuuggaac

SEQ ID NO: 6591 - RNA, 20 nt, Artificial Sequence
  GATA2 Guide RNA
aagucuggaucccuuccuuc

SEQ ID NO: 6592 - RNA, 20 nt, Artificial Sequence
  GATA2 Guide RNA
acaucuuccgguuccaaguc

SEQ ID NO: 6593 - RNA, 20 nt, Artificial Sequence
  GATA2 Guide RNA
acuuggaaccggaagauguc

SEQ ID NO: 6594 - RNA, 20 nt, Artificial Sequence
  GATA2 Guide RNA
agacuuggaaccggaagaug

SEQ ID NO: 6595 - RNA, 20 nt, Artificial Sequence
  GATA2 Guide RNA
aggaagggauccagacuugg

SEQ ID NO: 6596 - RNA, 20 nt, Artificial Sequence
  GATA2 Guide RNA
agggauccagacuuggaacc

SEQ ID NO: 6597 - RNA, 20 nt, Artificial Sequence
  GATA2 Guide RNA
auccagacuuggaaccggaa

SEQ ID NO: 6598 - RNA, 20 nt, Artificial Sequence
  GATA2 Guide RNA
aucuuccgguuccaagucug

SEQ ID NO: 6599 - RNA, 20 nt, Artificial Sequence
  GATA2 Guide RNA
caagucuggaucccuuccuu

SEQ ID NO: 6600 - RNA, 20 nt, Artificial Sequence
  GATA2 Guide RNA
cagacuuggaaccggaagau

SEQ ID NO: 6601 - RNA, 20 nt, Artificial Sequence
  GATA2 Guide RNA
caucuuccgguuccaagucu

SEQ ID NO: 6602 - RNA, 20 nt, Artificial Sequence
  GATA2 Guide RNA
ccaagucuggaucccuuccu

SEQ ID NO: 6603 - RNA, 20 nt, Artificial Sequence
  GATA2 Guide RNA
ccagacuuggaaccggaaga

SEQ ID NO: 6604 - RNA, 20 nt, Artificial Sequence
  GATA2 Guide RNA
ccgguuccaagucuggaucc

SEQ ID NO: 6605 - RNA, 20 nt, Artificial Sequence
  GATA2 Guide RNA
cgguuccaagucuggauccc

SEQ ID NO: 6606 - RNA, 20 nt, Artificial Sequence
  GATA2 Guide RNA
cuuccgguuccaagucugga

SEQ ID NO: 6607 - RNA, 20 nt, Artificial Sequence
  GATA2 Guide RNA
cuuggaaccggaagaugucc

SEQ ID NO: 6608 - RNA, 20 nt, Artificial Sequence
  GATA2 Guide RNA
gaaggaagggauccagacuu

SEQ ID NO: 6609 - RNA, 20 nt, Artificial Sequence
  GATA2 Guide RNA
gaagggauccagacuuggaa

SEQ ID NO: 6610 - RNA, 20 nt, Artificial Sequence
  GATA2 Guide RNA
gacaucuuccgguuccaagu

SEQ ID NO: 6611 - RNA, 20 nt, Artificial Sequence
  GATA2 Guide RNA
gacuuggaaccggaagaugu

SEQ ID NO: 6612 - RNA, 20 nt, Artificial Sequence
  GATA2 Guide RNA
gauccagacuuggaaccgga

SEQ ID NO: 6613 - RNA, 20 nt, Artificial Sequence
  GATA2 Guide RNA
ggaagggauccagacuugga

SEQ ID NO: 6614 - RNA, 20 nt, Artificial Sequence
  GATA2 Guide RNA
ggacaucuuccgguuccaag

SEQ ID NO: 6615 - RNA, 20 nt, Artificial Sequence
  GATA2 Guide RNA
ggauccagacuuggaaccgg

SEQ ID NO: 6616 - RNA, 20 nt, Artificial Sequence
  GATA2 Guide RNA
gggauccagacuuggaaccg

SEQ ID NO: 6617 - RNA, 20 nt, Artificial Sequence
  GATA2 Guide RNA
gguuccaagucuggaucccu

SEQ ID NO: 6618 - RNA, 20 nt, Artificial Sequence
  GATA2 Guide RNA
guuccaagucuggaucccuu

SEQ ID NO: 6619 - RNA, 20 nt, Artificial Sequence
  GATA2 Guide RNA
guuggacaucuuccgguucc

SEQ ID NO: 6620 - RNA, 20 nt, Artificial Sequence
  GATA2 Guide RNA
uccaagucuggaucccuucc

SEQ ID NO: 6621 - RNA, 20 nt, Artificial Sequence
  GATA2 Guide RNA
uccagacuuggaaccggaag

SEQ ID NO: 6622 - RNA, 20 nt, Artificial Sequence
  GATA2 Guide RNA
uccgguuccaagucuggauc

SEQ ID NO: 6623 - RNA, 20 nt, Artificial Sequence
  GATA2 Guide RNA
ucuuccgguuccaagucugg

SEQ ID NO: 6624 - RNA, 20 nt, Artificial Sequence
  GATA2 Guide RNA
ugaagaaggaagggauccag

SEQ ID NO: 6625 - RNA, 20 nt, Artificial Sequence
  GATA2 Guide RNA
uggacaucuuccgguuccaa

SEQ ID NO: 6626 - RNA, 20 nt, Artificial Sequence
  GATA2 Guide RNA
uuccaagucuggaucccuuc

SEQ ID NO: 6627 - RNA, 20 nt, Artificial Sequence
  GATA2 Guide RNA
uuccgguuccaagucuggau

SEQ ID NO: 6628 - RNA, 20 nt, Artificial Sequence
  GATA2 Guide RNA
uuggaaccggaagaugucca

SEQ ID NO: 6629 - RNA, 20 nt, Artificial Sequence
  GATA2 Guide RNA
uuggacaucuuccgguucca

SEQ ID NO: 6630 - RNA, 21 nt, Artificial Sequence
  GATA2 Guide RNA
aaggaagggauccagacuugg

SEQ ID NO: 6631 - RNA, 21 nt, Artificial Sequence
  GATA2 Guide RNA
aagggauccagacuuggaacc

SEQ ID NO: 6632 - RNA, 21 nt, Artificial Sequence
  GATA2 Guide RNA
aagucuggaucccuuccuucu

SEQ ID NO: 6633 - RNA, 21 nt, Artificial Sequence
  GATA2 Guide RNA
acaucuuccgguuccaagucu

SEQ ID NO: 6634 - RNA, 21 nt, Artificial Sequence
  GATA2 Guide RNA
acuuggaaccggaagaugucc

SEQ ID NO: 6635 - RNA, 21 nt, Artificial Sequence
  GATA2 Guide RNA
agaaggaagggauccagacuu

SEQ ID NO: 6636 - RNA, 21 nt, Artificial Sequence
  GATA2 Guide RNA
agacuuggaaccggaagaugu

SEQ ID NO: 6637 - RNA, 21 nt, Artificial Sequence
  GATA2 Guide RNA
aggaagggauccagacuugga

SEQ ID NO: 6638 - RNA, 21 nt, Artificial Sequence
  GATA2 Guide RNA
agggauccagacuuggaaccg

SEQ ID NO: 6639 - RNA, 21 nt, Artificial Sequence
  GATA2 Guide RNA
auccagacuuggaaccggaag

SEQ ID NO: 6640 - RNA, 21 nt, Artificial Sequence
  GATA2 Guide RNA
aucuuccgguuccaagucugg

SEQ ID NO: 6641 - RNA, 21 nt, Artificial Sequence
  GATA2 Guide RNA
augaagaaggaagggauccag

SEQ ID NO: 6642 - RNA, 21 nt, Artificial Sequence
  GATA2 Guide RNA
caagucuggaucccuuccuuc

SEQ ID NO: 6643 - RNA, 21 nt, Artificial Sequence
  GATA2 Guide RNA
cagacuuggaaccggaagaug

SEQ ID NO: 6644 - RNA, 21 nt, Artificial Sequence
  GATA2 Guide RNA
caucuuccgguuccaagucug

SEQ ID NO: 6645 - RNA, 21 nt, Artificial Sequence
  GATA2 Guide RNA
ccaagucuggaucccuuccuu

SEQ ID NO: 6646 - RNA, 21 nt, Artificial Sequence
  GATA2 Guide RNA
ccagacuuggaaccggaagau

SEQ ID NO: 6647 - RNA, 21 nt, Artificial Sequence
  GATA2 Guide RNA
ccgguuccaagucuggauccc

SEQ ID NO: 6648 - RNA, 21 nt, Artificial Sequence
  GATA2 Guide RNA
cgguuccaagucuggaucccu

SEQ ID NO: 6649 - RNA, 21 nt, Artificial Sequence
  GATA2 Guide RNA
cuuccgguuccaagucuggau

SEQ ID NO: 6650 - RNA, 21 nt, Artificial Sequence
  GATA2 Guide RNA
cuuggaaccggaagaugucca

SEQ ID NO: 6651 - RNA, 21 nt, Artificial Sequence
  GATA2 Guide RNA
gaaggaagggauccagacuug

SEQ ID NO: 6652 - RNA, 21 nt, Artificial Sequence
  GATA2 Guide RNA
gaagggauccagacuuggaac

SEQ ID NO: 6653 - RNA, 21 nt, Artificial Sequence
  GATA2 Guide RNA
gacaucuuccgguuccaaguc

SEQ ID NO: 6654 - RNA, 21 nt, Artificial Sequence
  GATA2 Guide RNA
gacuuggaaccggaagauguc

SEQ ID NO: 6655 - RNA, 21 nt, Artificial Sequence
  GATA2 Guide RNA
gauccagacuuggaaccggaa

SEQ ID NO: 6656 - RNA, 21 nt, Artificial Sequence
  GATA2 Guide RNA
ggaagggauccagacuuggaa

SEQ ID NO: 6657 - RNA, 21 nt, Artificial Sequence
  GATA2 Guide RNA
ggacaucuuccgguuccaagu

SEQ ID NO: 6658 - RNA, 21 nt, Artificial Sequence
  GATA2 Guide RNA
ggauccagacuuggaaccgga

SEQ ID NO: 6659 - RNA, 21 nt, Artificial Sequence
  GATA2 Guide RNA
gggauccagacuuggaaccgg

SEQ ID NO: 6660 - RNA, 21 nt, Artificial Sequence
  GATA2 Guide RNA
gguuccaagucuggaucccuu

SEQ ID NO: 6661 - RNA, 21 nt, Artificial Sequence
  GATA2 Guide RNA
guuccaagucuggaucccuuc

SEQ ID NO: 6662 - RNA, 21 nt, Artificial Sequence
  GATA2 Guide RNA
guuggacaucuuccgguucca

SEQ ID NO: 6663 - RNA, 21 nt, Artificial Sequence
  GATA2 Guide RNA
uccaagucuggaucccuuccu

SEQ ID NO: 6664 - RNA, 21 nt, Artificial Sequence
  GATA2 Guide RNA
uccagacuuggaaccggaaga

SEQ ID NO: 6665 - RNA, 21 nt, Artificial Sequence
  GATA2 Guide RNA
uccgguuccaagucuggaucc

SEQ ID NO: 6666 - RNA, 21 nt, Artificial Sequence
  GATA2 Guide RNA
ucuuccgguuccaagucugga

SEQ ID NO: 6667 - RNA, 21 nt, Artificial Sequence
  GATA2 Guide RNA
uggacaucuuccgguuccaag

SEQ ID NO: 6668 - RNA, 21 nt, Artificial Sequence
  GATA2 Guide RNA
uguuggacaucuuccgguucc

SEQ ID NO: 6669 - RNA, 21 nt, Artificial Sequence
  GATA2 Guide RNA
uuccaagucuggaucccuucc

SEQ ID NO: 6670 - RNA, 21 nt, Artificial Sequence
  GATA2 Guide RNA
uuccgguuccaagucuggauc

SEQ ID NO: 6671 - RNA, 21 nt, Artificial Sequence
  GATA2 Guide RNA
uuggaaccggaagauguccaa

SEQ ID NO: 6672 - RNA, 21 nt, Artificial Sequence
  GATA2 Guide RNA
uuggacaucuuccgguuccaa

SEQ ID NO: 6673 - RNA, 22 nt, Artificial Sequence
  GATA2 Guide RNA
aagaaggaagggauccagacuu

SEQ ID NO: 6674 - RNA, 22 nt, Artificial Sequence
  GATA2 Guide RNA
aaggaagggauccagacuugga

SEQ ID NO: 6675 - RNA, 22 nt, Artificial Sequence
  GATA2 Guide RNA
aagggauccagacuuggaaccg

SEQ ID NO: 6676 - RNA, 22 nt, Artificial Sequence
  GATA2 Guide RNA
aagucuggaucccuuccuucuu

SEQ ID NO: 6677 - RNA, 22 nt, Artificial Sequence
  GATA2 Guide RNA
acaucuuccgguuccaagucug

SEQ ID NO: 6678 - RNA, 22 nt, Artificial Sequence
  GATA2 Guide RNA
acuuggaaccggaagaugucca

SEQ ID NO: 6679 - RNA, 22 nt, Artificial Sequence
  GATA2 Guide RNA
agaaggaagggauccagacuug

SEQ ID NO: 6680 - RNA, 22 nt, Artificial Sequence
  GATA2 Guide RNA
agacuuggaaccggaagauguc

SEQ ID NO: 6681 - RNA, 22 nt, Artificial Sequence
  GATA2 Guide RNA
aggaagggauccagacuuggaa

SEQ ID NO: 6682 - RNA, 22 nt, Artificial Sequence
  GATA2 Guide RNA
agggauccagacuuggaaccgg

SEQ ID NO: 6683 - RNA, 22 nt, Artificial Sequence
  GATA2 Guide RNA
auccagacuuggaaccggaaga

SEQ ID NO: 6684 - RNA, 22 nt, Artificial Sequence
  GATA2 Guide RNA
aucuuccgguuccaagucugga

SEQ ID NO: 6685 - RNA, 22 nt, Artificial Sequence
  GATA2 Guide RNA
caagucuggaucccuuccuucu

SEQ ID NO: 6686 - RNA, 22 nt, Artificial Sequence
  GATA2 Guide RNA
cagacuuggaaccggaagaugu

SEQ ID NO: 6687 - RNA, 22 nt, Artificial Sequence
  GATA2 Guide RNA
caucuuccgguuccaagucugg

SEQ ID NO: 6688 - RNA, 22 nt, Artificial Sequence
  GATA2 Guide RNA
caugaagaaggaagggauccag

SEQ ID NO: 6689 - RNA, 22 nt, Artificial Sequence
  GATA2 Guide RNA
ccaagucuggaucccuuccuuc

SEQ ID NO: 6690 - RNA, 22 nt, Artificial Sequence
  GATA2 Guide RNA
ccagacuuggaaccggaagaug

SEQ ID NO: 6691 - RNA, 22 nt, Artificial Sequence
  GATA2 Guide RNA
ccgguuccaagucuggaucccu

SEQ ID NO: 6692 - RNA, 22 nt, Artificial Sequence
  GATA2 Guide RNA
cgguuccaagucuggaucccuu

SEQ ID NO: 6693 - RNA, 22 nt, Artificial Sequence
  GATA2 Guide RNA
cuuccgguuccaagucuggauc

SEQ ID NO: 6694 - RNA, 22 nt, Artificial Sequence
  GATA2 Guide RNA
cuuggaaccggaagauguccaa

SEQ ID NO: 6695 - RNA, 22 nt, Artificial Sequence
  GATA2 Guide RNA
gaaggaagggauccagacuugg

SEQ ID NO: 6696 - RNA, 22 nt, Artificial Sequence
  GATA2 Guide RNA
gaagggauccagacuuggaacc

SEQ ID NO: 6697 - RNA, 22 nt, Artificial Sequence
  GATA2 Guide RNA
gacaucuuccgguuccaagucu

SEQ ID NO: 6698 - RNA, 22 nt, Artificial Sequence
  GATA2 Guide RNA
gacuuggaaccggaagaugucc

SEQ ID NO: 6699 - RNA, 22 nt, Artificial Sequence
  GATA2 Guide RNA
gauccagacuuggaaccggaag

SEQ ID NO: 6700 - RNA, 22 nt, Artificial Sequence
  GATA2 Guide RNA
ggaagggauccagacuuggaac

SEQ ID NO: 6701 - RNA, 22 nt, Artificial Sequence
  GATA2 Guide RNA
ggacaucuuccgguuccaaguc

SEQ ID NO: 6702 - RNA, 22 nt, Artificial Sequence
  GATA2 Guide RNA
ggauccagacuuggaaccggaa

SEQ ID NO: 6703 - RNA, 22 nt, Artificial Sequence
  GATA2 Guide RNA
gggauccagacuuggaaccgga

SEQ ID NO: 6704 - RNA, 22 nt, Artificial Sequence
  GATA2 Guide RNA
gguuccaagucuggaucccuuc

SEQ ID NO: 6705 - RNA, 22 nt, Artificial Sequence
  GATA2 Guide RNA
guuccaagucuggaucccuucc

SEQ ID NO: 6706 - RNA, 22 nt, Artificial Sequence
  GATA2 Guide RNA
guuggacaucuuccgguuccaa

SEQ ID NO: 6707 - RNA, 22 nt, Artificial Sequence
  GATA2 Guide RNA
uccaagucuggaucccuuccuu

SEQ ID NO: 6708 - RNA, 22 nt, Artificial Sequence
  GATA2 Guide RNA
uccagacuuggaaccggaagau

SEQ ID NO: 6709 - RNA, 22 nt, Artificial Sequence
  GATA2 Guide RNA
uccgguuccaagucuggauccc

SEQ ID NO: 6710 - RNA, 22 nt, Artificial Sequence
  GATA2 Guide RNA
ucuuccgguuccaagucuggau

SEQ ID NO: 6711 - RNA, 22 nt, Artificial Sequence
  GATA2 Guide RNA
uggacaucuuccgguuccaagu

SEQ ID NO: 6712 - RNA, 22 nt, Artificial Sequence
  GATA2 Guide RNA
uguuggacaucuuccgguucca

SEQ ID NO: 6713 - RNA, 22 nt, Artificial Sequence
  GATA2 Guide RNA
uuccaagucuggaucccuuccu

SEQ ID NO: 6714 - RNA, 22 nt, Artificial Sequence
  GATA2 Guide RNA
uuccgguuccaagucuggaucc

SEQ ID NO: 6715 - RNA, 22 nt, Artificial Sequence
  GATA2 Guide RNA
uuggaaccggaagauguccaac

SEQ ID NO: 6716 - RNA, 22 nt, Artificial Sequence
  GATA2 Guide RNA
uuggacaucuuccgguuccaag

SEQ ID NO: 6717 - RNA, 22 nt, Artificial Sequence
  GATA2 Guide RNA
uuguuggacaucuuccgguucc

SEQ ID NO: 6718 - RNA, 20 nt, Artificial Sequence
  GATA2 Guide RNA
aagaaggaagggaugcagac

SEQ ID NO: 6719 - RNA, 20 nt, Artificial Sequence
  GATA2 Guide RNA
aaggaagggaugcagacucg

SEQ ID NO: 6720 - RNA, 20 nt, Artificial Sequence
  GATA2 Guide RNA
aagggaugcagacucggaac

SEQ ID NO: 6721 - RNA, 20 nt, Artificial Sequence
  GATA2 Guide RNA
acaucuuccgguuccgaguc

SEQ ID NO: 6722 - RNA, 20 nt, Artificial Sequence
  GATA2 Guide RNA
accaugaagaaggaagggau

SEQ ID NO: 6723 - RNA, 20 nt, Artificial Sequence
  GATA2 Guide RNA
agaaggaagggaugcagacu

SEQ ID NO: 6724 - RNA, 20 nt, Artificial Sequence
  GATA2 Guide RNA
aggaagggaugcagacucgg

SEQ ID NO: 6725 - RNA, 20 nt, Artificial Sequence
  GATA2 Guide RNA
agggaugcagacucggaacc

SEQ ID NO: 6726 - RNA, 20 nt, Artificial Sequence
  GATA2 Guide RNA
agucugcaucccuuccuucu

SEQ ID NO: 6727 - RNA, 20 nt, Artificial Sequence
  GATA2 Guide RNA
aucuuccgguuccgagucug

SEQ ID NO: 6728 - RNA, 20 nt, Artificial Sequence
  GATA2 Guide RNA
augaagaaggaagggaugca

SEQ ID NO: 6729 - RNA, 20 nt, Artificial Sequence
  GATA2 Guide RNA
augcagacucggaaccggaa

SEQ ID NO: 6730 - RNA, 20 nt, Artificial Sequence
  GATA2 Guide RNA
caucccuuccuucuucaugg

SEQ ID NO: 6731 - RNA, 20 nt, Artificial Sequence
  GATA2 Guide RNA
caucuuccgguuccgagucu

SEQ ID NO: 6732 - RNA, 20 nt, Artificial Sequence
  GATA2 Guide RNA
caugaagaaggaagggaugc

SEQ ID NO: 6733 - RNA, 20 nt, Artificial Sequence
  GATA2 Guide RNA
ccaugaagaaggaagggaug

SEQ ID NO: 6734 - RNA, 20 nt, Artificial Sequence
  GATA2 Guide RNA
ccgagucugcaucccuuccu

SEQ ID NO: 6735 - RNA, 20 nt, Artificial Sequence
  GATA2 Guide RNA
ccgguuccgagucugcaucc

SEQ ID NO: 6736 - RNA, 20 nt, Artificial Sequence
  GATA2 Guide RNA
cgagucugcaucccuuccuu

SEQ ID NO: 6737 - RNA, 20 nt, Artificial Sequence
  GATA2 Guide RNA
cgguuccgagucugcauccc

SEQ ID NO: 6738 - RNA, 20 nt, Artificial Sequence
  GATA2 Guide RNA
cugaccaugaagaaggaagg

SEQ ID NO: 6739 - RNA, 20 nt, Artificial Sequence
  GATA2 Guide RNA
cugcaucccuuccuucuuca

SEQ ID NO: 6740 - RNA, 20 nt, Artificial Sequence
  GATA2 Guide RNA
cuuccgguuccgagucugca

SEQ ID NO: 6741 - RNA, 20 nt, Artificial Sequence
  GATA2 Guide RNA
gaagaaggaagggaugcaga

SEQ ID NO: 6742 - RNA, 20 nt, Artificial Sequence
  GATA2 Guide RNA
gaaggaagggaugcagacuc

SEQ ID NO: 6743 - RNA, 20 nt, Artificial Sequence
  GATA2 Guide RNA
gaagggaugcagacucggaa

SEQ ID NO: 6744 - RNA, 20 nt, Artificial Sequence
  GATA2 Guide RNA
gaccaugaagaaggaaggga

SEQ ID NO: 6745 - RNA, 20 nt, Artificial Sequence
  GATA2 Guide RNA
gagucugcaucccuuccuuc

SEQ ID NO: 6746 - RNA, 20 nt, Artificial Sequence
  GATA2 Guide RNA
gaugcagacucggaaccgga

SEQ ID NO: 6747 - RNA, 20 nt, Artificial Sequence
  GATA2 Guide RNA
gcaucccuuccuucuucaug

SEQ ID NO: 6748 - RNA, 20 nt, Artificial Sequence
  GATA2 Guide RNA
ggaagggaugcagacucgga

SEQ ID NO: 6749 - RNA, 20 nt, Artificial Sequence
  GATA2 Guide RNA
ggaugcagacucggaaccgg

SEQ ID NO: 6750 - RNA, 20 nt, Artificial Sequence
  GATA2 Guide RNA
gggaugcagacucggaaccg

SEQ ID NO: 6751 - RNA, 20 nt, Artificial Sequence
  GATA2 Guide RNA
gguuccgagucugcaucccu

SEQ ID NO: 6752 - RNA, 20 nt, Artificial Sequence
  GATA2 Guide RNA
gucugcaucccuuccuucuu

SEQ ID NO: 6753 - RNA, 20 nt, Artificial Sequence
  GATA2 Guide RNA
guuccgagucugcaucccuu

SEQ ID NO: 6754 - RNA, 20 nt, Artificial Sequence
  GATA2 Guide RNA
uccgagucugcaucccuucc

SEQ ID NO: 6755 - RNA, 20 nt, Artificial Sequence
  GATA2 Guide RNA
uccgguuccgagucugcauc

SEQ ID NO: 6756 - RNA, 20 nt, Artificial Sequence
  GATA2 Guide RNA
ucugcaucccuuccuucuuc

SEQ ID NO: 6757 - RNA, 20 nt, Artificial Sequence
  GATA2 Guide RNA
ucuuccgguuccgagucugc

SEQ ID NO: 6758 - RNA, 20 nt, Artificial Sequence
  GATA2 Guide RNA
ugaagaaggaagggaugcag

SEQ ID NO: 6759 - RNA, 20 nt, Artificial Sequence
  GATA2 Guide RNA
ugaccaugaagaaggaaggg

SEQ ID NO: 6760 - RNA, 20 nt, Artificial Sequence
  GATA2 Guide RNA
ugcagacucggaaccggaag

SEQ ID NO: 6761 - RNA, 20 nt, Artificial Sequence
  GATA2 Guide RNA
ugcaucccuuccuucuucau

SEQ ID NO: 6762 - RNA, 20 nt, Artificial Sequence
  GATA2 Guide RNA
uuccgagucugcaucccuuc

SEQ ID NO: 6763 - RNA, 20 nt, Artificial Sequence
  GATA2 Guide RNA
uuccgguuccgagucugcau

SEQ ID NO: 6764 - RNA, 21 nt, Artificial Sequence
  GATA2 Guide RNA
aagaaggaagggaugcagacu

SEQ ID NO: 6765 - RNA, 21 nt, Artificial Sequence
  GATA2 Guide RNA
aaggaagggaugcagacucgg

SEQ ID NO: 6766 - RNA, 21 nt, Artificial Sequence
  GATA2 Guide RNA
aagggaugcagacucggaacc

SEQ ID NO: 6767 - RNA, 21 nt, Artificial Sequence
  GATA2 Guide RNA
acaucuuccgguuccgagucu

SEQ ID NO: 6768 - RNA, 21 nt, Artificial Sequence
  GATA2 Guide RNA
accaugaagaaggaagggaug

SEQ ID NO: 6769 - RNA, 21 nt, Artificial Sequence
  GATA2 Guide RNA
acugaccaugaagaaggaagg

SEQ ID NO: 6770 - RNA, 21 nt, Artificial Sequence
  GATA2 Guide RNA
agaaggaagggaugcagacuc

SEQ ID NO: 6771 - RNA, 21 nt, Artificial Sequence
  GATA2 Guide RNA
aggaagggaugcagacucgga

SEQ ID NO: 6772 - RNA, 21 nt, Artificial Sequence
  GATA2 Guide RNA
agggaugcagacucggaaccg

SEQ ID NO: 6773 - RNA, 21 nt, Artificial Sequence
  GATA2 Guide RNA
agucugcaucccuuccuucuu

SEQ ID NO: 6774 - RNA, 21 nt, Artificial Sequence
  GATA2 Guide RNA
aucuuccgguuccgagucugc

SEQ ID NO: 6775 - RNA, 21 nt, Artificial Sequence
  GATA2 Guide RNA
augaagaaggaagggaugcag

SEQ ID NO: 6776 - RNA, 21 nt, Artificial Sequence
  GATA2 Guide RNA
augcagacucggaaccggaag

SEQ ID NO: 6777 - RNA, 21 nt, Artificial Sequence
  GATA2 Guide RNA
caucccuuccuucuucauggu

SEQ ID NO: 6778 - RNA, 21 nt, Artificial Sequence
  GATA2 Guide RNA
caucuuccgguuccgagucug

SEQ ID NO: 6779 - RNA, 21 nt, Artificial Sequence
  GATA2 Guide RNA
caugaagaaggaagggaugca

SEQ ID NO: 6780 - RNA, 21 nt, Artificial Sequence
  GATA2 Guide RNA
ccaugaagaaggaagggaugc

SEQ ID NO: 6781 - RNA, 21 nt, Artificial Sequence
  GATA2 Guide RNA
ccgagucugcaucccuuccuu

SEQ ID NO: 6782 - RNA, 21 nt, Artificial Sequence
  GATA2 Guide RNA
ccgguuccgagucugcauccc

SEQ ID NO: 6783 - RNA, 21 nt, Artificial Sequence
  GATA2 Guide RNA
cgagucugcaucccuuccuuc

SEQ ID NO: 6784 - RNA, 21 nt, Artificial Sequence
  GATA2 Guide RNA
cgguuccgagucugcaucccu

SEQ ID NO: 6785 - RNA, 21 nt, Artificial Sequence
  GATA2 Guide RNA
cugaccaugaagaaggaaggg

SEQ ID NO: 6786 - RNA, 21 nt, Artificial Sequence
  GATA2 Guide RNA
cugcaucccuuccuucuucau

SEQ ID NO: 6787 - RNA, 21 nt, Artificial Sequence
  GATA2 Guide RNA
cuuccgguuccgagucugcau

SEQ ID NO: 6788 - RNA, 21 nt, Artificial Sequence
  GATA2 Guide RNA
gaagaaggaagggaugcagac

SEQ ID NO: 6789 - RNA, 21 nt, Artificial Sequence
  GATA2 Guide RNA
gaaggaagggaugcagacucg

SEQ ID NO: 6790 - RNA, 21 nt, Artificial Sequence
  GATA2 Guide RNA
gaagggaugcagacucggaac

SEQ ID NO: 6791 - RNA, 21 nt, Artificial Sequence
  GATA2 Guide RNA
gacaucuuccgguuccgaguc

SEQ ID NO: 6792 - RNA, 21 nt, Artificial Sequence
  GATA2 Guide RNA
gaccaugaagaaggaagggau

SEQ ID NO: 6793 - RNA, 21 nt, Artificial Sequence
  GATA2 Guide RNA
gagucugcaucccuuccuucu

SEQ ID NO: 6794 - RNA, 21 nt, Artificial Sequence
  GATA2 Guide RNA
gaugcagacucggaaccggaa

SEQ ID NO: 6795 - RNA, 21 nt, Artificial Sequence
  GATA2 Guide RNA
gcaucccuuccuucuucaugg

SEQ ID NO: 6796 - RNA, 21 nt, Artificial Sequence
  GATA2 Guide RNA
ggaagggaugcagacucggaa

SEQ ID NO: 6797 - RNA, 21 nt, Artificial Sequence
  GATA2 Guide RNA
ggaugcagacucggaaccgga

SEQ ID NO: 6798 - RNA, 21 nt, Artificial Sequence
  GATA2 Guide RNA
gggaugcagacucggaaccgg

SEQ ID NO: 6799 - RNA, 21 nt, Artificial Sequence
  GATA2 Guide RNA
gguuccgagucugcaucccuu

SEQ ID NO: 6800 - RNA, 21 nt, Artificial Sequence
  GATA2 Guide RNA
gucugcaucccuuccuucuuc

SEQ ID NO: 6801 - RNA, 21 nt, Artificial Sequence
  GATA2 Guide RNA
guuccgagucugcaucccuuc

SEQ ID NO: 6802 - RNA, 21 nt, Artificial Sequence
  GATA2 Guide RNA
uccgagucugcaucccuuccu

SEQ ID NO: 6803 - RNA, 21 nt, Artificial Sequence
  GATA2 Guide RNA
uccgguuccgagucugcaucc

SEQ ID NO: 6804 - RNA, 21 nt, Artificial Sequence
  GATA2 Guide RNA
ucugcaucccuuccuucuuca

SEQ ID NO: 6805 - RNA, 21 nt, Artificial Sequence
  GATA2 Guide RNA
ucuuccgguuccgagucugca

SEQ ID NO: 6806 - RNA, 21 nt, Artificial Sequence
  GATA2 Guide RNA
ugaagaaggaagggaugcaga

SEQ ID NO: 6807 - RNA, 21 nt, Artificial Sequence
  GATA2 Guide RNA
ugaccaugaagaaggaaggga

SEQ ID NO: 6808 - RNA, 21 nt, Artificial Sequence
  GATA2 Guide RNA
ugcagacucggaaccggaaga

SEQ ID NO: 6809 - RNA, 21 nt, Artificial Sequence
  GATA2 Guide RNA
ugcaucccuuccuucuucaug

SEQ ID NO: 6810 - RNA, 21 nt, Artificial Sequence
  GATA2 Guide RNA
uuccgagucugcaucccuucc

SEQ ID NO: 6811 - RNA, 21 nt, Artificial Sequence
  GATA2 Guide RNA
uuccgguuccgagucugcauc

SEQ ID NO: 6812 - RNA, 22 nt, Artificial Sequence
  GATA2 Guide RNA
aagaaggaagggaugcagacuc

SEQ ID NO: 6813 - RNA, 22 nt, Artificial Sequence
  GATA2 Guide RNA
aaggaagggaugcagacucgga

SEQ ID NO: 6814 - RNA, 22 nt, Artificial Sequence
  GATA2 Guide RNA
aagggaugcagacucggaaccg

SEQ ID NO: 6815 - RNA, 22 nt, Artificial Sequence
  GATA2 Guide RNA
acaucuuccgguuccgagucug

SEQ ID NO: 6816 - RNA, 22 nt, Artificial Sequence
  GATA2 Guide RNA
accaugaagaaggaagggaugc

SEQ ID NO: 6817 - RNA, 22 nt, Artificial Sequence
  GATA2 Guide RNA
acugaccaugaagaaggaaggg

SEQ ID NO: 6818 - RNA, 22 nt, Artificial Sequence
  GATA2 Guide RNA
agaaggaagggaugcagacucg

SEQ ID NO: 6819 - RNA, 22 nt, Artificial Sequence
  GATA2 Guide RNA
aggaagggaugcagacucggaa

SEQ ID NO: 6820 - RNA, 22 nt, Artificial Sequence
  GATA2 Guide RNA
agggaugcagacucggaaccgg

SEQ ID NO: 6821 - RNA, 22 nt, Artificial Sequence
  GATA2 Guide RNA
agucugcaucccuuccuucuuc

SEQ ID NO: 6822 - RNA, 22 nt, Artificial Sequence
  GATA2 Guide RNA
aucuuccgguuccgagucugca

SEQ ID NO: 6823 - RNA, 22 nt, Artificial Sequence
  GATA2 Guide RNA
augaagaaggaagggaugcaga

SEQ ID NO: 6824 - RNA, 22 nt, Artificial Sequence
  GATA2 Guide RNA
augcagacucggaaccggaaga

SEQ ID NO: 6825 - RNA, 22 nt, Artificial Sequence
  GATA2 Guide RNA
cacugaccaugaagaaggaagg

SEQ ID NO: 6826 - RNA, 22 nt, Artificial Sequence
  GATA2 Guide RNA
caucccuuccuucuucaugguc

SEQ ID NO: 6827 - RNA, 22 nt, Artificial Sequence
  GATA2 Guide RNA
caucuuccgguuccgagucugc

SEQ ID NO: 6828 - RNA, 22 nt, Artificial Sequence
  GATA2 Guide RNA
caugaagaaggaagggaugcag

SEQ ID NO: 6829 - RNA, 22 nt, Artificial Sequence
  GATA2 Guide RNA
ccaugaagaaggaagggaugca

SEQ ID NO: 6830 - RNA, 22 nt, Artificial Sequence
  GATA2 Guide RNA
ccgagucugcaucccuuccuuc

SEQ ID NO: 6831 - RNA, 22 nt, Artificial Sequence
  GATA2 Guide RNA
ccgguuccgagucugcaucccu

SEQ ID NO: 6832 - RNA, 22 nt, Artificial Sequence
  GATA2 Guide RNA
cgagucugcaucccuuccuucu

SEQ ID NO: 6833 - RNA, 22 nt, Artificial Sequence
  GATA2 Guide RNA
cgguuccgagucugcaucccuu

SEQ ID NO: 6834 - RNA, 22 nt, Artificial Sequence
  GATA2 Guide RNA
cugaccaugaagaaggaaggga

SEQ ID NO: 6835 - RNA, 22 nt, Artificial Sequence
  GATA2 Guide RNA
cugcaucccuuccuucuucaug

SEQ ID NO: 6836 - RNA, 22 nt, Artificial Sequence
  GATA2 Guide RNA
cuuccgguuccgagucugcauc

SEQ ID NO: 6837 - RNA, 22 nt, Artificial Sequence
  GATA2 Guide RNA
gaagaaggaagggaugcagacu

SEQ ID NO: 6838 - RNA, 22 nt, Artificial Sequence
  GATA2 Guide RNA
gaaggaagggaugcagacucgg

SEQ ID NO: 6839 - RNA, 22 nt, Artificial Sequence
  GATA2 Guide RNA
gaagggaugcagacucggaacc

SEQ ID NO: 6840 - RNA, 22 nt, Artificial Sequence
  GATA2 Guide RNA
gacaucuuccgguuccgagucu

SEQ ID NO: 6841 - RNA, 22 nt, Artificial Sequence
  GATA2 Guide RNA
gaccaugaagaaggaagggaug

SEQ ID NO: 6842 - RNA, 22 nt, Artificial Sequence
  GATA2 Guide RNA
gagucugcaucccuuccuucuu

SEQ ID NO: 6843 - RNA, 22 nt, Artificial Sequence
  GATA2 Guide RNA
gaugcagacucggaaccggaag

SEQ ID NO: 6844 - RNA, 22 nt, Artificial Sequence
  GATA2 Guide RNA
gcaucccuuccuucuucauggu

SEQ ID NO: 6845 - RNA, 22 nt, Artificial Sequence
  GATA2 Guide RNA
ggaagggaugcagacucggaac

SEQ ID NO: 6846 - RNA, 22 nt, Artificial Sequence
  GATA2 Guide RNA
ggacaucuuccgguuccgaguc

SEQ ID NO: 6847 - RNA, 22 nt, Artificial Sequence
  GATA2 Guide RNA
ggaugcagacucggaaccggaa

SEQ ID NO: 6848 - RNA, 22 nt, Artificial Sequence
  GATA2 Guide RNA
gggaugcagacucggaaccgga

SEQ ID NO: 6849 - RNA, 22 nt, Artificial Sequence
  GATA2 Guide RNA
gguuccgagucugcaucccuuc

SEQ ID NO: 6850 - RNA, 22 nt, Artificial Sequence
  GATA2 Guide RNA
gucugcaucccuuccuucuuca

SEQ ID NO: 6851 - RNA, 22 nt, Artificial Sequence
  GATA2 Guide RNA
guuccgagucugcaucccuucc

SEQ ID NO: 6852 - RNA, 22 nt, Artificial Sequence
  GATA2 Guide RNA
uccgagucugcaucccuuccuu

SEQ ID NO: 6853 - RNA, 22 nt, Artificial Sequence
  GATA2 Guide RNA
uccgguuccgagucugcauccc

SEQ ID NO: 6854 - RNA, 22 nt, Artificial Sequence
  GATA2 Guide RNA
ucugcaucccuuccuucuucau

SEQ ID NO: 6855 - RNA, 22 nt, Artificial Sequence
  GATA2 Guide RNA
ucuuccgguuccgagucugcau

SEQ ID NO: 6856 - RNA, 22 nt, Artificial Sequence
  GATA2 Guide RNA
ugaagaaggaagggaugcagac

SEQ ID NO: 6857 - RNA, 22 nt, Artificial Sequence
  GATA2 Guide RNA
ugaccaugaagaaggaagggau

SEQ ID NO: 6858 - RNA, 22 nt, Artificial Sequence
  GATA2 Guide RNA
ugcagacucggaaccggaagau

SEQ ID NO: 6859 - RNA, 22 nt, Artificial Sequence
  GATA2 Guide RNA
ugcaucccuuccuucuucaugg

SEQ ID NO: 6860 - RNA, 22 nt, Artificial Sequence
  GATA2 Guide RNA
uuccgagucugcaucccuuccu

SEQ ID NO: 6861 - RNA, 22 nt, Artificial Sequence
  GATA2 Guide RNA
uuccgguuccgagucugcaucc

SEQ ID NO: 6862 - RNA, 20 nt, Artificial Sequence
  GATA2 Guide RNA
aacaggccacugaccacgaa

SEQ ID NO: 6863 - RNA, 20 nt, Artificial Sequence
  GATA2 Guide RNA
acaggccacugaccacgaag

SEQ ID NO: 6864 - RNA, 20 nt, Artificial Sequence
  GATA2 Guide RNA
accacgaagaaggaagggau

SEQ ID NO: 6865 - RNA, 20 nt, Artificial Sequence
  GATA2 Guide RNA
acgaagaaggaagggaucca

SEQ ID NO: 6866 - RNA, 20 nt, Artificial Sequence
  GATA2 Guide RNA
acugaccacgaagaaggaag

SEQ ID NO: 6867 - RNA, 20 nt, Artificial Sequence
  GATA2 Guide RNA
aggccacugaccacgaagaa

SEQ ID NO: 6868 - RNA, 20 nt, Artificial Sequence
  GATA2 Guide RNA
agguuaacaggccacugacc

SEQ ID NO: 6869 - RNA, 20 nt, Artificial Sequence
  GATA2 Guide RNA
agucuggaucccuuccuucu

SEQ ID NO: 6870 - RNA, 20 nt, Artificial Sequence
  GATA2 Guide RNA
aucccuuccuucuucguggu

SEQ ID NO: 6871 - RNA, 20 nt, Artificial Sequence
  GATA2 Guide RNA
cacgaagaaggaagggaucc

SEQ ID NO: 6872 - RNA, 20 nt, Artificial Sequence
  GATA2 Guide RNA
cacugaccacgaagaaggaa

SEQ ID NO: 6873 - RNA, 20 nt, Artificial Sequence
  GATA2 Guide RNA
caggccacugaccacgaaga

SEQ ID NO: 6874 - RNA, 20 nt, Artificial Sequence
  GATA2 Guide RNA
ccacgaagaaggaagggauc

SEQ ID NO: 6875 - RNA, 20 nt, Artificial Sequence
  GATA2 Guide RNA
ccacugaccacgaagaagga

SEQ ID NO: 6876 - RNA, 20 nt, Artificial Sequence
  GATA2 Guide RNA
cccuuccuucuucgugguca

SEQ ID NO: 6877 - RNA, 20 nt, Artificial Sequence
  GATA2 Guide RNA
ccuuccuucuucguggucag

SEQ ID NO: 6878 - RNA, 20 nt, Artificial Sequence
  GATA2 Guide RNA
ccuucuucguggucaguggc

SEQ ID NO: 6879 - RNA, 20 nt, Artificial Sequence
  GATA2 Guide RNA
cguggucaguggccuguuaa

SEQ ID NO: 6880 - RNA, 20 nt, Artificial Sequence
  GATA2 Guide RNA
cuagguuaacaggccacuga

SEQ ID NO: 6881 - RNA, 20 nt, Artificial Sequence
  GATA2 Guide RNA
cugaccacgaagaaggaagg

SEQ ID NO: 6882 - RNA, 20 nt, Artificial Sequence
  GATA2 Guide RNA
cuggaucccuuccuucuucg

SEQ ID NO: 6883 - RNA, 20 nt, Artificial Sequence
  GATA2 Guide RNA
cuuccuucuucguggucagu

SEQ ID NO: 6884 - RNA, 20 nt, Artificial Sequence
  GATA2 Guide RNA
cuucguggucaguggccugu

SEQ ID NO: 6885 - RNA, 20 nt, Artificial Sequence
  GATA2 Guide RNA
cuucuucguggucaguggcc

SEQ ID NO: 6886 - RNA, 20 nt, Artificial Sequence
  GATA2 Guide RNA
gaccacgaagaaggaaggga

SEQ ID NO: 6887 - RNA, 20 nt, Artificial Sequence
  GATA2 Guide RNA
gaucccuuccuucuucgugg

SEQ ID NO: 6888 - RNA, 20 nt, Artificial Sequence
  GATA2 Guide RNA
gccacugaccacgaagaagg

SEQ ID NO: 6889 - RNA, 20 nt, Artificial Sequence
  GATA2 Guide RNA
ggaucccuuccuucuucgug

SEQ ID NO: 6890 - RNA, 20 nt, Artificial Sequence
  GATA2 Guide RNA
ggccacugaccacgaagaag

SEQ ID NO: 6891 - RNA, 20 nt, Artificial Sequence
  GATA2 Guide RNA
gguuaacaggccacugacca

SEQ ID NO: 6892 - RNA, 20 nt, Artificial Sequence
  GATA2 Guide RNA
gucuggaucccuuccuucuu

SEQ ID NO: 6893 - RNA, 20 nt, Artificial Sequence
  GATA2 Guide RNA
guggucaguggccuguuaac

SEQ ID NO: 6894 - RNA, 20 nt, Artificial Sequence
  GATA2 Guide RNA
guuaacaggccacugaccac

SEQ ID NO: 6895 - RNA, 20 nt, Artificial Sequence
  GATA2 Guide RNA
uaacaggccacugaccacga

SEQ ID NO: 6896 - RNA, 20 nt, Artificial Sequence
  GATA2 Guide RNA
uagguuaacaggccacugac

SEQ ID NO: 6897 - RNA, 20 nt, Artificial Sequence
  GATA2 Guide RNA
ucccuuccuucuucgugguc

SEQ ID NO: 6898 - RNA, 20 nt, Artificial Sequence
  GATA2 Guide RNA
uccuucuucguggucagugg

SEQ ID NO: 6899 - RNA, 20 nt, Artificial Sequence
  GATA2 Guide RNA
ucguggucaguggccuguua

SEQ ID NO: 6900 - RNA, 20 nt, Artificial Sequence
  GATA2 Guide RNA
ucuggaucccuuccuucuuc

SEQ ID NO: 6901 - RNA, 20 nt, Artificial Sequence
  GATA2 Guide RNA
ucuucguggucaguggccug

SEQ ID NO: 6902 - RNA, 20 nt, Artificial Sequence
  GATA2 Guide RNA
ugaccacgaagaaggaaggg

SEQ ID NO: 6903 - RNA, 20 nt, Artificial Sequence
  GATA2 Guide RNA
uggaucccuuccuucuucgu

SEQ ID NO: 6904 - RNA, 20 nt, Artificial Sequence
  GATA2 Guide RNA
uuaacaggccacugaccacg

SEQ ID NO: 6905 - RNA, 20 nt, Artificial Sequence
  GATA2 Guide RNA
uuccuucuucguggucagug

SEQ ID NO: 6906 - RNA, 20 nt, Artificial Sequence
  GATA2 Guide RNA
uucguggucaguggccuguu

SEQ ID NO: 6907 - RNA, 20 nt, Artificial Sequence
  GATA2 Guide RNA
uucuucguggucaguggccu

SEQ ID NO: 6908 - RNA, 21 nt, Artificial Sequence
  GATA2 Guide RNA
aacaggccacugaccacgaag

SEQ ID NO: 6909 - RNA, 21 nt, Artificial Sequence
  GATA2 Guide RNA
acaggccacugaccacgaaga

SEQ ID NO: 6910 - RNA, 21 nt, Artificial Sequence
  GATA2 Guide RNA
accacgaagaaggaagggauc

SEQ ID NO: 6911 - RNA, 21 nt, Artificial Sequence
  GATA2 Guide RNA
acgaagaaggaagggauccag

SEQ ID NO: 6912 - RNA, 21 nt, Artificial Sequence
  GATA2 Guide RNA
acugaccacgaagaaggaagg

SEQ ID NO: 6913 - RNA, 21 nt, Artificial Sequence
  GATA2 Guide RNA
aggccacugaccacgaagaag

SEQ ID NO: 6914 - RNA, 21 nt, Artificial Sequence
  GATA2 Guide RNA
agguuaacaggccacugacca

SEQ ID NO: 6915 - RNA, 21 nt, Artificial Sequence
  GATA2 Guide RNA
agucuggaucccuuccuucuu

SEQ ID NO: 6916 - RNA, 21 nt, Artificial Sequence
  GATA2 Guide RNA
aucccuuccuucuucgugguc

SEQ ID NO: 6917 - RNA, 21 nt, Artificial Sequence
  GATA2 Guide RNA
cacgaagaaggaagggaucca

SEQ ID NO: 6918 - RNA, 21 nt, Artificial Sequence
  GATA2 Guide RNA
cacugaccacgaagaaggaag

SEQ ID NO: 6919 - RNA, 21 nt, Artificial Sequence
  GATA2 Guide RNA
caggccacugaccacgaagaa

SEQ ID NO: 6920 - RNA, 21 nt, Artificial Sequence
  GATA2 Guide RNA
ccacgaagaaggaagggaucc

SEQ ID NO: 6921 - RNA, 21 nt, Artificial Sequence
  GATA2 Guide RNA
ccacugaccacgaagaaggaa

SEQ ID NO: 6922 - RNA, 21 nt, Artificial Sequence
  GATA2 Guide RNA
cccuuccuucuucguggucag

SEQ ID NO: 6923 - RNA, 21 nt, Artificial Sequence
  GATA2 Guide RNA
ccuuccuucuucguggucagu

SEQ ID NO: 6924 - RNA, 21 nt, Artificial Sequence
  GATA2 Guide RNA
ccuucuucguggucaguggcc

SEQ ID NO: 6925 - RNA, 21 nt, Artificial Sequence
  GATA2 Guide RNA
cguggucaguggccuguuaac

SEQ ID NO: 6926 - RNA, 21 nt, Artificial Sequence
  GATA2 Guide RNA
cuagguuaacaggccacugac

SEQ ID NO: 6927 - RNA, 21 nt, Artificial Sequence
  GATA2 Guide RNA
cugaccacgaagaaggaaggg

SEQ ID NO: 6928 - RNA, 21 nt, Artificial Sequence
  GATA2 Guide RNA
cuggaucccuuccuucuucgu

SEQ ID NO: 6929 - RNA, 21 nt, Artificial Sequence
  GATA2 Guide RNA
cuuccuucuucguggucagug

SEQ ID NO: 6930 - RNA, 21 nt, Artificial Sequence
  GATA2 Guide RNA
cuucguggucaguggccuguu

SEQ ID NO: 6931 - RNA, 21 nt, Artificial Sequence
  GATA2 Guide RNA
cuucuucguggucaguggccu

SEQ ID NO: 6932 - RNA, 21 nt, Artificial Sequence
  GATA2 Guide RNA
gaccacgaagaaggaagggau

SEQ ID NO: 6933 - RNA, 21 nt, Artificial Sequence
  GATA2 Guide RNA
gagucuggaucccuuccuucu

SEQ ID NO: 6934 - RNA, 21 nt, Artificial Sequence
  GATA2 Guide RNA
gaucccuuccuucuucguggu

SEQ ID NO: 6935 - RNA, 21 nt, Artificial Sequence
  GATA2 Guide RNA
gccacugaccacgaagaagga

SEQ ID NO: 6936 - RNA, 21 nt, Artificial Sequence
  GATA2 Guide RNA
ggaucccuuccuucuucgugg

SEQ ID NO: 6937 - RNA, 21 nt, Artificial Sequence
  GATA2 Guide RNA
ggccacugaccacgaagaagg

SEQ ID NO: 6938 - RNA, 21 nt, Artificial Sequence
  GATA2 Guide RNA
gguuaacaggccacugaccac

SEQ ID NO: 6939 - RNA, 21 nt, Artificial Sequence
  GATA2 Guide RNA
gucuggaucccuuccuucuuc

SEQ ID NO: 6940 - RNA, 21 nt, Artificial Sequence
  GATA2 Guide RNA
guggucaguggccuguuaacc

SEQ ID NO: 6941 - RNA, 21 nt, Artificial Sequence
  GATA2 Guide RNA
guuaacaggccacugaccacg

SEQ ID NO: 6942 - RNA, 21 nt, Artificial Sequence
  GATA2 Guide RNA
uaacaggccacugaccacgaa

SEQ ID NO: 6943 - RNA, 21 nt, Artificial Sequence
  GATA2 Guide RNA
uagguuaacaggccacugacc

SEQ ID NO: 6944 - RNA, 21 nt, Artificial Sequence
  GATA2 Guide RNA
ucccuuccuucuucgugguca

SEQ ID NO: 6945 - RNA, 21 nt, Artificial Sequence
  GATA2 Guide RNA
uccuucuucguggucaguggc

SEQ ID NO: 6946 - RNA, 21 nt, Artificial Sequence
  GATA2 Guide RNA
ucguggucaguggccuguuaa

SEQ ID NO: 6947 - RNA, 21 nt, Artificial Sequence
  GATA2 Guide RNA
ucuagguuaacaggccacuga

SEQ ID NO: 6948 - RNA, 21 nt, Artificial Sequence
  GATA2 Guide RNA
ucuggaucccuuccuucuucg

SEQ ID NO: 6949 - RNA, 21 nt, Artificial Sequence
  GATA2 Guide RNA
ucuucguggucaguggccugu

SEQ ID NO: 6950 - RNA, 21 nt, Artificial Sequence
  GATA2 Guide RNA
ugaccacgaagaaggaaggga

SEQ ID NO: 6951 - RNA, 21 nt, Artificial Sequence
  GATA2 Guide RNA
uggaucccuuccuucuucgug

SEQ ID NO: 6952 - RNA, 21 nt, Artificial Sequence
  GATA2 Guide RNA
uuaacaggccacugaccacga

SEQ ID NO: 6953 - RNA, 21 nt, Artificial Sequence
  GATA2 Guide RNA
uuccuucuucguggucagugg

SEQ ID NO: 6954 - RNA, 21 nt, Artificial Sequence
  GATA2 Guide RNA
uucguggucaguggccuguua

SEQ ID NO: 6955 - RNA, 21 nt, Artificial Sequence
  GATA2 Guide RNA
uucuucguggucaguggccug

SEQ ID NO: 6956 - RNA, 22 nt, Artificial Sequence
  GATA2 Guide RNA
aacaggccacugaccacgaaga

SEQ ID NO: 6957 - RNA, 22 nt, Artificial Sequence
  GATA2 Guide RNA
acaggccacugaccacgaagaa

SEQ ID NO: 6958 - RNA, 22 nt, Artificial Sequence
  GATA2 Guide RNA
accacgaagaaggaagggaucc

SEQ ID NO: 6959 - RNA, 22 nt, Artificial Sequence
  GATA2 Guide RNA
acgaagaaggaagggauccaga

SEQ ID NO: 6960 - RNA, 22 nt, Artificial Sequence
  GATA2 Guide RNA
acugaccacgaagaaggaaggg

SEQ ID NO: 6961 - RNA, 22 nt, Artificial Sequence
  GATA2 Guide RNA
aggccacugaccacgaagaagg

SEQ ID NO: 6962 - RNA, 22 nt, Artificial Sequence
  GATA2 Guide RNA
agguuaacaggccacugaccac

SEQ ID NO: 6963 - RNA, 22 nt, Artificial Sequence
  GATA2 Guide RNA
agucuggaucccuuccuucuuc

SEQ ID NO: 6964 - RNA, 22 nt, Artificial Sequence
  GATA2 Guide RNA
aucccuuccuucuucgugguca

SEQ ID NO: 6965 - RNA, 22 nt, Artificial Sequence
  GATA2 Guide RNA
cacgaagaaggaagggauccag

SEQ ID NO: 6966 - RNA, 22 nt, Artificial Sequence
  GATA2 Guide RNA
cacugaccacgaagaaggaagg

SEQ ID NO: 6967 - RNA, 22 nt, Artificial Sequence
  GATA2 Guide RNA
caggccacugaccacgaagaag

SEQ ID NO: 6968 - RNA, 22 nt, Artificial Sequence
  GATA2 Guide RNA
ccacgaagaaggaagggaucca

SEQ ID NO: 6969 - RNA, 22 nt, Artificial Sequence
  GATA2 Guide RNA
ccacugaccacgaagaaggaag

SEQ ID NO: 6970 - RNA, 22 nt, Artificial Sequence
  GATA2 Guide RNA
cccuuccuucuucguggucagu

SEQ ID NO: 6971 - RNA, 22 nt, Artificial Sequence
  GATA2 Guide RNA
ccuuccuucuucguggucagug

SEQ ID NO: 6972 - RNA, 22 nt, Artificial Sequence
  GATA2 Guide RNA
ccuucuucguggucaguggccu

SEQ ID NO: 6973 - RNA, 22 nt, Artificial Sequence
  GATA2 Guide RNA
cgagucuggaucccuuccuucu

SEQ ID NO: 6974 - RNA, 22 nt, Artificial Sequence
  GATA2 Guide RNA
cguggucaguggccuguuaacc

SEQ ID NO: 6975 - RNA, 22 nt, Artificial Sequence
  GATA2 Guide RNA
cuagguuaacaggccacugacc

SEQ ID NO: 6976 - RNA, 22 nt, Artificial Sequence
  GATA2 Guide RNA
cucuagguuaacaggccacuga

SEQ ID NO: 6977 - RNA, 22 nt, Artificial Sequence
  GATA2 Guide RNA
cugaccacgaagaaggaaggga

SEQ ID NO: 6978 - RNA, 22 nt, Artificial Sequence
  GATA2 Guide RNA
cuggaucccuuccuucuucgug

SEQ ID NO: 6979 - RNA, 22 nt, Artificial Sequence
  GATA2 Guide RNA
cuuccuucuucguggucagugg

SEQ ID NO: 6980 - RNA, 22 nt, Artificial Sequence
  GATA2 Guide RNA
cuucguggucaguggccuguua

SEQ ID NO: 6981 - RNA, 22 nt, Artificial Sequence
  GATA2 Guide RNA
cuucuucguggucaguggccug

SEQ ID NO: 6982 - RNA, 22 nt, Artificial Sequence
  GATA2 Guide RNA
gaccacgaagaaggaagggauc

SEQ ID NO: 6983 - RNA, 22 nt, Artificial Sequence
  GATA2 Guide RNA
gagucuggaucccuuccuucuu

SEQ ID NO: 6984 - RNA, 22 nt, Artificial Sequence
  GATA2 Guide RNA
gaucccuuccuucuucgugguc

SEQ ID NO: 6985 - RNA, 22 nt, Artificial Sequence
  GATA2 Guide RNA
gccacugaccacgaagaaggaa

SEQ ID NO: 6986 - RNA, 22 nt, Artificial Sequence
  GATA2 Guide RNA
ggaucccuuccuucuucguggu

SEQ ID NO: 6987 - RNA, 22 nt, Artificial Sequence
  GATA2 Guide RNA
ggccacugaccacgaagaagga

SEQ ID NO: 6988 - RNA, 22 nt, Artificial Sequence
  GATA2 Guide RNA
gguuaacaggccacugaccacg

SEQ ID NO: 6989 - RNA, 22 nt, Artificial Sequence
  GATA2 Guide RNA
gucuggaucccuuccuucuucg

SEQ ID NO: 6990 - RNA, 22 nt, Artificial Sequence
  GATA2 Guide RNA
guggucaguggccuguuaaccu

SEQ ID NO: 6991 - RNA, 22 nt, Artificial Sequence
  GATA2 Guide RNA
guuaacaggccacugaccacga

SEQ ID NO: 6992 - RNA, 22 nt, Artificial Sequence
  GATA2 Guide RNA
uaacaggccacugaccacgaag

SEQ ID NO: 6993 - RNA, 22 nt, Artificial Sequence
  GATA2 Guide RNA
uagguuaacaggccacugacca

SEQ ID NO: 6994 - RNA, 22 nt, Artificial Sequence
  GATA2 Guide RNA
ucccuuccuucuucguggucag

SEQ ID NO: 6995 - RNA, 22 nt, Artificial Sequence
  GATA2 Guide RNA
uccuucuucguggucaguggcc

SEQ ID NO: 6996 - RNA, 22 nt, Artificial Sequence
  GATA2 Guide RNA
ucguggucaguggccuguuaac

SEQ ID NO: 6997 - RNA, 22 nt, Artificial Sequence
  GATA2 Guide RNA
ucuagguuaacaggccacugac

SEQ ID NO: 6998 - RNA, 22 nt, Artificial Sequence
  GATA2 Guide RNA
ucuggaucccuuccuucuucgu

SEQ ID NO: 6999 - RNA, 22 nt, Artificial Sequence
  GATA2 Guide RNA
ucuucguggucaguggccuguu

SEQ ID NO: 7000 - RNA, 22 nt, Artificial Sequence
  GATA2 Guide RNA
ugaccacgaagaaggaagggau

SEQ ID NO: 7001 - RNA, 22 nt, Artificial Sequence
  GATA2 Guide RNA
uggaucccuuccuucuucgugg

SEQ ID NO: 7002 - RNA, 22 nt, Artificial Sequence
  GATA2 Guide RNA
uuaacaggccacugaccacgaa

SEQ ID NO: 7003 - RNA, 22 nt, Artificial Sequence
  GATA2 Guide RNA
uuccuucuucguggucaguggc

SEQ ID NO: 7004 - RNA, 22 nt, Artificial Sequence
  GATA2 Guide RNA
uucguggucaguggccuguuaa

SEQ ID NO: 7005 - RNA, 22 nt, Artificial Sequence
  GATA2 Guide RNA
uucuucguggucaguggccugu

SEQ ID NO: 7006 - RNA, 20 nt, Artificial Sequence
  GATA2 Guide RNA
aacaggccacugaacaugaa

SEQ ID NO: 7007 - RNA, 20 nt, Artificial Sequence
  GATA2 Guide RNA
aacaugaagaaggaagggau

SEQ ID NO: 7008 - RNA, 20 nt, Artificial Sequence
  GATA2 Guide RNA
acaggccacugaacaugaag

SEQ ID NO: 7009 - RNA, 20 nt, Artificial Sequence
  GATA2 Guide RNA
acugaacaugaagaaggaag

SEQ ID NO: 7010 - RNA, 20 nt, Artificial Sequence
  GATA2 Guide RNA
aggccacugaacaugaagaa

SEQ ID NO: 7011 - RNA, 20 nt, Artificial Sequence
  GATA2 Guide RNA
agguuaacaggccacugaac

SEQ ID NO: 7012 - RNA, 20 nt, Artificial Sequence
  GATA2 Guide RNA
aucccuuccuucuucauguu

SEQ ID NO: 7013 - RNA, 20 nt, Artificial Sequence
  GATA2 Guide RNA
auguucaguggccuguuaac

SEQ ID NO: 7014 - RNA, 20 nt, Artificial Sequence
  GATA2 Guide RNA
cacugaacaugaagaaggaa

SEQ ID NO: 7015 - RNA, 20 nt, Artificial Sequence
  GATA2 Guide RNA
caggccacugaacaugaaga

SEQ ID NO: 7016 - RNA, 20 nt, Artificial Sequence
  GATA2 Guide RNA
cauguucaguggccuguuaa

SEQ ID NO: 7017 - RNA, 20 nt, Artificial Sequence
  GATA2 Guide RNA
ccacugaacaugaagaagga

SEQ ID NO: 7018 - RNA, 20 nt, Artificial Sequence
  GATA2 Guide RNA
cccuuccuucuucauguuca

SEQ ID NO: 7019 - RNA, 20 nt, Artificial Sequence
  GATA2 Guide RNA
ccucuagguuaacaggccac

SEQ ID NO: 7020 - RNA, 20 nt, Artificial Sequence
  GATA2 Guide RNA
ccuuccuucuucauguucag

SEQ ID NO: 7021 - RNA, 20 nt, Artificial Sequence
  GATA2 Guide RNA
ccuucuucauguucaguggc

SEQ ID NO: 7022 - RNA, 20 nt, Artificial Sequence
  GATA2 Guide RNA
cucuagguuaacaggccacu

SEQ ID NO: 7023 - RNA, 20 nt, Artificial Sequence
  GATA2 Guide RNA
cugaacaugaagaaggaagg

SEQ ID NO: 7024 - RNA, 20 nt, Artificial Sequence
  GATA2 Guide RNA
cuggaucccuuccuucuuca

SEQ ID NO: 7025 - RNA, 20 nt, Artificial Sequence
  GATA2 Guide RNA
cuucauguucaguggccugu

SEQ ID NO: 7026 - RNA, 20 nt, Artificial Sequence
  GATA2 Guide RNA
cuuccuucuucauguucagu

SEQ ID NO: 7027 - RNA, 20 nt, Artificial Sequence
  GATA2 Guide RNA
cuucuucauguucaguggcc

SEQ ID NO: 7028 - RNA, 20 nt, Artificial Sequence
  GATA2 Guide RNA
gaacaugaagaaggaaggga

SEQ ID NO: 7029 - RNA, 20 nt, Artificial Sequence
  GATA2 Guide RNA
gaucccuuccuucuucaugu

SEQ ID NO: 7030 - RNA, 20 nt, Artificial Sequence
  GATA2 Guide RNA
gccacugaacaugaagaagg

SEQ ID NO: 7031 - RNA, 20 nt, Artificial Sequence
  GATA2 Guide RNA
ggaucccuuccuucuucaug

SEQ ID NO: 7032 - RNA, 20 nt, Artificial Sequence
  GATA2 Guide RNA
ggccacugaacaugaagaag

SEQ ID NO: 7033 - RNA, 20 nt, Artificial Sequence
  GATA2 Guide RNA
gguuaacaggccacugaaca

SEQ ID NO: 7034 - RNA, 20 nt, Artificial Sequence
  GATA2 Guide RNA
guuaacaggccacugaacau

SEQ ID NO: 7035 - RNA, 20 nt, Artificial Sequence
  GATA2 Guide RNA
guucaguggccuguuaaccu

SEQ ID NO: 7036 - RNA, 20 nt, Artificial Sequence
  GATA2 Guide RNA
uaacaggccacugaacauga

SEQ ID NO: 7037 - RNA, 20 nt, Artificial Sequence
  GATA2 Guide RNA
uagguuaacaggccacugaa

SEQ ID NO: 7038 - RNA, 20 nt, Artificial Sequence
  GATA2 Guide RNA
ucauguucaguggccuguua

SEQ ID NO: 7039 - RNA, 20 nt, Artificial Sequence
  GATA2 Guide RNA
ucccuuccuucuucauguuc

SEQ ID NO: 7040 - RNA, 20 nt, Artificial Sequence
  GATA2 Guide RNA
uccuucuucauguucagugg

SEQ ID NO: 7041 - RNA, 20 nt, Artificial Sequence
  GATA2 Guide RNA
ucuagguuaacaggccacug

SEQ ID NO: 7042 - RNA, 20 nt, Artificial Sequence
  GATA2 Guide RNA
ucuucauguucaguggccug

SEQ ID NO: 7043 - RNA, 20 nt, Artificial Sequence
  GATA2 Guide RNA
ugaacaugaagaaggaaggg

SEQ ID NO: 7044 - RNA, 20 nt, Artificial Sequence
  GATA2 Guide RNA
uggaucccuuccuucuucau

SEQ ID NO: 7045 - RNA, 20 nt, Artificial Sequence
  GATA2 Guide RNA
uguucaguggccuguuaacc

SEQ ID NO: 7046 - RNA, 20 nt, Artificial Sequence
  GATA2 Guide RNA
uuaacaggccacugaacaug

SEQ ID NO: 7047 - RNA, 20 nt, Artificial Sequence
  GATA2 Guide RNA
uucaguggccuguuaaccua

SEQ ID NO: 7048 - RNA, 20 nt, Artificial Sequence
  GATA2 Guide RNA
uucauguucaguggccuguu

SEQ ID NO: 7049 - RNA, 20 nt, Artificial Sequence
  GATA2 Guide RNA
uuccuucuucauguucagug

SEQ ID NO: 7050 - RNA, 20 nt, Artificial Sequence
  GATA2 Guide RNA
uucuucauguucaguggccu

SEQ ID NO: 7051 - RNA, 21 nt, Artificial Sequence
  GATA2 Guide RNA
aacaggccacugaacaugaag

SEQ ID NO: 7052 - RNA, 21 nt, Artificial Sequence
  GATA2 Guide RNA
aacaugaagaaggaagggauc

SEQ ID NO: 7053 - RNA, 21 nt, Artificial Sequence
  GATA2 Guide RNA
acaggccacugaacaugaaga

SEQ ID NO: 7054 - RNA, 21 nt, Artificial Sequence
  GATA2 Guide RNA
acugaacaugaagaaggaagg

SEQ ID NO: 7055 - RNA, 21 nt, Artificial Sequence
  GATA2 Guide RNA
aggccacugaacaugaagaag

SEQ ID NO: 7056 - RNA, 21 nt, Artificial Sequence
  GATA2 Guide RNA
agguuaacaggccacugaaca

SEQ ID NO: 7057 - RNA, 21 nt, Artificial Sequence
  GATA2 Guide RNA
aucccuuccuucuucauguuc

SEQ ID NO: 7058 - RNA, 21 nt, Artificial Sequence
  GATA2 Guide RNA
auguucaguggccuguuaacc

SEQ ID NO: 7059 - RNA, 21 nt, Artificial Sequence
  GATA2 Guide RNA
cacugaacaugaagaaggaag

SEQ ID NO: 7060 - RNA, 21 nt, Artificial Sequence
  GATA2 Guide RNA
caggccacugaacaugaagaa

SEQ ID NO: 7061 - RNA, 21 nt, Artificial Sequence
  GATA2 Guide RNA
cauguucaguggccuguuaac

SEQ ID NO: 7062 - RNA, 21 nt, Artificial Sequence
  GATA2 Guide RNA
ccacugaacaugaagaaggaa

SEQ ID NO: 7063 - RNA, 21 nt, Artificial Sequence
  GATA2 Guide RNA
cccuuccuucuucauguucag

SEQ ID NO: 7064 - RNA, 21 nt, Artificial Sequence
  GATA2 Guide RNA
ccucuagguuaacaggccacu

SEQ ID NO: 7065 - RNA, 21 nt, Artificial Sequence
  GATA2 Guide RNA
ccuuccuucuucauguucagu

SEQ ID NO: 7066 - RNA, 21 nt, Artificial Sequence
  GATA2 Guide RNA
ccuucuucauguucaguggcc

SEQ ID NO: 7067 - RNA, 21 nt, Artificial Sequence
  GATA2 Guide RNA
cuagguuaacaggccacugaa

SEQ ID NO: 7068 - RNA, 21 nt, Artificial Sequence
  GATA2 Guide RNA
cucuagguuaacaggccacug

SEQ ID NO: 7069 - RNA, 21 nt, Artificial Sequence
  GATA2 Guide RNA
cugaacaugaagaaggaaggg

SEQ ID NO: 7070 - RNA, 21 nt, Artificial Sequence
  GATA2 Guide RNA
cuggaucccuuccuucuucau

SEQ ID NO: 7071 - RNA, 21 nt, Artificial Sequence
  GATA2 Guide RNA
cuucauguucaguggccuguu

SEQ ID NO: 7072 - RNA, 21 nt, Artificial Sequence
  GATA2 Guide RNA
cuuccuucuucauguucagug

SEQ ID NO: 7073 - RNA, 21 nt, Artificial Sequence
  GATA2 Guide RNA
cuucuucauguucaguggccu

SEQ ID NO: 7074 - RNA, 21 nt, Artificial Sequence
  GATA2 Guide RNA
gaacaugaagaaggaagggau

SEQ ID NO: 7075 - RNA, 21 nt, Artificial Sequence
  GATA2 Guide RNA
gaucccuuccuucuucauguu

SEQ ID NO: 7076 - RNA, 21 nt, Artificial Sequence
  GATA2 Guide RNA
gccacugaacaugaagaagga

SEQ ID NO: 7077 - RNA, 21 nt, Artificial Sequence
  GATA2 Guide RNA
gccucuagguuaacaggccac

SEQ ID NO: 7078 - RNA, 21 nt, Artificial Sequence
  GATA2 Guide RNA
ggaucccuuccuucuucaugu

SEQ ID NO: 7079 - RNA, 21 nt, Artificial Sequence
  GATA2 Guide RNA
ggccacugaacaugaagaagg

SEQ ID NO: 7080 - RNA, 21 nt, Artificial Sequence
  GATA2 Guide RNA
gguuaacaggccacugaacau

SEQ ID NO: 7081 - RNA, 21 nt, Artificial Sequence
  GATA2 Guide RNA
guuaacaggccacugaacaug

SEQ ID NO: 7082 - RNA, 21 nt, Artificial Sequence
  GATA2 Guide RNA
guucaguggccuguuaaccua

SEQ ID NO: 7083 - RNA, 21 nt, Artificial Sequence
  GATA2 Guide RNA
uaacaggccacugaacaugaa

SEQ ID NO: 7084 - RNA, 21 nt, Artificial Sequence
  GATA2 Guide RNA
uagguuaacaggccacugaac

SEQ ID NO: 7085 - RNA, 21 nt, Artificial Sequence
  GATA2 Guide RNA
ucauguucaguggccuguuaa

SEQ ID NO: 7086 - RNA, 21 nt, Artificial Sequence
  GATA2 Guide RNA
ucccuuccuucuucauguuca

SEQ ID NO: 7087 - RNA, 21 nt, Artificial Sequence
  GATA2 Guide RNA
uccuucuucauguucaguggc

SEQ ID NO: 7088 - RNA, 21 nt, Artificial Sequence
  GATA2 Guide RNA
ucuggaucccuuccuucuuca

SEQ ID NO: 7089 - RNA, 21 nt, Artificial Sequence
  GATA2 Guide RNA
ucuucauguucaguggccugu

SEQ ID NO: 7090 - RNA, 21 nt, Artificial Sequence
  GATA2 Guide RNA
ugaacaugaagaaggaaggga

SEQ ID NO: 7091 - RNA, 21 nt, Artificial Sequence
  GATA2 Guide RNA
uggaucccuuccuucuucaug

SEQ ID NO: 7092 - RNA, 21 nt, Artificial Sequence
  GATA2 Guide RNA
uguucaguggccuguuaaccu

SEQ ID NO: 7093 - RNA, 21 nt, Artificial Sequence
  GATA2 Guide RNA
uuaacaggccacugaacauga

SEQ ID NO: 7094 - RNA, 21 nt, Artificial Sequence
  GATA2 Guide RNA
uucaguggccuguuaaccuag

SEQ ID NO: 7095 - RNA, 21 nt, Artificial Sequence
  GATA2 Guide RNA
uucauguucaguggccuguua

SEQ ID NO: 7096 - RNA, 21 nt, Artificial Sequence
  GATA2 Guide RNA
uuccuucuucauguucagugg

SEQ ID NO: 7097 - RNA, 21 nt, Artificial Sequence
  GATA2 Guide RNA
uucuucauguucaguggccug

SEQ ID NO: 7098 - RNA, 22 nt, Artificial Sequence
  GATA2 Guide RNA
aacaggccacugaacaugaaga

SEQ ID NO: 7099 - RNA, 22 nt, Artificial Sequence
  GATA2 Guide RNA
aacaugaagaaggaagggaucc

SEQ ID NO: 7100 - RNA, 22 nt, Artificial Sequence
  GATA2 Guide RNA
acaggccacugaacaugaagaa

SEQ ID NO: 7101 - RNA, 22 nt, Artificial Sequence
  GATA2 Guide RNA
acugaacaugaagaaggaaggg

SEQ ID NO: 7102 - RNA, 22 nt, Artificial Sequence
  GATA2 Guide RNA
aggccacugaacaugaagaagg

SEQ ID NO: 7103 - RNA, 22 nt, Artificial Sequence
  GATA2 Guide RNA
agguuaacaggccacugaacau

SEQ ID NO: 7104 - RNA, 22 nt, Artificial Sequence
  GATA2 Guide RNA
aucccuuccuucuucauguuca

SEQ ID NO: 7105 - RNA, 22 nt, Artificial Sequence
  GATA2 Guide RNA
auguucaguggccuguuaaccu

SEQ ID NO: 7106 - RNA, 22 nt, Artificial Sequence
  GATA2 Guide RNA
cacugaacaugaagaaggaagg

SEQ ID NO: 7107 - RNA, 22 nt, Artificial Sequence
  GATA2 Guide RNA
caggccacugaacaugaagaag

SEQ ID NO: 7108 - RNA, 22 nt, Artificial Sequence
  GATA2 Guide RNA
cauguucaguggccuguuaacc

SEQ ID NO: 7109 - RNA, 22 nt, Artificial Sequence
  GATA2 Guide RNA
ccacugaacaugaagaaggaag

SEQ ID NO: 7110 - RNA, 22 nt, Artificial Sequence
  GATA2 Guide RNA
cccuuccuucuucauguucagu

SEQ ID NO: 7111 - RNA, 22 nt, Artificial Sequence
  GATA2 Guide RNA
ccucuagguuaacaggccacug

SEQ ID NO: 7112 - RNA, 22 nt, Artificial Sequence
  GATA2 Guide RNA
ccuuccuucuucauguucagug

SEQ ID NO: 7113 - RNA, 22 nt, Artificial Sequence
  GATA2 Guide RNA
ccuucuucauguucaguggccu

SEQ ID NO: 7114 - RNA, 22 nt, Artificial Sequence
  GATA2 Guide RNA
cuagguuaacaggccacugaac

SEQ ID NO: 7115 - RNA, 22 nt, Artificial Sequence
  GATA2 Guide RNA
cugaacaugaagaaggaaggga

SEQ ID NO: 7116 - RNA, 22 nt, Artificial Sequence
  GATA2 Guide RNA
cuggaucccuuccuucuucaug

SEQ ID NO: 7117 - RNA, 22 nt, Artificial Sequence
  GATA2 Guide RNA
cuucauguucaguggccuguua

SEQ ID NO: 7118 - RNA, 22 nt, Artificial Sequence
  GATA2 Guide RNA
cuuccuucuucauguucagugg

SEQ ID NO: 7119 - RNA, 22 nt, Artificial Sequence
  GATA2 Guide RNA
cuucuucauguucaguggccug

SEQ ID NO: 7120 - RNA, 22 nt, Artificial Sequence
  GATA2 Guide RNA
gaacaugaagaaggaagggauc

SEQ ID NO: 7121 - RNA, 22 nt, Artificial Sequence
  GATA2 Guide RNA
gaucccuuccuucuucauguuc

SEQ ID NO: 7122 - RNA, 22 nt, Artificial Sequence
  GATA2 Guide RNA
gccacugaacaugaagaaggaa

SEQ ID NO: 7123 - RNA, 22 nt, Artificial Sequence
  GATA2 Guide RNA
gccucuagguuaacaggccacu

SEQ ID NO: 7124 - RNA, 22 nt, Artificial Sequence
  GATA2 Guide RNA
ggaucccuuccuucuucauguu

SEQ ID NO: 7125 - RNA, 22 nt, Artificial Sequence
  GATA2 Guide RNA
ggccacugaacaugaagaagga

SEQ ID NO: 7126 - RNA, 22 nt, Artificial Sequence
  GATA2 Guide RNA
gguuaacaggccacugaacaug

SEQ ID NO: 7127 - RNA, 22 nt, Artificial Sequence
  GATA2 Guide RNA
gucuggaucccuuccuucuuca

SEQ ID NO: 7128 - RNA, 22 nt, Artificial Sequence
  GATA2 Guide RNA
guuaacaggccacugaacauga

SEQ ID NO: 7129 - RNA, 22 nt, Artificial Sequence
  GATA2 Guide RNA
guucaguggccuguuaaccuag

SEQ ID NO: 7130 - RNA, 22 nt, Artificial Sequence
  GATA2 Guide RNA
uaacaggccacugaacaugaag

SEQ ID NO: 7131 - RNA, 22 nt, Artificial Sequence
  GATA2 Guide RNA
uagguuaacaggccacugaaca

SEQ ID NO: 7132 - RNA, 22 nt, Artificial Sequence
  GATA2 Guide RNA
ucauguucaguggccuguuaac

SEQ ID NO: 7133 - RNA, 22 nt, Artificial Sequence
  GATA2 Guide RNA
ucccuuccuucuucauguucag

SEQ ID NO: 7134 - RNA, 22 nt, Artificial Sequence
  GATA2 Guide RNA
uccuucuucauguucaguggcc

SEQ ID NO: 7135 - RNA, 22 nt, Artificial Sequence
  GATA2 Guide RNA
ucuagguuaacaggccacugaa

SEQ ID NO: 7136 - RNA, 22 nt, Artificial Sequence
  GATA2 Guide RNA
ucuggaucccuuccuucuucau

SEQ ID NO: 7137 - RNA, 22 nt, Artificial Sequence
  GATA2 Guide RNA
ucuucauguucaguggccuguu

SEQ ID NO: 7138 - RNA, 22 nt, Artificial Sequence
  GATA2 Guide RNA
ugaacaugaagaaggaagggau

SEQ ID NO: 7139 - RNA, 22 nt, Artificial Sequence
  GATA2 Guide RNA
ugccucuagguuaacaggccac

SEQ ID NO: 7140 - RNA, 22 nt, Artificial Sequence
  GATA2 Guide RNA
uggaucccuuccuucuucaugu

SEQ ID NO: 7141 - RNA, 22 nt, Artificial Sequence
  GATA2 Guide RNA
uguucaguggccuguuaaccua

SEQ ID NO: 7142 - RNA, 22 nt, Artificial Sequence
  GATA2 Guide RNA
uuaacaggccacugaacaugaa

SEQ ID NO: 7143 - RNA, 22 nt, Artificial Sequence
  GATA2 Guide RNA
uucaguggccuguuaaccuaga

SEQ ID NO: 7144 - RNA, 22 nt, Artificial Sequence
  GATA2 Guide RNA
uucauguucaguggccuguuaa

SEQ ID NO: 7145 - RNA, 22 nt, Artificial Sequence
  GATA2 Guide RNA
uuccuucuucauguucaguggc

SEQ ID NO: 7146 - RNA, 22 nt, Artificial Sequence
  GATA2 Guide RNA
uucuucauguucaguggccugu

SEQ ID NO: 7147 - RNA, 20 nt, Artificial Sequence
  GATA2 Guide RNA
aaaacuggugguugccucua

SEQ ID NO: 7148 - RNA, 20 nt, Artificial Sequence
  GATA2 Guide RNA
aaacaggccacugaccauga

SEQ ID NO: 7149 - RNA, 20 nt, Artificial Sequence
  GATA2 Guide RNA
aaacuggugguugccucuaa

SEQ ID NO: 7150 - RNA, 20 nt, Artificial Sequence
  GATA2 Guide RNA
aacuggugguugccucuaaa

SEQ ID NO: 7151 - RNA, 20 nt, Artificial Sequence
  GATA2 Guide RNA
acuggugguugccucuaaac

SEQ ID NO: 7152 - RNA, 20 nt, Artificial Sequence
  GATA2 Guide RNA
aguggccuguuuagaggcaa

SEQ ID NO: 7153 - RNA, 20 nt, Artificial Sequence
  GATA2 Guide RNA
auggucaguggccuguuuag

SEQ ID NO: 7154 - RNA, 20 nt, Artificial Sequence
  GATA2 Guide RNA
caguggccuguuuagaggca

SEQ ID NO: 7155 - RNA, 20 nt, Artificial Sequence
  GATA2 Guide RNA
cauggucaguggccuguuua

SEQ ID NO: 7156 - RNA, 20 nt, Artificial Sequence
  GATA2 Guide RNA
ccucuaaacaggccacugac

SEQ ID NO: 7157 - RNA, 20 nt, Artificial Sequence
  GATA2 Guide RNA
ccuguuuagaggcaaccacc

SEQ ID NO: 7158 - RNA, 20 nt, Artificial Sequence
  GATA2 Guide RNA
cuaaacaggccacugaccau

SEQ ID NO: 7159 - RNA, 20 nt, Artificial Sequence
  GATA2 Guide RNA
cucuaaacaggccacugacc

SEQ ID NO: 7160 - RNA, 20 nt, Artificial Sequence
  GATA2 Guide RNA
cugaaaacuggugguugccu

SEQ ID NO: 7161 - RNA, 20 nt, Artificial Sequence
  GATA2 Guide RNA
cuggugguugccucuaaaca

SEQ ID NO: 7162 - RNA, 20 nt, Artificial Sequence
  GATA2 Guide RNA
cuguuuagaggcaaccacca

SEQ ID NO: 7163 - RNA, 20 nt, Artificial Sequence
  GATA2 Guide RNA
cuucauggucaguggccugu

SEQ ID NO: 7164 - RNA, 20 nt, Artificial Sequence
  GATA2 Guide RNA
gaaaacuggugguugccucu

SEQ ID NO: 7165 - RNA, 20 nt, Artificial Sequence
  GATA2 Guide RNA
gccucuaaacaggccacuga

SEQ ID NO: 7166 - RNA, 20 nt, Artificial Sequence
  GATA2 Guide RNA
gccuguuuagaggcaaccac

SEQ ID NO: 7167 - RNA, 20 nt, Artificial Sequence
  GATA2 Guide RNA
ggccuguuuagaggcaacca

SEQ ID NO: 7168 - RNA, 20 nt, Artificial Sequence
  GATA2 Guide RNA
ggucaguggccuguuuagag

SEQ ID NO: 7169 - RNA, 20 nt, Artificial Sequence
  GATA2 Guide RNA
ggugguugccucuaaacagg

SEQ ID NO: 7170 - RNA, 20 nt, Artificial Sequence
  GATA2 Guide RNA
gguugccucuaaacaggcca

SEQ ID NO: 7171 - RNA, 20 nt, Artificial Sequence
  GATA2 Guide RNA
gucaguggccuguuuagagg

SEQ ID NO: 7172 - RNA, 20 nt, Artificial Sequence
  GATA2 Guide RNA
guggccuguuuagaggcaac

SEQ ID NO: 7173 - RNA, 20 nt, Artificial Sequence
  GATA2 Guide RNA
gugguugccucuaaacaggc

SEQ ID NO: 7174 - RNA, 20 nt, Artificial Sequence
  GATA2 Guide RNA
guugccucuaaacaggccac

SEQ ID NO: 7175 - RNA, 20 nt, Artificial Sequence
  GATA2 Guide RNA
guuuagaggcaaccaccagu

SEQ ID NO: 7176 - RNA, 20 nt, Artificial Sequence
  GATA2 Guide RNA
uaaacaggccacugaccaug

SEQ ID NO: 7177 - RNA, 20 nt, Artificial Sequence
  GATA2 Guide RNA
ucaguggccuguuuagaggc

SEQ ID NO: 7178 - RNA, 20 nt, Artificial Sequence
  GATA2 Guide RNA
ucauggucaguggccuguuu

SEQ ID NO: 7179 - RNA, 20 nt, Artificial Sequence
  GATA2 Guide RNA
ucuaaacaggccacugacca

SEQ ID NO: 7180 - RNA, 20 nt, Artificial Sequence
  GATA2 Guide RNA
ucuucauggucaguggccug

SEQ ID NO: 7181 - RNA, 20 nt, Artificial Sequence
  GATA2 Guide RNA
ugaaaacuggugguugccuc

SEQ ID NO: 7182 - RNA, 20 nt, Artificial Sequence
  GATA2 Guide RNA
ugccucuaaacaggccacug

SEQ ID NO: 7183 - RNA, 20 nt, Artificial Sequence
  GATA2 Guide RNA
uggccuguuuagaggcaacc

SEQ ID NO: 7184 - RNA, 20 nt, Artificial Sequence
  GATA2 Guide RNA
uggucaguggccuguuuaga

SEQ ID NO: 7185 - RNA, 20 nt, Artificial Sequence
  GATA2 Guide RNA
uggugguugccucuaaacag

SEQ ID NO: 7186 - RNA, 20 nt, Artificial Sequence
  GATA2 Guide RNA
ugguugccucuaaacaggcc

SEQ ID NO: 7187 - RNA, 20 nt, Artificial Sequence
  GATA2 Guide RNA
uguuuagaggcaaccaccag

SEQ ID NO: 7188 - RNA, 20 nt, Artificial Sequence
  GATA2 Guide RNA
uuagaggcaaccaccaguuu

SEQ ID NO: 7189 - RNA, 20 nt, Artificial Sequence
  GATA2 Guide RNA
uucauggucaguggccuguu

SEQ ID NO: 7190 - RNA, 20 nt, Artificial Sequence
  GATA2 Guide RNA
uucuucauggucaguggccu

SEQ ID NO: 7191 - RNA, 20 nt, Artificial Sequence
  GATA2 Guide RNA
uugccucuaaacaggccacu

SEQ ID NO: 7192 - RNA, 20 nt, Artificial Sequence
  GATA2 Guide RNA
uuuagaggcaaccaccaguu

SEQ ID NO: 7193 - RNA, 21 nt, Artificial Sequence
  GATA2 Guide RNA
aaaacuggugguugccucuaa

SEQ ID NO: 7194 - RNA, 21 nt, Artificial Sequence
  GATA2 Guide RNA
aaacaggccacugaccaugaa

SEQ ID NO: 7195 - RNA, 21 nt, Artificial Sequence
  GATA2 Guide RNA
aaacuggugguugccucuaaa

SEQ ID NO: 7196 - RNA, 21 nt, Artificial Sequence
  GATA2 Guide RNA
aacuggugguugccucuaaac

SEQ ID NO: 7197 - RNA, 21 nt, Artificial Sequence
  GATA2 Guide RNA
acuggugguugccucuaaaca

SEQ ID NO: 7198 - RNA, 21 nt, Artificial Sequence
  GATA2 Guide RNA
aguggccuguuuagaggcaac

SEQ ID NO: 7199 - RNA, 21 nt, Artificial Sequence
  GATA2 Guide RNA
auggucaguggccuguuuaga

SEQ ID NO: 7200 - RNA, 21 nt, Artificial Sequence
  GATA2 Guide RNA
caguggccuguuuagaggcaa

SEQ ID NO: 7201 - RNA, 21 nt, Artificial Sequence
  GATA2 Guide RNA
cauggucaguggccuguuuag

SEQ ID NO: 7202 - RNA, 21 nt, Artificial Sequence
  GATA2 Guide RNA
ccucuaaacaggccacugacc

SEQ ID NO: 7203 - RNA, 21 nt, Artificial Sequence
  GATA2 Guide RNA
ccuguuuagaggcaaccacca

SEQ ID NO: 7204 - RNA, 21 nt, Artificial Sequence
  GATA2 Guide RNA
cuaaacaggccacugaccaug

SEQ ID NO: 7205 - RNA, 21 nt, Artificial Sequence
  GATA2 Guide RNA
cucuaaacaggccacugacca

SEQ ID NO: 7206 - RNA, 21 nt, Artificial Sequence
  GATA2 Guide RNA
cugaaaacuggugguugccuc

SEQ ID NO: 7207 - RNA, 21 nt, Artificial Sequence
  GATA2 Guide RNA
cuggugguugccucuaaacag

SEQ ID NO: 7208 - RNA, 21 nt, Artificial Sequence
  GATA2 Guide RNA
cuguuuagaggcaaccaccag

SEQ ID NO: 7209 - RNA, 21 nt, Artificial Sequence
  GATA2 Guide RNA
cuucauggucaguggccuguu

SEQ ID NO: 7210 - RNA, 21 nt, Artificial Sequence
  GATA2 Guide RNA
cuucuucauggucaguggccu

SEQ ID NO: 7211 - RNA, 21 nt, Artificial Sequence
  GATA2 Guide RNA
gaaaacuggugguugccucua

SEQ ID NO: 7212 - RNA, 21 nt, Artificial Sequence
  GATA2 Guide RNA
gccucuaaacaggccacugac

SEQ ID NO: 7213 - RNA, 21 nt, Artificial Sequence
  GATA2 Guide RNA
gccuguuuagaggcaaccacc

SEQ ID NO: 7214 - RNA, 21 nt, Artificial Sequence
  GATA2 Guide RNA
ggccuguuuagaggcaaccac

SEQ ID NO: 7215 - RNA, 21 nt, Artificial Sequence
  GATA2 Guide RNA
ggucaguggccuguuuagagg

SEQ ID NO: 7216 - RNA, 21 nt, Artificial Sequence
  GATA2 Guide RNA
ggugguugccucuaaacaggc

SEQ ID NO: 7217 - RNA, 21 nt, Artificial Sequence
  GATA2 Guide RNA
gguugccucuaaacaggccac

SEQ ID NO: 7218 - RNA, 21 nt, Artificial Sequence
  GATA2 Guide RNA
gucaguggccuguuuagaggc

SEQ ID NO: 7219 - RNA, 21 nt, Artificial Sequence
  GATA2 Guide RNA
guggccuguuuagaggcaacc

SEQ ID NO: 7220 - RNA, 21 nt, Artificial Sequence
  GATA2 Guide RNA
gugguugccucuaaacaggcc

SEQ ID NO: 7221 - RNA, 21 nt, Artificial Sequence
  GATA2 Guide RNA
guugccucuaaacaggccacu

SEQ ID NO: 7222 - RNA, 21 nt, Artificial Sequence
  GATA2 Guide RNA
guuuagaggcaaccaccaguu

SEQ ID NO: 7223 - RNA, 21 nt, Artificial Sequence
  GATA2 Guide RNA
uaaacaggccacugaccauga

SEQ ID NO: 7224 - RNA, 21 nt, Artificial Sequence
  GATA2 Guide RNA
ucaguggccuguuuagaggca

SEQ ID NO: 7225 - RNA, 21 nt, Artificial Sequence
  GATA2 Guide RNA
ucauggucaguggccuguuua

SEQ ID NO: 7226 - RNA, 21 nt, Artificial Sequence
  GATA2 Guide RNA
ucuaaacaggccacugaccau

SEQ ID NO: 7227 - RNA, 21 nt, Artificial Sequence
  GATA2 Guide RNA
ucugaaaacuggugguugccu

SEQ ID NO: 7228 - RNA, 21 nt, Artificial Sequence
  GATA2 Guide RNA
ucuucauggucaguggccugu

SEQ ID NO: 7229 - RNA, 21 nt, Artificial Sequence
  GATA2 Guide RNA
ugaaaacuggugguugccucu

SEQ ID NO: 7230 - RNA, 21 nt, Artificial Sequence
  GATA2 Guide RNA
ugccucuaaacaggccacuga

SEQ ID NO: 7231 - RNA, 21 nt, Artificial Sequence
  GATA2 Guide RNA
uggccuguuuagaggcaacca

SEQ ID NO: 7232 - RNA, 21 nt, Artificial Sequence
  GATA2 Guide RNA
uggucaguggccuguuuagag

SEQ ID NO: 7233 - RNA, 21 nt, Artificial Sequence
  GATA2 Guide RNA
uggugguugccucuaaacagg

SEQ ID NO: 7234 - RNA, 21 nt, Artificial Sequence
  GATA2 Guide RNA
ugguugccucuaaacaggcca

SEQ ID NO: 7235 - RNA, 21 nt, Artificial Sequence
  GATA2 Guide RNA
uguuuagaggcaaccaccagu

SEQ ID NO: 7236 - RNA, 21 nt, Artificial Sequence
  GATA2 Guide RNA
uuagaggcaaccaccaguuuu

SEQ ID NO: 7237 - RNA, 21 nt, Artificial Sequence
  GATA2 Guide RNA
uucauggucaguggccuguuu

SEQ ID NO: 7238 - RNA, 21 nt, Artificial Sequence
  GATA2 Guide RNA
uucuucauggucaguggccug

SEQ ID NO: 7239 - RNA, 21 nt, Artificial Sequence
  GATA2 Guide RNA
uugccucuaaacaggccacug

SEQ ID NO: 7240 - RNA, 21 nt, Artificial Sequence
  GATA2 Guide RNA
uuuagaggcaaccaccaguuu

SEQ ID NO: 7241 - RNA, 22 nt, Artificial Sequence
  GATA2 Guide RNA
aaaacuggugguugccucuaaa

SEQ ID NO: 7242 - RNA, 22 nt, Artificial Sequence
  GATA2 Guide RNA
aaacaggccacugaccaugaag

SEQ ID NO: 7243 - RNA, 22 nt, Artificial Sequence
  GATA2 Guide RNA
aaacuggugguugccucuaaac

SEQ ID NO: 7244 - RNA, 22 nt, Artificial Sequence
  GATA2 Guide RNA
aacuggugguugccucuaaaca

SEQ ID NO: 7245 - RNA, 22 nt, Artificial Sequence
  GATA2 Guide RNA
acuggugguugccucuaaacag

SEQ ID NO: 7246 - RNA, 22 nt, Artificial Sequence
  GATA2 Guide RNA
aguggccuguuuagaggcaacc

SEQ ID NO: 7247 - RNA, 22 nt, Artificial Sequence
  GATA2 Guide RNA
auggucaguggccuguuuagag

SEQ ID NO: 7248 - RNA, 22 nt, Artificial Sequence
  GATA2 Guide RNA
caguggccuguuuagaggcaac

SEQ ID NO: 7249 - RNA, 22 nt, Artificial Sequence
  GATA2 Guide RNA
cauggucaguggccuguuuaga

SEQ ID NO: 7250 - RNA, 22 nt, Artificial Sequence
  GATA2 Guide RNA
ccucuaaacaggccacugacca

SEQ ID NO: 7251 - RNA, 22 nt, Artificial Sequence
  GATA2 Guide RNA
ccuguuuagaggcaaccaccag

SEQ ID NO: 7252 - RNA, 22 nt, Artificial Sequence
  GATA2 Guide RNA
ccuucuucauggucaguggccu

SEQ ID NO: 7253 - RNA, 22 nt, Artificial Sequence
  GATA2 Guide RNA
cuaaacaggccacugaccauga

SEQ ID NO: 7254 - RNA, 22 nt, Artificial Sequence
  GATA2 Guide RNA
cucuaaacaggccacugaccau

SEQ ID NO: 7255 - RNA, 22 nt, Artificial Sequence
  GATA2 Guide RNA
cucugaaaacuggugguugccu

SEQ ID NO: 7256 - RNA, 22 nt, Artificial Sequence
  GATA2 Guide RNA
cugaaaacuggugguugccucu

SEQ ID NO: 7257 - RNA, 22 nt, Artificial Sequence
  GATA2 Guide RNA
cuggugguugccucuaaacagg

SEQ ID NO: 7258 - RNA, 22 nt, Artificial Sequence
  GATA2 Guide RNA
cuguuuagaggcaaccaccagu

SEQ ID NO: 7259 - RNA, 22 nt, Artificial Sequence
  GATA2 Guide RNA
cuucauggucaguggccuguuu

SEQ ID NO: 7260 - RNA, 22 nt, Artificial Sequence
  GATA2 Guide RNA
cuucuucauggucaguggccug

SEQ ID NO: 7261 - RNA, 22 nt, Artificial Sequence
  GATA2 Guide RNA
gaaaacuggugguugccucuaa

SEQ ID NO: 7262 - RNA, 22 nt, Artificial Sequence
  GATA2 Guide RNA
gccucuaaacaggccacugacc

SEQ ID NO: 7263 - RNA, 22 nt, Artificial Sequence
  GATA2 Guide RNA
gccuguuuagaggcaaccacca

SEQ ID NO: 7264 - RNA, 22 nt, Artificial Sequence
  GATA2 Guide RNA
ggccuguuuagaggcaaccacc

SEQ ID NO: 7265 - RNA, 22 nt, Artificial Sequence
  GATA2 Guide RNA
ggucaguggccuguuuagaggc

SEQ ID NO: 7266 - RNA, 22 nt, Artificial Sequence
  GATA2 Guide RNA
ggugguugccucuaaacaggcc

SEQ ID NO: 7267 - RNA, 22 nt, Artificial Sequence
  GATA2 Guide RNA
gguugccucuaaacaggccacu

SEQ ID NO: 7268 - RNA, 22 nt, Artificial Sequence
  GATA2 Guide RNA
gucaguggccuguuuagaggca

SEQ ID NO: 7269 - RNA, 22 nt, Artificial Sequence
  GATA2 Guide RNA
guggccuguuuagaggcaacca

SEQ ID NO: 7270 - RNA, 22 nt, Artificial Sequence
  GATA2 Guide RNA
gugguugccucuaaacaggcca

SEQ ID NO: 7271 - RNA, 22 nt, Artificial Sequence
  GATA2 Guide RNA
guugccucuaaacaggccacug

SEQ ID NO: 7272 - RNA, 22 nt, Artificial Sequence
  GATA2 Guide RNA
guuuagaggcaaccaccaguuu

SEQ ID NO: 7273 - RNA, 22 nt, Artificial Sequence
  GATA2 Guide RNA
uaaacaggccacugaccaugaa

SEQ ID NO: 7274 - RNA, 22 nt, Artificial Sequence
  GATA2 Guide RNA
ucaguggccuguuuagaggcaa

SEQ ID NO: 7275 - RNA, 22 nt, Artificial Sequence
  GATA2 Guide RNA
ucauggucaguggccuguuuag

SEQ ID NO: 7276 - RNA, 22 nt, Artificial Sequence
  GATA2 Guide RNA
ucuaaacaggccacugaccaug

SEQ ID NO: 7277 - RNA, 22 nt, Artificial Sequence
  GATA2 Guide RNA
ucugaaaacuggugguugccuc

SEQ ID NO: 7278 - RNA, 22 nt, Artificial Sequence
  GATA2 Guide RNA
ucuucauggucaguggccuguu

SEQ ID NO: 7279 - RNA, 22 nt, Artificial Sequence
  GATA2 Guide RNA
ugaaaacuggugguugccucua

SEQ ID NO: 7280 - RNA, 22 nt, Artificial Sequence
  GATA2 Guide RNA
ugccucuaaacaggccacugac

SEQ ID NO: 7281 - RNA, 22 nt, Artificial Sequence
  GATA2 Guide RNA
uggccuguuuagaggcaaccac

SEQ ID NO: 7282 - RNA, 22 nt, Artificial Sequence
  GATA2 Guide RNA
uggucaguggccuguuuagagg

SEQ ID NO: 7283 - RNA, 22 nt, Artificial Sequence
  GATA2 Guide RNA
uggugguugccucuaaacaggc

SEQ ID NO: 7284 - RNA, 22 nt, Artificial Sequence
  GATA2 Guide RNA
ugguugccucuaaacaggccac

SEQ ID NO: 7285 - RNA, 22 nt, Artificial Sequence
  GATA2 Guide RNA
uguuuagaggcaaccaccaguu

SEQ ID NO: 7286 - RNA, 22 nt, Artificial Sequence
  GATA2 Guide RNA
uuagaggcaaccaccaguuuuc

SEQ ID NO: 7287 - RNA, 22 nt, Artificial Sequence
  GATA2 Guide RNA
uucauggucaguggccuguuua

SEQ ID NO: 7288 - RNA, 22 nt, Artificial Sequence
  GATA2 Guide RNA
uucuucauggucaguggccugu

SEQ ID NO: 7289 - RNA, 22 nt, Artificial Sequence
  GATA2 Guide RNA
uugccucuaaacaggccacuga

SEQ ID NO: 7290 - RNA, 22 nt, Artificial Sequence
  GATA2 Guide RNA
uuuagaggcaaccaccaguuuu

SEQ ID NO: 7291 - RNA, 20 nt, Artificial Sequence
  GATA2 Guide RNA
aaacuagaggcaaccaccag

SEQ ID NO: 7292 - RNA, 20 nt, Artificial Sequence
  GATA2 Guide RNA
aaacuggugguugccucuag

SEQ ID NO: 7293 - RNA, 20 nt, Artificial Sequence
  GATA2 Guide RNA
aacuagaggcaaccaccagu

SEQ ID NO: 7294 - RNA, 20 nt, Artificial Sequence
  GATA2 Guide RNA
aacuggugguugccucuagu

SEQ ID NO: 7295 - RNA, 20 nt, Artificial Sequence
  GATA2 Guide RNA
acuagaggcaaccaccaguu

SEQ ID NO: 7296 - RNA, 20 nt, Artificial Sequence
  GATA2 Guide RNA
acuggugguugccucuaguu

SEQ ID NO: 7297 - RNA, 20 nt, Artificial Sequence
  GATA2 Guide RNA
aguggccuguuaaacuagag

SEQ ID NO: 7298 - RNA, 20 nt, Artificial Sequence
  GATA2 Guide RNA
aguuuaacaggccacugacc

SEQ ID NO: 7299 - RNA, 20 nt, Artificial Sequence
  GATA2 Guide RNA
auggucaguggccuguuaaa

SEQ ID NO: 7300 - RNA, 20 nt, Artificial Sequence
  GATA2 Guide RNA
caguggccuguuaaacuaga

SEQ ID NO: 7301 - RNA, 20 nt, Artificial Sequence
  GATA2 Guide RNA
cauggucaguggccuguuaa

SEQ ID NO: 7302 - RNA, 20 nt, Artificial Sequence
  GATA2 Guide RNA
ccucuaguuuaacaggccac

SEQ ID NO: 7303 - RNA, 20 nt, Artificial Sequence
  GATA2 Guide RNA
ccuguuaaacuagaggcaac

SEQ ID NO: 7304 - RNA, 20 nt, Artificial Sequence
  GATA2 Guide RNA
cuaguuuaacaggccacuga

SEQ ID NO: 7305 - RNA, 20 nt, Artificial Sequence
  GATA2 Guide RNA
cucuaguuuaacaggccacu

SEQ ID NO: 7306 - RNA, 20 nt, Artificial Sequence
  GATA2 Guide RNA
cuggugguugccucuaguuu

SEQ ID NO: 7307 - RNA, 20 nt, Artificial Sequence
  GATA2 Guide RNA
cuguuaaacuagaggcaacc

SEQ ID NO: 7308 - RNA, 20 nt, Artificial Sequence
  GATA2 Guide RNA
gccucuaguuuaacaggcca

SEQ ID NO: 7309 - RNA, 20 nt, Artificial Sequence
  GATA2 Guide RNA
gccuguuaaacuagaggcaa

SEQ ID NO: 7310 - RNA, 20 nt, Artificial Sequence
  GATA2 Guide RNA
ggccuguuaaacuagaggca

SEQ ID NO: 7311 - RNA, 20 nt, Artificial Sequence
  GATA2 Guide RNA
ggucaguggccuguuaaacu

SEQ ID NO: 7312 - RNA, 20 nt, Artificial Sequence
  GATA2 Guide RNA
ggugguugccucuaguuuaa

SEQ ID NO: 7313 - RNA, 20 nt, Artificial Sequence
  GATA2 Guide RNA
gguugccucuaguuuaacag

SEQ ID NO: 7314 - RNA, 20 nt, Artificial Sequence
  GATA2 Guide RNA
gucaguggccuguuaaacua

SEQ ID NO: 7315 - RNA, 20 nt, Artificial Sequence
  GATA2 Guide RNA
guggccuguuaaacuagagg

SEQ ID NO: 7316 - RNA, 20 nt, Artificial Sequence
  GATA2 Guide RNA
gugguugccucuaguuuaac

SEQ ID NO: 7317 - RNA, 20 nt, Artificial Sequence
  GATA2 Guide RNA
guuaaacuagaggcaaccac

SEQ ID NO: 7318 - RNA, 20 nt, Artificial Sequence
  GATA2 Guide RNA
guugccucuaguuuaacagg

SEQ ID NO: 7319 - RNA, 20 nt, Artificial Sequence
  GATA2 Guide RNA
guuuaacaggccacugacca

SEQ ID NO: 7320 - RNA, 20 nt, Artificial Sequence
  GATA2 Guide RNA
uaaacuagaggcaaccacca

SEQ ID NO: 7321 - RNA, 20 nt, Artificial Sequence
  GATA2 Guide RNA
uaguuuaacaggccacugac

SEQ ID NO: 7322 - RNA, 20 nt, Artificial Sequence
  GATA2 Guide RNA
ucaguggccuguuaaacuag

SEQ ID NO: 7323 - RNA, 20 nt, Artificial Sequence
  GATA2 Guide RNA
ucauggucaguggccuguua

SEQ ID NO: 7324 - RNA, 20 nt, Artificial Sequence
  GATA2 Guide RNA
ucuaguuuaacaggccacug

SEQ ID NO: 7325 - RNA, 20 nt, Artificial Sequence
  GATA2 Guide RNA
ugccucuaguuuaacaggcc

SEQ ID NO: 7326 - RNA, 20 nt, Artificial Sequence
  GATA2 Guide RNA
uggccuguuaaacuagaggc

SEQ ID NO: 7327 - RNA, 20 nt, Artificial Sequence
  GATA2 Guide RNA
uggucaguggccuguuaaac

SEQ ID NO: 7328 - RNA, 20 nt, Artificial Sequence
  GATA2 Guide RNA
uggugguugccucuaguuua

SEQ ID NO: 7329 - RNA, 20 nt, Artificial Sequence
  GATA2 Guide RNA
ugguugccucuaguuuaaca

SEQ ID NO: 7330 - RNA, 20 nt, Artificial Sequence
  GATA2 Guide RNA
uguuaaacuagaggcaacca

SEQ ID NO: 7331 - RNA, 20 nt, Artificial Sequence
  GATA2 Guide RNA
uuaaacuagaggcaaccacc

SEQ ID NO: 7332 - RNA, 20 nt, Artificial Sequence
  GATA2 Guide RNA
uugccucuaguuuaacaggc

SEQ ID NO: 7333 - RNA, 21 nt, Artificial Sequence
  GATA2 Guide RNA
aaaacuggugguugccucuag

SEQ ID NO: 7334 - RNA, 21 nt, Artificial Sequence
  GATA2 Guide RNA
aaacuagaggcaaccaccagu

SEQ ID NO: 7335 - RNA, 21 nt, Artificial Sequence
  GATA2 Guide RNA
aaacuggugguugccucuagu

SEQ ID NO: 7336 - RNA, 21 nt, Artificial Sequence
  GATA2 Guide RNA
aacuagaggcaaccaccaguu

SEQ ID NO: 7337 - RNA, 21 nt, Artificial Sequence
  GATA2 Guide RNA
aacuggugguugccucuaguu

SEQ ID NO: 7338 - RNA, 21 nt, Artificial Sequence
  GATA2 Guide RNA
acuagaggcaaccaccaguuu

SEQ ID NO: 7339 - RNA, 21 nt, Artificial Sequence
  GATA2 Guide RNA
acuggugguugccucuaguuu

SEQ ID NO: 7340 - RNA, 21 nt, Artificial Sequence
  GATA2 Guide RNA
aguggccuguuaaacuagagg

SEQ ID NO: 7341 - RNA, 21 nt, Artificial Sequence
  GATA2 Guide RNA
aguuuaacaggccacugacca

SEQ ID NO: 7342 - RNA, 21 nt, Artificial Sequence
  GATA2 Guide RNA
auggucaguggccuguuaaac

SEQ ID NO: 7343 - RNA, 21 nt, Artificial Sequence
  GATA2 Guide RNA
caguggccuguuaaacuagag

SEQ ID NO: 7344 - RNA, 21 nt, Artificial Sequence
  GATA2 Guide RNA
cauggucaguggccuguuaaa

SEQ ID NO: 7345 - RNA, 21 nt, Artificial Sequence
  GATA2 Guide RNA
ccucuaguuuaacaggccacu

SEQ ID NO: 7346 - RNA, 21 nt, Artificial Sequence
  GATA2 Guide RNA
ccuguuaaacuagaggcaacc

SEQ ID NO: 7347 - RNA, 21 nt, Artificial Sequence
  GATA2 Guide RNA
cuaguuuaacaggccacugac

SEQ ID NO: 7348 - RNA, 21 nt, Artificial Sequence
  GATA2 Guide RNA
cucuaguuuaacaggccacug

SEQ ID NO: 7349 - RNA, 21 nt, Artificial Sequence
  GATA2 Guide RNA
cuggugguugccucuaguuua

SEQ ID NO: 7350 - RNA, 21 nt, Artificial Sequence
  GATA2 Guide RNA
cuguuaaacuagaggcaacca

SEQ ID NO: 7351 - RNA, 21 nt, Artificial Sequence
  GATA2 Guide RNA
gccucuaguuuaacaggccac

SEQ ID NO: 7352 - RNA, 21 nt, Artificial Sequence
  GATA2 Guide RNA
gccuguuaaacuagaggcaac

SEQ ID NO: 7353 - RNA, 21 nt, Artificial Sequence
  GATA2 Guide RNA
ggccuguuaaacuagaggcaa

SEQ ID NO: 7354 - RNA, 21 nt, Artificial Sequence
  GATA2 Guide RNA
ggucaguggccuguuaaacua

SEQ ID NO: 7355 - RNA, 21 nt, Artificial Sequence
  GATA2 Guide RNA
ggugguugccucuaguuuaac

SEQ ID NO: 7356 - RNA, 21 nt, Artificial Sequence
  GATA2 Guide RNA
gguugccucuaguuuaacagg

SEQ ID NO: 7357 - RNA, 21 nt, Artificial Sequence
  GATA2 Guide RNA
gucaguggccuguuaaacuag

SEQ ID NO: 7358 - RNA, 21 nt, Artificial Sequence
  GATA2 Guide RNA
guggccuguuaaacuagaggc

SEQ ID NO: 7359 - RNA, 21 nt, Artificial Sequence
  GATA2 Guide RNA
gugguugccucuaguuuaaca

SEQ ID NO: 7360 - RNA, 21 nt, Artificial Sequence
  GATA2 Guide RNA
guuaaacuagaggcaaccacc

SEQ ID NO: 7361 - RNA, 21 nt, Artificial Sequence
  GATA2 Guide RNA
guugccucuaguuuaacaggc

SEQ ID NO: 7362 - RNA, 21 nt, Artificial Sequence
  GATA2 Guide RNA
guuuaacaggccacugaccau

SEQ ID NO: 7363 - RNA, 21 nt, Artificial Sequence
  GATA2 Guide RNA
uaaacuagaggcaaccaccag

SEQ ID NO: 7364 - RNA, 21 nt, Artificial Sequence
  GATA2 Guide RNA
uaguuuaacaggccacugacc

SEQ ID NO: 7365 - RNA, 21 nt, Artificial Sequence
  GATA2 Guide RNA
ucaguggccuguuaaacuaga

SEQ ID NO: 7366 - RNA, 21 nt, Artificial Sequence
  GATA2 Guide RNA
ucauggucaguggccuguuaa

SEQ ID NO: 7367 - RNA, 21 nt, Artificial Sequence
  GATA2 Guide RNA
ucuaguuuaacaggccacuga

SEQ ID NO: 7368 - RNA, 21 nt, Artificial Sequence
  GATA2 Guide RNA
ugccucuaguuuaacaggcca

SEQ ID NO: 7369 - RNA, 21 nt, Artificial Sequence
  GATA2 Guide RNA
uggccuguuaaacuagaggca

SEQ ID NO: 7370 - RNA, 21 nt, Artificial Sequence
  GATA2 Guide RNA
uggucaguggccuguuaaacu

SEQ ID NO: 7371 - RNA, 21 nt, Artificial Sequence
  GATA2 Guide RNA
uggugguugccucuaguuuaa

SEQ ID NO: 7372 - RNA, 21 nt, Artificial Sequence
  GATA2 Guide RNA
ugguugccucuaguuuaacag

SEQ ID NO: 7373 - RNA, 21 nt, Artificial Sequence
  GATA2 Guide RNA
uguuaaacuagaggcaaccac

SEQ ID NO: 7374 - RNA, 21 nt, Artificial Sequence
  GATA2 Guide RNA
uuaaacuagaggcaaccacca

SEQ ID NO: 7375 - RNA, 21 nt, Artificial Sequence
  GATA2 Guide RNA
uucauggucaguggccuguua

SEQ ID NO: 7376 - RNA, 21 nt, Artificial Sequence
  GATA2 Guide RNA
uugccucuaguuuaacaggcc

SEQ ID NO: 7377 - RNA, 22 nt, Artificial Sequence
  GATA2 Guide RNA
aaaacuggugguugccucuagu

SEQ ID NO: 7378 - RNA, 22 nt, Artificial Sequence
  GATA2 Guide RNA
aaacuagaggcaaccaccaguu

SEQ ID NO: 7379 - RNA, 22 nt, Artificial Sequence
  GATA2 Guide RNA
aaacuggugguugccucuaguu

SEQ ID NO: 7380 - RNA, 22 nt, Artificial Sequence
  GATA2 Guide RNA
aacuagaggcaaccaccaguuu

SEQ ID NO: 7381 - RNA, 22 nt, Artificial Sequence
  GATA2 Guide RNA
aacuggugguugccucuaguuu

SEQ ID NO: 7382 - RNA, 22 nt, Artificial Sequence
  GATA2 Guide RNA
acuagaggcaaccaccaguuuu

SEQ ID NO: 7383 - RNA, 22 nt, Artificial Sequence
  GATA2 Guide RNA
acuggugguugccucuaguuua

SEQ ID NO: 7384 - RNA, 22 nt, Artificial Sequence
  GATA2 Guide RNA
aguggccuguuaaacuagaggc

SEQ ID NO: 7385 - RNA, 22 nt, Artificial Sequence
  GATA2 Guide RNA
aguuuaacaggccacugaccau

SEQ ID NO: 7386 - RNA, 22 nt, Artificial Sequence
  GATA2 Guide RNA
auggucaguggccuguuaaacu

SEQ ID NO: 7387 - RNA, 22 nt, Artificial Sequence
  GATA2 Guide RNA
caguggccuguuaaacuagagg

SEQ ID NO: 7388 - RNA, 22 nt, Artificial Sequence
  GATA2 Guide RNA
cauggucaguggccuguuaaac

SEQ ID NO: 7389 - RNA, 22 nt, Artificial Sequence
  GATA2 Guide RNA
ccucuaguuuaacaggccacug

SEQ ID NO: 7390 - RNA, 22 nt, Artificial Sequence
  GATA2 Guide RNA
ccuguuaaacuagaggcaacca

SEQ ID NO: 7391 - RNA, 22 nt, Artificial Sequence
  GATA2 Guide RNA
cuaguuuaacaggccacugacc

SEQ ID NO: 7392 - RNA, 22 nt, Artificial Sequence
  GATA2 Guide RNA
cucuaguuuaacaggccacuga

SEQ ID NO: 7393 - RNA, 22 nt, Artificial Sequence
  GATA2 Guide RNA
cuggugguugccucuaguuuaa

SEQ ID NO: 7394 - RNA, 22 nt, Artificial Sequence
  GATA2 Guide RNA
cuguuaaacuagaggcaaccac

SEQ ID NO: 7395 - RNA, 22 nt, Artificial Sequence
  GATA2 Guide RNA
cuucauggucaguggccuguua

SEQ ID NO: 7396 - RNA, 22 nt, Artificial Sequence
  GATA2 Guide RNA
gaaaacuggugguugccucuag

SEQ ID NO: 7397 - RNA, 22 nt, Artificial Sequence
  GATA2 Guide RNA
gccucuaguuuaacaggccacu

SEQ ID NO: 7398 - RNA, 22 nt, Artificial Sequence
  GATA2 Guide RNA
gccuguuaaacuagaggcaacc

SEQ ID NO: 7399 - RNA, 22 nt, Artificial Sequence
  GATA2 Guide RNA
ggccuguuaaacuagaggcaac

SEQ ID NO: 7400 - RNA, 22 nt, Artificial Sequence
  GATA2 Guide RNA
ggucaguggccuguuaaacuag

SEQ ID NO: 7401 - RNA, 22 nt, Artificial Sequence
  GATA2 Guide RNA
ggugguugccucuaguuuaaca

SEQ ID NO: 7402 - RNA, 22 nt, Artificial Sequence
  GATA2 Guide RNA
gguugccucuaguuuaacaggc

SEQ ID NO: 7403 - RNA, 22 nt, Artificial Sequence
  GATA2 Guide RNA
gucaguggccuguuaaacuaga

SEQ ID NO: 7404 - RNA, 22 nt, Artificial Sequence
  GATA2 Guide RNA
guggccuguuaaacuagaggca

SEQ ID NO: 7405 - RNA, 22 nt, Artificial Sequence
  GATA2 Guide RNA
gugguugccucuaguuuaacag

SEQ ID NO: 7406 - RNA, 22 nt, Artificial Sequence
  GATA2 Guide RNA
guuaaacuagaggcaaccacca

SEQ ID NO: 7407 - RNA, 22 nt, Artificial Sequence
  GATA2 Guide RNA
guugccucuaguuuaacaggcc

SEQ ID NO: 7408 - RNA, 22 nt, Artificial Sequence
  GATA2 Guide RNA
guuuaacaggccacugaccaug

SEQ ID NO: 7409 - RNA, 22 nt, Artificial Sequence
  GATA2 Guide RNA
uaaacuagaggcaaccaccagu

SEQ ID NO: 7410 - RNA, 22 nt, Artificial Sequence
  GATA2 Guide RNA
uaguuuaacaggccacugacca

SEQ ID NO: 7411 - RNA, 22 nt, Artificial Sequence
  GATA2 Guide RNA
ucaguggccuguuaaacuagag

SEQ ID NO: 7412 - RNA, 22 nt, Artificial Sequence
  GATA2 Guide RNA
ucauggucaguggccuguuaaa

SEQ ID NO: 7413 - RNA, 22 nt, Artificial Sequence
  GATA2 Guide RNA
ucuaguuuaacaggccacugac

SEQ ID NO: 7414 - RNA, 22 nt, Artificial Sequence
  GATA2 Guide RNA
ugccucuaguuuaacaggccac

SEQ ID NO: 7415 - RNA, 22 nt, Artificial Sequence
  GATA2 Guide RNA
uggccuguuaaacuagaggcaa

SEQ ID NO: 7416 - RNA, 22 nt, Artificial Sequence
  GATA2 Guide RNA
uggucaguggccuguuaaacua

SEQ ID NO: 7417 - RNA, 22 nt, Artificial Sequence
  GATA2 Guide RNA
uggugguugccucuaguuuaac

SEQ ID NO: 7418 - RNA, 22 nt, Artificial Sequence
  GATA2 Guide RNA
ugguugccucuaguuuaacagg

SEQ ID NO: 7419 - RNA, 22 nt, Artificial Sequence
  GATA2 Guide RNA
uguuaaacuagaggcaaccacc

SEQ ID NO: 7420 - RNA, 22 nt, Artificial Sequence
  GATA2 Guide RNA
uuaaacuagaggcaaccaccag

SEQ ID NO: 7421 - RNA, 22 nt, Artificial Sequence
  GATA2 Guide RNA
uucauggucaguggccuguuaa

SEQ ID NO: 7422 - RNA, 22 nt, Artificial Sequence
  GATA2 Guide RNA
uugccucuaguuuaacaggcca

SEQ ID NO: 7423 - RNA, 20 nt, Artificial Sequence
  GATA2 Guide RNA
aacgugagugcgccccgccc

SEQ ID NO: 7424 - RNA, 20 nt, Artificial Sequence
  GATA2 Guide RNA
aagcugcacaacgugagugc

SEQ ID NO: 7425 - RNA, 20 nt, Artificial Sequence
  GATA2 Guide RNA
acaacgugagugcgccccgc

SEQ ID NO: 7426 - RNA, 20 nt, Artificial Sequence
  GATA2 Guide RNA
acaagcugcacaacgugagu

SEQ ID NO: 7427 - RNA, 20 nt, Artificial Sequence
  GATA2 Guide RNA
acgugagugcgccccgcccc

SEQ ID NO: 7428 - RNA, 20 nt, Artificial Sequence
  GATA2 Guide RNA
acguugugcagcuuguagua

SEQ ID NO: 7429 - RNA, 20 nt, Artificial Sequence
  GATA2 Guide RNA
acuacaagcugcacaacgug

SEQ ID NO: 7430 - RNA, 20 nt, Artificial Sequence
  GATA2 Guide RNA
acucacguugugcagcuugu

SEQ ID NO: 7431 - RNA, 20 nt, Artificial Sequence
  GATA2 Guide RNA
agcugcacaacgugagugcg

SEQ ID NO: 7432 - RNA, 20 nt, Artificial Sequence
  GATA2 Guide RNA
caacgugagugcgccccgcc

SEQ ID NO: 7433 - RNA, 20 nt, Artificial Sequence
  GATA2 Guide RNA
caagcugcacaacgugagug

SEQ ID NO: 7434 - RNA, 20 nt, Artificial Sequence
  GATA2 Guide RNA
cacaacgugagugcgccccg

SEQ ID NO: 7435 - RNA, 20 nt, Artificial Sequence
  GATA2 Guide RNA
cacguugugcagcuuguagu

SEQ ID NO: 7436 - RNA, 20 nt, Artificial Sequence
  GATA2 Guide RNA
cacucacguugugcagcuug

SEQ ID NO: 7437 - RNA, 20 nt, Artificial Sequence
  GATA2 Guide RNA
ccucuacuacaagcugcaca

SEQ ID NO: 7438 - RNA, 20 nt, Artificial Sequence
  GATA2 Guide RNA
cgcacucacguugugcagcu

SEQ ID NO: 7439 - RNA, 20 nt, Artificial Sequence
  GATA2 Guide RNA
cggggcgcacucacguugug

SEQ ID NO: 7440 - RNA, 20 nt, Artificial Sequence
  GATA2 Guide RNA
cguugugcagcuuguaguag

SEQ ID NO: 7441 - RNA, 20 nt, Artificial Sequence
  GATA2 Guide RNA
cuacaagcugcacaacguga

SEQ ID NO: 7442 - RNA, 20 nt, Artificial Sequence
  GATA2 Guide RNA
cuacuacaagcugcacaacg

SEQ ID NO: 7443 - RNA, 20 nt, Artificial Sequence
  GATA2 Guide RNA
cucacguugugcagcuugua

SEQ ID NO: 7444 - RNA, 20 nt, Artificial Sequence
  GATA2 Guide RNA
cucuacuacaagcugcacaa

SEQ ID NO: 7445 - RNA, 20 nt, Artificial Sequence
  GATA2 Guide RNA
cugcacaacgugagugcgcc

SEQ ID NO: 7446 - RNA, 20 nt, Artificial Sequence
  GATA2 Guide RNA
gcacaacgugagugcgcccc

SEQ ID NO: 7447 - RNA, 20 nt, Artificial Sequence
  GATA2 Guide RNA
gcacucacguugugcagcuu

SEQ ID NO: 7448 - RNA, 20 nt, Artificial Sequence
  GATA2 Guide RNA
gccucuacuacaagcugcac

SEQ ID NO: 7449 - RNA, 20 nt, Artificial Sequence
  GATA2 Guide RNA
gcgcacucacguugugcagc

SEQ ID NO: 7450 - RNA, 20 nt, Artificial Sequence
  GATA2 Guide RNA
gcggggcgcacucacguugu

SEQ ID NO: 7451 - RNA, 20 nt, Artificial Sequence
  GATA2 Guide RNA
gcugcacaacgugagugcgc

SEQ ID NO: 7452 - RNA, 20 nt, Artificial Sequence
  GATA2 Guide RNA
ggccucuacuacaagcugca

SEQ ID NO: 7453 - RNA, 20 nt, Artificial Sequence
  GATA2 Guide RNA
ggcgcacucacguugugcag

SEQ ID NO: 7454 - RNA, 20 nt, Artificial Sequence
  GATA2 Guide RNA
ggcggggcgcacucacguug

SEQ ID NO: 7455 - RNA, 20 nt, Artificial Sequence
  GATA2 Guide RNA
gggcgcacucacguugugca

SEQ ID NO: 7456 - RNA, 20 nt, Artificial Sequence
  GATA2 Guide RNA
gggcggggcgcacucacguu

SEQ ID NO: 7457 - RNA, 20 nt, Artificial Sequence
  GATA2 Guide RNA
ggggcgcacucacguugugc

SEQ ID NO: 7458 - RNA, 20 nt, Artificial Sequence
  GATA2 Guide RNA
ggggcggggcgcacucacgu

SEQ ID NO: 7459 - RNA, 20 nt, Artificial Sequence
  GATA2 Guide RNA
guugugcagcuuguaguaga

SEQ ID NO: 7460 - RNA, 20 nt, Artificial Sequence
  GATA2 Guide RNA
uacaagcugcacaacgugag

SEQ ID NO: 7461 - RNA, 20 nt, Artificial Sequence
  GATA2 Guide RNA
uacuacaagcugcacaacgu

SEQ ID NO: 7462 - RNA, 20 nt, Artificial Sequence
  GATA2 Guide RNA
ucacguugugcagcuuguag

SEQ ID NO: 7463 - RNA, 20 nt, Artificial Sequence
  GATA2 Guide RNA
ucuacuacaagcugcacaac

SEQ ID NO: 7464 - RNA, 20 nt, Artificial Sequence
  GATA2 Guide RNA
ugcacaacgugagugcgccc

SEQ ID NO: 7465 - RNA, 21 nt, Artificial Sequence
  GATA2 Guide RNA
aacgugagugcgccccgcccc

SEQ ID NO: 7466 - RNA, 21 nt, Artificial Sequence
  GATA2 Guide RNA
aagcugcacaacgugagugcg

SEQ ID NO: 7467 - RNA, 21 nt, Artificial Sequence
  GATA2 Guide RNA
acaacgugagugcgccccgcc

SEQ ID NO: 7468 - RNA, 21 nt, Artificial Sequence
  GATA2 Guide RNA
acaagcugcacaacgugagug

SEQ ID NO: 7469 - RNA, 21 nt, Artificial Sequence
  GATA2 Guide RNA
acguugugcagcuuguaguag

SEQ ID NO: 7470 - RNA, 21 nt, Artificial Sequence
  GATA2 Guide RNA
acuacaagcugcacaacguga

SEQ ID NO: 7471 - RNA, 21 nt, Artificial Sequence
  GATA2 Guide RNA
acucacguugugcagcuugua

SEQ ID NO: 7472 - RNA, 21 nt, Artificial Sequence
  GATA2 Guide RNA
agcugcacaacgugagugcgc

SEQ ID NO: 7473 - RNA, 21 nt, Artificial Sequence
  GATA2 Guide RNA
caacgugagugcgccccgccc

SEQ ID NO: 7474 - RNA, 21 nt, Artificial Sequence
  GATA2 Guide RNA
caagcugcacaacgugagugc

SEQ ID NO: 7475 - RNA, 21 nt, Artificial Sequence
  GATA2 Guide RNA
cacaacgugagugcgccccgc

SEQ ID NO: 7476 - RNA, 21 nt, Artificial Sequence
  GATA2 Guide RNA
cacguugugcagcuuguagua

SEQ ID NO: 7477 - RNA, 21 nt, Artificial Sequence
  GATA2 Guide RNA
cacucacguugugcagcuugu

SEQ ID NO: 7478 - RNA, 21 nt, Artificial Sequence
  GATA2 Guide RNA
ccucuacuacaagcugcacaa

SEQ ID NO: 7479 - RNA, 21 nt, Artificial Sequence
  GATA2 Guide RNA
cgcacucacguugugcagcuu

SEQ ID NO: 7480 - RNA, 21 nt, Artificial Sequence
  GATA2 Guide RNA
cggggcgcacucacguugugc

SEQ ID NO: 7481 - RNA, 21 nt, Artificial Sequence
  GATA2 Guide RNA
cguugugcagcuuguaguaga

SEQ ID NO: 7482 - RNA, 21 nt, Artificial Sequence
  GATA2 Guide RNA
cuacaagcugcacaacgugag

SEQ ID NO: 7483 - RNA, 21 nt, Artificial Sequence
  GATA2 Guide RNA
cuacuacaagcugcacaacgu

SEQ ID NO: 7484 - RNA, 21 nt, Artificial Sequence
  GATA2 Guide RNA
cucacguugugcagcuuguag

SEQ ID NO: 7485 - RNA, 21 nt, Artificial Sequence
  GATA2 Guide RNA
cucuacuacaagcugcacaac

SEQ ID NO: 7486 - RNA, 21 nt, Artificial Sequence
  GATA2 Guide RNA
cugcacaacgugagugcgccc

SEQ ID NO: 7487 - RNA, 21 nt, Artificial Sequence
  GATA2 Guide RNA
gcacaacgugagugcgccccg

SEQ ID NO: 7488 - RNA, 21 nt, Artificial Sequence
  GATA2 Guide RNA
gcacucacguugugcagcuug

SEQ ID NO: 7489 - RNA, 21 nt, Artificial Sequence
  GATA2 Guide RNA
gccucuacuacaagcugcaca

SEQ ID NO: 7490 - RNA, 21 nt, Artificial Sequence
  GATA2 Guide RNA
gcgcacucacguugugcagcu

SEQ ID NO: 7491 - RNA, 21 nt, Artificial Sequence
  GATA2 Guide RNA
gcggggcgcacucacguugug

SEQ ID NO: 7492 - RNA, 21 nt, Artificial Sequence
  GATA2 Guide RNA
gcugcacaacgugagugcgcc

SEQ ID NO: 7493 - RNA, 21 nt, Artificial Sequence
  GATA2 Guide RNA
ggccucuacuacaagcugcac

SEQ ID NO: 7494 - RNA, 21 nt, Artificial Sequence
  GATA2 Guide RNA
ggcgcacucacguugugcagc

SEQ ID NO: 7495 - RNA, 21 nt, Artificial Sequence
  GATA2 Guide RNA
ggcggggcgcacucacguugu

SEQ ID NO: 7496 - RNA, 21 nt, Artificial Sequence
  GATA2 Guide RNA
gggcgcacucacguugugcag

SEQ ID NO: 7497 - RNA, 21 nt, Artificial Sequence
  GATA2 Guide RNA
gggcggggcgcacucacguug

SEQ ID NO: 7498 - RNA, 21 nt, Artificial Sequence
  GATA2 Guide RNA
ggggcgcacucacguugugca

SEQ ID NO: 7499 - RNA, 21 nt, Artificial Sequence
  GATA2 Guide RNA
ggggcggggcgcacucacguu

SEQ ID NO: 7500 - RNA, 21 nt, Artificial Sequence
  GATA2 Guide RNA
guugugcagcuuguaguagag

SEQ ID NO: 7501 - RNA, 21 nt, Artificial Sequence
  GATA2 Guide RNA
uacaagcugcacaacgugagu

SEQ ID NO: 7502 - RNA, 21 nt, Artificial Sequence
  GATA2 Guide RNA
uacuacaagcugcacaacgug

SEQ ID NO: 7503 - RNA, 21 nt, Artificial Sequence
  GATA2 Guide RNA
ucacguugugcagcuuguagu

SEQ ID NO: 7504 - RNA, 21 nt, Artificial Sequence
  GATA2 Guide RNA
ucuacuacaagcugcacaacg

SEQ ID NO: 7505 - RNA, 21 nt, Artificial Sequence
  GATA2 Guide RNA
ugcacaacgugagugcgcccc

SEQ ID NO: 7506 - RNA, 21 nt, Artificial Sequence
  GATA2 Guide RNA
uggccucuacuacaagcugca

SEQ ID NO: 7507 - RNA, 22 nt, Artificial Sequence
  GATA2 Guide RNA
aacgugagugcgccccgccccg

SEQ ID NO: 7508 - RNA, 22 nt, Artificial Sequence
  GATA2 Guide RNA
aagcugcacaacgugagugcgc

SEQ ID NO: 7509 - RNA, 22 nt, Artificial Sequence
  GATA2 Guide RNA
acaacgugagugcgccccgccc

SEQ ID NO: 7510 - RNA, 22 nt, Artificial Sequence
  GATA2 Guide RNA
acaagcugcacaacgugagugc

SEQ ID NO: 7511 - RNA, 22 nt, Artificial Sequence
  GATA2 Guide RNA
acguugugcagcuuguaguaga

SEQ ID NO: 7512 - RNA, 22 nt, Artificial Sequence
  GATA2 Guide RNA
acuacaagcugcacaacgugag

SEQ ID NO: 7513 - RNA, 22 nt, Artificial Sequence
  GATA2 Guide RNA
acucacguugugcagcuuguag

SEQ ID NO: 7514 - RNA, 22 nt, Artificial Sequence
  GATA2 Guide RNA
agcugcacaacgugagugcgcc

SEQ ID NO: 7515 - RNA, 22 nt, Artificial Sequence
  GATA2 Guide RNA
caacgugagugcgccccgcccc

SEQ ID NO: 7516 - RNA, 22 nt, Artificial Sequence
  GATA2 Guide RNA
caagcugcacaacgugagugcg

SEQ ID NO: 7517 - RNA, 22 nt, Artificial Sequence
  GATA2 Guide RNA
cacaacgugagugcgccccgcc

SEQ ID NO: 7518 - RNA, 22 nt, Artificial Sequence
  GATA2 Guide RNA
cacguugugcagcuuguaguag

SEQ ID NO: 7519 - RNA, 22 nt, Artificial Sequence
  GATA2 Guide RNA
cacucacguugugcagcuugua

SEQ ID NO: 7520 - RNA, 22 nt, Artificial Sequence
  GATA2 Guide RNA
ccucuacuacaagcugcacaac

SEQ ID NO: 7521 - RNA, 22 nt, Artificial Sequence
  GATA2 Guide RNA
cgcacucacguugugcagcuug

SEQ ID NO: 7522 - RNA, 22 nt, Artificial Sequence
  GATA2 Guide RNA
cggggcgcacucacguugugca

SEQ ID NO: 7523 - RNA, 22 nt, Artificial Sequence
  GATA2 Guide RNA
cggggcggggcgcacucacguu

SEQ ID NO: 7524 - RNA, 22 nt, Artificial Sequence
  GATA2 Guide RNA
cguugugcagcuuguaguagag

SEQ ID NO: 7525 - RNA, 22 nt, Artificial Sequence
  GATA2 Guide RNA
cuacaagcugcacaacgugagu

SEQ ID NO: 7526 - RNA, 22 nt, Artificial Sequence
  GATA2 Guide RNA
cuacuacaagcugcacaacgug

SEQ ID NO: 7527 - RNA, 22 nt, Artificial Sequence
  GATA2 Guide RNA
cucacguugugcagcuuguagu

SEQ ID NO: 7528 - RNA, 22 nt, Artificial Sequence
  GATA2 Guide RNA
cucuacuacaagcugcacaacg

SEQ ID NO: 7529 - RNA, 22 nt, Artificial Sequence
  GATA2 Guide RNA
cugcacaacgugagugcgcccc

SEQ ID NO: 7530 - RNA, 22 nt, Artificial Sequence
  GATA2 Guide RNA
gcacaacgugagugcgccccgc

SEQ ID NO: 7531 - RNA, 22 nt, Artificial Sequence
  GATA2 Guide RNA
gcacucacguugugcagcuugu

SEQ ID NO: 7532 - RNA, 22 nt, Artificial Sequence
  GATA2 Guide RNA
gccucuacuacaagcugcacaa

SEQ ID NO: 7533 - RNA, 22 nt, Artificial Sequence
  GATA2 Guide RNA
gcgcacucacguugugcagcuu

SEQ ID NO: 7534 - RNA, 22 nt, Artificial Sequence
  GATA2 Guide RNA
gcggggcgcacucacguugugc

SEQ ID NO: 7535 - RNA, 22 nt, Artificial Sequence
  GATA2 Guide RNA
gcugcacaacgugagugcgccc

SEQ ID NO: 7536 - RNA, 22 nt, Artificial Sequence
  GATA2 Guide RNA
ggccucuacuacaagcugcaca

SEQ ID NO: 7537 - RNA, 22 nt, Artificial Sequence
  GATA2 Guide RNA
ggcgcacucacguugugcagcu

SEQ ID NO: 7538 - RNA, 22 nt, Artificial Sequence
  GATA2 Guide RNA
ggcggggcgcacucacguugug

SEQ ID NO: 7539 - RNA, 22 nt, Artificial Sequence
  GATA2 Guide RNA
gggcgcacucacguugugcagc

SEQ ID NO: 7540 - RNA, 22 nt, Artificial Sequence
  GATA2 Guide RNA
gggcggggcgcacucacguugu

SEQ ID NO: 7541 - RNA, 22 nt, Artificial Sequence
  GATA2 Guide RNA
ggggcgcacucacguugugcag

SEQ ID NO: 7542 - RNA, 22 nt, Artificial Sequence
  GATA2 Guide RNA
ggggcggggcgcacucacguug

SEQ ID NO: 7543 - RNA, 22 nt, Artificial Sequence
  GATA2 Guide RNA
guggccucuacuacaagcugca

SEQ ID NO: 7544 - RNA, 22 nt, Artificial Sequence
  GATA2 Guide RNA
guugugcagcuuguaguagagg

SEQ ID NO: 7545 - RNA, 22 nt, Artificial Sequence
  GATA2 Guide RNA
uacaagcugcacaacgugagug

SEQ ID NO: 7546 - RNA, 22 nt, Artificial Sequence
  GATA2 Guide RNA
uacuacaagcugcacaacguga

SEQ ID NO: 7547 - RNA, 22 nt, Artificial Sequence
  GATA2 Guide RNA
ucacguugugcagcuuguagua

SEQ ID NO: 7548 - RNA, 22 nt, Artificial Sequence
  GATA2 Guide RNA
ucuacuacaagcugcacaacgu

SEQ ID NO: 7549 - RNA, 22 nt, Artificial Sequence
  GATA2 Guide RNA
ugcacaacgugagugcgccccg

SEQ ID NO: 7550 - RNA, 22 nt, Artificial Sequence
  GATA2 Guide RNA
uggccucuacuacaagcugcac

SEQ ID NO: 7551 - RNA, 20 nt, Artificial Sequence
  GATA2 Guide RNA
aacgccuguggccucucucu

SEQ ID NO: 7552 - RNA, 20 nt, Artificial Sequence
  GATA2 Guide RNA
acccugucugcaacgccugu

SEQ ID NO: 7553 - RNA, 20 nt, Artificial Sequence
  GATA2 Guide RNA
acgccuguggccucucucua

SEQ ID NO: 7554 - RNA, 20 nt, Artificial Sequence
  GATA2 Guide RNA
agagagaggccacaggcguu

SEQ ID NO: 7555 - RNA, 20 nt, Artificial Sequence
  GATA2 Guide RNA
agagaggccacaggcguugc

SEQ ID NO: 7556 - RNA, 20 nt, Artificial Sequence
  GATA2 Guide RNA
agaggccacaggcguugcag

SEQ ID NO: 7557 - RNA, 20 nt, Artificial Sequence
  GATA2 Guide RNA
agcuuguaguagagagaggc

SEQ ID NO: 7558 - RNA, 20 nt, Artificial Sequence
  GATA2 Guide RNA
aggccacaggcguugcagac

SEQ ID NO: 7559 - RNA, 20 nt, Artificial Sequence
  GATA2 Guide RNA
aguagagagaggccacaggc

SEQ ID NO: 7560 - RNA, 20 nt, Artificial Sequence
  GATA2 Guide RNA
auugugcagcuuguaguaga

SEQ ID NO: 7561 - RNA, 20 nt, Artificial Sequence
  GATA2 Guide RNA
caacgccuguggccucucuc

SEQ ID NO: 7562 - RNA, 20 nt, Artificial Sequence
  GATA2 Guide RNA
cagcuuguaguagagagagg

SEQ ID NO: 7563 - RNA, 20 nt, Artificial Sequence
  GATA2 Guide RNA
cauugugcagcuuguaguag

SEQ ID NO: 7564 - RNA, 20 nt, Artificial Sequence
  GATA2 Guide RNA
cccugucugcaacgccugug

SEQ ID NO: 7565 - RNA, 20 nt, Artificial Sequence
  GATA2 Guide RNA
ccucucucuacuacaagcug

SEQ ID NO: 7566 - RNA, 20 nt, Artificial Sequence
  GATA2 Guide RNA
ccugucugcaacgccugugg

SEQ ID NO: 7567 - RNA, 20 nt, Artificial Sequence
  GATA2 Guide RNA
ccuguggccucucucuacua

SEQ ID NO: 7568 - RNA, 20 nt, Artificial Sequence
  GATA2 Guide RNA
cgccuguggccucucucuac

SEQ ID NO: 7569 - RNA, 20 nt, Artificial Sequence
  GATA2 Guide RNA
cucucuacuacaagcugcac

SEQ ID NO: 7570 - RNA, 20 nt, Artificial Sequence
  GATA2 Guide RNA
cucucucuacuacaagcugc

SEQ ID NO: 7571 - RNA, 20 nt, Artificial Sequence
  GATA2 Guide RNA
cugcaacgccuguggccucu

SEQ ID NO: 7572 - RNA, 20 nt, Artificial Sequence
  GATA2 Guide RNA
cugucugcaacgccuguggc

SEQ ID NO: 7573 - RNA, 20 nt, Artificial Sequence
  GATA2 Guide RNA
cuguggccucucucuacuac

SEQ ID NO: 7574 - RNA, 20 nt, Artificial Sequence
  GATA2 Guide RNA
cuuguaguagagagaggcca

SEQ ID NO: 7575 - RNA, 20 nt, Artificial Sequence
  GATA2 Guide RNA
gacccugucugcaacgccug

SEQ ID NO: 7576 - RNA, 20 nt, Artificial Sequence
  GATA2 Guide RNA
gagagaggccacaggcguug

SEQ ID NO: 7577 - RNA, 20 nt, Artificial Sequence
  GATA2 Guide RNA
gagaggccacaggcguugca

SEQ ID NO: 7578 - RNA, 20 nt, Artificial Sequence
  GATA2 Guide RNA
gaggccacaggcguugcaga

SEQ ID NO: 7579 - RNA, 20 nt, Artificial Sequence
  GATA2 Guide RNA
gcaacgccuguggccucucu

SEQ ID NO: 7580 - RNA, 20 nt, Artificial Sequence
  GATA2 Guide RNA
gcagcuuguaguagagagag

SEQ ID NO: 7581 - RNA, 20 nt, Artificial Sequence
  GATA2 Guide RNA
gccacaggcguugcagacag

SEQ ID NO: 7582 - RNA, 20 nt, Artificial Sequence
  GATA2 Guide RNA
gccucucucuacuacaagcu

SEQ ID NO: 7583 - RNA, 20 nt, Artificial Sequence
  GATA2 Guide RNA
gccuguggccucucucuacu

SEQ ID NO: 7584 - RNA, 20 nt, Artificial Sequence
  GATA2 Guide RNA
gcuuguaguagagagaggcc

SEQ ID NO: 7585 - RNA, 20 nt, Artificial Sequence
  GATA2 Guide RNA
ggccacaggcguugcagaca

SEQ ID NO: 7586 - RNA, 20 nt, Artificial Sequence
  GATA2 Guide RNA
ggccucucucuacuacaagc

SEQ ID NO: 7587 - RNA, 20 nt, Artificial Sequence
  GATA2 Guide RNA
guagagagaggccacaggcg

SEQ ID NO: 7588 - RNA, 20 nt, Artificial Sequence
  GATA2 Guide RNA
guaguagagagaggccacag

SEQ ID NO: 7589 - RNA, 20 nt, Artificial Sequence
  GATA2 Guide RNA
gucugcaacgccuguggccu

SEQ ID NO: 7590 - RNA, 20 nt, Artificial Sequence
  GATA2 Guide RNA
gugcagcuuguaguagagag

SEQ ID NO: 7591 - RNA, 20 nt, Artificial Sequence
  GATA2 Guide RNA
guggccucucucuacuacaa

SEQ ID NO: 7592 - RNA, 20 nt, Artificial Sequence
  GATA2 Guide RNA
uagagagaggccacaggcgu

SEQ ID NO: 7593 - RNA, 20 nt, Artificial Sequence
  GATA2 Guide RNA
uaguagagagaggccacagg

SEQ ID NO: 7594 - RNA, 20 nt, Artificial Sequence
  GATA2 Guide RNA
ucucucuacuacaagcugca

SEQ ID NO: 7595 - RNA, 20 nt, Artificial Sequence
  GATA2 Guide RNA
ucugcaacgccuguggccuc

SEQ ID NO: 7596 - RNA, 20 nt, Artificial Sequence
  GATA2 Guide RNA
ugcaacgccuguggccucuc

SEQ ID NO: 7597 - RNA, 20 nt, Artificial Sequence
  GATA2 Guide RNA
ugcagcuuguaguagagaga

SEQ ID NO: 7598 - RNA, 20 nt, Artificial Sequence
  GATA2 Guide RNA
uggccucucucuacuacaag

SEQ ID NO: 7599 - RNA, 20 nt, Artificial Sequence
  GATA2 Guide RNA
uguaguagagagaggccaca

SEQ ID NO: 7600 - RNA, 20 nt, Artificial Sequence
  GATA2 Guide RNA
ugucugcaacgccuguggcc

SEQ ID NO: 7601 - RNA, 20 nt, Artificial Sequence
  GATA2 Guide RNA
ugugcagcuuguaguagaga

SEQ ID NO: 7602 - RNA, 20 nt, Artificial Sequence
  GATA2 Guide RNA
uguggccucucucuacuaca

SEQ ID NO: 7603 - RNA, 20 nt, Artificial Sequence
  GATA2 Guide RNA
uuguaguagagagaggccac

SEQ ID NO: 7604 - RNA, 20 nt, Artificial Sequence
  GATA2 Guide RNA
uugugcagcuuguaguagag

SEQ ID NO: 7605 - RNA, 21 nt, Artificial Sequence
  GATA2 Guide RNA
aacgccuguggccucucucua

SEQ ID NO: 7606 - RNA, 21 nt, Artificial Sequence
  GATA2 Guide RNA
acauugugcagcuuguaguag

SEQ ID NO: 7607 - RNA, 21 nt, Artificial Sequence
  GATA2 Guide RNA
acccugucugcaacgccugug

SEQ ID NO: 7608 - RNA, 21 nt, Artificial Sequence
  GATA2 Guide RNA
acgccuguggccucucucuac

SEQ ID NO: 7609 - RNA, 21 nt, Artificial Sequence
  GATA2 Guide RNA
agagagaggccacaggcguug

SEQ ID NO: 7610 - RNA, 21 nt, Artificial Sequence
  GATA2 Guide RNA
agagaggccacaggcguugca

SEQ ID NO: 7611 - RNA, 21 nt, Artificial Sequence
  GATA2 Guide RNA
agaggccacaggcguugcaga

SEQ ID NO: 7612 - RNA, 21 nt, Artificial Sequence
  GATA2 Guide RNA
agcuuguaguagagagaggcc

SEQ ID NO: 7613 - RNA, 21 nt, Artificial Sequence
  GATA2 Guide RNA
aggccacaggcguugcagaca

SEQ ID NO: 7614 - RNA, 21 nt, Artificial Sequence
  GATA2 Guide RNA
aguagagagaggccacaggcg

SEQ ID NO: 7615 - RNA, 21 nt, Artificial Sequence
  GATA2 Guide RNA
auugugcagcuuguaguagag

SEQ ID NO: 7616 - RNA, 21 nt, Artificial Sequence
  GATA2 Guide RNA
caacgccuguggccucucucu

SEQ ID NO: 7617 - RNA, 21 nt, Artificial Sequence
  GATA2 Guide RNA
cagcuuguaguagagagaggc

SEQ ID NO: 7618 - RNA, 21 nt, Artificial Sequence
  GATA2 Guide RNA
cauugugcagcuuguaguaga

SEQ ID NO: 7619 - RNA, 21 nt, Artificial Sequence
  GATA2 Guide RNA
cccugucugcaacgccugugg

SEQ ID NO: 7620 - RNA, 21 nt, Artificial Sequence
  GATA2 Guide RNA
ccucucucuacuacaagcugc

SEQ ID NO: 7621 - RNA, 21 nt, Artificial Sequence
  GATA2 Guide RNA
ccugucugcaacgccuguggc

SEQ ID NO: 7622 - RNA, 21 nt, Artificial Sequence
  GATA2 Guide RNA
ccuguggccucucucuacuac

SEQ ID NO: 7623 - RNA, 21 nt, Artificial Sequence
  GATA2 Guide RNA
cgccuguggccucucucuacu

SEQ ID NO: 7624 - RNA, 21 nt, Artificial Sequence
  GATA2 Guide RNA
cucucuacuacaagcugcaca

SEQ ID NO: 7625 - RNA, 21 nt, Artificial Sequence
  GATA2 Guide RNA
cucucucuacuacaagcugca

SEQ ID NO: 7626 - RNA, 21 nt, Artificial Sequence
  GATA2 Guide RNA
cugcaacgccuguggccucuc

SEQ ID NO: 7627 - RNA, 21 nt, Artificial Sequence
  GATA2 Guide RNA
cugucugcaacgccuguggcc

SEQ ID NO: 7628 - RNA, 21 nt, Artificial Sequence
  GATA2 Guide RNA
cuguggccucucucuacuaca

SEQ ID NO: 7629 - RNA, 21 nt, Artificial Sequence
  GATA2 Guide RNA
cuuguaguagagagaggccac

SEQ ID NO: 7630 - RNA, 21 nt, Artificial Sequence
  GATA2 Guide RNA
gacccugucugcaacgccugu

SEQ ID NO: 7631 - RNA, 21 nt, Artificial Sequence
  GATA2 Guide RNA
gagagaggccacaggcguugc

SEQ ID NO: 7632 - RNA, 21 nt, Artificial Sequence
  GATA2 Guide RNA
gagaggccacaggcguugcag

SEQ ID NO: 7633 - RNA, 21 nt, Artificial Sequence
  GATA2 Guide RNA
gaggccacaggcguugcagac

SEQ ID NO: 7634 - RNA, 21 nt, Artificial Sequence
  GATA2 Guide RNA
gcaacgccuguggccucucuc

SEQ ID NO: 7635 - RNA, 21 nt, Artificial Sequence
  GATA2 Guide RNA
gcagcuuguaguagagagagg

SEQ ID NO: 7636 - RNA, 21 nt, Artificial Sequence
  GATA2 Guide RNA
gccacaggcguugcagacagg

SEQ ID NO: 7637 - RNA, 21 nt, Artificial Sequence
  GATA2 Guide RNA
gccucucucuacuacaagcug

SEQ ID NO: 7638 - RNA, 21 nt, Artificial Sequence
  GATA2 Guide RNA
gccuguggccucucucuacua

SEQ ID NO: 7639 - RNA, 21 nt, Artificial Sequence
  GATA2 Guide RNA
gcuuguaguagagagaggcca

SEQ ID NO: 7640 - RNA, 21 nt, Artificial Sequence
  GATA2 Guide RNA
ggacccugucugcaacgccug

SEQ ID NO: 7641 - RNA, 21 nt, Artificial Sequence
  GATA2 Guide RNA
ggccacaggcguugcagacag

SEQ ID NO: 7642 - RNA, 21 nt, Artificial Sequence
  GATA2 Guide RNA
ggccucucucuacuacaagcu

SEQ ID NO: 7643 - RNA, 21 nt, Artificial Sequence
  GATA2 Guide RNA
guagagagaggccacaggcgu

SEQ ID NO: 7644 - RNA, 21 nt, Artificial Sequence
  GATA2 Guide RNA
guaguagagagaggccacagg

SEQ ID NO: 7645 - RNA, 21 nt, Artificial Sequence
  GATA2 Guide RNA
gucugcaacgccuguggccuc

SEQ ID NO: 7646 - RNA, 21 nt, Artificial Sequence
  GATA2 Guide RNA
gugcagcuuguaguagagaga

SEQ ID NO: 7647 - RNA, 21 nt, Artificial Sequence
  GATA2 Guide RNA
guggccucucucuacuacaag

SEQ ID NO: 7648 - RNA, 21 nt, Artificial Sequence
  GATA2 Guide RNA
uagagagaggccacaggcguu

SEQ ID NO: 7649 - RNA, 21 nt, Artificial Sequence
  GATA2 Guide RNA
uaguagagagaggccacaggc

SEQ ID NO: 7650 - RNA, 21 nt, Artificial Sequence
  GATA2 Guide RNA
ucucucuacuacaagcugcac

SEQ ID NO: 7651 - RNA, 21 nt, Artificial Sequence
  GATA2 Guide RNA
ucugcaacgccuguggccucu

SEQ ID NO: 7652 - RNA, 21 nt, Artificial Sequence
  GATA2 Guide RNA
ugcaacgccuguggccucucu

SEQ ID NO: 7653 - RNA, 21 nt, Artificial Sequence
  GATA2 Guide RNA
ugcagcuuguaguagagagag

SEQ ID NO: 7654 - RNA, 21 nt, Artificial Sequence
  GATA2 Guide RNA
uggccucucucuacuacaagc

SEQ ID NO: 7655 - RNA, 21 nt, Artificial Sequence
  GATA2 Guide RNA
uguaguagagagaggccacag

SEQ ID NO: 7656 - RNA, 21 nt, Artificial Sequence
  GATA2 Guide RNA
ugucugcaacgccuguggccu

SEQ ID NO: 7657 - RNA, 21 nt, Artificial Sequence
  GATA2 Guide RNA
ugugcagcuuguaguagagag

SEQ ID NO: 7658 - RNA, 21 nt, Artificial Sequence
  GATA2 Guide RNA
uguggccucucucuacuacaa

SEQ ID NO: 7659 - RNA, 21 nt, Artificial Sequence
  GATA2 Guide RNA
uuguaguagagagaggccaca

SEQ ID NO: 7660 - RNA, 21 nt, Artificial Sequence
  GATA2 Guide RNA
uugugcagcuuguaguagaga

SEQ ID NO: 7661 - RNA, 22 nt, Artificial Sequence
  GATA2 Guide RNA
aacgccuguggccucucucuac

SEQ ID NO: 7662 - RNA, 22 nt, Artificial Sequence
  GATA2 Guide RNA
acauugugcagcuuguaguaga

SEQ ID NO: 7663 - RNA, 22 nt, Artificial Sequence
  GATA2 Guide RNA
acccugucugcaacgccugugg

SEQ ID NO: 7664 - RNA, 22 nt, Artificial Sequence
  GATA2 Guide RNA
acgccuguggccucucucuacu

SEQ ID NO: 7665 - RNA, 22 nt, Artificial Sequence
  GATA2 Guide RNA
agagagaggccacaggcguugc

SEQ ID NO: 7666 - RNA, 22 nt, Artificial Sequence
  GATA2 Guide RNA
agagaggccacaggcguugcag

SEQ ID NO: 7667 - RNA, 22 nt, Artificial Sequence
  GATA2 Guide RNA
agaggccacaggcguugcagac

SEQ ID NO: 7668 - RNA, 22 nt, Artificial Sequence
  GATA2 Guide RNA
agcuuguaguagagagaggcca

SEQ ID NO: 7669 - RNA, 22 nt, Artificial Sequence
  GATA2 Guide RNA
aggccacaggcguugcagacag

SEQ ID NO: 7670 - RNA, 22 nt, Artificial Sequence
  GATA2 Guide RNA
aguagagagaggccacaggcgu

SEQ ID NO: 7671 - RNA, 22 nt, Artificial Sequence
  GATA2 Guide RNA
auugugcagcuuguaguagaga

SEQ ID NO: 7672 - RNA, 22 nt, Artificial Sequence
  GATA2 Guide RNA
caacgccuguggccucucucua

SEQ ID NO: 7673 - RNA, 22 nt, Artificial Sequence
  GATA2 Guide RNA
cacauugugcagcuuguaguag

SEQ ID NO: 7674 - RNA, 22 nt, Artificial Sequence
  GATA2 Guide RNA
cagcuuguaguagagagaggcc

SEQ ID NO: 7675 - RNA, 22 nt, Artificial Sequence
  GATA2 Guide RNA
cauugugcagcuuguaguagag

SEQ ID NO: 7676 - RNA, 22 nt, Artificial Sequence
  GATA2 Guide RNA
cccugucugcaacgccuguggc

SEQ ID NO: 7677 - RNA, 22 nt, Artificial Sequence
  GATA2 Guide RNA
ccucucucuacuacaagcugca

SEQ ID NO: 7678 - RNA, 22 nt, Artificial Sequence
  GATA2 Guide RNA
ccugucugcaacgccuguggcc

SEQ ID NO: 7679 - RNA, 22 nt, Artificial Sequence
  GATA2 Guide RNA
ccuguggccucucucuacuaca

SEQ ID NO: 7680 - RNA, 22 nt, Artificial Sequence
  GATA2 Guide RNA
cgccuguggccucucucuacua

SEQ ID NO: 7681 - RNA, 22 nt, Artificial Sequence
  GATA2 Guide RNA
cucucuacuacaagcugcacaa

SEQ ID NO: 7682 - RNA, 22 nt, Artificial Sequence
  GATA2 Guide RNA
cucucucuacuacaagcugcac

SEQ ID NO: 7683 - RNA, 22 nt, Artificial Sequence
  GATA2 Guide RNA
cugcaacgccuguggccucucu

SEQ ID NO: 7684 - RNA, 22 nt, Artificial Sequence
  GATA2 Guide RNA
cugucugcaacgccuguggccu

SEQ ID NO: 7685 - RNA, 22 nt, Artificial Sequence
  GATA2 Guide RNA
cuguggccucucucuacuacaa

SEQ ID NO: 7686 - RNA, 22 nt, Artificial Sequence
  GATA2 Guide RNA
cuuguaguagagagaggccaca

SEQ ID NO: 7687 - RNA, 22 nt, Artificial Sequence
  GATA2 Guide RNA
gacccugucugcaacgccugug

SEQ ID NO: 7688 - RNA, 22 nt, Artificial Sequence
  GATA2 Guide RNA
gagagaggccacaggcguugca

SEQ ID NO: 7689 - RNA, 22 nt, Artificial Sequence
  GATA2 Guide RNA
gagaggccacaggcguugcaga

SEQ ID NO: 7690 - RNA, 22 nt, Artificial Sequence
  GATA2 Guide RNA
gaggccacaggcguugcagaca

SEQ ID NO: 7691 - RNA, 22 nt, Artificial Sequence
  GATA2 Guide RNA
gcaacgccuguggccucucucu

SEQ ID NO: 7692 - RNA, 22 nt, Artificial Sequence
  GATA2 Guide RNA
gcagcuuguaguagagagaggc

SEQ ID NO: 7693 - RNA, 22 nt, Artificial Sequence
  GATA2 Guide RNA
gccacaggcguugcagacaggg

SEQ ID NO: 7694 - RNA, 22 nt, Artificial Sequence
  GATA2 Guide RNA
gccucucucuacuacaagcugc

SEQ ID NO: 7695 - RNA, 22 nt, Artificial Sequence
  GATA2 Guide RNA
gccuguggccucucucuacuac

SEQ ID NO: 7696 - RNA, 22 nt, Artificial Sequence
  GATA2 Guide RNA
gcuuguaguagagagaggccac

SEQ ID NO: 7697 - RNA, 22 nt, Artificial Sequence
  GATA2 Guide RNA
ggacccugucugcaacgccugu

SEQ ID NO: 7698 - RNA, 22 nt, Artificial Sequence
  GATA2 Guide RNA
ggccacaggcguugcagacagg

SEQ ID NO: 7699 - RNA, 22 nt, Artificial Sequence
  GATA2 Guide RNA
ggccucucucuacuacaagcug

SEQ ID NO: 7700 - RNA, 22 nt, Artificial Sequence
  GATA2 Guide RNA
gggacccugucugcaacgccug

SEQ ID NO: 7701 - RNA, 22 nt, Artificial Sequence
  GATA2 Guide RNA
guagagagaggccacaggcguu

SEQ ID NO: 7702 - RNA, 22 nt, Artificial Sequence
  GATA2 Guide RNA
guaguagagagaggccacaggc

SEQ ID NO: 7703 - RNA, 22 nt, Artificial Sequence
  GATA2 Guide RNA
gucugcaacgccuguggccucu

SEQ ID NO: 7704 - RNA, 22 nt, Artificial Sequence
  GATA2 Guide RNA
gugcagcuuguaguagagagag

SEQ ID NO: 7705 - RNA, 22 nt, Artificial Sequence
  GATA2 Guide RNA
guggccucucucuacuacaagc

SEQ ID NO: 7706 - RNA, 22 nt, Artificial Sequence
  GATA2 Guide RNA
uagagagaggccacaggcguug

SEQ ID NO: 7707 - RNA, 22 nt, Artificial Sequence
  GATA2 Guide RNA
uaguagagagaggccacaggcg

SEQ ID NO: 7708 - RNA, 22 nt, Artificial Sequence
  GATA2 Guide RNA
ucucucuacuacaagcugcaca

SEQ ID NO: 7709 - RNA, 22 nt, Artificial Sequence
  GATA2 Guide RNA
ucugcaacgccuguggccucuc

SEQ ID NO: 7710 - RNA, 22 nt, Artificial Sequence
  GATA2 Guide RNA
ugcaacgccuguggccucucuc

SEQ ID NO: 7711 - RNA, 22 nt, Artificial Sequence
  GATA2 Guide RNA
ugcagcuuguaguagagagagg

SEQ ID NO: 7712 - RNA, 22 nt, Artificial Sequence
  GATA2 Guide RNA
uggccucucucuacuacaagcu

SEQ ID NO: 7713 - RNA, 22 nt, Artificial Sequence
  GATA2 Guide RNA
uguaguagagagaggccacagg

SEQ ID NO: 7714 - RNA, 22 nt, Artificial Sequence
  GATA2 Guide RNA
ugucugcaacgccuguggccuc

SEQ ID NO: 7715 - RNA, 22 nt, Artificial Sequence
  GATA2 Guide RNA
ugugcagcuuguaguagagaga

SEQ ID NO: 7716 - RNA, 22 nt, Artificial Sequence
  GATA2 Guide RNA
uguggccucucucuacuacaag

SEQ ID NO: 7717 - RNA, 22 nt, Artificial Sequence
  GATA2 Guide RNA
uuguaguagagagaggccacag

SEQ ID NO: 7718 - RNA, 22 nt, Artificial Sequence
  GATA2 Guide RNA
uugugcagcuuguaguagagag

SEQ ID NO: 7719 - RNA, 20 nt, Artificial Sequence
  GATA2 Guide RNA
aacgccugugaccucuacua

SEQ ID NO: 7720 - RNA, 20 nt, Artificial Sequence
  GATA2 Guide RNA
acgccugugaccucuacuac

SEQ ID NO: 7721 - RNA, 20 nt, Artificial Sequence
  GATA2 Guide RNA
agaggucacaggcguugcag

SEQ ID NO: 7722 - RNA, 20 nt, Artificial Sequence
  GATA2 Guide RNA
agcuuguaguagaggucaca

SEQ ID NO: 7723 - RNA, 20 nt, Artificial Sequence
  GATA2 Guide RNA
aggucacaggcguugcagac

SEQ ID NO: 7724 - RNA, 20 nt, Artificial Sequence
  GATA2 Guide RNA
aguagaggucacaggcguug

SEQ ID NO: 7725 - RNA, 20 nt, Artificial Sequence
  GATA2 Guide RNA
caacgccugugaccucuacu

SEQ ID NO: 7726 - RNA, 20 nt, Artificial Sequence
  GATA2 Guide RNA
cagcuuguaguagaggucac

SEQ ID NO: 7727 - RNA, 20 nt, Artificial Sequence
  GATA2 Guide RNA
ccugucugcaacgccuguga

SEQ ID NO: 7728 - RNA, 20 nt, Artificial Sequence
  GATA2 Guide RNA
ccugugaccucuacuacaag

SEQ ID NO: 7729 - RNA, 20 nt, Artificial Sequence
  GATA2 Guide RNA
cgccugugaccucuacuaca

SEQ ID NO: 7730 - RNA, 20 nt, Artificial Sequence
  GATA2 Guide RNA
cugcaacgccugugaccucu

SEQ ID NO: 7731 - RNA, 20 nt, Artificial Sequence
  GATA2 Guide RNA
cugucugcaacgccugugac

SEQ ID NO: 7732 - RNA, 20 nt, Artificial Sequence
  GATA2 Guide RNA
cugugaccucuacuacaagc

SEQ ID NO: 7733 - RNA, 20 nt, Artificial Sequence
  GATA2 Guide RNA
cuuguaguagaggucacagg

SEQ ID NO: 7734 - RNA, 20 nt, Artificial Sequence
  GATA2 Guide RNA
gaccucuacuacaagcugca

SEQ ID NO: 7735 - RNA, 20 nt, Artificial Sequence
  GATA2 Guide RNA
gaggucacaggcguugcaga

SEQ ID NO: 7736 - RNA, 20 nt, Artificial Sequence
  GATA2 Guide RNA
gcaacgccugugaccucuac

SEQ ID NO: 7737 - RNA, 20 nt, Artificial Sequence
  GATA2 Guide RNA
gcagcuuguaguagagguca

SEQ ID NO: 7738 - RNA, 20 nt, Artificial Sequence
  GATA2 Guide RNA
gccugugaccucuacuacaa

SEQ ID NO: 7739 - RNA, 20 nt, Artificial Sequence
  GATA2 Guide RNA
gcuuguaguagaggucacag

SEQ ID NO: 7740 - RNA, 20 nt, Artificial Sequence
  GATA2 Guide RNA
ggacccugucugcaacgccu

SEQ ID NO: 7741 - RNA, 20 nt, Artificial Sequence
  GATA2 Guide RNA
ggucacaggcguugcagaca

SEQ ID NO: 7742 - RNA, 20 nt, Artificial Sequence
  GATA2 Guide RNA
guagaggucacaggcguugc

SEQ ID NO: 7743 - RNA, 20 nt, Artificial Sequence
  GATA2 Guide RNA
guaguagaggucacaggcgu

SEQ ID NO: 7744 - RNA, 20 nt, Artificial Sequence
  GATA2 Guide RNA
gucacaggcguugcagacag

SEQ ID NO: 7745 - RNA, 20 nt, Artificial Sequence
  GATA2 Guide RNA
gucugcaacgccugugaccu

SEQ ID NO: 7746 - RNA, 20 nt, Artificial Sequence
  GATA2 Guide RNA
gugaccucuacuacaagcug

SEQ ID NO: 7747 - RNA, 20 nt, Artificial Sequence
  GATA2 Guide RNA
gugcagcuuguaguagaggu

SEQ ID NO: 7748 - RNA, 20 nt, Artificial Sequence
  GATA2 Guide RNA
uagaggucacaggcguugca

SEQ ID NO: 7749 - RNA, 20 nt, Artificial Sequence
  GATA2 Guide RNA
uaguagaggucacaggcguu

SEQ ID NO: 7750 - RNA, 20 nt, Artificial Sequence
  GATA2 Guide RNA
ucacaggcguugcagacagg

SEQ ID NO: 7751 - RNA, 20 nt, Artificial Sequence
  GATA2 Guide RNA
ucugcaacgccugugaccuc

SEQ ID NO: 7752 - RNA, 20 nt, Artificial Sequence
  GATA2 Guide RNA
ugaccucuacuacaagcugc

SEQ ID NO: 7753 - RNA, 20 nt, Artificial Sequence
  GATA2 Guide RNA
ugcaacgccugugaccucua

SEQ ID NO: 7754 - RNA, 20 nt, Artificial Sequence
  GATA2 Guide RNA
ugcagcuuguaguagagguc

SEQ ID NO: 7755 - RNA, 20 nt, Artificial Sequence
  GATA2 Guide RNA
uguaguagaggucacaggcg

SEQ ID NO: 7756 - RNA, 20 nt, Artificial Sequence
  GATA2 Guide RNA
ugucugcaacgccugugacc

SEQ ID NO: 7757 - RNA, 20 nt, Artificial Sequence
  GATA2 Guide RNA
ugugaccucuacuacaagcu

SEQ ID NO: 7758 - RNA, 20 nt, Artificial Sequence
  GATA2 Guide RNA
ugugcagcuuguaguagagg

SEQ ID NO: 7759 - RNA, 20 nt, Artificial Sequence
  GATA2 Guide RNA
uuguaguagaggucacaggc

SEQ ID NO: 7760 - RNA, 21 nt, Artificial Sequence
  GATA2 Guide RNA
aacgccugugaccucuacuac

SEQ ID NO: 7761 - RNA, 21 nt, Artificial Sequence
  GATA2 Guide RNA
acgccugugaccucuacuaca

SEQ ID NO: 7762 - RNA, 21 nt, Artificial Sequence
  GATA2 Guide RNA
agaggucacaggcguugcaga

SEQ ID NO: 7763 - RNA, 21 nt, Artificial Sequence
  GATA2 Guide RNA
agcuuguaguagaggucacag

SEQ ID NO: 7764 - RNA, 21 nt, Artificial Sequence
  GATA2 Guide RNA
aggucacaggcguugcagaca

SEQ ID NO: 7765 - RNA, 21 nt, Artificial Sequence
  GATA2 Guide RNA
aguagaggucacaggcguugc

SEQ ID NO: 7766 - RNA, 21 nt, Artificial Sequence
  GATA2 Guide RNA
caacgccugugaccucuacua

SEQ ID NO: 7767 - RNA, 21 nt, Artificial Sequence
  GATA2 Guide RNA
cagcuuguaguagaggucaca

SEQ ID NO: 7768 - RNA, 21 nt, Artificial Sequence
  GATA2 Guide RNA
cccugucugcaacgccuguga

SEQ ID NO: 7769 - RNA, 21 nt, Artificial Sequence
  GATA2 Guide RNA
ccugucugcaacgccugugac

SEQ ID NO: 7770 - RNA, 21 nt, Artificial Sequence
  GATA2 Guide RNA
ccugugaccucuacuacaagc

SEQ ID NO: 7771 - RNA, 21 nt, Artificial Sequence
  GATA2 Guide RNA
cgccugugaccucuacuacaa

SEQ ID NO: 7772 - RNA, 21 nt, Artificial Sequence
  GATA2 Guide RNA
cugcaacgccugugaccucua

SEQ ID NO: 7773 - RNA, 21 nt, Artificial Sequence
  GATA2 Guide RNA
cugucugcaacgccugugacc

SEQ ID NO: 7774 - RNA, 21 nt, Artificial Sequence
  GATA2 Guide RNA
cugugaccucuacuacaagcu

SEQ ID NO: 7775 - RNA, 21 nt, Artificial Sequence
  GATA2 Guide RNA
cuuguaguagaggucacaggc

SEQ ID NO: 7776 - RNA, 21 nt, Artificial Sequence
  GATA2 Guide RNA
gaccucuacuacaagcugcac

SEQ ID NO: 7777 - RNA, 21 nt, Artificial Sequence
  GATA2 Guide RNA
gaggucacaggcguugcagac

SEQ ID NO: 7778 - RNA, 21 nt, Artificial Sequence
  GATA2 Guide RNA
gcaacgccugugaccucuacu

SEQ ID NO: 7779 - RNA, 21 nt, Artificial Sequence
  GATA2 Guide RNA
gcagcuuguaguagaggucac

SEQ ID NO: 7780 - RNA, 21 nt, Artificial Sequence
  GATA2 Guide RNA
gccugugaccucuacuacaag

SEQ ID NO: 7781 - RNA, 21 nt, Artificial Sequence
  GATA2 Guide RNA
gcuuguaguagaggucacagg

SEQ ID NO: 7782 - RNA, 21 nt, Artificial Sequence
  GATA2 Guide RNA
gggacccugucugcaacgccu

SEQ ID NO: 7783 - RNA, 21 nt, Artificial Sequence
  GATA2 Guide RNA
ggucacaggcguugcagacag

SEQ ID NO: 7784 - RNA, 21 nt, Artificial Sequence
  GATA2 Guide RNA
guagaggucacaggcguugca

SEQ ID NO: 7785 - RNA, 21 nt, Artificial Sequence
  GATA2 Guide RNA
guaguagaggucacaggcguu

SEQ ID NO: 7786 - RNA, 21 nt, Artificial Sequence
  GATA2 Guide RNA
gucacaggcguugcagacagg

SEQ ID NO: 7787 - RNA, 21 nt, Artificial Sequence
  GATA2 Guide RNA
gucugcaacgccugugaccuc

SEQ ID NO: 7788 - RNA, 21 nt, Artificial Sequence
  GATA2 Guide RNA
gugaccucuacuacaagcugc

SEQ ID NO: 7789 - RNA, 21 nt, Artificial Sequence
  GATA2 Guide RNA
gugcagcuuguaguagagguc

SEQ ID NO: 7790 - RNA, 21 nt, Artificial Sequence
  GATA2 Guide RNA
uagaggucacaggcguugcag

SEQ ID NO: 7791 - RNA, 21 nt, Artificial Sequence
  GATA2 Guide RNA
uaguagaggucacaggcguug

SEQ ID NO: 7792 - RNA, 21 nt, Artificial Sequence
  GATA2 Guide RNA
ucacaggcguugcagacaggg

SEQ ID NO: 7793 - RNA, 21 nt, Artificial Sequence
  GATA2 Guide RNA
ucugcaacgccugugaccucu

SEQ ID NO: 7794 - RNA, 21 nt, Artificial Sequence
  GATA2 Guide RNA
ugaccucuacuacaagcugca

SEQ ID NO: 7795 - RNA, 21 nt, Artificial Sequence
  GATA2 Guide RNA
ugcaacgccugugaccucuac

SEQ ID NO: 7796 - RNA, 21 nt, Artificial Sequence
  GATA2 Guide RNA
ugcagcuuguaguagagguca

SEQ ID NO: 7797 - RNA, 21 nt, Artificial Sequence
  GATA2 Guide RNA
uguaguagaggucacaggcgu

SEQ ID NO: 7798 - RNA, 21 nt, Artificial Sequence
  GATA2 Guide RNA
ugucugcaacgccugugaccu

SEQ ID NO: 7799 - RNA, 21 nt, Artificial Sequence
  GATA2 Guide RNA
ugugaccucuacuacaagcug

SEQ ID NO: 7800 - RNA, 21 nt, Artificial Sequence
  GATA2 Guide RNA
ugugcagcuuguaguagaggu

SEQ ID NO: 7801 - RNA, 21 nt, Artificial Sequence
  GATA2 Guide RNA
uuguaguagaggucacaggcg

SEQ ID NO: 7802 - RNA, 21 nt, Artificial Sequence
  GATA2 Guide RNA
uugugcagcuuguaguagagg

SEQ ID NO: 7803 - RNA, 22 nt, Artificial Sequence
  GATA2 Guide RNA
aacgccugugaccucuacuaca

SEQ ID NO: 7804 - RNA, 22 nt, Artificial Sequence
  GATA2 Guide RNA
acccugucugcaacgccuguga

SEQ ID NO: 7805 - RNA, 22 nt, Artificial Sequence
  GATA2 Guide RNA
acgccugugaccucuacuacaa

SEQ ID NO: 7806 - RNA, 22 nt, Artificial Sequence
  GATA2 Guide RNA
agaggucacaggcguugcagac

SEQ ID NO: 7807 - RNA, 22 nt, Artificial Sequence
  GATA2 Guide RNA
agcuuguaguagaggucacagg

SEQ ID NO: 7808 - RNA, 22 nt, Artificial Sequence
  GATA2 Guide RNA
aggucacaggcguugcagacag

SEQ ID NO: 7809 - RNA, 22 nt, Artificial Sequence
  GATA2 Guide RNA
aguagaggucacaggcguugca

SEQ ID NO: 7810 - RNA, 22 nt, Artificial Sequence
  GATA2 Guide RNA
auugugcagcuuguaguagagg

SEQ ID NO: 7811 - RNA, 22 nt, Artificial Sequence
  GATA2 Guide RNA
caacgccugugaccucuacuac

SEQ ID NO: 7812 - RNA, 22 nt, Artificial Sequence
  GATA2 Guide RNA
cagcuuguaguagaggucacag

SEQ ID NO: 7813 - RNA, 22 nt, Artificial Sequence
  GATA2 Guide RNA
cccugucugcaacgccugugac

SEQ ID NO: 7814 - RNA, 22 nt, Artificial Sequence
  GATA2 Guide RNA
ccugucugcaacgccugugacc

SEQ ID NO: 7815 - RNA, 22 nt, Artificial Sequence
  GATA2 Guide RNA
ccugugaccucuacuacaagcu

SEQ ID NO: 7816 - RNA, 22 nt, Artificial Sequence
  GATA2 Guide RNA
cgccugugaccucuacuacaag

SEQ ID NO: 7817 - RNA, 22 nt, Artificial Sequence
  GATA2 Guide RNA
cugcaacgccugugaccucuac

SEQ ID NO: 7818 - RNA, 22 nt, Artificial Sequence
  GATA2 Guide RNA
cugucugcaacgccugugaccu

SEQ ID NO: 7819 - RNA, 22 nt, Artificial Sequence
  GATA2 Guide RNA
cugugaccucuacuacaagcug

SEQ ID NO: 7820 - RNA, 22 nt, Artificial Sequence
  GATA2 Guide RNA
cuuguaguagaggucacaggcg

SEQ ID NO: 7821 - RNA, 22 nt, Artificial Sequence
  GATA2 Guide RNA
gaccucuacuacaagcugcaca

SEQ ID NO: 7822 - RNA, 22 nt, Artificial Sequence
  GATA2 Guide RNA
gaggucacaggcguugcagaca

SEQ ID NO: 7823 - RNA, 22 nt, Artificial Sequence
  GATA2 Guide RNA
gcaacgccugugaccucuacua

SEQ ID NO: 7824 - RNA, 22 nt, Artificial Sequence
  GATA2 Guide RNA
gcagcuuguaguagaggucaca

SEQ ID NO: 7825 - RNA, 22 nt, Artificial Sequence
  GATA2 Guide RNA
gccugugaccucuacuacaagc

SEQ ID NO: 7826 - RNA, 22 nt, Artificial Sequence
  GATA2 Guide RNA
gcuuguaguagaggucacaggc

SEQ ID NO: 7827 - RNA, 22 nt, Artificial Sequence
  GATA2 Guide RNA
ggggacccugucugcaacgccu

SEQ ID NO: 7828 - RNA, 22 nt, Artificial Sequence
  GATA2 Guide RNA
ggucacaggcguugcagacagg

SEQ ID NO: 7829 - RNA, 22 nt, Artificial Sequence
  GATA2 Guide RNA
guagaggucacaggcguugcag

SEQ ID NO: 7830 - RNA, 22 nt, Artificial Sequence
  GATA2 Guide RNA
guaguagaggucacaggcguug

SEQ ID NO: 7831 - RNA, 22 nt, Artificial Sequence
  GATA2 Guide RNA
gucacaggcguugcagacaggg

SEQ ID NO: 7832 - RNA, 22 nt, Artificial Sequence
  GATA2 Guide RNA
gucugcaacgccugugaccucu

SEQ ID NO: 7833 - RNA, 22 nt, Artificial Sequence
  GATA2 Guide RNA
gugaccucuacuacaagcugca

SEQ ID NO: 7834 - RNA, 22 nt, Artificial Sequence
  GATA2 Guide RNA
gugcagcuuguaguagagguca

SEQ ID NO: 7835 - RNA, 22 nt, Artificial Sequence
  GATA2 Guide RNA
uagaggucacaggcguugcaga

SEQ ID NO: 7836 - RNA, 22 nt, Artificial Sequence
  GATA2 Guide RNA
uaguagaggucacaggcguugc

SEQ ID NO: 7837 - RNA, 22 nt, Artificial Sequence
  GATA2 Guide RNA
ucacaggcguugcagacagggu

SEQ ID NO: 7838 - RNA, 22 nt, Artificial Sequence
  GATA2 Guide RNA
ucugcaacgccugugaccucua

SEQ ID NO: 7839 - RNA, 22 nt, Artificial Sequence
  GATA2 Guide RNA
ugaccucuacuacaagcugcac

SEQ ID NO: 7840 - RNA, 22 nt, Artificial Sequence
  GATA2 Guide RNA
ugcaacgccugugaccucuacu

SEQ ID NO: 7841 - RNA, 22 nt, Artificial Sequence
  GATA2 Guide RNA
ugcagcuuguaguagaggucac

SEQ ID NO: 7842 - RNA, 22 nt, Artificial Sequence
  GATA2 Guide RNA
uguaguagaggucacaggcguu

SEQ ID NO: 7843 - RNA, 22 nt, Artificial Sequence
  GATA2 Guide RNA
ugucugcaacgccugugaccuc

SEQ ID NO: 7844 - RNA, 22 nt, Artificial Sequence
  GATA2 Guide RNA
ugugaccucuacuacaagcugc

SEQ ID NO: 7845 - RNA, 22 nt, Artificial Sequence
  GATA2 Guide RNA
ugugcagcuuguaguagagguc

SEQ ID NO: 7846 - RNA, 22 nt, Artificial Sequence
  GATA2 Guide RNA
uuguaguagaggucacaggcgu

SEQ ID NO: 7847 - RNA, 22 nt, Artificial Sequence
  GATA2 Guide RNA
uugugcagcuuguaguagaggu

SEQ ID NO: 7848 - RNA, 20 nt, Artificial Sequence
  GATA2 Guide RNA
aacgcccguggccucuacua

SEQ ID NO: 7849 - RNA, 20 nt, Artificial Sequence
  GATA2 Guide RNA
acccugucugcaacgcccgu

SEQ ID NO: 7850 - RNA, 20 nt, Artificial Sequence
  GATA2 Guide RNA
acgcccguggccucuacuac

SEQ ID NO: 7851 - RNA, 20 nt, Artificial Sequence
  GATA2 Guide RNA
acgggcguugcagacagggu

SEQ ID NO: 7852 - RNA, 20 nt, Artificial Sequence
  GATA2 Guide RNA
acggggacccugucugcaac

SEQ ID NO: 7853 - RNA, 20 nt, Artificial Sequence
  GATA2 Guide RNA
agaggccacgggcguugcag

SEQ ID NO: 7854 - RNA, 20 nt, Artificial Sequence
  GATA2 Guide RNA
agcuuguaguagaggccacg

SEQ ID NO: 7855 - RNA, 20 nt, Artificial Sequence
  GATA2 Guide RNA
aggccacgggcguugcagac

SEQ ID NO: 7856 - RNA, 20 nt, Artificial Sequence
  GATA2 Guide RNA
aguagaggccacgggcguug

SEQ ID NO: 7857 - RNA, 20 nt, Artificial Sequence
  GATA2 Guide RNA
caacgcccguggccucuacu

SEQ ID NO: 7858 - RNA, 20 nt, Artificial Sequence
  GATA2 Guide RNA
cacgggcguugcagacaggg

SEQ ID NO: 7859 - RNA, 20 nt, Artificial Sequence
  GATA2 Guide RNA
cagcuuguaguagaggccac

SEQ ID NO: 7860 - RNA, 20 nt, Artificial Sequence
  GATA2 Guide RNA
ccacgggcguugcagacagg

SEQ ID NO: 7861 - RNA, 20 nt, Artificial Sequence
  GATA2 Guide RNA
cccguggccucuacuacaag

SEQ ID NO: 7862 - RNA, 20 nt, Artificial Sequence
  GATA2 Guide RNA
cccugucugcaacgcccgug

SEQ ID NO: 7863 - RNA, 20 nt, Artificial Sequence
  GATA2 Guide RNA
ccguggccucuacuacaagc

SEQ ID NO: 7864 - RNA, 20 nt, Artificial Sequence
  GATA2 Guide RNA
ccugucugcaacgcccgugg

SEQ ID NO: 7865 - RNA, 20 nt, Artificial Sequence
  GATA2 Guide RNA
cgcccguggccucuacuaca

SEQ ID NO: 7866 - RNA, 20 nt, Artificial Sequence
  GATA2 Guide RNA
cgggcguugcagacaggguc

SEQ ID NO: 7867 - RNA, 20 nt, Artificial Sequence
  GATA2 Guide RNA
cggggacccugucugcaacg

SEQ ID NO: 7868 - RNA, 20 nt, Artificial Sequence
  GATA2 Guide RNA
cugcaacgcccguggccucu

SEQ ID NO: 7869 - RNA, 20 nt, Artificial Sequence
  GATA2 Guide RNA
cugucugcaacgcccguggc

SEQ ID NO: 7870 - RNA, 20 nt, Artificial Sequence
  GATA2 Guide RNA
cuuguaguagaggccacggg

SEQ ID NO: 7871 - RNA, 20 nt, Artificial Sequence
  GATA2 Guide RNA
gacccugucugcaacgcccg

SEQ ID NO: 7872 - RNA, 20 nt, Artificial Sequence
  GATA2 Guide RNA
gaggccacgggcguugcaga

SEQ ID NO: 7873 - RNA, 20 nt, Artificial Sequence
  GATA2 Guide RNA
gcaacgcccguggccucuac

SEQ ID NO: 7874 - RNA, 20 nt, Artificial Sequence
  GATA2 Guide RNA
gcagcuuguaguagaggcca

SEQ ID NO: 7875 - RNA, 20 nt, Artificial Sequence
  GATA2 Guide RNA
gccacgggcguugcagacag

SEQ ID NO: 7876 - RNA, 20 nt, Artificial Sequence
  GATA2 Guide RNA
gcccguggccucuacuacaa

SEQ ID NO: 7877 - RNA, 20 nt, Artificial Sequence
  GATA2 Guide RNA
gcuuguaguagaggccacgg

SEQ ID NO: 7878 - RNA, 20 nt, Artificial Sequence
  GATA2 Guide RNA
ggacccugucugcaacgccc

SEQ ID NO: 7879 - RNA, 20 nt, Artificial Sequence
  GATA2 Guide RNA
ggccacgggcguugcagaca

SEQ ID NO: 7880 - RNA, 20 nt, Artificial Sequence
  GATA2 Guide RNA
gggacccugucugcaacgcc

SEQ ID NO: 7881 - RNA, 20 nt, Artificial Sequence
  GATA2 Guide RNA
gggcguugcagacagggucc

SEQ ID NO: 7882 - RNA, 20 nt, Artificial Sequence
  GATA2 Guide RNA
ggggacccugucugcaacgc

SEQ ID NO: 7883 - RNA, 20 nt, Artificial Sequence
  GATA2 Guide RNA
guagaggccacgggcguugc

SEQ ID NO: 7884 - RNA, 20 nt, Artificial Sequence
  GATA2 Guide RNA
guaguagaggccacgggcgu

SEQ ID NO: 7885 - RNA, 20 nt, Artificial Sequence
  GATA2 Guide RNA
gucugcaacgcccguggccu

SEQ ID NO: 7886 - RNA, 20 nt, Artificial Sequence
  GATA2 Guide RNA
uagaggccacgggcguugca

SEQ ID NO: 7887 - RNA, 20 nt, Artificial Sequence
  GATA2 Guide RNA
uaguagaggccacgggcguu

SEQ ID NO: 7888 - RNA, 20 nt, Artificial Sequence
  GATA2 Guide RNA
ucugcaacgcccguggccuc

SEQ ID NO: 7889 - RNA, 20 nt, Artificial Sequence
  GATA2 Guide RNA
ugcaacgcccguggccucua

SEQ ID NO: 7890 - RNA, 20 nt, Artificial Sequence
  GATA2 Guide RNA
ugcagcuuguaguagaggcc

SEQ ID NO: 7891 - RNA, 20 nt, Artificial Sequence
  GATA2 Guide RNA
uguaguagaggccacgggcg

SEQ ID NO: 7892 - RNA, 20 nt, Artificial Sequence
  GATA2 Guide RNA
ugucugcaacgcccguggcc

SEQ ID NO: 7893 - RNA, 20 nt, Artificial Sequence
  GATA2 Guide RNA
uuguaguagaggccacgggc

SEQ ID NO: 7894 - RNA, 21 nt, Artificial Sequence
  GATA2 Guide RNA
aacgcccguggccucuacuac

SEQ ID NO: 7895 - RNA, 21 nt, Artificial Sequence
  GATA2 Guide RNA
aacggggacccugucugcaac

SEQ ID NO: 7896 - RNA, 21 nt, Artificial Sequence
  GATA2 Guide RNA
acccugucugcaacgcccgug

SEQ ID NO: 7897 - RNA, 21 nt, Artificial Sequence
  GATA2 Guide RNA
acgcccguggccucuacuaca

SEQ ID NO: 7898 - RNA, 21 nt, Artificial Sequence
  GATA2 Guide RNA
acgggcguugcagacaggguc

SEQ ID NO: 7899 - RNA, 21 nt, Artificial Sequence
  GATA2 Guide RNA
acggggacccugucugcaacg

SEQ ID NO: 7900 - RNA, 21 nt, Artificial Sequence
  GATA2 Guide RNA
agaggccacgggcguugcaga

SEQ ID NO: 7901 - RNA, 21 nt, Artificial Sequence
  GATA2 Guide RNA
agcuuguaguagaggccacgg

SEQ ID NO: 7902 - RNA, 21 nt, Artificial Sequence
  GATA2 Guide RNA
aggccacgggcguugcagaca

SEQ ID NO: 7903 - RNA, 21 nt, Artificial Sequence
  GATA2 Guide RNA
aguagaggccacgggcguugc

SEQ ID NO: 7904 - RNA, 21 nt, Artificial Sequence
  GATA2 Guide RNA
caacgcccguggccucuacua

SEQ ID NO: 7905 - RNA, 21 nt, Artificial Sequence
  GATA2 Guide RNA
cacgggcguugcagacagggu

SEQ ID NO: 7906 - RNA, 21 nt, Artificial Sequence
  GATA2 Guide RNA
cagcuuguaguagaggccacg

SEQ ID NO: 7907 - RNA, 21 nt, Artificial Sequence
  GATA2 Guide RNA
ccacgggcguugcagacaggg

SEQ ID NO: 7908 - RNA, 21 nt, Artificial Sequence
  GATA2 Guide RNA
cccguggccucuacuacaagc

SEQ ID NO: 7909 - RNA, 21 nt, Artificial Sequence
  GATA2 Guide RNA
cccugucugcaacgcccgugg

SEQ ID NO: 7910 - RNA, 21 nt, Artificial Sequence
  GATA2 Guide RNA
ccguggccucuacuacaagcu

SEQ ID NO: 7911 - RNA, 21 nt, Artificial Sequence
  GATA2 Guide RNA
ccugucugcaacgcccguggc

SEQ ID NO: 7912 - RNA, 21 nt, Artificial Sequence
  GATA2 Guide RNA
cgcccguggccucuacuacaa

SEQ ID NO: 7913 - RNA, 21 nt, Artificial Sequence
  GATA2 Guide RNA
cgggcguugcagacagggucc

SEQ ID NO: 7914 - RNA, 21 nt, Artificial Sequence
  GATA2 Guide RNA
cggggacccugucugcaacgc

SEQ ID NO: 7915 - RNA, 21 nt, Artificial Sequence
  GATA2 Guide RNA
cugcaacgcccguggccucua

SEQ ID NO: 7916 - RNA, 21 nt, Artificial Sequence
  GATA2 Guide RNA
cugucugcaacgcccguggcc

SEQ ID NO: 7917 - RNA, 21 nt, Artificial Sequence
  GATA2 Guide RNA
cuuguaguagaggccacgggc

SEQ ID NO: 7918 - RNA, 21 nt, Artificial Sequence
  GATA2 Guide RNA
gacccugucugcaacgcccgu

SEQ ID NO: 7919 - RNA, 21 nt, Artificial Sequence
  GATA2 Guide RNA
gaggccacgggcguugcagac

SEQ ID NO: 7920 - RNA, 21 nt, Artificial Sequence
  GATA2 Guide RNA
gcaacgcccguggccucuacu

SEQ ID NO: 7921 - RNA, 21 nt, Artificial Sequence
  GATA2 Guide RNA
gcagcuuguaguagaggccac

SEQ ID NO: 7922 - RNA, 21 nt, Artificial Sequence
  GATA2 Guide RNA
gccacgggcguugcagacagg

SEQ ID NO: 7923 - RNA, 21 nt, Artificial Sequence
  GATA2 Guide RNA
gcccguggccucuacuacaag

SEQ ID NO: 7924 - RNA, 21 nt, Artificial Sequence
  GATA2 Guide RNA
gcuuguaguagaggccacggg

SEQ ID NO: 7925 - RNA, 21 nt, Artificial Sequence
  GATA2 Guide RNA
ggacccugucugcaacgcccg

SEQ ID NO: 7926 - RNA, 21 nt, Artificial Sequence
  GATA2 Guide RNA
ggccacgggcguugcagacag

SEQ ID NO: 7927 - RNA, 21 nt, Artificial Sequence
  GATA2 Guide RNA
gggacccugucugcaacgccc

SEQ ID NO: 7928 - RNA, 21 nt, Artificial Sequence
  GATA2 Guide RNA
gggcguugcagacaggguccc

SEQ ID NO: 7929 - RNA, 21 nt, Artificial Sequence
  GATA2 Guide RNA
ggggacccugucugcaacgcc

SEQ ID NO: 7930 - RNA, 21 nt, Artificial Sequence
  GATA2 Guide RNA
guagaggccacgggcguugca

SEQ ID NO: 7931 - RNA, 21 nt, Artificial Sequence
  GATA2 Guide RNA
guaguagaggccacgggcguu

SEQ ID NO: 7932 - RNA, 21 nt, Artificial Sequence
  GATA2 Guide RNA
gucugcaacgcccguggccuc

SEQ ID NO: 7933 - RNA, 21 nt, Artificial Sequence
  GATA2 Guide RNA
gugcagcuuguaguagaggcc

SEQ ID NO: 7934 - RNA, 21 nt, Artificial Sequence
  GATA2 Guide RNA
uagaggccacgggcguugcag

SEQ ID NO: 7935 - RNA, 21 nt, Artificial Sequence
  GATA2 Guide RNA
uaguagaggccacgggcguug

SEQ ID NO: 7936 - RNA, 21 nt, Artificial Sequence
  GATA2 Guide RNA
ucugcaacgcccguggccucu

SEQ ID NO: 7937 - RNA, 21 nt, Artificial Sequence
  GATA2 Guide RNA
ugcaacgcccguggccucuac

SEQ ID NO: 7938 - RNA, 21 nt, Artificial Sequence
  GATA2 Guide RNA
ugcagcuuguaguagaggcca

SEQ ID NO: 7939 - RNA, 21 nt, Artificial Sequence
  GATA2 Guide RNA
uguaguagaggccacgggcgu

SEQ ID NO: 7940 - RNA, 21 nt, Artificial Sequence
  GATA2 Guide RNA
ugucugcaacgcccguggccu

SEQ ID NO: 7941 - RNA, 21 nt, Artificial Sequence
  GATA2 Guide RNA
uuguaguagaggccacgggcg

SEQ ID NO: 7942 - RNA, 22 nt, Artificial Sequence
  GATA2 Guide RNA
aacgcccguggccucuacuaca

SEQ ID NO: 7943 - RNA, 22 nt, Artificial Sequence
  GATA2 Guide RNA
aacggggacccugucugcaacg

SEQ ID NO: 7944 - RNA, 22 nt, Artificial Sequence
  GATA2 Guide RNA
acccugucugcaacgcccgugg

SEQ ID NO: 7945 - RNA, 22 nt, Artificial Sequence
  GATA2 Guide RNA
acgcccguggccucuacuacaa

SEQ ID NO: 7946 - RNA, 22 nt, Artificial Sequence
  GATA2 Guide RNA
acgggcguugcagacagggucc

SEQ ID NO: 7947 - RNA, 22 nt, Artificial Sequence
  GATA2 Guide RNA
acggggacccugucugcaacgc

SEQ ID NO: 7948 - RNA, 22 nt, Artificial Sequence
  GATA2 Guide RNA
agaggccacgggcguugcagac

SEQ ID NO: 7949 - RNA, 22 nt, Artificial Sequence
  GATA2 Guide RNA
agcuuguaguagaggccacggg

SEQ ID NO: 7950 - RNA, 22 nt, Artificial Sequence
  GATA2 Guide RNA
aggccacgggcguugcagacag

SEQ ID NO: 7951 - RNA, 22 nt, Artificial Sequence
  GATA2 Guide RNA
aguagaggccacgggcguugca

SEQ ID NO: 7952 - RNA, 22 nt, Artificial Sequence
  GATA2 Guide RNA
caacgcccguggccucuacuac

SEQ ID NO: 7953 - RNA, 22 nt, Artificial Sequence
  GATA2 Guide RNA
caacggggacccugucugcaac

SEQ ID NO: 7954 - RNA, 22 nt, Artificial Sequence
  GATA2 Guide RNA
cacgggcguugcagacaggguc

SEQ ID NO: 7955 - RNA, 22 nt, Artificial Sequence
  GATA2 Guide RNA
cagcuuguaguagaggccacgg

SEQ ID NO: 7956 - RNA, 22 nt, Artificial Sequence
  GATA2 Guide RNA
ccacgggcguugcagacagggu

SEQ ID NO: 7957 - RNA, 22 nt, Artificial Sequence
  GATA2 Guide RNA
cccguggccucuacuacaagcu

SEQ ID NO: 7958 - RNA, 22 nt, Artificial Sequence
  GATA2 Guide RNA
cccugucugcaacgcccguggc

SEQ ID NO: 7959 - RNA, 22 nt, Artificial Sequence
  GATA2 Guide RNA
ccguggccucuacuacaagcug

SEQ ID NO: 7960 - RNA, 22 nt, Artificial Sequence
  GATA2 Guide RNA
ccugucugcaacgcccguggcc

SEQ ID NO: 7961 - RNA, 22 nt, Artificial Sequence
  GATA2 Guide RNA
cgcccguggccucuacuacaag

SEQ ID NO: 7962 - RNA, 22 nt, Artificial Sequence
  GATA2 Guide RNA
cgggcguugcagacaggguccc

SEQ ID NO: 7963 - RNA, 22 nt, Artificial Sequence
  GATA2 Guide RNA
cggggacccugucugcaacgcc

SEQ ID NO: 7964 - RNA, 22 nt, Artificial Sequence
  GATA2 Guide RNA
cugcaacgcccguggccucuac

SEQ ID NO: 7965 - RNA, 22 nt, Artificial Sequence
  GATA2 Guide RNA
cugucugcaacgcccguggccu

SEQ ID NO: 7966 - RNA, 22 nt, Artificial Sequence
  GATA2 Guide RNA
cuuguaguagaggccacgggcg

SEQ ID NO: 7967 - RNA, 22 nt, Artificial Sequence
  GATA2 Guide RNA
gacccugucugcaacgcccgug

SEQ ID NO: 7968 - RNA, 22 nt, Artificial Sequence
  GATA2 Guide RNA
gaggccacgggcguugcagaca

SEQ ID NO: 7969 - RNA, 22 nt, Artificial Sequence
  GATA2 Guide RNA
gcaacgcccguggccucuacua

SEQ ID NO: 7970 - RNA, 22 nt, Artificial Sequence
  GATA2 Guide RNA
gcagcuuguaguagaggccacg

SEQ ID NO: 7971 - RNA, 22 nt, Artificial Sequence
  GATA2 Guide RNA
gccacgggcguugcagacaggg

SEQ ID NO: 7972 - RNA, 22 nt, Artificial Sequence
  GATA2 Guide RNA
gcccguggccucuacuacaagc

SEQ ID NO: 7973 - RNA, 22 nt, Artificial Sequence
  GATA2 Guide RNA
gcuuguaguagaggccacgggc

SEQ ID NO: 7974 - RNA, 22 nt, Artificial Sequence
  GATA2 Guide RNA
ggacccugucugcaacgcccgu

SEQ ID NO: 7975 - RNA, 22 nt, Artificial Sequence
  GATA2 Guide RNA
ggccacgggcguugcagacagg

SEQ ID NO: 7976 - RNA, 22 nt, Artificial Sequence
  GATA2 Guide RNA
gggacccugucugcaacgcccg

SEQ ID NO: 7977 - RNA, 22 nt, Artificial Sequence
  GATA2 Guide RNA
gggcguugcagacagggucccc

SEQ ID NO: 7978 - RNA, 22 nt, Artificial Sequence
  GATA2 Guide RNA
ggggacccugucugcaacgccc

SEQ ID NO: 7979 - RNA, 22 nt, Artificial Sequence
  GATA2 Guide RNA
guagaggccacgggcguugcag

SEQ ID NO: 7980 - RNA, 22 nt, Artificial Sequence
  GATA2 Guide RNA
guaguagaggccacgggcguug

SEQ ID NO: 7981 - RNA, 22 nt, Artificial Sequence
  GATA2 Guide RNA
gucugcaacgcccguggccucu

SEQ ID NO: 7982 - RNA, 22 nt, Artificial Sequence
  GATA2 Guide RNA
gugcagcuuguaguagaggcca

SEQ ID NO: 7983 - RNA, 22 nt, Artificial Sequence
  GATA2 Guide RNA
uagaggccacgggcguugcaga

SEQ ID NO: 7984 - RNA, 22 nt, Artificial Sequence
  GATA2 Guide RNA
uaguagaggccacgggcguugc

SEQ ID NO: 7985 - RNA, 22 nt, Artificial Sequence
  GATA2 Guide RNA
ucugcaacgcccguggccucua

SEQ ID NO: 7986 - RNA, 22 nt, Artificial Sequence
  GATA2 Guide RNA
ugcaacgcccguggccucuacu

SEQ ID NO: 7987 - RNA, 22 nt, Artificial Sequence
  GATA2 Guide RNA
ugcagcuuguaguagaggccac

SEQ ID NO: 7988 - RNA, 22 nt, Artificial Sequence
  GATA2 Guide RNA
uguaguagaggccacgggcguu

SEQ ID NO: 7989 - RNA, 22 nt, Artificial Sequence
  GATA2 Guide RNA
ugucugcaacgcccguggccuc

SEQ ID NO: 7990 - RNA, 22 nt, Artificial Sequence
  GATA2 Guide RNA
ugugcagcuuguaguagaggcc

SEQ ID NO: 7991 - RNA, 22 nt, Artificial Sequence
  GATA2 Guide RNA
uuguaguagaggccacgggcgu

SEQ ID NO: 7992 - RNA, 20 nt, Artificial Sequence
  GATA2 Guide RNA
aaagccuguggccucuacua

SEQ ID NO: 7993 - RNA, 20 nt, Artificial Sequence
  GATA2 Guide RNA
aacggggacccugucugcaa

SEQ ID NO: 7994 - RNA, 20 nt, Artificial Sequence
  GATA2 Guide RNA
aagccuguggccucuacuac

SEQ ID NO: 7995 - RNA, 20 nt, Artificial Sequence
  GATA2 Guide RNA
acaggcuuugcagacagggu

SEQ ID NO: 7996 - RNA, 20 nt, Artificial Sequence
  GATA2 Guide RNA
acccugucugcaaagccugu

SEQ ID NO: 7997 - RNA, 20 nt, Artificial Sequence
  GATA2 Guide RNA
acggggacccugucugcaaa

SEQ ID NO: 7998 - RNA, 20 nt, Artificial Sequence
  GATA2 Guide RNA
agaggccacaggcuuugcag

SEQ ID NO: 7999 - RNA, 20 nt, Artificial Sequence
  GATA2 Guide RNA
aggccacaggcuuugcagac

SEQ ID NO: 8000 - RNA, 20 nt, Artificial Sequence
  GATA2 Guide RNA
aggcuuugcagacagggucc

SEQ ID NO: 8001 - RNA, 20 nt, Artificial Sequence
  GATA2 Guide RNA
aguagaggccacaggcuuug

SEQ ID NO: 8002 - RNA, 20 nt, Artificial Sequence
  GATA2 Guide RNA
caaagccuguggccucuacu

SEQ ID NO: 8003 - RNA, 20 nt, Artificial Sequence
  GATA2 Guide RNA
caacggggacccugucugca

SEQ ID NO: 8004 - RNA, 20 nt, Artificial Sequence
  GATA2 Guide RNA
cacaggcuuugcagacaggg

SEQ ID NO: 8005 - RNA, 20 nt, Artificial Sequence
  GATA2 Guide RNA
caggcuuugcagacaggguc

SEQ ID NO: 8006 - RNA, 20 nt, Artificial Sequence
  GATA2 Guide RNA
ccaacggggacccugucugc

SEQ ID NO: 8007 - RNA, 20 nt, Artificial Sequence
  GATA2 Guide RNA
ccacaggcuuugcagacagg

SEQ ID NO: 8008 - RNA, 20 nt, Artificial Sequence
  GATA2 Guide RNA
cccugucugcaaagccugug

SEQ ID NO: 8009 - RNA, 20 nt, Artificial Sequence
  GATA2 Guide RNA
ccugucugcaaagccugugg

SEQ ID NO: 8010 - RNA, 20 nt, Artificial Sequence
  GATA2 Guide RNA
cggggacccugucugcaaag

SEQ ID NO: 8011 - RNA, 20 nt, Artificial Sequence
  GATA2 Guide RNA
cugcaaagccuguggccucu

SEQ ID NO: 8012 - RNA, 20 nt, Artificial Sequence
  GATA2 Guide RNA
cugucugcaaagccuguggc

SEQ ID NO: 8013 - RNA, 20 nt, Artificial Sequence
  GATA2 Guide RNA
cuuguaguagaggccacagg

SEQ ID NO: 8014 - RNA, 20 nt, Artificial Sequence
  GATA2 Guide RNA
cuuugcagacaggguccccg

SEQ ID NO: 8015 - RNA, 20 nt, Artificial Sequence
  GATA2 Guide RNA
gacccugucugcaaagccug

SEQ ID NO: 8016 - RNA, 20 nt, Artificial Sequence
  GATA2 Guide RNA
gaggccacaggcuuugcaga

SEQ ID NO: 8017 - RNA, 20 nt, Artificial Sequence
  GATA2 Guide RNA
gcaaagccuguggccucuac

SEQ ID NO: 8018 - RNA, 20 nt, Artificial Sequence
  GATA2 Guide RNA
gccaacggggacccugucug

SEQ ID NO: 8019 - RNA, 20 nt, Artificial Sequence
  GATA2 Guide RNA
gccacaggcuuugcagacag

SEQ ID NO: 8020 - RNA, 20 nt, Artificial Sequence
  GATA2 Guide RNA
gcuuguaguagaggccacag

SEQ ID NO: 8021 - RNA, 20 nt, Artificial Sequence
  GATA2 Guide RNA
gcuuugcagacagggucccc

SEQ ID NO: 8022 - RNA, 20 nt, Artificial Sequence
  GATA2 Guide RNA
ggacccugucugcaaagccu

SEQ ID NO: 8023 - RNA, 20 nt, Artificial Sequence
  GATA2 Guide RNA
ggccacaggcuuugcagaca

SEQ ID NO: 8024 - RNA, 20 nt, Artificial Sequence
  GATA2 Guide RNA
ggcuuugcagacaggguccc

SEQ ID NO: 8025 - RNA, 20 nt, Artificial Sequence
  GATA2 Guide RNA
gggacccugucugcaaagcc

SEQ ID NO: 8026 - RNA, 20 nt, Artificial Sequence
  GATA2 Guide RNA
ggggacccugucugcaaagc

SEQ ID NO: 8027 - RNA, 20 nt, Artificial Sequence
  GATA2 Guide RNA
guagaggccacaggcuuugc

SEQ ID NO: 8028 - RNA, 20 nt, Artificial Sequence
  GATA2 Guide RNA
guaguagaggccacaggcuu

SEQ ID NO: 8029 - RNA, 20 nt, Artificial Sequence
  GATA2 Guide RNA
gucugcaaagccuguggccu

SEQ ID NO: 8030 - RNA, 20 nt, Artificial Sequence
  GATA2 Guide RNA
uagaggccacaggcuuugca

SEQ ID NO: 8031 - RNA, 20 nt, Artificial Sequence
  GATA2 Guide RNA
uaguagaggccacaggcuuu

SEQ ID NO: 8032 - RNA, 20 nt, Artificial Sequence
  GATA2 Guide RNA
ucugcaaagccuguggccuc

SEQ ID NO: 8033 - RNA, 20 nt, Artificial Sequence
  GATA2 Guide RNA
ugcaaagccuguggccucua

SEQ ID NO: 8034 - RNA, 20 nt, Artificial Sequence
  GATA2 Guide RNA
uguaguagaggccacaggcu

SEQ ID NO: 8035 - RNA, 20 nt, Artificial Sequence
  GATA2 Guide RNA
ugucugcaaagccuguggcc

SEQ ID NO: 8036 - RNA, 20 nt, Artificial Sequence
  GATA2 Guide RNA
uuguaguagaggccacaggc

SEQ ID NO: 8037 - RNA, 20 nt, Artificial Sequence
  GATA2 Guide RNA
uuugcagacaggguccccgu

SEQ ID NO: 8038 - RNA, 21 nt, Artificial Sequence
  GATA2 Guide RNA
aaagccuguggccucuacuac

SEQ ID NO: 8039 - RNA, 21 nt, Artificial Sequence
  GATA2 Guide RNA
aacggggacccugucugcaaa

SEQ ID NO: 8040 - RNA, 21 nt, Artificial Sequence
  GATA2 Guide RNA
aagccuguggccucuacuaca

SEQ ID NO: 8041 - RNA, 21 nt, Artificial Sequence
  GATA2 Guide RNA
acaggcuuugcagacaggguc

SEQ ID NO: 8042 - RNA, 21 nt, Artificial Sequence
  GATA2 Guide RNA
acccugucugcaaagccugug

SEQ ID NO: 8043 - RNA, 21 nt, Artificial Sequence
  GATA2 Guide RNA
acggggacccugucugcaaag

SEQ ID NO: 8044 - RNA, 21 nt, Artificial Sequence
  GATA2 Guide RNA
agaggccacaggcuuugcaga

SEQ ID NO: 8045 - RNA, 21 nt, Artificial Sequence
  GATA2 Guide RNA
agcuuguaguagaggccacag

SEQ ID NO: 8046 - RNA, 21 nt, Artificial Sequence
  GATA2 Guide RNA
aggccacaggcuuugcagaca

SEQ ID NO: 8047 - RNA, 21 nt, Artificial Sequence
  GATA2 Guide RNA
aggcuuugcagacaggguccc

SEQ ID NO: 8048 - RNA, 21 nt, Artificial Sequence
  GATA2 Guide RNA
aguagaggccacaggcuuugc

SEQ ID NO: 8049 - RNA, 21 nt, Artificial Sequence
  GATA2 Guide RNA
caaagccuguggccucuacua

SEQ ID NO: 8050 - RNA, 21 nt, Artificial Sequence
  GATA2 Guide RNA
caacggggacccugucugcaa

SEQ ID NO: 8051 - RNA, 21 nt, Artificial Sequence
  GATA2 Guide RNA
cacaggcuuugcagacagggu

SEQ ID NO: 8052 - RNA, 21 nt, Artificial Sequence
  GATA2 Guide RNA
caggcuuugcagacagggucc

SEQ ID NO: 8053 - RNA, 21 nt, Artificial Sequence
  GATA2 Guide RNA
ccaacggggacccugucugca

SEQ ID NO: 8054 - RNA, 21 nt, Artificial Sequence
  GATA2 Guide RNA
ccacaggcuuugcagacaggg

SEQ ID NO: 8055 - RNA, 21 nt, Artificial Sequence
  GATA2 Guide RNA
cccugucugcaaagccugugg

SEQ ID NO: 8056 - RNA, 21 nt, Artificial Sequence
  GATA2 Guide RNA
ccugucugcaaagccuguggc

SEQ ID NO: 8057 - RNA, 21 nt, Artificial Sequence
  GATA2 Guide RNA
cgccaacggggacccugucug

SEQ ID NO: 8058 - RNA, 21 nt, Artificial Sequence
  GATA2 Guide RNA
cggggacccugucugcaaagc

SEQ ID NO: 8059 - RNA, 21 nt, Artificial Sequence
  GATA2 Guide RNA
cugcaaagccuguggccucua

SEQ ID NO: 8060 - RNA, 21 nt, Artificial Sequence
  GATA2 Guide RNA
cugucugcaaagccuguggcc

SEQ ID NO: 8061 - RNA, 21 nt, Artificial Sequence
  GATA2 Guide RNA
cuuguaguagaggccacaggc

SEQ ID NO: 8062 - RNA, 21 nt, Artificial Sequence
  GATA2 Guide RNA
cuuugcagacaggguccccgu

SEQ ID NO: 8063 - RNA, 21 nt, Artificial Sequence
  GATA2 Guide RNA
gacccugucugcaaagccugu

SEQ ID NO: 8064 - RNA, 21 nt, Artificial Sequence
  GATA2 Guide RNA
gaggccacaggcuuugcagac

SEQ ID NO: 8065 - RNA, 21 nt, Artificial Sequence
  GATA2 Guide RNA
gcaaagccuguggccucuacu

SEQ ID NO: 8066 - RNA, 21 nt, Artificial Sequence
  GATA2 Guide RNA
gccaacggggacccugucugc

SEQ ID NO: 8067 - RNA, 21 nt, Artificial Sequence
  GATA2 Guide RNA
gccacaggcuuugcagacagg

SEQ ID NO: 8068 - RNA, 21 nt, Artificial Sequence
  GATA2 Guide RNA
gcuuguaguagaggccacagg

SEQ ID NO: 8069 - RNA, 21 nt, Artificial Sequence
  GATA2 Guide RNA
gcuuugcagacaggguccccg

SEQ ID NO: 8070 - RNA, 21 nt, Artificial Sequence
  GATA2 Guide RNA
ggacccugucugcaaagccug

SEQ ID NO: 8071 - RNA, 21 nt, Artificial Sequence
  GATA2 Guide RNA
ggccacaggcuuugcagacag

SEQ ID NO: 8072 - RNA, 21 nt, Artificial Sequence
  GATA2 Guide RNA
ggcuuugcagacagggucccc

SEQ ID NO: 8073 - RNA, 21 nt, Artificial Sequence
  GATA2 Guide RNA
gggacccugucugcaaagccu

SEQ ID NO: 8074 - RNA, 21 nt, Artificial Sequence
  GATA2 Guide RNA
ggggacccugucugcaaagcc

SEQ ID NO: 8075 - RNA, 21 nt, Artificial Sequence
  GATA2 Guide RNA
guagaggccacaggcuuugca

SEQ ID NO: 8076 - RNA, 21 nt, Artificial Sequence
  GATA2 Guide RNA
guaguagaggccacaggcuuu

SEQ ID NO: 8077 - RNA, 21 nt, Artificial Sequence
  GATA2 Guide RNA
gucugcaaagccuguggccuc

SEQ ID NO: 8078 - RNA, 21 nt, Artificial Sequence
  GATA2 Guide RNA
uagaggccacaggcuuugcag

SEQ ID NO: 8079 - RNA, 21 nt, Artificial Sequence
  GATA2 Guide RNA
uaguagaggccacaggcuuug

SEQ ID NO: 8080 - RNA, 21 nt, Artificial Sequence
  GATA2 Guide RNA
ucugcaaagccuguggccucu

SEQ ID NO: 8081 - RNA, 21 nt, Artificial Sequence
  GATA2 Guide RNA
ugcaaagccuguggccucuac

SEQ ID NO: 8082 - RNA, 21 nt, Artificial Sequence
  GATA2 Guide RNA
uguaguagaggccacaggcuu

SEQ ID NO: 8083 - RNA, 21 nt, Artificial Sequence
  GATA2 Guide RNA
ugucugcaaagccuguggccu

SEQ ID NO: 8084 - RNA, 21 nt, Artificial Sequence
  GATA2 Guide RNA
uuguaguagaggccacaggcu

SEQ ID NO: 8085 - RNA, 21 nt, Artificial Sequence
  GATA2 Guide RNA
uuugcagacaggguccccguu

SEQ ID NO: 8086 - RNA, 22 nt, Artificial Sequence
  GATA2 Guide RNA
aaagccuguggccucuacuaca

SEQ ID NO: 8087 - RNA, 22 nt, Artificial Sequence
  GATA2 Guide RNA
aacggggacccugucugcaaag

SEQ ID NO: 8088 - RNA, 22 nt, Artificial Sequence
  GATA2 Guide RNA
aagccuguggccucuacuacaa

SEQ ID NO: 8089 - RNA, 22 nt, Artificial Sequence
  GATA2 Guide RNA
acaggcuuugcagacagggucc

SEQ ID NO: 8090 - RNA, 22 nt, Artificial Sequence
  GATA2 Guide RNA
acccugucugcaaagccugugg

SEQ ID NO: 8091 - RNA, 22 nt, Artificial Sequence
  GATA2 Guide RNA
acgccaacggggacccugucug

SEQ ID NO: 8092 - RNA, 22 nt, Artificial Sequence
  GATA2 Guide RNA
acggggacccugucugcaaagc

SEQ ID NO: 8093 - RNA, 22 nt, Artificial Sequence
  GATA2 Guide RNA
agaggccacaggcuuugcagac

SEQ ID NO: 8094 - RNA, 22 nt, Artificial Sequence
  GATA2 Guide RNA
agcuuguaguagaggccacagg

SEQ ID NO: 8095 - RNA, 22 nt, Artificial Sequence
  GATA2 Guide RNA
aggccacaggcuuugcagacag

SEQ ID NO: 8096 - RNA, 22 nt, Artificial Sequence
  GATA2 Guide RNA
aggcuuugcagacagggucccc

SEQ ID NO: 8097 - RNA, 22 nt, Artificial Sequence
  GATA2 Guide RNA
aguagaggccacaggcuuugca

SEQ ID NO: 8098 - RNA, 22 nt, Artificial Sequence
  GATA2 Guide RNA
caaagccuguggccucuacuac

SEQ ID NO: 8099 - RNA, 22 nt, Artificial Sequence
  GATA2 Guide RNA
caacggggacccugucugcaaa

SEQ ID NO: 8100 - RNA, 22 nt, Artificial Sequence
  GATA2 Guide RNA
cacaggcuuugcagacaggguc

SEQ ID NO: 8101 - RNA, 22 nt, Artificial Sequence
  GATA2 Guide RNA
cagcuuguaguagaggccacag

SEQ ID NO: 8102 - RNA, 22 nt, Artificial Sequence
  GATA2 Guide RNA
caggcuuugcagacaggguccc

SEQ ID NO: 8103 - RNA, 22 nt, Artificial Sequence
  GATA2 Guide RNA
ccaacggggacccugucugcaa

SEQ ID NO: 8104 - RNA, 22 nt, Artificial Sequence
  GATA2 Guide RNA
ccacaggcuuugcagacagggu

SEQ ID NO: 8105 - RNA, 22 nt, Artificial Sequence
  GATA2 Guide RNA
cccugucugcaaagccuguggc

SEQ ID NO: 8106 - RNA, 22 nt, Artificial Sequence
  GATA2 Guide RNA
ccugucugcaaagccuguggcc

SEQ ID NO: 8107 - RNA, 22 nt, Artificial Sequence
  GATA2 Guide RNA
cgccaacggggacccugucugc

SEQ ID NO: 8108 - RNA, 22 nt, Artificial Sequence
  GATA2 Guide RNA
cggggacccugucugcaaagcc

SEQ ID NO: 8109 - RNA, 22 nt, Artificial Sequence
  GATA2 Guide RNA
cugcaaagccuguggccucuac

SEQ ID NO: 8110 - RNA, 22 nt, Artificial Sequence
  GATA2 Guide RNA
cugucugcaaagccuguggccu

SEQ ID NO: 8111 - RNA, 22 nt, Artificial Sequence
  GATA2 Guide RNA
cuuguaguagaggccacaggcu

SEQ ID NO: 8112 - RNA, 22 nt, Artificial Sequence
  GATA2 Guide RNA
cuuugcagacaggguccccguu

SEQ ID NO: 8113 - RNA, 22 nt, Artificial Sequence
  GATA2 Guide RNA
gacccugucugcaaagccugug

SEQ ID NO: 8114 - RNA, 22 nt, Artificial Sequence
  GATA2 Guide RNA
gaggccacaggcuuugcagaca

SEQ ID NO: 8115 - RNA, 22 nt, Artificial Sequence
  GATA2 Guide RNA
gcaaagccuguggccucuacua

SEQ ID NO: 8116 - RNA, 22 nt, Artificial Sequence
  GATA2 Guide RNA
gccaacggggacccugucugca

SEQ ID NO: 8117 - RNA, 22 nt, Artificial Sequence
  GATA2 Guide RNA
gccacaggcuuugcagacaggg

SEQ ID NO: 8118 - RNA, 22 nt, Artificial Sequence
  GATA2 Guide RNA
gcuuguaguagaggccacaggc

SEQ ID NO: 8119 - RNA, 22 nt, Artificial Sequence
  GATA2 Guide RNA
gcuuugcagacaggguccccgu

SEQ ID NO: 8120 - RNA, 22 nt, Artificial Sequence
  GATA2 Guide RNA
ggacccugucugcaaagccugu

SEQ ID NO: 8121 - RNA, 22 nt, Artificial Sequence
  GATA2 Guide RNA
ggccacaggcuuugcagacagg

SEQ ID NO: 8122 - RNA, 22 nt, Artificial Sequence
  GATA2 Guide RNA
ggcuuugcagacaggguccccg

SEQ ID NO: 8123 - RNA, 22 nt, Artificial Sequence
  GATA2 Guide RNA
gggacccugucugcaaagccug

SEQ ID NO: 8124 - RNA, 22 nt, Artificial Sequence
  GATA2 Guide RNA
ggggacccugucugcaaagccu

SEQ ID NO: 8125 - RNA, 22 nt, Artificial Sequence
  GATA2 Guide RNA
guagaggccacaggcuuugcag

SEQ ID NO: 8126 - RNA, 22 nt, Artificial Sequence
  GATA2 Guide RNA
guaguagaggccacaggcuuug

SEQ ID NO: 8127 - RNA, 22 nt, Artificial Sequence
  GATA2 Guide RNA
gucugcaaagccuguggccucu

SEQ ID NO: 8128 - RNA, 22 nt, Artificial Sequence
  GATA2 Guide RNA
uagaggccacaggcuuugcaga

SEQ ID NO: 8129 - RNA, 22 nt, Artificial Sequence
  GATA2 Guide RNA
uaguagaggccacaggcuuugc

SEQ ID NO: 8130 - RNA, 22 nt, Artificial Sequence
  GATA2 Guide RNA
ucugcaaagccuguggccucua

SEQ ID NO: 8131 - RNA, 22 nt, Artificial Sequence
  GATA2 Guide RNA
ugcaaagccuguggccucuacu

SEQ ID NO: 8132 - RNA, 22 nt, Artificial Sequence
  GATA2 Guide RNA
uguaguagaggccacaggcuuu

SEQ ID NO: 8133 - RNA, 22 nt, Artificial Sequence
  GATA2 Guide RNA
ugucugcaaagccuguggccuc

SEQ ID NO: 8134 - RNA, 22 nt, Artificial Sequence
  GATA2 Guide RNA
uuguaguagaggccacaggcuu

SEQ ID NO: 8135 - RNA, 22 nt, Artificial Sequence
  GATA2 Guide RNA
uuugcagacaggguccccguug

SEQ ID NO: 8136 - RNA, 20 nt, Artificial Sequence
  GATA2 Guide RNA
aaccaccaccuuauggcgcg

SEQ ID NO: 8137 - RNA, 20 nt, Artificial Sequence
  GATA2 Guide RNA
acaaccaccaccuuauggcg

SEQ ID NO: 8138 - RNA, 20 nt, Artificial Sequence
  GATA2 Guide RNA
acaggguccccgcgccauaa

SEQ ID NO: 8139 - RNA, 20 nt, Artificial Sequence
  GATA2 Guide RNA
accaccaccuuauggcgcgg

SEQ ID NO: 8140 - RNA, 20 nt, Artificial Sequence
  GATA2 Guide RNA
accaccuuauggcgcgggga

SEQ ID NO: 8141 - RNA, 20 nt, Artificial Sequence
  GATA2 Guide RNA
accuuauggcgcggggaccc

SEQ ID NO: 8142 - RNA, 20 nt, Artificial Sequence
  GATA2 Guide RNA
agacaggguccccgcgccau

SEQ ID NO: 8143 - RNA, 20 nt, Artificial Sequence
  GATA2 Guide RNA
aggcguugcagacagggucc

SEQ ID NO: 8144 - RNA, 20 nt, Artificial Sequence
  GATA2 Guide RNA
aggguccccgcgccauaagg

SEQ ID NO: 8145 - RNA, 20 nt, Artificial Sequence
  GATA2 Guide RNA
auggcgcggggacccugucu

SEQ ID NO: 8146 - RNA, 20 nt, Artificial Sequence
  GATA2 Guide RNA
caaccaccaccuuauggcgc

SEQ ID NO: 8147 - RNA, 20 nt, Artificial Sequence
  GATA2 Guide RNA
caccaccuuauggcgcgggg

SEQ ID NO: 8148 - RNA, 20 nt, Artificial Sequence
  GATA2 Guide RNA
caccuuauggcgcggggacc

SEQ ID NO: 8149 - RNA, 20 nt, Artificial Sequence
  GATA2 Guide RNA
cagacaggguccccgcgcca

SEQ ID NO: 8150 - RNA, 20 nt, Artificial Sequence
  GATA2 Guide RNA
caggcguugcagacaggguc

SEQ ID NO: 8151 - RNA, 20 nt, Artificial Sequence
  GATA2 Guide RNA
caggguccccgcgccauaag

SEQ ID NO: 8152 - RNA, 20 nt, Artificial Sequence
  GATA2 Guide RNA
ccaccaccuuauggcgcggg

SEQ ID NO: 8153 - RNA, 20 nt, Artificial Sequence
  GATA2 Guide RNA
ccaccuuauggcgcggggac

SEQ ID NO: 8154 - RNA, 20 nt, Artificial Sequence
  GATA2 Guide RNA
ccccgcgccauaagguggug

SEQ ID NO: 8155 - RNA, 20 nt, Artificial Sequence
  GATA2 Guide RNA
cccgcgccauaagguggugg

SEQ ID NO: 8156 - RNA, 20 nt, Artificial Sequence
  GATA2 Guide RNA
ccgcgccauaaggugguggu

SEQ ID NO: 8157 - RNA, 20 nt, Artificial Sequence
  GATA2 Guide RNA
ccuuauggcgcggggacccu

SEQ ID NO: 8158 - RNA, 20 nt, Artificial Sequence
  GATA2 Guide RNA
cgacaaccaccaccuuaugg

SEQ ID NO: 8159 - RNA, 20 nt, Artificial Sequence
  GATA2 Guide RNA
cgcgccauaagguggugguu

SEQ ID NO: 8160 - RNA, 20 nt, Artificial Sequence
  GATA2 Guide RNA
cgcggggacccugucugcaa

SEQ ID NO: 8161 - RNA, 20 nt, Artificial Sequence
  GATA2 Guide RNA
cguugcagacaggguccccg

SEQ ID NO: 8162 - RNA, 20 nt, Artificial Sequence
  GATA2 Guide RNA
cuuauggcgcggggacccug

SEQ ID NO: 8163 - RNA, 20 nt, Artificial Sequence
  GATA2 Guide RNA
gacaaccaccaccuuauggc

SEQ ID NO: 8164 - RNA, 20 nt, Artificial Sequence
  GATA2 Guide RNA
gacaggguccccgcgccaua

SEQ ID NO: 8165 - RNA, 20 nt, Artificial Sequence
  GATA2 Guide RNA
gcagacaggguccccgcgcc

SEQ ID NO: 8166 - RNA, 20 nt, Artificial Sequence
  GATA2 Guide RNA
gcgcggggacccugucugca

SEQ ID NO: 8167 - RNA, 20 nt, Artificial Sequence
  GATA2 Guide RNA
gcggggacccugucugcaac

SEQ ID NO: 8168 - RNA, 20 nt, Artificial Sequence
  GATA2 Guide RNA
gcguugcagacagggucccc

SEQ ID NO: 8169 - RNA, 20 nt, Artificial Sequence
  GATA2 Guide RNA
ggcgcggggacccugucugc

SEQ ID NO: 8170 - RNA, 20 nt, Artificial Sequence
  GATA2 Guide RNA
ggcguugcagacaggguccc

SEQ ID NO: 8171 - RNA, 20 nt, Artificial Sequence
  GATA2 Guide RNA
ggguccccgcgccauaaggu

SEQ ID NO: 8172 - RNA, 20 nt, Artificial Sequence
  GATA2 Guide RNA
gguccccgcgccauaaggug

SEQ ID NO: 8173 - RNA, 20 nt, Artificial Sequence
  GATA2 Guide RNA
guccccgcgccauaaggugg

SEQ ID NO: 8174 - RNA, 20 nt, Artificial Sequence
  GATA2 Guide RNA
guugcagacaggguccccgc

SEQ ID NO: 8175 - RNA, 20 nt, Artificial Sequence
  GATA2 Guide RNA
uauggcgcggggacccuguc

SEQ ID NO: 8176 - RNA, 20 nt, Artificial Sequence
  GATA2 Guide RNA
uccccgcgccauaagguggu

SEQ ID NO: 8177 - RNA, 20 nt, Artificial Sequence
  GATA2 Guide RNA
ugcagacaggguccccgcgc

SEQ ID NO: 8178 - RNA, 20 nt, Artificial Sequence
  GATA2 Guide RNA
uggcgcggggacccugucug

SEQ ID NO: 8179 - RNA, 20 nt, Artificial Sequence
  GATA2 Guide RNA
uuauggcgcggggacccugu

SEQ ID NO: 8180 - RNA, 20 nt, Artificial Sequence
  GATA2 Guide RNA
uugcagacaggguccccgcg

SEQ ID NO: 8181 - RNA, 21 nt, Artificial Sequence
  GATA2 Guide RNA
aaccaccaccuuauggcgcgg

SEQ ID NO: 8182 - RNA, 21 nt, Artificial Sequence
  GATA2 Guide RNA
acaaccaccaccuuauggcgc

SEQ ID NO: 8183 - RNA, 21 nt, Artificial Sequence
  GATA2 Guide RNA
acaggcguugcagacaggguc

SEQ ID NO: 8184 - RNA, 21 nt, Artificial Sequence
  GATA2 Guide RNA
acaggguccccgcgccauaag

SEQ ID NO: 8185 - RNA, 21 nt, Artificial Sequence
  GATA2 Guide RNA
accaccaccuuauggcgcggg

SEQ ID NO: 8186 - RNA, 21 nt, Artificial Sequence
  GATA2 Guide RNA
accaccuuauggcgcggggac

SEQ ID NO: 8187 - RNA, 21 nt, Artificial Sequence
  GATA2 Guide RNA
accuuauggcgcggggacccu

SEQ ID NO: 8188 - RNA, 21 nt, Artificial Sequence
  GATA2 Guide RNA
acgacaaccaccaccuuaugg

SEQ ID NO: 8189 - RNA, 21 nt, Artificial Sequence
  GATA2 Guide RNA
agacaggguccccgcgccaua

SEQ ID NO: 8190 - RNA, 21 nt, Artificial Sequence
  GATA2 Guide RNA
aggcguugcagacaggguccc

SEQ ID NO: 8191 - RNA, 21 nt, Artificial Sequence
  GATA2 Guide RNA
aggguccccgcgccauaaggu

SEQ ID NO: 8192 - RNA, 21 nt, Artificial Sequence
  GATA2 Guide RNA
auggcgcggggacccugucug

SEQ ID NO: 8193 - RNA, 21 nt, Artificial Sequence
  GATA2 Guide RNA
caaccaccaccuuauggcgcg

SEQ ID NO: 8194 - RNA, 21 nt, Artificial Sequence
  GATA2 Guide RNA
caccaccuuauggcgcgggga

SEQ ID NO: 8195 - RNA, 21 nt, Artificial Sequence
  GATA2 Guide RNA
caccuuauggcgcggggaccc

SEQ ID NO: 8196 - RNA, 21 nt, Artificial Sequence
  GATA2 Guide RNA
cagacaggguccccgcgccau

SEQ ID NO: 8197 - RNA, 21 nt, Artificial Sequence
  GATA2 Guide RNA
caggcguugcagacagggucc

SEQ ID NO: 8198 - RNA, 21 nt, Artificial Sequence
  GATA2 Guide RNA
caggguccccgcgccauaagg

SEQ ID NO: 8199 - RNA, 21 nt, Artificial Sequence
  GATA2 Guide RNA
ccaccaccuuauggcgcgggg

SEQ ID NO: 8200 - RNA, 21 nt, Artificial Sequence
  GATA2 Guide RNA
ccaccuuauggcgcggggacc

SEQ ID NO: 8201 - RNA, 21 nt, Artificial Sequence
  GATA2 Guide RNA
ccccgcgccauaagguggugg

SEQ ID NO: 8202 - RNA, 21 nt, Artificial Sequence
  GATA2 Guide RNA
cccgcgccauaaggugguggu

SEQ ID NO: 8203 - RNA, 21 nt, Artificial Sequence
  GATA2 Guide RNA
ccgcgccauaagguggugguu

SEQ ID NO: 8204 - RNA, 21 nt, Artificial Sequence
  GATA2 Guide RNA
ccuuauggcgcggggacccug

SEQ ID NO: 8205 - RNA, 21 nt, Artificial Sequence
  GATA2 Guide RNA
cgacaaccaccaccuuauggc

SEQ ID NO: 8206 - RNA, 21 nt, Artificial Sequence
  GATA2 Guide RNA
cgcgccauaagguggugguug

SEQ ID NO: 8207 - RNA, 21 nt, Artificial Sequence
  GATA2 Guide RNA
cgcggggacccugucugcaac

SEQ ID NO: 8208 - RNA, 21 nt, Artificial Sequence
  GATA2 Guide RNA
cguugcagacaggguccccgc

SEQ ID NO: 8209 - RNA, 21 nt, Artificial Sequence
  GATA2 Guide RNA
cuuauggcgcggggacccugu

SEQ ID NO: 8210 - RNA, 21 nt, Artificial Sequence
  GATA2 Guide RNA
gacaaccaccaccuuauggcg

SEQ ID NO: 8211 - RNA, 21 nt, Artificial Sequence
  GATA2 Guide RNA
gacaggguccccgcgccauaa

SEQ ID NO: 8212 - RNA, 21 nt, Artificial Sequence
  GATA2 Guide RNA
gcagacaggguccccgcgcca

SEQ ID NO: 8213 - RNA, 21 nt, Artificial Sequence
  GATA2 Guide RNA
gcgcggggacccugucugcaa

SEQ ID NO: 8214 - RNA, 21 nt, Artificial Sequence
  GATA2 Guide RNA
gcggggacccugucugcaacg

SEQ ID NO: 8215 - RNA, 21 nt, Artificial Sequence
  GATA2 Guide RNA
gcguugcagacaggguccccg

SEQ ID NO: 8216 - RNA, 21 nt, Artificial Sequence
  GATA2 Guide RNA
ggcgcggggacccugucugca

SEQ ID NO: 8217 - RNA, 21 nt, Artificial Sequence
  GATA2 Guide RNA
ggcguugcagacagggucccc

SEQ ID NO: 8218 - RNA, 21 nt, Artificial Sequence
  GATA2 Guide RNA
ggguccccgcgccauaaggug

SEQ ID NO: 8219 - RNA, 21 nt, Artificial Sequence
  GATA2 Guide RNA
gguccccgcgccauaaggugg

SEQ ID NO: 8220 - RNA, 21 nt, Artificial Sequence
  GATA2 Guide RNA
guccccgcgccauaagguggu

SEQ ID NO: 8221 - RNA, 21 nt, Artificial Sequence
  GATA2 Guide RNA
guugcagacaggguccccgcg

SEQ ID NO: 8222 - RNA, 21 nt, Artificial Sequence
  GATA2 Guide RNA
uauggcgcggggacccugucu

SEQ ID NO: 8223 - RNA, 21 nt, Artificial Sequence
  GATA2 Guide RNA
uccccgcgccauaagguggug

SEQ ID NO: 8224 - RNA, 21 nt, Artificial Sequence
  GATA2 Guide RNA
ugcagacaggguccccgcgcc

SEQ ID NO: 8225 - RNA, 21 nt, Artificial Sequence
  GATA2 Guide RNA
uggcgcggggacccugucugc

SEQ ID NO: 8226 - RNA, 21 nt, Artificial Sequence
  GATA2 Guide RNA
uuauggcgcggggacccuguc

SEQ ID NO: 8227 - RNA, 21 nt, Artificial Sequence
  GATA2 Guide RNA
uugcagacaggguccccgcgc

SEQ ID NO: 8228 - RNA, 22 nt, Artificial Sequence
  GATA2 Guide RNA
aaccaccaccuuauggcgcggg

SEQ ID NO: 8229 - RNA, 22 nt, Artificial Sequence
  GATA2 Guide RNA
acaaccaccaccuuauggcgcg

SEQ ID NO: 8230 - RNA, 22 nt, Artificial Sequence
  GATA2 Guide RNA
acaggcguugcagacagggucc

SEQ ID NO: 8231 - RNA, 22 nt, Artificial Sequence
  GATA2 Guide RNA
acaggguccccgcgccauaagg

SEQ ID NO: 8232 - RNA, 22 nt, Artificial Sequence
  GATA2 Guide RNA
accaccaccuuauggcgcgggg

SEQ ID NO: 8233 - RNA, 22 nt, Artificial Sequence
  GATA2 Guide RNA
accaccuuauggcgcggggacc

SEQ ID NO: 8234 - RNA, 22 nt, Artificial Sequence
  GATA2 Guide RNA
accuuauggcgcggggacccug

SEQ ID NO: 8235 - RNA, 22 nt, Artificial Sequence
  GATA2 Guide RNA
acgacaaccaccaccuuauggc

SEQ ID NO: 8236 - RNA, 22 nt, Artificial Sequence
  GATA2 Guide RNA
agacaggguccccgcgccauaa

SEQ ID NO: 8237 - RNA, 22 nt, Artificial Sequence
  GATA2 Guide RNA
aggcguugcagacagggucccc

SEQ ID NO: 8238 - RNA, 22 nt, Artificial Sequence
  GATA2 Guide RNA
aggguccccgcgccauaaggug

SEQ ID NO: 8239 - RNA, 22 nt, Artificial Sequence
  GATA2 Guide RNA
auggcgcggggacccugucugc

SEQ ID NO: 8240 - RNA, 22 nt, Artificial Sequence
  GATA2 Guide RNA
caaccaccaccuuauggcgcgg

SEQ ID NO: 8241 - RNA, 22 nt, Artificial Sequence
  GATA2 Guide RNA
cacaggcguugcagacaggguc

SEQ ID NO: 8242 - RNA, 22 nt, Artificial Sequence
  GATA2 Guide RNA
caccaccuuauggcgcggggac

SEQ ID NO: 8243 - RNA, 22 nt, Artificial Sequence
  GATA2 Guide RNA
caccuuauggcgcggggacccu

SEQ ID NO: 8244 - RNA, 22 nt, Artificial Sequence
  GATA2 Guide RNA
cagacaggguccccgcgccaua

SEQ ID NO: 8245 - RNA, 22 nt, Artificial Sequence
  GATA2 Guide RNA
caggcguugcagacaggguccc

SEQ ID NO: 8246 - RNA, 22 nt, Artificial Sequence
  GATA2 Guide RNA
caggguccccgcgccauaaggu

SEQ ID NO: 8247 - RNA, 22 nt, Artificial Sequence
  GATA2 Guide RNA
ccaccaccuuauggcgcgggga

SEQ ID NO: 8248 - RNA, 22 nt, Artificial Sequence
  GATA2 Guide RNA
ccaccuuauggcgcggggaccc

SEQ ID NO: 8249 - RNA, 22 nt, Artificial Sequence
  GATA2 Guide RNA
ccccgcgccauaaggugguggu

SEQ ID NO: 8250 - RNA, 22 nt, Artificial Sequence
  GATA2 Guide RNA
cccgcgccauaagguggugguu

SEQ ID NO: 8251 - RNA, 22 nt, Artificial Sequence
  GATA2 Guide RNA
ccgcgccauaagguggugguug

SEQ ID NO: 8252 - RNA, 22 nt, Artificial Sequence
  GATA2 Guide RNA
ccuuauggcgcggggacccugu

SEQ ID NO: 8253 - RNA, 22 nt, Artificial Sequence
  GATA2 Guide RNA
cgacaaccaccaccuuauggcg

SEQ ID NO: 8254 - RNA, 22 nt, Artificial Sequence
  GATA2 Guide RNA
cgcgccauaagguggugguugu

SEQ ID NO: 8255 - RNA, 22 nt, Artificial Sequence
  GATA2 Guide RNA
cgcggggacccugucugcaacg

SEQ ID NO: 8256 - RNA, 22 nt, Artificial Sequence
  GATA2 Guide RNA
cguugcagacaggguccccgcg

SEQ ID NO: 8257 - RNA, 22 nt, Artificial Sequence
  GATA2 Guide RNA
cuuauggcgcggggacccuguc

SEQ ID NO: 8258 - RNA, 22 nt, Artificial Sequence
  GATA2 Guide RNA
gacaaccaccaccuuauggcgc

SEQ ID NO: 8259 - RNA, 22 nt, Artificial Sequence
  GATA2 Guide RNA
gacaggguccccgcgccauaag

SEQ ID NO: 8260 - RNA, 22 nt, Artificial Sequence
  GATA2 Guide RNA
gacgacaaccaccaccuuaugg

SEQ ID NO: 8261 - RNA, 22 nt, Artificial Sequence
  GATA2 Guide RNA
gcagacaggguccccgcgccau

SEQ ID NO: 8262 - RNA, 22 nt, Artificial Sequence
  GATA2 Guide RNA
gcgcggggacccugucugcaac

SEQ ID NO: 8263 - RNA, 22 nt, Artificial Sequence
  GATA2 Guide RNA
gcggggacccugucugcaacgc

SEQ ID NO: 8264 - RNA, 22 nt, Artificial Sequence
  GATA2 Guide RNA
gcguugcagacaggguccccgc

SEQ ID NO: 8265 - RNA, 22 nt, Artificial Sequence
  GATA2 Guide RNA
ggcgcggggacccugucugcaa

SEQ ID NO: 8266 - RNA, 22 nt, Artificial Sequence
  GATA2 Guide RNA
ggcguugcagacaggguccccg

SEQ ID NO: 8267 - RNA, 22 nt, Artificial Sequence
  GATA2 Guide RNA
ggguccccgcgccauaaggugg

SEQ ID NO: 8268 - RNA, 22 nt, Artificial Sequence
  GATA2 Guide RNA
gguccccgcgccauaagguggu

SEQ ID NO: 8269 - RNA, 22 nt, Artificial Sequence
  GATA2 Guide RNA
guccccgcgccauaagguggug

SEQ ID NO: 8270 - RNA, 22 nt, Artificial Sequence
  GATA2 Guide RNA
guugcagacaggguccccgcgc

SEQ ID NO: 8271 - RNA, 22 nt, Artificial Sequence
  GATA2 Guide RNA
uauggcgcggggacccugucug

SEQ ID NO: 8272 - RNA, 22 nt, Artificial Sequence
  GATA2 Guide RNA
uccccgcgccauaagguggugg

SEQ ID NO: 8273 - RNA, 22 nt, Artificial Sequence
  GATA2 Guide RNA
ugcagacaggguccccgcgcca

SEQ ID NO: 8274 - RNA, 22 nt, Artificial Sequence
  GATA2 Guide RNA
uggcgcggggacccugucugca

SEQ ID NO: 8275 - RNA, 22 nt, Artificial Sequence
  GATA2 Guide RNA
uuauggcgcggggacccugucu

SEQ ID NO: 8276 - RNA, 22 nt, Artificial Sequence
  GATA2 Guide RNA
uugcagacaggguccccgcgcc

SEQ ID NO: 8277 - RNA, 20 nt, Artificial Sequence
  GATA2 Guide RNA
aaacaccaacggggacccug

SEQ ID NO: 8278 - RNA, 20 nt, Artificial Sequence
  GATA2 Guide RNA
aacaccaacggggacccugu

SEQ ID NO: 8279 - RNA, 20 nt, Artificial Sequence
  GATA2 Guide RNA
acaccaacggggacccuguc

SEQ ID NO: 8280 - RNA, 20 nt, Artificial Sequence
  GATA2 Guide RNA
acaggguccccguugguguu

SEQ ID NO: 8281 - RNA, 20 nt, Artificial Sequence
  GATA2 Guide RNA
accaccuuauggcgccgaaa

SEQ ID NO: 8282 - RNA, 20 nt, Artificial Sequence
  GATA2 Guide RNA
accuuauggcgccgaaacac

SEQ ID NO: 8283 - RNA, 20 nt, Artificial Sequence
  GATA2 Guide RNA
agacaggguccccguuggug

SEQ ID NO: 8284 - RNA, 20 nt, Artificial Sequence
  GATA2 Guide RNA
aggguccccguugguguuuc

SEQ ID NO: 8285 - RNA, 20 nt, Artificial Sequence
  GATA2 Guide RNA
auggcgccgaaacaccaacg

SEQ ID NO: 8286 - RNA, 20 nt, Artificial Sequence
  GATA2 Guide RNA
caccaacggggacccugucu

SEQ ID NO: 8287 - RNA, 20 nt, Artificial Sequence
  GATA2 Guide RNA
caccaccuuauggcgccgaa

SEQ ID NO: 8288 - RNA, 20 nt, Artificial Sequence
  GATA2 Guide RNA
caccuuauggcgccgaaaca

SEQ ID NO: 8289 - RNA, 20 nt, Artificial Sequence
  GATA2 Guide RNA
cagacaggguccccguuggu

SEQ ID NO: 8290 - RNA, 20 nt, Artificial Sequence
  GATA2 Guide RNA
caggguccccguugguguuu

SEQ ID NO: 8291 - RNA, 20 nt, Artificial Sequence
  GATA2 Guide RNA
ccaccaccuuauggcgccga

SEQ ID NO: 8292 - RNA, 20 nt, Artificial Sequence
  GATA2 Guide RNA
ccaccuuauggcgccgaaac

SEQ ID NO: 8293 - RNA, 20 nt, Artificial Sequence
  GATA2 Guide RNA
ccccguugguguuucggcgc

SEQ ID NO: 8294 - RNA, 20 nt, Artificial Sequence
  GATA2 Guide RNA
cccguugguguuucggcgcc

SEQ ID NO: 8295 - RNA, 20 nt, Artificial Sequence
  GATA2 Guide RNA
ccgaaacaccaacggggacc

SEQ ID NO: 8296 - RNA, 20 nt, Artificial Sequence
  GATA2 Guide RNA
ccguugguguuucggcgcca

SEQ ID NO: 8297 - RNA, 20 nt, Artificial Sequence
  GATA2 Guide RNA
ccuuauggcgccgaaacacc

SEQ ID NO: 8298 - RNA, 20 nt, Artificial Sequence
  GATA2 Guide RNA
cgaaacaccaacggggaccc

SEQ ID NO: 8299 - RNA, 20 nt, Artificial Sequence
  GATA2 Guide RNA
cgccgaaacaccaacgggga

SEQ ID NO: 8300 - RNA, 20 nt, Artificial Sequence
  GATA2 Guide RNA
cguugguguuucggcgccau

SEQ ID NO: 8301 - RNA, 20 nt, Artificial Sequence
  GATA2 Guide RNA
cuuauggcgccgaaacacca

SEQ ID NO: 8302 - RNA, 20 nt, Artificial Sequence
  GATA2 Guide RNA
gaaacaccaacggggacccu

SEQ ID NO: 8303 - RNA, 20 nt, Artificial Sequence
  GATA2 Guide RNA
gacaggguccccguuggugu

SEQ ID NO: 8304 - RNA, 20 nt, Artificial Sequence
  GATA2 Guide RNA
gcagacaggguccccguugg

SEQ ID NO: 8305 - RNA, 20 nt, Artificial Sequence
  GATA2 Guide RNA
gccgaaacaccaacggggac

SEQ ID NO: 8306 - RNA, 20 nt, Artificial Sequence
  GATA2 Guide RNA
gcgccgaaacaccaacgggg

SEQ ID NO: 8307 - RNA, 20 nt, Artificial Sequence
  GATA2 Guide RNA
ggcgccgaaacaccaacggg

SEQ ID NO: 8308 - RNA, 20 nt, Artificial Sequence
  GATA2 Guide RNA
ggguccccguugguguuucg

SEQ ID NO: 8309 - RNA, 20 nt, Artificial Sequence
  GATA2 Guide RNA
gguccccguugguguuucgg

SEQ ID NO: 8310 - RNA, 20 nt, Artificial Sequence
  GATA2 Guide RNA
gguguuucggcgccauaagg

SEQ ID NO: 8311 - RNA, 20 nt, Artificial Sequence
  GATA2 Guide RNA
guccccguugguguuucggc

SEQ ID NO: 8312 - RNA, 20 nt, Artificial Sequence
  GATA2 Guide RNA
guguuucggcgccauaaggu

SEQ ID NO: 8313 - RNA, 20 nt, Artificial Sequence
  GATA2 Guide RNA
guugguguuucggcgccaua

SEQ ID NO: 8314 - RNA, 20 nt, Artificial Sequence
  GATA2 Guide RNA
uauggcgccgaaacaccaac

SEQ ID NO: 8315 - RNA, 20 nt, Artificial Sequence
  GATA2 Guide RNA
uccccguugguguuucggcg

SEQ ID NO: 8316 - RNA, 20 nt, Artificial Sequence
  GATA2 Guide RNA
ugcagacaggguccccguug

SEQ ID NO: 8317 - RNA, 20 nt, Artificial Sequence
  GATA2 Guide RNA
uggcgccgaaacaccaacgg

SEQ ID NO: 8318 - RNA, 20 nt, Artificial Sequence
  GATA2 Guide RNA
ugguguuucggcgccauaag

SEQ ID NO: 8319 - RNA, 20 nt, Artificial Sequence
  GATA2 Guide RNA
uguuucggcgccauaaggug

SEQ ID NO: 8320 - RNA, 20 nt, Artificial Sequence
  GATA2 Guide RNA
uuauggcgccgaaacaccaa

SEQ ID NO: 8321 - RNA, 20 nt, Artificial Sequence
  GATA2 Guide RNA
uugcagacaggguccccguu

SEQ ID NO: 8322 - RNA, 20 nt, Artificial Sequence
  GATA2 Guide RNA
uugguguuucggcgccauaa

SEQ ID NO: 8323 - RNA, 21 nt, Artificial Sequence
  GATA2 Guide RNA
aaacaccaacggggacccugu

SEQ ID NO: 8324 - RNA, 21 nt, Artificial Sequence
  GATA2 Guide RNA
aacaccaacggggacccuguc

SEQ ID NO: 8325 - RNA, 21 nt, Artificial Sequence
  GATA2 Guide RNA
acaccaacggggacccugucu

SEQ ID NO: 8326 - RNA, 21 nt, Artificial Sequence
  GATA2 Guide RNA
acaggguccccguugguguuu

SEQ ID NO: 8327 - RNA, 21 nt, Artificial Sequence
  GATA2 Guide RNA
accaccaccuuauggcgccga

SEQ ID NO: 8328 - RNA, 21 nt, Artificial Sequence
  GATA2 Guide RNA
accaccuuauggcgccgaaac

SEQ ID NO: 8329 - RNA, 21 nt, Artificial Sequence
  GATA2 Guide RNA
accuuauggcgccgaaacacc

SEQ ID NO: 8330 - RNA, 21 nt, Artificial Sequence
  GATA2 Guide RNA
agacaggguccccguuggugu

SEQ ID NO: 8331 - RNA, 21 nt, Artificial Sequence
  GATA2 Guide RNA
aggguccccguugguguuucg

SEQ ID NO: 8332 - RNA, 21 nt, Artificial Sequence
  GATA2 Guide RNA
auggcgccgaaacaccaacgg

SEQ ID NO: 8333 - RNA, 21 nt, Artificial Sequence
  GATA2 Guide RNA
caccaacggggacccugucug

SEQ ID NO: 8334 - RNA, 21 nt, Artificial Sequence
  GATA2 Guide RNA
caccaccuuauggcgccgaaa

SEQ ID NO: 8335 - RNA, 21 nt, Artificial Sequence
  GATA2 Guide RNA
caccuuauggcgccgaaacac

SEQ ID NO: 8336 - RNA, 21 nt, Artificial Sequence
  GATA2 Guide RNA
cagacaggguccccguuggug

SEQ ID NO: 8337 - RNA, 21 nt, Artificial Sequence
  GATA2 Guide RNA
caggguccccguugguguuuc

SEQ ID NO: 8338 - RNA, 21 nt, Artificial Sequence
  GATA2 Guide RNA
ccaccaccuuauggcgccgaa

SEQ ID NO: 8339 - RNA, 21 nt, Artificial Sequence
  GATA2 Guide RNA
ccaccuuauggcgccgaaaca

SEQ ID NO: 8340 - RNA, 21 nt, Artificial Sequence
  GATA2 Guide RNA
ccccguugguguuucggcgcc

SEQ ID NO: 8341 - RNA, 21 nt, Artificial Sequence
  GATA2 Guide RNA
cccguugguguuucggcgcca

SEQ ID NO: 8342 - RNA, 21 nt, Artificial Sequence
  GATA2 Guide RNA
ccgaaacaccaacggggaccc

SEQ ID NO: 8343 - RNA, 21 nt, Artificial Sequence
  GATA2 Guide RNA
ccguugguguuucggcgccau

SEQ ID NO: 8344 - RNA, 21 nt, Artificial Sequence
  GATA2 Guide RNA
ccuuauggcgccgaaacacca

SEQ ID NO: 8345 - RNA, 21 nt, Artificial Sequence
  GATA2 Guide RNA
cgaaacaccaacggggacccu

SEQ ID NO: 8346 - RNA, 21 nt, Artificial Sequence
  GATA2 Guide RNA
cgccgaaacaccaacggggac

SEQ ID NO: 8347 - RNA, 21 nt, Artificial Sequence
  GATA2 Guide RNA
cguugguguuucggcgccaua

SEQ ID NO: 8348 - RNA, 21 nt, Artificial Sequence
  GATA2 Guide RNA
cuuauggcgccgaaacaccaa

SEQ ID NO: 8349 - RNA, 21 nt, Artificial Sequence
  GATA2 Guide RNA
gaaacaccaacggggacccug

SEQ ID NO: 8350 - RNA, 21 nt, Artificial Sequence
  GATA2 Guide RNA
gacaggguccccguugguguu

SEQ ID NO: 8351 - RNA, 21 nt, Artificial Sequence
  GATA2 Guide RNA
gcagacaggguccccguuggu

SEQ ID NO: 8352 - RNA, 21 nt, Artificial Sequence
  GATA2 Guide RNA
gccgaaacaccaacggggacc

SEQ ID NO: 8353 - RNA, 21 nt, Artificial Sequence
  GATA2 Guide RNA
gcgccgaaacaccaacgggga

SEQ ID NO: 8354 - RNA, 21 nt, Artificial Sequence
  GATA2 Guide RNA
ggcgccgaaacaccaacgggg

SEQ ID NO: 8355 - RNA, 21 nt, Artificial Sequence
  GATA2 Guide RNA
ggguccccguugguguuucgg

SEQ ID NO: 8356 - RNA, 21 nt, Artificial Sequence
  GATA2 Guide RNA
gguccccguugguguuucggc

SEQ ID NO: 8357 - RNA, 21 nt, Artificial Sequence
  GATA2 Guide RNA
gguguuucggcgccauaaggu

SEQ ID NO: 8358 - RNA, 21 nt, Artificial Sequence
  GATA2 Guide RNA
guccccguugguguuucggcg

SEQ ID NO: 8359 - RNA, 21 nt, Artificial Sequence
  GATA2 Guide RNA
guguuucggcgccauaaggug

SEQ ID NO: 8360 - RNA, 21 nt, Artificial Sequence
  GATA2 Guide RNA
guugcagacaggguccccguu

SEQ ID NO: 8361 - RNA, 21 nt, Artificial Sequence
  GATA2 Guide RNA
guugguguuucggcgccauaa

SEQ ID NO: 8362 - RNA, 21 nt, Artificial Sequence
  GATA2 Guide RNA
uauggcgccgaaacaccaacg

SEQ ID NO: 8363 - RNA, 21 nt, Artificial Sequence
  GATA2 Guide RNA
uccccguugguguuucggcgc

SEQ ID NO: 8364 - RNA, 21 nt, Artificial Sequence
  GATA2 Guide RNA
ugcagacaggguccccguugg

SEQ ID NO: 8365 - RNA, 21 nt, Artificial Sequence
  GATA2 Guide RNA
uggcgccgaaacaccaacggg

SEQ ID NO: 8366 - RNA, 21 nt, Artificial Sequence
  GATA2 Guide RNA
ugguguuucggcgccauaagg

SEQ ID NO: 8367 - RNA, 21 nt, Artificial Sequence
  GATA2 Guide RNA
uguuucggcgccauaaggugg

SEQ ID NO: 8368 - RNA, 21 nt, Artificial Sequence
  GATA2 Guide RNA
uuauggcgccgaaacaccaac

SEQ ID NO: 8369 - RNA, 21 nt, Artificial Sequence
  GATA2 Guide RNA
uugcagacaggguccccguug

SEQ ID NO: 8370 - RNA, 21 nt, Artificial Sequence
  GATA2 Guide RNA
uugguguuucggcgccauaag

SEQ ID NO: 8371 - RNA, 22 nt, Artificial Sequence
  GATA2 Guide RNA
aaacaccaacggggacccuguc

SEQ ID NO: 8372 - RNA, 22 nt, Artificial Sequence
  GATA2 Guide RNA
aacaccaacggggacccugucu

SEQ ID NO: 8373 - RNA, 22 nt, Artificial Sequence
  GATA2 Guide RNA
aaccaccaccuuauggcgccga

SEQ ID NO: 8374 - RNA, 22 nt, Artificial Sequence
  GATA2 Guide RNA
acaccaacggggacccugucug

SEQ ID NO: 8375 - RNA, 22 nt, Artificial Sequence
  GATA2 Guide RNA
acaggguccccguugguguuuc

SEQ ID NO: 8376 - RNA, 22 nt, Artificial Sequence
  GATA2 Guide RNA
accaccaccuuauggcgccgaa

SEQ ID NO: 8377 - RNA, 22 nt, Artificial Sequence
  GATA2 Guide RNA
accaccuuauggcgccgaaaca

SEQ ID NO: 8378 - RNA, 22 nt, Artificial Sequence
  GATA2 Guide RNA
accuuauggcgccgaaacacca

SEQ ID NO: 8379 - RNA, 22 nt, Artificial Sequence
  GATA2 Guide RNA
agacaggguccccguugguguu

SEQ ID NO: 8380 - RNA, 22 nt, Artificial Sequence
  GATA2 Guide RNA
aggguccccguugguguuucgg

SEQ ID NO: 8381 - RNA, 22 nt, Artificial Sequence
  GATA2 Guide RNA
auggcgccgaaacaccaacggg

SEQ ID NO: 8382 - RNA, 22 nt, Artificial Sequence
  GATA2 Guide RNA
caccaacggggacccugucugc

SEQ ID NO: 8383 - RNA, 22 nt, Artificial Sequence
  GATA2 Guide RNA
caccaccuuauggcgccgaaac

SEQ ID NO: 8384 - RNA, 22 nt, Artificial Sequence
  GATA2 Guide RNA
caccuuauggcgccgaaacacc

SEQ ID NO: 8385 - RNA, 22 nt, Artificial Sequence
  GATA2 Guide RNA
cagacaggguccccguuggugu

SEQ ID NO: 8386 - RNA, 22 nt, Artificial Sequence
  GATA2 Guide RNA
caggguccccguugguguuucg

SEQ ID NO: 8387 - RNA, 22 nt, Artificial Sequence
  GATA2 Guide RNA
ccaccaccuuauggcgccgaaa

SEQ ID NO: 8388 - RNA, 22 nt, Artificial Sequence
  GATA2 Guide RNA
ccaccuuauggcgccgaaacac

SEQ ID NO: 8389 - RNA, 22 nt, Artificial Sequence
  GATA2 Guide RNA
ccccguugguguuucggcgcca

SEQ ID NO: 8390 - RNA, 22 nt, Artificial Sequence
  GATA2 Guide RNA
cccguugguguuucggcgccau

SEQ ID NO: 8391 - RNA, 22 nt, Artificial Sequence
  GATA2 Guide RNA
ccgaaacaccaacggggacccu

SEQ ID NO: 8392 - RNA, 22 nt, Artificial Sequence
  GATA2 Guide RNA
ccguugguguuucggcgccaua

SEQ ID NO: 8393 - RNA, 22 nt, Artificial Sequence
  GATA2 Guide RNA
ccuuauggcgccgaaacaccaa

SEQ ID NO: 8394 - RNA, 22 nt, Artificial Sequence
  GATA2 Guide RNA
cgaaacaccaacggggacccug

SEQ ID NO: 8395 - RNA, 22 nt, Artificial Sequence
  GATA2 Guide RNA
cgccgaaacaccaacggggacc

SEQ ID NO: 8396 - RNA, 22 nt, Artificial Sequence
  GATA2 Guide RNA
cguugcagacaggguccccguu

SEQ ID NO: 8397 - RNA, 22 nt, Artificial Sequence
  GATA2 Guide RNA
cguugguguuucggcgccauaa

SEQ ID NO: 8398 - RNA, 22 nt, Artificial Sequence
  GATA2 Guide RNA
cuuauggcgccgaaacaccaac

SEQ ID NO: 8399 - RNA, 22 nt, Artificial Sequence
  GATA2 Guide RNA
gaaacaccaacggggacccugu

SEQ ID NO: 8400 - RNA, 22 nt, Artificial Sequence
  GATA2 Guide RNA
gacaggguccccguugguguuu

SEQ ID NO: 8401 - RNA, 22 nt, Artificial Sequence
  GATA2 Guide RNA
gcagacaggguccccguuggug

SEQ ID NO: 8402 - RNA, 22 nt, Artificial Sequence
  GATA2 Guide RNA
gccgaaacaccaacggggaccc

SEQ ID NO: 8403 - RNA, 22 nt, Artificial Sequence
  GATA2 Guide RNA
gcgccgaaacaccaacggggac

SEQ ID NO: 8404 - RNA, 22 nt, Artificial Sequence
  GATA2 Guide RNA
ggcgccgaaacaccaacgggga

SEQ ID NO: 8405 - RNA, 22 nt, Artificial Sequence
  GATA2 Guide RNA
ggguccccguugguguuucggc

SEQ ID NO: 8406 - RNA, 22 nt, Artificial Sequence
  GATA2 Guide RNA
gguccccguugguguuucggcg

SEQ ID NO: 8407 - RNA, 22 nt, Artificial Sequence
  GATA2 Guide RNA
gguguuucggcgccauaaggug

SEQ ID NO: 8408 - RNA, 22 nt, Artificial Sequence
  GATA2 Guide RNA
guccccguugguguuucggcgc

SEQ ID NO: 8409 - RNA, 22 nt, Artificial Sequence
  GATA2 Guide RNA
guguuucggcgccauaaggugg

SEQ ID NO: 8410 - RNA, 22 nt, Artificial Sequence
  GATA2 Guide RNA
guugcagacaggguccccguug

SEQ ID NO: 8411 - RNA, 22 nt, Artificial Sequence
  GATA2 Guide RNA
guugguguuucggcgccauaag

SEQ ID NO: 8412 - RNA, 22 nt, Artificial Sequence
  GATA2 Guide RNA
uauggcgccgaaacaccaacgg

SEQ ID NO: 8413 - RNA, 22 nt, Artificial Sequence
  GATA2 Guide RNA
uccccguugguguuucggcgcc

SEQ ID NO: 8414 - RNA, 22 nt, Artificial Sequence
  GATA2 Guide RNA
ugcagacaggguccccguuggu

SEQ ID NO: 8415 - RNA, 22 nt, Artificial Sequence
  GATA2 Guide RNA
uggcgccgaaacaccaacgggg

SEQ ID NO: 8416 - RNA, 22 nt, Artificial Sequence
  GATA2 Guide RNA
ugguguuucggcgccauaaggu

SEQ ID NO: 8417 - RNA, 22 nt, Artificial Sequence
  GATA2 Guide RNA
uguuucggcgccauaagguggu

SEQ ID NO: 8418 - RNA, 22 nt, Artificial Sequence
  GATA2 Guide RNA
uuauggcgccgaaacaccaacg

SEQ ID NO: 8419 - RNA, 22 nt, Artificial Sequence
  GATA2 Guide RNA
uugcagacaggguccccguugg

SEQ ID NO: 8420 - RNA, 22 nt, Artificial Sequence
  GATA2 Guide RNA
uugguguuucggcgccauaagg

SEQ ID NO: 8421 - RNA, 20 nt, Artificial Sequence
  GATA2 Guide RNA
aaccaccaccuuauggcgcc

SEQ ID NO: 8422 - RNA, 20 nt, Artificial Sequence
  GATA2 Guide RNA
acaggguccccguuggcguu

SEQ ID NO: 8423 - RNA, 20 nt, Artificial Sequence
  GATA2 Guide RNA
accaccaccuuauggcgcca

SEQ ID NO: 8424 - RNA, 20 nt, Artificial Sequence
  GATA2 Guide RNA
accaccuuauggcgccaaaa

SEQ ID NO: 8425 - RNA, 20 nt, Artificial Sequence
  GATA2 Guide RNA
accuuauggcgccaaaacgc

SEQ ID NO: 8426 - RNA, 20 nt, Artificial Sequence
  GATA2 Guide RNA
aggguccccguuggcguuuu

SEQ ID NO: 8427 - RNA, 20 nt, Artificial Sequence
  GATA2 Guide RNA
auggcgccaaaacgccaacg

SEQ ID NO: 8428 - RNA, 20 nt, Artificial Sequence
  GATA2 Guide RNA
caaaacgccaacggggaccc

SEQ ID NO: 8429 - RNA, 20 nt, Artificial Sequence
  GATA2 Guide RNA
caccaccuuauggcgccaaa

SEQ ID NO: 8430 - RNA, 20 nt, Artificial Sequence
  GATA2 Guide RNA
caccuuauggcgccaaaacg

SEQ ID NO: 8431 - RNA, 20 nt, Artificial Sequence
  GATA2 Guide RNA
caggguccccguuggcguuu

SEQ ID NO: 8432 - RNA, 20 nt, Artificial Sequence
  GATA2 Guide RNA
ccaaaacgccaacggggacc

SEQ ID NO: 8433 - RNA, 20 nt, Artificial Sequence
  GATA2 Guide RNA
ccaccaccuuauggcgccaa

SEQ ID NO: 8434 - RNA, 20 nt, Artificial Sequence
  GATA2 Guide RNA
ccaccuuauggcgccaaaac

SEQ ID NO: 8435 - RNA, 20 nt, Artificial Sequence
  GATA2 Guide RNA
ccccguuggcguuuuggcgc

SEQ ID NO: 8436 - RNA, 20 nt, Artificial Sequence
  GATA2 Guide RNA
cccguuggcguuuuggcgcc

SEQ ID NO: 8437 - RNA, 20 nt, Artificial Sequence
  GATA2 Guide RNA
ccguuggcguuuuggcgcca

SEQ ID NO: 8438 - RNA, 20 nt, Artificial Sequence
  GATA2 Guide RNA
ccuuauggcgccaaaacgcc

SEQ ID NO: 8439 - RNA, 20 nt, Artificial Sequence
  GATA2 Guide RNA
cgccaaaacgccaacgggga

SEQ ID NO: 8440 - RNA, 20 nt, Artificial Sequence
  GATA2 Guide RNA
cguuggcguuuuggcgccau

SEQ ID NO: 8441 - RNA, 20 nt, Artificial Sequence
  GATA2 Guide RNA
cguuuuggcgccauaaggug

SEQ ID NO: 8442 - RNA, 20 nt, Artificial Sequence
  GATA2 Guide RNA
cuuauggcgccaaaacgcca

SEQ ID NO: 8443 - RNA, 20 nt, Artificial Sequence
  GATA2 Guide RNA
gacaggguccccguuggcgu

SEQ ID NO: 8444 - RNA, 20 nt, Artificial Sequence
  GATA2 Guide RNA
gccaaaacgccaacggggac

SEQ ID NO: 8445 - RNA, 20 nt, Artificial Sequence
  GATA2 Guide RNA
gcgccaaaacgccaacgggg

SEQ ID NO: 8446 - RNA, 20 nt, Artificial Sequence
  GATA2 Guide RNA
gcguuuuggcgccauaaggu

SEQ ID NO: 8447 - RNA, 20 nt, Artificial Sequence
  GATA2 Guide RNA
ggcgccaaaacgccaacggg

SEQ ID NO: 8448 - RNA, 20 nt, Artificial Sequence
  GATA2 Guide RNA
ggcguuuuggcgccauaagg

SEQ ID NO: 8449 - RNA, 20 nt, Artificial Sequence
  GATA2 Guide RNA
ggguccccguuggcguuuug

SEQ ID NO: 8450 - RNA, 20 nt, Artificial Sequence
  GATA2 Guide RNA
gguccccguuggcguuuugg

SEQ ID NO: 8451 - RNA, 20 nt, Artificial Sequence
  GATA2 Guide RNA
guccccguuggcguuuuggc

SEQ ID NO: 8452 - RNA, 20 nt, Artificial Sequence
  GATA2 Guide RNA
guuggcguuuuggcgccaua

SEQ ID NO: 8453 - RNA, 20 nt, Artificial Sequence
  GATA2 Guide RNA
guuuuggcgccauaaggugg

SEQ ID NO: 8454 - RNA, 20 nt, Artificial Sequence
  GATA2 Guide RNA
uauggcgccaaaacgccaac

SEQ ID NO: 8455 - RNA, 20 nt, Artificial Sequence
  GATA2 Guide RNA
uccccguuggcguuuuggcg

SEQ ID NO: 8456 - RNA, 20 nt, Artificial Sequence
  GATA2 Guide RNA
uggcgccaaaacgccaacgg

SEQ ID NO: 8457 - RNA, 20 nt, Artificial Sequence
  GATA2 Guide RNA
uggcgccauaaggugguggu

SEQ ID NO: 8458 - RNA, 20 nt, Artificial Sequence
  GATA2 Guide RNA
uggcguuuuggcgccauaag

SEQ ID NO: 8459 - RNA, 20 nt, Artificial Sequence
  GATA2 Guide RNA
uuauggcgccaaaacgccaa

SEQ ID NO: 8460 - RNA, 20 nt, Artificial Sequence
  GATA2 Guide RNA
uuggcgccauaagguggugg

SEQ ID NO: 8461 - RNA, 20 nt, Artificial Sequence
  GATA2 Guide RNA
uuggcguuuuggcgccauaa

SEQ ID NO: 8462 - RNA, 20 nt, Artificial Sequence
  GATA2 Guide RNA
uuuggcgccauaagguggug

SEQ ID NO: 8463 - RNA, 20 nt, Artificial Sequence
  GATA2 Guide RNA
uuuuggcgccauaagguggu

SEQ ID NO: 8464 - RNA, 21 nt, Artificial Sequence
  GATA2 Guide RNA
aaccaccaccuuauggcgcca

SEQ ID NO: 8465 - RNA, 21 nt, Artificial Sequence
  GATA2 Guide RNA
acaggguccccguuggcguuu

SEQ ID NO: 8466 - RNA, 21 nt, Artificial Sequence
  GATA2 Guide RNA
accaccaccuuauggcgccaa

SEQ ID NO: 8467 - RNA, 21 nt, Artificial Sequence
  GATA2 Guide RNA
accaccuuauggcgccaaaac

SEQ ID NO: 8468 - RNA, 21 nt, Artificial Sequence
  GATA2 Guide RNA
accuuauggcgccaaaacgcc

SEQ ID NO: 8469 - RNA, 21 nt, Artificial Sequence
  GATA2 Guide RNA
agacaggguccccguuggcgu

SEQ ID NO: 8470 - RNA, 21 nt, Artificial Sequence
  GATA2 Guide RNA
aggguccccguuggcguuuug

SEQ ID NO: 8471 - RNA, 21 nt, Artificial Sequence
  GATA2 Guide RNA
auggcgccaaaacgccaacgg

SEQ ID NO: 8472 - RNA, 21 nt, Artificial Sequence
  GATA2 Guide RNA
caaaacgccaacggggacccu

SEQ ID NO: 8473 - RNA, 21 nt, Artificial Sequence
  GATA2 Guide RNA
caaccaccaccuuauggcgcc

SEQ ID NO: 8474 - RNA, 21 nt, Artificial Sequence
  GATA2 Guide RNA
caccaccuuauggcgccaaaa

SEQ ID NO: 8475 - RNA, 21 nt, Artificial Sequence
  GATA2 Guide RNA
caccuuauggcgccaaaacgc

SEQ ID NO: 8476 - RNA, 21 nt, Artificial Sequence
  GATA2 Guide RNA
caggguccccguuggcguuuu

SEQ ID NO: 8477 - RNA, 21 nt, Artificial Sequence
  GATA2 Guide RNA
ccaaaacgccaacggggaccc

SEQ ID NO: 8478 - RNA, 21 nt, Artificial Sequence
  GATA2 Guide RNA
ccaccaccuuauggcgccaaa

SEQ ID NO: 8479 - RNA, 21 nt, Artificial Sequence
  GATA2 Guide RNA
ccaccuuauggcgccaaaacg

SEQ ID NO: 8480 - RNA, 21 nt, Artificial Sequence
  GATA2 Guide RNA
ccccguuggcguuuuggcgcc

SEQ ID NO: 8481 - RNA, 21 nt, Artificial Sequence
  GATA2 Guide RNA
cccguuggcguuuuggcgcca

SEQ ID NO: 8482 - RNA, 21 nt, Artificial Sequence
  GATA2 Guide RNA
ccguuggcguuuuggcgccau

SEQ ID NO: 8483 - RNA, 21 nt, Artificial Sequence
  GATA2 Guide RNA
ccuuauggcgccaaaacgcca

SEQ ID NO: 8484 - RNA, 21 nt, Artificial Sequence
  GATA2 Guide RNA
cgccaaaacgccaacggggac

SEQ ID NO: 8485 - RNA, 21 nt, Artificial Sequence
  GATA2 Guide RNA
cguuggcguuuuggcgccaua

SEQ ID NO: 8486 - RNA, 21 nt, Artificial Sequence
  GATA2 Guide RNA
cguuuuggcgccauaaggugg

SEQ ID NO: 8487 - RNA, 21 nt, Artificial Sequence
  GATA2 Guide RNA
cuuauggcgccaaaacgccaa

SEQ ID NO: 8488 - RNA, 21 nt, Artificial Sequence
  GATA2 Guide RNA
gacaggguccccguuggcguu

SEQ ID NO: 8489 - RNA, 21 nt, Artificial Sequence
  GATA2 Guide RNA
gccaaaacgccaacggggacc

SEQ ID NO: 8490 - RNA, 21 nt, Artificial Sequence
  GATA2 Guide RNA
gcgccaaaacgccaacgggga

SEQ ID NO: 8491 - RNA, 21 nt, Artificial Sequence
  GATA2 Guide RNA
gcguuuuggcgccauaaggug

SEQ ID NO: 8492 - RNA, 21 nt, Artificial Sequence
  GATA2 Guide RNA
ggcgccaaaacgccaacgggg

SEQ ID NO: 8493 - RNA, 21 nt, Artificial Sequence
  GATA2 Guide RNA
ggcguuuuggcgccauaaggu

SEQ ID NO: 8494 - RNA, 21 nt, Artificial Sequence
  GATA2 Guide RNA
ggguccccguuggcguuuugg

SEQ ID NO: 8495 - RNA, 21 nt, Artificial Sequence
  GATA2 Guide RNA
gguccccguuggcguuuuggc

SEQ ID NO: 8496 - RNA, 21 nt, Artificial Sequence
  GATA2 Guide RNA
guccccguuggcguuuuggcg

SEQ ID NO: 8497 - RNA, 21 nt, Artificial Sequence
  GATA2 Guide RNA
guuggcguuuuggcgccauaa

SEQ ID NO: 8498 - RNA, 21 nt, Artificial Sequence
  GATA2 Guide RNA
guuuuggcgccauaagguggu

SEQ ID NO: 8499 - RNA, 21 nt, Artificial Sequence
  GATA2 Guide RNA
uauggcgccaaaacgccaacg

SEQ ID NO: 8500 - RNA, 21 nt, Artificial Sequence
  GATA2 Guide RNA
uccccguuggcguuuuggcgc

SEQ ID NO: 8501 - RNA, 21 nt, Artificial Sequence
  GATA2 Guide RNA
uggcgccaaaacgccaacggg

SEQ ID NO: 8502 - RNA, 21 nt, Artificial Sequence
  GATA2 Guide RNA
uggcgccauaagguggugguu

SEQ ID NO: 8503 - RNA, 21 nt, Artificial Sequence
  GATA2 Guide RNA
uggcguuuuggcgccauaagg

SEQ ID NO: 8504 - RNA, 21 nt, Artificial Sequence
  GATA2 Guide RNA
uuauggcgccaaaacgccaac

SEQ ID NO: 8505 - RNA, 21 nt, Artificial Sequence
  GATA2 Guide RNA
uuggcgccauaaggugguggu

SEQ ID NO: 8506 - RNA, 21 nt, Artificial Sequence
  GATA2 Guide RNA
uuggcguuuuggcgccauaag

SEQ ID NO: 8507 - RNA, 21 nt, Artificial Sequence
  GATA2 Guide RNA
uuuggcgccauaagguggugg

SEQ ID NO: 8508 - RNA, 21 nt, Artificial Sequence
  GATA2 Guide RNA
uuuuggcgccauaagguggug

SEQ ID NO: 8509 - RNA, 22 nt, Artificial Sequence
  GATA2 Guide RNA
aaccaccaccuuauggcgccaa

SEQ ID NO: 8510 - RNA, 22 nt, Artificial Sequence
  GATA2 Guide RNA
acaaccaccaccuuauggcgcc

SEQ ID NO: 8511 - RNA, 22 nt, Artificial Sequence
  GATA2 Guide RNA
acaggguccccguuggcguuuu

SEQ ID NO: 8512 - RNA, 22 nt, Artificial Sequence
  GATA2 Guide RNA
accaccaccuuauggcgccaaa

SEQ ID NO: 8513 - RNA, 22 nt, Artificial Sequence
  GATA2 Guide RNA
accaccuuauggcgccaaaacg

SEQ ID NO: 8514 - RNA, 22 nt, Artificial Sequence
  GATA2 Guide RNA
accuuauggcgccaaaacgcca

SEQ ID NO: 8515 - RNA, 22 nt, Artificial Sequence
  GATA2 Guide RNA
agacaggguccccguuggcguu

SEQ ID NO: 8516 - RNA, 22 nt, Artificial Sequence
  GATA2 Guide RNA
aggguccccguuggcguuuugg

SEQ ID NO: 8517 - RNA, 22 nt, Artificial Sequence
  GATA2 Guide RNA
auggcgccaaaacgccaacggg

SEQ ID NO: 8518 - RNA, 22 nt, Artificial Sequence
  GATA2 Guide RNA
caaaacgccaacggggacccug

SEQ ID NO: 8519 - RNA, 22 nt, Artificial Sequence
  GATA2 Guide RNA
caaccaccaccuuauggcgcca

SEQ ID NO: 8520 - RNA, 22 nt, Artificial Sequence
  GATA2 Guide RNA
caccaccuuauggcgccaaaac

SEQ ID NO: 8521 - RNA, 22 nt, Artificial Sequence
  GATA2 Guide RNA
caccuuauggcgccaaaacgcc

SEQ ID NO: 8522 - RNA, 22 nt, Artificial Sequence
  GATA2 Guide RNA
cagacaggguccccguuggcgu

SEQ ID NO: 8523 - RNA, 22 nt, Artificial Sequence
  GATA2 Guide RNA
caggguccccguuggcguuuug

SEQ ID NO: 8524 - RNA, 22 nt, Artificial Sequence
  GATA2 Guide RNA
ccaaaacgccaacggggacccu

SEQ ID NO: 8525 - RNA, 22 nt, Artificial Sequence
  GATA2 Guide RNA
ccaccaccuuauggcgccaaaa

SEQ ID NO: 8526 - RNA, 22 nt, Artificial Sequence
  GATA2 Guide RNA
ccaccuuauggcgccaaaacgc

SEQ ID NO: 8527 - RNA, 22 nt, Artificial Sequence
  GATA2 Guide RNA
ccccguuggcguuuuggcgcca

SEQ ID NO: 8528 - RNA, 22 nt, Artificial Sequence
  GATA2 Guide RNA
cccguuggcguuuuggcgccau

SEQ ID NO: 8529 - RNA, 22 nt, Artificial Sequence
  GATA2 Guide RNA
ccguuggcguuuuggcgccaua

SEQ ID NO: 8530 - RNA, 22 nt, Artificial Sequence
  GATA2 Guide RNA
ccuuauggcgccaaaacgccaa

SEQ ID NO: 8531 - RNA, 22 nt, Artificial Sequence
  GATA2 Guide RNA
cgccaaaacgccaacggggacc

SEQ ID NO: 8532 - RNA, 22 nt, Artificial Sequence
  GATA2 Guide RNA
cguuggcguuuuggcgccauaa

SEQ ID NO: 8533 - RNA, 22 nt, Artificial Sequence
  GATA2 Guide RNA
cguuuuggcgccauaagguggu

SEQ ID NO: 8534 - RNA, 22 nt, Artificial Sequence
  GATA2 Guide RNA
cuuauggcgccaaaacgccaac

SEQ ID NO: 8535 - RNA, 22 nt, Artificial Sequence
  GATA2 Guide RNA
gacaggguccccguuggcguuu

SEQ ID NO: 8536 - RNA, 22 nt, Artificial Sequence
  GATA2 Guide RNA
gccaaaacgccaacggggaccc

SEQ ID NO: 8537 - RNA, 22 nt, Artificial Sequence
  GATA2 Guide RNA
gcgccaaaacgccaacggggac

SEQ ID NO: 8538 - RNA, 22 nt, Artificial Sequence
  GATA2 Guide RNA
gcguuuuggcgccauaaggugg

SEQ ID NO: 8539 - RNA, 22 nt, Artificial Sequence
  GATA2 Guide RNA
ggcgccaaaacgccaacgggga

SEQ ID NO: 8540 - RNA, 22 nt, Artificial Sequence
  GATA2 Guide RNA
ggcguuuuggcgccauaaggug

SEQ ID NO: 8541 - RNA, 22 nt, Artificial Sequence
  GATA2 Guide RNA
ggguccccguuggcguuuuggc

SEQ ID NO: 8542 - RNA, 22 nt, Artificial Sequence
  GATA2 Guide RNA
gguccccguuggcguuuuggcg

SEQ ID NO: 8543 - RNA, 22 nt, Artificial Sequence
  GATA2 Guide RNA
guccccguuggcguuuuggcgc

SEQ ID NO: 8544 - RNA, 22 nt, Artificial Sequence
  GATA2 Guide RNA
guuggcguuuuggcgccauaag

SEQ ID NO: 8545 - RNA, 22 nt, Artificial Sequence
  GATA2 Guide RNA
guuuuggcgccauaagguggug

SEQ ID NO: 8546 - RNA, 22 nt, Artificial Sequence
  GATA2 Guide RNA
uauggcgccaaaacgccaacgg

SEQ ID NO: 8547 - RNA, 22 nt, Artificial Sequence
  GATA2 Guide RNA
uccccguuggcguuuuggcgcc

SEQ ID NO: 8548 - RNA, 22 nt, Artificial Sequence
  GATA2 Guide RNA
uggcgccaaaacgccaacgggg

SEQ ID NO: 8549 - RNA, 22 nt, Artificial Sequence
  GATA2 Guide RNA
uggcgccauaagguggugguug

SEQ ID NO: 8550 - RNA, 22 nt, Artificial Sequence
  GATA2 Guide RNA
uggcguuuuggcgccauaaggu

SEQ ID NO: 8551 - RNA, 22 nt, Artificial Sequence
  GATA2 Guide RNA
uuauggcgccaaaacgccaacg

SEQ ID NO: 8552 - RNA, 22 nt, Artificial Sequence
  GATA2 Guide RNA
uuggcgccauaagguggugguu

SEQ ID NO: 8553 - RNA, 22 nt, Artificial Sequence
  GATA2 Guide RNA
uuggcguuuuggcgccauaagg

SEQ ID NO: 8554 - RNA, 22 nt, Artificial Sequence
  GATA2 Guide RNA
uuuggcgccauaaggugguggu

SEQ ID NO: 8555 - RNA, 22 nt, Artificial Sequence
  GATA2 Guide RNA
uuuuggcgccauaagguggugg

SEQ ID NO: 8556 - RNA, 20 nt, Artificial Sequence
  GATA2 Guide RNA
aaccaccaccuuauggcgcu

SEQ ID NO: 8557 - RNA, 20 nt, Artificial Sequence
  GATA2 Guide RNA
accaccaccuuauggcgcug

SEQ ID NO: 8558 - RNA, 20 nt, Artificial Sequence
  GATA2 Guide RNA
accaccuuauggcgcugaaa

SEQ ID NO: 8559 - RNA, 20 nt, Artificial Sequence
  GATA2 Guide RNA
accuuauggcgcugaaacgc

SEQ ID NO: 8560 - RNA, 20 nt, Artificial Sequence
  GATA2 Guide RNA
agcgccauaagguggugguu

SEQ ID NO: 8561 - RNA, 20 nt, Artificial Sequence
  GATA2 Guide RNA
aggguccccguuggcguuuc

SEQ ID NO: 8562 - RNA, 20 nt, Artificial Sequence
  GATA2 Guide RNA
auggcgcugaaacgccaacg

SEQ ID NO: 8563 - RNA, 20 nt, Artificial Sequence
  GATA2 Guide RNA
caccaccuuauggcgcugaa

SEQ ID NO: 8564 - RNA, 20 nt, Artificial Sequence
  GATA2 Guide RNA
caccuuauggcgcugaaacg

SEQ ID NO: 8565 - RNA, 20 nt, Artificial Sequence
  GATA2 Guide RNA
cagcgccauaaggugguggu

SEQ ID NO: 8566 - RNA, 20 nt, Artificial Sequence
  GATA2 Guide RNA
ccaccaccuuauggcgcuga

SEQ ID NO: 8567 - RNA, 20 nt, Artificial Sequence
  GATA2 Guide RNA
ccaccuuauggcgcugaaac

SEQ ID NO: 8568 - RNA, 20 nt, Artificial Sequence
  GATA2 Guide RNA
ccccguuggcguuucagcgc

SEQ ID NO: 8569 - RNA, 20 nt, Artificial Sequence
  GATA2 Guide RNA
cccguuggcguuucagcgcc

SEQ ID NO: 8570 - RNA, 20 nt, Artificial Sequence
  GATA2 Guide RNA
ccguuggcguuucagcgcca

SEQ ID NO: 8571 - RNA, 20 nt, Artificial Sequence
  GATA2 Guide RNA
ccuuauggcgcugaaacgcc

SEQ ID NO: 8572 - RNA, 20 nt, Artificial Sequence
  GATA2 Guide RNA
cgcugaaacgccaacgggga

SEQ ID NO: 8573 - RNA, 20 nt, Artificial Sequence
  GATA2 Guide RNA
cguuggcguuucagcgccau

SEQ ID NO: 8574 - RNA, 20 nt, Artificial Sequence
  GATA2 Guide RNA
cguuucagcgccauaaggug

SEQ ID NO: 8575 - RNA, 20 nt, Artificial Sequence
  GATA2 Guide RNA
cugaaacgccaacggggacc

SEQ ID NO: 8576 - RNA, 20 nt, Artificial Sequence
  GATA2 Guide RNA
cuuauggcgcugaaacgcca

SEQ ID NO: 8577 - RNA, 20 nt, Artificial Sequence
  GATA2 Guide RNA
gcgcugaaacgccaacgggg

SEQ ID NO: 8578 - RNA, 20 nt, Artificial Sequence
  GATA2 Guide RNA
gcguuucagcgccauaaggu

SEQ ID NO: 8579 - RNA, 20 nt, Artificial Sequence
  GATA2 Guide RNA
gcugaaacgccaacggggac

SEQ ID NO: 8580 - RNA, 20 nt, Artificial Sequence
  GATA2 Guide RNA
ggcgcugaaacgccaacggg

SEQ ID NO: 8581 - RNA, 20 nt, Artificial Sequence
  GATA2 Guide RNA
ggcguuucagcgccauaagg

SEQ ID NO: 8582 - RNA, 20 nt, Artificial Sequence
  GATA2 Guide RNA
ggguccccguuggcguuuca

SEQ ID NO: 8583 - RNA, 20 nt, Artificial Sequence
  GATA2 Guide RNA
gguccccguuggcguuucag

SEQ ID NO: 8584 - RNA, 20 nt, Artificial Sequence
  GATA2 Guide RNA
guccccguuggcguuucagc

SEQ ID NO: 8585 - RNA, 20 nt, Artificial Sequence
  GATA2 Guide RNA
guuggcguuucagcgccaua

SEQ ID NO: 8586 - RNA, 20 nt, Artificial Sequence
  GATA2 Guide RNA
guuucagcgccauaaggugg

SEQ ID NO: 8587 - RNA, 20 nt, Artificial Sequence
  GATA2 Guide RNA
uauggcgcugaaacgccaac

SEQ ID NO: 8588 - RNA, 20 nt, Artificial Sequence
  GATA2 Guide RNA
ucagcgccauaagguggugg

SEQ ID NO: 8589 - RNA, 20 nt, Artificial Sequence
  GATA2 Guide RNA
uccccguuggcguuucagcg

SEQ ID NO: 8590 - RNA, 20 nt, Artificial Sequence
  GATA2 Guide RNA
uggcgcugaaacgccaacgg

SEQ ID NO: 8591 - RNA, 20 nt, Artificial Sequence
  GATA2 Guide RNA
uggcguuucagcgccauaag

SEQ ID NO: 8592 - RNA, 20 nt, Artificial Sequence
  GATA2 Guide RNA
uuauggcgcugaaacgccaa

SEQ ID NO: 8593 - RNA, 20 nt, Artificial Sequence
  GATA2 Guide RNA
uucagcgccauaagguggug

SEQ ID NO: 8594 - RNA, 20 nt, Artificial Sequence
  GATA2 Guide RNA
uuggcguuucagcgccauaa

SEQ ID NO: 8595 - RNA, 20 nt, Artificial Sequence
  GATA2 Guide RNA
uuucagcgccauaagguggu

SEQ ID NO: 8596 - RNA, 21 nt, Artificial Sequence
  GATA2 Guide RNA
aaccaccaccuuauggcgcug

SEQ ID NO: 8597 - RNA, 21 nt, Artificial Sequence
  GATA2 Guide RNA
accaccaccuuauggcgcuga

SEQ ID NO: 8598 - RNA, 21 nt, Artificial Sequence
  GATA2 Guide RNA
accaccuuauggcgcugaaac

SEQ ID NO: 8599 - RNA, 21 nt, Artificial Sequence
  GATA2 Guide RNA
accuuauggcgcugaaacgcc

SEQ ID NO: 8600 - RNA, 21 nt, Artificial Sequence
  GATA2 Guide RNA
agcgccauaagguggugguug

SEQ ID NO: 8601 - RNA, 21 nt, Artificial Sequence
  GATA2 Guide RNA
aggguccccguuggcguuuca

SEQ ID NO: 8602 - RNA, 21 nt, Artificial Sequence
  GATA2 Guide RNA
auggcgcugaaacgccaacgg

SEQ ID NO: 8603 - RNA, 21 nt, Artificial Sequence
  GATA2 Guide RNA
caaccaccaccuuauggcgcu

SEQ ID NO: 8604 - RNA, 21 nt, Artificial Sequence
  GATA2 Guide RNA
caccaccuuauggcgcugaaa

SEQ ID NO: 8605 - RNA, 21 nt, Artificial Sequence
  GATA2 Guide RNA
caccuuauggcgcugaaacgc

SEQ ID NO: 8606 - RNA, 21 nt, Artificial Sequence
  GATA2 Guide RNA
cagcgccauaagguggugguu

SEQ ID NO: 8607 - RNA, 21 nt, Artificial Sequence
  GATA2 Guide RNA
caggguccccguuggcguuuc

SEQ ID NO: 8608 - RNA, 21 nt, Artificial Sequence
  GATA2 Guide RNA
ccaccaccuuauggcgcugaa

SEQ ID NO: 8609 - RNA, 21 nt, Artificial Sequence
  GATA2 Guide RNA
ccaccuuauggcgcugaaacg

SEQ ID NO: 8610 - RNA, 21 nt, Artificial Sequence
  GATA2 Guide RNA
ccccguuggcguuucagcgcc

SEQ ID NO: 8611 - RNA, 21 nt, Artificial Sequence
  GATA2 Guide RNA
cccguuggcguuucagcgcca

SEQ ID NO: 8612 - RNA, 21 nt, Artificial Sequence
  GATA2 Guide RNA
ccguuggcguuucagcgccau

SEQ ID NO: 8613 - RNA, 21 nt, Artificial Sequence
  GATA2 Guide RNA
ccuuauggcgcugaaacgcca

SEQ ID NO: 8614 - RNA, 21 nt, Artificial Sequence
  GATA2 Guide RNA
cgcugaaacgccaacggggac

SEQ ID NO: 8615 - RNA, 21 nt, Artificial Sequence
  GATA2 Guide RNA
cguuggcguuucagcgccaua

SEQ ID NO: 8616 - RNA, 21 nt, Artificial Sequence
  GATA2 Guide RNA
cguuucagcgccauaaggugg

SEQ ID NO: 8617 - RNA, 21 nt, Artificial Sequence
  GATA2 Guide RNA
cugaaacgccaacggggaccc

SEQ ID NO: 8618 - RNA, 21 nt, Artificial Sequence
  GATA2 Guide RNA
cuuauggcgcugaaacgccaa

SEQ ID NO: 8619 - RNA, 21 nt, Artificial Sequence
  GATA2 Guide RNA
gcgcugaaacgccaacgggga

SEQ ID NO: 8620 - RNA, 21 nt, Artificial Sequence
  GATA2 Guide RNA
gcguuucagcgccauaaggug

SEQ ID NO: 8621 - RNA, 21 nt, Artificial Sequence
  GATA2 Guide RNA
gcugaaacgccaacggggacc

SEQ ID NO: 8622 - RNA, 21 nt, Artificial Sequence
  GATA2 Guide RNA
ggcgcugaaacgccaacgggg

SEQ ID NO: 8623 - RNA, 21 nt, Artificial Sequence
  GATA2 Guide RNA
ggcguuucagcgccauaaggu

SEQ ID NO: 8624 - RNA, 21 nt, Artificial Sequence
  GATA2 Guide RNA
ggguccccguuggcguuucag

SEQ ID NO: 8625 - RNA, 21 nt, Artificial Sequence
  GATA2 Guide RNA
gguccccguuggcguuucagc

SEQ ID NO: 8626 - RNA, 21 nt, Artificial Sequence
  GATA2 Guide RNA
guccccguuggcguuucagcg

SEQ ID NO: 8627 - RNA, 21 nt, Artificial Sequence
  GATA2 Guide RNA
guuggcguuucagcgccauaa

SEQ ID NO: 8628 - RNA, 21 nt, Artificial Sequence
  GATA2 Guide RNA
guuucagcgccauaagguggu

SEQ ID NO: 8629 - RNA, 21 nt, Artificial Sequence
  GATA2 Guide RNA
uauggcgcugaaacgccaacg

SEQ ID NO: 8630 - RNA, 21 nt, Artificial Sequence
  GATA2 Guide RNA
ucagcgccauaaggugguggu

SEQ ID NO: 8631 - RNA, 21 nt, Artificial Sequence
  GATA2 Guide RNA
uccccguuggcguuucagcgc

SEQ ID NO: 8632 - RNA, 21 nt, Artificial Sequence
  GATA2 Guide RNA
uggcgcugaaacgccaacggg

SEQ ID NO: 8633 - RNA, 21 nt, Artificial Sequence
  GATA2 Guide RNA
uggcguuucagcgccauaagg

SEQ ID NO: 8634 - RNA, 21 nt, Artificial Sequence
  GATA2 Guide RNA
uuauggcgcugaaacgccaac

SEQ ID NO: 8635 - RNA, 21 nt, Artificial Sequence
  GATA2 Guide RNA
uucagcgccauaagguggugg

SEQ ID NO: 8636 - RNA, 21 nt, Artificial Sequence
  GATA2 Guide RNA
uuggcguuucagcgccauaag

SEQ ID NO: 8637 - RNA, 21 nt, Artificial Sequence
  GATA2 Guide RNA
uuucagcgccauaagguggug

SEQ ID NO: 8638 - RNA, 22 nt, Artificial Sequence
  GATA2 Guide RNA
aaccaccaccuuauggcgcuga

SEQ ID NO: 8639 - RNA, 22 nt, Artificial Sequence
  GATA2 Guide RNA
acaaccaccaccuuauggcgcu

SEQ ID NO: 8640 - RNA, 22 nt, Artificial Sequence
  GATA2 Guide RNA
acaggguccccguuggcguuuc

SEQ ID NO: 8641 - RNA, 22 nt, Artificial Sequence
  GATA2 Guide RNA
accaccaccuuauggcgcugaa

SEQ ID NO: 8642 - RNA, 22 nt, Artificial Sequence
  GATA2 Guide RNA
accaccuuauggcgcugaaacg

SEQ ID NO: 8643 - RNA, 22 nt, Artificial Sequence
  GATA2 Guide RNA
accuuauggcgcugaaacgcca

SEQ ID NO: 8644 - RNA, 22 nt, Artificial Sequence
  GATA2 Guide RNA
agcgccauaagguggugguugu

SEQ ID NO: 8645 - RNA, 22 nt, Artificial Sequence
  GATA2 Guide RNA
aggguccccguuggcguuucag

SEQ ID NO: 8646 - RNA, 22 nt, Artificial Sequence
  GATA2 Guide RNA
auggcgcugaaacgccaacggg

SEQ ID NO: 8647 - RNA, 22 nt, Artificial Sequence
  GATA2 Guide RNA
caaccaccaccuuauggcgcug

SEQ ID NO: 8648 - RNA, 22 nt, Artificial Sequence
  GATA2 Guide RNA
caccaccuuauggcgcugaaac

SEQ ID NO: 8649 - RNA, 22 nt, Artificial Sequence
  GATA2 Guide RNA
caccuuauggcgcugaaacgcc

SEQ ID NO: 8650 - RNA, 22 nt, Artificial Sequence
  GATA2 Guide RNA
cagcgccauaagguggugguug

SEQ ID NO: 8651 - RNA, 22 nt, Artificial Sequence
  GATA2 Guide RNA
caggguccccguuggcguuuca

SEQ ID NO: 8652 - RNA, 22 nt, Artificial Sequence
  GATA2 Guide RNA
ccaccaccuuauggcgcugaaa

SEQ ID NO: 8653 - RNA, 22 nt, Artificial Sequence
  GATA2 Guide RNA
ccaccuuauggcgcugaaacgc

SEQ ID NO: 8654 - RNA, 22 nt, Artificial Sequence
  GATA2 Guide RNA
ccccguuggcguuucagcgcca

SEQ ID NO: 8655 - RNA, 22 nt, Artificial Sequence
  GATA2 Guide RNA
cccguuggcguuucagcgccau

SEQ ID NO: 8656 - RNA, 22 nt, Artificial Sequence
  GATA2 Guide RNA
ccguuggcguuucagcgccaua

SEQ ID NO: 8657 - RNA, 22 nt, Artificial Sequence
  GATA2 Guide RNA
ccuuauggcgcugaaacgccaa

SEQ ID NO: 8658 - RNA, 22 nt, Artificial Sequence
  GATA2 Guide RNA
cgcugaaacgccaacggggacc

SEQ ID NO: 8659 - RNA, 22 nt, Artificial Sequence
  GATA2 Guide RNA
cguuggcguuucagcgccauaa

SEQ ID NO: 8660 - RNA, 22 nt, Artificial Sequence
  GATA2 Guide RNA
cguuucagcgccauaagguggu

SEQ ID NO: 8661 - RNA, 22 nt, Artificial Sequence
  GATA2 Guide RNA
cugaaacgccaacggggacccu

SEQ ID NO: 8662 - RNA, 22 nt, Artificial Sequence
  GATA2 Guide RNA
cuuauggcgcugaaacgccaac

SEQ ID NO: 8663 - RNA, 22 nt, Artificial Sequence
  GATA2 Guide RNA
gcgcugaaacgccaacggggac

SEQ ID NO: 8664 - RNA, 22 nt, Artificial Sequence
  GATA2 Guide RNA
gcguuucagcgccauaaggugg

SEQ ID NO: 8665 - RNA, 22 nt, Artificial Sequence
  GATA2 Guide RNA
gcugaaacgccaacggggaccc

SEQ ID NO: 8666 - RNA, 22 nt, Artificial Sequence
  GATA2 Guide RNA
ggcgcugaaacgccaacgggga

SEQ ID NO: 8667 - RNA, 22 nt, Artificial Sequence
  GATA2 Guide RNA
ggcguuucagcgccauaaggug

SEQ ID NO: 8668 - RNA, 22 nt, Artificial Sequence
  GATA2 Guide RNA
ggguccccguuggcguuucagc

SEQ ID NO: 8669 - RNA, 22 nt, Artificial Sequence
  GATA2 Guide RNA
gguccccguuggcguuucagcg

SEQ ID NO: 8670 - RNA, 22 nt, Artificial Sequence
  GATA2 Guide RNA
guccccguuggcguuucagcgc

SEQ ID NO: 8671 - RNA, 22 nt, Artificial Sequence
  GATA2 Guide RNA
guuggcguuucagcgccauaag

SEQ ID NO: 8672 - RNA, 22 nt, Artificial Sequence
  GATA2 Guide RNA
guuucagcgccauaagguggug

SEQ ID NO: 8673 - RNA, 22 nt, Artificial Sequence
  GATA2 Guide RNA
uauggcgcugaaacgccaacgg

SEQ ID NO: 8674 - RNA, 22 nt, Artificial Sequence
  GATA2 Guide RNA
ucagcgccauaagguggugguu

SEQ ID NO: 8675 - RNA, 22 nt, Artificial Sequence
  GATA2 Guide RNA
uccccguuggcguuucagcgcc

SEQ ID NO: 8676 - RNA, 22 nt, Artificial Sequence
  GATA2 Guide RNA
uggcgcugaaacgccaacgggg

SEQ ID NO: 8677 - RNA, 22 nt, Artificial Sequence
  GATA2 Guide RNA
uggcguuucagcgccauaaggu

SEQ ID NO: 8678 - RNA, 22 nt, Artificial Sequence
  GATA2 Guide RNA
uuauggcgcugaaacgccaacg

SEQ ID NO: 8679 - RNA, 22 nt, Artificial Sequence
  GATA2 Guide RNA
uucagcgccauaaggugguggu

SEQ ID NO: 8680 - RNA, 22 nt, Artificial Sequence
  GATA2 Guide RNA
uuggcguuucagcgccauaagg

SEQ ID NO: 8681 - RNA, 22 nt, Artificial Sequence
  GATA2 Guide RNA
uuucagcgccauaagguggugg

SEQ ID NO: 8682 - RNA, 20 nt, Artificial Sequence
  GATA2 Guide RNA
aaccaccaccuuauggcucc

SEQ ID NO: 8683 - RNA, 20 nt, Artificial Sequence
  GATA2 Guide RNA
acaaccaccaccuuauggcu

SEQ ID NO: 8684 - RNA, 20 nt, Artificial Sequence
  GATA2 Guide RNA
accaccaccuuauggcuccg

SEQ ID NO: 8685 - RNA, 20 nt, Artificial Sequence
  GATA2 Guide RNA
accaccuuauggcuccgaaa

SEQ ID NO: 8686 - RNA, 20 nt, Artificial Sequence
  GATA2 Guide RNA
accuuauggcuccgaaacgc

SEQ ID NO: 8687 - RNA, 20 nt, Artificial Sequence
  GATA2 Guide RNA
acgacaaccaccaccuuaug

SEQ ID NO: 8688 - RNA, 20 nt, Artificial Sequence
  GATA2 Guide RNA
agccauaagguggugguugu

SEQ ID NO: 8689 - RNA, 20 nt, Artificial Sequence
  GATA2 Guide RNA
auggcuccgaaacgccaacg

SEQ ID NO: 8690 - RNA, 20 nt, Artificial Sequence
  GATA2 Guide RNA
caaccaccaccuuauggcuc

SEQ ID NO: 8691 - RNA, 20 nt, Artificial Sequence
  GATA2 Guide RNA
caccaccuuauggcuccgaa

SEQ ID NO: 8692 - RNA, 20 nt, Artificial Sequence
  GATA2 Guide RNA
caccuuauggcuccgaaacg

SEQ ID NO: 8693 - RNA, 20 nt, Artificial Sequence
  GATA2 Guide RNA
ccaccaccuuauggcuccga

SEQ ID NO: 8694 - RNA, 20 nt, Artificial Sequence
  GATA2 Guide RNA
ccaccuuauggcuccgaaac

SEQ ID NO: 8695 - RNA, 20 nt, Artificial Sequence
  GATA2 Guide RNA
ccccguuggcguuucggagc

SEQ ID NO: 8696 - RNA, 20 nt, Artificial Sequence
  GATA2 Guide RNA
cccguuggcguuucggagcc

SEQ ID NO: 8697 - RNA, 20 nt, Artificial Sequence
  GATA2 Guide RNA
ccguuggcguuucggagcca

SEQ ID NO: 8698 - RNA, 20 nt, Artificial Sequence
  GATA2 Guide RNA
ccuuauggcuccgaaacgcc

SEQ ID NO: 8699 - RNA, 20 nt, Artificial Sequence
  GATA2 Guide RNA
cggagccauaaggugguggu

SEQ ID NO: 8700 - RNA, 20 nt, Artificial Sequence
  GATA2 Guide RNA
cguuggcguuucggagccau

SEQ ID NO: 8701 - RNA, 20 nt, Artificial Sequence
  GATA2 Guide RNA
cguuucggagccauaaggug

SEQ ID NO: 8702 - RNA, 20 nt, Artificial Sequence
  GATA2 Guide RNA
cuccgaaacgccaacgggga

SEQ ID NO: 8703 - RNA, 20 nt, Artificial Sequence
  GATA2 Guide RNA
cuuauggcuccgaaacgcca

SEQ ID NO: 8704 - RNA, 20 nt, Artificial Sequence
  GATA2 Guide RNA
gacgacaaccaccaccuuau

SEQ ID NO: 8705 - RNA, 20 nt, Artificial Sequence
  GATA2 Guide RNA
gagccauaagguggugguug

SEQ ID NO: 8706 - RNA, 20 nt, Artificial Sequence
  GATA2 Guide RNA
gcguuucggagccauaaggu

SEQ ID NO: 8707 - RNA, 20 nt, Artificial Sequence
  GATA2 Guide RNA
gcuccgaaacgccaacgggg

SEQ ID NO: 8708 - RNA, 20 nt, Artificial Sequence
  GATA2 Guide RNA
ggagccauaagguggugguu

SEQ ID NO: 8709 - RNA, 20 nt, Artificial Sequence
  GATA2 Guide RNA
ggcguuucggagccauaagg

SEQ ID NO: 8710 - RNA, 20 nt, Artificial Sequence
  GATA2 Guide RNA
ggcuccgaaacgccaacggg

SEQ ID NO: 8711 - RNA, 20 nt, Artificial Sequence
  GATA2 Guide RNA
ggguccccguuggcguuucg

SEQ ID NO: 8712 - RNA, 20 nt, Artificial Sequence
  GATA2 Guide RNA
gguccccguuggcguuucgg

SEQ ID NO: 8713 - RNA, 20 nt, Artificial Sequence
  GATA2 Guide RNA
guccccguuggcguuucgga

SEQ ID NO: 8714 - RNA, 20 nt, Artificial Sequence
  GATA2 Guide RNA
guuggcguuucggagccaua

SEQ ID NO: 8715 - RNA, 20 nt, Artificial Sequence
  GATA2 Guide RNA
guuucggagccauaaggugg

SEQ ID NO: 8716 - RNA, 20 nt, Artificial Sequence
  GATA2 Guide RNA
uauggcuccgaaacgccaac

SEQ ID NO: 8717 - RNA, 20 nt, Artificial Sequence
  GATA2 Guide RNA
uccccguuggcguuucggag

SEQ ID NO: 8718 - RNA, 20 nt, Artificial Sequence
  GATA2 Guide RNA
ucggagccauaagguggugg

SEQ ID NO: 8719 - RNA, 20 nt, Artificial Sequence
  GATA2 Guide RNA
uggcguuucggagccauaag

SEQ ID NO: 8720 - RNA, 20 nt, Artificial Sequence
  GATA2 Guide RNA
uggcuccgaaacgccaacgg

SEQ ID NO: 8721 - RNA, 20 nt, Artificial Sequence
  GATA2 Guide RNA
uuauggcuccgaaacgccaa

SEQ ID NO: 8722 - RNA, 20 nt, Artificial Sequence
  GATA2 Guide RNA
uucggagccauaagguggug

SEQ ID NO: 8723 - RNA, 20 nt, Artificial Sequence
  GATA2 Guide RNA
uuggcguuucggagccauaa

SEQ ID NO: 8724 - RNA, 20 nt, Artificial Sequence
  GATA2 Guide RNA
uuucggagccauaagguggu

SEQ ID NO: 8725 - RNA, 21 nt, Artificial Sequence
  GATA2 Guide RNA
aaccaccaccuuauggcuccg

SEQ ID NO: 8726 - RNA, 21 nt, Artificial Sequence
  GATA2 Guide RNA
acaaccaccaccuuauggcuc

SEQ ID NO: 8727 - RNA, 21 nt, Artificial Sequence
  GATA2 Guide RNA
accaccaccuuauggcuccga

SEQ ID NO: 8728 - RNA, 21 nt, Artificial Sequence
  GATA2 Guide RNA
accaccuuauggcuccgaaac

SEQ ID NO: 8729 - RNA, 21 nt, Artificial Sequence
  GATA2 Guide RNA
accuuauggcuccgaaacgcc

SEQ ID NO: 8730 - RNA, 21 nt, Artificial Sequence
  GATA2 Guide RNA
agacgacaaccaccaccuuau

SEQ ID NO: 8731 - RNA, 21 nt, Artificial Sequence
  GATA2 Guide RNA
agccauaagguggugguuguc

SEQ ID NO: 8732 - RNA, 21 nt, Artificial Sequence
  GATA2 Guide RNA
aggguccccguuggcguuucg

SEQ ID NO: 8733 - RNA, 21 nt, Artificial Sequence
  GATA2 Guide RNA
auggcuccgaaacgccaacgg

SEQ ID NO: 8734 - RNA, 21 nt, Artificial Sequence
  GATA2 Guide RNA
caaccaccaccuuauggcucc

SEQ ID NO: 8735 - RNA, 21 nt, Artificial Sequence
  GATA2 Guide RNA
caccaccuuauggcuccgaaa

SEQ ID NO: 8736 - RNA, 21 nt, Artificial Sequence
  GATA2 Guide RNA
caccuuauggcuccgaaacgc

SEQ ID NO: 8737 - RNA, 21 nt, Artificial Sequence
  GATA2 Guide RNA
ccaccaccuuauggcuccgaa

SEQ ID NO: 8738 - RNA, 21 nt, Artificial Sequence
  GATA2 Guide RNA
ccaccuuauggcuccgaaacg

SEQ ID NO: 8739 - RNA, 21 nt, Artificial Sequence
  GATA2 Guide RNA
ccccguuggcguuucggagcc

SEQ ID NO: 8740 - RNA, 21 nt, Artificial Sequence
  GATA2 Guide RNA
cccguuggcguuucggagcca

SEQ ID NO: 8741 - RNA, 21 nt, Artificial Sequence
  GATA2 Guide RNA
ccguuggcguuucggagccau

SEQ ID NO: 8742 - RNA, 21 nt, Artificial Sequence
  GATA2 Guide RNA
ccuuauggcuccgaaacgcca

SEQ ID NO: 8743 - RNA, 21 nt, Artificial Sequence
  GATA2 Guide RNA
cggagccauaagguggugguu

SEQ ID NO: 8744 - RNA, 21 nt, Artificial Sequence
  GATA2 Guide RNA
cguuggcguuucggagccaua

SEQ ID NO: 8745 - RNA, 21 nt, Artificial Sequence
  GATA2 Guide RNA
cguuucggagccauaaggugg

SEQ ID NO: 8746 - RNA, 21 nt, Artificial Sequence
  GATA2 Guide RNA
cuccgaaacgccaacggggac

SEQ ID NO: 8747 - RNA, 21 nt, Artificial Sequence
  GATA2 Guide RNA
cuuauggcuccgaaacgccaa

SEQ ID NO: 8748 - RNA, 21 nt, Artificial Sequence
  GATA2 Guide RNA
gacaaccaccaccuuauggcu

SEQ ID NO: 8749 - RNA, 21 nt, Artificial Sequence
  GATA2 Guide RNA
gacgacaaccaccaccuuaug

SEQ ID NO: 8750 - RNA, 21 nt, Artificial Sequence
  GATA2 Guide RNA
gagccauaagguggugguugu

SEQ ID NO: 8751 - RNA, 21 nt, Artificial Sequence
  GATA2 Guide RNA
gcguuucggagccauaaggug

SEQ ID NO: 8752 - RNA, 21 nt, Artificial Sequence
  GATA2 Guide RNA
gcuccgaaacgccaacgggga

SEQ ID NO: 8753 - RNA, 21 nt, Artificial Sequence
  GATA2 Guide RNA
ggagccauaagguggugguug

SEQ ID NO: 8754 - RNA, 21 nt, Artificial Sequence
  GATA2 Guide RNA
ggcguuucggagccauaaggu

SEQ ID NO: 8755 - RNA, 21 nt, Artificial Sequence
  GATA2 Guide RNA
ggcuccgaaacgccaacgggg

SEQ ID NO: 8756 - RNA, 21 nt, Artificial Sequence
  GATA2 Guide RNA
ggguccccguuggcguuucgg

SEQ ID NO: 8757 - RNA, 21 nt, Artificial Sequence
  GATA2 Guide RNA
gguccccguuggcguuucgga

SEQ ID NO: 8758 - RNA, 21 nt, Artificial Sequence
  GATA2 Guide RNA
guccccguuggcguuucggag

SEQ ID NO: 8759 - RNA, 21 nt, Artificial Sequence
  GATA2 Guide RNA
guuggcguuucggagccauaa

SEQ ID NO: 8760 - RNA, 21 nt, Artificial Sequence
  GATA2 Guide RNA
guuucggagccauaagguggu

SEQ ID NO: 8761 - RNA, 21 nt, Artificial Sequence
  GATA2 Guide RNA
uauggcuccgaaacgccaacg

SEQ ID NO: 8762 - RNA, 21 nt, Artificial Sequence
  GATA2 Guide RNA
uccccguuggcguuucggagc

SEQ ID NO: 8763 - RNA, 21 nt, Artificial Sequence
  GATA2 Guide RNA
ucggagccauaaggugguggu

SEQ ID NO: 8764 - RNA, 21 nt, Artificial Sequence
  GATA2 Guide RNA
uggcguuucggagccauaagg

SEQ ID NO: 8765 - RNA, 21 nt, Artificial Sequence
  GATA2 Guide RNA
uggcuccgaaacgccaacggg

SEQ ID NO: 8766 - RNA, 21 nt, Artificial Sequence
  GATA2 Guide RNA
uuauggcuccgaaacgccaac

SEQ ID NO: 8767 - RNA, 21 nt, Artificial Sequence
  GATA2 Guide RNA
uucggagccauaagguggugg

SEQ ID NO: 8768 - RNA, 21 nt, Artificial Sequence
  GATA2 Guide RNA
uuggcguuucggagccauaag

SEQ ID NO: 8769 - RNA, 21 nt, Artificial Sequence
  GATA2 Guide RNA
uuucggagccauaagguggug

SEQ ID NO: 8770 - RNA, 22 nt, Artificial Sequence
  GATA2 Guide RNA
aaccaccaccuuauggcuccga

SEQ ID NO: 8771 - RNA, 22 nt, Artificial Sequence
  GATA2 Guide RNA
acaaccaccaccuuauggcucc

SEQ ID NO: 8772 - RNA, 22 nt, Artificial Sequence
  GATA2 Guide RNA
accaccaccuuauggcuccgaa

SEQ ID NO: 8773 - RNA, 22 nt, Artificial Sequence
  GATA2 Guide RNA
accaccuuauggcuccgaaacg

SEQ ID NO: 8774 - RNA, 22 nt, Artificial Sequence
  GATA2 Guide RNA
accuuauggcuccgaaacgcca

SEQ ID NO: 8775 - RNA, 22 nt, Artificial Sequence
  GATA2 Guide RNA
agacgacaaccaccaccuuaug

SEQ ID NO: 8776 - RNA, 22 nt, Artificial Sequence
  GATA2 Guide RNA
agccauaagguggugguugucg

SEQ ID NO: 8777 - RNA, 22 nt, Artificial Sequence
  GATA2 Guide RNA
aggguccccguuggcguuucgg

SEQ ID NO: 8778 - RNA, 22 nt, Artificial Sequence
  GATA2 Guide RNA
auggcuccgaaacgccaacggg

SEQ ID NO: 8779 - RNA, 22 nt, Artificial Sequence
  GATA2 Guide RNA
caaccaccaccuuauggcuccg

SEQ ID NO: 8780 - RNA, 22 nt, Artificial Sequence
  GATA2 Guide RNA
caccaccuuauggcuccgaaac

SEQ ID NO: 8781 - RNA, 22 nt, Artificial Sequence
  GATA2 Guide RNA
caccuuauggcuccgaaacgcc

SEQ ID NO: 8782 - RNA, 22 nt, Artificial Sequence
  GATA2 Guide RNA
cagacgacaaccaccaccuuau

SEQ ID NO: 8783 - RNA, 22 nt, Artificial Sequence
  GATA2 Guide RNA
caggguccccguuggcguuucg

SEQ ID NO: 8784 - RNA, 22 nt, Artificial Sequence
  GATA2 Guide RNA
ccaccaccuuauggcuccgaaa

SEQ ID NO: 8785 - RNA, 22 nt, Artificial Sequence
  GATA2 Guide RNA
ccaccuuauggcuccgaaacgc

SEQ ID NO: 8786 - RNA, 22 nt, Artificial Sequence
  GATA2 Guide RNA
ccccguuggcguuucggagcca

SEQ ID NO: 8787 - RNA, 22 nt, Artificial Sequence
  GATA2 Guide RNA
cccguuggcguuucggagccau

SEQ ID NO: 8788 - RNA, 22 nt, Artificial Sequence
  GATA2 Guide RNA
ccguuggcguuucggagccaua

SEQ ID NO: 8789 - RNA, 22 nt, Artificial Sequence
  GATA2 Guide RNA
ccuuauggcuccgaaacgccaa

SEQ ID NO: 8790 - RNA, 22 nt, Artificial Sequence
  GATA2 Guide RNA
cgacaaccaccaccuuauggcu

SEQ ID NO: 8791 - RNA, 22 nt, Artificial Sequence
  GATA2 Guide RNA
cggagccauaagguggugguug

SEQ ID NO: 8792 - RNA, 22 nt, Artificial Sequence
  GATA2 Guide RNA
cguuggcguuucggagccauaa

SEQ ID NO: 8793 - RNA, 22 nt, Artificial Sequence
  GATA2 Guide RNA
cguuucggagccauaagguggu

SEQ ID NO: 8794 - RNA, 22 nt, Artificial Sequence
  GATA2 Guide RNA
cuccgaaacgccaacggggacc

SEQ ID NO: 8795 - RNA, 22 nt, Artificial Sequence
  GATA2 Guide RNA
cuuauggcuccgaaacgccaac

SEQ ID NO: 8796 - RNA, 22 nt, Artificial Sequence
  GATA2 Guide RNA
gacaaccaccaccuuauggcuc

SEQ ID NO: 8797 - RNA, 22 nt, Artificial Sequence
  GATA2 Guide RNA
gagccauaagguggugguuguc

SEQ ID NO: 8798 - RNA, 22 nt, Artificial Sequence
  GATA2 Guide RNA
gcguuucggagccauaaggugg

SEQ ID NO: 8799 - RNA, 22 nt, Artificial Sequence
  GATA2 Guide RNA
gcuccgaaacgccaacggggac

SEQ ID NO: 8800 - RNA, 22 nt, Artificial Sequence
  GATA2 Guide RNA
ggagccauaagguggugguugu

SEQ ID NO: 8801 - RNA, 22 nt, Artificial Sequence
  GATA2 Guide RNA
ggcguuucggagccauaaggug

SEQ ID NO: 8802 - RNA, 22 nt, Artificial Sequence
  GATA2 Guide RNA
ggcuccgaaacgccaacgggga

SEQ ID NO: 8803 - RNA, 22 nt, Artificial Sequence
  GATA2 Guide RNA
ggguccccguuggcguuucgga

SEQ ID NO: 8804 - RNA, 22 nt, Artificial Sequence
  GATA2 Guide RNA
gguccccguuggcguuucggag

SEQ ID NO: 8805 - RNA, 22 nt, Artificial Sequence
  GATA2 Guide RNA
guccccguuggcguuucggagc

SEQ ID NO: 8806 - RNA, 22 nt, Artificial Sequence
  GATA2 Guide RNA
guuggcguuucggagccauaag

SEQ ID NO: 8807 - RNA, 22 nt, Artificial Sequence
  GATA2 Guide RNA
guuucggagccauaagguggug

SEQ ID NO: 8808 - RNA, 22 nt, Artificial Sequence
  GATA2 Guide RNA
uauggcuccgaaacgccaacgg

SEQ ID NO: 8809 - RNA, 22 nt, Artificial Sequence
  GATA2 Guide RNA
uccccguuggcguuucggagcc

SEQ ID NO: 8810 - RNA, 22 nt, Artificial Sequence
  GATA2 Guide RNA
ucggagccauaagguggugguu

SEQ ID NO: 8811 - RNA, 22 nt, Artificial Sequence
  GATA2 Guide RNA
uggcguuucggagccauaaggu

SEQ ID NO: 8812 - RNA, 22 nt, Artificial Sequence
  GATA2 Guide RNA
uggcuccgaaacgccaacgggg

SEQ ID NO: 8813 - RNA, 22 nt, Artificial Sequence
  GATA2 Guide RNA
uuauggcuccgaaacgccaacg

SEQ ID NO: 8814 - RNA, 22 nt, Artificial Sequence
  GATA2 Guide RNA
uucggagccauaaggugguggu

SEQ ID NO: 8815 - RNA, 22 nt, Artificial Sequence
  GATA2 Guide RNA
uuggcguuucggagccauaagg

SEQ ID NO: 8816 - RNA, 22 nt, Artificial Sequence
  GATA2 Guide RNA
uuucggagccauaagguggugg

SEQ ID NO: 8817 - RNA, 20 nt, Artificial Sequence
  GATA2 Guide RNA
aaccaccaccuuauggugcc

SEQ ID NO: 8818 - RNA, 20 nt, Artificial Sequence
  GATA2 Guide RNA
acaaccaccaccuuauggug

SEQ ID NO: 8819 - RNA, 20 nt, Artificial Sequence
  GATA2 Guide RNA
accaccaccuuauggugccg

SEQ ID NO: 8820 - RNA, 20 nt, Artificial Sequence
  GATA2 Guide RNA
accaccuuauggugccgaaa

SEQ ID NO: 8821 - RNA, 20 nt, Artificial Sequence
  GATA2 Guide RNA
accauaagguggugguuguc

SEQ ID NO: 8822 - RNA, 20 nt, Artificial Sequence
  GATA2 Guide RNA
accuuauggugccgaaacgc

SEQ ID NO: 8823 - RNA, 20 nt, Artificial Sequence
  GATA2 Guide RNA
agacgacaaccaccaccuua

SEQ ID NO: 8824 - RNA, 20 nt, Artificial Sequence
  GATA2 Guide RNA
auggugccgaaacgccaacg

SEQ ID NO: 8825 - RNA, 20 nt, Artificial Sequence
  GATA2 Guide RNA
caaccaccaccuuauggugc

SEQ ID NO: 8826 - RNA, 20 nt, Artificial Sequence
  GATA2 Guide RNA
caccaccuuauggugccgaa

SEQ ID NO: 8827 - RNA, 20 nt, Artificial Sequence
  GATA2 Guide RNA
caccauaagguggugguugu

SEQ ID NO: 8828 - RNA, 20 nt, Artificial Sequence
  GATA2 Guide RNA
caccuuauggugccgaaacg

SEQ ID NO: 8829 - RNA, 20 nt, Artificial Sequence
  GATA2 Guide RNA
ccaccaccuuauggugccga

SEQ ID NO: 8830 - RNA, 20 nt, Artificial Sequence
  GATA2 Guide RNA
ccaccuuauggugccgaaac

SEQ ID NO: 8831 - RNA, 20 nt, Artificial Sequence
  GATA2 Guide RNA
ccccguuggcguuucggcac

SEQ ID NO: 8832 - RNA, 20 nt, Artificial Sequence
  GATA2 Guide RNA
cccguuggcguuucggcacc

SEQ ID NO: 8833 - RNA, 20 nt, Artificial Sequence
  GATA2 Guide RNA
ccguuggcguuucggcacca

SEQ ID NO: 8834 - RNA, 20 nt, Artificial Sequence
  GATA2 Guide RNA
ccuuauggugccgaaacgcc

SEQ ID NO: 8835 - RNA, 20 nt, Artificial Sequence
  GATA2 Guide RNA
cggcaccauaaggugguggu

SEQ ID NO: 8836 - RNA, 20 nt, Artificial Sequence
  GATA2 Guide RNA
cguuggcguuucggcaccau

SEQ ID NO: 8837 - RNA, 20 nt, Artificial Sequence
  GATA2 Guide RNA
cguuucggcaccauaaggug

SEQ ID NO: 8838 - RNA, 20 nt, Artificial Sequence
  GATA2 Guide RNA
cuuauggugccgaaacgcca

SEQ ID NO: 8839 - RNA, 20 nt, Artificial Sequence
  GATA2 Guide RNA
gacaaccaccaccuuauggu

SEQ ID NO: 8840 - RNA, 20 nt, Artificial Sequence
  GATA2 Guide RNA
gcaccauaagguggugguug

SEQ ID NO: 8841 - RNA, 20 nt, Artificial Sequence
  GATA2 Guide RNA
gcguuucggcaccauaaggu

SEQ ID NO: 8842 - RNA, 20 nt, Artificial Sequence
  GATA2 Guide RNA
ggcaccauaagguggugguu

SEQ ID NO: 8843 - RNA, 20 nt, Artificial Sequence
  GATA2 Guide RNA
ggcguuucggcaccauaagg

SEQ ID NO: 8844 - RNA, 20 nt, Artificial Sequence
  GATA2 Guide RNA
ggugccgaaacgccaacggg

SEQ ID NO: 8845 - RNA, 20 nt, Artificial Sequence
  GATA2 Guide RNA
guccccguuggcguuucggc

SEQ ID NO: 8846 - RNA, 20 nt, Artificial Sequence
  GATA2 Guide RNA
gugccgaaacgccaacgggg

SEQ ID NO: 8847 - RNA, 20 nt, Artificial Sequence
  GATA2 Guide RNA
guuggcguuucggcaccaua

SEQ ID NO: 8848 - RNA, 20 nt, Artificial Sequence
  GATA2 Guide RNA
guuucggcaccauaaggugg

SEQ ID NO: 8849 - RNA, 20 nt, Artificial Sequence
  GATA2 Guide RNA
uauggugccgaaacgccaac

SEQ ID NO: 8850 - RNA, 20 nt, Artificial Sequence
  GATA2 Guide RNA
uccccguuggcguuucggca

SEQ ID NO: 8851 - RNA, 20 nt, Artificial Sequence
  GATA2 Guide RNA
ucggcaccauaagguggugg

SEQ ID NO: 8852 - RNA, 20 nt, Artificial Sequence
  GATA2 Guide RNA
uggcguuucggcaccauaag

SEQ ID NO: 8853 - RNA, 20 nt, Artificial Sequence
  GATA2 Guide RNA
uggugccgaaacgccaacgg

SEQ ID NO: 8854 - RNA, 20 nt, Artificial Sequence
  GATA2 Guide RNA
uuauggugccgaaacgccaa

SEQ ID NO: 8855 - RNA, 20 nt, Artificial Sequence
  GATA2 Guide RNA
uucggcaccauaagguggug

SEQ ID NO: 8856 - RNA, 20 nt, Artificial Sequence
  GATA2 Guide RNA
uuggcguuucggcaccauaa

SEQ ID NO: 8857 - RNA, 20 nt, Artificial Sequence
  GATA2 Guide RNA
uuucggcaccauaagguggu

SEQ ID NO: 8858 - RNA, 21 nt, Artificial Sequence
  GATA2 Guide RNA
aaccaccaccuuauggugccg

SEQ ID NO: 8859 - RNA, 21 nt, Artificial Sequence
  GATA2 Guide RNA
acaaccaccaccuuauggugc

SEQ ID NO: 8860 - RNA, 21 nt, Artificial Sequence
  GATA2 Guide RNA
accaccaccuuauggugccga

SEQ ID NO: 8861 - RNA, 21 nt, Artificial Sequence
  GATA2 Guide RNA
accaccuuauggugccgaaac

SEQ ID NO: 8862 - RNA, 21 nt, Artificial Sequence
  GATA2 Guide RNA
accauaagguggugguugucg

SEQ ID NO: 8863 - RNA, 21 nt, Artificial Sequence
  GATA2 Guide RNA
accuuauggugccgaaacgcc

SEQ ID NO: 8864 - RNA, 21 nt, Artificial Sequence
  GATA2 Guide RNA
auggugccgaaacgccaacgg

SEQ ID NO: 8865 - RNA, 21 nt, Artificial Sequence
  GATA2 Guide RNA
caaccaccaccuuauggugcc

SEQ ID NO: 8866 - RNA, 21 nt, Artificial Sequence
  GATA2 Guide RNA
caccaccuuauggugccgaaa

SEQ ID NO: 8867 - RNA, 21 nt, Artificial Sequence
  GATA2 Guide RNA
caccauaagguggugguuguc

SEQ ID NO: 8868 - RNA, 21 nt, Artificial Sequence
  GATA2 Guide RNA
caccuuauggugccgaaacgc

SEQ ID NO: 8869 - RNA, 21 nt, Artificial Sequence
  GATA2 Guide RNA
cagacgacaaccaccaccuua

SEQ ID NO: 8870 - RNA, 21 nt, Artificial Sequence
  GATA2 Guide RNA
ccaccaccuuauggugccgaa

SEQ ID NO: 8871 - RNA, 21 nt, Artificial Sequence
  GATA2 Guide RNA
ccaccuuauggugccgaaacg

SEQ ID NO: 8872 - RNA, 21 nt, Artificial Sequence
  GATA2 Guide RNA
ccccguuggcguuucggcacc

SEQ ID NO: 8873 - RNA, 21 nt, Artificial Sequence
  GATA2 Guide RNA
cccguuggcguuucggcacca

SEQ ID NO: 8874 - RNA, 21 nt, Artificial Sequence
  GATA2 Guide RNA
ccguuggcguuucggcaccau

SEQ ID NO: 8875 - RNA, 21 nt, Artificial Sequence
  GATA2 Guide RNA
ccuuauggugccgaaacgcca

SEQ ID NO: 8876 - RNA, 21 nt, Artificial Sequence
  GATA2 Guide RNA
cgacaaccaccaccuuauggu

SEQ ID NO: 8877 - RNA, 21 nt, Artificial Sequence
  GATA2 Guide RNA
cggcaccauaagguggugguu

SEQ ID NO: 8878 - RNA, 21 nt, Artificial Sequence
  GATA2 Guide RNA
cguuggcguuucggcaccaua

SEQ ID NO: 8879 - RNA, 21 nt, Artificial Sequence
  GATA2 Guide RNA
cguuucggcaccauaaggugg

SEQ ID NO: 8880 - RNA, 21 nt, Artificial Sequence
  GATA2 Guide RNA
cuuauggugccgaaacgccaa

SEQ ID NO: 8881 - RNA, 21 nt, Artificial Sequence
  GATA2 Guide RNA
gacaaccaccaccuuauggug

SEQ ID NO: 8882 - RNA, 21 nt, Artificial Sequence
  GATA2 Guide RNA
gcaccauaagguggugguugu

SEQ ID NO: 8883 - RNA, 21 nt, Artificial Sequence
  GATA2 Guide RNA
gcguuucggcaccauaaggug

SEQ ID NO: 8884 - RNA, 21 nt, Artificial Sequence
  GATA2 Guide RNA
ggcaccauaagguggugguug

SEQ ID NO: 8885 - RNA, 21 nt, Artificial Sequence
  GATA2 Guide RNA
ggcguuucggcaccauaaggu

SEQ ID NO: 8886 - RNA, 21 nt, Artificial Sequence
  GATA2 Guide RNA
gguccccguuggcguuucggc

SEQ ID NO: 8887 - RNA, 21 nt, Artificial Sequence
  GATA2 Guide RNA
ggugccgaaacgccaacgggg

SEQ ID NO: 8888 - RNA, 21 nt, Artificial Sequence
  GATA2 Guide RNA
guccccguuggcguuucggca

SEQ ID NO: 8889 - RNA, 21 nt, Artificial Sequence
  GATA2 Guide RNA
gugccgaaacgccaacgggga

SEQ ID NO: 8890 - RNA, 21 nt, Artificial Sequence
  GATA2 Guide RNA
guuggcguuucggcaccauaa

SEQ ID NO: 8891 - RNA, 21 nt, Artificial Sequence
  GATA2 Guide RNA
guuucggcaccauaagguggu

SEQ ID NO: 8892 - RNA, 21 nt, Artificial Sequence
  GATA2 Guide RNA
uauggugccgaaacgccaacg

SEQ ID NO: 8893 - RNA, 21 nt, Artificial Sequence
  GATA2 Guide RNA
uccccguuggcguuucggcac

SEQ ID NO: 8894 - RNA, 21 nt, Artificial Sequence
  GATA2 Guide RNA
ucggcaccauaaggugguggu

SEQ ID NO: 8895 - RNA, 21 nt, Artificial Sequence
  GATA2 Guide RNA
uggcguuucggcaccauaagg

SEQ ID NO: 8896 - RNA, 21 nt, Artificial Sequence
  GATA2 Guide RNA
uggugccgaaacgccaacggg

SEQ ID NO: 8897 - RNA, 21 nt, Artificial Sequence
  GATA2 Guide RNA
uuauggugccgaaacgccaac

SEQ ID NO: 8898 - RNA, 21 nt, Artificial Sequence
  GATA2 Guide RNA
uucggcaccauaagguggugg

SEQ ID NO: 8899 - RNA, 21 nt, Artificial Sequence
  GATA2 Guide RNA
uuggcguuucggcaccauaag

SEQ ID NO: 8900 - RNA, 21 nt, Artificial Sequence
  GATA2 Guide RNA
uuucggcaccauaagguggug

SEQ ID NO: 8901 - RNA, 22 nt, Artificial Sequence
  GATA2 Guide RNA
aaccaccaccuuauggugccga

SEQ ID NO: 8902 - RNA, 22 nt, Artificial Sequence
  GATA2 Guide RNA
acaaccaccaccuuauggugcc

SEQ ID NO: 8903 - RNA, 22 nt, Artificial Sequence
  GATA2 Guide RNA
accaccaccuuauggugccgaa

SEQ ID NO: 8904 - RNA, 22 nt, Artificial Sequence
  GATA2 Guide RNA
accaccuuauggugccgaaacg

SEQ ID NO: 8905 - RNA, 22 nt, Artificial Sequence
  GATA2 Guide RNA
accauaagguggugguugucgu

SEQ ID NO: 8906 - RNA, 22 nt, Artificial Sequence
  GATA2 Guide RNA
accuuauggugccgaaacgcca

SEQ ID NO: 8907 - RNA, 22 nt, Artificial Sequence
  GATA2 Guide RNA
acgacaaccaccaccuuauggu

SEQ ID NO: 8908 - RNA, 22 nt, Artificial Sequence
  GATA2 Guide RNA
auggugccgaaacgccaacggg

SEQ ID NO: 8909 - RNA, 22 nt, Artificial Sequence
  GATA2 Guide RNA
caaccaccaccuuauggugccg

SEQ ID NO: 8910 - RNA, 22 nt, Artificial Sequence
  GATA2 Guide RNA
caccaccuuauggugccgaaac

SEQ ID NO: 8911 - RNA, 22 nt, Artificial Sequence
  GATA2 Guide RNA
caccauaagguggugguugucg

SEQ ID NO: 8912 - RNA, 22 nt, Artificial Sequence
  GATA2 Guide RNA
caccuuauggugccgaaacgcc

SEQ ID NO: 8913 - RNA, 22 nt, Artificial Sequence
  GATA2 Guide RNA
ccaccaccuuauggugccgaaa

SEQ ID NO: 8914 - RNA, 22 nt, Artificial Sequence
  GATA2 Guide RNA
ccaccuuauggugccgaaacgc

SEQ ID NO: 8915 - RNA, 22 nt, Artificial Sequence
  GATA2 Guide RNA
ccccguuggcguuucggcacca

SEQ ID NO: 8916 - RNA, 22 nt, Artificial Sequence
  GATA2 Guide RNA
cccguuggcguuucggcaccau

SEQ ID NO: 8917 - RNA, 22 nt, Artificial Sequence
  GATA2 Guide RNA
ccguuggcguuucggcaccaua

SEQ ID NO: 8918 - RNA, 22 nt, Artificial Sequence
  GATA2 Guide RNA
ccuuauggugccgaaacgccaa

SEQ ID NO: 8919 - RNA, 22 nt, Artificial Sequence
  GATA2 Guide RNA
cgacaaccaccaccuuauggug

SEQ ID NO: 8920 - RNA, 22 nt, Artificial Sequence
  GATA2 Guide RNA
cggcaccauaagguggugguug

SEQ ID NO: 8921 - RNA, 22 nt, Artificial Sequence
  GATA2 Guide RNA
cguuggcguuucggcaccauaa

SEQ ID NO: 8922 - RNA, 22 nt, Artificial Sequence
  GATA2 Guide RNA
cguuucggcaccauaagguggu

SEQ ID NO: 8923 - RNA, 22 nt, Artificial Sequence
  GATA2 Guide RNA
cuuauggugccgaaacgccaac

SEQ ID NO: 8924 - RNA, 22 nt, Artificial Sequence
  GATA2 Guide RNA
gacaaccaccaccuuauggugc

SEQ ID NO: 8925 - RNA, 22 nt, Artificial Sequence
  GATA2 Guide RNA
gcaccauaagguggugguuguc

SEQ ID NO: 8926 - RNA, 22 nt, Artificial Sequence
  GATA2 Guide RNA
gcguuucggcaccauaaggugg

SEQ ID NO: 8927 - RNA, 22 nt, Artificial Sequence
  GATA2 Guide RNA
ggcaccauaagguggugguugu

SEQ ID NO: 8928 - RNA, 22 nt, Artificial Sequence
  GATA2 Guide RNA
ggcguuucggcaccauaaggug

SEQ ID NO: 8929 - RNA, 22 nt, Artificial Sequence
  GATA2 Guide RNA
ggguccccguuggcguuucggc

SEQ ID NO: 8930 - RNA, 22 nt, Artificial Sequence
  GATA2 Guide RNA
gguccccguuggcguuucggca

SEQ ID NO: 8931 - RNA, 22 nt, Artificial Sequence
  GATA2 Guide RNA
ggugccgaaacgccaacgggga

SEQ ID NO: 8932 - RNA, 22 nt, Artificial Sequence
  GATA2 Guide RNA
guccccguuggcguuucggcac

SEQ ID NO: 8933 - RNA, 22 nt, Artificial Sequence
  GATA2 Guide RNA
gugccgaaacgccaacggggac

SEQ ID NO: 8934 - RNA, 22 nt, Artificial Sequence
  GATA2 Guide RNA
guuggcguuucggcaccauaag

SEQ ID NO: 8935 - RNA, 22 nt, Artificial Sequence
  GATA2 Guide RNA
guuucggcaccauaagguggug

SEQ ID NO: 8936 - RNA, 22 nt, Artificial Sequence
  GATA2 Guide RNA
uauggugccgaaacgccaacgg

SEQ ID NO: 8937 - RNA, 22 nt, Artificial Sequence
  GATA2 Guide RNA
ucagacgacaaccaccaccuua

SEQ ID NO: 8938 - RNA, 22 nt, Artificial Sequence
  GATA2 Guide RNA
uccccguuggcguuucggcacc

SEQ ID NO: 8939 - RNA, 22 nt, Artificial Sequence
  GATA2 Guide RNA
ucggcaccauaagguggugguu

SEQ ID NO: 8940 - RNA, 22 nt, Artificial Sequence
  GATA2 Guide RNA
uggcguuucggcaccauaaggu

SEQ ID NO: 8941 - RNA, 22 nt, Artificial Sequence
  GATA2 Guide RNA
uggugccgaaacgccaacgggg

SEQ ID NO: 8942 - RNA, 22 nt, Artificial Sequence
  GATA2 Guide RNA
uuauggugccgaaacgccaacg

SEQ ID NO: 8943 - RNA, 22 nt, Artificial Sequence
  GATA2 Guide RNA
uucggcaccauaaggugguggu

SEQ ID NO: 8944 - RNA, 22 nt, Artificial Sequence
  GATA2 Guide RNA
uuggcguuucggcaccauaagg

SEQ ID NO: 8945 - RNA, 22 nt, Artificial Sequence
  GATA2 Guide RNA
uuucggcaccauaagguggugg

SEQ ID NO: 8946 - RNA, 20 nt, Artificial Sequence
  GATA2 Guide RNA
aaccaccaccuuauggggcc

SEQ ID NO: 8947 - RNA, 20 nt, Artificial Sequence
  GATA2 Guide RNA
acaaccaccaccuuaugggg

SEQ ID NO: 8948 - RNA, 20 nt, Artificial Sequence
  GATA2 Guide RNA
accaccaccuuauggggccg

SEQ ID NO: 8949 - RNA, 20 nt, Artificial Sequence
  GATA2 Guide RNA
accaccuuauggggccgaaa

SEQ ID NO: 8950 - RNA, 20 nt, Artificial Sequence
  GATA2 Guide RNA
accuuauggggccgaaacgc

SEQ ID NO: 8951 - RNA, 20 nt, Artificial Sequence
  GATA2 Guide RNA
auggggccgaaacgccaacg

SEQ ID NO: 8952 - RNA, 20 nt, Artificial Sequence
  GATA2 Guide RNA
caaccaccaccuuauggggc

SEQ ID NO: 8953 - RNA, 20 nt, Artificial Sequence
  GATA2 Guide RNA
caccaccuuauggggccgaa

SEQ ID NO: 8954 - RNA, 20 nt, Artificial Sequence
  GATA2 Guide RNA
caccuuauggggccgaaacg

SEQ ID NO: 8955 - RNA, 20 nt, Artificial Sequence
  GATA2 Guide RNA
ccaccaccuuauggggccga

SEQ ID NO: 8956 - RNA, 20 nt, Artificial Sequence
  GATA2 Guide RNA
ccaccuuauggggccgaaac

SEQ ID NO: 8957 - RNA, 20 nt, Artificial Sequence
  GATA2 Guide RNA
cccauaagguggugguuguc

SEQ ID NO: 8958 - RNA, 20 nt, Artificial Sequence
  GATA2 Guide RNA
ccccauaagguggugguugu

SEQ ID NO: 8959 - RNA, 20 nt, Artificial Sequence
  GATA2 Guide RNA
ccccguuggcguuucggccc

SEQ ID NO: 8960 - RNA, 20 nt, Artificial Sequence
  GATA2 Guide RNA
cccguuggcguuucggcccc

SEQ ID NO: 8961 - RNA, 20 nt, Artificial Sequence
  GATA2 Guide RNA
ccguuggcguuucggcccca

SEQ ID NO: 8962 - RNA, 20 nt, Artificial Sequence
  GATA2 Guide RNA
ccuuauggggccgaaacgcc

SEQ ID NO: 8963 - RNA, 20 nt, Artificial Sequence
  GATA2 Guide RNA
cggccccauaaggugguggu

SEQ ID NO: 8964 - RNA, 20 nt, Artificial Sequence
  GATA2 Guide RNA
cguuggcguuucggccccau

SEQ ID NO: 8965 - RNA, 20 nt, Artificial Sequence
  GATA2 Guide RNA
cguuucggccccauaaggug

SEQ ID NO: 8966 - RNA, 20 nt, Artificial Sequence
  GATA2 Guide RNA
cuuauggggccgaaacgcca

SEQ ID NO: 8967 - RNA, 20 nt, Artificial Sequence
  GATA2 Guide RNA
gacaaccaccaccuuauggg

SEQ ID NO: 8968 - RNA, 20 nt, Artificial Sequence
  GATA2 Guide RNA
gccccauaagguggugguug

SEQ ID NO: 8969 - RNA, 20 nt, Artificial Sequence
  GATA2 Guide RNA
gcguuucggccccauaaggu

SEQ ID NO: 8970 - RNA, 20 nt, Artificial Sequence
  GATA2 Guide RNA
ggccccauaagguggugguu

SEQ ID NO: 8971 - RNA, 20 nt, Artificial Sequence
  GATA2 Guide RNA
ggcguuucggccccauaagg

SEQ ID NO: 8972 - RNA, 20 nt, Artificial Sequence
  GATA2 Guide RNA
gggccgaaacgccaacgggg

SEQ ID NO: 8973 - RNA, 20 nt, Artificial Sequence
  GATA2 Guide RNA
ggggccgaaacgccaacggg

SEQ ID NO: 8974 - RNA, 20 nt, Artificial Sequence
  GATA2 Guide RNA
guuggcguuucggccccaua

SEQ ID NO: 8975 - RNA, 20 nt, Artificial Sequence
  GATA2 Guide RNA
guuucggccccauaaggugg

SEQ ID NO: 8976 - RNA, 20 nt, Artificial Sequence
  GATA2 Guide RNA
uauggggccgaaacgccaac

SEQ ID NO: 8977 - RNA, 20 nt, Artificial Sequence
  GATA2 Guide RNA
uccccguuggcguuucggcc

SEQ ID NO: 8978 - RNA, 20 nt, Artificial Sequence
  GATA2 Guide RNA
ucggccccauaagguggugg

SEQ ID NO: 8979 - RNA, 20 nt, Artificial Sequence
  GATA2 Guide RNA
uggcguuucggccccauaag

SEQ ID NO: 8980 - RNA, 20 nt, Artificial Sequence
  GATA2 Guide RNA
uggggccgaaacgccaacgg

SEQ ID NO: 8981 - RNA, 20 nt, Artificial Sequence
  GATA2 Guide RNA
uuauggggccgaaacgccaa

SEQ ID NO: 8982 - RNA, 20 nt, Artificial Sequence
  GATA2 Guide RNA
uucggccccauaagguggug

SEQ ID NO: 8983 - RNA, 20 nt, Artificial Sequence
  GATA2 Guide RNA
uuggcguuucggccccauaa

SEQ ID NO: 8984 - RNA, 20 nt, Artificial Sequence
  GATA2 Guide RNA
uuucggccccauaagguggu

SEQ ID NO: 8985 - RNA, 21 nt, Artificial Sequence
  GATA2 Guide RNA
aaccaccaccuuauggggccg

SEQ ID NO: 8986 - RNA, 21 nt, Artificial Sequence
  GATA2 Guide RNA
acaaccaccaccuuauggggc

SEQ ID NO: 8987 - RNA, 21 nt, Artificial Sequence
  GATA2 Guide RNA
accaccaccuuauggggccga

SEQ ID NO: 8988 - RNA, 21 nt, Artificial Sequence
  GATA2 Guide RNA
accaccuuauggggccgaaac

SEQ ID NO: 8989 - RNA, 21 nt, Artificial Sequence
  GATA2 Guide RNA
accuuauggggccgaaacgcc

SEQ ID NO: 8990 - RNA, 21 nt, Artificial Sequence
  GATA2 Guide RNA
auggggccgaaacgccaacgg

SEQ ID NO: 8991 - RNA, 21 nt, Artificial Sequence
  GATA2 Guide RNA
caaccaccaccuuauggggcc

SEQ ID NO: 8992 - RNA, 21 nt, Artificial Sequence
  GATA2 Guide RNA
caccaccuuauggggccgaaa

SEQ ID NO: 8993 - RNA, 21 nt, Artificial Sequence
  GATA2 Guide RNA
caccuuauggggccgaaacgc

SEQ ID NO: 8994 - RNA, 21 nt, Artificial Sequence
  GATA2 Guide RNA
ccaccaccuuauggggccgaa

SEQ ID NO: 8995 - RNA, 21 nt, Artificial Sequence
  GATA2 Guide RNA
ccaccuuauggggccgaaacg

SEQ ID NO: 8996 - RNA, 21 nt, Artificial Sequence
  GATA2 Guide RNA
cccauaagguggugguugucg

SEQ ID NO: 8997 - RNA, 21 nt, Artificial Sequence
  GATA2 Guide RNA
ccccauaagguggugguuguc

SEQ ID NO: 8998 - RNA, 21 nt, Artificial Sequence
  GATA2 Guide RNA
ccccguuggcguuucggcccc

SEQ ID NO: 8999 - RNA, 21 nt, Artificial Sequence
  GATA2 Guide RNA
cccguuggcguuucggcccca

SEQ ID NO: 9000 - RNA, 21 nt, Artificial Sequence
  GATA2 Guide RNA
ccguuggcguuucggccccau

SEQ ID NO: 9001 - RNA, 21 nt, Artificial Sequence
  GATA2 Guide RNA
ccuuauggggccgaaacgcca

SEQ ID NO: 9002 - RNA, 21 nt, Artificial Sequence
  GATA2 Guide RNA
cgacaaccaccaccuuauggg

SEQ ID NO: 9003 - RNA, 21 nt, Artificial Sequence
  GATA2 Guide RNA
cggccccauaagguggugguu

SEQ ID NO: 9004 - RNA, 21 nt, Artificial Sequence
  GATA2 Guide RNA
cguuggcguuucggccccaua

SEQ ID NO: 9005 - RNA, 21 nt, Artificial Sequence
  GATA2 Guide RNA
cguuucggccccauaaggugg

SEQ ID NO: 9006 - RNA, 21 nt, Artificial Sequence
  GATA2 Guide RNA
cuuauggggccgaaacgccaa

SEQ ID NO: 9007 - RNA, 21 nt, Artificial Sequence
  GATA2 Guide RNA
gacaaccaccaccuuaugggg

SEQ ID NO: 9008 - RNA, 21 nt, Artificial Sequence
  GATA2 Guide RNA
gccccauaagguggugguugu

SEQ ID NO: 9009 - RNA, 21 nt, Artificial Sequence
  GATA2 Guide RNA
gcguuucggccccauaaggug

SEQ ID NO: 9010 - RNA, 21 nt, Artificial Sequence
  GATA2 Guide RNA
ggccccauaagguggugguug

SEQ ID NO: 9011 - RNA, 21 nt, Artificial Sequence
  GATA2 Guide RNA
ggcguuucggccccauaaggu

SEQ ID NO: 9012 - RNA, 21 nt, Artificial Sequence
  GATA2 Guide RNA
gggccgaaacgccaacgggga

SEQ ID NO: 9013 - RNA, 21 nt, Artificial Sequence
  GATA2 Guide RNA
ggggccgaaacgccaacgggg

SEQ ID NO: 9014 - RNA, 21 nt, Artificial Sequence
  GATA2 Guide RNA
guccccguuggcguuucggcc

SEQ ID NO: 9015 - RNA, 21 nt, Artificial Sequence
  GATA2 Guide RNA
guuggcguuucggccccauaa

SEQ ID NO: 9016 - RNA, 21 nt, Artificial Sequence
  GATA2 Guide RNA
guuucggccccauaagguggu

SEQ ID NO: 9017 - RNA, 21 nt, Artificial Sequence
  GATA2 Guide RNA
uauggggccgaaacgccaacg

SEQ ID NO: 9018 - RNA, 21 nt, Artificial Sequence
  GATA2 Guide RNA
uccccguuggcguuucggccc

SEQ ID NO: 9019 - RNA, 21 nt, Artificial Sequence
  GATA2 Guide RNA
ucggccccauaaggugguggu

SEQ ID NO: 9020 - RNA, 21 nt, Artificial Sequence
  GATA2 Guide RNA
uggcguuucggccccauaagg

SEQ ID NO: 9021 - RNA, 21 nt, Artificial Sequence
  GATA2 Guide RNA
uggggccgaaacgccaacggg

SEQ ID NO: 9022 - RNA, 21 nt, Artificial Sequence
  GATA2 Guide RNA
uuauggggccgaaacgccaac

SEQ ID NO: 9023 - RNA, 21 nt, Artificial Sequence
  GATA2 Guide RNA
uucggccccauaagguggugg

SEQ ID NO: 9024 - RNA, 21 nt, Artificial Sequence
  GATA2 Guide RNA
uuggcguuucggccccauaag

SEQ ID NO: 9025 - RNA, 21 nt, Artificial Sequence
  GATA2 Guide RNA
uuucggccccauaagguggug

SEQ ID NO: 9026 - RNA, 22 nt, Artificial Sequence
  GATA2 Guide RNA
aaccaccaccuuauggggccga

SEQ ID NO: 9027 - RNA, 22 nt, Artificial Sequence
  GATA2 Guide RNA
acaaccaccaccuuauggggcc

SEQ ID NO: 9028 - RNA, 22 nt, Artificial Sequence
  GATA2 Guide RNA
accaccaccuuauggggccgaa

SEQ ID NO: 9029 - RNA, 22 nt, Artificial Sequence
  GATA2 Guide RNA
accaccuuauggggccgaaacg

SEQ ID NO: 9030 - RNA, 22 nt, Artificial Sequence
  GATA2 Guide RNA
accuuauggggccgaaacgcca

SEQ ID NO: 9031 - RNA, 22 nt, Artificial Sequence
  GATA2 Guide RNA
acgacaaccaccaccuuauggg

SEQ ID NO: 9032 - RNA, 22 nt, Artificial Sequence
  GATA2 Guide RNA
auggggccgaaacgccaacggg

SEQ ID NO: 9033 - RNA, 22 nt, Artificial Sequence
  GATA2 Guide RNA
caaccaccaccuuauggggccg

SEQ ID NO: 9034 - RNA, 22 nt, Artificial Sequence
  GATA2 Guide RNA
caccaccuuauggggccgaaac

SEQ ID NO: 9035 - RNA, 22 nt, Artificial Sequence
  GATA2 Guide RNA
caccuuauggggccgaaacgcc

SEQ ID NO: 9036 - RNA, 22 nt, Artificial Sequence
  GATA2 Guide RNA
ccaccaccuuauggggccgaaa

SEQ ID NO: 9037 - RNA, 22 nt, Artificial Sequence
  GATA2 Guide RNA
ccaccuuauggggccgaaacgc

SEQ ID NO: 9038 - RNA, 22 nt, Artificial Sequence
  GATA2 Guide RNA
cccauaagguggugguugucgu

SEQ ID NO: 9039 - RNA, 22 nt, Artificial Sequence
  GATA2 Guide RNA
ccccauaagguggugguugucg

SEQ ID NO: 9040 - RNA, 22 nt, Artificial Sequence
  GATA2 Guide RNA
ccccguuggcguuucggcccca

SEQ ID NO: 9041 - RNA, 22 nt, Artificial Sequence
  GATA2 Guide RNA
cccguuggcguuucggccccau

SEQ ID NO: 9042 - RNA, 22 nt, Artificial Sequence
  GATA2 Guide RNA
ccguuggcguuucggccccaua

SEQ ID NO: 9043 - RNA, 22 nt, Artificial Sequence
  GATA2 Guide RNA
ccuuauggggccgaaacgccaa

SEQ ID NO: 9044 - RNA, 22 nt, Artificial Sequence
  GATA2 Guide RNA
cgacaaccaccaccuuaugggg

SEQ ID NO: 9045 - RNA, 22 nt, Artificial Sequence
  GATA2 Guide RNA
cggccccauaagguggugguug

SEQ ID NO: 9046 - RNA, 22 nt, Artificial Sequence
  GATA2 Guide RNA
cguuggcguuucggccccauaa

SEQ ID NO: 9047 - RNA, 22 nt, Artificial Sequence
  GATA2 Guide RNA
cguuucggccccauaagguggu

SEQ ID NO: 9048 - RNA, 22 nt, Artificial Sequence
  GATA2 Guide RNA
cuuauggggccgaaacgccaac

SEQ ID NO: 9049 - RNA, 22 nt, Artificial Sequence
  GATA2 Guide RNA
gacaaccaccaccuuauggggc

SEQ ID NO: 9050 - RNA, 22 nt, Artificial Sequence
  GATA2 Guide RNA
gccccauaagguggugguuguc

SEQ ID NO: 9051 - RNA, 22 nt, Artificial Sequence
  GATA2 Guide RNA
gcguuucggccccauaaggugg

SEQ ID NO: 9052 - RNA, 22 nt, Artificial Sequence
  GATA2 Guide RNA
ggccccauaagguggugguugu

SEQ ID NO: 9053 - RNA, 22 nt, Artificial Sequence
  GATA2 Guide RNA
ggcguuucggccccauaaggug

SEQ ID NO: 9054 - RNA, 22 nt, Artificial Sequence
  GATA2 Guide RNA
gggccgaaacgccaacggggac

SEQ ID NO: 9055 - RNA, 22 nt, Artificial Sequence
  GATA2 Guide RNA
ggggccgaaacgccaacgggga

SEQ ID NO: 9056 - RNA, 22 nt, Artificial Sequence
  GATA2 Guide RNA
gguccccguuggcguuucggcc

SEQ ID NO: 9057 - RNA, 22 nt, Artificial Sequence
  GATA2 Guide RNA
guccccguuggcguuucggccc

SEQ ID NO: 9058 - RNA, 22 nt, Artificial Sequence
  GATA2 Guide RNA
guuggcguuucggccccauaag

SEQ ID NO: 9059 - RNA, 22 nt, Artificial Sequence
  GATA2 Guide RNA
guuucggccccauaagguggug

SEQ ID NO: 9060 - RNA, 22 nt, Artificial Sequence
  GATA2 Guide RNA
uauggggccgaaacgccaacgg

SEQ ID NO: 9061 - RNA, 22 nt, Artificial Sequence
  GATA2 Guide RNA
uccccguuggcguuucggcccc

SEQ ID NO: 9062 - RNA, 22 nt, Artificial Sequence
  GATA2 Guide RNA
ucggccccauaagguggugguu

SEQ ID NO: 9063 - RNA, 22 nt, Artificial Sequence
  GATA2 Guide RNA
uggcguuucggccccauaaggu

SEQ ID NO: 9064 - RNA, 22 nt, Artificial Sequence
  GATA2 Guide RNA
uggggccgaaacgccaacgggg

SEQ ID NO: 9065 - RNA, 22 nt, Artificial Sequence
  GATA2 Guide RNA
uuauggggccgaaacgccaacg

SEQ ID NO: 9066 - RNA, 22 nt, Artificial Sequence
  GATA2 Guide RNA
uucggccccauaaggugguggu

SEQ ID NO: 9067 - RNA, 22 nt, Artificial Sequence
  GATA2 Guide RNA
uuggcguuucggccccauaagg

SEQ ID NO: 9068 - RNA, 22 nt, Artificial Sequence
  GATA2 Guide RNA
uuucggccccauaagguggugg

SEQ ID NO: 9069 - RNA, 20 nt, Artificial Sequence
  GATA2 Guide RNA
aaccaccaccguauggcgcc

SEQ ID NO: 9070 - RNA, 20 nt, Artificial Sequence
  GATA2 Guide RNA
acaaccaccaccguauggcg

SEQ ID NO: 9071 - RNA, 20 nt, Artificial Sequence
  GATA2 Guide RNA
accaccaccguauggcgccg

SEQ ID NO: 9072 - RNA, 20 nt, Artificial Sequence
  GATA2 Guide RNA
accaccguauggcgccgaaa

SEQ ID NO: 9073 - RNA, 20 nt, Artificial Sequence
  GATA2 Guide RNA
accguauggcgccgaaacgc

SEQ ID NO: 9074 - RNA, 20 nt, Artificial Sequence
  GATA2 Guide RNA
acgacaaccaccaccguaug

SEQ ID NO: 9075 - RNA, 20 nt, Artificial Sequence
  GATA2 Guide RNA
acgguggugguugucgucug

SEQ ID NO: 9076 - RNA, 20 nt, Artificial Sequence
  GATA2 Guide RNA
agacgacaaccaccaccgua

SEQ ID NO: 9077 - RNA, 20 nt, Artificial Sequence
  GATA2 Guide RNA
auacgguggugguugucguc

SEQ ID NO: 9078 - RNA, 20 nt, Artificial Sequence
  GATA2 Guide RNA
auugucagacgacaaccacc

SEQ ID NO: 9079 - RNA, 20 nt, Artificial Sequence
  GATA2 Guide RNA
caaccaccaccguauggcgc

SEQ ID NO: 9080 - RNA, 20 nt, Artificial Sequence
  GATA2 Guide RNA
caccaccguauggcgccgaa

SEQ ID NO: 9081 - RNA, 20 nt, Artificial Sequence
  GATA2 Guide RNA
caccguauggcgccgaaacg

SEQ ID NO: 9082 - RNA, 20 nt, Artificial Sequence
  GATA2 Guide RNA
cagacgacaaccaccaccgu

SEQ ID NO: 9083 - RNA, 20 nt, Artificial Sequence
  GATA2 Guide RNA
cauacgguggugguugucgu

SEQ ID NO: 9084 - RNA, 20 nt, Artificial Sequence
  GATA2 Guide RNA
ccaccaccguauggcgccga

SEQ ID NO: 9085 - RNA, 20 nt, Artificial Sequence
  GATA2 Guide RNA
ccaccguauggcgccgaaac

SEQ ID NO: 9086 - RNA, 20 nt, Artificial Sequence
  GATA2 Guide RNA
ccauacgguggugguugucg

SEQ ID NO: 9087 - RNA, 20 nt, Artificial Sequence
  GATA2 Guide RNA
ccguauggcgccgaaacgcc

SEQ ID NO: 9088 - RNA, 20 nt, Artificial Sequence
  GATA2 Guide RNA
ccguuggcguuucggcgcca

SEQ ID NO: 9089 - RNA, 20 nt, Artificial Sequence
  GATA2 Guide RNA
cgacaaccaccaccguaugg

SEQ ID NO: 9090 - RNA, 20 nt, Artificial Sequence
  GATA2 Guide RNA
cgccauacgguggugguugu

SEQ ID NO: 9091 - RNA, 20 nt, Artificial Sequence
  GATA2 Guide RNA
cggcgccauacggugguggu

SEQ ID NO: 9092 - RNA, 20 nt, Artificial Sequence
  GATA2 Guide RNA
cgguggugguugucgucuga

SEQ ID NO: 9093 - RNA, 20 nt, Artificial Sequence
  GATA2 Guide RNA
cguauggcgccgaaacgcca

SEQ ID NO: 9094 - RNA, 20 nt, Artificial Sequence
  GATA2 Guide RNA
cguuggcguuucggcgccau

SEQ ID NO: 9095 - RNA, 20 nt, Artificial Sequence
  GATA2 Guide RNA
cguuucggcgccauacggug

SEQ ID NO: 9096 - RNA, 20 nt, Artificial Sequence
  GATA2 Guide RNA
gacaaccaccaccguauggc

SEQ ID NO: 9097 - RNA, 20 nt, Artificial Sequence
  GATA2 Guide RNA
gacgacaaccaccaccguau

SEQ ID NO: 9098 - RNA, 20 nt, Artificial Sequence
  GATA2 Guide RNA
gccauacgguggugguuguc

SEQ ID NO: 9099 - RNA, 20 nt, Artificial Sequence
  GATA2 Guide RNA
gcgccauacgguggugguug

SEQ ID NO: 9100 - RNA, 20 nt, Artificial Sequence
  GATA2 Guide RNA
gcguuucggcgccauacggu

SEQ ID NO: 9101 - RNA, 20 nt, Artificial Sequence
  GATA2 Guide RNA
ggcgccauacgguggugguu

SEQ ID NO: 9102 - RNA, 20 nt, Artificial Sequence
  GATA2 Guide RNA
ggcguuucggcgccauacgg

SEQ ID NO: 9103 - RNA, 20 nt, Artificial Sequence
  GATA2 Guide RNA
gucagacgacaaccaccacc

SEQ ID NO: 9104 - RNA, 20 nt, Artificial Sequence
  GATA2 Guide RNA
guuggcguuucggcgccaua

SEQ ID NO: 9105 - RNA, 20 nt, Artificial Sequence
  GATA2 Guide RNA
guuucggcgccauacggugg

SEQ ID NO: 9106 - RNA, 20 nt, Artificial Sequence
  GATA2 Guide RNA
uacgguggugguugucgucu

SEQ ID NO: 9107 - RNA, 20 nt, Artificial Sequence
  GATA2 Guide RNA
ucagacgacaaccaccaccg

SEQ ID NO: 9108 - RNA, 20 nt, Artificial Sequence
  GATA2 Guide RNA
ucggcgccauacgguggugg

SEQ ID NO: 9109 - RNA, 20 nt, Artificial Sequence
  GATA2 Guide RNA
uggcguuucggcgccauacg

SEQ ID NO: 9110 - RNA, 20 nt, Artificial Sequence
  GATA2 Guide RNA
ugucagacgacaaccaccac

SEQ ID NO: 9111 - RNA, 20 nt, Artificial Sequence
  GATA2 Guide RNA
uucggcgccauacgguggug

SEQ ID NO: 9112 - RNA, 20 nt, Artificial Sequence
  GATA2 Guide RNA
uuggcguuucggcgccauac

SEQ ID NO: 9113 - RNA, 20 nt, Artificial Sequence
  GATA2 Guide RNA
uugucagacgacaaccacca

SEQ ID NO: 9114 - RNA, 20 nt, Artificial Sequence
  GATA2 Guide RNA
uuucggcgccauacgguggu

SEQ ID NO: 9115 - RNA, 21 nt, Artificial Sequence
  GATA2 Guide RNA
aaccaccaccguauggcgccg

SEQ ID NO: 9116 - RNA, 21 nt, Artificial Sequence
  GATA2 Guide RNA
aauugucagacgacaaccacc

SEQ ID NO: 9117 - RNA, 21 nt, Artificial Sequence
  GATA2 Guide RNA
acaaccaccaccguauggcgc

SEQ ID NO: 9118 - RNA, 21 nt, Artificial Sequence
  GATA2 Guide RNA
accaccaccguauggcgccga

SEQ ID NO: 9119 - RNA, 21 nt, Artificial Sequence
  GATA2 Guide RNA
accaccguauggcgccgaaac

SEQ ID NO: 9120 - RNA, 21 nt, Artificial Sequence
  GATA2 Guide RNA
accguauggcgccgaaacgcc

SEQ ID NO: 9121 - RNA, 21 nt, Artificial Sequence
  GATA2 Guide RNA
acgacaaccaccaccguaugg

SEQ ID NO: 9122 - RNA, 21 nt, Artificial Sequence
  GATA2 Guide RNA
acgguggugguugucgucuga

SEQ ID NO: 9123 - RNA, 21 nt, Artificial Sequence
  GATA2 Guide RNA
agacgacaaccaccaccguau

SEQ ID NO: 9124 - RNA, 21 nt, Artificial Sequence
  GATA2 Guide RNA
auacgguggugguugucgucu

SEQ ID NO: 9125 - RNA, 21 nt, Artificial Sequence
  GATA2 Guide RNA
auugucagacgacaaccacca

SEQ ID NO: 9126 - RNA, 21 nt, Artificial Sequence
  GATA2 Guide RNA
caaccaccaccguauggcgcc

SEQ ID NO: 9127 - RNA, 21 nt, Artificial Sequence
  GATA2 Guide RNA
caccaccguauggcgccgaaa

SEQ ID NO: 9128 - RNA, 21 nt, Artificial Sequence
  GATA2 Guide RNA
caccguauggcgccgaaacgc

SEQ ID NO: 9129 - RNA, 21 nt, Artificial Sequence
  GATA2 Guide RNA
cagacgacaaccaccaccgua

SEQ ID NO: 9130 - RNA, 21 nt, Artificial Sequence
  GATA2 Guide RNA
cauacgguggugguugucguc

SEQ ID NO: 9131 - RNA, 21 nt, Artificial Sequence
  GATA2 Guide RNA
ccaccaccguauggcgccgaa

SEQ ID NO: 9132 - RNA, 21 nt, Artificial Sequence
  GATA2 Guide RNA
ccaccguauggcgccgaaacg

SEQ ID NO: 9133 - RNA, 21 nt, Artificial Sequence
  GATA2 Guide RNA
ccauacgguggugguugucgu

SEQ ID NO: 9134 - RNA, 21 nt, Artificial Sequence
  GATA2 Guide RNA
cccguuggcguuucggcgcca

SEQ ID NO: 9135 - RNA, 21 nt, Artificial Sequence
  GATA2 Guide RNA
ccguauggcgccgaaacgcca

SEQ ID NO: 9136 - RNA, 21 nt, Artificial Sequence
  GATA2 Guide RNA
ccguuggcguuucggcgccau

SEQ ID NO: 9137 - RNA, 21 nt, Artificial Sequence
  GATA2 Guide RNA
cgacaaccaccaccguauggc

SEQ ID NO: 9138 - RNA, 21 nt, Artificial Sequence
  GATA2 Guide RNA
cgccauacgguggugguuguc

SEQ ID NO: 9139 - RNA, 21 nt, Artificial Sequence
  GATA2 Guide RNA
cggcgccauacgguggugguu

SEQ ID NO: 9140 - RNA, 21 nt, Artificial Sequence
  GATA2 Guide RNA
cgguggugguugucgucugac

SEQ ID NO: 9141 - RNA, 21 nt, Artificial Sequence
  GATA2 Guide RNA
cguauggcgccgaaacgccaa

SEQ ID NO: 9142 - RNA, 21 nt, Artificial Sequence
  GATA2 Guide RNA
cguuggcguuucggcgccaua

SEQ ID NO: 9143 - RNA, 21 nt, Artificial Sequence
  GATA2 Guide RNA
cguuucggcgccauacggugg

SEQ ID NO: 9144 - RNA, 21 nt, Artificial Sequence
  GATA2 Guide RNA
gacaaccaccaccguauggcg

SEQ ID NO: 9145 - RNA, 21 nt, Artificial Sequence
  GATA2 Guide RNA
gacgacaaccaccaccguaug

SEQ ID NO: 9146 - RNA, 21 nt, Artificial Sequence
  GATA2 Guide RNA
gccauacgguggugguugucg

SEQ ID NO: 9147 - RNA, 21 nt, Artificial Sequence
  GATA2 Guide RNA
gcgccauacgguggugguugu

SEQ ID NO: 9148 - RNA, 21 nt, Artificial Sequence
  GATA2 Guide RNA
gcguuucggcgccauacggug

SEQ ID NO: 9149 - RNA, 21 nt, Artificial Sequence
  GATA2 Guide RNA
ggcgccauacgguggugguug

SEQ ID NO: 9150 - RNA, 21 nt, Artificial Sequence
  GATA2 Guide RNA
ggcguuucggcgccauacggu

SEQ ID NO: 9151 - RNA, 21 nt, Artificial Sequence
  GATA2 Guide RNA
gucagacgacaaccaccaccg

SEQ ID NO: 9152 - RNA, 21 nt, Artificial Sequence
  GATA2 Guide RNA
guuggcguuucggcgccauac

SEQ ID NO: 9153 - RNA, 21 nt, Artificial Sequence
  GATA2 Guide RNA
guuucggcgccauacgguggu

SEQ ID NO: 9154 - RNA, 21 nt, Artificial Sequence
  GATA2 Guide RNA
uacgguggugguugucgucug

SEQ ID NO: 9155 - RNA, 21 nt, Artificial Sequence
  GATA2 Guide RNA
ucagacgacaaccaccaccgu

SEQ ID NO: 9156 - RNA, 21 nt, Artificial Sequence
  GATA2 Guide RNA
ucggcgccauacggugguggu

SEQ ID NO: 9157 - RNA, 21 nt, Artificial Sequence
  GATA2 Guide RNA
uggcguuucggcgccauacgg

SEQ ID NO: 9158 - RNA, 21 nt, Artificial Sequence
  GATA2 Guide RNA
ugucagacgacaaccaccacc

SEQ ID NO: 9159 - RNA, 21 nt, Artificial Sequence
  GATA2 Guide RNA
uucggcgccauacgguggugg

SEQ ID NO: 9160 - RNA, 21 nt, Artificial Sequence
  GATA2 Guide RNA
uuggcguuucggcgccauacg

SEQ ID NO: 9161 - RNA, 21 nt, Artificial Sequence
  GATA2 Guide RNA
uugucagacgacaaccaccac

SEQ ID NO: 9162 - RNA, 21 nt, Artificial Sequence
  GATA2 Guide RNA
uuucggcgccauacgguggug

SEQ ID NO: 9163 - RNA, 22 nt, Artificial Sequence
  GATA2 Guide RNA
aaauugucagacgacaaccacc

SEQ ID NO: 9164 - RNA, 22 nt, Artificial Sequence
  GATA2 Guide RNA
aaccaccaccguauggcgccga

SEQ ID NO: 9165 - RNA, 22 nt, Artificial Sequence
  GATA2 Guide RNA
aauugucagacgacaaccacca

SEQ ID NO: 9166 - RNA, 22 nt, Artificial Sequence
  GATA2 Guide RNA
acaaccaccaccguauggcgcc

SEQ ID NO: 9167 - RNA, 22 nt, Artificial Sequence
  GATA2 Guide RNA
accaccaccguauggcgccgaa

SEQ ID NO: 9168 - RNA, 22 nt, Artificial Sequence
  GATA2 Guide RNA
accaccguauggcgccgaaacg

SEQ ID NO: 9169 - RNA, 22 nt, Artificial Sequence
  GATA2 Guide RNA
accguauggcgccgaaacgcca

SEQ ID NO: 9170 - RNA, 22 nt, Artificial Sequence
  GATA2 Guide RNA
acgacaaccaccaccguauggc

SEQ ID NO: 9171 - RNA, 22 nt, Artificial Sequence
  GATA2 Guide RNA
acgguggugguugucgucugac

SEQ ID NO: 9172 - RNA, 22 nt, Artificial Sequence
  GATA2 Guide RNA
agacgacaaccaccaccguaug

SEQ ID NO: 9173 - RNA, 22 nt, Artificial Sequence
  GATA2 Guide RNA
auacgguggugguugucgucug

SEQ ID NO: 9174 - RNA, 22 nt, Artificial Sequence
  GATA2 Guide RNA
auugucagacgacaaccaccac

SEQ ID NO: 9175 - RNA, 22 nt, Artificial Sequence
  GATA2 Guide RNA
caaccaccaccguauggcgccg

SEQ ID NO: 9176 - RNA, 22 nt, Artificial Sequence
  GATA2 Guide RNA
caccaccguauggcgccgaaac

SEQ ID NO: 9177 - RNA, 22 nt, Artificial Sequence
  GATA2 Guide RNA
caccguauggcgccgaaacgcc

SEQ ID NO: 9178 - RNA, 22 nt, Artificial Sequence
  GATA2 Guide RNA
cagacgacaaccaccaccguau

SEQ ID NO: 9179 - RNA, 22 nt, Artificial Sequence
  GATA2 Guide RNA
cauacgguggugguugucgucu

SEQ ID NO: 9180 - RNA, 22 nt, Artificial Sequence
  GATA2 Guide RNA
ccaccaccguauggcgccgaaa

SEQ ID NO: 9181 - RNA, 22 nt, Artificial Sequence
  GATA2 Guide RNA
ccaccguauggcgccgaaacgc

SEQ ID NO: 9182 - RNA, 22 nt, Artificial Sequence
  GATA2 Guide RNA
ccauacgguggugguugucguc

SEQ ID NO: 9183 - RNA, 22 nt, Artificial Sequence
  GATA2 Guide RNA
ccccguuggcguuucggcgcca

SEQ ID NO: 9184 - RNA, 22 nt, Artificial Sequence
  GATA2 Guide RNA
cccguuggcguuucggcgccau

SEQ ID NO: 9185 - RNA, 22 nt, Artificial Sequence
  GATA2 Guide RNA
ccguauggcgccgaaacgccaa

SEQ ID NO: 9186 - RNA, 22 nt, Artificial Sequence
  GATA2 Guide RNA
ccguuggcguuucggcgccaua

SEQ ID NO: 9187 - RNA, 22 nt, Artificial Sequence
  GATA2 Guide RNA
cgacaaccaccaccguauggcg

SEQ ID NO: 9188 - RNA, 22 nt, Artificial Sequence
  GATA2 Guide RNA
cgccauacgguggugguugucg

SEQ ID NO: 9189 - RNA, 22 nt, Artificial Sequence
  GATA2 Guide RNA
cggcgccauacgguggugguug

SEQ ID NO: 9190 - RNA, 22 nt, Artificial Sequence
  GATA2 Guide RNA
cgguggugguugucgucugaca

SEQ ID NO: 9191 - RNA, 22 nt, Artificial Sequence
  GATA2 Guide RNA
cguauggcgccgaaacgccaac

SEQ ID NO: 9192 - RNA, 22 nt, Artificial Sequence
  GATA2 Guide RNA
cguuggcguuucggcgccauac

SEQ ID NO: 9193 - RNA, 22 nt, Artificial Sequence
  GATA2 Guide RNA
cguuucggcgccauacgguggu

SEQ ID NO: 9194 - RNA, 22 nt, Artificial Sequence
  GATA2 Guide RNA
gacaaccaccaccguauggcgc

SEQ ID NO: 9195 - RNA, 22 nt, Artificial Sequence
  GATA2 Guide RNA
gacgacaaccaccaccguaugg

SEQ ID NO: 9196 - RNA, 22 nt, Artificial Sequence
  GATA2 Guide RNA
gccauacgguggugguugucgu

SEQ ID NO: 9197 - RNA, 22 nt, Artificial Sequence
  GATA2 Guide RNA
gcgccauacgguggugguuguc

SEQ ID NO: 9198 - RNA, 22 nt, Artificial Sequence
  GATA2 Guide RNA
gcguuucggcgccauacggugg

SEQ ID NO: 9199 - RNA, 22 nt, Artificial Sequence
  GATA2 Guide RNA
ggcgccauacgguggugguugu

SEQ ID NO: 9200 - RNA, 22 nt, Artificial Sequence
  GATA2 Guide RNA
ggcguuucggcgccauacggug

SEQ ID NO: 9201 - RNA, 22 nt, Artificial Sequence
  GATA2 Guide RNA
gucagacgacaaccaccaccgu

SEQ ID NO: 9202 - RNA, 22 nt, Artificial Sequence
  GATA2 Guide RNA
guuggcguuucggcgccauacg

SEQ ID NO: 9203 - RNA, 22 nt, Artificial Sequence
  GATA2 Guide RNA
guuucggcgccauacgguggug

SEQ ID NO: 9204 - RNA, 22 nt, Artificial Sequence
  GATA2 Guide RNA
uacgguggugguugucgucuga

SEQ ID NO: 9205 - RNA, 22 nt, Artificial Sequence
  GATA2 Guide RNA
ucagacgacaaccaccaccgua

SEQ ID NO: 9206 - RNA, 22 nt, Artificial Sequence
  GATA2 Guide RNA
ucggcgccauacgguggugguu

SEQ ID NO: 9207 - RNA, 22 nt, Artificial Sequence
  GATA2 Guide RNA
uggcguuucggcgccauacggu

SEQ ID NO: 9208 - RNA, 22 nt, Artificial Sequence
  GATA2 Guide RNA
ugucagacgacaaccaccaccg

SEQ ID NO: 9209 - RNA, 22 nt, Artificial Sequence
  GATA2 Guide RNA
uucggcgccauacggugguggu

SEQ ID NO: 9210 - RNA, 22 nt, Artificial Sequence
  GATA2 Guide RNA
uuggcguuucggcgccauacgg

SEQ ID NO: 9211 - RNA, 22 nt, Artificial Sequence
  GATA2 Guide RNA
uugucagacgacaaccaccacc

SEQ ID NO: 9212 - RNA, 22 nt, Artificial Sequence
  GATA2 Guide RNA
uuucggcgccauacgguggugg

SEQ ID NO: 9213 - RNA, 20 nt, Artificial Sequence
  GATA2 Guide RNA
aaauugucagagccuuacca

SEQ ID NO: 9214 - RNA, 20 nt, Artificial Sequence
  GATA2 Guide RNA
aaggcucugacaauuugcac

SEQ ID NO: 9215 - RNA, 20 nt, Artificial Sequence
  GATA2 Guide RNA
aagguggugguaaggcucug

SEQ ID NO: 9216 - RNA, 20 nt, Artificial Sequence
  GATA2 Guide RNA
aauugucagagccuuaccac

SEQ ID NO: 9217 - RNA, 20 nt, Artificial Sequence
  GATA2 Guide RNA
agagccuuaccaccaccuua

SEQ ID NO: 9218 - RNA, 20 nt, Artificial Sequence
  GATA2 Guide RNA
agccuuaccaccaccuuaug

SEQ ID NO: 9219 - RNA, 20 nt, Artificial Sequence
  GATA2 Guide RNA
agguggugguaaggcucuga

SEQ ID NO: 9220 - RNA, 20 nt, Artificial Sequence
  GATA2 Guide RNA
auaagguggugguaaggcuc

SEQ ID NO: 9221 - RNA, 20 nt, Artificial Sequence
  GATA2 Guide RNA
auugucagagccuuaccacc

SEQ ID NO: 9222 - RNA, 20 nt, Artificial Sequence
  GATA2 Guide RNA
caaauugucagagccuuacc

SEQ ID NO: 9223 - RNA, 20 nt, Artificial Sequence
  GATA2 Guide RNA
cagagccuuaccaccaccuu

SEQ ID NO: 9224 - RNA, 20 nt, Artificial Sequence
  GATA2 Guide RNA
cauaagguggugguaaggcu

SEQ ID NO: 9225 - RNA, 20 nt, Artificial Sequence
  GATA2 Guide RNA
ccauaagguggugguaaggc

SEQ ID NO: 9226 - RNA, 20 nt, Artificial Sequence
  GATA2 Guide RNA
ccuuaccaccaccuuauggc

SEQ ID NO: 9227 - RNA, 20 nt, Artificial Sequence
  GATA2 Guide RNA
cgccauaagguggugguaag

SEQ ID NO: 9228 - RNA, 20 nt, Artificial Sequence
  GATA2 Guide RNA
cggcgccauaaggugguggu

SEQ ID NO: 9229 - RNA, 20 nt, Artificial Sequence
  GATA2 Guide RNA
cuuaccaccaccuuauggcg

SEQ ID NO: 9230 - RNA, 20 nt, Artificial Sequence
  GATA2 Guide RNA
gagccuuaccaccaccuuau

SEQ ID NO: 9231 - RNA, 20 nt, Artificial Sequence
  GATA2 Guide RNA
gcaaauugucagagccuuac

SEQ ID NO: 9232 - RNA, 20 nt, Artificial Sequence
  GATA2 Guide RNA
gccauaagguggugguaagg

SEQ ID NO: 9233 - RNA, 20 nt, Artificial Sequence
  GATA2 Guide RNA
gccuuaccaccaccuuaugg

SEQ ID NO: 9234 - RNA, 20 nt, Artificial Sequence
  GATA2 Guide RNA
gcgccauaagguggugguaa

SEQ ID NO: 9235 - RNA, 20 nt, Artificial Sequence
  GATA2 Guide RNA
ggcgccauaaggugguggua

SEQ ID NO: 9236 - RNA, 20 nt, Artificial Sequence
  GATA2 Guide RNA
gguaaggcucugacaauuug

SEQ ID NO: 9237 - RNA, 20 nt, Artificial Sequence
  GATA2 Guide RNA
ggugguaaggcucugacaau

SEQ ID NO: 9238 - RNA, 20 nt, Artificial Sequence
  GATA2 Guide RNA
gguggugguaaggcucugac

SEQ ID NO: 9239 - RNA, 20 nt, Artificial Sequence
  GATA2 Guide RNA
guaaggcucugacaauuugc

SEQ ID NO: 9240 - RNA, 20 nt, Artificial Sequence
  GATA2 Guide RNA
gucagagccuuaccaccacc

SEQ ID NO: 9241 - RNA, 20 nt, Artificial Sequence
  GATA2 Guide RNA
gugcaaauugucagagccuu

SEQ ID NO: 9242 - RNA, 20 nt, Artificial Sequence
  GATA2 Guide RNA
gugguaaggcucugacaauu

SEQ ID NO: 9243 - RNA, 20 nt, Artificial Sequence
  GATA2 Guide RNA
guggugguaaggcucugaca

SEQ ID NO: 9244 - RNA, 20 nt, Artificial Sequence
  GATA2 Guide RNA
guugugcaaauugucagagc

SEQ ID NO: 9245 - RNA, 20 nt, Artificial Sequence
  GATA2 Guide RNA
uaaggcucugacaauuugca

SEQ ID NO: 9246 - RNA, 20 nt, Artificial Sequence
  GATA2 Guide RNA
uaagguggugguaaggcucu

SEQ ID NO: 9247 - RNA, 20 nt, Artificial Sequence
  GATA2 Guide RNA
ucagagccuuaccaccaccu

SEQ ID NO: 9248 - RNA, 20 nt, Artificial Sequence
  GATA2 Guide RNA
ucggcgccauaagguggugg

SEQ ID NO: 9249 - RNA, 20 nt, Artificial Sequence
  GATA2 Guide RNA
ugcaaauugucagagccuua

SEQ ID NO: 9250 - RNA, 20 nt, Artificial Sequence
  GATA2 Guide RNA
ugguaaggcucugacaauuu

SEQ ID NO: 9251 - RNA, 20 nt, Artificial Sequence
  GATA2 Guide RNA
uggugguaaggcucugacaa

SEQ ID NO: 9252 - RNA, 20 nt, Artificial Sequence
  GATA2 Guide RNA
ugucagagccuuaccaccac

SEQ ID NO: 9253 - RNA, 20 nt, Artificial Sequence
  GATA2 Guide RNA
ugugcaaauugucagagccu

SEQ ID NO: 9254 - RNA, 20 nt, Artificial Sequence
  GATA2 Guide RNA
uguugugcaaauugucagag

SEQ ID NO: 9255 - RNA, 20 nt, Artificial Sequence
  GATA2 Guide RNA
uuaccaccaccuuauggcgc

SEQ ID NO: 9256 - RNA, 20 nt, Artificial Sequence
  GATA2 Guide RNA
uucggcgccauaagguggug

SEQ ID NO: 9257 - RNA, 20 nt, Artificial Sequence
  GATA2 Guide RNA
uugucagagccuuaccacca

SEQ ID NO: 9258 - RNA, 20 nt, Artificial Sequence
  GATA2 Guide RNA
uugugcaaauugucagagcc

SEQ ID NO: 9259 - RNA, 21 nt, Artificial Sequence
  GATA2 Guide RNA
aaauugucagagccuuaccac

SEQ ID NO: 9260 - RNA, 21 nt, Artificial Sequence
  GATA2 Guide RNA
aaggcucugacaauuugcaca

SEQ ID NO: 9261 - RNA, 21 nt, Artificial Sequence
  GATA2 Guide RNA
aagguggugguaaggcucuga

SEQ ID NO: 9262 - RNA, 21 nt, Artificial Sequence
  GATA2 Guide RNA
aauugucagagccuuaccacc

SEQ ID NO: 9263 - RNA, 21 nt, Artificial Sequence
  GATA2 Guide RNA
agagccuuaccaccaccuuau

SEQ ID NO: 9264 - RNA, 21 nt, Artificial Sequence
  GATA2 Guide RNA
agccuuaccaccaccuuaugg

SEQ ID NO: 9265 - RNA, 21 nt, Artificial Sequence
  GATA2 Guide RNA
agguggugguaaggcucugac

SEQ ID NO: 9266 - RNA, 21 nt, Artificial Sequence
  GATA2 Guide RNA
auaagguggugguaaggcucu

SEQ ID NO: 9267 - RNA, 21 nt, Artificial Sequence
  GATA2 Guide RNA
auugucagagccuuaccacca

SEQ ID NO: 9268 - RNA, 21 nt, Artificial Sequence
  GATA2 Guide RNA
caaauugucagagccuuacca

SEQ ID NO: 9269 - RNA, 21 nt, Artificial Sequence
  GATA2 Guide RNA
cagagccuuaccaccaccuua

SEQ ID NO: 9270 - RNA, 21 nt, Artificial Sequence
  GATA2 Guide RNA
cauaagguggugguaaggcuc

SEQ ID NO: 9271 - RNA, 21 nt, Artificial Sequence
  GATA2 Guide RNA
ccauaagguggugguaaggcu

SEQ ID NO: 9272 - RNA, 21 nt, Artificial Sequence
  GATA2 Guide RNA
ccuuaccaccaccuuauggcg

SEQ ID NO: 9273 - RNA, 21 nt, Artificial Sequence
  GATA2 Guide RNA
cgccauaagguggugguaagg

SEQ ID NO: 9274 - RNA, 21 nt, Artificial Sequence
  GATA2 Guide RNA
cggcgccauaaggugguggua

SEQ ID NO: 9275 - RNA, 21 nt, Artificial Sequence
  GATA2 Guide RNA
cuguugugcaaauugucagag

SEQ ID NO: 9276 - RNA, 21 nt, Artificial Sequence
  GATA2 Guide RNA
cuuaccaccaccuuauggcgc

SEQ ID NO: 9277 - RNA, 21 nt, Artificial Sequence
  GATA2 Guide RNA
gagccuuaccaccaccuuaug

SEQ ID NO: 9278 - RNA, 21 nt, Artificial Sequence
  GATA2 Guide RNA
gcaaauugucagagccuuacc

SEQ ID NO: 9279 - RNA, 21 nt, Artificial Sequence
  GATA2 Guide RNA
gccauaagguggugguaaggc

SEQ ID NO: 9280 - RNA, 21 nt, Artificial Sequence
  GATA2 Guide RNA
gccuuaccaccaccuuauggc

SEQ ID NO: 9281 - RNA, 21 nt, Artificial Sequence
  GATA2 Guide RNA
gcgccauaagguggugguaag

SEQ ID NO: 9282 - RNA, 21 nt, Artificial Sequence
  GATA2 Guide RNA
ggcgccauaagguggugguaa

SEQ ID NO: 9283 - RNA, 21 nt, Artificial Sequence
  GATA2 Guide RNA
gguaaggcucugacaauuugc

SEQ ID NO: 9284 - RNA, 21 nt, Artificial Sequence
  GATA2 Guide RNA
ggugguaaggcucugacaauu

SEQ ID NO: 9285 - RNA, 21 nt, Artificial Sequence
  GATA2 Guide RNA
gguggugguaaggcucugaca

SEQ ID NO: 9286 - RNA, 21 nt, Artificial Sequence
  GATA2 Guide RNA
guaaggcucugacaauuugca

SEQ ID NO: 9287 - RNA, 21 nt, Artificial Sequence
  GATA2 Guide RNA
gucagagccuuaccaccaccu

SEQ ID NO: 9288 - RNA, 21 nt, Artificial Sequence
  GATA2 Guide RNA
gugcaaauugucagagccuua

SEQ ID NO: 9289 - RNA, 21 nt, Artificial Sequence
  GATA2 Guide RNA
gugguaaggcucugacaauuu

SEQ ID NO: 9290 - RNA, 21 nt, Artificial Sequence
  GATA2 Guide RNA
guggugguaaggcucugacaa

SEQ ID NO: 9291 - RNA, 21 nt, Artificial Sequence
  GATA2 Guide RNA
guugugcaaauugucagagcc

SEQ ID NO: 9292 - RNA, 21 nt, Artificial Sequence
  GATA2 Guide RNA
uaaggcucugacaauuugcac

SEQ ID NO: 9293 - RNA, 21 nt, Artificial Sequence
  GATA2 Guide RNA
uaagguggugguaaggcucug

SEQ ID NO: 9294 - RNA, 21 nt, Artificial Sequence
  GATA2 Guide RNA
ucagagccuuaccaccaccuu

SEQ ID NO: 9295 - RNA, 21 nt, Artificial Sequence
  GATA2 Guide RNA
ucggcgccauaaggugguggu

SEQ ID NO: 9296 - RNA, 21 nt, Artificial Sequence
  GATA2 Guide RNA
ugcaaauugucagagccuuac

SEQ ID NO: 9297 - RNA, 21 nt, Artificial Sequence
  GATA2 Guide RNA
ugguaaggcucugacaauuug

SEQ ID NO: 9298 - RNA, 21 nt, Artificial Sequence
  GATA2 Guide RNA
uggugguaaggcucugacaau

SEQ ID NO: 9299 - RNA, 21 nt, Artificial Sequence
  GATA2 Guide RNA
ugucagagccuuaccaccacc

SEQ ID NO: 9300 - RNA, 21 nt, Artificial Sequence
  GATA2 Guide RNA
ugugcaaauugucagagccuu

SEQ ID NO: 9301 - RNA, 21 nt, Artificial Sequence
  GATA2 Guide RNA
uguugugcaaauugucagagc

SEQ ID NO: 9302 - RNA, 21 nt, Artificial Sequence
  GATA2 Guide RNA
uuaccaccaccuuauggcgcc

SEQ ID NO: 9303 - RNA, 21 nt, Artificial Sequence
  GATA2 Guide RNA
uucggcgccauaagguggugg

SEQ ID NO: 9304 - RNA, 21 nt, Artificial Sequence
  GATA2 Guide RNA
uugucagagccuuaccaccac

SEQ ID NO: 9305 - RNA, 21 nt, Artificial Sequence
  GATA2 Guide RNA
uugugcaaauugucagagccu

SEQ ID NO: 9306 - RNA, 21 nt, Artificial Sequence
  GATA2 Guide RNA
uuucggcgccauaagguggug

SEQ ID NO: 9307 - RNA, 22 nt, Artificial Sequence
  GATA2 Guide RNA
aaauugucagagccuuaccacc

SEQ ID NO: 9308 - RNA, 22 nt, Artificial Sequence
  GATA2 Guide RNA
aaggcucugacaauuugcacaa

SEQ ID NO: 9309 - RNA, 22 nt, Artificial Sequence
  GATA2 Guide RNA
aagguggugguaaggcucugac

SEQ ID NO: 9310 - RNA, 22 nt, Artificial Sequence
  GATA2 Guide RNA
aauugucagagccuuaccacca

SEQ ID NO: 9311 - RNA, 22 nt, Artificial Sequence
  GATA2 Guide RNA
agagccuuaccaccaccuuaug

SEQ ID NO: 9312 - RNA, 22 nt, Artificial Sequence
  GATA2 Guide RNA
agccuuaccaccaccuuauggc

SEQ ID NO: 9313 - RNA, 22 nt, Artificial Sequence
  GATA2 Guide RNA
agguggugguaaggcucugaca

SEQ ID NO: 9314 - RNA, 22 nt, Artificial Sequence
  GATA2 Guide RNA
auaagguggugguaaggcucug

SEQ ID NO: 9315 - RNA, 22 nt, Artificial Sequence
  GATA2 Guide RNA
auugucagagccuuaccaccac

SEQ ID NO: 9316 - RNA, 22 nt, Artificial Sequence
  GATA2 Guide RNA
caaauugucagagccuuaccac

SEQ ID NO: 9317 - RNA, 22 nt, Artificial Sequence
  GATA2 Guide RNA
cagagccuuaccaccaccuuau

SEQ ID NO: 9318 - RNA, 22 nt, Artificial Sequence
  GATA2 Guide RNA
cauaagguggugguaaggcucu

SEQ ID NO: 9319 - RNA, 22 nt, Artificial Sequence
  GATA2 Guide RNA
ccauaagguggugguaaggcuc

SEQ ID NO: 9320 - RNA, 22 nt, Artificial Sequence
  GATA2 Guide RNA
ccuguugugcaaauugucagag

SEQ ID NO: 9321 - RNA, 22 nt, Artificial Sequence
  GATA2 Guide RNA
ccuuaccaccaccuuauggcgc

SEQ ID NO: 9322 - RNA, 22 nt, Artificial Sequence
  GATA2 Guide RNA
cgccauaagguggugguaaggc

SEQ ID NO: 9323 - RNA, 22 nt, Artificial Sequence
  GATA2 Guide RNA
cggcgccauaagguggugguaa

SEQ ID NO: 9324 - RNA, 22 nt, Artificial Sequence
  GATA2 Guide RNA
cuguugugcaaauugucagagc

SEQ ID NO: 9325 - RNA, 22 nt, Artificial Sequence
  GATA2 Guide RNA
cuuaccaccaccuuauggcgcc

SEQ ID NO: 9326 - RNA, 22 nt, Artificial Sequence
  GATA2 Guide RNA
gagccuuaccaccaccuuaugg

SEQ ID NO: 9327 - RNA, 22 nt, Artificial Sequence
  GATA2 Guide RNA
gcaaauugucagagccuuacca

SEQ ID NO: 9328 - RNA, 22 nt, Artificial Sequence
  GATA2 Guide RNA
gccauaagguggugguaaggcu

SEQ ID NO: 9329 - RNA, 22 nt, Artificial Sequence
  GATA2 Guide RNA
gccuuaccaccaccuuauggcg

SEQ ID NO: 9330 - RNA, 22 nt, Artificial Sequence
  GATA2 Guide RNA
gcgccauaagguggugguaagg

SEQ ID NO: 9331 - RNA, 22 nt, Artificial Sequence
  GATA2 Guide RNA
ggcgccauaagguggugguaag

SEQ ID NO: 9332 - RNA, 22 nt, Artificial Sequence
  GATA2 Guide RNA
gguaaggcucugacaauuugca

SEQ ID NO: 9333 - RNA, 22 nt, Artificial Sequence
  GATA2 Guide RNA
ggugguaaggcucugacaauuu

SEQ ID NO: 9334 - RNA, 22 nt, Artificial Sequence
  GATA2 Guide RNA
gguggugguaaggcucugacaa

SEQ ID NO: 9335 - RNA, 22 nt, Artificial Sequence
  GATA2 Guide RNA
guaaggcucugacaauuugcac

SEQ ID NO: 9336 - RNA, 22 nt, Artificial Sequence
  GATA2 Guide RNA
gucagagccuuaccaccaccuu

SEQ ID NO: 9337 - RNA, 22 nt, Artificial Sequence
  GATA2 Guide RNA
gugcaaauugucagagccuuac

SEQ ID NO: 9338 - RNA, 22 nt, Artificial Sequence
  GATA2 Guide RNA
gugguaaggcucugacaauuug

SEQ ID NO: 9339 - RNA, 22 nt, Artificial Sequence
  GATA2 Guide RNA
guggugguaaggcucugacaau

SEQ ID NO: 9340 - RNA, 22 nt, Artificial Sequence
  GATA2 Guide RNA
guugugcaaauugucagagccu

SEQ ID NO: 9341 - RNA, 22 nt, Artificial Sequence
  GATA2 Guide RNA
guuucggcgccauaagguggug

SEQ ID NO: 9342 - RNA, 22 nt, Artificial Sequence
  GATA2 Guide RNA
uaaggcucugacaauuugcaca

SEQ ID NO: 9343 - RNA, 22 nt, Artificial Sequence
  GATA2 Guide RNA
uaagguggugguaaggcucuga

SEQ ID NO: 9344 - RNA, 22 nt, Artificial Sequence
  GATA2 Guide RNA
ucagagccuuaccaccaccuua

SEQ ID NO: 9345 - RNA, 22 nt, Artificial Sequence
  GATA2 Guide RNA
ucggcgccauaaggugguggua

SEQ ID NO: 9346 - RNA, 22 nt, Artificial Sequence
  GATA2 Guide RNA
ugcaaauugucagagccuuacc

SEQ ID NO: 9347 - RNA, 22 nt, Artificial Sequence
  GATA2 Guide RNA
ugguaaggcucugacaauuugc

SEQ ID NO: 9348 - RNA, 22 nt, Artificial Sequence
  GATA2 Guide RNA
uggugguaaggcucugacaauu

SEQ ID NO: 9349 - RNA, 22 nt, Artificial Sequence
  GATA2 Guide RNA
ugucagagccuuaccaccaccu

SEQ ID NO: 9350 - RNA, 22 nt, Artificial Sequence
  GATA2 Guide RNA
ugugcaaauugucagagccuua

SEQ ID NO: 9351 - RNA, 22 nt, Artificial Sequence
  GATA2 Guide RNA
uguugugcaaauugucagagcc

SEQ ID NO: 9352 - RNA, 22 nt, Artificial Sequence
  GATA2 Guide RNA
uuaccaccaccuuauggcgccg

SEQ ID NO: 9353 - RNA, 22 nt, Artificial Sequence
  GATA2 Guide RNA
uucggcgccauaaggugguggu

SEQ ID NO: 9354 - RNA, 22 nt, Artificial Sequence
  GATA2 Guide RNA
uugucagagccuuaccaccacc

SEQ ID NO: 9355 - RNA, 22 nt, Artificial Sequence
  GATA2 Guide RNA
uugugcaaauugucagagccuu

SEQ ID NO: 9356 - RNA, 22 nt, Artificial Sequence
  GATA2 Guide RNA
uuucggcgccauaagguggugg

SEQ ID NO: 9357 - RNA, 20 nt, Artificial Sequence
  GATA2 Guide RNA
aaaaccaccaccuuauggcg

SEQ ID NO: 9358 - RNA, 20 nt, Artificial Sequence
  GATA2 Guide RNA
aaauugucagacgaaaacca

SEQ ID NO: 9359 - RNA, 20 nt, Artificial Sequence
  GATA2 Guide RNA
aagguggugguuuucgucug

SEQ ID NO: 9360 - RNA, 20 nt, Artificial Sequence
  GATA2 Guide RNA
aauugucagacgaaaaccac

SEQ ID NO: 9361 - RNA, 20 nt, Artificial Sequence
  GATA2 Guide RNA
acgaaaaccaccaccuuaug

SEQ ID NO: 9362 - RNA, 20 nt, Artificial Sequence
  GATA2 Guide RNA
agacgaaaaccaccaccuua

SEQ ID NO: 9363 - RNA, 20 nt, Artificial Sequence
  GATA2 Guide RNA
agguggugguuuucgucuga

SEQ ID NO: 9364 - RNA, 20 nt, Artificial Sequence
  GATA2 Guide RNA
auaagguggugguuuucguc

SEQ ID NO: 9365 - RNA, 20 nt, Artificial Sequence
  GATA2 Guide RNA
auugucagacgaaaaccacc

SEQ ID NO: 9366 - RNA, 20 nt, Artificial Sequence
  GATA2 Guide RNA
caaauugucagacgaaaacc

SEQ ID NO: 9367 - RNA, 20 nt, Artificial Sequence
  GATA2 Guide RNA
cagacgaaaaccaccaccuu

SEQ ID NO: 9368 - RNA, 20 nt, Artificial Sequence
  GATA2 Guide RNA
cauaagguggugguuuucgu

SEQ ID NO: 9369 - RNA, 20 nt, Artificial Sequence
  GATA2 Guide RNA
ccauaagguggugguuuucg

SEQ ID NO: 9370 - RNA, 20 nt, Artificial Sequence
  GATA2 Guide RNA
cgaaaaccaccaccuuaugg

SEQ ID NO: 9371 - RNA, 20 nt, Artificial Sequence
  GATA2 Guide RNA
cgccauaagguggugguuuu

SEQ ID NO: 9372 - RNA, 20 nt, Artificial Sequence
  GATA2 Guide RNA
cuguugugcaaauugucaga

SEQ ID NO: 9373 - RNA, 20 nt, Artificial Sequence
  GATA2 Guide RNA
gaaaaccaccaccuuauggc

SEQ ID NO: 9374 - RNA, 20 nt, Artificial Sequence
  GATA2 Guide RNA
gacgaaaaccaccaccuuau

SEQ ID NO: 9375 - RNA, 20 nt, Artificial Sequence
  GATA2 Guide RNA
gcaaauugucagacgaaaac

SEQ ID NO: 9376 - RNA, 20 nt, Artificial Sequence
  GATA2 Guide RNA
gccauaagguggugguuuuc

SEQ ID NO: 9377 - RNA, 20 nt, Artificial Sequence
  GATA2 Guide RNA
gcgccauaagguggugguuu

SEQ ID NO: 9378 - RNA, 20 nt, Artificial Sequence
  GATA2 Guide RNA
ggcgccauaagguggugguu

SEQ ID NO: 9379 - RNA, 20 nt, Artificial Sequence
  GATA2 Guide RNA
gguggugguuuucgucugac

SEQ ID NO: 9380 - RNA, 20 nt, Artificial Sequence
  GATA2 Guide RNA
ggugguuuucgucugacaau

SEQ ID NO: 9381 - RNA, 20 nt, Artificial Sequence
  GATA2 Guide RNA
gguuuucgucugacaauuug

SEQ ID NO: 9382 - RNA, 20 nt, Artificial Sequence
  GATA2 Guide RNA
gucagacgaaaaccaccacc

SEQ ID NO: 9383 - RNA, 20 nt, Artificial Sequence
  GATA2 Guide RNA
gugcaaauugucagacgaaa

SEQ ID NO: 9384 - RNA, 20 nt, Artificial Sequence
  GATA2 Guide RNA
guggugguuuucgucugaca

SEQ ID NO: 9385 - RNA, 20 nt, Artificial Sequence
  GATA2 Guide RNA
gugguuuucgucugacaauu

SEQ ID NO: 9386 - RNA, 20 nt, Artificial Sequence
  GATA2 Guide RNA
guugugcaaauugucagacg

SEQ ID NO: 9387 - RNA, 20 nt, Artificial Sequence
  GATA2 Guide RNA
guuuucgucugacaauuugc

SEQ ID NO: 9388 - RNA, 20 nt, Artificial Sequence
  GATA2 Guide RNA
uaagguggugguuuucgucu

SEQ ID NO: 9389 - RNA, 20 nt, Artificial Sequence
  GATA2 Guide RNA
ucagacgaaaaccaccaccu

SEQ ID NO: 9390 - RNA, 20 nt, Artificial Sequence
  GATA2 Guide RNA
ugcaaauugucagacgaaaa

SEQ ID NO: 9391 - RNA, 20 nt, Artificial Sequence
  GATA2 Guide RNA
uggugguuuucgucugacaa

SEQ ID NO: 9392 - RNA, 20 nt, Artificial Sequence
  GATA2 Guide RNA
ugguuuucgucugacaauuu

SEQ ID NO: 9393 - RNA, 20 nt, Artificial Sequence
  GATA2 Guide RNA
ugucagacgaaaaccaccac

SEQ ID NO: 9394 - RNA, 20 nt, Artificial Sequence
  GATA2 Guide RNA
ugugcaaauugucagacgaa

SEQ ID NO: 9395 - RNA, 20 nt, Artificial Sequence
  GATA2 Guide RNA
uguugugcaaauugucagac

SEQ ID NO: 9396 - RNA, 20 nt, Artificial Sequence
  GATA2 Guide RNA
uucgucugacaauuugcaca

SEQ ID NO: 9397 - RNA, 20 nt, Artificial Sequence
  GATA2 Guide RNA
uugucagacgaaaaccacca

SEQ ID NO: 9398 - RNA, 20 nt, Artificial Sequence
  GATA2 Guide RNA
uugugcaaauugucagacga

SEQ ID NO: 9399 - RNA, 20 nt, Artificial Sequence
  GATA2 Guide RNA
uuucgucugacaauuugcac

SEQ ID NO: 9400 - RNA, 20 nt, Artificial Sequence
  GATA2 Guide RNA
uuuucgucugacaauuugca

SEQ ID NO: 9401 - RNA, 21 nt, Artificial Sequence
  GATA2 Guide RNA
aaaaccaccaccuuauggcgc

SEQ ID NO: 9402 - RNA, 21 nt, Artificial Sequence
  GATA2 Guide RNA
aaauugucagacgaaaaccac

SEQ ID NO: 9403 - RNA, 21 nt, Artificial Sequence
  GATA2 Guide RNA
aagguggugguuuucgucuga

SEQ ID NO: 9404 - RNA, 21 nt, Artificial Sequence
  GATA2 Guide RNA
aauugucagacgaaaaccacc

SEQ ID NO: 9405 - RNA, 21 nt, Artificial Sequence
  GATA2 Guide RNA
acgaaaaccaccaccuuaugg

SEQ ID NO: 9406 - RNA, 21 nt, Artificial Sequence
  GATA2 Guide RNA
agacgaaaaccaccaccuuau

SEQ ID NO: 9407 - RNA, 21 nt, Artificial Sequence
  GATA2 Guide RNA
agguggugguuuucgucugac

SEQ ID NO: 9408 - RNA, 21 nt, Artificial Sequence
  GATA2 Guide RNA
auaagguggugguuuucgucu

SEQ ID NO: 9409 - RNA, 21 nt, Artificial Sequence
  GATA2 Guide RNA
auugucagacgaaaaccacca

SEQ ID NO: 9410 - RNA, 21 nt, Artificial Sequence
  GATA2 Guide RNA
caaauugucagacgaaaacca

SEQ ID NO: 9411 - RNA, 21 nt, Artificial Sequence
  GATA2 Guide RNA
cagacgaaaaccaccaccuua

SEQ ID NO: 9412 - RNA, 21 nt, Artificial Sequence
  GATA2 Guide RNA
cauaagguggugguuuucguc

SEQ ID NO: 9413 - RNA, 21 nt, Artificial Sequence
  GATA2 Guide RNA
ccauaagguggugguuuucgu

SEQ ID NO: 9414 - RNA, 21 nt, Artificial Sequence
  GATA2 Guide RNA
ccuguugugcaaauugucaga

SEQ ID NO: 9415 - RNA, 21 nt, Artificial Sequence
  GATA2 Guide RNA
cgaaaaccaccaccuuauggc

SEQ ID NO: 9416 - RNA, 21 nt, Artificial Sequence
  GATA2 Guide RNA
cgccauaagguggugguuuuc

SEQ ID NO: 9417 - RNA, 21 nt, Artificial Sequence
  GATA2 Guide RNA
cggcgccauaagguggugguu

SEQ ID NO: 9418 - RNA, 21 nt, Artificial Sequence
  GATA2 Guide RNA
cuguugugcaaauugucagac

SEQ ID NO: 9419 - RNA, 21 nt, Artificial Sequence
  GATA2 Guide RNA
gaaaaccaccaccuuauggcg

SEQ ID NO: 9420 - RNA, 21 nt, Artificial Sequence
  GATA2 Guide RNA
gacgaaaaccaccaccuuaug

SEQ ID NO: 9421 - RNA, 21 nt, Artificial Sequence
  GATA2 Guide RNA
gcaaauugucagacgaaaacc

SEQ ID NO: 9422 - RNA, 21 nt, Artificial Sequence
  GATA2 Guide RNA
gccauaagguggugguuuucg

SEQ ID NO: 9423 - RNA, 21 nt, Artificial Sequence
  GATA2 Guide RNA
gcgccauaagguggugguuuu

SEQ ID NO: 9424 - RNA, 21 nt, Artificial Sequence
  GATA2 Guide RNA
ggcgccauaagguggugguuu

SEQ ID NO: 9425 - RNA, 21 nt, Artificial Sequence
  GATA2 Guide RNA
gguggugguuuucgucugaca

SEQ ID NO: 9426 - RNA, 21 nt, Artificial Sequence
  GATA2 Guide RNA
ggugguuuucgucugacaauu

SEQ ID NO: 9427 - RNA, 21 nt, Artificial Sequence
  GATA2 Guide RNA
gguuuucgucugacaauuugc

SEQ ID NO: 9428 - RNA, 21 nt, Artificial Sequence
  GATA2 Guide RNA
gucagacgaaaaccaccaccu

SEQ ID NO: 9429 - RNA, 21 nt, Artificial Sequence
  GATA2 Guide RNA
gugcaaauugucagacgaaaa

SEQ ID NO: 9430 - RNA, 21 nt, Artificial Sequence
  GATA2 Guide RNA
guggugguuuucgucugacaa

SEQ ID NO: 9431 - RNA, 21 nt, Artificial Sequence
  GATA2 Guide RNA
gugguuuucgucugacaauuu

SEQ ID NO: 9432 - RNA, 21 nt, Artificial Sequence
  GATA2 Guide RNA
guugugcaaauugucagacga

SEQ ID NO: 9433 - RNA, 21 nt, Artificial Sequence
  GATA2 Guide RNA
guuuucgucugacaauuugca

SEQ ID NO: 9434 - RNA, 21 nt, Artificial Sequence
  GATA2 Guide RNA
uaagguggugguuuucgucug

SEQ ID NO: 9435 - RNA, 21 nt, Artificial Sequence
  GATA2 Guide RNA
ucagacgaaaaccaccaccuu

SEQ ID NO: 9436 - RNA, 21 nt, Artificial Sequence
  GATA2 Guide RNA
ugcaaauugucagacgaaaac

SEQ ID NO: 9437 - RNA, 21 nt, Artificial Sequence
  GATA2 Guide RNA
uggugguuuucgucugacaau

SEQ ID NO: 9438 - RNA, 21 nt, Artificial Sequence
  GATA2 Guide RNA
ugguuuucgucugacaauuug

SEQ ID NO: 9439 - RNA, 21 nt, Artificial Sequence
  GATA2 Guide RNA
ugucagacgaaaaccaccacc

SEQ ID NO: 9440 - RNA, 21 nt, Artificial Sequence
  GATA2 Guide RNA
ugugcaaauugucagacgaaa

SEQ ID NO: 9441 - RNA, 21 nt, Artificial Sequence
  GATA2 Guide RNA
uguugugcaaauugucagacg

SEQ ID NO: 9442 - RNA, 21 nt, Artificial Sequence
  GATA2 Guide RNA
uucgucugacaauuugcacaa

SEQ ID NO: 9443 - RNA, 21 nt, Artificial Sequence
  GATA2 Guide RNA
uugucagacgaaaaccaccac

SEQ ID NO: 9444 - RNA, 21 nt, Artificial Sequence
  GATA2 Guide RNA
uugugcaaauugucagacgaa

SEQ ID NO: 9445 - RNA, 21 nt, Artificial Sequence
  GATA2 Guide RNA
uuucgucugacaauuugcaca

SEQ ID NO: 9446 - RNA, 21 nt, Artificial Sequence
  GATA2 Guide RNA
uuuucgucugacaauuugcac

SEQ ID NO: 9447 - RNA, 22 nt, Artificial Sequence
  GATA2 Guide RNA
aaaaccaccaccuuauggcgcc

SEQ ID NO: 9448 - RNA, 22 nt, Artificial Sequence
  GATA2 Guide RNA
aaauugucagacgaaaaccacc

SEQ ID NO: 9449 - RNA, 22 nt, Artificial Sequence
  GATA2 Guide RNA
aagguggugguuuucgucugac

SEQ ID NO: 9450 - RNA, 22 nt, Artificial Sequence
  GATA2 Guide RNA
aauugucagacgaaaaccacca

SEQ ID NO: 9451 - RNA, 22 nt, Artificial Sequence
  GATA2 Guide RNA
accuguugugcaaauugucaga

SEQ ID NO: 9452 - RNA, 22 nt, Artificial Sequence
  GATA2 Guide RNA
acgaaaaccaccaccuuauggc

SEQ ID NO: 9453 - RNA, 22 nt, Artificial Sequence
  GATA2 Guide RNA
agacgaaaaccaccaccuuaug

SEQ ID NO: 9454 - RNA, 22 nt, Artificial Sequence
  GATA2 Guide RNA
agguggugguuuucgucugaca

SEQ ID NO: 9455 - RNA, 22 nt, Artificial Sequence
  GATA2 Guide RNA
auaagguggugguuuucgucug

SEQ ID NO: 9456 - RNA, 22 nt, Artificial Sequence
  GATA2 Guide RNA
auugucagacgaaaaccaccac

SEQ ID NO: 9457 - RNA, 22 nt, Artificial Sequence
  GATA2 Guide RNA
caaauugucagacgaaaaccac

SEQ ID NO: 9458 - RNA, 22 nt, Artificial Sequence
  GATA2 Guide RNA
cagacgaaaaccaccaccuuau

SEQ ID NO: 9459 - RNA, 22 nt, Artificial Sequence
  GATA2 Guide RNA
cauaagguggugguuuucgucu

SEQ ID NO: 9460 - RNA, 22 nt, Artificial Sequence
  GATA2 Guide RNA
ccauaagguggugguuuucguc

SEQ ID NO: 9461 - RNA, 22 nt, Artificial Sequence
  GATA2 Guide RNA
ccuguugugcaaauugucagac

SEQ ID NO: 9462 - RNA, 22 nt, Artificial Sequence
  GATA2 Guide RNA
cgaaaaccaccaccuuauggcg

SEQ ID NO: 9463 - RNA, 22 nt, Artificial Sequence
  GATA2 Guide RNA
cgccauaagguggugguuuucg

SEQ ID NO: 9464 - RNA, 22 nt, Artificial Sequence
  GATA2 Guide RNA
cggcgccauaagguggugguuu

SEQ ID NO: 9465 - RNA, 22 nt, Artificial Sequence
  GATA2 Guide RNA
cuguugugcaaauugucagacg

SEQ ID NO: 9466 - RNA, 22 nt, Artificial Sequence
  GATA2 Guide RNA
gaaaaccaccaccuuauggcgc

SEQ ID NO: 9467 - RNA, 22 nt, Artificial Sequence
  GATA2 Guide RNA
gacgaaaaccaccaccuuaugg

SEQ ID NO: 9468 - RNA, 22 nt, Artificial Sequence
  GATA2 Guide RNA
gcaaauugucagacgaaaacca

SEQ ID NO: 9469 - RNA, 22 nt, Artificial Sequence
  GATA2 Guide RNA
gccauaagguggugguuuucgu

SEQ ID NO: 9470 - RNA, 22 nt, Artificial Sequence
  GATA2 Guide RNA
gcgccauaagguggugguuuuc

SEQ ID NO: 9471 - RNA, 22 nt, Artificial Sequence
  GATA2 Guide RNA
ggcgccauaagguggugguuuu

SEQ ID NO: 9472 - RNA, 22 nt, Artificial Sequence
  GATA2 Guide RNA
gguggugguuuucgucugacaa

SEQ ID NO: 9473 - RNA, 22 nt, Artificial Sequence
  GATA2 Guide RNA
ggugguuuucgucugacaauuu

SEQ ID NO: 9474 - RNA, 22 nt, Artificial Sequence
  GATA2 Guide RNA
gguuuucgucugacaauuugca

SEQ ID NO: 9475 - RNA, 22 nt, Artificial Sequence
  GATA2 Guide RNA
gucagacgaaaaccaccaccuu

SEQ ID NO: 9476 - RNA, 22 nt, Artificial Sequence
  GATA2 Guide RNA
gugcaaauugucagacgaaaac

SEQ ID NO: 9477 - RNA, 22 nt, Artificial Sequence
  GATA2 Guide RNA
guggugguuuucgucugacaau

SEQ ID NO: 9478 - RNA, 22 nt, Artificial Sequence
  GATA2 Guide RNA
gugguuuucgucugacaauuug

SEQ ID NO: 9479 - RNA, 22 nt, Artificial Sequence
  GATA2 Guide RNA
guugugcaaauugucagacgaa

SEQ ID NO: 9480 - RNA, 22 nt, Artificial Sequence
  GATA2 Guide RNA
guuuucgucugacaauuugcac

SEQ ID NO: 9481 - RNA, 22 nt, Artificial Sequence
  GATA2 Guide RNA
uaagguggugguuuucgucuga

SEQ ID NO: 9482 - RNA, 22 nt, Artificial Sequence
  GATA2 Guide RNA
ucagacgaaaaccaccaccuua

SEQ ID NO: 9483 - RNA, 22 nt, Artificial Sequence
  GATA2 Guide RNA
ucggcgccauaagguggugguu

SEQ ID NO: 9484 - RNA, 22 nt, Artificial Sequence
  GATA2 Guide RNA
ugcaaauugucagacgaaaacc

SEQ ID NO: 9485 - RNA, 22 nt, Artificial Sequence
  GATA2 Guide RNA
uggugguuuucgucugacaauu

SEQ ID NO: 9486 - RNA, 22 nt, Artificial Sequence
  GATA2 Guide RNA
ugguuuucgucugacaauuugc

SEQ ID NO: 9487 - RNA, 22 nt, Artificial Sequence
  GATA2 Guide RNA
ugucagacgaaaaccaccaccu

SEQ ID NO: 9488 - RNA, 22 nt, Artificial Sequence
  GATA2 Guide RNA
ugugcaaauugucagacgaaaa

SEQ ID NO: 9489 - RNA, 22 nt, Artificial Sequence
  GATA2 Guide RNA
uguugugcaaauugucagacga

SEQ ID NO: 9490 - RNA, 22 nt, Artificial Sequence
  GATA2 Guide RNA
uucgucugacaauuugcacaac

SEQ ID NO: 9491 - RNA, 22 nt, Artificial Sequence
  GATA2 Guide RNA
uugucagacgaaaaccaccacc

SEQ ID NO: 9492 - RNA, 22 nt, Artificial Sequence
  GATA2 Guide RNA
uugugcaaauugucagacgaaa

SEQ ID NO: 9493 - RNA, 22 nt, Artificial Sequence
  GATA2 Guide RNA
uuucgucugacaauuugcacaa

SEQ ID NO: 9494 - RNA, 22 nt, Artificial Sequence
  GATA2 Guide RNA
uuuucgucugacaauuugcaca

SEQ ID NO: 9495 - RNA, 20 nt, Artificial Sequence
  GATA2 Guide RNA
aaauugucagaugacaacca

SEQ ID NO: 9496 - RNA, 20 nt, Artificial Sequence
  GATA2 Guide RNA
aagguggugguugucaucug

SEQ ID NO: 9497 - RNA, 20 nt, Artificial Sequence
  GATA2 Guide RNA
aauugucagaugacaaccac

SEQ ID NO: 9498 - RNA, 20 nt, Artificial Sequence
  GATA2 Guide RNA
accuguugugcaaauuguca

SEQ ID NO: 9499 - RNA, 20 nt, Artificial Sequence
  GATA2 Guide RNA
agaugacaaccaccaccuua

SEQ ID NO: 9500 - RNA, 20 nt, Artificial Sequence
  GATA2 Guide RNA
agguggugguugucaucuga

SEQ ID NO: 9501 - RNA, 20 nt, Artificial Sequence
  GATA2 Guide RNA
auaagguggugguugucauc

SEQ ID NO: 9502 - RNA, 20 nt, Artificial Sequence
  GATA2 Guide RNA
aucugacaauuugcacaaca

SEQ ID NO: 9503 - RNA, 20 nt, Artificial Sequence
  GATA2 Guide RNA
augacaaccaccaccuuaug

SEQ ID NO: 9504 - RNA, 20 nt, Artificial Sequence
  GATA2 Guide RNA
auugucagaugacaaccacc

SEQ ID NO: 9505 - RNA, 20 nt, Artificial Sequence
  GATA2 Guide RNA
caaauugucagaugacaacc

SEQ ID NO: 9506 - RNA, 20 nt, Artificial Sequence
  GATA2 Guide RNA
caccuguugugcaaauuguc

SEQ ID NO: 9507 - RNA, 20 nt, Artificial Sequence
  GATA2 Guide RNA
cagaugacaaccaccaccuu

SEQ ID NO: 9508 - RNA, 20 nt, Artificial Sequence
  GATA2 Guide RNA
cauaagguggugguugucau

SEQ ID NO: 9509 - RNA, 20 nt, Artificial Sequence
  GATA2 Guide RNA
caucugacaauuugcacaac

SEQ ID NO: 9510 - RNA, 20 nt, Artificial Sequence
  GATA2 Guide RNA
ccauaagguggugguuguca

SEQ ID NO: 9511 - RNA, 20 nt, Artificial Sequence
  GATA2 Guide RNA
ccuguugugcaaauugucag

SEQ ID NO: 9512 - RNA, 20 nt, Artificial Sequence
  GATA2 Guide RNA
cgccauaagguggugguugu

SEQ ID NO: 9513 - RNA, 20 nt, Artificial Sequence
  GATA2 Guide RNA
gaugacaaccaccaccuuau

SEQ ID NO: 9514 - RNA, 20 nt, Artificial Sequence
  GATA2 Guide RNA
gcaaauugucagaugacaac

SEQ ID NO: 9515 - RNA, 20 nt, Artificial Sequence
  GATA2 Guide RNA
gccauaagguggugguuguc

SEQ ID NO: 9516 - RNA, 20 nt, Artificial Sequence
  GATA2 Guide RNA
gcgccauaagguggugguug

SEQ ID NO: 9517 - RNA, 20 nt, Artificial Sequence
  GATA2 Guide RNA
gguggugguugucaucugac

SEQ ID NO: 9518 - RNA, 20 nt, Artificial Sequence
  GATA2 Guide RNA
ggugguugucaucugacaau

SEQ ID NO: 9519 - RNA, 20 nt, Artificial Sequence
  GATA2 Guide RNA
gguugucaucugacaauuug

SEQ ID NO: 9520 - RNA, 20 nt, Artificial Sequence
  GATA2 Guide RNA
gucagaugacaaccaccacc

SEQ ID NO: 9521 - RNA, 20 nt, Artificial Sequence
  GATA2 Guide RNA
gucaucugacaauuugcaca

SEQ ID NO: 9522 - RNA, 20 nt, Artificial Sequence
  GATA2 Guide RNA
gugcaaauugucagaugaca

SEQ ID NO: 9523 - RNA, 20 nt, Artificial Sequence
  GATA2 Guide RNA
guggugguugucaucugaca

SEQ ID NO: 9524 - RNA, 20 nt, Artificial Sequence
  GATA2 Guide RNA
gugguugucaucugacaauu

SEQ ID NO: 9525 - RNA, 20 nt, Artificial Sequence
  GATA2 Guide RNA
guugucaucugacaauuugc

SEQ ID NO: 9526 - RNA, 20 nt, Artificial Sequence
  GATA2 Guide RNA
guugugcaaauugucagaug

SEQ ID NO: 9527 - RNA, 20 nt, Artificial Sequence
  GATA2 Guide RNA
uaagguggugguugucaucu

SEQ ID NO: 9528 - RNA, 20 nt, Artificial Sequence
  GATA2 Guide RNA
ucagaugacaaccaccaccu

SEQ ID NO: 9529 - RNA, 20 nt, Artificial Sequence
  GATA2 Guide RNA
ucaucugacaauuugcacaa

SEQ ID NO: 9530 - RNA, 20 nt, Artificial Sequence
  GATA2 Guide RNA
ugcaaauugucagaugacaa

SEQ ID NO: 9531 - RNA, 20 nt, Artificial Sequence
  GATA2 Guide RNA
uggugguugucaucugacaa

SEQ ID NO: 9532 - RNA, 20 nt, Artificial Sequence
  GATA2 Guide RNA
ugguugucaucugacaauuu

SEQ ID NO: 9533 - RNA, 20 nt, Artificial Sequence
  GATA2 Guide RNA
ugucagaugacaaccaccac

SEQ ID NO: 9534 - RNA, 20 nt, Artificial Sequence
  GATA2 Guide RNA
ugucaucugacaauuugcac

SEQ ID NO: 9535 - RNA, 20 nt, Artificial Sequence
  GATA2 Guide RNA
ugugcaaauugucagaugac

SEQ ID NO: 9536 - RNA, 20 nt, Artificial Sequence
  GATA2 Guide RNA
uguugugcaaauugucagau

SEQ ID NO: 9537 - RNA, 20 nt, Artificial Sequence
  GATA2 Guide RNA
uugucagaugacaaccacca

SEQ ID NO: 9538 - RNA, 20 nt, Artificial Sequence
  GATA2 Guide RNA
uugucaucugacaauuugca

SEQ ID NO: 9539 - RNA, 20 nt, Artificial Sequence
  GATA2 Guide RNA
uugugcaaauugucagauga

SEQ ID NO: 9540 - RNA, 21 nt, Artificial Sequence
  GATA2 Guide RNA
aaauugucagaugacaaccac

SEQ ID NO: 9541 - RNA, 21 nt, Artificial Sequence
  GATA2 Guide RNA
aagguggugguugucaucuga

SEQ ID NO: 9542 - RNA, 21 nt, Artificial Sequence
  GATA2 Guide RNA
aauugucagaugacaaccacc

SEQ ID NO: 9543 - RNA, 21 nt, Artificial Sequence
  GATA2 Guide RNA
accuguugugcaaauugucag

SEQ ID NO: 9544 - RNA, 21 nt, Artificial Sequence
  GATA2 Guide RNA
agaugacaaccaccaccuuau

SEQ ID NO: 9545 - RNA, 21 nt, Artificial Sequence
  GATA2 Guide RNA
agguggugguugucaucugac

SEQ ID NO: 9546 - RNA, 21 nt, Artificial Sequence
  GATA2 Guide RNA
auaagguggugguugucaucu

SEQ ID NO: 9547 - RNA, 21 nt, Artificial Sequence
  GATA2 Guide RNA
aucugacaauuugcacaacag

SEQ ID NO: 9548 - RNA, 21 nt, Artificial Sequence
  GATA2 Guide RNA
augacaaccaccaccuuaugg

SEQ ID NO: 9549 - RNA, 21 nt, Artificial Sequence
  GATA2 Guide RNA
auugucagaugacaaccacca

SEQ ID NO: 9550 - RNA, 21 nt, Artificial Sequence
  GATA2 Guide RNA
caaauugucagaugacaacca

SEQ ID NO: 9551 - RNA, 21 nt, Artificial Sequence
  GATA2 Guide RNA
caccuguugugcaaauuguca

SEQ ID NO: 9552 - RNA, 21 nt, Artificial Sequence
  GATA2 Guide RNA
cagaugacaaccaccaccuua

SEQ ID NO: 9553 - RNA, 21 nt, Artificial Sequence
  GATA2 Guide RNA
cauaagguggugguugucauc

SEQ ID NO: 9554 - RNA, 21 nt, Artificial Sequence
  GATA2 Guide RNA
caucugacaauuugcacaaca

SEQ ID NO: 9555 - RNA, 21 nt, Artificial Sequence
  GATA2 Guide RNA
ccauaagguggugguugucau

SEQ ID NO: 9556 - RNA, 21 nt, Artificial Sequence
  GATA2 Guide RNA
cgccauaagguggugguuguc

SEQ ID NO: 9557 - RNA, 21 nt, Artificial Sequence
  GATA2 Guide RNA
cuguugugcaaauugucagau

SEQ ID NO: 9558 - RNA, 21 nt, Artificial Sequence
  GATA2 Guide RNA
gaugacaaccaccaccuuaug

SEQ ID NO: 9559 - RNA, 21 nt, Artificial Sequence
  GATA2 Guide RNA
gcaaauugucagaugacaacc

SEQ ID NO: 9560 - RNA, 21 nt, Artificial Sequence
  GATA2 Guide RNA
gcaccuguugugcaaauuguc

SEQ ID NO: 9561 - RNA, 21 nt, Artificial Sequence
  GATA2 Guide RNA
gccauaagguggugguuguca

SEQ ID NO: 9562 - RNA, 21 nt, Artificial Sequence
  GATA2 Guide RNA
gcgccauaagguggugguugu

SEQ ID NO: 9563 - RNA, 21 nt, Artificial Sequence
  GATA2 Guide RNA
ggcgccauaagguggugguug

SEQ ID NO: 9564 - RNA, 21 nt, Artificial Sequence
  GATA2 Guide RNA
gguggugguugucaucugaca

SEQ ID NO: 9565 - RNA, 21 nt, Artificial Sequence
  GATA2 Guide RNA
ggugguugucaucugacaauu

SEQ ID NO: 9566 - RNA, 21 nt, Artificial Sequence
  GATA2 Guide RNA
gguugucaucugacaauuugc

SEQ ID NO: 9567 - RNA, 21 nt, Artificial Sequence
  GATA2 Guide RNA
gucagaugacaaccaccaccu

SEQ ID NO: 9568 - RNA, 21 nt, Artificial Sequence
  GATA2 Guide RNA
gucaucugacaauuugcacaa

SEQ ID NO: 9569 - RNA, 21 nt, Artificial Sequence
  GATA2 Guide RNA
gugcaaauugucagaugacaa

SEQ ID NO: 9570 - RNA, 21 nt, Artificial Sequence
  GATA2 Guide RNA
guggugguugucaucugacaa

SEQ ID NO: 9571 - RNA, 21 nt, Artificial Sequence
  GATA2 Guide RNA
gugguugucaucugacaauuu

SEQ ID NO: 9572 - RNA, 21 nt, Artificial Sequence
  GATA2 Guide RNA
guugucaucugacaauuugca

SEQ ID NO: 9573 - RNA, 21 nt, Artificial Sequence
  GATA2 Guide RNA
guugugcaaauugucagauga

SEQ ID NO: 9574 - RNA, 21 nt, Artificial Sequence
  GATA2 Guide RNA
uaagguggugguugucaucug

SEQ ID NO: 9575 - RNA, 21 nt, Artificial Sequence
  GATA2 Guide RNA
ucagaugacaaccaccaccuu

SEQ ID NO: 9576 - RNA, 21 nt, Artificial Sequence
  GATA2 Guide RNA
ucaucugacaauuugcacaac

SEQ ID NO: 9577 - RNA, 21 nt, Artificial Sequence
  GATA2 Guide RNA
ugcaaauugucagaugacaac

SEQ ID NO: 9578 - RNA, 21 nt, Artificial Sequence
  GATA2 Guide RNA
uggugguugucaucugacaau

SEQ ID NO: 9579 - RNA, 21 nt, Artificial Sequence
  GATA2 Guide RNA
ugguugucaucugacaauuug

SEQ ID NO: 9580 - RNA, 21 nt, Artificial Sequence
  GATA2 Guide RNA
ugucagaugacaaccaccacc

SEQ ID NO: 9581 - RNA, 21 nt, Artificial Sequence
  GATA2 Guide RNA
ugucaucugacaauuugcaca

SEQ ID NO: 9582 - RNA, 21 nt, Artificial Sequence
  GATA2 Guide RNA
ugugcaaauugucagaugaca

SEQ ID NO: 9583 - RNA, 21 nt, Artificial Sequence
  GATA2 Guide RNA
uguugugcaaauugucagaug

SEQ ID NO: 9584 - RNA, 21 nt, Artificial Sequence
  GATA2 Guide RNA
uugucagaugacaaccaccac

SEQ ID NO: 9585 - RNA, 21 nt, Artificial Sequence
  GATA2 Guide RNA
uugucaucugacaauuugcac

SEQ ID NO: 9586 - RNA, 21 nt, Artificial Sequence
  GATA2 Guide RNA
uugugcaaauugucagaugac

SEQ ID NO: 9587 - RNA, 22 nt, Artificial Sequence
  GATA2 Guide RNA
aaauugucagaugacaaccacc

SEQ ID NO: 9588 - RNA, 22 nt, Artificial Sequence
  GATA2 Guide RNA
aagguggugguugucaucugac

SEQ ID NO: 9589 - RNA, 22 nt, Artificial Sequence
  GATA2 Guide RNA
aauugucagaugacaaccacca

SEQ ID NO: 9590 - RNA, 22 nt, Artificial Sequence
  GATA2 Guide RNA
agaugacaaccaccaccuuaug

SEQ ID NO: 9591 - RNA, 22 nt, Artificial Sequence
  GATA2 Guide RNA
agguggugguugucaucugaca

SEQ ID NO: 9592 - RNA, 22 nt, Artificial Sequence
  GATA2 Guide RNA
auaagguggugguugucaucug

SEQ ID NO: 9593 - RNA, 22 nt, Artificial Sequence
  GATA2 Guide RNA
aucugacaauuugcacaacagg

SEQ ID NO: 9594 - RNA, 22 nt, Artificial Sequence
  GATA2 Guide RNA
augacaaccaccaccuuauggc

SEQ ID NO: 9595 - RNA, 22 nt, Artificial Sequence
  GATA2 Guide RNA
auugucagaugacaaccaccac

SEQ ID NO: 9596 - RNA, 22 nt, Artificial Sequence
  GATA2 Guide RNA
caaauugucagaugacaaccac

SEQ ID NO: 9597 - RNA, 22 nt, Artificial Sequence
  GATA2 Guide RNA
caccuguugugcaaauugucag

SEQ ID NO: 9598 - RNA, 22 nt, Artificial Sequence
  GATA2 Guide RNA
cagaugacaaccaccaccuuau

SEQ ID NO: 9599 - RNA, 22 nt, Artificial Sequence
  GATA2 Guide RNA
cauaagguggugguugucaucu

SEQ ID NO: 9600 - RNA, 22 nt, Artificial Sequence
  GATA2 Guide RNA
caucugacaauuugcacaacag

SEQ ID NO: 9601 - RNA, 22 nt, Artificial Sequence
  GATA2 Guide RNA
ccauaagguggugguugucauc

SEQ ID NO: 9602 - RNA, 22 nt, Artificial Sequence
  GATA2 Guide RNA
ccuguugugcaaauugucagau

SEQ ID NO: 9603 - RNA, 22 nt, Artificial Sequence
  GATA2 Guide RNA
cgccauaagguggugguuguca

SEQ ID NO: 9604 - RNA, 22 nt, Artificial Sequence
  GATA2 Guide RNA
cggcgccauaagguggugguug

SEQ ID NO: 9605 - RNA, 22 nt, Artificial Sequence
  GATA2 Guide RNA
cuguugugcaaauugucagaug

SEQ ID NO: 9606 - RNA, 22 nt, Artificial Sequence
  GATA2 Guide RNA
gaugacaaccaccaccuuaugg

SEQ ID NO: 9607 - RNA, 22 nt, Artificial Sequence
  GATA2 Guide RNA
gcaaauugucagaugacaacca

SEQ ID NO: 9608 - RNA, 22 nt, Artificial Sequence
  GATA2 Guide RNA
gcaccuguugugcaaauuguca

SEQ ID NO: 9609 - RNA, 22 nt, Artificial Sequence
  GATA2 Guide RNA
gccauaagguggugguugucau

SEQ ID NO: 9610 - RNA, 22 nt, Artificial Sequence
  GATA2 Guide RNA
gcgccauaagguggugguuguc

SEQ ID NO: 9611 - RNA, 22 nt, Artificial Sequence
  GATA2 Guide RNA
ggcaccuguugugcaaauuguc

SEQ ID NO: 9612 - RNA, 22 nt, Artificial Sequence
  GATA2 Guide RNA
ggcgccauaagguggugguugu

SEQ ID NO: 9613 - RNA, 22 nt, Artificial Sequence
  GATA2 Guide RNA
gguggugguugucaucugacaa

SEQ ID NO: 9614 - RNA, 22 nt, Artificial Sequence
  GATA2 Guide RNA
ggugguugucaucugacaauuu

SEQ ID NO: 9615 - RNA, 22 nt, Artificial Sequence
  GATA2 Guide RNA
gguugucaucugacaauuugca

SEQ ID NO: 9616 - RNA, 22 nt, Artificial Sequence
  GATA2 Guide RNA
gucagaugacaaccaccaccuu

SEQ ID NO: 9617 - RNA, 22 nt, Artificial Sequence
  GATA2 Guide RNA
gucaucugacaauuugcacaac

SEQ ID NO: 9618 - RNA, 22 nt, Artificial Sequence
  GATA2 Guide RNA
gugcaaauugucagaugacaac

SEQ ID NO: 9619 - RNA, 22 nt, Artificial Sequence
  GATA2 Guide RNA
guggugguugucaucugacaau

SEQ ID NO: 9620 - RNA, 22 nt, Artificial Sequence
  GATA2 Guide RNA
gugguugucaucugacaauuug

SEQ ID NO: 9621 - RNA, 22 nt, Artificial Sequence
  GATA2 Guide RNA
guugucaucugacaauuugcac

SEQ ID NO: 9622 - RNA, 22 nt, Artificial Sequence
  GATA2 Guide RNA
guugugcaaauugucagaugac

SEQ ID NO: 9623 - RNA, 22 nt, Artificial Sequence
  GATA2 Guide RNA
uaagguggugguugucaucuga

SEQ ID NO: 9624 - RNA, 22 nt, Artificial Sequence
  GATA2 Guide RNA
ucagaugacaaccaccaccuua

SEQ ID NO: 9625 - RNA, 22 nt, Artificial Sequence
  GATA2 Guide RNA
ucaucugacaauuugcacaaca

SEQ ID NO: 9626 - RNA, 22 nt, Artificial Sequence
  GATA2 Guide RNA
ugcaaauugucagaugacaacc

SEQ ID NO: 9627 - RNA, 22 nt, Artificial Sequence
  GATA2 Guide RNA
uggugguugucaucugacaauu

SEQ ID NO: 9628 - RNA, 22 nt, Artificial Sequence
  GATA2 Guide RNA
ugguugucaucugacaauuugc

SEQ ID NO: 9629 - RNA, 22 nt, Artificial Sequence
  GATA2 Guide RNA
ugucagaugacaaccaccaccu

SEQ ID NO: 9630 - RNA, 22 nt, Artificial Sequence
  GATA2 Guide RNA
ugucaucugacaauuugcacaa

SEQ ID NO: 9631 - RNA, 22 nt, Artificial Sequence
  GATA2 Guide RNA
ugugcaaauugucagaugacaa

SEQ ID NO: 9632 - RNA, 22 nt, Artificial Sequence
  GATA2 Guide RNA
uguugugcaaauugucagauga

SEQ ID NO: 9633 - RNA, 22 nt, Artificial Sequence
  GATA2 Guide RNA
uugucagaugacaaccaccacc

SEQ ID NO: 9634 - RNA, 22 nt, Artificial Sequence
  GATA2 Guide RNA
uugucaucugacaauuugcaca

SEQ ID NO: 9635 - RNA, 22 nt, Artificial Sequence
  GATA2 Guide RNA
uugugcaaauugucagaugaca

SEQ ID NO: 9636 - RNA, 20 nt, Artificial Sequence
  GATA2 Guide RNA
aaaucgucagacgacaacca

SEQ ID NO: 9637 - RNA, 20 nt, Artificial Sequence
  GATA2 Guide RNA
aagguggugguugucgucug

SEQ ID NO: 9638 - RNA, 20 nt, Artificial Sequence
  GATA2 Guide RNA
aaucgucagacgacaaccac

SEQ ID NO: 9639 - RNA, 20 nt, Artificial Sequence
  GATA2 Guide RNA
accuguugugcaaaucguca

SEQ ID NO: 9640 - RNA, 20 nt, Artificial Sequence
  GATA2 Guide RNA
acgauuugcacaacaggugc

SEQ ID NO: 9641 - RNA, 20 nt, Artificial Sequence
  GATA2 Guide RNA
agccggcaccuguugugcaa

SEQ ID NO: 9642 - RNA, 20 nt, Artificial Sequence
  GATA2 Guide RNA
agguggugguugucgucuga

SEQ ID NO: 9643 - RNA, 20 nt, Artificial Sequence
  GATA2 Guide RNA
aucgucagacgacaaccacc

SEQ ID NO: 9644 - RNA, 20 nt, Artificial Sequence
  GATA2 Guide RNA
caaaucgucagacgacaacc

SEQ ID NO: 9645 - RNA, 20 nt, Artificial Sequence
  GATA2 Guide RNA
caccuguugugcaaaucguc

SEQ ID NO: 9646 - RNA, 20 nt, Artificial Sequence
  GATA2 Guide RNA
ccggcaccuguugugcaaau

SEQ ID NO: 9647 - RNA, 20 nt, Artificial Sequence
  GATA2 Guide RNA
ccuguugugcaaaucgucag

SEQ ID NO: 9648 - RNA, 20 nt, Artificial Sequence
  GATA2 Guide RNA
cgauuugcacaacaggugcc

SEQ ID NO: 9649 - RNA, 20 nt, Artificial Sequence
  GATA2 Guide RNA
cggcaccuguugugcaaauc

SEQ ID NO: 9650 - RNA, 20 nt, Artificial Sequence
  GATA2 Guide RNA
cgucugacgauuugcacaac

SEQ ID NO: 9651 - RNA, 20 nt, Artificial Sequence
  GATA2 Guide RNA
cugacgauuugcacaacagg

SEQ ID NO: 9652 - RNA, 20 nt, Artificial Sequence
  GATA2 Guide RNA
cuguugugcaaaucgucaga

SEQ ID NO: 9653 - RNA, 20 nt, Artificial Sequence
  GATA2 Guide RNA
gacgauuugcacaacaggug

SEQ ID NO: 9654 - RNA, 20 nt, Artificial Sequence
  GATA2 Guide RNA
gagccggcaccuguugugca

SEQ ID NO: 9655 - RNA, 20 nt, Artificial Sequence
  GATA2 Guide RNA
gauuugcacaacaggugccg

SEQ ID NO: 9656 - RNA, 20 nt, Artificial Sequence
  GATA2 Guide RNA
gcaaaucgucagacgacaac

SEQ ID NO: 9657 - RNA, 20 nt, Artificial Sequence
  GATA2 Guide RNA
gcaccuguugugcaaaucgu

SEQ ID NO: 9658 - RNA, 20 nt, Artificial Sequence
  GATA2 Guide RNA
gccggcaccuguugugcaaa

SEQ ID NO: 9659 - RNA, 20 nt, Artificial Sequence
  GATA2 Guide RNA
ggcaccuguugugcaaaucg

SEQ ID NO: 9660 - RNA, 20 nt, Artificial Sequence
  GATA2 Guide RNA
gguggugguugucgucugac

SEQ ID NO: 9661 - RNA, 20 nt, Artificial Sequence
  GATA2 Guide RNA
ggugguugucgucugacgau

SEQ ID NO: 9662 - RNA, 20 nt, Artificial Sequence
  GATA2 Guide RNA
gguugucgucugacgauuug

SEQ ID NO: 9663 - RNA, 20 nt, Artificial Sequence
  GATA2 Guide RNA
gucgucugacgauuugcaca

SEQ ID NO: 9664 - RNA, 20 nt, Artificial Sequence
  GATA2 Guide RNA
gucugacgauuugcacaaca

SEQ ID NO: 9665 - RNA, 20 nt, Artificial Sequence
  GATA2 Guide RNA
gugcaaaucgucagacgaca

SEQ ID NO: 9666 - RNA, 20 nt, Artificial Sequence
  GATA2 Guide RNA
guggugguugucgucugacg

SEQ ID NO: 9667 - RNA, 20 nt, Artificial Sequence
  GATA2 Guide RNA
gugguugucgucugacgauu

SEQ ID NO: 9668 - RNA, 20 nt, Artificial Sequence
  GATA2 Guide RNA
guugucgucugacgauuugc

SEQ ID NO: 9669 - RNA, 20 nt, Artificial Sequence
  GATA2 Guide RNA
guugugcaaaucgucagacg

SEQ ID NO: 9670 - RNA, 20 nt, Artificial Sequence
  GATA2 Guide RNA
ucgucagacgacaaccacca

SEQ ID NO: 9671 - RNA, 20 nt, Artificial Sequence
  GATA2 Guide RNA
ucgucugacgauuugcacaa

SEQ ID NO: 9672 - RNA, 20 nt, Artificial Sequence
  GATA2 Guide RNA
ucugacgauuugcacaacag

SEQ ID NO: 9673 - RNA, 20 nt, Artificial Sequence
  GATA2 Guide RNA
ugacgauuugcacaacaggu

SEQ ID NO: 9674 - RNA, 20 nt, Artificial Sequence
  GATA2 Guide RNA
ugcaaaucgucagacgacaa

SEQ ID NO: 9675 - RNA, 20 nt, Artificial Sequence
  GATA2 Guide RNA
uggugguugucgucugacga

SEQ ID NO: 9676 - RNA, 20 nt, Artificial Sequence
  GATA2 Guide RNA
ugguugucgucugacgauuu

SEQ ID NO: 9677 - RNA, 20 nt, Artificial Sequence
  GATA2 Guide RNA
ugucgucugacgauuugcac

SEQ ID NO: 9678 - RNA, 20 nt, Artificial Sequence
  GATA2 Guide RNA
ugugcaaaucgucagacgac

SEQ ID NO: 9679 - RNA, 20 nt, Artificial Sequence
  GATA2 Guide RNA
uguugugcaaaucgucagac

SEQ ID NO: 9680 - RNA, 20 nt, Artificial Sequence
  GATA2 Guide RNA
uugucgucugacgauuugca

SEQ ID NO: 9681 - RNA, 20 nt, Artificial Sequence
  GATA2 Guide RNA
uugugcaaaucgucagacga

SEQ ID NO: 9682 - RNA, 21 nt, Artificial Sequence
  GATA2 Guide RNA
aaaucgucagacgacaaccac

SEQ ID NO: 9683 - RNA, 21 nt, Artificial Sequence
  GATA2 Guide RNA
aagguggugguugucgucuga

SEQ ID NO: 9684 - RNA, 21 nt, Artificial Sequence
  GATA2 Guide RNA
aaucgucagacgacaaccacc

SEQ ID NO: 9685 - RNA, 21 nt, Artificial Sequence
  GATA2 Guide RNA
accuguugugcaaaucgucag

SEQ ID NO: 9686 - RNA, 21 nt, Artificial Sequence
  GATA2 Guide RNA
acgauuugcacaacaggugcc

SEQ ID NO: 9687 - RNA, 21 nt, Artificial Sequence
  GATA2 Guide RNA
agagccggcaccuguugugca

SEQ ID NO: 9688 - RNA, 21 nt, Artificial Sequence
  GATA2 Guide RNA
agccggcaccuguugugcaaa

SEQ ID NO: 9689 - RNA, 21 nt, Artificial Sequence
  GATA2 Guide RNA
agguggugguugucgucugac

SEQ ID NO: 9690 - RNA, 21 nt, Artificial Sequence
  GATA2 Guide RNA
aucgucagacgacaaccacca

SEQ ID NO: 9691 - RNA, 21 nt, Artificial Sequence
  GATA2 Guide RNA
caaaucgucagacgacaacca

SEQ ID NO: 9692 - RNA, 21 nt, Artificial Sequence
  GATA2 Guide RNA
caccuguugugcaaaucguca

SEQ ID NO: 9693 - RNA, 21 nt, Artificial Sequence
  GATA2 Guide RNA
ccggcaccuguugugcaaauc

SEQ ID NO: 9694 - RNA, 21 nt, Artificial Sequence
  GATA2 Guide RNA
ccuguugugcaaaucgucaga

SEQ ID NO: 9695 - RNA, 21 nt, Artificial Sequence
  GATA2 Guide RNA
cgauuugcacaacaggugccg

SEQ ID NO: 9696 - RNA, 21 nt, Artificial Sequence
  GATA2 Guide RNA
cggcaccuguugugcaaaucg

SEQ ID NO: 9697 - RNA, 21 nt, Artificial Sequence
  GATA2 Guide RNA
cgucugacgauuugcacaaca

SEQ ID NO: 9698 - RNA, 21 nt, Artificial Sequence
  GATA2 Guide RNA
cugacgauuugcacaacaggu

SEQ ID NO: 9699 - RNA, 21 nt, Artificial Sequence
  GATA2 Guide RNA
cuguugugcaaaucgucagac

SEQ ID NO: 9700 - RNA, 21 nt, Artificial Sequence
  GATA2 Guide RNA
gacgauuugcacaacaggugc

SEQ ID NO: 9701 - RNA, 21 nt, Artificial Sequence
  GATA2 Guide RNA
gagccggcaccuguugugcaa

SEQ ID NO: 9702 - RNA, 21 nt, Artificial Sequence
  GATA2 Guide RNA
gauuugcacaacaggugccgg

SEQ ID NO: 9703 - RNA, 21 nt, Artificial Sequence
  GATA2 Guide RNA
gcaaaucgucagacgacaacc

SEQ ID NO: 9704 - RNA, 21 nt, Artificial Sequence
  GATA2 Guide RNA
gcaccuguugugcaaaucguc

SEQ ID NO: 9705 - RNA, 21 nt, Artificial Sequence
  GATA2 Guide RNA
gccggcaccuguugugcaaau

SEQ ID NO: 9706 - RNA, 21 nt, Artificial Sequence
  GATA2 Guide RNA
ggcaccuguugugcaaaucgu

SEQ ID NO: 9707 - RNA, 21 nt, Artificial Sequence
  GATA2 Guide RNA
gguggugguugucgucugacg

SEQ ID NO: 9708 - RNA, 21 nt, Artificial Sequence
  GATA2 Guide RNA
ggugguugucgucugacgauu

SEQ ID NO: 9709 - RNA, 21 nt, Artificial Sequence
  GATA2 Guide RNA
gguugucgucugacgauuugc

SEQ ID NO: 9710 - RNA, 21 nt, Artificial Sequence
  GATA2 Guide RNA
gucgucugacgauuugcacaa

SEQ ID NO: 9711 - RNA, 21 nt, Artificial Sequence
  GATA2 Guide RNA
gucugacgauuugcacaacag

SEQ ID NO: 9712 - RNA, 21 nt, Artificial Sequence
  GATA2 Guide RNA
gugcaaaucgucagacgacaa

SEQ ID NO: 9713 - RNA, 21 nt, Artificial Sequence
  GATA2 Guide RNA
guggugguugucgucugacga

SEQ ID NO: 9714 - RNA, 21 nt, Artificial Sequence
  GATA2 Guide RNA
gugguugucgucugacgauuu

SEQ ID NO: 9715 - RNA, 21 nt, Artificial Sequence
  GATA2 Guide RNA
guugucgucugacgauuugca

SEQ ID NO: 9716 - RNA, 21 nt, Artificial Sequence
  GATA2 Guide RNA
guugugcaaaucgucagacga

SEQ ID NO: 9717 - RNA, 21 nt, Artificial Sequence
  GATA2 Guide RNA
uaagguggugguugucgucug

SEQ ID NO: 9718 - RNA, 21 nt, Artificial Sequence
  GATA2 Guide RNA
ucgucagacgacaaccaccac

SEQ ID NO: 9719 - RNA, 21 nt, Artificial Sequence
  GATA2 Guide RNA
ucgucugacgauuugcacaac

SEQ ID NO: 9720 - RNA, 21 nt, Artificial Sequence
  GATA2 Guide RNA
ucugacgauuugcacaacagg

SEQ ID NO: 9721 - RNA, 21 nt, Artificial Sequence
  GATA2 Guide RNA
ugacgauuugcacaacaggug

SEQ ID NO: 9722 - RNA, 21 nt, Artificial Sequence
  GATA2 Guide RNA
ugcaaaucgucagacgacaac

SEQ ID NO: 9723 - RNA, 21 nt, Artificial Sequence
  GATA2 Guide RNA
uggugguugucgucugacgau

SEQ ID NO: 9724 - RNA, 21 nt, Artificial Sequence
  GATA2 Guide RNA
ugguugucgucugacgauuug

SEQ ID NO: 9725 - RNA, 21 nt, Artificial Sequence
  GATA2 Guide RNA
ugucgucugacgauuugcaca

SEQ ID NO: 9726 - RNA, 21 nt, Artificial Sequence
  GATA2 Guide RNA
ugugcaaaucgucagacgaca

SEQ ID NO: 9727 - RNA, 21 nt, Artificial Sequence
  GATA2 Guide RNA
uguugugcaaaucgucagacg

SEQ ID NO: 9728 - RNA, 21 nt, Artificial Sequence
  GATA2 Guide RNA
uugucgucugacgauuugcac

SEQ ID NO: 9729 - RNA, 21 nt, Artificial Sequence
  GATA2 Guide RNA
uugugcaaaucgucagacgac

SEQ ID NO: 9730 - RNA, 22 nt, Artificial Sequence
  GATA2 Guide RNA
aaaucgucagacgacaaccacc

SEQ ID NO: 9731 - RNA, 22 nt, Artificial Sequence
  GATA2 Guide RNA
aagagccggcaccuguugugca

SEQ ID NO: 9732 - RNA, 22 nt, Artificial Sequence
  GATA2 Guide RNA
aagguggugguugucgucugac

SEQ ID NO: 9733 - RNA, 22 nt, Artificial Sequence
  GATA2 Guide RNA
aaucgucagacgacaaccacca

SEQ ID NO: 9734 - RNA, 22 nt, Artificial Sequence
  GATA2 Guide RNA
accuguugugcaaaucgucaga

SEQ ID NO: 9735 - RNA, 22 nt, Artificial Sequence
  GATA2 Guide RNA
acgauuugcacaacaggugccg

SEQ ID NO: 9736 - RNA, 22 nt, Artificial Sequence
  GATA2 Guide RNA
agagccggcaccuguugugcaa

SEQ ID NO: 9737 - RNA, 22 nt, Artificial Sequence
  GATA2 Guide RNA
agccggcaccuguugugcaaau

SEQ ID NO: 9738 - RNA, 22 nt, Artificial Sequence
  GATA2 Guide RNA
agguggugguugucgucugacg

SEQ ID NO: 9739 - RNA, 22 nt, Artificial Sequence
  GATA2 Guide RNA
auaagguggugguugucgucug

SEQ ID NO: 9740 - RNA, 22 nt, Artificial Sequence
  GATA2 Guide RNA
aucgucagacgacaaccaccac

SEQ ID NO: 9741 - RNA, 22 nt, Artificial Sequence
  GATA2 Guide RNA
caaaucgucagacgacaaccac

SEQ ID NO: 9742 - RNA, 22 nt, Artificial Sequence
  GATA2 Guide RNA
caccuguugugcaaaucgucag

SEQ ID NO: 9743 - RNA, 22 nt, Artificial Sequence
  GATA2 Guide RNA
ccggcaccuguugugcaaaucg

SEQ ID NO: 9744 - RNA, 22 nt, Artificial Sequence
  GATA2 Guide RNA
ccuguugugcaaaucgucagac

SEQ ID NO: 9745 - RNA, 22 nt, Artificial Sequence
  GATA2 Guide RNA
cgauuugcacaacaggugccgg

SEQ ID NO: 9746 - RNA, 22 nt, Artificial Sequence
  GATA2 Guide RNA
cggcaccuguugugcaaaucgu

SEQ ID NO: 9747 - RNA, 22 nt, Artificial Sequence
  GATA2 Guide RNA
cgucugacgauuugcacaacag

SEQ ID NO: 9748 - RNA, 22 nt, Artificial Sequence
  GATA2 Guide RNA
cugacgauuugcacaacaggug

SEQ ID NO: 9749 - RNA, 22 nt, Artificial Sequence
  GATA2 Guide RNA
cuguugugcaaaucgucagacg

SEQ ID NO: 9750 - RNA, 22 nt, Artificial Sequence
  GATA2 Guide RNA
gacgauuugcacaacaggugcc

SEQ ID NO: 9751 - RNA, 22 nt, Artificial Sequence
  GATA2 Guide RNA
gagccggcaccuguugugcaaa

SEQ ID NO: 9752 - RNA, 22 nt, Artificial Sequence
  GATA2 Guide RNA
gauuugcacaacaggugccggc

SEQ ID NO: 9753 - RNA, 22 nt, Artificial Sequence
  GATA2 Guide RNA
gcaaaucgucagacgacaacca

SEQ ID NO: 9754 - RNA, 22 nt, Artificial Sequence
  GATA2 Guide RNA
gcaccuguugugcaaaucguca

SEQ ID NO: 9755 - RNA, 22 nt, Artificial Sequence
  GATA2 Guide RNA
gccggcaccuguugugcaaauc

SEQ ID NO: 9756 - RNA, 22 nt, Artificial Sequence
  GATA2 Guide RNA
ggcaccuguugugcaaaucguc

SEQ ID NO: 9757 - RNA, 22 nt, Artificial Sequence
  GATA2 Guide RNA
gguggugguugucgucugacga

SEQ ID NO: 9758 - RNA, 22 nt, Artificial Sequence
  GATA2 Guide RNA
ggugguugucgucugacgauuu

SEQ ID NO: 9759 - RNA, 22 nt, Artificial Sequence
  GATA2 Guide RNA
gguugucgucugacgauuugca

SEQ ID NO: 9760 - RNA, 22 nt, Artificial Sequence
  GATA2 Guide RNA
gucgucugacgauuugcacaac

SEQ ID NO: 9761 - RNA, 22 nt, Artificial Sequence
  GATA2 Guide RNA
gucugacgauuugcacaacagg

SEQ ID NO: 9762 - RNA, 22 nt, Artificial Sequence
  GATA2 Guide RNA
gugcaaaucgucagacgacaac

SEQ ID NO: 9763 - RNA, 22 nt, Artificial Sequence
  GATA2 Guide RNA
guggugguugucgucugacgau

SEQ ID NO: 9764 - RNA, 22 nt, Artificial Sequence
  GATA2 Guide RNA
gugguugucgucugacgauuug

SEQ ID NO: 9765 - RNA, 22 nt, Artificial Sequence
  GATA2 Guide RNA
guugucgucugacgauuugcac

SEQ ID NO: 9766 - RNA, 22 nt, Artificial Sequence
  GATA2 Guide RNA
guugugcaaaucgucagacgac

SEQ ID NO: 9767 - RNA, 22 nt, Artificial Sequence
  GATA2 Guide RNA
uaagguggugguugucgucuga

SEQ ID NO: 9768 - RNA, 22 nt, Artificial Sequence
  GATA2 Guide RNA
ucgucagacgacaaccaccacc

SEQ ID NO: 9769 - RNA, 22 nt, Artificial Sequence
  GATA2 Guide RNA
ucgucugacgauuugcacaaca

SEQ ID NO: 9770 - RNA, 22 nt, Artificial Sequence
  GATA2 Guide RNA
ucugacgauuugcacaacaggu

SEQ ID NO: 9771 - RNA, 22 nt, Artificial Sequence
  GATA2 Guide RNA
ugacgauuugcacaacaggugc

SEQ ID NO: 9772 - RNA, 22 nt, Artificial Sequence
  GATA2 Guide RNA
ugcaaaucgucagacgacaacc

SEQ ID NO: 9773 - RNA, 22 nt, Artificial Sequence
  GATA2 Guide RNA
uggugguugucgucugacgauu

SEQ ID NO: 9774 - RNA, 22 nt, Artificial Sequence
  GATA2 Guide RNA
ugguugucgucugacgauuugc

SEQ ID NO: 9775 - RNA, 22 nt, Artificial Sequence
  GATA2 Guide RNA
ugucgucugacgauuugcacaa

SEQ ID NO: 9776 - RNA, 22 nt, Artificial Sequence
  GATA2 Guide RNA
ugugcaaaucgucagacgacaa

SEQ ID NO: 9777 - RNA, 22 nt, Artificial Sequence
  GATA2 Guide RNA
uguugugcaaaucgucagacga

SEQ ID NO: 9778 - RNA, 22 nt, Artificial Sequence
  GATA2 Guide RNA
uugucgucugacgauuugcaca

SEQ ID NO: 9779 - RNA, 22 nt, Artificial Sequence
  GATA2 Guide RNA
uugugcaaaucgucagacgaca

SEQ ID NO: 9780 - RNA, 20 nt, Artificial Sequence
  GATA2 Guide RNA
aacaggugccggcucuucug

SEQ ID NO: 9781 - RNA, 20 nt, Artificial Sequence
  GATA2 Guide RNA
aagagccggcagccagaaga

SEQ ID NO: 9782 - RNA, 20 nt, Artificial Sequence
  GATA2 Guide RNA
acaggugccggcucuucugg

SEQ ID NO: 9783 - RNA, 20 nt, Artificial Sequence
  GATA2 Guide RNA
agaagagccggcagccagaa

SEQ ID NO: 9784 - RNA, 20 nt, Artificial Sequence
  GATA2 Guide RNA
agagccggcagccagaagag

SEQ ID NO: 9785 - RNA, 20 nt, Artificial Sequence
  GATA2 Guide RNA
agccggcagccagaagagcc

SEQ ID NO: 9786 - RNA, 20 nt, Artificial Sequence
  GATA2 Guide RNA
aggugccggcucuucuggcu

SEQ ID NO: 9787 - RNA, 20 nt, Artificial Sequence
  GATA2 Guide RNA
agucggccgccagaagagcc

SEQ ID NO: 9788 - RNA, 20 nt, Artificial Sequence
  GATA2 Guide RNA
cagaagagccggcagccaga

SEQ ID NO: 9789 - RNA, 20 nt, Artificial Sequence
  GATA2 Guide RNA
cagccagaagagccggcacc

SEQ ID NO: 9790 - RNA, 20 nt, Artificial Sequence
  GATA2 Guide RNA
caggugccggcucuucuggc

SEQ ID NO: 9791 - RNA, 20 nt, Artificial Sequence
  GATA2 Guide RNA
cagucggccgccagaagagc

SEQ ID NO: 9792 - RNA, 20 nt, Artificial Sequence
  GATA2 Guide RNA
ccagaagagccggcagccag

SEQ ID NO: 9793 - RNA, 20 nt, Artificial Sequence
  GATA2 Guide RNA
ccagucggccgccagaagag

SEQ ID NO: 9794 - RNA, 20 nt, Artificial Sequence
  GATA2 Guide RNA
cccagucggccgccagaaga

SEQ ID NO: 9795 - RNA, 20 nt, Artificial Sequence
  GATA2 Guide RNA
cccucccagucggccgccag

SEQ ID NO: 9796 - RNA, 20 nt, Artificial Sequence
  GATA2 Guide RNA
ccgccagaagagccggcagc

SEQ ID NO: 9797 - RNA, 20 nt, Artificial Sequence
  GATA2 Guide RNA
ccggcagccagaagagccgg

SEQ ID NO: 9798 - RNA, 20 nt, Artificial Sequence
  GATA2 Guide RNA
ccggcucuucuggcggccga

SEQ ID NO: 9799 - RNA, 20 nt, Artificial Sequence
  GATA2 Guide RNA
ccggcucuucuggcugccgg

SEQ ID NO: 9800 - RNA, 20 nt, Artificial Sequence
  GATA2 Guide RNA
ccucccagucggccgccaga

SEQ ID NO: 9801 - RNA, 20 nt, Artificial Sequence
  GATA2 Guide RNA
ccuugcccucccagucggcc

SEQ ID NO: 9802 - RNA, 20 nt, Artificial Sequence
  GATA2 Guide RNA
cgccagaagagccggcagcc

SEQ ID NO: 9803 - RNA, 20 nt, Artificial Sequence
  GATA2 Guide RNA
cggcagccagaagagccggc

SEQ ID NO: 9804 - RNA, 20 nt, Artificial Sequence
  GATA2 Guide RNA
cggccgacugggagggcaag

SEQ ID NO: 9805 - RNA, 20 nt, Artificial Sequence
  GATA2 Guide RNA
cggccgccagaagagccggc

SEQ ID NO: 9806 - RNA, 20 nt, Artificial Sequence
  GATA2 Guide RNA
cggcucuucuggcggccgac

SEQ ID NO: 9807 - RNA, 20 nt, Artificial Sequence
  GATA2 Guide RNA
cggcucuucuggcugccggc

SEQ ID NO: 9808 - RNA, 20 nt, Artificial Sequence
  GATA2 Guide RNA
cucccagucggccgccagaa

SEQ ID NO: 9809 - RNA, 20 nt, Artificial Sequence
  GATA2 Guide RNA
cucuucuggcggccgacugg

SEQ ID NO: 9810 - RNA, 20 nt, Artificial Sequence
  GATA2 Guide RNA
cucuucuggcugccggcucu

SEQ ID NO: 9811 - RNA, 20 nt, Artificial Sequence
  GATA2 Guide RNA
cugccggcucuucuggcggc

SEQ ID NO: 9812 - RNA, 20 nt, Artificial Sequence
  GATA2 Guide RNA
cugccuugcccucccagucg

SEQ ID NO: 9813 - RNA, 20 nt, Artificial Sequence
  GATA2 Guide RNA
cuggcggccgacugggaggg

SEQ ID NO: 9814 - RNA, 20 nt, Artificial Sequence
  GATA2 Guide RNA
cuggcugccggcucuucugg

SEQ ID NO: 9815 - RNA, 20 nt, Artificial Sequence
  GATA2 Guide RNA
cuucuggcggccgacuggga

SEQ ID NO: 9816 - RNA, 20 nt, Artificial Sequence
  GATA2 Guide RNA
cuucuggcugccggcucuuc

SEQ ID NO: 9817 - RNA, 20 nt, Artificial Sequence
  GATA2 Guide RNA
cuugcccucccagucggccg

SEQ ID NO: 9818 - RNA, 20 nt, Artificial Sequence
  GATA2 Guide RNA
gaagagccggcagccagaag

SEQ ID NO: 9819 - RNA, 20 nt, Artificial Sequence
  GATA2 Guide RNA
gagccggcagccagaagagc

SEQ ID NO: 9820 - RNA, 20 nt, Artificial Sequence
  GATA2 Guide RNA
gcagccagaagagccggcac

SEQ ID NO: 9821 - RNA, 20 nt, Artificial Sequence
  GATA2 Guide RNA
gccagaagagccggcagcca

SEQ ID NO: 9822 - RNA, 20 nt, Artificial Sequence
  GATA2 Guide RNA
gcccucccagucggccgcca

SEQ ID NO: 9823 - RNA, 20 nt, Artificial Sequence
  GATA2 Guide RNA
gccgccagaagagccggcag

SEQ ID NO: 9824 - RNA, 20 nt, Artificial Sequence
  GATA2 Guide RNA
gccggcagccagaagagccg

SEQ ID NO: 9825 - RNA, 20 nt, Artificial Sequence
  GATA2 Guide RNA
gccggcucuucuggcggccg

SEQ ID NO: 9826 - RNA, 20 nt, Artificial Sequence
  GATA2 Guide RNA
gccggcucuucuggcugccg

SEQ ID NO: 9827 - RNA, 20 nt, Artificial Sequence
  GATA2 Guide RNA
gccuugcccucccagucggc

SEQ ID NO: 9828 - RNA, 20 nt, Artificial Sequence
  GATA2 Guide RNA
gcggccgacugggagggcaa

SEQ ID NO: 9829 - RNA, 20 nt, Artificial Sequence
  GATA2 Guide RNA
gcucuucuggcggccgacug

SEQ ID NO: 9830 - RNA, 20 nt, Artificial Sequence
  GATA2 Guide RNA
gcucuucuggcugccggcuc

SEQ ID NO: 9831 - RNA, 20 nt, Artificial Sequence
  GATA2 Guide RNA
gcugccggcucuucuggcgg

SEQ ID NO: 9832 - RNA, 20 nt, Artificial Sequence
  GATA2 Guide RNA
gcugccuugcccucccaguc

SEQ ID NO: 9833 - RNA, 20 nt, Artificial Sequence
  GATA2 Guide RNA
ggcagccagaagagccggca

SEQ ID NO: 9834 - RNA, 20 nt, Artificial Sequence
  GATA2 Guide RNA
ggccgacugggagggcaagg

SEQ ID NO: 9835 - RNA, 20 nt, Artificial Sequence
  GATA2 Guide RNA
ggccgccagaagagccggca

SEQ ID NO: 9836 - RNA, 20 nt, Artificial Sequence
  GATA2 Guide RNA
ggcggccgacugggagggca

SEQ ID NO: 9837 - RNA, 20 nt, Artificial Sequence
  GATA2 Guide RNA
ggcucuucuggcggccgacu

SEQ ID NO: 9838 - RNA, 20 nt, Artificial Sequence
  GATA2 Guide RNA
ggcucuucuggcugccggcu

SEQ ID NO: 9839 - RNA, 20 nt, Artificial Sequence
  GATA2 Guide RNA
ggcugccggcucuucuggcg

SEQ ID NO: 9840 - RNA, 20 nt, Artificial Sequence
  GATA2 Guide RNA
ggugccggcucuucuggcug

SEQ ID NO: 9841 - RNA, 20 nt, Artificial Sequence
  GATA2 Guide RNA
gucggccgccagaagagccg

SEQ ID NO: 9842 - RNA, 20 nt, Artificial Sequence
  GATA2 Guide RNA
gugccggcucuucuggcugc

SEQ ID NO: 9843 - RNA, 20 nt, Artificial Sequence
  GATA2 Guide RNA
ucccagucggccgccagaag

SEQ ID NO: 9844 - RNA, 20 nt, Artificial Sequence
  GATA2 Guide RNA
ucggccgccagaagagccgg

SEQ ID NO: 9845 - RNA, 20 nt, Artificial Sequence
  GATA2 Guide RNA
ucuggcggccgacugggagg

SEQ ID NO: 9846 - RNA, 20 nt, Artificial Sequence
  GATA2 Guide RNA
ucuggcugccggcucuucug

SEQ ID NO: 9847 - RNA, 20 nt, Artificial Sequence
  GATA2 Guide RNA
ucuucuggcggccgacuggg

SEQ ID NO: 9848 - RNA, 20 nt, Artificial Sequence
  GATA2 Guide RNA
ucuucuggcugccggcucuu

SEQ ID NO: 9849 - RNA, 20 nt, Artificial Sequence
  GATA2 Guide RNA
ugcccucccagucggccgcc

SEQ ID NO: 9850 - RNA, 20 nt, Artificial Sequence
  GATA2 Guide RNA
ugccggcucuucuggcggcc

SEQ ID NO: 9851 - RNA, 20 nt, Artificial Sequence
  GATA2 Guide RNA
ugccggcucuucuggcugcc

SEQ ID NO: 9852 - RNA, 20 nt, Artificial Sequence
  GATA2 Guide RNA
ugccuugcccucccagucgg

SEQ ID NO: 9853 - RNA, 20 nt, Artificial Sequence
  GATA2 Guide RNA
uggcggccgacugggagggc

SEQ ID NO: 9854 - RNA, 20 nt, Artificial Sequence
  GATA2 Guide RNA
uggcugccggcucuucuggc

SEQ ID NO: 9855 - RNA, 20 nt, Artificial Sequence
  GATA2 Guide RNA
uucuggcggccgacugggag

SEQ ID NO: 9856 - RNA, 20 nt, Artificial Sequence
  GATA2 Guide RNA
uucuggcugccggcucuucu

SEQ ID NO: 9857 - RNA, 20 nt, Artificial Sequence
  GATA2 Guide RNA
uugcccucccagucggccgc

SEQ ID NO: 9858 - RNA, 21 nt, Artificial Sequence
  GATA2 Guide RNA
aacaggugccggcucuucugg

SEQ ID NO: 9859 - RNA, 21 nt, Artificial Sequence
  GATA2 Guide RNA
aagagccggcagccagaagag

SEQ ID NO: 9860 - RNA, 21 nt, Artificial Sequence
  GATA2 Guide RNA
acaggugccggcucuucuggc

SEQ ID NO: 9861 - RNA, 21 nt, Artificial Sequence
  GATA2 Guide RNA
agaagagccggcagccagaag

SEQ ID NO: 9862 - RNA, 21 nt, Artificial Sequence
  GATA2 Guide RNA
agagccggcagccagaagagc

SEQ ID NO: 9863 - RNA, 21 nt, Artificial Sequence
  GATA2 Guide RNA
agccggcagccagaagagccg

SEQ ID NO: 9864 - RNA, 21 nt, Artificial Sequence
  GATA2 Guide RNA
aggugccggcucuucuggcug

SEQ ID NO: 9865 - RNA, 21 nt, Artificial Sequence
  GATA2 Guide RNA
agucggccgccagaagagccg

SEQ ID NO: 9866 - RNA, 21 nt, Artificial Sequence
  GATA2 Guide RNA
caacaggugccggcucuucug

SEQ ID NO: 9867 - RNA, 21 nt, Artificial Sequence
  GATA2 Guide RNA
cagaagagccggcagccagaa

SEQ ID NO: 9868 - RNA, 21 nt, Artificial Sequence
  GATA2 Guide RNA
cagccagaagagccggcaccu

SEQ ID NO: 9869 - RNA, 21 nt, Artificial Sequence
  GATA2 Guide RNA
caggugccggcucuucuggcu

SEQ ID NO: 9870 - RNA, 21 nt, Artificial Sequence
  GATA2 Guide RNA
cagucggccgccagaagagcc

SEQ ID NO: 9871 - RNA, 21 nt, Artificial Sequence
  GATA2 Guide RNA
ccagaagagccggcagccaga

SEQ ID NO: 9872 - RNA, 21 nt, Artificial Sequence
  GATA2 Guide RNA
ccagucggccgccagaagagc

SEQ ID NO: 9873 - RNA, 21 nt, Artificial Sequence
  GATA2 Guide RNA
cccagucggccgccagaagag

SEQ ID NO: 9874 - RNA, 21 nt, Artificial Sequence
  GATA2 Guide RNA
cccucccagucggccgccaga

SEQ ID NO: 9875 - RNA, 21 nt, Artificial Sequence
  GATA2 Guide RNA
ccgccagaagagccggcagcc

SEQ ID NO: 9876 - RNA, 21 nt, Artificial Sequence
  GATA2 Guide RNA
ccggcagccagaagagccggc

SEQ ID NO: 9877 - RNA, 21 nt, Artificial Sequence
  GATA2 Guide RNA
ccggcucuucuggcggccgac

SEQ ID NO: 9878 - RNA, 21 nt, Artificial Sequence
  GATA2 Guide RNA
ccggcucuucuggcugccggc

SEQ ID NO: 9879 - RNA, 21 nt, Artificial Sequence
  GATA2 Guide RNA
ccucccagucggccgccagaa

SEQ ID NO: 9880 - RNA, 21 nt, Artificial Sequence
  GATA2 Guide RNA
ccuugcccucccagucggccg

SEQ ID NO: 9881 - RNA, 21 nt, Artificial Sequence
  GATA2 Guide RNA
cgccagaagagccggcagcca

SEQ ID NO: 9882 - RNA, 21 nt, Artificial Sequence
  GATA2 Guide RNA
cgcugccuugcccucccaguc

SEQ ID NO: 9883 - RNA, 21 nt, Artificial Sequence
  GATA2 Guide RNA
cggcagccagaagagccggca

SEQ ID NO: 9884 - RNA, 21 nt, Artificial Sequence
  GATA2 Guide RNA
cggccgacugggagggcaagg

SEQ ID NO: 9885 - RNA, 21 nt, Artificial Sequence
  GATA2 Guide RNA
cggccgccagaagagccggca

SEQ ID NO: 9886 - RNA, 21 nt, Artificial Sequence
  GATA2 Guide RNA
cggcucuucuggcggccgacu

SEQ ID NO: 9887 - RNA, 21 nt, Artificial Sequence
  GATA2 Guide RNA
cggcucuucuggcugccggcu

SEQ ID NO: 9888 - RNA, 21 nt, Artificial Sequence
  GATA2 Guide RNA
cucccagucggccgccagaag

SEQ ID NO: 9889 - RNA, 21 nt, Artificial Sequence
  GATA2 Guide RNA
cucuucuggcggccgacuggg

SEQ ID NO: 9890 - RNA, 21 nt, Artificial Sequence
  GATA2 Guide RNA
cucuucuggcugccggcucuu

SEQ ID NO: 9891 - RNA, 21 nt, Artificial Sequence
  GATA2 Guide RNA
cugccggcucuucuggcggcc

SEQ ID NO: 9892 - RNA, 21 nt, Artificial Sequence
  GATA2 Guide RNA
cugccuugcccucccagucgg

SEQ ID NO: 9893 - RNA, 21 nt, Artificial Sequence
  GATA2 Guide RNA
cuggcugccggcucuucuggc

SEQ ID NO: 9894 - RNA, 21 nt, Artificial Sequence
  GATA2 Guide RNA
cuucuggcggccgacugggag

SEQ ID NO: 9895 - RNA, 21 nt, Artificial Sequence
  GATA2 Guide RNA
cuucuggcugccggcucuucu

SEQ ID NO: 9896 - RNA, 21 nt, Artificial Sequence
  GATA2 Guide RNA
cuugcccucccagucggccgc

SEQ ID NO: 9897 - RNA, 21 nt, Artificial Sequence
  GATA2 Guide RNA
gaagagccggcagccagaaga

SEQ ID NO: 9898 - RNA, 21 nt, Artificial Sequence
  GATA2 Guide RNA
gagccggcagccagaagagcc

SEQ ID NO: 9899 - RNA, 21 nt, Artificial Sequence
  GATA2 Guide RNA
gcagccagaagagccggcacc

SEQ ID NO: 9900 - RNA, 21 nt, Artificial Sequence
  GATA2 Guide RNA
gccagaagagccggcagccag

SEQ ID NO: 9901 - RNA, 21 nt, Artificial Sequence
  GATA2 Guide RNA
gccgccagaagagccggcagc

SEQ ID NO: 9902 - RNA, 21 nt, Artificial Sequence
  GATA2 Guide RNA
gccggcagccagaagagccgg

SEQ ID NO: 9903 - RNA, 21 nt, Artificial Sequence
  GATA2 Guide RNA
gccggcucuucuggcggccga

SEQ ID NO: 9904 - RNA, 21 nt, Artificial Sequence
  GATA2 Guide RNA
gccggcucuucuggcugccgg

SEQ ID NO: 9905 - RNA, 21 nt, Artificial Sequence
  GATA2 Guide RNA
gccuugcccucccagucggcc

SEQ ID NO: 9906 - RNA, 21 nt, Artificial Sequence
  GATA2 Guide RNA
gcggccgacugggagggcaag

SEQ ID NO: 9907 - RNA, 21 nt, Artificial Sequence
  GATA2 Guide RNA
gcucuucuggcggccgacugg

SEQ ID NO: 9908 - RNA, 21 nt, Artificial Sequence
  GATA2 Guide RNA
gcucuucuggcugccggcucu

SEQ ID NO: 9909 - RNA, 21 nt, Artificial Sequence
  GATA2 Guide RNA
gcugccggcucuucuggcggc

SEQ ID NO: 9910 - RNA, 21 nt, Artificial Sequence
  GATA2 Guide RNA
gcugccuugcccucccagucg

SEQ ID NO: 9911 - RNA, 21 nt, Artificial Sequence
  GATA2 Guide RNA
ggcagccagaagagccggcac

SEQ ID NO: 9912 - RNA, 21 nt, Artificial Sequence
  GATA2 Guide RNA
ggccgacugggagggcaaggc

SEQ ID NO: 9913 - RNA, 21 nt, Artificial Sequence
  GATA2 Guide RNA
ggccgccagaagagccggcag

SEQ ID NO: 9914 - RNA, 21 nt, Artificial Sequence
  GATA2 Guide RNA
ggcggccgacugggagggcaa

SEQ ID NO: 9915 - RNA, 21 nt, Artificial Sequence
  GATA2 Guide RNA
ggcucuucuggcggccgacug

SEQ ID NO: 9916 - RNA, 21 nt, Artificial Sequence
  GATA2 Guide RNA
ggcucuucuggcugccggcuc

SEQ ID NO: 9917 - RNA, 21 nt, Artificial Sequence
  GATA2 Guide RNA
ggcugccggcucuucuggcgg

SEQ ID NO: 9918 - RNA, 21 nt, Artificial Sequence
  GATA2 Guide RNA
ggugccggcucuucuggcugc

SEQ ID NO: 9919 - RNA, 21 nt, Artificial Sequence
  GATA2 Guide RNA
gucggccgccagaagagccgg

SEQ ID NO: 9920 - RNA, 21 nt, Artificial Sequence
  GATA2 Guide RNA
gugccggcucuucuggcugcc

SEQ ID NO: 9921 - RNA, 21 nt, Artificial Sequence
  GATA2 Guide RNA
ucccagucggccgccagaaga

SEQ ID NO: 9922 - RNA, 21 nt, Artificial Sequence
  GATA2 Guide RNA
ucggccgccagaagagccggc

SEQ ID NO: 9923 - RNA, 21 nt, Artificial Sequence
  GATA2 Guide RNA
ucuggcggccgacugggaggg

SEQ ID NO: 9924 - RNA, 21 nt, Artificial Sequence
  GATA2 Guide RNA
ucuggcugccggcucuucugg

SEQ ID NO: 9925 - RNA, 21 nt, Artificial Sequence
  GATA2 Guide RNA
ucuucuggcggccgacuggga

SEQ ID NO: 9926 - RNA, 21 nt, Artificial Sequence
  GATA2 Guide RNA
ucuucuggcugccggcucuuc

SEQ ID NO: 9927 - RNA, 21 nt, Artificial Sequence
  GATA2 Guide RNA
ugcccucccagucggccgcca

SEQ ID NO: 9928 - RNA, 21 nt, Artificial Sequence
  GATA2 Guide RNA
ugccggcucuucuggcggccg

SEQ ID NO: 9929 - RNA, 21 nt, Artificial Sequence
  GATA2 Guide RNA
ugccggcucuucuggcugccg

SEQ ID NO: 9930 - RNA, 21 nt, Artificial Sequence
  GATA2 Guide RNA
ugccuugcccucccagucggc

SEQ ID NO: 9931 - RNA, 21 nt, Artificial Sequence
  GATA2 Guide RNA
uggcggccgacugggagggca

SEQ ID NO: 9932 - RNA, 21 nt, Artificial Sequence
  GATA2 Guide RNA
uggcugccggcucuucuggcg

SEQ ID NO: 9933 - RNA, 21 nt, Artificial Sequence
  GATA2 Guide RNA
uucuggcggccgacugggagg

SEQ ID NO: 9934 - RNA, 21 nt, Artificial Sequence
  GATA2 Guide RNA
uucuggcugccggcucuucug

SEQ ID NO: 9935 - RNA, 21 nt, Artificial Sequence
  GATA2 Guide RNA
uugcccucccagucggccgcc

SEQ ID NO: 9936 - RNA, 22 nt, Artificial Sequence
  GATA2 Guide RNA
aacaggugccggcucuucuggc

SEQ ID NO: 9937 - RNA, 22 nt, Artificial Sequence
  GATA2 Guide RNA
aagagccggcagccagaagagc

SEQ ID NO: 9938 - RNA, 22 nt, Artificial Sequence
  GATA2 Guide RNA
acaacaggugccggcucuucug

SEQ ID NO: 9939 - RNA, 22 nt, Artificial Sequence
  GATA2 Guide RNA
acaggugccggcucuucuggcu

SEQ ID NO: 9940 - RNA, 22 nt, Artificial Sequence
  GATA2 Guide RNA
acgcugccuugcccucccaguc

SEQ ID NO: 9941 - RNA, 22 nt, Artificial Sequence
  GATA2 Guide RNA
agaagagccggcagccagaaga

SEQ ID NO: 9942 - RNA, 22 nt, Artificial Sequence
  GATA2 Guide RNA
agagccggcagccagaagagcc

SEQ ID NO: 9943 - RNA, 22 nt, Artificial Sequence
  GATA2 Guide RNA
agccggcagccagaagagccgg

SEQ ID NO: 9944 - RNA, 22 nt, Artificial Sequence
  GATA2 Guide RNA
aggugccggcucuucuggcugc

SEQ ID NO: 9945 - RNA, 22 nt, Artificial Sequence
  GATA2 Guide RNA
agucggccgccagaagagccgg

SEQ ID NO: 9946 - RNA, 22 nt, Artificial Sequence
  GATA2 Guide RNA
caacaggugccggcucuucugg

SEQ ID NO: 9947 - RNA, 22 nt, Artificial Sequence
  GATA2 Guide RNA
cagaagagccggcagccagaag

SEQ ID NO: 9948 - RNA, 22 nt, Artificial Sequence
  GATA2 Guide RNA
cagccagaagagccggcaccug

SEQ ID NO: 9949 - RNA, 22 nt, Artificial Sequence
  GATA2 Guide RNA
caggugccggcucuucuggcug

SEQ ID NO: 9950 - RNA, 22 nt, Artificial Sequence
  GATA2 Guide RNA
cagucggccgccagaagagccg

SEQ ID NO: 9951 - RNA, 22 nt, Artificial Sequence
  GATA2 Guide RNA
ccagaagagccggcagccagaa

SEQ ID NO: 9952 - RNA, 22 nt, Artificial Sequence
  GATA2 Guide RNA
ccagucggccgccagaagagcc

SEQ ID NO: 9953 - RNA, 22 nt, Artificial Sequence
  GATA2 Guide RNA
cccagucggccgccagaagagc

SEQ ID NO: 9954 - RNA, 22 nt, Artificial Sequence
  GATA2 Guide RNA
cccucccagucggccgccagaa

SEQ ID NO: 9955 - RNA, 22 nt, Artificial Sequence
  GATA2 Guide RNA
ccgccagaagagccggcagcca

SEQ ID NO: 9956 - RNA, 22 nt, Artificial Sequence
  GATA2 Guide RNA
ccggcagccagaagagccggca

SEQ ID NO: 9957 - RNA, 22 nt, Artificial Sequence
  GATA2 Guide RNA
ccggcucuucuggcggccgacu

SEQ ID NO: 9958 - RNA, 22 nt, Artificial Sequence
  GATA2 Guide RNA
ccggcucuucuggcugccggcu

SEQ ID NO: 9959 - RNA, 22 nt, Artificial Sequence
  GATA2 Guide RNA
ccucccagucggccgccagaag

SEQ ID NO: 9960 - RNA, 22 nt, Artificial Sequence
  GATA2 Guide RNA
ccuugcccucccagucggccgc

SEQ ID NO: 9961 - RNA, 22 nt, Artificial Sequence
  GATA2 Guide RNA
cgccagaagagccggcagccag

SEQ ID NO: 9962 - RNA, 22 nt, Artificial Sequence
  GATA2 Guide RNA
cgcugccuugcccucccagucg

SEQ ID NO: 9963 - RNA, 22 nt, Artificial Sequence
  GATA2 Guide RNA
cggcagccagaagagccggcac

SEQ ID NO: 9964 - RNA, 22 nt, Artificial Sequence
  GATA2 Guide RNA
cggccgacugggagggcaaggc

SEQ ID NO: 9965 - RNA, 22 nt, Artificial Sequence
  GATA2 Guide RNA
cggccgccagaagagccggcag

SEQ ID NO: 9966 - RNA, 22 nt, Artificial Sequence
  GATA2 Guide RNA
cggcucuucuggcggccgacug

SEQ ID NO: 9967 - RNA, 22 nt, Artificial Sequence
  GATA2 Guide RNA
cggcucuucuggcugccggcuc

SEQ ID NO: 9968 - RNA, 22 nt, Artificial Sequence
  GATA2 Guide RNA
cucccagucggccgccagaaga

SEQ ID NO: 9969 - RNA, 22 nt, Artificial Sequence
  GATA2 Guide RNA
cucuucuggcggccgacuggga

SEQ ID NO: 9970 - RNA, 22 nt, Artificial Sequence
  GATA2 Guide RNA
cucuucuggcugccggcucuuc

SEQ ID NO: 9971 - RNA, 22 nt, Artificial Sequence
  GATA2 Guide RNA
cugccggcucuucuggcggccg

SEQ ID NO: 9972 - RNA, 22 nt, Artificial Sequence
  GATA2 Guide RNA
cugccuugcccucccagucggc

SEQ ID NO: 9973 - RNA, 22 nt, Artificial Sequence
  GATA2 Guide RNA
cuggcggccgacugggagggca

SEQ ID NO: 9974 - RNA, 22 nt, Artificial Sequence
  GATA2 Guide RNA
cuggcugccggcucuucuggcg

SEQ ID NO: 9975 - RNA, 22 nt, Artificial Sequence
  GATA2 Guide RNA
cuucuggcggccgacugggagg

SEQ ID NO: 9976 - RNA, 22 nt, Artificial Sequence
  GATA2 Guide RNA
cuucuggcugccggcucuucug

SEQ ID NO: 9977 - RNA, 22 nt, Artificial Sequence
  GATA2 Guide RNA
cuugcccucccagucggccgcc

SEQ ID NO: 9978 - RNA, 22 nt, Artificial Sequence
  GATA2 Guide RNA
gaagagccggcagccagaagag

SEQ ID NO: 9979 - RNA, 22 nt, Artificial Sequence
  GATA2 Guide RNA
gagccggcagccagaagagccg

SEQ ID NO: 9980 - RNA, 22 nt, Artificial Sequence
  GATA2 Guide RNA
gcagccagaagagccggcaccu

SEQ ID NO: 9981 - RNA, 22 nt, Artificial Sequence
  GATA2 Guide RNA
gccagaagagccggcagccaga

SEQ ID NO: 9982 - RNA, 22 nt, Artificial Sequence
  GATA2 Guide RNA
gcccucccagucggccgccaga

SEQ ID NO: 9983 - RNA, 22 nt, Artificial Sequence
  GATA2 Guide RNA
gccgccagaagagccggcagcc

SEQ ID NO: 9984 - RNA, 22 nt, Artificial Sequence
  GATA2 Guide RNA
gccggcagccagaagagccggc

SEQ ID NO: 9985 - RNA, 22 nt, Artificial Sequence
  GATA2 Guide RNA
gccggcucuucuggcggccgac

SEQ ID NO: 9986 - RNA, 22 nt, Artificial Sequence
  GATA2 Guide RNA
gccggcucuucuggcugccggc

SEQ ID NO: 9987 - RNA, 22 nt, Artificial Sequence
  GATA2 Guide RNA
gccuugcccucccagucggccg

SEQ ID NO: 9988 - RNA, 22 nt, Artificial Sequence
  GATA2 Guide RNA
gcggccgacugggagggcaagg

SEQ ID NO: 9989 - RNA, 22 nt, Artificial Sequence
  GATA2 Guide RNA
gcucuucuggcggccgacuggg

SEQ ID NO: 9990 - RNA, 22 nt, Artificial Sequence
  GATA2 Guide RNA
gcucuucuggcugccggcucuu

SEQ ID NO: 9991 - RNA, 22 nt, Artificial Sequence
  GATA2 Guide RNA
gcugccggcucuucuggcggcc

SEQ ID NO: 9992 - RNA, 22 nt, Artificial Sequence
  GATA2 Guide RNA
gcugccuugcccucccagucgg

SEQ ID NO: 9993 - RNA, 22 nt, Artificial Sequence
  GATA2 Guide RNA
ggcagccagaagagccggcacc

SEQ ID NO: 9994 - RNA, 22 nt, Artificial Sequence
  GATA2 Guide RNA
ggccgacugggagggcaaggca

SEQ ID NO: 9995 - RNA, 22 nt, Artificial Sequence
  GATA2 Guide RNA
ggccgccagaagagccggcagc

SEQ ID NO: 9996 - RNA, 22 nt, Artificial Sequence
  GATA2 Guide RNA
ggcggccgacugggagggcaag

SEQ ID NO: 9997 - RNA, 22 nt, Artificial Sequence
  GATA2 Guide RNA
ggcucuucuggcggccgacugg

SEQ ID NO: 9998 - RNA, 22 nt, Artificial Sequence
  GATA2 Guide RNA
ggcucuucuggcugccggcucu

SEQ ID NO: 9999 - RNA, 22 nt, Artificial Sequence
  GATA2 Guide RNA
ggcugccggcucuucuggcggc

SEQ ID NO: 10000 - RNA, 22 nt, Artificial Sequence
  GATA2 Guide RNA
ggugccggcucuucuggcugcc

SEQ ID NO: 10001 - RNA, 22 nt, Artificial Sequence
  GATA2 Guide RNA
gucggccgccagaagagccggc

SEQ ID NO: 10002 - RNA, 22 nt, Artificial Sequence
  GATA2 Guide RNA
gugccggcucuucuggcugccg

SEQ ID NO: 10003 - RNA, 22 nt, Artificial Sequence
  GATA2 Guide RNA
ucccagucggccgccagaagag

SEQ ID NO: 10004 - RNA, 22 nt, Artificial Sequence
  GATA2 Guide RNA
ucggccgccagaagagccggca

SEQ ID NO: 10005 - RNA, 22 nt, Artificial Sequence
  GATA2 Guide RNA
ucuggcggccgacugggagggc

SEQ ID NO: 10006 - RNA, 22 nt, Artificial Sequence
  GATA2 Guide RNA
ucuggcugccggcucuucuggc

SEQ ID NO: 10007 - RNA, 22 nt, Artificial Sequence
  GATA2 Guide RNA
ucuucuggcggccgacugggag

SEQ ID NO: 10008 - RNA, 22 nt, Artificial Sequence
  GATA2 Guide RNA
ucuucuggcugccggcucuucu

SEQ ID NO: 10009 - RNA, 22 nt, Artificial Sequence
  GATA2 Guide RNA
ugcccucccagucggccgccag

SEQ ID NO: 10010 - RNA, 22 nt, Artificial Sequence
  GATA2 Guide RNA
ugccggcucuucuggcggccga

SEQ ID NO: 10011 - RNA, 22 nt, Artificial Sequence
  GATA2 Guide RNA
ugccggcucuucuggcugccgg

SEQ ID NO: 10012 - RNA, 22 nt, Artificial Sequence
  GATA2 Guide RNA
ugccuugcccucccagucggcc

SEQ ID NO: 10013 - RNA, 22 nt, Artificial Sequence
  GATA2 Guide RNA
uggcggccgacugggagggcaa

SEQ ID NO: 10014 - RNA, 22 nt, Artificial Sequence
  GATA2 Guide RNA
uggcugccggcucuucuggcgg

SEQ ID NO: 10015 - RNA, 22 nt, Artificial Sequence
  GATA2 Guide RNA
uucuggcggccgacugggaggg

SEQ ID NO: 10016 - RNA, 22 nt, Artificial Sequence
  GATA2 Guide RNA
uucuggcugccggcucuucugg

SEQ ID NO: 10017 - RNA, 22 nt, Artificial Sequence
  GATA2 Guide RNA
uugcccucccagucggccgcca

SEQ ID NO: 10018 - RNA, 20 nt, Artificial Sequence
  GATA2 Guide RNA
aacagguaccggcucuucug

SEQ ID NO: 10019 - RNA, 20 nt, Artificial Sequence
  GATA2 Guide RNA
aagagccgguaccuguugug

SEQ ID NO: 10020 - RNA, 20 nt, Artificial Sequence
  GATA2 Guide RNA
aauuugcacaacagguaccg

SEQ ID NO: 10021 - RNA, 20 nt, Artificial Sequence
  GATA2 Guide RNA
acaacagguaccggcucuuc

SEQ ID NO: 10022 - RNA, 20 nt, Artificial Sequence
  GATA2 Guide RNA
acaauuugcacaacagguac

SEQ ID NO: 10023 - RNA, 20 nt, Artificial Sequence
  GATA2 Guide RNA
acagguaccggcucuucugg

SEQ ID NO: 10024 - RNA, 20 nt, Artificial Sequence
  GATA2 Guide RNA
accggcucuucuggcggccg

SEQ ID NO: 10025 - RNA, 20 nt, Artificial Sequence
  GATA2 Guide RNA
agaagagccgguaccuguug

SEQ ID NO: 10026 - RNA, 20 nt, Artificial Sequence
  GATA2 Guide RNA
agagccgguaccuguugugc

SEQ ID NO: 10027 - RNA, 20 nt, Artificial Sequence
  GATA2 Guide RNA
agccgguaccuguugugcaa

SEQ ID NO: 10028 - RNA, 20 nt, Artificial Sequence
  GATA2 Guide RNA
agguaccggcucuucuggcg

SEQ ID NO: 10029 - RNA, 20 nt, Artificial Sequence
  GATA2 Guide RNA
auuugcacaacagguaccgg

SEQ ID NO: 10030 - RNA, 20 nt, Artificial Sequence
  GATA2 Guide RNA
caacagguaccggcucuucu

SEQ ID NO: 10031 - RNA, 20 nt, Artificial Sequence
  GATA2 Guide RNA
caauuugcacaacagguacc

SEQ ID NO: 10032 - RNA, 20 nt, Artificial Sequence
  GATA2 Guide RNA
cacaacagguaccggcucuu

SEQ ID NO: 10033 - RNA, 20 nt, Artificial Sequence
  GATA2 Guide RNA
cagaagagccgguaccuguu

SEQ ID NO: 10034 - RNA, 20 nt, Artificial Sequence
  GATA2 Guide RNA
cagguaccggcucuucuggc

SEQ ID NO: 10035 - RNA, 20 nt, Artificial Sequence
  GATA2 Guide RNA
ccagaagagccgguaccugu

SEQ ID NO: 10036 - RNA, 20 nt, Artificial Sequence
  GATA2 Guide RNA
ccgccagaagagccgguacc

SEQ ID NO: 10037 - RNA, 20 nt, Artificial Sequence
  GATA2 Guide RNA
ccgguaccuguugugcaaau

SEQ ID NO: 10038 - RNA, 20 nt, Artificial Sequence
  GATA2 Guide RNA
cgccagaagagccgguaccu

SEQ ID NO: 10039 - RNA, 20 nt, Artificial Sequence
  GATA2 Guide RNA
cggccgccagaagagccggu

SEQ ID NO: 10040 - RNA, 20 nt, Artificial Sequence
  GATA2 Guide RNA
cgguaccuguugugcaaauu

SEQ ID NO: 10041 - RNA, 20 nt, Artificial Sequence
  GATA2 Guide RNA
cugacaauuugcacaacagg

SEQ ID NO: 10042 - RNA, 20 nt, Artificial Sequence
  GATA2 Guide RNA
gaagagccgguaccuguugu

SEQ ID NO: 10043 - RNA, 20 nt, Artificial Sequence
  GATA2 Guide RNA
gacaauuugcacaacaggua

SEQ ID NO: 10044 - RNA, 20 nt, Artificial Sequence
  GATA2 Guide RNA
gagccgguaccuguugugca

SEQ ID NO: 10045 - RNA, 20 nt, Artificial Sequence
  GATA2 Guide RNA
gcacaacagguaccggcucu

SEQ ID NO: 10046 - RNA, 20 nt, Artificial Sequence
  GATA2 Guide RNA
gccagaagagccgguaccug

SEQ ID NO: 10047 - RNA, 20 nt, Artificial Sequence
  GATA2 Guide RNA
gccgccagaagagccgguac

SEQ ID NO: 10048 - RNA, 20 nt, Artificial Sequence
  GATA2 Guide RNA
gccgguaccuguugugcaaa

SEQ ID NO: 10049 - RNA, 20 nt, Artificial Sequence
  GATA2 Guide RNA
ggccgccagaagagccggua

SEQ ID NO: 10050 - RNA, 20 nt, Artificial Sequence
  GATA2 Guide RNA
gguaccggcucuucuggcgg

SEQ ID NO: 10051 - RNA, 20 nt, Artificial Sequence
  GATA2 Guide RNA
gguaccuguugugcaaauug

SEQ ID NO: 10052 - RNA, 20 nt, Artificial Sequence
  GATA2 Guide RNA
guaccggcucuucuggcggc

SEQ ID NO: 10053 - RNA, 20 nt, Artificial Sequence
  GATA2 Guide RNA
guaccuguugugcaaauugu

SEQ ID NO: 10054 - RNA, 20 nt, Artificial Sequence
  GATA2 Guide RNA
uaccggcucuucuggcggcc

SEQ ID NO: 10055 - RNA, 20 nt, Artificial Sequence
  GATA2 Guide RNA
ucugacaauuugcacaacag

SEQ ID NO: 10056 - RNA, 20 nt, Artificial Sequence
  GATA2 Guide RNA
ugacaauuugcacaacaggu

SEQ ID NO: 10057 - RNA, 20 nt, Artificial Sequence
  GATA2 Guide RNA
ugcacaacagguaccggcuc

SEQ ID NO: 10058 - RNA, 20 nt, Artificial Sequence
  GATA2 Guide RNA
uugcacaacagguaccggcu

SEQ ID NO: 10059 - RNA, 20 nt, Artificial Sequence
  GATA2 Guide RNA
uuugcacaacagguaccggc

SEQ ID NO: 10060 - RNA, 21 nt, Artificial Sequence
  GATA2 Guide RNA
aacagguaccggcucuucugg

SEQ ID NO: 10061 - RNA, 21 nt, Artificial Sequence
  GATA2 Guide RNA
aagagccgguaccuguugugc

SEQ ID NO: 10062 - RNA, 21 nt, Artificial Sequence
  GATA2 Guide RNA
aauuugcacaacagguaccgg

SEQ ID NO: 10063 - RNA, 21 nt, Artificial Sequence
  GATA2 Guide RNA
acaacagguaccggcucuucu

SEQ ID NO: 10064 - RNA, 21 nt, Artificial Sequence
  GATA2 Guide RNA
acaauuugcacaacagguacc

SEQ ID NO: 10065 - RNA, 21 nt, Artificial Sequence
  GATA2 Guide RNA
acagguaccggcucuucuggc

SEQ ID NO: 10066 - RNA, 21 nt, Artificial Sequence
  GATA2 Guide RNA
accggcucuucuggcggccga

SEQ ID NO: 10067 - RNA, 21 nt, Artificial Sequence
  GATA2 Guide RNA
agaagagccgguaccuguugu

SEQ ID NO: 10068 - RNA, 21 nt, Artificial Sequence
  GATA2 Guide RNA
agagccgguaccuguugugca

SEQ ID NO: 10069 - RNA, 21 nt, Artificial Sequence
  GATA2 Guide RNA
agccgguaccuguugugcaaa

SEQ ID NO: 10070 - RNA, 21 nt, Artificial Sequence
  GATA2 Guide RNA
agguaccggcucuucuggcgg

SEQ ID NO: 10071 - RNA, 21 nt, Artificial Sequence
  GATA2 Guide RNA
auuugcacaacagguaccggc

SEQ ID NO: 10072 - RNA, 21 nt, Artificial Sequence
  GATA2 Guide RNA
caacagguaccggcucuucug

SEQ ID NO: 10073 - RNA, 21 nt, Artificial Sequence
  GATA2 Guide RNA
caauuugcacaacagguaccg

SEQ ID NO: 10074 - RNA, 21 nt, Artificial Sequence
  GATA2 Guide RNA
cacaacagguaccggcucuuc

SEQ ID NO: 10075 - RNA, 21 nt, Artificial Sequence
  GATA2 Guide RNA
cagaagagccgguaccuguug

SEQ ID NO: 10076 - RNA, 21 nt, Artificial Sequence
  GATA2 Guide RNA
cagguaccggcucuucuggcg

SEQ ID NO: 10077 - RNA, 21 nt, Artificial Sequence
  GATA2 Guide RNA
ccagaagagccgguaccuguu

SEQ ID NO: 10078 - RNA, 21 nt, Artificial Sequence
  GATA2 Guide RNA
ccgccagaagagccgguaccu

SEQ ID NO: 10079 - RNA, 21 nt, Artificial Sequence
  GATA2 Guide RNA
ccgguaccuguugugcaaauu

SEQ ID NO: 10080 - RNA, 21 nt, Artificial Sequence
  GATA2 Guide RNA
cgccagaagagccgguaccug

SEQ ID NO: 10081 - RNA, 21 nt, Artificial Sequence
  GATA2 Guide RNA
cggccgccagaagagccggua

SEQ ID NO: 10082 - RNA, 21 nt, Artificial Sequence
  GATA2 Guide RNA
cgguaccuguugugcaaauug

SEQ ID NO: 10083 - RNA, 21 nt, Artificial Sequence
  GATA2 Guide RNA
cugacaauuugcacaacaggu

SEQ ID NO: 10084 - RNA, 21 nt, Artificial Sequence
  GATA2 Guide RNA
gaagagccgguaccuguugug

SEQ ID NO: 10085 - RNA, 21 nt, Artificial Sequence
  GATA2 Guide RNA
gacaauuugcacaacagguac

SEQ ID NO: 10086 - RNA, 21 nt, Artificial Sequence
  GATA2 Guide RNA
gagccgguaccuguugugcaa

SEQ ID NO: 10087 - RNA, 21 nt, Artificial Sequence
  GATA2 Guide RNA
gcacaacagguaccggcucuu

SEQ ID NO: 10088 - RNA, 21 nt, Artificial Sequence
  GATA2 Guide RNA
gccagaagagccgguaccugu

SEQ ID NO: 10089 - RNA, 21 nt, Artificial Sequence
  GATA2 Guide RNA
gccgccagaagagccgguacc

SEQ ID NO: 10090 - RNA, 21 nt, Artificial Sequence
  GATA2 Guide RNA
gccgguaccuguugugcaaau

SEQ ID NO: 10091 - RNA, 21 nt, Artificial Sequence
  GATA2 Guide RNA
ggccgccagaagagccgguac

SEQ ID NO: 10092 - RNA, 21 nt, Artificial Sequence
  GATA2 Guide RNA
gguaccggcucuucuggcggc

SEQ ID NO: 10093 - RNA, 21 nt, Artificial Sequence
  GATA2 Guide RNA
gguaccuguugugcaaauugu

SEQ ID NO: 10094 - RNA, 21 nt, Artificial Sequence
  GATA2 Guide RNA
guaccggcucuucuggcggcc

SEQ ID NO: 10095 - RNA, 21 nt, Artificial Sequence
  GATA2 Guide RNA
guaccuguugugcaaauuguc

SEQ ID NO: 10096 - RNA, 21 nt, Artificial Sequence
  GATA2 Guide RNA
gucugacaauuugcacaacag

SEQ ID NO: 10097 - RNA, 21 nt, Artificial Sequence
  GATA2 Guide RNA
uaccggcucuucuggcggccg

SEQ ID NO: 10098 - RNA, 21 nt, Artificial Sequence
  GATA2 Guide RNA
ucggccgccagaagagccggu

SEQ ID NO: 10099 - RNA, 21 nt, Artificial Sequence
  GATA2 Guide RNA
ucugacaauuugcacaacagg

SEQ ID NO: 10100 - RNA, 21 nt, Artificial Sequence
  GATA2 Guide RNA
ugacaauuugcacaacaggua

SEQ ID NO: 10101 - RNA, 21 nt, Artificial Sequence
  GATA2 Guide RNA
ugcacaacagguaccggcucu

SEQ ID NO: 10102 - RNA, 21 nt, Artificial Sequence
  GATA2 Guide RNA
uugcacaacagguaccggcuc

SEQ ID NO: 10103 - RNA, 21 nt, Artificial Sequence
  GATA2 Guide RNA
uuugcacaacagguaccggcu

SEQ ID NO: 10104 - RNA, 22 nt, Artificial Sequence
  GATA2 Guide RNA
aacagguaccggcucuucuggc

SEQ ID NO: 10105 - RNA, 22 nt, Artificial Sequence
  GATA2 Guide RNA
aagagccgguaccuguugugca

SEQ ID NO: 10106 - RNA, 22 nt, Artificial Sequence
  GATA2 Guide RNA
aauuugcacaacagguaccggc

SEQ ID NO: 10107 - RNA, 22 nt, Artificial Sequence
  GATA2 Guide RNA
acaacagguaccggcucuucug

SEQ ID NO: 10108 - RNA, 22 nt, Artificial Sequence
  GATA2 Guide RNA
acaauuugcacaacagguaccg

SEQ ID NO: 10109 - RNA, 22 nt, Artificial Sequence
  GATA2 Guide RNA
acagguaccggcucuucuggcg

SEQ ID NO: 10110 - RNA, 22 nt, Artificial Sequence
  GATA2 Guide RNA
accggcucuucuggcggccgac

SEQ ID NO: 10111 - RNA, 22 nt, Artificial Sequence
  GATA2 Guide RNA
agaagagccgguaccuguugug

SEQ ID NO: 10112 - RNA, 22 nt, Artificial Sequence
  GATA2 Guide RNA
agagccgguaccuguugugcaa

SEQ ID NO: 10113 - RNA, 22 nt, Artificial Sequence
  GATA2 Guide RNA
agccgguaccuguugugcaaau

SEQ ID NO: 10114 - RNA, 22 nt, Artificial Sequence
  GATA2 Guide RNA
agguaccggcucuucuggcggc

SEQ ID NO: 10115 - RNA, 22 nt, Artificial Sequence
  GATA2 Guide RNA
auuugcacaacagguaccggcu

SEQ ID NO: 10116 - RNA, 22 nt, Artificial Sequence
  GATA2 Guide RNA
caacagguaccggcucuucugg

SEQ ID NO: 10117 - RNA, 22 nt, Artificial Sequence
  GATA2 Guide RNA
caauuugcacaacagguaccgg

SEQ ID NO: 10118 - RNA, 22 nt, Artificial Sequence
  GATA2 Guide RNA
cacaacagguaccggcucuucu

SEQ ID NO: 10119 - RNA, 22 nt, Artificial Sequence
  GATA2 Guide RNA
cagaagagccgguaccuguugu

SEQ ID NO: 10120 - RNA, 22 nt, Artificial Sequence
  GATA2 Guide RNA
cagguaccggcucuucuggcgg

SEQ ID NO: 10121 - RNA, 22 nt, Artificial Sequence
  GATA2 Guide RNA
ccagaagagccgguaccuguug

SEQ ID NO: 10122 - RNA, 22 nt, Artificial Sequence
  GATA2 Guide RNA
ccgccagaagagccgguaccug

SEQ ID NO: 10123 - RNA, 22 nt, Artificial Sequence
  GATA2 Guide RNA
ccgguaccuguugugcaaauug

SEQ ID NO: 10124 - RNA, 22 nt, Artificial Sequence
  GATA2 Guide RNA
cgccagaagagccgguaccugu

SEQ ID NO: 10125 - RNA, 22 nt, Artificial Sequence
  GATA2 Guide RNA
cggccgccagaagagccgguac

SEQ ID NO: 10126 - RNA, 22 nt, Artificial Sequence
  GATA2 Guide RNA
cgguaccuguugugcaaauugu

SEQ ID NO: 10127 - RNA, 22 nt, Artificial Sequence
  GATA2 Guide RNA
cgucugacaauuugcacaacag

SEQ ID NO: 10128 - RNA, 22 nt, Artificial Sequence
  GATA2 Guide RNA
cugacaauuugcacaacaggua

SEQ ID NO: 10129 - RNA, 22 nt, Artificial Sequence
  GATA2 Guide RNA
gaagagccgguaccuguugugc

SEQ ID NO: 10130 - RNA, 22 nt, Artificial Sequence
  GATA2 Guide RNA
gacaauuugcacaacagguacc

SEQ ID NO: 10131 - RNA, 22 nt, Artificial Sequence
  GATA2 Guide RNA
gagccgguaccuguugugcaaa

SEQ ID NO: 10132 - RNA, 22 nt, Artificial Sequence
  GATA2 Guide RNA
gcacaacagguaccggcucuuc

SEQ ID NO: 10133 - RNA, 22 nt, Artificial Sequence
  GATA2 Guide RNA
gccagaagagccgguaccuguu

SEQ ID NO: 10134 - RNA, 22 nt, Artificial Sequence
  GATA2 Guide RNA
gccgccagaagagccgguaccu

SEQ ID NO: 10135 - RNA, 22 nt, Artificial Sequence
  GATA2 Guide RNA
gccgguaccuguugugcaaauu

SEQ ID NO: 10136 - RNA, 22 nt, Artificial Sequence
  GATA2 Guide RNA
ggccgccagaagagccgguacc

SEQ ID NO: 10137 - RNA, 22 nt, Artificial Sequence
  GATA2 Guide RNA
gguaccggcucuucuggcggcc

SEQ ID NO: 10138 - RNA, 22 nt, Artificial Sequence
  GATA2 Guide RNA
gguaccuguugugcaaauuguc

SEQ ID NO: 10139 - RNA, 22 nt, Artificial Sequence
  GATA2 Guide RNA
guaccggcucuucuggcggccg

SEQ ID NO: 10140 - RNA, 22 nt, Artificial Sequence
  GATA2 Guide RNA
guaccuguugugcaaauuguca

SEQ ID NO: 10141 - RNA, 22 nt, Artificial Sequence
  GATA2 Guide RNA
gucggccgccagaagagccggu

SEQ ID NO: 10142 - RNA, 22 nt, Artificial Sequence
  GATA2 Guide RNA
gucugacaauuugcacaacagg

SEQ ID NO: 10143 - RNA, 22 nt, Artificial Sequence
  GATA2 Guide RNA
uaccggcucuucuggcggccga

SEQ ID NO: 10144 - RNA, 22 nt, Artificial Sequence
  GATA2 Guide RNA
ucggccgccagaagagccggua

SEQ ID NO: 10145 - RNA, 22 nt, Artificial Sequence
  GATA2 Guide RNA
ucugacaauuugcacaacaggu

SEQ ID NO: 10146 - RNA, 22 nt, Artificial Sequence
  GATA2 Guide RNA
ugacaauuugcacaacagguac

SEQ ID NO: 10147 - RNA, 22 nt, Artificial Sequence
  GATA2 Guide RNA
ugcacaacagguaccggcucuu

SEQ ID NO: 10148 - RNA, 22 nt, Artificial Sequence
  GATA2 Guide RNA
uugcacaacagguaccggcucu

SEQ ID NO: 10149 - RNA, 22 nt, Artificial Sequence
  GATA2 Guide RNA
uuugcacaacagguaccggcuc

SEQ ID NO: 10150 - RNA, 20 nt, Artificial Sequence
  GATA2 Guide RNA
aacaggugcuggcucuucug

SEQ ID NO: 10151 - RNA, 20 nt, Artificial Sequence
  GATA2 Guide RNA
aagagccagcaccuguugug

SEQ ID NO: 10152 - RNA, 20 nt, Artificial Sequence
  GATA2 Guide RNA
aauuugcacaacaggugcug

SEQ ID NO: 10153 - RNA, 20 nt, Artificial Sequence
  GATA2 Guide RNA
acaacaggugcuggcucuuc

SEQ ID NO: 10154 - RNA, 20 nt, Artificial Sequence
  GATA2 Guide RNA
acaauuugcacaacaggugc

SEQ ID NO: 10155 - RNA, 20 nt, Artificial Sequence
  GATA2 Guide RNA
acaggugcuggcucuucugg

SEQ ID NO: 10156 - RNA, 20 nt, Artificial Sequence
  GATA2 Guide RNA
agaagagccagcaccuguug

SEQ ID NO: 10157 - RNA, 20 nt, Artificial Sequence
  GATA2 Guide RNA
agagccagcaccuguugugc

SEQ ID NO: 10158 - RNA, 20 nt, Artificial Sequence
  GATA2 Guide RNA
agccagcaccuguugugcaa

SEQ ID NO: 10159 - RNA, 20 nt, Artificial Sequence
  GATA2 Guide RNA
aggugcuggcucuucuggcg

SEQ ID NO: 10160 - RNA, 20 nt, Artificial Sequence
  GATA2 Guide RNA
auuugcacaacaggugcugg

SEQ ID NO: 10161 - RNA, 20 nt, Artificial Sequence
  GATA2 Guide RNA
caacaggugcuggcucuucu

SEQ ID NO: 10162 - RNA, 20 nt, Artificial Sequence
  GATA2 Guide RNA
caauuugcacaacaggugcu

SEQ ID NO: 10163 - RNA, 20 nt, Artificial Sequence
  GATA2 Guide RNA
cacaacaggugcuggcucuu

SEQ ID NO: 10164 - RNA, 20 nt, Artificial Sequence
  GATA2 Guide RNA
cagaagagccagcaccuguu

SEQ ID NO: 10165 - RNA, 20 nt, Artificial Sequence
  GATA2 Guide RNA
cagcaccuguugugcaaauu

SEQ ID NO: 10166 - RNA, 20 nt, Artificial Sequence
  GATA2 Guide RNA
caggugcuggcucuucuggc

SEQ ID NO: 10167 - RNA, 20 nt, Artificial Sequence
  GATA2 Guide RNA
ccagaagagccagcaccugu

SEQ ID NO: 10168 - RNA, 20 nt, Artificial Sequence
  GATA2 Guide RNA
ccagcaccuguugugcaaau

SEQ ID NO: 10169 - RNA, 20 nt, Artificial Sequence
  GATA2 Guide RNA
ccgccagaagagccagcacc

SEQ ID NO: 10170 - RNA, 20 nt, Artificial Sequence
  GATA2 Guide RNA
cgccagaagagccagcaccu

SEQ ID NO: 10171 - RNA, 20 nt, Artificial Sequence
  GATA2 Guide RNA
cggccgccagaagagccagc

SEQ ID NO: 10172 - RNA, 20 nt, Artificial Sequence
  GATA2 Guide RNA
cuggcucuucuggcggccga

SEQ ID NO: 10173 - RNA, 20 nt, Artificial Sequence
  GATA2 Guide RNA
gaagagccagcaccuguugu

SEQ ID NO: 10174 - RNA, 20 nt, Artificial Sequence
  GATA2 Guide RNA
gacaauuugcacaacaggug

SEQ ID NO: 10175 - RNA, 20 nt, Artificial Sequence
  GATA2 Guide RNA
gagccagcaccuguugugca

SEQ ID NO: 10176 - RNA, 20 nt, Artificial Sequence
  GATA2 Guide RNA
gcacaacaggugcuggcucu

SEQ ID NO: 10177 - RNA, 20 nt, Artificial Sequence
  GATA2 Guide RNA
gccagaagagccagcaccug

SEQ ID NO: 10178 - RNA, 20 nt, Artificial Sequence
  GATA2 Guide RNA
gccagcaccuguugugcaaa

SEQ ID NO: 10179 - RNA, 20 nt, Artificial Sequence
  GATA2 Guide RNA
gccgccagaagagccagcac

SEQ ID NO: 10180 - RNA, 20 nt, Artificial Sequence
  GATA2 Guide RNA
gcuggcucuucuggcggccg

SEQ ID NO: 10181 - RNA, 20 nt, Artificial Sequence
  GATA2 Guide RNA
ggccgccagaagagccagca

SEQ ID NO: 10182 - RNA, 20 nt, Artificial Sequence
  GATA2 Guide RNA
ggugcuggcucuucuggcgg

SEQ ID NO: 10183 - RNA, 20 nt, Artificial Sequence
  GATA2 Guide RNA
gucggccgccagaagagcca

SEQ ID NO: 10184 - RNA, 20 nt, Artificial Sequence
  GATA2 Guide RNA
gugcuggcucuucuggcggc

SEQ ID NO: 10185 - RNA, 20 nt, Artificial Sequence
  GATA2 Guide RNA
ucggccgccagaagagccag

SEQ ID NO: 10186 - RNA, 20 nt, Artificial Sequence
  GATA2 Guide RNA
ugcacaacaggugcuggcuc

SEQ ID NO: 10187 - RNA, 20 nt, Artificial Sequence
  GATA2 Guide RNA
ugcuggcucuucuggcggcc

SEQ ID NO: 10188 - RNA, 20 nt, Artificial Sequence
  GATA2 Guide RNA
uggcucuucuggcggccgac

SEQ ID NO: 10189 - RNA, 20 nt, Artificial Sequence
  GATA2 Guide RNA
uugcacaacaggugcuggcu

SEQ ID NO: 10190 - RNA, 20 nt, Artificial Sequence
  GATA2 Guide RNA
uuugcacaacaggugcuggc

SEQ ID NO: 10191 - RNA, 21 nt, Artificial Sequence
  GATA2 Guide RNA
aacaggugcuggcucuucugg

SEQ ID NO: 10192 - RNA, 21 nt, Artificial Sequence
  GATA2 Guide RNA
aagagccagcaccuguugugc

SEQ ID NO: 10193 - RNA, 21 nt, Artificial Sequence
  GATA2 Guide RNA
aauuugcacaacaggugcugg

SEQ ID NO: 10194 - RNA, 21 nt, Artificial Sequence
  GATA2 Guide RNA
acaacaggugcuggcucuucu

SEQ ID NO: 10195 - RNA, 21 nt, Artificial Sequence
  GATA2 Guide RNA
acaauuugcacaacaggugcu

SEQ ID NO: 10196 - RNA, 21 nt, Artificial Sequence
  GATA2 Guide RNA
acaggugcuggcucuucuggc

SEQ ID NO: 10197 - RNA, 21 nt, Artificial Sequence
  GATA2 Guide RNA
agaagagccagcaccuguugu

SEQ ID NO: 10198 - RNA, 21 nt, Artificial Sequence
  GATA2 Guide RNA
agagccagcaccuguugugca

SEQ ID NO: 10199 - RNA, 21 nt, Artificial Sequence
  GATA2 Guide RNA
agccagcaccuguugugcaaa

SEQ ID NO: 10200 - RNA, 21 nt, Artificial Sequence
  GATA2 Guide RNA
aggugcuggcucuucuggcgg

SEQ ID NO: 10201 - RNA, 21 nt, Artificial Sequence
  GATA2 Guide RNA
agucggccgccagaagagcca

SEQ ID NO: 10202 - RNA, 21 nt, Artificial Sequence
  GATA2 Guide RNA
auuugcacaacaggugcuggc

SEQ ID NO: 10203 - RNA, 21 nt, Artificial Sequence
  GATA2 Guide RNA
caacaggugcuggcucuucug

SEQ ID NO: 10204 - RNA, 21 nt, Artificial Sequence
  GATA2 Guide RNA
caauuugcacaacaggugcug

SEQ ID NO: 10205 - RNA, 21 nt, Artificial Sequence
  GATA2 Guide RNA
cacaacaggugcuggcucuuc

SEQ ID NO: 10206 - RNA, 21 nt, Artificial Sequence
  GATA2 Guide RNA
cagaagagccagcaccuguug

SEQ ID NO: 10207 - RNA, 21 nt, Artificial Sequence
  GATA2 Guide RNA
cagcaccuguugugcaaauug

SEQ ID NO: 10208 - RNA, 21 nt, Artificial Sequence
  GATA2 Guide RNA
caggugcuggcucuucuggcg

SEQ ID NO: 10209 - RNA, 21 nt, Artificial Sequence
  GATA2 Guide RNA
ccagaagagccagcaccuguu

SEQ ID NO: 10210 - RNA, 21 nt, Artificial Sequence
  GATA2 Guide RNA
ccagcaccuguugugcaaauu

SEQ ID NO: 10211 - RNA, 21 nt, Artificial Sequence
  GATA2 Guide RNA
ccgccagaagagccagcaccu

SEQ ID NO: 10212 - RNA, 21 nt, Artificial Sequence
  GATA2 Guide RNA
cgccagaagagccagcaccug

SEQ ID NO: 10213 - RNA, 21 nt, Artificial Sequence
  GATA2 Guide RNA
cggccgccagaagagccagca

SEQ ID NO: 10214 - RNA, 21 nt, Artificial Sequence
  GATA2 Guide RNA
cuggcucuucuggcggccgac

SEQ ID NO: 10215 - RNA, 21 nt, Artificial Sequence
  GATA2 Guide RNA
gaagagccagcaccuguugug

SEQ ID NO: 10216 - RNA, 21 nt, Artificial Sequence
  GATA2 Guide RNA
gacaauuugcacaacaggugc

SEQ ID NO: 10217 - RNA, 21 nt, Artificial Sequence
  GATA2 Guide RNA
gagccagcaccuguugugcaa

SEQ ID NO: 10218 - RNA, 21 nt, Artificial Sequence
  GATA2 Guide RNA
gcacaacaggugcuggcucuu

SEQ ID NO: 10219 - RNA, 21 nt, Artificial Sequence
  GATA2 Guide RNA
gccagaagagccagcaccugu

SEQ ID NO: 10220 - RNA, 21 nt, Artificial Sequence
  GATA2 Guide RNA
gccagcaccuguugugcaaau

SEQ ID NO: 10221 - RNA, 21 nt, Artificial Sequence
  GATA2 Guide RNA
gccgccagaagagccagcacc

SEQ ID NO: 10222 - RNA, 21 nt, Artificial Sequence
  GATA2 Guide RNA
gcuggcucuucuggcggccga

SEQ ID NO: 10223 - RNA, 21 nt, Artificial Sequence
  GATA2 Guide RNA
ggccgccagaagagccagcac

SEQ ID NO: 10224 - RNA, 21 nt, Artificial Sequence
  GATA2 Guide RNA
ggugcuggcucuucuggcggc

SEQ ID NO: 10225 - RNA, 21 nt, Artificial Sequence
  GATA2 Guide RNA
gucggccgccagaagagccag

SEQ ID NO: 10226 - RNA, 21 nt, Artificial Sequence
  GATA2 Guide RNA
gugcuggcucuucuggcggcc

SEQ ID NO: 10227 - RNA, 21 nt, Artificial Sequence
  GATA2 Guide RNA
ucggccgccagaagagccagc

SEQ ID NO: 10228 - RNA, 21 nt, Artificial Sequence
  GATA2 Guide RNA
ugacaauuugcacaacaggug

SEQ ID NO: 10229 - RNA, 21 nt, Artificial Sequence
  GATA2 Guide RNA
ugcacaacaggugcuggcucu

SEQ ID NO: 10230 - RNA, 21 nt, Artificial Sequence
  GATA2 Guide RNA
ugcuggcucuucuggcggccg

SEQ ID NO: 10231 - RNA, 21 nt, Artificial Sequence
  GATA2 Guide RNA
uggcucuucuggcggccgacu

SEQ ID NO: 10232 - RNA, 21 nt, Artificial Sequence
  GATA2 Guide RNA
uugcacaacaggugcuggcuc

SEQ ID NO: 10233 - RNA, 21 nt, Artificial Sequence
  GATA2 Guide RNA
uuugcacaacaggugcuggcu

SEQ ID NO: 10234 - RNA, 22 nt, Artificial Sequence
  GATA2 Guide RNA
aacaggugcuggcucuucuggc

SEQ ID NO: 10235 - RNA, 22 nt, Artificial Sequence
  GATA2 Guide RNA
aagagccagcaccuguugugca

SEQ ID NO: 10236 - RNA, 22 nt, Artificial Sequence
  GATA2 Guide RNA
aauuugcacaacaggugcuggc

SEQ ID NO: 10237 - RNA, 22 nt, Artificial Sequence
  GATA2 Guide RNA
acaacaggugcuggcucuucug

SEQ ID NO: 10238 - RNA, 22 nt, Artificial Sequence
  GATA2 Guide RNA
acaauuugcacaacaggugcug

SEQ ID NO: 10239 - RNA, 22 nt, Artificial Sequence
  GATA2 Guide RNA
acaggugcuggcucuucuggcg

SEQ ID NO: 10240 - RNA, 22 nt, Artificial Sequence
  GATA2 Guide RNA
agaagagccagcaccuguugug

SEQ ID NO: 10241 - RNA, 22 nt, Artificial Sequence
  GATA2 Guide RNA
agagccagcaccuguugugcaa

SEQ ID NO: 10242 - RNA, 22 nt, Artificial Sequence
  GATA2 Guide RNA
agccagcaccuguugugcaaau

SEQ ID NO: 10243 - RNA, 22 nt, Artificial Sequence
  GATA2 Guide RNA
aggugcuggcucuucuggcggc

SEQ ID NO: 10244 - RNA, 22 nt, Artificial Sequence
  GATA2 Guide RNA
agucggccgccagaagagccag

SEQ ID NO: 10245 - RNA, 22 nt, Artificial Sequence
  GATA2 Guide RNA
auuugcacaacaggugcuggcu

SEQ ID NO: 10246 - RNA, 22 nt, Artificial Sequence
  GATA2 Guide RNA
caacaggugcuggcucuucugg

SEQ ID NO: 10247 - RNA, 22 nt, Artificial Sequence
  GATA2 Guide RNA
caauuugcacaacaggugcugg

SEQ ID NO: 10248 - RNA, 22 nt, Artificial Sequence
  GATA2 Guide RNA
cacaacaggugcuggcucuucu

SEQ ID NO: 10249 - RNA, 22 nt, Artificial Sequence
  GATA2 Guide RNA
cagaagagccagcaccuguugu

SEQ ID NO: 10250 - RNA, 22 nt, Artificial Sequence
  GATA2 Guide RNA
cagcaccuguugugcaaauugu

SEQ ID NO: 10251 - RNA, 22 nt, Artificial Sequence
  GATA2 Guide RNA
caggugcuggcucuucuggcgg

SEQ ID NO: 10252 - RNA, 22 nt, Artificial Sequence
  GATA2 Guide RNA
cagucggccgccagaagagcca

SEQ ID NO: 10253 - RNA, 22 nt, Artificial Sequence
  GATA2 Guide RNA
ccagaagagccagcaccuguug

SEQ ID NO: 10254 - RNA, 22 nt, Artificial Sequence
  GATA2 Guide RNA
ccagcaccuguugugcaaauug

SEQ ID NO: 10255 - RNA, 22 nt, Artificial Sequence
  GATA2 Guide RNA
ccgccagaagagccagcaccug

SEQ ID NO: 10256 - RNA, 22 nt, Artificial Sequence
  GATA2 Guide RNA
cgccagaagagccagcaccugu

SEQ ID NO: 10257 - RNA, 22 nt, Artificial Sequence
  GATA2 Guide RNA
cggccgccagaagagccagcac

SEQ ID NO: 10258 - RNA, 22 nt, Artificial Sequence
  GATA2 Guide RNA
cugacaauuugcacaacaggug

SEQ ID NO: 10259 - RNA, 22 nt, Artificial Sequence
  GATA2 Guide RNA
cuggcucuucuggcggccgacu

SEQ ID NO: 10260 - RNA, 22 nt, Artificial Sequence
  GATA2 Guide RNA
gaagagccagcaccuguugugc

SEQ ID NO: 10261 - RNA, 22 nt, Artificial Sequence
  GATA2 Guide RNA
gacaauuugcacaacaggugcu

SEQ ID NO: 10262 - RNA, 22 nt, Artificial Sequence
  GATA2 Guide RNA
gagccagcaccuguugugcaaa

SEQ ID NO: 10263 - RNA, 22 nt, Artificial Sequence
  GATA2 Guide RNA
gcacaacaggugcuggcucuuc

SEQ ID NO: 10264 - RNA, 22 nt, Artificial Sequence
  GATA2 Guide RNA
gccagaagagccagcaccuguu

SEQ ID NO: 10265 - RNA, 22 nt, Artificial Sequence
  GATA2 Guide RNA
gccagcaccuguugugcaaauu

SEQ ID NO: 10266 - RNA, 22 nt, Artificial Sequence
  GATA2 Guide RNA
gccgccagaagagccagcaccu

SEQ ID NO: 10267 - RNA, 22 nt, Artificial Sequence
  GATA2 Guide RNA
gcuggcucuucuggcggccgac

SEQ ID NO: 10268 - RNA, 22 nt, Artificial Sequence
  GATA2 Guide RNA
ggccgccagaagagccagcacc

SEQ ID NO: 10269 - RNA, 22 nt, Artificial Sequence
  GATA2 Guide RNA
ggugcuggcucuucuggcggcc

SEQ ID NO: 10270 - RNA, 22 nt, Artificial Sequence
  GATA2 Guide RNA
gucggccgccagaagagccagc

SEQ ID NO: 10271 - RNA, 22 nt, Artificial Sequence
  GATA2 Guide RNA
gugcuggcucuucuggcggccg

SEQ ID NO: 10272 - RNA, 22 nt, Artificial Sequence
  GATA2 Guide RNA
ucggccgccagaagagccagca

SEQ ID NO: 10273 - RNA, 22 nt, Artificial Sequence
  GATA2 Guide RNA
ugacaauuugcacaacaggugc

SEQ ID NO: 10274 - RNA, 22 nt, Artificial Sequence
  GATA2 Guide RNA
ugcacaacaggugcuggcucuu

SEQ ID NO: 10275 - RNA, 22 nt, Artificial Sequence
  GATA2 Guide RNA
ugcuggcucuucuggcggccga

SEQ ID NO: 10276 - RNA, 22 nt, Artificial Sequence
  GATA2 Guide RNA
uggcucuucuggcggccgacug

SEQ ID NO: 10277 - RNA, 22 nt, Artificial Sequence
  GATA2 Guide RNA
uugcacaacaggugcuggcucu

SEQ ID NO: 10278 - RNA, 22 nt, Artificial Sequence
  GATA2 Guide RNA
uuugcacaacaggugcuggcuc

SEQ ID NO: 10279 - RNA, 20 nt, Artificial Sequence
  GATA2 Guide RNA
aacaggugccagcucuucug

SEQ ID NO: 10280 - RNA, 20 nt, Artificial Sequence
  GATA2 Guide RNA
aagagcuggcaccuguugug

SEQ ID NO: 10281 - RNA, 20 nt, Artificial Sequence
  GATA2 Guide RNA
aauuugcacaacaggugcca

SEQ ID NO: 10282 - RNA, 20 nt, Artificial Sequence
  GATA2 Guide RNA
acaacaggugccagcucuuc

SEQ ID NO: 10283 - RNA, 20 nt, Artificial Sequence
  GATA2 Guide RNA
acaggugccagcucuucugg

SEQ ID NO: 10284 - RNA, 20 nt, Artificial Sequence
  GATA2 Guide RNA
agaagagcuggcaccuguug

SEQ ID NO: 10285 - RNA, 20 nt, Artificial Sequence
  GATA2 Guide RNA
agagcuggcaccuguugugc

SEQ ID NO: 10286 - RNA, 20 nt, Artificial Sequence
  GATA2 Guide RNA
agcucuucuggcggccgacu

SEQ ID NO: 10287 - RNA, 20 nt, Artificial Sequence
  GATA2 Guide RNA
agcuggcaccuguugugcaa

SEQ ID NO: 10288 - RNA, 20 nt, Artificial Sequence
  GATA2 Guide RNA
aggugccagcucuucuggcg

SEQ ID NO: 10289 - RNA, 20 nt, Artificial Sequence
  GATA2 Guide RNA
agucggccgccagaagagcu

SEQ ID NO: 10290 - RNA, 20 nt, Artificial Sequence
  GATA2 Guide RNA
auuugcacaacaggugccag

SEQ ID NO: 10291 - RNA, 20 nt, Artificial Sequence
  GATA2 Guide RNA
caacaggugccagcucuucu

SEQ ID NO: 10292 - RNA, 20 nt, Artificial Sequence
  GATA2 Guide RNA
caauuugcacaacaggugcc

SEQ ID NO: 10293 - RNA, 20 nt, Artificial Sequence
  GATA2 Guide RNA
cacaacaggugccagcucuu

SEQ ID NO: 10294 - RNA, 20 nt, Artificial Sequence
  GATA2 Guide RNA
cagaagagcuggcaccuguu

SEQ ID NO: 10295 - RNA, 20 nt, Artificial Sequence
  GATA2 Guide RNA
cagcucuucuggcggccgac

SEQ ID NO: 10296 - RNA, 20 nt, Artificial Sequence
  GATA2 Guide RNA
caggugccagcucuucuggc

SEQ ID NO: 10297 - RNA, 20 nt, Artificial Sequence
  GATA2 Guide RNA
ccagaagagcuggcaccugu

SEQ ID NO: 10298 - RNA, 20 nt, Artificial Sequence
  GATA2 Guide RNA
ccagcucuucuggcggccga

SEQ ID NO: 10299 - RNA, 20 nt, Artificial Sequence
  GATA2 Guide RNA
ccgccagaagagcuggcacc

SEQ ID NO: 10300 - RNA, 20 nt, Artificial Sequence
  GATA2 Guide RNA
cgccagaagagcuggcaccu

SEQ ID NO: 10301 - RNA, 20 nt, Artificial Sequence
  GATA2 Guide RNA
cggccgccagaagagcuggc

SEQ ID NO: 10302 - RNA, 20 nt, Artificial Sequence
  GATA2 Guide RNA
cuggcaccuguugugcaaau

SEQ ID NO: 10303 - RNA, 20 nt, Artificial Sequence
  GATA2 Guide RNA
gaagagcuggcaccuguugu

SEQ ID NO: 10304 - RNA, 20 nt, Artificial Sequence
  GATA2 Guide RNA
gagcuggcaccuguugugca

SEQ ID NO: 10305 - RNA, 20 nt, Artificial Sequence
  GATA2 Guide RNA
gcacaacaggugccagcucu

SEQ ID NO: 10306 - RNA, 20 nt, Artificial Sequence
  GATA2 Guide RNA
gccagaagagcuggcaccug

SEQ ID NO: 10307 - RNA, 20 nt, Artificial Sequence
  GATA2 Guide RNA
gccagcucuucuggcggccg

SEQ ID NO: 10308 - RNA, 20 nt, Artificial Sequence
  GATA2 Guide RNA
gccgccagaagagcuggcac

SEQ ID NO: 10309 - RNA, 20 nt, Artificial Sequence
  GATA2 Guide RNA
gcuggcaccuguugugcaaa

SEQ ID NO: 10310 - RNA, 20 nt, Artificial Sequence
  GATA2 Guide RNA
ggccgccagaagagcuggca

SEQ ID NO: 10311 - RNA, 20 nt, Artificial Sequence
  GATA2 Guide RNA
ggugccagcucuucuggcgg

SEQ ID NO: 10312 - RNA, 20 nt, Artificial Sequence
  GATA2 Guide RNA
gucggccgccagaagagcug

SEQ ID NO: 10313 - RNA, 20 nt, Artificial Sequence
  GATA2 Guide RNA
gugccagcucuucuggcggc

SEQ ID NO: 10314 - RNA, 20 nt, Artificial Sequence
  GATA2 Guide RNA
ucggccgccagaagagcugg

SEQ ID NO: 10315 - RNA, 20 nt, Artificial Sequence
  GATA2 Guide RNA
ugcacaacaggugccagcuc

SEQ ID NO: 10316 - RNA, 20 nt, Artificial Sequence
  GATA2 Guide RNA
ugccagcucuucuggcggcc

SEQ ID NO: 10317 - RNA, 20 nt, Artificial Sequence
  GATA2 Guide RNA
uugcacaacaggugccagcu

SEQ ID NO: 10318 - RNA, 20 nt, Artificial Sequence
  GATA2 Guide RNA
uuugcacaacaggugccagc

SEQ ID NO: 10319 - RNA, 21 nt, Artificial Sequence
  GATA2 Guide RNA
aacaggugccagcucuucugg

SEQ ID NO: 10320 - RNA, 21 nt, Artificial Sequence
  GATA2 Guide RNA
aagagcuggcaccuguugugc

SEQ ID NO: 10321 - RNA, 21 nt, Artificial Sequence
  GATA2 Guide RNA
aauuugcacaacaggugccag

SEQ ID NO: 10322 - RNA, 21 nt, Artificial Sequence
  GATA2 Guide RNA
acaacaggugccagcucuucu

SEQ ID NO: 10323 - RNA, 21 nt, Artificial Sequence
  GATA2 Guide RNA
acaauuugcacaacaggugcc

SEQ ID NO: 10324 - RNA, 21 nt, Artificial Sequence
  GATA2 Guide RNA
acaggugccagcucuucuggc

SEQ ID NO: 10325 - RNA, 21 nt, Artificial Sequence
  GATA2 Guide RNA
agaagagcuggcaccuguugu

SEQ ID NO: 10326 - RNA, 21 nt, Artificial Sequence
  GATA2 Guide RNA
agagcuggcaccuguugugca

SEQ ID NO: 10327 - RNA, 21 nt, Artificial Sequence
  GATA2 Guide RNA
agcucuucuggcggccgacug

SEQ ID NO: 10328 - RNA, 21 nt, Artificial Sequence
  GATA2 Guide RNA
agcuggcaccuguugugcaaa

SEQ ID NO: 10329 - RNA, 21 nt, Artificial Sequence
  GATA2 Guide RNA
aggugccagcucuucuggcgg

SEQ ID NO: 10330 - RNA, 21 nt, Artificial Sequence
  GATA2 Guide RNA
agucggccgccagaagagcug

SEQ ID NO: 10331 - RNA, 21 nt, Artificial Sequence
  GATA2 Guide RNA
auuugcacaacaggugccagc

SEQ ID NO: 10332 - RNA, 21 nt, Artificial Sequence
  GATA2 Guide RNA
caacaggugccagcucuucug

SEQ ID NO: 10333 - RNA, 21 nt, Artificial Sequence
  GATA2 Guide RNA
caauuugcacaacaggugcca

SEQ ID NO: 10334 - RNA, 21 nt, Artificial Sequence
  GATA2 Guide RNA
cacaacaggugccagcucuuc

SEQ ID NO: 10335 - RNA, 21 nt, Artificial Sequence
  GATA2 Guide RNA
cagaagagcuggcaccuguug

SEQ ID NO: 10336 - RNA, 21 nt, Artificial Sequence
  GATA2 Guide RNA
cagcucuucuggcggccgacu

SEQ ID NO: 10337 - RNA, 21 nt, Artificial Sequence
  GATA2 Guide RNA
caggugccagcucuucuggcg

SEQ ID NO: 10338 - RNA, 21 nt, Artificial Sequence
  GATA2 Guide RNA
cagucggccgccagaagagcu

SEQ ID NO: 10339 - RNA, 21 nt, Artificial Sequence
  GATA2 Guide RNA
ccagaagagcuggcaccuguu

SEQ ID NO: 10340 - RNA, 21 nt, Artificial Sequence
  GATA2 Guide RNA
ccagcucuucuggcggccgac

SEQ ID NO: 10341 - RNA, 21 nt, Artificial Sequence
  GATA2 Guide RNA
ccgccagaagagcuggcaccu

SEQ ID NO: 10342 - RNA, 21 nt, Artificial Sequence
  GATA2 Guide RNA
cgccagaagagcuggcaccug

SEQ ID NO: 10343 - RNA, 21 nt, Artificial Sequence
  GATA2 Guide RNA
cggccgccagaagagcuggca

SEQ ID NO: 10344 - RNA, 21 nt, Artificial Sequence
  GATA2 Guide RNA
cuggcaccuguugugcaaauu

SEQ ID NO: 10345 - RNA, 21 nt, Artificial Sequence
  GATA2 Guide RNA
gaagagcuggcaccuguugug

SEQ ID NO: 10346 - RNA, 21 nt, Artificial Sequence
  GATA2 Guide RNA
gagcuggcaccuguugugcaa

SEQ ID NO: 10347 - RNA, 21 nt, Artificial Sequence
  GATA2 Guide RNA
gcacaacaggugccagcucuu

SEQ ID NO: 10348 - RNA, 21 nt, Artificial Sequence
  GATA2 Guide RNA
gccagaagagcuggcaccugu

SEQ ID NO: 10349 - RNA, 21 nt, Artificial Sequence
  GATA2 Guide RNA
gccagcucuucuggcggccga

SEQ ID NO: 10350 - RNA, 21 nt, Artificial Sequence
  GATA2 Guide RNA
gccgccagaagagcuggcacc

SEQ ID NO: 10351 - RNA, 21 nt, Artificial Sequence
  GATA2 Guide RNA
gcuggcaccuguugugcaaau

SEQ ID NO: 10352 - RNA, 21 nt, Artificial Sequence
  GATA2 Guide RNA
ggccgccagaagagcuggcac

SEQ ID NO: 10353 - RNA, 21 nt, Artificial Sequence
  GATA2 Guide RNA
ggugccagcucuucuggcggc

SEQ ID NO: 10354 - RNA, 21 nt, Artificial Sequence
  GATA2 Guide RNA
gucggccgccagaagagcugg

SEQ ID NO: 10355 - RNA, 21 nt, Artificial Sequence
  GATA2 Guide RNA
gugccagcucuucuggcggcc

SEQ ID NO: 10356 - RNA, 21 nt, Artificial Sequence
  GATA2 Guide RNA
ucggccgccagaagagcuggc

SEQ ID NO: 10357 - RNA, 21 nt, Artificial Sequence
  GATA2 Guide RNA
ugcacaacaggugccagcucu

SEQ ID NO: 10358 - RNA, 21 nt, Artificial Sequence
  GATA2 Guide RNA
ugccagcucuucuggcggccg

SEQ ID NO: 10359 - RNA, 21 nt, Artificial Sequence
  GATA2 Guide RNA
uugcacaacaggugccagcuc

SEQ ID NO: 10360 - RNA, 21 nt, Artificial Sequence
  GATA2 Guide RNA
uuugcacaacaggugccagcu

SEQ ID NO: 10361 - RNA, 22 nt, Artificial Sequence
  GATA2 Guide RNA
aacaggugccagcucuucuggc

SEQ ID NO: 10362 - RNA, 22 nt, Artificial Sequence
  GATA2 Guide RNA
aagagcuggcaccuguugugca

SEQ ID NO: 10363 - RNA, 22 nt, Artificial Sequence
  GATA2 Guide RNA
aauuugcacaacaggugccagc

SEQ ID NO: 10364 - RNA, 22 nt, Artificial Sequence
  GATA2 Guide RNA
acaacaggugccagcucuucug

SEQ ID NO: 10365 - RNA, 22 nt, Artificial Sequence
  GATA2 Guide RNA
acaauuugcacaacaggugcca

SEQ ID NO: 10366 - RNA, 22 nt, Artificial Sequence
  GATA2 Guide RNA
acaggugccagcucuucuggcg

SEQ ID NO: 10367 - RNA, 22 nt, Artificial Sequence
  GATA2 Guide RNA
agaagagcuggcaccuguugug

SEQ ID NO: 10368 - RNA, 22 nt, Artificial Sequence
  GATA2 Guide RNA
agagcuggcaccuguugugcaa

SEQ ID NO: 10369 - RNA, 22 nt, Artificial Sequence
  GATA2 Guide RNA
agcucuucuggcggccgacugg

SEQ ID NO: 10370 - RNA, 22 nt, Artificial Sequence
  GATA2 Guide RNA
agcuggcaccuguugugcaaau

SEQ ID NO: 10371 - RNA, 22 nt, Artificial Sequence
  GATA2 Guide RNA
aggugccagcucuucuggcggc

SEQ ID NO: 10372 - RNA, 22 nt, Artificial Sequence
  GATA2 Guide RNA
agucggccgccagaagagcugg

SEQ ID NO: 10373 - RNA, 22 nt, Artificial Sequence
  GATA2 Guide RNA
auuugcacaacaggugccagcu

SEQ ID NO: 10374 - RNA, 22 nt, Artificial Sequence
  GATA2 Guide RNA
caacaggugccagcucuucugg

SEQ ID NO: 10375 - RNA, 22 nt, Artificial Sequence
  GATA2 Guide RNA
caauuugcacaacaggugccag

SEQ ID NO: 10376 - RNA, 22 nt, Artificial Sequence
  GATA2 Guide RNA
cacaacaggugccagcucuucu

SEQ ID NO: 10377 - RNA, 22 nt, Artificial Sequence
  GATA2 Guide RNA
cagaagagcuggcaccuguugu

SEQ ID NO: 10378 - RNA, 22 nt, Artificial Sequence
  GATA2 Guide RNA
cagcucuucuggcggccgacug

SEQ ID NO: 10379 - RNA, 22 nt, Artificial Sequence
  GATA2 Guide RNA
caggugccagcucuucuggcgg

SEQ ID NO: 10380 - RNA, 22 nt, Artificial Sequence
  GATA2 Guide RNA
cagucggccgccagaagagcug

SEQ ID NO: 10381 - RNA, 22 nt, Artificial Sequence
  GATA2 Guide RNA
ccagaagagcuggcaccuguug

SEQ ID NO: 10382 - RNA, 22 nt, Artificial Sequence
  GATA2 Guide RNA
ccagcucuucuggcggccgacu

SEQ ID NO: 10383 - RNA, 22 nt, Artificial Sequence
  GATA2 Guide RNA
ccagucggccgccagaagagcu

SEQ ID NO: 10384 - RNA, 22 nt, Artificial Sequence
  GATA2 Guide RNA
ccgccagaagagcuggcaccug

SEQ ID NO: 10385 - RNA, 22 nt, Artificial Sequence
  GATA2 Guide RNA
cgccagaagagcuggcaccugu

SEQ ID NO: 10386 - RNA, 22 nt, Artificial Sequence
  GATA2 Guide RNA
cggccgccagaagagcuggcac

SEQ ID NO: 10387 - RNA, 22 nt, Artificial Sequence
  GATA2 Guide RNA
cuggcaccuguugugcaaauug

SEQ ID NO: 10388 - RNA, 22 nt, Artificial Sequence
  GATA2 Guide RNA
gaagagcuggcaccuguugugc

SEQ ID NO: 10389 - RNA, 22 nt, Artificial Sequence
  GATA2 Guide RNA
gacaauuugcacaacaggugcc

SEQ ID NO: 10390 - RNA, 22 nt, Artificial Sequence
  GATA2 Guide RNA
gagcuggcaccuguugugcaaa

SEQ ID NO: 10391 - RNA, 22 nt, Artificial Sequence
  GATA2 Guide RNA
gcacaacaggugccagcucuuc

SEQ ID NO: 10392 - RNA, 22 nt, Artificial Sequence
  GATA2 Guide RNA
gccagaagagcuggcaccuguu

SEQ ID NO: 10393 - RNA, 22 nt, Artificial Sequence
  GATA2 Guide RNA
gccagcucuucuggcggccgac

SEQ ID NO: 10394 - RNA, 22 nt, Artificial Sequence
  GATA2 Guide RNA
gccgccagaagagcuggcaccu

SEQ ID NO: 10395 - RNA, 22 nt, Artificial Sequence
  GATA2 Guide RNA
gcuggcaccuguugugcaaauu

SEQ ID NO: 10396 - RNA, 22 nt, Artificial Sequence
  GATA2 Guide RNA
ggccgccagaagagcuggcacc

SEQ ID NO: 10397 - RNA, 22 nt, Artificial Sequence
  GATA2 Guide RNA
ggugccagcucuucuggcggcc

SEQ ID NO: 10398 - RNA, 22 nt, Artificial Sequence
  GATA2 Guide RNA
gucggccgccagaagagcuggc

SEQ ID NO: 10399 - RNA, 22 nt, Artificial Sequence
  GATA2 Guide RNA
gugccagcucuucuggcggccg

SEQ ID NO: 10400 - RNA, 22 nt, Artificial Sequence
  GATA2 Guide RNA
ucggccgccagaagagcuggca

SEQ ID NO: 10401 - RNA, 22 nt, Artificial Sequence
  GATA2 Guide RNA
ugcacaacaggugccagcucuu

SEQ ID NO: 10402 - RNA, 22 nt, Artificial Sequence
  GATA2 Guide RNA
ugccagcucuucuggcggccga

SEQ ID NO: 10403 - RNA, 22 nt, Artificial Sequence
  GATA2 Guide RNA
uugcacaacaggugccagcucu

SEQ ID NO: 10404 - RNA, 22 nt, Artificial Sequence
  GATA2 Guide RNA
uuugcacaacaggugccagcuc

SEQ ID NO: 10405 - RNA, 20 nt, Artificial Sequence
  GATA2 Guide RNA
acaacaggugccggcucuuc

SEQ ID NO: 10406 - RNA, 20 nt, Artificial Sequence
  GATA2 Guide RNA
acaggugccggcucuucuga

SEQ ID NO: 10407 - RNA, 20 nt, Artificial Sequence
  GATA2 Guide RNA
acggccgacugggagggcaa

SEQ ID NO: 10408 - RNA, 20 nt, Artificial Sequence
  GATA2 Guide RNA
aggugccggcucuucugacg

SEQ ID NO: 10409 - RNA, 20 nt, Artificial Sequence
  GATA2 Guide RNA
agucggccgucagaagagcc

SEQ ID NO: 10410 - RNA, 20 nt, Artificial Sequence
  GATA2 Guide RNA
caacaggugccggcucuucu

SEQ ID NO: 10411 - RNA, 20 nt, Artificial Sequence
  GATA2 Guide RNA
caggugccggcucuucugac

SEQ ID NO: 10412 - RNA, 20 nt, Artificial Sequence
  GATA2 Guide RNA
cagucggccgucagaagagc

SEQ ID NO: 10413 - RNA, 20 nt, Artificial Sequence
  GATA2 Guide RNA
ccagucggccgucagaagag

SEQ ID NO: 10414 - RNA, 20 nt, Artificial Sequence
  GATA2 Guide RNA
cccagucggccgucagaaga

SEQ ID NO: 10415 - RNA, 20 nt, Artificial Sequence
  GATA2 Guide RNA
cccucccagucggccgucag

SEQ ID NO: 10416 - RNA, 20 nt, Artificial Sequence
  GATA2 Guide RNA
ccggcucuucugacggccga

SEQ ID NO: 10417 - RNA, 20 nt, Artificial Sequence
  GATA2 Guide RNA
ccgucagaagagccggcacc

SEQ ID NO: 10418 - RNA, 20 nt, Artificial Sequence
  GATA2 Guide RNA
ccucccagucggccgucaga

SEQ ID NO: 10419 - RNA, 20 nt, Artificial Sequence
  GATA2 Guide RNA
cggccgucagaagagccggc

SEQ ID NO: 10420 - RNA, 20 nt, Artificial Sequence
  GATA2 Guide RNA
cggcucuucugacggccgac

SEQ ID NO: 10421 - RNA, 20 nt, Artificial Sequence
  GATA2 Guide RNA
cgucagaagagccggcaccu

SEQ ID NO: 10422 - RNA, 20 nt, Artificial Sequence
  GATA2 Guide RNA
cucccagucggccgucagaa

SEQ ID NO: 10423 - RNA, 20 nt, Artificial Sequence
  GATA2 Guide RNA
cucuucugacggccgacugg

SEQ ID NO: 10424 - RNA, 20 nt, Artificial Sequence
  GATA2 Guide RNA
cugacggccgacugggaggg

SEQ ID NO: 10425 - RNA, 20 nt, Artificial Sequence
  GATA2 Guide RNA
cuucugacggccgacuggga

SEQ ID NO: 10426 - RNA, 20 nt, Artificial Sequence
  GATA2 Guide RNA
gacggccgacugggagggca

SEQ ID NO: 10427 - RNA, 20 nt, Artificial Sequence
  GATA2 Guide RNA
gcccucccagucggccguca

SEQ ID NO: 10428 - RNA, 20 nt, Artificial Sequence
  GATA2 Guide RNA
gccggcucuucugacggccg

SEQ ID NO: 10429 - RNA, 20 nt, Artificial Sequence
  GATA2 Guide RNA
gccgucagaagagccggcac

SEQ ID NO: 10430 - RNA, 20 nt, Artificial Sequence
  GATA2 Guide RNA
gcucuucugacggccgacug

SEQ ID NO: 10431 - RNA, 20 nt, Artificial Sequence
  GATA2 Guide RNA
ggccgucagaagagccggca

SEQ ID NO: 10432 - RNA, 20 nt, Artificial Sequence
  GATA2 Guide RNA
ggcucuucugacggccgacu

SEQ ID NO: 10433 - RNA, 20 nt, Artificial Sequence
  GATA2 Guide RNA
ggugccggcucuucugacgg

SEQ ID NO: 10434 - RNA, 20 nt, Artificial Sequence
  GATA2 Guide RNA
gucagaagagccggcaccug

SEQ ID NO: 10435 - RNA, 20 nt, Artificial Sequence
  GATA2 Guide RNA
gucggccgucagaagagccg

SEQ ID NO: 10436 - RNA, 20 nt, Artificial Sequence
  GATA2 Guide RNA
gugccggcucuucugacggc

SEQ ID NO: 10437 - RNA, 20 nt, Artificial Sequence
  GATA2 Guide RNA
ucccagucggccgucagaag

SEQ ID NO: 10438 - RNA, 20 nt, Artificial Sequence
  GATA2 Guide RNA
ucggccgucagaagagccgg

SEQ ID NO: 10439 - RNA, 20 nt, Artificial Sequence
  GATA2 Guide RNA
ucugacggccgacugggagg

SEQ ID NO: 10440 - RNA, 20 nt, Artificial Sequence
  GATA2 Guide RNA
ucuucugacggccgacuggg

SEQ ID NO: 10441 - RNA, 20 nt, Artificial Sequence
  GATA2 Guide RNA
ugacggccgacugggagggc

SEQ ID NO: 10442 - RNA, 20 nt, Artificial Sequence
  GATA2 Guide RNA
ugcccucccagucggccguc

SEQ ID NO: 10443 - RNA, 20 nt, Artificial Sequence
  GATA2 Guide RNA
ugccggcucuucugacggcc

SEQ ID NO: 10444 - RNA, 20 nt, Artificial Sequence
  GATA2 Guide RNA
uucugacggccgacugggag

SEQ ID NO: 10445 - RNA, 20 nt, Artificial Sequence
  GATA2 Guide RNA
uugcccucccagucggccgu

SEQ ID NO: 10446 - RNA, 21 nt, Artificial Sequence
  GATA2 Guide RNA
aacaggugccggcucuucuga

SEQ ID NO: 10447 - RNA, 21 nt, Artificial Sequence
  GATA2 Guide RNA
acaacaggugccggcucuucu

SEQ ID NO: 10448 - RNA, 21 nt, Artificial Sequence
  GATA2 Guide RNA
acaggugccggcucuucugac

SEQ ID NO: 10449 - RNA, 21 nt, Artificial Sequence
  GATA2 Guide RNA
acggccgacugggagggcaag

SEQ ID NO: 10450 - RNA, 21 nt, Artificial Sequence
  GATA2 Guide RNA
aggugccggcucuucugacgg

SEQ ID NO: 10451 - RNA, 21 nt, Artificial Sequence
  GATA2 Guide RNA
agucggccgucagaagagccg

SEQ ID NO: 10452 - RNA, 21 nt, Artificial Sequence
  GATA2 Guide RNA
cacaacaggugccggcucuuc

SEQ ID NO: 10453 - RNA, 21 nt, Artificial Sequence
  GATA2 Guide RNA
caggugccggcucuucugacg

SEQ ID NO: 10454 - RNA, 21 nt, Artificial Sequence
  GATA2 Guide RNA
cagucggccgucagaagagcc

SEQ ID NO: 10455 - RNA, 21 nt, Artificial Sequence
  GATA2 Guide RNA
ccagucggccgucagaagagc

SEQ ID NO: 10456 - RNA, 21 nt, Artificial Sequence
  GATA2 Guide RNA
cccagucggccgucagaagag

SEQ ID NO: 10457 - RNA, 21 nt, Artificial Sequence
  GATA2 Guide RNA
cccucccagucggccgucaga

SEQ ID NO: 10458 - RNA, 21 nt, Artificial Sequence
  GATA2 Guide RNA
ccggcucuucugacggccgac

SEQ ID NO: 10459 - RNA, 21 nt, Artificial Sequence
  GATA2 Guide RNA
ccgucagaagagccggcaccu

SEQ ID NO: 10460 - RNA, 21 nt, Artificial Sequence
  GATA2 Guide RNA
ccucccagucggccgucagaa

SEQ ID NO: 10461 - RNA, 21 nt, Artificial Sequence
  GATA2 Guide RNA
cggccgucagaagagccggca

SEQ ID NO: 10462 - RNA, 21 nt, Artificial Sequence
  GATA2 Guide RNA
cggcucuucugacggccgacu

SEQ ID NO: 10463 - RNA, 21 nt, Artificial Sequence
  GATA2 Guide RNA
cgucagaagagccggcaccug

SEQ ID NO: 10464 - RNA, 21 nt, Artificial Sequence
  GATA2 Guide RNA
cucccagucggccgucagaag

SEQ ID NO: 10465 - RNA, 21 nt, Artificial Sequence
  GATA2 Guide RNA
cucuucugacggccgacuggg

SEQ ID NO: 10466 - RNA, 21 nt, Artificial Sequence
  GATA2 Guide RNA
cugacggccgacugggagggc

SEQ ID NO: 10467 - RNA, 21 nt, Artificial Sequence
  GATA2 Guide RNA
cuucugacggccgacugggag

SEQ ID NO: 10468 - RNA, 21 nt, Artificial Sequence
  GATA2 Guide RNA
cuugcccucccagucggccgu

SEQ ID NO: 10469 - RNA, 21 nt, Artificial Sequence
  GATA2 Guide RNA
gacggccgacugggagggcaa

SEQ ID NO: 10470 - RNA, 21 nt, Artificial Sequence
  GATA2 Guide RNA
gcccucccagucggccgucag

SEQ ID NO: 10471 - RNA, 21 nt, Artificial Sequence
  GATA2 Guide RNA
gccggcucuucugacggccga

SEQ ID NO: 10472 - RNA, 21 nt, Artificial Sequence
  GATA2 Guide RNA
gccgucagaagagccggcacc

SEQ ID NO: 10473 - RNA, 21 nt, Artificial Sequence
  GATA2 Guide RNA
gcucuucugacggccgacugg

SEQ ID NO: 10474 - RNA, 21 nt, Artificial Sequence
  GATA2 Guide RNA
ggccgucagaagagccggcac

SEQ ID NO: 10475 - RNA, 21 nt, Artificial Sequence
  GATA2 Guide RNA
ggcucuucugacggccgacug

SEQ ID NO: 10476 - RNA, 21 nt, Artificial Sequence
  GATA2 Guide RNA
ggugccggcucuucugacggc

SEQ ID NO: 10477 - RNA, 21 nt, Artificial Sequence
  GATA2 Guide RNA
gucagaagagccggcaccugu

SEQ ID NO: 10478 - RNA, 21 nt, Artificial Sequence
  GATA2 Guide RNA
gucggccgucagaagagccgg

SEQ ID NO: 10479 - RNA, 21 nt, Artificial Sequence
  GATA2 Guide RNA
gugccggcucuucugacggcc

SEQ ID NO: 10480 - RNA, 21 nt, Artificial Sequence
  GATA2 Guide RNA
ucccagucggccgucagaaga

SEQ ID NO: 10481 - RNA, 21 nt, Artificial Sequence
  GATA2 Guide RNA
ucggccgucagaagagccggc

SEQ ID NO: 10482 - RNA, 21 nt, Artificial Sequence
  GATA2 Guide RNA
ucugacggccgacugggaggg

SEQ ID NO: 10483 - RNA, 21 nt, Artificial Sequence
  GATA2 Guide RNA
ucuucugacggccgacuggga

SEQ ID NO: 10484 - RNA, 21 nt, Artificial Sequence
  GATA2 Guide RNA
ugacggccgacugggagggca

SEQ ID NO: 10485 - RNA, 21 nt, Artificial Sequence
  GATA2 Guide RNA
ugcccucccagucggccguca

SEQ ID NO: 10486 - RNA, 21 nt, Artificial Sequence
  GATA2 Guide RNA
ugccggcucuucugacggccg

SEQ ID NO: 10487 - RNA, 21 nt, Artificial Sequence
  GATA2 Guide RNA
uucugacggccgacugggagg

SEQ ID NO: 10488 - RNA, 21 nt, Artificial Sequence
  GATA2 Guide RNA
uugcccucccagucggccguc

SEQ ID NO: 10489 - RNA, 22 nt, Artificial Sequence
  GATA2 Guide RNA
aacaggugccggcucuucugac

SEQ ID NO: 10490 - RNA, 22 nt, Artificial Sequence
  GATA2 Guide RNA
acaggugccggcucuucugacg

SEQ ID NO: 10491 - RNA, 22 nt, Artificial Sequence
  GATA2 Guide RNA
acggccgacugggagggcaagg

SEQ ID NO: 10492 - RNA, 22 nt, Artificial Sequence
  GATA2 Guide RNA
aggugccggcucuucugacggc

SEQ ID NO: 10493 - RNA, 22 nt, Artificial Sequence
  GATA2 Guide RNA
agucggccgucagaagagccgg

SEQ ID NO: 10494 - RNA, 22 nt, Artificial Sequence
  GATA2 Guide RNA
caacaggugccggcucuucuga

SEQ ID NO: 10495 - RNA, 22 nt, Artificial Sequence
  GATA2 Guide RNA
cacaacaggugccggcucuucu

SEQ ID NO: 10496 - RNA, 22 nt, Artificial Sequence
  GATA2 Guide RNA
caggugccggcucuucugacgg

SEQ ID NO: 10497 - RNA, 22 nt, Artificial Sequence
  GATA2 Guide RNA
cagucggccgucagaagagccg

SEQ ID NO: 10498 - RNA, 22 nt, Artificial Sequence
  GATA2 Guide RNA
ccagucggccgucagaagagcc

SEQ ID NO: 10499 - RNA, 22 nt, Artificial Sequence
  GATA2 Guide RNA
cccagucggccgucagaagagc

SEQ ID NO: 10500 - RNA, 22 nt, Artificial Sequence
  GATA2 Guide RNA
cccucccagucggccgucagaa

SEQ ID NO: 10501 - RNA, 22 nt, Artificial Sequence
  GATA2 Guide RNA
ccggcucuucugacggccgacu

SEQ ID NO: 10502 - RNA, 22 nt, Artificial Sequence
  GATA2 Guide RNA
ccgucagaagagccggcaccug

SEQ ID NO: 10503 - RNA, 22 nt, Artificial Sequence
  GATA2 Guide RNA
ccucccagucggccgucagaag

SEQ ID NO: 10504 - RNA, 22 nt, Artificial Sequence
  GATA2 Guide RNA
ccuugcccucccagucggccgu

SEQ ID NO: 10505 - RNA, 22 nt, Artificial Sequence
  GATA2 Guide RNA
cggccgucagaagagccggcac

SEQ ID NO: 10506 - RNA, 22 nt, Artificial Sequence
  GATA2 Guide RNA
cggcucuucugacggccgacug

SEQ ID NO: 10507 - RNA, 22 nt, Artificial Sequence
  GATA2 Guide RNA
cgucagaagagccggcaccugu

SEQ ID NO: 10508 - RNA, 22 nt, Artificial Sequence
  GATA2 Guide RNA
cucccagucggccgucagaaga

SEQ ID NO: 10509 - RNA, 22 nt, Artificial Sequence
  GATA2 Guide RNA
cucuucugacggccgacuggga

SEQ ID NO: 10510 - RNA, 22 nt, Artificial Sequence
  GATA2 Guide RNA
cugacggccgacugggagggca

SEQ ID NO: 10511 - RNA, 22 nt, Artificial Sequence
  GATA2 Guide RNA
cuucugacggccgacugggagg

SEQ ID NO: 10512 - RNA, 22 nt, Artificial Sequence
  GATA2 Guide RNA
cuugcccucccagucggccguc

SEQ ID NO: 10513 - RNA, 22 nt, Artificial Sequence
  GATA2 Guide RNA
gacggccgacugggagggcaag

SEQ ID NO: 10514 - RNA, 22 nt, Artificial Sequence
  GATA2 Guide RNA
gcacaacaggugccggcucuuc

SEQ ID NO: 10515 - RNA, 22 nt, Artificial Sequence
  GATA2 Guide RNA
gcccucccagucggccgucaga

SEQ ID NO: 10516 - RNA, 22 nt, Artificial Sequence
  GATA2 Guide RNA
gccggcucuucugacggccgac

SEQ ID NO: 10517 - RNA, 22 nt, Artificial Sequence
  GATA2 Guide RNA
gccgucagaagagccggcaccu

SEQ ID NO: 10518 - RNA, 22 nt, Artificial Sequence
  GATA2 Guide RNA
gcucuucugacggccgacuggg

SEQ ID NO: 10519 - RNA, 22 nt, Artificial Sequence
  GATA2 Guide RNA
ggccgucagaagagccggcacc

SEQ ID NO: 10520 - RNA, 22 nt, Artificial Sequence
  GATA2 Guide RNA
ggcucuucugacggccgacugg

SEQ ID NO: 10521 - RNA, 22 nt, Artificial Sequence
  GATA2 Guide RNA
ggugccggcucuucugacggcc

SEQ ID NO: 10522 - RNA, 22 nt, Artificial Sequence
  GATA2 Guide RNA
gucagaagagccggcaccuguu

SEQ ID NO: 10523 - RNA, 22 nt, Artificial Sequence
  GATA2 Guide RNA
gucggccgucagaagagccggc

SEQ ID NO: 10524 - RNA, 22 nt, Artificial Sequence
  GATA2 Guide RNA
gugccggcucuucugacggccg

SEQ ID NO: 10525 - RNA, 22 nt, Artificial Sequence
  GATA2 Guide RNA
ucccagucggccgucagaagag

SEQ ID NO: 10526 - RNA, 22 nt, Artificial Sequence
  GATA2 Guide RNA
ucggccgucagaagagccggca

SEQ ID NO: 10527 - RNA, 22 nt, Artificial Sequence
  GATA2 Guide RNA
ucugacggccgacugggagggc

SEQ ID NO: 10528 - RNA, 22 nt, Artificial Sequence
  GATA2 Guide RNA
ucuucugacggccgacugggag

SEQ ID NO: 10529 - RNA, 22 nt, Artificial Sequence
  GATA2 Guide RNA
ugacggccgacugggagggcaa

SEQ ID NO: 10530 - RNA, 22 nt, Artificial Sequence
  GATA2 Guide RNA
ugcccucccagucggccgucag

SEQ ID NO: 10531 - RNA, 22 nt, Artificial Sequence
  GATA2 Guide RNA
ugccggcucuucugacggccga

SEQ ID NO: 10532 - RNA, 22 nt, Artificial Sequence
  GATA2 Guide RNA
uucugacggccgacugggaggg

SEQ ID NO: 10533 - RNA, 22 nt, Artificial Sequence
  GATA2 Guide RNA
uugcccucccagucggccguca

SEQ ID NO: 10534 - RNA, 20 nt, Artificial Sequence
  GATA2 Guide RNA
acgcugccuugcccucccag

SEQ ID NO: 10535 - RNA, 20 nt, Artificial Sequence
  GATA2 Guide RNA
aggugccggcucuucuggcg

SEQ ID NO: 10536 - RNA, 20 nt, Artificial Sequence
  GATA2 Guide RNA
agucggccgcccgccagaag

SEQ ID NO: 10537 - RNA, 20 nt, Artificial Sequence
  GATA2 Guide RNA
cagucggccgcccgccagaa

SEQ ID NO: 10538 - RNA, 20 nt, Artificial Sequence
  GATA2 Guide RNA
ccagucggccgcccgccaga

SEQ ID NO: 10539 - RNA, 20 nt, Artificial Sequence
  GATA2 Guide RNA
ccgacugggagggcaaggca

SEQ ID NO: 10540 - RNA, 20 nt, Artificial Sequence
  GATA2 Guide RNA
ccgcccgccagaagagccgg

SEQ ID NO: 10541 - RNA, 20 nt, Artificial Sequence
  GATA2 Guide RNA
ccggcucuucuggcgggcgg

SEQ ID NO: 10542 - RNA, 20 nt, Artificial Sequence
  GATA2 Guide RNA
cgcccgccagaagagccggc

SEQ ID NO: 10543 - RNA, 20 nt, Artificial Sequence
  GATA2 Guide RNA
cgcugccuugcccucccagu

SEQ ID NO: 10544 - RNA, 20 nt, Artificial Sequence
  GATA2 Guide RNA
cggccgcccgccagaagagc

SEQ ID NO: 10545 - RNA, 20 nt, Artificial Sequence
  GATA2 Guide RNA
cggcucuucuggcgggcggc

SEQ ID NO: 10546 - RNA, 20 nt, Artificial Sequence
  GATA2 Guide RNA
cucuucuggcgggcggccga

SEQ ID NO: 10547 - RNA, 20 nt, Artificial Sequence
  GATA2 Guide RNA
cuucuggcgggcggccgacu

SEQ ID NO: 10548 - RNA, 20 nt, Artificial Sequence
  GATA2 Guide RNA
gcccgccagaagagccggca

SEQ ID NO: 10549 - RNA, 20 nt, Artificial Sequence
  GATA2 Guide RNA
gccgacugggagggcaaggc

SEQ ID NO: 10550 - RNA, 20 nt, Artificial Sequence
  GATA2 Guide RNA
gccgcccgccagaagagccg

SEQ ID NO: 10551 - RNA, 20 nt, Artificial Sequence
  GATA2 Guide RNA
gccggcucuucuggcgggcg

SEQ ID NO: 10552 - RNA, 20 nt, Artificial Sequence
  GATA2 Guide RNA
gcucuucuggcgggcggccg

SEQ ID NO: 10553 - RNA, 20 nt, Artificial Sequence
  GATA2 Guide RNA
ggccgcccgccagaagagcc

SEQ ID NO: 10554 - RNA, 20 nt, Artificial Sequence
  GATA2 Guide RNA
ggcucuucuggcgggcggcc

SEQ ID NO: 10555 - RNA, 20 nt, Artificial Sequence
  GATA2 Guide RNA
ggugccggcucuucuggcgg

SEQ ID NO: 10556 - RNA, 20 nt, Artificial Sequence
  GATA2 Guide RNA
gucggccgcccgccagaaga

SEQ ID NO: 10557 - RNA, 20 nt, Artificial Sequence
  GATA2 Guide RNA
gugccggcucuucuggcggg

SEQ ID NO: 10558 - RNA, 20 nt, Artificial Sequence
  GATA2 Guide RNA
ucccagucggccgcccgcca

SEQ ID NO: 10559 - RNA, 20 nt, Artificial Sequence
  GATA2 Guide RNA
ucggccgcccgccagaagag

SEQ ID NO: 10560 - RNA, 20 nt, Artificial Sequence
  GATA2 Guide RNA
ucuggcgggcggccgacugg

SEQ ID NO: 10561 - RNA, 20 nt, Artificial Sequence
  GATA2 Guide RNA
ucuucuggcgggcggccgac

SEQ ID NO: 10562 - RNA, 20 nt, Artificial Sequence
  GATA2 Guide RNA
ugccggcucuucuggcgggc

SEQ ID NO: 10563 - RNA, 20 nt, Artificial Sequence
  GATA2 Guide RNA
uggcgggcggccgacuggga

SEQ ID NO: 10564 - RNA, 20 nt, Artificial Sequence
  GATA2 Guide RNA
uucuggcgggcggccgacug

SEQ ID NO: 10565 - RNA, 21 nt, Artificial Sequence
  GATA2 Guide RNA
acgcugccuugcccucccagu

SEQ ID NO: 10566 - RNA, 21 nt, Artificial Sequence
  GATA2 Guide RNA
aggugccggcucuucuggcgg

SEQ ID NO: 10567 - RNA, 21 nt, Artificial Sequence
  GATA2 Guide RNA
agucggccgcccgccagaaga

SEQ ID NO: 10568 - RNA, 21 nt, Artificial Sequence
  GATA2 Guide RNA
caggugccggcucuucuggcg

SEQ ID NO: 10569 - RNA, 21 nt, Artificial Sequence
  GATA2 Guide RNA
cagucggccgcccgccagaag

SEQ ID NO: 10570 - RNA, 21 nt, Artificial Sequence
  GATA2 Guide RNA
ccagucggccgcccgccagaa

SEQ ID NO: 10571 - RNA, 21 nt, Artificial Sequence
  GATA2 Guide RNA
ccgacugggagggcaaggcag

SEQ ID NO: 10572 - RNA, 21 nt, Artificial Sequence
  GATA2 Guide RNA
cgcccgccagaagagccggca

SEQ ID NO: 10573 - RNA, 21 nt, Artificial Sequence
  GATA2 Guide RNA
cucuucuggcgggcggccgac

SEQ ID NO: 10574 - RNA, 21 nt, Artificial Sequence
  GATA2 Guide RNA
cuucuggcgggcggccgacug

SEQ ID NO: 10575 - RNA, 21 nt, Artificial Sequence
  GATA2 Guide RNA
gacgcugccuugcccucccag

SEQ ID NO: 10576 - RNA, 21 nt, Artificial Sequence
  GATA2 Guide RNA
gcccgccagaagagccggcac

SEQ ID NO: 10577 - RNA, 21 nt, Artificial Sequence
  GATA2 Guide RNA
gccgacugggagggcaaggca

SEQ ID NO: 10578 - RNA, 21 nt, Artificial Sequence
  GATA2 Guide RNA
gcucuucuggcgggcggccga

SEQ ID NO: 10579 - RNA, 21 nt, Artificial Sequence
  GATA2 Guide RNA
ggugccggcucuucuggcggg

SEQ ID NO: 10580 - RNA, 21 nt, Artificial Sequence
  GATA2 Guide RNA
gucggccgcccgccagaagag

SEQ ID NO: 10581 - RNA, 21 nt, Artificial Sequence
  GATA2 Guide RNA
gugccggcucuucuggcgggc

SEQ ID NO: 10582 - RNA, 21 nt, Artificial Sequence
  GATA2 Guide RNA
ucggccgcccgccagaagagc

SEQ ID NO: 10583 - RNA, 21 nt, Artificial Sequence
  GATA2 Guide RNA
ucuucuggcgggcggccgacu

SEQ ID NO: 10584 - RNA, 21 nt, Artificial Sequence
  GATA2 Guide RNA
ugccggcucuucuggcgggcg

SEQ ID NO: 10585 - RNA, 21 nt, Artificial Sequence
  GATA2 Guide RNA
uucuggcgggcggccgacugg

SEQ ID NO: 10586 - RNA, 22 nt, Artificial Sequence
  GATA2 Guide RNA
acaggugccggcucuucuggcg

SEQ ID NO: 10587 - RNA, 22 nt, Artificial Sequence
  GATA2 Guide RNA
aggugccggcucuucuggcggg

SEQ ID NO: 10588 - RNA, 22 nt, Artificial Sequence
  GATA2 Guide RNA
agucggccgcccgccagaagag

SEQ ID NO: 10589 - RNA, 22 nt, Artificial Sequence
  GATA2 Guide RNA
caggugccggcucuucuggcgg

SEQ ID NO: 10590 - RNA, 22 nt, Artificial Sequence
  GATA2 Guide RNA
cagucggccgcccgccagaaga

SEQ ID NO: 10591 - RNA, 22 nt, Artificial Sequence
  GATA2 Guide RNA
ccagucggccgcccgccagaag

SEQ ID NO: 10592 - RNA, 22 nt, Artificial Sequence
  GATA2 Guide RNA
cccagucggccgcccgccagaa

SEQ ID NO: 10593 - RNA, 22 nt, Artificial Sequence
  GATA2 Guide RNA
ccgacugggagggcaaggcagc

SEQ ID NO: 10594 - RNA, 22 nt, Artificial Sequence
  GATA2 Guide RNA
ccgcccgccagaagagccggca

SEQ ID NO: 10595 - RNA, 22 nt, Artificial Sequence
  GATA2 Guide RNA
cgcccgccagaagagccggcac

SEQ ID NO: 10596 - RNA, 22 nt, Artificial Sequence
  GATA2 Guide RNA
cucuucuggcgggcggccgacu

SEQ ID NO: 10597 - RNA, 22 nt, Artificial Sequence
  GATA2 Guide RNA
cuucuggcgggcggccgacugg

SEQ ID NO: 10598 - RNA, 22 nt, Artificial Sequence
  GATA2 Guide RNA
gacgcugccuugcccucccagu

SEQ ID NO: 10599 - RNA, 22 nt, Artificial Sequence
  GATA2 Guide RNA
gcccgccagaagagccggcacc

SEQ ID NO: 10600 - RNA, 22 nt, Artificial Sequence
  GATA2 Guide RNA
gccgacugggagggcaaggcag

SEQ ID NO: 10601 - RNA, 22 nt, Artificial Sequence
  GATA2 Guide RNA
gcucuucuggcgggcggccgac

SEQ ID NO: 10602 - RNA, 22 nt, Artificial Sequence
  GATA2 Guide RNA
ggcucuucuggcgggcggccga

SEQ ID NO: 10603 - RNA, 22 nt, Artificial Sequence
  GATA2 Guide RNA
gggcggccgacugggagggcaa

SEQ ID NO: 10604 - RNA, 22 nt, Artificial Sequence
  GATA2 Guide RNA
ggugccggcucuucuggcgggc

SEQ ID NO: 10605 - RNA, 22 nt, Artificial Sequence
  GATA2 Guide RNA
gucggccgcccgccagaagagc

SEQ ID NO: 10606 - RNA, 22 nt, Artificial Sequence
  GATA2 Guide RNA
gugccggcucuucuggcgggcg

SEQ ID NO: 10607 - RNA, 22 nt, Artificial Sequence
  GATA2 Guide RNA
ucccagucggccgcccgccaga

SEQ ID NO: 10608 - RNA, 22 nt, Artificial Sequence
  GATA2 Guide RNA
ucggccgcccgccagaagagcc

SEQ ID NO: 10609 - RNA, 22 nt, Artificial Sequence
  GATA2 Guide RNA
ucuggcgggcggccgacuggga

SEQ ID NO: 10610 - RNA, 22 nt, Artificial Sequence
  GATA2 Guide RNA
ucuucuggcgggcggccgacug

SEQ ID NO: 10611 - RNA, 22 nt, Artificial Sequence
  GATA2 Guide RNA
ugacgcugccuugcccucccag

SEQ ID NO: 10612 - RNA, 22 nt, Artificial Sequence
  GATA2 Guide RNA
ugccggcucuucuggcgggcgg

SEQ ID NO: 10613 - RNA, 22 nt, Artificial Sequence
  GATA2 Guide RNA
uucuggcgggcggccgacuggg

SEQ ID NO: 10614 - RNA, 22 nt, Artificial Sequence
  GATA2 Guide RNA
uugcccucccagucggccgccc

SEQ ID NO: 10615 - RNA, 20 nt, Artificial Sequence
  GATA2 Guide RNA
aggccgacugggagggcaag

SEQ ID NO: 10616 - RNA, 20 nt, Artificial Sequence
  GATA2 Guide RNA
aggugccggcucuucuggag

SEQ ID NO: 10617 - RNA, 20 nt, Artificial Sequence
  GATA2 Guide RNA
agucggccuccagaagagcc

SEQ ID NO: 10618 - RNA, 20 nt, Artificial Sequence
  GATA2 Guide RNA
caggugccggcucuucugga

SEQ ID NO: 10619 - RNA, 20 nt, Artificial Sequence
  GATA2 Guide RNA
cagucggccuccagaagagc

SEQ ID NO: 10620 - RNA, 20 nt, Artificial Sequence
  GATA2 Guide RNA
ccagucggccuccagaagag

SEQ ID NO: 10621 - RNA, 20 nt, Artificial Sequence
  GATA2 Guide RNA
cccagucggccuccagaaga

SEQ ID NO: 10622 - RNA, 20 nt, Artificial Sequence
  GATA2 Guide RNA
cccucccagucggccuccag

SEQ ID NO: 10623 - RNA, 20 nt, Artificial Sequence
  GATA2 Guide RNA
ccggcucuucuggaggccga

SEQ ID NO: 10624 - RNA, 20 nt, Artificial Sequence
  GATA2 Guide RNA
ccuccagaagagccggcacc

SEQ ID NO: 10625 - RNA, 20 nt, Artificial Sequence
  GATA2 Guide RNA
ccucccagucggccuccaga

SEQ ID NO: 10626 - RNA, 20 nt, Artificial Sequence
  GATA2 Guide RNA
cggccuccagaagagccggc

SEQ ID NO: 10627 - RNA, 20 nt, Artificial Sequence
  GATA2 Guide RNA
cggcucuucuggaggccgac

SEQ ID NO: 10628 - RNA, 20 nt, Artificial Sequence
  GATA2 Guide RNA
cuccagaagagccggcaccu

SEQ ID NO: 10629 - RNA, 20 nt, Artificial Sequence
  GATA2 Guide RNA
cucccagucggccuccagaa

SEQ ID NO: 10630 - RNA, 20 nt, Artificial Sequence
  GATA2 Guide RNA
cucuucuggaggccgacugg

SEQ ID NO: 10631 - RNA, 20 nt, Artificial Sequence
  GATA2 Guide RNA
cuggaggccgacugggaggg

SEQ ID NO: 10632 - RNA, 20 nt, Artificial Sequence
  GATA2 Guide RNA
cuucuggaggccgacuggga

SEQ ID NO: 10633 - RNA, 20 nt, Artificial Sequence
  GATA2 Guide RNA
cuugcccucccagucggccu

SEQ ID NO: 10634 - RNA, 20 nt, Artificial Sequence
  GATA2 Guide RNA
gaggccgacugggagggcaa

SEQ ID NO: 10635 - RNA, 20 nt, Artificial Sequence
  GATA2 Guide RNA
gcccucccagucggccucca

SEQ ID NO: 10636 - RNA, 20 nt, Artificial Sequence
  GATA2 Guide RNA
gccggcucuucuggaggccg

SEQ ID NO: 10637 - RNA, 20 nt, Artificial Sequence
  GATA2 Guide RNA
gccuccagaagagccggcac

SEQ ID NO: 10638 - RNA, 20 nt, Artificial Sequence
  GATA2 Guide RNA
gcucuucuggaggccgacug

SEQ ID NO: 10639 - RNA, 20 nt, Artificial Sequence
  GATA2 Guide RNA
ggaggccgacugggagggca

SEQ ID NO: 10640 - RNA, 20 nt, Artificial Sequence
  GATA2 Guide RNA
ggccuccagaagagccggca

SEQ ID NO: 10641 - RNA, 20 nt, Artificial Sequence
  GATA2 Guide RNA
ggcucuucuggaggccgacu

SEQ ID NO: 10642 - RNA, 20 nt, Artificial Sequence
  GATA2 Guide RNA
ggugccggcucuucuggagg

SEQ ID NO: 10643 - RNA, 20 nt, Artificial Sequence
  GATA2 Guide RNA
gucggccuccagaagagccg

SEQ ID NO: 10644 - RNA, 20 nt, Artificial Sequence
  GATA2 Guide RNA
gugccggcucuucuggaggc

SEQ ID NO: 10645 - RNA, 20 nt, Artificial Sequence
  GATA2 Guide RNA
ucccagucggccuccagaag

SEQ ID NO: 10646 - RNA, 20 nt, Artificial Sequence
  GATA2 Guide RNA
ucggccuccagaagagccgg

SEQ ID NO: 10647 - RNA, 20 nt, Artificial Sequence
  GATA2 Guide RNA
ucuggaggccgacugggagg

SEQ ID NO: 10648 - RNA, 20 nt, Artificial Sequence
  GATA2 Guide RNA
ucuucuggaggccgacuggg

SEQ ID NO: 10649 - RNA, 20 nt, Artificial Sequence
  GATA2 Guide RNA
ugcccucccagucggccucc

SEQ ID NO: 10650 - RNA, 20 nt, Artificial Sequence
  GATA2 Guide RNA
ugccggcucuucuggaggcc

SEQ ID NO: 10651 - RNA, 20 nt, Artificial Sequence
  GATA2 Guide RNA
uggaggccgacugggagggc

SEQ ID NO: 10652 - RNA, 20 nt, Artificial Sequence
  GATA2 Guide RNA
uucuggaggccgacugggag

SEQ ID NO: 10653 - RNA, 20 nt, Artificial Sequence
  GATA2 Guide RNA
uugcccucccagucggccuc

SEQ ID NO: 10654 - RNA, 21 nt, Artificial Sequence
  GATA2 Guide RNA
acaggugccggcucuucugga

SEQ ID NO: 10655 - RNA, 21 nt, Artificial Sequence
  GATA2 Guide RNA
aggccgacugggagggcaagg

SEQ ID NO: 10656 - RNA, 21 nt, Artificial Sequence
  GATA2 Guide RNA
aggugccggcucuucuggagg

SEQ ID NO: 10657 - RNA, 21 nt, Artificial Sequence
  GATA2 Guide RNA
agucggccuccagaagagccg

SEQ ID NO: 10658 - RNA, 21 nt, Artificial Sequence
  GATA2 Guide RNA
caggugccggcucuucuggag

SEQ ID NO: 10659 - RNA, 21 nt, Artificial Sequence
  GATA2 Guide RNA
cagucggccuccagaagagcc

SEQ ID NO: 10660 - RNA, 21 nt, Artificial Sequence
  GATA2 Guide RNA
ccagucggccuccagaagagc

SEQ ID NO: 10661 - RNA, 21 nt, Artificial Sequence
  GATA2 Guide RNA
cccagucggccuccagaagag

SEQ ID NO: 10662 - RNA, 21 nt, Artificial Sequence
  GATA2 Guide RNA
cccucccagucggccuccaga

SEQ ID NO: 10663 - RNA, 21 nt, Artificial Sequence
  GATA2 Guide RNA
ccggcucuucuggaggccgac

SEQ ID NO: 10664 - RNA, 21 nt, Artificial Sequence
  GATA2 Guide RNA
ccuccagaagagccggcaccu

SEQ ID NO: 10665 - RNA, 21 nt, Artificial Sequence
  GATA2 Guide RNA
ccucccagucggccuccagaa

SEQ ID NO: 10666 - RNA, 21 nt, Artificial Sequence
  GATA2 Guide RNA
ccuugcccucccagucggccu

SEQ ID NO: 10667 - RNA, 21 nt, Artificial Sequence
  GATA2 Guide RNA
cggccuccagaagagccggca

SEQ ID NO: 10668 - RNA, 21 nt, Artificial Sequence
  GATA2 Guide RNA
cggcucuucuggaggccgacu

SEQ ID NO: 10669 - RNA, 21 nt, Artificial Sequence
  GATA2 Guide RNA
cuccagaagagccggcaccug

SEQ ID NO: 10670 - RNA, 21 nt, Artificial Sequence
  GATA2 Guide RNA
cucccagucggccuccagaag

SEQ ID NO: 10671 - RNA, 21 nt, Artificial Sequence
  GATA2 Guide RNA
cucuucuggaggccgacuggg

SEQ ID NO: 10672 - RNA, 21 nt, Artificial Sequence
  GATA2 Guide RNA
cuggaggccgacugggagggc

SEQ ID NO: 10673 - RNA, 21 nt, Artificial Sequence
  GATA2 Guide RNA
cuucuggaggccgacugggag

SEQ ID NO: 10674 - RNA, 21 nt, Artificial Sequence
  GATA2 Guide RNA
cuugcccucccagucggccuc

SEQ ID NO: 10675 - RNA, 21 nt, Artificial Sequence
  GATA2 Guide RNA
gaggccgacugggagggcaag

SEQ ID NO: 10676 - RNA, 21 nt, Artificial Sequence
  GATA2 Guide RNA
gcccucccagucggccuccag

SEQ ID NO: 10677 - RNA, 21 nt, Artificial Sequence
  GATA2 Guide RNA
gccggcucuucuggaggccga

SEQ ID NO: 10678 - RNA, 21 nt, Artificial Sequence
  GATA2 Guide RNA
gccuccagaagagccggcacc

SEQ ID NO: 10679 - RNA, 21 nt, Artificial Sequence
  GATA2 Guide RNA
gcucuucuggaggccgacugg

SEQ ID NO: 10680 - RNA, 21 nt, Artificial Sequence
  GATA2 Guide RNA
ggaggccgacugggagggcaa

SEQ ID NO: 10681 - RNA, 21 nt, Artificial Sequence
  GATA2 Guide RNA
ggccuccagaagagccggcac

SEQ ID NO: 10682 - RNA, 21 nt, Artificial Sequence
  GATA2 Guide RNA
ggcucuucuggaggccgacug

SEQ ID NO: 10683 - RNA, 21 nt, Artificial Sequence
  GATA2 Guide RNA
ggugccggcucuucuggaggc

SEQ ID NO: 10684 - RNA, 21 nt, Artificial Sequence
  GATA2 Guide RNA
gucggccuccagaagagccgg

SEQ ID NO: 10685 - RNA, 21 nt, Artificial Sequence
  GATA2 Guide RNA
gugccggcucuucuggaggcc

SEQ ID NO: 10686 - RNA, 21 nt, Artificial Sequence
  GATA2 Guide RNA
ucccagucggccuccagaaga

SEQ ID NO: 10687 - RNA, 21 nt, Artificial Sequence
  GATA2 Guide RNA
ucggccuccagaagagccggc

SEQ ID NO: 10688 - RNA, 21 nt, Artificial Sequence
  GATA2 Guide RNA
ucuggaggccgacugggaggg

SEQ ID NO: 10689 - RNA, 21 nt, Artificial Sequence
  GATA2 Guide RNA
ucuucuggaggccgacuggga

SEQ ID NO: 10690 - RNA, 21 nt, Artificial Sequence
  GATA2 Guide RNA
ugcccucccagucggccucca

SEQ ID NO: 10691 - RNA, 21 nt, Artificial Sequence
  GATA2 Guide RNA
ugccggcucuucuggaggccg

SEQ ID NO: 10692 - RNA, 21 nt, Artificial Sequence
  GATA2 Guide RNA
uggaggccgacugggagggca

SEQ ID NO: 10693 - RNA, 21 nt, Artificial Sequence
  GATA2 Guide RNA
uucuggaggccgacugggagg

SEQ ID NO: 10694 - RNA, 21 nt, Artificial Sequence
  GATA2 Guide RNA
uugcccucccagucggccucc

SEQ ID NO: 10695 - RNA, 22 nt, Artificial Sequence
  GATA2 Guide RNA
aacaggugccggcucuucugga

SEQ ID NO: 10696 - RNA, 22 nt, Artificial Sequence
  GATA2 Guide RNA
acaggugccggcucuucuggag

SEQ ID NO: 10697 - RNA, 22 nt, Artificial Sequence
  GATA2 Guide RNA
aggccgacugggagggcaaggc

SEQ ID NO: 10698 - RNA, 22 nt, Artificial Sequence
  GATA2 Guide RNA
aggugccggcucuucuggaggc

SEQ ID NO: 10699 - RNA, 22 nt, Artificial Sequence
  GATA2 Guide RNA
agucggccuccagaagagccgg

SEQ ID NO: 10700 - RNA, 22 nt, Artificial Sequence
  GATA2 Guide RNA
caggugccggcucuucuggagg

SEQ ID NO: 10701 - RNA, 22 nt, Artificial Sequence
  GATA2 Guide RNA
cagucggccuccagaagagccg

SEQ ID NO: 10702 - RNA, 22 nt, Artificial Sequence
  GATA2 Guide RNA
ccagucggccuccagaagagcc

SEQ ID NO: 10703 - RNA, 22 nt, Artificial Sequence
  GATA2 Guide RNA
cccagucggccuccagaagagc

SEQ ID NO: 10704 - RNA, 22 nt, Artificial Sequence
  GATA2 Guide RNA
cccucccagucggccuccagaa

SEQ ID NO: 10705 - RNA, 22 nt, Artificial Sequence
  GATA2 Guide RNA
ccggcucuucuggaggccgacu

SEQ ID NO: 10706 - RNA, 22 nt, Artificial Sequence
  GATA2 Guide RNA
ccuccagaagagccggcaccug

SEQ ID NO: 10707 - RNA, 22 nt, Artificial Sequence
  GATA2 Guide RNA
ccucccagucggccuccagaag

SEQ ID NO: 10708 - RNA, 22 nt, Artificial Sequence
  GATA2 Guide RNA
ccuugcccucccagucggccuc

SEQ ID NO: 10709 - RNA, 22 nt, Artificial Sequence
  GATA2 Guide RNA
cggccuccagaagagccggcac

SEQ ID NO: 10710 - RNA, 22 nt, Artificial Sequence
  GATA2 Guide RNA
cggcucuucuggaggccgacug

SEQ ID NO: 10711 - RNA, 22 nt, Artificial Sequence
  GATA2 Guide RNA
cuccagaagagccggcaccugu

SEQ ID NO: 10712 - RNA, 22 nt, Artificial Sequence
  GATA2 Guide RNA
cucccagucggccuccagaaga

SEQ ID NO: 10713 - RNA, 22 nt, Artificial Sequence
  GATA2 Guide RNA
cucuucuggaggccgacuggga

SEQ ID NO: 10714 - RNA, 22 nt, Artificial Sequence
  GATA2 Guide RNA
cuggaggccgacugggagggca

SEQ ID NO: 10715 - RNA, 22 nt, Artificial Sequence
  GATA2 Guide RNA
cuucuggaggccgacugggagg

SEQ ID NO: 10716 - RNA, 22 nt, Artificial Sequence
  GATA2 Guide RNA
cuugcccucccagucggccucc

SEQ ID NO: 10717 - RNA, 22 nt, Artificial Sequence
  GATA2 Guide RNA
gaggccgacugggagggcaagg

SEQ ID NO: 10718 - RNA, 22 nt, Artificial Sequence
  GATA2 Guide RNA
gcccucccagucggccuccaga

SEQ ID NO: 10719 - RNA, 22 nt, Artificial Sequence
  GATA2 Guide RNA
gccggcucuucuggaggccgac

SEQ ID NO: 10720 - RNA, 22 nt, Artificial Sequence
  GATA2 Guide RNA
gccuccagaagagccggcaccu

SEQ ID NO: 10721 - RNA, 22 nt, Artificial Sequence
  GATA2 Guide RNA
gccuugcccucccagucggccu

SEQ ID NO: 10722 - RNA, 22 nt, Artificial Sequence
  GATA2 Guide RNA
gcucuucuggaggccgacuggg

SEQ ID NO: 10723 - RNA, 22 nt, Artificial Sequence
  GATA2 Guide RNA
ggaggccgacugggagggcaag

SEQ ID NO: 10724 - RNA, 22 nt, Artificial Sequence
  GATA2 Guide RNA
ggccuccagaagagccggcacc

SEQ ID NO: 10725 - RNA, 22 nt, Artificial Sequence
  GATA2 Guide RNA
ggcucuucuggaggccgacugg

SEQ ID NO: 10726 - RNA, 22 nt, Artificial Sequence
  GATA2 Guide RNA
ggugccggcucuucuggaggcc

SEQ ID NO: 10727 - RNA, 22 nt, Artificial Sequence
  GATA2 Guide RNA
gucggccuccagaagagccggc

SEQ ID NO: 10728 - RNA, 22 nt, Artificial Sequence
  GATA2 Guide RNA
gugccggcucuucuggaggccg

SEQ ID NO: 10729 - RNA, 22 nt, Artificial Sequence
  GATA2 Guide RNA
ucccagucggccuccagaagag

SEQ ID NO: 10730 - RNA, 22 nt, Artificial Sequence
  GATA2 Guide RNA
ucggccuccagaagagccggca

SEQ ID NO: 10731 - RNA, 22 nt, Artificial Sequence
  GATA2 Guide RNA
ucuggaggccgacugggagggc

SEQ ID NO: 10732 - RNA, 22 nt, Artificial Sequence
  GATA2 Guide RNA
ucuucuggaggccgacugggag

SEQ ID NO: 10733 - RNA, 22 nt, Artificial Sequence
  GATA2 Guide RNA
ugcccucccagucggccuccag

SEQ ID NO: 10734 - RNA, 22 nt, Artificial Sequence
  GATA2 Guide RNA
ugccggcucuucuggaggccga

SEQ ID NO: 10735 - RNA, 22 nt, Artificial Sequence
  GATA2 Guide RNA
uggaggccgacugggagggcaa

SEQ ID NO: 10736 - RNA, 22 nt, Artificial Sequence
  GATA2 Guide RNA
uucuggaggccgacugggaggg

SEQ ID NO: 10737 - RNA, 22 nt, Artificial Sequence
  GATA2 Guide RNA
uugcccucccagucggccucca

SEQ ID NO: 10738 - RNA, 20 nt, Artificial Sequence
  GATA2 Guide RNA
aggugccggcucuucuggug

SEQ ID NO: 10739 - RNA, 20 nt, Artificial Sequence
  GATA2 Guide RNA
agucggccaccagaagagcc

SEQ ID NO: 10740 - RNA, 20 nt, Artificial Sequence
  GATA2 Guide RNA
caccagaagagccggcaccu

SEQ ID NO: 10741 - RNA, 20 nt, Artificial Sequence
  GATA2 Guide RNA
caggugccggcucuucuggu

SEQ ID NO: 10742 - RNA, 20 nt, Artificial Sequence
  GATA2 Guide RNA
cagucggccaccagaagagc

SEQ ID NO: 10743 - RNA, 20 nt, Artificial Sequence
  GATA2 Guide RNA
ccaccagaagagccggcacc

SEQ ID NO: 10744 - RNA, 20 nt, Artificial Sequence
  GATA2 Guide RNA
ccagucggccaccagaagag

SEQ ID NO: 10745 - RNA, 20 nt, Artificial Sequence
  GATA2 Guide RNA
cccagucggccaccagaaga

SEQ ID NO: 10746 - RNA, 20 nt, Artificial Sequence
  GATA2 Guide RNA
cccucccagucggccaccag

SEQ ID NO: 10747 - RNA, 20 nt, Artificial Sequence
  GATA2 Guide RNA
ccggcucuucugguggccga

SEQ ID NO: 10748 - RNA, 20 nt, Artificial Sequence
  GATA2 Guide RNA
ccucccagucggccaccaga

SEQ ID NO: 10749 - RNA, 20 nt, Artificial Sequence
  GATA2 Guide RNA
cggccaccagaagagccggc

SEQ ID NO: 10750 - RNA, 20 nt, Artificial Sequence
  GATA2 Guide RNA
cggcucuucugguggccgac

SEQ ID NO: 10751 - RNA, 20 nt, Artificial Sequence
  GATA2 Guide RNA
cucccagucggccaccagaa

SEQ ID NO: 10752 - RNA, 20 nt, Artificial Sequence
  GATA2 Guide RNA
cucuucugguggccgacugg

SEQ ID NO: 10753 - RNA, 20 nt, Artificial Sequence
  GATA2 Guide RNA
cugguggccgacugggaggg

SEQ ID NO: 10754 - RNA, 20 nt, Artificial Sequence
  GATA2 Guide RNA
cuucugguggccgacuggga

SEQ ID NO: 10755 - RNA, 20 nt, Artificial Sequence
  GATA2 Guide RNA
cuugcccucccagucggcca

SEQ ID NO: 10756 - RNA, 20 nt, Artificial Sequence
  GATA2 Guide RNA
gccaccagaagagccggcac

SEQ ID NO: 10757 - RNA, 20 nt, Artificial Sequence
  GATA2 Guide RNA
gcccucccagucggccacca

SEQ ID NO: 10758 - RNA, 20 nt, Artificial Sequence
  GATA2 Guide RNA
gccggcucuucugguggccg

SEQ ID NO: 10759 - RNA, 20 nt, Artificial Sequence
  GATA2 Guide RNA
gcucuucugguggccgacug

SEQ ID NO: 10760 - RNA, 20 nt, Artificial Sequence
  GATA2 Guide RNA
ggccaccagaagagccggca

SEQ ID NO: 10761 - RNA, 20 nt, Artificial Sequence
  GATA2 Guide RNA
ggcucuucugguggccgacu

SEQ ID NO: 10762 - RNA, 20 nt, Artificial Sequence
  GATA2 Guide RNA
ggugccggcucuucuggugg

SEQ ID NO: 10763 - RNA, 20 nt, Artificial Sequence
  GATA2 Guide RNA
gguggccgacugggagggca

SEQ ID NO: 10764 - RNA, 20 nt, Artificial Sequence
  GATA2 Guide RNA
gucggccaccagaagagccg

SEQ ID NO: 10765 - RNA, 20 nt, Artificial Sequence
  GATA2 Guide RNA
gugccggcucuucugguggc

SEQ ID NO: 10766 - RNA, 20 nt, Artificial Sequence
  GATA2 Guide RNA
guggccgacugggagggcaa

SEQ ID NO: 10767 - RNA, 20 nt, Artificial Sequence
  GATA2 Guide RNA
ucccagucggccaccagaag

SEQ ID NO: 10768 - RNA, 20 nt, Artificial Sequence
  GATA2 Guide RNA
ucggccaccagaagagccgg

SEQ ID NO: 10769 - RNA, 20 nt, Artificial Sequence
  GATA2 Guide RNA
ucugguggccgacugggagg

SEQ ID NO: 10770 - RNA, 20 nt, Artificial Sequence
  GATA2 Guide RNA
ucuucugguggccgacuggg

SEQ ID NO: 10771 - RNA, 20 nt, Artificial Sequence
  GATA2 Guide RNA
ugcccucccagucggccacc

SEQ ID NO: 10772 - RNA, 20 nt, Artificial Sequence
  GATA2 Guide RNA
ugccggcucuucugguggcc

SEQ ID NO: 10773 - RNA, 20 nt, Artificial Sequence
  GATA2 Guide RNA
uggccgacugggagggcaag

SEQ ID NO: 10774 - RNA, 20 nt, Artificial Sequence
  GATA2 Guide RNA
ugguggccgacugggagggc

SEQ ID NO: 10775 - RNA, 20 nt, Artificial Sequence
  GATA2 Guide RNA
uucugguggccgacugggag

SEQ ID NO: 10776 - RNA, 20 nt, Artificial Sequence
  GATA2 Guide RNA
uugcccucccagucggccac

SEQ ID NO: 10777 - RNA, 21 nt, Artificial Sequence
  GATA2 Guide RNA
acaggugccggcucuucuggu

SEQ ID NO: 10778 - RNA, 21 nt, Artificial Sequence
  GATA2 Guide RNA
aggugccggcucuucuggugg

SEQ ID NO: 10779 - RNA, 21 nt, Artificial Sequence
  GATA2 Guide RNA
agucggccaccagaagagccg

SEQ ID NO: 10780 - RNA, 21 nt, Artificial Sequence
  GATA2 Guide RNA
caccagaagagccggcaccug

SEQ ID NO: 10781 - RNA, 21 nt, Artificial Sequence
  GATA2 Guide RNA
caggugccggcucuucuggug

SEQ ID NO: 10782 - RNA, 21 nt, Artificial Sequence
  GATA2 Guide RNA
cagucggccaccagaagagcc

SEQ ID NO: 10783 - RNA, 21 nt, Artificial Sequence
  GATA2 Guide RNA
ccaccagaagagccggcaccu

SEQ ID NO: 10784 - RNA, 21 nt, Artificial Sequence
  GATA2 Guide RNA
ccagucggccaccagaagagc

SEQ ID NO: 10785 - RNA, 21 nt, Artificial Sequence
  GATA2 Guide RNA
cccagucggccaccagaagag

SEQ ID NO: 10786 - RNA, 21 nt, Artificial Sequence
  GATA2 Guide RNA
cccucccagucggccaccaga

SEQ ID NO: 10787 - RNA, 21 nt, Artificial Sequence
  GATA2 Guide RNA
ccggcucuucugguggccgac

SEQ ID NO: 10788 - RNA, 21 nt, Artificial Sequence
  GATA2 Guide RNA
ccucccagucggccaccagaa

SEQ ID NO: 10789 - RNA, 21 nt, Artificial Sequence
  GATA2 Guide RNA
ccuugcccucccagucggcca

SEQ ID NO: 10790 - RNA, 21 nt, Artificial Sequence
  GATA2 Guide RNA
cggccaccagaagagccggca

SEQ ID NO: 10791 - RNA, 21 nt, Artificial Sequence
  GATA2 Guide RNA
cggcucuucugguggccgacu

SEQ ID NO: 10792 - RNA, 21 nt, Artificial Sequence
  GATA2 Guide RNA
cucccagucggccaccagaag

SEQ ID NO: 10793 - RNA, 21 nt, Artificial Sequence
  GATA2 Guide RNA
cucuucugguggccgacuggg

SEQ ID NO: 10794 - RNA, 21 nt, Artificial Sequence
  GATA2 Guide RNA
cugguggccgacugggagggc

SEQ ID NO: 10795 - RNA, 21 nt, Artificial Sequence
  GATA2 Guide RNA
cuucugguggccgacugggag

SEQ ID NO: 10796 - RNA, 21 nt, Artificial Sequence
  GATA2 Guide RNA
cuugcccucccagucggccac

SEQ ID NO: 10797 - RNA, 21 nt, Artificial Sequence
  GATA2 Guide RNA
gccaccagaagagccggcacc

SEQ ID NO: 10798 - RNA, 21 nt, Artificial Sequence
  GATA2 Guide RNA
gcccucccagucggccaccag

SEQ ID NO: 10799 - RNA, 21 nt, Artificial Sequence
  GATA2 Guide RNA
gccggcucuucugguggccga

SEQ ID NO: 10800 - RNA, 21 nt, Artificial Sequence
  GATA2 Guide RNA
gcucuucugguggccgacugg

SEQ ID NO: 10801 - RNA, 21 nt, Artificial Sequence
  GATA2 Guide RNA
ggccaccagaagagccggcac

SEQ ID NO: 10802 - RNA, 21 nt, Artificial Sequence
  GATA2 Guide RNA
ggcucuucugguggccgacug

SEQ ID NO: 10803 - RNA, 21 nt, Artificial Sequence
  GATA2 Guide RNA
ggugccggcucuucugguggc

SEQ ID NO: 10804 - RNA, 21 nt, Artificial Sequence
  GATA2 Guide RNA
gguggccgacugggagggcaa

SEQ ID NO: 10805 - RNA, 21 nt, Artificial Sequence
  GATA2 Guide RNA
gucggccaccagaagagccgg

SEQ ID NO: 10806 - RNA, 21 nt, Artificial Sequence
  GATA2 Guide RNA
gugccggcucuucugguggcc

SEQ ID NO: 10807 - RNA, 21 nt, Artificial Sequence
  GATA2 Guide RNA
guggccgacugggagggcaag

SEQ ID NO: 10808 - RNA, 21 nt, Artificial Sequence
  GATA2 Guide RNA
ucccagucggccaccagaaga

SEQ ID NO: 10809 - RNA, 21 nt, Artificial Sequence
  GATA2 Guide RNA
ucggccaccagaagagccggc

SEQ ID NO: 10810 - RNA, 21 nt, Artificial Sequence
  GATA2 Guide RNA
ucugguggccgacugggaggg

SEQ ID NO: 10811 - RNA, 21 nt, Artificial Sequence
  GATA2 Guide RNA
ucuucugguggccgacuggga

SEQ ID NO: 10812 - RNA, 21 nt, Artificial Sequence
  GATA2 Guide RNA
ugcccucccagucggccacca

SEQ ID NO: 10813 - RNA, 21 nt, Artificial Sequence
  GATA2 Guide RNA
ugccggcucuucugguggccg

SEQ ID NO: 10814 - RNA, 21 nt, Artificial Sequence
  GATA2 Guide RNA
uggccgacugggagggcaagg

SEQ ID NO: 10815 - RNA, 21 nt, Artificial Sequence
  GATA2 Guide RNA
ugguggccgacugggagggca

SEQ ID NO: 10816 - RNA, 21 nt, Artificial Sequence
  GATA2 Guide RNA
uucugguggccgacugggagg

SEQ ID NO: 10817 - RNA, 21 nt, Artificial Sequence
  GATA2 Guide RNA
uugcccucccagucggccacc

SEQ ID NO: 10818 - RNA, 22 nt, Artificial Sequence
  GATA2 Guide RNA
aacaggugccggcucuucuggu

SEQ ID NO: 10819 - RNA, 22 nt, Artificial Sequence
  GATA2 Guide RNA
acaggugccggcucuucuggug

SEQ ID NO: 10820 - RNA, 22 nt, Artificial Sequence
  GATA2 Guide RNA
aggugccggcucuucugguggc

SEQ ID NO: 10821 - RNA, 22 nt, Artificial Sequence
  GATA2 Guide RNA
agucggccaccagaagagccgg

SEQ ID NO: 10822 - RNA, 22 nt, Artificial Sequence
  GATA2 Guide RNA
caccagaagagccggcaccugu

SEQ ID NO: 10823 - RNA, 22 nt, Artificial Sequence
  GATA2 Guide RNA
caggugccggcucuucuggugg

SEQ ID NO: 10824 - RNA, 22 nt, Artificial Sequence
  GATA2 Guide RNA
cagucggccaccagaagagccg

SEQ ID NO: 10825 - RNA, 22 nt, Artificial Sequence
  GATA2 Guide RNA
ccaccagaagagccggcaccug

SEQ ID NO: 10826 - RNA, 22 nt, Artificial Sequence
  GATA2 Guide RNA
ccagucggccaccagaagagcc

SEQ ID NO: 10827 - RNA, 22 nt, Artificial Sequence
  GATA2 Guide RNA
cccagucggccaccagaagagc

SEQ ID NO: 10828 - RNA, 22 nt, Artificial Sequence
  GATA2 Guide RNA
cccucccagucggccaccagaa

SEQ ID NO: 10829 - RNA, 22 nt, Artificial Sequence
  GATA2 Guide RNA
ccggcucuucugguggccgacu

SEQ ID NO: 10830 - RNA, 22 nt, Artificial Sequence
  GATA2 Guide RNA
ccucccagucggccaccagaag

SEQ ID NO: 10831 - RNA, 22 nt, Artificial Sequence
  GATA2 Guide RNA
ccuugcccucccagucggccac

SEQ ID NO: 10832 - RNA, 22 nt, Artificial Sequence
  GATA2 Guide RNA
cggccaccagaagagccggcac

SEQ ID NO: 10833 - RNA, 22 nt, Artificial Sequence
  GATA2 Guide RNA
cggcucuucugguggccgacug

SEQ ID NO: 10834 - RNA, 22 nt, Artificial Sequence
  GATA2 Guide RNA
cucccagucggccaccagaaga

SEQ ID NO: 10835 - RNA, 22 nt, Artificial Sequence
  GATA2 Guide RNA
cucuucugguggccgacuggga

SEQ ID NO: 10836 - RNA, 22 nt, Artificial Sequence
  GATA2 Guide RNA
cugguggccgacugggagggca

SEQ ID NO: 10837 - RNA, 22 nt, Artificial Sequence
  GATA2 Guide RNA
cuucugguggccgacugggagg

SEQ ID NO: 10838 - RNA, 22 nt, Artificial Sequence
  GATA2 Guide RNA
cuugcccucccagucggccacc

SEQ ID NO: 10839 - RNA, 22 nt, Artificial Sequence
  GATA2 Guide RNA
gccaccagaagagccggcaccu

SEQ ID NO: 10840 - RNA, 22 nt, Artificial Sequence
  GATA2 Guide RNA
gcccucccagucggccaccaga

SEQ ID NO: 10841 - RNA, 22 nt, Artificial Sequence
  GATA2 Guide RNA
gccggcucuucugguggccgac

SEQ ID NO: 10842 - RNA, 22 nt, Artificial Sequence
  GATA2 Guide RNA
gccuugcccucccagucggcca

SEQ ID NO: 10843 - RNA, 22 nt, Artificial Sequence
  GATA2 Guide RNA
gcucuucugguggccgacuggg

SEQ ID NO: 10844 - RNA, 22 nt, Artificial Sequence
  GATA2 Guide RNA
ggccaccagaagagccggcacc

SEQ ID NO: 10845 - RNA, 22 nt, Artificial Sequence
  GATA2 Guide RNA
ggcucuucugguggccgacugg

SEQ ID NO: 10846 - RNA, 22 nt, Artificial Sequence
  GATA2 Guide RNA
ggugccggcucuucugguggcc

SEQ ID NO: 10847 - RNA, 22 nt, Artificial Sequence
  GATA2 Guide RNA
gguggccgacugggagggcaag

SEQ ID NO: 10848 - RNA, 22 nt, Artificial Sequence
  GATA2 Guide RNA
gucggccaccagaagagccggc

SEQ ID NO: 10849 - RNA, 22 nt, Artificial Sequence
  GATA2 Guide RNA
gugccggcucuucugguggccg

SEQ ID NO: 10850 - RNA, 22 nt, Artificial Sequence
  GATA2 Guide RNA
guggccgacugggagggcaagg

SEQ ID NO: 10851 - RNA, 22 nt, Artificial Sequence
  GATA2 Guide RNA
ucccagucggccaccagaagag

SEQ ID NO: 10852 - RNA, 22 nt, Artificial Sequence
  GATA2 Guide RNA
ucggccaccagaagagccggca

SEQ ID NO: 10853 - RNA, 22 nt, Artificial Sequence
  GATA2 Guide RNA
ucugguggccgacugggagggc

SEQ ID NO: 10854 - RNA, 22 nt, Artificial Sequence
  GATA2 Guide RNA
ucuucugguggccgacugggag

SEQ ID NO: 10855 - RNA, 22 nt, Artificial Sequence
  GATA2 Guide RNA
ugcccucccagucggccaccag

SEQ ID NO: 10856 - RNA, 22 nt, Artificial Sequence
  GATA2 Guide RNA
ugccggcucuucugguggccga

SEQ ID NO: 10857 - RNA, 22 nt, Artificial Sequence
  GATA2 Guide RNA
uggccgacugggagggcaaggc

SEQ ID NO: 10858 - RNA, 22 nt, Artificial Sequence
  GATA2 Guide RNA
ugguggccgacugggagggcaa

SEQ ID NO: 10859 - RNA, 22 nt, Artificial Sequence
  GATA2 Guide RNA
uucugguggccgacugggaggg

SEQ ID NO: 10860 - RNA, 22 nt, Artificial Sequence
  GATA2 Guide RNA
uugcccucccagucggccacca

SEQ ID NO: 10861 - RNA, 20 nt, Artificial Sequence
  GATA2 Guide RNA
aaggcacugggagggcaagg

SEQ ID NO: 10862 - RNA, 20 nt, Artificial Sequence
  GATA2 Guide RNA
aggugccggcucuucuggca

SEQ ID NO: 10863 - RNA, 20 nt, Artificial Sequence
  GATA2 Guide RNA
agugccuugccagaagagcc

SEQ ID NO: 10864 - RNA, 20 nt, Artificial Sequence
  GATA2 Guide RNA
caaggcacugggagggcaag

SEQ ID NO: 10865 - RNA, 20 nt, Artificial Sequence
  GATA2 Guide RNA
cagugccuugccagaagagc

SEQ ID NO: 10866 - RNA, 20 nt, Artificial Sequence
  GATA2 Guide RNA
ccagugccuugccagaagag

SEQ ID NO: 10867 - RNA, 20 nt, Artificial Sequence
  GATA2 Guide RNA
cccagugccuugccagaaga

SEQ ID NO: 10868 - RNA, 20 nt, Artificial Sequence
  GATA2 Guide RNA
cccucccagugccuugccag

SEQ ID NO: 10869 - RNA, 20 nt, Artificial Sequence
  GATA2 Guide RNA
ccggcucuucuggcaaggca

SEQ ID NO: 10870 - RNA, 20 nt, Artificial Sequence
  GATA2 Guide RNA
ccucccagugccuugccaga

SEQ ID NO: 10871 - RNA, 20 nt, Artificial Sequence
  GATA2 Guide RNA
ccuugccagaagagccggca

SEQ ID NO: 10872 - RNA, 20 nt, Artificial Sequence
  GATA2 Guide RNA
ccuugcccucccagugccuu

SEQ ID NO: 10873 - RNA, 20 nt, Artificial Sequence
  GATA2 Guide RNA
cggcucuucuggcaaggcac

SEQ ID NO: 10874 - RNA, 20 nt, Artificial Sequence
  GATA2 Guide RNA
cucccagugccuugccagaa

SEQ ID NO: 10875 - RNA, 20 nt, Artificial Sequence
  GATA2 Guide RNA
cucuucuggcaaggcacugg

SEQ ID NO: 10876 - RNA, 20 nt, Artificial Sequence
  GATA2 Guide RNA
cugccuugcccucccagugc

SEQ ID NO: 10877 - RNA, 20 nt, Artificial Sequence
  GATA2 Guide RNA
cuggcaaggcacugggaggg

SEQ ID NO: 10878 - RNA, 20 nt, Artificial Sequence
  GATA2 Guide RNA
cuucuggcaaggcacuggga

SEQ ID NO: 10879 - RNA, 20 nt, Artificial Sequence
  GATA2 Guide RNA
cuugccagaagagccggcac

SEQ ID NO: 10880 - RNA, 20 nt, Artificial Sequence
  GATA2 Guide RNA
cuugcccucccagugccuug

SEQ ID NO: 10881 - RNA, 20 nt, Artificial Sequence
  GATA2 Guide RNA
gcaaggcacugggagggcaa

SEQ ID NO: 10882 - RNA, 20 nt, Artificial Sequence
  GATA2 Guide RNA
gcccucccagugccuugcca

SEQ ID NO: 10883 - RNA, 20 nt, Artificial Sequence
  GATA2 Guide RNA
gccggcucuucuggcaaggc

SEQ ID NO: 10884 - RNA, 20 nt, Artificial Sequence
  GATA2 Guide RNA
gccuugccagaagagccggc

SEQ ID NO: 10885 - RNA, 20 nt, Artificial Sequence
  GATA2 Guide RNA
gccuugcccucccagugccu

SEQ ID NO: 10886 - RNA, 20 nt, Artificial Sequence
  GATA2 Guide RNA
gcucuucuggcaaggcacug

SEQ ID NO: 10887 - RNA, 20 nt, Artificial Sequence
  GATA2 Guide RNA
gcugccuugcccucccagug

SEQ ID NO: 10888 - RNA, 20 nt, Artificial Sequence
  GATA2 Guide RNA
ggcaaggcacugggagggca

SEQ ID NO: 10889 - RNA, 20 nt, Artificial Sequence
  GATA2 Guide RNA
ggcucuucuggcaaggcacu

SEQ ID NO: 10890 - RNA, 20 nt, Artificial Sequence
  GATA2 Guide RNA
ggugccggcucuucuggcaa

SEQ ID NO: 10891 - RNA, 20 nt, Artificial Sequence
  GATA2 Guide RNA
gugccggcucuucuggcaag

SEQ ID NO: 10892 - RNA, 20 nt, Artificial Sequence
  GATA2 Guide RNA
gugccuugccagaagagccg

SEQ ID NO: 10893 - RNA, 20 nt, Artificial Sequence
  GATA2 Guide RNA
ucccagugccuugccagaag

SEQ ID NO: 10894 - RNA, 20 nt, Artificial Sequence
  GATA2 Guide RNA
ucuggcaaggcacugggagg

SEQ ID NO: 10895 - RNA, 20 nt, Artificial Sequence
  GATA2 Guide RNA
ucuucuggcaaggcacuggg

SEQ ID NO: 10896 - RNA, 20 nt, Artificial Sequence
  GATA2 Guide RNA
ugcccucccagugccuugcc

SEQ ID NO: 10897 - RNA, 20 nt, Artificial Sequence
  GATA2 Guide RNA
ugccggcucuucuggcaagg

SEQ ID NO: 10898 - RNA, 20 nt, Artificial Sequence
  GATA2 Guide RNA
ugccuugccagaagagccgg

SEQ ID NO: 10899 - RNA, 20 nt, Artificial Sequence
  GATA2 Guide RNA
ugccuugcccucccagugcc

SEQ ID NO: 10900 - RNA, 20 nt, Artificial Sequence
  GATA2 Guide RNA
uggcaaggcacugggagggc

SEQ ID NO: 10901 - RNA, 20 nt, Artificial Sequence
  GATA2 Guide RNA
uucuggcaaggcacugggag

SEQ ID NO: 10902 - RNA, 20 nt, Artificial Sequence
  GATA2 Guide RNA
uugccagaagagccggcacc

SEQ ID NO: 10903 - RNA, 20 nt, Artificial Sequence
  GATA2 Guide RNA
uugcccucccagugccuugc

SEQ ID NO: 10904 - RNA, 21 nt, Artificial Sequence
  GATA2 Guide RNA
aaggcacugggagggcaaggc

SEQ ID NO: 10905 - RNA, 21 nt, Artificial Sequence
  GATA2 Guide RNA
aggugccggcucuucuggcaa

SEQ ID NO: 10906 - RNA, 21 nt, Artificial Sequence
  GATA2 Guide RNA
agugccuugccagaagagccg

SEQ ID NO: 10907 - RNA, 21 nt, Artificial Sequence
  GATA2 Guide RNA
caaggcacugggagggcaagg

SEQ ID NO: 10908 - RNA, 21 nt, Artificial Sequence
  GATA2 Guide RNA
caggugccggcucuucuggca

SEQ ID NO: 10909 - RNA, 21 nt, Artificial Sequence
  GATA2 Guide RNA
cagugccuugccagaagagcc

SEQ ID NO: 10910 - RNA, 21 nt, Artificial Sequence
  GATA2 Guide RNA
ccagugccuugccagaagagc

SEQ ID NO: 10911 - RNA, 21 nt, Artificial Sequence
  GATA2 Guide RNA
cccagugccuugccagaagag

SEQ ID NO: 10912 - RNA, 21 nt, Artificial Sequence
  GATA2 Guide RNA
cccucccagugccuugccaga

SEQ ID NO: 10913 - RNA, 21 nt, Artificial Sequence
  GATA2 Guide RNA
ccggcucuucuggcaaggcac

SEQ ID NO: 10914 - RNA, 21 nt, Artificial Sequence
  GATA2 Guide RNA
ccucccagugccuugccagaa

SEQ ID NO: 10915 - RNA, 21 nt, Artificial Sequence
  GATA2 Guide RNA
ccuugccagaagagccggcac

SEQ ID NO: 10916 - RNA, 21 nt, Artificial Sequence
  GATA2 Guide RNA
ccuugcccucccagugccuug

SEQ ID NO: 10917 - RNA, 21 nt, Artificial Sequence
  GATA2 Guide RNA
cgcugccuugcccucccagug

SEQ ID NO: 10918 - RNA, 21 nt, Artificial Sequence
  GATA2 Guide RNA
cggcucuucuggcaaggcacu

SEQ ID NO: 10919 - RNA, 21 nt, Artificial Sequence
  GATA2 Guide RNA
cucccagugccuugccagaag

SEQ ID NO: 10920 - RNA, 21 nt, Artificial Sequence
  GATA2 Guide RNA
cucuucuggcaaggcacuggg

SEQ ID NO: 10921 - RNA, 21 nt, Artificial Sequence
  GATA2 Guide RNA
cugccuugcccucccagugcc

SEQ ID NO: 10922 - RNA, 21 nt, Artificial Sequence
  GATA2 Guide RNA
cuggcaaggcacugggagggc

SEQ ID NO: 10923 - RNA, 21 nt, Artificial Sequence
  GATA2 Guide RNA
cuucuggcaaggcacugggag

SEQ ID NO: 10924 - RNA, 21 nt, Artificial Sequence
  GATA2 Guide RNA
cuugccagaagagccggcacc

SEQ ID NO: 10925 - RNA, 21 nt, Artificial Sequence
  GATA2 Guide RNA
cuugcccucccagugccuugc

SEQ ID NO: 10926 - RNA, 21 nt, Artificial Sequence
  GATA2 Guide RNA
gcaaggcacugggagggcaag

SEQ ID NO: 10927 - RNA, 21 nt, Artificial Sequence
  GATA2 Guide RNA
gcccucccagugccuugccag

SEQ ID NO: 10928 - RNA, 21 nt, Artificial Sequence
  GATA2 Guide RNA
gccggcucuucuggcaaggca

SEQ ID NO: 10929 - RNA, 21 nt, Artificial Sequence
  GATA2 Guide RNA
gccuugccagaagagccggca

SEQ ID NO: 10930 - RNA, 21 nt, Artificial Sequence
  GATA2 Guide RNA
gccuugcccucccagugccuu

SEQ ID NO: 10931 - RNA, 21 nt, Artificial Sequence
  GATA2 Guide RNA
gcucuucuggcaaggcacugg

SEQ ID NO: 10932 - RNA, 21 nt, Artificial Sequence
  GATA2 Guide RNA
gcugccuugcccucccagugc

SEQ ID NO: 10933 - RNA, 21 nt, Artificial Sequence
  GATA2 Guide RNA
ggcaaggcacugggagggcaa

SEQ ID NO: 10934 - RNA, 21 nt, Artificial Sequence
  GATA2 Guide RNA
ggcucuucuggcaaggcacug

SEQ ID NO: 10935 - RNA, 21 nt, Artificial Sequence
  GATA2 Guide RNA
ggugccggcucuucuggcaag

SEQ ID NO: 10936 - RNA, 21 nt, Artificial Sequence
  GATA2 Guide RNA
gugccggcucuucuggcaagg

SEQ ID NO: 10937 - RNA, 21 nt, Artificial Sequence
  GATA2 Guide RNA
gugccuugccagaagagccgg

SEQ ID NO: 10938 - RNA, 21 nt, Artificial Sequence
  GATA2 Guide RNA
ucccagugccuugccagaaga

SEQ ID NO: 10939 - RNA, 21 nt, Artificial Sequence
  GATA2 Guide RNA
ucuggcaaggcacugggaggg

SEQ ID NO: 10940 - RNA, 21 nt, Artificial Sequence
  GATA2 Guide RNA
ucuucuggcaaggcacuggga

SEQ ID NO: 10941 - RNA, 21 nt, Artificial Sequence
  GATA2 Guide RNA
ugcccucccagugccuugcca

SEQ ID NO: 10942 - RNA, 21 nt, Artificial Sequence
  GATA2 Guide RNA
ugccggcucuucuggcaaggc

SEQ ID NO: 10943 - RNA, 21 nt, Artificial Sequence
  GATA2 Guide RNA
ugccuugccagaagagccggc

SEQ ID NO: 10944 - RNA, 21 nt, Artificial Sequence
  GATA2 Guide RNA
ugccuugcccucccagugccu

SEQ ID NO: 10945 - RNA, 21 nt, Artificial Sequence
  GATA2 Guide RNA
uggcaaggcacugggagggca

SEQ ID NO: 10946 - RNA, 21 nt, Artificial Sequence
  GATA2 Guide RNA
uucuggcaaggcacugggagg

SEQ ID NO: 10947 - RNA, 21 nt, Artificial Sequence
  GATA2 Guide RNA
uugccagaagagccggcaccu

SEQ ID NO: 10948 - RNA, 21 nt, Artificial Sequence
  GATA2 Guide RNA
uugcccucccagugccuugcc

SEQ ID NO: 10949 - RNA, 22 nt, Artificial Sequence
  GATA2 Guide RNA
aaggcacugggagggcaaggca

SEQ ID NO: 10950 - RNA, 22 nt, Artificial Sequence
  GATA2 Guide RNA
acaggugccggcucuucuggca

SEQ ID NO: 10951 - RNA, 22 nt, Artificial Sequence
  GATA2 Guide RNA
acgcugccuugcccucccagug

SEQ ID NO: 10952 - RNA, 22 nt, Artificial Sequence
  GATA2 Guide RNA
aggugccggcucuucuggcaag

SEQ ID NO: 10953 - RNA, 22 nt, Artificial Sequence
  GATA2 Guide RNA
agugccuugccagaagagccgg

SEQ ID NO: 10954 - RNA, 22 nt, Artificial Sequence
  GATA2 Guide RNA
caaggcacugggagggcaaggc

SEQ ID NO: 10955 - RNA, 22 nt, Artificial Sequence
  GATA2 Guide RNA
caggugccggcucuucuggcaa

SEQ ID NO: 10956 - RNA, 22 nt, Artificial Sequence
  GATA2 Guide RNA
cagugccuugccagaagagccg

SEQ ID NO: 10957 - RNA, 22 nt, Artificial Sequence
  GATA2 Guide RNA
ccagugccuugccagaagagcc

SEQ ID NO: 10958 - RNA, 22 nt, Artificial Sequence
  GATA2 Guide RNA
cccagugccuugccagaagagc

SEQ ID NO: 10959 - RNA, 22 nt, Artificial Sequence
  GATA2 Guide RNA
cccucccagugccuugccagaa

SEQ ID NO: 10960 - RNA, 22 nt, Artificial Sequence
  GATA2 Guide RNA
ccggcucuucuggcaaggcacu

SEQ ID NO: 10961 - RNA, 22 nt, Artificial Sequence
  GATA2 Guide RNA
ccucccagugccuugccagaag

SEQ ID NO: 10962 - RNA, 22 nt, Artificial Sequence
  GATA2 Guide RNA
ccuugccagaagagccggcacc

SEQ ID NO: 10963 - RNA, 22 nt, Artificial Sequence
  GATA2 Guide RNA
ccuugcccucccagugccuugc

SEQ ID NO: 10964 - RNA, 22 nt, Artificial Sequence
  GATA2 Guide RNA
cgcugccuugcccucccagugc

SEQ ID NO: 10965 - RNA, 22 nt, Artificial Sequence
  GATA2 Guide RNA
cggcucuucuggcaaggcacug

SEQ ID NO: 10966 - RNA, 22 nt, Artificial Sequence
  GATA2 Guide RNA
cucccagugccuugccagaaga

SEQ ID NO: 10967 - RNA, 22 nt, Artificial Sequence
  GATA2 Guide RNA
cucuucuggcaaggcacuggga

SEQ ID NO: 10968 - RNA, 22 nt, Artificial Sequence
  GATA2 Guide RNA
cugccuugcccucccagugccu

SEQ ID NO: 10969 - RNA, 22 nt, Artificial Sequence
  GATA2 Guide RNA
cuggcaaggcacugggagggca

SEQ ID NO: 10970 - RNA, 22 nt, Artificial Sequence
  GATA2 Guide RNA
cuucuggcaaggcacugggagg

SEQ ID NO: 10971 - RNA, 22 nt, Artificial Sequence
  GATA2 Guide RNA
cuugccagaagagccggcaccu

SEQ ID NO: 10972 - RNA, 22 nt, Artificial Sequence
  GATA2 Guide RNA
cuugcccucccagugccuugcc

SEQ ID NO: 10973 - RNA, 22 nt, Artificial Sequence
  GATA2 Guide RNA
gcaaggcacugggagggcaagg

SEQ ID NO: 10974 - RNA, 22 nt, Artificial Sequence
  GATA2 Guide RNA
gcccucccagugccuugccaga

SEQ ID NO: 10975 - RNA, 22 nt, Artificial Sequence
  GATA2 Guide RNA
gccggcucuucuggcaaggcac

SEQ ID NO: 10976 - RNA, 22 nt, Artificial Sequence
  GATA2 Guide RNA
gccuugccagaagagccggcac

SEQ ID NO: 10977 - RNA, 22 nt, Artificial Sequence
  GATA2 Guide RNA
gccuugcccucccagugccuug

SEQ ID NO: 10978 - RNA, 22 nt, Artificial Sequence
  GATA2 Guide RNA
gcucuucuggcaaggcacuggg

SEQ ID NO: 10979 - RNA, 22 nt, Artificial Sequence
  GATA2 Guide RNA
gcugccuugcccucccagugcc

SEQ ID NO: 10980 - RNA, 22 nt, Artificial Sequence
  GATA2 Guide RNA
ggcaaggcacugggagggcaag

SEQ ID NO: 10981 - RNA, 22 nt, Artificial Sequence
  GATA2 Guide RNA
ggcucuucuggcaaggcacugg

SEQ ID NO: 10982 - RNA, 22 nt, Artificial Sequence
  GATA2 Guide RNA
ggugccggcucuucuggcaagg

SEQ ID NO: 10983 - RNA, 22 nt, Artificial Sequence
  GATA2 Guide RNA
gugccggcucuucuggcaaggc

SEQ ID NO: 10984 - RNA, 22 nt, Artificial Sequence
  GATA2 Guide RNA
gugccuugccagaagagccggc

SEQ ID NO: 10985 - RNA, 22 nt, Artificial Sequence
  GATA2 Guide RNA
ucccagugccuugccagaagag

SEQ ID NO: 10986 - RNA, 22 nt, Artificial Sequence
  GATA2 Guide RNA
ucuggcaaggcacugggagggc

SEQ ID NO: 10987 - RNA, 22 nt, Artificial Sequence
  GATA2 Guide RNA
ucuucuggcaaggcacugggag

SEQ ID NO: 10988 - RNA, 22 nt, Artificial Sequence
  GATA2 Guide RNA
ugcccucccagugccuugccag

SEQ ID NO: 10989 - RNA, 22 nt, Artificial Sequence
  GATA2 Guide RNA
ugccggcucuucuggcaaggca

SEQ ID NO: 10990 - RNA, 22 nt, Artificial Sequence
  GATA2 Guide RNA
ugccuugccagaagagccggca

SEQ ID NO: 10991 - RNA, 22 nt, Artificial Sequence
  GATA2 Guide RNA
ugccuugcccucccagugccuu

SEQ ID NO: 10992 - RNA, 22 nt, Artificial Sequence
  GATA2 Guide RNA
uggcaaggcacugggagggcaa

SEQ ID NO: 10993 - RNA, 22 nt, Artificial Sequence
  GATA2 Guide RNA
uucuggcaaggcacugggaggg

SEQ ID NO: 10994 - RNA, 22 nt, Artificial Sequence
  GATA2 Guide RNA
uugccagaagagccggcaccug

SEQ ID NO: 10995 - RNA, 22 nt, Artificial Sequence
  GATA2 Guide RNA
uugcccucccagugccuugcca

SEQ ID NO: 10996 - RNA, 20 nt, Artificial Sequence
  GATA2 Guide RNA
agucagccgccagaagagcc

SEQ ID NO: 10997 - RNA, 20 nt, Artificial Sequence
  GATA2 Guide RNA
cagccgccagaagagccggc

SEQ ID NO: 10998 - RNA, 20 nt, Artificial Sequence
  GATA2 Guide RNA
cagucagccgccagaagagc

SEQ ID NO: 10999 - RNA, 20 nt, Artificial Sequence
  GATA2 Guide RNA
ccagucagccgccagaagag

SEQ ID NO: 11000 - RNA, 20 nt, Artificial Sequence
  GATA2 Guide RNA
cccagucagccgccagaaga

SEQ ID NO: 11001 - RNA, 20 nt, Artificial Sequence
  GATA2 Guide RNA
cccucccagucagccgccag

SEQ ID NO: 11002 - RNA, 20 nt, Artificial Sequence
  GATA2 Guide RNA
ccggcucuucuggcggcuga

SEQ ID NO: 11003 - RNA, 20 nt, Artificial Sequence
  GATA2 Guide RNA
ccucccagucagccgccaga

SEQ ID NO: 11004 - RNA, 20 nt, Artificial Sequence
  GATA2 Guide RNA
ccuugcccucccagucagcc

SEQ ID NO: 11005 - RNA, 20 nt, Artificial Sequence
  GATA2 Guide RNA
cggcucuucuggcggcugac

SEQ ID NO: 11006 - RNA, 20 nt, Artificial Sequence
  GATA2 Guide RNA
cggcugacugggagggcaag

SEQ ID NO: 11007 - RNA, 20 nt, Artificial Sequence
  GATA2 Guide RNA
cucccagucagccgccagaa

SEQ ID NO: 11008 - RNA, 20 nt, Artificial Sequence
  GATA2 Guide RNA
cucuucuggcggcugacugg

SEQ ID NO: 11009 - RNA, 20 nt, Artificial Sequence
  GATA2 Guide RNA
cugacugggagggcaaggca

SEQ ID NO: 11010 - RNA, 20 nt, Artificial Sequence
  GATA2 Guide RNA
cugccuugcccucccaguca

SEQ ID NO: 11011 - RNA, 20 nt, Artificial Sequence
  GATA2 Guide RNA
cuggcggcugacugggaggg

SEQ ID NO: 11012 - RNA, 20 nt, Artificial Sequence
  GATA2 Guide RNA
cuucuggcggcugacuggga

SEQ ID NO: 11013 - RNA, 20 nt, Artificial Sequence
  GATA2 Guide RNA
cuugcccucccagucagccg

SEQ ID NO: 11014 - RNA, 20 nt, Artificial Sequence
  GATA2 Guide RNA
gacgcugccuugcccuccca

SEQ ID NO: 11015 - RNA, 20 nt, Artificial Sequence
  GATA2 Guide RNA
gcccucccagucagccgcca

SEQ ID NO: 11016 - RNA, 20 nt, Artificial Sequence
  GATA2 Guide RNA
gccggcucuucuggcggcug

SEQ ID NO: 11017 - RNA, 20 nt, Artificial Sequence
  GATA2 Guide RNA
gccuugcccucccagucagc

SEQ ID NO: 11018 - RNA, 20 nt, Artificial Sequence
  GATA2 Guide RNA
gcggcugacugggagggcaa

SEQ ID NO: 11019 - RNA, 20 nt, Artificial Sequence
  GATA2 Guide RNA
gcucuucuggcggcugacug

SEQ ID NO: 11020 - RNA, 20 nt, Artificial Sequence
  GATA2 Guide RNA
gcugacugggagggcaaggc

SEQ ID NO: 11021 - RNA, 20 nt, Artificial Sequence
  GATA2 Guide RNA
ggcggcugacugggagggca

SEQ ID NO: 11022 - RNA, 20 nt, Artificial Sequence
  GATA2 Guide RNA
ggcucuucuggcggcugacu

SEQ ID NO: 11023 - RNA, 20 nt, Artificial Sequence
  GATA2 Guide RNA
ggcugacugggagggcaagg

SEQ ID NO: 11024 - RNA, 20 nt, Artificial Sequence
  GATA2 Guide RNA
gucagccgccagaagagccg

SEQ ID NO: 11025 - RNA, 20 nt, Artificial Sequence
  GATA2 Guide RNA
gugccggcucuucuggcggc

SEQ ID NO: 11026 - RNA, 20 nt, Artificial Sequence
  GATA2 Guide RNA
ucagccgccagaagagccgg

SEQ ID NO: 11027 - RNA, 20 nt, Artificial Sequence
  GATA2 Guide RNA
ucccagucagccgccagaag

SEQ ID NO: 11028 - RNA, 20 nt, Artificial Sequence
  GATA2 Guide RNA
ucuggcggcugacugggagg

SEQ ID NO: 11029 - RNA, 20 nt, Artificial Sequence
  GATA2 Guide RNA
ucuucuggcggcugacuggg

SEQ ID NO: 11030 - RNA, 20 nt, Artificial Sequence
  GATA2 Guide RNA
ugacugggagggcaaggcag

SEQ ID NO: 11031 - RNA, 20 nt, Artificial Sequence
  GATA2 Guide RNA
ugcccucccagucagccgcc

SEQ ID NO: 11032 - RNA, 20 nt, Artificial Sequence
  GATA2 Guide RNA
ugccggcucuucuggcggcu

SEQ ID NO: 11033 - RNA, 20 nt, Artificial Sequence
  GATA2 Guide RNA
ugccuugcccucccagucag

SEQ ID NO: 11034 - RNA, 20 nt, Artificial Sequence
  GATA2 Guide RNA
uggcggcugacugggagggc

SEQ ID NO: 11035 - RNA, 20 nt, Artificial Sequence
  GATA2 Guide RNA
uucuggcggcugacugggag

SEQ ID NO: 11036 - RNA, 20 nt, Artificial Sequence
  GATA2 Guide RNA
uugcccucccagucagccgc

SEQ ID NO: 11037 - RNA, 21 nt, Artificial Sequence
  GATA2 Guide RNA
agucagccgccagaagagccg

SEQ ID NO: 11038 - RNA, 21 nt, Artificial Sequence
  GATA2 Guide RNA
cagccgccagaagagccggca

SEQ ID NO: 11039 - RNA, 21 nt, Artificial Sequence
  GATA2 Guide RNA
cagucagccgccagaagagcc

SEQ ID NO: 11040 - RNA, 21 nt, Artificial Sequence
  GATA2 Guide RNA
ccagucagccgccagaagagc

SEQ ID NO: 11041 - RNA, 21 nt, Artificial Sequence
  GATA2 Guide RNA
cccagucagccgccagaagag

SEQ ID NO: 11042 - RNA, 21 nt, Artificial Sequence
  GATA2 Guide RNA
cccucccagucagccgccaga

SEQ ID NO: 11043 - RNA, 21 nt, Artificial Sequence
  GATA2 Guide RNA
ccggcucuucuggcggcugac

SEQ ID NO: 11044 - RNA, 21 nt, Artificial Sequence
  GATA2 Guide RNA
ccucccagucagccgccagaa

SEQ ID NO: 11045 - RNA, 21 nt, Artificial Sequence
  GATA2 Guide RNA
ccuugcccucccagucagccg

SEQ ID NO: 11046 - RNA, 21 nt, Artificial Sequence
  GATA2 Guide RNA
cggcucuucuggcggcugacu

SEQ ID NO: 11047 - RNA, 21 nt, Artificial Sequence
  GATA2 Guide RNA
cggcugacugggagggcaagg

SEQ ID NO: 11048 - RNA, 21 nt, Artificial Sequence
  GATA2 Guide RNA
cucccagucagccgccagaag

SEQ ID NO: 11049 - RNA, 21 nt, Artificial Sequence
  GATA2 Guide RNA
cucuucuggcggcugacuggg

SEQ ID NO: 11050 - RNA, 21 nt, Artificial Sequence
  GATA2 Guide RNA
cugacugggagggcaaggcag

SEQ ID NO: 11051 - RNA, 21 nt, Artificial Sequence
  GATA2 Guide RNA
cugccuugcccucccagucag

SEQ ID NO: 11052 - RNA, 21 nt, Artificial Sequence
  GATA2 Guide RNA
cuggcggcugacugggagggc

SEQ ID NO: 11053 - RNA, 21 nt, Artificial Sequence
  GATA2 Guide RNA
cuucuggcggcugacugggag

SEQ ID NO: 11054 - RNA, 21 nt, Artificial Sequence
  GATA2 Guide RNA
cuugcccucccagucagccgc

SEQ ID NO: 11055 - RNA, 21 nt, Artificial Sequence
  GATA2 Guide RNA
gcccucccagucagccgccag

SEQ ID NO: 11056 - RNA, 21 nt, Artificial Sequence
  GATA2 Guide RNA
gccggcucuucuggcggcuga

SEQ ID NO: 11057 - RNA, 21 nt, Artificial Sequence
  GATA2 Guide RNA
gccuugcccucccagucagcc

SEQ ID NO: 11058 - RNA, 21 nt, Artificial Sequence
  GATA2 Guide RNA
gcggcugacugggagggcaag

SEQ ID NO: 11059 - RNA, 21 nt, Artificial Sequence
  GATA2 Guide RNA
gcucuucuggcggcugacugg

SEQ ID NO: 11060 - RNA, 21 nt, Artificial Sequence
  GATA2 Guide RNA
gcugacugggagggcaaggca

SEQ ID NO: 11061 - RNA, 21 nt, Artificial Sequence
  GATA2 Guide RNA
gcugccuugcccucccaguca

SEQ ID NO: 11062 - RNA, 21 nt, Artificial Sequence
  GATA2 Guide RNA
ggcggcugacugggagggcaa

SEQ ID NO: 11063 - RNA, 21 nt, Artificial Sequence
  GATA2 Guide RNA
ggcucuucuggcggcugacug

SEQ ID NO: 11064 - RNA, 21 nt, Artificial Sequence
  GATA2 Guide RNA
ggcugacugggagggcaaggc

SEQ ID NO: 11065 - RNA, 21 nt, Artificial Sequence
  GATA2 Guide RNA
ggugccggcucuucuggcggc

SEQ ID NO: 11066 - RNA, 21 nt, Artificial Sequence
  GATA2 Guide RNA
gucagccgccagaagagccgg

SEQ ID NO: 11067 - RNA, 21 nt, Artificial Sequence
  GATA2 Guide RNA
gugccggcucuucuggcggcu

SEQ ID NO: 11068 - RNA, 21 nt, Artificial Sequence
  GATA2 Guide RNA
ucagccgccagaagagccggc

SEQ ID NO: 11069 - RNA, 21 nt, Artificial Sequence
  GATA2 Guide RNA
ucccagucagccgccagaaga

SEQ ID NO: 11070 - RNA, 21 nt, Artificial Sequence
  GATA2 Guide RNA
ucuggcggcugacugggaggg

SEQ ID NO: 11071 - RNA, 21 nt, Artificial Sequence
  GATA2 Guide RNA
ucuucuggcggcugacuggga

SEQ ID NO: 11072 - RNA, 21 nt, Artificial Sequence
  GATA2 Guide RNA
ugacgcugccuugcccuccca

SEQ ID NO: 11073 - RNA, 21 nt, Artificial Sequence
  GATA2 Guide RNA
ugacugggagggcaaggcagc

SEQ ID NO: 11074 - RNA, 21 nt, Artificial Sequence
  GATA2 Guide RNA
ugcccucccagucagccgcca

SEQ ID NO: 11075 - RNA, 21 nt, Artificial Sequence
  GATA2 Guide RNA
ugccggcucuucuggcggcug

SEQ ID NO: 11076 - RNA, 21 nt, Artificial Sequence
  GATA2 Guide RNA
ugccuugcccucccagucagc

SEQ ID NO: 11077 - RNA, 21 nt, Artificial Sequence
  GATA2 Guide RNA
uggcggcugacugggagggca

SEQ ID NO: 11078 - RNA, 21 nt, Artificial Sequence
  GATA2 Guide RNA
uucuggcggcugacugggagg

SEQ ID NO: 11079 - RNA, 21 nt, Artificial Sequence
  GATA2 Guide RNA
uugcccucccagucagccgcc

SEQ ID NO: 11080 - RNA, 22 nt, Artificial Sequence
  GATA2 Guide RNA
aggugccggcucuucuggcggc

SEQ ID NO: 11081 - RNA, 22 nt, Artificial Sequence
  GATA2 Guide RNA
agucagccgccagaagagccgg

SEQ ID NO: 11082 - RNA, 22 nt, Artificial Sequence
  GATA2 Guide RNA
cagccgccagaagagccggcac

SEQ ID NO: 11083 - RNA, 22 nt, Artificial Sequence
  GATA2 Guide RNA
cagucagccgccagaagagccg

SEQ ID NO: 11084 - RNA, 22 nt, Artificial Sequence
  GATA2 Guide RNA
ccagucagccgccagaagagcc

SEQ ID NO: 11085 - RNA, 22 nt, Artificial Sequence
  GATA2 Guide RNA
cccagucagccgccagaagagc

SEQ ID NO: 11086 - RNA, 22 nt, Artificial Sequence
  GATA2 Guide RNA
cccucccagucagccgccagaa

SEQ ID NO: 11087 - RNA, 22 nt, Artificial Sequence
  GATA2 Guide RNA
ccggcucuucuggcggcugacu

SEQ ID NO: 11088 - RNA, 22 nt, Artificial Sequence
  GATA2 Guide RNA
ccucccagucagccgccagaag

SEQ ID NO: 11089 - RNA, 22 nt, Artificial Sequence
  GATA2 Guide RNA
ccuugcccucccagucagccgc

SEQ ID NO: 11090 - RNA, 22 nt, Artificial Sequence
  GATA2 Guide RNA
cgcugccuugcccucccaguca

SEQ ID NO: 11091 - RNA, 22 nt, Artificial Sequence
  GATA2 Guide RNA
cggcucuucuggcggcugacug

SEQ ID NO: 11092 - RNA, 22 nt, Artificial Sequence
  GATA2 Guide RNA
cggcugacugggagggcaaggc

SEQ ID NO: 11093 - RNA, 22 nt, Artificial Sequence
  GATA2 Guide RNA
cucccagucagccgccagaaga

SEQ ID NO: 11094 - RNA, 22 nt, Artificial Sequence
  GATA2 Guide RNA
cucuucuggcggcugacuggga

SEQ ID NO: 11095 - RNA, 22 nt, Artificial Sequence
  GATA2 Guide RNA
cugacgcugccuugcccuccca

SEQ ID NO: 11096 - RNA, 22 nt, Artificial Sequence
  GATA2 Guide RNA
cugacugggagggcaaggcagc

SEQ ID NO: 11097 - RNA, 22 nt, Artificial Sequence
  GATA2 Guide RNA
cugccuugcccucccagucagc

SEQ ID NO: 11098 - RNA, 22 nt, Artificial Sequence
  GATA2 Guide RNA
cuggcggcugacugggagggca

SEQ ID NO: 11099 - RNA, 22 nt, Artificial Sequence
  GATA2 Guide RNA
cuucuggcggcugacugggagg

SEQ ID NO: 11100 - RNA, 22 nt, Artificial Sequence
  GATA2 Guide RNA
cuugcccucccagucagccgcc

SEQ ID NO: 11101 - RNA, 22 nt, Artificial Sequence
  GATA2 Guide RNA
gcccucccagucagccgccaga

SEQ ID NO: 11102 - RNA, 22 nt, Artificial Sequence
  GATA2 Guide RNA
gccggcucuucuggcggcugac

SEQ ID NO: 11103 - RNA, 22 nt, Artificial Sequence
  GATA2 Guide RNA
gccuugcccucccagucagccg

SEQ ID NO: 11104 - RNA, 22 nt, Artificial Sequence
  GATA2 Guide RNA
gcggcugacugggagggcaagg

SEQ ID NO: 11105 - RNA, 22 nt, Artificial Sequence
  GATA2 Guide RNA
gcucuucuggcggcugacuggg

SEQ ID NO: 11106 - RNA, 22 nt, Artificial Sequence
  GATA2 Guide RNA
gcugacugggagggcaaggcag

SEQ ID NO: 11107 - RNA, 22 nt, Artificial Sequence
  GATA2 Guide RNA
gcugccuugcccucccagucag

SEQ ID NO: 11108 - RNA, 22 nt, Artificial Sequence
  GATA2 Guide RNA
ggcggcugacugggagggcaag

SEQ ID NO: 11109 - RNA, 22 nt, Artificial Sequence
  GATA2 Guide RNA
ggcucuucuggcggcugacugg

SEQ ID NO: 11110 - RNA, 22 nt, Artificial Sequence
  GATA2 Guide RNA
ggcugacugggagggcaaggca

SEQ ID NO: 11111 - RNA, 22 nt, Artificial Sequence
  GATA2 Guide RNA
ggugccggcucuucuggcggcu

SEQ ID NO: 11112 - RNA, 22 nt, Artificial Sequence
  GATA2 Guide RNA
gucagccgccagaagagccggc

SEQ ID NO: 11113 - RNA, 22 nt, Artificial Sequence
  GATA2 Guide RNA
gugccggcucuucuggcggcug

SEQ ID NO: 11114 - RNA, 22 nt, Artificial Sequence
  GATA2 Guide RNA
ucagccgccagaagagccggca

SEQ ID NO: 11115 - RNA, 22 nt, Artificial Sequence
  GATA2 Guide RNA
ucccagucagccgccagaagag

SEQ ID NO: 11116 - RNA, 22 nt, Artificial Sequence
  GATA2 Guide RNA
ucuggcggcugacugggagggc

SEQ ID NO: 11117 - RNA, 22 nt, Artificial Sequence
  GATA2 Guide RNA
ucuucuggcggcugacugggag

SEQ ID NO: 11118 - RNA, 22 nt, Artificial Sequence
  GATA2 Guide RNA
ugacugggagggcaaggcagcg

SEQ ID NO: 11119 - RNA, 22 nt, Artificial Sequence
  GATA2 Guide RNA
ugcccucccagucagccgccag

SEQ ID NO: 11120 - RNA, 22 nt, Artificial Sequence
  GATA2 Guide RNA
ugccggcucuucuggcggcuga

SEQ ID NO: 11121 - RNA, 22 nt, Artificial Sequence
  GATA2 Guide RNA
ugccuugcccucccagucagcc

SEQ ID NO: 11122 - RNA, 22 nt, Artificial Sequence
  GATA2 Guide RNA
uggcggcugacugggagggcaa

SEQ ID NO: 11123 - RNA, 22 nt, Artificial Sequence
  GATA2 Guide RNA
uucuggcggcugacugggaggg

SEQ ID NO: 11124 - RNA, 22 nt, Artificial Sequence
  GATA2 Guide RNA
uugcccucccagucagccgcca

SEQ ID NO: 11125 - RNA, 20 nt, Artificial Sequence
  GATA2 Guide RNA
aaugggagggcaaggcagcg

SEQ ID NO: 11126 - RNA, 20 nt, Artificial Sequence
  GATA2 Guide RNA
acgcugccuugcccucccau

SEQ ID NO: 11127 - RNA, 20 nt, Artificial Sequence
  GATA2 Guide RNA
augggagggcaaggcagcgu

SEQ ID NO: 11128 - RNA, 20 nt, Artificial Sequence
  GATA2 Guide RNA
auucggccgccagaagagcc

SEQ ID NO: 11129 - RNA, 20 nt, Artificial Sequence
  GATA2 Guide RNA
cauucggccgccagaagagc

SEQ ID NO: 11130 - RNA, 20 nt, Artificial Sequence
  GATA2 Guide RNA
ccauucggccgccagaagag

SEQ ID NO: 11131 - RNA, 20 nt, Artificial Sequence
  GATA2 Guide RNA
cccauucggccgccagaaga

SEQ ID NO: 11132 - RNA, 20 nt, Artificial Sequence
  GATA2 Guide RNA
cccucccauucggccgccag

SEQ ID NO: 11133 - RNA, 20 nt, Artificial Sequence
  GATA2 Guide RNA
ccgaaugggagggcaaggca

SEQ ID NO: 11134 - RNA, 20 nt, Artificial Sequence
  GATA2 Guide RNA
ccucccauucggccgccaga

SEQ ID NO: 11135 - RNA, 20 nt, Artificial Sequence
  GATA2 Guide RNA
ccuugcccucccauucggcc

SEQ ID NO: 11136 - RNA, 20 nt, Artificial Sequence
  GATA2 Guide RNA
cgaaugggagggcaaggcag

SEQ ID NO: 11137 - RNA, 20 nt, Artificial Sequence
  GATA2 Guide RNA
cgcugccuugcccucccauu

SEQ ID NO: 11138 - RNA, 20 nt, Artificial Sequence
  GATA2 Guide RNA
cggccgaaugggagggcaag

SEQ ID NO: 11139 - RNA, 20 nt, Artificial Sequence
  GATA2 Guide RNA
cggcucuucuggcggccgaa

SEQ ID NO: 11140 - RNA, 20 nt, Artificial Sequence
  GATA2 Guide RNA
cucccauucggccgccagaa

SEQ ID NO: 11141 - RNA, 20 nt, Artificial Sequence
  GATA2 Guide RNA
cucuucuggcggccgaaugg

SEQ ID NO: 11142 - RNA, 20 nt, Artificial Sequence
  GATA2 Guide RNA
cugacgcugccuugcccucc

SEQ ID NO: 11143 - RNA, 20 nt, Artificial Sequence
  GATA2 Guide RNA
cugccuugcccucccauucg

SEQ ID NO: 11144 - RNA, 20 nt, Artificial Sequence
  GATA2 Guide RNA
cuggcggccgaaugggaggg

SEQ ID NO: 11145 - RNA, 20 nt, Artificial Sequence
  GATA2 Guide RNA
cuucuggcggccgaauggga

SEQ ID NO: 11146 - RNA, 20 nt, Artificial Sequence
  GATA2 Guide RNA
cuugcccucccauucggccg

SEQ ID NO: 11147 - RNA, 20 nt, Artificial Sequence
  GATA2 Guide RNA
gaaugggagggcaaggcagc

SEQ ID NO: 11148 - RNA, 20 nt, Artificial Sequence
  GATA2 Guide RNA
gcccucccauucggccgcca

SEQ ID NO: 11149 - RNA, 20 nt, Artificial Sequence
  GATA2 Guide RNA
gccgaaugggagggcaaggc

SEQ ID NO: 11150 - RNA, 20 nt, Artificial Sequence
  GATA2 Guide RNA
gccuugcccucccauucggc

SEQ ID NO: 11151 - RNA, 20 nt, Artificial Sequence
  GATA2 Guide RNA
gcggccgaaugggagggcaa

SEQ ID NO: 11152 - RNA, 20 nt, Artificial Sequence
  GATA2 Guide RNA
gcucuucuggcggccgaaug

SEQ ID NO: 11153 - RNA, 20 nt, Artificial Sequence
  GATA2 Guide RNA
gcugacgcugccuugcccuc

SEQ ID NO: 11154 - RNA, 20 nt, Artificial Sequence
  GATA2 Guide RNA
gcugccuugcccucccauuc

SEQ ID NO: 11155 - RNA, 20 nt, Artificial Sequence
  GATA2 Guide RNA
ggccgaaugggagggcaagg

SEQ ID NO: 11156 - RNA, 20 nt, Artificial Sequence
  GATA2 Guide RNA
ggcggccgaaugggagggca

SEQ ID NO: 11157 - RNA, 20 nt, Artificial Sequence
  GATA2 Guide RNA
ggcucuucuggcggccgaau

SEQ ID NO: 11158 - RNA, 20 nt, Artificial Sequence
  GATA2 Guide RNA
ucccauucggccgccagaag

SEQ ID NO: 11159 - RNA, 20 nt, Artificial Sequence
  GATA2 Guide RNA
ucuggcggccgaaugggagg

SEQ ID NO: 11160 - RNA, 20 nt, Artificial Sequence
  GATA2 Guide RNA
ucuucuggcggccgaauggg

SEQ ID NO: 11161 - RNA, 20 nt, Artificial Sequence
  GATA2 Guide RNA
ugacgcugccuugcccuccc

SEQ ID NO: 11162 - RNA, 20 nt, Artificial Sequence
  GATA2 Guide RNA
ugcccucccauucggccgcc

SEQ ID NO: 11163 - RNA, 20 nt, Artificial Sequence
  GATA2 Guide RNA
ugccuugcccucccauucgg

SEQ ID NO: 11164 - RNA, 20 nt, Artificial Sequence
  GATA2 Guide RNA
uggcggccgaaugggagggc

SEQ ID NO: 11165 - RNA, 20 nt, Artificial Sequence
  GATA2 Guide RNA
uucuggcggccgaaugggag

SEQ ID NO: 11166 - RNA, 20 nt, Artificial Sequence
  GATA2 Guide RNA
uugcccucccauucggccgc

SEQ ID NO: 11167 - RNA, 21 nt, Artificial Sequence
  GATA2 Guide RNA
aaugggagggcaaggcagcgu

SEQ ID NO: 11168 - RNA, 21 nt, Artificial Sequence
  GATA2 Guide RNA
acgcugccuugcccucccauu

SEQ ID NO: 11169 - RNA, 21 nt, Artificial Sequence
  GATA2 Guide RNA
augggagggcaaggcagcguc

SEQ ID NO: 11170 - RNA, 21 nt, Artificial Sequence
  GATA2 Guide RNA
auucggccgccagaagagccg

SEQ ID NO: 11171 - RNA, 21 nt, Artificial Sequence
  GATA2 Guide RNA
cauucggccgccagaagagcc

SEQ ID NO: 11172 - RNA, 21 nt, Artificial Sequence
  GATA2 Guide RNA
ccauucggccgccagaagagc

SEQ ID NO: 11173 - RNA, 21 nt, Artificial Sequence
  GATA2 Guide RNA
cccauucggccgccagaagag

SEQ ID NO: 11174 - RNA, 21 nt, Artificial Sequence
  GATA2 Guide RNA
cccucccauucggccgccaga

SEQ ID NO: 11175 - RNA, 21 nt, Artificial Sequence
  GATA2 Guide RNA
ccgaaugggagggcaaggcag

SEQ ID NO: 11176 - RNA, 21 nt, Artificial Sequence
  GATA2 Guide RNA
ccggcucuucuggcggccgaa

SEQ ID NO: 11177 - RNA, 21 nt, Artificial Sequence
  GATA2 Guide RNA
ccucccauucggccgccagaa

SEQ ID NO: 11178 - RNA, 21 nt, Artificial Sequence
  GATA2 Guide RNA
ccuugcccucccauucggccg

SEQ ID NO: 11179 - RNA, 21 nt, Artificial Sequence
  GATA2 Guide RNA
cgaaugggagggcaaggcagc

SEQ ID NO: 11180 - RNA, 21 nt, Artificial Sequence
  GATA2 Guide RNA
cgcugccuugcccucccauuc

SEQ ID NO: 11181 - RNA, 21 nt, Artificial Sequence
  GATA2 Guide RNA
cggccgaaugggagggcaagg

SEQ ID NO: 11182 - RNA, 21 nt, Artificial Sequence
  GATA2 Guide RNA
cggcucuucuggcggccgaau

SEQ ID NO: 11183 - RNA, 21 nt, Artificial Sequence
  GATA2 Guide RNA
cucccauucggccgccagaag

SEQ ID NO: 11184 - RNA, 21 nt, Artificial Sequence
  GATA2 Guide RNA
cucuucuggcggccgaauggg

SEQ ID NO: 11185 - RNA, 21 nt, Artificial Sequence
  GATA2 Guide RNA
cugacgcugccuugcccuccc

SEQ ID NO: 11186 - RNA, 21 nt, Artificial Sequence
  GATA2 Guide RNA
cugccuugcccucccauucgg

SEQ ID NO: 11187 - RNA, 21 nt, Artificial Sequence
  GATA2 Guide RNA
cuggcggccgaaugggagggc

SEQ ID NO: 11188 - RNA, 21 nt, Artificial Sequence
  GATA2 Guide RNA
cuucuggcggccgaaugggag

SEQ ID NO: 11189 - RNA, 21 nt, Artificial Sequence
  GATA2 Guide RNA
cuugcccucccauucggccgc

SEQ ID NO: 11190 - RNA, 21 nt, Artificial Sequence
  GATA2 Guide RNA
gaaugggagggcaaggcagcg

SEQ ID NO: 11191 - RNA, 21 nt, Artificial Sequence
  GATA2 Guide RNA
gacgcugccuugcccucccau

SEQ ID NO: 11192 - RNA, 21 nt, Artificial Sequence
  GATA2 Guide RNA
gcccucccauucggccgccag

SEQ ID NO: 11193 - RNA, 21 nt, Artificial Sequence
  GATA2 Guide RNA
gccgaaugggagggcaaggca

SEQ ID NO: 11194 - RNA, 21 nt, Artificial Sequence
  GATA2 Guide RNA
gccuugcccucccauucggcc

SEQ ID NO: 11195 - RNA, 21 nt, Artificial Sequence
  GATA2 Guide RNA
gcggccgaaugggagggcaag

SEQ ID NO: 11196 - RNA, 21 nt, Artificial Sequence
  GATA2 Guide RNA
gcucuucuggcggccgaaugg

SEQ ID NO: 11197 - RNA, 21 nt, Artificial Sequence
  GATA2 Guide RNA
gcugacgcugccuugcccucc

SEQ ID NO: 11198 - RNA, 21 nt, Artificial Sequence
  GATA2 Guide RNA
gcugccuugcccucccauucg

SEQ ID NO: 11199 - RNA, 21 nt, Artificial Sequence
  GATA2 Guide RNA
ggccgaaugggagggcaaggc

SEQ ID NO: 11200 - RNA, 21 nt, Artificial Sequence
  GATA2 Guide RNA
ggcggccgaaugggagggcaa

SEQ ID NO: 11201 - RNA, 21 nt, Artificial Sequence
  GATA2 Guide RNA
ggcucuucuggcggccgaaug

SEQ ID NO: 11202 - RNA, 21 nt, Artificial Sequence
  GATA2 Guide RNA
gugccggcucuucuggcggcc

SEQ ID NO: 11203 - RNA, 21 nt, Artificial Sequence
  GATA2 Guide RNA
ucccauucggccgccagaaga

SEQ ID NO: 11204 - RNA, 21 nt, Artificial Sequence
  GATA2 Guide RNA
ucuggcggccgaaugggaggg

SEQ ID NO: 11205 - RNA, 21 nt, Artificial Sequence
  GATA2 Guide RNA
ucuucuggcggccgaauggga

SEQ ID NO: 11206 - RNA, 21 nt, Artificial Sequence
  GATA2 Guide RNA
ugcccucccauucggccgcca

SEQ ID NO: 11207 - RNA, 21 nt, Artificial Sequence
  GATA2 Guide RNA
ugccuugcccucccauucggc

SEQ ID NO: 11208 - RNA, 21 nt, Artificial Sequence
  GATA2 Guide RNA
ugcugacgcugccuugcccuc

SEQ ID NO: 11209 - RNA, 21 nt, Artificial Sequence
  GATA2 Guide RNA
uggcggccgaaugggagggca

SEQ ID NO: 11210 - RNA, 21 nt, Artificial Sequence
  GATA2 Guide RNA
uucuggcggccgaaugggagg

SEQ ID NO: 11211 - RNA, 21 nt, Artificial Sequence
  GATA2 Guide RNA
uugcccucccauucggccgcc

SEQ ID NO: 11212 - RNA, 22 nt, Artificial Sequence
  GATA2 Guide RNA
aaugggagggcaaggcagcguc

SEQ ID NO: 11213 - RNA, 22 nt, Artificial Sequence
  GATA2 Guide RNA
acgcugccuugcccucccauuc

SEQ ID NO: 11214 - RNA, 22 nt, Artificial Sequence
  GATA2 Guide RNA
augggagggcaaggcagcguca

SEQ ID NO: 11215 - RNA, 22 nt, Artificial Sequence
  GATA2 Guide RNA
auucggccgccagaagagccgg

SEQ ID NO: 11216 - RNA, 22 nt, Artificial Sequence
  GATA2 Guide RNA
cauucggccgccagaagagccg

SEQ ID NO: 11217 - RNA, 22 nt, Artificial Sequence
  GATA2 Guide RNA
ccauucggccgccagaagagcc

SEQ ID NO: 11218 - RNA, 22 nt, Artificial Sequence
  GATA2 Guide RNA
cccauucggccgccagaagagc

SEQ ID NO: 11219 - RNA, 22 nt, Artificial Sequence
  GATA2 Guide RNA
cccucccauucggccgccagaa

SEQ ID NO: 11220 - RNA, 22 nt, Artificial Sequence
  GATA2 Guide RNA
ccgaaugggagggcaaggcagc

SEQ ID NO: 11221 - RNA, 22 nt, Artificial Sequence
  GATA2 Guide RNA
ccggcucuucuggcggccgaau

SEQ ID NO: 11222 - RNA, 22 nt, Artificial Sequence
  GATA2 Guide RNA
ccucccauucggccgccagaag

SEQ ID NO: 11223 - RNA, 22 nt, Artificial Sequence
  GATA2 Guide RNA
ccuugcccucccauucggccgc

SEQ ID NO: 11224 - RNA, 22 nt, Artificial Sequence
  GATA2 Guide RNA
cgaaugggagggcaaggcagcg

SEQ ID NO: 11225 - RNA, 22 nt, Artificial Sequence
  GATA2 Guide RNA
cgcugccuugcccucccauucg

SEQ ID NO: 11226 - RNA, 22 nt, Artificial Sequence
  GATA2 Guide RNA
cggccgaaugggagggcaaggc

SEQ ID NO: 11227 - RNA, 22 nt, Artificial Sequence
  GATA2 Guide RNA
cggcucuucuggcggccgaaug

SEQ ID NO: 11228 - RNA, 22 nt, Artificial Sequence
  GATA2 Guide RNA
cucccauucggccgccagaaga

SEQ ID NO: 11229 - RNA, 22 nt, Artificial Sequence
  GATA2 Guide RNA
cucuucuggcggccgaauggga

SEQ ID NO: 11230 - RNA, 22 nt, Artificial Sequence
  GATA2 Guide RNA
cugccuugcccucccauucggc

SEQ ID NO: 11231 - RNA, 22 nt, Artificial Sequence
  GATA2 Guide RNA
cugcugacgcugccuugcccuc

SEQ ID NO: 11232 - RNA, 22 nt, Artificial Sequence
  GATA2 Guide RNA
cuggcggccgaaugggagggca

SEQ ID NO: 11233 - RNA, 22 nt, Artificial Sequence
  GATA2 Guide RNA
cuucuggcggccgaaugggagg

SEQ ID NO: 11234 - RNA, 22 nt, Artificial Sequence
  GATA2 Guide RNA
cuugcccucccauucggccgcc

SEQ ID NO: 11235 - RNA, 22 nt, Artificial Sequence
  GATA2 Guide RNA
gaaugggagggcaaggcagcgu

SEQ ID NO: 11236 - RNA, 22 nt, Artificial Sequence
  GATA2 Guide RNA
gacgcugccuugcccucccauu

SEQ ID NO: 11237 - RNA, 22 nt, Artificial Sequence
  GATA2 Guide RNA
gcccucccauucggccgccaga

SEQ ID NO: 11238 - RNA, 22 nt, Artificial Sequence
  GATA2 Guide RNA
gccgaaugggagggcaaggcag

SEQ ID NO: 11239 - RNA, 22 nt, Artificial Sequence
  GATA2 Guide RNA
gccggcucuucuggcggccgaa

SEQ ID NO: 11240 - RNA, 22 nt, Artificial Sequence
  GATA2 Guide RNA
gccuugcccucccauucggccg

SEQ ID NO: 11241 - RNA, 22 nt, Artificial Sequence
  GATA2 Guide RNA
gcggccgaaugggagggcaagg

SEQ ID NO: 11242 - RNA, 22 nt, Artificial Sequence
  GATA2 Guide RNA
gcucuucuggcggccgaauggg

SEQ ID NO: 11243 - RNA, 22 nt, Artificial Sequence
  GATA2 Guide RNA
gcugacgcugccuugcccuccc

SEQ ID NO: 11244 - RNA, 22 nt, Artificial Sequence
  GATA2 Guide RNA
gcugccuugcccucccauucgg

SEQ ID NO: 11245 - RNA, 22 nt, Artificial Sequence
  GATA2 Guide RNA
ggccgaaugggagggcaaggca

SEQ ID NO: 11246 - RNA, 22 nt, Artificial Sequence
  GATA2 Guide RNA
ggcggccgaaugggagggcaag

SEQ ID NO: 11247 - RNA, 22 nt, Artificial Sequence
  GATA2 Guide RNA
ggcucuucuggcggccgaaugg

SEQ ID NO: 11248 - RNA, 22 nt, Artificial Sequence
  GATA2 Guide RNA
ggugccggcucuucuggcggcc

SEQ ID NO: 11249 - RNA, 22 nt, Artificial Sequence
  GATA2 Guide RNA
gugccggcucuucuggcggccg

SEQ ID NO: 11250 - RNA, 22 nt, Artificial Sequence
  GATA2 Guide RNA
ucccauucggccgccagaagag

SEQ ID NO: 11251 - RNA, 22 nt, Artificial Sequence
  GATA2 Guide RNA
ucuggcggccgaaugggagggc

SEQ ID NO: 11252 - RNA, 22 nt, Artificial Sequence
  GATA2 Guide RNA
ucuucuggcggccgaaugggag

SEQ ID NO: 11253 - RNA, 22 nt, Artificial Sequence
  GATA2 Guide RNA
ugacgcugccuugcccucccau

SEQ ID NO: 11254 - RNA, 22 nt, Artificial Sequence
  GATA2 Guide RNA
ugcccucccauucggccgccag

SEQ ID NO: 11255 - RNA, 22 nt, Artificial Sequence
  GATA2 Guide RNA
ugccuugcccucccauucggcc

SEQ ID NO: 11256 - RNA, 22 nt, Artificial Sequence
  GATA2 Guide RNA
ugcugacgcugccuugcccucc

SEQ ID NO: 11257 - RNA, 22 nt, Artificial Sequence
  GATA2 Guide RNA
uggcggccgaaugggagggcaa

SEQ ID NO: 11258 - RNA, 22 nt, Artificial Sequence
  GATA2 Guide RNA
uucuggcggccgaaugggaggg

SEQ ID NO: 11259 - RNA, 22 nt, Artificial Sequence
  GATA2 Guide RNA
uugcccucccauucggccgcca

SEQ ID NO: 11260 - RNA, 20 nt, Artificial Sequence
  GATA2 Guide RNA
aaaaacucgcagaguccaga

SEQ ID NO: 11261 - RNA, 20 nt, Artificial Sequence
  GATA2 Guide RNA
aaaacucgcagaguccagaa

SEQ ID NO: 11262 - RNA, 20 nt, Artificial Sequence
  GATA2 Guide RNA
aaacucgcagaguccagaaa

SEQ ID NO: 11263 - RNA, 20 nt, Artificial Sequence
  GATA2 Guide RNA
aaacuucguguaucuguuuc

SEQ ID NO: 11264 - RNA, 20 nt, Artificial Sequence
  GATA2 Guide RNA
aacucgcagaguccagaaac

SEQ ID NO: 11265 - RNA, 20 nt, Artificial Sequence
  GATA2 Guide RNA
aacuucguguaucuguuucu

SEQ ID NO: 11266 - RNA, 20 nt, Artificial Sequence
  GATA2 Guide RNA
acucgcagaguccagaaaca

SEQ ID NO: 11267 - RNA, 20 nt, Artificial Sequence
  GATA2 Guide RNA
acucuaaaaacucgcagagu

SEQ ID NO: 11268 - RNA, 20 nt, Artificial Sequence
  GATA2 Guide RNA
acuucguguaucuguuucug

SEQ ID NO: 11269 - RNA, 20 nt, Artificial Sequence
  GATA2 Guide RNA
agaaacagauacacgaaguu

SEQ ID NO: 11270 - RNA, 20 nt, Artificial Sequence
  GATA2 Guide RNA
agaguccagaaacagauaca

SEQ ID NO: 11271 - RNA, 20 nt, Artificial Sequence
  GATA2 Guide RNA
aggaaacuucguguaucugu

SEQ ID NO: 11272 - RNA, 20 nt, Artificial Sequence
  GATA2 Guide RNA
aguccagaaacagauacacg

SEQ ID NO: 11273 - RNA, 20 nt, Artificial Sequence
  GATA2 Guide RNA
aucuguuucuggacucugcg

SEQ ID NO: 11274 - RNA, 20 nt, Artificial Sequence
  GATA2 Guide RNA
cagaaacagauacacgaagu

SEQ ID NO: 11275 - RNA, 20 nt, Artificial Sequence
  GATA2 Guide RNA
cagaguccagaaacagauac

SEQ ID NO: 11276 - RNA, 20 nt, Artificial Sequence
  GATA2 Guide RNA
ccagaaacagauacacgaag

SEQ ID NO: 11277 - RNA, 20 nt, Artificial Sequence
  GATA2 Guide RNA
cgcagaguccagaaacagau

SEQ ID NO: 11278 - RNA, 20 nt, Artificial Sequence
  GATA2 Guide RNA
cguguaucuguuucuggacu

SEQ ID NO: 11279 - RNA, 20 nt, Artificial Sequence
  GATA2 Guide RNA
cuaaaaacucgcagagucca

SEQ ID NO: 11280 - RNA, 20 nt, Artificial Sequence
  GATA2 Guide RNA
cucgcagaguccagaaacag

SEQ ID NO: 11281 - RNA, 20 nt, Artificial Sequence
  GATA2 Guide RNA
cucuaaaaacucgcagaguc

SEQ ID NO: 11282 - RNA, 20 nt, Artificial Sequence
  GATA2 Guide RNA
cuggacucugcgaguuuuua

SEQ ID NO: 11283 - RNA, 20 nt, Artificial Sequence
  GATA2 Guide RNA
cuguuucuggacucugcgag

SEQ ID NO: 11284 - RNA, 20 nt, Artificial Sequence
  GATA2 Guide RNA
cuucguguaucuguuucugg

SEQ ID NO: 11285 - RNA, 20 nt, Artificial Sequence
  GATA2 Guide RNA
gaaacuucguguaucuguuu

SEQ ID NO: 11286 - RNA, 20 nt, Artificial Sequence
  GATA2 Guide RNA
gaguccagaaacagauacac

SEQ ID NO: 11287 - RNA, 20 nt, Artificial Sequence
  GATA2 Guide RNA
gcagaguccagaaacagaua

SEQ ID NO: 11288 - RNA, 20 nt, Artificial Sequence
  GATA2 Guide RNA
ggaaacuucguguaucuguu

SEQ ID NO: 11289 - RNA, 20 nt, Artificial Sequence
  GATA2 Guide RNA
guaucuguuucuggacucug

SEQ ID NO: 11290 - RNA, 20 nt, Artificial Sequence
  GATA2 Guide RNA
guccagaaacagauacacga

SEQ ID NO: 11291 - RNA, 20 nt, Artificial Sequence
  GATA2 Guide RNA
guguaucuguuucuggacuc

SEQ ID NO: 11292 - RNA, 20 nt, Artificial Sequence
  GATA2 Guide RNA
guuucuggacucugcgaguu

SEQ ID NO: 11293 - RNA, 20 nt, Artificial Sequence
  GATA2 Guide RNA
uaaaaacucgcagaguccag

SEQ ID NO: 11294 - RNA, 20 nt, Artificial Sequence
  GATA2 Guide RNA
uaucuguuucuggacucugc

SEQ ID NO: 11295 - RNA, 20 nt, Artificial Sequence
  GATA2 Guide RNA
uccagaaacagauacacgaa

SEQ ID NO: 11296 - RNA, 20 nt, Artificial Sequence
  GATA2 Guide RNA
ucgcagaguccagaaacaga

SEQ ID NO: 11297 - RNA, 20 nt, Artificial Sequence
  GATA2 Guide RNA
ucguguaucuguuucuggac

SEQ ID NO: 11298 - RNA, 20 nt, Artificial Sequence
  GATA2 Guide RNA
ucuaaaaacucgcagagucc

SEQ ID NO: 11299 - RNA, 20 nt, Artificial Sequence
  GATA2 Guide RNA
ucuggacucugcgaguuuuu

SEQ ID NO: 11300 - RNA, 20 nt, Artificial Sequence
  GATA2 Guide RNA
ucuguuucuggacucugcga

SEQ ID NO: 11301 - RNA, 20 nt, Artificial Sequence
  GATA2 Guide RNA
uguaucuguuucuggacucu

SEQ ID NO: 11302 - RNA, 20 nt, Artificial Sequence
  GATA2 Guide RNA
uguuucuggacucugcgagu

SEQ ID NO: 11303 - RNA, 20 nt, Artificial Sequence
  GATA2 Guide RNA
uucguguaucuguuucugga

SEQ ID NO: 11304 - RNA, 20 nt, Artificial Sequence
  GATA2 Guide RNA
uucuggacucugcgaguuuu

SEQ ID NO: 11305 - RNA, 20 nt, Artificial Sequence
  GATA2 Guide RNA
uuucuggacucugcgaguuu

SEQ ID NO: 11306 - RNA, 21 nt, Artificial Sequence
  GATA2 Guide RNA
aaaaacucgcagaguccagaa

SEQ ID NO: 11307 - RNA, 21 nt, Artificial Sequence
  GATA2 Guide RNA
aaaacucgcagaguccagaaa

SEQ ID NO: 11308 - RNA, 21 nt, Artificial Sequence
  GATA2 Guide RNA
aaacucgcagaguccagaaac

SEQ ID NO: 11309 - RNA, 21 nt, Artificial Sequence
  GATA2 Guide RNA
aaacuucguguaucuguuucu

SEQ ID NO: 11310 - RNA, 21 nt, Artificial Sequence
  GATA2 Guide RNA
aacucgcagaguccagaaaca

SEQ ID NO: 11311 - RNA, 21 nt, Artificial Sequence
  GATA2 Guide RNA
aacuucguguaucuguuucug

SEQ ID NO: 11312 - RNA, 21 nt, Artificial Sequence
  GATA2 Guide RNA
aaggaaacuucguguaucugu

SEQ ID NO: 11313 - RNA, 21 nt, Artificial Sequence
  GATA2 Guide RNA
acucgcagaguccagaaacag

SEQ ID NO: 11314 - RNA, 21 nt, Artificial Sequence
  GATA2 Guide RNA
acucuaaaaacucgcagaguc

SEQ ID NO: 11315 - RNA, 21 nt, Artificial Sequence
  GATA2 Guide RNA
acuucguguaucuguuucugg

SEQ ID NO: 11316 - RNA, 21 nt, Artificial Sequence
  GATA2 Guide RNA
agaaacagauacacgaaguuu

SEQ ID NO: 11317 - RNA, 21 nt, Artificial Sequence
  GATA2 Guide RNA
agaguccagaaacagauacac

SEQ ID NO: 11318 - RNA, 21 nt, Artificial Sequence
  GATA2 Guide RNA
aggaaacuucguguaucuguu

SEQ ID NO: 11319 - RNA, 21 nt, Artificial Sequence
  GATA2 Guide RNA
aguccagaaacagauacacga

SEQ ID NO: 11320 - RNA, 21 nt, Artificial Sequence
  GATA2 Guide RNA
aucuguuucuggacucugcga

SEQ ID NO: 11321 - RNA, 21 nt, Artificial Sequence
  GATA2 Guide RNA
cagaaacagauacacgaaguu

SEQ ID NO: 11322 - RNA, 21 nt, Artificial Sequence
  GATA2 Guide RNA
cagaguccagaaacagauaca

SEQ ID NO: 11323 - RNA, 21 nt, Artificial Sequence
  GATA2 Guide RNA
ccagaaacagauacacgaagu

SEQ ID NO: 11324 - RNA, 21 nt, Artificial Sequence
  GATA2 Guide RNA
cgcagaguccagaaacagaua

SEQ ID NO: 11325 - RNA, 21 nt, Artificial Sequence
  GATA2 Guide RNA
cguguaucuguuucuggacuc

SEQ ID NO: 11326 - RNA, 21 nt, Artificial Sequence
  GATA2 Guide RNA
cuaaaaacucgcagaguccag

SEQ ID NO: 11327 - RNA, 21 nt, Artificial Sequence
  GATA2 Guide RNA
cucgcagaguccagaaacaga

SEQ ID NO: 11328 - RNA, 21 nt, Artificial Sequence
  GATA2 Guide RNA
cucuaaaaacucgcagagucc

SEQ ID NO: 11329 - RNA, 21 nt, Artificial Sequence
  GATA2 Guide RNA
cuggacucugcgaguuuuuag

SEQ ID NO: 11330 - RNA, 21 nt, Artificial Sequence
  GATA2 Guide RNA
cuguuucuggacucugcgagu

SEQ ID NO: 11331 - RNA, 21 nt, Artificial Sequence
  GATA2 Guide RNA
cuucguguaucuguuucugga

SEQ ID NO: 11332 - RNA, 21 nt, Artificial Sequence
  GATA2 Guide RNA
gaaacuucguguaucuguuuc

SEQ ID NO: 11333 - RNA, 21 nt, Artificial Sequence
  GATA2 Guide RNA
gacucuaaaaacucgcagagu

SEQ ID NO: 11334 - RNA, 21 nt, Artificial Sequence
  GATA2 Guide RNA
gaguccagaaacagauacacg

SEQ ID NO: 11335 - RNA, 21 nt, Artificial Sequence
  GATA2 Guide RNA
gcagaguccagaaacagauac

SEQ ID NO: 11336 - RNA, 21 nt, Artificial Sequence
  GATA2 Guide RNA
ggaaacuucguguaucuguuu

SEQ ID NO: 11337 - RNA, 21 nt, Artificial Sequence
  GATA2 Guide RNA
guaucuguuucuggacucugc

SEQ ID NO: 11338 - RNA, 21 nt, Artificial Sequence
  GATA2 Guide RNA
guccagaaacagauacacgaa

SEQ ID NO: 11339 - RNA, 21 nt, Artificial Sequence
  GATA2 Guide RNA
guguaucuguuucuggacucu

SEQ ID NO: 11340 - RNA, 21 nt, Artificial Sequence
  GATA2 Guide RNA
guuucuggacucugcgaguuu

SEQ ID NO: 11341 - RNA, 21 nt, Artificial Sequence
  GATA2 Guide RNA
uaaaaacucgcagaguccaga

SEQ ID NO: 11342 - RNA, 21 nt, Artificial Sequence
  GATA2 Guide RNA
uaucuguuucuggacucugcg

SEQ ID NO: 11343 - RNA, 21 nt, Artificial Sequence
  GATA2 Guide RNA
uccagaaacagauacacgaag

SEQ ID NO: 11344 - RNA, 21 nt, Artificial Sequence
  GATA2 Guide RNA
ucgcagaguccagaaacagau

SEQ ID NO: 11345 - RNA, 21 nt, Artificial Sequence
  GATA2 Guide RNA
ucguguaucuguuucuggacu

SEQ ID NO: 11346 - RNA, 21 nt, Artificial Sequence
  GATA2 Guide RNA
ucuaaaaacucgcagagucca

SEQ ID NO: 11347 - RNA, 21 nt, Artificial Sequence
  GATA2 Guide RNA
ucuggacucugcgaguuuuua

SEQ ID NO: 11348 - RNA, 21 nt, Artificial Sequence
  GATA2 Guide RNA
ucuguuucuggacucugcgag

SEQ ID NO: 11349 - RNA, 21 nt, Artificial Sequence
  GATA2 Guide RNA
uguaucuguuucuggacucug

SEQ ID NO: 11350 - RNA, 21 nt, Artificial Sequence
  GATA2 Guide RNA
uguuucuggacucugcgaguu

SEQ ID NO: 11351 - RNA, 21 nt, Artificial Sequence
  GATA2 Guide RNA
uucguguaucuguuucuggac

SEQ ID NO: 11352 - RNA, 21 nt, Artificial Sequence
  GATA2 Guide RNA
uucuggacucugcgaguuuuu

SEQ ID NO: 11353 - RNA, 21 nt, Artificial Sequence
  GATA2 Guide RNA
uuucuggacucugcgaguuuu

SEQ ID NO: 11354 - RNA, 22 nt, Artificial Sequence
  GATA2 Guide RNA
aaaaacucgcagaguccagaaa

SEQ ID NO: 11355 - RNA, 22 nt, Artificial Sequence
  GATA2 Guide RNA
aaaacucgcagaguccagaaac

SEQ ID NO: 11356 - RNA, 22 nt, Artificial Sequence
  GATA2 Guide RNA
aaacucgcagaguccagaaaca

SEQ ID NO: 11357 - RNA, 22 nt, Artificial Sequence
  GATA2 Guide RNA
aaacuucguguaucuguuucug

SEQ ID NO: 11358 - RNA, 22 nt, Artificial Sequence
  GATA2 Guide RNA
aacucgcagaguccagaaacag

SEQ ID NO: 11359 - RNA, 22 nt, Artificial Sequence
  GATA2 Guide RNA
aacuucguguaucuguuucugg

SEQ ID NO: 11360 - RNA, 22 nt, Artificial Sequence
  GATA2 Guide RNA
aaggaaacuucguguaucuguu

SEQ ID NO: 11361 - RNA, 22 nt, Artificial Sequence
  GATA2 Guide RNA
acucgcagaguccagaaacaga

SEQ ID NO: 11362 - RNA, 22 nt, Artificial Sequence
  GATA2 Guide RNA
acucuaaaaacucgcagagucc

SEQ ID NO: 11363 - RNA, 22 nt, Artificial Sequence
  GATA2 Guide RNA
acuucguguaucuguuucugga

SEQ ID NO: 11364 - RNA, 22 nt, Artificial Sequence
  GATA2 Guide RNA
agaaacagauacacgaaguuuc

SEQ ID NO: 11365 - RNA, 22 nt, Artificial Sequence
  GATA2 Guide RNA
agacucuaaaaacucgcagagu

SEQ ID NO: 11366 - RNA, 22 nt, Artificial Sequence
  GATA2 Guide RNA
agaguccagaaacagauacacg

SEQ ID NO: 11367 - RNA, 22 nt, Artificial Sequence
  GATA2 Guide RNA
aggaaacuucguguaucuguuu

SEQ ID NO: 11368 - RNA, 22 nt, Artificial Sequence
  GATA2 Guide RNA
aguccagaaacagauacacgaa

SEQ ID NO: 11369 - RNA, 22 nt, Artificial Sequence
  GATA2 Guide RNA
aucuguuucuggacucugcgag

SEQ ID NO: 11370 - RNA, 22 nt, Artificial Sequence
  GATA2 Guide RNA
cagaaacagauacacgaaguuu

SEQ ID NO: 11371 - RNA, 22 nt, Artificial Sequence
  GATA2 Guide RNA
cagaguccagaaacagauacac

SEQ ID NO: 11372 - RNA, 22 nt, Artificial Sequence
  GATA2 Guide RNA
ccagaaacagauacacgaaguu

SEQ ID NO: 11373 - RNA, 22 nt, Artificial Sequence
  GATA2 Guide RNA
cgcagaguccagaaacagauac

SEQ ID NO: 11374 - RNA, 22 nt, Artificial Sequence
  GATA2 Guide RNA
cguguaucuguuucuggacucu

SEQ ID NO: 11375 - RNA, 22 nt, Artificial Sequence
  GATA2 Guide RNA
cuaaaaacucgcagaguccaga

SEQ ID NO: 11376 - RNA, 22 nt, Artificial Sequence
  GATA2 Guide RNA
cucgcagaguccagaaacagau

SEQ ID NO: 11377 - RNA, 22 nt, Artificial Sequence
  GATA2 Guide RNA
cucuaaaaacucgcagagucca

SEQ ID NO: 11378 - RNA, 22 nt, Artificial Sequence
  GATA2 Guide RNA
cuggacucugcgaguuuuuaga

SEQ ID NO: 11379 - RNA, 22 nt, Artificial Sequence
  GATA2 Guide RNA
cuguuucuggacucugcgaguu

SEQ ID NO: 11380 - RNA, 22 nt, Artificial Sequence
  GATA2 Guide RNA
cuucguguaucuguuucuggac

SEQ ID NO: 11381 - RNA, 22 nt, Artificial Sequence
  GATA2 Guide RNA
gaaacuucguguaucuguuucu

SEQ ID NO: 11382 - RNA, 22 nt, Artificial Sequence
  GATA2 Guide RNA
gacucuaaaaacucgcagaguc

SEQ ID NO: 11383 - RNA, 22 nt, Artificial Sequence
  GATA2 Guide RNA
gaguccagaaacagauacacga

SEQ ID NO: 11384 - RNA, 22 nt, Artificial Sequence
  GATA2 Guide RNA
gcagaguccagaaacagauaca

SEQ ID NO: 11385 - RNA, 22 nt, Artificial Sequence
  GATA2 Guide RNA
ggaaacuucguguaucuguuuc

SEQ ID NO: 11386 - RNA, 22 nt, Artificial Sequence
  GATA2 Guide RNA
guaucuguuucuggacucugcg

SEQ ID NO: 11387 - RNA, 22 nt, Artificial Sequence
  GATA2 Guide RNA
guccagaaacagauacacgaag

SEQ ID NO: 11388 - RNA, 22 nt, Artificial Sequence
  GATA2 Guide RNA
guguaucuguuucuggacucug

SEQ ID NO: 11389 - RNA, 22 nt, Artificial Sequence
  GATA2 Guide RNA
guuucuggacucugcgaguuuu

SEQ ID NO: 11390 - RNA, 22 nt, Artificial Sequence
  GATA2 Guide RNA
uaaaaacucgcagaguccagaa

SEQ ID NO: 11391 - RNA, 22 nt, Artificial Sequence
  GATA2 Guide RNA
uaaggaaacuucguguaucugu

SEQ ID NO: 11392 - RNA, 22 nt, Artificial Sequence
  GATA2 Guide RNA
uaucuguuucuggacucugcga

SEQ ID NO: 11393 - RNA, 22 nt, Artificial Sequence
  GATA2 Guide RNA
uccagaaacagauacacgaagu

SEQ ID NO: 11394 - RNA, 22 nt, Artificial Sequence
  GATA2 Guide RNA
ucgcagaguccagaaacagaua

SEQ ID NO: 11395 - RNA, 22 nt, Artificial Sequence
  GATA2 Guide RNA
ucguguaucuguuucuggacuc

SEQ ID NO: 11396 - RNA, 22 nt, Artificial Sequence
  GATA2 Guide RNA
ucuaaaaacucgcagaguccag

SEQ ID NO: 11397 - RNA, 22 nt, Artificial Sequence
  GATA2 Guide RNA
ucuggacucugcgaguuuuuag

SEQ ID NO: 11398 - RNA, 22 nt, Artificial Sequence
  GATA2 Guide RNA
ucuguuucuggacucugcgagu

SEQ ID NO: 11399 - RNA, 22 nt, Artificial Sequence
  GATA2 Guide RNA
uguaucuguuucuggacucugc

SEQ ID NO: 11400 - RNA, 22 nt, Artificial Sequence
  GATA2 Guide RNA
uguuucuggacucugcgaguuu

SEQ ID NO: 11401 - RNA, 22 nt, Artificial Sequence
  GATA2 Guide RNA
uucguguaucuguuucuggacu

SEQ ID NO: 11402 - RNA, 22 nt, Artificial Sequence
  GATA2 Guide RNA
uucuggacucugcgaguuuuua

SEQ ID NO: 11403 - RNA, 22 nt, Artificial Sequence
  GATA2 Guide RNA
uuucuggacucugcgaguuuuu

SEQ ID NO: 11404 - RNA, 20 nt, Artificial Sequence
  GATA2 Guide RNA
agaugucuggauaggaaacu

SEQ ID NO: 11405 - RNA, 20 nt, Artificial Sequence
  GATA2 Guide RNA
aggcugcagaugucuggaua

SEQ ID NO: 11406 - RNA, 20 nt, Artificial Sequence
  GATA2 Guide RNA
aguuuccuauccagacaucu

SEQ ID NO: 11407 - RNA, 20 nt, Artificial Sequence
  GATA2 Guide RNA
auccagacaucugcagccug

SEQ ID NO: 11408 - RNA, 20 nt, Artificial Sequence
  GATA2 Guide RNA
aucuucaggcugcagauguc

SEQ ID NO: 11409 - RNA, 20 nt, Artificial Sequence
  GATA2 Guide RNA
augucuggauaggaaacucc

SEQ ID NO: 11410 - RNA, 20 nt, Artificial Sequence
  GATA2 Guide RNA
cagacaucugcagccugaag

SEQ ID NO: 11411 - RNA, 20 nt, Artificial Sequence
  GATA2 Guide RNA
cagaugucuggauaggaaac

SEQ ID NO: 11412 - RNA, 20 nt, Artificial Sequence
  GATA2 Guide RNA
caggcugcagaugucuggau

SEQ ID NO: 11413 - RNA, 20 nt, Artificial Sequence
  GATA2 Guide RNA
ccagacaucugcagccugaa

SEQ ID NO: 11414 - RNA, 20 nt, Artificial Sequence
  GATA2 Guide RNA
ccggaguuuccuauccagac

SEQ ID NO: 11415 - RNA, 20 nt, Artificial Sequence
  GATA2 Guide RNA
ccuauccagacaucugcagc

SEQ ID NO: 11416 - RNA, 20 nt, Artificial Sequence
  GATA2 Guide RNA
ccugccggaguuuccuaucc

SEQ ID NO: 11417 - RNA, 20 nt, Artificial Sequence
  GATA2 Guide RNA
cggaguuuccuauccagaca

SEQ ID NO: 11418 - RNA, 20 nt, Artificial Sequence
  GATA2 Guide RNA
cuauccagacaucugcagcc

SEQ ID NO: 11419 - RNA, 20 nt, Artificial Sequence
  GATA2 Guide RNA
cuccugccggaguuuccuau

SEQ ID NO: 11420 - RNA, 20 nt, Artificial Sequence
  GATA2 Guide RNA
cugcagaugucuggauagga

SEQ ID NO: 11421 - RNA, 20 nt, Artificial Sequence
  GATA2 Guide RNA
cugccggaguuuccuaucca

SEQ ID NO: 11422 - RNA, 20 nt, Artificial Sequence
  GATA2 Guide RNA
cuggauaggaaacuccggca

SEQ ID NO: 11423 - RNA, 20 nt, Artificial Sequence
  GATA2 Guide RNA
cuucaggcugcagaugucug

SEQ ID NO: 11424 - RNA, 20 nt, Artificial Sequence
  GATA2 Guide RNA
gaguuuccuauccagacauc

SEQ ID NO: 11425 - RNA, 20 nt, Artificial Sequence
  GATA2 Guide RNA
gaugucuggauaggaaacuc

SEQ ID NO: 11426 - RNA, 20 nt, Artificial Sequence
  GATA2 Guide RNA
gcagaugucuggauaggaaa

SEQ ID NO: 11427 - RNA, 20 nt, Artificial Sequence
  GATA2 Guide RNA
gccggaguuuccuauccaga

SEQ ID NO: 11428 - RNA, 20 nt, Artificial Sequence
  GATA2 Guide RNA
gcugcagaugucuggauagg

SEQ ID NO: 11429 - RNA, 20 nt, Artificial Sequence
  GATA2 Guide RNA
ggaguuuccuauccagacau

SEQ ID NO: 11430 - RNA, 20 nt, Artificial Sequence
  GATA2 Guide RNA
ggcugcagaugucuggauag

SEQ ID NO: 11431 - RNA, 20 nt, Artificial Sequence
  GATA2 Guide RNA
gucuggauaggaaacuccgg

SEQ ID NO: 11432 - RNA, 20 nt, Artificial Sequence
  GATA2 Guide RNA
guuuccuauccagacaucug

SEQ ID NO: 11433 - RNA, 20 nt, Artificial Sequence
  GATA2 Guide RNA
uauccagacaucugcagccu

SEQ ID NO: 11434 - RNA, 20 nt, Artificial Sequence
  GATA2 Guide RNA
uaucuucaggcugcagaugu

SEQ ID NO: 11435 - RNA, 20 nt, Artificial Sequence
  GATA2 Guide RNA
ucaggcugcagaugucugga

SEQ ID NO: 11436 - RNA, 20 nt, Artificial Sequence
  GATA2 Guide RNA
uccagacaucugcagccuga

SEQ ID NO: 11437 - RNA, 20 nt, Artificial Sequence
  GATA2 Guide RNA
uccuauccagacaucugcag

SEQ ID NO: 11438 - RNA, 20 nt, Artificial Sequence
  GATA2 Guide RNA
uccugccggaguuuccuauc

SEQ ID NO: 11439 - RNA, 20 nt, Artificial Sequence
  GATA2 Guide RNA
ucuccugccggaguuuccua

SEQ ID NO: 11440 - RNA, 20 nt, Artificial Sequence
  GATA2 Guide RNA
ucuggauaggaaacuccggc

SEQ ID NO: 11441 - RNA, 20 nt, Artificial Sequence
  GATA2 Guide RNA
ucuucaggcugcagaugucu

SEQ ID NO: 11442 - RNA, 20 nt, Artificial Sequence
  GATA2 Guide RNA
ugcagaugucuggauaggaa

SEQ ID NO: 11443 - RNA, 20 nt, Artificial Sequence
  GATA2 Guide RNA
ugccggaguuuccuauccag

SEQ ID NO: 11444 - RNA, 20 nt, Artificial Sequence
  GATA2 Guide RNA
uggauaggaaacuccggcag

SEQ ID NO: 11445 - RNA, 20 nt, Artificial Sequence
  GATA2 Guide RNA
ugucuggauaggaaacuccg

SEQ ID NO: 11446 - RNA, 20 nt, Artificial Sequence
  GATA2 Guide RNA
uuaucuucaggcugcagaug

SEQ ID NO: 11447 - RNA, 20 nt, Artificial Sequence
  GATA2 Guide RNA
uucaggcugcagaugucugg

SEQ ID NO: 11448 - RNA, 20 nt, Artificial Sequence
  GATA2 Guide RNA
uuccuauccagacaucugca

SEQ ID NO: 11449 - RNA, 20 nt, Artificial Sequence
  GATA2 Guide RNA
uuuccuauccagacaucugc

SEQ ID NO: 11450 - RNA, 21 nt, Artificial Sequence
  GATA2 Guide RNA
agaugucuggauaggaaacuc

SEQ ID NO: 11451 - RNA, 21 nt, Artificial Sequence
  GATA2 Guide RNA
aggcugcagaugucuggauag

SEQ ID NO: 11452 - RNA, 21 nt, Artificial Sequence
  GATA2 Guide RNA
aguuuccuauccagacaucug

SEQ ID NO: 11453 - RNA, 21 nt, Artificial Sequence
  GATA2 Guide RNA
auccagacaucugcagccuga

SEQ ID NO: 11454 - RNA, 21 nt, Artificial Sequence
  GATA2 Guide RNA
aucuccugccggaguuuccua

SEQ ID NO: 11455 - RNA, 21 nt, Artificial Sequence
  GATA2 Guide RNA
aucuucaggcugcagaugucu

SEQ ID NO: 11456 - RNA, 21 nt, Artificial Sequence
  GATA2 Guide RNA
augucuggauaggaaacuccg

SEQ ID NO: 11457 - RNA, 21 nt, Artificial Sequence
  GATA2 Guide RNA
cagacaucugcagccugaaga

SEQ ID NO: 11458 - RNA, 21 nt, Artificial Sequence
  GATA2 Guide RNA
cagaugucuggauaggaaacu

SEQ ID NO: 11459 - RNA, 21 nt, Artificial Sequence
  GATA2 Guide RNA
caggcugcagaugucuggaua

SEQ ID NO: 11460 - RNA, 21 nt, Artificial Sequence
  GATA2 Guide RNA
ccagacaucugcagccugaag

SEQ ID NO: 11461 - RNA, 21 nt, Artificial Sequence
  GATA2 Guide RNA
ccggaguuuccuauccagaca

SEQ ID NO: 11462 - RNA, 21 nt, Artificial Sequence
  GATA2 Guide RNA
ccuauccagacaucugcagcc

SEQ ID NO: 11463 - RNA, 21 nt, Artificial Sequence
  GATA2 Guide RNA
ccugccggaguuuccuaucca

SEQ ID NO: 11464 - RNA, 21 nt, Artificial Sequence
  GATA2 Guide RNA
cggaguuuccuauccagacau

SEQ ID NO: 11465 - RNA, 21 nt, Artificial Sequence
  GATA2 Guide RNA
cuauccagacaucugcagccu

SEQ ID NO: 11466 - RNA, 21 nt, Artificial Sequence
  GATA2 Guide RNA
cuccugccggaguuuccuauc

SEQ ID NO: 11467 - RNA, 21 nt, Artificial Sequence
  GATA2 Guide RNA
cugcagaugucuggauaggaa

SEQ ID NO: 11468 - RNA, 21 nt, Artificial Sequence
  GATA2 Guide RNA
cugccggaguuuccuauccag

SEQ ID NO: 11469 - RNA, 21 nt, Artificial Sequence
  GATA2 Guide RNA
cuggauaggaaacuccggcag

SEQ ID NO: 11470 - RNA, 21 nt, Artificial Sequence
  GATA2 Guide RNA
cuuaucuucaggcugcagaug

SEQ ID NO: 11471 - RNA, 21 nt, Artificial Sequence
  GATA2 Guide RNA
cuucaggcugcagaugucugg

SEQ ID NO: 11472 - RNA, 21 nt, Artificial Sequence
  GATA2 Guide RNA
gaguuuccuauccagacaucu

SEQ ID NO: 11473 - RNA, 21 nt, Artificial Sequence
  GATA2 Guide RNA
gaugucuggauaggaaacucc

SEQ ID NO: 11474 - RNA, 21 nt, Artificial Sequence
  GATA2 Guide RNA
gcagaugucuggauaggaaac

SEQ ID NO: 11475 - RNA, 21 nt, Artificial Sequence
  GATA2 Guide RNA
gccggaguuuccuauccagac

SEQ ID NO: 11476 - RNA, 21 nt, Artificial Sequence
  GATA2 Guide RNA
gcugcagaugucuggauagga

SEQ ID NO: 11477 - RNA, 21 nt, Artificial Sequence
  GATA2 Guide RNA
ggaguuuccuauccagacauc

SEQ ID NO: 11478 - RNA, 21 nt, Artificial Sequence
  GATA2 Guide RNA
ggcugcagaugucuggauagg

SEQ ID NO: 11479 - RNA, 21 nt, Artificial Sequence
  GATA2 Guide RNA
gucuggauaggaaacuccggc

SEQ ID NO: 11480 - RNA, 21 nt, Artificial Sequence
  GATA2 Guide RNA
guuuccuauccagacaucugc

SEQ ID NO: 11481 - RNA, 21 nt, Artificial Sequence
  GATA2 Guide RNA
uauccagacaucugcagccug

SEQ ID NO: 11482 - RNA, 21 nt, Artificial Sequence
  GATA2 Guide RNA
uaucuucaggcugcagauguc

SEQ ID NO: 11483 - RNA, 21 nt, Artificial Sequence
  GATA2 Guide RNA
ucaggcugcagaugucuggau

SEQ ID NO: 11484 - RNA, 21 nt, Artificial Sequence
  GATA2 Guide RNA
uccagacaucugcagccugaa

SEQ ID NO: 11485 - RNA, 21 nt, Artificial Sequence
  GATA2 Guide RNA
uccuauccagacaucugcagc

SEQ ID NO: 11486 - RNA, 21 nt, Artificial Sequence
  GATA2 Guide RNA
uccugccggaguuuccuaucc

SEQ ID NO: 11487 - RNA, 21 nt, Artificial Sequence
  GATA2 Guide RNA
ucuccugccggaguuuccuau

SEQ ID NO: 11488 - RNA, 21 nt, Artificial Sequence
  GATA2 Guide RNA
ucuggauaggaaacuccggca

SEQ ID NO: 11489 - RNA, 21 nt, Artificial Sequence
  GATA2 Guide RNA
ucuucaggcugcagaugucug

SEQ ID NO: 11490 - RNA, 21 nt, Artificial Sequence
  GATA2 Guide RNA
ugcagaugucuggauaggaaa

SEQ ID NO: 11491 - RNA, 21 nt, Artificial Sequence
  GATA2 Guide RNA
ugccggaguuuccuauccaga

SEQ ID NO: 11492 - RNA, 21 nt, Artificial Sequence
  GATA2 Guide RNA
uggauaggaaacuccggcagg

SEQ ID NO: 11493 - RNA, 21 nt, Artificial Sequence
  GATA2 Guide RNA
ugucuggauaggaaacuccgg

SEQ ID NO: 11494 - RNA, 21 nt, Artificial Sequence
  GATA2 Guide RNA
uuaucuucaggcugcagaugu

SEQ ID NO: 11495 - RNA, 21 nt, Artificial Sequence
  GATA2 Guide RNA
uucaggcugcagaugucugga

SEQ ID NO: 11496 - RNA, 21 nt, Artificial Sequence
  GATA2 Guide RNA
uuccuauccagacaucugcag

SEQ ID NO: 11497 - RNA, 21 nt, Artificial Sequence
  GATA2 Guide RNA
uuuccuauccagacaucugca

SEQ ID NO: 11498 - RNA, 22 nt, Artificial Sequence
  GATA2 Guide RNA
agaugucuggauaggaaacucc

SEQ ID NO: 11499 - RNA, 22 nt, Artificial Sequence
  GATA2 Guide RNA
aggcugcagaugucuggauagg

SEQ ID NO: 11500 - RNA, 22 nt, Artificial Sequence
  GATA2 Guide RNA
aguuuccuauccagacaucugc

SEQ ID NO: 11501 - RNA, 22 nt, Artificial Sequence
  GATA2 Guide RNA
auccagacaucugcagccugaa

SEQ ID NO: 11502 - RNA, 22 nt, Artificial Sequence
  GATA2 Guide RNA
aucuccugccggaguuuccuau

SEQ ID NO: 11503 - RNA, 22 nt, Artificial Sequence
  GATA2 Guide RNA
aucuucaggcugcagaugucug

SEQ ID NO: 11504 - RNA, 22 nt, Artificial Sequence
  GATA2 Guide RNA
augucuggauaggaaacuccgg

SEQ ID NO: 11505 - RNA, 22 nt, Artificial Sequence
  GATA2 Guide RNA
cagacaucugcagccugaagau

SEQ ID NO: 11506 - RNA, 22 nt, Artificial Sequence
  GATA2 Guide RNA
cagaugucuggauaggaaacuc

SEQ ID NO: 11507 - RNA, 22 nt, Artificial Sequence
  GATA2 Guide RNA
caggcugcagaugucuggauag

SEQ ID NO: 11508 - RNA, 22 nt, Artificial Sequence
  GATA2 Guide RNA
ccagacaucugcagccugaaga

SEQ ID NO: 11509 - RNA, 22 nt, Artificial Sequence
  GATA2 Guide RNA
ccggaguuuccuauccagacau

SEQ ID NO: 11510 - RNA, 22 nt, Artificial Sequence
  GATA2 Guide RNA
ccuauccagacaucugcagccu

SEQ ID NO: 11511 - RNA, 22 nt, Artificial Sequence
  GATA2 Guide RNA
ccugccggaguuuccuauccag

SEQ ID NO: 11512 - RNA, 22 nt, Artificial Sequence
  GATA2 Guide RNA
ccuuaucuucaggcugcagaug

SEQ ID NO: 11513 - RNA, 22 nt, Artificial Sequence
  GATA2 Guide RNA
cggaguuuccuauccagacauc

SEQ ID NO: 11514 - RNA, 22 nt, Artificial Sequence
  GATA2 Guide RNA
cuauccagacaucugcagccug

SEQ ID NO: 11515 - RNA, 22 nt, Artificial Sequence
  GATA2 Guide RNA
cuccugccggaguuuccuaucc

SEQ ID NO: 11516 - RNA, 22 nt, Artificial Sequence
  GATA2 Guide RNA
cugcagaugucuggauaggaaa

SEQ ID NO: 11517 - RNA, 22 nt, Artificial Sequence
  GATA2 Guide RNA
cugccggaguuuccuauccaga

SEQ ID NO: 11518 - RNA, 22 nt, Artificial Sequence
  GATA2 Guide RNA
cuggauaggaaacuccggcagg

SEQ ID NO: 11519 - RNA, 22 nt, Artificial Sequence
  GATA2 Guide RNA
cuuaucuucaggcugcagaugu

SEQ ID NO: 11520 - RNA, 22 nt, Artificial Sequence
  GATA2 Guide RNA
cuucaggcugcagaugucugga

SEQ ID NO: 11521 - RNA, 22 nt, Artificial Sequence
  GATA2 Guide RNA
gaguuuccuauccagacaucug

SEQ ID NO: 11522 - RNA, 22 nt, Artificial Sequence
  GATA2 Guide RNA
gaucuccugccggaguuuccua

SEQ ID NO: 11523 - RNA, 22 nt, Artificial Sequence
  GATA2 Guide RNA
gaugucuggauaggaaacuccg

SEQ ID NO: 11524 - RNA, 22 nt, Artificial Sequence
  GATA2 Guide RNA
gcagaugucuggauaggaaacu

SEQ ID NO: 11525 - RNA, 22 nt, Artificial Sequence
  GATA2 Guide RNA
gccggaguuuccuauccagaca

SEQ ID NO: 11526 - RNA, 22 nt, Artificial Sequence
  GATA2 Guide RNA
gcugcagaugucuggauaggaa

SEQ ID NO: 11527 - RNA, 22 nt, Artificial Sequence
  GATA2 Guide RNA
ggaguuuccuauccagacaucu

SEQ ID NO: 11528 - RNA, 22 nt, Artificial Sequence
  GATA2 Guide RNA
ggcugcagaugucuggauagga

SEQ ID NO: 11529 - RNA, 22 nt, Artificial Sequence
  GATA2 Guide RNA
gucuggauaggaaacuccggca

SEQ ID NO: 11530 - RNA, 22 nt, Artificial Sequence
  GATA2 Guide RNA
guuuccuauccagacaucugca

SEQ ID NO: 11531 - RNA, 22 nt, Artificial Sequence
  GATA2 Guide RNA
uauccagacaucugcagccuga

SEQ ID NO: 11532 - RNA, 22 nt, Artificial Sequence
  GATA2 Guide RNA
uaucuucaggcugcagaugucu

SEQ ID NO: 11533 - RNA, 22 nt, Artificial Sequence
  GATA2 Guide RNA
ucaggcugcagaugucuggaua

SEQ ID NO: 11534 - RNA, 22 nt, Artificial Sequence
  GATA2 Guide RNA
uccagacaucugcagccugaag

SEQ ID NO: 11535 - RNA, 22 nt, Artificial Sequence
  GATA2 Guide RNA
uccuauccagacaucugcagcc

SEQ ID NO: 11536 - RNA, 22 nt, Artificial Sequence
  GATA2 Guide RNA
uccugccggaguuuccuaucca

SEQ ID NO: 11537 - RNA, 22 nt, Artificial Sequence
  GATA2 Guide RNA
ucuccugccggaguuuccuauc

SEQ ID NO: 11538 - RNA, 22 nt, Artificial Sequence
  GATA2 Guide RNA
ucuggauaggaaacuccggcag

SEQ ID NO: 11539 - RNA, 22 nt, Artificial Sequence
  GATA2 Guide RNA
ucuucaggcugcagaugucugg

SEQ ID NO: 11540 - RNA, 22 nt, Artificial Sequence
  GATA2 Guide RNA
ugcagaugucuggauaggaaac

SEQ ID NO: 11541 - RNA, 22 nt, Artificial Sequence
  GATA2 Guide RNA
ugccggaguuuccuauccagac

SEQ ID NO: 11542 - RNA, 22 nt, Artificial Sequence
  GATA2 Guide RNA
uggauaggaaacuccggcagga

SEQ ID NO: 11543 - RNA, 22 nt, Artificial Sequence
  GATA2 Guide RNA
ugucuggauaggaaacuccggc

SEQ ID NO: 11544 - RNA, 22 nt, Artificial Sequence
  GATA2 Guide RNA
uuaucuucaggcugcagauguc

SEQ ID NO: 11545 - RNA, 22 nt, Artificial Sequence
  GATA2 Guide RNA
uucaggcugcagaugucuggau

SEQ ID NO: 11546 - RNA, 22 nt, Artificial Sequence
  GATA2 Guide RNA
uuccuauccagacaucugcagc

SEQ ID NO: 11547 - RNA, 22 nt, Artificial Sequence
  GATA2 Guide RNA
uuuccuauccagacaucugcag

SEQ ID NO: 11548 - RNA, 20 nt, Artificial Sequence
  GATA2 Guide RNA
aaacucuggcaggagauccg

SEQ ID NO: 11549 - RNA, 20 nt, Artificial Sequence
  GATA2 Guide RNA
aacucuggcaggagauccga

SEQ ID NO: 11550 - RNA, 20 nt, Artificial Sequence
  GATA2 Guide RNA
aaugcccuuucggaucuccu

SEQ ID NO: 11551 - RNA, 20 nt, Artificial Sequence
  GATA2 Guide RNA
acucuggcaggagauccgaa

SEQ ID NO: 11552 - RNA, 20 nt, Artificial Sequence
  GATA2 Guide RNA
agauguccggauaggaaacu

SEQ ID NO: 11553 - RNA, 20 nt, Artificial Sequence
  GATA2 Guide RNA
aggaaacucuggcaggagau

SEQ ID NO: 11554 - RNA, 20 nt, Artificial Sequence
  GATA2 Guide RNA
auaggaaacucuggcaggag

SEQ ID NO: 11555 - RNA, 20 nt, Artificial Sequence
  GATA2 Guide RNA
aucuccugccagaguuuccu

SEQ ID NO: 11556 - RNA, 20 nt, Artificial Sequence
  GATA2 Guide RNA
augcccuuucggaucuccug

SEQ ID NO: 11557 - RNA, 20 nt, Artificial Sequence
  GATA2 Guide RNA
auguccggauaggaaacucu

SEQ ID NO: 11558 - RNA, 20 nt, Artificial Sequence
  GATA2 Guide RNA
cagaguuuccuauccggaca

SEQ ID NO: 11559 - RNA, 20 nt, Artificial Sequence
  GATA2 Guide RNA
cagauguccggauaggaaac

SEQ ID NO: 11560 - RNA, 20 nt, Artificial Sequence
  GATA2 Guide RNA
ccagaguuuccuauccggac

SEQ ID NO: 11561 - RNA, 20 nt, Artificial Sequence
  GATA2 Guide RNA
cccuuucggaucuccugcca

SEQ ID NO: 11562 - RNA, 20 nt, Artificial Sequence
  GATA2 Guide RNA
ccggauaggaaacucuggca

SEQ ID NO: 11563 - RNA, 20 nt, Artificial Sequence
  GATA2 Guide RNA
ccugccagaguuuccuaucc

SEQ ID NO: 11564 - RNA, 20 nt, Artificial Sequence
  GATA2 Guide RNA
ccuuucggaucuccugccag

SEQ ID NO: 11565 - RNA, 20 nt, Artificial Sequence
  GATA2 Guide RNA
cggauaggaaacucuggcag

SEQ ID NO: 11566 - RNA, 20 nt, Artificial Sequence
  GATA2 Guide RNA
cggaucuccugccagaguuu

SEQ ID NO: 11567 - RNA, 20 nt, Artificial Sequence
  GATA2 Guide RNA
cuccugccagaguuuccuau

SEQ ID NO: 11568 - RNA, 20 nt, Artificial Sequence
  GATA2 Guide RNA
cucuggcaggagauccgaaa

SEQ ID NO: 11569 - RNA, 20 nt, Artificial Sequence
  GATA2 Guide RNA
cugccagaguuuccuauccg

SEQ ID NO: 11570 - RNA, 20 nt, Artificial Sequence
  GATA2 Guide RNA
cuggcaggagauccgaaagg

SEQ ID NO: 11571 - RNA, 20 nt, Artificial Sequence
  GATA2 Guide RNA
cuuucggaucuccugccaga

SEQ ID NO: 11572 - RNA, 20 nt, Artificial Sequence
  GATA2 Guide RNA
gaaacucuggcaggagaucc

SEQ ID NO: 11573 - RNA, 20 nt, Artificial Sequence
  GATA2 Guide RNA
gauaggaaacucuggcagga

SEQ ID NO: 11574 - RNA, 20 nt, Artificial Sequence
  GATA2 Guide RNA
gaucuccugccagaguuucc

SEQ ID NO: 11575 - RNA, 20 nt, Artificial Sequence
  GATA2 Guide RNA
gauguccggauaggaaacuc

SEQ ID NO: 11576 - RNA, 20 nt, Artificial Sequence
  GATA2 Guide RNA
gccagaguuuccuauccgga

SEQ ID NO: 11577 - RNA, 20 nt, Artificial Sequence
  GATA2 Guide RNA
gcccuuucggaucuccugcc

SEQ ID NO: 11578 - RNA, 20 nt, Artificial Sequence
  GATA2 Guide RNA
ggaaacucuggcaggagauc

SEQ ID NO: 11579 - RNA, 20 nt, Artificial Sequence
  GATA2 Guide RNA
ggauaggaaacucuggcagg

SEQ ID NO: 11580 - RNA, 20 nt, Artificial Sequence
  GATA2 Guide RNA
ggaucuccugccagaguuuc

SEQ ID NO: 11581 - RNA, 20 nt, Artificial Sequence
  GATA2 Guide RNA
guccggauaggaaacucugg

SEQ ID NO: 11582 - RNA, 20 nt, Artificial Sequence
  GATA2 Guide RNA
uaggaaacucuggcaggaga

SEQ ID NO: 11583 - RNA, 20 nt, Artificial Sequence
  GATA2 Guide RNA
uccggauaggaaacucuggc

SEQ ID NO: 11584 - RNA, 20 nt, Artificial Sequence
  GATA2 Guide RNA
uccugccagaguuuccuauc

SEQ ID NO: 11585 - RNA, 20 nt, Artificial Sequence
  GATA2 Guide RNA
ucggaucuccugccagaguu

SEQ ID NO: 11586 - RNA, 20 nt, Artificial Sequence
  GATA2 Guide RNA
ucuccugccagaguuuccua

SEQ ID NO: 11587 - RNA, 20 nt, Artificial Sequence
  GATA2 Guide RNA
ucuggcaggagauccgaaag

SEQ ID NO: 11588 - RNA, 20 nt, Artificial Sequence
  GATA2 Guide RNA
ugccagaguuuccuauccgg

SEQ ID NO: 11589 - RNA, 20 nt, Artificial Sequence
  GATA2 Guide RNA
ugcccuuucggaucuccugc

SEQ ID NO: 11590 - RNA, 20 nt, Artificial Sequence
  GATA2 Guide RNA
uggcaggagauccgaaaggg

SEQ ID NO: 11591 - RNA, 20 nt, Artificial Sequence
  GATA2 Guide RNA
uguccggauaggaaacucug

SEQ ID NO: 11592 - RNA, 20 nt, Artificial Sequence
  GATA2 Guide RNA
uucggaucuccugccagagu

SEQ ID NO: 11593 - RNA, 20 nt, Artificial Sequence
  GATA2 Guide RNA
uuucggaucuccugccagag

SEQ ID NO: 11594 - RNA, 21 nt, Artificial Sequence
  GATA2 Guide RNA
aaacucuggcaggagauccga

SEQ ID NO: 11595 - RNA, 21 nt, Artificial Sequence
  GATA2 Guide RNA
aaaugcccuuucggaucuccu

SEQ ID NO: 11596 - RNA, 21 nt, Artificial Sequence
  GATA2 Guide RNA
aacucuggcaggagauccgaa

SEQ ID NO: 11597 - RNA, 21 nt, Artificial Sequence
  GATA2 Guide RNA
aaugcccuuucggaucuccug

SEQ ID NO: 11598 - RNA, 21 nt, Artificial Sequence
  GATA2 Guide RNA
acucuggcaggagauccgaaa

SEQ ID NO: 11599 - RNA, 21 nt, Artificial Sequence
  GATA2 Guide RNA
agauguccggauaggaaacuc

SEQ ID NO: 11600 - RNA, 21 nt, Artificial Sequence
  GATA2 Guide RNA
aggaaacucuggcaggagauc

SEQ ID NO: 11601 - RNA, 21 nt, Artificial Sequence
  GATA2 Guide RNA
auaggaaacucuggcaggaga

SEQ ID NO: 11602 - RNA, 21 nt, Artificial Sequence
  GATA2 Guide RNA
aucuccugccagaguuuccua

SEQ ID NO: 11603 - RNA, 21 nt, Artificial Sequence
  GATA2 Guide RNA
augcccuuucggaucuccugc

SEQ ID NO: 11604 - RNA, 21 nt, Artificial Sequence
  GATA2 Guide RNA
auguccggauaggaaacucug

SEQ ID NO: 11605 - RNA, 21 nt, Artificial Sequence
  GATA2 Guide RNA
cagaguuuccuauccggacau

SEQ ID NO: 11606 - RNA, 21 nt, Artificial Sequence
  GATA2 Guide RNA
cagauguccggauaggaaacu

SEQ ID NO: 11607 - RNA, 21 nt, Artificial Sequence
  GATA2 Guide RNA
ccagaguuuccuauccggaca

SEQ ID NO: 11608 - RNA, 21 nt, Artificial Sequence
  GATA2 Guide RNA
cccuuucggaucuccugccag

SEQ ID NO: 11609 - RNA, 21 nt, Artificial Sequence
  GATA2 Guide RNA
ccggauaggaaacucuggcag

SEQ ID NO: 11610 - RNA, 21 nt, Artificial Sequence
  GATA2 Guide RNA
ccugccagaguuuccuauccg

SEQ ID NO: 11611 - RNA, 21 nt, Artificial Sequence
  GATA2 Guide RNA
ccuuucggaucuccugccaga

SEQ ID NO: 11612 - RNA, 21 nt, Artificial Sequence
  GATA2 Guide RNA
cggauaggaaacucuggcagg

SEQ ID NO: 11613 - RNA, 21 nt, Artificial Sequence
  GATA2 Guide RNA
cggaucuccugccagaguuuc

SEQ ID NO: 11614 - RNA, 21 nt, Artificial Sequence
  GATA2 Guide RNA
cuccugccagaguuuccuauc

SEQ ID NO: 11615 - RNA, 21 nt, Artificial Sequence
  GATA2 Guide RNA
cucuggcaggagauccgaaag

SEQ ID NO: 11616 - RNA, 21 nt, Artificial Sequence
  GATA2 Guide RNA
cugccagaguuuccuauccgg

SEQ ID NO: 11617 - RNA, 21 nt, Artificial Sequence
  GATA2 Guide RNA
cuggcaggagauccgaaaggg

SEQ ID NO: 11618 - RNA, 21 nt, Artificial Sequence
  GATA2 Guide RNA
cuuucggaucuccugccagag

SEQ ID NO: 11619 - RNA, 21 nt, Artificial Sequence
  GATA2 Guide RNA
gaaacucuggcaggagauccg

SEQ ID NO: 11620 - RNA, 21 nt, Artificial Sequence
  GATA2 Guide RNA
gauaggaaacucuggcaggag

SEQ ID NO: 11621 - RNA, 21 nt, Artificial Sequence
  GATA2 Guide RNA
gaucuccugccagaguuuccu

SEQ ID NO: 11622 - RNA, 21 nt, Artificial Sequence
  GATA2 Guide RNA
gauguccggauaggaaacucu

SEQ ID NO: 11623 - RNA, 21 nt, Artificial Sequence
  GATA2 Guide RNA
gcagauguccggauaggaaac

SEQ ID NO: 11624 - RNA, 21 nt, Artificial Sequence
  GATA2 Guide RNA
gccagaguuuccuauccggac

SEQ ID NO: 11625 - RNA, 21 nt, Artificial Sequence
  GATA2 Guide RNA
gcccuuucggaucuccugcca

SEQ ID NO: 11626 - RNA, 21 nt, Artificial Sequence
  GATA2 Guide RNA
ggaaacucuggcaggagaucc

SEQ ID NO: 11627 - RNA, 21 nt, Artificial Sequence
  GATA2 Guide RNA
ggauaggaaacucuggcagga

SEQ ID NO: 11628 - RNA, 21 nt, Artificial Sequence
  GATA2 Guide RNA
ggaucuccugccagaguuucc

SEQ ID NO: 11629 - RNA, 21 nt, Artificial Sequence
  GATA2 Guide RNA
guccggauaggaaacucuggc

SEQ ID NO: 11630 - RNA, 21 nt, Artificial Sequence
  GATA2 Guide RNA
uaggaaacucuggcaggagau

SEQ ID NO: 11631 - RNA, 21 nt, Artificial Sequence
  GATA2 Guide RNA
uccggauaggaaacucuggca

SEQ ID NO: 11632 - RNA, 21 nt, Artificial Sequence
  GATA2 Guide RNA
uccugccagaguuuccuaucc

SEQ ID NO: 11633 - RNA, 21 nt, Artificial Sequence
  GATA2 Guide RNA
ucggaucuccugccagaguuu

SEQ ID NO: 11634 - RNA, 21 nt, Artificial Sequence
  GATA2 Guide RNA
ucuccugccagaguuuccuau

SEQ ID NO: 11635 - RNA, 21 nt, Artificial Sequence
  GATA2 Guide RNA
ucuggcaggagauccgaaagg

SEQ ID NO: 11636 - RNA, 21 nt, Artificial Sequence
  GATA2 Guide RNA
ugccagaguuuccuauccgga

SEQ ID NO: 11637 - RNA, 21 nt, Artificial Sequence
  GATA2 Guide RNA
ugcccuuucggaucuccugcc

SEQ ID NO: 11638 - RNA, 21 nt, Artificial Sequence
  GATA2 Guide RNA
uggcaggagauccgaaagggc

SEQ ID NO: 11639 - RNA, 21 nt, Artificial Sequence
  GATA2 Guide RNA
uguccggauaggaaacucugg

SEQ ID NO: 11640 - RNA, 21 nt, Artificial Sequence
  GATA2 Guide RNA
uucggaucuccugccagaguu

SEQ ID NO: 11641 - RNA, 21 nt, Artificial Sequence
  GATA2 Guide RNA
uuucggaucuccugccagagu

SEQ ID NO: 11642 - RNA, 22 nt, Artificial Sequence
  GATA2 Guide RNA
aaaaugcccuuucggaucuccu

SEQ ID NO: 11643 - RNA, 22 nt, Artificial Sequence
  GATA2 Guide RNA
aaacucuggcaggagauccgaa

SEQ ID NO: 11644 - RNA, 22 nt, Artificial Sequence
  GATA2 Guide RNA
aaaugcccuuucggaucuccug

SEQ ID NO: 11645 - RNA, 22 nt, Artificial Sequence
  GATA2 Guide RNA
aacucuggcaggagauccgaaa

SEQ ID NO: 11646 - RNA, 22 nt, Artificial Sequence
  GATA2 Guide RNA
aaugcccuuucggaucuccugc

SEQ ID NO: 11647 - RNA, 22 nt, Artificial Sequence
  GATA2 Guide RNA
acucuggcaggagauccgaaag

SEQ ID NO: 11648 - RNA, 22 nt, Artificial Sequence
  GATA2 Guide RNA
agauguccggauaggaaacucu

SEQ ID NO: 11649 - RNA, 22 nt, Artificial Sequence
  GATA2 Guide RNA
aggaaacucuggcaggagaucc

SEQ ID NO: 11650 - RNA, 22 nt, Artificial Sequence
  GATA2 Guide RNA
auaggaaacucuggcaggagau

SEQ ID NO: 11651 - RNA, 22 nt, Artificial Sequence
  GATA2 Guide RNA
aucuccugccagaguuuccuau

SEQ ID NO: 11652 - RNA, 22 nt, Artificial Sequence
  GATA2 Guide RNA
augcccuuucggaucuccugcc

SEQ ID NO: 11653 - RNA, 22 nt, Artificial Sequence
  GATA2 Guide RNA
auguccggauaggaaacucugg

SEQ ID NO: 11654 - RNA, 22 nt, Artificial Sequence
  GATA2 Guide RNA
cagaguuuccuauccggacauc

SEQ ID NO: 11655 - RNA, 22 nt, Artificial Sequence
  GATA2 Guide RNA
cagauguccggauaggaaacuc

SEQ ID NO: 11656 - RNA, 22 nt, Artificial Sequence
  GATA2 Guide RNA
ccagaguuuccuauccggacau

SEQ ID NO: 11657 - RNA, 22 nt, Artificial Sequence
  GATA2 Guide RNA
cccuuucggaucuccugccaga

SEQ ID NO: 11658 - RNA, 22 nt, Artificial Sequence
  GATA2 Guide RNA
ccggauaggaaacucuggcagg

SEQ ID NO: 11659 - RNA, 22 nt, Artificial Sequence
  GATA2 Guide RNA
ccugccagaguuuccuauccgg

SEQ ID NO: 11660 - RNA, 22 nt, Artificial Sequence
  GATA2 Guide RNA
ccuuucggaucuccugccagag

SEQ ID NO: 11661 - RNA, 22 nt, Artificial Sequence
  GATA2 Guide RNA
cggauaggaaacucuggcagga

SEQ ID NO: 11662 - RNA, 22 nt, Artificial Sequence
  GATA2 Guide RNA
cggaucuccugccagaguuucc

SEQ ID NO: 11663 - RNA, 22 nt, Artificial Sequence
  GATA2 Guide RNA
cuccugccagaguuuccuaucc

SEQ ID NO: 11664 - RNA, 22 nt, Artificial Sequence
  GATA2 Guide RNA
cucuggcaggagauccgaaagg

SEQ ID NO: 11665 - RNA, 22 nt, Artificial Sequence
  GATA2 Guide RNA
cugccagaguuuccuauccgga

SEQ ID NO: 11666 - RNA, 22 nt, Artificial Sequence
  GATA2 Guide RNA
cuggcaggagauccgaaagggc

SEQ ID NO: 11667 - RNA, 22 nt, Artificial Sequence
  GATA2 Guide RNA
cuuucggaucuccugccagagu

SEQ ID NO: 11668 - RNA, 22 nt, Artificial Sequence
  GATA2 Guide RNA
gaaacucuggcaggagauccga

SEQ ID NO: 11669 - RNA, 22 nt, Artificial Sequence
  GATA2 Guide RNA
gauaggaaacucuggcaggaga

SEQ ID NO: 11670 - RNA, 22 nt, Artificial Sequence
  GATA2 Guide RNA
gaucuccugccagaguuuccua

SEQ ID NO: 11671 - RNA, 22 nt, Artificial Sequence
  GATA2 Guide RNA
gauguccggauaggaaacucug

SEQ ID NO: 11672 - RNA, 22 nt, Artificial Sequence
  GATA2 Guide RNA
gcagauguccggauaggaaacu

SEQ ID NO: 11673 - RNA, 22 nt, Artificial Sequence
  GATA2 Guide RNA
gccagaguuuccuauccggaca

SEQ ID NO: 11674 - RNA, 22 nt, Artificial Sequence
  GATA2 Guide RNA
gcccuuucggaucuccugccag

SEQ ID NO: 11675 - RNA, 22 nt, Artificial Sequence
  GATA2 Guide RNA
ggaaacucuggcaggagauccg

SEQ ID NO: 11676 - RNA, 22 nt, Artificial Sequence
  GATA2 Guide RNA
ggauaggaaacucuggcaggag

SEQ ID NO: 11677 - RNA, 22 nt, Artificial Sequence
  GATA2 Guide RNA
ggaucuccugccagaguuuccu

SEQ ID NO: 11678 - RNA, 22 nt, Artificial Sequence
  GATA2 Guide RNA
guccggauaggaaacucuggca

SEQ ID NO: 11679 - RNA, 22 nt, Artificial Sequence
  GATA2 Guide RNA
uaggaaacucuggcaggagauc

SEQ ID NO: 11680 - RNA, 22 nt, Artificial Sequence
  GATA2 Guide RNA
uccggauaggaaacucuggcag

SEQ ID NO: 11681 - RNA, 22 nt, Artificial Sequence
  GATA2 Guide RNA
uccugccagaguuuccuauccg

SEQ ID NO: 11682 - RNA, 22 nt, Artificial Sequence
  GATA2 Guide RNA
ucggaucuccugccagaguuuc

SEQ ID NO: 11683 - RNA, 22 nt, Artificial Sequence
  GATA2 Guide RNA
ucuccugccagaguuuccuauc

SEQ ID NO: 11684 - RNA, 22 nt, Artificial Sequence
  GATA2 Guide RNA
ucuggcaggagauccgaaaggg

SEQ ID NO: 11685 - RNA, 22 nt, Artificial Sequence
  GATA2 Guide RNA
ugcagauguccggauaggaaac

SEQ ID NO: 11686 - RNA, 22 nt, Artificial Sequence
  GATA2 Guide RNA
ugccagaguuuccuauccggac

SEQ ID NO: 11687 - RNA, 22 nt, Artificial Sequence
  GATA2 Guide RNA
ugcccuuucggaucuccugcca

SEQ ID NO: 11688 - RNA, 22 nt, Artificial Sequence
  GATA2 Guide RNA
uggcaggagauccgaaagggca

SEQ ID NO: 11689 - RNA, 22 nt, Artificial Sequence
  GATA2 Guide RNA
uguccggauaggaaacucuggc

SEQ ID NO: 11690 - RNA, 22 nt, Artificial Sequence
  GATA2 Guide RNA
uucggaucuccugccagaguuu

SEQ ID NO: 11691 - RNA, 22 nt, Artificial Sequence
  GATA2 Guide RNA
uuucggaucuccugccagaguu

SEQ ID NO: 11692 - RNA, 20 nt, Artificial Sequence
  GATA2 Guide RNA
agauccgaaagggcauuuuu

SEQ ID NO: 11693 - RNA, 20 nt, Artificial Sequence
  GATA2 Guide RNA
auccgaaagggcauuuuuua

SEQ ID NO: 11694 - RNA, 20 nt, Artificial Sequence
  GATA2 Guide RNA
ccgaaagggcauuuuuuaaa

SEQ ID NO: 11695 - RNA, 20 nt, Artificial Sequence
  GATA2 Guide RNA
cgaaagggcauuuuuuaaaa

SEQ ID NO: 11696 - RNA, 20 nt, Artificial Sequence
  GATA2 Guide RNA
gagauccgaaagggcauuuu

SEQ ID NO: 11697 - RNA, 20 nt, Artificial Sequence
  GATA2 Guide RNA
gauccgaaagggcauuuuuu

SEQ ID NO: 11698 - RNA, 20 nt, Artificial Sequence
  GATA2 Guide RNA
gggcauuuuuuaaaaaucac

SEQ ID NO: 11699 - RNA, 20 nt, Artificial Sequence
  GATA2 Guide RNA
gugauuuuuaaaaaaugccc

SEQ ID NO: 11700 - RNA, 20 nt, Artificial Sequence
  GATA2 Guide RNA
uccgaaagggcauuuuuuaa

SEQ ID NO: 11701 - RNA, 20 nt, Artificial Sequence
  GATA2 Guide RNA
uuaaaaaaugcccuuucgga

SEQ ID NO: 11702 - RNA, 20 nt, Artificial Sequence
  GATA2 Guide RNA
uuuaaaaaaugcccuuucgg

SEQ ID NO: 11703 - RNA, 20 nt, Artificial Sequence
  GATA2 Guide RNA
uuuuaaaaaaugcccuuucg

SEQ ID NO: 11704 - RNA, 21 nt, Artificial Sequence
  GATA2 Guide RNA
agauccgaaagggcauuuuuu

SEQ ID NO: 11705 - RNA, 21 nt, Artificial Sequence
  GATA2 Guide RNA
auccgaaagggcauuuuuuaa

SEQ ID NO: 11706 - RNA, 21 nt, Artificial Sequence
  GATA2 Guide RNA
ccgaaagggcauuuuuuaaaa

SEQ ID NO: 11707 - RNA, 21 nt, Artificial Sequence
  GATA2 Guide RNA
gagauccgaaagggcauuuuu

SEQ ID NO: 11708 - RNA, 21 nt, Artificial Sequence
  GATA2 Guide RNA
gauccgaaagggcauuuuuua

SEQ ID NO: 11709 - RNA, 21 nt, Artificial Sequence
  GATA2 Guide RNA
ggagauccgaaagggcauuuu

SEQ ID NO: 11710 - RNA, 21 nt, Artificial Sequence
  GATA2 Guide RNA
uccgaaagggcauuuuuuaaa

SEQ ID NO: 11711 - RNA, 21 nt, Artificial Sequence
  GATA2 Guide RNA
uuaaaaaaugcccuuucggau

SEQ ID NO: 11712 - RNA, 21 nt, Artificial Sequence
  GATA2 Guide RNA
uuuaaaaaaugcccuuucgga

SEQ ID NO: 11713 - RNA, 21 nt, Artificial Sequence
  GATA2 Guide RNA
uuuuaaaaaaugcccuuucgg

SEQ ID NO: 11714 - RNA, 22 nt, Artificial Sequence
  GATA2 Guide RNA
agauccgaaagggcauuuuuua

SEQ ID NO: 11715 - RNA, 22 nt, Artificial Sequence
  GATA2 Guide RNA
aggagauccgaaagggcauuuu

SEQ ID NO: 11716 - RNA, 22 nt, Artificial Sequence
  GATA2 Guide RNA
auccgaaagggcauuuuuuaaa

SEQ ID NO: 11717 - RNA, 22 nt, Artificial Sequence
  GATA2 Guide RNA
ccgaaagggcauuuuuuaaaaa

SEQ ID NO: 11718 - RNA, 22 nt, Artificial Sequence
  GATA2 Guide RNA
gagauccgaaagggcauuuuuu

SEQ ID NO: 11719 - RNA, 22 nt, Artificial Sequence
  GATA2 Guide RNA
gagugauuuuuaaaaaaugccc

SEQ ID NO: 11720 - RNA, 22 nt, Artificial Sequence
  GATA2 Guide RNA
gauccgaaagggcauuuuuuaa

SEQ ID NO: 11721 - RNA, 22 nt, Artificial Sequence
  GATA2 Guide RNA
ggagauccgaaagggcauuuuu

SEQ ID NO: 11722 - RNA, 22 nt, Artificial Sequence
  GATA2 Guide RNA
gggcauuuuuuaaaaaucacuc

SEQ ID NO: 11723 - RNA, 22 nt, Artificial Sequence
  GATA2 Guide RNA
uccgaaagggcauuuuuuaaaa

SEQ ID NO: 11724 - RNA, 22 nt, Artificial Sequence
  GATA2 Guide RNA
uuaaaaaaugcccuuucggauc

SEQ ID NO: 11725 - RNA, 22 nt, Artificial Sequence
  GATA2 Guide RNA
uuuaaaaaaugcccuuucggau

SEQ ID NO: 11726 - RNA, 22 nt, Artificial Sequence
  GATA2 Guide RNA
uuuuaaaaaaugcccuuucgga

SEQ ID NO: 11727 - RNA, 22 nt, Artificial Sequence
  GATA2 Guide RNA
uuuuuaaaaaaugcccuuucgg

SEQ ID NO: 11728 - RNA, 20 nt, Artificial Sequence
  GATA2 Guide RNA
aagcccaagugaagacuggu

SEQ ID NO: 11729 - RNA, 20 nt, Artificial Sequence
  GATA2 Guide RNA
aagugaagacugguaggagc

SEQ ID NO: 11730 - RNA, 20 nt, Artificial Sequence
  GATA2 Guide RNA
accacucaucaagcccaagu

SEQ ID NO: 11731 - RNA, 20 nt, Artificial Sequence
  GATA2 Guide RNA
accagucuucacuugggcuu

SEQ ID NO: 11732 - RNA, 20 nt, Artificial Sequence
  GATA2 Guide RNA
accgaccacucaucaagccc

SEQ ID NO: 11733 - RNA, 20 nt, Artificial Sequence
  GATA2 Guide RNA
acucaucaagcccaagugaa

SEQ ID NO: 11734 - RNA, 20 nt, Artificial Sequence
  GATA2 Guide RNA
acuugggcuugaugaguggu

SEQ ID NO: 11735 - RNA, 20 nt, Artificial Sequence
  GATA2 Guide RNA
agcccaagugaagacuggua

SEQ ID NO: 11736 - RNA, 20 nt, Artificial Sequence
  GATA2 Guide RNA
agucuucacuugggcuugau

SEQ ID NO: 11737 - RNA, 20 nt, Artificial Sequence
  GATA2 Guide RNA
agugaagacugguaggagcg

SEQ ID NO: 11738 - RNA, 20 nt, Artificial Sequence
  GATA2 Guide RNA
aucaagcccaagugaagacu

SEQ ID NO: 11739 - RNA, 20 nt, Artificial Sequence
  GATA2 Guide RNA
caagcccaagugaagacugg

SEQ ID NO: 11740 - RNA, 20 nt, Artificial Sequence
  GATA2 Guide RNA
caagugaagacugguaggag

SEQ ID NO: 11741 - RNA, 20 nt, Artificial Sequence
  GATA2 Guide RNA
cacucaucaagcccaaguga

SEQ ID NO: 11742 - RNA, 20 nt, Artificial Sequence
  GATA2 Guide RNA
cacuugggcuugaugagugg

SEQ ID NO: 11743 - RNA, 20 nt, Artificial Sequence
  GATA2 Guide RNA
cagucuucacuugggcuuga

SEQ ID NO: 11744 - RNA, 20 nt, Artificial Sequence
  GATA2 Guide RNA
caucaagcccaagugaagac

SEQ ID NO: 11745 - RNA, 20 nt, Artificial Sequence
  GATA2 Guide RNA
ccaagugaagacugguagga

SEQ ID NO: 11746 - RNA, 20 nt, Artificial Sequence
  GATA2 Guide RNA
ccacucaucaagcccaagug

SEQ ID NO: 11747 - RNA, 20 nt, Artificial Sequence
  GATA2 Guide RNA
ccagucuucacuugggcuug

SEQ ID NO: 11748 - RNA, 20 nt, Artificial Sequence
  GATA2 Guide RNA
cccaagugaagacugguagg

SEQ ID NO: 11749 - RNA, 20 nt, Artificial Sequence
  GATA2 Guide RNA
cccgcuccuaccagucuuca

SEQ ID NO: 11750 - RNA, 20 nt, Artificial Sequence
  GATA2 Guide RNA
ccgaccacucaucaagccca

SEQ ID NO: 11751 - RNA, 20 nt, Artificial Sequence
  GATA2 Guide RNA
ccgcuccuaccagucuucac

SEQ ID NO: 11752 - RNA, 20 nt, Artificial Sequence
  GATA2 Guide RNA
ccuaccagucuucacuuggg

SEQ ID NO: 11753 - RNA, 20 nt, Artificial Sequence
  GATA2 Guide RNA
cgaccacucaucaagcccaa

SEQ ID NO: 11754 - RNA, 20 nt, Artificial Sequence
  GATA2 Guide RNA
cgcuccuaccagucuucacu

SEQ ID NO: 11755 - RNA, 20 nt, Artificial Sequence
  GATA2 Guide RNA
cuaccagucuucacuugggc

SEQ ID NO: 11756 - RNA, 20 nt, Artificial Sequence
  GATA2 Guide RNA
cucaucaagcccaagugaag

SEQ ID NO: 11757 - RNA, 20 nt, Artificial Sequence
  GATA2 Guide RNA
cuccuaccagucuucacuug

SEQ ID NO: 11758 - RNA, 20 nt, Artificial Sequence
  GATA2 Guide RNA
cuucacuugggcuugaugag

SEQ ID NO: 11759 - RNA, 20 nt, Artificial Sequence
  GATA2 Guide RNA
gaccacucaucaagcccaag

SEQ ID NO: 11760 - RNA, 20 nt, Artificial Sequence
  GATA2 Guide RNA
gcccaagugaagacugguag

SEQ ID NO: 11761 - RNA, 20 nt, Artificial Sequence
  GATA2 Guide RNA
gcccgcuccuaccagucuuc

SEQ ID NO: 11762 - RNA, 20 nt, Artificial Sequence
  GATA2 Guide RNA
gcuccuaccagucuucacuu

SEQ ID NO: 11763 - RNA, 20 nt, Artificial Sequence
  GATA2 Guide RNA
gucuucacuugggcuugaug

SEQ ID NO: 11764 - RNA, 20 nt, Artificial Sequence
  GATA2 Guide RNA
gugaagacugguaggagcgg

SEQ ID NO: 11765 - RNA, 20 nt, Artificial Sequence
  GATA2 Guide RNA
gugcccgcuccuaccagucu

SEQ ID NO: 11766 - RNA, 20 nt, Artificial Sequence
  GATA2 Guide RNA
uaccagucuucacuugggcu

SEQ ID NO: 11767 - RNA, 20 nt, Artificial Sequence
  GATA2 Guide RNA
ucaagcccaagugaagacug

SEQ ID NO: 11768 - RNA, 20 nt, Artificial Sequence
  GATA2 Guide RNA
ucacuugggcuugaugagug

SEQ ID NO: 11769 - RNA, 20 nt, Artificial Sequence
  GATA2 Guide RNA
ucaucaagcccaagugaaga

SEQ ID NO: 11770 - RNA, 20 nt, Artificial Sequence
  GATA2 Guide RNA
uccuaccagucuucacuugg

SEQ ID NO: 11771 - RNA, 20 nt, Artificial Sequence
  GATA2 Guide RNA
ucuucacuugggcuugauga

SEQ ID NO: 11772 - RNA, 20 nt, Artificial Sequence
  GATA2 Guide RNA
ugcccgcuccuaccagucuu

SEQ ID NO: 11773 - RNA, 20 nt, Artificial Sequence
  GATA2 Guide RNA
uucacuugggcuugaugagu

SEQ ID NO: 11774 - RNA, 21 nt, Artificial Sequence
  GATA2 Guide RNA
aaccgaccacucaucaagccc

SEQ ID NO: 11775 - RNA, 21 nt, Artificial Sequence
  GATA2 Guide RNA
aagcccaagugaagacuggua

SEQ ID NO: 11776 - RNA, 21 nt, Artificial Sequence
  GATA2 Guide RNA
aagugaagacugguaggagcg

SEQ ID NO: 11777 - RNA, 21 nt, Artificial Sequence
  GATA2 Guide RNA
accacucaucaagcccaagug

SEQ ID NO: 11778 - RNA, 21 nt, Artificial Sequence
  GATA2 Guide RNA
accagucuucacuugggcuug

SEQ ID NO: 11779 - RNA, 21 nt, Artificial Sequence
  GATA2 Guide RNA
accgaccacucaucaagccca

SEQ ID NO: 11780 - RNA, 21 nt, Artificial Sequence
  GATA2 Guide RNA
acucaucaagcccaagugaag

SEQ ID NO: 11781 - RNA, 21 nt, Artificial Sequence
  GATA2 Guide RNA
acuugggcuugaugagugguc

SEQ ID NO: 11782 - RNA, 21 nt, Artificial Sequence
  GATA2 Guide RNA
agcccaagugaagacugguag

SEQ ID NO: 11783 - RNA, 21 nt, Artificial Sequence
  GATA2 Guide RNA
agucuucacuugggcuugaug

SEQ ID NO: 11784 - RNA, 21 nt, Artificial Sequence
  GATA2 Guide RNA
agugaagacugguaggagcgg

SEQ ID NO: 11785 - RNA, 21 nt, Artificial Sequence
  GATA2 Guide RNA
aucaagcccaagugaagacug

SEQ ID NO: 11786 - RNA, 21 nt, Artificial Sequence
  GATA2 Guide RNA
caagcccaagugaagacuggu

SEQ ID NO: 11787 - RNA, 21 nt, Artificial Sequence
  GATA2 Guide RNA
caagugaagacugguaggagc

SEQ ID NO: 11788 - RNA, 21 nt, Artificial Sequence
  GATA2 Guide RNA
cacucaucaagcccaagugaa

SEQ ID NO: 11789 - RNA, 21 nt, Artificial Sequence
  GATA2 Guide RNA
cacuugggcuugaugaguggu

SEQ ID NO: 11790 - RNA, 21 nt, Artificial Sequence
  GATA2 Guide RNA
cagucuucacuugggcuugau

SEQ ID NO: 11791 - RNA, 21 nt, Artificial Sequence
  GATA2 Guide RNA
caucaagcccaagugaagacu

SEQ ID NO: 11792 - RNA, 21 nt, Artificial Sequence
  GATA2 Guide RNA
ccaagugaagacugguaggag

SEQ ID NO: 11793 - RNA, 21 nt, Artificial Sequence
  GATA2 Guide RNA
ccacucaucaagcccaaguga

SEQ ID NO: 11794 - RNA, 21 nt, Artificial Sequence
  GATA2 Guide RNA
ccagucuucacuugggcuuga

SEQ ID NO: 11795 - RNA, 21 nt, Artificial Sequence
  GATA2 Guide RNA
cccaagugaagacugguagga

SEQ ID NO: 11796 - RNA, 21 nt, Artificial Sequence
  GATA2 Guide RNA
cccgcuccuaccagucuucac

SEQ ID NO: 11797 - RNA, 21 nt, Artificial Sequence
  GATA2 Guide RNA
ccgaccacucaucaagcccaa

SEQ ID NO: 11798 - RNA, 21 nt, Artificial Sequence
  GATA2 Guide RNA
ccgcuccuaccagucuucacu

SEQ ID NO: 11799 - RNA, 21 nt, Artificial Sequence
  GATA2 Guide RNA
ccuaccagucuucacuugggc

SEQ ID NO: 11800 - RNA, 21 nt, Artificial Sequence
  GATA2 Guide RNA
cgaccacucaucaagcccaag

SEQ ID NO: 11801 - RNA, 21 nt, Artificial Sequence
  GATA2 Guide RNA
cgcuccuaccagucuucacuu

SEQ ID NO: 11802 - RNA, 21 nt, Artificial Sequence
  GATA2 Guide RNA
cuaccagucuucacuugggcu

SEQ ID NO: 11803 - RNA, 21 nt, Artificial Sequence
  GATA2 Guide RNA
cucaucaagcccaagugaaga

SEQ ID NO: 11804 - RNA, 21 nt, Artificial Sequence
  GATA2 Guide RNA
cuccuaccagucuucacuugg

SEQ ID NO: 11805 - RNA, 21 nt, Artificial Sequence
  GATA2 Guide RNA
cuucacuugggcuugaugagu

SEQ ID NO: 11806 - RNA, 21 nt, Artificial Sequence
  GATA2 Guide RNA
gaccacucaucaagcccaagu

SEQ ID NO: 11807 - RNA, 21 nt, Artificial Sequence
  GATA2 Guide RNA
gcccaagugaagacugguagg

SEQ ID NO: 11808 - RNA, 21 nt, Artificial Sequence
  GATA2 Guide RNA
gcccgcuccuaccagucuuca

SEQ ID NO: 11809 - RNA, 21 nt, Artificial Sequence
  GATA2 Guide RNA
gcuccuaccagucuucacuug

SEQ ID NO: 11810 - RNA, 21 nt, Artificial Sequence
  GATA2 Guide RNA
gucuucacuugggcuugauga

SEQ ID NO: 11811 - RNA, 21 nt, Artificial Sequence
  GATA2 Guide RNA
gugaagacugguaggagcggg

SEQ ID NO: 11812 - RNA, 21 nt, Artificial Sequence
  GATA2 Guide RNA
gugcccgcuccuaccagucuu

SEQ ID NO: 11813 - RNA, 21 nt, Artificial Sequence
  GATA2 Guide RNA
uaccagucuucacuugggcuu

SEQ ID NO: 11814 - RNA, 21 nt, Artificial Sequence
  GATA2 Guide RNA
ucaagcccaagugaagacugg

SEQ ID NO: 11815 - RNA, 21 nt, Artificial Sequence
  GATA2 Guide RNA
ucacuugggcuugaugagugg

SEQ ID NO: 11816 - RNA, 21 nt, Artificial Sequence
  GATA2 Guide RNA
ucaucaagcccaagugaagac

SEQ ID NO: 11817 - RNA, 21 nt, Artificial Sequence
  GATA2 Guide RNA
uccuaccagucuucacuuggg

SEQ ID NO: 11818 - RNA, 21 nt, Artificial Sequence
  GATA2 Guide RNA
ucuucacuugggcuugaugag

SEQ ID NO: 11819 - RNA, 21 nt, Artificial Sequence
  GATA2 Guide RNA
ugcccgcuccuaccagucuuc

SEQ ID NO: 11820 - RNA, 21 nt, Artificial Sequence
  GATA2 Guide RNA
ugugcccgcuccuaccagucu

SEQ ID NO: 11821 - RNA, 21 nt, Artificial Sequence
  GATA2 Guide RNA
uucacuugggcuugaugagug

SEQ ID NO: 11822 - RNA, 22 nt, Artificial Sequence
  GATA2 Guide RNA
aaccgaccacucaucaagccca

SEQ ID NO: 11823 - RNA, 22 nt, Artificial Sequence
  GATA2 Guide RNA
aagcccaagugaagacugguag

SEQ ID NO: 11824 - RNA, 22 nt, Artificial Sequence
  GATA2 Guide RNA
aagugaagacugguaggagcgg

SEQ ID NO: 11825 - RNA, 22 nt, Artificial Sequence
  GATA2 Guide RNA
accacucaucaagcccaaguga

SEQ ID NO: 11826 - RNA, 22 nt, Artificial Sequence
  GATA2 Guide RNA
accagucuucacuugggcuuga

SEQ ID NO: 11827 - RNA, 22 nt, Artificial Sequence
  GATA2 Guide RNA
accgaccacucaucaagcccaa

SEQ ID NO: 11828 - RNA, 22 nt, Artificial Sequence
  GATA2 Guide RNA
acucaucaagcccaagugaaga

SEQ ID NO: 11829 - RNA, 22 nt, Artificial Sequence
  GATA2 Guide RNA
acuugggcuugaugaguggucg

SEQ ID NO: 11830 - RNA, 22 nt, Artificial Sequence
  GATA2 Guide RNA
agcccaagugaagacugguagg

SEQ ID NO: 11831 - RNA, 22 nt, Artificial Sequence
  GATA2 Guide RNA
agucuucacuugggcuugauga

SEQ ID NO: 11832 - RNA, 22 nt, Artificial Sequence
  GATA2 Guide RNA
agugaagacugguaggagcggg

SEQ ID NO: 11833 - RNA, 22 nt, Artificial Sequence
  GATA2 Guide RNA
aucaagcccaagugaagacugg

SEQ ID NO: 11834 - RNA, 22 nt, Artificial Sequence
  GATA2 Guide RNA
caagcccaagugaagacuggua

SEQ ID NO: 11835 - RNA, 22 nt, Artificial Sequence
  GATA2 Guide RNA
caagugaagacugguaggagcg

SEQ ID NO: 11836 - RNA, 22 nt, Artificial Sequence
  GATA2 Guide RNA
cacucaucaagcccaagugaag

SEQ ID NO: 11837 - RNA, 22 nt, Artificial Sequence
  GATA2 Guide RNA
cacuugggcuugaugagugguc

SEQ ID NO: 11838 - RNA, 22 nt, Artificial Sequence
  GATA2 Guide RNA
cagucuucacuugggcuugaug

SEQ ID NO: 11839 - RNA, 22 nt, Artificial Sequence
  GATA2 Guide RNA
caucaagcccaagugaagacug

SEQ ID NO: 11840 - RNA, 22 nt, Artificial Sequence
  GATA2 Guide RNA
ccaagugaagacugguaggagc

SEQ ID NO: 11841 - RNA, 22 nt, Artificial Sequence
  GATA2 Guide RNA
ccacucaucaagcccaagugaa

SEQ ID NO: 11842 - RNA, 22 nt, Artificial Sequence
  GATA2 Guide RNA
ccagucuucacuugggcuugau

SEQ ID NO: 11843 - RNA, 22 nt, Artificial Sequence
  GATA2 Guide RNA
cccaagugaagacugguaggag

SEQ ID NO: 11844 - RNA, 22 nt, Artificial Sequence
  GATA2 Guide RNA
cccgcuccuaccagucuucacu

SEQ ID NO: 11845 - RNA, 22 nt, Artificial Sequence
  GATA2 Guide RNA
ccgaccacucaucaagcccaag

SEQ ID NO: 11846 - RNA, 22 nt, Artificial Sequence
  GATA2 Guide RNA
ccgcuccuaccagucuucacuu

SEQ ID NO: 11847 - RNA, 22 nt, Artificial Sequence
  GATA2 Guide RNA
ccuaccagucuucacuugggcu

SEQ ID NO: 11848 - RNA, 22 nt, Artificial Sequence
  GATA2 Guide RNA
cgaccacucaucaagcccaagu

SEQ ID NO: 11849 - RNA, 22 nt, Artificial Sequence
  GATA2 Guide RNA
cgcuccuaccagucuucacuug

SEQ ID NO: 11850 - RNA, 22 nt, Artificial Sequence
  GATA2 Guide RNA
cuaccagucuucacuugggcuu

SEQ ID NO: 11851 - RNA, 22 nt, Artificial Sequence
  GATA2 Guide RNA
cucaucaagcccaagugaagac

SEQ ID NO: 11852 - RNA, 22 nt, Artificial Sequence
  GATA2 Guide RNA
cuccuaccagucuucacuuggg

SEQ ID NO: 11853 - RNA, 22 nt, Artificial Sequence
  GATA2 Guide RNA
cugugcccgcuccuaccagucu

SEQ ID NO: 11854 - RNA, 22 nt, Artificial Sequence
  GATA2 Guide RNA
cuucacuugggcuugaugagug

SEQ ID NO: 11855 - RNA, 22 nt, Artificial Sequence
  GATA2 Guide RNA
gaaccgaccacucaucaagccc

SEQ ID NO: 11856 - RNA, 22 nt, Artificial Sequence
  GATA2 Guide RNA
gaccacucaucaagcccaagug

SEQ ID NO: 11857 - RNA, 22 nt, Artificial Sequence
  GATA2 Guide RNA
gcccaagugaagacugguagga

SEQ ID NO: 11858 - RNA, 22 nt, Artificial Sequence
  GATA2 Guide RNA
gcccgcuccuaccagucuucac

SEQ ID NO: 11859 - RNA, 22 nt, Artificial Sequence
  GATA2 Guide RNA
gcuccuaccagucuucacuugg

SEQ ID NO: 11860 - RNA, 22 nt, Artificial Sequence
  GATA2 Guide RNA
gucuucacuugggcuugaugag

SEQ ID NO: 11861 - RNA, 22 nt, Artificial Sequence
  GATA2 Guide RNA
gugaagacugguaggagcgggc

SEQ ID NO: 11862 - RNA, 22 nt, Artificial Sequence
  GATA2 Guide RNA
gugcccgcuccuaccagucuuc

SEQ ID NO: 11863 - RNA, 22 nt, Artificial Sequence
  GATA2 Guide RNA
uaccagucuucacuugggcuug

SEQ ID NO: 11864 - RNA, 22 nt, Artificial Sequence
  GATA2 Guide RNA
ucaagcccaagugaagacuggu

SEQ ID NO: 11865 - RNA, 22 nt, Artificial Sequence
  GATA2 Guide RNA
ucacuugggcuugaugaguggu

SEQ ID NO: 11866 - RNA, 22 nt, Artificial Sequence
  GATA2 Guide RNA
ucaucaagcccaagugaagacu

SEQ ID NO: 11867 - RNA, 22 nt, Artificial Sequence
  GATA2 Guide RNA
uccuaccagucuucacuugggc

SEQ ID NO: 11868 - RNA, 22 nt, Artificial Sequence
  GATA2 Guide RNA
ucuucacuugggcuugaugagu

SEQ ID NO: 11869 - RNA, 22 nt, Artificial Sequence
  GATA2 Guide RNA
ugcccgcuccuaccagucuuca

SEQ ID NO: 11870 - RNA, 22 nt, Artificial Sequence
  GATA2 Guide RNA
ugugcccgcuccuaccagucuu

SEQ ID NO: 11871 - RNA, 22 nt, Artificial Sequence
  GATA2 Guide RNA
uucacuugggcuugaugagugg

SEQ ID NO: 11872 - RNA, 20 nt, Artificial Sequence
  GATA2 Guide RNA
aacugaccacucaucaagcc

SEQ ID NO: 11873 - RNA, 20 nt, Artificial Sequence
  GATA2 Guide RNA
aagaugaaugggcagaacug

SEQ ID NO: 11874 - RNA, 20 nt, Artificial Sequence
  GATA2 Guide RNA
aaugggcagaacugaccacu

SEQ ID NO: 11875 - RNA, 20 nt, Artificial Sequence
  GATA2 Guide RNA
acaagaugaaugggcagaac

SEQ ID NO: 11876 - RNA, 20 nt, Artificial Sequence
  GATA2 Guide RNA
accacaagaugaaugggcag

SEQ ID NO: 11877 - RNA, 20 nt, Artificial Sequence
  GATA2 Guide RNA
acugaccacucaucaagccc

SEQ ID NO: 11878 - RNA, 20 nt, Artificial Sequence
  GATA2 Guide RNA
agaacugaccacucaucaag

SEQ ID NO: 11879 - RNA, 20 nt, Artificial Sequence
  GATA2 Guide RNA
agaugaaugggcagaacuga

SEQ ID NO: 11880 - RNA, 20 nt, Artificial Sequence
  GATA2 Guide RNA
aguggucaguucugcccauu

SEQ ID NO: 11881 - RNA, 20 nt, Artificial Sequence
  GATA2 Guide RNA
aguucugcccauucaucuug

SEQ ID NO: 11882 - RNA, 20 nt, Artificial Sequence
  GATA2 Guide RNA
augaaugggcagaacugacc

SEQ ID NO: 11883 - RNA, 20 nt, Artificial Sequence
  GATA2 Guide RNA
augaguggucaguucugccc

SEQ ID NO: 11884 - RNA, 20 nt, Artificial Sequence
  GATA2 Guide RNA
augggcagaacugaccacuc

SEQ ID NO: 11885 - RNA, 20 nt, Artificial Sequence
  GATA2 Guide RNA
caagaugaaugggcagaacu

SEQ ID NO: 11886 - RNA, 20 nt, Artificial Sequence
  GATA2 Guide RNA
cacaagaugaaugggcagaa

SEQ ID NO: 11887 - RNA, 20 nt, Artificial Sequence
  GATA2 Guide RNA
cagaacugaccacucaucaa

SEQ ID NO: 11888 - RNA, 20 nt, Artificial Sequence
  GATA2 Guide RNA
caguucugcccauucaucuu

SEQ ID NO: 11889 - RNA, 20 nt, Artificial Sequence
  GATA2 Guide RNA
ccacaagaugaaugggcaga

SEQ ID NO: 11890 - RNA, 20 nt, Artificial Sequence
  GATA2 Guide RNA
cgcuugggcuugaugagugg

SEQ ID NO: 11891 - RNA, 20 nt, Artificial Sequence
  GATA2 Guide RNA
cugaccacucaucaagccca

SEQ ID NO: 11892 - RNA, 20 nt, Artificial Sequence
  GATA2 Guide RNA
cuugaugaguggucaguucu

SEQ ID NO: 11893 - RNA, 20 nt, Artificial Sequence
  GATA2 Guide RNA
cuugggcuugaugagugguc

SEQ ID NO: 11894 - RNA, 20 nt, Artificial Sequence
  GATA2 Guide RNA
gaacugaccacucaucaagc

SEQ ID NO: 11895 - RNA, 20 nt, Artificial Sequence
  GATA2 Guide RNA
gaaugggcagaacugaccac

SEQ ID NO: 11896 - RNA, 20 nt, Artificial Sequence
  GATA2 Guide RNA
gaguggucaguucugcccau

SEQ ID NO: 11897 - RNA, 20 nt, Artificial Sequence
  GATA2 Guide RNA
gaugaaugggcagaacugac

SEQ ID NO: 11898 - RNA, 20 nt, Artificial Sequence
  GATA2 Guide RNA
gaugaguggucaguucugcc

SEQ ID NO: 11899 - RNA, 20 nt, Artificial Sequence
  GATA2 Guide RNA
gcagaacugaccacucauca

SEQ ID NO: 11900 - RNA, 20 nt, Artificial Sequence
  GATA2 Guide RNA
gcuugaugaguggucaguuc

SEQ ID NO: 11901 - RNA, 20 nt, Artificial Sequence
  GATA2 Guide RNA
gcuugggcuugaugaguggu

SEQ ID NO: 11902 - RNA, 20 nt, Artificial Sequence
  GATA2 Guide RNA
ggcagaacugaccacucauc

SEQ ID NO: 11903 - RNA, 20 nt, Artificial Sequence
  GATA2 Guide RNA
ggcuugaugaguggucaguu

SEQ ID NO: 11904 - RNA, 20 nt, Artificial Sequence
  GATA2 Guide RNA
gggcagaacugaccacucau

SEQ ID NO: 11905 - RNA, 20 nt, Artificial Sequence
  GATA2 Guide RNA
gggcuugaugaguggucagu

SEQ ID NO: 11906 - RNA, 20 nt, Artificial Sequence
  GATA2 Guide RNA
ggucaguucugcccauucau

SEQ ID NO: 11907 - RNA, 20 nt, Artificial Sequence
  GATA2 Guide RNA
gucaguucugcccauucauc

SEQ ID NO: 11908 - RNA, 20 nt, Artificial Sequence
  GATA2 Guide RNA
guggucaguucugcccauuc

SEQ ID NO: 11909 - RNA, 20 nt, Artificial Sequence
  GATA2 Guide RNA
ucaguucugcccauucaucu

SEQ ID NO: 11910 - RNA, 20 nt, Artificial Sequence
  GATA2 Guide RNA
ugaaugggcagaacugacca

SEQ ID NO: 11911 - RNA, 20 nt, Artificial Sequence
  GATA2 Guide RNA
ugaguggucaguucugccca

SEQ ID NO: 11912 - RNA, 20 nt, Artificial Sequence
  GATA2 Guide RNA
ugaugaguggucaguucugc

SEQ ID NO: 11913 - RNA, 20 nt, Artificial Sequence
  GATA2 Guide RNA
ugggcagaacugaccacuca

SEQ ID NO: 11914 - RNA, 20 nt, Artificial Sequence
  GATA2 Guide RNA
ugggcuugaugaguggucag

SEQ ID NO: 11915 - RNA, 20 nt, Artificial Sequence
  GATA2 Guide RNA
uggucaguucugcccauuca

SEQ ID NO: 11916 - RNA, 20 nt, Artificial Sequence
  GATA2 Guide RNA
uugaugaguggucaguucug

SEQ ID NO: 11917 - RNA, 20 nt, Artificial Sequence
  GATA2 Guide RNA
uugggcuugaugagugguca

SEQ ID NO: 11918 - RNA, 21 nt, Artificial Sequence
  GATA2 Guide RNA
aacugaccacucaucaagccc

SEQ ID NO: 11919 - RNA, 21 nt, Artificial Sequence
  GATA2 Guide RNA
aagaugaaugggcagaacuga

SEQ ID NO: 11920 - RNA, 21 nt, Artificial Sequence
  GATA2 Guide RNA
aaugggcagaacugaccacuc

SEQ ID NO: 11921 - RNA, 21 nt, Artificial Sequence
  GATA2 Guide RNA
acaagaugaaugggcagaacu

SEQ ID NO: 11922 - RNA, 21 nt, Artificial Sequence
  GATA2 Guide RNA
accacaagaugaaugggcaga

SEQ ID NO: 11923 - RNA, 21 nt, Artificial Sequence
  GATA2 Guide RNA
acugaccacucaucaagccca

SEQ ID NO: 11924 - RNA, 21 nt, Artificial Sequence
  GATA2 Guide RNA
agaacugaccacucaucaagc

SEQ ID NO: 11925 - RNA, 21 nt, Artificial Sequence
  GATA2 Guide RNA
agaugaaugggcagaacugac

SEQ ID NO: 11926 - RNA, 21 nt, Artificial Sequence
  GATA2 Guide RNA
aguggucaguucugcccauuc

SEQ ID NO: 11927 - RNA, 21 nt, Artificial Sequence
  GATA2 Guide RNA
aguucugcccauucaucuugu

SEQ ID NO: 11928 - RNA, 21 nt, Artificial Sequence
  GATA2 Guide RNA
augaaugggcagaacugacca

SEQ ID NO: 11929 - RNA, 21 nt, Artificial Sequence
  GATA2 Guide RNA
augaguggucaguucugccca

SEQ ID NO: 11930 - RNA, 21 nt, Artificial Sequence
  GATA2 Guide RNA
augggcagaacugaccacuca

SEQ ID NO: 11931 - RNA, 21 nt, Artificial Sequence
  GATA2 Guide RNA
caagaugaaugggcagaacug

SEQ ID NO: 11932 - RNA, 21 nt, Artificial Sequence
  GATA2 Guide RNA
cacaagaugaaugggcagaac

SEQ ID NO: 11933 - RNA, 21 nt, Artificial Sequence
  GATA2 Guide RNA
cagaacugaccacucaucaag

SEQ ID NO: 11934 - RNA, 21 nt, Artificial Sequence
  GATA2 Guide RNA
caguucugcccauucaucuug

SEQ ID NO: 11935 - RNA, 21 nt, Artificial Sequence
  GATA2 Guide RNA
ccacaagaugaaugggcagaa

SEQ ID NO: 11936 - RNA, 21 nt, Artificial Sequence
  GATA2 Guide RNA
cgcuugggcuugaugaguggu

SEQ ID NO: 11937 - RNA, 21 nt, Artificial Sequence
  GATA2 Guide RNA
cugaccacucaucaagcccaa

SEQ ID NO: 11938 - RNA, 21 nt, Artificial Sequence
  GATA2 Guide RNA
cuugaugaguggucaguucug

SEQ ID NO: 11939 - RNA, 21 nt, Artificial Sequence
  GATA2 Guide RNA
cuugggcuugaugagugguca

SEQ ID NO: 11940 - RNA, 21 nt, Artificial Sequence
  GATA2 Guide RNA
gaacugaccacucaucaagcc

SEQ ID NO: 11941 - RNA, 21 nt, Artificial Sequence
  GATA2 Guide RNA
gaaugggcagaacugaccacu

SEQ ID NO: 11942 - RNA, 21 nt, Artificial Sequence
  GATA2 Guide RNA
gaguggucaguucugcccauu

SEQ ID NO: 11943 - RNA, 21 nt, Artificial Sequence
  GATA2 Guide RNA
gaugaaugggcagaacugacc

SEQ ID NO: 11944 - RNA, 21 nt, Artificial Sequence
  GATA2 Guide RNA
gaugaguggucaguucugccc

SEQ ID NO: 11945 - RNA, 21 nt, Artificial Sequence
  GATA2 Guide RNA
gcagaacugaccacucaucaa

SEQ ID NO: 11946 - RNA, 21 nt, Artificial Sequence
  GATA2 Guide RNA
gcuugaugaguggucaguucu

SEQ ID NO: 11947 - RNA, 21 nt, Artificial Sequence
  GATA2 Guide RNA
gcuugggcuugaugagugguc

SEQ ID NO: 11948 - RNA, 21 nt, Artificial Sequence
  GATA2 Guide RNA
ggcagaacugaccacucauca

SEQ ID NO: 11949 - RNA, 21 nt, Artificial Sequence
  GATA2 Guide RNA
ggcuugaugaguggucaguuc

SEQ ID NO: 11950 - RNA, 21 nt, Artificial Sequence
  GATA2 Guide RNA
gggcagaacugaccacucauc

SEQ ID NO: 11951 - RNA, 21 nt, Artificial Sequence
  GATA2 Guide RNA
gggcuugaugaguggucaguu

SEQ ID NO: 11952 - RNA, 21 nt, Artificial Sequence
  GATA2 Guide RNA
ggucaguucugcccauucauc

SEQ ID NO: 11953 - RNA, 21 nt, Artificial Sequence
  GATA2 Guide RNA
gucaguucugcccauucaucu

SEQ ID NO: 11954 - RNA, 21 nt, Artificial Sequence
  GATA2 Guide RNA
guggucaguucugcccauuca

SEQ ID NO: 11955 - RNA, 21 nt, Artificial Sequence
  GATA2 Guide RNA
uaccacaagaugaaugggcag

SEQ ID NO: 11956 - RNA, 21 nt, Artificial Sequence
  GATA2 Guide RNA
ucaguucugcccauucaucuu

SEQ ID NO: 11957 - RNA, 21 nt, Artificial Sequence
  GATA2 Guide RNA
ucgcuugggcuugaugagugg

SEQ ID NO: 11958 - RNA, 21 nt, Artificial Sequence
  GATA2 Guide RNA
ugaaugggcagaacugaccac

SEQ ID NO: 11959 - RNA, 21 nt, Artificial Sequence
  GATA2 Guide RNA
ugaguggucaguucugcccau

SEQ ID NO: 11960 - RNA, 21 nt, Artificial Sequence
  GATA2 Guide RNA
ugaugaguggucaguucugcc

SEQ ID NO: 11961 - RNA, 21 nt, Artificial Sequence
  GATA2 Guide RNA
ugggcagaacugaccacucau

SEQ ID NO: 11962 - RNA, 21 nt, Artificial Sequence
  GATA2 Guide RNA
ugggcuugaugaguggucagu

SEQ ID NO: 11963 - RNA, 21 nt, Artificial Sequence
  GATA2 Guide RNA
uggucaguucugcccauucau

SEQ ID NO: 11964 - RNA, 21 nt, Artificial Sequence
  GATA2 Guide RNA
uugaugaguggucaguucugc

SEQ ID NO: 11965 - RNA, 21 nt, Artificial Sequence
  GATA2 Guide RNA
uugggcuugaugaguggucag

SEQ ID NO: 11966 - RNA, 22 nt, Artificial Sequence
  GATA2 Guide RNA
aacugaccacucaucaagccca

SEQ ID NO: 11967 - RNA, 22 nt, Artificial Sequence
  GATA2 Guide RNA
aagaugaaugggcagaacugac

SEQ ID NO: 11968 - RNA, 22 nt, Artificial Sequence
  GATA2 Guide RNA
aaugggcagaacugaccacuca

SEQ ID NO: 11969 - RNA, 22 nt, Artificial Sequence
  GATA2 Guide RNA
acaagaugaaugggcagaacug

SEQ ID NO: 11970 - RNA, 22 nt, Artificial Sequence
  GATA2 Guide RNA
accacaagaugaaugggcagaa

SEQ ID NO: 11971 - RNA, 22 nt, Artificial Sequence
  GATA2 Guide RNA
acugaccacucaucaagcccaa

SEQ ID NO: 11972 - RNA, 22 nt, Artificial Sequence
  GATA2 Guide RNA
agaacugaccacucaucaagcc

SEQ ID NO: 11973 - RNA, 22 nt, Artificial Sequence
  GATA2 Guide RNA
agaugaaugggcagaacugacc

SEQ ID NO: 11974 - RNA, 22 nt, Artificial Sequence
  GATA2 Guide RNA
aguggucaguucugcccauuca

SEQ ID NO: 11975 - RNA, 22 nt, Artificial Sequence
  GATA2 Guide RNA
aguucugcccauucaucuugug

SEQ ID NO: 11976 - RNA, 22 nt, Artificial Sequence
  GATA2 Guide RNA
augaaugggcagaacugaccac

SEQ ID NO: 11977 - RNA, 22 nt, Artificial Sequence
  GATA2 Guide RNA
augaguggucaguucugcccau

SEQ ID NO: 11978 - RNA, 22 nt, Artificial Sequence
  GATA2 Guide RNA
augggcagaacugaccacucau

SEQ ID NO: 11979 - RNA, 22 nt, Artificial Sequence
  GATA2 Guide RNA
caagaugaaugggcagaacuga

SEQ ID NO: 11980 - RNA, 22 nt, Artificial Sequence
  GATA2 Guide RNA
cacaagaugaaugggcagaacu

SEQ ID NO: 11981 - RNA, 22 nt, Artificial Sequence
  GATA2 Guide RNA
cagaacugaccacucaucaagc

SEQ ID NO: 11982 - RNA, 22 nt, Artificial Sequence
  GATA2 Guide RNA
caguucugcccauucaucuugu

SEQ ID NO: 11983 - RNA, 22 nt, Artificial Sequence
  GATA2 Guide RNA
ccacaagaugaaugggcagaac

SEQ ID NO: 11984 - RNA, 22 nt, Artificial Sequence
  GATA2 Guide RNA
cgcuugggcuugaugagugguc

SEQ ID NO: 11985 - RNA, 22 nt, Artificial Sequence
  GATA2 Guide RNA
cuaccacaagaugaaugggcag

SEQ ID NO: 11986 - RNA, 22 nt, Artificial Sequence
  GATA2 Guide RNA
cugaccacucaucaagcccaag

SEQ ID NO: 11987 - RNA, 22 nt, Artificial Sequence
  GATA2 Guide RNA
cuugaugaguggucaguucugc

SEQ ID NO: 11988 - RNA, 22 nt, Artificial Sequence
  GATA2 Guide RNA
cuugggcuugaugaguggucag

SEQ ID NO: 11989 - RNA, 22 nt, Artificial Sequence
  GATA2 Guide RNA
gaacugaccacucaucaagccc

SEQ ID NO: 11990 - RNA, 22 nt, Artificial Sequence
  GATA2 Guide RNA
gaaugggcagaacugaccacuc

SEQ ID NO: 11991 - RNA, 22 nt, Artificial Sequence
  GATA2 Guide RNA
gaguggucaguucugcccauuc

SEQ ID NO: 11992 - RNA, 22 nt, Artificial Sequence
  GATA2 Guide RNA
gaugaaugggcagaacugacca

SEQ ID NO: 11993 - RNA, 22 nt, Artificial Sequence
  GATA2 Guide RNA
gaugaguggucaguucugccca

SEQ ID NO: 11994 - RNA, 22 nt, Artificial Sequence
  GATA2 Guide RNA
gcagaacugaccacucaucaag

SEQ ID NO: 11995 - RNA, 22 nt, Artificial Sequence
  GATA2 Guide RNA
gcuugaugaguggucaguucug

SEQ ID NO: 11996 - RNA, 22 nt, Artificial Sequence
  GATA2 Guide RNA
gcuugggcuugaugagugguca

SEQ ID NO: 11997 - RNA, 22 nt, Artificial Sequence
  GATA2 Guide RNA
ggcagaacugaccacucaucaa

SEQ ID NO: 11998 - RNA, 22 nt, Artificial Sequence
  GATA2 Guide RNA
ggcuugaugaguggucaguucu

SEQ ID NO: 11999 - RNA, 22 nt, Artificial Sequence
  GATA2 Guide RNA
gggcagaacugaccacucauca

SEQ ID NO: 12000 - RNA, 22 nt, Artificial Sequence
  GATA2 Guide RNA
gggcuugaugaguggucaguuc

SEQ ID NO: 12001 - RNA, 22 nt, Artificial Sequence
  GATA2 Guide RNA
ggucaguucugcccauucaucu

SEQ ID NO: 12002 - RNA, 22 nt, Artificial Sequence
  GATA2 Guide RNA
gucaguucugcccauucaucuu

SEQ ID NO: 12003 - RNA, 22 nt, Artificial Sequence
  GATA2 Guide RNA
guggucaguucugcccauucau

SEQ ID NO: 12004 - RNA, 22 nt, Artificial Sequence
  GATA2 Guide RNA
uaccacaagaugaaugggcaga

SEQ ID NO: 12005 - RNA, 22 nt, Artificial Sequence
  GATA2 Guide RNA
ucaguucugcccauucaucuug

SEQ ID NO: 12006 - RNA, 22 nt, Artificial Sequence
  GATA2 Guide RNA
ucgcuugggcuugaugaguggu

SEQ ID NO: 12007 - RNA, 22 nt, Artificial Sequence
  GATA2 Guide RNA
ugaaugggcagaacugaccacu

SEQ ID NO: 12008 - RNA, 22 nt, Artificial Sequence
  GATA2 Guide RNA
ugaguggucaguucugcccauu

SEQ ID NO: 12009 - RNA, 22 nt, Artificial Sequence
  GATA2 Guide RNA
ugaugaguggucaguucugccc

SEQ ID NO: 12010 - RNA, 22 nt, Artificial Sequence
  GATA2 Guide RNA
ugggcagaacugaccacucauc

SEQ ID NO: 12011 - RNA, 22 nt, Artificial Sequence
  GATA2 Guide RNA
ugggcuugaugaguggucaguu

SEQ ID NO: 12012 - RNA, 22 nt, Artificial Sequence
  GATA2 Guide RNA
uggucaguucugcccauucauc

SEQ ID NO: 12013 - RNA, 22 nt, Artificial Sequence
  GATA2 Guide RNA
uucgcuugggcuugaugagugg

SEQ ID NO: 12014 - RNA, 22 nt, Artificial Sequence
  GATA2 Guide RNA
uugaugaguggucaguucugcc

SEQ ID NO: 12015 - RNA, 22 nt, Artificial Sequence
  GATA2 Guide RNA
uugggcuugaugaguggucagu

SEQ ID NO: 12016 - RNA, 20 nt, Artificial Sequence
  GATA2 Guide RNA
aaugccuguggccucuacca

SEQ ID NO: 12017 - RNA, 20 nt, Artificial Sequence
  GATA2 Guide RNA
acagaugaaugggcagaacc

SEQ ID NO: 12018 - RNA, 20 nt, Artificial Sequence
  GATA2 Guide RNA
accacagaugaaugggcaga

SEQ ID NO: 12019 - RNA, 20 nt, Artificial Sequence
  GATA2 Guide RNA
agaugaaugggcagaaccga

SEQ ID NO: 12020 - RNA, 20 nt, Artificial Sequence
  GATA2 Guide RNA
aucugugguagaggccacag

SEQ ID NO: 12021 - RNA, 20 nt, Artificial Sequence
  GATA2 Guide RNA
augccuguggccucuaccac

SEQ ID NO: 12022 - RNA, 20 nt, Artificial Sequence
  GATA2 Guide RNA
auucaucugugguagaggcc

SEQ ID NO: 12023 - RNA, 20 nt, Artificial Sequence
  GATA2 Guide RNA
caaugccuguggccucuacc

SEQ ID NO: 12024 - RNA, 20 nt, Artificial Sequence
  GATA2 Guide RNA
cacagaugaaugggcagaac

SEQ ID NO: 12025 - RNA, 20 nt, Artificial Sequence
  GATA2 Guide RNA
cagaugaaugggcagaaccg

SEQ ID NO: 12026 - RNA, 20 nt, Artificial Sequence
  GATA2 Guide RNA
caucugugguagaggccaca

SEQ ID NO: 12027 - RNA, 20 nt, Artificial Sequence
  GATA2 Guide RNA
cauucaucugugguagaggc

SEQ ID NO: 12028 - RNA, 20 nt, Artificial Sequence
  GATA2 Guide RNA
ccacagaugaaugggcagaa

SEQ ID NO: 12029 - RNA, 20 nt, Artificial Sequence
  GATA2 Guide RNA
ccauucaucugugguagagg

SEQ ID NO: 12030 - RNA, 20 nt, Artificial Sequence
  GATA2 Guide RNA
cccauucaucugugguagag

SEQ ID NO: 12031 - RNA, 20 nt, Artificial Sequence
  GATA2 Guide RNA
ccucuaccacagaugaaugg

SEQ ID NO: 12032 - RNA, 20 nt, Artificial Sequence
  GATA2 Guide RNA
ccuguggccucuaccacaga

SEQ ID NO: 12033 - RNA, 20 nt, Artificial Sequence
  GATA2 Guide RNA
cgguucugcccauucaucug

SEQ ID NO: 12034 - RNA, 20 nt, Artificial Sequence
  GATA2 Guide RNA
cuaccacagaugaaugggca

SEQ ID NO: 12035 - RNA, 20 nt, Artificial Sequence
  GATA2 Guide RNA
cucuaccacagaugaauggg

SEQ ID NO: 12036 - RNA, 20 nt, Artificial Sequence
  GATA2 Guide RNA
cugcccauucaucuguggua

SEQ ID NO: 12037 - RNA, 20 nt, Artificial Sequence
  GATA2 Guide RNA
cuguggccucuaccacagau

SEQ ID NO: 12038 - RNA, 20 nt, Artificial Sequence
  GATA2 Guide RNA
cugugguagaggccacaggc

SEQ ID NO: 12039 - RNA, 20 nt, Artificial Sequence
  GATA2 Guide RNA
gcccauucaucugugguaga

SEQ ID NO: 12040 - RNA, 20 nt, Artificial Sequence
  GATA2 Guide RNA
gccucuaccacagaugaaug

SEQ ID NO: 12041 - RNA, 20 nt, Artificial Sequence
  GATA2 Guide RNA
gccuguggccucuaccacag

SEQ ID NO: 12042 - RNA, 20 nt, Artificial Sequence
  GATA2 Guide RNA
ggccucuaccacagaugaau

SEQ ID NO: 12043 - RNA, 20 nt, Artificial Sequence
  GATA2 Guide RNA
ggucgguucugcccauucau

SEQ ID NO: 12044 - RNA, 20 nt, Artificial Sequence
  GATA2 Guide RNA
gguucugcccauucaucugu

SEQ ID NO: 12045 - RNA, 20 nt, Artificial Sequence
  GATA2 Guide RNA
gucgguucugcccauucauc

SEQ ID NO: 12046 - RNA, 20 nt, Artificial Sequence
  GATA2 Guide RNA
guggccucuaccacagauga

SEQ ID NO: 12047 - RNA, 20 nt, Artificial Sequence
  GATA2 Guide RNA
guggucgguucugcccauuc

SEQ ID NO: 12048 - RNA, 20 nt, Artificial Sequence
  GATA2 Guide RNA
guucugcccauucaucugug

SEQ ID NO: 12049 - RNA, 20 nt, Artificial Sequence
  GATA2 Guide RNA
uaccacagaugaaugggcag

SEQ ID NO: 12050 - RNA, 20 nt, Artificial Sequence
  GATA2 Guide RNA
ucaucugugguagaggccac

SEQ ID NO: 12051 - RNA, 20 nt, Artificial Sequence
  GATA2 Guide RNA
ucgguucugcccauucaucu

SEQ ID NO: 12052 - RNA, 20 nt, Artificial Sequence
  GATA2 Guide RNA
ucuaccacagaugaaugggc

SEQ ID NO: 12053 - RNA, 20 nt, Artificial Sequence
  GATA2 Guide RNA
ucugcccauucaucuguggu

SEQ ID NO: 12054 - RNA, 20 nt, Artificial Sequence
  GATA2 Guide RNA
ucugugguagaggccacagg

SEQ ID NO: 12055 - RNA, 20 nt, Artificial Sequence
  GATA2 Guide RNA
ugcccauucaucugugguag

SEQ ID NO: 12056 - RNA, 20 nt, Artificial Sequence
  GATA2 Guide RNA
ugccuguggccucuaccaca

SEQ ID NO: 12057 - RNA, 20 nt, Artificial Sequence
  GATA2 Guide RNA
uggccucuaccacagaugaa

SEQ ID NO: 12058 - RNA, 20 nt, Artificial Sequence
  GATA2 Guide RNA
uggucgguucugcccauuca

SEQ ID NO: 12059 - RNA, 20 nt, Artificial Sequence
  GATA2 Guide RNA
uguggccucuaccacagaug

SEQ ID NO: 12060 - RNA, 20 nt, Artificial Sequence
  GATA2 Guide RNA
uucaucugugguagaggcca

SEQ ID NO: 12061 - RNA, 20 nt, Artificial Sequence
  GATA2 Guide RNA
uucugcccauucaucugugg

SEQ ID NO: 12062 - RNA, 21 nt, Artificial Sequence
  GATA2 Guide RNA
aaugccuguggccucuaccac

SEQ ID NO: 12063 - RNA, 21 nt, Artificial Sequence
  GATA2 Guide RNA
acagaugaaugggcagaaccg

SEQ ID NO: 12064 - RNA, 21 nt, Artificial Sequence
  GATA2 Guide RNA
accacagaugaaugggcagaa

SEQ ID NO: 12065 - RNA, 21 nt, Artificial Sequence
  GATA2 Guide RNA
agaugaaugggcagaaccgac

SEQ ID NO: 12066 - RNA, 21 nt, Artificial Sequence
  GATA2 Guide RNA
aguggucgguucugcccauuc

SEQ ID NO: 12067 - RNA, 21 nt, Artificial Sequence
  GATA2 Guide RNA
aucugugguagaggccacagg

SEQ ID NO: 12068 - RNA, 21 nt, Artificial Sequence
  GATA2 Guide RNA
augccuguggccucuaccaca

SEQ ID NO: 12069 - RNA, 21 nt, Artificial Sequence
  GATA2 Guide RNA
auucaucugugguagaggcca

SEQ ID NO: 12070 - RNA, 21 nt, Artificial Sequence
  GATA2 Guide RNA
caaugccuguggccucuacca

SEQ ID NO: 12071 - RNA, 21 nt, Artificial Sequence
  GATA2 Guide RNA
cacagaugaaugggcagaacc

SEQ ID NO: 12072 - RNA, 21 nt, Artificial Sequence
  GATA2 Guide RNA
cagaugaaugggcagaaccga

SEQ ID NO: 12073 - RNA, 21 nt, Artificial Sequence
  GATA2 Guide RNA
caucugugguagaggccacag

SEQ ID NO: 12074 - RNA, 21 nt, Artificial Sequence
  GATA2 Guide RNA
cauucaucugugguagaggcc

SEQ ID NO: 12075 - RNA, 21 nt, Artificial Sequence
  GATA2 Guide RNA
ccacagaugaaugggcagaac

SEQ ID NO: 12076 - RNA, 21 nt, Artificial Sequence
  GATA2 Guide RNA
ccauucaucugugguagaggc

SEQ ID NO: 12077 - RNA, 21 nt, Artificial Sequence
  GATA2 Guide RNA
cccauucaucugugguagagg

SEQ ID NO: 12078 - RNA, 21 nt, Artificial Sequence
  GATA2 Guide RNA
ccucuaccacagaugaauggg

SEQ ID NO: 12079 - RNA, 21 nt, Artificial Sequence
  GATA2 Guide RNA
ccuguggccucuaccacagau

SEQ ID NO: 12080 - RNA, 21 nt, Artificial Sequence
  GATA2 Guide RNA
cgguucugcccauucaucugu

SEQ ID NO: 12081 - RNA, 21 nt, Artificial Sequence
  GATA2 Guide RNA
cuaccacagaugaaugggcag

SEQ ID NO: 12082 - RNA, 21 nt, Artificial Sequence
  GATA2 Guide RNA
cucuaccacagaugaaugggc

SEQ ID NO: 12083 - RNA, 21 nt, Artificial Sequence
  GATA2 Guide RNA
cugcccauucaucugugguag

SEQ ID NO: 12084 - RNA, 21 nt, Artificial Sequence
  GATA2 Guide RNA
cuguggccucuaccacagaug

SEQ ID NO: 12085 - RNA, 21 nt, Artificial Sequence
  GATA2 Guide RNA
cugugguagaggccacaggca

SEQ ID NO: 12086 - RNA, 21 nt, Artificial Sequence
  GATA2 Guide RNA
gcaaugccuguggccucuacc

SEQ ID NO: 12087 - RNA, 21 nt, Artificial Sequence
  GATA2 Guide RNA
gcccauucaucugugguagag

SEQ ID NO: 12088 - RNA, 21 nt, Artificial Sequence
  GATA2 Guide RNA
gccucuaccacagaugaaugg

SEQ ID NO: 12089 - RNA, 21 nt, Artificial Sequence
  GATA2 Guide RNA
gccuguggccucuaccacaga

SEQ ID NO: 12090 - RNA, 21 nt, Artificial Sequence
  GATA2 Guide RNA
ggccucuaccacagaugaaug

SEQ ID NO: 12091 - RNA, 21 nt, Artificial Sequence
  GATA2 Guide RNA
ggucgguucugcccauucauc

SEQ ID NO: 12092 - RNA, 21 nt, Artificial Sequence
  GATA2 Guide RNA
gguucugcccauucaucugug

SEQ ID NO: 12093 - RNA, 21 nt, Artificial Sequence
  GATA2 Guide RNA
gucgguucugcccauucaucu

SEQ ID NO: 12094 - RNA, 21 nt, Artificial Sequence
  GATA2 Guide RNA
guggccucuaccacagaugaa

SEQ ID NO: 12095 - RNA, 21 nt, Artificial Sequence
  GATA2 Guide RNA
guggucgguucugcccauuca

SEQ ID NO: 12096 - RNA, 21 nt, Artificial Sequence
  GATA2 Guide RNA
guucugcccauucaucugugg

SEQ ID NO: 12097 - RNA, 21 nt, Artificial Sequence
  GATA2 Guide RNA
uaccacagaugaaugggcaga

SEQ ID NO: 12098 - RNA, 21 nt, Artificial Sequence
  GATA2 Guide RNA
ucaucugugguagaggccaca

SEQ ID NO: 12099 - RNA, 21 nt, Artificial Sequence
  GATA2 Guide RNA
ucgguucugcccauucaucug

SEQ ID NO: 12100 - RNA, 21 nt, Artificial Sequence
  GATA2 Guide RNA
ucuaccacagaugaaugggca

SEQ ID NO: 12101 - RNA, 21 nt, Artificial Sequence
  GATA2 Guide RNA
ucugcccauucaucuguggua

SEQ ID NO: 12102 - RNA, 21 nt, Artificial Sequence
  GATA2 Guide RNA
ucugugguagaggccacaggc

SEQ ID NO: 12103 - RNA, 21 nt, Artificial Sequence
  GATA2 Guide RNA
ugcccauucaucugugguaga

SEQ ID NO: 12104 - RNA, 21 nt, Artificial Sequence
  GATA2 Guide RNA
ugccuguggccucuaccacag

SEQ ID NO: 12105 - RNA, 21 nt, Artificial Sequence
  GATA2 Guide RNA
uggccucuaccacagaugaau

SEQ ID NO: 12106 - RNA, 21 nt, Artificial Sequence
  GATA2 Guide RNA
uggucgguucugcccauucau

SEQ ID NO: 12107 - RNA, 21 nt, Artificial Sequence
  GATA2 Guide RNA
uguggccucuaccacagauga

SEQ ID NO: 12108 - RNA, 21 nt, Artificial Sequence
  GATA2 Guide RNA
uucaucugugguagaggccac

SEQ ID NO: 12109 - RNA, 21 nt, Artificial Sequence
  GATA2 Guide RNA
uucugcccauucaucuguggu

SEQ ID NO: 12110 - RNA, 22 nt, Artificial Sequence
  GATA2 Guide RNA
aaugccuguggccucuaccaca

SEQ ID NO: 12111 - RNA, 22 nt, Artificial Sequence
  GATA2 Guide RNA
acagaugaaugggcagaaccga

SEQ ID NO: 12112 - RNA, 22 nt, Artificial Sequence
  GATA2 Guide RNA
accacagaugaaugggcagaac

SEQ ID NO: 12113 - RNA, 22 nt, Artificial Sequence
  GATA2 Guide RNA
agaugaaugggcagaaccgacc

SEQ ID NO: 12114 - RNA, 22 nt, Artificial Sequence
  GATA2 Guide RNA
aguggucgguucugcccauuca

SEQ ID NO: 12115 - RNA, 22 nt, Artificial Sequence
  GATA2 Guide RNA
aucugugguagaggccacaggc

SEQ ID NO: 12116 - RNA, 22 nt, Artificial Sequence
  GATA2 Guide RNA
augccuguggccucuaccacag

SEQ ID NO: 12117 - RNA, 22 nt, Artificial Sequence
  GATA2 Guide RNA
auucaucugugguagaggccac

SEQ ID NO: 12118 - RNA, 22 nt, Artificial Sequence
  GATA2 Guide RNA
caaugccuguggccucuaccac

SEQ ID NO: 12119 - RNA, 22 nt, Artificial Sequence
  GATA2 Guide RNA
cacagaugaaugggcagaaccg

SEQ ID NO: 12120 - RNA, 22 nt, Artificial Sequence
  GATA2 Guide RNA
cagaugaaugggcagaaccgac

SEQ ID NO: 12121 - RNA, 22 nt, Artificial Sequence
  GATA2 Guide RNA
caucugugguagaggccacagg

SEQ ID NO: 12122 - RNA, 22 nt, Artificial Sequence
  GATA2 Guide RNA
cauucaucugugguagaggcca

SEQ ID NO: 12123 - RNA, 22 nt, Artificial Sequence
  GATA2 Guide RNA
ccacagaugaaugggcagaacc

SEQ ID NO: 12124 - RNA, 22 nt, Artificial Sequence
  GATA2 Guide RNA
ccauucaucugugguagaggcc

SEQ ID NO: 12125 - RNA, 22 nt, Artificial Sequence
  GATA2 Guide RNA
cccauucaucugugguagaggc

SEQ ID NO: 12126 - RNA, 22 nt, Artificial Sequence
  GATA2 Guide RNA
ccucuaccacagaugaaugggc

SEQ ID NO: 12127 - RNA, 22 nt, Artificial Sequence
  GATA2 Guide RNA
ccuguggccucuaccacagaug

SEQ ID NO: 12128 - RNA, 22 nt, Artificial Sequence
  GATA2 Guide RNA
cgguucugcccauucaucugug

SEQ ID NO: 12129 - RNA, 22 nt, Artificial Sequence
  GATA2 Guide RNA
cuaccacagaugaaugggcaga

SEQ ID NO: 12130 - RNA, 22 nt, Artificial Sequence
  GATA2 Guide RNA
cucuaccacagaugaaugggca

SEQ ID NO: 12131 - RNA, 22 nt, Artificial Sequence
  GATA2 Guide RNA
cugcccauucaucugugguaga

SEQ ID NO: 12132 - RNA, 22 nt, Artificial Sequence
  GATA2 Guide RNA
cuguggccucuaccacagauga

SEQ ID NO: 12133 - RNA, 22 nt, Artificial Sequence
  GATA2 Guide RNA
cugugguagaggccacaggcau

SEQ ID NO: 12134 - RNA, 22 nt, Artificial Sequence
  GATA2 Guide RNA
gaguggucgguucugcccauuc

SEQ ID NO: 12135 - RNA, 22 nt, Artificial Sequence
  GATA2 Guide RNA
gcaaugccuguggccucuacca

SEQ ID NO: 12136 - RNA, 22 nt, Artificial Sequence
  GATA2 Guide RNA
gcccauucaucugugguagagg

SEQ ID NO: 12137 - RNA, 22 nt, Artificial Sequence
  GATA2 Guide RNA
gccucuaccacagaugaauggg

SEQ ID NO: 12138 - RNA, 22 nt, Artificial Sequence
  GATA2 Guide RNA
gccuguggccucuaccacagau

SEQ ID NO: 12139 - RNA, 22 nt, Artificial Sequence
  GATA2 Guide RNA
ggccucuaccacagaugaaugg

SEQ ID NO: 12140 - RNA, 22 nt, Artificial Sequence
  GATA2 Guide RNA
ggucgguucugcccauucaucu

SEQ ID NO: 12141 - RNA, 22 nt, Artificial Sequence
  GATA2 Guide RNA
gguucugcccauucaucugugg

SEQ ID NO: 12142 - RNA, 22 nt, Artificial Sequence
  GATA2 Guide RNA
gucgguucugcccauucaucug

SEQ ID NO: 12143 - RNA, 22 nt, Artificial Sequence
  GATA2 Guide RNA
guggccucuaccacagaugaau

SEQ ID NO: 12144 - RNA, 22 nt, Artificial Sequence
  GATA2 Guide RNA
guggucgguucugcccauucau

SEQ ID NO: 12145 - RNA, 22 nt, Artificial Sequence
  GATA2 Guide RNA
guucugcccauucaucuguggu

SEQ ID NO: 12146 - RNA, 22 nt, Artificial Sequence
  GATA2 Guide RNA
uaccacagaugaaugggcagaa

SEQ ID NO: 12147 - RNA, 22 nt, Artificial Sequence
  GATA2 Guide RNA
ucaucugugguagaggccacag

SEQ ID NO: 12148 - RNA, 22 nt, Artificial Sequence
  GATA2 Guide RNA
ucgguucugcccauucaucugu

SEQ ID NO: 12149 - RNA, 22 nt, Artificial Sequence
  GATA2 Guide RNA
ucuaccacagaugaaugggcag

SEQ ID NO: 12150 - RNA, 22 nt, Artificial Sequence
  GATA2 Guide RNA
ucugcccauucaucugugguag

SEQ ID NO: 12151 - RNA, 22 nt, Artificial Sequence
  GATA2 Guide RNA
ucugugguagaggccacaggca

SEQ ID NO: 12152 - RNA, 22 nt, Artificial Sequence
  GATA2 Guide RNA
ugcaaugccuguggccucuacc

SEQ ID NO: 12153 - RNA, 22 nt, Artificial Sequence
  GATA2 Guide RNA
ugcccauucaucugugguagag

SEQ ID NO: 12154 - RNA, 22 nt, Artificial Sequence
  GATA2 Guide RNA
ugccuguggccucuaccacaga

SEQ ID NO: 12155 - RNA, 22 nt, Artificial Sequence
  GATA2 Guide RNA
uggccucuaccacagaugaaug

SEQ ID NO: 12156 - RNA, 22 nt, Artificial Sequence
  GATA2 Guide RNA
uggucgguucugcccauucauc

SEQ ID NO: 12157 - RNA, 22 nt, Artificial Sequence
  GATA2 Guide RNA
uguggccucuaccacagaugaa

SEQ ID NO: 12158 - RNA, 22 nt, Artificial Sequence
  GATA2 Guide RNA
uucaucugugguagaggccaca

SEQ ID NO: 12159 - RNA, 22 nt, Artificial Sequence
  GATA2 Guide RNA
uucugcccauucaucuguggua

SEQ ID NO: 12160 - RNA, 20 nt, Artificial Sequence
  GATA2 Guide RNA
acaggaugaaugggcagaac

SEQ ID NO: 12161 - RNA, 20 nt, Artificial Sequence
  GATA2 Guide RNA
accacaggaugaaugggcag

SEQ ID NO: 12162 - RNA, 20 nt, Artificial Sequence
  GATA2 Guide RNA
aggaugaaugggcagaaccg

SEQ ID NO: 12163 - RNA, 20 nt, Artificial Sequence
  GATA2 Guide RNA
auccugugguagaggccaca

SEQ ID NO: 12164 - RNA, 20 nt, Artificial Sequence
  GATA2 Guide RNA
auucauccugugguagaggc

SEQ ID NO: 12165 - RNA, 20 nt, Artificial Sequence
  GATA2 Guide RNA
cacaggaugaaugggcagaa

SEQ ID NO: 12166 - RNA, 20 nt, Artificial Sequence
  GATA2 Guide RNA
caggaugaaugggcagaacc

SEQ ID NO: 12167 - RNA, 20 nt, Artificial Sequence
  GATA2 Guide RNA
cauccugugguagaggccac

SEQ ID NO: 12168 - RNA, 20 nt, Artificial Sequence
  GATA2 Guide RNA
cauucauccugugguagagg

SEQ ID NO: 12169 - RNA, 20 nt, Artificial Sequence
  GATA2 Guide RNA
ccacaggaugaaugggcaga

SEQ ID NO: 12170 - RNA, 20 nt, Artificial Sequence
  GATA2 Guide RNA
ccauucauccugugguagag

SEQ ID NO: 12171 - RNA, 20 nt, Artificial Sequence
  GATA2 Guide RNA
cccauucauccugugguaga

SEQ ID NO: 12172 - RNA, 20 nt, Artificial Sequence
  GATA2 Guide RNA
ccucuaccacaggaugaaug

SEQ ID NO: 12173 - RNA, 20 nt, Artificial Sequence
  GATA2 Guide RNA
ccuguggccucuaccacagg

SEQ ID NO: 12174 - RNA, 20 nt, Artificial Sequence
  GATA2 Guide RNA
ccugugguagaggccacagg

SEQ ID NO: 12175 - RNA, 20 nt, Artificial Sequence
  GATA2 Guide RNA
cgguucugcccauucauccu

SEQ ID NO: 12176 - RNA, 20 nt, Artificial Sequence
  GATA2 Guide RNA
cuaccacaggaugaaugggc

SEQ ID NO: 12177 - RNA, 20 nt, Artificial Sequence
  GATA2 Guide RNA
cucuaccacaggaugaaugg

SEQ ID NO: 12178 - RNA, 20 nt, Artificial Sequence
  GATA2 Guide RNA
cugcccauucauccuguggu

SEQ ID NO: 12179 - RNA, 20 nt, Artificial Sequence
  GATA2 Guide RNA
cuguggccucuaccacagga

SEQ ID NO: 12180 - RNA, 20 nt, Artificial Sequence
  GATA2 Guide RNA
gcccauucauccugugguag

SEQ ID NO: 12181 - RNA, 20 nt, Artificial Sequence
  GATA2 Guide RNA
gccucuaccacaggaugaau

SEQ ID NO: 12182 - RNA, 20 nt, Artificial Sequence
  GATA2 Guide RNA
ggccucuaccacaggaugaa

SEQ ID NO: 12183 - RNA, 20 nt, Artificial Sequence
  GATA2 Guide RNA
gguucugcccauucauccug

SEQ ID NO: 12184 - RNA, 20 nt, Artificial Sequence
  GATA2 Guide RNA
guggccucuaccacaggaug

SEQ ID NO: 12185 - RNA, 20 nt, Artificial Sequence
  GATA2 Guide RNA
guucugcccauucauccugu

SEQ ID NO: 12186 - RNA, 20 nt, Artificial Sequence
  GATA2 Guide RNA
uaccacaggaugaaugggca

SEQ ID NO: 12187 - RNA, 20 nt, Artificial Sequence
  GATA2 Guide RNA
ucauccugugguagaggcca

SEQ ID NO: 12188 - RNA, 20 nt, Artificial Sequence
  GATA2 Guide RNA
uccugugguagaggccacag

SEQ ID NO: 12189 - RNA, 20 nt, Artificial Sequence
  GATA2 Guide RNA
ucgguucugcccauucaucc

SEQ ID NO: 12190 - RNA, 20 nt, Artificial Sequence
  GATA2 Guide RNA
ucuaccacaggaugaauggg

SEQ ID NO: 12191 - RNA, 20 nt, Artificial Sequence
  GATA2 Guide RNA
ucugcccauucauccugugg

SEQ ID NO: 12192 - RNA, 20 nt, Artificial Sequence
  GATA2 Guide RNA
ugcccauucauccuguggua

SEQ ID NO: 12193 - RNA, 20 nt, Artificial Sequence
  GATA2 Guide RNA
uggccucuaccacaggauga

SEQ ID NO: 12194 - RNA, 20 nt, Artificial Sequence
  GATA2 Guide RNA
uguggccucuaccacaggau

SEQ ID NO: 12195 - RNA, 20 nt, Artificial Sequence
  GATA2 Guide RNA
uucauccugugguagaggcc

SEQ ID NO: 12196 - RNA, 20 nt, Artificial Sequence
  GATA2 Guide RNA
uucugcccauucauccugug

SEQ ID NO: 12197 - RNA, 21 nt, Artificial Sequence
  GATA2 Guide RNA
acaggaugaaugggcagaacc

SEQ ID NO: 12198 - RNA, 21 nt, Artificial Sequence
  GATA2 Guide RNA
accacaggaugaaugggcaga

SEQ ID NO: 12199 - RNA, 21 nt, Artificial Sequence
  GATA2 Guide RNA
aggaugaaugggcagaaccga

SEQ ID NO: 12200 - RNA, 21 nt, Artificial Sequence
  GATA2 Guide RNA
auccugugguagaggccacag

SEQ ID NO: 12201 - RNA, 21 nt, Artificial Sequence
  GATA2 Guide RNA
auucauccugugguagaggcc

SEQ ID NO: 12202 - RNA, 21 nt, Artificial Sequence
  GATA2 Guide RNA
cacaggaugaaugggcagaac

SEQ ID NO: 12203 - RNA, 21 nt, Artificial Sequence
  GATA2 Guide RNA
caggaugaaugggcagaaccg

SEQ ID NO: 12204 - RNA, 21 nt, Artificial Sequence
  GATA2 Guide RNA
cauccugugguagaggccaca

SEQ ID NO: 12205 - RNA, 21 nt, Artificial Sequence
  GATA2 Guide RNA
cauucauccugugguagaggc

SEQ ID NO: 12206 - RNA, 21 nt, Artificial Sequence
  GATA2 Guide RNA
ccacaggaugaaugggcagaa

SEQ ID NO: 12207 - RNA, 21 nt, Artificial Sequence
  GATA2 Guide RNA
ccauucauccugugguagagg

SEQ ID NO: 12208 - RNA, 21 nt, Artificial Sequence
  GATA2 Guide RNA
cccauucauccugugguagag

SEQ ID NO: 12209 - RNA, 21 nt, Artificial Sequence
  GATA2 Guide RNA
ccucuaccacaggaugaaugg

SEQ ID NO: 12210 - RNA, 21 nt, Artificial Sequence
  GATA2 Guide RNA
ccuguggccucuaccacagga

SEQ ID NO: 12211 - RNA, 21 nt, Artificial Sequence
  GATA2 Guide RNA
ccugugguagaggccacaggc

SEQ ID NO: 12212 - RNA, 21 nt, Artificial Sequence
  GATA2 Guide RNA
cgguucugcccauucauccug

SEQ ID NO: 12213 - RNA, 21 nt, Artificial Sequence
  GATA2 Guide RNA
cuaccacaggaugaaugggca

SEQ ID NO: 12214 - RNA, 21 nt, Artificial Sequence
  GATA2 Guide RNA
cucuaccacaggaugaauggg

SEQ ID NO: 12215 - RNA, 21 nt, Artificial Sequence
  GATA2 Guide RNA
cugcccauucauccuguggua

SEQ ID NO: 12216 - RNA, 21 nt, Artificial Sequence
  GATA2 Guide RNA
cuguggccucuaccacaggau

SEQ ID NO: 12217 - RNA, 21 nt, Artificial Sequence
  GATA2 Guide RNA
gcccauucauccugugguaga

SEQ ID NO: 12218 - RNA, 21 nt, Artificial Sequence
  GATA2 Guide RNA
gccucuaccacaggaugaaug

SEQ ID NO: 12219 - RNA, 21 nt, Artificial Sequence
  GATA2 Guide RNA
gccuguggccucuaccacagg

SEQ ID NO: 12220 - RNA, 21 nt, Artificial Sequence
  GATA2 Guide RNA
ggccucuaccacaggaugaau

SEQ ID NO: 12221 - RNA, 21 nt, Artificial Sequence
  GATA2 Guide RNA
gguucugcccauucauccugu

SEQ ID NO: 12222 - RNA, 21 nt, Artificial Sequence
  GATA2 Guide RNA
gucgguucugcccauucaucc

SEQ ID NO: 12223 - RNA, 21 nt, Artificial Sequence
  GATA2 Guide RNA
guggccucuaccacaggauga

SEQ ID NO: 12224 - RNA, 21 nt, Artificial Sequence
  GATA2 Guide RNA
guucugcccauucauccugug

SEQ ID NO: 12225 - RNA, 21 nt, Artificial Sequence
  GATA2 Guide RNA
uaccacaggaugaaugggcag

SEQ ID NO: 12226 - RNA, 21 nt, Artificial Sequence
  GATA2 Guide RNA
ucauccugugguagaggccac

SEQ ID NO: 12227 - RNA, 21 nt, Artificial Sequence
  GATA2 Guide RNA
uccugugguagaggccacagg

SEQ ID NO: 12228 - RNA, 21 nt, Artificial Sequence
  GATA2 Guide RNA
ucgguucugcccauucauccu

SEQ ID NO: 12229 - RNA, 21 nt, Artificial Sequence
  GATA2 Guide RNA
ucuaccacaggaugaaugggc

SEQ ID NO: 12230 - RNA, 21 nt, Artificial Sequence
  GATA2 Guide RNA
ucugcccauucauccuguggu

SEQ ID NO: 12231 - RNA, 21 nt, Artificial Sequence
  GATA2 Guide RNA
ugcccauucauccugugguag

SEQ ID NO: 12232 - RNA, 21 nt, Artificial Sequence
  GATA2 Guide RNA
uggccucuaccacaggaugaa

SEQ ID NO: 12233 - RNA, 21 nt, Artificial Sequence
  GATA2 Guide RNA
uguggccucuaccacaggaug

SEQ ID NO: 12234 - RNA, 21 nt, Artificial Sequence
  GATA2 Guide RNA
uucauccugugguagaggcca

SEQ ID NO: 12235 - RNA, 21 nt, Artificial Sequence
  GATA2 Guide RNA
uucugcccauucauccugugg

SEQ ID NO: 12236 - RNA, 22 nt, Artificial Sequence
  GATA2 Guide RNA
acaggaugaaugggcagaaccg

SEQ ID NO: 12237 - RNA, 22 nt, Artificial Sequence
  GATA2 Guide RNA
accacaggaugaaugggcagaa

SEQ ID NO: 12238 - RNA, 22 nt, Artificial Sequence
  GATA2 Guide RNA
aggaugaaugggcagaaccgac

SEQ ID NO: 12239 - RNA, 22 nt, Artificial Sequence
  GATA2 Guide RNA
auccugugguagaggccacagg

SEQ ID NO: 12240 - RNA, 22 nt, Artificial Sequence
  GATA2 Guide RNA
auucauccugugguagaggcca

SEQ ID NO: 12241 - RNA, 22 nt, Artificial Sequence
  GATA2 Guide RNA
cacaggaugaaugggcagaacc

SEQ ID NO: 12242 - RNA, 22 nt, Artificial Sequence
  GATA2 Guide RNA
caggaugaaugggcagaaccga

SEQ ID NO: 12243 - RNA, 22 nt, Artificial Sequence
  GATA2 Guide RNA
cauccugugguagaggccacag

SEQ ID NO: 12244 - RNA, 22 nt, Artificial Sequence
  GATA2 Guide RNA
cauucauccugugguagaggcc

SEQ ID NO: 12245 - RNA, 22 nt, Artificial Sequence
  GATA2 Guide RNA
ccacaggaugaaugggcagaac

SEQ ID NO: 12246 - RNA, 22 nt, Artificial Sequence
  GATA2 Guide RNA
ccauucauccugugguagaggc

SEQ ID NO: 12247 - RNA, 22 nt, Artificial Sequence
  GATA2 Guide RNA
cccauucauccugugguagagg

SEQ ID NO: 12248 - RNA, 22 nt, Artificial Sequence
  GATA2 Guide RNA
ccucuaccacaggaugaauggg

SEQ ID NO: 12249 - RNA, 22 nt, Artificial Sequence
  GATA2 Guide RNA
ccuguggccucuaccacaggau

SEQ ID NO: 12250 - RNA, 22 nt, Artificial Sequence
  GATA2 Guide RNA
ccugugguagaggccacaggca

SEQ ID NO: 12251 - RNA, 22 nt, Artificial Sequence
  GATA2 Guide RNA
cgguucugcccauucauccugu

SEQ ID NO: 12252 - RNA, 22 nt, Artificial Sequence
  GATA2 Guide RNA
cuaccacaggaugaaugggcag

SEQ ID NO: 12253 - RNA, 22 nt, Artificial Sequence
  GATA2 Guide RNA
cucuaccacaggaugaaugggc

SEQ ID NO: 12254 - RNA, 22 nt, Artificial Sequence
  GATA2 Guide RNA
cugcccauucauccugugguag

SEQ ID NO: 12255 - RNA, 22 nt, Artificial Sequence
  GATA2 Guide RNA
cuguggccucuaccacaggaug

SEQ ID NO: 12256 - RNA, 22 nt, Artificial Sequence
  GATA2 Guide RNA
gcccauucauccugugguagag

SEQ ID NO: 12257 - RNA, 22 nt, Artificial Sequence
  GATA2 Guide RNA
gccucuaccacaggaugaaugg

SEQ ID NO: 12258 - RNA, 22 nt, Artificial Sequence
  GATA2 Guide RNA
gccuguggccucuaccacagga

SEQ ID NO: 12259 - RNA, 22 nt, Artificial Sequence
  GATA2 Guide RNA
ggccucuaccacaggaugaaug

SEQ ID NO: 12260 - RNA, 22 nt, Artificial Sequence
  GATA2 Guide RNA
ggucgguucugcccauucaucc

SEQ ID NO: 12261 - RNA, 22 nt, Artificial Sequence
  GATA2 Guide RNA
gguucugcccauucauccugug

SEQ ID NO: 12262 - RNA, 22 nt, Artificial Sequence
  GATA2 Guide RNA
gucgguucugcccauucauccu

SEQ ID NO: 12263 - RNA, 22 nt, Artificial Sequence
  GATA2 Guide RNA
guggccucuaccacaggaugaa

SEQ ID NO: 12264 - RNA, 22 nt, Artificial Sequence
  GATA2 Guide RNA
guucugcccauucauccugugg

SEQ ID NO: 12265 - RNA, 22 nt, Artificial Sequence
  GATA2 Guide RNA
uaccacaggaugaaugggcaga

SEQ ID NO: 12266 - RNA, 22 nt, Artificial Sequence
  GATA2 Guide RNA
ucauccugugguagaggccaca

SEQ ID NO: 12267 - RNA, 22 nt, Artificial Sequence
  GATA2 Guide RNA
uccugugguagaggccacaggc

SEQ ID NO: 12268 - RNA, 22 nt, Artificial Sequence
  GATA2 Guide RNA
ucgguucugcccauucauccug

SEQ ID NO: 12269 - RNA, 22 nt, Artificial Sequence
  GATA2 Guide RNA
ucuaccacaggaugaaugggca

SEQ ID NO: 12270 - RNA, 22 nt, Artificial Sequence
  GATA2 Guide RNA
ucugcccauucauccuguggua

SEQ ID NO: 12271 - RNA, 22 nt, Artificial Sequence
  GATA2 Guide RNA
ugcccauucauccugugguaga

SEQ ID NO: 12272 - RNA, 22 nt, Artificial Sequence
  GATA2 Guide RNA
ugccuguggccucuaccacagg

SEQ ID NO: 12273 - RNA, 22 nt, Artificial Sequence
  GATA2 Guide RNA
uggccucuaccacaggaugaau

SEQ ID NO: 12274 - RNA, 22 nt, Artificial Sequence
  GATA2 Guide RNA
uguggccucuaccacaggauga

SEQ ID NO: 12275 - RNA, 22 nt, Artificial Sequence
  GATA2 Guide RNA
uucauccugugguagaggccac

SEQ ID NO: 12276 - RNA, 22 nt, Artificial Sequence
  GATA2 Guide RNA
uucugcccauucauccuguggu

SEQ ID NO: 12277 - RNA, 20 nt, Artificial Sequence
  GATA2 Guide RNA
aaugccugugcaaugccugu

SEQ ID NO: 12278 - RNA, 20 nt, Artificial Sequence
  GATA2 Guide RNA
acaggcauugcacaggcauu

SEQ ID NO: 12279 - RNA, 20 nt, Artificial Sequence
  GATA2 Guide RNA
acaggcauugcacagguagu

SEQ ID NO: 12280 - RNA, 20 nt, Artificial Sequence
  GATA2 Guide RNA
acagguaguggccggugccg

SEQ ID NO: 12281 - RNA, 20 nt, Artificial Sequence
  GATA2 Guide RNA
accggccacuaccugugcaa

SEQ ID NO: 12282 - RNA, 20 nt, Artificial Sequence
  GATA2 Guide RNA
accugugcaaugccugugca

SEQ ID NO: 12283 - RNA, 20 nt, Artificial Sequence
  GATA2 Guide RNA
acggcaccggccacuaccug

SEQ ID NO: 12284 - RNA, 20 nt, Artificial Sequence
  GATA2 Guide RNA
acuaccugugcaaugccugu

SEQ ID NO: 12285 - RNA, 20 nt, Artificial Sequence
  GATA2 Guide RNA
aggcauugcacaggcauugc

SEQ ID NO: 12286 - RNA, 20 nt, Artificial Sequence
  GATA2 Guide RNA
aggcauugcacagguagugg

SEQ ID NO: 12287 - RNA, 20 nt, Artificial Sequence
  GATA2 Guide RNA
aggccacaggcauugcacag

SEQ ID NO: 12288 - RNA, 20 nt, Artificial Sequence
  GATA2 Guide RNA
agguaguggccggugccguc

SEQ ID NO: 12289 - RNA, 20 nt, Artificial Sequence
  GATA2 Guide RNA
augccugugcaaugccugug

SEQ ID NO: 12290 - RNA, 20 nt, Artificial Sequence
  GATA2 Guide RNA
auugcacaggcauugcacag

SEQ ID NO: 12291 - RNA, 20 nt, Artificial Sequence
  GATA2 Guide RNA
auugcacagguaguggccgg

SEQ ID NO: 12292 - RNA, 20 nt, Artificial Sequence
  GATA2 Guide RNA
caaugccugugcaaugccug

SEQ ID NO: 12293 - RNA, 20 nt, Artificial Sequence
  GATA2 Guide RNA
cacaggcauugcacaggcau

SEQ ID NO: 12294 - RNA, 20 nt, Artificial Sequence
  GATA2 Guide RNA
cacaggcauugcacagguag

SEQ ID NO: 12295 - RNA, 20 nt, Artificial Sequence
  GATA2 Guide RNA
cacagguaguggccggugcc

SEQ ID NO: 12296 - RNA, 20 nt, Artificial Sequence
  GATA2 Guide RNA
caccggccacuaccugugca

SEQ ID NO: 12297 - RNA, 20 nt, Artificial Sequence
  GATA2 Guide RNA
cacuaccugugcaaugccug

SEQ ID NO: 12298 - RNA, 20 nt, Artificial Sequence
  GATA2 Guide RNA
caggcauugcacaggcauug

SEQ ID NO: 12299 - RNA, 20 nt, Artificial Sequence
  GATA2 Guide RNA
caggcauugcacagguagug

SEQ ID NO: 12300 - RNA, 20 nt, Artificial Sequence
  GATA2 Guide RNA
cagguaguggccggugccgu

SEQ ID NO: 12301 - RNA, 20 nt, Artificial Sequence
  GATA2 Guide RNA
cauugcacaggcauugcaca

SEQ ID NO: 12302 - RNA, 20 nt, Artificial Sequence
  GATA2 Guide RNA
cauugcacagguaguggccg

SEQ ID NO: 12303 - RNA, 20 nt, Artificial Sequence
  GATA2 Guide RNA
ccacaggcauugcacaggca

SEQ ID NO: 12304 - RNA, 20 nt, Artificial Sequence
  GATA2 Guide RNA
ccacuaccugugcaaugccu

SEQ ID NO: 12305 - RNA, 20 nt, Artificial Sequence
  GATA2 Guide RNA
ccggccacuaccugugcaau

SEQ ID NO: 12306 - RNA, 20 nt, Artificial Sequence
  GATA2 Guide RNA
ccugugcaaugccugugcaa

SEQ ID NO: 12307 - RNA, 20 nt, Artificial Sequence
  GATA2 Guide RNA
cggcaccggccacuaccugu

SEQ ID NO: 12308 - RNA, 20 nt, Artificial Sequence
  GATA2 Guide RNA
cggccacuaccugugcaaug

SEQ ID NO: 12309 - RNA, 20 nt, Artificial Sequence
  GATA2 Guide RNA
cgggacggcaccggccacua

SEQ ID NO: 12310 - RNA, 20 nt, Artificial Sequence
  GATA2 Guide RNA
cuaccugugcaaugccugug

SEQ ID NO: 12311 - RNA, 20 nt, Artificial Sequence
  GATA2 Guide RNA
cugugcaaugccugugcaau

SEQ ID NO: 12312 - RNA, 20 nt, Artificial Sequence
  GATA2 Guide RNA
gacggcaccggccacuaccu

SEQ ID NO: 12313 - RNA, 20 nt, Artificial Sequence
  GATA2 Guide RNA
gaggccacaggcauugcaca

SEQ ID NO: 12314 - RNA, 20 nt, Artificial Sequence
  GATA2 Guide RNA
gcaaugccugugcaaugccu

SEQ ID NO: 12315 - RNA, 20 nt, Artificial Sequence
  GATA2 Guide RNA
gcacaggcauugcacaggua

SEQ ID NO: 12316 - RNA, 20 nt, Artificial Sequence
  GATA2 Guide RNA
gcacagguaguggccggugc

SEQ ID NO: 12317 - RNA, 20 nt, Artificial Sequence
  GATA2 Guide RNA
gcaccggccacuaccugugc

SEQ ID NO: 12318 - RNA, 20 nt, Artificial Sequence
  GATA2 Guide RNA
gcauugcacaggcauugcac

SEQ ID NO: 12319 - RNA, 20 nt, Artificial Sequence
  GATA2 Guide RNA
gcauugcacagguaguggcc

SEQ ID NO: 12320 - RNA, 20 nt, Artificial Sequence
  GATA2 Guide RNA
gccacaggcauugcacaggc

SEQ ID NO: 12321 - RNA, 20 nt, Artificial Sequence
  GATA2 Guide RNA
gccacuaccugugcaaugcc

SEQ ID NO: 12322 - RNA, 20 nt, Artificial Sequence
  GATA2 Guide RNA
gcgggacggcaccggccacu

SEQ ID NO: 12323 - RNA, 20 nt, Artificial Sequence
  GATA2 Guide RNA
ggacggcaccggccacuacc

SEQ ID NO: 12324 - RNA, 20 nt, Artificial Sequence
  GATA2 Guide RNA
ggcaccggccacuaccugug

SEQ ID NO: 12325 - RNA, 20 nt, Artificial Sequence
  GATA2 Guide RNA
ggcauugcacaggcauugca

SEQ ID NO: 12326 - RNA, 20 nt, Artificial Sequence
  GATA2 Guide RNA
ggcauugcacagguaguggc

SEQ ID NO: 12327 - RNA, 20 nt, Artificial Sequence
  GATA2 Guide RNA
ggccacaggcauugcacagg

SEQ ID NO: 12328 - RNA, 20 nt, Artificial Sequence
  GATA2 Guide RNA
ggccacuaccugugcaaugc

SEQ ID NO: 12329 - RNA, 20 nt, Artificial Sequence
  GATA2 Guide RNA
gggacggcaccggccacuac

SEQ ID NO: 12330 - RNA, 20 nt, Artificial Sequence
  GATA2 Guide RNA
gguaguggccggugccgucc

SEQ ID NO: 12331 - RNA, 20 nt, Artificial Sequence
  GATA2 Guide RNA
guaguggccggugccguccc

SEQ ID NO: 12332 - RNA, 20 nt, Artificial Sequence
  GATA2 Guide RNA
gugcaaugccugugcaaugc

SEQ ID NO: 12333 - RNA, 20 nt, Artificial Sequence
  GATA2 Guide RNA
uaccugugcaaugccugugc

SEQ ID NO: 12334 - RNA, 20 nt, Artificial Sequence
  GATA2 Guide RNA
uaguggccggugccgucccg

SEQ ID NO: 12335 - RNA, 20 nt, Artificial Sequence
  GATA2 Guide RNA
ugcaaugccugugcaaugcc

SEQ ID NO: 12336 - RNA, 20 nt, Artificial Sequence
  GATA2 Guide RNA
ugcacaggcauugcacaggu

SEQ ID NO: 12337 - RNA, 20 nt, Artificial Sequence
  GATA2 Guide RNA
ugcacagguaguggccggug

SEQ ID NO: 12338 - RNA, 20 nt, Artificial Sequence
  GATA2 Guide RNA
ugccugugcaaugccugugg

SEQ ID NO: 12339 - RNA, 20 nt, Artificial Sequence
  GATA2 Guide RNA
ugugcaaugccugugcaaug

SEQ ID NO: 12340 - RNA, 20 nt, Artificial Sequence
  GATA2 Guide RNA
uugcacaggcauugcacagg

SEQ ID NO: 12341 - RNA, 20 nt, Artificial Sequence
  GATA2 Guide RNA
uugcacagguaguggccggu

SEQ ID NO: 12342 - RNA, 21 nt, Artificial Sequence
  GATA2 Guide RNA
aaugccugugcaaugccugug

SEQ ID NO: 12343 - RNA, 21 nt, Artificial Sequence
  GATA2 Guide RNA
acaggcauugcacaggcauug

SEQ ID NO: 12344 - RNA, 21 nt, Artificial Sequence
  GATA2 Guide RNA
acaggcauugcacagguagug

SEQ ID NO: 12345 - RNA, 21 nt, Artificial Sequence
  GATA2 Guide RNA
acagguaguggccggugccgu

SEQ ID NO: 12346 - RNA, 21 nt, Artificial Sequence
  GATA2 Guide RNA
accggccacuaccugugcaau

SEQ ID NO: 12347 - RNA, 21 nt, Artificial Sequence
  GATA2 Guide RNA
accugugcaaugccugugcaa

SEQ ID NO: 12348 - RNA, 21 nt, Artificial Sequence
  GATA2 Guide RNA
acggcaccggccacuaccugu

SEQ ID NO: 12349 - RNA, 21 nt, Artificial Sequence
  GATA2 Guide RNA
acuaccugugcaaugccugug

SEQ ID NO: 12350 - RNA, 21 nt, Artificial Sequence
  GATA2 Guide RNA
agaggccacaggcauugcaca

SEQ ID NO: 12351 - RNA, 21 nt, Artificial Sequence
  GATA2 Guide RNA
aggcauugcacaggcauugca

SEQ ID NO: 12352 - RNA, 21 nt, Artificial Sequence
  GATA2 Guide RNA
aggcauugcacagguaguggc

SEQ ID NO: 12353 - RNA, 21 nt, Artificial Sequence
  GATA2 Guide RNA
aggccacaggcauugcacagg

SEQ ID NO: 12354 - RNA, 21 nt, Artificial Sequence
  GATA2 Guide RNA
agguaguggccggugccgucc

SEQ ID NO: 12355 - RNA, 21 nt, Artificial Sequence
  GATA2 Guide RNA
augccugugcaaugccugugg

SEQ ID NO: 12356 - RNA, 21 nt, Artificial Sequence
  GATA2 Guide RNA
auugcacaggcauugcacagg

SEQ ID NO: 12357 - RNA, 21 nt, Artificial Sequence
  GATA2 Guide RNA
auugcacagguaguggccggu

SEQ ID NO: 12358 - RNA, 21 nt, Artificial Sequence
  GATA2 Guide RNA
caaugccugugcaaugccugu

SEQ ID NO: 12359 - RNA, 21 nt, Artificial Sequence
  GATA2 Guide RNA
cacaggcauugcacaggcauu

SEQ ID NO: 12360 - RNA, 21 nt, Artificial Sequence
  GATA2 Guide RNA
cacaggcauugcacagguagu

SEQ ID NO: 12361 - RNA, 21 nt, Artificial Sequence
  GATA2 Guide RNA
cacagguaguggccggugccg

SEQ ID NO: 12362 - RNA, 21 nt, Artificial Sequence
  GATA2 Guide RNA
caccggccacuaccugugcaa

SEQ ID NO: 12363 - RNA, 21 nt, Artificial Sequence
  GATA2 Guide RNA
cacuaccugugcaaugccugu

SEQ ID NO: 12364 - RNA, 21 nt, Artificial Sequence
  GATA2 Guide RNA
caggcauugcacaggcauugc

SEQ ID NO: 12365 - RNA, 21 nt, Artificial Sequence
  GATA2 Guide RNA
caggcauugcacagguagugg

SEQ ID NO: 12366 - RNA, 21 nt, Artificial Sequence
  GATA2 Guide RNA
cagguaguggccggugccguc

SEQ ID NO: 12367 - RNA, 21 nt, Artificial Sequence
  GATA2 Guide RNA
cauugcacaggcauugcacag

SEQ ID NO: 12368 - RNA, 21 nt, Artificial Sequence
  GATA2 Guide RNA
cauugcacagguaguggccgg

SEQ ID NO: 12369 - RNA, 21 nt, Artificial Sequence
  GATA2 Guide RNA
ccacaggcauugcacaggcau

SEQ ID NO: 12370 - RNA, 21 nt, Artificial Sequence
  GATA2 Guide RNA
ccacuaccugugcaaugccug

SEQ ID NO: 12371 - RNA, 21 nt, Artificial Sequence
  GATA2 Guide RNA
ccggccacuaccugugcaaug

SEQ ID NO: 12372 - RNA, 21 nt, Artificial Sequence
  GATA2 Guide RNA
ccugugcaaugccugugcaau

SEQ ID NO: 12373 - RNA, 21 nt, Artificial Sequence
  GATA2 Guide RNA
cggcaccggccacuaccugug

SEQ ID NO: 12374 - RNA, 21 nt, Artificial Sequence
  GATA2 Guide RNA
cggccacuaccugugcaaugc

SEQ ID NO: 12375 - RNA, 21 nt, Artificial Sequence
  GATA2 Guide RNA
cgggacggcaccggccacuac

SEQ ID NO: 12376 - RNA, 21 nt, Artificial Sequence
  GATA2 Guide RNA
cuaccugugcaaugccugugc

SEQ ID NO: 12377 - RNA, 21 nt, Artificial Sequence
  GATA2 Guide RNA
cugugcaaugccugugcaaug

SEQ ID NO: 12378 - RNA, 21 nt, Artificial Sequence
  GATA2 Guide RNA
gacggcaccggccacuaccug

SEQ ID NO: 12379 - RNA, 21 nt, Artificial Sequence
  GATA2 Guide RNA
gaggccacaggcauugcacag

SEQ ID NO: 12380 - RNA, 21 nt, Artificial Sequence
  GATA2 Guide RNA
gcaaugccugugcaaugccug

SEQ ID NO: 12381 - RNA, 21 nt, Artificial Sequence
  GATA2 Guide RNA
gcacaggcauugcacagguag

SEQ ID NO: 12382 - RNA, 21 nt, Artificial Sequence
  GATA2 Guide RNA
gcacagguaguggccggugcc

SEQ ID NO: 12383 - RNA, 21 nt, Artificial Sequence
  GATA2 Guide RNA
gcaccggccacuaccugugca

SEQ ID NO: 12384 - RNA, 21 nt, Artificial Sequence
  GATA2 Guide RNA
gcauugcacaggcauugcaca

SEQ ID NO: 12385 - RNA, 21 nt, Artificial Sequence
  GATA2 Guide RNA
gcauugcacagguaguggccg

SEQ ID NO: 12386 - RNA, 21 nt, Artificial Sequence
  GATA2 Guide RNA
gccacaggcauugcacaggca

SEQ ID NO: 12387 - RNA, 21 nt, Artificial Sequence
  GATA2 Guide RNA
gccacuaccugugcaaugccu

SEQ ID NO: 12388 - RNA, 21 nt, Artificial Sequence
  GATA2 Guide RNA
gcgggacggcaccggccacua

SEQ ID NO: 12389 - RNA, 21 nt, Artificial Sequence
  GATA2 Guide RNA
ggacggcaccggccacuaccu

SEQ ID NO: 12390 - RNA, 21 nt, Artificial Sequence
  GATA2 Guide RNA
ggcaccggccacuaccugugc

SEQ ID NO: 12391 - RNA, 21 nt, Artificial Sequence
  GATA2 Guide RNA
ggcauugcacaggcauugcac

SEQ ID NO: 12392 - RNA, 21 nt, Artificial Sequence
  GATA2 Guide RNA
ggcauugcacagguaguggcc

SEQ ID NO: 12393 - RNA, 21 nt, Artificial Sequence
  GATA2 Guide RNA
ggccacaggcauugcacaggc

SEQ ID NO: 12394 - RNA, 21 nt, Artificial Sequence
  GATA2 Guide RNA
ggccacuaccugugcaaugcc

SEQ ID NO: 12395 - RNA, 21 nt, Artificial Sequence
  GATA2 Guide RNA
gggacggcaccggccacuacc

SEQ ID NO: 12396 - RNA, 21 nt, Artificial Sequence
  GATA2 Guide RNA
gguaguggccggugccguccc

SEQ ID NO: 12397 - RNA, 21 nt, Artificial Sequence
  GATA2 Guide RNA
guaguggccggugccgucccg

SEQ ID NO: 12398 - RNA, 21 nt, Artificial Sequence
  GATA2 Guide RNA
gugcaaugccugugcaaugcc

SEQ ID NO: 12399 - RNA, 21 nt, Artificial Sequence
  GATA2 Guide RNA
uaccugugcaaugccugugca

SEQ ID NO: 12400 - RNA, 21 nt, Artificial Sequence
  GATA2 Guide RNA
uaguggccggugccgucccgc

SEQ ID NO: 12401 - RNA, 21 nt, Artificial Sequence
  GATA2 Guide RNA
ugcaaugccugugcaaugccu

SEQ ID NO: 12402 - RNA, 21 nt, Artificial Sequence
  GATA2 Guide RNA
ugcacaggcauugcacaggua

SEQ ID NO: 12403 - RNA, 21 nt, Artificial Sequence
  GATA2 Guide RNA
ugcacagguaguggccggugc

SEQ ID NO: 12404 - RNA, 21 nt, Artificial Sequence
  GATA2 Guide RNA
ugccugugcaaugccuguggc

SEQ ID NO: 12405 - RNA, 21 nt, Artificial Sequence
  GATA2 Guide RNA
ugugcaaugccugugcaaugc

SEQ ID NO: 12406 - RNA, 21 nt, Artificial Sequence
  GATA2 Guide RNA
uugcacaggcauugcacaggu

SEQ ID NO: 12407 - RNA, 21 nt, Artificial Sequence
  GATA2 Guide RNA
uugcacagguaguggccggug

SEQ ID NO: 12408 - RNA, 22 nt, Artificial Sequence
  GATA2 Guide RNA
aaugccugugcaaugccugugg

SEQ ID NO: 12409 - RNA, 22 nt, Artificial Sequence
  GATA2 Guide RNA
acaggcauugcacaggcauugc

SEQ ID NO: 12410 - RNA, 22 nt, Artificial Sequence
  GATA2 Guide RNA
acaggcauugcacagguagugg

SEQ ID NO: 12411 - RNA, 22 nt, Artificial Sequence
  GATA2 Guide RNA
acagguaguggccggugccguc

SEQ ID NO: 12412 - RNA, 22 nt, Artificial Sequence
  GATA2 Guide RNA
accggccacuaccugugcaaug

SEQ ID NO: 12413 - RNA, 22 nt, Artificial Sequence
  GATA2 Guide RNA
accugugcaaugccugugcaau

SEQ ID NO: 12414 - RNA, 22 nt, Artificial Sequence
  GATA2 Guide RNA
acggcaccggccacuaccugug

SEQ ID NO: 12415 - RNA, 22 nt, Artificial Sequence
  GATA2 Guide RNA
acuaccugugcaaugccugugc

SEQ ID NO: 12416 - RNA, 22 nt, Artificial Sequence
  GATA2 Guide RNA
agaggccacaggcauugcacag

SEQ ID NO: 12417 - RNA, 22 nt, Artificial Sequence
  GATA2 Guide RNA
aggcauugcacaggcauugcac

SEQ ID NO: 12418 - RNA, 22 nt, Artificial Sequence
  GATA2 Guide RNA
aggcauugcacagguaguggcc

SEQ ID NO: 12419 - RNA, 22 nt, Artificial Sequence
  GATA2 Guide RNA
aggccacaggcauugcacaggc

SEQ ID NO: 12420 - RNA, 22 nt, Artificial Sequence
  GATA2 Guide RNA
agguaguggccggugccguccc

SEQ ID NO: 12421 - RNA, 22 nt, Artificial Sequence
  GATA2 Guide RNA
augccugugcaaugccuguggc

SEQ ID NO: 12422 - RNA, 22 nt, Artificial Sequence
  GATA2 Guide RNA
auugcacaggcauugcacaggu

SEQ ID NO: 12423 - RNA, 22 nt, Artificial Sequence
  GATA2 Guide RNA
auugcacagguaguggccggug

SEQ ID NO: 12424 - RNA, 22 nt, Artificial Sequence
  GATA2 Guide RNA
caaugccugugcaaugccugug

SEQ ID NO: 12425 - RNA, 22 nt, Artificial Sequence
  GATA2 Guide RNA
cacaggcauugcacaggcauug

SEQ ID NO: 12426 - RNA, 22 nt, Artificial Sequence
  GATA2 Guide RNA
cacaggcauugcacagguagug

SEQ ID NO: 12427 - RNA, 22 nt, Artificial Sequence
  GATA2 Guide RNA
cacagguaguggccggugccgu

SEQ ID NO: 12428 - RNA, 22 nt, Artificial Sequence
  GATA2 Guide RNA
caccggccacuaccugugcaau

SEQ ID NO: 12429 - RNA, 22 nt, Artificial Sequence
  GATA2 Guide RNA
cacuaccugugcaaugccugug

SEQ ID NO: 12430 - RNA, 22 nt, Artificial Sequence
  GATA2 Guide RNA
caggcauugcacaggcauugca

SEQ ID NO: 12431 - RNA, 22 nt, Artificial Sequence
  GATA2 Guide RNA
caggcauugcacagguaguggc

SEQ ID NO: 12432 - RNA, 22 nt, Artificial Sequence
  GATA2 Guide RNA
cagguaguggccggugccgucc

SEQ ID NO: 12433 - RNA, 22 nt, Artificial Sequence
  GATA2 Guide RNA
cauugcacaggcauugcacagg

SEQ ID NO: 12434 - RNA, 22 nt, Artificial Sequence
  GATA2 Guide RNA
cauugcacagguaguggccggu

SEQ ID NO: 12435 - RNA, 22 nt, Artificial Sequence
  GATA2 Guide RNA
ccacaggcauugcacaggcauu

SEQ ID NO: 12436 - RNA, 22 nt, Artificial Sequence
  GATA2 Guide RNA
ccacuaccugugcaaugccugu

SEQ ID NO: 12437 - RNA, 22 nt, Artificial Sequence
  GATA2 Guide RNA
ccggccacuaccugugcaaugc

SEQ ID NO: 12438 - RNA, 22 nt, Artificial Sequence
  GATA2 Guide RNA
ccugugcaaugccugugcaaug

SEQ ID NO: 12439 - RNA, 22 nt, Artificial Sequence
  GATA2 Guide RNA
cggcaccggccacuaccugugc

SEQ ID NO: 12440 - RNA, 22 nt, Artificial Sequence
  GATA2 Guide RNA
cggccacuaccugugcaaugcc

SEQ ID NO: 12441 - RNA, 22 nt, Artificial Sequence
  GATA2 Guide RNA
cgggacggcaccggccacuacc

SEQ ID NO: 12442 - RNA, 22 nt, Artificial Sequence
  GATA2 Guide RNA
cuaccugugcaaugccugugca

SEQ ID NO: 12443 - RNA, 22 nt, Artificial Sequence
  GATA2 Guide RNA
cugugcaaugccugugcaaugc

SEQ ID NO: 12444 - RNA, 22 nt, Artificial Sequence
  GATA2 Guide RNA
gacggcaccggccacuaccugu

SEQ ID NO: 12445 - RNA, 22 nt, Artificial Sequence
  GATA2 Guide RNA
gaggccacaggcauugcacagg

SEQ ID NO: 12446 - RNA, 22 nt, Artificial Sequence
  GATA2 Guide RNA
gcaaugccugugcaaugccugu

SEQ ID NO: 12447 - RNA, 22 nt, Artificial Sequence
  GATA2 Guide RNA
gcacaggcauugcacagguagu

SEQ ID NO: 12448 - RNA, 22 nt, Artificial Sequence
  GATA2 Guide RNA
gcacagguaguggccggugccg

SEQ ID NO: 12449 - RNA, 22 nt, Artificial Sequence
  GATA2 Guide RNA
gcaccggccacuaccugugcaa

SEQ ID NO: 12450 - RNA, 22 nt, Artificial Sequence
  GATA2 Guide RNA
gcauugcacaggcauugcacag

SEQ ID NO: 12451 - RNA, 22 nt, Artificial Sequence
  GATA2 Guide RNA
gcauugcacagguaguggccgg

SEQ ID NO: 12452 - RNA, 22 nt, Artificial Sequence
  GATA2 Guide RNA
gccacaggcauugcacaggcau

SEQ ID NO: 12453 - RNA, 22 nt, Artificial Sequence
  GATA2 Guide RNA
gccacuaccugugcaaugccug

SEQ ID NO: 12454 - RNA, 22 nt, Artificial Sequence
  GATA2 Guide RNA
gcgggacggcaccggccacuac

SEQ ID NO: 12455 - RNA, 22 nt, Artificial Sequence
  GATA2 Guide RNA
ggacggcaccggccacuaccug

SEQ ID NO: 12456 - RNA, 22 nt, Artificial Sequence
  GATA2 Guide RNA
ggcaccggccacuaccugugca

SEQ ID NO: 12457 - RNA, 22 nt, Artificial Sequence
  GATA2 Guide RNA
ggcauugcacaggcauugcaca

SEQ ID NO: 12458 - RNA, 22 nt, Artificial Sequence
  GATA2 Guide RNA
ggcauugcacagguaguggccg

SEQ ID NO: 12459 - RNA, 22 nt, Artificial Sequence
  GATA2 Guide RNA
ggccacaggcauugcacaggca

SEQ ID NO: 12460 - RNA, 22 nt, Artificial Sequence
  GATA2 Guide RNA
ggccacuaccugugcaaugccu

SEQ ID NO: 12461 - RNA, 22 nt, Artificial Sequence
  GATA2 Guide RNA
ggcgggacggcaccggccacua

SEQ ID NO: 12462 - RNA, 22 nt, Artificial Sequence
  GATA2 Guide RNA
gggacggcaccggccacuaccu

SEQ ID NO: 12463 - RNA, 22 nt, Artificial Sequence
  GATA2 Guide RNA
gguaguggccggugccgucccg

SEQ ID NO: 12464 - RNA, 22 nt, Artificial Sequence
  GATA2 Guide RNA
guaguggccggugccgucccgc

SEQ ID NO: 12465 - RNA, 22 nt, Artificial Sequence
  GATA2 Guide RNA
gugcaaugccugugcaaugccu

SEQ ID NO: 12466 - RNA, 22 nt, Artificial Sequence
  GATA2 Guide RNA
uaccugugcaaugccugugcaa

SEQ ID NO: 12467 - RNA, 22 nt, Artificial Sequence
  GATA2 Guide RNA
uagaggccacaggcauugcaca

SEQ ID NO: 12468 - RNA, 22 nt, Artificial Sequence
  GATA2 Guide RNA
uaguggccggugccgucccgcc

SEQ ID NO: 12469 - RNA, 22 nt, Artificial Sequence
  GATA2 Guide RNA
ugcaaugccugugcaaugccug

SEQ ID NO: 12470 - RNA, 22 nt, Artificial Sequence
  GATA2 Guide RNA
ugcacaggcauugcacagguag

SEQ ID NO: 12471 - RNA, 22 nt, Artificial Sequence
  GATA2 Guide RNA
ugcacagguaguggccggugcc

SEQ ID NO: 12472 - RNA, 22 nt, Artificial Sequence
  GATA2 Guide RNA
ugccugugcaaugccuguggcc

SEQ ID NO: 12473 - RNA, 22 nt, Artificial Sequence
  GATA2 Guide RNA
ugugcaaugccugugcaaugcc

SEQ ID NO: 12474 - RNA, 22 nt, Artificial Sequence
  GATA2 Guide RNA
uugcacaggcauugcacaggua

SEQ ID NO: 12475 - RNA, 22 nt, Artificial Sequence
  GATA2 Guide RNA
uugcacagguaguggccggugc

SEQ ID NO: 12476 - RNA, 20 nt, Artificial Sequence
  GATA2 Guide RNA
acagccaccccucucuggca

SEQ ID NO: 12477 - RNA, 20 nt, Artificial Sequence
  GATA2 Guide RNA
accccucucuggcagcggga

SEQ ID NO: 12478 - RNA, 20 nt, Artificial Sequence
  GATA2 Guide RNA
agccaccccucucuggcagc

SEQ ID NO: 12479 - RNA, 20 nt, Artificial Sequence
  GATA2 Guide RNA
aguggccggugccgucccgc

SEQ ID NO: 12480 - RNA, 20 nt, Artificial Sequence
  GATA2 Guide RNA
cacagccaccccucucuggc

SEQ ID NO: 12481 - RNA, 20 nt, Artificial Sequence
  GATA2 Guide RNA
caccccucucuggcagcggg

SEQ ID NO: 12482 - RNA, 20 nt, Artificial Sequence
  GATA2 Guide RNA
cagccaccccucucuggcag

SEQ ID NO: 12483 - RNA, 20 nt, Artificial Sequence
  GATA2 Guide RNA
cagcgggacggcaccggcca

SEQ ID NO: 12484 - RNA, 20 nt, Artificial Sequence
  GATA2 Guide RNA
ccacagccaccccucucugg

SEQ ID NO: 12485 - RNA, 20 nt, Artificial Sequence
  GATA2 Guide RNA
ccaccccucucuggcagcgg

SEQ ID NO: 12486 - RNA, 20 nt, Artificial Sequence
  GATA2 Guide RNA
ccccucucuggcagcgggac

SEQ ID NO: 12487 - RNA, 20 nt, Artificial Sequence
  GATA2 Guide RNA
cccgcugccagagaggggug

SEQ ID NO: 12488 - RNA, 20 nt, Artificial Sequence
  GATA2 Guide RNA
cccucucuggcagcgggacg

SEQ ID NO: 12489 - RNA, 20 nt, Artificial Sequence
  GATA2 Guide RNA
ccgcugccagagaggggugg

SEQ ID NO: 12490 - RNA, 20 nt, Artificial Sequence
  GATA2 Guide RNA
ccggugccgucccgcugcca

SEQ ID NO: 12491 - RNA, 20 nt, Artificial Sequence
  GATA2 Guide RNA
ccgucccgcugccagagagg

SEQ ID NO: 12492 - RNA, 20 nt, Artificial Sequence
  GATA2 Guide RNA
ccucucuggcagcgggacgg

SEQ ID NO: 12493 - RNA, 20 nt, Artificial Sequence
  GATA2 Guide RNA
cgcugccagagagggguggc

SEQ ID NO: 12494 - RNA, 20 nt, Artificial Sequence
  GATA2 Guide RNA
cggugccgucccgcugccag

SEQ ID NO: 12495 - RNA, 20 nt, Artificial Sequence
  GATA2 Guide RNA
cgucccgcugccagagaggg

SEQ ID NO: 12496 - RNA, 20 nt, Artificial Sequence
  GATA2 Guide RNA
cucucuggcagcgggacggc

SEQ ID NO: 12497 - RNA, 20 nt, Artificial Sequence
  GATA2 Guide RNA
cucuggcagcgggacggcac

SEQ ID NO: 12498 - RNA, 20 nt, Artificial Sequence
  GATA2 Guide RNA
cugccagagagggguggcug

SEQ ID NO: 12499 - RNA, 20 nt, Artificial Sequence
  GATA2 Guide RNA
cuggcagcgggacggcaccg

SEQ ID NO: 12500 - RNA, 20 nt, Artificial Sequence
  GATA2 Guide RNA
gccacagccaccccucucug

SEQ ID NO: 12501 - RNA, 20 nt, Artificial Sequence
  GATA2 Guide RNA
gccaccccucucuggcagcg

SEQ ID NO: 12502 - RNA, 20 nt, Artificial Sequence
  GATA2 Guide RNA
gccgucccgcugccagagag

SEQ ID NO: 12503 - RNA, 20 nt, Artificial Sequence
  GATA2 Guide RNA
gcugccagagagggguggcu

SEQ ID NO: 12504 - RNA, 20 nt, Artificial Sequence
  GATA2 Guide RNA
ggccacagccaccccucucu

SEQ ID NO: 12505 - RNA, 20 nt, Artificial Sequence
  GATA2 Guide RNA
ggugccgucccgcugccaga

SEQ ID NO: 12506 - RNA, 20 nt, Artificial Sequence
  GATA2 Guide RNA
gucccgcugccagagagggg

SEQ ID NO: 12507 - RNA, 20 nt, Artificial Sequence
  GATA2 Guide RNA
gugccgucccgcugccagag

SEQ ID NO: 12508 - RNA, 20 nt, Artificial Sequence
  GATA2 Guide RNA
guggccggugccgucccgcu

SEQ ID NO: 12509 - RNA, 20 nt, Artificial Sequence
  GATA2 Guide RNA
ucccgcugccagagaggggu

SEQ ID NO: 12510 - RNA, 20 nt, Artificial Sequence
  GATA2 Guide RNA
ucucuggcagcgggacggca

SEQ ID NO: 12511 - RNA, 20 nt, Artificial Sequence
  GATA2 Guide RNA
ucuggcagcgggacggcacc

SEQ ID NO: 12512 - RNA, 20 nt, Artificial Sequence
  GATA2 Guide RNA
ugccagagagggguggcugu

SEQ ID NO: 12513 - RNA, 20 nt, Artificial Sequence
  GATA2 Guide RNA
ugccgucccgcugccagaga

SEQ ID NO: 12514 - RNA, 20 nt, Artificial Sequence
  GATA2 Guide RNA
uggcagcgggacggcaccgg

SEQ ID NO: 12515 - RNA, 20 nt, Artificial Sequence
  GATA2 Guide RNA
uggccggugccgucccgcug

SEQ ID NO: 12516 - RNA, 21 nt, Artificial Sequence
  GATA2 Guide RNA
acagccaccccucucuggcag

SEQ ID NO: 12517 - RNA, 21 nt, Artificial Sequence
  GATA2 Guide RNA
accccucucuggcagcgggac

SEQ ID NO: 12518 - RNA, 21 nt, Artificial Sequence
  GATA2 Guide RNA
agccaccccucucuggcagcg

SEQ ID NO: 12519 - RNA, 21 nt, Artificial Sequence
  GATA2 Guide RNA
aguggccggugccgucccgcu

SEQ ID NO: 12520 - RNA, 21 nt, Artificial Sequence
  GATA2 Guide RNA
cacagccaccccucucuggca

SEQ ID NO: 12521 - RNA, 21 nt, Artificial Sequence
  GATA2 Guide RNA
caccccucucuggcagcggga

SEQ ID NO: 12522 - RNA, 21 nt, Artificial Sequence
  GATA2 Guide RNA
cagccaccccucucuggcagc

SEQ ID NO: 12523 - RNA, 21 nt, Artificial Sequence
  GATA2 Guide RNA
ccacagccaccccucucuggc

SEQ ID NO: 12524 - RNA, 21 nt, Artificial Sequence
  GATA2 Guide RNA
ccaccccucucuggcagcggg

SEQ ID NO: 12525 - RNA, 21 nt, Artificial Sequence
  GATA2 Guide RNA
ccccucucuggcagcgggacg

SEQ ID NO: 12526 - RNA, 21 nt, Artificial Sequence
  GATA2 Guide RNA
cccgcugccagagaggggugg

SEQ ID NO: 12527 - RNA, 21 nt, Artificial Sequence
  GATA2 Guide RNA
cccucucuggcagcgggacgg

SEQ ID NO: 12528 - RNA, 21 nt, Artificial Sequence
  GATA2 Guide RNA
ccgcugccagagagggguggc

SEQ ID NO: 12529 - RNA, 21 nt, Artificial Sequence
  GATA2 Guide RNA
ccgucccgcugccagagaggg

SEQ ID NO: 12530 - RNA, 21 nt, Artificial Sequence
  GATA2 Guide RNA
ccucucuggcagcgggacggc

SEQ ID NO: 12531 - RNA, 21 nt, Artificial Sequence
  GATA2 Guide RNA
cgcugccagagagggguggcu

SEQ ID NO: 12532 - RNA, 21 nt, Artificial Sequence
  GATA2 Guide RNA
cggugccgucccgcugccaga

SEQ ID NO: 12533 - RNA, 21 nt, Artificial Sequence
  GATA2 Guide RNA
cgucccgcugccagagagggg

SEQ ID NO: 12534 - RNA, 21 nt, Artificial Sequence
  GATA2 Guide RNA
cucucuggcagcgggacggca

SEQ ID NO: 12535 - RNA, 21 nt, Artificial Sequence
  GATA2 Guide RNA
cucuggcagcgggacggcacc

SEQ ID NO: 12536 - RNA, 21 nt, Artificial Sequence
  GATA2 Guide RNA
cugccagagagggguggcugu

SEQ ID NO: 12537 - RNA, 21 nt, Artificial Sequence
  GATA2 Guide RNA
gccacagccaccccucucugg

SEQ ID NO: 12538 - RNA, 21 nt, Artificial Sequence
  GATA2 Guide RNA
gccaccccucucuggcagcgg

SEQ ID NO: 12539 - RNA, 21 nt, Artificial Sequence
  GATA2 Guide RNA
gccgucccgcugccagagagg

SEQ ID NO: 12540 - RNA, 21 nt, Artificial Sequence
  GATA2 Guide RNA
gcugccagagagggguggcug

SEQ ID NO: 12541 - RNA, 21 nt, Artificial Sequence
  GATA2 Guide RNA
ggccacagccaccccucucug

SEQ ID NO: 12542 - RNA, 21 nt, Artificial Sequence
  GATA2 Guide RNA
gggccacagccaccccucucu

SEQ ID NO: 12543 - RNA, 21 nt, Artificial Sequence
  GATA2 Guide RNA
ggugccgucccgcugccagag

SEQ ID NO: 12544 - RNA, 21 nt, Artificial Sequence
  GATA2 Guide RNA
gucccgcugccagagaggggu

SEQ ID NO: 12545 - RNA, 21 nt, Artificial Sequence
  GATA2 Guide RNA
gugccgucccgcugccagaga

SEQ ID NO: 12546 - RNA, 21 nt, Artificial Sequence
  GATA2 Guide RNA
ucccgcugccagagaggggug

SEQ ID NO: 12547 - RNA, 21 nt, Artificial Sequence
  GATA2 Guide RNA
ucucuggcagcgggacggcac

SEQ ID NO: 12548 - RNA, 21 nt, Artificial Sequence
  GATA2 Guide RNA
ucuggcagcgggacggcaccg

SEQ ID NO: 12549 - RNA, 21 nt, Artificial Sequence
  GATA2 Guide RNA
ugccagagagggguggcugug

SEQ ID NO: 12550 - RNA, 21 nt, Artificial Sequence
  GATA2 Guide RNA
ugccgucccgcugccagagag

SEQ ID NO: 12551 - RNA, 22 nt, Artificial Sequence
  GATA2 Guide RNA
acagccaccccucucuggcagc

SEQ ID NO: 12552 - RNA, 22 nt, Artificial Sequence
  GATA2 Guide RNA
accccucucuggcagcgggacg

SEQ ID NO: 12553 - RNA, 22 nt, Artificial Sequence
  GATA2 Guide RNA
agccaccccucucuggcagcgg

SEQ ID NO: 12554 - RNA, 22 nt, Artificial Sequence
  GATA2 Guide RNA
aguggccggugccgucccgcug

SEQ ID NO: 12555 - RNA, 22 nt, Artificial Sequence
  GATA2 Guide RNA
cacagccaccccucucuggcag

SEQ ID NO: 12556 - RNA, 22 nt, Artificial Sequence
  GATA2 Guide RNA
caccccucucuggcagcgggac

SEQ ID NO: 12557 - RNA, 22 nt, Artificial Sequence
  GATA2 Guide RNA
cagccaccccucucuggcagcg

SEQ ID NO: 12558 - RNA, 22 nt, Artificial Sequence
  GATA2 Guide RNA
cagcgggacggcaccggccacu

SEQ ID NO: 12559 - RNA, 22 nt, Artificial Sequence
  GATA2 Guide RNA
ccacagccaccccucucuggca

SEQ ID NO: 12560 - RNA, 22 nt, Artificial Sequence
  GATA2 Guide RNA
ccaccccucucuggcagcggga

SEQ ID NO: 12561 - RNA, 22 nt, Artificial Sequence
  GATA2 Guide RNA
ccccucucuggcagcgggacgg

SEQ ID NO: 12562 - RNA, 22 nt, Artificial Sequence
  GATA2 Guide RNA
cccgcugccagagagggguggc

SEQ ID NO: 12563 - RNA, 22 nt, Artificial Sequence
  GATA2 Guide RNA
cccucucuggcagcgggacggc

SEQ ID NO: 12564 - RNA, 22 nt, Artificial Sequence
  GATA2 Guide RNA
ccgcugccagagagggguggcu

SEQ ID NO: 12565 - RNA, 22 nt, Artificial Sequence
  GATA2 Guide RNA
ccggugccgucccgcugccaga

SEQ ID NO: 12566 - RNA, 22 nt, Artificial Sequence
  GATA2 Guide RNA
ccgucccgcugccagagagggg

SEQ ID NO: 12567 - RNA, 22 nt, Artificial Sequence
  GATA2 Guide RNA
ccucucuggcagcgggacggca

SEQ ID NO: 12568 - RNA, 22 nt, Artificial Sequence
  GATA2 Guide RNA
cgcugccagagagggguggcug

SEQ ID NO: 12569 - RNA, 22 nt, Artificial Sequence
  GATA2 Guide RNA
cggugccgucccgcugccagag

SEQ ID NO: 12570 - RNA, 22 nt, Artificial Sequence
  GATA2 Guide RNA
cgucccgcugccagagaggggu

SEQ ID NO: 12571 - RNA, 22 nt, Artificial Sequence
  GATA2 Guide RNA
cucucuggcagcgggacggcac

SEQ ID NO: 12572 - RNA, 22 nt, Artificial Sequence
  GATA2 Guide RNA
cucuggcagcgggacggcaccg

SEQ ID NO: 12573 - RNA, 22 nt, Artificial Sequence
  GATA2 Guide RNA
cugccagagagggguggcugug

SEQ ID NO: 12574 - RNA, 22 nt, Artificial Sequence
  GATA2 Guide RNA
gccacagccaccccucucuggc

SEQ ID NO: 12575 - RNA, 22 nt, Artificial Sequence
  GATA2 Guide RNA
gccaccccucucuggcagcggg

SEQ ID NO: 12576 - RNA, 22 nt, Artificial Sequence
  GATA2 Guide RNA
gccgucccgcugccagagaggg

SEQ ID NO: 12577 - RNA, 22 nt, Artificial Sequence
  GATA2 Guide RNA
gcugccagagagggguggcugu

SEQ ID NO: 12578 - RNA, 22 nt, Artificial Sequence
  GATA2 Guide RNA
ggccacagccaccccucucugg

SEQ ID NO: 12579 - RNA, 22 nt, Artificial Sequence
  GATA2 Guide RNA
gggccacagccaccccucucug

SEQ ID NO: 12580 - RNA, 22 nt, Artificial Sequence
  GATA2 Guide RNA
ggggccacagccaccccucucu

SEQ ID NO: 12581 - RNA, 22 nt, Artificial Sequence
  GATA2 Guide RNA
ggugccgucccgcugccagaga

SEQ ID NO: 12582 - RNA, 22 nt, Artificial Sequence
  GATA2 Guide RNA
gucccgcugccagagaggggug

SEQ ID NO: 12583 - RNA, 22 nt, Artificial Sequence
  GATA2 Guide RNA
gugccgucccgcugccagagag

SEQ ID NO: 12584 - RNA, 22 nt, Artificial Sequence
  GATA2 Guide RNA
uaguggccggugccgucccgcu

SEQ ID NO: 12585 - RNA, 22 nt, Artificial Sequence
  GATA2 Guide RNA
ucccgcugccagagaggggugg

SEQ ID NO: 12586 - RNA, 22 nt, Artificial Sequence
  GATA2 Guide RNA
ucucuggcagcgggacggcacc

SEQ ID NO: 12587 - RNA, 22 nt, Artificial Sequence
  GATA2 Guide RNA
ucuggcagcgggacggcaccgg

SEQ ID NO: 12588 - RNA, 22 nt, Artificial Sequence
  GATA2 Guide RNA
ugccagagagggguggcugugg

SEQ ID NO: 12589 - RNA, 22 nt, Artificial Sequence
  GATA2 Guide RNA
ugccgucccgcugccagagagg

SEQ ID NO: 12590 - RNA, 20 nt, Artificial Sequence
  GATA2 Guide RNA
aacuguggggccacagcugu

SEQ ID NO: 12591 - RNA, 20 nt, Artificial Sequence
  GATA2 Guide RNA
aaggccgggagugugucaac

SEQ ID NO: 12592 - RNA, 20 nt, Artificial Sequence
  GATA2 Guide RNA
acagcuguggccccacaguu

SEQ ID NO: 12593 - RNA, 20 nt, Artificial Sequence
  GATA2 Guide RNA
acagcuguggggccacagcc

SEQ ID NO: 12594 - RNA, 20 nt, Artificial Sequence
  GATA2 Guide RNA
acaguugacacacucccggc

SEQ ID NO: 12595 - RNA, 20 nt, Artificial Sequence
  GATA2 Guide RNA
acuguggggccacagcugug

SEQ ID NO: 12596 - RNA, 20 nt, Artificial Sequence
  GATA2 Guide RNA
agaaggccgggaguguguca

SEQ ID NO: 12597 - RNA, 20 nt, Artificial Sequence
  GATA2 Guide RNA
agcuguggccccacaguuga

SEQ ID NO: 12598 - RNA, 20 nt, Artificial Sequence
  GATA2 Guide RNA
agcuguggggccacagccac

SEQ ID NO: 12599 - RNA, 20 nt, Artificial Sequence
  GATA2 Guide RNA
aggccgggagugugucaacu

SEQ ID NO: 12600 - RNA, 20 nt, Artificial Sequence
  GATA2 Guide RNA
agggguggcuguggccccac

SEQ ID NO: 12601 - RNA, 20 nt, Artificial Sequence
  GATA2 Guide RNA
agugugucaacuguggggcc

SEQ ID NO: 12602 - RNA, 20 nt, Artificial Sequence
  GATA2 Guide RNA
aguugacacacucccggccu

SEQ ID NO: 12603 - RNA, 20 nt, Artificial Sequence
  GATA2 Guide RNA
caacuguggggccacagcug

SEQ ID NO: 12604 - RNA, 20 nt, Artificial Sequence
  GATA2 Guide RNA
cacagcuguggccccacagu

SEQ ID NO: 12605 - RNA, 20 nt, Artificial Sequence
  GATA2 Guide RNA
cacagcuguggggccacagc

SEQ ID NO: 12606 - RNA, 20 nt, Artificial Sequence
  GATA2 Guide RNA
cacaguugacacacucccgg

SEQ ID NO: 12607 - RNA, 20 nt, Artificial Sequence
  GATA2 Guide RNA
cagaaggccgggaguguguc

SEQ ID NO: 12608 - RNA, 20 nt, Artificial Sequence
  GATA2 Guide RNA
cagcuguggccccacaguug

SEQ ID NO: 12609 - RNA, 20 nt, Artificial Sequence
  GATA2 Guide RNA
cagcuguggggccacagcca

SEQ ID NO: 12610 - RNA, 20 nt, Artificial Sequence
  GATA2 Guide RNA
caguugacacacucccggcc

SEQ ID NO: 12611 - RNA, 20 nt, Artificial Sequence
  GATA2 Guide RNA
ccacagcuguggccccacag

SEQ ID NO: 12612 - RNA, 20 nt, Artificial Sequence
  GATA2 Guide RNA
ccacagcuguggggccacag

SEQ ID NO: 12613 - RNA, 20 nt, Artificial Sequence
  GATA2 Guide RNA
ccacaguugacacacucccg

SEQ ID NO: 12614 - RNA, 20 nt, Artificial Sequence
  GATA2 Guide RNA
cccacagcuguggccccaca

SEQ ID NO: 12615 - RNA, 20 nt, Artificial Sequence
  GATA2 Guide RNA
cccacaguugacacacuccc

SEQ ID NO: 12616 - RNA, 20 nt, Artificial Sequence
  GATA2 Guide RNA
ccccacagcuguggccccac

SEQ ID NO: 12617 - RNA, 20 nt, Artificial Sequence
  GATA2 Guide RNA
ccccacaguugacacacucc

SEQ ID NO: 12618 - RNA, 20 nt, Artificial Sequence
  GATA2 Guide RNA
ccgggagugugucaacugug

SEQ ID NO: 12619 - RNA, 20 nt, Artificial Sequence
  GATA2 Guide RNA
cgggagugugucaacugugg

SEQ ID NO: 12620 - RNA, 20 nt, Artificial Sequence
  GATA2 Guide RNA
cuguggccccacagcugugg

SEQ ID NO: 12621 - RNA, 20 nt, Artificial Sequence
  GATA2 Guide RNA
cuguggccccacaguugaca

SEQ ID NO: 12622 - RNA, 20 nt, Artificial Sequence
  GATA2 Guide RNA
cuguggggccacagcugugg

SEQ ID NO: 12623 - RNA, 20 nt, Artificial Sequence
  GATA2 Guide RNA
gaaggccgggagugugucaa

SEQ ID NO: 12624 - RNA, 20 nt, Artificial Sequence
  GATA2 Guide RNA
gagugugucaacuguggggc

SEQ ID NO: 12625 - RNA, 20 nt, Artificial Sequence
  GATA2 Guide RNA
gcagaaggccgggagugugu

SEQ ID NO: 12626 - RNA, 20 nt, Artificial Sequence
  GATA2 Guide RNA
gccacagcuguggggccaca

SEQ ID NO: 12627 - RNA, 20 nt, Artificial Sequence
  GATA2 Guide RNA
gccccacagcuguggcccca

SEQ ID NO: 12628 - RNA, 20 nt, Artificial Sequence
  GATA2 Guide RNA
gccccacaguugacacacuc

SEQ ID NO: 12629 - RNA, 20 nt, Artificial Sequence
  GATA2 Guide RNA
gccgggagugugucaacugu

SEQ ID NO: 12630 - RNA, 20 nt, Artificial Sequence
  GATA2 Guide RNA
gcuguggccccacagcugug

SEQ ID NO: 12631 - RNA, 20 nt, Artificial Sequence
  GATA2 Guide RNA
gcuguggccccacaguugac

SEQ ID NO: 12632 - RNA, 20 nt, Artificial Sequence
  GATA2 Guide RNA
ggagugugucaacugugggg

SEQ ID NO: 12633 - RNA, 20 nt, Artificial Sequence
  GATA2 Guide RNA
ggccacagcuguggggccac

SEQ ID NO: 12634 - RNA, 20 nt, Artificial Sequence
  GATA2 Guide RNA
ggccccacagcuguggcccc

SEQ ID NO: 12635 - RNA, 20 nt, Artificial Sequence
  GATA2 Guide RNA
ggccccacaguugacacacu

SEQ ID NO: 12636 - RNA, 20 nt, Artificial Sequence
  GATA2 Guide RNA
ggccgggagugugucaacug

SEQ ID NO: 12637 - RNA, 20 nt, Artificial Sequence
  GATA2 Guide RNA
ggcuguggccccacagcugu

SEQ ID NO: 12638 - RNA, 20 nt, Artificial Sequence
  GATA2 Guide RNA
gggagugugucaacuguggg

SEQ ID NO: 12639 - RNA, 20 nt, Artificial Sequence
  GATA2 Guide RNA
gggccacagcuguggggcca

SEQ ID NO: 12640 - RNA, 20 nt, Artificial Sequence
  GATA2 Guide RNA
ggggccacagcuguggggcc

SEQ ID NO: 12641 - RNA, 20 nt, Artificial Sequence
  GATA2 Guide RNA
gggguggcuguggccccaca

SEQ ID NO: 12642 - RNA, 20 nt, Artificial Sequence
  GATA2 Guide RNA
ggguggcuguggccccacag

SEQ ID NO: 12643 - RNA, 20 nt, Artificial Sequence
  GATA2 Guide RNA
gguggcuguggccccacagc

SEQ ID NO: 12644 - RNA, 20 nt, Artificial Sequence
  GATA2 Guide RNA
gucaacuguggggccacagc

SEQ ID NO: 12645 - RNA, 20 nt, Artificial Sequence
  GATA2 Guide RNA
guggccccacagcuguggcc

SEQ ID NO: 12646 - RNA, 20 nt, Artificial Sequence
  GATA2 Guide RNA
guggccccacaguugacaca

SEQ ID NO: 12647 - RNA, 20 nt, Artificial Sequence
  GATA2 Guide RNA
guggcuguggccccacagcu

SEQ ID NO: 12648 - RNA, 20 nt, Artificial Sequence
  GATA2 Guide RNA
guggggccacagcugugggg

SEQ ID NO: 12649 - RNA, 20 nt, Artificial Sequence
  GATA2 Guide RNA
gugucaacuguggggccaca

SEQ ID NO: 12650 - RNA, 20 nt, Artificial Sequence
  GATA2 Guide RNA
gugugucaacuguggggcca

SEQ ID NO: 12651 - RNA, 20 nt, Artificial Sequence
  GATA2 Guide RNA
guugacacacucccggccuu

SEQ ID NO: 12652 - RNA, 20 nt, Artificial Sequence
  GATA2 Guide RNA
ucaacuguggggccacagcu

SEQ ID NO: 12653 - RNA, 20 nt, Artificial Sequence
  GATA2 Guide RNA
ugcagaaggccgggagugug

SEQ ID NO: 12654 - RNA, 20 nt, Artificial Sequence
  GATA2 Guide RNA
uggccccacagcuguggccc

SEQ ID NO: 12655 - RNA, 20 nt, Artificial Sequence
  GATA2 Guide RNA
uggccccacaguugacacac

SEQ ID NO: 12656 - RNA, 20 nt, Artificial Sequence
  GATA2 Guide RNA
uggcuguggccccacagcug

SEQ ID NO: 12657 - RNA, 20 nt, Artificial Sequence
  GATA2 Guide RNA
uggggccacagcuguggggc

SEQ ID NO: 12658 - RNA, 20 nt, Artificial Sequence
  GATA2 Guide RNA
ugucaacuguggggccacag

SEQ ID NO: 12659 - RNA, 20 nt, Artificial Sequence
  GATA2 Guide RNA
uguggccccacagcuguggc

SEQ ID NO: 12660 - RNA, 20 nt, Artificial Sequence
  GATA2 Guide RNA
uguggccccacaguugacac

SEQ ID NO: 12661 - RNA, 20 nt, Artificial Sequence
  GATA2 Guide RNA
uguggggccacagcuguggg

SEQ ID NO: 12662 - RNA, 20 nt, Artificial Sequence
  GATA2 Guide RNA
ugugucaacuguggggccac

SEQ ID NO: 12663 - RNA, 20 nt, Artificial Sequence
  GATA2 Guide RNA
uugacacacucccggccuuc

SEQ ID NO: 12664 - RNA, 21 nt, Artificial Sequence
  GATA2 Guide RNA
aacuguggggccacagcugug

SEQ ID NO: 12665 - RNA, 21 nt, Artificial Sequence
  GATA2 Guide RNA
aaggccgggagugugucaacu

SEQ ID NO: 12666 - RNA, 21 nt, Artificial Sequence
  GATA2 Guide RNA
acagcuguggccccacaguug

SEQ ID NO: 12667 - RNA, 21 nt, Artificial Sequence
  GATA2 Guide RNA
acagcuguggggccacagcca

SEQ ID NO: 12668 - RNA, 21 nt, Artificial Sequence
  GATA2 Guide RNA
acaguugacacacucccggcc

SEQ ID NO: 12669 - RNA, 21 nt, Artificial Sequence
  GATA2 Guide RNA
acuguggggccacagcugugg

SEQ ID NO: 12670 - RNA, 21 nt, Artificial Sequence
  GATA2 Guide RNA
agaaggccgggagugugucaa

SEQ ID NO: 12671 - RNA, 21 nt, Artificial Sequence
  GATA2 Guide RNA
agcuguggccccacaguugac

SEQ ID NO: 12672 - RNA, 21 nt, Artificial Sequence
  GATA2 Guide RNA
agcuguggggccacagccacc

SEQ ID NO: 12673 - RNA, 21 nt, Artificial Sequence
  GATA2 Guide RNA
aggccgggagugugucaacug

SEQ ID NO: 12674 - RNA, 21 nt, Artificial Sequence
  GATA2 Guide RNA
agggguggcuguggccccaca

SEQ ID NO: 12675 - RNA, 21 nt, Artificial Sequence
  GATA2 Guide RNA
agugugucaacuguggggcca

SEQ ID NO: 12676 - RNA, 21 nt, Artificial Sequence
  GATA2 Guide RNA
aguugacacacucccggccuu

SEQ ID NO: 12677 - RNA, 21 nt, Artificial Sequence
  GATA2 Guide RNA
caacuguggggccacagcugu

SEQ ID NO: 12678 - RNA, 21 nt, Artificial Sequence
  GATA2 Guide RNA
cacagcuguggccccacaguu

SEQ ID NO: 12679 - RNA, 21 nt, Artificial Sequence
  GATA2 Guide RNA
cacagcuguggggccacagcc

SEQ ID NO: 12680 - RNA, 21 nt, Artificial Sequence
  GATA2 Guide RNA
cacaguugacacacucccggc

SEQ ID NO: 12681 - RNA, 21 nt, Artificial Sequence
  GATA2 Guide RNA
cagaaggccgggaguguguca

SEQ ID NO: 12682 - RNA, 21 nt, Artificial Sequence
  GATA2 Guide RNA
cagcuguggccccacaguuga

SEQ ID NO: 12683 - RNA, 21 nt, Artificial Sequence
  GATA2 Guide RNA
cagcuguggggccacagccac

SEQ ID NO: 12684 - RNA, 21 nt, Artificial Sequence
  GATA2 Guide RNA
caguugacacacucccggccu

SEQ ID NO: 12685 - RNA, 21 nt, Artificial Sequence
  GATA2 Guide RNA
ccacagcuguggccccacagu

SEQ ID NO: 12686 - RNA, 21 nt, Artificial Sequence
  GATA2 Guide RNA
ccacagcuguggggccacagc

SEQ ID NO: 12687 - RNA, 21 nt, Artificial Sequence
  GATA2 Guide RNA
ccacaguugacacacucccgg

SEQ ID NO: 12688 - RNA, 21 nt, Artificial Sequence
  GATA2 Guide RNA
cccacagcuguggccccacag

SEQ ID NO: 12689 - RNA, 21 nt, Artificial Sequence
  GATA2 Guide RNA
cccacaguugacacacucccg

SEQ ID NO: 12690 - RNA, 21 nt, Artificial Sequence
  GATA2 Guide RNA
ccccacagcuguggccccaca

SEQ ID NO: 12691 - RNA, 21 nt, Artificial Sequence
  GATA2 Guide RNA
ccccacaguugacacacuccc

SEQ ID NO: 12692 - RNA, 21 nt, Artificial Sequence
  GATA2 Guide RNA
ccgggagugugucaacugugg

SEQ ID NO: 12693 - RNA, 21 nt, Artificial Sequence
  GATA2 Guide RNA
cgggagugugucaacuguggg

SEQ ID NO: 12694 - RNA, 21 nt, Artificial Sequence
  GATA2 Guide RNA
cugcagaaggccgggagugug

SEQ ID NO: 12695 - RNA, 21 nt, Artificial Sequence
  GATA2 Guide RNA
cuguggccccacagcuguggc

SEQ ID NO: 12696 - RNA, 21 nt, Artificial Sequence
  GATA2 Guide RNA
cuguggccccacaguugacac

SEQ ID NO: 12697 - RNA, 21 nt, Artificial Sequence
  GATA2 Guide RNA
cuguggggccacagcuguggg

SEQ ID NO: 12698 - RNA, 21 nt, Artificial Sequence
  GATA2 Guide RNA
gaaggccgggagugugucaac

SEQ ID NO: 12699 - RNA, 21 nt, Artificial Sequence
  GATA2 Guide RNA
gagggguggcuguggccccac

SEQ ID NO: 12700 - RNA, 21 nt, Artificial Sequence
  GATA2 Guide RNA
gagugugucaacuguggggcc

SEQ ID NO: 12701 - RNA, 21 nt, Artificial Sequence
  GATA2 Guide RNA
gcagaaggccgggaguguguc

SEQ ID NO: 12702 - RNA, 21 nt, Artificial Sequence
  GATA2 Guide RNA
gccacagcuguggggccacag

SEQ ID NO: 12703 - RNA, 21 nt, Artificial Sequence
  GATA2 Guide RNA
gccccacagcuguggccccac

SEQ ID NO: 12704 - RNA, 21 nt, Artificial Sequence
  GATA2 Guide RNA
gccccacaguugacacacucc

SEQ ID NO: 12705 - RNA, 21 nt, Artificial Sequence
  GATA2 Guide RNA
gccgggagugugucaacugug

SEQ ID NO: 12706 - RNA, 21 nt, Artificial Sequence
  GATA2 Guide RNA
gcuguggccccacagcugugg

SEQ ID NO: 12707 - RNA, 21 nt, Artificial Sequence
  GATA2 Guide RNA
gcuguggccccacaguugaca

SEQ ID NO: 12708 - RNA, 21 nt, Artificial Sequence
  GATA2 Guide RNA
ggagugugucaacuguggggc

SEQ ID NO: 12709 - RNA, 21 nt, Artificial Sequence
  GATA2 Guide RNA
ggccacagcuguggggccaca

SEQ ID NO: 12710 - RNA, 21 nt, Artificial Sequence
  GATA2 Guide RNA
ggccccacagcuguggcccca

SEQ ID NO: 12711 - RNA, 21 nt, Artificial Sequence
  GATA2 Guide RNA
ggccccacaguugacacacuc

SEQ ID NO: 12712 - RNA, 21 nt, Artificial Sequence
  GATA2 Guide RNA
ggccgggagugugucaacugu

SEQ ID NO: 12713 - RNA, 21 nt, Artificial Sequence
  GATA2 Guide RNA
ggcuguggccccacagcugug

SEQ ID NO: 12714 - RNA, 21 nt, Artificial Sequence
  GATA2 Guide RNA
gggagugugucaacugugggg

SEQ ID NO: 12715 - RNA, 21 nt, Artificial Sequence
  GATA2 Guide RNA
gggccacagcuguggggccac

SEQ ID NO: 12716 - RNA, 21 nt, Artificial Sequence
  GATA2 Guide RNA
ggggccacagcuguggggcca

SEQ ID NO: 12717 - RNA, 21 nt, Artificial Sequence
  GATA2 Guide RNA
gggguggcuguggccccacag

SEQ ID NO: 12718 - RNA, 21 nt, Artificial Sequence
  GATA2 Guide RNA
ggguggcuguggccccacagc

SEQ ID NO: 12719 - RNA, 21 nt, Artificial Sequence
  GATA2 Guide RNA
gguggcuguggccccacagcu

SEQ ID NO: 12720 - RNA, 21 nt, Artificial Sequence
  GATA2 Guide RNA
gucaacuguggggccacagcu

SEQ ID NO: 12721 - RNA, 21 nt, Artificial Sequence
  GATA2 Guide RNA
guggccccacagcuguggccc

SEQ ID NO: 12722 - RNA, 21 nt, Artificial Sequence
  GATA2 Guide RNA
guggccccacaguugacacac

SEQ ID NO: 12723 - RNA, 21 nt, Artificial Sequence
  GATA2 Guide RNA
guggcuguggccccacagcug

SEQ ID NO: 12724 - RNA, 21 nt, Artificial Sequence
  GATA2 Guide RNA
guggggccacagcuguggggc

SEQ ID NO: 12725 - RNA, 21 nt, Artificial Sequence
  GATA2 Guide RNA
gugucaacuguggggccacag

SEQ ID NO: 12726 - RNA, 21 nt, Artificial Sequence
  GATA2 Guide RNA
gugugucaacuguggggccac

SEQ ID NO: 12727 - RNA, 21 nt, Artificial Sequence
  GATA2 Guide RNA
guugacacacucccggccuuc

SEQ ID NO: 12728 - RNA, 21 nt, Artificial Sequence
  GATA2 Guide RNA
ucaacuguggggccacagcug

SEQ ID NO: 12729 - RNA, 21 nt, Artificial Sequence
  GATA2 Guide RNA
ugcagaaggccgggagugugu

SEQ ID NO: 12730 - RNA, 21 nt, Artificial Sequence
  GATA2 Guide RNA
uggccccacagcuguggcccc

SEQ ID NO: 12731 - RNA, 21 nt, Artificial Sequence
  GATA2 Guide RNA
uggccccacaguugacacacu

SEQ ID NO: 12732 - RNA, 21 nt, Artificial Sequence
  GATA2 Guide RNA
uggcuguggccccacagcugu

SEQ ID NO: 12733 - RNA, 21 nt, Artificial Sequence
  GATA2 Guide RNA
uggggccacagcuguggggcc

SEQ ID NO: 12734 - RNA, 21 nt, Artificial Sequence
  GATA2 Guide RNA
ugucaacuguggggccacagc

SEQ ID NO: 12735 - RNA, 21 nt, Artificial Sequence
  GATA2 Guide RNA
uguggccccacagcuguggcc

SEQ ID NO: 12736 - RNA, 21 nt, Artificial Sequence
  GATA2 Guide RNA
uguggccccacaguugacaca

SEQ ID NO: 12737 - RNA, 21 nt, Artificial Sequence
  GATA2 Guide RNA
uguggggccacagcugugggg

SEQ ID NO: 12738 - RNA, 21 nt, Artificial Sequence
  GATA2 Guide RNA
ugugucaacuguggggccaca

SEQ ID NO: 12739 - RNA, 21 nt, Artificial Sequence
  GATA2 Guide RNA
uugacacacucccggccuucu

SEQ ID NO: 12740 - RNA, 22 nt, Artificial Sequence
  GATA2 Guide RNA
aacuguggggccacagcugugg

SEQ ID NO: 12741 - RNA, 22 nt, Artificial Sequence
  GATA2 Guide RNA
aaggccgggagugugucaacug

SEQ ID NO: 12742 - RNA, 22 nt, Artificial Sequence
  GATA2 Guide RNA
acagcuguggccccacaguuga

SEQ ID NO: 12743 - RNA, 22 nt, Artificial Sequence
  GATA2 Guide RNA
acagcuguggggccacagccac

SEQ ID NO: 12744 - RNA, 22 nt, Artificial Sequence
  GATA2 Guide RNA
acaguugacacacucccggccu

SEQ ID NO: 12745 - RNA, 22 nt, Artificial Sequence
  GATA2 Guide RNA
acuguggggccacagcuguggg

SEQ ID NO: 12746 - RNA, 22 nt, Artificial Sequence
  GATA2 Guide RNA
agaaggccgggagugugucaac

SEQ ID NO: 12747 - RNA, 22 nt, Artificial Sequence
  GATA2 Guide RNA
agagggguggcuguggccccac

SEQ ID NO: 12748 - RNA, 22 nt, Artificial Sequence
  GATA2 Guide RNA
agcuguggccccacaguugaca

SEQ ID NO: 12749 - RNA, 22 nt, Artificial Sequence
  GATA2 Guide RNA
agcuguggggccacagccaccc

SEQ ID NO: 12750 - RNA, 22 nt, Artificial Sequence
  GATA2 Guide RNA
aggccgggagugugucaacugu

SEQ ID NO: 12751 - RNA, 22 nt, Artificial Sequence
  GATA2 Guide RNA
agggguggcuguggccccacag

SEQ ID NO: 12752 - RNA, 22 nt, Artificial Sequence
  GATA2 Guide RNA
agugugucaacuguggggccac

SEQ ID NO: 12753 - RNA, 22 nt, Artificial Sequence
  GATA2 Guide RNA
aguugacacacucccggccuuc

SEQ ID NO: 12754 - RNA, 22 nt, Artificial Sequence
  GATA2 Guide RNA
caacuguggggccacagcugug

SEQ ID NO: 12755 - RNA, 22 nt, Artificial Sequence
  GATA2 Guide RNA
cacagcuguggccccacaguug

SEQ ID NO: 12756 - RNA, 22 nt, Artificial Sequence
  GATA2 Guide RNA
cacagcuguggggccacagcca

SEQ ID NO: 12757 - RNA, 22 nt, Artificial Sequence
  GATA2 Guide RNA
cacaguugacacacucccggcc

SEQ ID NO: 12758 - RNA, 22 nt, Artificial Sequence
  GATA2 Guide RNA
cagaaggccgggagugugucaa

SEQ ID NO: 12759 - RNA, 22 nt, Artificial Sequence
  GATA2 Guide RNA
cagcuguggccccacaguugac

SEQ ID NO: 12760 - RNA, 22 nt, Artificial Sequence
  GATA2 Guide RNA
cagcuguggggccacagccacc

SEQ ID NO: 12761 - RNA, 22 nt, Artificial Sequence
  GATA2 Guide RNA
caguugacacacucccggccuu

SEQ ID NO: 12762 - RNA, 22 nt, Artificial Sequence
  GATA2 Guide RNA
ccacagcuguggccccacaguu

SEQ ID NO: 12763 - RNA, 22 nt, Artificial Sequence
  GATA2 Guide RNA
ccacagcuguggggccacagcc

SEQ ID NO: 12764 - RNA, 22 nt, Artificial Sequence
  GATA2 Guide RNA
ccacaguugacacacucccggc

SEQ ID NO: 12765 - RNA, 22 nt, Artificial Sequence
  GATA2 Guide RNA
cccacagcuguggccccacagu

SEQ ID NO: 12766 - RNA, 22 nt, Artificial Sequence
  GATA2 Guide RNA
cccacaguugacacacucccgg

SEQ ID NO: 12767 - RNA, 22 nt, Artificial Sequence
  GATA2 Guide RNA
ccccacagcuguggccccacag

SEQ ID NO: 12768 - RNA, 22 nt, Artificial Sequence
  GATA2 Guide RNA
ccccacaguugacacacucccg

SEQ ID NO: 12769 - RNA, 22 nt, Artificial Sequence
  GATA2 Guide RNA
ccgggagugugucaacuguggg

SEQ ID NO: 12770 - RNA, 22 nt, Artificial Sequence
  GATA2 Guide RNA
ccugcagaaggccgggagugug

SEQ ID NO: 12771 - RNA, 22 nt, Artificial Sequence
  GATA2 Guide RNA
cgggagugugucaacugugggg

SEQ ID NO: 12772 - RNA, 22 nt, Artificial Sequence
  GATA2 Guide RNA
cugcagaaggccgggagugugu

SEQ ID NO: 12773 - RNA, 22 nt, Artificial Sequence
  GATA2 Guide RNA
cuguggccccacagcuguggcc

SEQ ID NO: 12774 - RNA, 22 nt, Artificial Sequence
  GATA2 Guide RNA
cuguggccccacaguugacaca

SEQ ID NO: 12775 - RNA, 22 nt, Artificial Sequence
  GATA2 Guide RNA
cuguggggccacagcugugggg

SEQ ID NO: 12776 - RNA, 22 nt, Artificial Sequence
  GATA2 Guide RNA
gaaggccgggagugugucaacu

SEQ ID NO: 12777 - RNA, 22 nt, Artificial Sequence
  GATA2 Guide RNA
gagggguggcuguggccccaca

SEQ ID NO: 12778 - RNA, 22 nt, Artificial Sequence
  GATA2 Guide RNA
gagugugucaacuguggggcca

SEQ ID NO: 12779 - RNA, 22 nt, Artificial Sequence
  GATA2 Guide RNA
gcagaaggccgggaguguguca

SEQ ID NO: 12780 - RNA, 22 nt, Artificial Sequence
  GATA2 Guide RNA
gccacagcuguggggccacagc

SEQ ID NO: 12781 - RNA, 22 nt, Artificial Sequence
  GATA2 Guide RNA
gccccacagcuguggccccaca

SEQ ID NO: 12782 - RNA, 22 nt, Artificial Sequence
  GATA2 Guide RNA
gccccacaguugacacacuccc

SEQ ID NO: 12783 - RNA, 22 nt, Artificial Sequence
  GATA2 Guide RNA
gccgggagugugucaacugugg

SEQ ID NO: 12784 - RNA, 22 nt, Artificial Sequence
  GATA2 Guide RNA
gcuguggccccacagcuguggc

SEQ ID NO: 12785 - RNA, 22 nt, Artificial Sequence
  GATA2 Guide RNA
gcuguggccccacaguugacac

SEQ ID NO: 12786 - RNA, 22 nt, Artificial Sequence
  GATA2 Guide RNA
ggagugugucaacuguggggcc

SEQ ID NO: 12787 - RNA, 22 nt, Artificial Sequence
  GATA2 Guide RNA
ggccacagcuguggggccacag

SEQ ID NO: 12788 - RNA, 22 nt, Artificial Sequence
  GATA2 Guide RNA
ggccccacagcuguggccccac

SEQ ID NO: 12789 - RNA, 22 nt, Artificial Sequence
  GATA2 Guide RNA
ggccccacaguugacacacucc

SEQ ID NO: 12790 - RNA, 22 nt, Artificial Sequence
  GATA2 Guide RNA
ggccgggagugugucaacugug

SEQ ID NO: 12791 - RNA, 22 nt, Artificial Sequence
  GATA2 Guide RNA
ggcuguggccccacagcugugg

SEQ ID NO: 12792 - RNA, 22 nt, Artificial Sequence
  GATA2 Guide RNA
gggagugugucaacuguggggc

SEQ ID NO: 12793 - RNA, 22 nt, Artificial Sequence
  GATA2 Guide RNA
gggccacagcuguggggccaca

SEQ ID NO: 12794 - RNA, 22 nt, Artificial Sequence
  GATA2 Guide RNA
ggggccacagcuguggggccac

SEQ ID NO: 12795 - RNA, 22 nt, Artificial Sequence
  GATA2 Guide RNA
gggguggcuguggccccacagc

SEQ ID NO: 12796 - RNA, 22 nt, Artificial Sequence
  GATA2 Guide RNA
ggguggcuguggccccacagcu

SEQ ID NO: 12797 - RNA, 22 nt, Artificial Sequence
  GATA2 Guide RNA
gguggcuguggccccacagcug

SEQ ID NO: 12798 - RNA, 22 nt, Artificial Sequence
  GATA2 Guide RNA
gucaacuguggggccacagcug

SEQ ID NO: 12799 - RNA, 22 nt, Artificial Sequence
  GATA2 Guide RNA
guggccccacagcuguggcccc

SEQ ID NO: 12800 - RNA, 22 nt, Artificial Sequence
  GATA2 Guide RNA
guggccccacaguugacacacu

SEQ ID NO: 12801 - RNA, 22 nt, Artificial Sequence
  GATA2 Guide RNA
guggcuguggccccacagcugu

SEQ ID NO: 12802 - RNA, 22 nt, Artificial Sequence
  GATA2 Guide RNA
guggggccacagcuguggggcc

SEQ ID NO: 12803 - RNA, 22 nt, Artificial Sequence
  GATA2 Guide RNA
gugucaacuguggggccacagc

SEQ ID NO: 12804 - RNA, 22 nt, Artificial Sequence
  GATA2 Guide RNA
gugugucaacuguggggccaca

SEQ ID NO: 12805 - RNA, 22 nt, Artificial Sequence
  GATA2 Guide RNA
guugacacacucccggccuucu

SEQ ID NO: 12806 - RNA, 22 nt, Artificial Sequence
  GATA2 Guide RNA
ucaacuguggggccacagcugu

SEQ ID NO: 12807 - RNA, 22 nt, Artificial Sequence
  GATA2 Guide RNA
ugcagaaggccgggaguguguc

SEQ ID NO: 12808 - RNA, 22 nt, Artificial Sequence
  GATA2 Guide RNA
uggccccacagcuguggcccca

SEQ ID NO: 12809 - RNA, 22 nt, Artificial Sequence
  GATA2 Guide RNA
uggccccacaguugacacacuc

SEQ ID NO: 12810 - RNA, 22 nt, Artificial Sequence
  GATA2 Guide RNA
uggcuguggccccacagcugug

SEQ ID NO: 12811 - RNA, 22 nt, Artificial Sequence
  GATA2 Guide RNA
uggggccacagcuguggggcca

SEQ ID NO: 12812 - RNA, 22 nt, Artificial Sequence
  GATA2 Guide RNA
ugucaacuguggggccacagcu

SEQ ID NO: 12813 - RNA, 22 nt, Artificial Sequence
  GATA2 Guide RNA
uguggccccacagcuguggccc

SEQ ID NO: 12814 - RNA, 22 nt, Artificial Sequence
  GATA2 Guide RNA
uguggccccacaguugacacac

SEQ ID NO: 12815 - RNA, 22 nt, Artificial Sequence
  GATA2 Guide RNA
uguggggccacagcuguggggc

SEQ ID NO: 12816 - RNA, 22 nt, Artificial Sequence
  GATA2 Guide RNA
ugugucaacuguggggccacag

SEQ ID NO: 12817 - RNA, 22 nt, Artificial Sequence
  GATA2 Guide RNA
uugacacacucccggccuucug

SEQ ID NO: 12818 - RNA, 20 nt, Artificial Sequence
  GATA2 Guide RNA
acacacucccggccuucugc

SEQ ID NO: 12819 - RNA, 20 nt, Artificial Sequence
  GATA2 Guide RNA
acacucccggccuucugccg

SEQ ID NO: 12820 - RNA, 20 nt, Artificial Sequence
  GATA2 Guide RNA
acucccggccuucugccggg

SEQ ID NO: 12821 - RNA, 20 nt, Artificial Sequence
  GATA2 Guide RNA
cacacucccggccuucugcc

SEQ ID NO: 12822 - RNA, 20 nt, Artificial Sequence
  GATA2 Guide RNA
cacucccggccuucugccgg

SEQ ID NO: 12823 - RNA, 20 nt, Artificial Sequence
  GATA2 Guide RNA
ccccggcagaaggccgggag

SEQ ID NO: 12824 - RNA, 20 nt, Artificial Sequence
  GATA2 Guide RNA
ccccgugucucucccuguuc

SEQ ID NO: 12825 - RNA, 20 nt, Artificial Sequence
  GATA2 Guide RNA
cccggcagaaggccgggagu

SEQ ID NO: 12826 - RNA, 20 nt, Artificial Sequence
  GATA2 Guide RNA
cccggccuucugccggggaa

SEQ ID NO: 12827 - RNA, 20 nt, Artificial Sequence
  GATA2 Guide RNA
cccgugucucucccuguucc

SEQ ID NO: 12828 - RNA, 20 nt, Artificial Sequence
  GATA2 Guide RNA
cccuguuccccggcagaagg

SEQ ID NO: 12829 - RNA, 20 nt, Artificial Sequence
  GATA2 Guide RNA
ccggcagaaggccgggagug

SEQ ID NO: 12830 - RNA, 20 nt, Artificial Sequence
  GATA2 Guide RNA
ccggccuucugccggggaac

SEQ ID NO: 12831 - RNA, 20 nt, Artificial Sequence
  GATA2 Guide RNA
ccggggaacagggagagaca

SEQ ID NO: 12832 - RNA, 20 nt, Artificial Sequence
  GATA2 Guide RNA
ccgugucucucccuguuccc

SEQ ID NO: 12833 - RNA, 20 nt, Artificial Sequence
  GATA2 Guide RNA
ccuguuccccggcagaaggc

SEQ ID NO: 12834 - RNA, 20 nt, Artificial Sequence
  GATA2 Guide RNA
ccuucugccggggaacaggg

SEQ ID NO: 12835 - RNA, 20 nt, Artificial Sequence
  GATA2 Guide RNA
cggcagaaggccgggagugu

SEQ ID NO: 12836 - RNA, 20 nt, Artificial Sequence
  GATA2 Guide RNA
cggccuucugccggggaaca

SEQ ID NO: 12837 - RNA, 20 nt, Artificial Sequence
  GATA2 Guide RNA
cggggaacagggagagacac

SEQ ID NO: 12838 - RNA, 20 nt, Artificial Sequence
  GATA2 Guide RNA
cgugucucucccuguucccc

SEQ ID NO: 12839 - RNA, 20 nt, Artificial Sequence
  GATA2 Guide RNA
cucccggccuucugccgggg

SEQ ID NO: 12840 - RNA, 20 nt, Artificial Sequence
  GATA2 Guide RNA
cucccuguuccccggcagaa

SEQ ID NO: 12841 - RNA, 20 nt, Artificial Sequence
  GATA2 Guide RNA
cucucccuguuccccggcag

SEQ ID NO: 12842 - RNA, 20 nt, Artificial Sequence
  GATA2 Guide RNA
cugccggggaacagggagag

SEQ ID NO: 12843 - RNA, 20 nt, Artificial Sequence
  GATA2 Guide RNA
cuguuccccggcagaaggcc

SEQ ID NO: 12844 - RNA, 20 nt, Artificial Sequence
  GATA2 Guide RNA
cuucugccggggaacaggga

SEQ ID NO: 12845 - RNA, 20 nt, Artificial Sequence
  GATA2 Guide RNA
gacacacucccggccuucug

SEQ ID NO: 12846 - RNA, 20 nt, Artificial Sequence
  GATA2 Guide RNA
gccggggaacagggagagac

SEQ ID NO: 12847 - RNA, 20 nt, Artificial Sequence
  GATA2 Guide RNA
gccuucugccggggaacagg

SEQ ID NO: 12848 - RNA, 20 nt, Artificial Sequence
  GATA2 Guide RNA
ggccuucugccggggaacag

SEQ ID NO: 12849 - RNA, 20 nt, Artificial Sequence
  GATA2 Guide RNA
gucucucccuguuccccggc

SEQ ID NO: 12850 - RNA, 20 nt, Artificial Sequence
  GATA2 Guide RNA
gugucucucccuguuccccg

SEQ ID NO: 12851 - RNA, 20 nt, Artificial Sequence
  GATA2 Guide RNA
guuccccggcagaaggccgg

SEQ ID NO: 12852 - RNA, 20 nt, Artificial Sequence
  GATA2 Guide RNA
uccccggcagaaggccggga

SEQ ID NO: 12853 - RNA, 20 nt, Artificial Sequence
  GATA2 Guide RNA
ucccggccuucugccgggga

SEQ ID NO: 12854 - RNA, 20 nt, Artificial Sequence
  GATA2 Guide RNA
ucccuguuccccggcagaag

SEQ ID NO: 12855 - RNA, 20 nt, Artificial Sequence
  GATA2 Guide RNA
ucucccuguuccccggcaga

SEQ ID NO: 12856 - RNA, 20 nt, Artificial Sequence
  GATA2 Guide RNA
ucucucccuguuccccggca

SEQ ID NO: 12857 - RNA, 20 nt, Artificial Sequence
  GATA2 Guide RNA
ucugccggggaacagggaga

SEQ ID NO: 12858 - RNA, 20 nt, Artificial Sequence
  GATA2 Guide RNA
ugacacacucccggccuucu

SEQ ID NO: 12859 - RNA, 20 nt, Artificial Sequence
  GATA2 Guide RNA
ugccggggaacagggagaga

SEQ ID NO: 12860 - RNA, 20 nt, Artificial Sequence
  GATA2 Guide RNA
ugucucucccuguuccccgg

SEQ ID NO: 12861 - RNA, 20 nt, Artificial Sequence
  GATA2 Guide RNA
uguuccccggcagaaggccg

SEQ ID NO: 12862 - RNA, 20 nt, Artificial Sequence
  GATA2 Guide RNA
uuccccggcagaaggccggg

SEQ ID NO: 12863 - RNA, 20 nt, Artificial Sequence
  GATA2 Guide RNA
uucugccggggaacagggag

SEQ ID NO: 12864 - RNA, 21 nt, Artificial Sequence
  GATA2 Guide RNA
acacacucccggccuucugcc

SEQ ID NO: 12865 - RNA, 21 nt, Artificial Sequence
  GATA2 Guide RNA
acacucccggccuucugccgg

SEQ ID NO: 12866 - RNA, 21 nt, Artificial Sequence
  GATA2 Guide RNA
acucccggccuucugccgggg

SEQ ID NO: 12867 - RNA, 21 nt, Artificial Sequence
  GATA2 Guide RNA
cacacucccggccuucugccg

SEQ ID NO: 12868 - RNA, 21 nt, Artificial Sequence
  GATA2 Guide RNA
cacucccggccuucugccggg

SEQ ID NO: 12869 - RNA, 21 nt, Artificial Sequence
  GATA2 Guide RNA
cccccgugucucucccuguuc

SEQ ID NO: 12870 - RNA, 21 nt, Artificial Sequence
  GATA2 Guide RNA
ccccggcagaaggccgggagu

SEQ ID NO: 12871 - RNA, 21 nt, Artificial Sequence
  GATA2 Guide RNA
ccccgugucucucccuguucc

SEQ ID NO: 12872 - RNA, 21 nt, Artificial Sequence
  GATA2 Guide RNA
cccggcagaaggccgggagug

SEQ ID NO: 12873 - RNA, 21 nt, Artificial Sequence
  GATA2 Guide RNA
cccggccuucugccggggaac

SEQ ID NO: 12874 - RNA, 21 nt, Artificial Sequence
  GATA2 Guide RNA
cccgugucucucccuguuccc

SEQ ID NO: 12875 - RNA, 21 nt, Artificial Sequence
  GATA2 Guide RNA
cccuguuccccggcagaaggc

SEQ ID NO: 12876 - RNA, 21 nt, Artificial Sequence
  GATA2 Guide RNA
ccggcagaaggccgggagugu

SEQ ID NO: 12877 - RNA, 21 nt, Artificial Sequence
  GATA2 Guide RNA
ccggccuucugccggggaaca

SEQ ID NO: 12878 - RNA, 21 nt, Artificial Sequence
  GATA2 Guide RNA
ccggggaacagggagagacac

SEQ ID NO: 12879 - RNA, 21 nt, Artificial Sequence
  GATA2 Guide RNA
ccgugucucucccuguucccc

SEQ ID NO: 12880 - RNA, 21 nt, Artificial Sequence
  GATA2 Guide RNA
ccuguuccccggcagaaggcc

SEQ ID NO: 12881 - RNA, 21 nt, Artificial Sequence
  GATA2 Guide RNA
ccuucugccggggaacaggga

SEQ ID NO: 12882 - RNA, 21 nt, Artificial Sequence
  GATA2 Guide RNA
cggcagaaggccgggagugug

SEQ ID NO: 12883 - RNA, 21 nt, Artificial Sequence
  GATA2 Guide RNA
cggccuucugccggggaacag

SEQ ID NO: 12884 - RNA, 21 nt, Artificial Sequence
  GATA2 Guide RNA
cggggaacagggagagacacg

SEQ ID NO: 12885 - RNA, 21 nt, Artificial Sequence
  GATA2 Guide RNA
cgugucucucccuguuccccg

SEQ ID NO: 12886 - RNA, 21 nt, Artificial Sequence
  GATA2 Guide RNA
cucccggccuucugccgggga

SEQ ID NO: 12887 - RNA, 21 nt, Artificial Sequence
  GATA2 Guide RNA
cucccuguuccccggcagaag

SEQ ID NO: 12888 - RNA, 21 nt, Artificial Sequence
  GATA2 Guide RNA
cucucccuguuccccggcaga

SEQ ID NO: 12889 - RNA, 21 nt, Artificial Sequence
  GATA2 Guide RNA
cugccggggaacagggagaga

SEQ ID NO: 12890 - RNA, 21 nt, Artificial Sequence
  GATA2 Guide RNA
cuguuccccggcagaaggccg

SEQ ID NO: 12891 - RNA, 21 nt, Artificial Sequence
  GATA2 Guide RNA
cuucugccggggaacagggag

SEQ ID NO: 12892 - RNA, 21 nt, Artificial Sequence
  GATA2 Guide RNA
gacacacucccggccuucugc

SEQ ID NO: 12893 - RNA, 21 nt, Artificial Sequence
  GATA2 Guide RNA
gccggggaacagggagagaca

SEQ ID NO: 12894 - RNA, 21 nt, Artificial Sequence
  GATA2 Guide RNA
gccuucugccggggaacaggg

SEQ ID NO: 12895 - RNA, 21 nt, Artificial Sequence
  GATA2 Guide RNA
ggccuucugccggggaacagg

SEQ ID NO: 12896 - RNA, 21 nt, Artificial Sequence
  GATA2 Guide RNA
gucucucccuguuccccggca

SEQ ID NO: 12897 - RNA, 21 nt, Artificial Sequence
  GATA2 Guide RNA
gugucucucccuguuccccgg

SEQ ID NO: 12898 - RNA, 21 nt, Artificial Sequence
  GATA2 Guide RNA
guuccccggcagaaggccggg

SEQ ID NO: 12899 - RNA, 21 nt, Artificial Sequence
  GATA2 Guide RNA
uccccggcagaaggccgggag

SEQ ID NO: 12900 - RNA, 21 nt, Artificial Sequence
  GATA2 Guide RNA
ucccggccuucugccggggaa

SEQ ID NO: 12901 - RNA, 21 nt, Artificial Sequence
  GATA2 Guide RNA
ucccuguuccccggcagaagg

SEQ ID NO: 12902 - RNA, 21 nt, Artificial Sequence
  GATA2 Guide RNA
ucucccuguuccccggcagaa

SEQ ID NO: 12903 - RNA, 21 nt, Artificial Sequence
  GATA2 Guide RNA
ucucucccuguuccccggcag

SEQ ID NO: 12904 - RNA, 21 nt, Artificial Sequence
  GATA2 Guide RNA
ucugccggggaacagggagag

SEQ ID NO: 12905 - RNA, 21 nt, Artificial Sequence
  GATA2 Guide RNA
ugacacacucccggccuucug

SEQ ID NO: 12906 - RNA, 21 nt, Artificial Sequence
  GATA2 Guide RNA
ugccggggaacagggagagac

SEQ ID NO: 12907 - RNA, 21 nt, Artificial Sequence
  GATA2 Guide RNA
ugucucucccuguuccccggc

SEQ ID NO: 12908 - RNA, 21 nt, Artificial Sequence
  GATA2 Guide RNA
uguuccccggcagaaggccgg

SEQ ID NO: 12909 - RNA, 21 nt, Artificial Sequence
  GATA2 Guide RNA
uuccccggcagaaggccggga

SEQ ID NO: 12910 - RNA, 21 nt, Artificial Sequence
  GATA2 Guide RNA
uucugccggggaacagggaga

SEQ ID NO: 12911 - RNA, 22 nt, Artificial Sequence
  GATA2 Guide RNA
acacacucccggccuucugccg

SEQ ID NO: 12912 - RNA, 22 nt, Artificial Sequence
  GATA2 Guide RNA
acacucccggccuucugccggg

SEQ ID NO: 12913 - RNA, 22 nt, Artificial Sequence
  GATA2 Guide RNA
acucccggccuucugccgggga

SEQ ID NO: 12914 - RNA, 22 nt, Artificial Sequence
  GATA2 Guide RNA
cacacucccggccuucugccgg

SEQ ID NO: 12915 - RNA, 22 nt, Artificial Sequence
  GATA2 Guide RNA
cacucccggccuucugccgggg

SEQ ID NO: 12916 - RNA, 22 nt, Artificial Sequence
  GATA2 Guide RNA
cccccgugucucucccuguucc

SEQ ID NO: 12917 - RNA, 22 nt, Artificial Sequence
  GATA2 Guide RNA
ccccggcagaaggccgggagug

SEQ ID NO: 12918 - RNA, 22 nt, Artificial Sequence
  GATA2 Guide RNA
ccccgugucucucccuguuccc

SEQ ID NO: 12919 - RNA, 22 nt, Artificial Sequence
  GATA2 Guide RNA
cccggcagaaggccgggagugu

SEQ ID NO: 12920 - RNA, 22 nt, Artificial Sequence
  GATA2 Guide RNA
cccggccuucugccggggaaca

SEQ ID NO: 12921 - RNA, 22 nt, Artificial Sequence
  GATA2 Guide RNA
cccgugucucucccuguucccc

SEQ ID NO: 12922 - RNA, 22 nt, Artificial Sequence
  GATA2 Guide RNA
cccuguuccccggcagaaggcc

SEQ ID NO: 12923 - RNA, 22 nt, Artificial Sequence
  GATA2 Guide RNA
ccggcagaaggccgggagugug

SEQ ID NO: 12924 - RNA, 22 nt, Artificial Sequence
  GATA2 Guide RNA
ccggccuucugccggggaacag

SEQ ID NO: 12925 - RNA, 22 nt, Artificial Sequence
  GATA2 Guide RNA
ccggggaacagggagagacacg

SEQ ID NO: 12926 - RNA, 22 nt, Artificial Sequence
  GATA2 Guide RNA
ccgugucucucccuguuccccg

SEQ ID NO: 12927 - RNA, 22 nt, Artificial Sequence
  GATA2 Guide RNA
ccuguuccccggcagaaggccg

SEQ ID NO: 12928 - RNA, 22 nt, Artificial Sequence
  GATA2 Guide RNA
ccuucugccggggaacagggag

SEQ ID NO: 12929 - RNA, 22 nt, Artificial Sequence
  GATA2 Guide RNA
cggcagaaggccgggagugugu

SEQ ID NO: 12930 - RNA, 22 nt, Artificial Sequence
  GATA2 Guide RNA
cggccuucugccggggaacagg

SEQ ID NO: 12931 - RNA, 22 nt, Artificial Sequence
  GATA2 Guide RNA
cggggaacagggagagacacgg

SEQ ID NO: 12932 - RNA, 22 nt, Artificial Sequence
  GATA2 Guide RNA
cgugucucucccuguuccccgg

SEQ ID NO: 12933 - RNA, 22 nt, Artificial Sequence
  GATA2 Guide RNA
cucccggccuucugccggggaa

SEQ ID NO: 12934 - RNA, 22 nt, Artificial Sequence
  GATA2 Guide RNA
cucccuguuccccggcagaagg

SEQ ID NO: 12935 - RNA, 22 nt, Artificial Sequence
  GATA2 Guide RNA
cucucccuguuccccggcagaa

SEQ ID NO: 12936 - RNA, 22 nt, Artificial Sequence
  GATA2 Guide RNA
cugccggggaacagggagagac

SEQ ID NO: 12937 - RNA, 22 nt, Artificial Sequence
  GATA2 Guide RNA
cuguuccccggcagaaggccgg

SEQ ID NO: 12938 - RNA, 22 nt, Artificial Sequence
  GATA2 Guide RNA
cuucugccggggaacagggaga

SEQ ID NO: 12939 - RNA, 22 nt, Artificial Sequence
  GATA2 Guide RNA
gacacacucccggccuucugcc

SEQ ID NO: 12940 - RNA, 22 nt, Artificial Sequence
  GATA2 Guide RNA
gcccccgugucucucccuguuc

SEQ ID NO: 12941 - RNA, 22 nt, Artificial Sequence
  GATA2 Guide RNA
gccggggaacagggagagacac

SEQ ID NO: 12942 - RNA, 22 nt, Artificial Sequence
  GATA2 Guide RNA
gccuucugccggggaacaggga

SEQ ID NO: 12943 - RNA, 22 nt, Artificial Sequence
  GATA2 Guide RNA
ggccuucugccggggaacaggg

SEQ ID NO: 12944 - RNA, 22 nt, Artificial Sequence
  GATA2 Guide RNA
gucucucccuguuccccggcag

SEQ ID NO: 12945 - RNA, 22 nt, Artificial Sequence
  GATA2 Guide RNA
gugucucucccuguuccccggc

SEQ ID NO: 12946 - RNA, 22 nt, Artificial Sequence
  GATA2 Guide RNA
guuccccggcagaaggccggga

SEQ ID NO: 12947 - RNA, 22 nt, Artificial Sequence
  GATA2 Guide RNA
uccccggcagaaggccgggagu

SEQ ID NO: 12948 - RNA, 22 nt, Artificial Sequence
  GATA2 Guide RNA
ucccggccuucugccggggaac

SEQ ID NO: 12949 - RNA, 22 nt, Artificial Sequence
  GATA2 Guide RNA
ucccuguuccccggcagaaggc

SEQ ID NO: 12950 - RNA, 22 nt, Artificial Sequence
  GATA2 Guide RNA
ucucccuguuccccggcagaag

SEQ ID NO: 12951 - RNA, 22 nt, Artificial Sequence
  GATA2 Guide RNA
ucucucccuguuccccggcaga

SEQ ID NO: 12952 - RNA, 22 nt, Artificial Sequence
  GATA2 Guide RNA
ucugccggggaacagggagaga

SEQ ID NO: 12953 - RNA, 22 nt, Artificial Sequence
  GATA2 Guide RNA
ugacacacucccggccuucugc

SEQ ID NO: 12954 - RNA, 22 nt, Artificial Sequence
  GATA2 Guide RNA
ugccggggaacagggagagaca

SEQ ID NO: 12955 - RNA, 22 nt, Artificial Sequence
  GATA2 Guide RNA
ugucucucccuguuccccggca

SEQ ID NO: 12956 - RNA, 22 nt, Artificial Sequence
  GATA2 Guide RNA
uguuccccggcagaaggccggg

SEQ ID NO: 12957 - RNA, 22 nt, Artificial Sequence
  GATA2 Guide RNA
uuccccggcagaaggccgggag

SEQ ID NO: 12958 - RNA, 22 nt, Artificial Sequence
  GATA2 Guide RNA
uucugccggggaacagggagag

SEQ ID NO: 12959 - RNA, 20 nt, Artificial Sequence
  GATA2 Guide RNA
aacaggaaugagccuugcug

SEQ ID NO: 12960 - RNA, 20 nt, Artificial Sequence
  GATA2 Guide RNA
aagcagcgcagcaaggcuca

SEQ ID NO: 12961 - RNA, 20 nt, Artificial Sequence
  GATA2 Guide RNA
aaggcucauuccuguucagg

SEQ ID NO: 12962 - RNA, 20 nt, Artificial Sequence
  GATA2 Guide RNA
aaugagccuugcugcgcugc

SEQ ID NO: 12963 - RNA, 20 nt, Artificial Sequence
  GATA2 Guide RNA
acaggaaugagccuugcugc

SEQ ID NO: 12964 - RNA, 20 nt, Artificial Sequence
  GATA2 Guide RNA
accugaacaggaaugagccu

SEQ ID NO: 12965 - RNA, 20 nt, Artificial Sequence
  GATA2 Guide RNA
agcaaggcucauuccuguuc

SEQ ID NO: 12966 - RNA, 20 nt, Artificial Sequence
  GATA2 Guide RNA
agcagcgcagcaaggcucau

SEQ ID NO: 12967 - RNA, 20 nt, Artificial Sequence
  GATA2 Guide RNA
agcgcagcaaggcucauucc

SEQ ID NO: 12968 - RNA, 20 nt, Artificial Sequence
  GATA2 Guide RNA
aggaaugagccuugcugcgc

SEQ ID NO: 12969 - RNA, 20 nt, Artificial Sequence
  GATA2 Guide RNA
aggcucauuccuguucaggu

SEQ ID NO: 12970 - RNA, 20 nt, Artificial Sequence
  GATA2 Guide RNA
augagccuugcugcgcugcu

SEQ ID NO: 12971 - RNA, 20 nt, Artificial Sequence
  GATA2 Guide RNA
caaggcucauuccuguucag

SEQ ID NO: 12972 - RNA, 20 nt, Artificial Sequence
  GATA2 Guide RNA
cagcaaggcucauuccuguu

SEQ ID NO: 12973 - RNA, 20 nt, Artificial Sequence
  GATA2 Guide RNA
cagcgcagcaaggcucauuc

SEQ ID NO: 12974 - RNA, 20 nt, Artificial Sequence
  GATA2 Guide RNA
caggaaugagccuugcugcg

SEQ ID NO: 12975 - RNA, 20 nt, Artificial Sequence
  GATA2 Guide RNA
cauuccuguucagguaaagg

SEQ ID NO: 12976 - RNA, 20 nt, Artificial Sequence
  GATA2 Guide RNA
cccuaagcagcgcagcaagg

SEQ ID NO: 12977 - RNA, 20 nt, Artificial Sequence
  GATA2 Guide RNA
ccuaagcagcgcagcaaggc

SEQ ID NO: 12978 - RNA, 20 nt, Artificial Sequence
  GATA2 Guide RNA
ccugaacaggaaugagccuu

SEQ ID NO: 12979 - RNA, 20 nt, Artificial Sequence
  GATA2 Guide RNA
ccugccuuuaccugaacagg

SEQ ID NO: 12980 - RNA, 20 nt, Artificial Sequence
  GATA2 Guide RNA
ccuuuaccugaacaggaaug

SEQ ID NO: 12981 - RNA, 20 nt, Artificial Sequence
  GATA2 Guide RNA
cgcagcaaggcucauuccug

SEQ ID NO: 12982 - RNA, 20 nt, Artificial Sequence
  GATA2 Guide RNA
cuaagcagcgcagcaaggcu

SEQ ID NO: 12983 - RNA, 20 nt, Artificial Sequence
  GATA2 Guide RNA
cucauuccuguucagguaaa

SEQ ID NO: 12984 - RNA, 20 nt, Artificial Sequence
  GATA2 Guide RNA
cugaacaggaaugagccuug

SEQ ID NO: 12985 - RNA, 20 nt, Artificial Sequence
  GATA2 Guide RNA
cugccuuuaccugaacagga

SEQ ID NO: 12986 - RNA, 20 nt, Artificial Sequence
  GATA2 Guide RNA
cuuuaccugaacaggaauga

SEQ ID NO: 12987 - RNA, 20 nt, Artificial Sequence
  GATA2 Guide RNA
gaacaggaaugagccuugcu

SEQ ID NO: 12988 - RNA, 20 nt, Artificial Sequence
  GATA2 Guide RNA
gaaugagccuugcugcgcug

SEQ ID NO: 12989 - RNA, 20 nt, Artificial Sequence
  GATA2 Guide RNA
gcaaggcucauuccuguuca

SEQ ID NO: 12990 - RNA, 20 nt, Artificial Sequence
  GATA2 Guide RNA
gcagcaaggcucauuccugu

SEQ ID NO: 12991 - RNA, 20 nt, Artificial Sequence
  GATA2 Guide RNA
gcagcgcagcaaggcucauu

SEQ ID NO: 12992 - RNA, 20 nt, Artificial Sequence
  GATA2 Guide RNA
gccuuuaccugaacaggaau

SEQ ID NO: 12993 - RNA, 20 nt, Artificial Sequence
  GATA2 Guide RNA
gcgcagcaaggcucauuccu

SEQ ID NO: 12994 - RNA, 20 nt, Artificial Sequence
  GATA2 Guide RNA
gcucauuccuguucagguaa

SEQ ID NO: 12995 - RNA, 20 nt, Artificial Sequence
  GATA2 Guide RNA
ggaaugagccuugcugcgcu

SEQ ID NO: 12996 - RNA, 20 nt, Artificial Sequence
  GATA2 Guide RNA
ggcucauuccuguucaggua

SEQ ID NO: 12997 - RNA, 20 nt, Artificial Sequence
  GATA2 Guide RNA
uaagcagcgcagcaaggcuc

SEQ ID NO: 12998 - RNA, 20 nt, Artificial Sequence
  GATA2 Guide RNA
uaccugaacaggaaugagcc

SEQ ID NO: 12999 - RNA, 20 nt, Artificial Sequence
  GATA2 Guide RNA
ucauuccuguucagguaaag

SEQ ID NO: 13000 - RNA, 20 nt, Artificial Sequence
  GATA2 Guide RNA
ugaacaggaaugagccuugc

SEQ ID NO: 13001 - RNA, 20 nt, Artificial Sequence
  GATA2 Guide RNA
ugagccuugcugcgcugcuu

SEQ ID NO: 13002 - RNA, 20 nt, Artificial Sequence
  GATA2 Guide RNA
ugccuuuaccugaacaggaa

SEQ ID NO: 13003 - RNA, 20 nt, Artificial Sequence
  GATA2 Guide RNA
uuaccugaacaggaaugagc

SEQ ID NO: 13004 - RNA, 20 nt, Artificial Sequence
  GATA2 Guide RNA
uuuaccugaacaggaaugag

SEQ ID NO: 13005 - RNA, 21 nt, Artificial Sequence
  GATA2 Guide RNA
aacaggaaugagccuugcugc

SEQ ID NO: 13006 - RNA, 21 nt, Artificial Sequence
  GATA2 Guide RNA
aagcagcgcagcaaggcucau

SEQ ID NO: 13007 - RNA, 21 nt, Artificial Sequence
  GATA2 Guide RNA
aaggcucauuccuguucaggu

SEQ ID NO: 13008 - RNA, 21 nt, Artificial Sequence
  GATA2 Guide RNA
aaugagccuugcugcgcugcu

SEQ ID NO: 13009 - RNA, 21 nt, Artificial Sequence
  GATA2 Guide RNA
acaggaaugagccuugcugcg

SEQ ID NO: 13010 - RNA, 21 nt, Artificial Sequence
  GATA2 Guide RNA
accugaacaggaaugagccuu

SEQ ID NO: 13011 - RNA, 21 nt, Artificial Sequence
  GATA2 Guide RNA
accugccuuuaccugaacagg

SEQ ID NO: 13012 - RNA, 21 nt, Artificial Sequence
  GATA2 Guide RNA
agcaaggcucauuccuguuca

SEQ ID NO: 13013 - RNA, 21 nt, Artificial Sequence
  GATA2 Guide RNA
agcagcgcagcaaggcucauu

SEQ ID NO: 13014 - RNA, 21 nt, Artificial Sequence
  GATA2 Guide RNA
agcgcagcaaggcucauuccu

SEQ ID NO: 13015 - RNA, 21 nt, Artificial Sequence
  GATA2 Guide RNA
aggaaugagccuugcugcgcu

SEQ ID NO: 13016 - RNA, 21 nt, Artificial Sequence
  GATA2 Guide RNA
aggcucauuccuguucaggua

SEQ ID NO: 13017 - RNA, 21 nt, Artificial Sequence
  GATA2 Guide RNA
augagccuugcugcgcugcuu

SEQ ID NO: 13018 - RNA, 21 nt, Artificial Sequence
  GATA2 Guide RNA
caaggcucauuccuguucagg

SEQ ID NO: 13019 - RNA, 21 nt, Artificial Sequence
  GATA2 Guide RNA
cagcaaggcucauuccuguuc

SEQ ID NO: 13020 - RNA, 21 nt, Artificial Sequence
  GATA2 Guide RNA
cagcgcagcaaggcucauucc

SEQ ID NO: 13021 - RNA, 21 nt, Artificial Sequence
  GATA2 Guide RNA
caggaaugagccuugcugcgc

SEQ ID NO: 13022 - RNA, 21 nt, Artificial Sequence
  GATA2 Guide RNA
cauuccuguucagguaaaggc

SEQ ID NO: 13023 - RNA, 21 nt, Artificial Sequence
  GATA2 Guide RNA
ccccuaagcagcgcagcaagg

SEQ ID NO: 13024 - RNA, 21 nt, Artificial Sequence
  GATA2 Guide RNA
cccuaagcagcgcagcaaggc

SEQ ID NO: 13025 - RNA, 21 nt, Artificial Sequence
  GATA2 Guide RNA
ccuaagcagcgcagcaaggcu

SEQ ID NO: 13026 - RNA, 21 nt, Artificial Sequence
  GATA2 Guide RNA
ccugaacaggaaugagccuug

SEQ ID NO: 13027 - RNA, 21 nt, Artificial Sequence
  GATA2 Guide RNA
ccugccuuuaccugaacagga

SEQ ID NO: 13028 - RNA, 21 nt, Artificial Sequence
  GATA2 Guide RNA
ccuuuaccugaacaggaauga

SEQ ID NO: 13029 - RNA, 21 nt, Artificial Sequence
  GATA2 Guide RNA
cgcagcaaggcucauuccugu

SEQ ID NO: 13030 - RNA, 21 nt, Artificial Sequence
  GATA2 Guide RNA
cuaagcagcgcagcaaggcuc

SEQ ID NO: 13031 - RNA, 21 nt, Artificial Sequence
  GATA2 Guide RNA
cucauuccuguucagguaaag

SEQ ID NO: 13032 - RNA, 21 nt, Artificial Sequence
  GATA2 Guide RNA
cugaacaggaaugagccuugc

SEQ ID NO: 13033 - RNA, 21 nt, Artificial Sequence
  GATA2 Guide RNA
cugccuuuaccugaacaggaa

SEQ ID NO: 13034 - RNA, 21 nt, Artificial Sequence
  GATA2 Guide RNA
cuuuaccugaacaggaaugag

SEQ ID NO: 13035 - RNA, 21 nt, Artificial Sequence
  GATA2 Guide RNA
gaacaggaaugagccuugcug

SEQ ID NO: 13036 - RNA, 21 nt, Artificial Sequence
  GATA2 Guide RNA
gaaugagccuugcugcgcugc

SEQ ID NO: 13037 - RNA, 21 nt, Artificial Sequence
  GATA2 Guide RNA
gcaaggcucauuccuguucag

SEQ ID NO: 13038 - RNA, 21 nt, Artificial Sequence
  GATA2 Guide RNA
gcagcaaggcucauuccuguu

SEQ ID NO: 13039 - RNA, 21 nt, Artificial Sequence
  GATA2 Guide RNA
gcagcgcagcaaggcucauuc

SEQ ID NO: 13040 - RNA, 21 nt, Artificial Sequence
  GATA2 Guide RNA
gccuuuaccugaacaggaaug

SEQ ID NO: 13041 - RNA, 21 nt, Artificial Sequence
  GATA2 Guide RNA
gcgcagcaaggcucauuccug

SEQ ID NO: 13042 - RNA, 21 nt, Artificial Sequence
  GATA2 Guide RNA
gcucauuccuguucagguaaa

SEQ ID NO: 13043 - RNA, 21 nt, Artificial Sequence
  GATA2 Guide RNA
ggaaugagccuugcugcgcug

SEQ ID NO: 13044 - RNA, 21 nt, Artificial Sequence
  GATA2 Guide RNA
ggcucauuccuguucagguaa

SEQ ID NO: 13045 - RNA, 21 nt, Artificial Sequence
  GATA2 Guide RNA
uaagcagcgcagcaaggcuca

SEQ ID NO: 13046 - RNA, 21 nt, Artificial Sequence
  GATA2 Guide RNA
uaccugaacaggaaugagccu

SEQ ID NO: 13047 - RNA, 21 nt, Artificial Sequence
  GATA2 Guide RNA
ucauuccuguucagguaaagg

SEQ ID NO: 13048 - RNA, 21 nt, Artificial Sequence
  GATA2 Guide RNA
ugaacaggaaugagccuugcu

SEQ ID NO: 13049 - RNA, 21 nt, Artificial Sequence
  GATA2 Guide RNA
ugagccuugcugcgcugcuua

SEQ ID NO: 13050 - RNA, 21 nt, Artificial Sequence
  GATA2 Guide RNA
ugccuuuaccugaacaggaau

SEQ ID NO: 13051 - RNA, 21 nt, Artificial Sequence
  GATA2 Guide RNA
uuaccugaacaggaaugagcc

SEQ ID NO: 13052 - RNA, 21 nt, Artificial Sequence
  GATA2 Guide RNA
uuuaccugaacaggaaugagc

SEQ ID NO: 13053 - RNA, 22 nt, Artificial Sequence
  GATA2 Guide RNA
aacaggaaugagccuugcugcg

SEQ ID NO: 13054 - RNA, 22 nt, Artificial Sequence
  GATA2 Guide RNA
aagcagcgcagcaaggcucauu

SEQ ID NO: 13055 - RNA, 22 nt, Artificial Sequence
  GATA2 Guide RNA
aaggcucauuccuguucaggua

SEQ ID NO: 13056 - RNA, 22 nt, Artificial Sequence
  GATA2 Guide RNA
aaugagccuugcugcgcugcuu

SEQ ID NO: 13057 - RNA, 22 nt, Artificial Sequence
  GATA2 Guide RNA
acaggaaugagccuugcugcgc

SEQ ID NO: 13058 - RNA, 22 nt, Artificial Sequence
  GATA2 Guide RNA
accccuaagcagcgcagcaagg

SEQ ID NO: 13059 - RNA, 22 nt, Artificial Sequence
  GATA2 Guide RNA
accugaacaggaaugagccuug

SEQ ID NO: 13060 - RNA, 22 nt, Artificial Sequence
  GATA2 Guide RNA
accugccuuuaccugaacagga

SEQ ID NO: 13061 - RNA, 22 nt, Artificial Sequence
  GATA2 Guide RNA
agcaaggcucauuccuguucag

SEQ ID NO: 13062 - RNA, 22 nt, Artificial Sequence
  GATA2 Guide RNA
agcagcgcagcaaggcucauuc

SEQ ID NO: 13063 - RNA, 22 nt, Artificial Sequence
  GATA2 Guide RNA
agcgcagcaaggcucauuccug

SEQ ID NO: 13064 - RNA, 22 nt, Artificial Sequence
  GATA2 Guide RNA
aggaaugagccuugcugcgcug

SEQ ID NO: 13065 - RNA, 22 nt, Artificial Sequence
  GATA2 Guide RNA
aggcucauuccuguucagguaa

SEQ ID NO: 13066 - RNA, 22 nt, Artificial Sequence
  GATA2 Guide RNA
augagccuugcugcgcugcuua

SEQ ID NO: 13067 - RNA, 22 nt, Artificial Sequence
  GATA2 Guide RNA
caaggcucauuccuguucaggu

SEQ ID NO: 13068 - RNA, 22 nt, Artificial Sequence
  GATA2 Guide RNA
caccugccuuuaccugaacagg

SEQ ID NO: 13069 - RNA, 22 nt, Artificial Sequence
  GATA2 Guide RNA
cagcaaggcucauuccuguuca

SEQ ID NO: 13070 - RNA, 22 nt, Artificial Sequence
  GATA2 Guide RNA
cagcgcagcaaggcucauuccu

SEQ ID NO: 13071 - RNA, 22 nt, Artificial Sequence
  GATA2 Guide RNA
caggaaugagccuugcugcgcu

SEQ ID NO: 13072 - RNA, 22 nt, Artificial Sequence
  GATA2 Guide RNA
cauuccuguucagguaaaggca

SEQ ID NO: 13073 - RNA, 22 nt, Artificial Sequence
  GATA2 Guide RNA
ccccuaagcagcgcagcaaggc

SEQ ID NO: 13074 - RNA, 22 nt, Artificial Sequence
  GATA2 Guide RNA
cccuaagcagcgcagcaaggcu

SEQ ID NO: 13075 - RNA, 22 nt, Artificial Sequence
  GATA2 Guide RNA
ccuaagcagcgcagcaaggcuc

SEQ ID NO: 13076 - RNA, 22 nt, Artificial Sequence
  GATA2 Guide RNA
ccugaacaggaaugagccuugc

SEQ ID NO: 13077 - RNA, 22 nt, Artificial Sequence
  GATA2 Guide RNA
ccugccuuuaccugaacaggaa

SEQ ID NO: 13078 - RNA, 22 nt, Artificial Sequence
  GATA2 Guide RNA
ccuuuaccugaacaggaaugag

SEQ ID NO: 13079 - RNA, 22 nt, Artificial Sequence
  GATA2 Guide RNA
cgcagcaaggcucauuccuguu

SEQ ID NO: 13080 - RNA, 22 nt, Artificial Sequence
  GATA2 Guide RNA
cuaagcagcgcagcaaggcuca

SEQ ID NO: 13081 - RNA, 22 nt, Artificial Sequence
  GATA2 Guide RNA
cucauuccuguucagguaaagg

SEQ ID NO: 13082 - RNA, 22 nt, Artificial Sequence
  GATA2 Guide RNA
cugaacaggaaugagccuugcu

SEQ ID NO: 13083 - RNA, 22 nt, Artificial Sequence
  GATA2 Guide RNA
cugccuuuaccugaacaggaau

SEQ ID NO: 13084 - RNA, 22 nt, Artificial Sequence
  GATA2 Guide RNA
cuuuaccugaacaggaaugagc

SEQ ID NO: 13085 - RNA, 22 nt, Artificial Sequence
  GATA2 Guide RNA
gaacaggaaugagccuugcugc

SEQ ID NO: 13086 - RNA, 22 nt, Artificial Sequence
  GATA2 Guide RNA
gaaugagccuugcugcgcugcu

SEQ ID NO: 13087 - RNA, 22 nt, Artificial Sequence
  GATA2 Guide RNA
gcaaggcucauuccuguucagg

SEQ ID NO: 13088 - RNA, 22 nt, Artificial Sequence
  GATA2 Guide RNA
gcagcaaggcucauuccuguuc

SEQ ID NO: 13089 - RNA, 22 nt, Artificial Sequence
  GATA2 Guide RNA
gcagcgcagcaaggcucauucc

SEQ ID NO: 13090 - RNA, 22 nt, Artificial Sequence
  GATA2 Guide RNA
gccuuuaccugaacaggaauga

SEQ ID NO: 13091 - RNA, 22 nt, Artificial Sequence
  GATA2 Guide RNA
gcgcagcaaggcucauuccugu

SEQ ID NO: 13092 - RNA, 22 nt, Artificial Sequence
  GATA2 Guide RNA
gcucauuccuguucagguaaag

SEQ ID NO: 13093 - RNA, 22 nt, Artificial Sequence
  GATA2 Guide RNA
ggaaugagccuugcugcgcugc

SEQ ID NO: 13094 - RNA, 22 nt, Artificial Sequence
  GATA2 Guide RNA
ggcucauuccuguucagguaaa

SEQ ID NO: 13095 - RNA, 22 nt, Artificial Sequence
  GATA2 Guide RNA
uaagcagcgcagcaaggcucau

SEQ ID NO: 13096 - RNA, 22 nt, Artificial Sequence
  GATA2 Guide RNA
uaccugaacaggaaugagccuu

SEQ ID NO: 13097 - RNA, 22 nt, Artificial Sequence
  GATA2 Guide RNA
ucauuccuguucagguaaaggc

SEQ ID NO: 13098 - RNA, 22 nt, Artificial Sequence
  GATA2 Guide RNA
ugaacaggaaugagccuugcug

SEQ ID NO: 13099 - RNA, 22 nt, Artificial Sequence
  GATA2 Guide RNA
ugagccuugcugcgcugcuuag

SEQ ID NO: 13100 - RNA, 22 nt, Artificial Sequence
  GATA2 Guide RNA
ugccuuuaccugaacaggaaug

SEQ ID NO: 13101 - RNA, 22 nt, Artificial Sequence
  GATA2 Guide RNA
uuaccugaacaggaaugagccu

SEQ ID NO: 13102 - RNA, 22 nt, Artificial Sequence
  GATA2 Guide RNA
uuuaccugaacaggaaugagcc

SEQ ID NO: 13103 - RNA, 20 nt, Artificial Sequence
  GATA2 Guide RNA
aacaggaacgaaccuugcug

SEQ ID NO: 13104 - RNA, 20 nt, Artificial Sequence
  GATA2 Guide RNA
aaccuugcugcgcugcuuag

SEQ ID NO: 13105 - RNA, 20 nt, Artificial Sequence
  GATA2 Guide RNA
aacgaaccuugcugcgcugc

SEQ ID NO: 13106 - RNA, 20 nt, Artificial Sequence
  GATA2 Guide RNA
aagcagcgcagcaagguucg

SEQ ID NO: 13107 - RNA, 20 nt, Artificial Sequence
  GATA2 Guide RNA
aagguucguuccuguucagg

SEQ ID NO: 13108 - RNA, 20 nt, Artificial Sequence
  GATA2 Guide RNA
acaggaacgaaccuugcugc

SEQ ID NO: 13109 - RNA, 20 nt, Artificial Sequence
  GATA2 Guide RNA
accccuaagcagcgcagcaa

SEQ ID NO: 13110 - RNA, 20 nt, Artificial Sequence
  GATA2 Guide RNA
accugaacaggaacgaaccu

SEQ ID NO: 13111 - RNA, 20 nt, Artificial Sequence
  GATA2 Guide RNA
accuugcugcgcugcuuagg

SEQ ID NO: 13112 - RNA, 20 nt, Artificial Sequence
  GATA2 Guide RNA
acgaaccuugcugcgcugcu

SEQ ID NO: 13113 - RNA, 20 nt, Artificial Sequence
  GATA2 Guide RNA
agcaagguucguuccuguuc

SEQ ID NO: 13114 - RNA, 20 nt, Artificial Sequence
  GATA2 Guide RNA
agcagcgcagcaagguucgu

SEQ ID NO: 13115 - RNA, 20 nt, Artificial Sequence
  GATA2 Guide RNA
agcgcagcaagguucguucc

SEQ ID NO: 13116 - RNA, 20 nt, Artificial Sequence
  GATA2 Guide RNA
aggaacgaaccuugcugcgc

SEQ ID NO: 13117 - RNA, 20 nt, Artificial Sequence
  GATA2 Guide RNA
agguucguuccuguucaggu

SEQ ID NO: 13118 - RNA, 20 nt, Artificial Sequence
  GATA2 Guide RNA
caagguucguuccuguucag

SEQ ID NO: 13119 - RNA, 20 nt, Artificial Sequence
  GATA2 Guide RNA
caccccuaagcagcgcagca

SEQ ID NO: 13120 - RNA, 20 nt, Artificial Sequence
  GATA2 Guide RNA
cagcaagguucguuccuguu

SEQ ID NO: 13121 - RNA, 20 nt, Artificial Sequence
  GATA2 Guide RNA
cagcgcagcaagguucguuc

SEQ ID NO: 13122 - RNA, 20 nt, Artificial Sequence
  GATA2 Guide RNA
caggaacgaaccuugcugcg

SEQ ID NO: 13123 - RNA, 20 nt, Artificial Sequence
  GATA2 Guide RNA
ccccuaagcagcgcagcaag

SEQ ID NO: 13124 - RNA, 20 nt, Artificial Sequence
  GATA2 Guide RNA
ccuaagcagcgcagcaaggu

SEQ ID NO: 13125 - RNA, 20 nt, Artificial Sequence
  GATA2 Guide RNA
ccugaacaggaacgaaccuu

SEQ ID NO: 13126 - RNA, 20 nt, Artificial Sequence
  GATA2 Guide RNA
ccuuuaccugaacaggaacg

SEQ ID NO: 13127 - RNA, 20 nt, Artificial Sequence
  GATA2 Guide RNA
cgaaccuugcugcgcugcuu

SEQ ID NO: 13128 - RNA, 20 nt, Artificial Sequence
  GATA2 Guide RNA
cgcagcaagguucguuccug

SEQ ID NO: 13129 - RNA, 20 nt, Artificial Sequence
  GATA2 Guide RNA
cuaagcagcgcagcaagguu

SEQ ID NO: 13130 - RNA, 20 nt, Artificial Sequence
  GATA2 Guide RNA
cugaacaggaacgaaccuug

SEQ ID NO: 13131 - RNA, 20 nt, Artificial Sequence
  GATA2 Guide RNA
cuuuaccugaacaggaacga

SEQ ID NO: 13132 - RNA, 20 nt, Artificial Sequence
  GATA2 Guide RNA
gaacaggaacgaaccuugcu

SEQ ID NO: 13133 - RNA, 20 nt, Artificial Sequence
  GATA2 Guide RNA
gaaccuugcugcgcugcuua

SEQ ID NO: 13134 - RNA, 20 nt, Artificial Sequence
  GATA2 Guide RNA
gaacgaaccuugcugcgcug

SEQ ID NO: 13135 - RNA, 20 nt, Artificial Sequence
  GATA2 Guide RNA
gcaagguucguuccuguuca

SEQ ID NO: 13136 - RNA, 20 nt, Artificial Sequence
  GATA2 Guide RNA
gcagcaagguucguuccugu

SEQ ID NO: 13137 - RNA, 20 nt, Artificial Sequence
  GATA2 Guide RNA
gcagcgcagcaagguucguu

SEQ ID NO: 13138 - RNA, 20 nt, Artificial Sequence
  GATA2 Guide RNA
gccuuuaccugaacaggaac

SEQ ID NO: 13139 - RNA, 20 nt, Artificial Sequence
  GATA2 Guide RNA
gcgcagcaagguucguuccu

SEQ ID NO: 13140 - RNA, 20 nt, Artificial Sequence
  GATA2 Guide RNA
ggaacgaaccuugcugcgcu

SEQ ID NO: 13141 - RNA, 20 nt, Artificial Sequence
  GATA2 Guide RNA
gguucguuccuguucaggua

SEQ ID NO: 13142 - RNA, 20 nt, Artificial Sequence
  GATA2 Guide RNA
guucguuccuguucagguaa

SEQ ID NO: 13143 - RNA, 20 nt, Artificial Sequence
  GATA2 Guide RNA
uaagcagcgcagcaagguuc

SEQ ID NO: 13144 - RNA, 20 nt, Artificial Sequence
  GATA2 Guide RNA
uaccugaacaggaacgaacc

SEQ ID NO: 13145 - RNA, 20 nt, Artificial Sequence
  GATA2 Guide RNA
ugaacaggaacgaaccuugc

SEQ ID NO: 13146 - RNA, 20 nt, Artificial Sequence
  GATA2 Guide RNA
uuaccugaacaggaacgaac

SEQ ID NO: 13147 - RNA, 20 nt, Artificial Sequence
  GATA2 Guide RNA
uuuaccugaacaggaacgaa

SEQ ID NO: 13148 - RNA, 21 nt, Artificial Sequence
  GATA2 Guide RNA
aacaggaacgaaccuugcugc

SEQ ID NO: 13149 - RNA, 21 nt, Artificial Sequence
  GATA2 Guide RNA
aaccuugcugcgcugcuuagg

SEQ ID NO: 13150 - RNA, 21 nt, Artificial Sequence
  GATA2 Guide RNA
aacgaaccuugcugcgcugcu

SEQ ID NO: 13151 - RNA, 21 nt, Artificial Sequence
  GATA2 Guide RNA
aagcagcgcagcaagguucgu

SEQ ID NO: 13152 - RNA, 21 nt, Artificial Sequence
  GATA2 Guide RNA
aagguucguuccuguucaggu

SEQ ID NO: 13153 - RNA, 21 nt, Artificial Sequence
  GATA2 Guide RNA
acaggaacgaaccuugcugcg

SEQ ID NO: 13154 - RNA, 21 nt, Artificial Sequence
  GATA2 Guide RNA
accccuaagcagcgcagcaag

SEQ ID NO: 13155 - RNA, 21 nt, Artificial Sequence
  GATA2 Guide RNA
accugaacaggaacgaaccuu

SEQ ID NO: 13156 - RNA, 21 nt, Artificial Sequence
  GATA2 Guide RNA
accuugcugcgcugcuuaggg

SEQ ID NO: 13157 - RNA, 21 nt, Artificial Sequence
  GATA2 Guide RNA
acgaaccuugcugcgcugcuu

SEQ ID NO: 13158 - RNA, 21 nt, Artificial Sequence
  GATA2 Guide RNA
agcaagguucguuccuguuca

SEQ ID NO: 13159 - RNA, 21 nt, Artificial Sequence
  GATA2 Guide RNA
agcagcgcagcaagguucguu

SEQ ID NO: 13160 - RNA, 21 nt, Artificial Sequence
  GATA2 Guide RNA
agcgcagcaagguucguuccu

SEQ ID NO: 13161 - RNA, 21 nt, Artificial Sequence
  GATA2 Guide RNA
aggaacgaaccuugcugcgcu

SEQ ID NO: 13162 - RNA, 21 nt, Artificial Sequence
  GATA2 Guide RNA
agguucguuccuguucaggua

SEQ ID NO: 13163 - RNA, 21 nt, Artificial Sequence
  GATA2 Guide RNA
caagguucguuccuguucagg

SEQ ID NO: 13164 - RNA, 21 nt, Artificial Sequence
  GATA2 Guide RNA
caccccuaagcagcgcagcaa

SEQ ID NO: 13165 - RNA, 21 nt, Artificial Sequence
  GATA2 Guide RNA
cagcaagguucguuccuguuc

SEQ ID NO: 13166 - RNA, 21 nt, Artificial Sequence
  GATA2 Guide RNA
cagcgcagcaagguucguucc

SEQ ID NO: 13167 - RNA, 21 nt, Artificial Sequence
  GATA2 Guide RNA
caggaacgaaccuugcugcgc

SEQ ID NO: 13168 - RNA, 21 nt, Artificial Sequence
  GATA2 Guide RNA
cccuaagcagcgcagcaaggu

SEQ ID NO: 13169 - RNA, 21 nt, Artificial Sequence
  GATA2 Guide RNA
ccuaagcagcgcagcaagguu

SEQ ID NO: 13170 - RNA, 21 nt, Artificial Sequence
  GATA2 Guide RNA
ccugaacaggaacgaaccuug

SEQ ID NO: 13171 - RNA, 21 nt, Artificial Sequence
  GATA2 Guide RNA
ccuuuaccugaacaggaacga

SEQ ID NO: 13172 - RNA, 21 nt, Artificial Sequence
  GATA2 Guide RNA
cgaaccuugcugcgcugcuua

SEQ ID NO: 13173 - RNA, 21 nt, Artificial Sequence
  GATA2 Guide RNA
cgcagcaagguucguuccugu

SEQ ID NO: 13174 - RNA, 21 nt, Artificial Sequence
  GATA2 Guide RNA
cuaagcagcgcagcaagguuc

SEQ ID NO: 13175 - RNA, 21 nt, Artificial Sequence
  GATA2 Guide RNA
cugaacaggaacgaaccuugc

SEQ ID NO: 13176 - RNA, 21 nt, Artificial Sequence
  GATA2 Guide RNA
cuuuaccugaacaggaacgaa

SEQ ID NO: 13177 - RNA, 21 nt, Artificial Sequence
  GATA2 Guide RNA
gaacaggaacgaaccuugcug

SEQ ID NO: 13178 - RNA, 21 nt, Artificial Sequence
  GATA2 Guide RNA
gaaccuugcugcgcugcuuag

SEQ ID NO: 13179 - RNA, 21 nt, Artificial Sequence
  GATA2 Guide RNA
gaacgaaccuugcugcgcugc

SEQ ID NO: 13180 - RNA, 21 nt, Artificial Sequence
  GATA2 Guide RNA
gcaagguucguuccuguucag

SEQ ID NO: 13181 - RNA, 21 nt, Artificial Sequence
  GATA2 Guide RNA
gcagcaagguucguuccuguu

SEQ ID NO: 13182 - RNA, 21 nt, Artificial Sequence
  GATA2 Guide RNA
gcagcgcagcaagguucguuc

SEQ ID NO: 13183 - RNA, 21 nt, Artificial Sequence
  GATA2 Guide RNA
gccuuuaccugaacaggaacg

SEQ ID NO: 13184 - RNA, 21 nt, Artificial Sequence
  GATA2 Guide RNA
gcgcagcaagguucguuccug

SEQ ID NO: 13185 - RNA, 21 nt, Artificial Sequence
  GATA2 Guide RNA
ggaacgaaccuugcugcgcug

SEQ ID NO: 13186 - RNA, 21 nt, Artificial Sequence
  GATA2 Guide RNA
gguucguuccuguucagguaa

SEQ ID NO: 13187 - RNA, 21 nt, Artificial Sequence
  GATA2 Guide RNA
guucguuccuguucagguaaa

SEQ ID NO: 13188 - RNA, 21 nt, Artificial Sequence
  GATA2 Guide RNA
uaagcagcgcagcaagguucg

SEQ ID NO: 13189 - RNA, 21 nt, Artificial Sequence
  GATA2 Guide RNA
uaccugaacaggaacgaaccu

SEQ ID NO: 13190 - RNA, 21 nt, Artificial Sequence
  GATA2 Guide RNA
ucaccccuaagcagcgcagca

SEQ ID NO: 13191 - RNA, 21 nt, Artificial Sequence
  GATA2 Guide RNA
ugaacaggaacgaaccuugcu

SEQ ID NO: 13192 - RNA, 21 nt, Artificial Sequence
  GATA2 Guide RNA
ugccuuuaccugaacaggaac

SEQ ID NO: 13193 - RNA, 21 nt, Artificial Sequence
  GATA2 Guide RNA
uuaccugaacaggaacgaacc

SEQ ID NO: 13194 - RNA, 21 nt, Artificial Sequence
  GATA2 Guide RNA
uuuaccugaacaggaacgaac

SEQ ID NO: 13195 - RNA, 22 nt, Artificial Sequence
  GATA2 Guide RNA
aacaggaacgaaccuugcugcg

SEQ ID NO: 13196 - RNA, 22 nt, Artificial Sequence
  GATA2 Guide RNA
aaccuugcugcgcugcuuaggg

SEQ ID NO: 13197 - RNA, 22 nt, Artificial Sequence
  GATA2 Guide RNA
aacgaaccuugcugcgcugcuu

SEQ ID NO: 13198 - RNA, 22 nt, Artificial Sequence
  GATA2 Guide RNA
aagcagcgcagcaagguucguu

SEQ ID NO: 13199 - RNA, 22 nt, Artificial Sequence
  GATA2 Guide RNA
aagguucguuccuguucaggua

SEQ ID NO: 13200 - RNA, 22 nt, Artificial Sequence
  GATA2 Guide RNA
acaggaacgaaccuugcugcgc

SEQ ID NO: 13201 - RNA, 22 nt, Artificial Sequence
  GATA2 Guide RNA
accugaacaggaacgaaccuug

SEQ ID NO: 13202 - RNA, 22 nt, Artificial Sequence
  GATA2 Guide RNA
accuugcugcgcugcuuagggg

SEQ ID NO: 13203 - RNA, 22 nt, Artificial Sequence
  GATA2 Guide RNA
acgaaccuugcugcgcugcuua

SEQ ID NO: 13204 - RNA, 22 nt, Artificial Sequence
  GATA2 Guide RNA
agcaagguucguuccuguucag

SEQ ID NO: 13205 - RNA, 22 nt, Artificial Sequence
  GATA2 Guide RNA
agcagcgcagcaagguucguuc

SEQ ID NO: 13206 - RNA, 22 nt, Artificial Sequence
  GATA2 Guide RNA
agcgcagcaagguucguuccug

SEQ ID NO: 13207 - RNA, 22 nt, Artificial Sequence
  GATA2 Guide RNA
aggaacgaaccuugcugcgcug

SEQ ID NO: 13208 - RNA, 22 nt, Artificial Sequence
  GATA2 Guide RNA
agguucguuccuguucagguaa

SEQ ID NO: 13209 - RNA, 22 nt, Artificial Sequence
  GATA2 Guide RNA
caagguucguuccuguucaggu

SEQ ID NO: 13210 - RNA, 22 nt, Artificial Sequence
  GATA2 Guide RNA
caccccuaagcagcgcagcaag

SEQ ID NO: 13211 - RNA, 22 nt, Artificial Sequence
  GATA2 Guide RNA
cagcaagguucguuccuguuca

SEQ ID NO: 13212 - RNA, 22 nt, Artificial Sequence
  GATA2 Guide RNA
cagcgcagcaagguucguuccu

SEQ ID NO: 13213 - RNA, 22 nt, Artificial Sequence
  GATA2 Guide RNA
caggaacgaaccuugcugcgcu

SEQ ID NO: 13214 - RNA, 22 nt, Artificial Sequence
  GATA2 Guide RNA
ccccuaagcagcgcagcaaggu

SEQ ID NO: 13215 - RNA, 22 nt, Artificial Sequence
  GATA2 Guide RNA
cccuaagcagcgcagcaagguu

SEQ ID NO: 13216 - RNA, 22 nt, Artificial Sequence
  GATA2 Guide RNA
ccuaagcagcgcagcaagguuc

SEQ ID NO: 13217 - RNA, 22 nt, Artificial Sequence
  GATA2 Guide RNA
ccugaacaggaacgaaccuugc

SEQ ID NO: 13218 - RNA, 22 nt, Artificial Sequence
  GATA2 Guide RNA
ccuuuaccugaacaggaacgaa

SEQ ID NO: 13219 - RNA, 22 nt, Artificial Sequence
  GATA2 Guide RNA
cgaaccuugcugcgcugcuuag

SEQ ID NO: 13220 - RNA, 22 nt, Artificial Sequence
  GATA2 Guide RNA
cgcagcaagguucguuccuguu

SEQ ID NO: 13221 - RNA, 22 nt, Artificial Sequence
  GATA2 Guide RNA
cuaagcagcgcagcaagguucg

SEQ ID NO: 13222 - RNA, 22 nt, Artificial Sequence
  GATA2 Guide RNA
cugaacaggaacgaaccuugcu

SEQ ID NO: 13223 - RNA, 22 nt, Artificial Sequence
  GATA2 Guide RNA
cugccuuuaccugaacaggaac

SEQ ID NO: 13224 - RNA, 22 nt, Artificial Sequence
  GATA2 Guide RNA
cuuuaccugaacaggaacgaac

SEQ ID NO: 13225 - RNA, 22 nt, Artificial Sequence
  GATA2 Guide RNA
gaacaggaacgaaccuugcugc

SEQ ID NO: 13226 - RNA, 22 nt, Artificial Sequence
  GATA2 Guide RNA
gaaccuugcugcgcugcuuagg

SEQ ID NO: 13227 - RNA, 22 nt, Artificial Sequence
  GATA2 Guide RNA
gaacgaaccuugcugcgcugcu

SEQ ID NO: 13228 - RNA, 22 nt, Artificial Sequence
  GATA2 Guide RNA
gcaagguucguuccuguucagg

SEQ ID NO: 13229 - RNA, 22 nt, Artificial Sequence
  GATA2 Guide RNA
gcagcaagguucguuccuguuc

SEQ ID NO: 13230 - RNA, 22 nt, Artificial Sequence
  GATA2 Guide RNA
gcagcgcagcaagguucguucc

SEQ ID NO: 13231 - RNA, 22 nt, Artificial Sequence
  GATA2 Guide RNA
gccuuuaccugaacaggaacga

SEQ ID NO: 13232 - RNA, 22 nt, Artificial Sequence
  GATA2 Guide RNA
gcgcagcaagguucguuccugu

SEQ ID NO: 13233 - RNA, 22 nt, Artificial Sequence
  GATA2 Guide RNA
ggaacgaaccuugcugcgcugc

SEQ ID NO: 13234 - RNA, 22 nt, Artificial Sequence
  GATA2 Guide RNA
gguucguuccuguucagguaaa

SEQ ID NO: 13235 - RNA, 22 nt, Artificial Sequence
  GATA2 Guide RNA
guucguuccuguucagguaaag

SEQ ID NO: 13236 - RNA, 22 nt, Artificial Sequence
  GATA2 Guide RNA
uaagcagcgcagcaagguucgu

SEQ ID NO: 13237 - RNA, 22 nt, Artificial Sequence
  GATA2 Guide RNA
uaccugaacaggaacgaaccuu

SEQ ID NO: 13238 - RNA, 22 nt, Artificial Sequence
  GATA2 Guide RNA
ucaccccuaagcagcgcagcaa

SEQ ID NO: 13239 - RNA, 22 nt, Artificial Sequence
  GATA2 Guide RNA
ugaacaggaacgaaccuugcug

SEQ ID NO: 13240 - RNA, 22 nt, Artificial Sequence
  GATA2 Guide RNA
ugccuuuaccugaacaggaacg

SEQ ID NO: 13241 - RNA, 22 nt, Artificial Sequence
  GATA2 Guide RNA
uuaccugaacaggaacgaaccu

SEQ ID NO: 13242 - RNA, 22 nt, Artificial Sequence
  GATA2 Guide RNA
uucaccccuaagcagcgcagca

SEQ ID NO: 13243 - RNA, 22 nt, Artificial Sequence
  GATA2 Guide RNA
uuuaccugaacaggaacgaacc

SEQ ID NO: 13244 - RNA, 20 nt, Artificial Sequence
  GATA2 Guide RNA
aacaggaacgagccuuacug

SEQ ID NO: 13245 - RNA, 20 nt, Artificial Sequence
  GATA2 Guide RNA
aacgagccuuacugcgcugc

SEQ ID NO: 13246 - RNA, 20 nt, Artificial Sequence
  GATA2 Guide RNA
aagcagcgcaguaaggcucg

SEQ ID NO: 13247 - RNA, 20 nt, Artificial Sequence
  GATA2 Guide RNA
acaggaacgagccuuacugc

SEQ ID NO: 13248 - RNA, 20 nt, Artificial Sequence
  GATA2 Guide RNA
accccuaagcagcgcaguaa

SEQ ID NO: 13249 - RNA, 20 nt, Artificial Sequence
  GATA2 Guide RNA
accugaacaggaacgagccu

SEQ ID NO: 13250 - RNA, 20 nt, Artificial Sequence
  GATA2 Guide RNA
acgagccuuacugcgcugcu

SEQ ID NO: 13251 - RNA, 20 nt, Artificial Sequence
  GATA2 Guide RNA
acugcgcugcuuagggguga

SEQ ID NO: 13252 - RNA, 20 nt, Artificial Sequence
  GATA2 Guide RNA
agcagcgcaguaaggcucgu

SEQ ID NO: 13253 - RNA, 20 nt, Artificial Sequence
  GATA2 Guide RNA
agccuuacugcgcugcuuag

SEQ ID NO: 13254 - RNA, 20 nt, Artificial Sequence
  GATA2 Guide RNA
agcgcaguaaggcucguucc

SEQ ID NO: 13255 - RNA, 20 nt, Artificial Sequence
  GATA2 Guide RNA
agcuucaccccuaagcagcg

SEQ ID NO: 13256 - RNA, 20 nt, Artificial Sequence
  GATA2 Guide RNA
aggaacgagccuuacugcgc

SEQ ID NO: 13257 - RNA, 20 nt, Artificial Sequence
  GATA2 Guide RNA
aguaaggcucguuccuguuc

SEQ ID NO: 13258 - RNA, 20 nt, Artificial Sequence
  GATA2 Guide RNA
caccccuaagcagcgcagua

SEQ ID NO: 13259 - RNA, 20 nt, Artificial Sequence
  GATA2 Guide RNA
cagcgcaguaaggcucguuc

SEQ ID NO: 13260 - RNA, 20 nt, Artificial Sequence
  GATA2 Guide RNA
caggaacgagccuuacugcg

SEQ ID NO: 13261 - RNA, 20 nt, Artificial Sequence
  GATA2 Guide RNA
caguaaggcucguuccuguu

SEQ ID NO: 13262 - RNA, 20 nt, Artificial Sequence
  GATA2 Guide RNA
ccccuaagcagcgcaguaag

SEQ ID NO: 13263 - RNA, 20 nt, Artificial Sequence
  GATA2 Guide RNA
cccuaagcagcgcaguaagg

SEQ ID NO: 13264 - RNA, 20 nt, Artificial Sequence
  GATA2 Guide RNA
ccuaagcagcgcaguaaggc

SEQ ID NO: 13265 - RNA, 20 nt, Artificial Sequence
  GATA2 Guide RNA
ccugaacaggaacgagccuu

SEQ ID NO: 13266 - RNA, 20 nt, Artificial Sequence
  GATA2 Guide RNA
ccuuacugcgcugcuuaggg

SEQ ID NO: 13267 - RNA, 20 nt, Artificial Sequence
  GATA2 Guide RNA
cgagccuuacugcgcugcuu

SEQ ID NO: 13268 - RNA, 20 nt, Artificial Sequence
  GATA2 Guide RNA
cgcaguaaggcucguuccug

SEQ ID NO: 13269 - RNA, 20 nt, Artificial Sequence
  GATA2 Guide RNA
cuaagcagcgcaguaaggcu

SEQ ID NO: 13270 - RNA, 20 nt, Artificial Sequence
  GATA2 Guide RNA
cugaacaggaacgagccuua

SEQ ID NO: 13271 - RNA, 20 nt, Artificial Sequence
  GATA2 Guide RNA
cuuacugcgcugcuuagggg

SEQ ID NO: 13272 - RNA, 20 nt, Artificial Sequence
  GATA2 Guide RNA
cuucaccccuaagcagcgca

SEQ ID NO: 13273 - RNA, 20 nt, Artificial Sequence
  GATA2 Guide RNA
gaacaggaacgagccuuacu

SEQ ID NO: 13274 - RNA, 20 nt, Artificial Sequence
  GATA2 Guide RNA
gaacgagccuuacugcgcug

SEQ ID NO: 13275 - RNA, 20 nt, Artificial Sequence
  GATA2 Guide RNA
gagccuuacugcgcugcuua

SEQ ID NO: 13276 - RNA, 20 nt, Artificial Sequence
  GATA2 Guide RNA
gcagcgcaguaaggcucguu

SEQ ID NO: 13277 - RNA, 20 nt, Artificial Sequence
  GATA2 Guide RNA
gcaguaaggcucguuccugu

SEQ ID NO: 13278 - RNA, 20 nt, Artificial Sequence
  GATA2 Guide RNA
gccuuacugcgcugcuuagg

SEQ ID NO: 13279 - RNA, 20 nt, Artificial Sequence
  GATA2 Guide RNA
gcgcaguaaggcucguuccu

SEQ ID NO: 13280 - RNA, 20 nt, Artificial Sequence
  GATA2 Guide RNA
gcuucaccccuaagcagcgc

SEQ ID NO: 13281 - RNA, 20 nt, Artificial Sequence
  GATA2 Guide RNA
ggaacgagccuuacugcgcu

SEQ ID NO: 13282 - RNA, 20 nt, Artificial Sequence
  GATA2 Guide RNA
guaaggcucguuccuguuca

SEQ ID NO: 13283 - RNA, 20 nt, Artificial Sequence
  GATA2 Guide RNA
uaagcagcgcaguaaggcuc

SEQ ID NO: 13284 - RNA, 20 nt, Artificial Sequence
  GATA2 Guide RNA
uaccugaacaggaacgagcc

SEQ ID NO: 13285 - RNA, 20 nt, Artificial Sequence
  GATA2 Guide RNA
uacugcgcugcuuaggggug

SEQ ID NO: 13286 - RNA, 20 nt, Artificial Sequence
  GATA2 Guide RNA
ucaccccuaagcagcgcagu

SEQ ID NO: 13287 - RNA, 20 nt, Artificial Sequence
  GATA2 Guide RNA
ugaacaggaacgagccuuac

SEQ ID NO: 13288 - RNA, 20 nt, Artificial Sequence
  GATA2 Guide RNA
uuacugcgcugcuuaggggu

SEQ ID NO: 13289 - RNA, 20 nt, Artificial Sequence
  GATA2 Guide RNA
uucaccccuaagcagcgcag

SEQ ID NO: 13290 - RNA, 21 nt, Artificial Sequence
  GATA2 Guide RNA
aacaggaacgagccuuacugc

SEQ ID NO: 13291 - RNA, 21 nt, Artificial Sequence
  GATA2 Guide RNA
aacgagccuuacugcgcugcu

SEQ ID NO: 13292 - RNA, 21 nt, Artificial Sequence
  GATA2 Guide RNA
aagcagcgcaguaaggcucgu

SEQ ID NO: 13293 - RNA, 21 nt, Artificial Sequence
  GATA2 Guide RNA
acaggaacgagccuuacugcg

SEQ ID NO: 13294 - RNA, 21 nt, Artificial Sequence
  GATA2 Guide RNA
accccuaagcagcgcaguaag

SEQ ID NO: 13295 - RNA, 21 nt, Artificial Sequence
  GATA2 Guide RNA
accugaacaggaacgagccuu

SEQ ID NO: 13296 - RNA, 21 nt, Artificial Sequence
  GATA2 Guide RNA
acgagccuuacugcgcugcuu

SEQ ID NO: 13297 - RNA, 21 nt, Artificial Sequence
  GATA2 Guide RNA
acugcgcugcuuaggggugaa

SEQ ID NO: 13298 - RNA, 21 nt, Artificial Sequence
  GATA2 Guide RNA
agcagcgcaguaaggcucguu

SEQ ID NO: 13299 - RNA, 21 nt, Artificial Sequence
  GATA2 Guide RNA
agccuuacugcgcugcuuagg

SEQ ID NO: 13300 - RNA, 21 nt, Artificial Sequence
  GATA2 Guide RNA
agcgcaguaaggcucguuccu

SEQ ID NO: 13301 - RNA, 21 nt, Artificial Sequence
  GATA2 Guide RNA
agcuucaccccuaagcagcgc

SEQ ID NO: 13302 - RNA, 21 nt, Artificial Sequence
  GATA2 Guide RNA
aggaacgagccuuacugcgcu

SEQ ID NO: 13303 - RNA, 21 nt, Artificial Sequence
  GATA2 Guide RNA
aguaaggcucguuccuguuca

SEQ ID NO: 13304 - RNA, 21 nt, Artificial Sequence
  GATA2 Guide RNA
caccccuaagcagcgcaguaa

SEQ ID NO: 13305 - RNA, 21 nt, Artificial Sequence
  GATA2 Guide RNA
cagcgcaguaaggcucguucc

SEQ ID NO: 13306 - RNA, 21 nt, Artificial Sequence
  GATA2 Guide RNA
cagcuucaccccuaagcagcg

SEQ ID NO: 13307 - RNA, 21 nt, Artificial Sequence
  GATA2 Guide RNA
caggaacgagccuuacugcgc

SEQ ID NO: 13308 - RNA, 21 nt, Artificial Sequence
  GATA2 Guide RNA
caguaaggcucguuccuguuc

SEQ ID NO: 13309 - RNA, 21 nt, Artificial Sequence
  GATA2 Guide RNA
ccccuaagcagcgcaguaagg

SEQ ID NO: 13310 - RNA, 21 nt, Artificial Sequence
  GATA2 Guide RNA
cccuaagcagcgcaguaaggc

SEQ ID NO: 13311 - RNA, 21 nt, Artificial Sequence
  GATA2 Guide RNA
ccuaagcagcgcaguaaggcu

SEQ ID NO: 13312 - RNA, 21 nt, Artificial Sequence
  GATA2 Guide RNA
ccugaacaggaacgagccuua

SEQ ID NO: 13313 - RNA, 21 nt, Artificial Sequence
  GATA2 Guide RNA
ccuuacugcgcugcuuagggg

SEQ ID NO: 13314 - RNA, 21 nt, Artificial Sequence
  GATA2 Guide RNA
cgagccuuacugcgcugcuua

SEQ ID NO: 13315 - RNA, 21 nt, Artificial Sequence
  GATA2 Guide RNA
cgcaguaaggcucguuccugu

SEQ ID NO: 13316 - RNA, 21 nt, Artificial Sequence
  GATA2 Guide RNA
cuaagcagcgcaguaaggcuc

SEQ ID NO: 13317 - RNA, 21 nt, Artificial Sequence
  GATA2 Guide RNA
cugaacaggaacgagccuuac

SEQ ID NO: 13318 - RNA, 21 nt, Artificial Sequence
  GATA2 Guide RNA
cuuacugcgcugcuuaggggu

SEQ ID NO: 13319 - RNA, 21 nt, Artificial Sequence
  GATA2 Guide RNA
cuucaccccuaagcagcgcag

SEQ ID NO: 13320 - RNA, 21 nt, Artificial Sequence
  GATA2 Guide RNA
gaacaggaacgagccuuacug

SEQ ID NO: 13321 - RNA, 21 nt, Artificial Sequence
  GATA2 Guide RNA
gaacgagccuuacugcgcugc

SEQ ID NO: 13322 - RNA, 21 nt, Artificial Sequence
  GATA2 Guide RNA
gagccuuacugcgcugcuuag

SEQ ID NO: 13323 - RNA, 21 nt, Artificial Sequence
  GATA2 Guide RNA
gcagcgcaguaaggcucguuc

SEQ ID NO: 13324 - RNA, 21 nt, Artificial Sequence
  GATA2 Guide RNA
gcaguaaggcucguuccuguu

SEQ ID NO: 13325 - RNA, 21 nt, Artificial Sequence
  GATA2 Guide RNA
gccuuacugcgcugcuuaggg

SEQ ID NO: 13326 - RNA, 21 nt, Artificial Sequence
  GATA2 Guide RNA
gcgcaguaaggcucguuccug

SEQ ID NO: 13327 - RNA, 21 nt, Artificial Sequence
  GATA2 Guide RNA
gcuucaccccuaagcagcgca

SEQ ID NO: 13328 - RNA, 21 nt, Artificial Sequence
  GATA2 Guide RNA
ggaacgagccuuacugcgcug

SEQ ID NO: 13329 - RNA, 21 nt, Artificial Sequence
  GATA2 Guide RNA
guaaggcucguuccuguucag

SEQ ID NO: 13330 - RNA, 21 nt, Artificial Sequence
  GATA2 Guide RNA
uaagcagcgcaguaaggcucg

SEQ ID NO: 13331 - RNA, 21 nt, Artificial Sequence
  GATA2 Guide RNA
uaccugaacaggaacgagccu

SEQ ID NO: 13332 - RNA, 21 nt, Artificial Sequence
  GATA2 Guide RNA
uacugcgcugcuuagggguga

SEQ ID NO: 13333 - RNA, 21 nt, Artificial Sequence
  GATA2 Guide RNA
ucaccccuaagcagcgcagua

SEQ ID NO: 13334 - RNA, 21 nt, Artificial Sequence
  GATA2 Guide RNA
ugaacaggaacgagccuuacu

SEQ ID NO: 13335 - RNA, 21 nt, Artificial Sequence
  GATA2 Guide RNA
uuaccugaacaggaacgagcc

SEQ ID NO: 13336 - RNA, 21 nt, Artificial Sequence
  GATA2 Guide RNA
uuacugcgcugcuuaggggug

SEQ ID NO: 13337 - RNA, 21 nt, Artificial Sequence
  GATA2 Guide RNA
uucaccccuaagcagcgcagu

SEQ ID NO: 13338 - RNA, 22 nt, Artificial Sequence
  GATA2 Guide RNA
aacaggaacgagccuuacugcg

SEQ ID NO: 13339 - RNA, 22 nt, Artificial Sequence
  GATA2 Guide RNA
aacgagccuuacugcgcugcuu

SEQ ID NO: 13340 - RNA, 22 nt, Artificial Sequence
  GATA2 Guide RNA
aagcagcgcaguaaggcucguu

SEQ ID NO: 13341 - RNA, 22 nt, Artificial Sequence
  GATA2 Guide RNA
acaggaacgagccuuacugcgc

SEQ ID NO: 13342 - RNA, 22 nt, Artificial Sequence
  GATA2 Guide RNA
accccuaagcagcgcaguaagg

SEQ ID NO: 13343 - RNA, 22 nt, Artificial Sequence
  GATA2 Guide RNA
accugaacaggaacgagccuua

SEQ ID NO: 13344 - RNA, 22 nt, Artificial Sequence
  GATA2 Guide RNA
acgagccuuacugcgcugcuua

SEQ ID NO: 13345 - RNA, 22 nt, Artificial Sequence
  GATA2 Guide RNA
acugcgcugcuuaggggugaag

SEQ ID NO: 13346 - RNA, 22 nt, Artificial Sequence
  GATA2 Guide RNA
agcagcgcaguaaggcucguuc

SEQ ID NO: 13347 - RNA, 22 nt, Artificial Sequence
  GATA2 Guide RNA
agccuuacugcgcugcuuaggg

SEQ ID NO: 13348 - RNA, 22 nt, Artificial Sequence
  GATA2 Guide RNA
agcgcaguaaggcucguuccug

SEQ ID NO: 13349 - RNA, 22 nt, Artificial Sequence
  GATA2 Guide RNA
agcuucaccccuaagcagcgca

SEQ ID NO: 13350 - RNA, 22 nt, Artificial Sequence
  GATA2 Guide RNA
aggaacgagccuuacugcgcug

SEQ ID NO: 13351 - RNA, 22 nt, Artificial Sequence
  GATA2 Guide RNA
aguaaggcucguuccuguucag

SEQ ID NO: 13352 - RNA, 22 nt, Artificial Sequence
  GATA2 Guide RNA
caccccuaagcagcgcaguaag

SEQ ID NO: 13353 - RNA, 22 nt, Artificial Sequence
  GATA2 Guide RNA
cagcgcaguaaggcucguuccu

SEQ ID NO: 13354 - RNA, 22 nt, Artificial Sequence
  GATA2 Guide RNA
cagcuucaccccuaagcagcgc

SEQ ID NO: 13355 - RNA, 22 nt, Artificial Sequence
  GATA2 Guide RNA
caggaacgagccuuacugcgcu

SEQ ID NO: 13356 - RNA, 22 nt, Artificial Sequence
  GATA2 Guide RNA
caguaaggcucguuccuguuca

SEQ ID NO: 13357 - RNA, 22 nt, Artificial Sequence
  GATA2 Guide RNA
ccagcuucaccccuaagcagcg

SEQ ID NO: 13358 - RNA, 22 nt, Artificial Sequence
  GATA2 Guide RNA
ccccuaagcagcgcaguaaggc

SEQ ID NO: 13359 - RNA, 22 nt, Artificial Sequence
  GATA2 Guide RNA
cccuaagcagcgcaguaaggcu

SEQ ID NO: 13360 - RNA, 22 nt, Artificial Sequence
  GATA2 Guide RNA
ccuaagcagcgcaguaaggcuc

SEQ ID NO: 13361 - RNA, 22 nt, Artificial Sequence
  GATA2 Guide RNA
ccugaacaggaacgagccuuac

SEQ ID NO: 13362 - RNA, 22 nt, Artificial Sequence
  GATA2 Guide RNA
ccuuacugcgcugcuuaggggu

SEQ ID NO: 13363 - RNA, 22 nt, Artificial Sequence
  GATA2 Guide RNA
cgagccuuacugcgcugcuuag

SEQ ID NO: 13364 - RNA, 22 nt, Artificial Sequence
  GATA2 Guide RNA
cgcaguaaggcucguuccuguu

SEQ ID NO: 13365 - RNA, 22 nt, Artificial Sequence
  GATA2 Guide RNA
cuaagcagcgcaguaaggcucg

SEQ ID NO: 13366 - RNA, 22 nt, Artificial Sequence
  GATA2 Guide RNA
cugaacaggaacgagccuuacu

SEQ ID NO: 13367 - RNA, 22 nt, Artificial Sequence
  GATA2 Guide RNA
cuuacugcgcugcuuaggggug

SEQ ID NO: 13368 - RNA, 22 nt, Artificial Sequence
  GATA2 Guide RNA
cuucaccccuaagcagcgcagu

SEQ ID NO: 13369 - RNA, 22 nt, Artificial Sequence
  GATA2 Guide RNA
gaacaggaacgagccuuacugc

SEQ ID NO: 13370 - RNA, 22 nt, Artificial Sequence
  GATA2 Guide RNA
gaacgagccuuacugcgcugcu

SEQ ID NO: 13371 - RNA, 22 nt, Artificial Sequence
  GATA2 Guide RNA
gagccuuacugcgcugcuuagg

SEQ ID NO: 13372 - RNA, 22 nt, Artificial Sequence
  GATA2 Guide RNA
gcagcgcaguaaggcucguucc

SEQ ID NO: 13373 - RNA, 22 nt, Artificial Sequence
  GATA2 Guide RNA
gcaguaaggcucguuccuguuc

SEQ ID NO: 13374 - RNA, 22 nt, Artificial Sequence
  GATA2 Guide RNA
gccuuacugcgcugcuuagggg

SEQ ID NO: 13375 - RNA, 22 nt, Artificial Sequence
  GATA2 Guide RNA
gcgcaguaaggcucguuccugu

SEQ ID NO: 13376 - RNA, 22 nt, Artificial Sequence
  GATA2 Guide RNA
gcuucaccccuaagcagcgcag

SEQ ID NO: 13377 - RNA, 22 nt, Artificial Sequence
  GATA2 Guide RNA
ggaacgagccuuacugcgcugc

SEQ ID NO: 13378 - RNA, 22 nt, Artificial Sequence
  GATA2 Guide RNA
guaaggcucguuccuguucagg

SEQ ID NO: 13379 - RNA, 22 nt, Artificial Sequence
  GATA2 Guide RNA
uaagcagcgcaguaaggcucgu

SEQ ID NO: 13380 - RNA, 22 nt, Artificial Sequence
  GATA2 Guide RNA
uaccugaacaggaacgagccuu

SEQ ID NO: 13381 - RNA, 22 nt, Artificial Sequence
  GATA2 Guide RNA
uacugcgcugcuuaggggugaa

SEQ ID NO: 13382 - RNA, 22 nt, Artificial Sequence
  GATA2 Guide RNA
ucaccccuaagcagcgcaguaa

SEQ ID NO: 13383 - RNA, 22 nt, Artificial Sequence
  GATA2 Guide RNA
ugaacaggaacgagccuuacug

SEQ ID NO: 13384 - RNA, 22 nt, Artificial Sequence
  GATA2 Guide RNA
uuaccugaacaggaacgagccu

SEQ ID NO: 13385 - RNA, 22 nt, Artificial Sequence
  GATA2 Guide RNA
uuacugcgcugcuuagggguga

SEQ ID NO: 13386 - RNA, 22 nt, Artificial Sequence
  GATA2 Guide RNA
uucaccccuaagcagcgcagua

SEQ ID NO: 13387 - RNA, 22 nt, Artificial Sequence
  GATA2 Guide RNA
uuuaccugaacaggaacgagcc

SEQ ID NO: 13388 - RNA, 20 nt, Artificial Sequence
  GATA2 Guide RNA
aacaggaacgagccuugcug

SEQ ID NO: 13389 - RNA, 20 nt, Artificial Sequence
  GATA2 Guide RNA
aacgagccuugcugugcugc

SEQ ID NO: 13390 - RNA, 20 nt, Artificial Sequence
  GATA2 Guide RNA
aagcagcacagcaaggcucg

SEQ ID NO: 13391 - RNA, 20 nt, Artificial Sequence
  GATA2 Guide RNA
acaggaacgagccuugcugu

SEQ ID NO: 13392 - RNA, 20 nt, Artificial Sequence
  GATA2 Guide RNA
accccuaagcagcacagcaa

SEQ ID NO: 13393 - RNA, 20 nt, Artificial Sequence
  GATA2 Guide RNA
acgagccuugcugugcugcu

SEQ ID NO: 13394 - RNA, 20 nt, Artificial Sequence
  GATA2 Guide RNA
agcacagcaaggcucguucc

SEQ ID NO: 13395 - RNA, 20 nt, Artificial Sequence
  GATA2 Guide RNA
agcagcacagcaaggcucgu

SEQ ID NO: 13396 - RNA, 20 nt, Artificial Sequence
  GATA2 Guide RNA
agccuugcugugcugcuuag

SEQ ID NO: 13397 - RNA, 20 nt, Artificial Sequence
  GATA2 Guide RNA
agcuucaccccuaagcagca

SEQ ID NO: 13398 - RNA, 20 nt, Artificial Sequence
  GATA2 Guide RNA
aggaacgagccuugcugugc

SEQ ID NO: 13399 - RNA, 20 nt, Artificial Sequence
  GATA2 Guide RNA
cacagcaaggcucguuccug

SEQ ID NO: 13400 - RNA, 20 nt, Artificial Sequence
  GATA2 Guide RNA
caccccuaagcagcacagca

SEQ ID NO: 13401 - RNA, 20 nt, Artificial Sequence
  GATA2 Guide RNA
cagcacagcaaggcucguuc

SEQ ID NO: 13402 - RNA, 20 nt, Artificial Sequence
  GATA2 Guide RNA
cagcuucaccccuaagcagc

SEQ ID NO: 13403 - RNA, 20 nt, Artificial Sequence
  GATA2 Guide RNA
caggaacgagccuugcugug

SEQ ID NO: 13404 - RNA, 20 nt, Artificial Sequence
  GATA2 Guide RNA
ccagcuucaccccuaagcag

SEQ ID NO: 13405 - RNA, 20 nt, Artificial Sequence
  GATA2 Guide RNA
ccccuaagcagcacagcaag

SEQ ID NO: 13406 - RNA, 20 nt, Artificial Sequence
  GATA2 Guide RNA
cccuaagcagcacagcaagg

SEQ ID NO: 13407 - RNA, 20 nt, Artificial Sequence
  GATA2 Guide RNA
ccuaagcagcacagcaaggc

SEQ ID NO: 13408 - RNA, 20 nt, Artificial Sequence
  GATA2 Guide RNA
ccuugcugugcugcuuaggg

SEQ ID NO: 13409 - RNA, 20 nt, Artificial Sequence
  GATA2 Guide RNA
cgagccuugcugugcugcuu

SEQ ID NO: 13410 - RNA, 20 nt, Artificial Sequence
  GATA2 Guide RNA
cuaagcagcacagcaaggcu

SEQ ID NO: 13411 - RNA, 20 nt, Artificial Sequence
  GATA2 Guide RNA
cuccagcuucaccccuaagc

SEQ ID NO: 13412 - RNA, 20 nt, Artificial Sequence
  GATA2 Guide RNA
cugugcugcuuaggggugaa

SEQ ID NO: 13413 - RNA, 20 nt, Artificial Sequence
  GATA2 Guide RNA
cuucaccccuaagcagcaca

SEQ ID NO: 13414 - RNA, 20 nt, Artificial Sequence
  GATA2 Guide RNA
cuugcugugcugcuuagggg

SEQ ID NO: 13415 - RNA, 20 nt, Artificial Sequence
  GATA2 Guide RNA
gaacaggaacgagccuugcu

SEQ ID NO: 13416 - RNA, 20 nt, Artificial Sequence
  GATA2 Guide RNA
gaacgagccuugcugugcug

SEQ ID NO: 13417 - RNA, 20 nt, Artificial Sequence
  GATA2 Guide RNA
gagccuugcugugcugcuua

SEQ ID NO: 13418 - RNA, 20 nt, Artificial Sequence
  GATA2 Guide RNA
gcacagcaaggcucguuccu

SEQ ID NO: 13419 - RNA, 20 nt, Artificial Sequence
  GATA2 Guide RNA
gcagcacagcaaggcucguu

SEQ ID NO: 13420 - RNA, 20 nt, Artificial Sequence
  GATA2 Guide RNA
gccuugcugugcugcuuagg

SEQ ID NO: 13421 - RNA, 20 nt, Artificial Sequence
  GATA2 Guide RNA
gcugugcugcuuagggguga

SEQ ID NO: 13422 - RNA, 20 nt, Artificial Sequence
  GATA2 Guide RNA
gcuucaccccuaagcagcac

SEQ ID NO: 13423 - RNA, 20 nt, Artificial Sequence
  GATA2 Guide RNA
ggaacgagccuugcugugcu

SEQ ID NO: 13424 - RNA, 20 nt, Artificial Sequence
  GATA2 Guide RNA
gugcugcuuaggggugaagc

SEQ ID NO: 13425 - RNA, 20 nt, Artificial Sequence
  GATA2 Guide RNA
uaagcagcacagcaaggcuc

SEQ ID NO: 13426 - RNA, 20 nt, Artificial Sequence
  GATA2 Guide RNA
ucaccccuaagcagcacagc

SEQ ID NO: 13427 - RNA, 20 nt, Artificial Sequence
  GATA2 Guide RNA
uccagcuucaccccuaagca

SEQ ID NO: 13428 - RNA, 20 nt, Artificial Sequence
  GATA2 Guide RNA
ugaacaggaacgagccuugc

SEQ ID NO: 13429 - RNA, 20 nt, Artificial Sequence
  GATA2 Guide RNA
ugcugcuuaggggugaagcu

SEQ ID NO: 13430 - RNA, 20 nt, Artificial Sequence
  GATA2 Guide RNA
ugcugugcugcuuaggggug

SEQ ID NO: 13431 - RNA, 20 nt, Artificial Sequence
  GATA2 Guide RNA
ugugcugcuuaggggugaag

SEQ ID NO: 13432 - RNA, 20 nt, Artificial Sequence
  GATA2 Guide RNA
uucaccccuaagcagcacag

SEQ ID NO: 13433 - RNA, 20 nt, Artificial Sequence
  GATA2 Guide RNA
uugcugugcugcuuaggggu

SEQ ID NO: 13434 - RNA, 21 nt, Artificial Sequence
  GATA2 Guide RNA
aacaggaacgagccuugcugu

SEQ ID NO: 13435 - RNA, 21 nt, Artificial Sequence
  GATA2 Guide RNA
aacgagccuugcugugcugcu

SEQ ID NO: 13436 - RNA, 21 nt, Artificial Sequence
  GATA2 Guide RNA
aagcagcacagcaaggcucgu

SEQ ID NO: 13437 - RNA, 21 nt, Artificial Sequence
  GATA2 Guide RNA
acaggaacgagccuugcugug

SEQ ID NO: 13438 - RNA, 21 nt, Artificial Sequence
  GATA2 Guide RNA
accccuaagcagcacagcaag

SEQ ID NO: 13439 - RNA, 21 nt, Artificial Sequence
  GATA2 Guide RNA
acgagccuugcugugcugcuu

SEQ ID NO: 13440 - RNA, 21 nt, Artificial Sequence
  GATA2 Guide RNA
agcacagcaaggcucguuccu

SEQ ID NO: 13441 - RNA, 21 nt, Artificial Sequence
  GATA2 Guide RNA
agcagcacagcaaggcucguu

SEQ ID NO: 13442 - RNA, 21 nt, Artificial Sequence
  GATA2 Guide RNA
agccuugcugugcugcuuagg

SEQ ID NO: 13443 - RNA, 21 nt, Artificial Sequence
  GATA2 Guide RNA
agcuucaccccuaagcagcac

SEQ ID NO: 13444 - RNA, 21 nt, Artificial Sequence
  GATA2 Guide RNA
aggaacgagccuugcugugcu

SEQ ID NO: 13445 - RNA, 21 nt, Artificial Sequence
  GATA2 Guide RNA
cacagcaaggcucguuccugu

SEQ ID NO: 13446 - RNA, 21 nt, Artificial Sequence
  GATA2 Guide RNA
caccccuaagcagcacagcaa

SEQ ID NO: 13447 - RNA, 21 nt, Artificial Sequence
  GATA2 Guide RNA
cagcacagcaaggcucguucc

SEQ ID NO: 13448 - RNA, 21 nt, Artificial Sequence
  GATA2 Guide RNA
cagcuucaccccuaagcagca

SEQ ID NO: 13449 - RNA, 21 nt, Artificial Sequence
  GATA2 Guide RNA
caggaacgagccuugcugugc

SEQ ID NO: 13450 - RNA, 21 nt, Artificial Sequence
  GATA2 Guide RNA
ccagcuucaccccuaagcagc

SEQ ID NO: 13451 - RNA, 21 nt, Artificial Sequence
  GATA2 Guide RNA
ccccuaagcagcacagcaagg

SEQ ID NO: 13452 - RNA, 21 nt, Artificial Sequence
  GATA2 Guide RNA
cccuaagcagcacagcaaggc

SEQ ID NO: 13453 - RNA, 21 nt, Artificial Sequence
  GATA2 Guide RNA
ccuaagcagcacagcaaggcu

SEQ ID NO: 13454 - RNA, 21 nt, Artificial Sequence
  GATA2 Guide RNA
ccuccagcuucaccccuaagc

SEQ ID NO: 13455 - RNA, 21 nt, Artificial Sequence
  GATA2 Guide RNA
ccuugcugugcugcuuagggg

SEQ ID NO: 13456 - RNA, 21 nt, Artificial Sequence
  GATA2 Guide RNA
cgagccuugcugugcugcuua

SEQ ID NO: 13457 - RNA, 21 nt, Artificial Sequence
  GATA2 Guide RNA
cuaagcagcacagcaaggcuc

SEQ ID NO: 13458 - RNA, 21 nt, Artificial Sequence
  GATA2 Guide RNA
cuccagcuucaccccuaagca

SEQ ID NO: 13459 - RNA, 21 nt, Artificial Sequence
  GATA2 Guide RNA
cugaacaggaacgagccuugc

SEQ ID NO: 13460 - RNA, 21 nt, Artificial Sequence
  GATA2 Guide RNA
cugugcugcuuaggggugaag

SEQ ID NO: 13461 - RNA, 21 nt, Artificial Sequence
  GATA2 Guide RNA
cuucaccccuaagcagcacag

SEQ ID NO: 13462 - RNA, 21 nt, Artificial Sequence
  GATA2 Guide RNA
cuugcugugcugcuuaggggu

SEQ ID NO: 13463 - RNA, 21 nt, Artificial Sequence
  GATA2 Guide RNA
gaacaggaacgagccuugcug

SEQ ID NO: 13464 - RNA, 21 nt, Artificial Sequence
  GATA2 Guide RNA
gaacgagccuugcugugcugc

SEQ ID NO: 13465 - RNA, 21 nt, Artificial Sequence
  GATA2 Guide RNA
gagccuugcugugcugcuuag

SEQ ID NO: 13466 - RNA, 21 nt, Artificial Sequence
  GATA2 Guide RNA
gcacagcaaggcucguuccug

SEQ ID NO: 13467 - RNA, 21 nt, Artificial Sequence
  GATA2 Guide RNA
gcagcacagcaaggcucguuc

SEQ ID NO: 13468 - RNA, 21 nt, Artificial Sequence
  GATA2 Guide RNA
gccuugcugugcugcuuaggg

SEQ ID NO: 13469 - RNA, 21 nt, Artificial Sequence
  GATA2 Guide RNA
gcugugcugcuuaggggugaa

SEQ ID NO: 13470 - RNA, 21 nt, Artificial Sequence
  GATA2 Guide RNA
gcuucaccccuaagcagcaca

SEQ ID NO: 13471 - RNA, 21 nt, Artificial Sequence
  GATA2 Guide RNA
ggaacgagccuugcugugcug

SEQ ID NO: 13472 - RNA, 21 nt, Artificial Sequence
  GATA2 Guide RNA
gugcugcuuaggggugaagcu

SEQ ID NO: 13473 - RNA, 21 nt, Artificial Sequence
  GATA2 Guide RNA
uaagcagcacagcaaggcucg

SEQ ID NO: 13474 - RNA, 21 nt, Artificial Sequence
  GATA2 Guide RNA
ucaccccuaagcagcacagca

SEQ ID NO: 13475 - RNA, 21 nt, Artificial Sequence
  GATA2 Guide RNA
uccagcuucaccccuaagcag

SEQ ID NO: 13476 - RNA, 21 nt, Artificial Sequence
  GATA2 Guide RNA
ugaacaggaacgagccuugcu

SEQ ID NO: 13477 - RNA, 21 nt, Artificial Sequence
  GATA2 Guide RNA
ugcugcuuaggggugaagcug

SEQ ID NO: 13478 - RNA, 21 nt, Artificial Sequence
  GATA2 Guide RNA
ugcugugcugcuuagggguga

SEQ ID NO: 13479 - RNA, 21 nt, Artificial Sequence
  GATA2 Guide RNA
ugugcugcuuaggggugaagc

SEQ ID NO: 13480 - RNA, 21 nt, Artificial Sequence
  GATA2 Guide RNA
uucaccccuaagcagcacagc

SEQ ID NO: 13481 - RNA, 21 nt, Artificial Sequence
  GATA2 Guide RNA
uugcugugcugcuuaggggug

SEQ ID NO: 13482 - RNA, 22 nt, Artificial Sequence
  GATA2 Guide RNA
aacaggaacgagccuugcugug

SEQ ID NO: 13483 - RNA, 22 nt, Artificial Sequence
  GATA2 Guide RNA
aacgagccuugcugugcugcuu

SEQ ID NO: 13484 - RNA, 22 nt, Artificial Sequence
  GATA2 Guide RNA
aagcagcacagcaaggcucguu

SEQ ID NO: 13485 - RNA, 22 nt, Artificial Sequence
  GATA2 Guide RNA
acaggaacgagccuugcugugc

SEQ ID NO: 13486 - RNA, 22 nt, Artificial Sequence
  GATA2 Guide RNA
accccuaagcagcacagcaagg

SEQ ID NO: 13487 - RNA, 22 nt, Artificial Sequence
  GATA2 Guide RNA
acgagccuugcugugcugcuua

SEQ ID NO: 13488 - RNA, 22 nt, Artificial Sequence
  GATA2 Guide RNA
agcacagcaaggcucguuccug

SEQ ID NO: 13489 - RNA, 22 nt, Artificial Sequence
  GATA2 Guide RNA
agcagcacagcaaggcucguuc

SEQ ID NO: 13490 - RNA, 22 nt, Artificial Sequence
  GATA2 Guide RNA
agccuugcugugcugcuuaggg

SEQ ID NO: 13491 - RNA, 22 nt, Artificial Sequence
  GATA2 Guide RNA
agcuucaccccuaagcagcaca

SEQ ID NO: 13492 - RNA, 22 nt, Artificial Sequence
  GATA2 Guide RNA
aggaacgagccuugcugugcug

SEQ ID NO: 13493 - RNA, 22 nt, Artificial Sequence
  GATA2 Guide RNA
cacagcaaggcucguuccuguu

SEQ ID NO: 13494 - RNA, 22 nt, Artificial Sequence
  GATA2 Guide RNA
caccccuaagcagcacagcaag

SEQ ID NO: 13495 - RNA, 22 nt, Artificial Sequence
  GATA2 Guide RNA
cagcacagcaaggcucguuccu

SEQ ID NO: 13496 - RNA, 22 nt, Artificial Sequence
  GATA2 Guide RNA
cagcuucaccccuaagcagcac

SEQ ID NO: 13497 - RNA, 22 nt, Artificial Sequence
  GATA2 Guide RNA
caggaacgagccuugcugugcu

SEQ ID NO: 13498 - RNA, 22 nt, Artificial Sequence
  GATA2 Guide RNA
ccagcuucaccccuaagcagca

SEQ ID NO: 13499 - RNA, 22 nt, Artificial Sequence
  GATA2 Guide RNA
ccccuaagcagcacagcaaggc

SEQ ID NO: 13500 - RNA, 22 nt, Artificial Sequence
  GATA2 Guide RNA
cccuaagcagcacagcaaggcu

SEQ ID NO: 13501 - RNA, 22 nt, Artificial Sequence
  GATA2 Guide RNA
ccuaagcagcacagcaaggcuc

SEQ ID NO: 13502 - RNA, 22 nt, Artificial Sequence
  GATA2 Guide RNA
ccuccagcuucaccccuaagca

SEQ ID NO: 13503 - RNA, 22 nt, Artificial Sequence
  GATA2 Guide RNA
ccugaacaggaacgagccuugc

SEQ ID NO: 13504 - RNA, 22 nt, Artificial Sequence
  GATA2 Guide RNA
ccuugcugugcugcuuaggggu

SEQ ID NO: 13505 - RNA, 22 nt, Artificial Sequence
  GATA2 Guide RNA
cgagccuugcugugcugcuuag

SEQ ID NO: 13506 - RNA, 22 nt, Artificial Sequence
  GATA2 Guide RNA
cuaagcagcacagcaaggcucg

SEQ ID NO: 13507 - RNA, 22 nt, Artificial Sequence
  GATA2 Guide RNA
cuccagcuucaccccuaagcag

SEQ ID NO: 13508 - RNA, 22 nt, Artificial Sequence
  GATA2 Guide RNA
cugaacaggaacgagccuugcu

SEQ ID NO: 13509 - RNA, 22 nt, Artificial Sequence
  GATA2 Guide RNA
cugugcugcuuaggggugaagc

SEQ ID NO: 13510 - RNA, 22 nt, Artificial Sequence
  GATA2 Guide RNA
cuucaccccuaagcagcacagc

SEQ ID NO: 13511 - RNA, 22 nt, Artificial Sequence
  GATA2 Guide RNA
cuugcugugcugcuuaggggug

SEQ ID NO: 13512 - RNA, 22 nt, Artificial Sequence
  GATA2 Guide RNA
gaacaggaacgagccuugcugu

SEQ ID NO: 13513 - RNA, 22 nt, Artificial Sequence
  GATA2 Guide RNA
gaacgagccuugcugugcugcu

SEQ ID NO: 13514 - RNA, 22 nt, Artificial Sequence
  GATA2 Guide RNA
gagccuugcugugcugcuuagg

SEQ ID NO: 13515 - RNA, 22 nt, Artificial Sequence
  GATA2 Guide RNA
gcacagcaaggcucguuccugu

SEQ ID NO: 13516 - RNA, 22 nt, Artificial Sequence
  GATA2 Guide RNA
gcagcacagcaaggcucguucc

SEQ ID NO: 13517 - RNA, 22 nt, Artificial Sequence
  GATA2 Guide RNA
gccuccagcuucaccccuaagc

SEQ ID NO: 13518 - RNA, 22 nt, Artificial Sequence
  GATA2 Guide RNA
gccuugcugugcugcuuagggg

SEQ ID NO: 13519 - RNA, 22 nt, Artificial Sequence
  GATA2 Guide RNA
gcugugcugcuuaggggugaag

SEQ ID NO: 13520 - RNA, 22 nt, Artificial Sequence
  GATA2 Guide RNA
gcuucaccccuaagcagcacag

SEQ ID NO: 13521 - RNA, 22 nt, Artificial Sequence
  GATA2 Guide RNA
ggaacgagccuugcugugcugc

SEQ ID NO: 13522 - RNA, 22 nt, Artificial Sequence
  GATA2 Guide RNA
gugcugcuuaggggugaagcug

SEQ ID NO: 13523 - RNA, 22 nt, Artificial Sequence
  GATA2 Guide RNA
uaagcagcacagcaaggcucgu

SEQ ID NO: 13524 - RNA, 22 nt, Artificial Sequence
  GATA2 Guide RNA
ucaccccuaagcagcacagcaa

SEQ ID NO: 13525 - RNA, 22 nt, Artificial Sequence
  GATA2 Guide RNA
uccagcuucaccccuaagcagc

SEQ ID NO: 13526 - RNA, 22 nt, Artificial Sequence
  GATA2 Guide RNA
ugaacaggaacgagccuugcug

SEQ ID NO: 13527 - RNA, 22 nt, Artificial Sequence
  GATA2 Guide RNA
ugcugcuuaggggugaagcugg

SEQ ID NO: 13528 - RNA, 22 nt, Artificial Sequence
  GATA2 Guide RNA
ugcugugcugcuuaggggugaa

SEQ ID NO: 13529 - RNA, 22 nt, Artificial Sequence
  GATA2 Guide RNA
ugugcugcuuaggggugaagcu

SEQ ID NO: 13530 - RNA, 22 nt, Artificial Sequence
  GATA2 Guide RNA
uucaccccuaagcagcacagca

SEQ ID NO: 13531 - RNA, 22 nt, Artificial Sequence
  GATA2 Guide RNA
uugcugugcugcuuagggguga

SEQ ID NO: 13532 - RNA, 20 nt, Artificial Sequence
  GATA2 Guide RNA
aacgagccuugcugcgcugc

SEQ ID NO: 13533 - RNA, 20 nt, Artificial Sequence
  GATA2 Guide RNA
acccuaagcagcgcagcaag

SEQ ID NO: 13534 - RNA, 20 nt, Artificial Sequence
  GATA2 Guide RNA
accggccuccagcuucaccc

SEQ ID NO: 13535 - RNA, 20 nt, Artificial Sequence
  GATA2 Guide RNA
acgagccuugcugcgcugcu

SEQ ID NO: 13536 - RNA, 20 nt, Artificial Sequence
  GATA2 Guide RNA
agccuugcugcgcugcuuag

SEQ ID NO: 13537 - RNA, 20 nt, Artificial Sequence
  GATA2 Guide RNA
agcuucacccuaagcagcgc

SEQ ID NO: 13538 - RNA, 20 nt, Artificial Sequence
  GATA2 Guide RNA
agggugaagcuggaggccgg

SEQ ID NO: 13539 - RNA, 20 nt, Artificial Sequence
  GATA2 Guide RNA
cacccuaagcagcgcagcaa

SEQ ID NO: 13540 - RNA, 20 nt, Artificial Sequence
  GATA2 Guide RNA
cagcuucacccuaagcagcg

SEQ ID NO: 13541 - RNA, 20 nt, Artificial Sequence
  GATA2 Guide RNA
ccagcuucacccuaagcagc

SEQ ID NO: 13542 - RNA, 20 nt, Artificial Sequence
  GATA2 Guide RNA
ccggccuccagcuucacccu

SEQ ID NO: 13543 - RNA, 20 nt, Artificial Sequence
  GATA2 Guide RNA
ccuccagcuucacccuaagc

SEQ ID NO: 13544 - RNA, 20 nt, Artificial Sequence
  GATA2 Guide RNA
ccuugcugcgcugcuuaggg

SEQ ID NO: 13545 - RNA, 20 nt, Artificial Sequence
  GATA2 Guide RNA
cgagccuugcugcgcugcuu

SEQ ID NO: 13546 - RNA, 20 nt, Artificial Sequence
  GATA2 Guide RNA
cgcugcuuagggugaagcug

SEQ ID NO: 13547 - RNA, 20 nt, Artificial Sequence
  GATA2 Guide RNA
cggccuccagcuucacccua

SEQ ID NO: 13548 - RNA, 20 nt, Artificial Sequence
  GATA2 Guide RNA
cuccagcuucacccuaagca

SEQ ID NO: 13549 - RNA, 20 nt, Artificial Sequence
  GATA2 Guide RNA
cugcgcugcuuagggugaag

SEQ ID NO: 13550 - RNA, 20 nt, Artificial Sequence
  GATA2 Guide RNA
cugcuuagggugaagcugga

SEQ ID NO: 13551 - RNA, 20 nt, Artificial Sequence
  GATA2 Guide RNA
cuuagggugaagcuggaggc

SEQ ID NO: 13552 - RNA, 20 nt, Artificial Sequence
  GATA2 Guide RNA
cuucacccuaagcagcgcag

SEQ ID NO: 13553 - RNA, 20 nt, Artificial Sequence
  GATA2 Guide RNA
cuugcugcgcugcuuagggu

SEQ ID NO: 13554 - RNA, 20 nt, Artificial Sequence
  GATA2 Guide RNA
gaccggccuccagcuucacc

SEQ ID NO: 13555 - RNA, 20 nt, Artificial Sequence
  GATA2 Guide RNA
gagccuugcugcgcugcuua

SEQ ID NO: 13556 - RNA, 20 nt, Artificial Sequence
  GATA2 Guide RNA
gccuccagcuucacccuaag

SEQ ID NO: 13557 - RNA, 20 nt, Artificial Sequence
  GATA2 Guide RNA
gccuugcugcgcugcuuagg

SEQ ID NO: 13558 - RNA, 20 nt, Artificial Sequence
  GATA2 Guide RNA
gcgcugcuuagggugaagcu

SEQ ID NO: 13559 - RNA, 20 nt, Artificial Sequence
  GATA2 Guide RNA
gcugcgcugcuuagggugaa

SEQ ID NO: 13560 - RNA, 20 nt, Artificial Sequence
  GATA2 Guide RNA
gcugcuuagggugaagcugg

SEQ ID NO: 13561 - RNA, 20 nt, Artificial Sequence
  GATA2 Guide RNA
gcuuagggugaagcuggagg

SEQ ID NO: 13562 - RNA, 20 nt, Artificial Sequence
  GATA2 Guide RNA
gcuucacccuaagcagcgca

SEQ ID NO: 13563 - RNA, 20 nt, Artificial Sequence
  GATA2 Guide RNA
ggaccggccuccagcuucac

SEQ ID NO: 13564 - RNA, 20 nt, Artificial Sequence
  GATA2 Guide RNA
ggccuccagcuucacccuaa

SEQ ID NO: 13565 - RNA, 20 nt, Artificial Sequence
  GATA2 Guide RNA
gggaccggccuccagcuuca

SEQ ID NO: 13566 - RNA, 20 nt, Artificial Sequence
  GATA2 Guide RNA
uagggugaagcuggaggccg

SEQ ID NO: 13567 - RNA, 20 nt, Artificial Sequence
  GATA2 Guide RNA
ucacccuaagcagcgcagca

SEQ ID NO: 13568 - RNA, 20 nt, Artificial Sequence
  GATA2 Guide RNA
uccagcuucacccuaagcag

SEQ ID NO: 13569 - RNA, 20 nt, Artificial Sequence
  GATA2 Guide RNA
ugcgcugcuuagggugaagc

SEQ ID NO: 13570 - RNA, 20 nt, Artificial Sequence
  GATA2 Guide RNA
ugcugcgcugcuuaggguga

SEQ ID NO: 13571 - RNA, 20 nt, Artificial Sequence
  GATA2 Guide RNA
ugcuuagggugaagcuggag

SEQ ID NO: 13572 - RNA, 20 nt, Artificial Sequence
  GATA2 Guide RNA
uuagggugaagcuggaggcc

SEQ ID NO: 13573 - RNA, 20 nt, Artificial Sequence
  GATA2 Guide RNA
uucacccuaagcagcgcagc

SEQ ID NO: 13574 - RNA, 20 nt, Artificial Sequence
  GATA2 Guide RNA
uugcugcgcugcuuagggug

SEQ ID NO: 13575 - RNA, 21 nt, Artificial Sequence
  GATA2 Guide RNA
aacgagccuugcugcgcugcu

SEQ ID NO: 13576 - RNA, 21 nt, Artificial Sequence
  GATA2 Guide RNA
acccuaagcagcgcagcaagg

SEQ ID NO: 13577 - RNA, 21 nt, Artificial Sequence
  GATA2 Guide RNA
accggccuccagcuucacccu

SEQ ID NO: 13578 - RNA, 21 nt, Artificial Sequence
  GATA2 Guide RNA
acgagccuugcugcgcugcuu

SEQ ID NO: 13579 - RNA, 21 nt, Artificial Sequence
  GATA2 Guide RNA
agccuugcugcgcugcuuagg

SEQ ID NO: 13580 - RNA, 21 nt, Artificial Sequence
  GATA2 Guide RNA
agcuucacccuaagcagcgca

SEQ ID NO: 13581 - RNA, 21 nt, Artificial Sequence
  GATA2 Guide RNA
agggugaagcuggaggccggu

SEQ ID NO: 13582 - RNA, 21 nt, Artificial Sequence
  GATA2 Guide RNA
cacccuaagcagcgcagcaag

SEQ ID NO: 13583 - RNA, 21 nt, Artificial Sequence
  GATA2 Guide RNA
cagcuucacccuaagcagcgc

SEQ ID NO: 13584 - RNA, 21 nt, Artificial Sequence
  GATA2 Guide RNA
ccagcuucacccuaagcagcg

SEQ ID NO: 13585 - RNA, 21 nt, Artificial Sequence
  GATA2 Guide RNA
ccggccuccagcuucacccua

SEQ ID NO: 13586 - RNA, 21 nt, Artificial Sequence
  GATA2 Guide RNA
ccuccagcuucacccuaagca

SEQ ID NO: 13587 - RNA, 21 nt, Artificial Sequence
  GATA2 Guide RNA
ccuugcugcgcugcuuagggu

SEQ ID NO: 13588 - RNA, 21 nt, Artificial Sequence
  GATA2 Guide RNA
cgagccuugcugcgcugcuua

SEQ ID NO: 13589 - RNA, 21 nt, Artificial Sequence
  GATA2 Guide RNA
cgcugcuuagggugaagcugg

SEQ ID NO: 13590 - RNA, 21 nt, Artificial Sequence
  GATA2 Guide RNA
cggccuccagcuucacccuaa

SEQ ID NO: 13591 - RNA, 21 nt, Artificial Sequence
  GATA2 Guide RNA
cuccagcuucacccuaagcag

SEQ ID NO: 13592 - RNA, 21 nt, Artificial Sequence
  GATA2 Guide RNA
cugcgcugcuuagggugaagc

SEQ ID NO: 13593 - RNA, 21 nt, Artificial Sequence
  GATA2 Guide RNA
cugcuuagggugaagcuggag

SEQ ID NO: 13594 - RNA, 21 nt, Artificial Sequence
  GATA2 Guide RNA
cuuagggugaagcuggaggcc

SEQ ID NO: 13595 - RNA, 21 nt, Artificial Sequence
  GATA2 Guide RNA
cuucacccuaagcagcgcagc

SEQ ID NO: 13596 - RNA, 21 nt, Artificial Sequence
  GATA2 Guide RNA
cuugcugcgcugcuuagggug

SEQ ID NO: 13597 - RNA, 21 nt, Artificial Sequence
  GATA2 Guide RNA
gaacgagccuugcugcgcugc

SEQ ID NO: 13598 - RNA, 21 nt, Artificial Sequence
  GATA2 Guide RNA
gaccggccuccagcuucaccc

SEQ ID NO: 13599 - RNA, 21 nt, Artificial Sequence
  GATA2 Guide RNA
gagccuugcugcgcugcuuag

SEQ ID NO: 13600 - RNA, 21 nt, Artificial Sequence
  GATA2 Guide RNA
gccuccagcuucacccuaagc

SEQ ID NO: 13601 - RNA, 21 nt, Artificial Sequence
  GATA2 Guide RNA
gccuugcugcgcugcuuaggg

SEQ ID NO: 13602 - RNA, 21 nt, Artificial Sequence
  GATA2 Guide RNA
gcgcugcuuagggugaagcug

SEQ ID NO: 13603 - RNA, 21 nt, Artificial Sequence
  GATA2 Guide RNA
gcugcgcugcuuagggugaag

SEQ ID NO: 13604 - RNA, 21 nt, Artificial Sequence
  GATA2 Guide RNA
gcugcuuagggugaagcugga

SEQ ID NO: 13605 - RNA, 21 nt, Artificial Sequence
  GATA2 Guide RNA
gcuuagggugaagcuggaggc

SEQ ID NO: 13606 - RNA, 21 nt, Artificial Sequence
  GATA2 Guide RNA
gcuucacccuaagcagcgcag

SEQ ID NO: 13607 - RNA, 21 nt, Artificial Sequence
  GATA2 Guide RNA
ggaccggccuccagcuucacc

SEQ ID NO: 13608 - RNA, 21 nt, Artificial Sequence
  GATA2 Guide RNA
ggccuccagcuucacccuaag

SEQ ID NO: 13609 - RNA, 21 nt, Artificial Sequence
  GATA2 Guide RNA
gggaccggccuccagcuucac

SEQ ID NO: 13610 - RNA, 21 nt, Artificial Sequence
  GATA2 Guide RNA
ggggaccggccuccagcuuca

SEQ ID NO: 13611 - RNA, 21 nt, Artificial Sequence
  GATA2 Guide RNA
uagggugaagcuggaggccgg

SEQ ID NO: 13612 - RNA, 21 nt, Artificial Sequence
  GATA2 Guide RNA
ucacccuaagcagcgcagcaa

SEQ ID NO: 13613 - RNA, 21 nt, Artificial Sequence
  GATA2 Guide RNA
uccagcuucacccuaagcagc

SEQ ID NO: 13614 - RNA, 21 nt, Artificial Sequence
  GATA2 Guide RNA
ugcgcugcuuagggugaagcu

SEQ ID NO: 13615 - RNA, 21 nt, Artificial Sequence
  GATA2 Guide RNA
ugcugcgcugcuuagggugaa

SEQ ID NO: 13616 - RNA, 21 nt, Artificial Sequence
  GATA2 Guide RNA
ugcuuagggugaagcuggagg

SEQ ID NO: 13617 - RNA, 21 nt, Artificial Sequence
  GATA2 Guide RNA
uuagggugaagcuggaggccg

SEQ ID NO: 13618 - RNA, 21 nt, Artificial Sequence
  GATA2 Guide RNA
uucacccuaagcagcgcagca

SEQ ID NO: 13619 - RNA, 21 nt, Artificial Sequence
  GATA2 Guide RNA
uugcugcgcugcuuaggguga

SEQ ID NO: 13620 - RNA, 22 nt, Artificial Sequence
  GATA2 Guide RNA
aacgagccuugcugcgcugcuu

SEQ ID NO: 13621 - RNA, 22 nt, Artificial Sequence
  GATA2 Guide RNA
acccuaagcagcgcagcaaggc

SEQ ID NO: 13622 - RNA, 22 nt, Artificial Sequence
  GATA2 Guide RNA
accggccuccagcuucacccua

SEQ ID NO: 13623 - RNA, 22 nt, Artificial Sequence
  GATA2 Guide RNA
acgagccuugcugcgcugcuua

SEQ ID NO: 13624 - RNA, 22 nt, Artificial Sequence
  GATA2 Guide RNA
agccuugcugcgcugcuuaggg

SEQ ID NO: 13625 - RNA, 22 nt, Artificial Sequence
  GATA2 Guide RNA
agcuucacccuaagcagcgcag

SEQ ID NO: 13626 - RNA, 22 nt, Artificial Sequence
  GATA2 Guide RNA
agggugaagcuggaggccgguc

SEQ ID NO: 13627 - RNA, 22 nt, Artificial Sequence
  GATA2 Guide RNA
cacccuaagcagcgcagcaagg

SEQ ID NO: 13628 - RNA, 22 nt, Artificial Sequence
  GATA2 Guide RNA
cagcuucacccuaagcagcgca

SEQ ID NO: 13629 - RNA, 22 nt, Artificial Sequence
  GATA2 Guide RNA
ccagcuucacccuaagcagcgc

SEQ ID NO: 13630 - RNA, 22 nt, Artificial Sequence
  GATA2 Guide RNA
ccggccuccagcuucacccuaa

SEQ ID NO: 13631 - RNA, 22 nt, Artificial Sequence
  GATA2 Guide RNA
ccuccagcuucacccuaagcag

SEQ ID NO: 13632 - RNA, 22 nt, Artificial Sequence
  GATA2 Guide RNA
ccuugcugcgcugcuuagggug

SEQ ID NO: 13633 - RNA, 22 nt, Artificial Sequence
  GATA2 Guide RNA
cgagccuugcugcgcugcuuag

SEQ ID NO: 13634 - RNA, 22 nt, Artificial Sequence
  GATA2 Guide RNA
cgcugcuuagggugaagcugga

SEQ ID NO: 13635 - RNA, 22 nt, Artificial Sequence
  GATA2 Guide RNA
cggccuccagcuucacccuaag

SEQ ID NO: 13636 - RNA, 22 nt, Artificial Sequence
  GATA2 Guide RNA
cuaagcagcgcagcaaggcucg

SEQ ID NO: 13637 - RNA, 22 nt, Artificial Sequence
  GATA2 Guide RNA
cuccagcuucacccuaagcagc

SEQ ID NO: 13638 - RNA, 22 nt, Artificial Sequence
  GATA2 Guide RNA
cugcgcugcuuagggugaagcu

SEQ ID NO: 13639 - RNA, 22 nt, Artificial Sequence
  GATA2 Guide RNA
cugcuuagggugaagcuggagg

SEQ ID NO: 13640 - RNA, 22 nt, Artificial Sequence
  GATA2 Guide RNA
cuuagggugaagcuggaggccg

SEQ ID NO: 13641 - RNA, 22 nt, Artificial Sequence
  GATA2 Guide RNA
cuucacccuaagcagcgcagca

SEQ ID NO: 13642 - RNA, 22 nt, Artificial Sequence
  GATA2 Guide RNA
cuugcugcgcugcuuaggguga

SEQ ID NO: 13643 - RNA, 22 nt, Artificial Sequence
  GATA2 Guide RNA
gaacgagccuugcugcgcugcu

SEQ ID NO: 13644 - RNA, 22 nt, Artificial Sequence
  GATA2 Guide RNA
gaccggccuccagcuucacccu

SEQ ID NO: 13645 - RNA, 22 nt, Artificial Sequence
  GATA2 Guide RNA
gagccuugcugcgcugcuuagg

SEQ ID NO: 13646 - RNA, 22 nt, Artificial Sequence
  GATA2 Guide RNA
gccuccagcuucacccuaagca

SEQ ID NO: 13647 - RNA, 22 nt, Artificial Sequence
  GATA2 Guide RNA
gccuugcugcgcugcuuagggu

SEQ ID NO: 13648 - RNA, 22 nt, Artificial Sequence
  GATA2 Guide RNA
gcgcugcuuagggugaagcugg

SEQ ID NO: 13649 - RNA, 22 nt, Artificial Sequence
  GATA2 Guide RNA
gcugcgcugcuuagggugaagc

SEQ ID NO: 13650 - RNA, 22 nt, Artificial Sequence
  GATA2 Guide RNA
gcugcuuagggugaagcuggag

SEQ ID NO: 13651 - RNA, 22 nt, Artificial Sequence
  GATA2 Guide RNA
gcuuagggugaagcuggaggcc

SEQ ID NO: 13652 - RNA, 22 nt, Artificial Sequence
  GATA2 Guide RNA
gcuucacccuaagcagcgcagc

SEQ ID NO: 13653 - RNA, 22 nt, Artificial Sequence
  GATA2 Guide RNA
ggaacgagccuugcugcgcugc

SEQ ID NO: 13654 - RNA, 22 nt, Artificial Sequence
  GATA2 Guide RNA
ggaccggccuccagcuucaccc

SEQ ID NO: 13655 - RNA, 22 nt, Artificial Sequence
  GATA2 Guide RNA
ggccuccagcuucacccuaagc

SEQ ID NO: 13656 - RNA, 22 nt, Artificial Sequence
  GATA2 Guide RNA
gggaccggccuccagcuucacc

SEQ ID NO: 13657 - RNA, 22 nt, Artificial Sequence
  GATA2 Guide RNA
ggggaccggccuccagcuucac

SEQ ID NO: 13658 - RNA, 22 nt, Artificial Sequence
  GATA2 Guide RNA
gggggaccggccuccagcuuca

SEQ ID NO: 13659 - RNA, 22 nt, Artificial Sequence
  GATA2 Guide RNA
uagggugaagcuggaggccggu

SEQ ID NO: 13660 - RNA, 22 nt, Artificial Sequence
  GATA2 Guide RNA
ucacccuaagcagcgcagcaag

SEQ ID NO: 13661 - RNA, 22 nt, Artificial Sequence
  GATA2 Guide RNA
uccagcuucacccuaagcagcg

SEQ ID NO: 13662 - RNA, 22 nt, Artificial Sequence
  GATA2 Guide RNA
ugcgcugcuuagggugaagcug

SEQ ID NO: 13663 - RNA, 22 nt, Artificial Sequence
  GATA2 Guide RNA
ugcugcgcugcuuagggugaag

SEQ ID NO: 13664 - RNA, 22 nt, Artificial Sequence
  GATA2 Guide RNA
ugcuuagggugaagcuggaggc

SEQ ID NO: 13665 - RNA, 22 nt, Artificial Sequence
  GATA2 Guide RNA
uuagggugaagcuggaggccgg

SEQ ID NO: 13666 - RNA, 22 nt, Artificial Sequence
  GATA2 Guide RNA
uucacccuaagcagcgcagcaa

SEQ ID NO: 13667 - RNA, 22 nt, Artificial Sequence
  GATA2 Guide RNA
uugcugcgcugcuuagggugaa

SEQ ID NO: 13668 - RNA, 20 nt, Artificial Sequence
  GATA2 Guide RNA
accggccuccagcaucaccc

SEQ ID NO: 13669 - RNA, 20 nt, Artificial Sequence
  GATA2 Guide RNA
agcaucaccccuaagcagcg

SEQ ID NO: 13670 - RNA, 20 nt, Artificial Sequence
  GATA2 Guide RNA
aggggugaugcuggaggccg

SEQ ID NO: 13671 - RNA, 20 nt, Artificial Sequence
  GATA2 Guide RNA
augcuggaggccgguccccc

SEQ ID NO: 13672 - RNA, 20 nt, Artificial Sequence
  GATA2 Guide RNA
cagcaucaccccuaagcagc

SEQ ID NO: 13673 - RNA, 20 nt, Artificial Sequence
  GATA2 Guide RNA
caucaccccuaagcagcgca

SEQ ID NO: 13674 - RNA, 20 nt, Artificial Sequence
  GATA2 Guide RNA
ccagcaucaccccuaagcag

SEQ ID NO: 13675 - RNA, 20 nt, Artificial Sequence
  GATA2 Guide RNA
ccggccuccagcaucacccc

SEQ ID NO: 13676 - RNA, 20 nt, Artificial Sequence
  GATA2 Guide RNA
ccuccagcaucaccccuaag

SEQ ID NO: 13677 - RNA, 20 nt, Artificial Sequence
  GATA2 Guide RNA
ccuggggggaccggccucca

SEQ ID NO: 13678 - RNA, 20 nt, Artificial Sequence
  GATA2 Guide RNA
cgcugcuuaggggugaugcu

SEQ ID NO: 13679 - RNA, 20 nt, Artificial Sequence
  GATA2 Guide RNA
cggccuccagcaucaccccu

SEQ ID NO: 13680 - RNA, 20 nt, Artificial Sequence
  GATA2 Guide RNA
cuccagcaucaccccuaagc

SEQ ID NO: 13681 - RNA, 20 nt, Artificial Sequence
  GATA2 Guide RNA
cugcgcugcuuaggggugau

SEQ ID NO: 13682 - RNA, 20 nt, Artificial Sequence
  GATA2 Guide RNA
cugcuuaggggugaugcugg

SEQ ID NO: 13683 - RNA, 20 nt, Artificial Sequence
  GATA2 Guide RNA
cuggggggaccggccuccag

SEQ ID NO: 13684 - RNA, 20 nt, Artificial Sequence
  GATA2 Guide RNA
cuuaggggugaugcuggagg

SEQ ID NO: 13685 - RNA, 20 nt, Artificial Sequence
  GATA2 Guide RNA
gaccggccuccagcaucacc

SEQ ID NO: 13686 - RNA, 20 nt, Artificial Sequence
  GATA2 Guide RNA
gaugcuggaggccggucccc

SEQ ID NO: 13687 - RNA, 20 nt, Artificial Sequence
  GATA2 Guide RNA
gcaucaccccuaagcagcgc

SEQ ID NO: 13688 - RNA, 20 nt, Artificial Sequence
  GATA2 Guide RNA
gccuccagcaucaccccuaa

SEQ ID NO: 13689 - RNA, 20 nt, Artificial Sequence
  GATA2 Guide RNA
gcgcugcuuaggggugaugc

SEQ ID NO: 13690 - RNA, 20 nt, Artificial Sequence
  GATA2 Guide RNA
gcugcgcugcuuagggguga

SEQ ID NO: 13691 - RNA, 20 nt, Artificial Sequence
  GATA2 Guide RNA
gcugcuuaggggugaugcug

SEQ ID NO: 13692 - RNA, 20 nt, Artificial Sequence
  GATA2 Guide RNA
gcuuaggggugaugcuggag

SEQ ID NO: 13693 - RNA, 20 nt, Artificial Sequence
  GATA2 Guide RNA
ggaccggccuccagcaucac

SEQ ID NO: 13694 - RNA, 20 nt, Artificial Sequence
  GATA2 Guide RNA
ggccuccagcaucaccccua

SEQ ID NO: 13695 - RNA, 20 nt, Artificial Sequence
  GATA2 Guide RNA
gggaccggccuccagcauca

SEQ ID NO: 13696 - RNA, 20 nt, Artificial Sequence
  GATA2 Guide RNA
ggggaccggccuccagcauc

SEQ ID NO: 13697 - RNA, 20 nt, Artificial Sequence
  GATA2 Guide RNA
gggggaccggccuccagcau

SEQ ID NO: 13698 - RNA, 20 nt, Artificial Sequence
  GATA2 Guide RNA
ggggggaccggccuccagca

SEQ ID NO: 13699 - RNA, 20 nt, Artificial Sequence
  GATA2 Guide RNA
ggggugaugcuggaggccgg

SEQ ID NO: 13700 - RNA, 20 nt, Artificial Sequence
  GATA2 Guide RNA
gggugaugcuggaggccggu

SEQ ID NO: 13701 - RNA, 20 nt, Artificial Sequence
  GATA2 Guide RNA
ggugaugcuggaggccgguc

SEQ ID NO: 13702 - RNA, 20 nt, Artificial Sequence
  GATA2 Guide RNA
gugaugcuggaggccggucc

SEQ ID NO: 13703 - RNA, 20 nt, Artificial Sequence
  GATA2 Guide RNA
uaggggugaugcuggaggcc

SEQ ID NO: 13704 - RNA, 20 nt, Artificial Sequence
  GATA2 Guide RNA
uccagcaucaccccuaagca

SEQ ID NO: 13705 - RNA, 20 nt, Artificial Sequence
  GATA2 Guide RNA
uccuggggggaccggccucc

SEQ ID NO: 13706 - RNA, 20 nt, Artificial Sequence
  GATA2 Guide RNA
ugaugcuggaggccgguccc

SEQ ID NO: 13707 - RNA, 20 nt, Artificial Sequence
  GATA2 Guide RNA
ugcgcugcuuaggggugaug

SEQ ID NO: 13708 - RNA, 20 nt, Artificial Sequence
  GATA2 Guide RNA
ugcugcgcugcuuaggggug

SEQ ID NO: 13709 - RNA, 20 nt, Artificial Sequence
  GATA2 Guide RNA
ugcuggaggccggucccccc

SEQ ID NO: 13710 - RNA, 20 nt, Artificial Sequence
  GATA2 Guide RNA
ugcuuaggggugaugcugga

SEQ ID NO: 13711 - RNA, 20 nt, Artificial Sequence
  GATA2 Guide RNA
uggggggaccggccuccagc

SEQ ID NO: 13712 - RNA, 20 nt, Artificial Sequence
  GATA2 Guide RNA
uuaggggugaugcuggaggc

SEQ ID NO: 13713 - RNA, 20 nt, Artificial Sequence
  GATA2 Guide RNA
uugcugcgcugcuuaggggu

SEQ ID NO: 13714 - RNA, 21 nt, Artificial Sequence
  GATA2 Guide RNA
accggccuccagcaucacccc

SEQ ID NO: 13715 - RNA, 21 nt, Artificial Sequence
  GATA2 Guide RNA
agcaucaccccuaagcagcgc

SEQ ID NO: 13716 - RNA, 21 nt, Artificial Sequence
  GATA2 Guide RNA
aggggugaugcuggaggccgg

SEQ ID NO: 13717 - RNA, 21 nt, Artificial Sequence
  GATA2 Guide RNA
augcuggaggccggucccccc

SEQ ID NO: 13718 - RNA, 21 nt, Artificial Sequence
  GATA2 Guide RNA
cagcaucaccccuaagcagcg

SEQ ID NO: 13719 - RNA, 21 nt, Artificial Sequence
  GATA2 Guide RNA
caucaccccuaagcagcgcag

SEQ ID NO: 13720 - RNA, 21 nt, Artificial Sequence
  GATA2 Guide RNA
ccagcaucaccccuaagcagc

SEQ ID NO: 13721 - RNA, 21 nt, Artificial Sequence
  GATA2 Guide RNA
ccggccuccagcaucaccccu

SEQ ID NO: 13722 - RNA, 21 nt, Artificial Sequence
  GATA2 Guide RNA
ccuccagcaucaccccuaagc

SEQ ID NO: 13723 - RNA, 21 nt, Artificial Sequence
  GATA2 Guide RNA
cgcugcuuaggggugaugcug

SEQ ID NO: 13724 - RNA, 21 nt, Artificial Sequence
  GATA2 Guide RNA
cggccuccagcaucaccccua

SEQ ID NO: 13725 - RNA, 21 nt, Artificial Sequence
  GATA2 Guide RNA
cuccagcaucaccccuaagca

SEQ ID NO: 13726 - RNA, 21 nt, Artificial Sequence
  GATA2 Guide RNA
cugcgcugcuuaggggugaug

SEQ ID NO: 13727 - RNA, 21 nt, Artificial Sequence
  GATA2 Guide RNA
cugcuuaggggugaugcugga

SEQ ID NO: 13728 - RNA, 21 nt, Artificial Sequence
  GATA2 Guide RNA
cuuaggggugaugcuggaggc

SEQ ID NO: 13729 - RNA, 21 nt, Artificial Sequence
  GATA2 Guide RNA
cuugcugcgcugcuuaggggu

SEQ ID NO: 13730 - RNA, 21 nt, Artificial Sequence
  GATA2 Guide RNA
gaccggccuccagcaucaccc

SEQ ID NO: 13731 - RNA, 21 nt, Artificial Sequence
  GATA2 Guide RNA
gaugcuggaggccgguccccc

SEQ ID NO: 13732 - RNA, 21 nt, Artificial Sequence
  GATA2 Guide RNA
gcaucaccccuaagcagcgca

SEQ ID NO: 13733 - RNA, 21 nt, Artificial Sequence
  GATA2 Guide RNA
gccuccagcaucaccccuaag

SEQ ID NO: 13734 - RNA, 21 nt, Artificial Sequence
  GATA2 Guide RNA
gcgcugcuuaggggugaugcu

SEQ ID NO: 13735 - RNA, 21 nt, Artificial Sequence
  GATA2 Guide RNA
gcugcgcugcuuaggggugau

SEQ ID NO: 13736 - RNA, 21 nt, Artificial Sequence
  GATA2 Guide RNA
gcugcuuaggggugaugcugg

SEQ ID NO: 13737 - RNA, 21 nt, Artificial Sequence
  GATA2 Guide RNA
gcuuaggggugaugcuggagg

SEQ ID NO: 13738 - RNA, 21 nt, Artificial Sequence
  GATA2 Guide RNA
ggaccggccuccagcaucacc

SEQ ID NO: 13739 - RNA, 21 nt, Artificial Sequence
  GATA2 Guide RNA
ggccuccagcaucaccccuaa

SEQ ID NO: 13740 - RNA, 21 nt, Artificial Sequence
  GATA2 Guide RNA
gggaccggccuccagcaucac

SEQ ID NO: 13741 - RNA, 21 nt, Artificial Sequence
  GATA2 Guide RNA
ggggaccggccuccagcauca

SEQ ID NO: 13742 - RNA, 21 nt, Artificial Sequence
  GATA2 Guide RNA
gggggaccggccuccagcauc

SEQ ID NO: 13743 - RNA, 21 nt, Artificial Sequence
  GATA2 Guide RNA
ggggggaccggccuccagcau

SEQ ID NO: 13744 - RNA, 21 nt, Artificial Sequence
  GATA2 Guide RNA
ggggugaugcuggaggccggu

SEQ ID NO: 13745 - RNA, 21 nt, Artificial Sequence
  GATA2 Guide RNA
gggugaugcuggaggccgguc

SEQ ID NO: 13746 - RNA, 21 nt, Artificial Sequence
  GATA2 Guide RNA
ggugaugcuggaggccggucc

SEQ ID NO: 13747 - RNA, 21 nt, Artificial Sequence
  GATA2 Guide RNA
gugaugcuggaggccgguccc

SEQ ID NO: 13748 - RNA, 21 nt, Artificial Sequence
  GATA2 Guide RNA
uaggggugaugcuggaggccg

SEQ ID NO: 13749 - RNA, 21 nt, Artificial Sequence
  GATA2 Guide RNA
uccagcaucaccccuaagcag

SEQ ID NO: 13750 - RNA, 21 nt, Artificial Sequence
  GATA2 Guide RNA
uccuggggggaccggccucca

SEQ ID NO: 13751 - RNA, 21 nt, Artificial Sequence
  GATA2 Guide RNA
ugaugcuggaggccggucccc

SEQ ID NO: 13752 - RNA, 21 nt, Artificial Sequence
  GATA2 Guide RNA
ugcgcugcuuaggggugaugc

SEQ ID NO: 13753 - RNA, 21 nt, Artificial Sequence
  GATA2 Guide RNA
ugcugcgcugcuuagggguga

SEQ ID NO: 13754 - RNA, 21 nt, Artificial Sequence
  GATA2 Guide RNA
ugcuggaggccggucccccca

SEQ ID NO: 13755 - RNA, 21 nt, Artificial Sequence
  GATA2 Guide RNA
ugcuuaggggugaugcuggag

SEQ ID NO: 13756 - RNA, 21 nt, Artificial Sequence
  GATA2 Guide RNA
uggggggaccggccuccagca

SEQ ID NO: 13757 - RNA, 21 nt, Artificial Sequence
  GATA2 Guide RNA
uuaggggugaugcuggaggcc

SEQ ID NO: 13758 - RNA, 21 nt, Artificial Sequence
  GATA2 Guide RNA
uuccuggggggaccggccucc

SEQ ID NO: 13759 - RNA, 21 nt, Artificial Sequence
  GATA2 Guide RNA
uugcugcgcugcuuaggggug

SEQ ID NO: 13760 - RNA, 22 nt, Artificial Sequence
  GATA2 Guide RNA
accggccuccagcaucaccccu

SEQ ID NO: 13761 - RNA, 22 nt, Artificial Sequence
  GATA2 Guide RNA
agcaucaccccuaagcagcgca

SEQ ID NO: 13762 - RNA, 22 nt, Artificial Sequence
  GATA2 Guide RNA
aggggugaugcuggaggccggu

SEQ ID NO: 13763 - RNA, 22 nt, Artificial Sequence
  GATA2 Guide RNA
augcuggaggccggucccccca

SEQ ID NO: 13764 - RNA, 22 nt, Artificial Sequence
  GATA2 Guide RNA
cagcaucaccccuaagcagcgc

SEQ ID NO: 13765 - RNA, 22 nt, Artificial Sequence
  GATA2 Guide RNA
caucaccccuaagcagcgcagc

SEQ ID NO: 13766 - RNA, 22 nt, Artificial Sequence
  GATA2 Guide RNA
ccagcaucaccccuaagcagcg

SEQ ID NO: 13767 - RNA, 22 nt, Artificial Sequence
  GATA2 Guide RNA
ccggccuccagcaucaccccua

SEQ ID NO: 13768 - RNA, 22 nt, Artificial Sequence
  GATA2 Guide RNA
ccuccagcaucaccccuaagca

SEQ ID NO: 13769 - RNA, 22 nt, Artificial Sequence
  GATA2 Guide RNA
ccuugcugcgcugcuuaggggu

SEQ ID NO: 13770 - RNA, 22 nt, Artificial Sequence
  GATA2 Guide RNA
cgcugcuuaggggugaugcugg

SEQ ID NO: 13771 - RNA, 22 nt, Artificial Sequence
  GATA2 Guide RNA
cggccuccagcaucaccccuaa

SEQ ID NO: 13772 - RNA, 22 nt, Artificial Sequence
  GATA2 Guide RNA
cuccagcaucaccccuaagcag

SEQ ID NO: 13773 - RNA, 22 nt, Artificial Sequence
  GATA2 Guide RNA
cugcgcugcuuaggggugaugc

SEQ ID NO: 13774 - RNA, 22 nt, Artificial Sequence
  GATA2 Guide RNA
cugcuuaggggugaugcuggag

SEQ ID NO: 13775 - RNA, 22 nt, Artificial Sequence
  GATA2 Guide RNA
cuggggggaccggccuccagca

SEQ ID NO: 13776 - RNA, 22 nt, Artificial Sequence
  GATA2 Guide RNA
cuuaggggugaugcuggaggcc

SEQ ID NO: 13777 - RNA, 22 nt, Artificial Sequence
  GATA2 Guide RNA
cuuccuggggggaccggccucc

SEQ ID NO: 13778 - RNA, 22 nt, Artificial Sequence
  GATA2 Guide RNA
cuugcugcgcugcuuaggggug

SEQ ID NO: 13779 - RNA, 22 nt, Artificial Sequence
  GATA2 Guide RNA
gaccggccuccagcaucacccc

SEQ ID NO: 13780 - RNA, 22 nt, Artificial Sequence
  GATA2 Guide RNA
gaugcuggaggccggucccccc

SEQ ID NO: 13781 - RNA, 22 nt, Artificial Sequence
  GATA2 Guide RNA
gcaucaccccuaagcagcgcag

SEQ ID NO: 13782 - RNA, 22 nt, Artificial Sequence
  GATA2 Guide RNA
gccuccagcaucaccccuaagc

SEQ ID NO: 13783 - RNA, 22 nt, Artificial Sequence
  GATA2 Guide RNA
gcgcugcuuaggggugaugcug

SEQ ID NO: 13784 - RNA, 22 nt, Artificial Sequence
  GATA2 Guide RNA
gcugcgcugcuuaggggugaug

SEQ ID NO: 13785 - RNA, 22 nt, Artificial Sequence
  GATA2 Guide RNA
gcugcuuaggggugaugcugga

SEQ ID NO: 13786 - RNA, 22 nt, Artificial Sequence
  GATA2 Guide RNA
gcuuaggggugaugcuggaggc

SEQ ID NO: 13787 - RNA, 22 nt, Artificial Sequence
  GATA2 Guide RNA
ggaccggccuccagcaucaccc

SEQ ID NO: 13788 - RNA, 22 nt, Artificial Sequence
  GATA2 Guide RNA
ggccuccagcaucaccccuaag

SEQ ID NO: 13789 - RNA, 22 nt, Artificial Sequence
  GATA2 Guide RNA
gggaccggccuccagcaucacc

SEQ ID NO: 13790 - RNA, 22 nt, Artificial Sequence
  GATA2 Guide RNA
ggggaccggccuccagcaucac

SEQ ID NO: 13791 - RNA, 22 nt, Artificial Sequence
  GATA2 Guide RNA
gggggaccggccuccagcauca

SEQ ID NO: 13792 - RNA, 22 nt, Artificial Sequence
  GATA2 Guide RNA
ggggggaccggccuccagcauc

SEQ ID NO: 13793 - RNA, 22 nt, Artificial Sequence
  GATA2 Guide RNA
ggggugaugcuggaggccgguc

SEQ ID NO: 13794 - RNA, 22 nt, Artificial Sequence
  GATA2 Guide RNA
gggugaugcuggaggccggucc

SEQ ID NO: 13795 - RNA, 22 nt, Artificial Sequence
  GATA2 Guide RNA
ggugaugcuggaggccgguccc

SEQ ID NO: 13796 - RNA, 22 nt, Artificial Sequence
  GATA2 Guide RNA
gugaugcuggaggccggucccc

SEQ ID NO: 13797 - RNA, 22 nt, Artificial Sequence
  GATA2 Guide RNA
uaggggugaugcuggaggccgg

SEQ ID NO: 13798 - RNA, 22 nt, Artificial Sequence
  GATA2 Guide RNA
uccagcaucaccccuaagcagc

SEQ ID NO: 13799 - RNA, 22 nt, Artificial Sequence
  GATA2 Guide RNA
uccuggggggaccggccuccag

SEQ ID NO: 13800 - RNA, 22 nt, Artificial Sequence
  GATA2 Guide RNA
ugaugcuggaggccgguccccc

SEQ ID NO: 13801 - RNA, 22 nt, Artificial Sequence
  GATA2 Guide RNA
ugcgcugcuuaggggugaugcu

SEQ ID NO: 13802 - RNA, 22 nt, Artificial Sequence
  GATA2 Guide RNA
ugcugcgcugcuuaggggugau

SEQ ID NO: 13803 - RNA, 22 nt, Artificial Sequence
  GATA2 Guide RNA
ugcuggaggccgguccccccag

SEQ ID NO: 13804 - RNA, 22 nt, Artificial Sequence
  GATA2 Guide RNA
ugcuuaggggugaugcuggagg

SEQ ID NO: 13805 - RNA, 22 nt, Artificial Sequence
  GATA2 Guide RNA
uggggggaccggccuccagcau

SEQ ID NO: 13806 - RNA, 22 nt, Artificial Sequence
  GATA2 Guide RNA
uuaggggugaugcuggaggccg

SEQ ID NO: 13807 - RNA, 22 nt, Artificial Sequence
  GATA2 Guide RNA
uuccuggggggaccggccucca

SEQ ID NO: 13808 - RNA, 22 nt, Artificial Sequence
  GATA2 Guide RNA
uugcugcgcugcuuagggguga

SEQ ID NO: 13809 - RNA, 20 nt, Artificial Sequence
  GATA2 Guide RNA
aagccggaggccgguccccc

SEQ ID NO: 13810 - RNA, 20 nt, Artificial Sequence
  GATA2 Guide RNA
accggccuccggcuucaccc

SEQ ID NO: 13811 - RNA, 20 nt, Artificial Sequence
  GATA2 Guide RNA
aggggugaagccggaggccg

SEQ ID NO: 13812 - RNA, 20 nt, Artificial Sequence
  GATA2 Guide RNA
ccggccuccggcuucacccc

SEQ ID NO: 13813 - RNA, 20 nt, Artificial Sequence
  GATA2 Guide RNA
ccggcuucaccccuaagcag

SEQ ID NO: 13814 - RNA, 20 nt, Artificial Sequence
  GATA2 Guide RNA
ccuccggcuucaccccuaag

SEQ ID NO: 13815 - RNA, 20 nt, Artificial Sequence
  GATA2 Guide RNA
cgcugcuuaggggugaagcc

SEQ ID NO: 13816 - RNA, 20 nt, Artificial Sequence
  GATA2 Guide RNA
cggccuccggcuucaccccu

SEQ ID NO: 13817 - RNA, 20 nt, Artificial Sequence
  GATA2 Guide RNA
cggcuucaccccuaagcagc

SEQ ID NO: 13818 - RNA, 20 nt, Artificial Sequence
  GATA2 Guide RNA
cuccggcuucaccccuaagc

SEQ ID NO: 13819 - RNA, 20 nt, Artificial Sequence
  GATA2 Guide RNA
cugcgcugcuuaggggugaa

SEQ ID NO: 13820 - RNA, 20 nt, Artificial Sequence
  GATA2 Guide RNA
cugcuuaggggugaagccgg

SEQ ID NO: 13821 - RNA, 20 nt, Artificial Sequence
  GATA2 Guide RNA
cuuaggggugaagccggagg

SEQ ID NO: 13822 - RNA, 20 nt, Artificial Sequence
  GATA2 Guide RNA
cuuccuggggggaccggccu

SEQ ID NO: 13823 - RNA, 20 nt, Artificial Sequence
  GATA2 Guide RNA
gaagccggaggccggucccc

SEQ ID NO: 13824 - RNA, 20 nt, Artificial Sequence
  GATA2 Guide RNA
gaccggccuccggcuucacc

SEQ ID NO: 13825 - RNA, 20 nt, Artificial Sequence
  GATA2 Guide RNA
gccuccggcuucaccccuaa

SEQ ID NO: 13826 - RNA, 20 nt, Artificial Sequence
  GATA2 Guide RNA
gcgcugcuuaggggugaagc

SEQ ID NO: 13827 - RNA, 20 nt, Artificial Sequence
  GATA2 Guide RNA
gcugcuuaggggugaagccg

SEQ ID NO: 13828 - RNA, 20 nt, Artificial Sequence
  GATA2 Guide RNA
gcuuaggggugaagccggag

SEQ ID NO: 13829 - RNA, 20 nt, Artificial Sequence
  GATA2 Guide RNA
gcuuccuggggggaccggcc

SEQ ID NO: 13830 - RNA, 20 nt, Artificial Sequence
  GATA2 Guide RNA
ggaccggccuccggcuucac

SEQ ID NO: 13831 - RNA, 20 nt, Artificial Sequence
  GATA2 Guide RNA
ggccuccggcuucaccccua

SEQ ID NO: 13832 - RNA, 20 nt, Artificial Sequence
  GATA2 Guide RNA
gggaccggccuccggcuuca

SEQ ID NO: 13833 - RNA, 20 nt, Artificial Sequence
  GATA2 Guide RNA
ggggaccggccuccggcuuc

SEQ ID NO: 13834 - RNA, 20 nt, Artificial Sequence
  GATA2 Guide RNA
gggggaccggccuccggcuu

SEQ ID NO: 13835 - RNA, 20 nt, Artificial Sequence
  GATA2 Guide RNA
ggggugaagccggaggccgg

SEQ ID NO: 13836 - RNA, 20 nt, Artificial Sequence
  GATA2 Guide RNA
gggugaagccggaggccggu

SEQ ID NO: 13837 - RNA, 20 nt, Artificial Sequence
  GATA2 Guide RNA
ggugaagccggaggccgguc

SEQ ID NO: 13838 - RNA, 20 nt, Artificial Sequence
  GATA2 Guide RNA
gugaagccggaggccggucc

SEQ ID NO: 13839 - RNA, 20 nt, Artificial Sequence
  GATA2 Guide RNA
uaggggugaagccggaggcc

SEQ ID NO: 13840 - RNA, 20 nt, Artificial Sequence
  GATA2 Guide RNA
uccggcuucaccccuaagca

SEQ ID NO: 13841 - RNA, 20 nt, Artificial Sequence
  GATA2 Guide RNA
ugaagccggaggccgguccc

SEQ ID NO: 13842 - RNA, 20 nt, Artificial Sequence
  GATA2 Guide RNA
ugcgcugcuuaggggugaag

SEQ ID NO: 13843 - RNA, 20 nt, Artificial Sequence
  GATA2 Guide RNA
ugcuuaggggugaagccgga

SEQ ID NO: 13844 - RNA, 20 nt, Artificial Sequence
  GATA2 Guide RNA
uuaggggugaagccggaggc

SEQ ID NO: 13845 - RNA, 20 nt, Artificial Sequence
  GATA2 Guide RNA
uuccuggggggaccggccuc

SEQ ID NO: 13846 - RNA, 21 nt, Artificial Sequence
  GATA2 Guide RNA
accggccuccggcuucacccc

SEQ ID NO: 13847 - RNA, 21 nt, Artificial Sequence
  GATA2 Guide RNA
aggggugaagccggaggccgg

SEQ ID NO: 13848 - RNA, 21 nt, Artificial Sequence
  GATA2 Guide RNA
ccggccuccggcuucaccccu

SEQ ID NO: 13849 - RNA, 21 nt, Artificial Sequence
  GATA2 Guide RNA
ccggcuucaccccuaagcagc

SEQ ID NO: 13850 - RNA, 21 nt, Artificial Sequence
  GATA2 Guide RNA
ccuccggcuucaccccuaagc

SEQ ID NO: 13851 - RNA, 21 nt, Artificial Sequence
  GATA2 Guide RNA
cgcugcuuaggggugaagccg

SEQ ID NO: 13852 - RNA, 21 nt, Artificial Sequence
  GATA2 Guide RNA
cggccuccggcuucaccccua

SEQ ID NO: 13853 - RNA, 21 nt, Artificial Sequence
  GATA2 Guide RNA
cggcuucaccccuaagcagcg

SEQ ID NO: 13854 - RNA, 21 nt, Artificial Sequence
  GATA2 Guide RNA
cuccggcuucaccccuaagca

SEQ ID NO: 13855 - RNA, 21 nt, Artificial Sequence
  GATA2 Guide RNA
cugcgcugcuuaggggugaag

SEQ ID NO: 13856 - RNA, 21 nt, Artificial Sequence
  GATA2 Guide RNA
cugcuuaggggugaagccgga

SEQ ID NO: 13857 - RNA, 21 nt, Artificial Sequence
  GATA2 Guide RNA
cuuaggggugaagccggaggc

SEQ ID NO: 13858 - RNA, 21 nt, Artificial Sequence
  GATA2 Guide RNA
cuuccuggggggaccggccuc

SEQ ID NO: 13859 - RNA, 21 nt, Artificial Sequence
  GATA2 Guide RNA
gaccggccuccggcuucaccc

SEQ ID NO: 13860 - RNA, 21 nt, Artificial Sequence
  GATA2 Guide RNA
gccuccggcuucaccccuaag

SEQ ID NO: 13861 - RNA, 21 nt, Artificial Sequence
  GATA2 Guide RNA
gcgcugcuuaggggugaagcc

SEQ ID NO: 13862 - RNA, 21 nt, Artificial Sequence
  GATA2 Guide RNA
gcugcgcugcuuaggggugaa

SEQ ID NO: 13863 - RNA, 21 nt, Artificial Sequence
  GATA2 Guide RNA
gcugcuuaggggugaagccgg

SEQ ID NO: 13864 - RNA, 21 nt, Artificial Sequence
  GATA2 Guide RNA
gcuuaggggugaagccggagg

SEQ ID NO: 13865 - RNA, 21 nt, Artificial Sequence
  GATA2 Guide RNA
gcuuccuggggggaccggccu

SEQ ID NO: 13866 - RNA, 21 nt, Artificial Sequence
  GATA2 Guide RNA
ggaccggccuccggcuucacc

SEQ ID NO: 13867 - RNA, 21 nt, Artificial Sequence
  GATA2 Guide RNA
ggccuccggcuucaccccuaa

SEQ ID NO: 13868 - RNA, 21 nt, Artificial Sequence
  GATA2 Guide RNA
gggaccggccuccggcuucac

SEQ ID NO: 13869 - RNA, 21 nt, Artificial Sequence
  GATA2 Guide RNA
ggggaccggccuccggcuuca

SEQ ID NO: 13870 - RNA, 21 nt, Artificial Sequence
  GATA2 Guide RNA
ggggugaagccggaggccggu

SEQ ID NO: 13871 - RNA, 21 nt, Artificial Sequence
  GATA2 Guide RNA
gggugaagccggaggccgguc

SEQ ID NO: 13872 - RNA, 21 nt, Artificial Sequence
  GATA2 Guide RNA
ggugaagccggaggccggucc

SEQ ID NO: 13873 - RNA, 21 nt, Artificial Sequence
  GATA2 Guide RNA
gugaagccggaggccgguccc

SEQ ID NO: 13874 - RNA, 21 nt, Artificial Sequence
  GATA2 Guide RNA
uaggggugaagccggaggccg

SEQ ID NO: 13875 - RNA, 21 nt, Artificial Sequence
  GATA2 Guide RNA
uccggcuucaccccuaagcag

SEQ ID NO: 13876 - RNA, 21 nt, Artificial Sequence
  GATA2 Guide RNA
ugaagccggaggccggucccc

SEQ ID NO: 13877 - RNA, 21 nt, Artificial Sequence
  GATA2 Guide RNA
ugcgcugcuuaggggugaagc

SEQ ID NO: 13878 - RNA, 21 nt, Artificial Sequence
  GATA2 Guide RNA
ugcuuaggggugaagccggag

SEQ ID NO: 13879 - RNA, 21 nt, Artificial Sequence
  GATA2 Guide RNA
uuaggggugaagccggaggcc

SEQ ID NO: 13880 - RNA, 22 nt, Artificial Sequence
  GATA2 Guide RNA
aagccggaggccggucccccca

SEQ ID NO: 13881 - RNA, 22 nt, Artificial Sequence
  GATA2 Guide RNA
accggccuccggcuucaccccu

SEQ ID NO: 13882 - RNA, 22 nt, Artificial Sequence
  GATA2 Guide RNA
aggcuuccuggggggaccggcc

SEQ ID NO: 13883 - RNA, 22 nt, Artificial Sequence
  GATA2 Guide RNA
aggggugaagccggaggccggu

SEQ ID NO: 13884 - RNA, 22 nt, Artificial Sequence
  GATA2 Guide RNA
ccggccuccggcuucaccccua

SEQ ID NO: 13885 - RNA, 22 nt, Artificial Sequence
  GATA2 Guide RNA
ccggcuucaccccuaagcagcg

SEQ ID NO: 13886 - RNA, 22 nt, Artificial Sequence
  GATA2 Guide RNA
ccuccggcuucaccccuaagca

SEQ ID NO: 13887 - RNA, 22 nt, Artificial Sequence
  GATA2 Guide RNA
cgcugcuuaggggugaagccgg

SEQ ID NO: 13888 - RNA, 22 nt, Artificial Sequence
  GATA2 Guide RNA
cggaggccgguccccccaggaa

SEQ ID NO: 13889 - RNA, 22 nt, Artificial Sequence
  GATA2 Guide RNA
cggccuccggcuucaccccuaa

SEQ ID NO: 13890 - RNA, 22 nt, Artificial Sequence
  GATA2 Guide RNA
cggcuucaccccuaagcagcgc

SEQ ID NO: 13891 - RNA, 22 nt, Artificial Sequence
  GATA2 Guide RNA
cuccggcuucaccccuaagcag

SEQ ID NO: 13892 - RNA, 22 nt, Artificial Sequence
  GATA2 Guide RNA
cugcgcugcuuaggggugaagc

SEQ ID NO: 13893 - RNA, 22 nt, Artificial Sequence
  GATA2 Guide RNA
cugcuuaggggugaagccggag

SEQ ID NO: 13894 - RNA, 22 nt, Artificial Sequence
  GATA2 Guide RNA
cuuaggggugaagccggaggcc

SEQ ID NO: 13895 - RNA, 22 nt, Artificial Sequence
  GATA2 Guide RNA
gaccggccuccggcuucacccc

SEQ ID NO: 13896 - RNA, 22 nt, Artificial Sequence
  GATA2 Guide RNA
gccuccggcuucaccccuaagc

SEQ ID NO: 13897 - RNA, 22 nt, Artificial Sequence
  GATA2 Guide RNA
gcgcugcuuaggggugaagccg

SEQ ID NO: 13898 - RNA, 22 nt, Artificial Sequence
  GATA2 Guide RNA
gcugcgcugcuuaggggugaag

SEQ ID NO: 13899 - RNA, 22 nt, Artificial Sequence
  GATA2 Guide RNA
gcugcuuaggggugaagccgga

SEQ ID NO: 13900 - RNA, 22 nt, Artificial Sequence
  GATA2 Guide RNA
gcuuaggggugaagccggaggc

SEQ ID NO: 13901 - RNA, 22 nt, Artificial Sequence
  GATA2 Guide RNA
gcuuccuggggggaccggccuc

SEQ ID NO: 13902 - RNA, 22 nt, Artificial Sequence
  GATA2 Guide RNA
ggaccggccuccggcuucaccc

SEQ ID NO: 13903 - RNA, 22 nt, Artificial Sequence
  GATA2 Guide RNA
ggccuccggcuucaccccuaag

SEQ ID NO: 13904 - RNA, 22 nt, Artificial Sequence
  GATA2 Guide RNA
ggcuuccuggggggaccggccu

SEQ ID NO: 13905 - RNA, 22 nt, Artificial Sequence
  GATA2 Guide RNA
gggaccggccuccggcuucacc

SEQ ID NO: 13906 - RNA, 22 nt, Artificial Sequence
  GATA2 Guide RNA
ggggaccggccuccggcuucac

SEQ ID NO: 13907 - RNA, 22 nt, Artificial Sequence
  GATA2 Guide RNA
gggggaccggccuccggcuuca

SEQ ID NO: 13908 - RNA, 22 nt, Artificial Sequence
  GATA2 Guide RNA
ggggugaagccggaggccgguc

SEQ ID NO: 13909 - RNA, 22 nt, Artificial Sequence
  GATA2 Guide RNA
gggugaagccggaggccggucc

SEQ ID NO: 13910 - RNA, 22 nt, Artificial Sequence
  GATA2 Guide RNA
ggugaagccggaggccgguccc

SEQ ID NO: 13911 - RNA, 22 nt, Artificial Sequence
  GATA2 Guide RNA
gugaagccggaggccggucccc

SEQ ID NO: 13912 - RNA, 22 nt, Artificial Sequence
  GATA2 Guide RNA
uaggggugaagccggaggccgg

SEQ ID NO: 13913 - RNA, 22 nt, Artificial Sequence
  GATA2 Guide RNA
uccggcuucaccccuaagcagc

SEQ ID NO: 13914 - RNA, 22 nt, Artificial Sequence
  GATA2 Guide RNA
ugaagccggaggccgguccccc

SEQ ID NO: 13915 - RNA, 22 nt, Artificial Sequence
  GATA2 Guide RNA
ugcgcugcuuaggggugaagcc

SEQ ID NO: 13916 - RNA, 22 nt, Artificial Sequence
  GATA2 Guide RNA
ugcugcgcugcuuaggggugaa

SEQ ID NO: 13917 - RNA, 22 nt, Artificial Sequence
  GATA2 Guide RNA
ugcuuaggggugaagccggagg

SEQ ID NO: 13918 - RNA, 22 nt, Artificial Sequence
  GATA2 Guide RNA
uggggggaccggccuccggcuu

SEQ ID NO: 13919 - RNA, 22 nt, Artificial Sequence
  GATA2 Guide RNA
uuaggggugaagccggaggccg

SEQ ID NO: 13920 - RNA, 22 nt, Artificial Sequence
  GATA2 Guide RNA
uuccuggggggaccggccuccg

SEQ ID NO: 13921 - RNA, 20 nt, Artificial Sequence
  GATA2 Guide RNA
aagcuggaggccgguucccc

SEQ ID NO: 13922 - RNA, 20 nt, Artificial Sequence
  GATA2 Guide RNA
accccggaggcuuccugggg

SEQ ID NO: 13923 - RNA, 20 nt, Artificial Sequence
  GATA2 Guide RNA
agcuggaggccgguuccccc

SEQ ID NO: 13924 - RNA, 20 nt, Artificial Sequence
  GATA2 Guide RNA
aggccgguuccccccaggaa

SEQ ID NO: 13925 - RNA, 20 nt, Artificial Sequence
  GATA2 Guide RNA
aggcuuccuggggggaaccg

SEQ ID NO: 13926 - RNA, 20 nt, Artificial Sequence
  GATA2 Guide RNA
aggggugaagcuggaggccg

SEQ ID NO: 13927 - RNA, 20 nt, Artificial Sequence
  GATA2 Guide RNA
caccccggaggcuuccuggg

SEQ ID NO: 13928 - RNA, 20 nt, Artificial Sequence
  GATA2 Guide RNA
ccaccccggaggcuuccugg

SEQ ID NO: 13929 - RNA, 20 nt, Artificial Sequence
  GATA2 Guide RNA
ccccccaggaagccuccggg

SEQ ID NO: 13930 - RNA, 20 nt, Artificial Sequence
  GATA2 Guide RNA
ccccggaggcuuccuggggg

SEQ ID NO: 13931 - RNA, 20 nt, Artificial Sequence
  GATA2 Guide RNA
cccggaggcuuccugggggg

SEQ ID NO: 13932 - RNA, 20 nt, Artificial Sequence
  GATA2 Guide RNA
ccggaggcuuccugggggga

SEQ ID NO: 13933 - RNA, 20 nt, Artificial Sequence
  GATA2 Guide RNA
ccgguuccccccaggaagcc

SEQ ID NO: 13934 - RNA, 20 nt, Artificial Sequence
  GATA2 Guide RNA
ccuggggggaaccggccucc

SEQ ID NO: 13935 - RNA, 20 nt, Artificial Sequence
  GATA2 Guide RNA
cggaggcuuccuggggggaa

SEQ ID NO: 13936 - RNA, 20 nt, Artificial Sequence
  GATA2 Guide RNA
cgguuccccccaggaagccu

SEQ ID NO: 13937 - RNA, 20 nt, Artificial Sequence
  GATA2 Guide RNA
cuggaggccgguucccccca

SEQ ID NO: 13938 - RNA, 20 nt, Artificial Sequence
  GATA2 Guide RNA
cuggggggaaccggccucca

SEQ ID NO: 13939 - RNA, 20 nt, Artificial Sequence
  GATA2 Guide RNA
cuuccuggggggaaccggcc

SEQ ID NO: 13940 - RNA, 20 nt, Artificial Sequence
  GATA2 Guide RNA
gaaccggccuccagcuucac

SEQ ID NO: 13941 - RNA, 20 nt, Artificial Sequence
  GATA2 Guide RNA
gaagcuggaggccgguuccc

SEQ ID NO: 13942 - RNA, 20 nt, Artificial Sequence
  GATA2 Guide RNA
gaggccgguuccccccagga

SEQ ID NO: 13943 - RNA, 20 nt, Artificial Sequence
  GATA2 Guide RNA
gaggcuuccuggggggaacc

SEQ ID NO: 13944 - RNA, 20 nt, Artificial Sequence
  GATA2 Guide RNA
gccgguuccccccaggaagc

SEQ ID NO: 13945 - RNA, 20 nt, Artificial Sequence
  GATA2 Guide RNA
gcuggaggccgguucccccc

SEQ ID NO: 13946 - RNA, 20 nt, Artificial Sequence
  GATA2 Guide RNA
gcuuccuggggggaaccggc

SEQ ID NO: 13947 - RNA, 20 nt, Artificial Sequence
  GATA2 Guide RNA
ggaaccggccuccagcuuca

SEQ ID NO: 13948 - RNA, 20 nt, Artificial Sequence
  GATA2 Guide RNA
ggaggccgguuccccccagg

SEQ ID NO: 13949 - RNA, 20 nt, Artificial Sequence
  GATA2 Guide RNA
ggaggcuuccuggggggaac

SEQ ID NO: 13950 - RNA, 20 nt, Artificial Sequence
  GATA2 Guide RNA
ggccgguuccccccaggaag

SEQ ID NO: 13951 - RNA, 20 nt, Artificial Sequence
  GATA2 Guide RNA
ggcuuccuggggggaaccgg

SEQ ID NO: 13952 - RNA, 20 nt, Artificial Sequence
  GATA2 Guide RNA
gggaaccggccuccagcuuc

SEQ ID NO: 13953 - RNA, 20 nt, Artificial Sequence
  GATA2 Guide RNA
ggggaaccggccuccagcuu

SEQ ID NO: 13954 - RNA, 20 nt, Artificial Sequence
  GATA2 Guide RNA
gggggaaccggccuccagcu

SEQ ID NO: 13955 - RNA, 20 nt, Artificial Sequence
  GATA2 Guide RNA
ggggggaaccggccuccagc

SEQ ID NO: 13956 - RNA, 20 nt, Artificial Sequence
  GATA2 Guide RNA
ggggugaagcuggaggccgg

SEQ ID NO: 13957 - RNA, 20 nt, Artificial Sequence
  GATA2 Guide RNA
gggugaagcuggaggccggu

SEQ ID NO: 13958 - RNA, 20 nt, Artificial Sequence
  GATA2 Guide RNA
ggugaagcuggaggccgguu

SEQ ID NO: 13959 - RNA, 20 nt, Artificial Sequence
  GATA2 Guide RNA
gguuccccccaggaagccuc

SEQ ID NO: 13960 - RNA, 20 nt, Artificial Sequence
  GATA2 Guide RNA
gugaagcuggaggccgguuc

SEQ ID NO: 13961 - RNA, 20 nt, Artificial Sequence
  GATA2 Guide RNA
guuccccccaggaagccucc

SEQ ID NO: 13962 - RNA, 20 nt, Artificial Sequence
  GATA2 Guide RNA
uccccccaggaagccuccgg

SEQ ID NO: 13963 - RNA, 20 nt, Artificial Sequence
  GATA2 Guide RNA
uccuggggggaaccggccuc

SEQ ID NO: 13964 - RNA, 20 nt, Artificial Sequence
  GATA2 Guide RNA
ugaagcuggaggccgguucc

SEQ ID NO: 13965 - RNA, 20 nt, Artificial Sequence
  GATA2 Guide RNA
uggaggccgguuccccccag

SEQ ID NO: 13966 - RNA, 20 nt, Artificial Sequence
  GATA2 Guide RNA
uggggggaaccggccuccag

SEQ ID NO: 13967 - RNA, 20 nt, Artificial Sequence
  GATA2 Guide RNA
uuccccccaggaagccuccg

SEQ ID NO: 13968 - RNA, 20 nt, Artificial Sequence
  GATA2 Guide RNA
uuccuggggggaaccggccu

SEQ ID NO: 13969 - RNA, 21 nt, Artificial Sequence
  GATA2 Guide RNA
aagcuggaggccgguuccccc

SEQ ID NO: 13970 - RNA, 21 nt, Artificial Sequence
  GATA2 Guide RNA
accccggaggcuuccuggggg

SEQ ID NO: 13971 - RNA, 21 nt, Artificial Sequence
  GATA2 Guide RNA
agcuggaggccgguucccccc

SEQ ID NO: 13972 - RNA, 21 nt, Artificial Sequence
  GATA2 Guide RNA
aggccgguuccccccaggaag

SEQ ID NO: 13973 - RNA, 21 nt, Artificial Sequence
  GATA2 Guide RNA
aggcuuccuggggggaaccgg

SEQ ID NO: 13974 - RNA, 21 nt, Artificial Sequence
  GATA2 Guide RNA
aggggugaagcuggaggccgg

SEQ ID NO: 13975 - RNA, 21 nt, Artificial Sequence
  GATA2 Guide RNA
caccccggaggcuuccugggg

SEQ ID NO: 13976 - RNA, 21 nt, Artificial Sequence
  GATA2 Guide RNA
ccaccccggaggcuuccuggg

SEQ ID NO: 13977 - RNA, 21 nt, Artificial Sequence
  GATA2 Guide RNA
cccggaggcuuccugggggga

SEQ ID NO: 13978 - RNA, 21 nt, Artificial Sequence
  GATA2 Guide RNA
ccggaggcuuccuggggggaa

SEQ ID NO: 13979 - RNA, 21 nt, Artificial Sequence
  GATA2 Guide RNA
ccgguuccccccaggaagccu

SEQ ID NO: 13980 - RNA, 21 nt, Artificial Sequence
  GATA2 Guide RNA
ccuggggggaaccggccucca

SEQ ID NO: 13981 - RNA, 21 nt, Artificial Sequence
  GATA2 Guide RNA
cggaggcuuccuggggggaac

SEQ ID NO: 13982 - RNA, 21 nt, Artificial Sequence
  GATA2 Guide RNA
cgguuccccccaggaagccuc

SEQ ID NO: 13983 - RNA, 21 nt, Artificial Sequence
  GATA2 Guide RNA
cuggaggccgguuccccccag

SEQ ID NO: 13984 - RNA, 21 nt, Artificial Sequence
  GATA2 Guide RNA
cuggggggaaccggccuccag

SEQ ID NO: 13985 - RNA, 21 nt, Artificial Sequence
  GATA2 Guide RNA
cuuccuggggggaaccggccu

SEQ ID NO: 13986 - RNA, 21 nt, Artificial Sequence
  GATA2 Guide RNA
gaaccggccuccagcuucacc

SEQ ID NO: 13987 - RNA, 21 nt, Artificial Sequence
  GATA2 Guide RNA
gaagcuggaggccgguucccc

SEQ ID NO: 13988 - RNA, 21 nt, Artificial Sequence
  GATA2 Guide RNA
gaggccgguuccccccaggaa

SEQ ID NO: 13989 - RNA, 21 nt, Artificial Sequence
  GATA2 Guide RNA
gaggcuuccuggggggaaccg

SEQ ID NO: 13990 - RNA, 21 nt, Artificial Sequence
  GATA2 Guide RNA
gccgguuccccccaggaagcc

SEQ ID NO: 13991 - RNA, 21 nt, Artificial Sequence
  GATA2 Guide RNA
gcuggaggccgguucccccca

SEQ ID NO: 13992 - RNA, 21 nt, Artificial Sequence
  GATA2 Guide RNA
gcuuccuggggggaaccggcc

SEQ ID NO: 13993 - RNA, 21 nt, Artificial Sequence
  GATA2 Guide RNA
ggaaccggccuccagcuucac

SEQ ID NO: 13994 - RNA, 21 nt, Artificial Sequence
  GATA2 Guide RNA
ggaggccgguuccccccagga

SEQ ID NO: 13995 - RNA, 21 nt, Artificial Sequence
  GATA2 Guide RNA
ggaggcuuccuggggggaacc

SEQ ID NO: 13996 - RNA, 21 nt, Artificial Sequence
  GATA2 Guide RNA
ggccgguuccccccaggaagc

SEQ ID NO: 13997 - RNA, 21 nt, Artificial Sequence
  GATA2 Guide RNA
ggcuuccuggggggaaccggc

SEQ ID NO: 13998 - RNA, 21 nt, Artificial Sequence
  GATA2 Guide RNA
gggaaccggccuccagcuuca

SEQ ID NO: 13999 - RNA, 21 nt, Artificial Sequence
  GATA2 Guide RNA
ggggaaccggccuccagcuuc

SEQ ID NO: 14000 - RNA, 21 nt, Artificial Sequence
  GATA2 Guide RNA
gggggaaccggccuccagcuu

SEQ ID NO: 14001 - RNA, 21 nt, Artificial Sequence
  GATA2 Guide RNA
ggggggaaccggccuccagcu

SEQ ID NO: 14002 - RNA, 21 nt, Artificial Sequence
  GATA2 Guide RNA
ggggugaagcuggaggccggu

SEQ ID NO: 14003 - RNA, 21 nt, Artificial Sequence
  GATA2 Guide RNA
gggugaagcuggaggccgguu

SEQ ID NO: 14004 - RNA, 21 nt, Artificial Sequence
  GATA2 Guide RNA
ggugaagcuggaggccgguuc

SEQ ID NO: 14005 - RNA, 21 nt, Artificial Sequence
  GATA2 Guide RNA
gguuccccccaggaagccucc

SEQ ID NO: 14006 - RNA, 21 nt, Artificial Sequence
  GATA2 Guide RNA
gugaagcuggaggccgguucc

SEQ ID NO: 14007 - RNA, 21 nt, Artificial Sequence
  GATA2 Guide RNA
guuccccccaggaagccuccg

SEQ ID NO: 14008 - RNA, 21 nt, Artificial Sequence
  GATA2 Guide RNA
uaggggugaagcuggaggccg

SEQ ID NO: 14009 - RNA, 21 nt, Artificial Sequence
  GATA2 Guide RNA
uccaccccggaggcuuccugg

SEQ ID NO: 14010 - RNA, 21 nt, Artificial Sequence
  GATA2 Guide RNA
uccccccaggaagccuccggg

SEQ ID NO: 14011 - RNA, 21 nt, Artificial Sequence
  GATA2 Guide RNA
uccuggggggaaccggccucc

SEQ ID NO: 14012 - RNA, 21 nt, Artificial Sequence
  GATA2 Guide RNA
ugaagcuggaggccgguuccc

SEQ ID NO: 14013 - RNA, 21 nt, Artificial Sequence
  GATA2 Guide RNA
uggaggccgguuccccccagg

SEQ ID NO: 14014 - RNA, 21 nt, Artificial Sequence
  GATA2 Guide RNA
uggggggaaccggccuccagc

SEQ ID NO: 14015 - RNA, 21 nt, Artificial Sequence
  GATA2 Guide RNA
uuccccccaggaagccuccgg

SEQ ID NO: 14016 - RNA, 21 nt, Artificial Sequence
  GATA2 Guide RNA
uuccuggggggaaccggccuc

SEQ ID NO: 14017 - RNA, 22 nt, Artificial Sequence
  GATA2 Guide RNA
aagcuggaggccgguucccccc

SEQ ID NO: 14018 - RNA, 22 nt, Artificial Sequence
  GATA2 Guide RNA
accccggaggcuuccugggggg

SEQ ID NO: 14019 - RNA, 22 nt, Artificial Sequence
  GATA2 Guide RNA
agcuggaggccgguucccccca

SEQ ID NO: 14020 - RNA, 22 nt, Artificial Sequence
  GATA2 Guide RNA
aggccgguuccccccaggaagc

SEQ ID NO: 14021 - RNA, 22 nt, Artificial Sequence
  GATA2 Guide RNA
aggcuuccuggggggaaccggc

SEQ ID NO: 14022 - RNA, 22 nt, Artificial Sequence
  GATA2 Guide RNA
aggggugaagcuggaggccggu

SEQ ID NO: 14023 - RNA, 22 nt, Artificial Sequence
  GATA2 Guide RNA
caccccggaggcuuccuggggg

SEQ ID NO: 14024 - RNA, 22 nt, Artificial Sequence
  GATA2 Guide RNA
ccaccccggaggcuuccugggg

SEQ ID NO: 14025 - RNA, 22 nt, Artificial Sequence
  GATA2 Guide RNA
ccccccaggaagccuccggggu

SEQ ID NO: 14026 - RNA, 22 nt, Artificial Sequence
  GATA2 Guide RNA
ccccggaggcuuccugggggga

SEQ ID NO: 14027 - RNA, 22 nt, Artificial Sequence
  GATA2 Guide RNA
cccggaggcuuccuggggggaa

SEQ ID NO: 14028 - RNA, 22 nt, Artificial Sequence
  GATA2 Guide RNA
ccggaggcuuccuggggggaac

SEQ ID NO: 14029 - RNA, 22 nt, Artificial Sequence
  GATA2 Guide RNA
ccgguuccccccaggaagccuc

SEQ ID NO: 14030 - RNA, 22 nt, Artificial Sequence
  GATA2 Guide RNA
ccuggggggaaccggccuccag

SEQ ID NO: 14031 - RNA, 22 nt, Artificial Sequence
  GATA2 Guide RNA
cggaggcuuccuggggggaacc

SEQ ID NO: 14032 - RNA, 22 nt, Artificial Sequence
  GATA2 Guide RNA
cgguuccccccaggaagccucc

SEQ ID NO: 14033 - RNA, 22 nt, Artificial Sequence
  GATA2 Guide RNA
cuggaggccgguuccccccagg

SEQ ID NO: 14034 - RNA, 22 nt, Artificial Sequence
  GATA2 Guide RNA
cuggggggaaccggccuccagc

SEQ ID NO: 14035 - RNA, 22 nt, Artificial Sequence
  GATA2 Guide RNA
cuuccuggggggaaccggccuc

SEQ ID NO: 14036 - RNA, 22 nt, Artificial Sequence
  GATA2 Guide RNA
gaaccggccuccagcuucaccc

SEQ ID NO: 14037 - RNA, 22 nt, Artificial Sequence
  GATA2 Guide RNA
gaagcuggaggccgguuccccc

SEQ ID NO: 14038 - RNA, 22 nt, Artificial Sequence
  GATA2 Guide RNA
gaggccgguuccccccaggaag

SEQ ID NO: 14039 - RNA, 22 nt, Artificial Sequence
  GATA2 Guide RNA
gaggcuuccuggggggaaccgg

SEQ ID NO: 14040 - RNA, 22 nt, Artificial Sequence
  GATA2 Guide RNA
gccgguuccccccaggaagccu

SEQ ID NO: 14041 - RNA, 22 nt, Artificial Sequence
  GATA2 Guide RNA
gcuggaggccgguuccccccag

SEQ ID NO: 14042 - RNA, 22 nt, Artificial Sequence
  GATA2 Guide RNA
gcuuccuggggggaaccggccu

SEQ ID NO: 14043 - RNA, 22 nt, Artificial Sequence
  GATA2 Guide RNA
ggaaccggccuccagcuucacc

SEQ ID NO: 14044 - RNA, 22 nt, Artificial Sequence
  GATA2 Guide RNA
ggaggccgguuccccccaggaa

SEQ ID NO: 14045 - RNA, 22 nt, Artificial Sequence
  GATA2 Guide RNA
ggaggcuuccuggggggaaccg

SEQ ID NO: 14046 - RNA, 22 nt, Artificial Sequence
  GATA2 Guide RNA
ggccgguuccccccaggaagcc

SEQ ID NO: 14047 - RNA, 22 nt, Artificial Sequence
  GATA2 Guide RNA
ggcuuccuggggggaaccggcc

SEQ ID NO: 14048 - RNA, 22 nt, Artificial Sequence
  GATA2 Guide RNA
gggaaccggccuccagcuucac

SEQ ID NO: 14049 - RNA, 22 nt, Artificial Sequence
  GATA2 Guide RNA
ggggaaccggccuccagcuuca

SEQ ID NO: 14050 - RNA, 22 nt, Artificial Sequence
  GATA2 Guide RNA
gggggaaccggccuccagcuuc

SEQ ID NO: 14051 - RNA, 22 nt, Artificial Sequence
  GATA2 Guide RNA
ggggggaaccggccuccagcuu

SEQ ID NO: 14052 - RNA, 22 nt, Artificial Sequence
  GATA2 Guide RNA
ggggugaagcuggaggccgguu

SEQ ID NO: 14053 - RNA, 22 nt, Artificial Sequence
  GATA2 Guide RNA
gggugaagcuggaggccgguuc

SEQ ID NO: 14054 - RNA, 22 nt, Artificial Sequence
  GATA2 Guide RNA
ggugaagcuggaggccgguucc

SEQ ID NO: 14055 - RNA, 22 nt, Artificial Sequence
  GATA2 Guide RNA
gguuccccccaggaagccuccg

SEQ ID NO: 14056 - RNA, 22 nt, Artificial Sequence
  GATA2 Guide RNA
gugaagcuggaggccgguuccc

SEQ ID NO: 14057 - RNA, 22 nt, Artificial Sequence
  GATA2 Guide RNA
guuccccccaggaagccuccgg

SEQ ID NO: 14058 - RNA, 22 nt, Artificial Sequence
  GATA2 Guide RNA
uaggggugaagcuggaggccgg

SEQ ID NO: 14059 - RNA, 22 nt, Artificial Sequence
  GATA2 Guide RNA
uccaccccggaggcuuccuggg

SEQ ID NO: 14060 - RNA, 22 nt, Artificial Sequence
  GATA2 Guide RNA
uccccccaggaagccuccgggg

SEQ ID NO: 14061 - RNA, 22 nt, Artificial Sequence
  GATA2 Guide RNA
uccuggggggaaccggccucca

SEQ ID NO: 14062 - RNA, 22 nt, Artificial Sequence
  GATA2 Guide RNA
ugaagcuggaggccgguucccc

SEQ ID NO: 14063 - RNA, 22 nt, Artificial Sequence
  GATA2 Guide RNA
uggaggccgguuccccccagga

SEQ ID NO: 14064 - RNA, 22 nt, Artificial Sequence
  GATA2 Guide RNA
uggggggaaccggccuccagcu

SEQ ID NO: 14065 - RNA, 22 nt, Artificial Sequence
  GATA2 Guide RNA
uuaggggugaagcuggaggccg

SEQ ID NO: 14066 - RNA, 22 nt, Artificial Sequence
  GATA2 Guide RNA
uuccaccccggaggcuuccugg

SEQ ID NO: 14067 - RNA, 22 nt, Artificial Sequence
  GATA2 Guide RNA
uuccccccaggaagccuccggg

SEQ ID NO: 14068 - RNA, 22 nt, Artificial Sequence
  GATA2 Guide RNA
uuccuggggggaaccggccucc

SEQ ID NO: 14069 - RNA, 20 nt, Artificial Sequence
  GATA2 Guide RNA
aagcuggaggccgguacccc

SEQ ID NO: 14070 - RNA, 20 nt, Artificial Sequence
  GATA2 Guide RNA
acccccaggaagccuccggg

SEQ ID NO: 14071 - RNA, 20 nt, Artificial Sequence
  GATA2 Guide RNA
agcuggaggccgguaccccc

SEQ ID NO: 14072 - RNA, 20 nt, Artificial Sequence
  GATA2 Guide RNA
aggccgguacccccaggaag

SEQ ID NO: 14073 - RNA, 20 nt, Artificial Sequence
  GATA2 Guide RNA
aggcuuccuggggguaccgg

SEQ ID NO: 14074 - RNA, 20 nt, Artificial Sequence
  GATA2 Guide RNA
cccggaggcuuccugggggu

SEQ ID NO: 14075 - RNA, 20 nt, Artificial Sequence
  GATA2 Guide RNA
ccggaggcuuccugggggua

SEQ ID NO: 14076 - RNA, 20 nt, Artificial Sequence
  GATA2 Guide RNA
ccgguacccccaggaagccu

SEQ ID NO: 14077 - RNA, 20 nt, Artificial Sequence
  GATA2 Guide RNA
ccuggggguaccggccucca

SEQ ID NO: 14078 - RNA, 20 nt, Artificial Sequence
  GATA2 Guide RNA
cggaggcuuccuggggguac

SEQ ID NO: 14079 - RNA, 20 nt, Artificial Sequence
  GATA2 Guide RNA
cgguacccccaggaagccuc

SEQ ID NO: 14080 - RNA, 20 nt, Artificial Sequence
  GATA2 Guide RNA
cuggaggccgguacccccag

SEQ ID NO: 14081 - RNA, 20 nt, Artificial Sequence
  GATA2 Guide RNA
cuggggguaccggccuccag

SEQ ID NO: 14082 - RNA, 20 nt, Artificial Sequence
  GATA2 Guide RNA
cuuccuggggguaccggccu

SEQ ID NO: 14083 - RNA, 20 nt, Artificial Sequence
  GATA2 Guide RNA
gaagcuggaggccgguaccc

SEQ ID NO: 14084 - RNA, 20 nt, Artificial Sequence
  GATA2 Guide RNA
gaggccgguacccccaggaa

SEQ ID NO: 14085 - RNA, 20 nt, Artificial Sequence
  GATA2 Guide RNA
gaggcuuccuggggguaccg

SEQ ID NO: 14086 - RNA, 20 nt, Artificial Sequence
  GATA2 Guide RNA
gccgguacccccaggaagcc

SEQ ID NO: 14087 - RNA, 20 nt, Artificial Sequence
  GATA2 Guide RNA
gcuggaggccgguaccccca

SEQ ID NO: 14088 - RNA, 20 nt, Artificial Sequence
  GATA2 Guide RNA
gcuuccuggggguaccggcc

SEQ ID NO: 14089 - RNA, 20 nt, Artificial Sequence
  GATA2 Guide RNA
ggaggccgguacccccagga

SEQ ID NO: 14090 - RNA, 20 nt, Artificial Sequence
  GATA2 Guide RNA
ggaggcuuccuggggguacc

SEQ ID NO: 14091 - RNA, 20 nt, Artificial Sequence
  GATA2 Guide RNA
ggccgguacccccaggaagc

SEQ ID NO: 14092 - RNA, 20 nt, Artificial Sequence
  GATA2 Guide RNA
ggcuuccuggggguaccggc

SEQ ID NO: 14093 - RNA, 20 nt, Artificial Sequence
  GATA2 Guide RNA
ggggguaccggccuccagcu

SEQ ID NO: 14094 - RNA, 20 nt, Artificial Sequence
  GATA2 Guide RNA
gggguaccggccuccagcuu

SEQ ID NO: 14095 - RNA, 20 nt, Artificial Sequence
  GATA2 Guide RNA
ggguaccggccuccagcuuc

SEQ ID NO: 14096 - RNA, 20 nt, Artificial Sequence
  GATA2 Guide RNA
gguacccccaggaagccucc

SEQ ID NO: 14097 - RNA, 20 nt, Artificial Sequence
  GATA2 Guide RNA
gguaccggccuccagcuuca

SEQ ID NO: 14098 - RNA, 20 nt, Artificial Sequence
  GATA2 Guide RNA
ggugaagcuggaggccggua

SEQ ID NO: 14099 - RNA, 20 nt, Artificial Sequence
  GATA2 Guide RNA
guacccccaggaagccuccg

SEQ ID NO: 14100 - RNA, 20 nt, Artificial Sequence
  GATA2 Guide RNA
guaccggccuccagcuucac

SEQ ID NO: 14101 - RNA, 20 nt, Artificial Sequence
  GATA2 Guide RNA
gugaagcuggaggccgguac

SEQ ID NO: 14102 - RNA, 20 nt, Artificial Sequence
  GATA2 Guide RNA
uacccccaggaagccuccgg

SEQ ID NO: 14103 - RNA, 20 nt, Artificial Sequence
  GATA2 Guide RNA
uccuggggguaccggccucc

SEQ ID NO: 14104 - RNA, 20 nt, Artificial Sequence
  GATA2 Guide RNA
ugaagcuggaggccgguacc

SEQ ID NO: 14105 - RNA, 20 nt, Artificial Sequence
  GATA2 Guide RNA
uggaggccgguacccccagg

SEQ ID NO: 14106 - RNA, 20 nt, Artificial Sequence
  GATA2 Guide RNA
uggggguaccggccuccagc

SEQ ID NO: 14107 - RNA, 20 nt, Artificial Sequence
  GATA2 Guide RNA
uuccuggggguaccggccuc

SEQ ID NO: 14108 - RNA, 21 nt, Artificial Sequence
  GATA2 Guide RNA
aagcuggaggccgguaccccc

SEQ ID NO: 14109 - RNA, 21 nt, Artificial Sequence
  GATA2 Guide RNA
acccccaggaagccuccgggg

SEQ ID NO: 14110 - RNA, 21 nt, Artificial Sequence
  GATA2 Guide RNA
agcuggaggccgguaccccca

SEQ ID NO: 14111 - RNA, 21 nt, Artificial Sequence
  GATA2 Guide RNA
aggccgguacccccaggaagc

SEQ ID NO: 14112 - RNA, 21 nt, Artificial Sequence
  GATA2 Guide RNA
aggcuuccuggggguaccggc

SEQ ID NO: 14113 - RNA, 21 nt, Artificial Sequence
  GATA2 Guide RNA
ccccggaggcuuccugggggu

SEQ ID NO: 14114 - RNA, 21 nt, Artificial Sequence
  GATA2 Guide RNA
cccggaggcuuccugggggua

SEQ ID NO: 14115 - RNA, 21 nt, Artificial Sequence
  GATA2 Guide RNA
ccggaggcuuccuggggguac

SEQ ID NO: 14116 - RNA, 21 nt, Artificial Sequence
  GATA2 Guide RNA
ccgguacccccaggaagccuc

SEQ ID NO: 14117 - RNA, 21 nt, Artificial Sequence
  GATA2 Guide RNA
ccuggggguaccggccuccag

SEQ ID NO: 14118 - RNA, 21 nt, Artificial Sequence
  GATA2 Guide RNA
cggaggcuuccuggggguacc

SEQ ID NO: 14119 - RNA, 21 nt, Artificial Sequence
  GATA2 Guide RNA
cgguacccccaggaagccucc

SEQ ID NO: 14120 - RNA, 21 nt, Artificial Sequence
  GATA2 Guide RNA
cuggaggccgguacccccagg

SEQ ID NO: 14121 - RNA, 21 nt, Artificial Sequence
  GATA2 Guide RNA
cuggggguaccggccuccagc

SEQ ID NO: 14122 - RNA, 21 nt, Artificial Sequence
  GATA2 Guide RNA
cuuccuggggguaccggccuc

SEQ ID NO: 14123 - RNA, 21 nt, Artificial Sequence
  GATA2 Guide RNA
gaagcuggaggccgguacccc

SEQ ID NO: 14124 - RNA, 21 nt, Artificial Sequence
  GATA2 Guide RNA
gaggccgguacccccaggaag

SEQ ID NO: 14125 - RNA, 21 nt, Artificial Sequence
  GATA2 Guide RNA
gaggcuuccuggggguaccgg

SEQ ID NO: 14126 - RNA, 21 nt, Artificial Sequence
  GATA2 Guide RNA
gccgguacccccaggaagccu

SEQ ID NO: 14127 - RNA, 21 nt, Artificial Sequence
  GATA2 Guide RNA
gcuggaggccgguacccccag

SEQ ID NO: 14128 - RNA, 21 nt, Artificial Sequence
  GATA2 Guide RNA
gcuuccuggggguaccggccu

SEQ ID NO: 14129 - RNA, 21 nt, Artificial Sequence
  GATA2 Guide RNA
ggaggccgguacccccaggaa

SEQ ID NO: 14130 - RNA, 21 nt, Artificial Sequence
  GATA2 Guide RNA
ggaggcuuccuggggguaccg

SEQ ID NO: 14131 - RNA, 21 nt, Artificial Sequence
  GATA2 Guide RNA
ggccgguacccccaggaagcc

SEQ ID NO: 14132 - RNA, 21 nt, Artificial Sequence
  GATA2 Guide RNA
ggcuuccuggggguaccggcc

SEQ ID NO: 14133 - RNA, 21 nt, Artificial Sequence
  GATA2 Guide RNA
ggggguaccggccuccagcuu

SEQ ID NO: 14134 - RNA, 21 nt, Artificial Sequence
  GATA2 Guide RNA
gggguaccggccuccagcuuc

SEQ ID NO: 14135 - RNA, 21 nt, Artificial Sequence
  GATA2 Guide RNA
ggguaccggccuccagcuuca

SEQ ID NO: 14136 - RNA, 21 nt, Artificial Sequence
  GATA2 Guide RNA
gggugaagcuggaggccggua

SEQ ID NO: 14137 - RNA, 21 nt, Artificial Sequence
  GATA2 Guide RNA
gguacccccaggaagccuccg

SEQ ID NO: 14138 - RNA, 21 nt, Artificial Sequence
  GATA2 Guide RNA
gguaccggccuccagcuucac

SEQ ID NO: 14139 - RNA, 21 nt, Artificial Sequence
  GATA2 Guide RNA
ggugaagcuggaggccgguac

SEQ ID NO: 14140 - RNA, 21 nt, Artificial Sequence
  GATA2 Guide RNA
guacccccaggaagccuccgg

SEQ ID NO: 14141 - RNA, 21 nt, Artificial Sequence
  GATA2 Guide RNA
guaccggccuccagcuucacc

SEQ ID NO: 14142 - RNA, 21 nt, Artificial Sequence
  GATA2 Guide RNA
gugaagcuggaggccgguacc

SEQ ID NO: 14143 - RNA, 21 nt, Artificial Sequence
  GATA2 Guide RNA
uacccccaggaagccuccggg

SEQ ID NO: 14144 - RNA, 21 nt, Artificial Sequence
  GATA2 Guide RNA
uccuggggguaccggccucca

SEQ ID NO: 14145 - RNA, 21 nt, Artificial Sequence
  GATA2 Guide RNA
ugaagcuggaggccgguaccc

SEQ ID NO: 14146 - RNA, 21 nt, Artificial Sequence
  GATA2 Guide RNA
uggaggccgguacccccagga

SEQ ID NO: 14147 - RNA, 21 nt, Artificial Sequence
  GATA2 Guide RNA
uggggguaccggccuccagcu

SEQ ID NO: 14148 - RNA, 21 nt, Artificial Sequence
  GATA2 Guide RNA
uuccuggggguaccggccucc

SEQ ID NO: 14149 - RNA, 22 nt, Artificial Sequence
  GATA2 Guide RNA
aagcuggaggccgguaccccca

SEQ ID NO: 14150 - RNA, 22 nt, Artificial Sequence
  GATA2 Guide RNA
acccccaggaagccuccggggu

SEQ ID NO: 14151 - RNA, 22 nt, Artificial Sequence
  GATA2 Guide RNA
accccggaggcuuccugggggu

SEQ ID NO: 14152 - RNA, 22 nt, Artificial Sequence
  GATA2 Guide RNA
agcuggaggccgguacccccag

SEQ ID NO: 14153 - RNA, 22 nt, Artificial Sequence
  GATA2 Guide RNA
aggccgguacccccaggaagcc

SEQ ID NO: 14154 - RNA, 22 nt, Artificial Sequence
  GATA2 Guide RNA
aggcuuccuggggguaccggcc

SEQ ID NO: 14155 - RNA, 22 nt, Artificial Sequence
  GATA2 Guide RNA
ccccggaggcuuccugggggua

SEQ ID NO: 14156 - RNA, 22 nt, Artificial Sequence
  GATA2 Guide RNA
cccggaggcuuccuggggguac

SEQ ID NO: 14157 - RNA, 22 nt, Artificial Sequence
  GATA2 Guide RNA
ccggaggcuuccuggggguacc

SEQ ID NO: 14158 - RNA, 22 nt, Artificial Sequence
  GATA2 Guide RNA
ccgguacccccaggaagccucc

SEQ ID NO: 14159 - RNA, 22 nt, Artificial Sequence
  GATA2 Guide RNA
ccuggggguaccggccuccagc

SEQ ID NO: 14160 - RNA, 22 nt, Artificial Sequence
  GATA2 Guide RNA
cggaggcuuccuggggguaccg

SEQ ID NO: 14161 - RNA, 22 nt, Artificial Sequence
  GATA2 Guide RNA
cgguacccccaggaagccuccg

SEQ ID NO: 14162 - RNA, 22 nt, Artificial Sequence
  GATA2 Guide RNA
cuggaggccgguacccccagga

SEQ ID NO: 14163 - RNA, 22 nt, Artificial Sequence
  GATA2 Guide RNA
cuggggguaccggccuccagcu

SEQ ID NO: 14164 - RNA, 22 nt, Artificial Sequence
  GATA2 Guide RNA
cuuccuggggguaccggccucc

SEQ ID NO: 14165 - RNA, 22 nt, Artificial Sequence
  GATA2 Guide RNA
gaagcuggaggccgguaccccc

SEQ ID NO: 14166 - RNA, 22 nt, Artificial Sequence
  GATA2 Guide RNA
gaggccgguacccccaggaagc

SEQ ID NO: 14167 - RNA, 22 nt, Artificial Sequence
  GATA2 Guide RNA
gaggcuuccuggggguaccggc

SEQ ID NO: 14168 - RNA, 22 nt, Artificial Sequence
  GATA2 Guide RNA
gccgguacccccaggaagccuc

SEQ ID NO: 14169 - RNA, 22 nt, Artificial Sequence
  GATA2 Guide RNA
gcuggaggccgguacccccagg

SEQ ID NO: 14170 - RNA, 22 nt, Artificial Sequence
  GATA2 Guide RNA
gcuuccuggggguaccggccuc

SEQ ID NO: 14171 - RNA, 22 nt, Artificial Sequence
  GATA2 Guide RNA
ggaggccgguacccccaggaag

SEQ ID NO: 14172 - RNA, 22 nt, Artificial Sequence
  GATA2 Guide RNA
ggaggcuuccuggggguaccgg

SEQ ID NO: 14173 - RNA, 22 nt, Artificial Sequence
  GATA2 Guide RNA
ggccgguacccccaggaagccu

SEQ ID NO: 14174 - RNA, 22 nt, Artificial Sequence
  GATA2 Guide RNA
ggcuuccuggggguaccggccu

SEQ ID NO: 14175 - RNA, 22 nt, Artificial Sequence
  GATA2 Guide RNA
ggggguaccggccuccagcuuc

SEQ ID NO: 14176 - RNA, 22 nt, Artificial Sequence
  GATA2 Guide RNA
gggguaccggccuccagcuuca

SEQ ID NO: 14177 - RNA, 22 nt, Artificial Sequence
  GATA2 Guide RNA
ggggugaagcuggaggccggua

SEQ ID NO: 14178 - RNA, 22 nt, Artificial Sequence
  GATA2 Guide RNA
ggguaccggccuccagcuucac

SEQ ID NO: 14179 - RNA, 22 nt, Artificial Sequence
  GATA2 Guide RNA
gggugaagcuggaggccgguac

SEQ ID NO: 14180 - RNA, 22 nt, Artificial Sequence
  GATA2 Guide RNA
gguacccccaggaagccuccgg

SEQ ID NO: 14181 - RNA, 22 nt, Artificial Sequence
  GATA2 Guide RNA
gguaccggccuccagcuucacc

SEQ ID NO: 14182 - RNA, 22 nt, Artificial Sequence
  GATA2 Guide RNA
ggugaagcuggaggccgguacc

SEQ ID NO: 14183 - RNA, 22 nt, Artificial Sequence
  GATA2 Guide RNA
guacccccaggaagccuccggg

SEQ ID NO: 14184 - RNA, 22 nt, Artificial Sequence
  GATA2 Guide RNA
guaccggccuccagcuucaccc

SEQ ID NO: 14185 - RNA, 22 nt, Artificial Sequence
  GATA2 Guide RNA
gugaagcuggaggccgguaccc

SEQ ID NO: 14186 - RNA, 22 nt, Artificial Sequence
  GATA2 Guide RNA
uacccccaggaagccuccgggg

SEQ ID NO: 14187 - RNA, 22 nt, Artificial Sequence
  GATA2 Guide RNA
uccuggggguaccggccuccag

SEQ ID NO: 14188 - RNA, 22 nt, Artificial Sequence
  GATA2 Guide RNA
ugaagcuggaggccgguacccc

SEQ ID NO: 14189 - RNA, 22 nt, Artificial Sequence
  GATA2 Guide RNA
uggaggccgguacccccaggaa

SEQ ID NO: 14190 - RNA, 22 nt, Artificial Sequence
  GATA2 Guide RNA
uggggguaccggccuccagcuu

SEQ ID NO: 14191 - RNA, 22 nt, Artificial Sequence
  GATA2 Guide RNA
uuccuggggguaccggccucca

SEQ ID NO: 14192 - RNA, 20 nt, Artificial Sequence
  GATA2 Guide RNA
aagcuggaggccggucccuc

SEQ ID NO: 14193 - RNA, 20 nt, Artificial Sequence
  GATA2 Guide RNA
accccggaggcuuccuggag

SEQ ID NO: 14194 - RNA, 20 nt, Artificial Sequence
  GATA2 Guide RNA
agcuggaggccggucccucc

SEQ ID NO: 14195 - RNA, 20 nt, Artificial Sequence
  GATA2 Guide RNA
aggccggucccuccaggaag

SEQ ID NO: 14196 - RNA, 20 nt, Artificial Sequence
  GATA2 Guide RNA
aggcuuccuggagggaccgg

SEQ ID NO: 14197 - RNA, 20 nt, Artificial Sequence
  GATA2 Guide RNA
caccccggaggcuuccugga

SEQ ID NO: 14198 - RNA, 20 nt, Artificial Sequence
  GATA2 Guide RNA
ccccggaggcuuccuggagg

SEQ ID NO: 14199 - RNA, 20 nt, Artificial Sequence
  GATA2 Guide RNA
cccggaggcuuccuggaggg

SEQ ID NO: 14200 - RNA, 20 nt, Artificial Sequence
  GATA2 Guide RNA
cccuccaggaagccuccggg

SEQ ID NO: 14201 - RNA, 20 nt, Artificial Sequence
  GATA2 Guide RNA
ccggaggcuuccuggaggga

SEQ ID NO: 14202 - RNA, 20 nt, Artificial Sequence
  GATA2 Guide RNA
ccggucccuccaggaagccu

SEQ ID NO: 14203 - RNA, 20 nt, Artificial Sequence
  GATA2 Guide RNA
ccuccaggaagccuccgggg

SEQ ID NO: 14204 - RNA, 20 nt, Artificial Sequence
  GATA2 Guide RNA
ccuggagggaccggccucca

SEQ ID NO: 14205 - RNA, 20 nt, Artificial Sequence
  GATA2 Guide RNA
cggaggcuuccuggagggac

SEQ ID NO: 14206 - RNA, 20 nt, Artificial Sequence
  GATA2 Guide RNA
cggucccuccaggaagccuc

SEQ ID NO: 14207 - RNA, 20 nt, Artificial Sequence
  GATA2 Guide RNA
cuccaggaagccuccggggu

SEQ ID NO: 14208 - RNA, 20 nt, Artificial Sequence
  GATA2 Guide RNA
cuggaggccggucccuccag

SEQ ID NO: 14209 - RNA, 20 nt, Artificial Sequence
  GATA2 Guide RNA
cuggagggaccggccuccag

SEQ ID NO: 14210 - RNA, 20 nt, Artificial Sequence
  GATA2 Guide RNA
cuuccaccccggaggcuucc

SEQ ID NO: 14211 - RNA, 20 nt, Artificial Sequence
  GATA2 Guide RNA
cuuccuggagggaccggccu

SEQ ID NO: 14212 - RNA, 20 nt, Artificial Sequence
  GATA2 Guide RNA
gaagcuggaggccggucccu

SEQ ID NO: 14213 - RNA, 20 nt, Artificial Sequence
  GATA2 Guide RNA
gaggccggucccuccaggaa

SEQ ID NO: 14214 - RNA, 20 nt, Artificial Sequence
  GATA2 Guide RNA
gaggcuuccuggagggaccg

SEQ ID NO: 14215 - RNA, 20 nt, Artificial Sequence
  GATA2 Guide RNA
gagggaccggccuccagcuu

SEQ ID NO: 14216 - RNA, 20 nt, Artificial Sequence
  GATA2 Guide RNA
gccggucccuccaggaagcc

SEQ ID NO: 14217 - RNA, 20 nt, Artificial Sequence
  GATA2 Guide RNA
gcuggaggccggucccucca

SEQ ID NO: 14218 - RNA, 20 nt, Artificial Sequence
  GATA2 Guide RNA
gcuuccuggagggaccggcc

SEQ ID NO: 14219 - RNA, 20 nt, Artificial Sequence
  GATA2 Guide RNA
ggaggccggucccuccagga

SEQ ID NO: 14220 - RNA, 20 nt, Artificial Sequence
  GATA2 Guide RNA
ggaggcuuccuggagggacc

SEQ ID NO: 14221 - RNA, 20 nt, Artificial Sequence
  GATA2 Guide RNA
ggagggaccggccuccagcu

SEQ ID NO: 14222 - RNA, 20 nt, Artificial Sequence
  GATA2 Guide RNA
ggccggucccuccaggaagc

SEQ ID NO: 14223 - RNA, 20 nt, Artificial Sequence
  GATA2 Guide RNA
ggcuuccuggagggaccggc

SEQ ID NO: 14224 - RNA, 20 nt, Artificial Sequence
  GATA2 Guide RNA
ggucccuccaggaagccucc

SEQ ID NO: 14225 - RNA, 20 nt, Artificial Sequence
  GATA2 Guide RNA
ggugaagcuggaggccgguc

SEQ ID NO: 14226 - RNA, 20 nt, Artificial Sequence
  GATA2 Guide RNA
gucccuccaggaagccuccg

SEQ ID NO: 14227 - RNA, 20 nt, Artificial Sequence
  GATA2 Guide RNA
gugaagcuggaggccggucc

SEQ ID NO: 14228 - RNA, 20 nt, Artificial Sequence
  GATA2 Guide RNA
uccaccccggaggcuuccug

SEQ ID NO: 14229 - RNA, 20 nt, Artificial Sequence
  GATA2 Guide RNA
uccaggaagccuccggggug

SEQ ID NO: 14230 - RNA, 20 nt, Artificial Sequence
  GATA2 Guide RNA
ucccuccaggaagccuccgg

SEQ ID NO: 14231 - RNA, 20 nt, Artificial Sequence
  GATA2 Guide RNA
uccuggagggaccggccucc

SEQ ID NO: 14232 - RNA, 20 nt, Artificial Sequence
  GATA2 Guide RNA
ugaagcuggaggccgguccc

SEQ ID NO: 14233 - RNA, 20 nt, Artificial Sequence
  GATA2 Guide RNA
uggaggccggucccuccagg

SEQ ID NO: 14234 - RNA, 20 nt, Artificial Sequence
  GATA2 Guide RNA
uggagggaccggccuccagc

SEQ ID NO: 14235 - RNA, 20 nt, Artificial Sequence
  GATA2 Guide RNA
uuccaccccggaggcuuccu

SEQ ID NO: 14236 - RNA, 20 nt, Artificial Sequence
  GATA2 Guide RNA
uuccuggagggaccggccuc

SEQ ID NO: 14237 - RNA, 21 nt, Artificial Sequence
  GATA2 Guide RNA
aagcuggaggccggucccucc

SEQ ID NO: 14238 - RNA, 21 nt, Artificial Sequence
  GATA2 Guide RNA
accccggaggcuuccuggagg

SEQ ID NO: 14239 - RNA, 21 nt, Artificial Sequence
  GATA2 Guide RNA
agcuggaggccggucccucca

SEQ ID NO: 14240 - RNA, 21 nt, Artificial Sequence
  GATA2 Guide RNA
aggccggucccuccaggaagc

SEQ ID NO: 14241 - RNA, 21 nt, Artificial Sequence
  GATA2 Guide RNA
aggcuuccuggagggaccggc

SEQ ID NO: 14242 - RNA, 21 nt, Artificial Sequence
  GATA2 Guide RNA
caccccggaggcuuccuggag

SEQ ID NO: 14243 - RNA, 21 nt, Artificial Sequence
  GATA2 Guide RNA
ccaccccggaggcuuccugga

SEQ ID NO: 14244 - RNA, 21 nt, Artificial Sequence
  GATA2 Guide RNA
ccccggaggcuuccuggaggg

SEQ ID NO: 14245 - RNA, 21 nt, Artificial Sequence
  GATA2 Guide RNA
cccggaggcuuccuggaggga

SEQ ID NO: 14246 - RNA, 21 nt, Artificial Sequence
  GATA2 Guide RNA
cccuccaggaagccuccgggg

SEQ ID NO: 14247 - RNA, 21 nt, Artificial Sequence
  GATA2 Guide RNA
ccggaggcuuccuggagggac

SEQ ID NO: 14248 - RNA, 21 nt, Artificial Sequence
  GATA2 Guide RNA
ccggucccuccaggaagccuc

SEQ ID NO: 14249 - RNA, 21 nt, Artificial Sequence
  GATA2 Guide RNA
ccuccaggaagccuccggggu

SEQ ID NO: 14250 - RNA, 21 nt, Artificial Sequence
  GATA2 Guide RNA
ccuggagggaccggccuccag

SEQ ID NO: 14251 - RNA, 21 nt, Artificial Sequence
  GATA2 Guide RNA
cggaggcuuccuggagggacc

SEQ ID NO: 14252 - RNA, 21 nt, Artificial Sequence
  GATA2 Guide RNA
cggucccuccaggaagccucc

SEQ ID NO: 14253 - RNA, 21 nt, Artificial Sequence
  GATA2 Guide RNA
cuccaggaagccuccggggug

SEQ ID NO: 14254 - RNA, 21 nt, Artificial Sequence
  GATA2 Guide RNA
cuggaggccggucccuccagg

SEQ ID NO: 14255 - RNA, 21 nt, Artificial Sequence
  GATA2 Guide RNA
cuggagggaccggccuccagc

SEQ ID NO: 14256 - RNA, 21 nt, Artificial Sequence
  GATA2 Guide RNA
cuuccaccccggaggcuuccu

SEQ ID NO: 14257 - RNA, 21 nt, Artificial Sequence
  GATA2 Guide RNA
cuuccuggagggaccggccuc

SEQ ID NO: 14258 - RNA, 21 nt, Artificial Sequence
  GATA2 Guide RNA
gaagcuggaggccggucccuc

SEQ ID NO: 14259 - RNA, 21 nt, Artificial Sequence
  GATA2 Guide RNA
gaggccggucccuccaggaag

SEQ ID NO: 14260 - RNA, 21 nt, Artificial Sequence
  GATA2 Guide RNA
gaggcuuccuggagggaccgg

SEQ ID NO: 14261 - RNA, 21 nt, Artificial Sequence
  GATA2 Guide RNA
gagggaccggccuccagcuuc

SEQ ID NO: 14262 - RNA, 21 nt, Artificial Sequence
  GATA2 Guide RNA
gccggucccuccaggaagccu

SEQ ID NO: 14263 - RNA, 21 nt, Artificial Sequence
  GATA2 Guide RNA
gcuggaggccggucccuccag

SEQ ID NO: 14264 - RNA, 21 nt, Artificial Sequence
  GATA2 Guide RNA
gcuuccuggagggaccggccu

SEQ ID NO: 14265 - RNA, 21 nt, Artificial Sequence
  GATA2 Guide RNA
ggaggccggucccuccaggaa

SEQ ID NO: 14266 - RNA, 21 nt, Artificial Sequence
  GATA2 Guide RNA
ggaggcuuccuggagggaccg

SEQ ID NO: 14267 - RNA, 21 nt, Artificial Sequence
  GATA2 Guide RNA
ggagggaccggccuccagcuu

SEQ ID NO: 14268 - RNA, 21 nt, Artificial Sequence
  GATA2 Guide RNA
ggccggucccuccaggaagcc

SEQ ID NO: 14269 - RNA, 21 nt, Artificial Sequence
  GATA2 Guide RNA
ggcuuccuggagggaccggcc

SEQ ID NO: 14270 - RNA, 21 nt, Artificial Sequence
  GATA2 Guide RNA
gggugaagcuggaggccgguc

SEQ ID NO: 14271 - RNA, 21 nt, Artificial Sequence
  GATA2 Guide RNA
ggucccuccaggaagccuccg

SEQ ID NO: 14272 - RNA, 21 nt, Artificial Sequence
  GATA2 Guide RNA
ggugaagcuggaggccggucc

SEQ ID NO: 14273 - RNA, 21 nt, Artificial Sequence
  GATA2 Guide RNA
gucccuccaggaagccuccgg

SEQ ID NO: 14274 - RNA, 21 nt, Artificial Sequence
  GATA2 Guide RNA
gugaagcuggaggccgguccc

SEQ ID NO: 14275 - RNA, 21 nt, Artificial Sequence
  GATA2 Guide RNA
uccaggaagccuccggggugg

SEQ ID NO: 14276 - RNA, 21 nt, Artificial Sequence
  GATA2 Guide RNA
ucccuccaggaagccuccggg

SEQ ID NO: 14277 - RNA, 21 nt, Artificial Sequence
  GATA2 Guide RNA
uccuggagggaccggccucca

SEQ ID NO: 14278 - RNA, 21 nt, Artificial Sequence
  GATA2 Guide RNA
ucuuccaccccggaggcuucc

SEQ ID NO: 14279 - RNA, 21 nt, Artificial Sequence
  GATA2 Guide RNA
ugaagcuggaggccggucccu

SEQ ID NO: 14280 - RNA, 21 nt, Artificial Sequence
  GATA2 Guide RNA
uggaggccggucccuccagga

SEQ ID NO: 14281 - RNA, 21 nt, Artificial Sequence
  GATA2 Guide RNA
uggagggaccggccuccagcu

SEQ ID NO: 14282 - RNA, 21 nt, Artificial Sequence
  GATA2 Guide RNA
uuccaccccggaggcuuccug

SEQ ID NO: 14283 - RNA, 21 nt, Artificial Sequence
  GATA2 Guide RNA
uuccuggagggaccggccucc

SEQ ID NO: 14284 - RNA, 22 nt, Artificial Sequence
  GATA2 Guide RNA
aagcuggaggccggucccucca

SEQ ID NO: 14285 - RNA, 22 nt, Artificial Sequence
  GATA2 Guide RNA
accccggaggcuuccuggaggg

SEQ ID NO: 14286 - RNA, 22 nt, Artificial Sequence
  GATA2 Guide RNA
agcuggaggccggucccuccag

SEQ ID NO: 14287 - RNA, 22 nt, Artificial Sequence
  GATA2 Guide RNA
aggccggucccuccaggaagcc

SEQ ID NO: 14288 - RNA, 22 nt, Artificial Sequence
  GATA2 Guide RNA
aggcuuccuggagggaccggcc

SEQ ID NO: 14289 - RNA, 22 nt, Artificial Sequence
  GATA2 Guide RNA
caccccggaggcuuccuggagg

SEQ ID NO: 14290 - RNA, 22 nt, Artificial Sequence
  GATA2 Guide RNA
ccaccccggaggcuuccuggag

SEQ ID NO: 14291 - RNA, 22 nt, Artificial Sequence
  GATA2 Guide RNA
ccccggaggcuuccuggaggga

SEQ ID NO: 14292 - RNA, 22 nt, Artificial Sequence
  GATA2 Guide RNA
cccggaggcuuccuggagggac

SEQ ID NO: 14293 - RNA, 22 nt, Artificial Sequence
  GATA2 Guide RNA
cccuccaggaagccuccggggu

SEQ ID NO: 14294 - RNA, 22 nt, Artificial Sequence
  GATA2 Guide RNA
ccggaggcuuccuggagggacc

SEQ ID NO: 14295 - RNA, 22 nt, Artificial Sequence
  GATA2 Guide RNA
ccggucccuccaggaagccucc

SEQ ID NO: 14296 - RNA, 22 nt, Artificial Sequence
  GATA2 Guide RNA
ccuccaggaagccuccggggug

SEQ ID NO: 14297 - RNA, 22 nt, Artificial Sequence
  GATA2 Guide RNA
ccuggagggaccggccuccagc

SEQ ID NO: 14298 - RNA, 22 nt, Artificial Sequence
  GATA2 Guide RNA
cggaggcuuccuggagggaccg

SEQ ID NO: 14299 - RNA, 22 nt, Artificial Sequence
  GATA2 Guide RNA
cggucccuccaggaagccuccg

SEQ ID NO: 14300 - RNA, 22 nt, Artificial Sequence
  GATA2 Guide RNA
cuccaggaagccuccggggugg

SEQ ID NO: 14301 - RNA, 22 nt, Artificial Sequence
  GATA2 Guide RNA
cucuuccaccccggaggcuucc

SEQ ID NO: 14302 - RNA, 22 nt, Artificial Sequence
  GATA2 Guide RNA
cuggaggccggucccuccagga

SEQ ID NO: 14303 - RNA, 22 nt, Artificial Sequence
  GATA2 Guide RNA
cuggagggaccggccuccagcu

SEQ ID NO: 14304 - RNA, 22 nt, Artificial Sequence
  GATA2 Guide RNA
cuuccaccccggaggcuuccug

SEQ ID NO: 14305 - RNA, 22 nt, Artificial Sequence
  GATA2 Guide RNA
cuuccuggagggaccggccucc

SEQ ID NO: 14306 - RNA, 22 nt, Artificial Sequence
  GATA2 Guide RNA
gaagcuggaggccggucccucc

SEQ ID NO: 14307 - RNA, 22 nt, Artificial Sequence
  GATA2 Guide RNA
gaggccggucccuccaggaagc

SEQ ID NO: 14308 - RNA, 22 nt, Artificial Sequence
  GATA2 Guide RNA
gaggcuuccuggagggaccggc

SEQ ID NO: 14309 - RNA, 22 nt, Artificial Sequence
  GATA2 Guide RNA
gagggaccggccuccagcuuca

SEQ ID NO: 14310 - RNA, 22 nt, Artificial Sequence
  GATA2 Guide RNA
gccggucccuccaggaagccuc

SEQ ID NO: 14311 - RNA, 22 nt, Artificial Sequence
  GATA2 Guide RNA
gcuggaggccggucccuccagg

SEQ ID NO: 14312 - RNA, 22 nt, Artificial Sequence
  GATA2 Guide RNA
gcuuccuggagggaccggccuc

SEQ ID NO: 14313 - RNA, 22 nt, Artificial Sequence
  GATA2 Guide RNA
ggaggccggucccuccaggaag

SEQ ID NO: 14314 - RNA, 22 nt, Artificial Sequence
  GATA2 Guide RNA
ggaggcuuccuggagggaccgg

SEQ ID NO: 14315 - RNA, 22 nt, Artificial Sequence
  GATA2 Guide RNA
ggagggaccggccuccagcuuc

SEQ ID NO: 14316 - RNA, 22 nt, Artificial Sequence
  GATA2 Guide RNA
ggccggucccuccaggaagccu

SEQ ID NO: 14317 - RNA, 22 nt, Artificial Sequence
  GATA2 Guide RNA
ggcuuccuggagggaccggccu

SEQ ID NO: 14318 - RNA, 22 nt, Artificial Sequence
  GATA2 Guide RNA
ggggugaagcuggaggccgguc

SEQ ID NO: 14319 - RNA, 22 nt, Artificial Sequence
  GATA2 Guide RNA
gggugaagcuggaggccggucc

SEQ ID NO: 14320 - RNA, 22 nt, Artificial Sequence
  GATA2 Guide RNA
ggucccuccaggaagccuccgg

SEQ ID NO: 14321 - RNA, 22 nt, Artificial Sequence
  GATA2 Guide RNA
ggugaagcuggaggccgguccc

SEQ ID NO: 14322 - RNA, 22 nt, Artificial Sequence
  GATA2 Guide RNA
gucccuccaggaagccuccggg

SEQ ID NO: 14323 - RNA, 22 nt, Artificial Sequence
  GATA2 Guide RNA
gugaagcuggaggccggucccu

SEQ ID NO: 14324 - RNA, 22 nt, Artificial Sequence
  GATA2 Guide RNA
uccaccccggaggcuuccugga

SEQ ID NO: 14325 - RNA, 22 nt, Artificial Sequence
  GATA2 Guide RNA
uccaggaagccuccggggugga

SEQ ID NO: 14326 - RNA, 22 nt, Artificial Sequence
  GATA2 Guide RNA
ucccuccaggaagccuccgggg

SEQ ID NO: 14327 - RNA, 22 nt, Artificial Sequence
  GATA2 Guide RNA
uccuggagggaccggccuccag

SEQ ID NO: 14328 - RNA, 22 nt, Artificial Sequence
  GATA2 Guide RNA
ucuuccaccccggaggcuuccu

SEQ ID NO: 14329 - RNA, 22 nt, Artificial Sequence
  GATA2 Guide RNA
ugaagcuggaggccggucccuc

SEQ ID NO: 14330 - RNA, 22 nt, Artificial Sequence
  GATA2 Guide RNA
uggaggccggucccuccaggaa

SEQ ID NO: 14331 - RNA, 22 nt, Artificial Sequence
  GATA2 Guide RNA
uggagggaccggccuccagcuu

SEQ ID NO: 14332 - RNA, 22 nt, Artificial Sequence
  GATA2 Guide RNA
uuccuggagggaccggccucca

SEQ ID NO: 14333 - RNA, 20 nt, Artificial Sequence
  GATA2 Guide RNA
accccggaggcugccugggg

SEQ ID NO: 14334 - RNA, 20 nt, Artificial Sequence
  GATA2 Guide RNA
acucuuccaccccggaggcu

SEQ ID NO: 14335 - RNA, 20 nt, Artificial Sequence
  GATA2 Guide RNA
aggcagccuccgggguggaa

SEQ ID NO: 14336 - RNA, 20 nt, Artificial Sequence
  GATA2 Guide RNA
aggccgguccccccaggcag

SEQ ID NO: 14337 - RNA, 20 nt, Artificial Sequence
  GATA2 Guide RNA
aggcugccuggggggaccgg

SEQ ID NO: 14338 - RNA, 20 nt, Artificial Sequence
  GATA2 Guide RNA
caccccggaggcugccuggg

SEQ ID NO: 14339 - RNA, 20 nt, Artificial Sequence
  GATA2 Guide RNA
cagccuccgggguggaagag

SEQ ID NO: 14340 - RNA, 20 nt, Artificial Sequence
  GATA2 Guide RNA
caggcagccuccggggugga

SEQ ID NO: 14341 - RNA, 20 nt, Artificial Sequence
  GATA2 Guide RNA
ccaccccggaggcugccugg

SEQ ID NO: 14342 - RNA, 20 nt, Artificial Sequence
  GATA2 Guide RNA
ccaggcagccuccggggugg

SEQ ID NO: 14343 - RNA, 20 nt, Artificial Sequence
  GATA2 Guide RNA
cccaggcagccuccggggug

SEQ ID NO: 14344 - RNA, 20 nt, Artificial Sequence
  GATA2 Guide RNA
ccccaggcagccuccggggu

SEQ ID NO: 14345 - RNA, 20 nt, Artificial Sequence
  GATA2 Guide RNA
ccggaggcugccugggggga

SEQ ID NO: 14346 - RNA, 20 nt, Artificial Sequence
  GATA2 Guide RNA
ccgguccccccaggcagccu

SEQ ID NO: 14347 - RNA, 20 nt, Artificial Sequence
  GATA2 Guide RNA
cggacucuuccaccccggag

SEQ ID NO: 14348 - RNA, 20 nt, Artificial Sequence
  GATA2 Guide RNA
cggaggcugccuggggggac

SEQ ID NO: 14349 - RNA, 20 nt, Artificial Sequence
  GATA2 Guide RNA
cgguccccccaggcagccuc

SEQ ID NO: 14350 - RNA, 20 nt, Artificial Sequence
  GATA2 Guide RNA
cucuuccaccccggaggcug

SEQ ID NO: 14351 - RNA, 20 nt, Artificial Sequence
  GATA2 Guide RNA
cugccuggggggaccggccu

SEQ ID NO: 14352 - RNA, 20 nt, Artificial Sequence
  GATA2 Guide RNA
cuggaggccgguccccccag

SEQ ID NO: 14353 - RNA, 20 nt, Artificial Sequence
  GATA2 Guide RNA
cuuccaccccggaggcugcc

SEQ ID NO: 14354 - RNA, 20 nt, Artificial Sequence
  GATA2 Guide RNA
gacucuuccaccccggaggc

SEQ ID NO: 14355 - RNA, 20 nt, Artificial Sequence
  GATA2 Guide RNA
gaggccgguccccccaggca

SEQ ID NO: 14356 - RNA, 20 nt, Artificial Sequence
  GATA2 Guide RNA
gaggcugccuggggggaccg

SEQ ID NO: 14357 - RNA, 20 nt, Artificial Sequence
  GATA2 Guide RNA
gcagccuccgggguggaaga

SEQ ID NO: 14358 - RNA, 20 nt, Artificial Sequence
  GATA2 Guide RNA
gcuggaggccggucccccca

SEQ ID NO: 14359 - RNA, 20 nt, Artificial Sequence
  GATA2 Guide RNA
ggacucuuccaccccggagg

SEQ ID NO: 14360 - RNA, 20 nt, Artificial Sequence
  GATA2 Guide RNA
ggaggcugccuggggggacc

SEQ ID NO: 14361 - RNA, 20 nt, Artificial Sequence
  GATA2 Guide RNA
ggcagccuccgggguggaag

SEQ ID NO: 14362 - RNA, 20 nt, Artificial Sequence
  GATA2 Guide RNA
gguccccccaggcagccucc

SEQ ID NO: 14363 - RNA, 20 nt, Artificial Sequence
  GATA2 Guide RNA
guccccccaggcagccuccg

SEQ ID NO: 14364 - RNA, 20 nt, Artificial Sequence
  GATA2 Guide RNA
uccaccccggaggcugccug

SEQ ID NO: 14365 - RNA, 20 nt, Artificial Sequence
  GATA2 Guide RNA
uccccccaggcagccuccgg

SEQ ID NO: 14366 - RNA, 20 nt, Artificial Sequence
  GATA2 Guide RNA
ucuuccaccccggaggcugc

SEQ ID NO: 14367 - RNA, 20 nt, Artificial Sequence
  GATA2 Guide RNA
ugccuggggggaccggccuc

SEQ ID NO: 14368 - RNA, 20 nt, Artificial Sequence
  GATA2 Guide RNA
uggaggccgguccccccagg

SEQ ID NO: 14369 - RNA, 20 nt, Artificial Sequence
  GATA2 Guide RNA
uuccaccccggaggcugccu

SEQ ID NO: 14370 - RNA, 21 nt, Artificial Sequence
  GATA2 Guide RNA
acucuuccaccccggaggcug

SEQ ID NO: 14371 - RNA, 21 nt, Artificial Sequence
  GATA2 Guide RNA
agcuggaggccggucccccca

SEQ ID NO: 14372 - RNA, 21 nt, Artificial Sequence
  GATA2 Guide RNA
aggcagccuccgggguggaag

SEQ ID NO: 14373 - RNA, 21 nt, Artificial Sequence
  GATA2 Guide RNA
cagccuccgggguggaagagu

SEQ ID NO: 14374 - RNA, 21 nt, Artificial Sequence
  GATA2 Guide RNA
caggcagccuccgggguggaa

SEQ ID NO: 14375 - RNA, 21 nt, Artificial Sequence
  GATA2 Guide RNA
ccaggcagccuccggggugga

SEQ ID NO: 14376 - RNA, 21 nt, Artificial Sequence
  GATA2 Guide RNA
cggacucuuccaccccggagg

SEQ ID NO: 14377 - RNA, 21 nt, Artificial Sequence
  GATA2 Guide RNA
cucuuccaccccggaggcugc

SEQ ID NO: 14378 - RNA, 21 nt, Artificial Sequence
  GATA2 Guide RNA
cuuccaccccggaggcugccu

SEQ ID NO: 14379 - RNA, 21 nt, Artificial Sequence
  GATA2 Guide RNA
gacucuuccaccccggaggcu

SEQ ID NO: 14380 - RNA, 21 nt, Artificial Sequence
  GATA2 Guide RNA
gcagccuccgggguggaagag

SEQ ID NO: 14381 - RNA, 21 nt, Artificial Sequence
  GATA2 Guide RNA
gcggacucuuccaccccggag

SEQ ID NO: 14382 - RNA, 21 nt, Artificial Sequence
  GATA2 Guide RNA
ggacucuuccaccccggaggc

SEQ ID NO: 14383 - RNA, 21 nt, Artificial Sequence
  GATA2 Guide RNA
ggcagccuccgggguggaaga

SEQ ID NO: 14384 - RNA, 21 nt, Artificial Sequence
  GATA2 Guide RNA
uccaccccggaggcugccugg

SEQ ID NO: 14385 - RNA, 21 nt, Artificial Sequence
  GATA2 Guide RNA
ucuuccaccccggaggcugcc

SEQ ID NO: 14386 - RNA, 21 nt, Artificial Sequence
  GATA2 Guide RNA
uuccaccccggaggcugccug

SEQ ID NO: 14387 - RNA, 22 nt, Artificial Sequence
  GATA2 Guide RNA
aagcuggaggccggucccccca

SEQ ID NO: 14388 - RNA, 22 nt, Artificial Sequence
  GATA2 Guide RNA
acucuuccaccccggaggcugc

SEQ ID NO: 14389 - RNA, 22 nt, Artificial Sequence
  GATA2 Guide RNA
agcggacucuuccaccccggag

SEQ ID NO: 14390 - RNA, 22 nt, Artificial Sequence
  GATA2 Guide RNA
agcuggaggccgguccccccag

SEQ ID NO: 14391 - RNA, 22 nt, Artificial Sequence
  GATA2 Guide RNA
aggcagccuccgggguggaaga

SEQ ID NO: 14392 - RNA, 22 nt, Artificial Sequence
  GATA2 Guide RNA
cagccuccgggguggaagaguc

SEQ ID NO: 14393 - RNA, 22 nt, Artificial Sequence
  GATA2 Guide RNA
caggcagccuccgggguggaag

SEQ ID NO: 14394 - RNA, 22 nt, Artificial Sequence
  GATA2 Guide RNA
ccaggcagccuccgggguggaa

SEQ ID NO: 14395 - RNA, 22 nt, Artificial Sequence
  GATA2 Guide RNA
cccaggcagccuccggggugga

SEQ ID NO: 14396 - RNA, 22 nt, Artificial Sequence
  GATA2 Guide RNA
cggacucuuccaccccggaggc

SEQ ID NO: 14397 - RNA, 22 nt, Artificial Sequence
  GATA2 Guide RNA
cucuuccaccccggaggcugcc

SEQ ID NO: 14398 - RNA, 22 nt, Artificial Sequence
  GATA2 Guide RNA
cuuccaccccggaggcugccug

SEQ ID NO: 14399 - RNA, 22 nt, Artificial Sequence
  GATA2 Guide RNA
gacucuuccaccccggaggcug

SEQ ID NO: 14400 - RNA, 22 nt, Artificial Sequence
  GATA2 Guide RNA
gcagccuccgggguggaagagu

SEQ ID NO: 14401 - RNA, 22 nt, Artificial Sequence
  GATA2 Guide RNA
gcggacucuuccaccccggagg

SEQ ID NO: 14402 - RNA, 22 nt, Artificial Sequence
  GATA2 Guide RNA
ggacucuuccaccccggaggcu

SEQ ID NO: 14403 - RNA, 22 nt, Artificial Sequence
  GATA2 Guide RNA
ggcagccuccgggguggaagag

SEQ ID NO: 14404 - RNA, 22 nt, Artificial Sequence
  GATA2 Guide RNA
uccaccccggaggcugccuggg

SEQ ID NO: 14405 - RNA, 22 nt, Artificial Sequence
  GATA2 Guide RNA
ucuuccaccccggaggcugccu

SEQ ID NO: 14406 - RNA, 22 nt, Artificial Sequence
  GATA2 Guide RNA
ugccuggggggaccggccucca

SEQ ID NO: 14407 - RNA, 22 nt, Artificial Sequence
  GATA2 Guide RNA
uggaggccgguccccccaggca

SEQ ID NO: 14408 - RNA, 22 nt, Artificial Sequence
  GATA2 Guide RNA
uuccaccccggaggcugccugg

SEQ ID NO: 14409 - RNA, 20 nt, Artificial Sequence
  GATA2 Guide RNA
aagccuacgggguggaagag

SEQ ID NO: 14410 - RNA, 20 nt, Artificial Sequence
  GATA2 Guide RNA
accccguaggcuuccugggg

SEQ ID NO: 14411 - RNA, 20 nt, Artificial Sequence
  GATA2 Guide RNA
acgggguggaagaguccgcu

SEQ ID NO: 14412 - RNA, 20 nt, Artificial Sequence
  GATA2 Guide RNA
acucuuccaccccguaggcu

SEQ ID NO: 14413 - RNA, 20 nt, Artificial Sequence
  GATA2 Guide RNA
agcagcggacucuuccaccc

SEQ ID NO: 14414 - RNA, 20 nt, Artificial Sequence
  GATA2 Guide RNA
agccuacgggguggaagagu

SEQ ID NO: 14415 - RNA, 20 nt, Artificial Sequence
  GATA2 Guide RNA
agcggacucuuccaccccgu

SEQ ID NO: 14416 - RNA, 20 nt, Artificial Sequence
  GATA2 Guide RNA
aggaagccuacgggguggaa

SEQ ID NO: 14417 - RNA, 20 nt, Artificial Sequence
  GATA2 Guide RNA
caccccguaggcuuccuggg

SEQ ID NO: 14418 - RNA, 20 nt, Artificial Sequence
  GATA2 Guide RNA
cagcagcggacucuuccacc

SEQ ID NO: 14419 - RNA, 20 nt, Artificial Sequence
  GATA2 Guide RNA
cagcggacucuuccaccccg

SEQ ID NO: 14420 - RNA, 20 nt, Artificial Sequence
  GATA2 Guide RNA
caggaagccuacggggugga

SEQ ID NO: 14421 - RNA, 20 nt, Artificial Sequence
  GATA2 Guide RNA
ccaccccguaggcuuccugg

SEQ ID NO: 14422 - RNA, 20 nt, Artificial Sequence
  GATA2 Guide RNA
ccaggaagccuacggggugg

SEQ ID NO: 14423 - RNA, 20 nt, Artificial Sequence
  GATA2 Guide RNA
cccaggaagccuacggggug

SEQ ID NO: 14424 - RNA, 20 nt, Artificial Sequence
  GATA2 Guide RNA
ccccaggaagccuacggggu

SEQ ID NO: 14425 - RNA, 20 nt, Artificial Sequence
  GATA2 Guide RNA
cccccaggaagccuacgggg

SEQ ID NO: 14426 - RNA, 20 nt, Artificial Sequence
  GATA2 Guide RNA
ccccccaggaagccuacggg

SEQ ID NO: 14427 - RNA, 20 nt, Artificial Sequence
  GATA2 Guide RNA
ccccguaggcuuccuggggg

SEQ ID NO: 14428 - RNA, 20 nt, Artificial Sequence
  GATA2 Guide RNA
cccguaggcuuccugggggg

SEQ ID NO: 14429 - RNA, 20 nt, Artificial Sequence
  GATA2 Guide RNA
ccgguccccccaggaagccu

SEQ ID NO: 14430 - RNA, 20 nt, Artificial Sequence
  GATA2 Guide RNA
ccguaggcuuccugggggga

SEQ ID NO: 14431 - RNA, 20 nt, Artificial Sequence
  GATA2 Guide RNA
ccuacgggguggaagagucc

SEQ ID NO: 14432 - RNA, 20 nt, Artificial Sequence
  GATA2 Guide RNA
cggacucuuccaccccguag

SEQ ID NO: 14433 - RNA, 20 nt, Artificial Sequence
  GATA2 Guide RNA
cgguccccccaggaagccua

SEQ ID NO: 14434 - RNA, 20 nt, Artificial Sequence
  GATA2 Guide RNA
cguaggcuuccuggggggac

SEQ ID NO: 14435 - RNA, 20 nt, Artificial Sequence
  GATA2 Guide RNA
cuacgggguggaagaguccg

SEQ ID NO: 14436 - RNA, 20 nt, Artificial Sequence
  GATA2 Guide RNA
cucuuccaccccguaggcuu

SEQ ID NO: 14437 - RNA, 20 nt, Artificial Sequence
  GATA2 Guide RNA
cuuccaccccguaggcuucc

SEQ ID NO: 14438 - RNA, 20 nt, Artificial Sequence
  GATA2 Guide RNA
gaagccuacgggguggaaga

SEQ ID NO: 14439 - RNA, 20 nt, Artificial Sequence
  GATA2 Guide RNA
gacucuuccaccccguaggc

SEQ ID NO: 14440 - RNA, 20 nt, Artificial Sequence
  GATA2 Guide RNA
gcagcggacucuuccacccc

SEQ ID NO: 14441 - RNA, 20 nt, Artificial Sequence
  GATA2 Guide RNA
gccgguccccccaggaagcc

SEQ ID NO: 14442 - RNA, 20 nt, Artificial Sequence
  GATA2 Guide RNA
gccuacgggguggaagaguc

SEQ ID NO: 14443 - RNA, 20 nt, Artificial Sequence
  GATA2 Guide RNA
gcggacucuuccaccccgua

SEQ ID NO: 14444 - RNA, 20 nt, Artificial Sequence
  GATA2 Guide RNA
ggaagccuacgggguggaag

SEQ ID NO: 14445 - RNA, 20 nt, Artificial Sequence
  GATA2 Guide RNA
ggacucuuccaccccguagg

SEQ ID NO: 14446 - RNA, 20 nt, Artificial Sequence
  GATA2 Guide RNA
ggccgguccccccaggaagc

SEQ ID NO: 14447 - RNA, 20 nt, Artificial Sequence
  GATA2 Guide RNA
gguccccccaggaagccuac

SEQ ID NO: 14448 - RNA, 20 nt, Artificial Sequence
  GATA2 Guide RNA
guaggcuuccuggggggacc

SEQ ID NO: 14449 - RNA, 20 nt, Artificial Sequence
  GATA2 Guide RNA
guccccccaggaagccuacg

SEQ ID NO: 14450 - RNA, 20 nt, Artificial Sequence
  GATA2 Guide RNA
uacgggguggaagaguccgc

SEQ ID NO: 14451 - RNA, 20 nt, Artificial Sequence
  GATA2 Guide RNA
uccaccccguaggcuuccug

SEQ ID NO: 14452 - RNA, 20 nt, Artificial Sequence
  GATA2 Guide RNA
uccccccaggaagccuacgg

SEQ ID NO: 14453 - RNA, 20 nt, Artificial Sequence
  GATA2 Guide RNA
ucuuccaccccguaggcuuc

SEQ ID NO: 14454 - RNA, 20 nt, Artificial Sequence
  GATA2 Guide RNA
uuccaccccguaggcuuccu

SEQ ID NO: 14455 - RNA, 21 nt, Artificial Sequence
  GATA2 Guide RNA
aagccuacgggguggaagagu

SEQ ID NO: 14456 - RNA, 21 nt, Artificial Sequence
  GATA2 Guide RNA
acagcagcggacucuuccacc

SEQ ID NO: 14457 - RNA, 21 nt, Artificial Sequence
  GATA2 Guide RNA
accccguaggcuuccuggggg

SEQ ID NO: 14458 - RNA, 21 nt, Artificial Sequence
  GATA2 Guide RNA
acgggguggaagaguccgcug

SEQ ID NO: 14459 - RNA, 21 nt, Artificial Sequence
  GATA2 Guide RNA
acucuuccaccccguaggcuu

SEQ ID NO: 14460 - RNA, 21 nt, Artificial Sequence
  GATA2 Guide RNA
agcagcggacucuuccacccc

SEQ ID NO: 14461 - RNA, 21 nt, Artificial Sequence
  GATA2 Guide RNA
agccuacgggguggaagaguc

SEQ ID NO: 14462 - RNA, 21 nt, Artificial Sequence
  GATA2 Guide RNA
agcggacucuuccaccccgua

SEQ ID NO: 14463 - RNA, 21 nt, Artificial Sequence
  GATA2 Guide RNA
aggaagccuacgggguggaag

SEQ ID NO: 14464 - RNA, 21 nt, Artificial Sequence
  GATA2 Guide RNA
aggccgguccccccaggaagc

SEQ ID NO: 14465 - RNA, 21 nt, Artificial Sequence
  GATA2 Guide RNA
caccccguaggcuuccugggg

SEQ ID NO: 14466 - RNA, 21 nt, Artificial Sequence
  GATA2 Guide RNA
cagcagcggacucuuccaccc

SEQ ID NO: 14467 - RNA, 21 nt, Artificial Sequence
  GATA2 Guide RNA
cagcggacucuuccaccccgu

SEQ ID NO: 14468 - RNA, 21 nt, Artificial Sequence
  GATA2 Guide RNA
caggaagccuacgggguggaa

SEQ ID NO: 14469 - RNA, 21 nt, Artificial Sequence
  GATA2 Guide RNA
ccaccccguaggcuuccuggg

SEQ ID NO: 14470 - RNA, 21 nt, Artificial Sequence
  GATA2 Guide RNA
ccaggaagccuacggggugga

SEQ ID NO: 14471 - RNA, 21 nt, Artificial Sequence
  GATA2 Guide RNA
cccaggaagccuacggggugg

SEQ ID NO: 14472 - RNA, 21 nt, Artificial Sequence
  GATA2 Guide RNA
ccccaggaagccuacggggug

SEQ ID NO: 14473 - RNA, 21 nt, Artificial Sequence
  GATA2 Guide RNA
cccccaggaagccuacggggu

SEQ ID NO: 14474 - RNA, 21 nt, Artificial Sequence
  GATA2 Guide RNA
ccccccaggaagccuacgggg

SEQ ID NO: 14475 - RNA, 21 nt, Artificial Sequence
  GATA2 Guide RNA
ccccguaggcuuccugggggg

SEQ ID NO: 14476 - RNA, 21 nt, Artificial Sequence
  GATA2 Guide RNA
cccguaggcuuccugggggga

SEQ ID NO: 14477 - RNA, 21 nt, Artificial Sequence
  GATA2 Guide RNA
ccgguccccccaggaagccua

SEQ ID NO: 14478 - RNA, 21 nt, Artificial Sequence
  GATA2 Guide RNA
ccguaggcuuccuggggggac

SEQ ID NO: 14479 - RNA, 21 nt, Artificial Sequence
  GATA2 Guide RNA
ccuacgggguggaagaguccg

SEQ ID NO: 14480 - RNA, 21 nt, Artificial Sequence
  GATA2 Guide RNA
cggacucuuccaccccguagg

SEQ ID NO: 14481 - RNA, 21 nt, Artificial Sequence
  GATA2 Guide RNA
cgguccccccaggaagccuac

SEQ ID NO: 14482 - RNA, 21 nt, Artificial Sequence
  GATA2 Guide RNA
cguaggcuuccuggggggacc

SEQ ID NO: 14483 - RNA, 21 nt, Artificial Sequence
  GATA2 Guide RNA
cuacgggguggaagaguccgc

SEQ ID NO: 14484 - RNA, 21 nt, Artificial Sequence
  GATA2 Guide RNA
cucuuccaccccguaggcuuc

SEQ ID NO: 14485 - RNA, 21 nt, Artificial Sequence
  GATA2 Guide RNA
cuuccaccccguaggcuuccu

SEQ ID NO: 14486 - RNA, 21 nt, Artificial Sequence
  GATA2 Guide RNA
gaagccuacgggguggaagag

SEQ ID NO: 14487 - RNA, 21 nt, Artificial Sequence
  GATA2 Guide RNA
gacucuuccaccccguaggcu

SEQ ID NO: 14488 - RNA, 21 nt, Artificial Sequence
  GATA2 Guide RNA
gcagcggacucuuccaccccg

SEQ ID NO: 14489 - RNA, 21 nt, Artificial Sequence
  GATA2 Guide RNA
gccgguccccccaggaagccu

SEQ ID NO: 14490 - RNA, 21 nt, Artificial Sequence
  GATA2 Guide RNA
gccuacgggguggaagagucc

SEQ ID NO: 14491 - RNA, 21 nt, Artificial Sequence
  GATA2 Guide RNA
gcggacucuuccaccccguag

SEQ ID NO: 14492 - RNA, 21 nt, Artificial Sequence
  GATA2 Guide RNA
ggaagccuacgggguggaaga

SEQ ID NO: 14493 - RNA, 21 nt, Artificial Sequence
  GATA2 Guide RNA
ggacucuuccaccccguaggc

SEQ ID NO: 14494 - RNA, 21 nt, Artificial Sequence
  GATA2 Guide RNA
gguccccccaggaagccuacg

SEQ ID NO: 14495 - RNA, 21 nt, Artificial Sequence
  GATA2 Guide RNA
guaggcuuccuggggggaccg

SEQ ID NO: 14496 - RNA, 21 nt, Artificial Sequence
  GATA2 Guide RNA
guccccccaggaagccuacgg

SEQ ID NO: 14497 - RNA, 21 nt, Artificial Sequence
  GATA2 Guide RNA
uacgggguggaagaguccgcu

SEQ ID NO: 14498 - RNA, 21 nt, Artificial Sequence
  GATA2 Guide RNA
uccaccccguaggcuuccugg

SEQ ID NO: 14499 - RNA, 21 nt, Artificial Sequence
  GATA2 Guide RNA
uccccccaggaagccuacggg

SEQ ID NO: 14500 - RNA, 21 nt, Artificial Sequence
  GATA2 Guide RNA
ucuuccaccccguaggcuucc

SEQ ID NO: 14501 - RNA, 21 nt, Artificial Sequence
  GATA2 Guide RNA
uuccaccccguaggcuuccug

SEQ ID NO: 14502 - RNA, 22 nt, Artificial Sequence
  GATA2 Guide RNA
aagccuacgggguggaagaguc

SEQ ID NO: 14503 - RNA, 22 nt, Artificial Sequence
  GATA2 Guide RNA
acagcagcggacucuuccaccc

SEQ ID NO: 14504 - RNA, 22 nt, Artificial Sequence
  GATA2 Guide RNA
accccguaggcuuccugggggg

SEQ ID NO: 14505 - RNA, 22 nt, Artificial Sequence
  GATA2 Guide RNA
acgggguggaagaguccgcugc

SEQ ID NO: 14506 - RNA, 22 nt, Artificial Sequence
  GATA2 Guide RNA
acucuuccaccccguaggcuuc

SEQ ID NO: 14507 - RNA, 22 nt, Artificial Sequence
  GATA2 Guide RNA
agcagcggacucuuccaccccg

SEQ ID NO: 14508 - RNA, 22 nt, Artificial Sequence
  GATA2 Guide RNA
agccuacgggguggaagagucc

SEQ ID NO: 14509 - RNA, 22 nt, Artificial Sequence
  GATA2 Guide RNA
agcggacucuuccaccccguag

SEQ ID NO: 14510 - RNA, 22 nt, Artificial Sequence
  GATA2 Guide RNA
aggaagccuacgggguggaaga

SEQ ID NO: 14511 - RNA, 22 nt, Artificial Sequence
  GATA2 Guide RNA
aggccgguccccccaggaagcc

SEQ ID NO: 14512 - RNA, 22 nt, Artificial Sequence
  GATA2 Guide RNA
caccccguaggcuuccuggggg

SEQ ID NO: 14513 - RNA, 22 nt, Artificial Sequence
  GATA2 Guide RNA
cagcagcggacucuuccacccc

SEQ ID NO: 14514 - RNA, 22 nt, Artificial Sequence
  GATA2 Guide RNA
cagcggacucuuccaccccgua

SEQ ID NO: 14515 - RNA, 22 nt, Artificial Sequence
  GATA2 Guide RNA
caggaagccuacgggguggaag

SEQ ID NO: 14516 - RNA, 22 nt, Artificial Sequence
  GATA2 Guide RNA
ccaccccguaggcuuccugggg

SEQ ID NO: 14517 - RNA, 22 nt, Artificial Sequence
  GATA2 Guide RNA
ccaggaagccuacgggguggaa

SEQ ID NO: 14518 - RNA, 22 nt, Artificial Sequence
  GATA2 Guide RNA
cccaggaagccuacggggugga

SEQ ID NO: 14519 - RNA, 22 nt, Artificial Sequence
  GATA2 Guide RNA
ccccaggaagccuacggggugg

SEQ ID NO: 14520 - RNA, 22 nt, Artificial Sequence
  GATA2 Guide RNA
cccccaggaagccuacggggug

SEQ ID NO: 14521 - RNA, 22 nt, Artificial Sequence
  GATA2 Guide RNA
ccccccaggaagccuacggggu

SEQ ID NO: 14522 - RNA, 22 nt, Artificial Sequence
  GATA2 Guide RNA
ccccguaggcuuccugggggga

SEQ ID NO: 14523 - RNA, 22 nt, Artificial Sequence
  GATA2 Guide RNA
cccguaggcuuccuggggggac

SEQ ID NO: 14524 - RNA, 22 nt, Artificial Sequence
  GATA2 Guide RNA
ccgguccccccaggaagccuac

SEQ ID NO: 14525 - RNA, 22 nt, Artificial Sequence
  GATA2 Guide RNA
ccguaggcuuccuggggggacc

SEQ ID NO: 14526 - RNA, 22 nt, Artificial Sequence
  GATA2 Guide RNA
ccuacgggguggaagaguccgc

SEQ ID NO: 14527 - RNA, 22 nt, Artificial Sequence
  GATA2 Guide RNA
cggacucuuccaccccguaggc

SEQ ID NO: 14528 - RNA, 22 nt, Artificial Sequence
  GATA2 Guide RNA
cgguccccccaggaagccuacg

SEQ ID NO: 14529 - RNA, 22 nt, Artificial Sequence
  GATA2 Guide RNA
cguaggcuuccuggggggaccg

SEQ ID NO: 14530 - RNA, 22 nt, Artificial Sequence
  GATA2 Guide RNA
cuacgggguggaagaguccgcu

SEQ ID NO: 14531 - RNA, 22 nt, Artificial Sequence
  GATA2 Guide RNA
cucuuccaccccguaggcuucc

SEQ ID NO: 14532 - RNA, 22 nt, Artificial Sequence
  GATA2 Guide RNA
cuuccaccccguaggcuuccug

SEQ ID NO: 14533 - RNA, 22 nt, Artificial Sequence
  GATA2 Guide RNA
gaagccuacgggguggaagagu

SEQ ID NO: 14534 - RNA, 22 nt, Artificial Sequence
  GATA2 Guide RNA
gacucuuccaccccguaggcuu

SEQ ID NO: 14535 - RNA, 22 nt, Artificial Sequence
  GATA2 Guide RNA
gaggccgguccccccaggaagc

SEQ ID NO: 14536 - RNA, 22 nt, Artificial Sequence
  GATA2 Guide RNA
gcagcggacucuuccaccccgu

SEQ ID NO: 14537 - RNA, 22 nt, Artificial Sequence
  GATA2 Guide RNA
gccgguccccccaggaagccua

SEQ ID NO: 14538 - RNA, 22 nt, Artificial Sequence
  GATA2 Guide RNA
gccuacgggguggaagaguccg

SEQ ID NO: 14539 - RNA, 22 nt, Artificial Sequence
  GATA2 Guide RNA
gcggacucuuccaccccguagg

SEQ ID NO: 14540 - RNA, 22 nt, Artificial Sequence
  GATA2 Guide RNA
ggaagccuacgggguggaagag

SEQ ID NO: 14541 - RNA, 22 nt, Artificial Sequence
  GATA2 Guide RNA
ggacucuuccaccccguaggcu

SEQ ID NO: 14542 - RNA, 22 nt, Artificial Sequence
  GATA2 Guide RNA
ggccgguccccccaggaagccu

SEQ ID NO: 14543 - RNA, 22 nt, Artificial Sequence
  GATA2 Guide RNA
gguccccccaggaagccuacgg

SEQ ID NO: 14544 - RNA, 22 nt, Artificial Sequence
  GATA2 Guide RNA
guaggcuuccuggggggaccgg

SEQ ID NO: 14545 - RNA, 22 nt, Artificial Sequence
  GATA2 Guide RNA
guccccccaggaagccuacggg

SEQ ID NO: 14546 - RNA, 22 nt, Artificial Sequence
  GATA2 Guide RNA
uacagcagcggacucuuccacc

SEQ ID NO: 14547 - RNA, 22 nt, Artificial Sequence
  GATA2 Guide RNA
uacgggguggaagaguccgcug

SEQ ID NO: 14548 - RNA, 22 nt, Artificial Sequence
  GATA2 Guide RNA
uccaccccguaggcuuccuggg

SEQ ID NO: 14549 - RNA, 22 nt, Artificial Sequence
  GATA2 Guide RNA
uccccccaggaagccuacgggg

SEQ ID NO: 14550 - RNA, 22 nt, Artificial Sequence
  GATA2 Guide RNA
ucuuccaccccguaggcuuccu

SEQ ID NO: 14551 - RNA, 22 nt, Artificial Sequence
  GATA2 Guide RNA
uuccaccccguaggcuuccugg

SEQ ID NO: 14552 - RNA, 20 nt, Artificial Sequence
  GATA2 Guide RNA
aagccuccgagguggaagag

SEQ ID NO: 14553 - RNA, 20 nt, Artificial Sequence
  GATA2 Guide RNA
acagcagcggacucuuccac

SEQ ID NO: 14554 - RNA, 20 nt, Artificial Sequence
  GATA2 Guide RNA
accucggaggcuuccugggg

SEQ ID NO: 14555 - RNA, 20 nt, Artificial Sequence
  GATA2 Guide RNA
acucuuccaccucggaggcu

SEQ ID NO: 14556 - RNA, 20 nt, Artificial Sequence
  GATA2 Guide RNA
agcagcggacucuuccaccu

SEQ ID NO: 14557 - RNA, 20 nt, Artificial Sequence
  GATA2 Guide RNA
agccuccgagguggaagagu

SEQ ID NO: 14558 - RNA, 20 nt, Artificial Sequence
  GATA2 Guide RNA
agcggacucuuccaccucgg

SEQ ID NO: 14559 - RNA, 20 nt, Artificial Sequence
  GATA2 Guide RNA
aggaagccuccgagguggaa

SEQ ID NO: 14560 - RNA, 20 nt, Artificial Sequence
  GATA2 Guide RNA
agguggaagaguccgcugcu

SEQ ID NO: 14561 - RNA, 20 nt, Artificial Sequence
  GATA2 Guide RNA
caccucggaggcuuccuggg

SEQ ID NO: 14562 - RNA, 20 nt, Artificial Sequence
  GATA2 Guide RNA
cagcggacucuuccaccucg

SEQ ID NO: 14563 - RNA, 20 nt, Artificial Sequence
  GATA2 Guide RNA
caggaagccuccgaggugga

SEQ ID NO: 14564 - RNA, 20 nt, Artificial Sequence
  GATA2 Guide RNA
ccaccucggaggcuuccugg

SEQ ID NO: 14565 - RNA, 20 nt, Artificial Sequence
  GATA2 Guide RNA
ccaggaagccuccgaggugg

SEQ ID NO: 14566 - RNA, 20 nt, Artificial Sequence
  GATA2 Guide RNA
cccaggaagccuccgaggug

SEQ ID NO: 14567 - RNA, 20 nt, Artificial Sequence
  GATA2 Guide RNA
ccccaggaagccuccgaggu

SEQ ID NO: 14568 - RNA, 20 nt, Artificial Sequence
  GATA2 Guide RNA
cccccaggaagccuccgagg

SEQ ID NO: 14569 - RNA, 20 nt, Artificial Sequence
  GATA2 Guide RNA
ccccccaggaagccuccgag

SEQ ID NO: 14570 - RNA, 20 nt, Artificial Sequence
  GATA2 Guide RNA
ccgagguggaagaguccgcu

SEQ ID NO: 14571 - RNA, 20 nt, Artificial Sequence
  GATA2 Guide RNA
ccuccgagguggaagagucc

SEQ ID NO: 14572 - RNA, 20 nt, Artificial Sequence
  GATA2 Guide RNA
ccucggaggcuuccuggggg

SEQ ID NO: 14573 - RNA, 20 nt, Artificial Sequence
  GATA2 Guide RNA
cgagguggaagaguccgcug

SEQ ID NO: 14574 - RNA, 20 nt, Artificial Sequence
  GATA2 Guide RNA
cggacucuuccaccucggag

SEQ ID NO: 14575 - RNA, 20 nt, Artificial Sequence
  GATA2 Guide RNA
cgguccccccaggaagccuc

SEQ ID NO: 14576 - RNA, 20 nt, Artificial Sequence
  GATA2 Guide RNA
cuacagcagcggacucuucc

SEQ ID NO: 14577 - RNA, 20 nt, Artificial Sequence
  GATA2 Guide RNA
cuccgagguggaagaguccg

SEQ ID NO: 14578 - RNA, 20 nt, Artificial Sequence
  GATA2 Guide RNA
cucggaggcuuccugggggg

SEQ ID NO: 14579 - RNA, 20 nt, Artificial Sequence
  GATA2 Guide RNA
cucuuccaccucggaggcuu

SEQ ID NO: 14580 - RNA, 20 nt, Artificial Sequence
  GATA2 Guide RNA
cuuccaccucggaggcuucc

SEQ ID NO: 14581 - RNA, 20 nt, Artificial Sequence
  GATA2 Guide RNA
gaagccuccgagguggaaga

SEQ ID NO: 14582 - RNA, 20 nt, Artificial Sequence
  GATA2 Guide RNA
gacucuuccaccucggaggc

SEQ ID NO: 14583 - RNA, 20 nt, Artificial Sequence
  GATA2 Guide RNA
gagguggaagaguccgcugc

SEQ ID NO: 14584 - RNA, 20 nt, Artificial Sequence
  GATA2 Guide RNA
gcagcggacucuuccaccuc

SEQ ID NO: 14585 - RNA, 20 nt, Artificial Sequence
  GATA2 Guide RNA
gccuccgagguggaagaguc

SEQ ID NO: 14586 - RNA, 20 nt, Artificial Sequence
  GATA2 Guide RNA
gcggacucuuccaccucgga

SEQ ID NO: 14587 - RNA, 20 nt, Artificial Sequence
  GATA2 Guide RNA
ggaagccuccgagguggaag

SEQ ID NO: 14588 - RNA, 20 nt, Artificial Sequence
  GATA2 Guide RNA
ggacucuuccaccucggagg

SEQ ID NO: 14589 - RNA, 20 nt, Artificial Sequence
  GATA2 Guide RNA
gguccccccaggaagccucc

SEQ ID NO: 14590 - RNA, 20 nt, Artificial Sequence
  GATA2 Guide RNA
guccccccaggaagccuccg

SEQ ID NO: 14591 - RNA, 20 nt, Artificial Sequence
  GATA2 Guide RNA
uacagcagcggacucuucca

SEQ ID NO: 14592 - RNA, 20 nt, Artificial Sequence
  GATA2 Guide RNA
uccaccucggaggcuuccug

SEQ ID NO: 14593 - RNA, 20 nt, Artificial Sequence
  GATA2 Guide RNA
uccccccaggaagccuccga

SEQ ID NO: 14594 - RNA, 20 nt, Artificial Sequence
  GATA2 Guide RNA
uccgagguggaagaguccgc

SEQ ID NO: 14595 - RNA, 20 nt, Artificial Sequence
  GATA2 Guide RNA
ucuuccaccucggaggcuuc

SEQ ID NO: 14596 - RNA, 20 nt, Artificial Sequence
  GATA2 Guide RNA
uuccaccucggaggcuuccu

SEQ ID NO: 14597 - RNA, 21 nt, Artificial Sequence
  GATA2 Guide RNA
aagccuccgagguggaagagu

SEQ ID NO: 14598 - RNA, 21 nt, Artificial Sequence
  GATA2 Guide RNA
accucggaggcuuccuggggg

SEQ ID NO: 14599 - RNA, 21 nt, Artificial Sequence
  GATA2 Guide RNA
acuacagcagcggacucuucc

SEQ ID NO: 14600 - RNA, 21 nt, Artificial Sequence
  GATA2 Guide RNA
acucuuccaccucggaggcuu

SEQ ID NO: 14601 - RNA, 21 nt, Artificial Sequence
  GATA2 Guide RNA
agcagcggacucuuccaccuc

SEQ ID NO: 14602 - RNA, 21 nt, Artificial Sequence
  GATA2 Guide RNA
agccuccgagguggaagaguc

SEQ ID NO: 14603 - RNA, 21 nt, Artificial Sequence
  GATA2 Guide RNA
agcggacucuuccaccucgga

SEQ ID NO: 14604 - RNA, 21 nt, Artificial Sequence
  GATA2 Guide RNA
aggaagccuccgagguggaag

SEQ ID NO: 14605 - RNA, 21 nt, Artificial Sequence
  GATA2 Guide RNA
agguggaagaguccgcugcug

SEQ ID NO: 14606 - RNA, 21 nt, Artificial Sequence
  GATA2 Guide RNA
caccucggaggcuuccugggg

SEQ ID NO: 14607 - RNA, 21 nt, Artificial Sequence
  GATA2 Guide RNA
cagcagcggacucuuccaccu

SEQ ID NO: 14608 - RNA, 21 nt, Artificial Sequence
  GATA2 Guide RNA
cagcggacucuuccaccucgg

SEQ ID NO: 14609 - RNA, 21 nt, Artificial Sequence
  GATA2 Guide RNA
caggaagccuccgagguggaa

SEQ ID NO: 14610 - RNA, 21 nt, Artificial Sequence
  GATA2 Guide RNA
ccaccucggaggcuuccuggg

SEQ ID NO: 14611 - RNA, 21 nt, Artificial Sequence
  GATA2 Guide RNA
ccaggaagccuccgaggugga

SEQ ID NO: 14612 - RNA, 21 nt, Artificial Sequence
  GATA2 Guide RNA
cccaggaagccuccgaggugg

SEQ ID NO: 14613 - RNA, 21 nt, Artificial Sequence
  GATA2 Guide RNA
ccccaggaagccuccgaggug

SEQ ID NO: 14614 - RNA, 21 nt, Artificial Sequence
  GATA2 Guide RNA
cccccaggaagccuccgaggu

SEQ ID NO: 14615 - RNA, 21 nt, Artificial Sequence
  GATA2 Guide RNA
ccccccaggaagccuccgagg

SEQ ID NO: 14616 - RNA, 21 nt, Artificial Sequence
  GATA2 Guide RNA
ccgagguggaagaguccgcug

SEQ ID NO: 14617 - RNA, 21 nt, Artificial Sequence
  GATA2 Guide RNA
ccgguccccccaggaagccuc

SEQ ID NO: 14618 - RNA, 21 nt, Artificial Sequence
  GATA2 Guide RNA
ccuccgagguggaagaguccg

SEQ ID NO: 14619 - RNA, 21 nt, Artificial Sequence
  GATA2 Guide RNA
ccucggaggcuuccugggggg

SEQ ID NO: 14620 - RNA, 21 nt, Artificial Sequence
  GATA2 Guide RNA
cgagguggaagaguccgcugc

SEQ ID NO: 14621 - RNA, 21 nt, Artificial Sequence
  GATA2 Guide RNA
cggacucuuccaccucggagg

SEQ ID NO: 14622 - RNA, 21 nt, Artificial Sequence
  GATA2 Guide RNA
cgguccccccaggaagccucc

SEQ ID NO: 14623 - RNA, 21 nt, Artificial Sequence
  GATA2 Guide RNA
cuacagcagcggacucuucca

SEQ ID NO: 14624 - RNA, 21 nt, Artificial Sequence
  GATA2 Guide RNA
cuccgagguggaagaguccgc

SEQ ID NO: 14625 - RNA, 21 nt, Artificial Sequence
  GATA2 Guide RNA
cucggaggcuuccugggggga

SEQ ID NO: 14626 - RNA, 21 nt, Artificial Sequence
  GATA2 Guide RNA
cucuuccaccucggaggcuuc

SEQ ID NO: 14627 - RNA, 21 nt, Artificial Sequence
  GATA2 Guide RNA
cuuccaccucggaggcuuccu

SEQ ID NO: 14628 - RNA, 21 nt, Artificial Sequence
  GATA2 Guide RNA
gaagccuccgagguggaagag

SEQ ID NO: 14629 - RNA, 21 nt, Artificial Sequence
  GATA2 Guide RNA
gacucuuccaccucggaggcu

SEQ ID NO: 14630 - RNA, 21 nt, Artificial Sequence
  GATA2 Guide RNA
gagguggaagaguccgcugcu

SEQ ID NO: 14631 - RNA, 21 nt, Artificial Sequence
  GATA2 Guide RNA
gcagcggacucuuccaccucg

SEQ ID NO: 14632 - RNA, 21 nt, Artificial Sequence
  GATA2 Guide RNA
gccuccgagguggaagagucc

SEQ ID NO: 14633 - RNA, 21 nt, Artificial Sequence
  GATA2 Guide RNA
gcggacucuuccaccucggag

SEQ ID NO: 14634 - RNA, 21 nt, Artificial Sequence
  GATA2 Guide RNA
ggaagccuccgagguggaaga

SEQ ID NO: 14635 - RNA, 21 nt, Artificial Sequence
  GATA2 Guide RNA
ggacucuuccaccucggaggc

SEQ ID NO: 14636 - RNA, 21 nt, Artificial Sequence
  GATA2 Guide RNA
gguccccccaggaagccuccg

SEQ ID NO: 14637 - RNA, 21 nt, Artificial Sequence
  GATA2 Guide RNA
guccccccaggaagccuccga

SEQ ID NO: 14638 - RNA, 21 nt, Artificial Sequence
  GATA2 Guide RNA
uacagcagcggacucuuccac

SEQ ID NO: 14639 - RNA, 21 nt, Artificial Sequence
  GATA2 Guide RNA
uccaccucggaggcuuccugg

SEQ ID NO: 14640 - RNA, 21 nt, Artificial Sequence
  GATA2 Guide RNA
uccccccaggaagccuccgag

SEQ ID NO: 14641 - RNA, 21 nt, Artificial Sequence
  GATA2 Guide RNA
uccgagguggaagaguccgcu

SEQ ID NO: 14642 - RNA, 21 nt, Artificial Sequence
  GATA2 Guide RNA
ucuuccaccucggaggcuucc

SEQ ID NO: 14643 - RNA, 21 nt, Artificial Sequence
  GATA2 Guide RNA
uuccaccucggaggcuuccug

SEQ ID NO: 14644 - RNA, 22 nt, Artificial Sequence
  GATA2 Guide RNA
aagccuccgagguggaagaguc

SEQ ID NO: 14645 - RNA, 22 nt, Artificial Sequence
  GATA2 Guide RNA
acagcagcggacucuuccaccu

SEQ ID NO: 14646 - RNA, 22 nt, Artificial Sequence
  GATA2 Guide RNA
accucggaggcuuccugggggg

SEQ ID NO: 14647 - RNA, 22 nt, Artificial Sequence
  GATA2 Guide RNA
acuacagcagcggacucuucca

SEQ ID NO: 14648 - RNA, 22 nt, Artificial Sequence
  GATA2 Guide RNA
acucuuccaccucggaggcuuc

SEQ ID NO: 14649 - RNA, 22 nt, Artificial Sequence
  GATA2 Guide RNA
agcagcggacucuuccaccucg

SEQ ID NO: 14650 - RNA, 22 nt, Artificial Sequence
  GATA2 Guide RNA
agccuccgagguggaagagucc

SEQ ID NO: 14651 - RNA, 22 nt, Artificial Sequence
  GATA2 Guide RNA
agcggacucuuccaccucggag

SEQ ID NO: 14652 - RNA, 22 nt, Artificial Sequence
  GATA2 Guide RNA
aggaagccuccgagguggaaga

SEQ ID NO: 14653 - RNA, 22 nt, Artificial Sequence
  GATA2 Guide RNA
agguggaagaguccgcugcugu

SEQ ID NO: 14654 - RNA, 22 nt, Artificial Sequence
  GATA2 Guide RNA
caccucggaggcuuccuggggg

SEQ ID NO: 14655 - RNA, 22 nt, Artificial Sequence
  GATA2 Guide RNA
cagcagcggacucuuccaccuc

SEQ ID NO: 14656 - RNA, 22 nt, Artificial Sequence
  GATA2 Guide RNA
cagcggacucuuccaccucgga

SEQ ID NO: 14657 - RNA, 22 nt, Artificial Sequence
  GATA2 Guide RNA
caggaagccuccgagguggaag

SEQ ID NO: 14658 - RNA, 22 nt, Artificial Sequence
  GATA2 Guide RNA
ccaccucggaggcuuccugggg

SEQ ID NO: 14659 - RNA, 22 nt, Artificial Sequence
  GATA2 Guide RNA
ccaggaagccuccgagguggaa

SEQ ID NO: 14660 - RNA, 22 nt, Artificial Sequence
  GATA2 Guide RNA
cccaggaagccuccgaggugga

SEQ ID NO: 14661 - RNA, 22 nt, Artificial Sequence
  GATA2 Guide RNA
ccccaggaagccuccgaggugg

SEQ ID NO: 14662 - RNA, 22 nt, Artificial Sequence
  GATA2 Guide RNA
cccccaggaagccuccgaggug

SEQ ID NO: 14663 - RNA, 22 nt, Artificial Sequence
  GATA2 Guide RNA
ccccccaggaagccuccgaggu

SEQ ID NO: 14664 - RNA, 22 nt, Artificial Sequence
  GATA2 Guide RNA
ccgagguggaagaguccgcugc

SEQ ID NO: 14665 - RNA, 22 nt, Artificial Sequence
  GATA2 Guide RNA
ccgguccccccaggaagccucc

SEQ ID NO: 14666 - RNA, 22 nt, Artificial Sequence
  GATA2 Guide RNA
ccuccgagguggaagaguccgc

SEQ ID NO: 14667 - RNA, 22 nt, Artificial Sequence
  GATA2 Guide RNA
ccucggaggcuuccugggggga

SEQ ID NO: 14668 - RNA, 22 nt, Artificial Sequence
  GATA2 Guide RNA
cgagguggaagaguccgcugcu

SEQ ID NO: 14669 - RNA, 22 nt, Artificial Sequence
  GATA2 Guide RNA
cggacucuuccaccucggaggc

SEQ ID NO: 14670 - RNA, 22 nt, Artificial Sequence
  GATA2 Guide RNA
cgguccccccaggaagccuccg

SEQ ID NO: 14671 - RNA, 22 nt, Artificial Sequence
  GATA2 Guide RNA
cuacagcagcggacucuuccac

SEQ ID NO: 14672 - RNA, 22 nt, Artificial Sequence
  GATA2 Guide RNA
cuccgagguggaagaguccgcu

SEQ ID NO: 14673 - RNA, 22 nt, Artificial Sequence
  GATA2 Guide RNA
cucggaggcuuccuggggggac

SEQ ID NO: 14674 - RNA, 22 nt, Artificial Sequence
  GATA2 Guide RNA
cucuuccaccucggaggcuucc

SEQ ID NO: 14675 - RNA, 22 nt, Artificial Sequence
  GATA2 Guide RNA
cuuccaccucggaggcuuccug

SEQ ID NO: 14676 - RNA, 22 nt, Artificial Sequence
  GATA2 Guide RNA
gaagccuccgagguggaagagu

SEQ ID NO: 14677 - RNA, 22 nt, Artificial Sequence
  GATA2 Guide RNA
gacuacagcagcggacucuucc

SEQ ID NO: 14678 - RNA, 22 nt, Artificial Sequence
  GATA2 Guide RNA
gacucuuccaccucggaggcuu

SEQ ID NO: 14679 - RNA, 22 nt, Artificial Sequence
  GATA2 Guide RNA
gagguggaagaguccgcugcug

SEQ ID NO: 14680 - RNA, 22 nt, Artificial Sequence
  GATA2 Guide RNA
gcagcggacucuuccaccucgg

SEQ ID NO: 14681 - RNA, 22 nt, Artificial Sequence
  GATA2 Guide RNA
gccgguccccccaggaagccuc

SEQ ID NO: 14682 - RNA, 22 nt, Artificial Sequence
  GATA2 Guide RNA
gccuccgagguggaagaguccg

SEQ ID NO: 14683 - RNA, 22 nt, Artificial Sequence
  GATA2 Guide RNA
gcggacucuuccaccucggagg

SEQ ID NO: 14684 - RNA, 22 nt, Artificial Sequence
  GATA2 Guide RNA
ggaagccuccgagguggaagag

SEQ ID NO: 14685 - RNA, 22 nt, Artificial Sequence
  GATA2 Guide RNA
ggacucuuccaccucggaggcu

SEQ ID NO: 14686 - RNA, 22 nt, Artificial Sequence
  GATA2 Guide RNA
gguccccccaggaagccuccga

SEQ ID NO: 14687 - RNA, 22 nt, Artificial Sequence
  GATA2 Guide RNA
guccccccaggaagccuccgag

SEQ ID NO: 14688 - RNA, 22 nt, Artificial Sequence
  GATA2 Guide RNA
uccaccucggaggcuuccuggg

SEQ ID NO: 14689 - RNA, 22 nt, Artificial Sequence
  GATA2 Guide RNA
uccccccaggaagccuccgagg

SEQ ID NO: 14690 - RNA, 22 nt, Artificial Sequence
  GATA2 Guide RNA
uccgagguggaagaguccgcug

SEQ ID NO: 14691 - RNA, 22 nt, Artificial Sequence
  GATA2 Guide RNA
ucuuccaccucggaggcuuccu

SEQ ID NO: 14692 - RNA, 22 nt, Artificial Sequence
  GATA2 Guide RNA
uuccaccucggaggcuuccugg

SEQ ID NO: 14693 - RNA, 20 nt, Artificial Sequence
  GATA2 Guide RNA
aagagucugcugcuguaguc

SEQ ID NO: 14694 - RNA, 20 nt, Artificial Sequence
  GATA2 Guide RNA
aagccuccgggguggaagag

SEQ ID NO: 14695 - RNA, 20 nt, Artificial Sequence
  GATA2 Guide RNA
acagcagcagacucuuccac

SEQ ID NO: 14696 - RNA, 20 nt, Artificial Sequence
  GATA2 Guide RNA
acgacuacagcagcagacuc

SEQ ID NO: 14697 - RNA, 20 nt, Artificial Sequence
  GATA2 Guide RNA
acuacagcagcagacucuuc

SEQ ID NO: 14698 - RNA, 20 nt, Artificial Sequence
  GATA2 Guide RNA
agagucugcugcuguagucg

SEQ ID NO: 14699 - RNA, 20 nt, Artificial Sequence
  GATA2 Guide RNA
agcagacucuuccaccccgg

SEQ ID NO: 14700 - RNA, 20 nt, Artificial Sequence
  GATA2 Guide RNA
agcagcagacucuuccaccc

SEQ ID NO: 14701 - RNA, 20 nt, Artificial Sequence
  GATA2 Guide RNA
agccuccgggguggaagagu

SEQ ID NO: 14702 - RNA, 20 nt, Artificial Sequence
  GATA2 Guide RNA
agucugcugcuguagucgug

SEQ ID NO: 14703 - RNA, 20 nt, Artificial Sequence
  GATA2 Guide RNA
cacgacuacagcagcagacu

SEQ ID NO: 14704 - RNA, 20 nt, Artificial Sequence
  GATA2 Guide RNA
cagacucuuccaccccggag

SEQ ID NO: 14705 - RNA, 20 nt, Artificial Sequence
  GATA2 Guide RNA
cagcagacucuuccaccccg

SEQ ID NO: 14706 - RNA, 20 nt, Artificial Sequence
  GATA2 Guide RNA
cagcagcagacucuuccacc

SEQ ID NO: 14707 - RNA, 20 nt, Artificial Sequence
  GATA2 Guide RNA
ccacgacuacagcagcagac

SEQ ID NO: 14708 - RNA, 20 nt, Artificial Sequence
  GATA2 Guide RNA
cccacgacuacagcagcaga

SEQ ID NO: 14709 - RNA, 20 nt, Artificial Sequence
  GATA2 Guide RNA
ccgggguggaagagucugcu

SEQ ID NO: 14710 - RNA, 20 nt, Artificial Sequence
  GATA2 Guide RNA
ccuccgggguggaagagucu

SEQ ID NO: 14711 - RNA, 20 nt, Artificial Sequence
  GATA2 Guide RNA
cgacuacagcagcagacucu

SEQ ID NO: 14712 - RNA, 20 nt, Artificial Sequence
  GATA2 Guide RNA
cggcugcccacgacuacagc

SEQ ID NO: 14713 - RNA, 20 nt, Artificial Sequence
  GATA2 Guide RNA
cgggguggaagagucugcug

SEQ ID NO: 14714 - RNA, 20 nt, Artificial Sequence
  GATA2 Guide RNA
cuacagcagcagacucuucc

SEQ ID NO: 14715 - RNA, 20 nt, Artificial Sequence
  GATA2 Guide RNA
cuccgggguggaagagucug

SEQ ID NO: 14716 - RNA, 20 nt, Artificial Sequence
  GATA2 Guide RNA
cugcccacgacuacagcagc

SEQ ID NO: 14717 - RNA, 20 nt, Artificial Sequence
  GATA2 Guide RNA
cugcugcuguagucgugggc

SEQ ID NO: 14718 - RNA, 20 nt, Artificial Sequence
  GATA2 Guide RNA
gaagagucugcugcuguagu

SEQ ID NO: 14719 - RNA, 20 nt, Artificial Sequence
  GATA2 Guide RNA
gacuacagcagcagacucuu

SEQ ID NO: 14720 - RNA, 20 nt, Artificial Sequence
  GATA2 Guide RNA
gagucugcugcuguagucgu

SEQ ID NO: 14721 - RNA, 20 nt, Artificial Sequence
  GATA2 Guide RNA
gcagacucuuccaccccgga

SEQ ID NO: 14722 - RNA, 20 nt, Artificial Sequence
  GATA2 Guide RNA
gcagcagacucuuccacccc

SEQ ID NO: 14723 - RNA, 20 nt, Artificial Sequence
  GATA2 Guide RNA
gcccacgacuacagcagcag

SEQ ID NO: 14724 - RNA, 20 nt, Artificial Sequence
  GATA2 Guide RNA
gccuccgggguggaagaguc

SEQ ID NO: 14725 - RNA, 20 nt, Artificial Sequence
  GATA2 Guide RNA
gcugcccacgacuacagcag

SEQ ID NO: 14726 - RNA, 20 nt, Artificial Sequence
  GATA2 Guide RNA
ggaagagucugcugcuguag

SEQ ID NO: 14727 - RNA, 20 nt, Artificial Sequence
  GATA2 Guide RNA
ggcugcccacgacuacagca

SEQ ID NO: 14728 - RNA, 20 nt, Artificial Sequence
  GATA2 Guide RNA
gggguggaagagucugcugc

SEQ ID NO: 14729 - RNA, 20 nt, Artificial Sequence
  GATA2 Guide RNA
ggguggaagagucugcugcu

SEQ ID NO: 14730 - RNA, 20 nt, Artificial Sequence
  GATA2 Guide RNA
gguggaagagucugcugcug

SEQ ID NO: 14731 - RNA, 20 nt, Artificial Sequence
  GATA2 Guide RNA
gucugcugcuguagucgugg

SEQ ID NO: 14732 - RNA, 20 nt, Artificial Sequence
  GATA2 Guide RNA
guggaagagucugcugcugu

SEQ ID NO: 14733 - RNA, 20 nt, Artificial Sequence
  GATA2 Guide RNA
uacagcagcagacucuucca

SEQ ID NO: 14734 - RNA, 20 nt, Artificial Sequence
  GATA2 Guide RNA
uccgggguggaagagucugc

SEQ ID NO: 14735 - RNA, 20 nt, Artificial Sequence
  GATA2 Guide RNA
ucugcugcuguagucguggg

SEQ ID NO: 14736 - RNA, 20 nt, Artificial Sequence
  GATA2 Guide RNA
ugcccacgacuacagcagca

SEQ ID NO: 14737 - RNA, 20 nt, Artificial Sequence
  GATA2 Guide RNA
ugcugcuguagucgugggca

SEQ ID NO: 14738 - RNA, 20 nt, Artificial Sequence
  GATA2 Guide RNA
uggaagagucugcugcugua

SEQ ID NO: 14739 - RNA, 21 nt, Artificial Sequence
  GATA2 Guide RNA
aagagucugcugcuguagucg

SEQ ID NO: 14740 - RNA, 21 nt, Artificial Sequence
  GATA2 Guide RNA
aagccuccgggguggaagagu

SEQ ID NO: 14741 - RNA, 21 nt, Artificial Sequence
  GATA2 Guide RNA
acagcagcagacucuuccacc

SEQ ID NO: 14742 - RNA, 21 nt, Artificial Sequence
  GATA2 Guide RNA
acgacuacagcagcagacucu

SEQ ID NO: 14743 - RNA, 21 nt, Artificial Sequence
  GATA2 Guide RNA
acuacagcagcagacucuucc

SEQ ID NO: 14744 - RNA, 21 nt, Artificial Sequence
  GATA2 Guide RNA
agagucugcugcuguagucgu

SEQ ID NO: 14745 - RNA, 21 nt, Artificial Sequence
  GATA2 Guide RNA
agcagacucuuccaccccgga

SEQ ID NO: 14746 - RNA, 21 nt, Artificial Sequence
  GATA2 Guide RNA
agcagcagacucuuccacccc

SEQ ID NO: 14747 - RNA, 21 nt, Artificial Sequence
  GATA2 Guide RNA
agccuccgggguggaagaguc

SEQ ID NO: 14748 - RNA, 21 nt, Artificial Sequence
  GATA2 Guide RNA
agucugcugcuguagucgugg

SEQ ID NO: 14749 - RNA, 21 nt, Artificial Sequence
  GATA2 Guide RNA
cacgacuacagcagcagacuc

SEQ ID NO: 14750 - RNA, 21 nt, Artificial Sequence
  GATA2 Guide RNA
cagacucuuccaccccggagg

SEQ ID NO: 14751 - RNA, 21 nt, Artificial Sequence
  GATA2 Guide RNA
cagcagacucuuccaccccgg

SEQ ID NO: 14752 - RNA, 21 nt, Artificial Sequence
  GATA2 Guide RNA
cagcagcagacucuuccaccc

SEQ ID NO: 14753 - RNA, 21 nt, Artificial Sequence
  GATA2 Guide RNA
ccacgacuacagcagcagacu

SEQ ID NO: 14754 - RNA, 21 nt, Artificial Sequence
  GATA2 Guide RNA
cccacgacuacagcagcagac

SEQ ID NO: 14755 - RNA, 21 nt, Artificial Sequence
  GATA2 Guide RNA
ccgggguggaagagucugcug

SEQ ID NO: 14756 - RNA, 21 nt, Artificial Sequence
  GATA2 Guide RNA
ccuccgggguggaagagucug

SEQ ID NO: 14757 - RNA, 21 nt, Artificial Sequence
  GATA2 Guide RNA
cgacuacagcagcagacucuu

SEQ ID NO: 14758 - RNA, 21 nt, Artificial Sequence
  GATA2 Guide RNA
cggcugcccacgacuacagca

SEQ ID NO: 14759 - RNA, 21 nt, Artificial Sequence
  GATA2 Guide RNA
cgggguggaagagucugcugc

SEQ ID NO: 14760 - RNA, 21 nt, Artificial Sequence
  GATA2 Guide RNA
cuacagcagcagacucuucca

SEQ ID NO: 14761 - RNA, 21 nt, Artificial Sequence
  GATA2 Guide RNA
cuccgggguggaagagucugc

SEQ ID NO: 14762 - RNA, 21 nt, Artificial Sequence
  GATA2 Guide RNA
cugcccacgacuacagcagca

SEQ ID NO: 14763 - RNA, 21 nt, Artificial Sequence
  GATA2 Guide RNA
cugcugcuguagucgugggca

SEQ ID NO: 14764 - RNA, 21 nt, Artificial Sequence
  GATA2 Guide RNA
gaagagucugcugcuguaguc

SEQ ID NO: 14765 - RNA, 21 nt, Artificial Sequence
  GATA2 Guide RNA
gaagccuccgggguggaagag

SEQ ID NO: 14766 - RNA, 21 nt, Artificial Sequence
  GATA2 Guide RNA
gacuacagcagcagacucuuc

SEQ ID NO: 14767 - RNA, 21 nt, Artificial Sequence
  GATA2 Guide RNA
gagucugcugcuguagucgug

SEQ ID NO: 14768 - RNA, 21 nt, Artificial Sequence
  GATA2 Guide RNA
gcagacucuuccaccccggag

SEQ ID NO: 14769 - RNA, 21 nt, Artificial Sequence
  GATA2 Guide RNA
gcagcagacucuuccaccccg

SEQ ID NO: 14770 - RNA, 21 nt, Artificial Sequence
  GATA2 Guide RNA
gcccacgacuacagcagcaga

SEQ ID NO: 14771 - RNA, 21 nt, Artificial Sequence
  GATA2 Guide RNA
gccuccgggguggaagagucu

SEQ ID NO: 14772 - RNA, 21 nt, Artificial Sequence
  GATA2 Guide RNA
gcggcugcccacgacuacagc

SEQ ID NO: 14773 - RNA, 21 nt, Artificial Sequence
  GATA2 Guide RNA
gcugcccacgacuacagcagc

SEQ ID NO: 14774 - RNA, 21 nt, Artificial Sequence
  GATA2 Guide RNA
ggaagagucugcugcuguagu

SEQ ID NO: 14775 - RNA, 21 nt, Artificial Sequence
  GATA2 Guide RNA
ggcugcccacgacuacagcag

SEQ ID NO: 14776 - RNA, 21 nt, Artificial Sequence
  GATA2 Guide RNA
gggguggaagagucugcugcu

SEQ ID NO: 14777 - RNA, 21 nt, Artificial Sequence
  GATA2 Guide RNA
ggguggaagagucugcugcug

SEQ ID NO: 14778 - RNA, 21 nt, Artificial Sequence
  GATA2 Guide RNA
gguggaagagucugcugcugu

SEQ ID NO: 14779 - RNA, 21 nt, Artificial Sequence
  GATA2 Guide RNA
gucugcugcuguagucguggg

SEQ ID NO: 14780 - RNA, 21 nt, Artificial Sequence
  GATA2 Guide RNA
guggaagagucugcugcugua

SEQ ID NO: 14781 - RNA, 21 nt, Artificial Sequence
  GATA2 Guide RNA
uacagcagcagacucuuccac

SEQ ID NO: 14782 - RNA, 21 nt, Artificial Sequence
  GATA2 Guide RNA
uccgggguggaagagucugcu

SEQ ID NO: 14783 - RNA, 21 nt, Artificial Sequence
  GATA2 Guide RNA
ucugcugcuguagucgugggc

SEQ ID NO: 14784 - RNA, 21 nt, Artificial Sequence
  GATA2 Guide RNA
ugcccacgacuacagcagcag

SEQ ID NO: 14785 - RNA, 21 nt, Artificial Sequence
  GATA2 Guide RNA
ugcugcuguagucgugggcag

SEQ ID NO: 14786 - RNA, 21 nt, Artificial Sequence
  GATA2 Guide RNA
uggaagagucugcugcuguag

SEQ ID NO: 14787 - RNA, 22 nt, Artificial Sequence
  GATA2 Guide RNA
aagagucugcugcuguagucgu

SEQ ID NO: 14788 - RNA, 22 nt, Artificial Sequence
  GATA2 Guide RNA
aagccuccgggguggaagaguc

SEQ ID NO: 14789 - RNA, 22 nt, Artificial Sequence
  GATA2 Guide RNA
acagcagcagacucuuccaccc

SEQ ID NO: 14790 - RNA, 22 nt, Artificial Sequence
  GATA2 Guide RNA
acgacuacagcagcagacucuu

SEQ ID NO: 14791 - RNA, 22 nt, Artificial Sequence
  GATA2 Guide RNA
acuacagcagcagacucuucca

SEQ ID NO: 14792 - RNA, 22 nt, Artificial Sequence
  GATA2 Guide RNA
agagucugcugcuguagucgug

SEQ ID NO: 14793 - RNA, 22 nt, Artificial Sequence
  GATA2 Guide RNA
agcagacucuuccaccccggag

SEQ ID NO: 14794 - RNA, 22 nt, Artificial Sequence
  GATA2 Guide RNA
agcagcagacucuuccaccccg

SEQ ID NO: 14795 - RNA, 22 nt, Artificial Sequence
  GATA2 Guide RNA
agccuccgggguggaagagucu

SEQ ID NO: 14796 - RNA, 22 nt, Artificial Sequence
  GATA2 Guide RNA
agucugcugcuguagucguggg

SEQ ID NO: 14797 - RNA, 22 nt, Artificial Sequence
  GATA2 Guide RNA
cacgacuacagcagcagacucu

SEQ ID NO: 14798 - RNA, 22 nt, Artificial Sequence
  GATA2 Guide RNA
cagacucuuccaccccggaggc

SEQ ID NO: 14799 - RNA, 22 nt, Artificial Sequence
  GATA2 Guide RNA
cagcagacucuuccaccccgga

SEQ ID NO: 14800 - RNA, 22 nt, Artificial Sequence
  GATA2 Guide RNA
cagcagcagacucuuccacccc

SEQ ID NO: 14801 - RNA, 22 nt, Artificial Sequence
  GATA2 Guide RNA
ccacgacuacagcagcagacuc

SEQ ID NO: 14802 - RNA, 22 nt, Artificial Sequence
  GATA2 Guide RNA
cccacgacuacagcagcagacu

SEQ ID NO: 14803 - RNA, 22 nt, Artificial Sequence
  GATA2 Guide RNA
ccgggguggaagagucugcugc

SEQ ID NO: 14804 - RNA, 22 nt, Artificial Sequence
  GATA2 Guide RNA
ccuccgggguggaagagucugc

SEQ ID NO: 14805 - RNA, 22 nt, Artificial Sequence
  GATA2 Guide RNA
cgacuacagcagcagacucuuc

SEQ ID NO: 14806 - RNA, 22 nt, Artificial Sequence
  GATA2 Guide RNA
cggcugcccacgacuacagcag

SEQ ID NO: 14807 - RNA, 22 nt, Artificial Sequence
  GATA2 Guide RNA
cgggguggaagagucugcugcu

SEQ ID NO: 14808 - RNA, 22 nt, Artificial Sequence
  GATA2 Guide RNA
cuacagcagcagacucuuccac

SEQ ID NO: 14809 - RNA, 22 nt, Artificial Sequence
  GATA2 Guide RNA
cuccgggguggaagagucugcu

SEQ ID NO: 14810 - RNA, 22 nt, Artificial Sequence
  GATA2 Guide RNA
cugcccacgacuacagcagcag

SEQ ID NO: 14811 - RNA, 22 nt, Artificial Sequence
  GATA2 Guide RNA
cugcugcuguagucgugggcag

SEQ ID NO: 14812 - RNA, 22 nt, Artificial Sequence
  GATA2 Guide RNA
gaagagucugcugcuguagucg

SEQ ID NO: 14813 - RNA, 22 nt, Artificial Sequence
  GATA2 Guide RNA
gaagccuccgggguggaagagu

SEQ ID NO: 14814 - RNA, 22 nt, Artificial Sequence
  GATA2 Guide RNA
gacuacagcagcagacucuucc

SEQ ID NO: 14815 - RNA, 22 nt, Artificial Sequence
  GATA2 Guide RNA
gagucugcugcuguagucgugg

SEQ ID NO: 14816 - RNA, 22 nt, Artificial Sequence
  GATA2 Guide RNA
gcagacucuuccaccccggagg

SEQ ID NO: 14817 - RNA, 22 nt, Artificial Sequence
  GATA2 Guide RNA
gcagcagacucuuccaccccgg

SEQ ID NO: 14818 - RNA, 22 nt, Artificial Sequence
  GATA2 Guide RNA
gcccacgacuacagcagcagac

SEQ ID NO: 14819 - RNA, 22 nt, Artificial Sequence
  GATA2 Guide RNA
gccuccgggguggaagagucug

SEQ ID NO: 14820 - RNA, 22 nt, Artificial Sequence
  GATA2 Guide RNA
gcggcugcccacgacuacagca

SEQ ID NO: 14821 - RNA, 22 nt, Artificial Sequence
  GATA2 Guide RNA
gcugcccacgacuacagcagca

SEQ ID NO: 14822 - RNA, 22 nt, Artificial Sequence
  GATA2 Guide RNA
ggaagagucugcugcuguaguc

SEQ ID NO: 14823 - RNA, 22 nt, Artificial Sequence
  GATA2 Guide RNA
ggaagccuccgggguggaagag

SEQ ID NO: 14824 - RNA, 22 nt, Artificial Sequence
  GATA2 Guide RNA
ggcggcugcccacgacuacagc

SEQ ID NO: 14825 - RNA, 22 nt, Artificial Sequence
  GATA2 Guide RNA
ggcugcccacgacuacagcagc

SEQ ID NO: 14826 - RNA, 22 nt, Artificial Sequence
  GATA2 Guide RNA
gggguggaagagucugcugcug

SEQ ID NO: 14827 - RNA, 22 nt, Artificial Sequence
  GATA2 Guide RNA
ggguggaagagucugcugcugu

SEQ ID NO: 14828 - RNA, 22 nt, Artificial Sequence
  GATA2 Guide RNA
gguggaagagucugcugcugua

SEQ ID NO: 14829 - RNA, 22 nt, Artificial Sequence
  GATA2 Guide RNA
gucugcugcuguagucgugggc

SEQ ID NO: 14830 - RNA, 22 nt, Artificial Sequence
  GATA2 Guide RNA
guggaagagucugcugcuguag

SEQ ID NO: 14831 - RNA, 22 nt, Artificial Sequence
  GATA2 Guide RNA
uacagcagcagacucuuccacc

SEQ ID NO: 14832 - RNA, 22 nt, Artificial Sequence
  GATA2 Guide RNA
uccgggguggaagagucugcug

SEQ ID NO: 14833 - RNA, 22 nt, Artificial Sequence
  GATA2 Guide RNA
ucugcugcuguagucgugggca

SEQ ID NO: 14834 - RNA, 22 nt, Artificial Sequence
  GATA2 Guide RNA
ugcccacgacuacagcagcaga

SEQ ID NO: 14835 - RNA, 22 nt, Artificial Sequence
  GATA2 Guide RNA
ugcugcuguagucgugggcagc

SEQ ID NO: 14836 - RNA, 22 nt, Artificial Sequence
  GATA2 Guide RNA
uggaagagucugcugcuguagu

SEQ ID NO: 14837 - RNA, 20 nt, Artificial Sequence
  GATA2 Guide RNA
accccuccuaugugccggcg

SEQ ID NO: 14838 - RNA, 20 nt, Artificial Sequence
  GATA2 Guide RNA
acgacuacccacgacuacag

SEQ ID NO: 14839 - RNA, 20 nt, Artificial Sequence
  GATA2 Guide RNA
acuacccacgacuacagcag

SEQ ID NO: 14840 - RNA, 20 nt, Artificial Sequence
  GATA2 Guide RNA
aguccgcugcuguagucgug

SEQ ID NO: 14841 - RNA, 20 nt, Artificial Sequence
  GATA2 Guide RNA
agucgugggcagccgccggc

SEQ ID NO: 14842 - RNA, 20 nt, Artificial Sequence
  GATA2 Guide RNA
agucguggguagucgugggc

SEQ ID NO: 14843 - RNA, 20 nt, Artificial Sequence
  GATA2 Guide RNA
augugccggcggcugcccac

SEQ ID NO: 14844 - RNA, 20 nt, Artificial Sequence
  GATA2 Guide RNA
cacgacuacccacgacuaca

SEQ ID NO: 14845 - RNA, 20 nt, Artificial Sequence
  GATA2 Guide RNA
cagccgccggcacauaggag

SEQ ID NO: 14846 - RNA, 20 nt, Artificial Sequence
  GATA2 Guide RNA
ccacgacuacccacgacuac

SEQ ID NO: 14847 - RNA, 20 nt, Artificial Sequence
  GATA2 Guide RNA
cccacgacuacccacgacua

SEQ ID NO: 14848 - RNA, 20 nt, Artificial Sequence
  GATA2 Guide RNA
ccccuccuaugugccggcgg

SEQ ID NO: 14849 - RNA, 20 nt, Artificial Sequence
  GATA2 Guide RNA
cccuccuaugugccggcggc

SEQ ID NO: 14850 - RNA, 20 nt, Artificial Sequence
  GATA2 Guide RNA
ccgcugcuguagucgugggu

SEQ ID NO: 14851 - RNA, 20 nt, Artificial Sequence
  GATA2 Guide RNA
ccggcggcugcccacgacua

SEQ ID NO: 14852 - RNA, 20 nt, Artificial Sequence
  GATA2 Guide RNA
ccuaugugccggcggcugcc

SEQ ID NO: 14853 - RNA, 20 nt, Artificial Sequence
  GATA2 Guide RNA
ccuccuaugugccggcggcu

SEQ ID NO: 14854 - RNA, 20 nt, Artificial Sequence
  GATA2 Guide RNA
cgacuacccacgacuacagc

SEQ ID NO: 14855 - RNA, 20 nt, Artificial Sequence
  GATA2 Guide RNA
cgcugcuguagucgugggua

SEQ ID NO: 14856 - RNA, 20 nt, Artificial Sequence
  GATA2 Guide RNA
cggcggcugcccacgacuac

SEQ ID NO: 14857 - RNA, 20 nt, Artificial Sequence
  GATA2 Guide RNA
cggcugcccacgacuaccca

SEQ ID NO: 14858 - RNA, 20 nt, Artificial Sequence
  GATA2 Guide RNA
cgugggcagccgccggcaca

SEQ ID NO: 14859 - RNA, 20 nt, Artificial Sequence
  GATA2 Guide RNA
cguggguagucgugggcagc

SEQ ID NO: 14860 - RNA, 20 nt, Artificial Sequence
  GATA2 Guide RNA
cuacccacgacuacagcagc

SEQ ID NO: 14861 - RNA, 20 nt, Artificial Sequence
  GATA2 Guide RNA
cuaugugccggcggcugccc

SEQ ID NO: 14862 - RNA, 20 nt, Artificial Sequence
  GATA2 Guide RNA
cuccuaugugccggcggcug

SEQ ID NO: 14863 - RNA, 20 nt, Artificial Sequence
  GATA2 Guide RNA
cugcccacgacuacccacga

SEQ ID NO: 14864 - RNA, 20 nt, Artificial Sequence
  GATA2 Guide RNA
cugcuguagucguggguagu

SEQ ID NO: 14865 - RNA, 20 nt, Artificial Sequence
  GATA2 Guide RNA
cuguagucguggguagucgu

SEQ ID NO: 14866 - RNA, 20 nt, Artificial Sequence
  GATA2 Guide RNA
gacuacccacgacuacagca

SEQ ID NO: 14867 - RNA, 20 nt, Artificial Sequence
  GATA2 Guide RNA
gcagccgccggcacauagga

SEQ ID NO: 14868 - RNA, 20 nt, Artificial Sequence
  GATA2 Guide RNA
gcccacgacuacccacgacu

SEQ ID NO: 14869 - RNA, 20 nt, Artificial Sequence
  GATA2 Guide RNA
gccggcggcugcccacgacu

SEQ ID NO: 14870 - RNA, 20 nt, Artificial Sequence
  GATA2 Guide RNA
gcggcugcccacgacuaccc

SEQ ID NO: 14871 - RNA, 20 nt, Artificial Sequence
  GATA2 Guide RNA
gcugcccacgacuacccacg

SEQ ID NO: 14872 - RNA, 20 nt, Artificial Sequence
  GATA2 Guide RNA
gcugcuguagucguggguag

SEQ ID NO: 14873 - RNA, 20 nt, Artificial Sequence
  GATA2 Guide RNA
gcuguagucguggguagucg

SEQ ID NO: 14874 - RNA, 20 nt, Artificial Sequence
  GATA2 Guide RNA
ggcagccgccggcacauagg

SEQ ID NO: 14875 - RNA, 20 nt, Artificial Sequence
  GATA2 Guide RNA
ggcggcugcccacgacuacc

SEQ ID NO: 14876 - RNA, 20 nt, Artificial Sequence
  GATA2 Guide RNA
ggcugcccacgacuacccac

SEQ ID NO: 14877 - RNA, 20 nt, Artificial Sequence
  GATA2 Guide RNA
gggcagccgccggcacauag

SEQ ID NO: 14878 - RNA, 20 nt, Artificial Sequence
  GATA2 Guide RNA
ggguagucgugggcagccgc

SEQ ID NO: 14879 - RNA, 20 nt, Artificial Sequence
  GATA2 Guide RNA
gguagucgugggcagccgcc

SEQ ID NO: 14880 - RNA, 20 nt, Artificial Sequence
  GATA2 Guide RNA
guagucgugggcagccgccg

SEQ ID NO: 14881 - RNA, 20 nt, Artificial Sequence
  GATA2 Guide RNA
guagucguggguagucgugg

SEQ ID NO: 14882 - RNA, 20 nt, Artificial Sequence
  GATA2 Guide RNA
guccgcugcuguagucgugg

SEQ ID NO: 14883 - RNA, 20 nt, Artificial Sequence
  GATA2 Guide RNA
gucgugggcagccgccggca

SEQ ID NO: 14884 - RNA, 20 nt, Artificial Sequence
  GATA2 Guide RNA
gucguggguagucgugggca

SEQ ID NO: 14885 - RNA, 20 nt, Artificial Sequence
  GATA2 Guide RNA
gugccggcggcugcccacga

SEQ ID NO: 14886 - RNA, 20 nt, Artificial Sequence
  GATA2 Guide RNA
gugggcagccgccggcacau

SEQ ID NO: 14887 - RNA, 20 nt, Artificial Sequence
  GATA2 Guide RNA
guggguagucgugggcagcc

SEQ ID NO: 14888 - RNA, 20 nt, Artificial Sequence
  GATA2 Guide RNA
uacccacgacuacagcagcg

SEQ ID NO: 14889 - RNA, 20 nt, Artificial Sequence
  GATA2 Guide RNA
uagucgugggcagccgccgg

SEQ ID NO: 14890 - RNA, 20 nt, Artificial Sequence
  GATA2 Guide RNA
uagucguggguagucguggg

SEQ ID NO: 14891 - RNA, 20 nt, Artificial Sequence
  GATA2 Guide RNA
uaugugccggcggcugccca

SEQ ID NO: 14892 - RNA, 20 nt, Artificial Sequence
  GATA2 Guide RNA
uccgcugcuguagucguggg

SEQ ID NO: 14893 - RNA, 20 nt, Artificial Sequence
  GATA2 Guide RNA
uccuaugugccggcggcugc

SEQ ID NO: 14894 - RNA, 20 nt, Artificial Sequence
  GATA2 Guide RNA
ucgugggcagccgccggcac

SEQ ID NO: 14895 - RNA, 20 nt, Artificial Sequence
  GATA2 Guide RNA
ucguggguagucgugggcag

SEQ ID NO: 14896 - RNA, 20 nt, Artificial Sequence
  GATA2 Guide RNA
ugcccacgacuacccacgac

SEQ ID NO: 14897 - RNA, 20 nt, Artificial Sequence
  GATA2 Guide RNA
ugccggcggcugcccacgac

SEQ ID NO: 14898 - RNA, 20 nt, Artificial Sequence
  GATA2 Guide RNA
ugcuguagucguggguaguc

SEQ ID NO: 14899 - RNA, 20 nt, Artificial Sequence
  GATA2 Guide RNA
ugggcagccgccggcacaua

SEQ ID NO: 14900 - RNA, 20 nt, Artificial Sequence
  GATA2 Guide RNA
uggguagucgugggcagccg

SEQ ID NO: 14901 - RNA, 20 nt, Artificial Sequence
  GATA2 Guide RNA
uguagucguggguagucgug

SEQ ID NO: 14902 - RNA, 20 nt, Artificial Sequence
  GATA2 Guide RNA
ugugccggcggcugcccacg

SEQ ID NO: 14903 - RNA, 21 nt, Artificial Sequence
  GATA2 Guide RNA
accccuccuaugugccggcgg

SEQ ID NO: 14904 - RNA, 21 nt, Artificial Sequence
  GATA2 Guide RNA
acgacuacccacgacuacagc

SEQ ID NO: 14905 - RNA, 21 nt, Artificial Sequence
  GATA2 Guide RNA
acuacccacgacuacagcagc

SEQ ID NO: 14906 - RNA, 21 nt, Artificial Sequence
  GATA2 Guide RNA
aguccgcugcuguagucgugg

SEQ ID NO: 14907 - RNA, 21 nt, Artificial Sequence
  GATA2 Guide RNA
agucgugggcagccgccggca

SEQ ID NO: 14908 - RNA, 21 nt, Artificial Sequence
  GATA2 Guide RNA
agucguggguagucgugggca

SEQ ID NO: 14909 - RNA, 21 nt, Artificial Sequence
  GATA2 Guide RNA
augugccggcggcugcccacg

SEQ ID NO: 14910 - RNA, 21 nt, Artificial Sequence
  GATA2 Guide RNA
cacgacuacccacgacuacag

SEQ ID NO: 14911 - RNA, 21 nt, Artificial Sequence
  GATA2 Guide RNA
cagccgccggcacauaggagg

SEQ ID NO: 14912 - RNA, 21 nt, Artificial Sequence
  GATA2 Guide RNA
ccacgacuacccacgacuaca

SEQ ID NO: 14913 - RNA, 21 nt, Artificial Sequence
  GATA2 Guide RNA
cccacgacuacccacgacuac

SEQ ID NO: 14914 - RNA, 21 nt, Artificial Sequence
  GATA2 Guide RNA
ccccuccuaugugccggcggc

SEQ ID NO: 14915 - RNA, 21 nt, Artificial Sequence
  GATA2 Guide RNA
cccuccuaugugccggcggcu

SEQ ID NO: 14916 - RNA, 21 nt, Artificial Sequence
  GATA2 Guide RNA
ccgcugcuguagucgugggua

SEQ ID NO: 14917 - RNA, 21 nt, Artificial Sequence
  GATA2 Guide RNA
ccggcggcugcccacgacuac

SEQ ID NO: 14918 - RNA, 21 nt, Artificial Sequence
  GATA2 Guide RNA
ccuaugugccggcggcugccc

SEQ ID NO: 14919 - RNA, 21 nt, Artificial Sequence
  GATA2 Guide RNA
ccuccuaugugccggcggcug

SEQ ID NO: 14920 - RNA, 21 nt, Artificial Sequence
  GATA2 Guide RNA
cgacuacccacgacuacagca

SEQ ID NO: 14921 - RNA, 21 nt, Artificial Sequence
  GATA2 Guide RNA
cgcugcuguagucguggguag

SEQ ID NO: 14922 - RNA, 21 nt, Artificial Sequence
  GATA2 Guide RNA
cggcggcugcccacgacuacc

SEQ ID NO: 14923 - RNA, 21 nt, Artificial Sequence
  GATA2 Guide RNA
cggcugcccacgacuacccac

SEQ ID NO: 14924 - RNA, 21 nt, Artificial Sequence
  GATA2 Guide RNA
cgugggcagccgccggcacau

SEQ ID NO: 14925 - RNA, 21 nt, Artificial Sequence
  GATA2 Guide RNA
cguggguagucgugggcagcc

SEQ ID NO: 14926 - RNA, 21 nt, Artificial Sequence
  GATA2 Guide RNA
cuacccacgacuacagcagcg

SEQ ID NO: 14927 - RNA, 21 nt, Artificial Sequence
  GATA2 Guide RNA
cuaugugccggcggcugccca

SEQ ID NO: 14928 - RNA, 21 nt, Artificial Sequence
  GATA2 Guide RNA
cuccuaugugccggcggcugc

SEQ ID NO: 14929 - RNA, 21 nt, Artificial Sequence
  GATA2 Guide RNA
cugcccacgacuacccacgac

SEQ ID NO: 14930 - RNA, 21 nt, Artificial Sequence
  GATA2 Guide RNA
cugcuguagucguggguaguc

SEQ ID NO: 14931 - RNA, 21 nt, Artificial Sequence
  GATA2 Guide RNA
cuguagucguggguagucgug

SEQ ID NO: 14932 - RNA, 21 nt, Artificial Sequence
  GATA2 Guide RNA
gacuacccacgacuacagcag

SEQ ID NO: 14933 - RNA, 21 nt, Artificial Sequence
  GATA2 Guide RNA
gaguccgcugcuguagucgug

SEQ ID NO: 14934 - RNA, 21 nt, Artificial Sequence
  GATA2 Guide RNA
gcagccgccggcacauaggag

SEQ ID NO: 14935 - RNA, 21 nt, Artificial Sequence
  GATA2 Guide RNA
gcccacgacuacccacgacua

SEQ ID NO: 14936 - RNA, 21 nt, Artificial Sequence
  GATA2 Guide RNA
gccggcggcugcccacgacua

SEQ ID NO: 14937 - RNA, 21 nt, Artificial Sequence
  GATA2 Guide RNA
gcggcugcccacgacuaccca

SEQ ID NO: 14938 - RNA, 21 nt, Artificial Sequence
  GATA2 Guide RNA
gcugcccacgacuacccacga

SEQ ID NO: 14939 - RNA, 21 nt, Artificial Sequence
  GATA2 Guide RNA
gcugcuguagucguggguagu

SEQ ID NO: 14940 - RNA, 21 nt, Artificial Sequence
  GATA2 Guide RNA
gcuguagucguggguagucgu

SEQ ID NO: 14941 - RNA, 21 nt, Artificial Sequence
  GATA2 Guide RNA
ggcagccgccggcacauagga

SEQ ID NO: 14942 - RNA, 21 nt, Artificial Sequence
  GATA2 Guide RNA
ggcggcugcccacgacuaccc

SEQ ID NO: 14943 - RNA, 21 nt, Artificial Sequence
  GATA2 Guide RNA
ggcugcccacgacuacccacg

SEQ ID NO: 14944 - RNA, 21 nt, Artificial Sequence
  GATA2 Guide RNA
gggcagccgccggcacauagg

SEQ ID NO: 14945 - RNA, 21 nt, Artificial Sequence
  GATA2 Guide RNA
ggguagucgugggcagccgcc

SEQ ID NO: 14946 - RNA, 21 nt, Artificial Sequence
  GATA2 Guide RNA
gguagucgugggcagccgccg

SEQ ID NO: 14947 - RNA, 21 nt, Artificial Sequence
  GATA2 Guide RNA
guagucgugggcagccgccgg

SEQ ID NO: 14948 - RNA, 21 nt, Artificial Sequence
  GATA2 Guide RNA
guagucguggguagucguggg

SEQ ID NO: 14949 - RNA, 21 nt, Artificial Sequence
  GATA2 Guide RNA
guccgcugcuguagucguggg

SEQ ID NO: 14950 - RNA, 21 nt, Artificial Sequence
  GATA2 Guide RNA
gucguggguagucgugggcag

SEQ ID NO: 14951 - RNA, 21 nt, Artificial Sequence
  GATA2 Guide RNA
gugggcagccgccggcacaua

SEQ ID NO: 14952 - RNA, 21 nt, Artificial Sequence
  GATA2 Guide RNA
guggguagucgugggcagccg

SEQ ID NO: 14953 - RNA, 21 nt, Artificial Sequence
  GATA2 Guide RNA
uacccacgacuacagcagcgg

SEQ ID NO: 14954 - RNA, 21 nt, Artificial Sequence
  GATA2 Guide RNA
uaccccuccuaugugccggcg

SEQ ID NO: 14955 - RNA, 21 nt, Artificial Sequence
  GATA2 Guide RNA
uagucgugggcagccgccggc

SEQ ID NO: 14956 - RNA, 21 nt, Artificial Sequence
  GATA2 Guide RNA
uagucguggguagucgugggc

SEQ ID NO: 14957 - RNA, 21 nt, Artificial Sequence
  GATA2 Guide RNA
uaugugccggcggcugcccac

SEQ ID NO: 14958 - RNA, 21 nt, Artificial Sequence
  GATA2 Guide RNA
uccgcugcuguagucgugggu

SEQ ID NO: 14959 - RNA, 21 nt, Artificial Sequence
  GATA2 Guide RNA
uccuaugugccggcggcugcc

SEQ ID NO: 14960 - RNA, 21 nt, Artificial Sequence
  GATA2 Guide RNA
ucgugggcagccgccggcaca

SEQ ID NO: 14961 - RNA, 21 nt, Artificial Sequence
  GATA2 Guide RNA
ucguggguagucgugggcagc

SEQ ID NO: 14962 - RNA, 21 nt, Artificial Sequence
  GATA2 Guide RNA
ugcccacgacuacccacgacu

SEQ ID NO: 14963 - RNA, 21 nt, Artificial Sequence
  GATA2 Guide RNA
ugccggcggcugcccacgacu

SEQ ID NO: 14964 - RNA, 21 nt, Artificial Sequence
  GATA2 Guide RNA
ugcuguagucguggguagucg

SEQ ID NO: 14965 - RNA, 21 nt, Artificial Sequence
  GATA2 Guide RNA
ugggcagccgccggcacauag

SEQ ID NO: 14966 - RNA, 21 nt, Artificial Sequence
  GATA2 Guide RNA
uggguagucgugggcagccgc

SEQ ID NO: 14967 - RNA, 21 nt, Artificial Sequence
  GATA2 Guide RNA
uguagucguggguagucgugg

SEQ ID NO: 14968 - RNA, 21 nt, Artificial Sequence
  GATA2 Guide RNA
ugugccggcggcugcccacga

SEQ ID NO: 14969 - RNA, 22 nt, Artificial Sequence
  GATA2 Guide RNA
accccuccuaugugccggcggc

SEQ ID NO: 14970 - RNA, 22 nt, Artificial Sequence
  GATA2 Guide RNA
acgacuacccacgacuacagca

SEQ ID NO: 14971 - RNA, 22 nt, Artificial Sequence
  GATA2 Guide RNA
acuacccacgacuacagcagcg

SEQ ID NO: 14972 - RNA, 22 nt, Artificial Sequence
  GATA2 Guide RNA
agaguccgcugcuguagucgug

SEQ ID NO: 14973 - RNA, 22 nt, Artificial Sequence
  GATA2 Guide RNA
aguccgcugcuguagucguggg

SEQ ID NO: 14974 - RNA, 22 nt, Artificial Sequence
  GATA2 Guide RNA
agucgugggcagccgccggcac

SEQ ID NO: 14975 - RNA, 22 nt, Artificial Sequence
  GATA2 Guide RNA
agucguggguagucgugggcag

SEQ ID NO: 14976 - RNA, 22 nt, Artificial Sequence
  GATA2 Guide RNA
augugccggcggcugcccacga

SEQ ID NO: 14977 - RNA, 22 nt, Artificial Sequence
  GATA2 Guide RNA
cacgacuacccacgacuacagc

SEQ ID NO: 14978 - RNA, 22 nt, Artificial Sequence
  GATA2 Guide RNA
cagccgccggcacauaggaggg

SEQ ID NO: 14979 - RNA, 22 nt, Artificial Sequence
  GATA2 Guide RNA
ccacgacuacccacgacuacag

SEQ ID NO: 14980 - RNA, 22 nt, Artificial Sequence
  GATA2 Guide RNA
cccacgacuacccacgacuaca

SEQ ID NO: 14981 - RNA, 22 nt, Artificial Sequence
  GATA2 Guide RNA
ccccuccuaugugccggcggcu

SEQ ID NO: 14982 - RNA, 22 nt, Artificial Sequence
  GATA2 Guide RNA
cccuccuaugugccggcggcug

SEQ ID NO: 14983 - RNA, 22 nt, Artificial Sequence
  GATA2 Guide RNA
ccgcugcuguagucguggguag

SEQ ID NO: 14984 - RNA, 22 nt, Artificial Sequence
  GATA2 Guide RNA
ccggcggcugcccacgacuacc

SEQ ID NO: 14985 - RNA, 22 nt, Artificial Sequence
  GATA2 Guide RNA
ccuaugugccggcggcugccca

SEQ ID NO: 14986 - RNA, 22 nt, Artificial Sequence
  GATA2 Guide RNA
ccuccuaugugccggcggcugc

SEQ ID NO: 14987 - RNA, 22 nt, Artificial Sequence
  GATA2 Guide RNA
cgacuacccacgacuacagcag

SEQ ID NO: 14988 - RNA, 22 nt, Artificial Sequence
  GATA2 Guide RNA
cgcugcuguagucguggguagu

SEQ ID NO: 14989 - RNA, 22 nt, Artificial Sequence
  GATA2 Guide RNA
cggcggcugcccacgacuaccc

SEQ ID NO: 14990 - RNA, 22 nt, Artificial Sequence
  GATA2 Guide RNA
cggcugcccacgacuacccacg

SEQ ID NO: 14991 - RNA, 22 nt, Artificial Sequence
  GATA2 Guide RNA
cgugggcagccgccggcacaua

SEQ ID NO: 14992 - RNA, 22 nt, Artificial Sequence
  GATA2 Guide RNA
cguggguagucgugggcagccg

SEQ ID NO: 14993 - RNA, 22 nt, Artificial Sequence
  GATA2 Guide RNA
cuacccacgacuacagcagcgg

SEQ ID NO: 14994 - RNA, 22 nt, Artificial Sequence
  GATA2 Guide RNA
cuaccccuccuaugugccggcg

SEQ ID NO: 14995 - RNA, 22 nt, Artificial Sequence
  GATA2 Guide RNA
cuaugugccggcggcugcccac

SEQ ID NO: 14996 - RNA, 22 nt, Artificial Sequence
  GATA2 Guide RNA
cuccuaugugccggcggcugcc

SEQ ID NO: 14997 - RNA, 22 nt, Artificial Sequence
  GATA2 Guide RNA
cugcccacgacuacccacgacu

SEQ ID NO: 14998 - RNA, 22 nt, Artificial Sequence
  GATA2 Guide RNA
cugcuguagucguggguagucg

SEQ ID NO: 14999 - RNA, 22 nt, Artificial Sequence
  GATA2 Guide RNA
cuguagucguggguagucgugg

SEQ ID NO: 15000 - RNA, 22 nt, Artificial Sequence
  GATA2 Guide RNA
gacuacccacgacuacagcagc

SEQ ID NO: 15001 - RNA, 22 nt, Artificial Sequence
  GATA2 Guide RNA
gaguccgcugcuguagucgugg

SEQ ID NO: 15002 - RNA, 22 nt, Artificial Sequence
  GATA2 Guide RNA
gcagccgccggcacauaggagg

SEQ ID NO: 15003 - RNA, 22 nt, Artificial Sequence
  GATA2 Guide RNA
gcccacgacuacccacgacuac

SEQ ID NO: 15004 - RNA, 22 nt, Artificial Sequence
  GATA2 Guide RNA
gccggcggcugcccacgacuac

SEQ ID NO: 15005 - RNA, 22 nt, Artificial Sequence
  GATA2 Guide RNA
gcggcugcccacgacuacccac

SEQ ID NO: 15006 - RNA, 22 nt, Artificial Sequence
  GATA2 Guide RNA
gcugcccacgacuacccacgac

SEQ ID NO: 15007 - RNA, 22 nt, Artificial Sequence
  GATA2 Guide RNA
gcugcuguagucguggguaguc

SEQ ID NO: 15008 - RNA, 22 nt, Artificial Sequence
  GATA2 Guide RNA
gcuguagucguggguagucgug

SEQ ID NO: 15009 - RNA, 22 nt, Artificial Sequence
  GATA2 Guide RNA
ggcagccgccggcacauaggag

SEQ ID NO: 15010 - RNA, 22 nt, Artificial Sequence
  GATA2 Guide RNA
ggcggcugcccacgacuaccca

SEQ ID NO: 15011 - RNA, 22 nt, Artificial Sequence
  GATA2 Guide RNA
ggcugcccacgacuacccacga

SEQ ID NO: 15012 - RNA, 22 nt, Artificial Sequence
  GATA2 Guide RNA
gggcagccgccggcacauagga

SEQ ID NO: 15013 - RNA, 22 nt, Artificial Sequence
  GATA2 Guide RNA
ggguagucgugggcagccgccg

SEQ ID NO: 15014 - RNA, 22 nt, Artificial Sequence
  GATA2 Guide RNA
gguagucgugggcagccgccgg

SEQ ID NO: 15015 - RNA, 22 nt, Artificial Sequence
  GATA2 Guide RNA
guagucgugggcagccgccggc

SEQ ID NO: 15016 - RNA, 22 nt, Artificial Sequence
  GATA2 Guide RNA
guagucguggguagucgugggc

SEQ ID NO: 15017 - RNA, 22 nt, Artificial Sequence
  GATA2 Guide RNA
guccgcugcuguagucgugggu

SEQ ID NO: 15018 - RNA, 22 nt, Artificial Sequence
  GATA2 Guide RNA
gucgugggcagccgccggcaca

SEQ ID NO: 15019 - RNA, 22 nt, Artificial Sequence
  GATA2 Guide RNA
gucguggguagucgugggcagc

SEQ ID NO: 15020 - RNA, 22 nt, Artificial Sequence
  GATA2 Guide RNA
gugccggcggcugcccacgacu

SEQ ID NO: 15021 - RNA, 22 nt, Artificial Sequence
  GATA2 Guide RNA
gugggcagccgccggcacauag

SEQ ID NO: 15022 - RNA, 22 nt, Artificial Sequence
  GATA2 Guide RNA
guggguagucgugggcagccgc

SEQ ID NO: 15023 - RNA, 22 nt, Artificial Sequence
  GATA2 Guide RNA
uacccacgacuacagcagcgga

SEQ ID NO: 15024 - RNA, 22 nt, Artificial Sequence
  GATA2 Guide RNA
uaccccuccuaugugccggcgg

SEQ ID NO: 15025 - RNA, 22 nt, Artificial Sequence
  GATA2 Guide RNA
uagucgugggcagccgccggca

SEQ ID NO: 15026 - RNA, 22 nt, Artificial Sequence
  GATA2 Guide RNA
uagucguggguagucgugggca

SEQ ID NO: 15027 - RNA, 22 nt, Artificial Sequence
  GATA2 Guide RNA
uaugugccggcggcugcccacg

SEQ ID NO: 15028 - RNA, 22 nt, Artificial Sequence
  GATA2 Guide RNA
uccgcugcuguagucgugggua

SEQ ID NO: 15029 - RNA, 22 nt, Artificial Sequence
  GATA2 Guide RNA
uccuaugugccggcggcugccc

SEQ ID NO: 15030 - RNA, 22 nt, Artificial Sequence
  GATA2 Guide RNA
ucgugggcagccgccggcacau

SEQ ID NO: 15031 - RNA, 22 nt, Artificial Sequence
  GATA2 Guide RNA
ucguggguagucgugggcagcc

SEQ ID NO: 15032 - RNA, 22 nt, Artificial Sequence
  GATA2 Guide RNA
ugcccacgacuacccacgacua

SEQ ID NO: 15033 - RNA, 22 nt, Artificial Sequence
  GATA2 Guide RNA
ugccggcggcugcccacgacua

SEQ ID NO: 15034 - RNA, 22 nt, Artificial Sequence
  GATA2 Guide RNA
ugcuguagucguggguagucgu

SEQ ID NO: 15035 - RNA, 22 nt, Artificial Sequence
  GATA2 Guide RNA
ugggcagccgccggcacauagg

SEQ ID NO: 15036 - RNA, 22 nt, Artificial Sequence
  GATA2 Guide RNA
uggguagucgugggcagccgcc

SEQ ID NO: 15037 - RNA, 22 nt, Artificial Sequence
  GATA2 Guide RNA
uguagucguggguagucguggg

SEQ ID NO: 15038 - RNA, 22 nt, Artificial Sequence
  GATA2 Guide RNA
ugugccggcggcugcccacgac

SEQ ID NO: 15039 - RNA, 20 nt, Artificial Sequence
  GATA2 Guide RNA
accccuccuaugugcuggcg

SEQ ID NO: 15040 - RNA, 20 nt, Artificial Sequence
  GATA2 Guide RNA
accuaccccuccuaugugcu

SEQ ID NO: 15041 - RNA, 20 nt, Artificial Sequence
  GATA2 Guide RNA
agcacauaggagggguaggu

SEQ ID NO: 15042 - RNA, 20 nt, Artificial Sequence
  GATA2 Guide RNA
agccgccagcacauaggagg

SEQ ID NO: 15043 - RNA, 20 nt, Artificial Sequence
  GATA2 Guide RNA
agucgugggcagccgccagc

SEQ ID NO: 15044 - RNA, 20 nt, Artificial Sequence
  GATA2 Guide RNA
augugcuggcggcugcccac

SEQ ID NO: 15045 - RNA, 20 nt, Artificial Sequence
  GATA2 Guide RNA
caccuaccccuccuaugugc

SEQ ID NO: 15046 - RNA, 20 nt, Artificial Sequence
  GATA2 Guide RNA
cagcacauaggagggguagg

SEQ ID NO: 15047 - RNA, 20 nt, Artificial Sequence
  GATA2 Guide RNA
cagccgccagcacauaggag

SEQ ID NO: 15048 - RNA, 20 nt, Artificial Sequence
  GATA2 Guide RNA
ccaccuaccccuccuaugug

SEQ ID NO: 15049 - RNA, 20 nt, Artificial Sequence
  GATA2 Guide RNA
ccagcacauaggagggguag

SEQ ID NO: 15050 - RNA, 20 nt, Artificial Sequence
  GATA2 Guide RNA
cccaccuaccccuccuaugu

SEQ ID NO: 15051 - RNA, 20 nt, Artificial Sequence
  GATA2 Guide RNA
ccccaccuaccccuccuaug

SEQ ID NO: 15052 - RNA, 20 nt, Artificial Sequence
  GATA2 Guide RNA
ccccuccuaugugcuggcgg

SEQ ID NO: 15053 - RNA, 20 nt, Artificial Sequence
  GATA2 Guide RNA
cccuccuaugugcuggcggc

SEQ ID NO: 15054 - RNA, 20 nt, Artificial Sequence
  GATA2 Guide RNA
ccgccagcacauaggagggg

SEQ ID NO: 15055 - RNA, 20 nt, Artificial Sequence
  GATA2 Guide RNA
ccuaccccuccuaugugcug

SEQ ID NO: 15056 - RNA, 20 nt, Artificial Sequence
  GATA2 Guide RNA
ccuaugugcuggcggcugcc

SEQ ID NO: 15057 - RNA, 20 nt, Artificial Sequence
  GATA2 Guide RNA
ccuccuaugugcuggcggcu

SEQ ID NO: 15058 - RNA, 20 nt, Artificial Sequence
  GATA2 Guide RNA
cgccagcacauaggaggggu

SEQ ID NO: 15059 - RNA, 20 nt, Artificial Sequence
  GATA2 Guide RNA
cgugggcagccgccagcaca

SEQ ID NO: 15060 - RNA, 20 nt, Artificial Sequence
  GATA2 Guide RNA
cuaccccuccuaugugcugg

SEQ ID NO: 15061 - RNA, 20 nt, Artificial Sequence
  GATA2 Guide RNA
cuaugugcuggcggcugccc

SEQ ID NO: 15062 - RNA, 20 nt, Artificial Sequence
  GATA2 Guide RNA
cuccuaugugcuggcggcug

SEQ ID NO: 15063 - RNA, 20 nt, Artificial Sequence
  GATA2 Guide RNA
cuggcggcugcccacgacua

SEQ ID NO: 15064 - RNA, 20 nt, Artificial Sequence
  GATA2 Guide RNA
cuguagucgugggcagccgc

SEQ ID NO: 15065 - RNA, 20 nt, Artificial Sequence
  GATA2 Guide RNA
gcagccgccagcacauagga

SEQ ID NO: 15066 - RNA, 20 nt, Artificial Sequence
  GATA2 Guide RNA
gccagcacauaggaggggua

SEQ ID NO: 15067 - RNA, 20 nt, Artificial Sequence
  GATA2 Guide RNA
gccgccagcacauaggaggg

SEQ ID NO: 15068 - RNA, 20 nt, Artificial Sequence
  GATA2 Guide RNA
gcuggcggcugcccacgacu

SEQ ID NO: 15069 - RNA, 20 nt, Artificial Sequence
  GATA2 Guide RNA
gcuguagucgugggcagccg

SEQ ID NO: 15070 - RNA, 20 nt, Artificial Sequence
  GATA2 Guide RNA
ggcagccgccagcacauagg

SEQ ID NO: 15071 - RNA, 20 nt, Artificial Sequence
  GATA2 Guide RNA
gggcagccgccagcacauag

SEQ ID NO: 15072 - RNA, 20 nt, Artificial Sequence
  GATA2 Guide RNA
guagucgugggcagccgcca

SEQ ID NO: 15073 - RNA, 20 nt, Artificial Sequence
  GATA2 Guide RNA
gucgugggcagccgccagca

SEQ ID NO: 15074 - RNA, 20 nt, Artificial Sequence
  GATA2 Guide RNA
gugcuggcggcugcccacga

SEQ ID NO: 15075 - RNA, 20 nt, Artificial Sequence
  GATA2 Guide RNA
gugggcagccgccagcacau

SEQ ID NO: 15076 - RNA, 20 nt, Artificial Sequence
  GATA2 Guide RNA
uaccccuccuaugugcuggc

SEQ ID NO: 15077 - RNA, 20 nt, Artificial Sequence
  GATA2 Guide RNA
uagucgugggcagccgccag

SEQ ID NO: 15078 - RNA, 20 nt, Artificial Sequence
  GATA2 Guide RNA
uaugugcuggcggcugccca

SEQ ID NO: 15079 - RNA, 20 nt, Artificial Sequence
  GATA2 Guide RNA
uccuaugugcuggcggcugc

SEQ ID NO: 15080 - RNA, 20 nt, Artificial Sequence
  GATA2 Guide RNA
ucgugggcagccgccagcac

SEQ ID NO: 15081 - RNA, 20 nt, Artificial Sequence
  GATA2 Guide RNA
ugcuggcggcugcccacgac

SEQ ID NO: 15082 - RNA, 20 nt, Artificial Sequence
  GATA2 Guide RNA
ugggcagccgccagcacaua

SEQ ID NO: 15083 - RNA, 20 nt, Artificial Sequence
  GATA2 Guide RNA
uguagucgugggcagccgcc

SEQ ID NO: 15084 - RNA, 20 nt, Artificial Sequence
  GATA2 Guide RNA
ugugcuggcggcugcccacg

SEQ ID NO: 15085 - RNA, 21 nt, Artificial Sequence
  GATA2 Guide RNA
accccuccuaugugcuggcgg

SEQ ID NO: 15086 - RNA, 21 nt, Artificial Sequence
  GATA2 Guide RNA
accuaccccuccuaugugcug

SEQ ID NO: 15087 - RNA, 21 nt, Artificial Sequence
  GATA2 Guide RNA
agcacauaggagggguaggug

SEQ ID NO: 15088 - RNA, 21 nt, Artificial Sequence
  GATA2 Guide RNA
agccgccagcacauaggaggg

SEQ ID NO: 15089 - RNA, 21 nt, Artificial Sequence
  GATA2 Guide RNA
agucgugggcagccgccagca

SEQ ID NO: 15090 - RNA, 21 nt, Artificial Sequence
  GATA2 Guide RNA
augugcuggcggcugcccacg

SEQ ID NO: 15091 - RNA, 21 nt, Artificial Sequence
  GATA2 Guide RNA
caccuaccccuccuaugugcu

SEQ ID NO: 15092 - RNA, 21 nt, Artificial Sequence
  GATA2 Guide RNA
cagcacauaggagggguaggu

SEQ ID NO: 15093 - RNA, 21 nt, Artificial Sequence
  GATA2 Guide RNA
cagccgccagcacauaggagg

SEQ ID NO: 15094 - RNA, 21 nt, Artificial Sequence
  GATA2 Guide RNA
ccaccuaccccuccuaugugc

SEQ ID NO: 15095 - RNA, 21 nt, Artificial Sequence
  GATA2 Guide RNA
ccagcacauaggagggguagg

SEQ ID NO: 15096 - RNA, 21 nt, Artificial Sequence
  GATA2 Guide RNA
cccaccuaccccuccuaugug

SEQ ID NO: 15097 - RNA, 21 nt, Artificial Sequence
  GATA2 Guide RNA
ccccaccuaccccuccuaugu

SEQ ID NO: 15098 - RNA, 21 nt, Artificial Sequence
  GATA2 Guide RNA
ccccuccuaugugcuggcggc

SEQ ID NO: 15099 - RNA, 21 nt, Artificial Sequence
  GATA2 Guide RNA
cccuccuaugugcuggcggcu

SEQ ID NO: 15100 - RNA, 21 nt, Artificial Sequence
  GATA2 Guide RNA
ccgccagcacauaggaggggu

SEQ ID NO: 15101 - RNA, 21 nt, Artificial Sequence
  GATA2 Guide RNA
ccuaccccuccuaugugcugg

SEQ ID NO: 15102 - RNA, 21 nt, Artificial Sequence
  GATA2 Guide RNA
ccuaugugcuggcggcugccc

SEQ ID NO: 15103 - RNA, 21 nt, Artificial Sequence
  GATA2 Guide RNA
ccuccuaugugcuggcggcug

SEQ ID NO: 15104 - RNA, 21 nt, Artificial Sequence
  GATA2 Guide RNA
cgccagcacauaggaggggua

SEQ ID NO: 15105 - RNA, 21 nt, Artificial Sequence
  GATA2 Guide RNA
cgugggcagccgccagcacau

SEQ ID NO: 15106 - RNA, 21 nt, Artificial Sequence
  GATA2 Guide RNA
cuaccccuccuaugugcuggc

SEQ ID NO: 15107 - RNA, 21 nt, Artificial Sequence
  GATA2 Guide RNA
cuaugugcuggcggcugccca

SEQ ID NO: 15108 - RNA, 21 nt, Artificial Sequence
  GATA2 Guide RNA
cuccuaugugcuggcggcugc

SEQ ID NO: 15109 - RNA, 21 nt, Artificial Sequence
  GATA2 Guide RNA
cuggcggcugcccacgacuac

SEQ ID NO: 15110 - RNA, 21 nt, Artificial Sequence
  GATA2 Guide RNA
cuguagucgugggcagccgcc

SEQ ID NO: 15111 - RNA, 21 nt, Artificial Sequence
  GATA2 Guide RNA
gcagccgccagcacauaggag

SEQ ID NO: 15112 - RNA, 21 nt, Artificial Sequence
  GATA2 Guide RNA
gccagcacauaggagggguag

SEQ ID NO: 15113 - RNA, 21 nt, Artificial Sequence
  GATA2 Guide RNA
gccgccagcacauaggagggg

SEQ ID NO: 15114 - RNA, 21 nt, Artificial Sequence
  GATA2 Guide RNA
gcuggcggcugcccacgacua

SEQ ID NO: 15115 - RNA, 21 nt, Artificial Sequence
  GATA2 Guide RNA
gcuguagucgugggcagccgc

SEQ ID NO: 15116 - RNA, 21 nt, Artificial Sequence
  GATA2 Guide RNA
ggcagccgccagcacauagga

SEQ ID NO: 15117 - RNA, 21 nt, Artificial Sequence
  GATA2 Guide RNA
gggcagccgccagcacauagg

SEQ ID NO: 15118 - RNA, 21 nt, Artificial Sequence
  GATA2 Guide RNA
guagucgugggcagccgccag

SEQ ID NO: 15119 - RNA, 21 nt, Artificial Sequence
  GATA2 Guide RNA
gucgugggcagccgccagcac

SEQ ID NO: 15120 - RNA, 21 nt, Artificial Sequence
  GATA2 Guide RNA
gugcuggcggcugcccacgac

SEQ ID NO: 15121 - RNA, 21 nt, Artificial Sequence
  GATA2 Guide RNA
gugggcagccgccagcacaua

SEQ ID NO: 15122 - RNA, 21 nt, Artificial Sequence
  GATA2 Guide RNA
uaccccuccuaugugcuggcg

SEQ ID NO: 15123 - RNA, 21 nt, Artificial Sequence
  GATA2 Guide RNA
uagucgugggcagccgccagc

SEQ ID NO: 15124 - RNA, 21 nt, Artificial Sequence
  GATA2 Guide RNA
uaugugcuggcggcugcccac

SEQ ID NO: 15125 - RNA, 21 nt, Artificial Sequence
  GATA2 Guide RNA
uccccaccuaccccuccuaug

SEQ ID NO: 15126 - RNA, 21 nt, Artificial Sequence
  GATA2 Guide RNA
uccuaugugcuggcggcugcc

SEQ ID NO: 15127 - RNA, 21 nt, Artificial Sequence
  GATA2 Guide RNA
ucgugggcagccgccagcaca

SEQ ID NO: 15128 - RNA, 21 nt, Artificial Sequence
  GATA2 Guide RNA
ugcuggcggcugcccacgacu

SEQ ID NO: 15129 - RNA, 21 nt, Artificial Sequence
  GATA2 Guide RNA
ugcuguagucgugggcagccg

SEQ ID NO: 15130 - RNA, 21 nt, Artificial Sequence
  GATA2 Guide RNA
ugggcagccgccagcacauag

SEQ ID NO: 15131 - RNA, 21 nt, Artificial Sequence
  GATA2 Guide RNA
uguagucgugggcagccgcca

SEQ ID NO: 15132 - RNA, 21 nt, Artificial Sequence
  GATA2 Guide RNA
ugugcuggcggcugcccacga

SEQ ID NO: 15133 - RNA, 22 nt, Artificial Sequence
  GATA2 Guide RNA
accccuccuaugugcuggcggc

SEQ ID NO: 15134 - RNA, 22 nt, Artificial Sequence
  GATA2 Guide RNA
accuaccccuccuaugugcugg

SEQ ID NO: 15135 - RNA, 22 nt, Artificial Sequence
  GATA2 Guide RNA
agcacauaggagggguaggugg

SEQ ID NO: 15136 - RNA, 22 nt, Artificial Sequence
  GATA2 Guide RNA
agccgccagcacauaggagggg

SEQ ID NO: 15137 - RNA, 22 nt, Artificial Sequence
  GATA2 Guide RNA
agucgugggcagccgccagcac

SEQ ID NO: 15138 - RNA, 22 nt, Artificial Sequence
  GATA2 Guide RNA
auccccaccuaccccuccuaug

SEQ ID NO: 15139 - RNA, 22 nt, Artificial Sequence
  GATA2 Guide RNA
augugcuggcggcugcccacga

SEQ ID NO: 15140 - RNA, 22 nt, Artificial Sequence
  GATA2 Guide RNA
caccuaccccuccuaugugcug

SEQ ID NO: 15141 - RNA, 22 nt, Artificial Sequence
  GATA2 Guide RNA
cagcacauaggagggguaggug

SEQ ID NO: 15142 - RNA, 22 nt, Artificial Sequence
  GATA2 Guide RNA
cagccgccagcacauaggaggg

SEQ ID NO: 15143 - RNA, 22 nt, Artificial Sequence
  GATA2 Guide RNA
ccaccuaccccuccuaugugcu

SEQ ID NO: 15144 - RNA, 22 nt, Artificial Sequence
  GATA2 Guide RNA
ccagcacauaggagggguaggu

SEQ ID NO: 15145 - RNA, 22 nt, Artificial Sequence
  GATA2 Guide RNA
cccaccuaccccuccuaugugc

SEQ ID NO: 15146 - RNA, 22 nt, Artificial Sequence
  GATA2 Guide RNA
ccccaccuaccccuccuaugug

SEQ ID NO: 15147 - RNA, 22 nt, Artificial Sequence
  GATA2 Guide RNA
ccccuccuaugugcuggcggcu

SEQ ID NO: 15148 - RNA, 22 nt, Artificial Sequence
  GATA2 Guide RNA
cccuccuaugugcuggcggcug

SEQ ID NO: 15149 - RNA, 22 nt, Artificial Sequence
  GATA2 Guide RNA
ccgccagcacauaggaggggua

SEQ ID NO: 15150 - RNA, 22 nt, Artificial Sequence
  GATA2 Guide RNA
ccuaccccuccuaugugcuggc

SEQ ID NO: 15151 - RNA, 22 nt, Artificial Sequence
  GATA2 Guide RNA
ccuaugugcuggcggcugccca

SEQ ID NO: 15152 - RNA, 22 nt, Artificial Sequence
  GATA2 Guide RNA
ccuccuaugugcuggcggcugc

SEQ ID NO: 15153 - RNA, 22 nt, Artificial Sequence
  GATA2 Guide RNA
cgccagcacauaggagggguag

SEQ ID NO: 15154 - RNA, 22 nt, Artificial Sequence
  GATA2 Guide RNA
cgugggcagccgccagcacaua

SEQ ID NO: 15155 - RNA, 22 nt, Artificial Sequence
  GATA2 Guide RNA
cuaccccuccuaugugcuggcg

SEQ ID NO: 15156 - RNA, 22 nt, Artificial Sequence
  GATA2 Guide RNA
cuaugugcuggcggcugcccac

SEQ ID NO: 15157 - RNA, 22 nt, Artificial Sequence
  GATA2 Guide RNA
cuccuaugugcuggcggcugcc

SEQ ID NO: 15158 - RNA, 22 nt, Artificial Sequence
  GATA2 Guide RNA
cugcuguagucgugggcagccg

SEQ ID NO: 15159 - RNA, 22 nt, Artificial Sequence
  GATA2 Guide RNA
cuggcggcugcccacgacuaca

SEQ ID NO: 15160 - RNA, 22 nt, Artificial Sequence
  GATA2 Guide RNA
cuguagucgugggcagccgcca

SEQ ID NO: 15161 - RNA, 22 nt, Artificial Sequence
  GATA2 Guide RNA
gcagccgccagcacauaggagg

SEQ ID NO: 15162 - RNA, 22 nt, Artificial Sequence
  GATA2 Guide RNA
gccagcacauaggagggguagg

SEQ ID NO: 15163 - RNA, 22 nt, Artificial Sequence
  GATA2 Guide RNA
gccgccagcacauaggaggggu

SEQ ID NO: 15164 - RNA, 22 nt, Artificial Sequence
  GATA2 Guide RNA
gcuggcggcugcccacgacuac

SEQ ID NO: 15165 - RNA, 22 nt, Artificial Sequence
  GATA2 Guide RNA
gcuguagucgugggcagccgcc

SEQ ID NO: 15166 - RNA, 22 nt, Artificial Sequence
  GATA2 Guide RNA
ggcagccgccagcacauaggag

SEQ ID NO: 15167 - RNA, 22 nt, Artificial Sequence
  GATA2 Guide RNA
gggcagccgccagcacauagga

SEQ ID NO: 15168 - RNA, 22 nt, Artificial Sequence
  GATA2 Guide RNA
guagucgugggcagccgccagc

SEQ ID NO: 15169 - RNA, 22 nt, Artificial Sequence
  GATA2 Guide RNA
gucgugggcagccgccagcaca

SEQ ID NO: 15170 - RNA, 22 nt, Artificial Sequence
  GATA2 Guide RNA
gugcuggcggcugcccacgacu

SEQ ID NO: 15171 - RNA, 22 nt, Artificial Sequence
  GATA2 Guide RNA
gugggcagccgccagcacauag

SEQ ID NO: 15172 - RNA, 22 nt, Artificial Sequence
  GATA2 Guide RNA
uaccccuccuaugugcuggcgg

SEQ ID NO: 15173 - RNA, 22 nt, Artificial Sequence
  GATA2 Guide RNA
uagucgugggcagccgccagca

SEQ ID NO: 15174 - RNA, 22 nt, Artificial Sequence
  GATA2 Guide RNA
uaugugcuggcggcugcccacg

SEQ ID NO: 15175 - RNA, 22 nt, Artificial Sequence
  GATA2 Guide RNA
uccccaccuaccccuccuaugu

SEQ ID NO: 15176 - RNA, 22 nt, Artificial Sequence
  GATA2 Guide RNA
uccuaugugcuggcggcugccc

SEQ ID NO: 15177 - RNA, 22 nt, Artificial Sequence
  GATA2 Guide RNA
ucgugggcagccgccagcacau

SEQ ID NO: 15178 - RNA, 22 nt, Artificial Sequence
  GATA2 Guide RNA
ugcuggcggcugcccacgacua

SEQ ID NO: 15179 - RNA, 22 nt, Artificial Sequence
  GATA2 Guide RNA
ugcuguagucgugggcagccgc

SEQ ID NO: 15180 - RNA, 22 nt, Artificial Sequence
  GATA2 Guide RNA
ugggcagccgccagcacauagg

SEQ ID NO: 15181 - RNA, 22 nt, Artificial Sequence
  GATA2 Guide RNA
uguagucgugggcagccgccag

SEQ ID NO: 15182 - RNA, 22 nt, Artificial Sequence
  GATA2 Guide RNA
ugugcuggcggcugcccacgac

SEQ ID NO: 15183 - RNA, 20 nt, Artificial Sequence
  GATA2 Guide RNA
accccuccuaugugcgggcg

SEQ ID NO: 15184 - RNA, 20 nt, Artificial Sequence
  GATA2 Guide RNA
accuaccccuccuaugugcg

SEQ ID NO: 15185 - RNA, 20 nt, Artificial Sequence
  GATA2 Guide RNA
agccgcccgcacauaggagg

SEQ ID NO: 15186 - RNA, 20 nt, Artificial Sequence
  GATA2 Guide RNA
agucgugggcagccgcccgc

SEQ ID NO: 15187 - RNA, 20 nt, Artificial Sequence
  GATA2 Guide RNA
augugcgggcggcugcccac

SEQ ID NO: 15188 - RNA, 20 nt, Artificial Sequence
  GATA2 Guide RNA
cagccgcccgcacauaggag

SEQ ID NO: 15189 - RNA, 20 nt, Artificial Sequence
  GATA2 Guide RNA
ccccuccuaugugcgggcgg

SEQ ID NO: 15190 - RNA, 20 nt, Artificial Sequence
  GATA2 Guide RNA
cccgcacauaggagggguag

SEQ ID NO: 15191 - RNA, 20 nt, Artificial Sequence
  GATA2 Guide RNA
cccuccuaugugcgggcggc

SEQ ID NO: 15192 - RNA, 20 nt, Artificial Sequence
  GATA2 Guide RNA
ccgcacauaggagggguagg

SEQ ID NO: 15193 - RNA, 20 nt, Artificial Sequence
  GATA2 Guide RNA
ccgcccgcacauaggagggg

SEQ ID NO: 15194 - RNA, 20 nt, Artificial Sequence
  GATA2 Guide RNA
ccuaccccuccuaugugcgg

SEQ ID NO: 15195 - RNA, 20 nt, Artificial Sequence
  GATA2 Guide RNA
ccuaugugcgggcggcugcc

SEQ ID NO: 15196 - RNA, 20 nt, Artificial Sequence
  GATA2 Guide RNA
ccuccuaugugcgggcggcu

SEQ ID NO: 15197 - RNA, 20 nt, Artificial Sequence
  GATA2 Guide RNA
cgcacauaggagggguaggu

SEQ ID NO: 15198 - RNA, 20 nt, Artificial Sequence
  GATA2 Guide RNA
cgcccgcacauaggaggggu

SEQ ID NO: 15199 - RNA, 20 nt, Artificial Sequence
  GATA2 Guide RNA
cgggcggcugcccacgacua

SEQ ID NO: 15200 - RNA, 20 nt, Artificial Sequence
  GATA2 Guide RNA
cgugggcagccgcccgcaca

SEQ ID NO: 15201 - RNA, 20 nt, Artificial Sequence
  GATA2 Guide RNA
cuaccccuccuaugugcggg

SEQ ID NO: 15202 - RNA, 20 nt, Artificial Sequence
  GATA2 Guide RNA
cuaugugcgggcggcugccc

SEQ ID NO: 15203 - RNA, 20 nt, Artificial Sequence
  GATA2 Guide RNA
cuccuaugugcgggcggcug

SEQ ID NO: 15204 - RNA, 20 nt, Artificial Sequence
  GATA2 Guide RNA
gcagccgcccgcacauagga

SEQ ID NO: 15205 - RNA, 20 nt, Artificial Sequence
  GATA2 Guide RNA
gcccgcacauaggaggggua

SEQ ID NO: 15206 - RNA, 20 nt, Artificial Sequence
  GATA2 Guide RNA
gccgcccgcacauaggaggg

SEQ ID NO: 15207 - RNA, 20 nt, Artificial Sequence
  GATA2 Guide RNA
gcgggcggcugcccacgacu

SEQ ID NO: 15208 - RNA, 20 nt, Artificial Sequence
  GATA2 Guide RNA
ggcagccgcccgcacauagg

SEQ ID NO: 15209 - RNA, 20 nt, Artificial Sequence
  GATA2 Guide RNA
gggcagccgcccgcacauag

SEQ ID NO: 15210 - RNA, 20 nt, Artificial Sequence
  GATA2 Guide RNA
guagucgugggcagccgccc

SEQ ID NO: 15211 - RNA, 20 nt, Artificial Sequence
  GATA2 Guide RNA
gucgugggcagccgcccgca

SEQ ID NO: 15212 - RNA, 20 nt, Artificial Sequence
  GATA2 Guide RNA
gugcgggcggcugcccacga

SEQ ID NO: 15213 - RNA, 20 nt, Artificial Sequence
  GATA2 Guide RNA
gugggcagccgcccgcacau

SEQ ID NO: 15214 - RNA, 20 nt, Artificial Sequence
  GATA2 Guide RNA
uaccccuccuaugugcgggc

SEQ ID NO: 15215 - RNA, 20 nt, Artificial Sequence
  GATA2 Guide RNA
uagucgugggcagccgcccg

SEQ ID NO: 15216 - RNA, 20 nt, Artificial Sequence
  GATA2 Guide RNA
uaugugcgggcggcugccca

SEQ ID NO: 15217 - RNA, 20 nt, Artificial Sequence
  GATA2 Guide RNA
uccuaugugcgggcggcugc

SEQ ID NO: 15218 - RNA, 20 nt, Artificial Sequence
  GATA2 Guide RNA
ucgugggcagccgcccgcac

SEQ ID NO: 15219 - RNA, 20 nt, Artificial Sequence
  GATA2 Guide RNA
ugcgggcggcugcccacgac

SEQ ID NO: 15220 - RNA, 20 nt, Artificial Sequence
  GATA2 Guide RNA
ugggcagccgcccgcacaua

SEQ ID NO: 15221 - RNA, 20 nt, Artificial Sequence
  GATA2 Guide RNA
ugugcgggcggcugcccacg

SEQ ID NO: 15222 - RNA, 21 nt, Artificial Sequence
  GATA2 Guide RNA
accccuccuaugugcgggcgg

SEQ ID NO: 15223 - RNA, 21 nt, Artificial Sequence
  GATA2 Guide RNA
accuaccccuccuaugugcgg

SEQ ID NO: 15224 - RNA, 21 nt, Artificial Sequence
  GATA2 Guide RNA
agccgcccgcacauaggaggg

SEQ ID NO: 15225 - RNA, 21 nt, Artificial Sequence
  GATA2 Guide RNA
agucgugggcagccgcccgca

SEQ ID NO: 15226 - RNA, 21 nt, Artificial Sequence
  GATA2 Guide RNA
augugcgggcggcugcccacg

SEQ ID NO: 15227 - RNA, 21 nt, Artificial Sequence
  GATA2 Guide RNA
caccuaccccuccuaugugcg

SEQ ID NO: 15228 - RNA, 21 nt, Artificial Sequence
  GATA2 Guide RNA
cagccgcccgcacauaggagg

SEQ ID NO: 15229 - RNA, 21 nt, Artificial Sequence
  GATA2 Guide RNA
ccccuccuaugugcgggcggc

SEQ ID NO: 15230 - RNA, 21 nt, Artificial Sequence
  GATA2 Guide RNA
cccgcacauaggagggguagg

SEQ ID NO: 15231 - RNA, 21 nt, Artificial Sequence
  GATA2 Guide RNA
cccuccuaugugcgggcggcu

SEQ ID NO: 15232 - RNA, 21 nt, Artificial Sequence
  GATA2 Guide RNA
ccgcacauaggagggguaggu

SEQ ID NO: 15233 - RNA, 21 nt, Artificial Sequence
  GATA2 Guide RNA
ccgcccgcacauaggaggggu

SEQ ID NO: 15234 - RNA, 21 nt, Artificial Sequence
  GATA2 Guide RNA
ccuaccccuccuaugugcggg

SEQ ID NO: 15235 - RNA, 21 nt, Artificial Sequence
  GATA2 Guide RNA
ccuaugugcgggcggcugccc

SEQ ID NO: 15236 - RNA, 21 nt, Artificial Sequence
  GATA2 Guide RNA
ccuccuaugugcgggcggcug

SEQ ID NO: 15237 - RNA, 21 nt, Artificial Sequence
  GATA2 Guide RNA
cgcacauaggagggguaggug

SEQ ID NO: 15238 - RNA, 21 nt, Artificial Sequence
  GATA2 Guide RNA
cgcccgcacauaggaggggua

SEQ ID NO: 15239 - RNA, 21 nt, Artificial Sequence
  GATA2 Guide RNA
cgggcggcugcccacgacuac

SEQ ID NO: 15240 - RNA, 21 nt, Artificial Sequence
  GATA2 Guide RNA
cgugggcagccgcccgcacau

SEQ ID NO: 15241 - RNA, 21 nt, Artificial Sequence
  GATA2 Guide RNA
cuaccccuccuaugugcgggc

SEQ ID NO: 15242 - RNA, 21 nt, Artificial Sequence
  GATA2 Guide RNA
cuaugugcgggcggcugccca

SEQ ID NO: 15243 - RNA, 21 nt, Artificial Sequence
  GATA2 Guide RNA
cuccuaugugcgggcggcugc

SEQ ID NO: 15244 - RNA, 21 nt, Artificial Sequence
  GATA2 Guide RNA
gcagccgcccgcacauaggag

SEQ ID NO: 15245 - RNA, 21 nt, Artificial Sequence
  GATA2 Guide RNA
gcccgcacauaggagggguag

SEQ ID NO: 15246 - RNA, 21 nt, Artificial Sequence
  GATA2 Guide RNA
gccgcccgcacauaggagggg

SEQ ID NO: 15247 - RNA, 21 nt, Artificial Sequence
  GATA2 Guide RNA
gcgggcggcugcccacgacua

SEQ ID NO: 15248 - RNA, 21 nt, Artificial Sequence
  GATA2 Guide RNA
ggcagccgcccgcacauagga

SEQ ID NO: 15249 - RNA, 21 nt, Artificial Sequence
  GATA2 Guide RNA
gggcagccgcccgcacauagg

SEQ ID NO: 15250 - RNA, 21 nt, Artificial Sequence
  GATA2 Guide RNA
guagucgugggcagccgcccg

SEQ ID NO: 15251 - RNA, 21 nt, Artificial Sequence
  GATA2 Guide RNA
gugggcagccgcccgcacaua

SEQ ID NO: 15252 - RNA, 21 nt, Artificial Sequence
  GATA2 Guide RNA
uaccccuccuaugugcgggcg

SEQ ID NO: 15253 - RNA, 21 nt, Artificial Sequence
  GATA2 Guide RNA
uagucgugggcagccgcccgc

SEQ ID NO: 15254 - RNA, 21 nt, Artificial Sequence
  GATA2 Guide RNA
uaugugcgggcggcugcccac

SEQ ID NO: 15255 - RNA, 21 nt, Artificial Sequence
  GATA2 Guide RNA
uccuaugugcgggcggcugcc

SEQ ID NO: 15256 - RNA, 21 nt, Artificial Sequence
  GATA2 Guide RNA
ucgugggcagccgcccgcaca

SEQ ID NO: 15257 - RNA, 21 nt, Artificial Sequence
  GATA2 Guide RNA
ugcgggcggcugcccacgacu

SEQ ID NO: 15258 - RNA, 21 nt, Artificial Sequence
  GATA2 Guide RNA
ugggcagccgcccgcacauag

SEQ ID NO: 15259 - RNA, 21 nt, Artificial Sequence
  GATA2 Guide RNA
uguagucgugggcagccgccc

SEQ ID NO: 15260 - RNA, 21 nt, Artificial Sequence
  GATA2 Guide RNA
ugugcgggcggcugcccacga

SEQ ID NO: 15261 - RNA, 22 nt, Artificial Sequence
  GATA2 Guide RNA
accccuccuaugugcgggcggc

SEQ ID NO: 15262 - RNA, 22 nt, Artificial Sequence
  GATA2 Guide RNA
accuaccccuccuaugugcggg

SEQ ID NO: 15263 - RNA, 22 nt, Artificial Sequence
  GATA2 Guide RNA
agccgcccgcacauaggagggg

SEQ ID NO: 15264 - RNA, 22 nt, Artificial Sequence
  GATA2 Guide RNA
agucgugggcagccgcccgcac

SEQ ID NO: 15265 - RNA, 22 nt, Artificial Sequence
  GATA2 Guide RNA
augugcgggcggcugcccacga

SEQ ID NO: 15266 - RNA, 22 nt, Artificial Sequence
  GATA2 Guide RNA
caccuaccccuccuaugugcgg

SEQ ID NO: 15267 - RNA, 22 nt, Artificial Sequence
  GATA2 Guide RNA
cagccgcccgcacauaggaggg

SEQ ID NO: 15268 - RNA, 22 nt, Artificial Sequence
  GATA2 Guide RNA
ccaccuaccccuccuaugugcg

SEQ ID NO: 15269 - RNA, 22 nt, Artificial Sequence
  GATA2 Guide RNA
ccccuccuaugugcgggcggcu

SEQ ID NO: 15270 - RNA, 22 nt, Artificial Sequence
  GATA2 Guide RNA
cccgcacauaggagggguaggu

SEQ ID NO: 15271 - RNA, 22 nt, Artificial Sequence
  GATA2 Guide RNA
cccuccuaugugcgggcggcug

SEQ ID NO: 15272 - RNA, 22 nt, Artificial Sequence
  GATA2 Guide RNA
ccgcacauaggagggguaggug

SEQ ID NO: 15273 - RNA, 22 nt, Artificial Sequence
  GATA2 Guide RNA
ccgcccgcacauaggaggggua

SEQ ID NO: 15274 - RNA, 22 nt, Artificial Sequence
  GATA2 Guide RNA
ccuaccccuccuaugugcgggc

SEQ ID NO: 15275 - RNA, 22 nt, Artificial Sequence
  GATA2 Guide RNA
ccuaugugcgggcggcugccca

SEQ ID NO: 15276 - RNA, 22 nt, Artificial Sequence
  GATA2 Guide RNA
ccuccuaugugcgggcggcugc

SEQ ID NO: 15277 - RNA, 22 nt, Artificial Sequence
  GATA2 Guide RNA
cgcacauaggagggguaggugg

SEQ ID NO: 15278 - RNA, 22 nt, Artificial Sequence
  GATA2 Guide RNA
cgcccgcacauaggagggguag

SEQ ID NO: 15279 - RNA, 22 nt, Artificial Sequence
  GATA2 Guide RNA
cgggcggcugcccacgacuaca

SEQ ID NO: 15280 - RNA, 22 nt, Artificial Sequence
  GATA2 Guide RNA
cgugggcagccgcccgcacaua

SEQ ID NO: 15281 - RNA, 22 nt, Artificial Sequence
  GATA2 Guide RNA
cuaccccuccuaugugcgggcg

SEQ ID NO: 15282 - RNA, 22 nt, Artificial Sequence
  GATA2 Guide RNA
cuaugugcgggcggcugcccac

SEQ ID NO: 15283 - RNA, 22 nt, Artificial Sequence
  GATA2 Guide RNA
cuccuaugugcgggcggcugcc

SEQ ID NO: 15284 - RNA, 22 nt, Artificial Sequence
  GATA2 Guide RNA
cuguagucgugggcagccgccc

SEQ ID NO: 15285 - RNA, 22 nt, Artificial Sequence
  GATA2 Guide RNA
gcagccgcccgcacauaggagg

SEQ ID NO: 15286 - RNA, 22 nt, Artificial Sequence
  GATA2 Guide RNA
gcccgcacauaggagggguagg

SEQ ID NO: 15287 - RNA, 22 nt, Artificial Sequence
  GATA2 Guide RNA
gccgcccgcacauaggaggggu

SEQ ID NO: 15288 - RNA, 22 nt, Artificial Sequence
  GATA2 Guide RNA
gcgggcggcugcccacgacuac

SEQ ID NO: 15289 - RNA, 22 nt, Artificial Sequence
  GATA2 Guide RNA
ggcagccgcccgcacauaggag

SEQ ID NO: 15290 - RNA, 22 nt, Artificial Sequence
  GATA2 Guide RNA
gggcagccgcccgcacauagga

SEQ ID NO: 15291 - RNA, 22 nt, Artificial Sequence
  GATA2 Guide RNA
guagucgugggcagccgcccgc

SEQ ID NO: 15292 - RNA, 22 nt, Artificial Sequence
  GATA2 Guide RNA
gucgugggcagccgcccgcaca

SEQ ID NO: 15293 - RNA, 22 nt, Artificial Sequence
  GATA2 Guide RNA
gugcgggcggcugcccacgacu

SEQ ID NO: 15294 - RNA, 22 nt, Artificial Sequence
  GATA2 Guide RNA
gugggcagccgcccgcacauag

SEQ ID NO: 15295 - RNA, 22 nt, Artificial Sequence
  GATA2 Guide RNA
uaccccuccuaugugcgggcgg

SEQ ID NO: 15296 - RNA, 22 nt, Artificial Sequence
  GATA2 Guide RNA
uagucgugggcagccgcccgca

SEQ ID NO: 15297 - RNA, 22 nt, Artificial Sequence
  GATA2 Guide RNA
uaugugcgggcggcugcccacg

SEQ ID NO: 15298 - RNA, 22 nt, Artificial Sequence
  GATA2 Guide RNA
uccuaugugcgggcggcugccc

SEQ ID NO: 15299 - RNA, 22 nt, Artificial Sequence
  GATA2 Guide RNA
ucgugggcagccgcccgcacau

SEQ ID NO: 15300 - RNA, 22 nt, Artificial Sequence
  GATA2 Guide RNA
ugcgggcggcugcccacgacua

SEQ ID NO: 15301 - RNA, 22 nt, Artificial Sequence
  GATA2 Guide RNA
ugggcagccgcccgcacauagg

SEQ ID NO: 15302 - RNA, 22 nt, Artificial Sequence
  GATA2 Guide RNA
uguagucgugggcagccgcccg

SEQ ID NO: 15303 - RNA, 22 nt, Artificial Sequence
  GATA2 Guide RNA
ugugcgggcggcugcccacgac

SEQ ID NO: 15304 - RNA, 20 nt, Artificial Sequence
  GATA2 Guide RNA
acacaggagggguagguggg

SEQ ID NO: 15305 - RNA, 20 nt, Artificial Sequence
  GATA2 Guide RNA
acaggagggguaggugggga

SEQ ID NO: 15306 - RNA, 20 nt, Artificial Sequence
  GATA2 Guide RNA
accccuccugugugccggcg

SEQ ID NO: 15307 - RNA, 20 nt, Artificial Sequence
  GATA2 Guide RNA
accuaccccuccugugugcc

SEQ ID NO: 15308 - RNA, 20 nt, Artificial Sequence
  GATA2 Guide RNA
agccgccggcacacaggagg

SEQ ID NO: 15309 - RNA, 20 nt, Artificial Sequence
  GATA2 Guide RNA
auccccaccuaccccuccug

SEQ ID NO: 15310 - RNA, 20 nt, Artificial Sequence
  GATA2 Guide RNA
cacacaggagggguaggugg

SEQ ID NO: 15311 - RNA, 20 nt, Artificial Sequence
  GATA2 Guide RNA
cacaggagggguaggugggg

SEQ ID NO: 15312 - RNA, 20 nt, Artificial Sequence
  GATA2 Guide RNA
caccuaccccuccugugugc

SEQ ID NO: 15313 - RNA, 20 nt, Artificial Sequence
  GATA2 Guide RNA
cagccgccggcacacaggag

SEQ ID NO: 15314 - RNA, 20 nt, Artificial Sequence
  GATA2 Guide RNA
caggagggguagguggggau

SEQ ID NO: 15315 - RNA, 20 nt, Artificial Sequence
  GATA2 Guide RNA
cauccccaccuaccccuccu

SEQ ID NO: 15316 - RNA, 20 nt, Artificial Sequence
  GATA2 Guide RNA
ccaccuaccccuccugugug

SEQ ID NO: 15317 - RNA, 20 nt, Artificial Sequence
  GATA2 Guide RNA
ccauccccaccuaccccucc

SEQ ID NO: 15318 - RNA, 20 nt, Artificial Sequence
  GATA2 Guide RNA
cccaccuaccccuccugugu

SEQ ID NO: 15319 - RNA, 20 nt, Artificial Sequence
  GATA2 Guide RNA
cccauccccaccuaccccuc

SEQ ID NO: 15320 - RNA, 20 nt, Artificial Sequence
  GATA2 Guide RNA
ccccaccuaccccuccugug

SEQ ID NO: 15321 - RNA, 20 nt, Artificial Sequence
  GATA2 Guide RNA
ccccauccccaccuaccccu

SEQ ID NO: 15322 - RNA, 20 nt, Artificial Sequence
  GATA2 Guide RNA
ccccuccugugugccggcgg

SEQ ID NO: 15323 - RNA, 20 nt, Artificial Sequence
  GATA2 Guide RNA
cccuccugugugccggcggc

SEQ ID NO: 15324 - RNA, 20 nt, Artificial Sequence
  GATA2 Guide RNA
ccgccggcacacaggagggg

SEQ ID NO: 15325 - RNA, 20 nt, Artificial Sequence
  GATA2 Guide RNA
ccggcacacaggagggguag

SEQ ID NO: 15326 - RNA, 20 nt, Artificial Sequence
  GATA2 Guide RNA
ccuaccccuccugugugccg

SEQ ID NO: 15327 - RNA, 20 nt, Artificial Sequence
  GATA2 Guide RNA
ccuccugugugccggcggcu

SEQ ID NO: 15328 - RNA, 20 nt, Artificial Sequence
  GATA2 Guide RNA
ccugugugccggcggcugcc

SEQ ID NO: 15329 - RNA, 20 nt, Artificial Sequence
  GATA2 Guide RNA
cgccggcacacaggaggggu

SEQ ID NO: 15330 - RNA, 20 nt, Artificial Sequence
  GATA2 Guide RNA
cggcacacaggagggguagg

SEQ ID NO: 15331 - RNA, 20 nt, Artificial Sequence
  GATA2 Guide RNA
cuaccccuccugugugccgg

SEQ ID NO: 15332 - RNA, 20 nt, Artificial Sequence
  GATA2 Guide RNA
cuccugugugccggcggcug

SEQ ID NO: 15333 - RNA, 20 nt, Artificial Sequence
  GATA2 Guide RNA
cugugugccggcggcugccc

SEQ ID NO: 15334 - RNA, 20 nt, Artificial Sequence
  GATA2 Guide RNA
gcacacaggagggguaggug

SEQ ID NO: 15335 - RNA, 20 nt, Artificial Sequence
  GATA2 Guide RNA
gcagccgccggcacacagga

SEQ ID NO: 15336 - RNA, 20 nt, Artificial Sequence
  GATA2 Guide RNA
gccgccggcacacaggaggg

SEQ ID NO: 15337 - RNA, 20 nt, Artificial Sequence
  GATA2 Guide RNA
gccggcacacaggaggggua

SEQ ID NO: 15338 - RNA, 20 nt, Artificial Sequence
  GATA2 Guide RNA
ggcacacaggagggguaggu

SEQ ID NO: 15339 - RNA, 20 nt, Artificial Sequence
  GATA2 Guide RNA
ggcagccgccggcacacagg

SEQ ID NO: 15340 - RNA, 20 nt, Artificial Sequence
  GATA2 Guide RNA
gggcagccgccggcacacag

SEQ ID NO: 15341 - RNA, 20 nt, Artificial Sequence
  GATA2 Guide RNA
gugggcagccgccggcacac

SEQ ID NO: 15342 - RNA, 20 nt, Artificial Sequence
  GATA2 Guide RNA
uaccccuccugugugccggc

SEQ ID NO: 15343 - RNA, 20 nt, Artificial Sequence
  GATA2 Guide RNA
uccccaccuaccccuccugu

SEQ ID NO: 15344 - RNA, 20 nt, Artificial Sequence
  GATA2 Guide RNA
uccugugugccggcggcugc

SEQ ID NO: 15345 - RNA, 20 nt, Artificial Sequence
  GATA2 Guide RNA
ugggcagccgccggcacaca

SEQ ID NO: 15346 - RNA, 20 nt, Artificial Sequence
  GATA2 Guide RNA
ugugugccggcggcugccca

SEQ ID NO: 15347 - RNA, 21 nt, Artificial Sequence
  GATA2 Guide RNA
acacaggagggguaggugggg

SEQ ID NO: 15348 - RNA, 21 nt, Artificial Sequence
  GATA2 Guide RNA
acaggagggguagguggggau

SEQ ID NO: 15349 - RNA, 21 nt, Artificial Sequence
  GATA2 Guide RNA
accccauccccaccuaccccu

SEQ ID NO: 15350 - RNA, 21 nt, Artificial Sequence
  GATA2 Guide RNA
accccuccugugugccggcgg

SEQ ID NO: 15351 - RNA, 21 nt, Artificial Sequence
  GATA2 Guide RNA
accuaccccuccugugugccg

SEQ ID NO: 15352 - RNA, 21 nt, Artificial Sequence
  GATA2 Guide RNA
agccgccggcacacaggaggg

SEQ ID NO: 15353 - RNA, 21 nt, Artificial Sequence
  GATA2 Guide RNA
auccccaccuaccccuccugu

SEQ ID NO: 15354 - RNA, 21 nt, Artificial Sequence
  GATA2 Guide RNA
cacacaggagggguagguggg

SEQ ID NO: 15355 - RNA, 21 nt, Artificial Sequence
  GATA2 Guide RNA
cacaggagggguaggugggga

SEQ ID NO: 15356 - RNA, 21 nt, Artificial Sequence
  GATA2 Guide RNA
caccuaccccuccugugugcc

SEQ ID NO: 15357 - RNA, 21 nt, Artificial Sequence
  GATA2 Guide RNA
cagccgccggcacacaggagg

SEQ ID NO: 15358 - RNA, 21 nt, Artificial Sequence
  GATA2 Guide RNA
caggagggguagguggggaug

SEQ ID NO: 15359 - RNA, 21 nt, Artificial Sequence
  GATA2 Guide RNA
cauccccaccuaccccuccug

SEQ ID NO: 15360 - RNA, 21 nt, Artificial Sequence
  GATA2 Guide RNA
ccaccuaccccuccugugugc

SEQ ID NO: 15361 - RNA, 21 nt, Artificial Sequence
  GATA2 Guide RNA
ccauccccaccuaccccuccu

SEQ ID NO: 15362 - RNA, 21 nt, Artificial Sequence
  GATA2 Guide RNA
cccaccuaccccuccugugug

SEQ ID NO: 15363 - RNA, 21 nt, Artificial Sequence
  GATA2 Guide RNA
cccauccccaccuaccccucc

SEQ ID NO: 15364 - RNA, 21 nt, Artificial Sequence
  GATA2 Guide RNA
ccccaccuaccccuccugugu

SEQ ID NO: 15365 - RNA, 21 nt, Artificial Sequence
  GATA2 Guide RNA
ccccauccccaccuaccccuc

SEQ ID NO: 15366 - RNA, 21 nt, Artificial Sequence
  GATA2 Guide RNA
cccuccugugugccggcggcu

SEQ ID NO: 15367 - RNA, 21 nt, Artificial Sequence
  GATA2 Guide RNA
ccgccggcacacaggaggggu

SEQ ID NO: 15368 - RNA, 21 nt, Artificial Sequence
  GATA2 Guide RNA
ccggcacacaggagggguagg

SEQ ID NO: 15369 - RNA, 21 nt, Artificial Sequence
  GATA2 Guide RNA
ccuaccccuccugugugccgg

SEQ ID NO: 15370 - RNA, 21 nt, Artificial Sequence
  GATA2 Guide RNA
ccuccugugugccggcggcug

SEQ ID NO: 15371 - RNA, 21 nt, Artificial Sequence
  GATA2 Guide RNA
cgccggcacacaggaggggua

SEQ ID NO: 15372 - RNA, 21 nt, Artificial Sequence
  GATA2 Guide RNA
cggcacacaggagggguaggu

SEQ ID NO: 15373 - RNA, 21 nt, Artificial Sequence
  GATA2 Guide RNA
cuaccccuccugugugccggc

SEQ ID NO: 15374 - RNA, 21 nt, Artificial Sequence
  GATA2 Guide RNA
cuccugugugccggcggcugc

SEQ ID NO: 15375 - RNA, 21 nt, Artificial Sequence
  GATA2 Guide RNA
cugugugccggcggcugccca

SEQ ID NO: 15376 - RNA, 21 nt, Artificial Sequence
  GATA2 Guide RNA
gcacacaggagggguaggugg

SEQ ID NO: 15377 - RNA, 21 nt, Artificial Sequence
  GATA2 Guide RNA
gcagccgccggcacacaggag

SEQ ID NO: 15378 - RNA, 21 nt, Artificial Sequence
  GATA2 Guide RNA
gccggcacacaggagggguag

SEQ ID NO: 15379 - RNA, 21 nt, Artificial Sequence
  GATA2 Guide RNA
ggcacacaggagggguaggug

SEQ ID NO: 15380 - RNA, 21 nt, Artificial Sequence
  GATA2 Guide RNA
ggcagccgccggcacacagga

SEQ ID NO: 15381 - RNA, 21 nt, Artificial Sequence
  GATA2 Guide RNA
gugggcagccgccggcacaca

SEQ ID NO: 15382 - RNA, 21 nt, Artificial Sequence
  GATA2 Guide RNA
uaccccuccugugugccggcg

SEQ ID NO: 15383 - RNA, 21 nt, Artificial Sequence
  GATA2 Guide RNA
uccccaccuaccccuccugug

SEQ ID NO: 15384 - RNA, 21 nt, Artificial Sequence
  GATA2 Guide RNA
uccugugugccggcggcugcc

SEQ ID NO: 15385 - RNA, 21 nt, Artificial Sequence
  GATA2 Guide RNA
ugggcagccgccggcacacag

SEQ ID NO: 15386 - RNA, 21 nt, Artificial Sequence
  GATA2 Guide RNA
ugugugccggcggcugcccac

SEQ ID NO: 15387 - RNA, 22 nt, Artificial Sequence
  GATA2 Guide RNA
acacaggagggguaggugggga

SEQ ID NO: 15388 - RNA, 22 nt, Artificial Sequence
  GATA2 Guide RNA
acaggagggguagguggggaug

SEQ ID NO: 15389 - RNA, 22 nt, Artificial Sequence
  GATA2 Guide RNA
accccauccccaccuaccccuc

SEQ ID NO: 15390 - RNA, 22 nt, Artificial Sequence
  GATA2 Guide RNA
accccuccugugugccggcggc

SEQ ID NO: 15391 - RNA, 22 nt, Artificial Sequence
  GATA2 Guide RNA
accuaccccuccugugugccgg

SEQ ID NO: 15392 - RNA, 22 nt, Artificial Sequence
  GATA2 Guide RNA
agccgccggcacacaggagggg

SEQ ID NO: 15393 - RNA, 22 nt, Artificial Sequence
  GATA2 Guide RNA
auccccaccuaccccuccugug

SEQ ID NO: 15394 - RNA, 22 nt, Artificial Sequence
  GATA2 Guide RNA
cacacaggagggguaggugggg

SEQ ID NO: 15395 - RNA, 22 nt, Artificial Sequence
  GATA2 Guide RNA
cacaggagggguagguggggau

SEQ ID NO: 15396 - RNA, 22 nt, Artificial Sequence
  GATA2 Guide RNA
caccccauccccaccuaccccu

SEQ ID NO: 15397 - RNA, 22 nt, Artificial Sequence
  GATA2 Guide RNA
caccuaccccuccugugugccg

SEQ ID NO: 15398 - RNA, 22 nt, Artificial Sequence
  GATA2 Guide RNA
cagccgccggcacacaggaggg

SEQ ID NO: 15399 - RNA, 22 nt, Artificial Sequence
  GATA2 Guide RNA
caggagggguagguggggaugg

SEQ ID NO: 15400 - RNA, 22 nt, Artificial Sequence
  GATA2 Guide RNA
cauccccaccuaccccuccugu

SEQ ID NO: 15401 - RNA, 22 nt, Artificial Sequence
  GATA2 Guide RNA
ccaccuaccccuccugugugcc

SEQ ID NO: 15402 - RNA, 22 nt, Artificial Sequence
  GATA2 Guide RNA
ccauccccaccuaccccuccug

SEQ ID NO: 15403 - RNA, 22 nt, Artificial Sequence
  GATA2 Guide RNA
cccaccuaccccuccugugugc

SEQ ID NO: 15404 - RNA, 22 nt, Artificial Sequence
  GATA2 Guide RNA
cccauccccaccuaccccuccu

SEQ ID NO: 15405 - RNA, 22 nt, Artificial Sequence
  GATA2 Guide RNA
ccccaccuaccccuccugugug

SEQ ID NO: 15406 - RNA, 22 nt, Artificial Sequence
  GATA2 Guide RNA
ccccauccccaccuaccccucc

SEQ ID NO: 15407 - RNA, 22 nt, Artificial Sequence
  GATA2 Guide RNA
ccccuccugugugccggcggcu

SEQ ID NO: 15408 - RNA, 22 nt, Artificial Sequence
  GATA2 Guide RNA
cccuccugugugccggcggcug

SEQ ID NO: 15409 - RNA, 22 nt, Artificial Sequence
  GATA2 Guide RNA
ccgccggcacacaggaggggua

SEQ ID NO: 15410 - RNA, 22 nt, Artificial Sequence
  GATA2 Guide RNA
ccggcacacaggagggguaggu

SEQ ID NO: 15411 - RNA, 22 nt, Artificial Sequence
  GATA2 Guide RNA
ccuaccccuccugugugccggc

SEQ ID NO: 15412 - RNA, 22 nt, Artificial Sequence
  GATA2 Guide RNA
ccuccugugugccggcggcugc

SEQ ID NO: 15413 - RNA, 22 nt, Artificial Sequence
  GATA2 Guide RNA
ccugugugccggcggcugccca

SEQ ID NO: 15414 - RNA, 22 nt, Artificial Sequence
  GATA2 Guide RNA
cgccggcacacaggagggguag

SEQ ID NO: 15415 - RNA, 22 nt, Artificial Sequence
  GATA2 Guide RNA
cggcacacaggagggguaggug

SEQ ID NO: 15416 - RNA, 22 nt, Artificial Sequence
  GATA2 Guide RNA
cgugggcagccgccggcacaca

SEQ ID NO: 15417 - RNA, 22 nt, Artificial Sequence
  GATA2 Guide RNA
cuaccccuccugugugccggcg

SEQ ID NO: 15418 - RNA, 22 nt, Artificial Sequence
  GATA2 Guide RNA
cuccugugugccggcggcugcc

SEQ ID NO: 15419 - RNA, 22 nt, Artificial Sequence
  GATA2 Guide RNA
cugugugccggcggcugcccac

SEQ ID NO: 15420 - RNA, 22 nt, Artificial Sequence
  GATA2 Guide RNA
gcacacaggagggguagguggg

SEQ ID NO: 15421 - RNA, 22 nt, Artificial Sequence
  GATA2 Guide RNA
gcagccgccggcacacaggagg

SEQ ID NO: 15422 - RNA, 22 nt, Artificial Sequence
  GATA2 Guide RNA
gccgccggcacacaggaggggu

SEQ ID NO: 15423 - RNA, 22 nt, Artificial Sequence
  GATA2 Guide RNA
gccggcacacaggagggguagg

SEQ ID NO: 15424 - RNA, 22 nt, Artificial Sequence
  GATA2 Guide RNA
ggcacacaggagggguaggugg

SEQ ID NO: 15425 - RNA, 22 nt, Artificial Sequence
  GATA2 Guide RNA
ggcagccgccggcacacaggag

SEQ ID NO: 15426 - RNA, 22 nt, Artificial Sequence
  GATA2 Guide RNA
gggcagccgccggcacacagga

SEQ ID NO: 15427 - RNA, 22 nt, Artificial Sequence
  GATA2 Guide RNA
gugggcagccgccggcacacag

SEQ ID NO: 15428 - RNA, 22 nt, Artificial Sequence
  GATA2 Guide RNA
uaccccuccugugugccggcgg

SEQ ID NO: 15429 - RNA, 22 nt, Artificial Sequence
  GATA2 Guide RNA
uccccaccuaccccuccugugu

SEQ ID NO: 15430 - RNA, 22 nt, Artificial Sequence
  GATA2 Guide RNA
uccugugugccggcggcugccc

SEQ ID NO: 15431 - RNA, 22 nt, Artificial Sequence
  GATA2 Guide RNA
ucgugggcagccgccggcacac

SEQ ID NO: 15432 - RNA, 22 nt, Artificial Sequence
  GATA2 Guide RNA
ugggcagccgccggcacacagg

SEQ ID NO: 15433 - RNA, 22 nt, Artificial Sequence
  GATA2 Guide RNA
ugugugccggcggcugcccacg

SEQ ID NO: 15434 - RNA, 20 nt, Artificial Sequence
  GATA2 Guide RNA
acaccaccccauccccaccu

SEQ ID NO: 15435 - RNA, 20 nt, Artificial Sequence
  GATA2 Guide RNA
acauaggaggaguagguggg

SEQ ID NO: 15436 - RNA, 20 nt, Artificial Sequence
  GATA2 Guide RNA
accaccccauccccaccuac

SEQ ID NO: 15437 - RNA, 20 nt, Artificial Sequence
  GATA2 Guide RNA
accccauccccaccuacucc

SEQ ID NO: 15438 - RNA, 20 nt, Artificial Sequence
  GATA2 Guide RNA
accuacuccuccuaugugcc

SEQ ID NO: 15439 - RNA, 20 nt, Artificial Sequence
  GATA2 Guide RNA
acuccuccuaugugccggcg

SEQ ID NO: 15440 - RNA, 20 nt, Artificial Sequence
  GATA2 Guide RNA
agccgccggcacauaggagg

SEQ ID NO: 15441 - RNA, 20 nt, Artificial Sequence
  GATA2 Guide RNA
aggaggaguagguggggaug

SEQ ID NO: 15442 - RNA, 20 nt, Artificial Sequence
  GATA2 Guide RNA
aggaguagguggggaugggg

SEQ ID NO: 15443 - RNA, 20 nt, Artificial Sequence
  GATA2 Guide RNA
aguagguggggauggggugg

SEQ ID NO: 15444 - RNA, 20 nt, Artificial Sequence
  GATA2 Guide RNA
auaggaggaguaggugggga

SEQ ID NO: 15445 - RNA, 20 nt, Artificial Sequence
  GATA2 Guide RNA
auccccaccuacuccuccua

SEQ ID NO: 15446 - RNA, 20 nt, Artificial Sequence
  GATA2 Guide RNA
cacaccaccccauccccacc

SEQ ID NO: 15447 - RNA, 20 nt, Artificial Sequence
  GATA2 Guide RNA
cacauaggaggaguaggugg

SEQ ID NO: 15448 - RNA, 20 nt, Artificial Sequence
  GATA2 Guide RNA
caccaccccauccccaccua

SEQ ID NO: 15449 - RNA, 20 nt, Artificial Sequence
  GATA2 Guide RNA
caccccauccccaccuacuc

SEQ ID NO: 15450 - RNA, 20 nt, Artificial Sequence
  GATA2 Guide RNA
caccuacuccuccuaugugc

SEQ ID NO: 15451 - RNA, 20 nt, Artificial Sequence
  GATA2 Guide RNA
cauaggaggaguaggugggg

SEQ ID NO: 15452 - RNA, 20 nt, Artificial Sequence
  GATA2 Guide RNA
cauccccaccuacuccuccu

SEQ ID NO: 15453 - RNA, 20 nt, Artificial Sequence
  GATA2 Guide RNA
ccaccccauccccaccuacu

SEQ ID NO: 15454 - RNA, 20 nt, Artificial Sequence
  GATA2 Guide RNA
ccaccuacuccuccuaugug

SEQ ID NO: 15455 - RNA, 20 nt, Artificial Sequence
  GATA2 Guide RNA
ccauccccaccuacuccucc

SEQ ID NO: 15456 - RNA, 20 nt, Artificial Sequence
  GATA2 Guide RNA
cccaccuacuccuccuaugu

SEQ ID NO: 15457 - RNA, 20 nt, Artificial Sequence
  GATA2 Guide RNA
cccauccccaccuacuccuc

SEQ ID NO: 15458 - RNA, 20 nt, Artificial Sequence
  GATA2 Guide RNA
ccccaccuacuccuccuaug

SEQ ID NO: 15459 - RNA, 20 nt, Artificial Sequence
  GATA2 Guide RNA
ccccauccccaccuacuccu

SEQ ID NO: 15460 - RNA, 20 nt, Artificial Sequence
  GATA2 Guide RNA
ccgccggcacauaggaggag

SEQ ID NO: 15461 - RNA, 20 nt, Artificial Sequence
  GATA2 Guide RNA
ccggcacauaggaggaguag

SEQ ID NO: 15462 - RNA, 20 nt, Artificial Sequence
  GATA2 Guide RNA
ccuacuccuccuaugugccg

SEQ ID NO: 15463 - RNA, 20 nt, Artificial Sequence
  GATA2 Guide RNA
cgccggcacauaggaggagu

SEQ ID NO: 15464 - RNA, 20 nt, Artificial Sequence
  GATA2 Guide RNA
cggcacauaggaggaguagg

SEQ ID NO: 15465 - RNA, 20 nt, Artificial Sequence
  GATA2 Guide RNA
cuacuccuccuaugugccgg

SEQ ID NO: 15466 - RNA, 20 nt, Artificial Sequence
  GATA2 Guide RNA
cuccuccuaugugccggcgg

SEQ ID NO: 15467 - RNA, 20 nt, Artificial Sequence
  GATA2 Guide RNA
gaggaguagguggggauggg

SEQ ID NO: 15468 - RNA, 20 nt, Artificial Sequence
  GATA2 Guide RNA
gaguagguggggauggggug

SEQ ID NO: 15469 - RNA, 20 nt, Artificial Sequence
  GATA2 Guide RNA
gcacauaggaggaguaggug

SEQ ID NO: 15470 - RNA, 20 nt, Artificial Sequence
  GATA2 Guide RNA
gccgccggcacauaggagga

SEQ ID NO: 15471 - RNA, 20 nt, Artificial Sequence
  GATA2 Guide RNA
gccggcacauaggaggagua

SEQ ID NO: 15472 - RNA, 20 nt, Artificial Sequence
  GATA2 Guide RNA
ggaggaguagguggggaugg

SEQ ID NO: 15473 - RNA, 20 nt, Artificial Sequence
  GATA2 Guide RNA
ggaguagguggggauggggu

SEQ ID NO: 15474 - RNA, 20 nt, Artificial Sequence
  GATA2 Guide RNA
ggcacauaggaggaguaggu

SEQ ID NO: 15475 - RNA, 20 nt, Artificial Sequence
  GATA2 Guide RNA
uacuccuccuaugugccggc

SEQ ID NO: 15476 - RNA, 20 nt, Artificial Sequence
  GATA2 Guide RNA
uaggaggaguagguggggau

SEQ ID NO: 15477 - RNA, 20 nt, Artificial Sequence
  GATA2 Guide RNA
uccccaccuacuccuccuau

SEQ ID NO: 15478 - RNA, 21 nt, Artificial Sequence
  GATA2 Guide RNA
acacaccaccccauccccacc

SEQ ID NO: 15479 - RNA, 21 nt, Artificial Sequence
  GATA2 Guide RNA
acaccaccccauccccaccua

SEQ ID NO: 15480 - RNA, 21 nt, Artificial Sequence
  GATA2 Guide RNA
acauaggaggaguaggugggg

SEQ ID NO: 15481 - RNA, 21 nt, Artificial Sequence
  GATA2 Guide RNA
accaccccauccccaccuacu

SEQ ID NO: 15482 - RNA, 21 nt, Artificial Sequence
  GATA2 Guide RNA
accccauccccaccuacuccu

SEQ ID NO: 15483 - RNA, 21 nt, Artificial Sequence
  GATA2 Guide RNA
accuacuccuccuaugugccg

SEQ ID NO: 15484 - RNA, 21 nt, Artificial Sequence
  GATA2 Guide RNA
acuccuccuaugugccggcgg

SEQ ID NO: 15485 - RNA, 21 nt, Artificial Sequence
  GATA2 Guide RNA
agccgccggcacauaggagga

SEQ ID NO: 15486 - RNA, 21 nt, Artificial Sequence
  GATA2 Guide RNA
aggaggaguagguggggaugg

SEQ ID NO: 15487 - RNA, 21 nt, Artificial Sequence
  GATA2 Guide RNA
aggaguagguggggauggggu

SEQ ID NO: 15488 - RNA, 21 nt, Artificial Sequence
  GATA2 Guide RNA
aguagguggggaugggguggu

SEQ ID NO: 15489 - RNA, 21 nt, Artificial Sequence
  GATA2 Guide RNA
auaggaggaguagguggggau

SEQ ID NO: 15490 - RNA, 21 nt, Artificial Sequence
  GATA2 Guide RNA
auccccaccuacuccuccuau

SEQ ID NO: 15491 - RNA, 21 nt, Artificial Sequence
  GATA2 Guide RNA
cacaccaccccauccccaccu

SEQ ID NO: 15492 - RNA, 21 nt, Artificial Sequence
  GATA2 Guide RNA
cacauaggaggaguagguggg

SEQ ID NO: 15493 - RNA, 21 nt, Artificial Sequence
  GATA2 Guide RNA
caccaccccauccccaccuac

SEQ ID NO: 15494 - RNA, 21 nt, Artificial Sequence
  GATA2 Guide RNA
caccccauccccaccuacucc

SEQ ID NO: 15495 - RNA, 21 nt, Artificial Sequence
  GATA2 Guide RNA
caccuacuccuccuaugugcc

SEQ ID NO: 15496 - RNA, 21 nt, Artificial Sequence
  GATA2 Guide RNA
cauaggaggaguaggugggga

SEQ ID NO: 15497 - RNA, 21 nt, Artificial Sequence
  GATA2 Guide RNA
cauccccaccuacuccuccua

SEQ ID NO: 15498 - RNA, 21 nt, Artificial Sequence
  GATA2 Guide RNA
ccaccccauccccaccuacuc

SEQ ID NO: 15499 - RNA, 21 nt, Artificial Sequence
  GATA2 Guide RNA
ccaccuacuccuccuaugugc

SEQ ID NO: 15500 - RNA, 21 nt, Artificial Sequence
  GATA2 Guide RNA
ccauccccaccuacuccuccu

SEQ ID NO: 15501 - RNA, 21 nt, Artificial Sequence
  GATA2 Guide RNA
cccaccuacuccuccuaugug

SEQ ID NO: 15502 - RNA, 21 nt, Artificial Sequence
  GATA2 Guide RNA
cccauccccaccuacuccucc

SEQ ID NO: 15503 - RNA, 21 nt, Artificial Sequence
  GATA2 Guide RNA
ccccaccuacuccuccuaugu

SEQ ID NO: 15504 - RNA, 21 nt, Artificial Sequence
  GATA2 Guide RNA
ccccauccccaccuacuccuc

SEQ ID NO: 15505 - RNA, 21 nt, Artificial Sequence
  GATA2 Guide RNA
ccgccggcacauaggaggagu

SEQ ID NO: 15506 - RNA, 21 nt, Artificial Sequence
  GATA2 Guide RNA
ccggcacauaggaggaguagg

SEQ ID NO: 15507 - RNA, 21 nt, Artificial Sequence
  GATA2 Guide RNA
ccuacuccuccuaugugccgg

SEQ ID NO: 15508 - RNA, 21 nt, Artificial Sequence
  GATA2 Guide RNA
cgccggcacauaggaggagua

SEQ ID NO: 15509 - RNA, 21 nt, Artificial Sequence
  GATA2 Guide RNA
cggcacauaggaggaguaggu

SEQ ID NO: 15510 - RNA, 21 nt, Artificial Sequence
  GATA2 Guide RNA
cuacuccuccuaugugccggc

SEQ ID NO: 15511 - RNA, 21 nt, Artificial Sequence
  GATA2 Guide RNA
cuccuccuaugugccggcggc

SEQ ID NO: 15512 - RNA, 21 nt, Artificial Sequence
  GATA2 Guide RNA
gaggaguagguggggaugggg

SEQ ID NO: 15513 - RNA, 21 nt, Artificial Sequence
  GATA2 Guide RNA
gaguagguggggauggggugg

SEQ ID NO: 15514 - RNA, 21 nt, Artificial Sequence
  GATA2 Guide RNA
gcacauaggaggaguaggugg

SEQ ID NO: 15515 - RNA, 21 nt, Artificial Sequence
  GATA2 Guide RNA
gccgccggcacauaggaggag

SEQ ID NO: 15516 - RNA, 21 nt, Artificial Sequence
  GATA2 Guide RNA
gccggcacauaggaggaguag

SEQ ID NO: 15517 - RNA, 21 nt, Artificial Sequence
  GATA2 Guide RNA
ggaggaguagguggggauggg

SEQ ID NO: 15518 - RNA, 21 nt, Artificial Sequence
  GATA2 Guide RNA
ggaguagguggggauggggug

SEQ ID NO: 15519 - RNA, 21 nt, Artificial Sequence
  GATA2 Guide RNA
ggcacauaggaggaguaggug

SEQ ID NO: 15520 - RNA, 21 nt, Artificial Sequence
  GATA2 Guide RNA
uacuccuccuaugugccggcg

SEQ ID NO: 15521 - RNA, 21 nt, Artificial Sequence
  GATA2 Guide RNA
uaggaggaguagguggggaug

SEQ ID NO: 15522 - RNA, 21 nt, Artificial Sequence
  GATA2 Guide RNA
uccccaccuacuccuccuaug

SEQ ID NO: 15523 - RNA, 22 nt, Artificial Sequence
  GATA2 Guide RNA
acacaccaccccauccccaccu

SEQ ID NO: 15524 - RNA, 22 nt, Artificial Sequence
  GATA2 Guide RNA
acaccaccccauccccaccuac

SEQ ID NO: 15525 - RNA, 22 nt, Artificial Sequence
  GATA2 Guide RNA
acauaggaggaguaggugggga

SEQ ID NO: 15526 - RNA, 22 nt, Artificial Sequence
  GATA2 Guide RNA
accaccccauccccaccuacuc

SEQ ID NO: 15527 - RNA, 22 nt, Artificial Sequence
  GATA2 Guide RNA
accccauccccaccuacuccuc

SEQ ID NO: 15528 - RNA, 22 nt, Artificial Sequence
  GATA2 Guide RNA
accuacuccuccuaugugccgg

SEQ ID NO: 15529 - RNA, 22 nt, Artificial Sequence
  GATA2 Guide RNA
acuccuccuaugugccggcggc

SEQ ID NO: 15530 - RNA, 22 nt, Artificial Sequence
  GATA2 Guide RNA
agccgccggcacauaggaggag

SEQ ID NO: 15531 - RNA, 22 nt, Artificial Sequence
  GATA2 Guide RNA
aggaggaguagguggggauggg

SEQ ID NO: 15532 - RNA, 22 nt, Artificial Sequence
  GATA2 Guide RNA
aggaguagguggggauggggug

SEQ ID NO: 15533 - RNA, 22 nt, Artificial Sequence
  GATA2 Guide RNA
aguagguggggaugggguggug

SEQ ID NO: 15534 - RNA, 22 nt, Artificial Sequence
  GATA2 Guide RNA
auaggaggaguagguggggaug

SEQ ID NO: 15535 - RNA, 22 nt, Artificial Sequence
  GATA2 Guide RNA
auccccaccuacuccuccuaug

SEQ ID NO: 15536 - RNA, 22 nt, Artificial Sequence
  GATA2 Guide RNA
cacaccaccccauccccaccua

SEQ ID NO: 15537 - RNA, 22 nt, Artificial Sequence
  GATA2 Guide RNA
cacauaggaggaguaggugggg

SEQ ID NO: 15538 - RNA, 22 nt, Artificial Sequence
  GATA2 Guide RNA
caccaccccauccccaccuacu

SEQ ID NO: 15539 - RNA, 22 nt, Artificial Sequence
  GATA2 Guide RNA
caccccauccccaccuacuccu

SEQ ID NO: 15540 - RNA, 22 nt, Artificial Sequence
  GATA2 Guide RNA
caccuacuccuccuaugugccg

SEQ ID NO: 15541 - RNA, 22 nt, Artificial Sequence
  GATA2 Guide RNA
cagccgccggcacauaggagga

SEQ ID NO: 15542 - RNA, 22 nt, Artificial Sequence
  GATA2 Guide RNA
cauaggaggaguagguggggau

SEQ ID NO: 15543 - RNA, 22 nt, Artificial Sequence
  GATA2 Guide RNA
cauccccaccuacuccuccuau

SEQ ID NO: 15544 - RNA, 22 nt, Artificial Sequence
  GATA2 Guide RNA
ccaccccauccccaccuacucc

SEQ ID NO: 15545 - RNA, 22 nt, Artificial Sequence
  GATA2 Guide RNA
ccaccuacuccuccuaugugcc

SEQ ID NO: 15546 - RNA, 22 nt, Artificial Sequence
  GATA2 Guide RNA
ccauccccaccuacuccuccua

SEQ ID NO: 15547 - RNA, 22 nt, Artificial Sequence
  GATA2 Guide RNA
cccaccuacuccuccuaugugc

SEQ ID NO: 15548 - RNA, 22 nt, Artificial Sequence
  GATA2 Guide RNA
cccauccccaccuacuccuccu

SEQ ID NO: 15549 - RNA, 22 nt, Artificial Sequence
  GATA2 Guide RNA
ccccaccuacuccuccuaugug

SEQ ID NO: 15550 - RNA, 22 nt, Artificial Sequence
  GATA2 Guide RNA
ccccauccccaccuacuccucc

SEQ ID NO: 15551 - RNA, 22 nt, Artificial Sequence
  GATA2 Guide RNA
ccgccggcacauaggaggagua

SEQ ID NO: 15552 - RNA, 22 nt, Artificial Sequence
  GATA2 Guide RNA
ccggcacauaggaggaguaggu

SEQ ID NO: 15553 - RNA, 22 nt, Artificial Sequence
  GATA2 Guide RNA
ccuacuccuccuaugugccggc

SEQ ID NO: 15554 - RNA, 22 nt, Artificial Sequence
  GATA2 Guide RNA
cgccggcacauaggaggaguag

SEQ ID NO: 15555 - RNA, 22 nt, Artificial Sequence
  GATA2 Guide RNA
cggcacauaggaggaguaggug

SEQ ID NO: 15556 - RNA, 22 nt, Artificial Sequence
  GATA2 Guide RNA
cuacuccuccuaugugccggcg

SEQ ID NO: 15557 - RNA, 22 nt, Artificial Sequence
  GATA2 Guide RNA
cuccuccuaugugccggcggcu

SEQ ID NO: 15558 - RNA, 22 nt, Artificial Sequence
  GATA2 Guide RNA
gaggaguagguggggauggggu

SEQ ID NO: 15559 - RNA, 22 nt, Artificial Sequence
  GATA2 Guide RNA
gaguagguggggaugggguggu

SEQ ID NO: 15560 - RNA, 22 nt, Artificial Sequence
  GATA2 Guide RNA
gcacauaggaggaguagguggg

SEQ ID NO: 15561 - RNA, 22 nt, Artificial Sequence
  GATA2 Guide RNA
gccgccggcacauaggaggagu

SEQ ID NO: 15562 - RNA, 22 nt, Artificial Sequence
  GATA2 Guide RNA
gccggcacauaggaggaguagg

SEQ ID NO: 15563 - RNA, 22 nt, Artificial Sequence
  GATA2 Guide RNA
ggaggaguagguggggaugggg

SEQ ID NO: 15564 - RNA, 22 nt, Artificial Sequence
  GATA2 Guide RNA
ggaguagguggggauggggugg

SEQ ID NO: 15565 - RNA, 22 nt, Artificial Sequence
  GATA2 Guide RNA
ggcacauaggaggaguaggugg

SEQ ID NO: 15566 - RNA, 22 nt, Artificial Sequence
  GATA2 Guide RNA
uacacaccaccccauccccacc

SEQ ID NO: 15567 - RNA, 22 nt, Artificial Sequence
  GATA2 Guide RNA
uacuccuccuaugugccggcgg

SEQ ID NO: 15568 - RNA, 22 nt, Artificial Sequence
  GATA2 Guide RNA
uaggaggaguagguggggaugg

SEQ ID NO: 15569 - RNA, 22 nt, Artificial Sequence
  GATA2 Guide RNA
uccccaccuacuccuccuaugu

SEQ ID NO: 15570 - RNA, 20 nt, Artificial Sequence
  GATA2 Guide RNA
acacaccaccccauccccau

SEQ ID NO: 15571 - RNA, 20 nt, Artificial Sequence
  GATA2 Guide RNA
acaccaccccauccccaucu

SEQ ID NO: 15572 - RNA, 20 nt, Artificial Sequence
  GATA2 Guide RNA
acauaggagggguagauggg

SEQ ID NO: 15573 - RNA, 20 nt, Artificial Sequence
  GATA2 Guide RNA
accaccccauccccaucuac

SEQ ID NO: 15574 - RNA, 20 nt, Artificial Sequence
  GATA2 Guide RNA
accccauccccaucuacccc

SEQ ID NO: 15575 - RNA, 20 nt, Artificial Sequence
  GATA2 Guide RNA
agauggggaugggguggugu

SEQ ID NO: 15576 - RNA, 20 nt, Artificial Sequence
  GATA2 Guide RNA
aggagggguagauggggaug

SEQ ID NO: 15577 - RNA, 20 nt, Artificial Sequence
  GATA2 Guide RNA
agggguagauggggaugggg

SEQ ID NO: 15578 - RNA, 20 nt, Artificial Sequence
  GATA2 Guide RNA
auaggagggguagaugggga

SEQ ID NO: 15579 - RNA, 20 nt, Artificial Sequence
  GATA2 Guide RNA
auccccaucuaccccuccua

SEQ ID NO: 15580 - RNA, 20 nt, Artificial Sequence
  GATA2 Guide RNA
aucuaccccuccuaugugcc

SEQ ID NO: 15581 - RNA, 20 nt, Artificial Sequence
  GATA2 Guide RNA
auggggaugggguggugugu

SEQ ID NO: 15582 - RNA, 20 nt, Artificial Sequence
  GATA2 Guide RNA
cacaccaccccauccccauc

SEQ ID NO: 15583 - RNA, 20 nt, Artificial Sequence
  GATA2 Guide RNA
cacauaggagggguagaugg

SEQ ID NO: 15584 - RNA, 20 nt, Artificial Sequence
  GATA2 Guide RNA
caccaccccauccccaucua

SEQ ID NO: 15585 - RNA, 20 nt, Artificial Sequence
  GATA2 Guide RNA
caccccauccccaucuaccc

SEQ ID NO: 15586 - RNA, 20 nt, Artificial Sequence
  GATA2 Guide RNA
cauaggagggguagaugggg

SEQ ID NO: 15587 - RNA, 20 nt, Artificial Sequence
  GATA2 Guide RNA
cauccccaucuaccccuccu

SEQ ID NO: 15588 - RNA, 20 nt, Artificial Sequence
  GATA2 Guide RNA
caucuaccccuccuaugugc

SEQ ID NO: 15589 - RNA, 20 nt, Artificial Sequence
  GATA2 Guide RNA
ccaccccauccccaucuacc

SEQ ID NO: 15590 - RNA, 20 nt, Artificial Sequence
  GATA2 Guide RNA
ccauccccaucuaccccucc

SEQ ID NO: 15591 - RNA, 20 nt, Artificial Sequence
  GATA2 Guide RNA
ccaucuaccccuccuaugug

SEQ ID NO: 15592 - RNA, 20 nt, Artificial Sequence
  GATA2 Guide RNA
cccauccccaucuaccccuc

SEQ ID NO: 15593 - RNA, 20 nt, Artificial Sequence
  GATA2 Guide RNA
cccaucuaccccuccuaugu

SEQ ID NO: 15594 - RNA, 20 nt, Artificial Sequence
  GATA2 Guide RNA
ccccauccccaucuaccccu

SEQ ID NO: 15595 - RNA, 20 nt, Artificial Sequence
  GATA2 Guide RNA
ccccaucuaccccuccuaug

SEQ ID NO: 15596 - RNA, 20 nt, Artificial Sequence
  GATA2 Guide RNA
ccggcacauaggagggguag

SEQ ID NO: 15597 - RNA, 20 nt, Artificial Sequence
  GATA2 Guide RNA
cgccggcacauaggaggggu

SEQ ID NO: 15598 - RNA, 20 nt, Artificial Sequence
  GATA2 Guide RNA
cggcacauaggagggguaga

SEQ ID NO: 15599 - RNA, 20 nt, Artificial Sequence
  GATA2 Guide RNA
cuacacaccaccccaucccc

SEQ ID NO: 15600 - RNA, 20 nt, Artificial Sequence
  GATA2 Guide RNA
gagggguagauggggauggg

SEQ ID NO: 15601 - RNA, 20 nt, Artificial Sequence
  GATA2 Guide RNA
gauggggaugggguggugug

SEQ ID NO: 15602 - RNA, 20 nt, Artificial Sequence
  GATA2 Guide RNA
gcacauaggagggguagaug

SEQ ID NO: 15603 - RNA, 20 nt, Artificial Sequence
  GATA2 Guide RNA
gccggcacauaggaggggua

SEQ ID NO: 15604 - RNA, 20 nt, Artificial Sequence
  GATA2 Guide RNA
gcuacacaccaccccauccc

SEQ ID NO: 15605 - RNA, 20 nt, Artificial Sequence
  GATA2 Guide RNA
ggagggguagauggggaugg

SEQ ID NO: 15606 - RNA, 20 nt, Artificial Sequence
  GATA2 Guide RNA
ggcacauaggagggguagau

SEQ ID NO: 15607 - RNA, 20 nt, Artificial Sequence
  GATA2 Guide RNA
gggguagauggggauggggu

SEQ ID NO: 15608 - RNA, 20 nt, Artificial Sequence
  GATA2 Guide RNA
ggguagauggggauggggug

SEQ ID NO: 15609 - RNA, 20 nt, Artificial Sequence
  GATA2 Guide RNA
gguagauggggauggggugg

SEQ ID NO: 15610 - RNA, 20 nt, Artificial Sequence
  GATA2 Guide RNA
guagauggggaugggguggu

SEQ ID NO: 15611 - RNA, 20 nt, Artificial Sequence
  GATA2 Guide RNA
uacacaccaccccaucccca

SEQ ID NO: 15612 - RNA, 20 nt, Artificial Sequence
  GATA2 Guide RNA
uagauggggaugggguggug

SEQ ID NO: 15613 - RNA, 20 nt, Artificial Sequence
  GATA2 Guide RNA
uaggagggguagauggggau

SEQ ID NO: 15614 - RNA, 20 nt, Artificial Sequence
  GATA2 Guide RNA
uccccaucuaccccuccuau

SEQ ID NO: 15615 - RNA, 20 nt, Artificial Sequence
  GATA2 Guide RNA
ugcuacacaccaccccaucc

SEQ ID NO: 15616 - RNA, 21 nt, Artificial Sequence
  GATA2 Guide RNA
acacaccaccccauccccauc

SEQ ID NO: 15617 - RNA, 21 nt, Artificial Sequence
  GATA2 Guide RNA
acaccaccccauccccaucua

SEQ ID NO: 15618 - RNA, 21 nt, Artificial Sequence
  GATA2 Guide RNA
acauaggagggguagaugggg

SEQ ID NO: 15619 - RNA, 21 nt, Artificial Sequence
  GATA2 Guide RNA
accaccccauccccaucuacc

SEQ ID NO: 15620 - RNA, 21 nt, Artificial Sequence
  GATA2 Guide RNA
accccauccccaucuaccccu

SEQ ID NO: 15621 - RNA, 21 nt, Artificial Sequence
  GATA2 Guide RNA
agauggggaugggguggugug

SEQ ID NO: 15622 - RNA, 21 nt, Artificial Sequence
  GATA2 Guide RNA
aggagggguagauggggaugg

SEQ ID NO: 15623 - RNA, 21 nt, Artificial Sequence
  GATA2 Guide RNA
agggguagauggggauggggu

SEQ ID NO: 15624 - RNA, 21 nt, Artificial Sequence
  GATA2 Guide RNA
auaggagggguagauggggau

SEQ ID NO: 15625 - RNA, 21 nt, Artificial Sequence
  GATA2 Guide RNA
auccccaucuaccccuccuau

SEQ ID NO: 15626 - RNA, 21 nt, Artificial Sequence
  GATA2 Guide RNA
aucuaccccuccuaugugccg

SEQ ID NO: 15627 - RNA, 21 nt, Artificial Sequence
  GATA2 Guide RNA
auggggaugggguggugugua

SEQ ID NO: 15628 - RNA, 21 nt, Artificial Sequence
  GATA2 Guide RNA
cacaccaccccauccccaucu

SEQ ID NO: 15629 - RNA, 21 nt, Artificial Sequence
  GATA2 Guide RNA
cacauaggagggguagauggg

SEQ ID NO: 15630 - RNA, 21 nt, Artificial Sequence
  GATA2 Guide RNA
caccaccccauccccaucuac

SEQ ID NO: 15631 - RNA, 21 nt, Artificial Sequence
  GATA2 Guide RNA
caccccauccccaucuacccc

SEQ ID NO: 15632 - RNA, 21 nt, Artificial Sequence
  GATA2 Guide RNA
cauaggagggguagaugggga

SEQ ID NO: 15633 - RNA, 21 nt, Artificial Sequence
  GATA2 Guide RNA
cauccccaucuaccccuccua

SEQ ID NO: 15634 - RNA, 21 nt, Artificial Sequence
  GATA2 Guide RNA
caucuaccccuccuaugugcc

SEQ ID NO: 15635 - RNA, 21 nt, Artificial Sequence
  GATA2 Guide RNA
ccaccccauccccaucuaccc

SEQ ID NO: 15636 - RNA, 21 nt, Artificial Sequence
  GATA2 Guide RNA
ccauccccaucuaccccuccu

SEQ ID NO: 15637 - RNA, 21 nt, Artificial Sequence
  GATA2 Guide RNA
ccaucuaccccuccuaugugc

SEQ ID NO: 15638 - RNA, 21 nt, Artificial Sequence
  GATA2 Guide RNA
cccauccccaucuaccccucc

SEQ ID NO: 15639 - RNA, 21 nt, Artificial Sequence
  GATA2 Guide RNA
cccaucuaccccuccuaugug

SEQ ID NO: 15640 - RNA, 21 nt, Artificial Sequence
  GATA2 Guide RNA
ccccauccccaucuaccccuc

SEQ ID NO: 15641 - RNA, 21 nt, Artificial Sequence
  GATA2 Guide RNA
ccccaucuaccccuccuaugu

SEQ ID NO: 15642 - RNA, 21 nt, Artificial Sequence
  GATA2 Guide RNA
ccgccggcacauaggaggggu

SEQ ID NO: 15643 - RNA, 21 nt, Artificial Sequence
  GATA2 Guide RNA
ccggcacauaggagggguaga

SEQ ID NO: 15644 - RNA, 21 nt, Artificial Sequence
  GATA2 Guide RNA
cgccggcacauaggaggggua

SEQ ID NO: 15645 - RNA, 21 nt, Artificial Sequence
  GATA2 Guide RNA
cggcacauaggagggguagau

SEQ ID NO: 15646 - RNA, 21 nt, Artificial Sequence
  GATA2 Guide RNA
cuacacaccaccccaucccca

SEQ ID NO: 15647 - RNA, 21 nt, Artificial Sequence
  GATA2 Guide RNA
cugcuacacaccaccccaucc

SEQ ID NO: 15648 - RNA, 21 nt, Artificial Sequence
  GATA2 Guide RNA
gagggguagauggggaugggg

SEQ ID NO: 15649 - RNA, 21 nt, Artificial Sequence
  GATA2 Guide RNA
gauggggaugggguggugugu

SEQ ID NO: 15650 - RNA, 21 nt, Artificial Sequence
  GATA2 Guide RNA
gcacauaggagggguagaugg

SEQ ID NO: 15651 - RNA, 21 nt, Artificial Sequence
  GATA2 Guide RNA
gccggcacauaggagggguag

SEQ ID NO: 15652 - RNA, 21 nt, Artificial Sequence
  GATA2 Guide RNA
gcuacacaccaccccaucccc

SEQ ID NO: 15653 - RNA, 21 nt, Artificial Sequence
  GATA2 Guide RNA
ggagggguagauggggauggg

SEQ ID NO: 15654 - RNA, 21 nt, Artificial Sequence
  GATA2 Guide RNA
ggcacauaggagggguagaug

SEQ ID NO: 15655 - RNA, 21 nt, Artificial Sequence
  GATA2 Guide RNA
gggguagauggggauggggug

SEQ ID NO: 15656 - RNA, 21 nt, Artificial Sequence
  GATA2 Guide RNA
ggguagauggggauggggugg

SEQ ID NO: 15657 - RNA, 21 nt, Artificial Sequence
  GATA2 Guide RNA
gguagauggggaugggguggu

SEQ ID NO: 15658 - RNA, 21 nt, Artificial Sequence
  GATA2 Guide RNA
guagauggggaugggguggug

SEQ ID NO: 15659 - RNA, 21 nt, Artificial Sequence
  GATA2 Guide RNA
uacacaccaccccauccccau

SEQ ID NO: 15660 - RNA, 21 nt, Artificial Sequence
  GATA2 Guide RNA
uagauggggaugggguggugu

SEQ ID NO: 15661 - RNA, 21 nt, Artificial Sequence
  GATA2 Guide RNA
uaggagggguagauggggaug

SEQ ID NO: 15662 - RNA, 21 nt, Artificial Sequence
  GATA2 Guide RNA
uccccaucuaccccuccuaug

SEQ ID NO: 15663 - RNA, 21 nt, Artificial Sequence
  GATA2 Guide RNA
ugcuacacaccaccccauccc

SEQ ID NO: 15664 - RNA, 22 nt, Artificial Sequence
  GATA2 Guide RNA
acacaccaccccauccccaucu

SEQ ID NO: 15665 - RNA, 22 nt, Artificial Sequence
  GATA2 Guide RNA
acaccaccccauccccaucuac

SEQ ID NO: 15666 - RNA, 22 nt, Artificial Sequence
  GATA2 Guide RNA
acauaggagggguagaugggga

SEQ ID NO: 15667 - RNA, 22 nt, Artificial Sequence
  GATA2 Guide RNA
accaccccauccccaucuaccc

SEQ ID NO: 15668 - RNA, 22 nt, Artificial Sequence
  GATA2 Guide RNA
accccauccccaucuaccccuc

SEQ ID NO: 15669 - RNA, 22 nt, Artificial Sequence
  GATA2 Guide RNA
agauggggaugggguggugugu

SEQ ID NO: 15670 - RNA, 22 nt, Artificial Sequence
  GATA2 Guide RNA
aggagggguagauggggauggg

SEQ ID NO: 15671 - RNA, 22 nt, Artificial Sequence
  GATA2 Guide RNA
agggguagauggggauggggug

SEQ ID NO: 15672 - RNA, 22 nt, Artificial Sequence
  GATA2 Guide RNA
auaggagggguagauggggaug

SEQ ID NO: 15673 - RNA, 22 nt, Artificial Sequence
  GATA2 Guide RNA
auccccaucuaccccuccuaug

SEQ ID NO: 15674 - RNA, 22 nt, Artificial Sequence
  GATA2 Guide RNA
aucuaccccuccuaugugccgg

SEQ ID NO: 15675 - RNA, 22 nt, Artificial Sequence
  GATA2 Guide RNA
auggggauggggugguguguag

SEQ ID NO: 15676 - RNA, 22 nt, Artificial Sequence
  GATA2 Guide RNA
cacaccaccccauccccaucua

SEQ ID NO: 15677 - RNA, 22 nt, Artificial Sequence
  GATA2 Guide RNA
cacauaggagggguagaugggg

SEQ ID NO: 15678 - RNA, 22 nt, Artificial Sequence
  GATA2 Guide RNA
caccaccccauccccaucuacc

SEQ ID NO: 15679 - RNA, 22 nt, Artificial Sequence
  GATA2 Guide RNA
caccccauccccaucuaccccu

SEQ ID NO: 15680 - RNA, 22 nt, Artificial Sequence
  GATA2 Guide RNA
cauaggagggguagauggggau

SEQ ID NO: 15681 - RNA, 22 nt, Artificial Sequence
  GATA2 Guide RNA
cauccccaucuaccccuccuau

SEQ ID NO: 15682 - RNA, 22 nt, Artificial Sequence
  GATA2 Guide RNA
caucuaccccuccuaugugccg

SEQ ID NO: 15683 - RNA, 22 nt, Artificial Sequence
  GATA2 Guide RNA
ccaccccauccccaucuacccc

SEQ ID NO: 15684 - RNA, 22 nt, Artificial Sequence
  GATA2 Guide RNA
ccauccccaucuaccccuccua

SEQ ID NO: 15685 - RNA, 22 nt, Artificial Sequence
  GATA2 Guide RNA
ccaucuaccccuccuaugugcc

SEQ ID NO: 15686 - RNA, 22 nt, Artificial Sequence
  GATA2 Guide RNA
cccauccccaucuaccccuccu

SEQ ID NO: 15687 - RNA, 22 nt, Artificial Sequence
  GATA2 Guide RNA
cccaucuaccccuccuaugugc

SEQ ID NO: 15688 - RNA, 22 nt, Artificial Sequence
  GATA2 Guide RNA
ccccauccccaucuaccccucc

SEQ ID NO: 15689 - RNA, 22 nt, Artificial Sequence
  GATA2 Guide RNA
ccccaucuaccccuccuaugug

SEQ ID NO: 15690 - RNA, 22 nt, Artificial Sequence
  GATA2 Guide RNA
ccgccggcacauaggaggggua

SEQ ID NO: 15691 - RNA, 22 nt, Artificial Sequence
  GATA2 Guide RNA
ccggcacauaggagggguagau

SEQ ID NO: 15692 - RNA, 22 nt, Artificial Sequence
  GATA2 Guide RNA
ccugcuacacaccaccccaucc

SEQ ID NO: 15693 - RNA, 22 nt, Artificial Sequence
  GATA2 Guide RNA
cgccggcacauaggagggguag

SEQ ID NO: 15694 - RNA, 22 nt, Artificial Sequence
  GATA2 Guide RNA
cggcacauaggagggguagaug

SEQ ID NO: 15695 - RNA, 22 nt, Artificial Sequence
  GATA2 Guide RNA
cuacacaccaccccauccccau

SEQ ID NO: 15696 - RNA, 22 nt, Artificial Sequence
  GATA2 Guide RNA
cugcuacacaccaccccauccc

SEQ ID NO: 15697 - RNA, 22 nt, Artificial Sequence
  GATA2 Guide RNA
gagggguagauggggauggggu

SEQ ID NO: 15698 - RNA, 22 nt, Artificial Sequence
  GATA2 Guide RNA
gauggggaugggguggugugua

SEQ ID NO: 15699 - RNA, 22 nt, Artificial Sequence
  GATA2 Guide RNA
gcacauaggagggguagauggg

SEQ ID NO: 15700 - RNA, 22 nt, Artificial Sequence
  GATA2 Guide RNA
gccgccggcacauaggaggggu

SEQ ID NO: 15701 - RNA, 22 nt, Artificial Sequence
  GATA2 Guide RNA
gccggcacauaggagggguaga

SEQ ID NO: 15702 - RNA, 22 nt, Artificial Sequence
  GATA2 Guide RNA
gcuacacaccaccccaucccca

SEQ ID NO: 15703 - RNA, 22 nt, Artificial Sequence
  GATA2 Guide RNA
ggagggguagauggggaugggg

SEQ ID NO: 15704 - RNA, 22 nt, Artificial Sequence
  GATA2 Guide RNA
ggcacauaggagggguagaugg

SEQ ID NO: 15705 - RNA, 22 nt, Artificial Sequence
  GATA2 Guide RNA
gggguagauggggauggggugg

SEQ ID NO: 15706 - RNA, 22 nt, Artificial Sequence
  GATA2 Guide RNA
ggguagauggggaugggguggu

SEQ ID NO: 15707 - RNA, 22 nt, Artificial Sequence
  GATA2 Guide RNA
gguagauggggaugggguggug

SEQ ID NO: 15708 - RNA, 22 nt, Artificial Sequence
  GATA2 Guide RNA
guagauggggaugggguggugu

SEQ ID NO: 15709 - RNA, 22 nt, Artificial Sequence
  GATA2 Guide RNA
uacacaccaccccauccccauc

SEQ ID NO: 15710 - RNA, 22 nt, Artificial Sequence
  GATA2 Guide RNA
uagauggggaugggguggugug

SEQ ID NO: 15711 - RNA, 22 nt, Artificial Sequence
  GATA2 Guide RNA
uaggagggguagauggggaugg

SEQ ID NO: 15712 - RNA, 22 nt, Artificial Sequence
  GATA2 Guide RNA
uccccaucuaccccuccuaugu

SEQ ID NO: 15713 - RNA, 22 nt, Artificial Sequence
  GATA2 Guide RNA
ugcuacacaccaccccaucccc

SEQ ID NO: 15714 - RNA, 20 nt, Artificial Sequence
  GATA2 Guide RNA
acacagcaccccauccccac

SEQ ID NO: 15715 - RNA, 20 nt, Artificial Sequence
  GATA2 Guide RNA
acagcaccccauccccaccu

SEQ ID NO: 15716 - RNA, 20 nt, Artificial Sequence
  GATA2 Guide RNA
acccagccugcuacacagca

SEQ ID NO: 15717 - RNA, 20 nt, Artificial Sequence
  GATA2 Guide RNA
agcaccccauccccaccuac

SEQ ID NO: 15718 - RNA, 20 nt, Artificial Sequence
  GATA2 Guide RNA
agccugcuacacagcacccc

SEQ ID NO: 15719 - RNA, 20 nt, Artificial Sequence
  GATA2 Guide RNA
agggguagguggggaugggg

SEQ ID NO: 15720 - RNA, 20 nt, Artificial Sequence
  GATA2 Guide RNA
agguggggauggggugcugu

SEQ ID NO: 15721 - RNA, 20 nt, Artificial Sequence
  GATA2 Guide RNA
augggcacccagccugcuac

SEQ ID NO: 15722 - RNA, 20 nt, Artificial Sequence
  GATA2 Guide RNA
auggggugcuguguagcagg

SEQ ID NO: 15723 - RNA, 20 nt, Artificial Sequence
  GATA2 Guide RNA
cacagcaccccauccccacc

SEQ ID NO: 15724 - RNA, 20 nt, Artificial Sequence
  GATA2 Guide RNA
cacccagccugcuacacagc

SEQ ID NO: 15725 - RNA, 20 nt, Artificial Sequence
  GATA2 Guide RNA
cagcaccccauccccaccua

SEQ ID NO: 15726 - RNA, 20 nt, Artificial Sequence
  GATA2 Guide RNA
cagccugcuacacagcaccc

SEQ ID NO: 15727 - RNA, 20 nt, Artificial Sequence
  GATA2 Guide RNA
ccagccugcuacacagcacc

SEQ ID NO: 15728 - RNA, 20 nt, Artificial Sequence
  GATA2 Guide RNA
cccagccugcuacacagcac

SEQ ID NO: 15729 - RNA, 20 nt, Artificial Sequence
  GATA2 Guide RNA
ccugcuacacagcaccccau

SEQ ID NO: 15730 - RNA, 20 nt, Artificial Sequence
  GATA2 Guide RNA
cuacacagcaccccaucccc

SEQ ID NO: 15731 - RNA, 20 nt, Artificial Sequence
  GATA2 Guide RNA
cugcuacacagcaccccauc

SEQ ID NO: 15732 - RNA, 20 nt, Artificial Sequence
  GATA2 Guide RNA
cuguguagcaggcugggugc

SEQ ID NO: 15733 - RNA, 20 nt, Artificial Sequence
  GATA2 Guide RNA
gauggggugcuguguagcag

SEQ ID NO: 15734 - RNA, 20 nt, Artificial Sequence
  GATA2 Guide RNA
gcacccagccugcuacacag

SEQ ID NO: 15735 - RNA, 20 nt, Artificial Sequence
  GATA2 Guide RNA
gccugcuacacagcacccca

SEQ ID NO: 15736 - RNA, 20 nt, Artificial Sequence
  GATA2 Guide RNA
gcuacacagcaccccauccc

SEQ ID NO: 15737 - RNA, 20 nt, Artificial Sequence
  GATA2 Guide RNA
gcuguguagcaggcugggug

SEQ ID NO: 15738 - RNA, 20 nt, Artificial Sequence
  GATA2 Guide RNA
ggauggggugcuguguagca

SEQ ID NO: 15739 - RNA, 20 nt, Artificial Sequence
  GATA2 Guide RNA
ggcacccagccugcuacaca

SEQ ID NO: 15740 - RNA, 20 nt, Artificial Sequence
  GATA2 Guide RNA
gggauggggugcuguguagc

SEQ ID NO: 15741 - RNA, 20 nt, Artificial Sequence
  GATA2 Guide RNA
gggcacccagccugcuacac

SEQ ID NO: 15742 - RNA, 20 nt, Artificial Sequence
  GATA2 Guide RNA
ggggauggggugcuguguag

SEQ ID NO: 15743 - RNA, 20 nt, Artificial Sequence
  GATA2 Guide RNA
gggguagguggggauggggu

SEQ ID NO: 15744 - RNA, 20 nt, Artificial Sequence
  GATA2 Guide RNA
ggggugcuguguagcaggcu

SEQ ID NO: 15745 - RNA, 20 nt, Artificial Sequence
  GATA2 Guide RNA
ggguagguggggauggggug

SEQ ID NO: 15746 - RNA, 20 nt, Artificial Sequence
  GATA2 Guide RNA
gggugcuguguagcaggcug

SEQ ID NO: 15747 - RNA, 20 nt, Artificial Sequence
  GATA2 Guide RNA
gguagguggggauggggugc

SEQ ID NO: 15748 - RNA, 20 nt, Artificial Sequence
  GATA2 Guide RNA
ggugcuguguagcaggcugg

SEQ ID NO: 15749 - RNA, 20 nt, Artificial Sequence
  GATA2 Guide RNA
gguggggauggggugcugug

SEQ ID NO: 15750 - RNA, 20 nt, Artificial Sequence
  GATA2 Guide RNA
guagguggggauggggugcu

SEQ ID NO: 15751 - RNA, 20 nt, Artificial Sequence
  GATA2 Guide RNA
gugcuguguagcaggcuggg

SEQ ID NO: 15752 - RNA, 20 nt, Artificial Sequence
  GATA2 Guide RNA
guggggauggggugcugugu

SEQ ID NO: 15753 - RNA, 20 nt, Artificial Sequence
  GATA2 Guide RNA
uacacagcaccccaucccca

SEQ ID NO: 15754 - RNA, 20 nt, Artificial Sequence
  GATA2 Guide RNA
uagguggggauggggugcug

SEQ ID NO: 15755 - RNA, 20 nt, Artificial Sequence
  GATA2 Guide RNA
ugcuacacagcaccccaucc

SEQ ID NO: 15756 - RNA, 20 nt, Artificial Sequence
  GATA2 Guide RNA
ugcuguguagcaggcugggu

SEQ ID NO: 15757 - RNA, 20 nt, Artificial Sequence
  GATA2 Guide RNA
ugggcacccagccugcuaca

SEQ ID NO: 15758 - RNA, 20 nt, Artificial Sequence
  GATA2 Guide RNA
uggggauggggugcugugua

SEQ ID NO: 15759 - RNA, 20 nt, Artificial Sequence
  GATA2 Guide RNA
uggggugcuguguagcaggc

SEQ ID NO: 15760 - RNA, 21 nt, Artificial Sequence
  GATA2 Guide RNA
acacagcaccccauccccacc

SEQ ID NO: 15761 - RNA, 21 nt, Artificial Sequence
  GATA2 Guide RNA
acagcaccccauccccaccua

SEQ ID NO: 15762 - RNA, 21 nt, Artificial Sequence
  GATA2 Guide RNA
acccagccugcuacacagcac

SEQ ID NO: 15763 - RNA, 21 nt, Artificial Sequence
  GATA2 Guide RNA
agcaccccauccccaccuacc

SEQ ID NO: 15764 - RNA, 21 nt, Artificial Sequence
  GATA2 Guide RNA
agccugcuacacagcacccca

SEQ ID NO: 15765 - RNA, 21 nt, Artificial Sequence
  GATA2 Guide RNA
agggguagguggggauggggu

SEQ ID NO: 15766 - RNA, 21 nt, Artificial Sequence
  GATA2 Guide RNA
agguggggauggggugcugug

SEQ ID NO: 15767 - RNA, 21 nt, Artificial Sequence
  GATA2 Guide RNA
augggcacccagccugcuaca

SEQ ID NO: 15768 - RNA, 21 nt, Artificial Sequence
  GATA2 Guide RNA
auggggugcuguguagcaggc

SEQ ID NO: 15769 - RNA, 21 nt, Artificial Sequence
  GATA2 Guide RNA
cacagcaccccauccccaccu

SEQ ID NO: 15770 - RNA, 21 nt, Artificial Sequence
  GATA2 Guide RNA
cacccagccugcuacacagca

SEQ ID NO: 15771 - RNA, 21 nt, Artificial Sequence
  GATA2 Guide RNA
cagcaccccauccccaccuac

SEQ ID NO: 15772 - RNA, 21 nt, Artificial Sequence
  GATA2 Guide RNA
cagccugcuacacagcacccc

SEQ ID NO: 15773 - RNA, 21 nt, Artificial Sequence
  GATA2 Guide RNA
ccagccugcuacacagcaccc

SEQ ID NO: 15774 - RNA, 21 nt, Artificial Sequence
  GATA2 Guide RNA
cccagccugcuacacagcacc

SEQ ID NO: 15775 - RNA, 21 nt, Artificial Sequence
  GATA2 Guide RNA
ccugcuacacagcaccccauc

SEQ ID NO: 15776 - RNA, 21 nt, Artificial Sequence
  GATA2 Guide RNA
cuacacagcaccccaucccca

SEQ ID NO: 15777 - RNA, 21 nt, Artificial Sequence
  GATA2 Guide RNA
cugcuacacagcaccccaucc

SEQ ID NO: 15778 - RNA, 21 nt, Artificial Sequence
  GATA2 Guide RNA
cuguguagcaggcugggugcc

SEQ ID NO: 15779 - RNA, 21 nt, Artificial Sequence
  GATA2 Guide RNA
gagggguagguggggaugggg

SEQ ID NO: 15780 - RNA, 21 nt, Artificial Sequence
  GATA2 Guide RNA
gauggggugcuguguagcagg

SEQ ID NO: 15781 - RNA, 21 nt, Artificial Sequence
  GATA2 Guide RNA
gcacccagccugcuacacagc

SEQ ID NO: 15782 - RNA, 21 nt, Artificial Sequence
  GATA2 Guide RNA
gccugcuacacagcaccccau

SEQ ID NO: 15783 - RNA, 21 nt, Artificial Sequence
  GATA2 Guide RNA
gcuacacagcaccccaucccc

SEQ ID NO: 15784 - RNA, 21 nt, Artificial Sequence
  GATA2 Guide RNA
gcuguguagcaggcugggugc

SEQ ID NO: 15785 - RNA, 21 nt, Artificial Sequence
  GATA2 Guide RNA
ggauggggugcuguguagcag

SEQ ID NO: 15786 - RNA, 21 nt, Artificial Sequence
  GATA2 Guide RNA
ggcacccagccugcuacacag

SEQ ID NO: 15787 - RNA, 21 nt, Artificial Sequence
  GATA2 Guide RNA
gggauggggugcuguguagca

SEQ ID NO: 15788 - RNA, 21 nt, Artificial Sequence
  GATA2 Guide RNA
gggcacccagccugcuacaca

SEQ ID NO: 15789 - RNA, 21 nt, Artificial Sequence
  GATA2 Guide RNA
ggggauggggugcuguguagc

SEQ ID NO: 15790 - RNA, 21 nt, Artificial Sequence
  GATA2 Guide RNA
gggguagguggggauggggug

SEQ ID NO: 15791 - RNA, 21 nt, Artificial Sequence
  GATA2 Guide RNA
ggggugcuguguagcaggcug

SEQ ID NO: 15792 - RNA, 21 nt, Artificial Sequence
  GATA2 Guide RNA
ggguagguggggauggggugc

SEQ ID NO: 15793 - RNA, 21 nt, Artificial Sequence
  GATA2 Guide RNA
gggugcuguguagcaggcugg

SEQ ID NO: 15794 - RNA, 21 nt, Artificial Sequence
  GATA2 Guide RNA
gguagguggggauggggugcu

SEQ ID NO: 15795 - RNA, 21 nt, Artificial Sequence
  GATA2 Guide RNA
ggugcuguguagcaggcuggg

SEQ ID NO: 15796 - RNA, 21 nt, Artificial Sequence
  GATA2 Guide RNA
gguggggauggggugcugugu

SEQ ID NO: 15797 - RNA, 21 nt, Artificial Sequence
  GATA2 Guide RNA
guagguggggauggggugcug

SEQ ID NO: 15798 - RNA, 21 nt, Artificial Sequence
  GATA2 Guide RNA
gugcuguguagcaggcugggu

SEQ ID NO: 15799 - RNA, 21 nt, Artificial Sequence
  GATA2 Guide RNA
guggggauggggugcugugua

SEQ ID NO: 15800 - RNA, 21 nt, Artificial Sequence
  GATA2 Guide RNA
uacacagcaccccauccccac

SEQ ID NO: 15801 - RNA, 21 nt, Artificial Sequence
  GATA2 Guide RNA
uagguggggauggggugcugu

SEQ ID NO: 15802 - RNA, 21 nt, Artificial Sequence
  GATA2 Guide RNA
uaugggcacccagccugcuac

SEQ ID NO: 15803 - RNA, 21 nt, Artificial Sequence
  GATA2 Guide RNA
ugcuacacagcaccccauccc

SEQ ID NO: 15804 - RNA, 21 nt, Artificial Sequence
  GATA2 Guide RNA
ugcuguguagcaggcugggug

SEQ ID NO: 15805 - RNA, 21 nt, Artificial Sequence
  GATA2 Guide RNA
ugggcacccagccugcuacac

SEQ ID NO: 15806 - RNA, 21 nt, Artificial Sequence
  GATA2 Guide RNA
uggggauggggugcuguguag

SEQ ID NO: 15807 - RNA, 21 nt, Artificial Sequence
  GATA2 Guide RNA
uggggugcuguguagcaggcu

SEQ ID NO: 15808 - RNA, 22 nt, Artificial Sequence
  GATA2 Guide RNA
acacagcaccccauccccaccu

SEQ ID NO: 15809 - RNA, 22 nt, Artificial Sequence
  GATA2 Guide RNA
acagcaccccauccccaccuac

SEQ ID NO: 15810 - RNA, 22 nt, Artificial Sequence
  GATA2 Guide RNA
acccagccugcuacacagcacc

SEQ ID NO: 15811 - RNA, 22 nt, Artificial Sequence
  GATA2 Guide RNA
agcaccccauccccaccuaccc

SEQ ID NO: 15812 - RNA, 22 nt, Artificial Sequence
  GATA2 Guide RNA
agccugcuacacagcaccccau

SEQ ID NO: 15813 - RNA, 22 nt, Artificial Sequence
  GATA2 Guide RNA
agggguagguggggauggggug

SEQ ID NO: 15814 - RNA, 22 nt, Artificial Sequence
  GATA2 Guide RNA
agguggggauggggugcugugu

SEQ ID NO: 15815 - RNA, 22 nt, Artificial Sequence
  GATA2 Guide RNA
augggcacccagccugcuacac

SEQ ID NO: 15816 - RNA, 22 nt, Artificial Sequence
  GATA2 Guide RNA
auggggugcuguguagcaggcu

SEQ ID NO: 15817 - RNA, 22 nt, Artificial Sequence
  GATA2 Guide RNA
cacagcaccccauccccaccua

SEQ ID NO: 15818 - RNA, 22 nt, Artificial Sequence
  GATA2 Guide RNA
cacccagccugcuacacagcac

SEQ ID NO: 15819 - RNA, 22 nt, Artificial Sequence
  GATA2 Guide RNA
cagcaccccauccccaccuacc

SEQ ID NO: 15820 - RNA, 22 nt, Artificial Sequence
  GATA2 Guide RNA
cagccugcuacacagcacccca

SEQ ID NO: 15821 - RNA, 22 nt, Artificial Sequence
  GATA2 Guide RNA
ccagccugcuacacagcacccc

SEQ ID NO: 15822 - RNA, 22 nt, Artificial Sequence
  GATA2 Guide RNA
cccagccugcuacacagcaccc

SEQ ID NO: 15823 - RNA, 22 nt, Artificial Sequence
  GATA2 Guide RNA
ccugcuacacagcaccccaucc

SEQ ID NO: 15824 - RNA, 22 nt, Artificial Sequence
  GATA2 Guide RNA
cuacacagcaccccauccccac

SEQ ID NO: 15825 - RNA, 22 nt, Artificial Sequence
  GATA2 Guide RNA
cuaugggcacccagccugcuac

SEQ ID NO: 15826 - RNA, 22 nt, Artificial Sequence
  GATA2 Guide RNA
cugcuacacagcaccccauccc

SEQ ID NO: 15827 - RNA, 22 nt, Artificial Sequence
  GATA2 Guide RNA
cuguguagcaggcugggugccc

SEQ ID NO: 15828 - RNA, 22 nt, Artificial Sequence
  GATA2 Guide RNA
gagggguagguggggauggggu

SEQ ID NO: 15829 - RNA, 22 nt, Artificial Sequence
  GATA2 Guide RNA
gauggggugcuguguagcaggc

SEQ ID NO: 15830 - RNA, 22 nt, Artificial Sequence
  GATA2 Guide RNA
gcacccagccugcuacacagca

SEQ ID NO: 15831 - RNA, 22 nt, Artificial Sequence
  GATA2 Guide RNA
gccugcuacacagcaccccauc

SEQ ID NO: 15832 - RNA, 22 nt, Artificial Sequence
  GATA2 Guide RNA
gcuacacagcaccccaucccca

SEQ ID NO: 15833 - RNA, 22 nt, Artificial Sequence
  GATA2 Guide RNA
gcuguguagcaggcugggugcc

SEQ ID NO: 15834 - RNA, 22 nt, Artificial Sequence
  GATA2 Guide RNA
ggagggguagguggggaugggg

SEQ ID NO: 15835 - RNA, 22 nt, Artificial Sequence
  GATA2 Guide RNA
ggauggggugcuguguagcagg

SEQ ID NO: 15836 - RNA, 22 nt, Artificial Sequence
  GATA2 Guide RNA
ggcacccagccugcuacacagc

SEQ ID NO: 15837 - RNA, 22 nt, Artificial Sequence
  GATA2 Guide RNA
gggauggggugcuguguagcag

SEQ ID NO: 15838 - RNA, 22 nt, Artificial Sequence
  GATA2 Guide RNA
gggcacccagccugcuacacag

SEQ ID NO: 15839 - RNA, 22 nt, Artificial Sequence
  GATA2 Guide RNA
ggggauggggugcuguguagca

SEQ ID NO: 15840 - RNA, 22 nt, Artificial Sequence
  GATA2 Guide RNA
gggguagguggggauggggugc

SEQ ID NO: 15841 - RNA, 22 nt, Artificial Sequence
  GATA2 Guide RNA
ggggugcuguguagcaggcugg

SEQ ID NO: 15842 - RNA, 22 nt, Artificial Sequence
  GATA2 Guide RNA
ggguagguggggauggggugcu

SEQ ID NO: 15843 - RNA, 22 nt, Artificial Sequence
  GATA2 Guide RNA
gggugcuguguagcaggcuggg

SEQ ID NO: 15844 - RNA, 22 nt, Artificial Sequence
  GATA2 Guide RNA
gguagguggggauggggugcug

SEQ ID NO: 15845 - RNA, 22 nt, Artificial Sequence
  GATA2 Guide RNA
ggugcuguguagcaggcugggu

SEQ ID NO: 15846 - RNA, 22 nt, Artificial Sequence
  GATA2 Guide RNA
gguggggauggggugcugugua

SEQ ID NO: 15847 - RNA, 22 nt, Artificial Sequence
  GATA2 Guide RNA
guagguggggauggggugcugu

SEQ ID NO: 15848 - RNA, 22 nt, Artificial Sequence
  GATA2 Guide RNA
gugcuguguagcaggcugggug

SEQ ID NO: 15849 - RNA, 22 nt, Artificial Sequence
  GATA2 Guide RNA
guggggauggggugcuguguag

SEQ ID NO: 15850 - RNA, 22 nt, Artificial Sequence
  GATA2 Guide RNA
uacacagcaccccauccccacc

SEQ ID NO: 15851 - RNA, 22 nt, Artificial Sequence
  GATA2 Guide RNA
uagguggggauggggugcugug

SEQ ID NO: 15852 - RNA, 22 nt, Artificial Sequence
  GATA2 Guide RNA
uaugggcacccagccugcuaca

SEQ ID NO: 15853 - RNA, 22 nt, Artificial Sequence
  GATA2 Guide RNA
ugcuacacagcaccccaucccc

SEQ ID NO: 15854 - RNA, 22 nt, Artificial Sequence
  GATA2 Guide RNA
ugcuguguagcaggcugggugc

SEQ ID NO: 15855 - RNA, 22 nt, Artificial Sequence
  GATA2 Guide RNA
ugggcacccagccugcuacaca

SEQ ID NO: 15856 - RNA, 22 nt, Artificial Sequence
  GATA2 Guide RNA
uggggauggggugcuguguagc

SEQ ID NO: 15857 - RNA, 22 nt, Artificial Sequence
  GATA2 Guide RNA
uggggugcuguguagcaggcug

SEQ ID NO: 15858 - RNA, 20 nt, Artificial Sequence
  GATA2 Guide RNA
acauaccaccccauccccac

SEQ ID NO: 15859 - RNA, 20 nt, Artificial Sequence
  GATA2 Guide RNA
acccagccugcuacauacca

SEQ ID NO: 15860 - RNA, 20 nt, Artificial Sequence
  GATA2 Guide RNA
agccugcuacauaccacccc

SEQ ID NO: 15861 - RNA, 20 nt, Artificial Sequence
  GATA2 Guide RNA
agguggggauggggugguau

SEQ ID NO: 15862 - RNA, 20 nt, Artificial Sequence
  GATA2 Guide RNA
auaccaccccauccccaccu

SEQ ID NO: 15863 - RNA, 20 nt, Artificial Sequence
  GATA2 Guide RNA
auggggugguauguagcagg

SEQ ID NO: 15864 - RNA, 20 nt, Artificial Sequence
  GATA2 Guide RNA
auguagcaggcugggugccc

SEQ ID NO: 15865 - RNA, 20 nt, Artificial Sequence
  GATA2 Guide RNA
cacccagccugcuacauacc

SEQ ID NO: 15866 - RNA, 20 nt, Artificial Sequence
  GATA2 Guide RNA
cagccugcuacauaccaccc

SEQ ID NO: 15867 - RNA, 20 nt, Artificial Sequence
  GATA2 Guide RNA
cauaccaccccauccccacc

SEQ ID NO: 15868 - RNA, 20 nt, Artificial Sequence
  GATA2 Guide RNA
ccagccugcuacauaccacc

SEQ ID NO: 15869 - RNA, 20 nt, Artificial Sequence
  GATA2 Guide RNA
cccagccugcuacauaccac

SEQ ID NO: 15870 - RNA, 20 nt, Artificial Sequence
  GATA2 Guide RNA
ccugcuacauaccaccccau

SEQ ID NO: 15871 - RNA, 20 nt, Artificial Sequence
  GATA2 Guide RNA
cuacauaccaccccaucccc

SEQ ID NO: 15872 - RNA, 20 nt, Artificial Sequence
  GATA2 Guide RNA
cuaugggcacccagccugcu

SEQ ID NO: 15873 - RNA, 20 nt, Artificial Sequence
  GATA2 Guide RNA
cugcuacauaccaccccauc

SEQ ID NO: 15874 - RNA, 20 nt, Artificial Sequence
  GATA2 Guide RNA
gauggggugguauguagcag

SEQ ID NO: 15875 - RNA, 20 nt, Artificial Sequence
  GATA2 Guide RNA
gcacccagccugcuacauac

SEQ ID NO: 15876 - RNA, 20 nt, Artificial Sequence
  GATA2 Guide RNA
gccugcuacauaccacccca

SEQ ID NO: 15877 - RNA, 20 nt, Artificial Sequence
  GATA2 Guide RNA
gcuacauaccaccccauccc

SEQ ID NO: 15878 - RNA, 20 nt, Artificial Sequence
  GATA2 Guide RNA
ggauggggugguauguagca

SEQ ID NO: 15879 - RNA, 20 nt, Artificial Sequence
  GATA2 Guide RNA
ggcacccagccugcuacaua

SEQ ID NO: 15880 - RNA, 20 nt, Artificial Sequence
  GATA2 Guide RNA
gggauggggugguauguagc

SEQ ID NO: 15881 - RNA, 20 nt, Artificial Sequence
  GATA2 Guide RNA
gggcacccagccugcuacau

SEQ ID NO: 15882 - RNA, 20 nt, Artificial Sequence
  GATA2 Guide RNA
ggggauggggugguauguag

SEQ ID NO: 15883 - RNA, 20 nt, Artificial Sequence
  GATA2 Guide RNA
ggggugguauguagcaggcu

SEQ ID NO: 15884 - RNA, 20 nt, Artificial Sequence
  GATA2 Guide RNA
gggugguauguagcaggcug

SEQ ID NO: 15885 - RNA, 20 nt, Artificial Sequence
  GATA2 Guide RNA
gguagguggggauggggugg

SEQ ID NO: 15886 - RNA, 20 nt, Artificial Sequence
  GATA2 Guide RNA
gguauguagcaggcugggug

SEQ ID NO: 15887 - RNA, 20 nt, Artificial Sequence
  GATA2 Guide RNA
gguggggauggggugguaug

SEQ ID NO: 15888 - RNA, 20 nt, Artificial Sequence
  GATA2 Guide RNA
ggugguauguagcaggcugg

SEQ ID NO: 15889 - RNA, 20 nt, Artificial Sequence
  GATA2 Guide RNA
guagguggggaugggguggu

SEQ ID NO: 15890 - RNA, 20 nt, Artificial Sequence
  GATA2 Guide RNA
guauguagcaggcugggugc

SEQ ID NO: 15891 - RNA, 20 nt, Artificial Sequence
  GATA2 Guide RNA
guggggauggggugguaugu

SEQ ID NO: 15892 - RNA, 20 nt, Artificial Sequence
  GATA2 Guide RNA
gugguauguagcaggcuggg

SEQ ID NO: 15893 - RNA, 20 nt, Artificial Sequence
  GATA2 Guide RNA
uacauaccaccccaucccca

SEQ ID NO: 15894 - RNA, 20 nt, Artificial Sequence
  GATA2 Guide RNA
uagguggggaugggguggua

SEQ ID NO: 15895 - RNA, 20 nt, Artificial Sequence
  GATA2 Guide RNA
uaugggcacccagccugcua

SEQ ID NO: 15896 - RNA, 20 nt, Artificial Sequence
  GATA2 Guide RNA
uauguagcaggcugggugcc

SEQ ID NO: 15897 - RNA, 20 nt, Artificial Sequence
  GATA2 Guide RNA
ugcuacauaccaccccaucc

SEQ ID NO: 15898 - RNA, 20 nt, Artificial Sequence
  GATA2 Guide RNA
uggggauggggugguaugua

SEQ ID NO: 15899 - RNA, 20 nt, Artificial Sequence
  GATA2 Guide RNA
uggggugguauguagcaggc

SEQ ID NO: 15900 - RNA, 20 nt, Artificial Sequence
  GATA2 Guide RNA
ugguauguagcaggcugggu

SEQ ID NO: 15901 - RNA, 21 nt, Artificial Sequence
  GATA2 Guide RNA
acauaccaccccauccccacc

SEQ ID NO: 15902 - RNA, 21 nt, Artificial Sequence
  GATA2 Guide RNA
acccagccugcuacauaccac

SEQ ID NO: 15903 - RNA, 21 nt, Artificial Sequence
  GATA2 Guide RNA
acuaugggcacccagccugcu

SEQ ID NO: 15904 - RNA, 21 nt, Artificial Sequence
  GATA2 Guide RNA
agccugcuacauaccacccca

SEQ ID NO: 15905 - RNA, 21 nt, Artificial Sequence
  GATA2 Guide RNA
agguggggauggggugguaug

SEQ ID NO: 15906 - RNA, 21 nt, Artificial Sequence
  GATA2 Guide RNA
auaccaccccauccccaccua

SEQ ID NO: 15907 - RNA, 21 nt, Artificial Sequence
  GATA2 Guide RNA
auggggugguauguagcaggc

SEQ ID NO: 15908 - RNA, 21 nt, Artificial Sequence
  GATA2 Guide RNA
auguagcaggcugggugccca

SEQ ID NO: 15909 - RNA, 21 nt, Artificial Sequence
  GATA2 Guide RNA
cacccagccugcuacauacca

SEQ ID NO: 15910 - RNA, 21 nt, Artificial Sequence
  GATA2 Guide RNA
cagccugcuacauaccacccc

SEQ ID NO: 15911 - RNA, 21 nt, Artificial Sequence
  GATA2 Guide RNA
cauaccaccccauccccaccu

SEQ ID NO: 15912 - RNA, 21 nt, Artificial Sequence
  GATA2 Guide RNA
ccagccugcuacauaccaccc

SEQ ID NO: 15913 - RNA, 21 nt, Artificial Sequence
  GATA2 Guide RNA
cccagccugcuacauaccacc

SEQ ID NO: 15914 - RNA, 21 nt, Artificial Sequence
  GATA2 Guide RNA
ccugcuacauaccaccccauc

SEQ ID NO: 15915 - RNA, 21 nt, Artificial Sequence
  GATA2 Guide RNA
cuacauaccaccccaucccca

SEQ ID NO: 15916 - RNA, 21 nt, Artificial Sequence
  GATA2 Guide RNA
cuaugggcacccagccugcua

SEQ ID NO: 15917 - RNA, 21 nt, Artificial Sequence
  GATA2 Guide RNA
cugcuacauaccaccccaucc

SEQ ID NO: 15918 - RNA, 21 nt, Artificial Sequence
  GATA2 Guide RNA
gauggggugguauguagcagg

SEQ ID NO: 15919 - RNA, 21 nt, Artificial Sequence
  GATA2 Guide RNA
gcacccagccugcuacauacc

SEQ ID NO: 15920 - RNA, 21 nt, Artificial Sequence
  GATA2 Guide RNA
gccugcuacauaccaccccau

SEQ ID NO: 15921 - RNA, 21 nt, Artificial Sequence
  GATA2 Guide RNA
gcuacauaccaccccaucccc

SEQ ID NO: 15922 - RNA, 21 nt, Artificial Sequence
  GATA2 Guide RNA
ggauggggugguauguagcag

SEQ ID NO: 15923 - RNA, 21 nt, Artificial Sequence
  GATA2 Guide RNA
ggcacccagccugcuacauac

SEQ ID NO: 15924 - RNA, 21 nt, Artificial Sequence
  GATA2 Guide RNA
gggauggggugguauguagca

SEQ ID NO: 15925 - RNA, 21 nt, Artificial Sequence
  GATA2 Guide RNA
gggcacccagccugcuacaua

SEQ ID NO: 15926 - RNA, 21 nt, Artificial Sequence
  GATA2 Guide RNA
ggggauggggugguauguagc

SEQ ID NO: 15927 - RNA, 21 nt, Artificial Sequence
  GATA2 Guide RNA
ggggugguauguagcaggcug

SEQ ID NO: 15928 - RNA, 21 nt, Artificial Sequence
  GATA2 Guide RNA
ggguagguggggauggggugg

SEQ ID NO: 15929 - RNA, 21 nt, Artificial Sequence
  GATA2 Guide RNA
gggugguauguagcaggcugg

SEQ ID NO: 15930 - RNA, 21 nt, Artificial Sequence
  GATA2 Guide RNA
gguagguggggaugggguggu

SEQ ID NO: 15931 - RNA, 21 nt, Artificial Sequence
  GATA2 Guide RNA
gguauguagcaggcugggugc

SEQ ID NO: 15932 - RNA, 21 nt, Artificial Sequence
  GATA2 Guide RNA
gguggggauggggugguaugu

SEQ ID NO: 15933 - RNA, 21 nt, Artificial Sequence
  GATA2 Guide RNA
ggugguauguagcaggcuggg

SEQ ID NO: 15934 - RNA, 21 nt, Artificial Sequence
  GATA2 Guide RNA
guagguggggaugggguggua

SEQ ID NO: 15935 - RNA, 21 nt, Artificial Sequence
  GATA2 Guide RNA
guauguagcaggcugggugcc

SEQ ID NO: 15936 - RNA, 21 nt, Artificial Sequence
  GATA2 Guide RNA
guggggauggggugguaugua

SEQ ID NO: 15937 - RNA, 21 nt, Artificial Sequence
  GATA2 Guide RNA
gugguauguagcaggcugggu

SEQ ID NO: 15938 - RNA, 21 nt, Artificial Sequence
  GATA2 Guide RNA
uacauaccaccccauccccac

SEQ ID NO: 15939 - RNA, 21 nt, Artificial Sequence
  GATA2 Guide RNA
uagguggggauggggugguau

SEQ ID NO: 15940 - RNA, 21 nt, Artificial Sequence
  GATA2 Guide RNA
uauguagcaggcugggugccc

SEQ ID NO: 15941 - RNA, 21 nt, Artificial Sequence
  GATA2 Guide RNA
ugcuacauaccaccccauccc

SEQ ID NO: 15942 - RNA, 21 nt, Artificial Sequence
  GATA2 Guide RNA
ugggcacccagccugcuacau

SEQ ID NO: 15943 - RNA, 21 nt, Artificial Sequence
  GATA2 Guide RNA
uggggauggggugguauguag

SEQ ID NO: 15944 - RNA, 21 nt, Artificial Sequence
  GATA2 Guide RNA
uggggugguauguagcaggcu

SEQ ID NO: 15945 - RNA, 21 nt, Artificial Sequence
  GATA2 Guide RNA
ugguauguagcaggcugggug

SEQ ID NO: 15946 - RNA, 22 nt, Artificial Sequence
  GATA2 Guide RNA
acauaccaccccauccccaccu

SEQ ID NO: 15947 - RNA, 22 nt, Artificial Sequence
  GATA2 Guide RNA
acccagccugcuacauaccacc

SEQ ID NO: 15948 - RNA, 22 nt, Artificial Sequence
  GATA2 Guide RNA
acuaugggcacccagccugcua

SEQ ID NO: 15949 - RNA, 22 nt, Artificial Sequence
  GATA2 Guide RNA
agccugcuacauaccaccccau

SEQ ID NO: 15950 - RNA, 22 nt, Artificial Sequence
  GATA2 Guide RNA
agguggggauggggugguaugu

SEQ ID NO: 15951 - RNA, 22 nt, Artificial Sequence
  GATA2 Guide RNA
auaccaccccauccccaccuac

SEQ ID NO: 15952 - RNA, 22 nt, Artificial Sequence
  GATA2 Guide RNA
augggcacccagccugcuacau

SEQ ID NO: 15953 - RNA, 22 nt, Artificial Sequence
  GATA2 Guide RNA
auggggugguauguagcaggcu

SEQ ID NO: 15954 - RNA, 22 nt, Artificial Sequence
  GATA2 Guide RNA
auguagcaggcugggugcccau

SEQ ID NO: 15955 - RNA, 22 nt, Artificial Sequence
  GATA2 Guide RNA
cacccagccugcuacauaccac

SEQ ID NO: 15956 - RNA, 22 nt, Artificial Sequence
  GATA2 Guide RNA
cagccugcuacauaccacccca

SEQ ID NO: 15957 - RNA, 22 nt, Artificial Sequence
  GATA2 Guide RNA
cauaccaccccauccccaccua

SEQ ID NO: 15958 - RNA, 22 nt, Artificial Sequence
  GATA2 Guide RNA
ccagccugcuacauaccacccc

SEQ ID NO: 15959 - RNA, 22 nt, Artificial Sequence
  GATA2 Guide RNA
cccagccugcuacauaccaccc

SEQ ID NO: 15960 - RNA, 22 nt, Artificial Sequence
  GATA2 Guide RNA
ccugcuacauaccaccccaucc

SEQ ID NO: 15961 - RNA, 22 nt, Artificial Sequence
  GATA2 Guide RNA
cuacauaccaccccauccccac

SEQ ID NO: 15962 - RNA, 22 nt, Artificial Sequence
  GATA2 Guide RNA
cugcuacauaccaccccauccc

SEQ ID NO: 15963 - RNA, 22 nt, Artificial Sequence
  GATA2 Guide RNA
gauggggugguauguagcaggc

SEQ ID NO: 15964 - RNA, 22 nt, Artificial Sequence
  GATA2 Guide RNA
gcacccagccugcuacauacca

SEQ ID NO: 15965 - RNA, 22 nt, Artificial Sequence
  GATA2 Guide RNA
gccugcuacauaccaccccauc

SEQ ID NO: 15966 - RNA, 22 nt, Artificial Sequence
  GATA2 Guide RNA
gcuacauaccaccccaucccca

SEQ ID NO: 15967 - RNA, 22 nt, Artificial Sequence
  GATA2 Guide RNA
ggauggggugguauguagcagg

SEQ ID NO: 15968 - RNA, 22 nt, Artificial Sequence
  GATA2 Guide RNA
ggcacccagccugcuacauacc

SEQ ID NO: 15969 - RNA, 22 nt, Artificial Sequence
  GATA2 Guide RNA
gggauggggugguauguagcag

SEQ ID NO: 15970 - RNA, 22 nt, Artificial Sequence
  GATA2 Guide RNA
gggcacccagccugcuacauac

SEQ ID NO: 15971 - RNA, 22 nt, Artificial Sequence
  GATA2 Guide RNA
ggggauggggugguauguagca

SEQ ID NO: 15972 - RNA, 22 nt, Artificial Sequence
  GATA2 Guide RNA
gggguagguggggauggggugg

SEQ ID NO: 15973 - RNA, 22 nt, Artificial Sequence
  GATA2 Guide RNA
ggggugguauguagcaggcugg

SEQ ID NO: 15974 - RNA, 22 nt, Artificial Sequence
  GATA2 Guide RNA
ggguagguggggaugggguggu

SEQ ID NO: 15975 - RNA, 22 nt, Artificial Sequence
  GATA2 Guide RNA
gggugguauguagcaggcuggg

SEQ ID NO: 15976 - RNA, 22 nt, Artificial Sequence
  GATA2 Guide RNA
gguagguggggaugggguggua

SEQ ID NO: 15977 - RNA, 22 nt, Artificial Sequence
  GATA2 Guide RNA
gguauguagcaggcugggugcc

SEQ ID NO: 15978 - RNA, 22 nt, Artificial Sequence
  GATA2 Guide RNA
gguggggauggggugguaugua

SEQ ID NO: 15979 - RNA, 22 nt, Artificial Sequence
  GATA2 Guide RNA
ggugguauguagcaggcugggu

SEQ ID NO: 15980 - RNA, 22 nt, Artificial Sequence
  GATA2 Guide RNA
guagguggggauggggugguau

SEQ ID NO: 15981 - RNA, 22 nt, Artificial Sequence
  GATA2 Guide RNA
guauguagcaggcugggugccc

SEQ ID NO: 15982 - RNA, 22 nt, Artificial Sequence
  GATA2 Guide RNA
guggggauggggugguauguag

SEQ ID NO: 15983 - RNA, 22 nt, Artificial Sequence
  GATA2 Guide RNA
gugguauguagcaggcugggug

SEQ ID NO: 15984 - RNA, 22 nt, Artificial Sequence
  GATA2 Guide RNA
uacauaccaccccauccccacc

SEQ ID NO: 15985 - RNA, 22 nt, Artificial Sequence
  GATA2 Guide RNA
uacuaugggcacccagccugcu

SEQ ID NO: 15986 - RNA, 22 nt, Artificial Sequence
  GATA2 Guide RNA
uagguggggauggggugguaug

SEQ ID NO: 15987 - RNA, 22 nt, Artificial Sequence
  GATA2 Guide RNA
uauguagcaggcugggugccca

SEQ ID NO: 15988 - RNA, 22 nt, Artificial Sequence
  GATA2 Guide RNA
ugcuacauaccaccccaucccc

SEQ ID NO: 15989 - RNA, 22 nt, Artificial Sequence
  GATA2 Guide RNA
ugggcacccagccugcuacaua

SEQ ID NO: 15990 - RNA, 22 nt, Artificial Sequence
  GATA2 Guide RNA
uggggauggggugguauguagc

SEQ ID NO: 15991 - RNA, 22 nt, Artificial Sequence
  GATA2 Guide RNA
uggggugguauguagcaggcug

SEQ ID NO: 15992 - RNA, 22 nt, Artificial Sequence
  GATA2 Guide RNA
ugguauguagcaggcugggugc

SEQ ID NO: 15993 - RNA, 20 nt, Artificial Sequence
  GATA2 Guide RNA
acccagccugcugcacacca

SEQ ID NO: 15994 - RNA, 20 nt, Artificial Sequence
  GATA2 Guide RNA
acuaugggcacccagccugc

SEQ ID NO: 15995 - RNA, 20 nt, Artificial Sequence
  GATA2 Guide RNA
agccugcugcacaccacccc

SEQ ID NO: 15996 - RNA, 20 nt, Artificial Sequence
  GATA2 Guide RNA
agguggggaugggguggugu

SEQ ID NO: 15997 - RNA, 20 nt, Artificial Sequence
  GATA2 Guide RNA
augggcacccagccugcugc

SEQ ID NO: 15998 - RNA, 20 nt, Artificial Sequence
  GATA2 Guide RNA
augggguggugugcagcagg

SEQ ID NO: 15999 - RNA, 20 nt, Artificial Sequence
  GATA2 Guide RNA
cacccagccugcugcacacc

SEQ ID NO: 16000 - RNA, 20 nt, Artificial Sequence
  GATA2 Guide RNA
cagcaggcugggugcccaua

SEQ ID NO: 16001 - RNA, 20 nt, Artificial Sequence
  GATA2 Guide RNA
cagccugcugcacaccaccc

SEQ ID NO: 16002 - RNA, 20 nt, Artificial Sequence
  GATA2 Guide RNA
ccagccugcugcacaccacc

SEQ ID NO: 16003 - RNA, 20 nt, Artificial Sequence
  GATA2 Guide RNA
cccagccugcugcacaccac

SEQ ID NO: 16004 - RNA, 20 nt, Artificial Sequence
  GATA2 Guide RNA
ccugcugcacaccaccccau

SEQ ID NO: 16005 - RNA, 20 nt, Artificial Sequence
  GATA2 Guide RNA
cuacuaugggcacccagccu

SEQ ID NO: 16006 - RNA, 20 nt, Artificial Sequence
  GATA2 Guide RNA
cugcacaccaccccaucccc

SEQ ID NO: 16007 - RNA, 20 nt, Artificial Sequence
  GATA2 Guide RNA
cugcugcacaccaccccauc

SEQ ID NO: 16008 - RNA, 20 nt, Artificial Sequence
  GATA2 Guide RNA
gaugggguggugugcagcag

SEQ ID NO: 16009 - RNA, 20 nt, Artificial Sequence
  GATA2 Guide RNA
gcacccagccugcugcacac

SEQ ID NO: 16010 - RNA, 20 nt, Artificial Sequence
  GATA2 Guide RNA
gcagcaggcugggugcccau

SEQ ID NO: 16011 - RNA, 20 nt, Artificial Sequence
  GATA2 Guide RNA
gccugcugcacaccacccca

SEQ ID NO: 16012 - RNA, 20 nt, Artificial Sequence
  GATA2 Guide RNA
gcugcacaccaccccauccc

SEQ ID NO: 16013 - RNA, 20 nt, Artificial Sequence
  GATA2 Guide RNA
ggaugggguggugugcagca

SEQ ID NO: 16014 - RNA, 20 nt, Artificial Sequence
  GATA2 Guide RNA
ggcacccagccugcugcaca

SEQ ID NO: 16015 - RNA, 20 nt, Artificial Sequence
  GATA2 Guide RNA
gggaugggguggugugcagc

SEQ ID NO: 16016 - RNA, 20 nt, Artificial Sequence
  GATA2 Guide RNA
gggcacccagccugcugcac

SEQ ID NO: 16017 - RNA, 20 nt, Artificial Sequence
  GATA2 Guide RNA
ggggaugggguggugugcag

SEQ ID NO: 16018 - RNA, 20 nt, Artificial Sequence
  GATA2 Guide RNA
gggguggugugcagcaggcu

SEQ ID NO: 16019 - RNA, 20 nt, Artificial Sequence
  GATA2 Guide RNA
ggguggugugcagcaggcug

SEQ ID NO: 16020 - RNA, 20 nt, Artificial Sequence
  GATA2 Guide RNA
gguggggaugggguggugug

SEQ ID NO: 16021 - RNA, 20 nt, Artificial Sequence
  GATA2 Guide RNA
gguggugugcagcaggcugg

SEQ ID NO: 16022 - RNA, 20 nt, Artificial Sequence
  GATA2 Guide RNA
ggugugcagcaggcugggug

SEQ ID NO: 16023 - RNA, 20 nt, Artificial Sequence
  GATA2 Guide RNA
gugcagcaggcugggugccc

SEQ ID NO: 16024 - RNA, 20 nt, Artificial Sequence
  GATA2 Guide RNA
guggggaugggguggugugc

SEQ ID NO: 16025 - RNA, 20 nt, Artificial Sequence
  GATA2 Guide RNA
guggugugcagcaggcuggg

SEQ ID NO: 16026 - RNA, 20 nt, Artificial Sequence
  GATA2 Guide RNA
gugugcagcaggcugggugc

SEQ ID NO: 16027 - RNA, 20 nt, Artificial Sequence
  GATA2 Guide RNA
uacuaugggcacccagccug

SEQ ID NO: 16028 - RNA, 20 nt, Artificial Sequence
  GATA2 Guide RNA
uagguggggaugggguggug

SEQ ID NO: 16029 - RNA, 20 nt, Artificial Sequence
  GATA2 Guide RNA
uaugggcacccagccugcug

SEQ ID NO: 16030 - RNA, 20 nt, Artificial Sequence
  GATA2 Guide RNA
ugcacaccaccccaucccca

SEQ ID NO: 16031 - RNA, 20 nt, Artificial Sequence
  GATA2 Guide RNA
ugcagcaggcugggugccca

SEQ ID NO: 16032 - RNA, 20 nt, Artificial Sequence
  GATA2 Guide RNA
ugcugcacaccaccccaucc

SEQ ID NO: 16033 - RNA, 20 nt, Artificial Sequence
  GATA2 Guide RNA
ugggcacccagccugcugca

SEQ ID NO: 16034 - RNA, 20 nt, Artificial Sequence
  GATA2 Guide RNA
uggggaugggguggugugca

SEQ ID NO: 16035 - RNA, 20 nt, Artificial Sequence
  GATA2 Guide RNA
ugggguggugugcagcaggc

SEQ ID NO: 16036 - RNA, 20 nt, Artificial Sequence
  GATA2 Guide RNA
uggugugcagcaggcugggu

SEQ ID NO: 16037 - RNA, 20 nt, Artificial Sequence
  GATA2 Guide RNA
ugugcagcaggcugggugcc

SEQ ID NO: 16038 - RNA, 21 nt, Artificial Sequence
  GATA2 Guide RNA
acccagccugcugcacaccac

SEQ ID NO: 16039 - RNA, 21 nt, Artificial Sequence
  GATA2 Guide RNA
agccugcugcacaccacccca

SEQ ID NO: 16040 - RNA, 21 nt, Artificial Sequence
  GATA2 Guide RNA
agguggggaugggguggugug

SEQ ID NO: 16041 - RNA, 21 nt, Artificial Sequence
  GATA2 Guide RNA
augggcacccagccugcugca

SEQ ID NO: 16042 - RNA, 21 nt, Artificial Sequence
  GATA2 Guide RNA
augggguggugugcagcaggc

SEQ ID NO: 16043 - RNA, 21 nt, Artificial Sequence
  GATA2 Guide RNA
cacccagccugcugcacacca

SEQ ID NO: 16044 - RNA, 21 nt, Artificial Sequence
  GATA2 Guide RNA
cagcaggcugggugcccauag

SEQ ID NO: 16045 - RNA, 21 nt, Artificial Sequence
  GATA2 Guide RNA
cagccugcugcacaccacccc

SEQ ID NO: 16046 - RNA, 21 nt, Artificial Sequence
  GATA2 Guide RNA
ccagccugcugcacaccaccc

SEQ ID NO: 16047 - RNA, 21 nt, Artificial Sequence
  GATA2 Guide RNA
cccagccugcugcacaccacc

SEQ ID NO: 16048 - RNA, 21 nt, Artificial Sequence
  GATA2 Guide RNA
ccugcugcacaccaccccauc

SEQ ID NO: 16049 - RNA, 21 nt, Artificial Sequence
  GATA2 Guide RNA
cuacuaugggcacccagccug

SEQ ID NO: 16050 - RNA, 21 nt, Artificial Sequence
  GATA2 Guide RNA
cuaugggcacccagccugcug

SEQ ID NO: 16051 - RNA, 21 nt, Artificial Sequence
  GATA2 Guide RNA
cugcacaccaccccaucccca

SEQ ID NO: 16052 - RNA, 21 nt, Artificial Sequence
  GATA2 Guide RNA
cugcugcacaccaccccaucc

SEQ ID NO: 16053 - RNA, 21 nt, Artificial Sequence
  GATA2 Guide RNA
gaugggguggugugcagcagg

SEQ ID NO: 16054 - RNA, 21 nt, Artificial Sequence
  GATA2 Guide RNA
gcacccagccugcugcacacc

SEQ ID NO: 16055 - RNA, 21 nt, Artificial Sequence
  GATA2 Guide RNA
gcagcaggcugggugcccaua

SEQ ID NO: 16056 - RNA, 21 nt, Artificial Sequence
  GATA2 Guide RNA
gccugcugcacaccaccccau

SEQ ID NO: 16057 - RNA, 21 nt, Artificial Sequence
  GATA2 Guide RNA
gcuacuaugggcacccagccu

SEQ ID NO: 16058 - RNA, 21 nt, Artificial Sequence
  GATA2 Guide RNA
gcugcacaccaccccaucccc

SEQ ID NO: 16059 - RNA, 21 nt, Artificial Sequence
  GATA2 Guide RNA
ggaugggguggugugcagcag

SEQ ID NO: 16060 - RNA, 21 nt, Artificial Sequence
  GATA2 Guide RNA
ggcacccagccugcugcacac

SEQ ID NO: 16061 - RNA, 21 nt, Artificial Sequence
  GATA2 Guide RNA
gggaugggguggugugcagca

SEQ ID NO: 16062 - RNA, 21 nt, Artificial Sequence
  GATA2 Guide RNA
gggcacccagccugcugcaca

SEQ ID NO: 16063 - RNA, 21 nt, Artificial Sequence
  GATA2 Guide RNA
ggggaugggguggugugcagc

SEQ ID NO: 16064 - RNA, 21 nt, Artificial Sequence
  GATA2 Guide RNA
gggguggugugcagcaggcug

SEQ ID NO: 16065 - RNA, 21 nt, Artificial Sequence
  GATA2 Guide RNA
ggguggugugcagcaggcugg

SEQ ID NO: 16066 - RNA, 21 nt, Artificial Sequence
  GATA2 Guide RNA
gguggggaugggguggugugc

SEQ ID NO: 16067 - RNA, 21 nt, Artificial Sequence
  GATA2 Guide RNA
gguggugugcagcaggcuggg

SEQ ID NO: 16068 - RNA, 21 nt, Artificial Sequence
  GATA2 Guide RNA
ggugugcagcaggcugggugc

SEQ ID NO: 16069 - RNA, 21 nt, Artificial Sequence
  GATA2 Guide RNA
guagguggggaugggguggug

SEQ ID NO: 16070 - RNA, 21 nt, Artificial Sequence
  GATA2 Guide RNA
gugcagcaggcugggugccca

SEQ ID NO: 16071 - RNA, 21 nt, Artificial Sequence
  GATA2 Guide RNA
guggggaugggguggugugca

SEQ ID NO: 16072 - RNA, 21 nt, Artificial Sequence
  GATA2 Guide RNA
guggugugcagcaggcugggu

SEQ ID NO: 16073 - RNA, 21 nt, Artificial Sequence
  GATA2 Guide RNA
gugugcagcaggcugggugcc

SEQ ID NO: 16074 - RNA, 21 nt, Artificial Sequence
  GATA2 Guide RNA
uacuaugggcacccagccugc

SEQ ID NO: 16075 - RNA, 21 nt, Artificial Sequence
  GATA2 Guide RNA
uagguggggaugggguggugu

SEQ ID NO: 16076 - RNA, 21 nt, Artificial Sequence
  GATA2 Guide RNA
uaugggcacccagccugcugc

SEQ ID NO: 16077 - RNA, 21 nt, Artificial Sequence
  GATA2 Guide RNA
ugcacaccaccccauccccac

SEQ ID NO: 16078 - RNA, 21 nt, Artificial Sequence
  GATA2 Guide RNA
ugcagcaggcugggugcccau

SEQ ID NO: 16079 - RNA, 21 nt, Artificial Sequence
  GATA2 Guide RNA
ugcugcacaccaccccauccc

SEQ ID NO: 16080 - RNA, 21 nt, Artificial Sequence
  GATA2 Guide RNA
ugggcacccagccugcugcac

SEQ ID NO: 16081 - RNA, 21 nt, Artificial Sequence
  GATA2 Guide RNA
uggggaugggguggugugcag

SEQ ID NO: 16082 - RNA, 21 nt, Artificial Sequence
  GATA2 Guide RNA
ugggguggugugcagcaggcu

SEQ ID NO: 16083 - RNA, 21 nt, Artificial Sequence
  GATA2 Guide RNA
uggugugcagcaggcugggug

SEQ ID NO: 16084 - RNA, 21 nt, Artificial Sequence
  GATA2 Guide RNA
ugugcagcaggcugggugccc

SEQ ID NO: 16085 - RNA, 22 nt, Artificial Sequence
  GATA2 Guide RNA
acccagccugcugcacaccacc

SEQ ID NO: 16086 - RNA, 22 nt, Artificial Sequence
  GATA2 Guide RNA
acuaugggcacccagccugcug

SEQ ID NO: 16087 - RNA, 22 nt, Artificial Sequence
  GATA2 Guide RNA
agccugcugcacaccaccccau

SEQ ID NO: 16088 - RNA, 22 nt, Artificial Sequence
  GATA2 Guide RNA
agcuacuaugggcacccagccu

SEQ ID NO: 16089 - RNA, 22 nt, Artificial Sequence
  GATA2 Guide RNA
agguggggaugggguggugugc

SEQ ID NO: 16090 - RNA, 22 nt, Artificial Sequence
  GATA2 Guide RNA
augggcacccagccugcugcac

SEQ ID NO: 16091 - RNA, 22 nt, Artificial Sequence
  GATA2 Guide RNA
augggguggugugcagcaggcu

SEQ ID NO: 16092 - RNA, 22 nt, Artificial Sequence
  GATA2 Guide RNA
cacccagccugcugcacaccac

SEQ ID NO: 16093 - RNA, 22 nt, Artificial Sequence
  GATA2 Guide RNA
cagcaggcugggugcccauagu

SEQ ID NO: 16094 - RNA, 22 nt, Artificial Sequence
  GATA2 Guide RNA
cagccugcugcacaccacccca

SEQ ID NO: 16095 - RNA, 22 nt, Artificial Sequence
  GATA2 Guide RNA
ccagccugcugcacaccacccc

SEQ ID NO: 16096 - RNA, 22 nt, Artificial Sequence
  GATA2 Guide RNA
cccagccugcugcacaccaccc

SEQ ID NO: 16097 - RNA, 22 nt, Artificial Sequence
  GATA2 Guide RNA
ccugcugcacaccaccccaucc

SEQ ID NO: 16098 - RNA, 22 nt, Artificial Sequence
  GATA2 Guide RNA
cuacuaugggcacccagccugc

SEQ ID NO: 16099 - RNA, 22 nt, Artificial Sequence
  GATA2 Guide RNA
cuaugggcacccagccugcugc

SEQ ID NO: 16100 - RNA, 22 nt, Artificial Sequence
  GATA2 Guide RNA
cugcacaccaccccauccccac

SEQ ID NO: 16101 - RNA, 22 nt, Artificial Sequence
  GATA2 Guide RNA
cugcugcacaccaccccauccc

SEQ ID NO: 16102 - RNA, 22 nt, Artificial Sequence
  GATA2 Guide RNA
gaugggguggugugcagcaggc

SEQ ID NO: 16103 - RNA, 22 nt, Artificial Sequence
  GATA2 Guide RNA
gcacccagccugcugcacacca

SEQ ID NO: 16104 - RNA, 22 nt, Artificial Sequence
  GATA2 Guide RNA
gcagcaggcugggugcccauag

SEQ ID NO: 16105 - RNA, 22 nt, Artificial Sequence
  GATA2 Guide RNA
gccugcugcacaccaccccauc

SEQ ID NO: 16106 - RNA, 22 nt, Artificial Sequence
  GATA2 Guide RNA
gcuacuaugggcacccagccug

SEQ ID NO: 16107 - RNA, 22 nt, Artificial Sequence
  GATA2 Guide RNA
gcugcacaccaccccaucccca

SEQ ID NO: 16108 - RNA, 22 nt, Artificial Sequence
  GATA2 Guide RNA
ggaugggguggugugcagcagg

SEQ ID NO: 16109 - RNA, 22 nt, Artificial Sequence
  GATA2 Guide RNA
ggcacccagccugcugcacacc

SEQ ID NO: 16110 - RNA, 22 nt, Artificial Sequence
  GATA2 Guide RNA
gggaugggguggugugcagcag

SEQ ID NO: 16111 - RNA, 22 nt, Artificial Sequence
  GATA2 Guide RNA
gggcacccagccugcugcacac

SEQ ID NO: 16112 - RNA, 22 nt, Artificial Sequence
  GATA2 Guide RNA
ggggaugggguggugugcagca

SEQ ID NO: 16113 - RNA, 22 nt, Artificial Sequence
  GATA2 Guide RNA
gggguggugugcagcaggcugg

SEQ ID NO: 16114 - RNA, 22 nt, Artificial Sequence
  GATA2 Guide RNA
ggguggugugcagcaggcuggg

SEQ ID NO: 16115 - RNA, 22 nt, Artificial Sequence
  GATA2 Guide RNA
gguagguggggaugggguggug

SEQ ID NO: 16116 - RNA, 22 nt, Artificial Sequence
  GATA2 Guide RNA
gguggggaugggguggugugca

SEQ ID NO: 16117 - RNA, 22 nt, Artificial Sequence
  GATA2 Guide RNA
gguggugugcagcaggcugggu

SEQ ID NO: 16118 - RNA, 22 nt, Artificial Sequence
  GATA2 Guide RNA
ggugugcagcaggcugggugcc

SEQ ID NO: 16119 - RNA, 22 nt, Artificial Sequence
  GATA2 Guide RNA
guagguggggaugggguggugu

SEQ ID NO: 16120 - RNA, 22 nt, Artificial Sequence
  GATA2 Guide RNA
gugcagcaggcugggugcccau

SEQ ID NO: 16121 - RNA, 22 nt, Artificial Sequence
  GATA2 Guide RNA
guggggaugggguggugugcag

SEQ ID NO: 16122 - RNA, 22 nt, Artificial Sequence
  GATA2 Guide RNA
guggugugcagcaggcugggug

SEQ ID NO: 16123 - RNA, 22 nt, Artificial Sequence
  GATA2 Guide RNA
gugugcagcaggcugggugccc

SEQ ID NO: 16124 - RNA, 22 nt, Artificial Sequence
  GATA2 Guide RNA
uagguggggaugggguggugug

SEQ ID NO: 16125 - RNA, 22 nt, Artificial Sequence
  GATA2 Guide RNA
uaugggcacccagccugcugca

SEQ ID NO: 16126 - RNA, 22 nt, Artificial Sequence
  GATA2 Guide RNA
ugcacaccaccccauccccacc

SEQ ID NO: 16127 - RNA, 22 nt, Artificial Sequence
  GATA2 Guide RNA
ugcagcaggcugggugcccaua

SEQ ID NO: 16128 - RNA, 22 nt, Artificial Sequence
  GATA2 Guide RNA
ugcugcacaccaccccaucccc

SEQ ID NO: 16129 - RNA, 22 nt, Artificial Sequence
  GATA2 Guide RNA
ugggcacccagccugcugcaca

SEQ ID NO: 16130 - RNA, 22 nt, Artificial Sequence
  GATA2 Guide RNA
uggggaugggguggugugcagc

SEQ ID NO: 16131 - RNA, 22 nt, Artificial Sequence
  GATA2 Guide RNA
ugggguggugugcagcaggcug

SEQ ID NO: 16132 - RNA, 22 nt, Artificial Sequence
  GATA2 Guide RNA
uggugugcagcaggcugggugc

SEQ ID NO: 16133 - RNA, 22 nt, Artificial Sequence
  GATA2 Guide RNA
ugugcagcaggcugggugccca

SEQ ID NO: 16134 - RNA, 20 nt, Artificial Sequence
  GATA2 Guide RNA
acgggcacccagccugcuac

SEQ ID NO: 16135 - RNA, 20 nt, Artificial Sequence
  GATA2 Guide RNA
acuacgggcacccagccugc

SEQ ID NO: 16136 - RNA, 20 nt, Artificial Sequence
  GATA2 Guide RNA
agcaggcugggugcccguag

SEQ ID NO: 16137 - RNA, 20 nt, Artificial Sequence
  GATA2 Guide RNA
agcuacuacgggcacccagc

SEQ ID NO: 16138 - RNA, 20 nt, Artificial Sequence
  GATA2 Guide RNA
aggccuagcuacuacgggca

SEQ ID NO: 16139 - RNA, 20 nt, Artificial Sequence
  GATA2 Guide RNA
aggcugggugcccguaguag

SEQ ID NO: 16140 - RNA, 20 nt, Artificial Sequence
  GATA2 Guide RNA
caggccuagcuacuacgggc

SEQ ID NO: 16141 - RNA, 20 nt, Artificial Sequence
  GATA2 Guide RNA
caggcugggugcccguagua

SEQ ID NO: 16142 - RNA, 20 nt, Artificial Sequence
  GATA2 Guide RNA
ccaggccuagcuacuacggg

SEQ ID NO: 16143 - RNA, 20 nt, Artificial Sequence
  GATA2 Guide RNA
cccaggccuagcuacuacgg

SEQ ID NO: 16144 - RNA, 20 nt, Artificial Sequence
  GATA2 Guide RNA
cccguaguagcuaggccugg

SEQ ID NO: 16145 - RNA, 20 nt, Artificial Sequence
  GATA2 Guide RNA
ccguaguagcuaggccuggg

SEQ ID NO: 16146 - RNA, 20 nt, Artificial Sequence
  GATA2 Guide RNA
ccuagcuacuacgggcaccc

SEQ ID NO: 16147 - RNA, 20 nt, Artificial Sequence
  GATA2 Guide RNA
ccugcgcccaggccuagcua

SEQ ID NO: 16148 - RNA, 20 nt, Artificial Sequence
  GATA2 Guide RNA
cgcccaggccuagcuacuac

SEQ ID NO: 16149 - RNA, 20 nt, Artificial Sequence
  GATA2 Guide RNA
cguaguagcuaggccugggc

SEQ ID NO: 16150 - RNA, 20 nt, Artificial Sequence
  GATA2 Guide RNA
cuacgggcacccagccugcu

SEQ ID NO: 16151 - RNA, 20 nt, Artificial Sequence
  GATA2 Guide RNA
cuacuacgggcacccagccu

SEQ ID NO: 16152 - RNA, 20 nt, Artificial Sequence
  GATA2 Guide RNA
cuagcuacuacgggcaccca

SEQ ID NO: 16153 - RNA, 20 nt, Artificial Sequence
  GATA2 Guide RNA
cugcgcccaggccuagcuac

SEQ ID NO: 16154 - RNA, 20 nt, Artificial Sequence
  GATA2 Guide RNA
cugggugcccguaguagcua

SEQ ID NO: 16155 - RNA, 20 nt, Artificial Sequence
  GATA2 Guide RNA
gcaggcugggugcccguagu

SEQ ID NO: 16156 - RNA, 20 nt, Artificial Sequence
  GATA2 Guide RNA
gcccaggccuagcuacuacg

SEQ ID NO: 16157 - RNA, 20 nt, Artificial Sequence
  GATA2 Guide RNA
gcccguaguagcuaggccug

SEQ ID NO: 16158 - RNA, 20 nt, Artificial Sequence
  GATA2 Guide RNA
gccuagcuacuacgggcacc

SEQ ID NO: 16159 - RNA, 20 nt, Artificial Sequence
  GATA2 Guide RNA
gcgcccaggccuagcuacua

SEQ ID NO: 16160 - RNA, 20 nt, Artificial Sequence
  GATA2 Guide RNA
gcuacuacgggcacccagcc

SEQ ID NO: 16161 - RNA, 20 nt, Artificial Sequence
  GATA2 Guide RNA
gcugggugcccguaguagcu

SEQ ID NO: 16162 - RNA, 20 nt, Artificial Sequence
  GATA2 Guide RNA
ggccuagcuacuacgggcac

SEQ ID NO: 16163 - RNA, 20 nt, Artificial Sequence
  GATA2 Guide RNA
ggcugggugcccguaguagc

SEQ ID NO: 16164 - RNA, 20 nt, Artificial Sequence
  GATA2 Guide RNA
gggugcccguaguagcuagg

SEQ ID NO: 16165 - RNA, 20 nt, Artificial Sequence
  GATA2 Guide RNA
ggugcccguaguagcuaggc

SEQ ID NO: 16166 - RNA, 20 nt, Artificial Sequence
  GATA2 Guide RNA
guagcaggcugggugcccgu

SEQ ID NO: 16167 - RNA, 20 nt, Artificial Sequence
  GATA2 Guide RNA
guaguagcuaggccugggcg

SEQ ID NO: 16168 - RNA, 20 nt, Artificial Sequence
  GATA2 Guide RNA
gugcccguaguagcuaggcc

SEQ ID NO: 16169 - RNA, 20 nt, Artificial Sequence
  GATA2 Guide RNA
guguagcaggcugggugccc

SEQ ID NO: 16170 - RNA, 20 nt, Artificial Sequence
  GATA2 Guide RNA
guguguagcaggcugggugc

SEQ ID NO: 16171 - RNA, 20 nt, Artificial Sequence
  GATA2 Guide RNA
uacgggcacccagccugcua

SEQ ID NO: 16172 - RNA, 20 nt, Artificial Sequence
  GATA2 Guide RNA
uacuacgggcacccagccug

SEQ ID NO: 16173 - RNA, 20 nt, Artificial Sequence
  GATA2 Guide RNA
uagcaggcugggugcccgua

SEQ ID NO: 16174 - RNA, 20 nt, Artificial Sequence
  GATA2 Guide RNA
uagcuacuacgggcacccag

SEQ ID NO: 16175 - RNA, 20 nt, Artificial Sequence
  GATA2 Guide RNA
ugcccguaguagcuaggccu

SEQ ID NO: 16176 - RNA, 20 nt, Artificial Sequence
  GATA2 Guide RNA
ugcgcccaggccuagcuacu

SEQ ID NO: 16177 - RNA, 20 nt, Artificial Sequence
  GATA2 Guide RNA
ugggugcccguaguagcuag

SEQ ID NO: 16178 - RNA, 20 nt, Artificial Sequence
  GATA2 Guide RNA
uguagcaggcugggugcccg

SEQ ID NO: 16179 - RNA, 20 nt, Artificial Sequence
  GATA2 Guide RNA
uguguagcaggcugggugcc

SEQ ID NO: 16180 - RNA, 21 nt, Artificial Sequence
  GATA2 Guide RNA
acgggcacccagccugcuaca

SEQ ID NO: 16181 - RNA, 21 nt, Artificial Sequence
  GATA2 Guide RNA
acuacgggcacccagccugcu

SEQ ID NO: 16182 - RNA, 21 nt, Artificial Sequence
  GATA2 Guide RNA
agcaggcugggugcccguagu

SEQ ID NO: 16183 - RNA, 21 nt, Artificial Sequence
  GATA2 Guide RNA
agcuacuacgggcacccagcc

SEQ ID NO: 16184 - RNA, 21 nt, Artificial Sequence
  GATA2 Guide RNA
aggccuagcuacuacgggcac

SEQ ID NO: 16185 - RNA, 21 nt, Artificial Sequence
  GATA2 Guide RNA
aggcugggugcccguaguagc

SEQ ID NO: 16186 - RNA, 21 nt, Artificial Sequence
  GATA2 Guide RNA
caggccuagcuacuacgggca

SEQ ID NO: 16187 - RNA, 21 nt, Artificial Sequence
  GATA2 Guide RNA
caggcugggugcccguaguag

SEQ ID NO: 16188 - RNA, 21 nt, Artificial Sequence
  GATA2 Guide RNA
ccaggccuagcuacuacgggc

SEQ ID NO: 16189 - RNA, 21 nt, Artificial Sequence
  GATA2 Guide RNA
cccaggccuagcuacuacggg

SEQ ID NO: 16190 - RNA, 21 nt, Artificial Sequence
  GATA2 Guide RNA
cccguaguagcuaggccuggg

SEQ ID NO: 16191 - RNA, 21 nt, Artificial Sequence
  GATA2 Guide RNA
cccugcgcccaggccuagcua

SEQ ID NO: 16192 - RNA, 21 nt, Artificial Sequence
  GATA2 Guide RNA
ccguaguagcuaggccugggc

SEQ ID NO: 16193 - RNA, 21 nt, Artificial Sequence
  GATA2 Guide RNA
ccuagcuacuacgggcaccca

SEQ ID NO: 16194 - RNA, 21 nt, Artificial Sequence
  GATA2 Guide RNA
ccugcgcccaggccuagcuac

SEQ ID NO: 16195 - RNA, 21 nt, Artificial Sequence
  GATA2 Guide RNA
cgcccaggccuagcuacuacg

SEQ ID NO: 16196 - RNA, 21 nt, Artificial Sequence
  GATA2 Guide RNA
cguaguagcuaggccugggcg

SEQ ID NO: 16197 - RNA, 21 nt, Artificial Sequence
  GATA2 Guide RNA
cuacgggcacccagccugcua

SEQ ID NO: 16198 - RNA, 21 nt, Artificial Sequence
  GATA2 Guide RNA
cuacuacgggcacccagccug

SEQ ID NO: 16199 - RNA, 21 nt, Artificial Sequence
  GATA2 Guide RNA
cuagcuacuacgggcacccag

SEQ ID NO: 16200 - RNA, 21 nt, Artificial Sequence
  GATA2 Guide RNA
cugcgcccaggccuagcuacu

SEQ ID NO: 16201 - RNA, 21 nt, Artificial Sequence
  GATA2 Guide RNA
cugggugcccguaguagcuag

SEQ ID NO: 16202 - RNA, 21 nt, Artificial Sequence
  GATA2 Guide RNA
gcaggcugggugcccguagua

SEQ ID NO: 16203 - RNA, 21 nt, Artificial Sequence
  GATA2 Guide RNA
gcccaggccuagcuacuacgg

SEQ ID NO: 16204 - RNA, 21 nt, Artificial Sequence
  GATA2 Guide RNA
gcccguaguagcuaggccugg

SEQ ID NO: 16205 - RNA, 21 nt, Artificial Sequence
  GATA2 Guide RNA
gccuagcuacuacgggcaccc

SEQ ID NO: 16206 - RNA, 21 nt, Artificial Sequence
  GATA2 Guide RNA
gcgcccaggccuagcuacuac

SEQ ID NO: 16207 - RNA, 21 nt, Artificial Sequence
  GATA2 Guide RNA
gcuacuacgggcacccagccu

SEQ ID NO: 16208 - RNA, 21 nt, Artificial Sequence
  GATA2 Guide RNA
gcugggugcccguaguagcua

SEQ ID NO: 16209 - RNA, 21 nt, Artificial Sequence
  GATA2 Guide RNA
ggccuagcuacuacgggcacc

SEQ ID NO: 16210 - RNA, 21 nt, Artificial Sequence
  GATA2 Guide RNA
ggcugggugcccguaguagcu

SEQ ID NO: 16211 - RNA, 21 nt, Artificial Sequence
  GATA2 Guide RNA
gggugcccguaguagcuaggc

SEQ ID NO: 16212 - RNA, 21 nt, Artificial Sequence
  GATA2 Guide RNA
ggugcccguaguagcuaggcc

SEQ ID NO: 16213 - RNA, 21 nt, Artificial Sequence
  GATA2 Guide RNA
gguguguagcaggcugggugc

SEQ ID NO: 16214 - RNA, 21 nt, Artificial Sequence
  GATA2 Guide RNA
guagcaggcugggugcccgua

SEQ ID NO: 16215 - RNA, 21 nt, Artificial Sequence
  GATA2 Guide RNA
guaguagcuaggccugggcgc

SEQ ID NO: 16216 - RNA, 21 nt, Artificial Sequence
  GATA2 Guide RNA
gugcccguaguagcuaggccu

SEQ ID NO: 16217 - RNA, 21 nt, Artificial Sequence
  GATA2 Guide RNA
guguagcaggcugggugcccg

SEQ ID NO: 16218 - RNA, 21 nt, Artificial Sequence
  GATA2 Guide RNA
guguguagcaggcugggugcc

SEQ ID NO: 16219 - RNA, 21 nt, Artificial Sequence
  GATA2 Guide RNA
uacgggcacccagccugcuac

SEQ ID NO: 16220 - RNA, 21 nt, Artificial Sequence
  GATA2 Guide RNA
uacuacgggcacccagccugc

SEQ ID NO: 16221 - RNA, 21 nt, Artificial Sequence
  GATA2 Guide RNA
uagcaggcugggugcccguag

SEQ ID NO: 16222 - RNA, 21 nt, Artificial Sequence
  GATA2 Guide RNA
uagcuacuacgggcacccagc

SEQ ID NO: 16223 - RNA, 21 nt, Artificial Sequence
  GATA2 Guide RNA
ugcccguaguagcuaggccug

SEQ ID NO: 16224 - RNA, 21 nt, Artificial Sequence
  GATA2 Guide RNA
ugcgcccaggccuagcuacua

SEQ ID NO: 16225 - RNA, 21 nt, Artificial Sequence
  GATA2 Guide RNA
ugggugcccguaguagcuagg

SEQ ID NO: 16226 - RNA, 21 nt, Artificial Sequence
  GATA2 Guide RNA
uguagcaggcugggugcccgu

SEQ ID NO: 16227 - RNA, 21 nt, Artificial Sequence
  GATA2 Guide RNA
uguguagcaggcugggugccc

SEQ ID NO: 16228 - RNA, 22 nt, Artificial Sequence
  GATA2 Guide RNA
acgggcacccagccugcuacac

SEQ ID NO: 16229 - RNA, 22 nt, Artificial Sequence
  GATA2 Guide RNA
acuacgggcacccagccugcua

SEQ ID NO: 16230 - RNA, 22 nt, Artificial Sequence
  GATA2 Guide RNA
agcaggcugggugcccguagua

SEQ ID NO: 16231 - RNA, 22 nt, Artificial Sequence
  GATA2 Guide RNA
agcuacuacgggcacccagccu

SEQ ID NO: 16232 - RNA, 22 nt, Artificial Sequence
  GATA2 Guide RNA
aggccuagcuacuacgggcacc

SEQ ID NO: 16233 - RNA, 22 nt, Artificial Sequence
  GATA2 Guide RNA
aggcugggugcccguaguagcu

SEQ ID NO: 16234 - RNA, 22 nt, Artificial Sequence
  GATA2 Guide RNA
caggccuagcuacuacgggcac

SEQ ID NO: 16235 - RNA, 22 nt, Artificial Sequence
  GATA2 Guide RNA
caggcugggugcccguaguagc

SEQ ID NO: 16236 - RNA, 22 nt, Artificial Sequence
  GATA2 Guide RNA
ccaggccuagcuacuacgggca

SEQ ID NO: 16237 - RNA, 22 nt, Artificial Sequence
  GATA2 Guide RNA
cccaggccuagcuacuacgggc

SEQ ID NO: 16238 - RNA, 22 nt, Artificial Sequence
  GATA2 Guide RNA
ccccugcgcccaggccuagcua

SEQ ID NO: 16239 - RNA, 22 nt, Artificial Sequence
  GATA2 Guide RNA
cccguaguagcuaggccugggc

SEQ ID NO: 16240 - RNA, 22 nt, Artificial Sequence
  GATA2 Guide RNA
cccugcgcccaggccuagcuac

SEQ ID NO: 16241 - RNA, 22 nt, Artificial Sequence
  GATA2 Guide RNA
ccguaguagcuaggccugggcg

SEQ ID NO: 16242 - RNA, 22 nt, Artificial Sequence
  GATA2 Guide RNA
ccuagcuacuacgggcacccag

SEQ ID NO: 16243 - RNA, 22 nt, Artificial Sequence
  GATA2 Guide RNA
ccugcgcccaggccuagcuacu

SEQ ID NO: 16244 - RNA, 22 nt, Artificial Sequence
  GATA2 Guide RNA
cgcccaggccuagcuacuacgg

SEQ ID NO: 16245 - RNA, 22 nt, Artificial Sequence
  GATA2 Guide RNA
cguaguagcuaggccugggcgc

SEQ ID NO: 16246 - RNA, 22 nt, Artificial Sequence
  GATA2 Guide RNA
cuacgggcacccagccugcuac

SEQ ID NO: 16247 - RNA, 22 nt, Artificial Sequence
  GATA2 Guide RNA
cuacuacgggcacccagccugc

SEQ ID NO: 16248 - RNA, 22 nt, Artificial Sequence
  GATA2 Guide RNA
cuagcuacuacgggcacccagc

SEQ ID NO: 16249 - RNA, 22 nt, Artificial Sequence
  GATA2 Guide RNA
cugcgcccaggccuagcuacua

SEQ ID NO: 16250 - RNA, 22 nt, Artificial Sequence
  GATA2 Guide RNA
cugggugcccguaguagcuagg

SEQ ID NO: 16251 - RNA, 22 nt, Artificial Sequence
  GATA2 Guide RNA
gcaggcugggugcccguaguag

SEQ ID NO: 16252 - RNA, 22 nt, Artificial Sequence
  GATA2 Guide RNA
gcccaggccuagcuacuacggg

SEQ ID NO: 16253 - RNA, 22 nt, Artificial Sequence
  GATA2 Guide RNA
gcccguaguagcuaggccuggg

SEQ ID NO: 16254 - RNA, 22 nt, Artificial Sequence
  GATA2 Guide RNA
gccuagcuacuacgggcaccca

SEQ ID NO: 16255 - RNA, 22 nt, Artificial Sequence
  GATA2 Guide RNA
gcgcccaggccuagcuacuacg

SEQ ID NO: 16256 - RNA, 22 nt, Artificial Sequence
  GATA2 Guide RNA
gcuacuacgggcacccagccug

SEQ ID NO: 16257 - RNA, 22 nt, Artificial Sequence
  GATA2 Guide RNA
gcugggugcccguaguagcuag

SEQ ID NO: 16258 - RNA, 22 nt, Artificial Sequence
  GATA2 Guide RNA
ggccuagcuacuacgggcaccc

SEQ ID NO: 16259 - RNA, 22 nt, Artificial Sequence
  GATA2 Guide RNA
ggcugggugcccguaguagcua

SEQ ID NO: 16260 - RNA, 22 nt, Artificial Sequence
  GATA2 Guide RNA
gggugcccguaguagcuaggcc

SEQ ID NO: 16261 - RNA, 22 nt, Artificial Sequence
  GATA2 Guide RNA
ggugcccguaguagcuaggccu

SEQ ID NO: 16262 - RNA, 22 nt, Artificial Sequence
  GATA2 Guide RNA
gguguguagcaggcugggugcc

SEQ ID NO: 16263 - RNA, 22 nt, Artificial Sequence
  GATA2 Guide RNA
guagcaggcugggugcccguag

SEQ ID NO: 16264 - RNA, 22 nt, Artificial Sequence
  GATA2 Guide RNA
guaguagcuaggccugggcgca

SEQ ID NO: 16265 - RNA, 22 nt, Artificial Sequence
  GATA2 Guide RNA
gugcccguaguagcuaggccug

SEQ ID NO: 16266 - RNA, 22 nt, Artificial Sequence
  GATA2 Guide RNA
guguagcaggcugggugcccgu

SEQ ID NO: 16267 - RNA, 22 nt, Artificial Sequence
  GATA2 Guide RNA
guguguagcaggcugggugccc

SEQ ID NO: 16268 - RNA, 22 nt, Artificial Sequence
  GATA2 Guide RNA
uacgggcacccagccugcuaca

SEQ ID NO: 16269 - RNA, 22 nt, Artificial Sequence
  GATA2 Guide RNA
uacuacgggcacccagccugcu

SEQ ID NO: 16270 - RNA, 22 nt, Artificial Sequence
  GATA2 Guide RNA
uagcaggcugggugcccguagu

SEQ ID NO: 16271 - RNA, 22 nt, Artificial Sequence
  GATA2 Guide RNA
uagcuacuacgggcacccagcc

SEQ ID NO: 16272 - RNA, 22 nt, Artificial Sequence
  GATA2 Guide RNA
ugcccguaguagcuaggccugg

SEQ ID NO: 16273 - RNA, 22 nt, Artificial Sequence
  GATA2 Guide RNA
ugcgcccaggccuagcuacuac

SEQ ID NO: 16274 - RNA, 22 nt, Artificial Sequence
  GATA2 Guide RNA
ugggugcccguaguagcuaggc

SEQ ID NO: 16275 - RNA, 22 nt, Artificial Sequence
  GATA2 Guide RNA
ugguguguagcaggcugggugc

SEQ ID NO: 16276 - RNA, 22 nt, Artificial Sequence
  GATA2 Guide RNA
uguagcaggcugggugcccgua

SEQ ID NO: 16277 - RNA, 22 nt, Artificial Sequence
  GATA2 Guide RNA
uguguagcaggcugggugcccg

SEQ ID NO: 16278 - RNA, 20 nt, Artificial Sequence
  GATA2 Guide RNA
acaguagcuaggccugggcg

SEQ ID NO: 16279 - RNA, 20 nt, Artificial Sequence
  GATA2 Guide RNA
acugugggcacccagccugc

SEQ ID NO: 16280 - RNA, 20 nt, Artificial Sequence
  GATA2 Guide RNA
agcaggcugggugcccacag

SEQ ID NO: 16281 - RNA, 20 nt, Artificial Sequence
  GATA2 Guide RNA
agcuacugugggcacccagc

SEQ ID NO: 16282 - RNA, 20 nt, Artificial Sequence
  GATA2 Guide RNA
aggccuagcuacugugggca

SEQ ID NO: 16283 - RNA, 20 nt, Artificial Sequence
  GATA2 Guide RNA
aggcugggugcccacaguag

SEQ ID NO: 16284 - RNA, 20 nt, Artificial Sequence
  GATA2 Guide RNA
cacaguagcuaggccugggc

SEQ ID NO: 16285 - RNA, 20 nt, Artificial Sequence
  GATA2 Guide RNA
caggccuagcuacugugggc

SEQ ID NO: 16286 - RNA, 20 nt, Artificial Sequence
  GATA2 Guide RNA
caggcugggugcccacagua

SEQ ID NO: 16287 - RNA, 20 nt, Artificial Sequence
  GATA2 Guide RNA
caguagcuaggccugggcgc

SEQ ID NO: 16288 - RNA, 20 nt, Artificial Sequence
  GATA2 Guide RNA
ccacaguagcuaggccuggg

SEQ ID NO: 16289 - RNA, 20 nt, Artificial Sequence
  GATA2 Guide RNA
ccaggccuagcuacuguggg

SEQ ID NO: 16290 - RNA, 20 nt, Artificial Sequence
  GATA2 Guide RNA
cccacaguagcuaggccugg

SEQ ID NO: 16291 - RNA, 20 nt, Artificial Sequence
  GATA2 Guide RNA
cccaggccuagcuacugugg

SEQ ID NO: 16292 - RNA, 20 nt, Artificial Sequence
  GATA2 Guide RNA
cccugcgcccaggccuagcu

SEQ ID NO: 16293 - RNA, 20 nt, Artificial Sequence
  GATA2 Guide RNA
ccuagcuacugugggcaccc

SEQ ID NO: 16294 - RNA, 20 nt, Artificial Sequence
  GATA2 Guide RNA
cgcccaggccuagcuacugu

SEQ ID NO: 16295 - RNA, 20 nt, Artificial Sequence
  GATA2 Guide RNA
cuacugugggcacccagccu

SEQ ID NO: 16296 - RNA, 20 nt, Artificial Sequence
  GATA2 Guide RNA
cuagcuacugugggcaccca

SEQ ID NO: 16297 - RNA, 20 nt, Artificial Sequence
  GATA2 Guide RNA
cugggugcccacaguagcua

SEQ ID NO: 16298 - RNA, 20 nt, Artificial Sequence
  GATA2 Guide RNA
cugugggcacccagccugcu

SEQ ID NO: 16299 - RNA, 20 nt, Artificial Sequence
  GATA2 Guide RNA
gcaggcugggugcccacagu

SEQ ID NO: 16300 - RNA, 20 nt, Artificial Sequence
  GATA2 Guide RNA
gcccacaguagcuaggccug

SEQ ID NO: 16301 - RNA, 20 nt, Artificial Sequence
  GATA2 Guide RNA
gcccaggccuagcuacugug

SEQ ID NO: 16302 - RNA, 20 nt, Artificial Sequence
  GATA2 Guide RNA
gccuagcuacugugggcacc

SEQ ID NO: 16303 - RNA, 20 nt, Artificial Sequence
  GATA2 Guide RNA
gcgcccaggccuagcuacug

SEQ ID NO: 16304 - RNA, 20 nt, Artificial Sequence
  GATA2 Guide RNA
gcuacugugggcacccagcc

SEQ ID NO: 16305 - RNA, 20 nt, Artificial Sequence
  GATA2 Guide RNA
gcugggugcccacaguagcu

SEQ ID NO: 16306 - RNA, 20 nt, Artificial Sequence
  GATA2 Guide RNA
ggccuagcuacugugggcac

SEQ ID NO: 16307 - RNA, 20 nt, Artificial Sequence
  GATA2 Guide RNA
ggcugggugcccacaguagc

SEQ ID NO: 16308 - RNA, 20 nt, Artificial Sequence
  GATA2 Guide RNA
gggugcccacaguagcuagg

SEQ ID NO: 16309 - RNA, 20 nt, Artificial Sequence
  GATA2 Guide RNA
ggugcccacaguagcuaggc

SEQ ID NO: 16310 - RNA, 20 nt, Artificial Sequence
  GATA2 Guide RNA
guagcaggcugggugcccac

SEQ ID NO: 16311 - RNA, 20 nt, Artificial Sequence
  GATA2 Guide RNA
gugcccacaguagcuaggcc

SEQ ID NO: 16312 - RNA, 20 nt, Artificial Sequence
  GATA2 Guide RNA
uacugugggcacccagccug

SEQ ID NO: 16313 - RNA, 20 nt, Artificial Sequence
  GATA2 Guide RNA
uagcaggcugggugcccaca

SEQ ID NO: 16314 - RNA, 20 nt, Artificial Sequence
  GATA2 Guide RNA
uagcuacugugggcacccag

SEQ ID NO: 16315 - RNA, 20 nt, Artificial Sequence
  GATA2 Guide RNA
ugcccacaguagcuaggccu

SEQ ID NO: 16316 - RNA, 20 nt, Artificial Sequence
  GATA2 Guide RNA
ugggugcccacaguagcuag

SEQ ID NO: 16317 - RNA, 20 nt, Artificial Sequence
  GATA2 Guide RNA
uguagcaggcugggugccca

SEQ ID NO: 16318 - RNA, 20 nt, Artificial Sequence
  GATA2 Guide RNA
ugugggcacccagccugcua

SEQ ID NO: 16319 - RNA, 21 nt, Artificial Sequence
  GATA2 Guide RNA
acaguagcuaggccugggcgc

SEQ ID NO: 16320 - RNA, 21 nt, Artificial Sequence
  GATA2 Guide RNA
acugugggcacccagccugcu

SEQ ID NO: 16321 - RNA, 21 nt, Artificial Sequence
  GATA2 Guide RNA
agcaggcugggugcccacagu

SEQ ID NO: 16322 - RNA, 21 nt, Artificial Sequence
  GATA2 Guide RNA
agcuacugugggcacccagcc

SEQ ID NO: 16323 - RNA, 21 nt, Artificial Sequence
  GATA2 Guide RNA
aggccuagcuacugugggcac

SEQ ID NO: 16324 - RNA, 21 nt, Artificial Sequence
  GATA2 Guide RNA
aggcugggugcccacaguagc

SEQ ID NO: 16325 - RNA, 21 nt, Artificial Sequence
  GATA2 Guide RNA
cacaguagcuaggccugggcg

SEQ ID NO: 16326 - RNA, 21 nt, Artificial Sequence
  GATA2 Guide RNA
caggccuagcuacugugggca

SEQ ID NO: 16327 - RNA, 21 nt, Artificial Sequence
  GATA2 Guide RNA
caggcugggugcccacaguag

SEQ ID NO: 16328 - RNA, 21 nt, Artificial Sequence
  GATA2 Guide RNA
caguagcuaggccugggcgca

SEQ ID NO: 16329 - RNA, 21 nt, Artificial Sequence
  GATA2 Guide RNA
ccacaguagcuaggccugggc

SEQ ID NO: 16330 - RNA, 21 nt, Artificial Sequence
  GATA2 Guide RNA
ccaggccuagcuacugugggc

SEQ ID NO: 16331 - RNA, 21 nt, Artificial Sequence
  GATA2 Guide RNA
cccacaguagcuaggccuggg

SEQ ID NO: 16332 - RNA, 21 nt, Artificial Sequence
  GATA2 Guide RNA
cccaggccuagcuacuguggg

SEQ ID NO: 16333 - RNA, 21 nt, Artificial Sequence
  GATA2 Guide RNA
ccccugcgcccaggccuagcu

SEQ ID NO: 16334 - RNA, 21 nt, Artificial Sequence
  GATA2 Guide RNA
ccuagcuacugugggcaccca

SEQ ID NO: 16335 - RNA, 21 nt, Artificial Sequence
  GATA2 Guide RNA
cgcccaggccuagcuacugug

SEQ ID NO: 16336 - RNA, 21 nt, Artificial Sequence
  GATA2 Guide RNA
cuacugugggcacccagccug

SEQ ID NO: 16337 - RNA, 21 nt, Artificial Sequence
  GATA2 Guide RNA
cuagcuacugugggcacccag

SEQ ID NO: 16338 - RNA, 21 nt, Artificial Sequence
  GATA2 Guide RNA
cugggugcccacaguagcuag

SEQ ID NO: 16339 - RNA, 21 nt, Artificial Sequence
  GATA2 Guide RNA
cugugggcacccagccugcua

SEQ ID NO: 16340 - RNA, 21 nt, Artificial Sequence
  GATA2 Guide RNA
gcaggcugggugcccacagua

SEQ ID NO: 16341 - RNA, 21 nt, Artificial Sequence
  GATA2 Guide RNA
gcccacaguagcuaggccugg

SEQ ID NO: 16342 - RNA, 21 nt, Artificial Sequence
  GATA2 Guide RNA
gcccaggccuagcuacugugg

SEQ ID NO: 16343 - RNA, 21 nt, Artificial Sequence
  GATA2 Guide RNA
gccuagcuacugugggcaccc

SEQ ID NO: 16344 - RNA, 21 nt, Artificial Sequence
  GATA2 Guide RNA
gcgcccaggccuagcuacugu

SEQ ID NO: 16345 - RNA, 21 nt, Artificial Sequence
  GATA2 Guide RNA
gcuacugugggcacccagccu

SEQ ID NO: 16346 - RNA, 21 nt, Artificial Sequence
  GATA2 Guide RNA
gcugggugcccacaguagcua

SEQ ID NO: 16347 - RNA, 21 nt, Artificial Sequence
  GATA2 Guide RNA
ggccuagcuacugugggcacc

SEQ ID NO: 16348 - RNA, 21 nt, Artificial Sequence
  GATA2 Guide RNA
ggcugggugcccacaguagcu

SEQ ID NO: 16349 - RNA, 21 nt, Artificial Sequence
  GATA2 Guide RNA
gggugcccacaguagcuaggc

SEQ ID NO: 16350 - RNA, 21 nt, Artificial Sequence
  GATA2 Guide RNA
ggugcccacaguagcuaggcc

SEQ ID NO: 16351 - RNA, 21 nt, Artificial Sequence
  GATA2 Guide RNA
guagcaggcugggugcccaca

SEQ ID NO: 16352 - RNA, 21 nt, Artificial Sequence
  GATA2 Guide RNA
gugcccacaguagcuaggccu

SEQ ID NO: 16353 - RNA, 21 nt, Artificial Sequence
  GATA2 Guide RNA
guguagcaggcugggugccca

SEQ ID NO: 16354 - RNA, 21 nt, Artificial Sequence
  GATA2 Guide RNA
uacugugggcacccagccugc

SEQ ID NO: 16355 - RNA, 21 nt, Artificial Sequence
  GATA2 Guide RNA
uagcaggcugggugcccacag

SEQ ID NO: 16356 - RNA, 21 nt, Artificial Sequence
  GATA2 Guide RNA
uagcuacugugggcacccagc

SEQ ID NO: 16357 - RNA, 21 nt, Artificial Sequence
  GATA2 Guide RNA
ugcccacaguagcuaggccug

SEQ ID NO: 16358 - RNA, 21 nt, Artificial Sequence
  GATA2 Guide RNA
ugcgcccaggccuagcuacug

SEQ ID NO: 16359 - RNA, 21 nt, Artificial Sequence
  GATA2 Guide RNA
ugggugcccacaguagcuagg

SEQ ID NO: 16360 - RNA, 21 nt, Artificial Sequence
  GATA2 Guide RNA
uguagcaggcugggugcccac

SEQ ID NO: 16361 - RNA, 21 nt, Artificial Sequence
  GATA2 Guide RNA
ugugggcacccagccugcuac

SEQ ID NO: 16362 - RNA, 22 nt, Artificial Sequence
  GATA2 Guide RNA
acaguagcuaggccugggcgca

SEQ ID NO: 16363 - RNA, 22 nt, Artificial Sequence
  GATA2 Guide RNA
acugugggcacccagccugcua

SEQ ID NO: 16364 - RNA, 22 nt, Artificial Sequence
  GATA2 Guide RNA
agcaggcugggugcccacagua

SEQ ID NO: 16365 - RNA, 22 nt, Artificial Sequence
  GATA2 Guide RNA
agcuacugugggcacccagccu

SEQ ID NO: 16366 - RNA, 22 nt, Artificial Sequence
  GATA2 Guide RNA
aggccuagcuacugugggcacc

SEQ ID NO: 16367 - RNA, 22 nt, Artificial Sequence
  GATA2 Guide RNA
aggcugggugcccacaguagcu

SEQ ID NO: 16368 - RNA, 22 nt, Artificial Sequence
  GATA2 Guide RNA
cacaguagcuaggccugggcgc

SEQ ID NO: 16369 - RNA, 22 nt, Artificial Sequence
  GATA2 Guide RNA
caggccuagcuacugugggcac

SEQ ID NO: 16370 - RNA, 22 nt, Artificial Sequence
  GATA2 Guide RNA
caggcugggugcccacaguagc

SEQ ID NO: 16371 - RNA, 22 nt, Artificial Sequence
  GATA2 Guide RNA
caguagcuaggccugggcgcag

SEQ ID NO: 16372 - RNA, 22 nt, Artificial Sequence
  GATA2 Guide RNA
ccacaguagcuaggccugggcg

SEQ ID NO: 16373 - RNA, 22 nt, Artificial Sequence
  GATA2 Guide RNA
ccaggccuagcuacugugggca

SEQ ID NO: 16374 - RNA, 22 nt, Artificial Sequence
  GATA2 Guide RNA
cccacaguagcuaggccugggc

SEQ ID NO: 16375 - RNA, 22 nt, Artificial Sequence
  GATA2 Guide RNA
cccaggccuagcuacugugggc

SEQ ID NO: 16376 - RNA, 22 nt, Artificial Sequence
  GATA2 Guide RNA
ccuagcuacugugggcacccag

SEQ ID NO: 16377 - RNA, 22 nt, Artificial Sequence
  GATA2 Guide RNA
cgcccaggccuagcuacugugg

SEQ ID NO: 16378 - RNA, 22 nt, Artificial Sequence
  GATA2 Guide RNA
cuacugugggcacccagccugc

SEQ ID NO: 16379 - RNA, 22 nt, Artificial Sequence
  GATA2 Guide RNA
cuagcuacugugggcacccagc

SEQ ID NO: 16380 - RNA, 22 nt, Artificial Sequence
  GATA2 Guide RNA
cugcgcccaggccuagcuacug

SEQ ID NO: 16381 - RNA, 22 nt, Artificial Sequence
  GATA2 Guide RNA
cugggugcccacaguagcuagg

SEQ ID NO: 16382 - RNA, 22 nt, Artificial Sequence
  GATA2 Guide RNA
cugugggcacccagccugcuac

SEQ ID NO: 16383 - RNA, 22 nt, Artificial Sequence
  GATA2 Guide RNA
gcaggcugggugcccacaguag

SEQ ID NO: 16384 - RNA, 22 nt, Artificial Sequence
  GATA2 Guide RNA
gcccacaguagcuaggccuggg

SEQ ID NO: 16385 - RNA, 22 nt, Artificial Sequence
  GATA2 Guide RNA
gcccaggccuagcuacuguggg

SEQ ID NO: 16386 - RNA, 22 nt, Artificial Sequence
  GATA2 Guide RNA
gccuagcuacugugggcaccca

SEQ ID NO: 16387 - RNA, 22 nt, Artificial Sequence
  GATA2 Guide RNA
gcgcccaggccuagcuacugug

SEQ ID NO: 16388 - RNA, 22 nt, Artificial Sequence
  GATA2 Guide RNA
gcuacugugggcacccagccug

SEQ ID NO: 16389 - RNA, 22 nt, Artificial Sequence
  GATA2 Guide RNA
gcugggugcccacaguagcuag

SEQ ID NO: 16390 - RNA, 22 nt, Artificial Sequence
  GATA2 Guide RNA
ggccuagcuacugugggcaccc

SEQ ID NO: 16391 - RNA, 22 nt, Artificial Sequence
  GATA2 Guide RNA
ggcugggugcccacaguagcua

SEQ ID NO: 16392 - RNA, 22 nt, Artificial Sequence
  GATA2 Guide RNA
gggugcccacaguagcuaggcc

SEQ ID NO: 16393 - RNA, 22 nt, Artificial Sequence
  GATA2 Guide RNA
ggugcccacaguagcuaggccu

SEQ ID NO: 16394 - RNA, 22 nt, Artificial Sequence
  GATA2 Guide RNA
guagcaggcugggugcccacag

SEQ ID NO: 16395 - RNA, 22 nt, Artificial Sequence
  GATA2 Guide RNA
gugcccacaguagcuaggccug

SEQ ID NO: 16396 - RNA, 22 nt, Artificial Sequence
  GATA2 Guide RNA
guguagcaggcugggugcccac

SEQ ID NO: 16397 - RNA, 22 nt, Artificial Sequence
  GATA2 Guide RNA
uacugugggcacccagccugcu

SEQ ID NO: 16398 - RNA, 22 nt, Artificial Sequence
  GATA2 Guide RNA
uagcaggcugggugcccacagu

SEQ ID NO: 16399 - RNA, 22 nt, Artificial Sequence
  GATA2 Guide RNA
uagcuacugugggcacccagcc

SEQ ID NO: 16400 - RNA, 22 nt, Artificial Sequence
  GATA2 Guide RNA
uccccugcgcccaggccuagcu

SEQ ID NO: 16401 - RNA, 22 nt, Artificial Sequence
  GATA2 Guide RNA
ugcccacaguagcuaggccugg

SEQ ID NO: 16402 - RNA, 22 nt, Artificial Sequence
  GATA2 Guide RNA
ugcgcccaggccuagcuacugu

SEQ ID NO: 16403 - RNA, 22 nt, Artificial Sequence
  GATA2 Guide RNA
ugggugcccacaguagcuaggc

SEQ ID NO: 16404 - RNA, 22 nt, Artificial Sequence
  GATA2 Guide RNA
uguagcaggcugggugcccaca

SEQ ID NO: 16405 - RNA, 22 nt, Artificial Sequence
  GATA2 Guide RNA
ugugggcacccagccugcuaca

SEQ ID NO: 16406 - RNA, 22 nt, Artificial Sequence
  GATA2 Guide RNA
uguguagcaggcugggugccca

SEQ ID NO: 16407 - RNA, 20 nt, Artificial Sequence
  GATA2 Guide RNA
acucugggcacccagccugc

SEQ ID NO: 16408 - RNA, 20 nt, Artificial Sequence
  GATA2 Guide RNA
agaguagcuaggccugggcg

SEQ ID NO: 16409 - RNA, 20 nt, Artificial Sequence
  GATA2 Guide RNA
agcaggcugggugcccagag

SEQ ID NO: 16410 - RNA, 20 nt, Artificial Sequence
  GATA2 Guide RNA
agcuacucugggcacccagc

SEQ ID NO: 16411 - RNA, 20 nt, Artificial Sequence
  GATA2 Guide RNA
aggccuagcuacucugggca

SEQ ID NO: 16412 - RNA, 20 nt, Artificial Sequence
  GATA2 Guide RNA
aggcugggugcccagaguag

SEQ ID NO: 16413 - RNA, 20 nt, Artificial Sequence
  GATA2 Guide RNA
cagaguagcuaggccugggc

SEQ ID NO: 16414 - RNA, 20 nt, Artificial Sequence
  GATA2 Guide RNA
caggccuagcuacucugggc

SEQ ID NO: 16415 - RNA, 20 nt, Artificial Sequence
  GATA2 Guide RNA
caggcugggugcccagagua

SEQ ID NO: 16416 - RNA, 20 nt, Artificial Sequence
  GATA2 Guide RNA
ccagaguagcuaggccuggg

SEQ ID NO: 16417 - RNA, 20 nt, Artificial Sequence
  GATA2 Guide RNA
ccaggccuagcuacucuggg

SEQ ID NO: 16418 - RNA, 20 nt, Artificial Sequence
  GATA2 Guide RNA
cccagaguagcuaggccugg

SEQ ID NO: 16419 - RNA, 20 nt, Artificial Sequence
  GATA2 Guide RNA
cccaggccuagcuacucugg

SEQ ID NO: 16420 - RNA, 20 nt, Artificial Sequence
  GATA2 Guide RNA
ccuagcuacucugggcaccc

SEQ ID NO: 16421 - RNA, 20 nt, Artificial Sequence
  GATA2 Guide RNA
cgcccaggccuagcuacucu

SEQ ID NO: 16422 - RNA, 20 nt, Artificial Sequence
  GATA2 Guide RNA
cuacucugggcacccagccu

SEQ ID NO: 16423 - RNA, 20 nt, Artificial Sequence
  GATA2 Guide RNA
cuagcuacucugggcaccca

SEQ ID NO: 16424 - RNA, 20 nt, Artificial Sequence
  GATA2 Guide RNA
cucugggcacccagccugcu

SEQ ID NO: 16425 - RNA, 20 nt, Artificial Sequence
  GATA2 Guide RNA
cugggugcccagaguagcua

SEQ ID NO: 16426 - RNA, 20 nt, Artificial Sequence
  GATA2 Guide RNA
gaguagcuaggccugggcgc

SEQ ID NO: 16427 - RNA, 20 nt, Artificial Sequence
  GATA2 Guide RNA
gcaggcugggugcccagagu

SEQ ID NO: 16428 - RNA, 20 nt, Artificial Sequence
  GATA2 Guide RNA
gcccagaguagcuaggccug

SEQ ID NO: 16429 - RNA, 20 nt, Artificial Sequence
  GATA2 Guide RNA
gcccaggccuagcuacucug

SEQ ID NO: 16430 - RNA, 20 nt, Artificial Sequence
  GATA2 Guide RNA
gccuagcuacucugggcacc

SEQ ID NO: 16431 - RNA, 20 nt, Artificial Sequence
  GATA2 Guide RNA
gcgcccaggccuagcuacuc

SEQ ID NO: 16432 - RNA, 20 nt, Artificial Sequence
  GATA2 Guide RNA
gcuacucugggcacccagcc

SEQ ID NO: 16433 - RNA, 20 nt, Artificial Sequence
  GATA2 Guide RNA
gcugggugcccagaguagcu

SEQ ID NO: 16434 - RNA, 20 nt, Artificial Sequence
  GATA2 Guide RNA
ggccuagcuacucugggcac

SEQ ID NO: 16435 - RNA, 20 nt, Artificial Sequence
  GATA2 Guide RNA
ggcugggugcccagaguagc

SEQ ID NO: 16436 - RNA, 20 nt, Artificial Sequence
  GATA2 Guide RNA
gggugcccagaguagcuagg

SEQ ID NO: 16437 - RNA, 20 nt, Artificial Sequence
  GATA2 Guide RNA
ggugcccagaguagcuaggc

SEQ ID NO: 16438 - RNA, 20 nt, Artificial Sequence
  GATA2 Guide RNA
guagcaggcugggugcccag

SEQ ID NO: 16439 - RNA, 20 nt, Artificial Sequence
  GATA2 Guide RNA
gugcccagaguagcuaggcc

SEQ ID NO: 16440 - RNA, 20 nt, Artificial Sequence
  GATA2 Guide RNA
uacucugggcacccagccug

SEQ ID NO: 16441 - RNA, 20 nt, Artificial Sequence
  GATA2 Guide RNA
uagcaggcugggugcccaga

SEQ ID NO: 16442 - RNA, 20 nt, Artificial Sequence
  GATA2 Guide RNA
uagcuacucugggcacccag

SEQ ID NO: 16443 - RNA, 20 nt, Artificial Sequence
  GATA2 Guide RNA
ucugggcacccagccugcua

SEQ ID NO: 16444 - RNA, 20 nt, Artificial Sequence
  GATA2 Guide RNA
ugcccagaguagcuaggccu

SEQ ID NO: 16445 - RNA, 20 nt, Artificial Sequence
  GATA2 Guide RNA
ugggugcccagaguagcuag

SEQ ID NO: 16446 - RNA, 21 nt, Artificial Sequence
  GATA2 Guide RNA
acucugggcacccagccugcu

SEQ ID NO: 16447 - RNA, 21 nt, Artificial Sequence
  GATA2 Guide RNA
agaguagcuaggccugggcgc

SEQ ID NO: 16448 - RNA, 21 nt, Artificial Sequence
  GATA2 Guide RNA
agcaggcugggugcccagagu

SEQ ID NO: 16449 - RNA, 21 nt, Artificial Sequence
  GATA2 Guide RNA
agcuacucugggcacccagcc

SEQ ID NO: 16450 - RNA, 21 nt, Artificial Sequence
  GATA2 Guide RNA
aggccuagcuacucugggcac

SEQ ID NO: 16451 - RNA, 21 nt, Artificial Sequence
  GATA2 Guide RNA
aggcugggugcccagaguagc

SEQ ID NO: 16452 - RNA, 21 nt, Artificial Sequence
  GATA2 Guide RNA
cagaguagcuaggccugggcg

SEQ ID NO: 16453 - RNA, 21 nt, Artificial Sequence
  GATA2 Guide RNA
caggccuagcuacucugggca

SEQ ID NO: 16454 - RNA, 21 nt, Artificial Sequence
  GATA2 Guide RNA
caggcugggugcccagaguag

SEQ ID NO: 16455 - RNA, 21 nt, Artificial Sequence
  GATA2 Guide RNA
ccagaguagcuaggccugggc

SEQ ID NO: 16456 - RNA, 21 nt, Artificial Sequence
  GATA2 Guide RNA
ccaggccuagcuacucugggc

SEQ ID NO: 16457 - RNA, 21 nt, Artificial Sequence
  GATA2 Guide RNA
cccagaguagcuaggccuggg

SEQ ID NO: 16458 - RNA, 21 nt, Artificial Sequence
  GATA2 Guide RNA
cccaggccuagcuacucuggg

SEQ ID NO: 16459 - RNA, 21 nt, Artificial Sequence
  GATA2 Guide RNA
ccuagcuacucugggcaccca

SEQ ID NO: 16460 - RNA, 21 nt, Artificial Sequence
  GATA2 Guide RNA
cgcccaggccuagcuacucug

SEQ ID NO: 16461 - RNA, 21 nt, Artificial Sequence
  GATA2 Guide RNA
cuacucugggcacccagccug

SEQ ID NO: 16462 - RNA, 21 nt, Artificial Sequence
  GATA2 Guide RNA
cuagcuacucugggcacccag

SEQ ID NO: 16463 - RNA, 21 nt, Artificial Sequence
  GATA2 Guide RNA
cucugggcacccagccugcua

SEQ ID NO: 16464 - RNA, 21 nt, Artificial Sequence
  GATA2 Guide RNA
cugggugcccagaguagcuag

SEQ ID NO: 16465 - RNA, 21 nt, Artificial Sequence
  GATA2 Guide RNA
gaguagcuaggccugggcgca

SEQ ID NO: 16466 - RNA, 21 nt, Artificial Sequence
  GATA2 Guide RNA
gcaggcugggugcccagagua

SEQ ID NO: 16467 - RNA, 21 nt, Artificial Sequence
  GATA2 Guide RNA
gcccagaguagcuaggccugg

SEQ ID NO: 16468 - RNA, 21 nt, Artificial Sequence
  GATA2 Guide RNA
gcccaggccuagcuacucugg

SEQ ID NO: 16469 - RNA, 21 nt, Artificial Sequence
  GATA2 Guide RNA
gccuagcuacucugggcaccc

SEQ ID NO: 16470 - RNA, 21 nt, Artificial Sequence
  GATA2 Guide RNA
gcgcccaggccuagcuacucu

SEQ ID NO: 16471 - RNA, 21 nt, Artificial Sequence
  GATA2 Guide RNA
gcuacucugggcacccagccu

SEQ ID NO: 16472 - RNA, 21 nt, Artificial Sequence
  GATA2 Guide RNA
gcugggugcccagaguagcua

SEQ ID NO: 16473 - RNA, 21 nt, Artificial Sequence
  GATA2 Guide RNA
ggccuagcuacucugggcacc

SEQ ID NO: 16474 - RNA, 21 nt, Artificial Sequence
  GATA2 Guide RNA
ggcugggugcccagaguagcu

SEQ ID NO: 16475 - RNA, 21 nt, Artificial Sequence
  GATA2 Guide RNA
gggugcccagaguagcuaggc

SEQ ID NO: 16476 - RNA, 21 nt, Artificial Sequence
  GATA2 Guide RNA
ggugcccagaguagcuaggcc

SEQ ID NO: 16477 - RNA, 21 nt, Artificial Sequence
  GATA2 Guide RNA
guagcaggcugggugcccaga

SEQ ID NO: 16478 - RNA, 21 nt, Artificial Sequence
  GATA2 Guide RNA
gugcccagaguagcuaggccu

SEQ ID NO: 16479 - RNA, 21 nt, Artificial Sequence
  GATA2 Guide RNA
uacucugggcacccagccugc

SEQ ID NO: 16480 - RNA, 21 nt, Artificial Sequence
  GATA2 Guide RNA
uagcaggcugggugcccagag

SEQ ID NO: 16481 - RNA, 21 nt, Artificial Sequence
  GATA2 Guide RNA
uagcuacucugggcacccagc

SEQ ID NO: 16482 - RNA, 21 nt, Artificial Sequence
  GATA2 Guide RNA
ucugggcacccagccugcuac

SEQ ID NO: 16483 - RNA, 21 nt, Artificial Sequence
  GATA2 Guide RNA
ugcccagaguagcuaggccug

SEQ ID NO: 16484 - RNA, 21 nt, Artificial Sequence
  GATA2 Guide RNA
ugcgcccaggccuagcuacuc

SEQ ID NO: 16485 - RNA, 21 nt, Artificial Sequence
  GATA2 Guide RNA
ugggugcccagaguagcuagg

SEQ ID NO: 16486 - RNA, 21 nt, Artificial Sequence
  GATA2 Guide RNA
uguagcaggcugggugcccag

SEQ ID NO: 16487 - RNA, 22 nt, Artificial Sequence
  GATA2 Guide RNA
acucugggcacccagccugcua

SEQ ID NO: 16488 - RNA, 22 nt, Artificial Sequence
  GATA2 Guide RNA
agaguagcuaggccugggcgca

SEQ ID NO: 16489 - RNA, 22 nt, Artificial Sequence
  GATA2 Guide RNA
agcaggcugggugcccagagua

SEQ ID NO: 16490 - RNA, 22 nt, Artificial Sequence
  GATA2 Guide RNA
agcuacucugggcacccagccu

SEQ ID NO: 16491 - RNA, 22 nt, Artificial Sequence
  GATA2 Guide RNA
aggccuagcuacucugggcacc

SEQ ID NO: 16492 - RNA, 22 nt, Artificial Sequence
  GATA2 Guide RNA
aggcugggugcccagaguagcu

SEQ ID NO: 16493 - RNA, 22 nt, Artificial Sequence
  GATA2 Guide RNA
cagaguagcuaggccugggcgc

SEQ ID NO: 16494 - RNA, 22 nt, Artificial Sequence
  GATA2 Guide RNA
caggccuagcuacucugggcac

SEQ ID NO: 16495 - RNA, 22 nt, Artificial Sequence
  GATA2 Guide RNA
caggcugggugcccagaguagc

SEQ ID NO: 16496 - RNA, 22 nt, Artificial Sequence
  GATA2 Guide RNA
ccagaguagcuaggccugggcg

SEQ ID NO: 16497 - RNA, 22 nt, Artificial Sequence
  GATA2 Guide RNA
ccaggccuagcuacucugggca

SEQ ID NO: 16498 - RNA, 22 nt, Artificial Sequence
  GATA2 Guide RNA
cccagaguagcuaggccugggc

SEQ ID NO: 16499 - RNA, 22 nt, Artificial Sequence
  GATA2 Guide RNA
cccaggccuagcuacucugggc

SEQ ID NO: 16500 - RNA, 22 nt, Artificial Sequence
  GATA2 Guide RNA
ccuagcuacucugggcacccag

SEQ ID NO: 16501 - RNA, 22 nt, Artificial Sequence
  GATA2 Guide RNA
cgcccaggccuagcuacucugg

SEQ ID NO: 16502 - RNA, 22 nt, Artificial Sequence
  GATA2 Guide RNA
cuacucugggcacccagccugc

SEQ ID NO: 16503 - RNA, 22 nt, Artificial Sequence
  GATA2 Guide RNA
cuagcuacucugggcacccagc

SEQ ID NO: 16504 - RNA, 22 nt, Artificial Sequence
  GATA2 Guide RNA
cucugggcacccagccugcuac

SEQ ID NO: 16505 - RNA, 22 nt, Artificial Sequence
  GATA2 Guide RNA
cugcgcccaggccuagcuacuc

SEQ ID NO: 16506 - RNA, 22 nt, Artificial Sequence
  GATA2 Guide RNA
cugggugcccagaguagcuagg

SEQ ID NO: 16507 - RNA, 22 nt, Artificial Sequence
  GATA2 Guide RNA
gaguagcuaggccugggcgcag

SEQ ID NO: 16508 - RNA, 22 nt, Artificial Sequence
  GATA2 Guide RNA
gcaggcugggugcccagaguag

SEQ ID NO: 16509 - RNA, 22 nt, Artificial Sequence
  GATA2 Guide RNA
gcccagaguagcuaggccuggg

SEQ ID NO: 16510 - RNA, 22 nt, Artificial Sequence
  GATA2 Guide RNA
gcccaggccuagcuacucuggg

SEQ ID NO: 16511 - RNA, 22 nt, Artificial Sequence
  GATA2 Guide RNA
gccuagcuacucugggcaccca

SEQ ID NO: 16512 - RNA, 22 nt, Artificial Sequence
  GATA2 Guide RNA
gcgcccaggccuagcuacucug

SEQ ID NO: 16513 - RNA, 22 nt, Artificial Sequence
  GATA2 Guide RNA
gcuacucugggcacccagccug

SEQ ID NO: 16514 - RNA, 22 nt, Artificial Sequence
  GATA2 Guide RNA
gcugggugcccagaguagcuag

SEQ ID NO: 16515 - RNA, 22 nt, Artificial Sequence
  GATA2 Guide RNA
ggccuagcuacucugggcaccc

SEQ ID NO: 16516 - RNA, 22 nt, Artificial Sequence
  GATA2 Guide RNA
ggcugggugcccagaguagcua

SEQ ID NO: 16517 - RNA, 22 nt, Artificial Sequence
  GATA2 Guide RNA
gggugcccagaguagcuaggcc

SEQ ID NO: 16518 - RNA, 22 nt, Artificial Sequence
  GATA2 Guide RNA
ggugcccagaguagcuaggccu

SEQ ID NO: 16519 - RNA, 22 nt, Artificial Sequence
  GATA2 Guide RNA
guagcaggcugggugcccagag

SEQ ID NO: 16520 - RNA, 22 nt, Artificial Sequence
  GATA2 Guide RNA
gugcccagaguagcuaggccug

SEQ ID NO: 16521 - RNA, 22 nt, Artificial Sequence
  GATA2 Guide RNA
guguagcaggcugggugcccag

SEQ ID NO: 16522 - RNA, 22 nt, Artificial Sequence
  GATA2 Guide RNA
uacucugggcacccagccugcu

SEQ ID NO: 16523 - RNA, 22 nt, Artificial Sequence
  GATA2 Guide RNA
uagcaggcugggugcccagagu

SEQ ID NO: 16524 - RNA, 22 nt, Artificial Sequence
  GATA2 Guide RNA
uagcuacucugggcacccagcc

SEQ ID NO: 16525 - RNA, 22 nt, Artificial Sequence
  GATA2 Guide RNA
ucugggcacccagccugcuaca

SEQ ID NO: 16526 - RNA, 22 nt, Artificial Sequence
  GATA2 Guide RNA
ugcccagaguagcuaggccugg

SEQ ID NO: 16527 - RNA, 22 nt, Artificial Sequence
  GATA2 Guide RNA
ugcgcccaggccuagcuacucu

SEQ ID NO: 16528 - RNA, 22 nt, Artificial Sequence
  GATA2 Guide RNA
ugggugcccagaguagcuaggc

SEQ ID NO: 16529 - RNA, 22 nt, Artificial Sequence
  GATA2 Guide RNA
uguagcaggcugggugcccaga

SEQ ID NO: 16530 - RNA, 20 nt, Artificial Sequence
  GATA2 Guide RNA
aaaguggcaguccccugcac

SEQ ID NO: 16531 - RNA, 20 nt, Artificial Sequence
  GATA2 Guide RNA
aaguggcaguccccugcacc

SEQ ID NO: 16532 - RNA, 20 nt, Artificial Sequence
  GATA2 Guide RNA
agcuaggccugggugcaggg

SEQ ID NO: 16533 - RNA, 20 nt, Artificial Sequence
  GATA2 Guide RNA
aggccugggugcaggggacu

SEQ ID NO: 16534 - RNA, 20 nt, Artificial Sequence
  GATA2 Guide RNA
aguagcuaggccugggugca

SEQ ID NO: 16535 - RNA, 20 nt, Artificial Sequence
  GATA2 Guide RNA
aguccccugcacccaggccu

SEQ ID NO: 16536 - RNA, 20 nt, Artificial Sequence
  GATA2 Guide RNA
aguggcaguccccugcaccc

SEQ ID NO: 16537 - RNA, 20 nt, Artificial Sequence
  GATA2 Guide RNA
auaguagcuaggccugggug

SEQ ID NO: 16538 - RNA, 20 nt, Artificial Sequence
  GATA2 Guide RNA
auggaaaguggcaguccccu

SEQ ID NO: 16539 - RNA, 20 nt, Artificial Sequence
  GATA2 Guide RNA
cacccaggccuagcuacuau

SEQ ID NO: 16540 - RNA, 20 nt, Artificial Sequence
  GATA2 Guide RNA
caguccccugcacccaggcc

SEQ ID NO: 16541 - RNA, 20 nt, Artificial Sequence
  GATA2 Guide RNA
cauaguagcuaggccugggu

SEQ ID NO: 16542 - RNA, 20 nt, Artificial Sequence
  GATA2 Guide RNA
ccauaguagcuaggccuggg

SEQ ID NO: 16543 - RNA, 20 nt, Artificial Sequence
  GATA2 Guide RNA
cccauaguagcuaggccugg

SEQ ID NO: 16544 - RNA, 20 nt, Artificial Sequence
  GATA2 Guide RNA
ccccugcacccaggccuagc

SEQ ID NO: 16545 - RNA, 20 nt, Artificial Sequence
  GATA2 Guide RNA
cccugcacccaggccuagcu

SEQ ID NO: 16546 - RNA, 20 nt, Artificial Sequence
  GATA2 Guide RNA
ccugcacccaggccuagcua

SEQ ID NO: 16547 - RNA, 20 nt, Artificial Sequence
  GATA2 Guide RNA
ccugggugcaggggacugcc

SEQ ID NO: 16548 - RNA, 20 nt, Artificial Sequence
  GATA2 Guide RNA
cuaggccugggugcagggga

SEQ ID NO: 16549 - RNA, 20 nt, Artificial Sequence
  GATA2 Guide RNA
cugcacccaggccuagcuac

SEQ ID NO: 16550 - RNA, 20 nt, Artificial Sequence
  GATA2 Guide RNA
cugggugcaggggacugcca

SEQ ID NO: 16551 - RNA, 20 nt, Artificial Sequence
  GATA2 Guide RNA
gaaaguggcaguccccugca

SEQ ID NO: 16552 - RNA, 20 nt, Artificial Sequence
  GATA2 Guide RNA
gauggaaaguggcagucccc

SEQ ID NO: 16553 - RNA, 20 nt, Artificial Sequence
  GATA2 Guide RNA
gcacccaggccuagcuacua

SEQ ID NO: 16554 - RNA, 20 nt, Artificial Sequence
  GATA2 Guide RNA
gcaguccccugcacccaggc

SEQ ID NO: 16555 - RNA, 20 nt, Artificial Sequence
  GATA2 Guide RNA
gcccauaguagcuaggccug

SEQ ID NO: 16556 - RNA, 20 nt, Artificial Sequence
  GATA2 Guide RNA
gccugggugcaggggacugc

SEQ ID NO: 16557 - RNA, 20 nt, Artificial Sequence
  GATA2 Guide RNA
gcuaggccugggugcagggg

SEQ ID NO: 16558 - RNA, 20 nt, Artificial Sequence
  GATA2 Guide RNA
ggaaaguggcaguccccugc

SEQ ID NO: 16559 - RNA, 20 nt, Artificial Sequence
  GATA2 Guide RNA
ggcaguccccugcacccagg

SEQ ID NO: 16560 - RNA, 20 nt, Artificial Sequence
  GATA2 Guide RNA
ggccugggugcaggggacug

SEQ ID NO: 16561 - RNA, 20 nt, Artificial Sequence
  GATA2 Guide RNA
gggugcaggggacugccacu

SEQ ID NO: 16562 - RNA, 20 nt, Artificial Sequence
  GATA2 Guide RNA
ggugcaggggacugccacuu

SEQ ID NO: 16563 - RNA, 20 nt, Artificial Sequence
  GATA2 Guide RNA
guagcuaggccugggugcag

SEQ ID NO: 16564 - RNA, 20 nt, Artificial Sequence
  GATA2 Guide RNA
guccccugcacccaggccua

SEQ ID NO: 16565 - RNA, 20 nt, Artificial Sequence
  GATA2 Guide RNA
gugcaggggacugccacuuu

SEQ ID NO: 16566 - RNA, 20 nt, Artificial Sequence
  GATA2 Guide RNA
guggcaguccccugcaccca

SEQ ID NO: 16567 - RNA, 20 nt, Artificial Sequence
  GATA2 Guide RNA
uagcuaggccugggugcagg

SEQ ID NO: 16568 - RNA, 20 nt, Artificial Sequence
  GATA2 Guide RNA
uaggccugggugcaggggac

SEQ ID NO: 16569 - RNA, 20 nt, Artificial Sequence
  GATA2 Guide RNA
uaguagcuaggccugggugc

SEQ ID NO: 16570 - RNA, 20 nt, Artificial Sequence
  GATA2 Guide RNA
uccccugcacccaggccuag

SEQ ID NO: 16571 - RNA, 20 nt, Artificial Sequence
  GATA2 Guide RNA
ugcacccaggccuagcuacu

SEQ ID NO: 16572 - RNA, 20 nt, Artificial Sequence
  GATA2 Guide RNA
ugcaggggacugccacuuuc

SEQ ID NO: 16573 - RNA, 20 nt, Artificial Sequence
  GATA2 Guide RNA
uggaaaguggcaguccccug

SEQ ID NO: 16574 - RNA, 20 nt, Artificial Sequence
  GATA2 Guide RNA
uggcaguccccugcacccag

SEQ ID NO: 16575 - RNA, 20 nt, Artificial Sequence
  GATA2 Guide RNA
ugggugcaggggacugccac

SEQ ID NO: 16576 - RNA, 21 nt, Artificial Sequence
  GATA2 Guide RNA
aaaguggcaguccccugcacc

SEQ ID NO: 16577 - RNA, 21 nt, Artificial Sequence
  GATA2 Guide RNA
aaguggcaguccccugcaccc

SEQ ID NO: 16578 - RNA, 21 nt, Artificial Sequence
  GATA2 Guide RNA
agauggaaaguggcagucccc

SEQ ID NO: 16579 - RNA, 21 nt, Artificial Sequence
  GATA2 Guide RNA
agcuaggccugggugcagggg

SEQ ID NO: 16580 - RNA, 21 nt, Artificial Sequence
  GATA2 Guide RNA
aggccugggugcaggggacug

SEQ ID NO: 16581 - RNA, 21 nt, Artificial Sequence
  GATA2 Guide RNA
aguagcuaggccugggugcag

SEQ ID NO: 16582 - RNA, 21 nt, Artificial Sequence
  GATA2 Guide RNA
aguccccugcacccaggccua

SEQ ID NO: 16583 - RNA, 21 nt, Artificial Sequence
  GATA2 Guide RNA
aguggcaguccccugcaccca

SEQ ID NO: 16584 - RNA, 21 nt, Artificial Sequence
  GATA2 Guide RNA
auaguagcuaggccugggugc

SEQ ID NO: 16585 - RNA, 21 nt, Artificial Sequence
  GATA2 Guide RNA
auggaaaguggcaguccccug

SEQ ID NO: 16586 - RNA, 21 nt, Artificial Sequence
  GATA2 Guide RNA
cacccaggccuagcuacuaug

SEQ ID NO: 16587 - RNA, 21 nt, Artificial Sequence
  GATA2 Guide RNA
caguccccugcacccaggccu

SEQ ID NO: 16588 - RNA, 21 nt, Artificial Sequence
  GATA2 Guide RNA
cauaguagcuaggccugggug

SEQ ID NO: 16589 - RNA, 21 nt, Artificial Sequence
  GATA2 Guide RNA
ccauaguagcuaggccugggu

SEQ ID NO: 16590 - RNA, 21 nt, Artificial Sequence
  GATA2 Guide RNA
cccauaguagcuaggccuggg

SEQ ID NO: 16591 - RNA, 21 nt, Artificial Sequence
  GATA2 Guide RNA
ccccugcacccaggccuagcu

SEQ ID NO: 16592 - RNA, 21 nt, Artificial Sequence
  GATA2 Guide RNA
cccugcacccaggccuagcua

SEQ ID NO: 16593 - RNA, 21 nt, Artificial Sequence
  GATA2 Guide RNA
ccugcacccaggccuagcuac

SEQ ID NO: 16594 - RNA, 21 nt, Artificial Sequence
  GATA2 Guide RNA
ccugggugcaggggacugcca

SEQ ID NO: 16595 - RNA, 21 nt, Artificial Sequence
  GATA2 Guide RNA
cuaggccugggugcaggggac

SEQ ID NO: 16596 - RNA, 21 nt, Artificial Sequence
  GATA2 Guide RNA
cugcacccaggccuagcuacu

SEQ ID NO: 16597 - RNA, 21 nt, Artificial Sequence
  GATA2 Guide RNA
cugggugcaggggacugccac

SEQ ID NO: 16598 - RNA, 21 nt, Artificial Sequence
  GATA2 Guide RNA
gaaaguggcaguccccugcac

SEQ ID NO: 16599 - RNA, 21 nt, Artificial Sequence
  GATA2 Guide RNA
gauggaaaguggcaguccccu

SEQ ID NO: 16600 - RNA, 21 nt, Artificial Sequence
  GATA2 Guide RNA
gcacccaggccuagcuacuau

SEQ ID NO: 16601 - RNA, 21 nt, Artificial Sequence
  GATA2 Guide RNA
gcaguccccugcacccaggcc

SEQ ID NO: 16602 - RNA, 21 nt, Artificial Sequence
  GATA2 Guide RNA
gcccauaguagcuaggccugg

SEQ ID NO: 16603 - RNA, 21 nt, Artificial Sequence
  GATA2 Guide RNA
gccugggugcaggggacugcc

SEQ ID NO: 16604 - RNA, 21 nt, Artificial Sequence
  GATA2 Guide RNA
gcuaggccugggugcagggga

SEQ ID NO: 16605 - RNA, 21 nt, Artificial Sequence
  GATA2 Guide RNA
ggaaaguggcaguccccugca

SEQ ID NO: 16606 - RNA, 21 nt, Artificial Sequence
  GATA2 Guide RNA
ggcaguccccugcacccaggc

SEQ ID NO: 16607 - RNA, 21 nt, Artificial Sequence
  GATA2 Guide RNA
ggccugggugcaggggacugc

SEQ ID NO: 16608 - RNA, 21 nt, Artificial Sequence
  GATA2 Guide RNA
gggugcaggggacugccacuu

SEQ ID NO: 16609 - RNA, 21 nt, Artificial Sequence
  GATA2 Guide RNA
ggugcaggggacugccacuuu

SEQ ID NO: 16610 - RNA, 21 nt, Artificial Sequence
  GATA2 Guide RNA
guagcuaggccugggugcagg

SEQ ID NO: 16611 - RNA, 21 nt, Artificial Sequence
  GATA2 Guide RNA
guccccugcacccaggccuag

SEQ ID NO: 16612 - RNA, 21 nt, Artificial Sequence
  GATA2 Guide RNA
gugcaggggacugccacuuuc

SEQ ID NO: 16613 - RNA, 21 nt, Artificial Sequence
  GATA2 Guide RNA
guggcaguccccugcacccag

SEQ ID NO: 16614 - RNA, 21 nt, Artificial Sequence
  GATA2 Guide RNA
uagcuaggccugggugcaggg

SEQ ID NO: 16615 - RNA, 21 nt, Artificial Sequence
  GATA2 Guide RNA
uaggccugggugcaggggacu

SEQ ID NO: 16616 - RNA, 21 nt, Artificial Sequence
  GATA2 Guide RNA
uaguagcuaggccugggugca

SEQ ID NO: 16617 - RNA, 21 nt, Artificial Sequence
  GATA2 Guide RNA
uccccugcacccaggccuagc

SEQ ID NO: 16618 - RNA, 21 nt, Artificial Sequence
  GATA2 Guide RNA
ugcacccaggccuagcuacua

SEQ ID NO: 16619 - RNA, 21 nt, Artificial Sequence
  GATA2 Guide RNA
ugcaggggacugccacuuucc

SEQ ID NO: 16620 - RNA, 21 nt, Artificial Sequence
  GATA2 Guide RNA
ugcccauaguagcuaggccug

SEQ ID NO: 16621 - RNA, 21 nt, Artificial Sequence
  GATA2 Guide RNA
uggaaaguggcaguccccugc

SEQ ID NO: 16622 - RNA, 21 nt, Artificial Sequence
  GATA2 Guide RNA
uggcaguccccugcacccagg

SEQ ID NO: 16623 - RNA, 21 nt, Artificial Sequence
  GATA2 Guide RNA
ugggugcaggggacugccacu

SEQ ID NO: 16624 - RNA, 22 nt, Artificial Sequence
  GATA2 Guide RNA
aaaguggcaguccccugcaccc

SEQ ID NO: 16625 - RNA, 22 nt, Artificial Sequence
  GATA2 Guide RNA
aagauggaaaguggcagucccc

SEQ ID NO: 16626 - RNA, 22 nt, Artificial Sequence
  GATA2 Guide RNA
aaguggcaguccccugcaccca

SEQ ID NO: 16627 - RNA, 22 nt, Artificial Sequence
  GATA2 Guide RNA
agauggaaaguggcaguccccu

SEQ ID NO: 16628 - RNA, 22 nt, Artificial Sequence
  GATA2 Guide RNA
agcuaggccugggugcagggga

SEQ ID NO: 16629 - RNA, 22 nt, Artificial Sequence
  GATA2 Guide RNA
aggccugggugcaggggacugc

SEQ ID NO: 16630 - RNA, 22 nt, Artificial Sequence
  GATA2 Guide RNA
aguagcuaggccugggugcagg

SEQ ID NO: 16631 - RNA, 22 nt, Artificial Sequence
  GATA2 Guide RNA
aguccccugcacccaggccuag

SEQ ID NO: 16632 - RNA, 22 nt, Artificial Sequence
  GATA2 Guide RNA
aguggcaguccccugcacccag

SEQ ID NO: 16633 - RNA, 22 nt, Artificial Sequence
  GATA2 Guide RNA
auaguagcuaggccugggugca

SEQ ID NO: 16634 - RNA, 22 nt, Artificial Sequence
  GATA2 Guide RNA
auggaaaguggcaguccccugc

SEQ ID NO: 16635 - RNA, 22 nt, Artificial Sequence
  GATA2 Guide RNA
cacccaggccuagcuacuaugg

SEQ ID NO: 16636 - RNA, 22 nt, Artificial Sequence
  GATA2 Guide RNA
caguccccugcacccaggccua

SEQ ID NO: 16637 - RNA, 22 nt, Artificial Sequence
  GATA2 Guide RNA
cauaguagcuaggccugggugc

SEQ ID NO: 16638 - RNA, 22 nt, Artificial Sequence
  GATA2 Guide RNA
ccauaguagcuaggccugggug

SEQ ID NO: 16639 - RNA, 22 nt, Artificial Sequence
  GATA2 Guide RNA
cccauaguagcuaggccugggu

SEQ ID NO: 16640 - RNA, 22 nt, Artificial Sequence
  GATA2 Guide RNA
ccccugcacccaggccuagcua

SEQ ID NO: 16641 - RNA, 22 nt, Artificial Sequence
  GATA2 Guide RNA
cccugcacccaggccuagcuac

SEQ ID NO: 16642 - RNA, 22 nt, Artificial Sequence
  GATA2 Guide RNA
ccugcacccaggccuagcuacu

SEQ ID NO: 16643 - RNA, 22 nt, Artificial Sequence
  GATA2 Guide RNA
ccugggugcaggggacugccac

SEQ ID NO: 16644 - RNA, 22 nt, Artificial Sequence
  GATA2 Guide RNA
cuaggccugggugcaggggacu

SEQ ID NO: 16645 - RNA, 22 nt, Artificial Sequence
  GATA2 Guide RNA
cugcacccaggccuagcuacua

SEQ ID NO: 16646 - RNA, 22 nt, Artificial Sequence
  GATA2 Guide RNA
cugggugcaggggacugccacu

SEQ ID NO: 16647 - RNA, 22 nt, Artificial Sequence
  GATA2 Guide RNA
gaaaguggcaguccccugcacc

SEQ ID NO: 16648 - RNA, 22 nt, Artificial Sequence
  GATA2 Guide RNA
gauggaaaguggcaguccccug

SEQ ID NO: 16649 - RNA, 22 nt, Artificial Sequence
  GATA2 Guide RNA
gcacccaggccuagcuacuaug

SEQ ID NO: 16650 - RNA, 22 nt, Artificial Sequence
  GATA2 Guide RNA
gcaguccccugcacccaggccu

SEQ ID NO: 16651 - RNA, 22 nt, Artificial Sequence
  GATA2 Guide RNA
gcccauaguagcuaggccuggg

SEQ ID NO: 16652 - RNA, 22 nt, Artificial Sequence
  GATA2 Guide RNA
gccugggugcaggggacugcca

SEQ ID NO: 16653 - RNA, 22 nt, Artificial Sequence
  GATA2 Guide RNA
gcuaggccugggugcaggggac

SEQ ID NO: 16654 - RNA, 22 nt, Artificial Sequence
  GATA2 Guide RNA
ggaaaguggcaguccccugcac

SEQ ID NO: 16655 - RNA, 22 nt, Artificial Sequence
  GATA2 Guide RNA
ggcaguccccugcacccaggcc

SEQ ID NO: 16656 - RNA, 22 nt, Artificial Sequence
  GATA2 Guide RNA
ggccugggugcaggggacugcc

SEQ ID NO: 16657 - RNA, 22 nt, Artificial Sequence
  GATA2 Guide RNA
gggugcaggggacugccacuuu

SEQ ID NO: 16658 - RNA, 22 nt, Artificial Sequence
  GATA2 Guide RNA
ggugcaggggacugccacuuuc

SEQ ID NO: 16659 - RNA, 22 nt, Artificial Sequence
  GATA2 Guide RNA
guagcuaggccugggugcaggg

SEQ ID NO: 16660 - RNA, 22 nt, Artificial Sequence
  GATA2 Guide RNA
guccccugcacccaggccuagc

SEQ ID NO: 16661 - RNA, 22 nt, Artificial Sequence
  GATA2 Guide RNA
gugcaggggacugccacuuucc

SEQ ID NO: 16662 - RNA, 22 nt, Artificial Sequence
  GATA2 Guide RNA
gugcccauaguagcuaggccug

SEQ ID NO: 16663 - RNA, 22 nt, Artificial Sequence
  GATA2 Guide RNA
guggcaguccccugcacccagg

SEQ ID NO: 16664 - RNA, 22 nt, Artificial Sequence
  GATA2 Guide RNA
uagcuaggccugggugcagggg

SEQ ID NO: 16665 - RNA, 22 nt, Artificial Sequence
  GATA2 Guide RNA
uaggccugggugcaggggacug

SEQ ID NO: 16666 - RNA, 22 nt, Artificial Sequence
  GATA2 Guide RNA
uaguagcuaggccugggugcag

SEQ ID NO: 16667 - RNA, 22 nt, Artificial Sequence
  GATA2 Guide RNA
uccccugcacccaggccuagcu

SEQ ID NO: 16668 - RNA, 22 nt, Artificial Sequence
  GATA2 Guide RNA
ugcacccaggccuagcuacuau

SEQ ID NO: 16669 - RNA, 22 nt, Artificial Sequence
  GATA2 Guide RNA
ugcaggggacugccacuuucca

SEQ ID NO: 16670 - RNA, 22 nt, Artificial Sequence
  GATA2 Guide RNA
ugcccauaguagcuaggccugg

SEQ ID NO: 16671 - RNA, 22 nt, Artificial Sequence
  GATA2 Guide RNA
uggaaaguggcaguccccugca

SEQ ID NO: 16672 - RNA, 22 nt, Artificial Sequence
  GATA2 Guide RNA
uggcaguccccugcacccaggc

SEQ ID NO: 16673 - RNA, 22 nt, Artificial Sequence
  GATA2 Guide RNA
ugggugcaggggacugccacuu

SEQ ID NO: 16674 - RNA, 20 nt, Artificial Sequence
  GATA2 Guide RNA
aaaguggcaguccccugugc

SEQ ID NO: 16675 - RNA, 20 nt, Artificial Sequence
  GATA2 Guide RNA
aaguggcaguccccugugcc

SEQ ID NO: 16676 - RNA, 20 nt, Artificial Sequence
  GATA2 Guide RNA
acaggggacugccacuuucc

SEQ ID NO: 16677 - RNA, 20 nt, Artificial Sequence
  GATA2 Guide RNA
agauggaaaguggcaguccc

SEQ ID NO: 16678 - RNA, 20 nt, Artificial Sequence
  GATA2 Guide RNA
agcuaggccugggcacaggg

SEQ ID NO: 16679 - RNA, 20 nt, Artificial Sequence
  GATA2 Guide RNA
aggccugggcacaggggacu

SEQ ID NO: 16680 - RNA, 20 nt, Artificial Sequence
  GATA2 Guide RNA
aguagcuaggccugggcaca

SEQ ID NO: 16681 - RNA, 20 nt, Artificial Sequence
  GATA2 Guide RNA
aguccccugugcccaggccu

SEQ ID NO: 16682 - RNA, 20 nt, Artificial Sequence
  GATA2 Guide RNA
aguggcaguccccugugccc

SEQ ID NO: 16683 - RNA, 20 nt, Artificial Sequence
  GATA2 Guide RNA
auaguagcuaggccugggca

SEQ ID NO: 16684 - RNA, 20 nt, Artificial Sequence
  GATA2 Guide RNA
cacaggggacugccacuuuc

SEQ ID NO: 16685 - RNA, 20 nt, Artificial Sequence
  GATA2 Guide RNA
caguccccugugcccaggcc

SEQ ID NO: 16686 - RNA, 20 nt, Artificial Sequence
  GATA2 Guide RNA
cauaguagcuaggccugggc

SEQ ID NO: 16687 - RNA, 20 nt, Artificial Sequence
  GATA2 Guide RNA
ccccugugcccaggccuagc

SEQ ID NO: 16688 - RNA, 20 nt, Artificial Sequence
  GATA2 Guide RNA
cccugugcccaggccuagcu

SEQ ID NO: 16689 - RNA, 20 nt, Artificial Sequence
  GATA2 Guide RNA
ccugggcacaggggacugcc

SEQ ID NO: 16690 - RNA, 20 nt, Artificial Sequence
  GATA2 Guide RNA
ccugugcccaggccuagcua

SEQ ID NO: 16691 - RNA, 20 nt, Artificial Sequence
  GATA2 Guide RNA
cuaggccugggcacagggga

SEQ ID NO: 16692 - RNA, 20 nt, Artificial Sequence
  GATA2 Guide RNA
cugggcacaggggacugcca

SEQ ID NO: 16693 - RNA, 20 nt, Artificial Sequence
  GATA2 Guide RNA
cugugcccaggccuagcuac

SEQ ID NO: 16694 - RNA, 20 nt, Artificial Sequence
  GATA2 Guide RNA
gaaaguggcaguccccugug

SEQ ID NO: 16695 - RNA, 20 nt, Artificial Sequence
  GATA2 Guide RNA
gcacaggggacugccacuuu

SEQ ID NO: 16696 - RNA, 20 nt, Artificial Sequence
  GATA2 Guide RNA
gcaguccccugugcccaggc

SEQ ID NO: 16697 - RNA, 20 nt, Artificial Sequence
  GATA2 Guide RNA
gccugggcacaggggacugc

SEQ ID NO: 16698 - RNA, 20 nt, Artificial Sequence
  GATA2 Guide RNA
gcuaggccugggcacagggg

SEQ ID NO: 16699 - RNA, 20 nt, Artificial Sequence
  GATA2 Guide RNA
ggaaaguggcaguccccugu

SEQ ID NO: 16700 - RNA, 20 nt, Artificial Sequence
  GATA2 Guide RNA
ggcacaggggacugccacuu

SEQ ID NO: 16701 - RNA, 20 nt, Artificial Sequence
  GATA2 Guide RNA
ggcaguccccugugcccagg

SEQ ID NO: 16702 - RNA, 20 nt, Artificial Sequence
  GATA2 Guide RNA
ggccugggcacaggggacug

SEQ ID NO: 16703 - RNA, 20 nt, Artificial Sequence
  GATA2 Guide RNA
gggcacaggggacugccacu

SEQ ID NO: 16704 - RNA, 20 nt, Artificial Sequence
  GATA2 Guide RNA
guagcuaggccugggcacag

SEQ ID NO: 16705 - RNA, 20 nt, Artificial Sequence
  GATA2 Guide RNA
guccccugugcccaggccua

SEQ ID NO: 16706 - RNA, 20 nt, Artificial Sequence
  GATA2 Guide RNA
gugcccaggccuagcuacua

SEQ ID NO: 16707 - RNA, 20 nt, Artificial Sequence
  GATA2 Guide RNA
guggcaguccccugugccca

SEQ ID NO: 16708 - RNA, 20 nt, Artificial Sequence
  GATA2 Guide RNA
uagcuaggccugggcacagg

SEQ ID NO: 16709 - RNA, 20 nt, Artificial Sequence
  GATA2 Guide RNA
uaggccugggcacaggggac

SEQ ID NO: 16710 - RNA, 20 nt, Artificial Sequence
  GATA2 Guide RNA
uaguagcuaggccugggcac

SEQ ID NO: 16711 - RNA, 20 nt, Artificial Sequence
  GATA2 Guide RNA
uccccugugcccaggccuag

SEQ ID NO: 16712 - RNA, 20 nt, Artificial Sequence
  GATA2 Guide RNA
uggcaguccccugugcccag

SEQ ID NO: 16713 - RNA, 20 nt, Artificial Sequence
  GATA2 Guide RNA
ugggcacaggggacugccac

SEQ ID NO: 16714 - RNA, 20 nt, Artificial Sequence
  GATA2 Guide RNA
ugugcccaggccuagcuacu

SEQ ID NO: 16715 - RNA, 21 nt, Artificial Sequence
  GATA2 Guide RNA
aaaguggcaguccccugugcc

SEQ ID NO: 16716 - RNA, 21 nt, Artificial Sequence
  GATA2 Guide RNA
aagauggaaaguggcaguccc

SEQ ID NO: 16717 - RNA, 21 nt, Artificial Sequence
  GATA2 Guide RNA
aaguggcaguccccugugccc

SEQ ID NO: 16718 - RNA, 21 nt, Artificial Sequence
  GATA2 Guide RNA
acaggggacugccacuuucca

SEQ ID NO: 16719 - RNA, 21 nt, Artificial Sequence
  GATA2 Guide RNA
agcuaggccugggcacagggg

SEQ ID NO: 16720 - RNA, 21 nt, Artificial Sequence
  GATA2 Guide RNA
aggccugggcacaggggacug

SEQ ID NO: 16721 - RNA, 21 nt, Artificial Sequence
  GATA2 Guide RNA
aguagcuaggccugggcacag

SEQ ID NO: 16722 - RNA, 21 nt, Artificial Sequence
  GATA2 Guide RNA
aguccccugugcccaggccua

SEQ ID NO: 16723 - RNA, 21 nt, Artificial Sequence
  GATA2 Guide RNA
aguggcaguccccugugccca

SEQ ID NO: 16724 - RNA, 21 nt, Artificial Sequence
  GATA2 Guide RNA
auaguagcuaggccugggcac

SEQ ID NO: 16725 - RNA, 21 nt, Artificial Sequence
  GATA2 Guide RNA
cacaggggacugccacuuucc

SEQ ID NO: 16726 - RNA, 21 nt, Artificial Sequence
  GATA2 Guide RNA
caguccccugugcccaggccu

SEQ ID NO: 16727 - RNA, 21 nt, Artificial Sequence
  GATA2 Guide RNA
cauaguagcuaggccugggca

SEQ ID NO: 16728 - RNA, 21 nt, Artificial Sequence
  GATA2 Guide RNA
ccauaguagcuaggccugggc

SEQ ID NO: 16729 - RNA, 21 nt, Artificial Sequence
  GATA2 Guide RNA
ccccugugcccaggccuagcu

SEQ ID NO: 16730 - RNA, 21 nt, Artificial Sequence
  GATA2 Guide RNA
cccugugcccaggccuagcua

SEQ ID NO: 16731 - RNA, 21 nt, Artificial Sequence
  GATA2 Guide RNA
ccugggcacaggggacugcca

SEQ ID NO: 16732 - RNA, 21 nt, Artificial Sequence
  GATA2 Guide RNA
ccugugcccaggccuagcuac

SEQ ID NO: 16733 - RNA, 21 nt, Artificial Sequence
  GATA2 Guide RNA
cuaggccugggcacaggggac

SEQ ID NO: 16734 - RNA, 21 nt, Artificial Sequence
  GATA2 Guide RNA
cugggcacaggggacugccac

SEQ ID NO: 16735 - RNA, 21 nt, Artificial Sequence
  GATA2 Guide RNA
cugugcccaggccuagcuacu

SEQ ID NO: 16736 - RNA, 21 nt, Artificial Sequence
  GATA2 Guide RNA
gaaaguggcaguccccugugc

SEQ ID NO: 16737 - RNA, 21 nt, Artificial Sequence
  GATA2 Guide RNA
gcacaggggacugccacuuuc

SEQ ID NO: 16738 - RNA, 21 nt, Artificial Sequence
  GATA2 Guide RNA
gcaguccccugugcccaggcc

SEQ ID NO: 16739 - RNA, 21 nt, Artificial Sequence
  GATA2 Guide RNA
gccugggcacaggggacugcc

SEQ ID NO: 16740 - RNA, 21 nt, Artificial Sequence
  GATA2 Guide RNA
gcuaggccugggcacagggga

SEQ ID NO: 16741 - RNA, 21 nt, Artificial Sequence
  GATA2 Guide RNA
ggaaaguggcaguccccugug

SEQ ID NO: 16742 - RNA, 21 nt, Artificial Sequence
  GATA2 Guide RNA
ggcacaggggacugccacuuu

SEQ ID NO: 16743 - RNA, 21 nt, Artificial Sequence
  GATA2 Guide RNA
ggcaguccccugugcccaggc

SEQ ID NO: 16744 - RNA, 21 nt, Artificial Sequence
  GATA2 Guide RNA
ggccugggcacaggggacugc

SEQ ID NO: 16745 - RNA, 21 nt, Artificial Sequence
  GATA2 Guide RNA
gggcacaggggacugccacuu

SEQ ID NO: 16746 - RNA, 21 nt, Artificial Sequence
  GATA2 Guide RNA
guagcuaggccugggcacagg

SEQ ID NO: 16747 - RNA, 21 nt, Artificial Sequence
  GATA2 Guide RNA
guccccugugcccaggccuag

SEQ ID NO: 16748 - RNA, 21 nt, Artificial Sequence
  GATA2 Guide RNA
gugcccaggccuagcuacuau

SEQ ID NO: 16749 - RNA, 21 nt, Artificial Sequence
  GATA2 Guide RNA
guggcaguccccugugcccag

SEQ ID NO: 16750 - RNA, 21 nt, Artificial Sequence
  GATA2 Guide RNA
uagcuaggccugggcacaggg

SEQ ID NO: 16751 - RNA, 21 nt, Artificial Sequence
  GATA2 Guide RNA
uaggccugggcacaggggacu

SEQ ID NO: 16752 - RNA, 21 nt, Artificial Sequence
  GATA2 Guide RNA
uaguagcuaggccugggcaca

SEQ ID NO: 16753 - RNA, 21 nt, Artificial Sequence
  GATA2 Guide RNA
uccccugugcccaggccuagc

SEQ ID NO: 16754 - RNA, 21 nt, Artificial Sequence
  GATA2 Guide RNA
uggaaaguggcaguccccugu

SEQ ID NO: 16755 - RNA, 21 nt, Artificial Sequence
  GATA2 Guide RNA
uggcaguccccugugcccagg

SEQ ID NO: 16756 - RNA, 21 nt, Artificial Sequence
  GATA2 Guide RNA
ugggcacaggggacugccacu

SEQ ID NO: 16757 - RNA, 21 nt, Artificial Sequence
  GATA2 Guide RNA
ugugcccaggccuagcuacua

SEQ ID NO: 16758 - RNA, 22 nt, Artificial Sequence
  GATA2 Guide RNA
aaaguggcaguccccugugccc

SEQ ID NO: 16759 - RNA, 22 nt, Artificial Sequence
  GATA2 Guide RNA
aaguggcaguccccugugccca

SEQ ID NO: 16760 - RNA, 22 nt, Artificial Sequence
  GATA2 Guide RNA
acaggggacugccacuuuccau

SEQ ID NO: 16761 - RNA, 22 nt, Artificial Sequence
  GATA2 Guide RNA
agcuaggccugggcacagggga

SEQ ID NO: 16762 - RNA, 22 nt, Artificial Sequence
  GATA2 Guide RNA
aggccugggcacaggggacugc

SEQ ID NO: 16763 - RNA, 22 nt, Artificial Sequence
  GATA2 Guide RNA
aguagcuaggccugggcacagg

SEQ ID NO: 16764 - RNA, 22 nt, Artificial Sequence
  GATA2 Guide RNA
aguccccugugcccaggccuag

SEQ ID NO: 16765 - RNA, 22 nt, Artificial Sequence
  GATA2 Guide RNA
aguggcaguccccugugcccag

SEQ ID NO: 16766 - RNA, 22 nt, Artificial Sequence
  GATA2 Guide RNA
auaguagcuaggccugggcaca

SEQ ID NO: 16767 - RNA, 22 nt, Artificial Sequence
  GATA2 Guide RNA
auggaaaguggcaguccccugu

SEQ ID NO: 16768 - RNA, 22 nt, Artificial Sequence
  GATA2 Guide RNA
cacaggggacugccacuuucca

SEQ ID NO: 16769 - RNA, 22 nt, Artificial Sequence
  GATA2 Guide RNA
caguccccugugcccaggccua

SEQ ID NO: 16770 - RNA, 22 nt, Artificial Sequence
  GATA2 Guide RNA
cauaguagcuaggccugggcac

SEQ ID NO: 16771 - RNA, 22 nt, Artificial Sequence
  GATA2 Guide RNA
ccauaguagcuaggccugggca

SEQ ID NO: 16772 - RNA, 22 nt, Artificial Sequence
  GATA2 Guide RNA
cccauaguagcuaggccugggc

SEQ ID NO: 16773 - RNA, 22 nt, Artificial Sequence
  GATA2 Guide RNA
ccccugugcccaggccuagcua

SEQ ID NO: 16774 - RNA, 22 nt, Artificial Sequence
  GATA2 Guide RNA
cccugugcccaggccuagcuac

SEQ ID NO: 16775 - RNA, 22 nt, Artificial Sequence
  GATA2 Guide RNA
ccugggcacaggggacugccac

SEQ ID NO: 16776 - RNA, 22 nt, Artificial Sequence
  GATA2 Guide RNA
ccugugcccaggccuagcuacu

SEQ ID NO: 16777 - RNA, 22 nt, Artificial Sequence
  GATA2 Guide RNA
cuaggccugggcacaggggacu

SEQ ID NO: 16778 - RNA, 22 nt, Artificial Sequence
  GATA2 Guide RNA
cugggcacaggggacugccacu

SEQ ID NO: 16779 - RNA, 22 nt, Artificial Sequence
  GATA2 Guide RNA
cugugcccaggccuagcuacua

SEQ ID NO: 16780 - RNA, 22 nt, Artificial Sequence
  GATA2 Guide RNA
gaaaguggcaguccccugugcc

SEQ ID NO: 16781 - RNA, 22 nt, Artificial Sequence
  GATA2 Guide RNA
gaagauggaaaguggcaguccc

SEQ ID NO: 16782 - RNA, 22 nt, Artificial Sequence
  GATA2 Guide RNA
gcacaggggacugccacuuucc

SEQ ID NO: 16783 - RNA, 22 nt, Artificial Sequence
  GATA2 Guide RNA
gcaguccccugugcccaggccu

SEQ ID NO: 16784 - RNA, 22 nt, Artificial Sequence
  GATA2 Guide RNA
gccugggcacaggggacugcca

SEQ ID NO: 16785 - RNA, 22 nt, Artificial Sequence
  GATA2 Guide RNA
gcuaggccugggcacaggggac

SEQ ID NO: 16786 - RNA, 22 nt, Artificial Sequence
  GATA2 Guide RNA
ggaaaguggcaguccccugugc

SEQ ID NO: 16787 - RNA, 22 nt, Artificial Sequence
  GATA2 Guide RNA
ggcacaggggacugccacuuuc

SEQ ID NO: 16788 - RNA, 22 nt, Artificial Sequence
  GATA2 Guide RNA
ggcaguccccugugcccaggcc

SEQ ID NO: 16789 - RNA, 22 nt, Artificial Sequence
  GATA2 Guide RNA
ggccugggcacaggggacugcc

SEQ ID NO: 16790 - RNA, 22 nt, Artificial Sequence
  GATA2 Guide RNA
gggcacaggggacugccacuuu

SEQ ID NO: 16791 - RNA, 22 nt, Artificial Sequence
  GATA2 Guide RNA
guagcuaggccugggcacaggg

SEQ ID NO: 16792 - RNA, 22 nt, Artificial Sequence
  GATA2 Guide RNA
guccccugugcccaggccuagc

SEQ ID NO: 16793 - RNA, 22 nt, Artificial Sequence
  GATA2 Guide RNA
gugcccaggccuagcuacuaug

SEQ ID NO: 16794 - RNA, 22 nt, Artificial Sequence
  GATA2 Guide RNA
guggcaguccccugugcccagg

SEQ ID NO: 16795 - RNA, 22 nt, Artificial Sequence
  GATA2 Guide RNA
uagcuaggccugggcacagggg

SEQ ID NO: 16796 - RNA, 22 nt, Artificial Sequence
  GATA2 Guide RNA
uaggccugggcacaggggacug

SEQ ID NO: 16797 - RNA, 22 nt, Artificial Sequence
  GATA2 Guide RNA
uaguagcuaggccugggcacag

SEQ ID NO: 16798 - RNA, 22 nt, Artificial Sequence
  GATA2 Guide RNA
uccccugugcccaggccuagcu

SEQ ID NO: 16799 - RNA, 22 nt, Artificial Sequence
  GATA2 Guide RNA
uggaaaguggcaguccccugug

SEQ ID NO: 16800 - RNA, 22 nt, Artificial Sequence
  GATA2 Guide RNA
uggcaguccccugugcccaggc

SEQ ID NO: 16801 - RNA, 22 nt, Artificial Sequence
  GATA2 Guide RNA
ugggcacaggggacugccacuu

SEQ ID NO: 16802 - RNA, 22 nt, Artificial Sequence
  GATA2 Guide RNA
ugugcccaggccuagcuacuau

SEQ ID NO: 16803 - RNA, 20 nt, Artificial Sequence
  GATA2 Guide RNA
aaaguggcaguacccugcgc

SEQ ID NO: 16804 - RNA, 20 nt, Artificial Sequence
  GATA2 Guide RNA
aagauggaaaguggcaguac

SEQ ID NO: 16805 - RNA, 20 nt, Artificial Sequence
  GATA2 Guide RNA
aaguggcaguacccugcgcc

SEQ ID NO: 16806 - RNA, 20 nt, Artificial Sequence
  GATA2 Guide RNA
agauggaaaguggcaguacc

SEQ ID NO: 16807 - RNA, 20 nt, Artificial Sequence
  GATA2 Guide RNA
agcuaggccugggcgcaggg

SEQ ID NO: 16808 - RNA, 20 nt, Artificial Sequence
  GATA2 Guide RNA
aggccugggcgcaggguacu

SEQ ID NO: 16809 - RNA, 20 nt, Artificial Sequence
  GATA2 Guide RNA
aggguacugccacuuuccau

SEQ ID NO: 16810 - RNA, 20 nt, Artificial Sequence
  GATA2 Guide RNA
aguacccugcgcccaggccu

SEQ ID NO: 16811 - RNA, 20 nt, Artificial Sequence
  GATA2 Guide RNA
aguggcaguacccugcgccc

SEQ ID NO: 16812 - RNA, 20 nt, Artificial Sequence
  GATA2 Guide RNA
augaagauggaaaguggcag

SEQ ID NO: 16813 - RNA, 20 nt, Artificial Sequence
  GATA2 Guide RNA
auggaaaguggcaguacccu

SEQ ID NO: 16814 - RNA, 20 nt, Artificial Sequence
  GATA2 Guide RNA
caggguacugccacuuucca

SEQ ID NO: 16815 - RNA, 20 nt, Artificial Sequence
  GATA2 Guide RNA
caguacccugcgcccaggcc

SEQ ID NO: 16816 - RNA, 20 nt, Artificial Sequence
  GATA2 Guide RNA
caugaagauggaaaguggca

SEQ ID NO: 16817 - RNA, 20 nt, Artificial Sequence
  GATA2 Guide RNA
ccugggcgcaggguacugcc

SEQ ID NO: 16818 - RNA, 20 nt, Artificial Sequence
  GATA2 Guide RNA
cgcaggguacugccacuuuc

SEQ ID NO: 16819 - RNA, 20 nt, Artificial Sequence
  GATA2 Guide RNA
cuaggccugggcgcagggua

SEQ ID NO: 16820 - RNA, 20 nt, Artificial Sequence
  GATA2 Guide RNA
cugggcgcaggguacugcca

SEQ ID NO: 16821 - RNA, 20 nt, Artificial Sequence
  GATA2 Guide RNA
gaaaguggcaguacccugcg

SEQ ID NO: 16822 - RNA, 20 nt, Artificial Sequence
  GATA2 Guide RNA
gaagauggaaaguggcagua

SEQ ID NO: 16823 - RNA, 20 nt, Artificial Sequence
  GATA2 Guide RNA
gauggaaaguggcaguaccc

SEQ ID NO: 16824 - RNA, 20 nt, Artificial Sequence
  GATA2 Guide RNA
gcaggguacugccacuuucc

SEQ ID NO: 16825 - RNA, 20 nt, Artificial Sequence
  GATA2 Guide RNA
gcaguacccugcgcccaggc

SEQ ID NO: 16826 - RNA, 20 nt, Artificial Sequence
  GATA2 Guide RNA
gcaugaagauggaaaguggc

SEQ ID NO: 16827 - RNA, 20 nt, Artificial Sequence
  GATA2 Guide RNA
gccugggcgcaggguacugc

SEQ ID NO: 16828 - RNA, 20 nt, Artificial Sequence
  GATA2 Guide RNA
gcgcaggguacugccacuuu

SEQ ID NO: 16829 - RNA, 20 nt, Artificial Sequence
  GATA2 Guide RNA
gcuaggccugggcgcagggu

SEQ ID NO: 16830 - RNA, 20 nt, Artificial Sequence
  GATA2 Guide RNA
ggaaaguggcaguacccugc

SEQ ID NO: 16831 - RNA, 20 nt, Artificial Sequence
  GATA2 Guide RNA
ggcaguacccugcgcccagg

SEQ ID NO: 16832 - RNA, 20 nt, Artificial Sequence
  GATA2 Guide RNA
ggccugggcgcaggguacug

SEQ ID NO: 16833 - RNA, 20 nt, Artificial Sequence
  GATA2 Guide RNA
ggcgcaggguacugccacuu

SEQ ID NO: 16834 - RNA, 20 nt, Artificial Sequence
  GATA2 Guide RNA
gggcgcaggguacugccacu

SEQ ID NO: 16835 - RNA, 20 nt, Artificial Sequence
  GATA2 Guide RNA
ggguacugccacuuuccauc

SEQ ID NO: 16836 - RNA, 20 nt, Artificial Sequence
  GATA2 Guide RNA
gguacugccacuuuccaucu

SEQ ID NO: 16837 - RNA, 20 nt, Artificial Sequence
  GATA2 Guide RNA
guacccugcgcccaggccua

SEQ ID NO: 16838 - RNA, 20 nt, Artificial Sequence
  GATA2 Guide RNA
guacugccacuuuccaucuu

SEQ ID NO: 16839 - RNA, 20 nt, Artificial Sequence
  GATA2 Guide RNA
guagcuaggccugggcgcag

SEQ ID NO: 16840 - RNA, 20 nt, Artificial Sequence
  GATA2 Guide RNA
guggcaguacccugcgccca

SEQ ID NO: 16841 - RNA, 20 nt, Artificial Sequence
  GATA2 Guide RNA
uacccugcgcccaggccuag

SEQ ID NO: 16842 - RNA, 20 nt, Artificial Sequence
  GATA2 Guide RNA
uacugccacuuuccaucuuc

SEQ ID NO: 16843 - RNA, 20 nt, Artificial Sequence
  GATA2 Guide RNA
uagcuaggccugggcgcagg

SEQ ID NO: 16844 - RNA, 20 nt, Artificial Sequence
  GATA2 Guide RNA
uaggccugggcgcaggguac

SEQ ID NO: 16845 - RNA, 20 nt, Artificial Sequence
  GATA2 Guide RNA
ugaagauggaaaguggcagu

SEQ ID NO: 16846 - RNA, 20 nt, Artificial Sequence
  GATA2 Guide RNA
uggaaaguggcaguacccug

SEQ ID NO: 16847 - RNA, 20 nt, Artificial Sequence
  GATA2 Guide RNA
uggcaguacccugcgcccag

SEQ ID NO: 16848 - RNA, 20 nt, Artificial Sequence
  GATA2 Guide RNA
ugggcgcaggguacugccac

SEQ ID NO: 16849 - RNA, 21 nt, Artificial Sequence
  GATA2 Guide RNA
aaaguggcaguacccugcgcc

SEQ ID NO: 16850 - RNA, 21 nt, Artificial Sequence
  GATA2 Guide RNA
aagauggaaaguggcaguacc

SEQ ID NO: 16851 - RNA, 21 nt, Artificial Sequence
  GATA2 Guide RNA
aaguggcaguacccugcgccc

SEQ ID NO: 16852 - RNA, 21 nt, Artificial Sequence
  GATA2 Guide RNA
agauggaaaguggcaguaccc

SEQ ID NO: 16853 - RNA, 21 nt, Artificial Sequence
  GATA2 Guide RNA
agcaugaagauggaaaguggc

SEQ ID NO: 16854 - RNA, 21 nt, Artificial Sequence
  GATA2 Guide RNA
agcuaggccugggcgcagggu

SEQ ID NO: 16855 - RNA, 21 nt, Artificial Sequence
  GATA2 Guide RNA
aggccugggcgcaggguacug

SEQ ID NO: 16856 - RNA, 21 nt, Artificial Sequence
  GATA2 Guide RNA
aggguacugccacuuuccauc

SEQ ID NO: 16857 - RNA, 21 nt, Artificial Sequence
  GATA2 Guide RNA
aguacccugcgcccaggccua

SEQ ID NO: 16858 - RNA, 21 nt, Artificial Sequence
  GATA2 Guide RNA
aguagcuaggccugggcgcag

SEQ ID NO: 16859 - RNA, 21 nt, Artificial Sequence
  GATA2 Guide RNA
aguggcaguacccugcgccca

SEQ ID NO: 16860 - RNA, 21 nt, Artificial Sequence
  GATA2 Guide RNA
augaagauggaaaguggcagu

SEQ ID NO: 16861 - RNA, 21 nt, Artificial Sequence
  GATA2 Guide RNA
auggaaaguggcaguacccug

SEQ ID NO: 16862 - RNA, 21 nt, Artificial Sequence
  GATA2 Guide RNA
caggguacugccacuuuccau

SEQ ID NO: 16863 - RNA, 21 nt, Artificial Sequence
  GATA2 Guide RNA
caguacccugcgcccaggccu

SEQ ID NO: 16864 - RNA, 21 nt, Artificial Sequence
  GATA2 Guide RNA
caugaagauggaaaguggcag

SEQ ID NO: 16865 - RNA, 21 nt, Artificial Sequence
  GATA2 Guide RNA
ccugggcgcaggguacugcca

SEQ ID NO: 16866 - RNA, 21 nt, Artificial Sequence
  GATA2 Guide RNA
cgcaggguacugccacuuucc

SEQ ID NO: 16867 - RNA, 21 nt, Artificial Sequence
  GATA2 Guide RNA
cuaggccugggcgcaggguac

SEQ ID NO: 16868 - RNA, 21 nt, Artificial Sequence
  GATA2 Guide RNA
cugggcgcaggguacugccac

SEQ ID NO: 16869 - RNA, 21 nt, Artificial Sequence
  GATA2 Guide RNA
gaaaguggcaguacccugcgc

SEQ ID NO: 16870 - RNA, 21 nt, Artificial Sequence
  GATA2 Guide RNA
gaagauggaaaguggcaguac

SEQ ID NO: 16871 - RNA, 21 nt, Artificial Sequence
  GATA2 Guide RNA
gauggaaaguggcaguacccu

SEQ ID NO: 16872 - RNA, 21 nt, Artificial Sequence
  GATA2 Guide RNA
gcaggguacugccacuuucca

SEQ ID NO: 16873 - RNA, 21 nt, Artificial Sequence
  GATA2 Guide RNA
gcaguacccugcgcccaggcc

SEQ ID NO: 16874 - RNA, 21 nt, Artificial Sequence
  GATA2 Guide RNA
gcaugaagauggaaaguggca

SEQ ID NO: 16875 - RNA, 21 nt, Artificial Sequence
  GATA2 Guide RNA
gccugggcgcaggguacugcc

SEQ ID NO: 16876 - RNA, 21 nt, Artificial Sequence
  GATA2 Guide RNA
gcgcaggguacugccacuuuc

SEQ ID NO: 16877 - RNA, 21 nt, Artificial Sequence
  GATA2 Guide RNA
gcuaggccugggcgcagggua

SEQ ID NO: 16878 - RNA, 21 nt, Artificial Sequence
  GATA2 Guide RNA
ggaaaguggcaguacccugcg

SEQ ID NO: 16879 - RNA, 21 nt, Artificial Sequence
  GATA2 Guide RNA
ggcaguacccugcgcccaggc

SEQ ID NO: 16880 - RNA, 21 nt, Artificial Sequence
  GATA2 Guide RNA
ggccugggcgcaggguacugc

SEQ ID NO: 16881 - RNA, 21 nt, Artificial Sequence
  GATA2 Guide RNA
ggcgcaggguacugccacuuu

SEQ ID NO: 16882 - RNA, 21 nt, Artificial Sequence
  GATA2 Guide RNA
gggcgcaggguacugccacuu

SEQ ID NO: 16883 - RNA, 21 nt, Artificial Sequence
  GATA2 Guide RNA
ggguacugccacuuuccaucu

SEQ ID NO: 16884 - RNA, 21 nt, Artificial Sequence
  GATA2 Guide RNA
gguacugccacuuuccaucuu

SEQ ID NO: 16885 - RNA, 21 nt, Artificial Sequence
  GATA2 Guide RNA
guacccugcgcccaggccuag

SEQ ID NO: 16886 - RNA, 21 nt, Artificial Sequence
  GATA2 Guide RNA
guacugccacuuuccaucuuc

SEQ ID NO: 16887 - RNA, 21 nt, Artificial Sequence
  GATA2 Guide RNA
guagcuaggccugggcgcagg

SEQ ID NO: 16888 - RNA, 21 nt, Artificial Sequence
  GATA2 Guide RNA
guggcaguacccugcgcccag

SEQ ID NO: 16889 - RNA, 21 nt, Artificial Sequence
  GATA2 Guide RNA
uacccugcgcccaggccuagc

SEQ ID NO: 16890 - RNA, 21 nt, Artificial Sequence
  GATA2 Guide RNA
uacugccacuuuccaucuuca

SEQ ID NO: 16891 - RNA, 21 nt, Artificial Sequence
  GATA2 Guide RNA
uagcuaggccugggcgcaggg

SEQ ID NO: 16892 - RNA, 21 nt, Artificial Sequence
  GATA2 Guide RNA
uaggccugggcgcaggguacu

SEQ ID NO: 16893 - RNA, 21 nt, Artificial Sequence
  GATA2 Guide RNA
ugaagauggaaaguggcagua

SEQ ID NO: 16894 - RNA, 21 nt, Artificial Sequence
  GATA2 Guide RNA
uggaaaguggcaguacccugc

SEQ ID NO: 16895 - RNA, 21 nt, Artificial Sequence
  GATA2 Guide RNA
uggcaguacccugcgcccagg

SEQ ID NO: 16896 - RNA, 21 nt, Artificial Sequence
  GATA2 Guide RNA
ugggcgcaggguacugccacu

SEQ ID NO: 16897 - RNA, 22 nt, Artificial Sequence
  GATA2 Guide RNA
aaaguggcaguacccugcgccc

SEQ ID NO: 16898 - RNA, 22 nt, Artificial Sequence
  GATA2 Guide RNA
aagauggaaaguggcaguaccc

SEQ ID NO: 16899 - RNA, 22 nt, Artificial Sequence
  GATA2 Guide RNA
aaguggcaguacccugcgccca

SEQ ID NO: 16900 - RNA, 22 nt, Artificial Sequence
  GATA2 Guide RNA
agauggaaaguggcaguacccu

SEQ ID NO: 16901 - RNA, 22 nt, Artificial Sequence
  GATA2 Guide RNA
agcaugaagauggaaaguggca

SEQ ID NO: 16902 - RNA, 22 nt, Artificial Sequence
  GATA2 Guide RNA
agcuaggccugggcgcagggua

SEQ ID NO: 16903 - RNA, 22 nt, Artificial Sequence
  GATA2 Guide RNA
aggccugggcgcaggguacugc

SEQ ID NO: 16904 - RNA, 22 nt, Artificial Sequence
  GATA2 Guide RNA
aggguacugccacuuuccaucu

SEQ ID NO: 16905 - RNA, 22 nt, Artificial Sequence
  GATA2 Guide RNA
aguacccugcgcccaggccuag

SEQ ID NO: 16906 - RNA, 22 nt, Artificial Sequence
  GATA2 Guide RNA
aguagcuaggccugggcgcagg

SEQ ID NO: 16907 - RNA, 22 nt, Artificial Sequence
  GATA2 Guide RNA
aguggcaguacccugcgcccag

SEQ ID NO: 16908 - RNA, 22 nt, Artificial Sequence
  GATA2 Guide RNA
augaagauggaaaguggcagua

SEQ ID NO: 16909 - RNA, 22 nt, Artificial Sequence
  GATA2 Guide RNA
auggaaaguggcaguacccugc

SEQ ID NO: 16910 - RNA, 22 nt, Artificial Sequence
  GATA2 Guide RNA
caggguacugccacuuuccauc

SEQ ID NO: 16911 - RNA, 22 nt, Artificial Sequence
  GATA2 Guide RNA
caguacccugcgcccaggccua

SEQ ID NO: 16912 - RNA, 22 nt, Artificial Sequence
  GATA2 Guide RNA
caugaagauggaaaguggcagu

SEQ ID NO: 16913 - RNA, 22 nt, Artificial Sequence
  GATA2 Guide RNA
ccugggcgcaggguacugccac

SEQ ID NO: 16914 - RNA, 22 nt, Artificial Sequence
  GATA2 Guide RNA
cgcaggguacugccacuuucca

SEQ ID NO: 16915 - RNA, 22 nt, Artificial Sequence
  GATA2 Guide RNA
cuaggccugggcgcaggguacu

SEQ ID NO: 16916 - RNA, 22 nt, Artificial Sequence
  GATA2 Guide RNA
cugggcgcaggguacugccacu

SEQ ID NO: 16917 - RNA, 22 nt, Artificial Sequence
  GATA2 Guide RNA
gaaaguggcaguacccugcgcc

SEQ ID NO: 16918 - RNA, 22 nt, Artificial Sequence
  GATA2 Guide RNA
gaagauggaaaguggcaguacc

SEQ ID NO: 16919 - RNA, 22 nt, Artificial Sequence
  GATA2 Guide RNA
gagcaugaagauggaaaguggc

SEQ ID NO: 16920 - RNA, 22 nt, Artificial Sequence
  GATA2 Guide RNA
gauggaaaguggcaguacccug

SEQ ID NO: 16921 - RNA, 22 nt, Artificial Sequence
  GATA2 Guide RNA
gcaggguacugccacuuuccau

SEQ ID NO: 16922 - RNA, 22 nt, Artificial Sequence
  GATA2 Guide RNA
gcaguacccugcgcccaggccu

SEQ ID NO: 16923 - RNA, 22 nt, Artificial Sequence
  GATA2 Guide RNA
gcaugaagauggaaaguggcag

SEQ ID NO: 16924 - RNA, 22 nt, Artificial Sequence
  GATA2 Guide RNA
gccugggcgcaggguacugcca

SEQ ID NO: 16925 - RNA, 22 nt, Artificial Sequence
  GATA2 Guide RNA
gcgcaggguacugccacuuucc

SEQ ID NO: 16926 - RNA, 22 nt, Artificial Sequence
  GATA2 Guide RNA
gcuaggccugggcgcaggguac

SEQ ID NO: 16927 - RNA, 22 nt, Artificial Sequence
  GATA2 Guide RNA
ggaaaguggcaguacccugcgc

SEQ ID NO: 16928 - RNA, 22 nt, Artificial Sequence
  GATA2 Guide RNA
ggcaguacccugcgcccaggcc

SEQ ID NO: 16929 - RNA, 22 nt, Artificial Sequence
  GATA2 Guide RNA
ggccugggcgcaggguacugcc

SEQ ID NO: 16930 - RNA, 22 nt, Artificial Sequence
  GATA2 Guide RNA
ggcgcaggguacugccacuuuc

SEQ ID NO: 16931 - RNA, 22 nt, Artificial Sequence
  GATA2 Guide RNA
gggcgcaggguacugccacuuu

SEQ ID NO: 16932 - RNA, 22 nt, Artificial Sequence
  GATA2 Guide RNA
ggguacugccacuuuccaucuu

SEQ ID NO: 16933 - RNA, 22 nt, Artificial Sequence
  GATA2 Guide RNA
gguacugccacuuuccaucuuc

SEQ ID NO: 16934 - RNA, 22 nt, Artificial Sequence
  GATA2 Guide RNA
guacccugcgcccaggccuagc

SEQ ID NO: 16935 - RNA, 22 nt, Artificial Sequence
  GATA2 Guide RNA
guacugccacuuuccaucuuca

SEQ ID NO: 16936 - RNA, 22 nt, Artificial Sequence
  GATA2 Guide RNA
guagcuaggccugggcgcaggg

SEQ ID NO: 16937 - RNA, 22 nt, Artificial Sequence
  GATA2 Guide RNA
guggcaguacccugcgcccagg

SEQ ID NO: 16938 - RNA, 22 nt, Artificial Sequence
  GATA2 Guide RNA
uacccugcgcccaggccuagcu

SEQ ID NO: 16939 - RNA, 22 nt, Artificial Sequence
  GATA2 Guide RNA
uacugccacuuuccaucuucau

SEQ ID NO: 16940 - RNA, 22 nt, Artificial Sequence
  GATA2 Guide RNA
uagcuaggccugggcgcagggu

SEQ ID NO: 16941 - RNA, 22 nt, Artificial Sequence
  GATA2 Guide RNA
uaggccugggcgcaggguacug

SEQ ID NO: 16942 - RNA, 22 nt, Artificial Sequence
  GATA2 Guide RNA
uaguagcuaggccugggcgcag

SEQ ID NO: 16943 - RNA, 22 nt, Artificial Sequence
  GATA2 Guide RNA
ugaagauggaaaguggcaguac

SEQ ID NO: 16944 - RNA, 22 nt, Artificial Sequence
  GATA2 Guide RNA
uggaaaguggcaguacccugcg

SEQ ID NO: 16945 - RNA, 22 nt, Artificial Sequence
  GATA2 Guide RNA
uggcaguacccugcgcccaggc

SEQ ID NO: 16946 - RNA, 22 nt, Artificial Sequence
  GATA2 Guide RNA
ugggcgcaggguacugccacuu

SEQ ID NO: 16947 - RNA, 20 nt, Artificial Sequence
  GATA2 Guide RNA
aaaauggcaguccccugcgc

SEQ ID NO: 16948 - RNA, 20 nt, Artificial Sequence
  GATA2 Guide RNA
aaauggcaguccccugcgcc

SEQ ID NO: 16949 - RNA, 20 nt, Artificial Sequence
  GATA2 Guide RNA
aagauggaaaauggcagucc

SEQ ID NO: 16950 - RNA, 20 nt, Artificial Sequence
  GATA2 Guide RNA
aauggcaguccccugcgccc

SEQ ID NO: 16951 - RNA, 20 nt, Artificial Sequence
  GATA2 Guide RNA
acggagagcaugaagaugga

SEQ ID NO: 16952 - RNA, 20 nt, Artificial Sequence
  GATA2 Guide RNA
acugccauuuuccaucuuca

SEQ ID NO: 16953 - RNA, 20 nt, Artificial Sequence
  GATA2 Guide RNA
agagcaugaagauggaaaau

SEQ ID NO: 16954 - RNA, 20 nt, Artificial Sequence
  GATA2 Guide RNA
agauggaaaauggcaguccc

SEQ ID NO: 16955 - RNA, 20 nt, Artificial Sequence
  GATA2 Guide RNA
agcaugaagauggaaaaugg

SEQ ID NO: 16956 - RNA, 20 nt, Artificial Sequence
  GATA2 Guide RNA
aggggacugccauuuuccau

SEQ ID NO: 16957 - RNA, 20 nt, Artificial Sequence
  GATA2 Guide RNA
augaagauggaaaauggcag

SEQ ID NO: 16958 - RNA, 20 nt, Artificial Sequence
  GATA2 Guide RNA
auggaaaauggcaguccccu

SEQ ID NO: 16959 - RNA, 20 nt, Artificial Sequence
  GATA2 Guide RNA
auuuuccaucuucaugcucu

SEQ ID NO: 16960 - RNA, 20 nt, Artificial Sequence
  GATA2 Guide RNA
caggggacugccauuuucca

SEQ ID NO: 16961 - RNA, 20 nt, Artificial Sequence
  GATA2 Guide RNA
caugaagauggaaaauggca

SEQ ID NO: 16962 - RNA, 20 nt, Artificial Sequence
  GATA2 Guide RNA
cauuuuccaucuucaugcuc

SEQ ID NO: 16963 - RNA, 20 nt, Artificial Sequence
  GATA2 Guide RNA
ccauuuuccaucuucaugcu

SEQ ID NO: 16964 - RNA, 20 nt, Artificial Sequence
  GATA2 Guide RNA
ccugggcgcaggggacugcc

SEQ ID NO: 16965 - RNA, 20 nt, Artificial Sequence
  GATA2 Guide RNA
cgcaggggacugccauuuuc

SEQ ID NO: 16966 - RNA, 20 nt, Artificial Sequence
  GATA2 Guide RNA
cggagagcaugaagauggaa

SEQ ID NO: 16967 - RNA, 20 nt, Artificial Sequence
  GATA2 Guide RNA
cugccauuuuccaucuucau

SEQ ID NO: 16968 - RNA, 20 nt, Artificial Sequence
  GATA2 Guide RNA
cugggcgcaggggacugcca

SEQ ID NO: 16969 - RNA, 20 nt, Artificial Sequence
  GATA2 Guide RNA
gaaaauggcaguccccugcg

SEQ ID NO: 16970 - RNA, 20 nt, Artificial Sequence
  GATA2 Guide RNA
gaagauggaaaauggcaguc

SEQ ID NO: 16971 - RNA, 20 nt, Artificial Sequence
  GATA2 Guide RNA
gacggagagcaugaagaugg

SEQ ID NO: 16972 - RNA, 20 nt, Artificial Sequence
  GATA2 Guide RNA
gacugccauuuuccaucuuc

SEQ ID NO: 16973 - RNA, 20 nt, Artificial Sequence
  GATA2 Guide RNA
gagagcaugaagauggaaaa

SEQ ID NO: 16974 - RNA, 20 nt, Artificial Sequence
  GATA2 Guide RNA
gagcaugaagauggaaaaug

SEQ ID NO: 16975 - RNA, 20 nt, Artificial Sequence
  GATA2 Guide RNA
gauggaaaauggcagucccc

SEQ ID NO: 16976 - RNA, 20 nt, Artificial Sequence
  GATA2 Guide RNA
gcaggggacugccauuuucc

SEQ ID NO: 16977 - RNA, 20 nt, Artificial Sequence
  GATA2 Guide RNA
gcaugaagauggaaaauggc

SEQ ID NO: 16978 - RNA, 20 nt, Artificial Sequence
  GATA2 Guide RNA
gccauuuuccaucuucaugc

SEQ ID NO: 16979 - RNA, 20 nt, Artificial Sequence
  GATA2 Guide RNA
gccugggcgcaggggacugc

SEQ ID NO: 16980 - RNA, 20 nt, Artificial Sequence
  GATA2 Guide RNA
gcgcaggggacugccauuuu

SEQ ID NO: 16981 - RNA, 20 nt, Artificial Sequence
  GATA2 Guide RNA
ggaaaauggcaguccccugc

SEQ ID NO: 16982 - RNA, 20 nt, Artificial Sequence
  GATA2 Guide RNA
ggacugccauuuuccaucuu

SEQ ID NO: 16983 - RNA, 20 nt, Artificial Sequence
  GATA2 Guide RNA
ggagagcaugaagauggaaa

SEQ ID NO: 16984 - RNA, 20 nt, Artificial Sequence
  GATA2 Guide RNA
ggcgcaggggacugccauuu

SEQ ID NO: 16985 - RNA, 20 nt, Artificial Sequence
  GATA2 Guide RNA
gggacugccauuuuccaucu

SEQ ID NO: 16986 - RNA, 20 nt, Artificial Sequence
  GATA2 Guide RNA
gggcgcaggggacugccauu

SEQ ID NO: 16987 - RNA, 20 nt, Artificial Sequence
  GATA2 Guide RNA
ggggacugccauuuuccauc

SEQ ID NO: 16988 - RNA, 20 nt, Artificial Sequence
  GATA2 Guide RNA
ugaagauggaaaauggcagu

SEQ ID NO: 16989 - RNA, 20 nt, Artificial Sequence
  GATA2 Guide RNA
ugccauuuuccaucuucaug

SEQ ID NO: 16990 - RNA, 20 nt, Artificial Sequence
  GATA2 Guide RNA
uggaaaauggcaguccccug

SEQ ID NO: 16991 - RNA, 20 nt, Artificial Sequence
  GATA2 Guide RNA
ugggcgcaggggacugccau

SEQ ID NO: 16992 - RNA, 20 nt, Artificial Sequence
  GATA2 Guide RNA
uuuuccaucuucaugcucuc

SEQ ID NO: 16993 - RNA, 21 nt, Artificial Sequence
  GATA2 Guide RNA
aaaauggcaguccccugcgcc

SEQ ID NO: 16994 - RNA, 21 nt, Artificial Sequence
  GATA2 Guide RNA
aaauggcaguccccugcgccc

SEQ ID NO: 16995 - RNA, 21 nt, Artificial Sequence
  GATA2 Guide RNA
aagauggaaaauggcaguccc

SEQ ID NO: 16996 - RNA, 21 nt, Artificial Sequence
  GATA2 Guide RNA
aauggcaguccccugcgccca

SEQ ID NO: 16997 - RNA, 21 nt, Artificial Sequence
  GATA2 Guide RNA
acggagagcaugaagauggaa

SEQ ID NO: 16998 - RNA, 21 nt, Artificial Sequence
  GATA2 Guide RNA
acugccauuuuccaucuucau

SEQ ID NO: 16999 - RNA, 21 nt, Artificial Sequence
  GATA2 Guide RNA
agagcaugaagauggaaaaug

SEQ ID NO: 17000 - RNA, 21 nt, Artificial Sequence
  GATA2 Guide RNA
agauggaaaauggcagucccc

SEQ ID NO: 17001 - RNA, 21 nt, Artificial Sequence
  GATA2 Guide RNA
agcaugaagauggaaaauggc

SEQ ID NO: 17002 - RNA, 21 nt, Artificial Sequence
  GATA2 Guide RNA
aggggacugccauuuuccauc

SEQ ID NO: 17003 - RNA, 21 nt, Artificial Sequence
  GATA2 Guide RNA
augaagauggaaaauggcagu

SEQ ID NO: 17004 - RNA, 21 nt, Artificial Sequence
  GATA2 Guide RNA
auggaaaauggcaguccccug

SEQ ID NO: 17005 - RNA, 21 nt, Artificial Sequence
  GATA2 Guide RNA
auuuuccaucuucaugcucuc

SEQ ID NO: 17006 - RNA, 21 nt, Artificial Sequence
  GATA2 Guide RNA
caggggacugccauuuuccau

SEQ ID NO: 17007 - RNA, 21 nt, Artificial Sequence
  GATA2 Guide RNA
caugaagauggaaaauggcag

SEQ ID NO: 17008 - RNA, 21 nt, Artificial Sequence
  GATA2 Guide RNA
cauuuuccaucuucaugcucu

SEQ ID NO: 17009 - RNA, 21 nt, Artificial Sequence
  GATA2 Guide RNA
ccauuuuccaucuucaugcuc

SEQ ID NO: 17010 - RNA, 21 nt, Artificial Sequence
  GATA2 Guide RNA
ccugggcgcaggggacugcca

SEQ ID NO: 17011 - RNA, 21 nt, Artificial Sequence
  GATA2 Guide RNA
cgcaggggacugccauuuucc

SEQ ID NO: 17012 - RNA, 21 nt, Artificial Sequence
  GATA2 Guide RNA
cggagagcaugaagauggaaa

SEQ ID NO: 17013 - RNA, 21 nt, Artificial Sequence
  GATA2 Guide RNA
cugccauuuuccaucuucaug

SEQ ID NO: 17014 - RNA, 21 nt, Artificial Sequence
  GATA2 Guide RNA
cugggcgcaggggacugccau

SEQ ID NO: 17015 - RNA, 21 nt, Artificial Sequence
  GATA2 Guide RNA
gaaaauggcaguccccugcgc

SEQ ID NO: 17016 - RNA, 21 nt, Artificial Sequence
  GATA2 Guide RNA
gaagauggaaaauggcagucc

SEQ ID NO: 17017 - RNA, 21 nt, Artificial Sequence
  GATA2 Guide RNA
gacggagagcaugaagaugga

SEQ ID NO: 17018 - RNA, 21 nt, Artificial Sequence
  GATA2 Guide RNA
gacugccauuuuccaucuuca

SEQ ID NO: 17019 - RNA, 21 nt, Artificial Sequence
  GATA2 Guide RNA
gagagcaugaagauggaaaau

SEQ ID NO: 17020 - RNA, 21 nt, Artificial Sequence
  GATA2 Guide RNA
gagcaugaagauggaaaaugg

SEQ ID NO: 17021 - RNA, 21 nt, Artificial Sequence
  GATA2 Guide RNA
gauggaaaauggcaguccccu

SEQ ID NO: 17022 - RNA, 21 nt, Artificial Sequence
  GATA2 Guide RNA
gcaggggacugccauuuucca

SEQ ID NO: 17023 - RNA, 21 nt, Artificial Sequence
  GATA2 Guide RNA
gcaugaagauggaaaauggca

SEQ ID NO: 17024 - RNA, 21 nt, Artificial Sequence
  GATA2 Guide RNA
gccauuuuccaucuucaugcu

SEQ ID NO: 17025 - RNA, 21 nt, Artificial Sequence
  GATA2 Guide RNA
gcgcaggggacugccauuuuc

SEQ ID NO: 17026 - RNA, 21 nt, Artificial Sequence
  GATA2 Guide RNA
ggaaaauggcaguccccugcg

SEQ ID NO: 17027 - RNA, 21 nt, Artificial Sequence
  GATA2 Guide RNA
ggacugccauuuuccaucuuc

SEQ ID NO: 17028 - RNA, 21 nt, Artificial Sequence
  GATA2 Guide RNA
ggagagcaugaagauggaaaa

SEQ ID NO: 17029 - RNA, 21 nt, Artificial Sequence
  GATA2 Guide RNA
ggcgcaggggacugccauuuu

SEQ ID NO: 17030 - RNA, 21 nt, Artificial Sequence
  GATA2 Guide RNA
gggacugccauuuuccaucuu

SEQ ID NO: 17031 - RNA, 21 nt, Artificial Sequence
  GATA2 Guide RNA
gggcgcaggggacugccauuu

SEQ ID NO: 17032 - RNA, 21 nt, Artificial Sequence
  GATA2 Guide RNA
ggggacugccauuuuccaucu

SEQ ID NO: 17033 - RNA, 21 nt, Artificial Sequence
  GATA2 Guide RNA
ugaagauggaaaauggcaguc

SEQ ID NO: 17034 - RNA, 21 nt, Artificial Sequence
  GATA2 Guide RNA
ugacggagagcaugaagaugg

SEQ ID NO: 17035 - RNA, 21 nt, Artificial Sequence
  GATA2 Guide RNA
ugccauuuuccaucuucaugc

SEQ ID NO: 17036 - RNA, 21 nt, Artificial Sequence
  GATA2 Guide RNA
uggaaaauggcaguccccugc

SEQ ID NO: 17037 - RNA, 21 nt, Artificial Sequence
  GATA2 Guide RNA
ugggcgcaggggacugccauu

SEQ ID NO: 17038 - RNA, 21 nt, Artificial Sequence
  GATA2 Guide RNA
uuuuccaucuucaugcucucc

SEQ ID NO: 17039 - RNA, 22 nt, Artificial Sequence
  GATA2 Guide RNA
aaaauggcaguccccugcgccc

SEQ ID NO: 17040 - RNA, 22 nt, Artificial Sequence
  GATA2 Guide RNA
aaauggcaguccccugcgccca

SEQ ID NO: 17041 - RNA, 22 nt, Artificial Sequence
  GATA2 Guide RNA
aagauggaaaauggcagucccc

SEQ ID NO: 17042 - RNA, 22 nt, Artificial Sequence
  GATA2 Guide RNA
aauggcaguccccugcgcccag

SEQ ID NO: 17043 - RNA, 22 nt, Artificial Sequence
  GATA2 Guide RNA
acggagagcaugaagauggaaa

SEQ ID NO: 17044 - RNA, 22 nt, Artificial Sequence
  GATA2 Guide RNA
acugccauuuuccaucuucaug

SEQ ID NO: 17045 - RNA, 22 nt, Artificial Sequence
  GATA2 Guide RNA
agagcaugaagauggaaaaugg

SEQ ID NO: 17046 - RNA, 22 nt, Artificial Sequence
  GATA2 Guide RNA
agauggaaaauggcaguccccu

SEQ ID NO: 17047 - RNA, 22 nt, Artificial Sequence
  GATA2 Guide RNA
agcaugaagauggaaaauggca

SEQ ID NO: 17048 - RNA, 22 nt, Artificial Sequence
  GATA2 Guide RNA
aggccugggcgcaggggacugc

SEQ ID NO: 17049 - RNA, 22 nt, Artificial Sequence
  GATA2 Guide RNA
aggggacugccauuuuccaucu

SEQ ID NO: 17050 - RNA, 22 nt, Artificial Sequence
  GATA2 Guide RNA
augaagauggaaaauggcaguc

SEQ ID NO: 17051 - RNA, 22 nt, Artificial Sequence
  GATA2 Guide RNA
auggaaaauggcaguccccugc

SEQ ID NO: 17052 - RNA, 22 nt, Artificial Sequence
  GATA2 Guide RNA
auuuuccaucuucaugcucucc

SEQ ID NO: 17053 - RNA, 22 nt, Artificial Sequence
  GATA2 Guide RNA
caggggacugccauuuuccauc

SEQ ID NO: 17054 - RNA, 22 nt, Artificial Sequence
  GATA2 Guide RNA
caugaagauggaaaauggcagu

SEQ ID NO: 17055 - RNA, 22 nt, Artificial Sequence
  GATA2 Guide RNA
cauuuuccaucuucaugcucuc

SEQ ID NO: 17056 - RNA, 22 nt, Artificial Sequence
  GATA2 Guide RNA
ccauuuuccaucuucaugcucu

SEQ ID NO: 17057 - RNA, 22 nt, Artificial Sequence
  GATA2 Guide RNA
ccugggcgcaggggacugccau

SEQ ID NO: 17058 - RNA, 22 nt, Artificial Sequence
  GATA2 Guide RNA
cgcaggggacugccauuuucca

SEQ ID NO: 17059 - RNA, 22 nt, Artificial Sequence
  GATA2 Guide RNA
cggagagcaugaagauggaaaa

SEQ ID NO: 17060 - RNA, 22 nt, Artificial Sequence
  GATA2 Guide RNA
cugacggagagcaugaagaugg

SEQ ID NO: 17061 - RNA, 22 nt, Artificial Sequence
  GATA2 Guide RNA
cugccauuuuccaucuucaugc

SEQ ID NO: 17062 - RNA, 22 nt, Artificial Sequence
  GATA2 Guide RNA
cugggcgcaggggacugccauu

SEQ ID NO: 17063 - RNA, 22 nt, Artificial Sequence
  GATA2 Guide RNA
gaaaauggcaguccccugcgcc

SEQ ID NO: 17064 - RNA, 22 nt, Artificial Sequence
  GATA2 Guide RNA
gaagauggaaaauggcaguccc

SEQ ID NO: 17065 - RNA, 22 nt, Artificial Sequence
  GATA2 Guide RNA
gacggagagcaugaagauggaa

SEQ ID NO: 17066 - RNA, 22 nt, Artificial Sequence
  GATA2 Guide RNA
gacugccauuuuccaucuucau

SEQ ID NO: 17067 - RNA, 22 nt, Artificial Sequence
  GATA2 Guide RNA
gagagcaugaagauggaaaaug

SEQ ID NO: 17068 - RNA, 22 nt, Artificial Sequence
  GATA2 Guide RNA
gagcaugaagauggaaaauggc

SEQ ID NO: 17069 - RNA, 22 nt, Artificial Sequence
  GATA2 Guide RNA
gauggaaaauggcaguccccug

SEQ ID NO: 17070 - RNA, 22 nt, Artificial Sequence
  GATA2 Guide RNA
gcaggggacugccauuuuccau

SEQ ID NO: 17071 - RNA, 22 nt, Artificial Sequence
  GATA2 Guide RNA
gcaugaagauggaaaauggcag

SEQ ID NO: 17072 - RNA, 22 nt, Artificial Sequence
  GATA2 Guide RNA
gccauuuuccaucuucaugcuc

SEQ ID NO: 17073 - RNA, 22 nt, Artificial Sequence
  GATA2 Guide RNA
gccugggcgcaggggacugcca

SEQ ID NO: 17074 - RNA, 22 nt, Artificial Sequence
  GATA2 Guide RNA
gcgcaggggacugccauuuucc

SEQ ID NO: 17075 - RNA, 22 nt, Artificial Sequence
  GATA2 Guide RNA
ggaaaauggcaguccccugcgc

SEQ ID NO: 17076 - RNA, 22 nt, Artificial Sequence
  GATA2 Guide RNA
ggacugccauuuuccaucuuca

SEQ ID NO: 17077 - RNA, 22 nt, Artificial Sequence
  GATA2 Guide RNA
ggagagcaugaagauggaaaau

SEQ ID NO: 17078 - RNA, 22 nt, Artificial Sequence
  GATA2 Guide RNA
ggcgcaggggacugccauuuuc

SEQ ID NO: 17079 - RNA, 22 nt, Artificial Sequence
  GATA2 Guide RNA
gggacugccauuuuccaucuuc

SEQ ID NO: 17080 - RNA, 22 nt, Artificial Sequence
  GATA2 Guide RNA
gggcgcaggggacugccauuuu

SEQ ID NO: 17081 - RNA, 22 nt, Artificial Sequence
  GATA2 Guide RNA
ggggacugccauuuuccaucuu

SEQ ID NO: 17082 - RNA, 22 nt, Artificial Sequence
  GATA2 Guide RNA
ugaagauggaaaauggcagucc

SEQ ID NO: 17083 - RNA, 22 nt, Artificial Sequence
  GATA2 Guide RNA
ugacggagagcaugaagaugga

SEQ ID NO: 17084 - RNA, 22 nt, Artificial Sequence
  GATA2 Guide RNA
ugccauuuuccaucuucaugcu

SEQ ID NO: 17085 - RNA, 22 nt, Artificial Sequence
  GATA2 Guide RNA
uggaaaauggcaguccccugcg

SEQ ID NO: 17086 - RNA, 22 nt, Artificial Sequence
  GATA2 Guide RNA
ugggcgcaggggacugccauuu

SEQ ID NO: 17087 - RNA, 22 nt, Artificial Sequence
  GATA2 Guide RNA
uuuuccaucuucaugcucuccg

SEQ ID NO: 17088 - RNA, 20 nt, Artificial Sequence
  GATA2 Guide RNA
aagauagaaaguggcagucc

SEQ ID NO: 17089 - RNA, 20 nt, Artificial Sequence
  GATA2 Guide RNA
acggagagcaugaagauaga

SEQ ID NO: 17090 - RNA, 20 nt, Artificial Sequence
  GATA2 Guide RNA
acugacggagagcaugaaga

SEQ ID NO: 17091 - RNA, 20 nt, Artificial Sequence
  GATA2 Guide RNA
acugccacuuucuaucuuca

SEQ ID NO: 17092 - RNA, 20 nt, Artificial Sequence
  GATA2 Guide RNA
acuuucuaucuucaugcucu

SEQ ID NO: 17093 - RNA, 20 nt, Artificial Sequence
  GATA2 Guide RNA
agagcaugaagauagaaagu

SEQ ID NO: 17094 - RNA, 20 nt, Artificial Sequence
  GATA2 Guide RNA
agauagaaaguggcaguccc

SEQ ID NO: 17095 - RNA, 20 nt, Artificial Sequence
  GATA2 Guide RNA
agcaugaagauagaaagugg

SEQ ID NO: 17096 - RNA, 20 nt, Artificial Sequence
  GATA2 Guide RNA
aggggacugccacuuucuau

SEQ ID NO: 17097 - RNA, 20 nt, Artificial Sequence
  GATA2 Guide RNA
auagaaaguggcaguccccu

SEQ ID NO: 17098 - RNA, 20 nt, Artificial Sequence
  GATA2 Guide RNA
augaagauagaaaguggcag

SEQ ID NO: 17099 - RNA, 20 nt, Artificial Sequence
  GATA2 Guide RNA
cacugacggagagcaugaag

SEQ ID NO: 17100 - RNA, 20 nt, Artificial Sequence
  GATA2 Guide RNA
cacuuucuaucuucaugcuc

SEQ ID NO: 17101 - RNA, 20 nt, Artificial Sequence
  GATA2 Guide RNA
caggggacugccacuuucua

SEQ ID NO: 17102 - RNA, 20 nt, Artificial Sequence
  GATA2 Guide RNA
caugaagauagaaaguggca

SEQ ID NO: 17103 - RNA, 20 nt, Artificial Sequence
  GATA2 Guide RNA
ccacuuucuaucuucaugcu

SEQ ID NO: 17104 - RNA, 20 nt, Artificial Sequence
  GATA2 Guide RNA
cgcaggggacugccacuuuc

SEQ ID NO: 17105 - RNA, 20 nt, Artificial Sequence
  GATA2 Guide RNA
cggagagcaugaagauagaa

SEQ ID NO: 17106 - RNA, 20 nt, Artificial Sequence
  GATA2 Guide RNA
cuaucuucaugcucuccguc

SEQ ID NO: 17107 - RNA, 20 nt, Artificial Sequence
  GATA2 Guide RNA
cugacggagagcaugaagau

SEQ ID NO: 17108 - RNA, 20 nt, Artificial Sequence
  GATA2 Guide RNA
cugccacuuucuaucuucau

SEQ ID NO: 17109 - RNA, 20 nt, Artificial Sequence
  GATA2 Guide RNA
cuuucuaucuucaugcucuc

SEQ ID NO: 17110 - RNA, 20 nt, Artificial Sequence
  GATA2 Guide RNA
gaagauagaaaguggcaguc

SEQ ID NO: 17111 - RNA, 20 nt, Artificial Sequence
  GATA2 Guide RNA
gacggagagcaugaagauag

SEQ ID NO: 17112 - RNA, 20 nt, Artificial Sequence
  GATA2 Guide RNA
gacugccacuuucuaucuuc

SEQ ID NO: 17113 - RNA, 20 nt, Artificial Sequence
  GATA2 Guide RNA
gagagcaugaagauagaaag

SEQ ID NO: 17114 - RNA, 20 nt, Artificial Sequence
  GATA2 Guide RNA
gagcaugaagauagaaagug

SEQ ID NO: 17115 - RNA, 20 nt, Artificial Sequence
  GATA2 Guide RNA
gauagaaaguggcagucccc

SEQ ID NO: 17116 - RNA, 20 nt, Artificial Sequence
  GATA2 Guide RNA
gcaggggacugccacuuucu

SEQ ID NO: 17117 - RNA, 20 nt, Artificial Sequence
  GATA2 Guide RNA
gcaugaagauagaaaguggc

SEQ ID NO: 17118 - RNA, 20 nt, Artificial Sequence
  GATA2 Guide RNA
gccacuuucuaucuucaugc

SEQ ID NO: 17119 - RNA, 20 nt, Artificial Sequence
  GATA2 Guide RNA
gcgcaggggacugccacuuu

SEQ ID NO: 17120 - RNA, 20 nt, Artificial Sequence
  GATA2 Guide RNA
ggacugccacuuucuaucuu

SEQ ID NO: 17121 - RNA, 20 nt, Artificial Sequence
  GATA2 Guide RNA
ggagagcaugaagauagaaa

SEQ ID NO: 17122 - RNA, 20 nt, Artificial Sequence
  GATA2 Guide RNA
ggcgcaggggacugccacuu

SEQ ID NO: 17123 - RNA, 20 nt, Artificial Sequence
  GATA2 Guide RNA
gggacugccacuuucuaucu

SEQ ID NO: 17124 - RNA, 20 nt, Artificial Sequence
  GATA2 Guide RNA
ggggacugccacuuucuauc

SEQ ID NO: 17125 - RNA, 20 nt, Artificial Sequence
  GATA2 Guide RNA
uagaaaguggcaguccccug

SEQ ID NO: 17126 - RNA, 20 nt, Artificial Sequence
  GATA2 Guide RNA
uaucuucaugcucuccguca

SEQ ID NO: 17127 - RNA, 20 nt, Artificial Sequence
  GATA2 Guide RNA
ucacugacggagagcaugaa

SEQ ID NO: 17128 - RNA, 20 nt, Artificial Sequence
  GATA2 Guide RNA
ucuaucuucaugcucuccgu

SEQ ID NO: 17129 - RNA, 20 nt, Artificial Sequence
  GATA2 Guide RNA
ugaagauagaaaguggcagu

SEQ ID NO: 17130 - RNA, 20 nt, Artificial Sequence
  GATA2 Guide RNA
ugacggagagcaugaagaua

SEQ ID NO: 17131 - RNA, 20 nt, Artificial Sequence
  GATA2 Guide RNA
ugccacuuucuaucuucaug

SEQ ID NO: 17132 - RNA, 20 nt, Artificial Sequence
  GATA2 Guide RNA
uucuaucuucaugcucuccg

SEQ ID NO: 17133 - RNA, 20 nt, Artificial Sequence
  GATA2 Guide RNA
uuucuaucuucaugcucucc

SEQ ID NO: 17134 - RNA, 21 nt, Artificial Sequence
  GATA2 Guide RNA
aagauagaaaguggcaguccc

SEQ ID NO: 17135 - RNA, 21 nt, Artificial Sequence
  GATA2 Guide RNA
acggagagcaugaagauagaa

SEQ ID NO: 17136 - RNA, 21 nt, Artificial Sequence
  GATA2 Guide RNA
acugacggagagcaugaagau

SEQ ID NO: 17137 - RNA, 21 nt, Artificial Sequence
  GATA2 Guide RNA
acugccacuuucuaucuucau

SEQ ID NO: 17138 - RNA, 21 nt, Artificial Sequence
  GATA2 Guide RNA
acuuucuaucuucaugcucuc

SEQ ID NO: 17139 - RNA, 21 nt, Artificial Sequence
  GATA2 Guide RNA
agagcaugaagauagaaagug

SEQ ID NO: 17140 - RNA, 21 nt, Artificial Sequence
  GATA2 Guide RNA
agauagaaaguggcagucccc

SEQ ID NO: 17141 - RNA, 21 nt, Artificial Sequence
  GATA2 Guide RNA
agcaugaagauagaaaguggc

SEQ ID NO: 17142 - RNA, 21 nt, Artificial Sequence
  GATA2 Guide RNA
aggggacugccacuuucuauc

SEQ ID NO: 17143 - RNA, 21 nt, Artificial Sequence
  GATA2 Guide RNA
auagaaaguggcaguccccug

SEQ ID NO: 17144 - RNA, 21 nt, Artificial Sequence
  GATA2 Guide RNA
augaagauagaaaguggcagu

SEQ ID NO: 17145 - RNA, 21 nt, Artificial Sequence
  GATA2 Guide RNA
cacugacggagagcaugaaga

SEQ ID NO: 17146 - RNA, 21 nt, Artificial Sequence
  GATA2 Guide RNA
cacuuucuaucuucaugcucu

SEQ ID NO: 17147 - RNA, 21 nt, Artificial Sequence
  GATA2 Guide RNA
caggggacugccacuuucuau

SEQ ID NO: 17148 - RNA, 21 nt, Artificial Sequence
  GATA2 Guide RNA
caugaagauagaaaguggcag

SEQ ID NO: 17149 - RNA, 21 nt, Artificial Sequence
  GATA2 Guide RNA
ccacuuucuaucuucaugcuc

SEQ ID NO: 17150 - RNA, 21 nt, Artificial Sequence
  GATA2 Guide RNA
cgcaggggacugccacuuucu

SEQ ID NO: 17151 - RNA, 21 nt, Artificial Sequence
  GATA2 Guide RNA
cggagagcaugaagauagaaa

SEQ ID NO: 17152 - RNA, 21 nt, Artificial Sequence
  GATA2 Guide RNA
cuaucuucaugcucuccguca

SEQ ID NO: 17153 - RNA, 21 nt, Artificial Sequence
  GATA2 Guide RNA
cugacggagagcaugaagaua

SEQ ID NO: 17154 - RNA, 21 nt, Artificial Sequence
  GATA2 Guide RNA
cugccacuuucuaucuucaug

SEQ ID NO: 17155 - RNA, 21 nt, Artificial Sequence
  GATA2 Guide RNA
cuuucuaucuucaugcucucc

SEQ ID NO: 17156 - RNA, 21 nt, Artificial Sequence
  GATA2 Guide RNA
gaagauagaaaguggcagucc

SEQ ID NO: 17157 - RNA, 21 nt, Artificial Sequence
  GATA2 Guide RNA
gacggagagcaugaagauaga

SEQ ID NO: 17158 - RNA, 21 nt, Artificial Sequence
  GATA2 Guide RNA
gacugccacuuucuaucuuca

SEQ ID NO: 17159 - RNA, 21 nt, Artificial Sequence
  GATA2 Guide RNA
gagagcaugaagauagaaagu

SEQ ID NO: 17160 - RNA, 21 nt, Artificial Sequence
  GATA2 Guide RNA
gagcaugaagauagaaagugg

SEQ ID NO: 17161 - RNA, 21 nt, Artificial Sequence
  GATA2 Guide RNA
gauagaaaguggcaguccccu

SEQ ID NO: 17162 - RNA, 21 nt, Artificial Sequence
  GATA2 Guide RNA
gcaggggacugccacuuucua

SEQ ID NO: 17163 - RNA, 21 nt, Artificial Sequence
  GATA2 Guide RNA
gcaugaagauagaaaguggca

SEQ ID NO: 17164 - RNA, 21 nt, Artificial Sequence
  GATA2 Guide RNA
gccacuuucuaucuucaugcu

SEQ ID NO: 17165 - RNA, 21 nt, Artificial Sequence
  GATA2 Guide RNA
gcgcaggggacugccacuuuc

SEQ ID NO: 17166 - RNA, 21 nt, Artificial Sequence
  GATA2 Guide RNA
ggacugccacuuucuaucuuc

SEQ ID NO: 17167 - RNA, 21 nt, Artificial Sequence
  GATA2 Guide RNA
ggagagcaugaagauagaaag

SEQ ID NO: 17168 - RNA, 21 nt, Artificial Sequence
  GATA2 Guide RNA
ggcgcaggggacugccacuuu

SEQ ID NO: 17169 - RNA, 21 nt, Artificial Sequence
  GATA2 Guide RNA
gggacugccacuuucuaucuu

SEQ ID NO: 17170 - RNA, 21 nt, Artificial Sequence
  GATA2 Guide RNA
gggcgcaggggacugccacuu

SEQ ID NO: 17171 - RNA, 21 nt, Artificial Sequence
  GATA2 Guide RNA
ggggacugccacuuucuaucu

SEQ ID NO: 17172 - RNA, 21 nt, Artificial Sequence
  GATA2 Guide RNA
gucacugacggagagcaugaa

SEQ ID NO: 17173 - RNA, 21 nt, Artificial Sequence
  GATA2 Guide RNA
uagaaaguggcaguccccugc

SEQ ID NO: 17174 - RNA, 21 nt, Artificial Sequence
  GATA2 Guide RNA
uaucuucaugcucuccgucag

SEQ ID NO: 17175 - RNA, 21 nt, Artificial Sequence
  GATA2 Guide RNA
ucacugacggagagcaugaag

SEQ ID NO: 17176 - RNA, 21 nt, Artificial Sequence
  GATA2 Guide RNA
ucuaucuucaugcucuccguc

SEQ ID NO: 17177 - RNA, 21 nt, Artificial Sequence
  GATA2 Guide RNA
ugaagauagaaaguggcaguc

SEQ ID NO: 17178 - RNA, 21 nt, Artificial Sequence
  GATA2 Guide RNA
ugacggagagcaugaagauag

SEQ ID NO: 17179 - RNA, 21 nt, Artificial Sequence
  GATA2 Guide RNA
ugccacuuucuaucuucaugc

SEQ ID NO: 17180 - RNA, 21 nt, Artificial Sequence
  GATA2 Guide RNA
uucuaucuucaugcucuccgu

SEQ ID NO: 17181 - RNA, 21 nt, Artificial Sequence
  GATA2 Guide RNA
uuucuaucuucaugcucuccg

SEQ ID NO: 17182 - RNA, 22 nt, Artificial Sequence
  GATA2 Guide RNA
aagauagaaaguggcagucccc

SEQ ID NO: 17183 - RNA, 22 nt, Artificial Sequence
  GATA2 Guide RNA
acggagagcaugaagauagaaa

SEQ ID NO: 17184 - RNA, 22 nt, Artificial Sequence
  GATA2 Guide RNA
acugacggagagcaugaagaua

SEQ ID NO: 17185 - RNA, 22 nt, Artificial Sequence
  GATA2 Guide RNA
acugccacuuucuaucuucaug

SEQ ID NO: 17186 - RNA, 22 nt, Artificial Sequence
  GATA2 Guide RNA
acuuucuaucuucaugcucucc

SEQ ID NO: 17187 - RNA, 22 nt, Artificial Sequence
  GATA2 Guide RNA
agagcaugaagauagaaagugg

SEQ ID NO: 17188 - RNA, 22 nt, Artificial Sequence
  GATA2 Guide RNA
agauagaaaguggcaguccccu

SEQ ID NO: 17189 - RNA, 22 nt, Artificial Sequence
  GATA2 Guide RNA
agcaugaagauagaaaguggca

SEQ ID NO: 17190 - RNA, 22 nt, Artificial Sequence
  GATA2 Guide RNA
aggggacugccacuuucuaucu

SEQ ID NO: 17191 - RNA, 22 nt, Artificial Sequence
  GATA2 Guide RNA
auagaaaguggcaguccccugc

SEQ ID NO: 17192 - RNA, 22 nt, Artificial Sequence
  GATA2 Guide RNA
augaagauagaaaguggcaguc

SEQ ID NO: 17193 - RNA, 22 nt, Artificial Sequence
  GATA2 Guide RNA
cacugacggagagcaugaagau

SEQ ID NO: 17194 - RNA, 22 nt, Artificial Sequence
  GATA2 Guide RNA
cacuuucuaucuucaugcucuc

SEQ ID NO: 17195 - RNA, 22 nt, Artificial Sequence
  GATA2 Guide RNA
caggggacugccacuuucuauc

SEQ ID NO: 17196 - RNA, 22 nt, Artificial Sequence
  GATA2 Guide RNA
caugaagauagaaaguggcagu

SEQ ID NO: 17197 - RNA, 22 nt, Artificial Sequence
  GATA2 Guide RNA
ccacuuucuaucuucaugcucu

SEQ ID NO: 17198 - RNA, 22 nt, Artificial Sequence
  GATA2 Guide RNA
cgcaggggacugccacuuucua

SEQ ID NO: 17199 - RNA, 22 nt, Artificial Sequence
  GATA2 Guide RNA
cggagagcaugaagauagaaag

SEQ ID NO: 17200 - RNA, 22 nt, Artificial Sequence
  GATA2 Guide RNA
cuaucuucaugcucuccgucag

SEQ ID NO: 17201 - RNA, 22 nt, Artificial Sequence
  GATA2 Guide RNA
cugacggagagcaugaagauag

SEQ ID NO: 17202 - RNA, 22 nt, Artificial Sequence
  GATA2 Guide RNA
cugccacuuucuaucuucaugc

SEQ ID NO: 17203 - RNA, 22 nt, Artificial Sequence
  GATA2 Guide RNA
cuuucuaucuucaugcucuccg

SEQ ID NO: 17204 - RNA, 22 nt, Artificial Sequence
  GATA2 Guide RNA
gaagauagaaaguggcaguccc

SEQ ID NO: 17205 - RNA, 22 nt, Artificial Sequence
  GATA2 Guide RNA
gacggagagcaugaagauagaa

SEQ ID NO: 17206 - RNA, 22 nt, Artificial Sequence
  GATA2 Guide RNA
gacugccacuuucuaucuucau

SEQ ID NO: 17207 - RNA, 22 nt, Artificial Sequence
  GATA2 Guide RNA
gagagcaugaagauagaaagug

SEQ ID NO: 17208 - RNA, 22 nt, Artificial Sequence
  GATA2 Guide RNA
gagcaugaagauagaaaguggc

SEQ ID NO: 17209 - RNA, 22 nt, Artificial Sequence
  GATA2 Guide RNA
gauagaaaguggcaguccccug

SEQ ID NO: 17210 - RNA, 22 nt, Artificial Sequence
  GATA2 Guide RNA
gcaggggacugccacuuucuau

SEQ ID NO: 17211 - RNA, 22 nt, Artificial Sequence
  GATA2 Guide RNA
gcaugaagauagaaaguggcag

SEQ ID NO: 17212 - RNA, 22 nt, Artificial Sequence
  GATA2 Guide RNA
gccacuuucuaucuucaugcuc

SEQ ID NO: 17213 - RNA, 22 nt, Artificial Sequence
  GATA2 Guide RNA
gcgcaggggacugccacuuucu

SEQ ID NO: 17214 - RNA, 22 nt, Artificial Sequence
  GATA2 Guide RNA
ggacugccacuuucuaucuuca

SEQ ID NO: 17215 - RNA, 22 nt, Artificial Sequence
  GATA2 Guide RNA
ggagagcaugaagauagaaagu

SEQ ID NO: 17216 - RNA, 22 nt, Artificial Sequence
  GATA2 Guide RNA
ggcgcaggggacugccacuuuc

SEQ ID NO: 17217 - RNA, 22 nt, Artificial Sequence
  GATA2 Guide RNA
gggacugccacuuucuaucuuc

SEQ ID NO: 17218 - RNA, 22 nt, Artificial Sequence
  GATA2 Guide RNA
gggcgcaggggacugccacuuu

SEQ ID NO: 17219 - RNA, 22 nt, Artificial Sequence
  GATA2 Guide RNA
ggggacugccacuuucuaucuu

SEQ ID NO: 17220 - RNA, 22 nt, Artificial Sequence
  GATA2 Guide RNA
gucacugacggagagcaugaag

SEQ ID NO: 17221 - RNA, 22 nt, Artificial Sequence
  GATA2 Guide RNA
uagaaaguggcaguccccugcg

SEQ ID NO: 17222 - RNA, 22 nt, Artificial Sequence
  GATA2 Guide RNA
uaucuucaugcucuccgucagu

SEQ ID NO: 17223 - RNA, 22 nt, Artificial Sequence
  GATA2 Guide RNA
ucacugacggagagcaugaaga

SEQ ID NO: 17224 - RNA, 22 nt, Artificial Sequence
  GATA2 Guide RNA
ucuaucuucaugcucuccguca

SEQ ID NO: 17225 - RNA, 22 nt, Artificial Sequence
  GATA2 Guide RNA
ugaagauagaaaguggcagucc

SEQ ID NO: 17226 - RNA, 22 nt, Artificial Sequence
  GATA2 Guide RNA
ugacggagagcaugaagauaga

SEQ ID NO: 17227 - RNA, 22 nt, Artificial Sequence
  GATA2 Guide RNA
ugccacuuucuaucuucaugcu

SEQ ID NO: 17228 - RNA, 22 nt, Artificial Sequence
  GATA2 Guide RNA
ugggcgcaggggacugccacuu

SEQ ID NO: 17229 - RNA, 22 nt, Artificial Sequence
  GATA2 Guide RNA
ugucacugacggagagcaugaa

SEQ ID NO: 17230 - RNA, 22 nt, Artificial Sequence
  GATA2 Guide RNA
uucuaucuucaugcucuccguc

SEQ ID NO: 17231 - RNA, 22 nt, Artificial Sequence
  GATA2 Guide RNA
uuucuaucuucaugcucuccgu

SEQ ID NO: 17232 - RNA, 20 nt, Artificial Sequence
  GATA2 Guide RNA
accaggugucacugacggag

SEQ ID NO: 17233 - RNA, 20 nt, Artificial Sequence
  GATA2 Guide RNA
acggagagccugaagaugga

SEQ ID NO: 17234 - RNA, 20 nt, Artificial Sequence
  GATA2 Guide RNA
acugacggagagccugaaga

SEQ ID NO: 17235 - RNA, 20 nt, Artificial Sequence
  GATA2 Guide RNA
acugccacuuuccaucuuca

SEQ ID NO: 17236 - RNA, 20 nt, Artificial Sequence
  GATA2 Guide RNA
acuuuccaucuucaggcucu

SEQ ID NO: 17237 - RNA, 20 nt, Artificial Sequence
  GATA2 Guide RNA
agagccugaagauggaaagu

SEQ ID NO: 17238 - RNA, 20 nt, Artificial Sequence
  GATA2 Guide RNA
agccugaagauggaaagugg

SEQ ID NO: 17239 - RNA, 20 nt, Artificial Sequence
  GATA2 Guide RNA
aggcucuccgucagugacac

SEQ ID NO: 17240 - RNA, 20 nt, Artificial Sequence
  GATA2 Guide RNA
aggugucacugacggagagc

SEQ ID NO: 17241 - RNA, 20 nt, Artificial Sequence
  GATA2 Guide RNA
aucuucaggcucuccgucag

SEQ ID NO: 17242 - RNA, 20 nt, Artificial Sequence
  GATA2 Guide RNA
cacugacggagagccugaag

SEQ ID NO: 17243 - RNA, 20 nt, Artificial Sequence
  GATA2 Guide RNA
cacuuuccaucuucaggcuc

SEQ ID NO: 17244 - RNA, 20 nt, Artificial Sequence
  GATA2 Guide RNA
caggcucuccgucagugaca

SEQ ID NO: 17245 - RNA, 20 nt, Artificial Sequence
  GATA2 Guide RNA
caggugucacugacggagag

SEQ ID NO: 17246 - RNA, 20 nt, Artificial Sequence
  GATA2 Guide RNA
caucuucaggcucuccguca

SEQ ID NO: 17247 - RNA, 20 nt, Artificial Sequence
  GATA2 Guide RNA
ccacuuuccaucuucaggcu

SEQ ID NO: 17248 - RNA, 20 nt, Artificial Sequence
  GATA2 Guide RNA
ccaggugucacugacggaga

SEQ ID NO: 17249 - RNA, 20 nt, Artificial Sequence
  GATA2 Guide RNA
ccaucuucaggcucuccguc

SEQ ID NO: 17250 - RNA, 20 nt, Artificial Sequence
  GATA2 Guide RNA
ccugaagauggaaaguggca

SEQ ID NO: 17251 - RNA, 20 nt, Artificial Sequence
  GATA2 Guide RNA
cggagagccugaagauggaa

SEQ ID NO: 17252 - RNA, 20 nt, Artificial Sequence
  GATA2 Guide RNA
cugacggagagccugaagau

SEQ ID NO: 17253 - RNA, 20 nt, Artificial Sequence
  GATA2 Guide RNA
cugccacuuuccaucuucag

SEQ ID NO: 17254 - RNA, 20 nt, Artificial Sequence
  GATA2 Guide RNA
cuucaggcucuccgucagug

SEQ ID NO: 17255 - RNA, 20 nt, Artificial Sequence
  GATA2 Guide RNA
cuuuccaucuucaggcucuc

SEQ ID NO: 17256 - RNA, 20 nt, Artificial Sequence
  GATA2 Guide RNA
gacggagagccugaagaugg

SEQ ID NO: 17257 - RNA, 20 nt, Artificial Sequence
  GATA2 Guide RNA
gacugccacuuuccaucuuc

SEQ ID NO: 17258 - RNA, 20 nt, Artificial Sequence
  GATA2 Guide RNA
gagagccugaagauggaaag

SEQ ID NO: 17259 - RNA, 20 nt, Artificial Sequence
  GATA2 Guide RNA
gagccugaagauggaaagug

SEQ ID NO: 17260 - RNA, 20 nt, Artificial Sequence
  GATA2 Guide RNA
gccacuuuccaucuucaggc

SEQ ID NO: 17261 - RNA, 20 nt, Artificial Sequence
  GATA2 Guide RNA
gccugaagauggaaaguggc

SEQ ID NO: 17262 - RNA, 20 nt, Artificial Sequence
  GATA2 Guide RNA
ggacugccacuuuccaucuu

SEQ ID NO: 17263 - RNA, 20 nt, Artificial Sequence
  GATA2 Guide RNA
ggagagccugaagauggaaa

SEQ ID NO: 17264 - RNA, 20 nt, Artificial Sequence
  GATA2 Guide RNA
ggcucuccgucagugacacc

SEQ ID NO: 17265 - RNA, 20 nt, Artificial Sequence
  GATA2 Guide RNA
ggugucacugacggagagcc

SEQ ID NO: 17266 - RNA, 20 nt, Artificial Sequence
  GATA2 Guide RNA
gucacugacggagagccuga

SEQ ID NO: 17267 - RNA, 20 nt, Artificial Sequence
  GATA2 Guide RNA
gugucacugacggagagccu

SEQ ID NO: 17268 - RNA, 20 nt, Artificial Sequence
  GATA2 Guide RNA
ucacugacggagagccugaa

SEQ ID NO: 17269 - RNA, 20 nt, Artificial Sequence
  GATA2 Guide RNA
ucaggcucuccgucagugac

SEQ ID NO: 17270 - RNA, 20 nt, Artificial Sequence
  GATA2 Guide RNA
uccaucuucaggcucuccgu

SEQ ID NO: 17271 - RNA, 20 nt, Artificial Sequence
  GATA2 Guide RNA
ucuucaggcucuccgucagu

SEQ ID NO: 17272 - RNA, 20 nt, Artificial Sequence
  GATA2 Guide RNA
ugacggagagccugaagaug

SEQ ID NO: 17273 - RNA, 20 nt, Artificial Sequence
  GATA2 Guide RNA
ugccacuuuccaucuucagg

SEQ ID NO: 17274 - RNA, 20 nt, Artificial Sequence
  GATA2 Guide RNA
ugucacugacggagagccug

SEQ ID NO: 17275 - RNA, 20 nt, Artificial Sequence
  GATA2 Guide RNA
uucaggcucuccgucaguga

SEQ ID NO: 17276 - RNA, 20 nt, Artificial Sequence
  GATA2 Guide RNA
uuccaucuucaggcucuccg

SEQ ID NO: 17277 - RNA, 20 nt, Artificial Sequence
  GATA2 Guide RNA
uuuccaucuucaggcucucc

SEQ ID NO: 17278 - RNA, 21 nt, Artificial Sequence
  GATA2 Guide RNA
accaggugucacugacggaga

SEQ ID NO: 17279 - RNA, 21 nt, Artificial Sequence
  GATA2 Guide RNA
acggagagccugaagauggaa

SEQ ID NO: 17280 - RNA, 21 nt, Artificial Sequence
  GATA2 Guide RNA
acugacggagagccugaagau

SEQ ID NO: 17281 - RNA, 21 nt, Artificial Sequence
  GATA2 Guide RNA
acugccacuuuccaucuucag

SEQ ID NO: 17282 - RNA, 21 nt, Artificial Sequence
  GATA2 Guide RNA
acuuuccaucuucaggcucuc

SEQ ID NO: 17283 - RNA, 21 nt, Artificial Sequence
  GATA2 Guide RNA
agagccugaagauggaaagug

SEQ ID NO: 17284 - RNA, 21 nt, Artificial Sequence
  GATA2 Guide RNA
agccugaagauggaaaguggc

SEQ ID NO: 17285 - RNA, 21 nt, Artificial Sequence
  GATA2 Guide RNA
aggcucuccgucagugacacc

SEQ ID NO: 17286 - RNA, 21 nt, Artificial Sequence
  GATA2 Guide RNA
aggugucacugacggagagcc

SEQ ID NO: 17287 - RNA, 21 nt, Artificial Sequence
  GATA2 Guide RNA
aucuucaggcucuccgucagu

SEQ ID NO: 17288 - RNA, 21 nt, Artificial Sequence
  GATA2 Guide RNA
cacugacggagagccugaaga

SEQ ID NO: 17289 - RNA, 21 nt, Artificial Sequence
  GATA2 Guide RNA
cacuuuccaucuucaggcucu

SEQ ID NO: 17290 - RNA, 21 nt, Artificial Sequence
  GATA2 Guide RNA
caggcucuccgucagugacac

SEQ ID NO: 17291 - RNA, 21 nt, Artificial Sequence
  GATA2 Guide RNA
caggugucacugacggagagc

SEQ ID NO: 17292 - RNA, 21 nt, Artificial Sequence
  GATA2 Guide RNA
caucuucaggcucuccgucag

SEQ ID NO: 17293 - RNA, 21 nt, Artificial Sequence
  GATA2 Guide RNA
ccacuuuccaucuucaggcuc

SEQ ID NO: 17294 - RNA, 21 nt, Artificial Sequence
  GATA2 Guide RNA
ccaggugucacugacggagag

SEQ ID NO: 17295 - RNA, 21 nt, Artificial Sequence
  GATA2 Guide RNA
ccaucuucaggcucuccguca

SEQ ID NO: 17296 - RNA, 21 nt, Artificial Sequence
  GATA2 Guide RNA
ccugaagauggaaaguggcag

SEQ ID NO: 17297 - RNA, 21 nt, Artificial Sequence
  GATA2 Guide RNA
cggagagccugaagauggaaa

SEQ ID NO: 17298 - RNA, 21 nt, Artificial Sequence
  GATA2 Guide RNA
cugacggagagccugaagaug

SEQ ID NO: 17299 - RNA, 21 nt, Artificial Sequence
  GATA2 Guide RNA
cugccacuuuccaucuucagg

SEQ ID NO: 17300 - RNA, 21 nt, Artificial Sequence
  GATA2 Guide RNA
cuucaggcucuccgucaguga

SEQ ID NO: 17301 - RNA, 21 nt, Artificial Sequence
  GATA2 Guide RNA
cuuuccaucuucaggcucucc

SEQ ID NO: 17302 - RNA, 21 nt, Artificial Sequence
  GATA2 Guide RNA
gacggagagccugaagaugga

SEQ ID NO: 17303 - RNA, 21 nt, Artificial Sequence
  GATA2 Guide RNA
gacugccacuuuccaucuuca

SEQ ID NO: 17304 - RNA, 21 nt, Artificial Sequence
  GATA2 Guide RNA
gagagccugaagauggaaagu

SEQ ID NO: 17305 - RNA, 21 nt, Artificial Sequence
  GATA2 Guide RNA
gagccugaagauggaaagugg

SEQ ID NO: 17306 - RNA, 21 nt, Artificial Sequence
  GATA2 Guide RNA
gccacuuuccaucuucaggcu

SEQ ID NO: 17307 - RNA, 21 nt, Artificial Sequence
  GATA2 Guide RNA
gccugaagauggaaaguggca

SEQ ID NO: 17308 - RNA, 21 nt, Artificial Sequence
  GATA2 Guide RNA
ggacugccacuuuccaucuuc

SEQ ID NO: 17309 - RNA, 21 nt, Artificial Sequence
  GATA2 Guide RNA
ggagagccugaagauggaaag

SEQ ID NO: 17310 - RNA, 21 nt, Artificial Sequence
  GATA2 Guide RNA
ggcucuccgucagugacaccu

SEQ ID NO: 17311 - RNA, 21 nt, Artificial Sequence
  GATA2 Guide RNA
gggacugccacuuuccaucuu

SEQ ID NO: 17312 - RNA, 21 nt, Artificial Sequence
  GATA2 Guide RNA
ggugucacugacggagagccu

SEQ ID NO: 17313 - RNA, 21 nt, Artificial Sequence
  GATA2 Guide RNA
gucacugacggagagccugaa

SEQ ID NO: 17314 - RNA, 21 nt, Artificial Sequence
  GATA2 Guide RNA
gugucacugacggagagccug

SEQ ID NO: 17315 - RNA, 21 nt, Artificial Sequence
  GATA2 Guide RNA
uaccaggugucacugacggag

SEQ ID NO: 17316 - RNA, 21 nt, Artificial Sequence
  GATA2 Guide RNA
ucacugacggagagccugaag

SEQ ID NO: 17317 - RNA, 21 nt, Artificial Sequence
  GATA2 Guide RNA
ucaggcucuccgucagugaca

SEQ ID NO: 17318 - RNA, 21 nt, Artificial Sequence
  GATA2 Guide RNA
uccaucuucaggcucuccguc

SEQ ID NO: 17319 - RNA, 21 nt, Artificial Sequence
  GATA2 Guide RNA
ucuucaggcucuccgucagug

SEQ ID NO: 17320 - RNA, 21 nt, Artificial Sequence
  GATA2 Guide RNA
ugacggagagccugaagaugg

SEQ ID NO: 17321 - RNA, 21 nt, Artificial Sequence
  GATA2 Guide RNA
ugccacuuuccaucuucaggc

SEQ ID NO: 17322 - RNA, 21 nt, Artificial Sequence
  GATA2 Guide RNA
ugucacugacggagagccuga

SEQ ID NO: 17323 - RNA, 21 nt, Artificial Sequence
  GATA2 Guide RNA
uucaggcucuccgucagugac

SEQ ID NO: 17324 - RNA, 21 nt, Artificial Sequence
  GATA2 Guide RNA
uuccaucuucaggcucuccgu

SEQ ID NO: 17325 - RNA, 21 nt, Artificial Sequence
  GATA2 Guide RNA
uuuccaucuucaggcucuccg

SEQ ID NO: 17326 - RNA, 22 nt, Artificial Sequence
  GATA2 Guide RNA
accaggugucacugacggagag

SEQ ID NO: 17327 - RNA, 22 nt, Artificial Sequence
  GATA2 Guide RNA
acggagagccugaagauggaaa

SEQ ID NO: 17328 - RNA, 22 nt, Artificial Sequence
  GATA2 Guide RNA
acugacggagagccugaagaug

SEQ ID NO: 17329 - RNA, 22 nt, Artificial Sequence
  GATA2 Guide RNA
acugccacuuuccaucuucagg

SEQ ID NO: 17330 - RNA, 22 nt, Artificial Sequence
  GATA2 Guide RNA
acuuuccaucuucaggcucucc

SEQ ID NO: 17331 - RNA, 22 nt, Artificial Sequence
  GATA2 Guide RNA
agagccugaagauggaaagugg

SEQ ID NO: 17332 - RNA, 22 nt, Artificial Sequence
  GATA2 Guide RNA
agccugaagauggaaaguggca

SEQ ID NO: 17333 - RNA, 22 nt, Artificial Sequence
  GATA2 Guide RNA
aggcucuccgucagugacaccu

SEQ ID NO: 17334 - RNA, 22 nt, Artificial Sequence
  GATA2 Guide RNA
aggugucacugacggagagccu

SEQ ID NO: 17335 - RNA, 22 nt, Artificial Sequence
  GATA2 Guide RNA
aucuucaggcucuccgucagug

SEQ ID NO: 17336 - RNA, 22 nt, Artificial Sequence
  GATA2 Guide RNA
cacugacggagagccugaagau

SEQ ID NO: 17337 - RNA, 22 nt, Artificial Sequence
  GATA2 Guide RNA
cacuuuccaucuucaggcucuc

SEQ ID NO: 17338 - RNA, 22 nt, Artificial Sequence
  GATA2 Guide RNA
caggcucuccgucagugacacc

SEQ ID NO: 17339 - RNA, 22 nt, Artificial Sequence
  GATA2 Guide RNA
caggugucacugacggagagcc

SEQ ID NO: 17340 - RNA, 22 nt, Artificial Sequence
  GATA2 Guide RNA
caucuucaggcucuccgucagu

SEQ ID NO: 17341 - RNA, 22 nt, Artificial Sequence
  GATA2 Guide RNA
ccacuuuccaucuucaggcucu

SEQ ID NO: 17342 - RNA, 22 nt, Artificial Sequence
  GATA2 Guide RNA
ccaggugucacugacggagagc

SEQ ID NO: 17343 - RNA, 22 nt, Artificial Sequence
  GATA2 Guide RNA
ccaucuucaggcucuccgucag

SEQ ID NO: 17344 - RNA, 22 nt, Artificial Sequence
  GATA2 Guide RNA
ccugaagauggaaaguggcagu

SEQ ID NO: 17345 - RNA, 22 nt, Artificial Sequence
  GATA2 Guide RNA
cggagagccugaagauggaaag

SEQ ID NO: 17346 - RNA, 22 nt, Artificial Sequence
  GATA2 Guide RNA
cugacggagagccugaagaugg

SEQ ID NO: 17347 - RNA, 22 nt, Artificial Sequence
  GATA2 Guide RNA
cugccacuuuccaucuucaggc

SEQ ID NO: 17348 - RNA, 22 nt, Artificial Sequence
  GATA2 Guide RNA
cuucaggcucuccgucagugac

SEQ ID NO: 17349 - RNA, 22 nt, Artificial Sequence
  GATA2 Guide RNA
cuuuccaucuucaggcucuccg

SEQ ID NO: 17350 - RNA, 22 nt, Artificial Sequence
  GATA2 Guide RNA
gacggagagccugaagauggaa

SEQ ID NO: 17351 - RNA, 22 nt, Artificial Sequence
  GATA2 Guide RNA
gacugccacuuuccaucuucag

SEQ ID NO: 17352 - RNA, 22 nt, Artificial Sequence
  GATA2 Guide RNA
gagagccugaagauggaaagug

SEQ ID NO: 17353 - RNA, 22 nt, Artificial Sequence
  GATA2 Guide RNA
gagccugaagauggaaaguggc

SEQ ID NO: 17354 - RNA, 22 nt, Artificial Sequence
  GATA2 Guide RNA
gccacuuuccaucuucaggcuc

SEQ ID NO: 17355 - RNA, 22 nt, Artificial Sequence
  GATA2 Guide RNA
gccugaagauggaaaguggcag

SEQ ID NO: 17356 - RNA, 22 nt, Artificial Sequence
  GATA2 Guide RNA
ggacugccacuuuccaucuuca

SEQ ID NO: 17357 - RNA, 22 nt, Artificial Sequence
  GATA2 Guide RNA
ggagagccugaagauggaaagu

SEQ ID NO: 17358 - RNA, 22 nt, Artificial Sequence
  GATA2 Guide RNA
ggcucuccgucagugacaccug

SEQ ID NO: 17359 - RNA, 22 nt, Artificial Sequence
  GATA2 Guide RNA
gggacugccacuuuccaucuuc

SEQ ID NO: 17360 - RNA, 22 nt, Artificial Sequence
  GATA2 Guide RNA
ggggacugccacuuuccaucuu

SEQ ID NO: 17361 - RNA, 22 nt, Artificial Sequence
  GATA2 Guide RNA
ggugucacugacggagagccug

SEQ ID NO: 17362 - RNA, 22 nt, Artificial Sequence
  GATA2 Guide RNA
guaccaggugucacugacggag

SEQ ID NO: 17363 - RNA, 22 nt, Artificial Sequence
  GATA2 Guide RNA
gucacugacggagagccugaag

SEQ ID NO: 17364 - RNA, 22 nt, Artificial Sequence
  GATA2 Guide RNA
gugucacugacggagagccuga

SEQ ID NO: 17365 - RNA, 22 nt, Artificial Sequence
  GATA2 Guide RNA
uaccaggugucacugacggaga

SEQ ID NO: 17366 - RNA, 22 nt, Artificial Sequence
  GATA2 Guide RNA
ucacugacggagagccugaaga

SEQ ID NO: 17367 - RNA, 22 nt, Artificial Sequence
  GATA2 Guide RNA
ucaggcucuccgucagugacac

SEQ ID NO: 17368 - RNA, 22 nt, Artificial Sequence
  GATA2 Guide RNA
uccaucuucaggcucuccguca

SEQ ID NO: 17369 - RNA, 22 nt, Artificial Sequence
  GATA2 Guide RNA
ucuucaggcucuccgucaguga

SEQ ID NO: 17370 - RNA, 22 nt, Artificial Sequence
  GATA2 Guide RNA
ugacggagagccugaagaugga

SEQ ID NO: 17371 - RNA, 22 nt, Artificial Sequence
  GATA2 Guide RNA
ugccacuuuccaucuucaggcu

SEQ ID NO: 17372 - RNA, 22 nt, Artificial Sequence
  GATA2 Guide RNA
ugucacugacggagagccugaa

SEQ ID NO: 17373 - RNA, 22 nt, Artificial Sequence
  GATA2 Guide RNA
uucaggcucuccgucagugaca

SEQ ID NO: 17374 - RNA, 22 nt, Artificial Sequence
  GATA2 Guide RNA
uuccaucuucaggcucuccguc

SEQ ID NO: 17375 - RNA, 22 nt, Artificial Sequence
  GATA2 Guide RNA
uuuccaucuucaggcucuccgu

SEQ ID NO: 17376 - RNA, 20 nt, Artificial Sequence
  GATA2 Guide RNA
aaguaccaggugucacugac

SEQ ID NO: 17377 - RNA, 20 nt, Artificial Sequence
  GATA2 Guide RNA
accaggugucacugacguga

SEQ ID NO: 17378 - RNA, 20 nt, Artificial Sequence
  GATA2 Guide RNA
acggcgucaaguaccaggug

SEQ ID NO: 17379 - RNA, 20 nt, Artificial Sequence
  GATA2 Guide RNA
acgucagugacaccugguac

SEQ ID NO: 17380 - RNA, 20 nt, Artificial Sequence
  GATA2 Guide RNA
acgugacggagagcaugaag

SEQ ID NO: 17381 - RNA, 20 nt, Artificial Sequence
  GATA2 Guide RNA
acugacgugacggagagcau

SEQ ID NO: 17382 - RNA, 20 nt, Artificial Sequence
  GATA2 Guide RNA
aggugucacugacgugacgg

SEQ ID NO: 17383 - RNA, 20 nt, Artificial Sequence
  GATA2 Guide RNA
aguaccaggugucacugacg

SEQ ID NO: 17384 - RNA, 20 nt, Artificial Sequence
  GATA2 Guide RNA
agugacaccugguacuugac

SEQ ID NO: 17385 - RNA, 20 nt, Artificial Sequence
  GATA2 Guide RNA
aucuucaugcucuccgucac

SEQ ID NO: 17386 - RNA, 20 nt, Artificial Sequence
  GATA2 Guide RNA
augcucuccgucacgucagu

SEQ ID NO: 17387 - RNA, 20 nt, Artificial Sequence
  GATA2 Guide RNA
caaguaccaggugucacuga

SEQ ID NO: 17388 - RNA, 20 nt, Artificial Sequence
  GATA2 Guide RNA
cacgucagugacaccuggua

SEQ ID NO: 17389 - RNA, 20 nt, Artificial Sequence
  GATA2 Guide RNA
cacugacgugacggagagca

SEQ ID NO: 17390 - RNA, 20 nt, Artificial Sequence
  GATA2 Guide RNA
caggugucacugacgugacg

SEQ ID NO: 17391 - RNA, 20 nt, Artificial Sequence
  GATA2 Guide RNA
cagugacaccugguacuuga

SEQ ID NO: 17392 - RNA, 20 nt, Artificial Sequence
  GATA2 Guide RNA
caucuucaugcucuccguca

SEQ ID NO: 17393 - RNA, 20 nt, Artificial Sequence
  GATA2 Guide RNA
caugcucuccgucacgucag

SEQ ID NO: 17394 - RNA, 20 nt, Artificial Sequence
  GATA2 Guide RNA
ccaggugucacugacgugac

SEQ ID NO: 17395 - RNA, 20 nt, Artificial Sequence
  GATA2 Guide RNA
ccaucuucaugcucuccguc

SEQ ID NO: 17396 - RNA, 20 nt, Artificial Sequence
  GATA2 Guide RNA
ccgucacgucagugacaccu

SEQ ID NO: 17397 - RNA, 20 nt, Artificial Sequence
  GATA2 Guide RNA
cggcgucaaguaccaggugu

SEQ ID NO: 17398 - RNA, 20 nt, Artificial Sequence
  GATA2 Guide RNA
cgucaaguaccaggugucac

SEQ ID NO: 17399 - RNA, 20 nt, Artificial Sequence
  GATA2 Guide RNA
cgucacgucagugacaccug

SEQ ID NO: 17400 - RNA, 20 nt, Artificial Sequence
  GATA2 Guide RNA
cgucagugacaccugguacu

SEQ ID NO: 17401 - RNA, 20 nt, Artificial Sequence
  GATA2 Guide RNA
cgugacggagagcaugaaga

SEQ ID NO: 17402 - RNA, 20 nt, Artificial Sequence
  GATA2 Guide RNA
cuccgucacgucagugacac

SEQ ID NO: 17403 - RNA, 20 nt, Artificial Sequence
  GATA2 Guide RNA
cucuccgucacgucagugac

SEQ ID NO: 17404 - RNA, 20 nt, Artificial Sequence
  GATA2 Guide RNA
cugacgugacggagagcaug

SEQ ID NO: 17405 - RNA, 20 nt, Artificial Sequence
  GATA2 Guide RNA
cuucaugcucuccgucacgu

SEQ ID NO: 17406 - RNA, 20 nt, Artificial Sequence
  GATA2 Guide RNA
gacgugacggagagcaugaa

SEQ ID NO: 17407 - RNA, 20 nt, Artificial Sequence
  GATA2 Guide RNA
gcgucaaguaccagguguca

SEQ ID NO: 17408 - RNA, 20 nt, Artificial Sequence
  GATA2 Guide RNA
gcucuccgucacgucaguga

SEQ ID NO: 17409 - RNA, 20 nt, Artificial Sequence
  GATA2 Guide RNA
ggcgucaaguaccagguguc

SEQ ID NO: 17410 - RNA, 20 nt, Artificial Sequence
  GATA2 Guide RNA
ggugucacugacgugacgga

SEQ ID NO: 17411 - RNA, 20 nt, Artificial Sequence
  GATA2 Guide RNA
guaccaggugucacugacgu

SEQ ID NO: 17412 - RNA, 20 nt, Artificial Sequence
  GATA2 Guide RNA
gucaaguaccaggugucacu

SEQ ID NO: 17413 - RNA, 20 nt, Artificial Sequence
  GATA2 Guide RNA
gucacgucagugacaccugg

SEQ ID NO: 17414 - RNA, 20 nt, Artificial Sequence
  GATA2 Guide RNA
gucacugacgugacggagag

SEQ ID NO: 17415 - RNA, 20 nt, Artificial Sequence
  GATA2 Guide RNA
gucagugacaccugguacuu

SEQ ID NO: 17416 - RNA, 20 nt, Artificial Sequence
  GATA2 Guide RNA
gugacaccugguacuugacg

SEQ ID NO: 17417 - RNA, 20 nt, Artificial Sequence
  GATA2 Guide RNA
gugucacugacgugacggag

SEQ ID NO: 17418 - RNA, 20 nt, Artificial Sequence
  GATA2 Guide RNA
uaccaggugucacugacgug

SEQ ID NO: 17419 - RNA, 20 nt, Artificial Sequence
  GATA2 Guide RNA
ucaaguaccaggugucacug

SEQ ID NO: 17420 - RNA, 20 nt, Artificial Sequence
  GATA2 Guide RNA
ucacgucagugacaccuggu

SEQ ID NO: 17421 - RNA, 20 nt, Artificial Sequence
  GATA2 Guide RNA
ucacugacgugacggagagc

SEQ ID NO: 17422 - RNA, 20 nt, Artificial Sequence
  GATA2 Guide RNA
ucagugacaccugguacuug

SEQ ID NO: 17423 - RNA, 20 nt, Artificial Sequence
  GATA2 Guide RNA
ucaugcucuccgucacguca

SEQ ID NO: 17424 - RNA, 20 nt, Artificial Sequence
  GATA2 Guide RNA
uccaucuucaugcucuccgu

SEQ ID NO: 17425 - RNA, 20 nt, Artificial Sequence
  GATA2 Guide RNA
uccgucacgucagugacacc

SEQ ID NO: 17426 - RNA, 20 nt, Artificial Sequence
  GATA2 Guide RNA
ucuccgucacgucagugaca

SEQ ID NO: 17427 - RNA, 20 nt, Artificial Sequence
  GATA2 Guide RNA
ucuucaugcucuccgucacg

SEQ ID NO: 17428 - RNA, 20 nt, Artificial Sequence
  GATA2 Guide RNA
ugacgugacggagagcauga

SEQ ID NO: 17429 - RNA, 20 nt, Artificial Sequence
  GATA2 Guide RNA
ugcucuccgucacgucagug

SEQ ID NO: 17430 - RNA, 20 nt, Artificial Sequence
  GATA2 Guide RNA
ugucacugacgugacggaga

SEQ ID NO: 17431 - RNA, 20 nt, Artificial Sequence
  GATA2 Guide RNA
uucaugcucuccgucacguc

SEQ ID NO: 17432 - RNA, 21 nt, Artificial Sequence
  GATA2 Guide RNA
aaguaccaggugucacugacg

SEQ ID NO: 17433 - RNA, 21 nt, Artificial Sequence
  GATA2 Guide RNA
accaggugucacugacgugac

SEQ ID NO: 17434 - RNA, 21 nt, Artificial Sequence
  GATA2 Guide RNA
acggcgucaaguaccaggugu

SEQ ID NO: 17435 - RNA, 21 nt, Artificial Sequence
  GATA2 Guide RNA
acgucagugacaccugguacu

SEQ ID NO: 17436 - RNA, 21 nt, Artificial Sequence
  GATA2 Guide RNA
acgugacggagagcaugaaga

SEQ ID NO: 17437 - RNA, 21 nt, Artificial Sequence
  GATA2 Guide RNA
acugacgugacggagagcaug

SEQ ID NO: 17438 - RNA, 21 nt, Artificial Sequence
  GATA2 Guide RNA
aggugucacugacgugacgga

SEQ ID NO: 17439 - RNA, 21 nt, Artificial Sequence
  GATA2 Guide RNA
aguaccaggugucacugacgu

SEQ ID NO: 17440 - RNA, 21 nt, Artificial Sequence
  GATA2 Guide RNA
agugacaccugguacuugacg

SEQ ID NO: 17441 - RNA, 21 nt, Artificial Sequence
  GATA2 Guide RNA
aucuucaugcucuccgucacg

SEQ ID NO: 17442 - RNA, 21 nt, Artificial Sequence
  GATA2 Guide RNA
augcucuccgucacgucagug

SEQ ID NO: 17443 - RNA, 21 nt, Artificial Sequence
  GATA2 Guide RNA
caaguaccaggugucacugac

SEQ ID NO: 17444 - RNA, 21 nt, Artificial Sequence
  GATA2 Guide RNA
cacgucagugacaccugguac

SEQ ID NO: 17445 - RNA, 21 nt, Artificial Sequence
  GATA2 Guide RNA
cacugacgugacggagagcau

SEQ ID NO: 17446 - RNA, 21 nt, Artificial Sequence
  GATA2 Guide RNA
caggugucacugacgugacgg

SEQ ID NO: 17447 - RNA, 21 nt, Artificial Sequence
  GATA2 Guide RNA
cagugacaccugguacuugac

SEQ ID NO: 17448 - RNA, 21 nt, Artificial Sequence
  GATA2 Guide RNA
caucuucaugcucuccgucac

SEQ ID NO: 17449 - RNA, 21 nt, Artificial Sequence
  GATA2 Guide RNA
caugcucuccgucacgucagu

SEQ ID NO: 17450 - RNA, 21 nt, Artificial Sequence
  GATA2 Guide RNA
ccaggugucacugacgugacg

SEQ ID NO: 17451 - RNA, 21 nt, Artificial Sequence
  GATA2 Guide RNA
ccaucuucaugcucuccguca

SEQ ID NO: 17452 - RNA, 21 nt, Artificial Sequence
  GATA2 Guide RNA
ccgucacgucagugacaccug

SEQ ID NO: 17453 - RNA, 21 nt, Artificial Sequence
  GATA2 Guide RNA
cggcgucaaguaccagguguc

SEQ ID NO: 17454 - RNA, 21 nt, Artificial Sequence
  GATA2 Guide RNA
cgucaaguaccaggugucacu

SEQ ID NO: 17455 - RNA, 21 nt, Artificial Sequence
  GATA2 Guide RNA
cgucacgucagugacaccugg

SEQ ID NO: 17456 - RNA, 21 nt, Artificial Sequence
  GATA2 Guide RNA
cgucagugacaccugguacuu

SEQ ID NO: 17457 - RNA, 21 nt, Artificial Sequence
  GATA2 Guide RNA
cgugacggagagcaugaagau

SEQ ID NO: 17458 - RNA, 21 nt, Artificial Sequence
  GATA2 Guide RNA
cuccgucacgucagugacacc

SEQ ID NO: 17459 - RNA, 21 nt, Artificial Sequence
  GATA2 Guide RNA
cucuccgucacgucagugaca

SEQ ID NO: 17460 - RNA, 21 nt, Artificial Sequence
  GATA2 Guide RNA
cugacgugacggagagcauga

SEQ ID NO: 17461 - RNA, 21 nt, Artificial Sequence
  GATA2 Guide RNA
cuucaugcucuccgucacguc

SEQ ID NO: 17462 - RNA, 21 nt, Artificial Sequence
  GATA2 Guide RNA
gacggcgucaaguaccaggug

SEQ ID NO: 17463 - RNA, 21 nt, Artificial Sequence
  GATA2 Guide RNA
gacgugacggagagcaugaag

SEQ ID NO: 17464 - RNA, 21 nt, Artificial Sequence
  GATA2 Guide RNA
gcgucaaguaccaggugucac

SEQ ID NO: 17465 - RNA, 21 nt, Artificial Sequence
  GATA2 Guide RNA
gcucuccgucacgucagugac

SEQ ID NO: 17466 - RNA, 21 nt, Artificial Sequence
  GATA2 Guide RNA
ggcgucaaguaccagguguca

SEQ ID NO: 17467 - RNA, 21 nt, Artificial Sequence
  GATA2 Guide RNA
ggugucacugacgugacggag

SEQ ID NO: 17468 - RNA, 21 nt, Artificial Sequence
  GATA2 Guide RNA
guaccaggugucacugacgug

SEQ ID NO: 17469 - RNA, 21 nt, Artificial Sequence
  GATA2 Guide RNA
gucaaguaccaggugucacug

SEQ ID NO: 17470 - RNA, 21 nt, Artificial Sequence
  GATA2 Guide RNA
gucacgucagugacaccuggu

SEQ ID NO: 17471 - RNA, 21 nt, Artificial Sequence
  GATA2 Guide RNA
gucacugacgugacggagagc

SEQ ID NO: 17472 - RNA, 21 nt, Artificial Sequence
  GATA2 Guide RNA
gucagugacaccugguacuug

SEQ ID NO: 17473 - RNA, 21 nt, Artificial Sequence
  GATA2 Guide RNA
gugacaccugguacuugacgc

SEQ ID NO: 17474 - RNA, 21 nt, Artificial Sequence
  GATA2 Guide RNA
gugucacugacgugacggaga

SEQ ID NO: 17475 - RNA, 21 nt, Artificial Sequence
  GATA2 Guide RNA
uaccaggugucacugacguga

SEQ ID NO: 17476 - RNA, 21 nt, Artificial Sequence
  GATA2 Guide RNA
ucaaguaccaggugucacuga

SEQ ID NO: 17477 - RNA, 21 nt, Artificial Sequence
  GATA2 Guide RNA
ucacgucagugacaccuggua

SEQ ID NO: 17478 - RNA, 21 nt, Artificial Sequence
  GATA2 Guide RNA
ucacugacgugacggagagca

SEQ ID NO: 17479 - RNA, 21 nt, Artificial Sequence
  GATA2 Guide RNA
ucagugacaccugguacuuga

SEQ ID NO: 17480 - RNA, 21 nt, Artificial Sequence
  GATA2 Guide RNA
ucaugcucuccgucacgucag

SEQ ID NO: 17481 - RNA, 21 nt, Artificial Sequence
  GATA2 Guide RNA
uccaucuucaugcucuccguc

SEQ ID NO: 17482 - RNA, 21 nt, Artificial Sequence
  GATA2 Guide RNA
uccgucacgucagugacaccu

SEQ ID NO: 17483 - RNA, 21 nt, Artificial Sequence
  GATA2 Guide RNA
ucuccgucacgucagugacac

SEQ ID NO: 17484 - RNA, 21 nt, Artificial Sequence
  GATA2 Guide RNA
ucuucaugcucuccgucacgu

SEQ ID NO: 17485 - RNA, 21 nt, Artificial Sequence
  GATA2 Guide RNA
ugacgugacggagagcaugaa

SEQ ID NO: 17486 - RNA, 21 nt, Artificial Sequence
  GATA2 Guide RNA
ugcucuccgucacgucaguga

SEQ ID NO: 17487 - RNA, 21 nt, Artificial Sequence
  GATA2 Guide RNA
ugucacugacgugacggagag

SEQ ID NO: 17488 - RNA, 21 nt, Artificial Sequence
  GATA2 Guide RNA
uucaugcucuccgucacguca

SEQ ID NO: 17489 - RNA, 21 nt, Artificial Sequence
  GATA2 Guide RNA
uuccaucuucaugcucuccgu

SEQ ID NO: 17490 - RNA, 22 nt, Artificial Sequence
  GATA2 Guide RNA
aaguaccaggugucacugacgu

SEQ ID NO: 17491 - RNA, 22 nt, Artificial Sequence
  GATA2 Guide RNA
accaggugucacugacgugacg

SEQ ID NO: 17492 - RNA, 22 nt, Artificial Sequence
  GATA2 Guide RNA
acggcgucaaguaccagguguc

SEQ ID NO: 17493 - RNA, 22 nt, Artificial Sequence
  GATA2 Guide RNA
acgucagugacaccugguacuu

SEQ ID NO: 17494 - RNA, 22 nt, Artificial Sequence
  GATA2 Guide RNA
acgugacggagagcaugaagau

SEQ ID NO: 17495 - RNA, 22 nt, Artificial Sequence
  GATA2 Guide RNA
acugacgugacggagagcauga

SEQ ID NO: 17496 - RNA, 22 nt, Artificial Sequence
  GATA2 Guide RNA
aggugucacugacgugacggag

SEQ ID NO: 17497 - RNA, 22 nt, Artificial Sequence
  GATA2 Guide RNA
aguaccaggugucacugacgug

SEQ ID NO: 17498 - RNA, 22 nt, Artificial Sequence
  GATA2 Guide RNA
agugacaccugguacuugacgc

SEQ ID NO: 17499 - RNA, 22 nt, Artificial Sequence
  GATA2 Guide RNA
aucuucaugcucuccgucacgu

SEQ ID NO: 17500 - RNA, 22 nt, Artificial Sequence
  GATA2 Guide RNA
augcucuccgucacgucaguga

SEQ ID NO: 17501 - RNA, 22 nt, Artificial Sequence
  GATA2 Guide RNA
caaguaccaggugucacugacg

SEQ ID NO: 17502 - RNA, 22 nt, Artificial Sequence
  GATA2 Guide RNA
cacgucagugacaccugguacu

SEQ ID NO: 17503 - RNA, 22 nt, Artificial Sequence
  GATA2 Guide RNA
cacugacgugacggagagcaug

SEQ ID NO: 17504 - RNA, 22 nt, Artificial Sequence
  GATA2 Guide RNA
caggugucacugacgugacgga

SEQ ID NO: 17505 - RNA, 22 nt, Artificial Sequence
  GATA2 Guide RNA
cagugacaccugguacuugacg

SEQ ID NO: 17506 - RNA, 22 nt, Artificial Sequence
  GATA2 Guide RNA
caucuucaugcucuccgucacg

SEQ ID NO: 17507 - RNA, 22 nt, Artificial Sequence
  GATA2 Guide RNA
caugcucuccgucacgucagug

SEQ ID NO: 17508 - RNA, 22 nt, Artificial Sequence
  GATA2 Guide RNA
ccaggugucacugacgugacgg

SEQ ID NO: 17509 - RNA, 22 nt, Artificial Sequence
  GATA2 Guide RNA
ccaucuucaugcucuccgucac

SEQ ID NO: 17510 - RNA, 22 nt, Artificial Sequence
  GATA2 Guide RNA
ccgucacgucagugacaccugg

SEQ ID NO: 17511 - RNA, 22 nt, Artificial Sequence
  GATA2 Guide RNA
cggcgucaaguaccagguguca

SEQ ID NO: 17512 - RNA, 22 nt, Artificial Sequence
  GATA2 Guide RNA
cgucaaguaccaggugucacug

SEQ ID NO: 17513 - RNA, 22 nt, Artificial Sequence
  GATA2 Guide RNA
cgucacgucagugacaccuggu

SEQ ID NO: 17514 - RNA, 22 nt, Artificial Sequence
  GATA2 Guide RNA
cgucagugacaccugguacuug

SEQ ID NO: 17515 - RNA, 22 nt, Artificial Sequence
  GATA2 Guide RNA
cgugacggagagcaugaagaug

SEQ ID NO: 17516 - RNA, 22 nt, Artificial Sequence
  GATA2 Guide RNA
cuccgucacgucagugacaccu

SEQ ID NO: 17517 - RNA, 22 nt, Artificial Sequence
  GATA2 Guide RNA
cucuccgucacgucagugacac

SEQ ID NO: 17518 - RNA, 22 nt, Artificial Sequence
  GATA2 Guide RNA
cugacgugacggagagcaugaa

SEQ ID NO: 17519 - RNA, 22 nt, Artificial Sequence
  GATA2 Guide RNA
cuucaugcucuccgucacguca

SEQ ID NO: 17520 - RNA, 22 nt, Artificial Sequence
  GATA2 Guide RNA
gacggcgucaaguaccaggugu

SEQ ID NO: 17521 - RNA, 22 nt, Artificial Sequence
  GATA2 Guide RNA
gacgugacggagagcaugaaga

SEQ ID NO: 17522 - RNA, 22 nt, Artificial Sequence
  GATA2 Guide RNA
gcgucaaguaccaggugucacu

SEQ ID NO: 17523 - RNA, 22 nt, Artificial Sequence
  GATA2 Guide RNA
gcucuccgucacgucagugaca

SEQ ID NO: 17524 - RNA, 22 nt, Artificial Sequence
  GATA2 Guide RNA
ggacggcgucaaguaccaggug

SEQ ID NO: 17525 - RNA, 22 nt, Artificial Sequence
  GATA2 Guide RNA
ggcgucaaguaccaggugucac

SEQ ID NO: 17526 - RNA, 22 nt, Artificial Sequence
  GATA2 Guide RNA
ggugucacugacgugacggaga

SEQ ID NO: 17527 - RNA, 22 nt, Artificial Sequence
  GATA2 Guide RNA
guaccaggugucacugacguga

SEQ ID NO: 17528 - RNA, 22 nt, Artificial Sequence
  GATA2 Guide RNA
gucaaguaccaggugucacuga

SEQ ID NO: 17529 - RNA, 22 nt, Artificial Sequence
  GATA2 Guide RNA
gucacgucagugacaccuggua

SEQ ID NO: 17530 - RNA, 22 nt, Artificial Sequence
  GATA2 Guide RNA
gucacugacgugacggagagca

SEQ ID NO: 17531 - RNA, 22 nt, Artificial Sequence
  GATA2 Guide RNA
gucagugacaccugguacuuga

SEQ ID NO: 17532 - RNA, 22 nt, Artificial Sequence
  GATA2 Guide RNA
gugacaccugguacuugacgcc

SEQ ID NO: 17533 - RNA, 22 nt, Artificial Sequence
  GATA2 Guide RNA
gugucacugacgugacggagag

SEQ ID NO: 17534 - RNA, 22 nt, Artificial Sequence
  GATA2 Guide RNA
uaccaggugucacugacgugac

SEQ ID NO: 17535 - RNA, 22 nt, Artificial Sequence
  GATA2 Guide RNA
ucaaguaccaggugucacugac

SEQ ID NO: 17536 - RNA, 22 nt, Artificial Sequence
  GATA2 Guide RNA
ucacgucagugacaccugguac

SEQ ID NO: 17537 - RNA, 22 nt, Artificial Sequence
  GATA2 Guide RNA
ucacugacgugacggagagcau

SEQ ID NO: 17538 - RNA, 22 nt, Artificial Sequence
  GATA2 Guide RNA
ucagugacaccugguacuugac

SEQ ID NO: 17539 - RNA, 22 nt, Artificial Sequence
  GATA2 Guide RNA
ucaugcucuccgucacgucagu

SEQ ID NO: 17540 - RNA, 22 nt, Artificial Sequence
  GATA2 Guide RNA
uccaucuucaugcucuccguca

SEQ ID NO: 17541 - RNA, 22 nt, Artificial Sequence
  GATA2 Guide RNA
uccgucacgucagugacaccug

SEQ ID NO: 17542 - RNA, 22 nt, Artificial Sequence
  GATA2 Guide RNA
ucuccgucacgucagugacacc

SEQ ID NO: 17543 - RNA, 22 nt, Artificial Sequence
  GATA2 Guide RNA
ucuucaugcucuccgucacguc

SEQ ID NO: 17544 - RNA, 22 nt, Artificial Sequence
  GATA2 Guide RNA
ugacgugacggagagcaugaag

SEQ ID NO: 17545 - RNA, 22 nt, Artificial Sequence
  GATA2 Guide RNA
ugcucuccgucacgucagugac

SEQ ID NO: 17546 - RNA, 22 nt, Artificial Sequence
  GATA2 Guide RNA
ugucacugacgugacggagagc

SEQ ID NO: 17547 - RNA, 22 nt, Artificial Sequence
  GATA2 Guide RNA
uucaugcucuccgucacgucag

SEQ ID NO: 17548 - RNA, 22 nt, Artificial Sequence
  GATA2 Guide RNA
uuccaucuucaugcucuccguc

SEQ ID NO: 17549 - RNA, 22 nt, Artificial Sequence
  GATA2 Guide RNA
uuuccaucuucaugcucuccgu

SEQ ID NO: 17550 - RNA, 20 nt, Artificial Sequence
  GATA2 Guide RNA
acagagagcaugaagaugga

SEQ ID NO: 17551 - RNA, 20 nt, Artificial Sequence
  GATA2 Guide RNA
accaggugucacugacagag

SEQ ID NO: 17552 - RNA, 20 nt, Artificial Sequence
  GATA2 Guide RNA
acugacagagagcaugaaga

SEQ ID NO: 17553 - RNA, 20 nt, Artificial Sequence
  GATA2 Guide RNA
acuuuccaucuucaugcucu

SEQ ID NO: 17554 - RNA, 20 nt, Artificial Sequence
  GATA2 Guide RNA
aggugucacugacagagagc

SEQ ID NO: 17555 - RNA, 20 nt, Artificial Sequence
  GATA2 Guide RNA
aguaccaggugucacugaca

SEQ ID NO: 17556 - RNA, 20 nt, Artificial Sequence
  GATA2 Guide RNA
aucuucaugcucucugucag

SEQ ID NO: 17557 - RNA, 20 nt, Artificial Sequence
  GATA2 Guide RNA
augcucucugucagugacac

SEQ ID NO: 17558 - RNA, 20 nt, Artificial Sequence
  GATA2 Guide RNA
cacugacagagagcaugaag

SEQ ID NO: 17559 - RNA, 20 nt, Artificial Sequence
  GATA2 Guide RNA
cacuuuccaucuucaugcuc

SEQ ID NO: 17560 - RNA, 20 nt, Artificial Sequence
  GATA2 Guide RNA
cagagagcaugaagauggaa

SEQ ID NO: 17561 - RNA, 20 nt, Artificial Sequence
  GATA2 Guide RNA
caggugucacugacagagag

SEQ ID NO: 17562 - RNA, 20 nt, Artificial Sequence
  GATA2 Guide RNA
caucuucaugcucucuguca

SEQ ID NO: 17563 - RNA, 20 nt, Artificial Sequence
  GATA2 Guide RNA
caugcucucugucagugaca

SEQ ID NO: 17564 - RNA, 20 nt, Artificial Sequence
  GATA2 Guide RNA
ccaggugucacugacagaga

SEQ ID NO: 17565 - RNA, 20 nt, Artificial Sequence
  GATA2 Guide RNA
ccaucuucaugcucucuguc

SEQ ID NO: 17566 - RNA, 20 nt, Artificial Sequence
  GATA2 Guide RNA
cucucugucagugacaccug

SEQ ID NO: 17567 - RNA, 20 nt, Artificial Sequence
  GATA2 Guide RNA
cucugucagugacaccuggu

SEQ ID NO: 17568 - RNA, 20 nt, Artificial Sequence
  GATA2 Guide RNA
cugacagagagcaugaagau

SEQ ID NO: 17569 - RNA, 20 nt, Artificial Sequence
  GATA2 Guide RNA
cugucagugacaccugguac

SEQ ID NO: 17570 - RNA, 20 nt, Artificial Sequence
  GATA2 Guide RNA
cuucaugcucucugucagug

SEQ ID NO: 17571 - RNA, 20 nt, Artificial Sequence
  GATA2 Guide RNA
cuuuccaucuucaugcucuc

SEQ ID NO: 17572 - RNA, 20 nt, Artificial Sequence
  GATA2 Guide RNA
gacagagagcaugaagaugg

SEQ ID NO: 17573 - RNA, 20 nt, Artificial Sequence
  GATA2 Guide RNA
gcucucugucagugacaccu

SEQ ID NO: 17574 - RNA, 20 nt, Artificial Sequence
  GATA2 Guide RNA
ggugucacugacagagagca

SEQ ID NO: 17575 - RNA, 20 nt, Artificial Sequence
  GATA2 Guide RNA
guaccaggugucacugacag

SEQ ID NO: 17576 - RNA, 20 nt, Artificial Sequence
  GATA2 Guide RNA
gucacugacagagagcauga

SEQ ID NO: 17577 - RNA, 20 nt, Artificial Sequence
  GATA2 Guide RNA
gugucacugacagagagcau

SEQ ID NO: 17578 - RNA, 20 nt, Artificial Sequence
  GATA2 Guide RNA
uaccaggugucacugacaga

SEQ ID NO: 17579 - RNA, 20 nt, Artificial Sequence
  GATA2 Guide RNA
ucacugacagagagcaugaa

SEQ ID NO: 17580 - RNA, 20 nt, Artificial Sequence
  GATA2 Guide RNA
ucaugcucucugucagugac

SEQ ID NO: 17581 - RNA, 20 nt, Artificial Sequence
  GATA2 Guide RNA
uccaucuucaugcucucugu

SEQ ID NO: 17582 - RNA, 20 nt, Artificial Sequence
  GATA2 Guide RNA
ucucugucagugacaccugg

SEQ ID NO: 17583 - RNA, 20 nt, Artificial Sequence
  GATA2 Guide RNA
ucugucagugacaccuggua

SEQ ID NO: 17584 - RNA, 20 nt, Artificial Sequence
  GATA2 Guide RNA
ucuucaugcucucugucagu

SEQ ID NO: 17585 - RNA, 20 nt, Artificial Sequence
  GATA2 Guide RNA
ugacagagagcaugaagaug

SEQ ID NO: 17586 - RNA, 20 nt, Artificial Sequence
  GATA2 Guide RNA
ugcucucugucagugacacc

SEQ ID NO: 17587 - RNA, 20 nt, Artificial Sequence
  GATA2 Guide RNA
ugucacugacagagagcaug

SEQ ID NO: 17588 - RNA, 20 nt, Artificial Sequence
  GATA2 Guide RNA
ugucagugacaccugguacu

SEQ ID NO: 17589 - RNA, 20 nt, Artificial Sequence
  GATA2 Guide RNA
uucaugcucucugucaguga

SEQ ID NO: 17590 - RNA, 20 nt, Artificial Sequence
  GATA2 Guide RNA
uuccaucuucaugcucucug

SEQ ID NO: 17591 - RNA, 20 nt, Artificial Sequence
  GATA2 Guide RNA
uuuccaucuucaugcucucu

SEQ ID NO: 17592 - RNA, 21 nt, Artificial Sequence
  GATA2 Guide RNA
aaguaccaggugucacugaca

SEQ ID NO: 17593 - RNA, 21 nt, Artificial Sequence
  GATA2 Guide RNA
acagagagcaugaagauggaa

SEQ ID NO: 17594 - RNA, 21 nt, Artificial Sequence
  GATA2 Guide RNA
accaggugucacugacagaga

SEQ ID NO: 17595 - RNA, 21 nt, Artificial Sequence
  GATA2 Guide RNA
acugacagagagcaugaagau

SEQ ID NO: 17596 - RNA, 21 nt, Artificial Sequence
  GATA2 Guide RNA
acuuuccaucuucaugcucuc

SEQ ID NO: 17597 - RNA, 21 nt, Artificial Sequence
  GATA2 Guide RNA
aggugucacugacagagagca

SEQ ID NO: 17598 - RNA, 21 nt, Artificial Sequence
  GATA2 Guide RNA
aguaccaggugucacugacag

SEQ ID NO: 17599 - RNA, 21 nt, Artificial Sequence
  GATA2 Guide RNA
aucuucaugcucucugucagu

SEQ ID NO: 17600 - RNA, 21 nt, Artificial Sequence
  GATA2 Guide RNA
augcucucugucagugacacc

SEQ ID NO: 17601 - RNA, 21 nt, Artificial Sequence
  GATA2 Guide RNA
cacugacagagagcaugaaga

SEQ ID NO: 17602 - RNA, 21 nt, Artificial Sequence
  GATA2 Guide RNA
cacuuuccaucuucaugcucu

SEQ ID NO: 17603 - RNA, 21 nt, Artificial Sequence
  GATA2 Guide RNA
cagagagcaugaagauggaaa

SEQ ID NO: 17604 - RNA, 21 nt, Artificial Sequence
  GATA2 Guide RNA
caggugucacugacagagagc

SEQ ID NO: 17605 - RNA, 21 nt, Artificial Sequence
  GATA2 Guide RNA
caucuucaugcucucugucag

SEQ ID NO: 17606 - RNA, 21 nt, Artificial Sequence
  GATA2 Guide RNA
caugcucucugucagugacac

SEQ ID NO: 17607 - RNA, 21 nt, Artificial Sequence
  GATA2 Guide RNA
ccacuuuccaucuucaugcuc

SEQ ID NO: 17608 - RNA, 21 nt, Artificial Sequence
  GATA2 Guide RNA
ccaggugucacugacagagag

SEQ ID NO: 17609 - RNA, 21 nt, Artificial Sequence
  GATA2 Guide RNA
ccaucuucaugcucucuguca

SEQ ID NO: 17610 - RNA, 21 nt, Artificial Sequence
  GATA2 Guide RNA
cucucugucagugacaccugg

SEQ ID NO: 17611 - RNA, 21 nt, Artificial Sequence
  GATA2 Guide RNA
cucugucagugacaccuggua

SEQ ID NO: 17612 - RNA, 21 nt, Artificial Sequence
  GATA2 Guide RNA
cugacagagagcaugaagaug

SEQ ID NO: 17613 - RNA, 21 nt, Artificial Sequence
  GATA2 Guide RNA
cugucagugacaccugguacu

SEQ ID NO: 17614 - RNA, 21 nt, Artificial Sequence
  GATA2 Guide RNA
cuucaugcucucugucaguga

SEQ ID NO: 17615 - RNA, 21 nt, Artificial Sequence
  GATA2 Guide RNA
cuuuccaucuucaugcucucu

SEQ ID NO: 17616 - RNA, 21 nt, Artificial Sequence
  GATA2 Guide RNA
gacagagagcaugaagaugga

SEQ ID NO: 17617 - RNA, 21 nt, Artificial Sequence
  GATA2 Guide RNA
gcucucugucagugacaccug

SEQ ID NO: 17618 - RNA, 21 nt, Artificial Sequence
  GATA2 Guide RNA
ggugucacugacagagagcau

SEQ ID NO: 17619 - RNA, 21 nt, Artificial Sequence
  GATA2 Guide RNA
guaccaggugucacugacaga

SEQ ID NO: 17620 - RNA, 21 nt, Artificial Sequence
  GATA2 Guide RNA
gucacugacagagagcaugaa

SEQ ID NO: 17621 - RNA, 21 nt, Artificial Sequence
  GATA2 Guide RNA
gugucacugacagagagcaug

SEQ ID NO: 17622 - RNA, 21 nt, Artificial Sequence
  GATA2 Guide RNA
uaccaggugucacugacagag

SEQ ID NO: 17623 - RNA, 21 nt, Artificial Sequence
  GATA2 Guide RNA
ucacugacagagagcaugaag

SEQ ID NO: 17624 - RNA, 21 nt, Artificial Sequence
  GATA2 Guide RNA
ucaugcucucugucagugaca

SEQ ID NO: 17625 - RNA, 21 nt, Artificial Sequence
  GATA2 Guide RNA
uccaucuucaugcucucuguc

SEQ ID NO: 17626 - RNA, 21 nt, Artificial Sequence
  GATA2 Guide RNA
ucucugucagugacaccuggu

SEQ ID NO: 17627 - RNA, 21 nt, Artificial Sequence
  GATA2 Guide RNA
ucugucagugacaccugguac

SEQ ID NO: 17628 - RNA, 21 nt, Artificial Sequence
  GATA2 Guide RNA
ucuucaugcucucugucagug

SEQ ID NO: 17629 - RNA, 21 nt, Artificial Sequence
  GATA2 Guide RNA
ugacagagagcaugaagaugg

SEQ ID NO: 17630 - RNA, 21 nt, Artificial Sequence
  GATA2 Guide RNA
ugcucucugucagugacaccu

SEQ ID NO: 17631 - RNA, 21 nt, Artificial Sequence
  GATA2 Guide RNA
ugucacugacagagagcauga

SEQ ID NO: 17632 - RNA, 21 nt, Artificial Sequence
  GATA2 Guide RNA
ugucagugacaccugguacuu

SEQ ID NO: 17633 - RNA, 21 nt, Artificial Sequence
  GATA2 Guide RNA
uucaugcucucugucagugac

SEQ ID NO: 17634 - RNA, 21 nt, Artificial Sequence
  GATA2 Guide RNA
uuccaucuucaugcucucugu

SEQ ID NO: 17635 - RNA, 21 nt, Artificial Sequence
  GATA2 Guide RNA
uuuccaucuucaugcucucug

SEQ ID NO: 17636 - RNA, 22 nt, Artificial Sequence
  GATA2 Guide RNA
aaguaccaggugucacugacag

SEQ ID NO: 17637 - RNA, 22 nt, Artificial Sequence
  GATA2 Guide RNA
acagagagcaugaagauggaaa

SEQ ID NO: 17638 - RNA, 22 nt, Artificial Sequence
  GATA2 Guide RNA
accaggugucacugacagagag

SEQ ID NO: 17639 - RNA, 22 nt, Artificial Sequence
  GATA2 Guide RNA
acugacagagagcaugaagaug

SEQ ID NO: 17640 - RNA, 22 nt, Artificial Sequence
  GATA2 Guide RNA
acuuuccaucuucaugcucucu

SEQ ID NO: 17641 - RNA, 22 nt, Artificial Sequence
  GATA2 Guide RNA
aggugucacugacagagagcau

SEQ ID NO: 17642 - RNA, 22 nt, Artificial Sequence
  GATA2 Guide RNA
aguaccaggugucacugacaga

SEQ ID NO: 17643 - RNA, 22 nt, Artificial Sequence
  GATA2 Guide RNA
aucuucaugcucucugucagug

SEQ ID NO: 17644 - RNA, 22 nt, Artificial Sequence
  GATA2 Guide RNA
augcucucugucagugacaccu

SEQ ID NO: 17645 - RNA, 22 nt, Artificial Sequence
  GATA2 Guide RNA
caaguaccaggugucacugaca

SEQ ID NO: 17646 - RNA, 22 nt, Artificial Sequence
  GATA2 Guide RNA
cacugacagagagcaugaagau

SEQ ID NO: 17647 - RNA, 22 nt, Artificial Sequence
  GATA2 Guide RNA
cacuuuccaucuucaugcucuc

SEQ ID NO: 17648 - RNA, 22 nt, Artificial Sequence
  GATA2 Guide RNA
cagagagcaugaagauggaaag

SEQ ID NO: 17649 - RNA, 22 nt, Artificial Sequence
  GATA2 Guide RNA
caggugucacugacagagagca

SEQ ID NO: 17650 - RNA, 22 nt, Artificial Sequence
  GATA2 Guide RNA
caucuucaugcucucugucagu

SEQ ID NO: 17651 - RNA, 22 nt, Artificial Sequence
  GATA2 Guide RNA
caugcucucugucagugacacc

SEQ ID NO: 17652 - RNA, 22 nt, Artificial Sequence
  GATA2 Guide RNA
ccacuuuccaucuucaugcucu

SEQ ID NO: 17653 - RNA, 22 nt, Artificial Sequence
  GATA2 Guide RNA
ccaggugucacugacagagagc

SEQ ID NO: 17654 - RNA, 22 nt, Artificial Sequence
  GATA2 Guide RNA
ccaucuucaugcucucugucag

SEQ ID NO: 17655 - RNA, 22 nt, Artificial Sequence
  GATA2 Guide RNA
cucucugucagugacaccuggu

SEQ ID NO: 17656 - RNA, 22 nt, Artificial Sequence
  GATA2 Guide RNA
cucugucagugacaccugguac

SEQ ID NO: 17657 - RNA, 22 nt, Artificial Sequence
  GATA2 Guide RNA
cugacagagagcaugaagaugg

SEQ ID NO: 17658 - RNA, 22 nt, Artificial Sequence
  GATA2 Guide RNA
cugucagugacaccugguacuu

SEQ ID NO: 17659 - RNA, 22 nt, Artificial Sequence
  GATA2 Guide RNA
cuucaugcucucugucagugac

SEQ ID NO: 17660 - RNA, 22 nt, Artificial Sequence
  GATA2 Guide RNA
cuuuccaucuucaugcucucug

SEQ ID NO: 17661 - RNA, 22 nt, Artificial Sequence
  GATA2 Guide RNA
gacagagagcaugaagauggaa

SEQ ID NO: 17662 - RNA, 22 nt, Artificial Sequence
  GATA2 Guide RNA
gccacuuuccaucuucaugcuc

SEQ ID NO: 17663 - RNA, 22 nt, Artificial Sequence
  GATA2 Guide RNA
gcucucugucagugacaccugg

SEQ ID NO: 17664 - RNA, 22 nt, Artificial Sequence
  GATA2 Guide RNA
ggugucacugacagagagcaug

SEQ ID NO: 17665 - RNA, 22 nt, Artificial Sequence
  GATA2 Guide RNA
guaccaggugucacugacagag

SEQ ID NO: 17666 - RNA, 22 nt, Artificial Sequence
  GATA2 Guide RNA
gucacugacagagagcaugaag

SEQ ID NO: 17667 - RNA, 22 nt, Artificial Sequence
  GATA2 Guide RNA
gugucacugacagagagcauga

SEQ ID NO: 17668 - RNA, 22 nt, Artificial Sequence
  GATA2 Guide RNA
uaccaggugucacugacagaga

SEQ ID NO: 17669 - RNA, 22 nt, Artificial Sequence
  GATA2 Guide RNA
ucacugacagagagcaugaaga

SEQ ID NO: 17670 - RNA, 22 nt, Artificial Sequence
  GATA2 Guide RNA
ucaugcucucugucagugacac

SEQ ID NO: 17671 - RNA, 22 nt, Artificial Sequence
  GATA2 Guide RNA
uccaucuucaugcucucuguca

SEQ ID NO: 17672 - RNA, 22 nt, Artificial Sequence
  GATA2 Guide RNA
ucucugucagugacaccuggua

SEQ ID NO: 17673 - RNA, 22 nt, Artificial Sequence
  GATA2 Guide RNA
ucugucagugacaccugguacu

SEQ ID NO: 17674 - RNA, 22 nt, Artificial Sequence
  GATA2 Guide RNA
ucuucaugcucucugucaguga

SEQ ID NO: 17675 - RNA, 22 nt, Artificial Sequence
  GATA2 Guide RNA
ugacagagagcaugaagaugga

SEQ ID NO: 17676 - RNA, 22 nt, Artificial Sequence
  GATA2 Guide RNA
ugcucucugucagugacaccug

SEQ ID NO: 17677 - RNA, 22 nt, Artificial Sequence
  GATA2 Guide RNA
ugucacugacagagagcaugaa

SEQ ID NO: 17678 - RNA, 22 nt, Artificial Sequence
  GATA2 Guide RNA
ugucagugacaccugguacuug

SEQ ID NO: 17679 - RNA, 22 nt, Artificial Sequence
  GATA2 Guide RNA
uucaugcucucugucagugaca

SEQ ID NO: 17680 - RNA, 22 nt, Artificial Sequence
  GATA2 Guide RNA
uuccaucuucaugcucucuguc

SEQ ID NO: 17681 - RNA, 22 nt, Artificial Sequence
  GATA2 Guide RNA
uuuccaucuucaugcucucugu

SEQ ID NO: 17682 - RNA, 20 nt, Artificial Sequence
  GATA2 Guide RNA
aaggacggcgucaauuacca

SEQ ID NO: 17683 - RNA, 20 nt, Artificial Sequence
  GATA2 Guide RNA
aauuaccaggugucacugac

SEQ ID NO: 17684 - RNA, 20 nt, Artificial Sequence
  GATA2 Guide RNA
aauugacgccguccuugucc

SEQ ID NO: 17685 - RNA, 20 nt, Artificial Sequence
  GATA2 Guide RNA
acaaggacggcgucaauuac

SEQ ID NO: 17686 - RNA, 20 nt, Artificial Sequence
  GATA2 Guide RNA
acaccugguaauugacgccg

SEQ ID NO: 17687 - RNA, 20 nt, Artificial Sequence
  GATA2 Guide RNA
accugguaauugacgccguc

SEQ ID NO: 17688 - RNA, 20 nt, Artificial Sequence
  GATA2 Guide RNA
acggcgucaauuaccaggug

SEQ ID NO: 17689 - RNA, 20 nt, Artificial Sequence
  GATA2 Guide RNA
agaggacaaggacggcguca

SEQ ID NO: 17690 - RNA, 20 nt, Artificial Sequence
  GATA2 Guide RNA
aggacaaggacggcgucaau

SEQ ID NO: 17691 - RNA, 20 nt, Artificial Sequence
  GATA2 Guide RNA
aggacggcgucaauuaccag

SEQ ID NO: 17692 - RNA, 20 nt, Artificial Sequence
  GATA2 Guide RNA
agugacaccugguaauugac

SEQ ID NO: 17693 - RNA, 20 nt, Artificial Sequence
  GATA2 Guide RNA
auuaccaggugucacugacg

SEQ ID NO: 17694 - RNA, 20 nt, Artificial Sequence
  GATA2 Guide RNA
auugacgccguccuuguccu

SEQ ID NO: 17695 - RNA, 20 nt, Artificial Sequence
  GATA2 Guide RNA
caaggacggcgucaauuacc

SEQ ID NO: 17696 - RNA, 20 nt, Artificial Sequence
  GATA2 Guide RNA
caauuaccaggugucacuga

SEQ ID NO: 17697 - RNA, 20 nt, Artificial Sequence
  GATA2 Guide RNA
caccugguaauugacgccgu

SEQ ID NO: 17698 - RNA, 20 nt, Artificial Sequence
  GATA2 Guide RNA
cagugacaccugguaauuga

SEQ ID NO: 17699 - RNA, 20 nt, Artificial Sequence
  GATA2 Guide RNA
ccgucagugacaccugguaa

SEQ ID NO: 17700 - RNA, 20 nt, Artificial Sequence
  GATA2 Guide RNA
ccugguaauugacgccgucc

SEQ ID NO: 17701 - RNA, 20 nt, Artificial Sequence
  GATA2 Guide RNA
cggcgucaauuaccaggugu

SEQ ID NO: 17702 - RNA, 20 nt, Artificial Sequence
  GATA2 Guide RNA
cgucaauuaccaggugucac

SEQ ID NO: 17703 - RNA, 20 nt, Artificial Sequence
  GATA2 Guide RNA
cgucagugacaccugguaau

SEQ ID NO: 17704 - RNA, 20 nt, Artificial Sequence
  GATA2 Guide RNA
cuccgucagugacaccuggu

SEQ ID NO: 17705 - RNA, 20 nt, Artificial Sequence
  GATA2 Guide RNA
cugguaauugacgccguccu

SEQ ID NO: 17706 - RNA, 20 nt, Artificial Sequence
  GATA2 Guide RNA
gacaaggacggcgucaauua

SEQ ID NO: 17707 - RNA, 20 nt, Artificial Sequence
  GATA2 Guide RNA
gacaccugguaauugacgcc

SEQ ID NO: 17708 - RNA, 20 nt, Artificial Sequence
  GATA2 Guide RNA
gacggcgucaauuaccaggu

SEQ ID NO: 17709 - RNA, 20 nt, Artificial Sequence
  GATA2 Guide RNA
gagaggacaaggacggcguc

SEQ ID NO: 17710 - RNA, 20 nt, Artificial Sequence
  GATA2 Guide RNA
gaggacaaggacggcgucaa

SEQ ID NO: 17711 - RNA, 20 nt, Artificial Sequence
  GATA2 Guide RNA
gcgucaauuaccagguguca

SEQ ID NO: 17712 - RNA, 20 nt, Artificial Sequence
  GATA2 Guide RNA
ggacaaggacggcgucaauu

SEQ ID NO: 17713 - RNA, 20 nt, Artificial Sequence
  GATA2 Guide RNA
ggacggcgucaauuaccagg

SEQ ID NO: 17714 - RNA, 20 nt, Artificial Sequence
  GATA2 Guide RNA
ggagaggacaaggacggcgu

SEQ ID NO: 17715 - RNA, 20 nt, Artificial Sequence
  GATA2 Guide RNA
ggcgucaauuaccagguguc

SEQ ID NO: 17716 - RNA, 20 nt, Artificial Sequence
  GATA2 Guide RNA
gguaauugacgccguccuug

SEQ ID NO: 17717 - RNA, 20 nt, Artificial Sequence
  GATA2 Guide RNA
guaauugacgccguccuugu

SEQ ID NO: 17718 - RNA, 20 nt, Artificial Sequence
  GATA2 Guide RNA
gucaauuaccaggugucacu

SEQ ID NO: 17719 - RNA, 20 nt, Artificial Sequence
  GATA2 Guide RNA
gucagugacaccugguaauu

SEQ ID NO: 17720 - RNA, 20 nt, Artificial Sequence
  GATA2 Guide RNA
gugacaccugguaauugacg

SEQ ID NO: 17721 - RNA, 20 nt, Artificial Sequence
  GATA2 Guide RNA
uaauugacgccguccuuguc

SEQ ID NO: 17722 - RNA, 20 nt, Artificial Sequence
  GATA2 Guide RNA
ucaauuaccaggugucacug

SEQ ID NO: 17723 - RNA, 20 nt, Artificial Sequence
  GATA2 Guide RNA
ucagugacaccugguaauug

SEQ ID NO: 17724 - RNA, 20 nt, Artificial Sequence
  GATA2 Guide RNA
uccgucagugacaccuggua

SEQ ID NO: 17725 - RNA, 20 nt, Artificial Sequence
  GATA2 Guide RNA
ucuccgucagugacaccugg

SEQ ID NO: 17726 - RNA, 20 nt, Artificial Sequence
  GATA2 Guide RNA
ugacaccugguaauugacgc

SEQ ID NO: 17727 - RNA, 20 nt, Artificial Sequence
  GATA2 Guide RNA
ugguaauugacgccguccuu

SEQ ID NO: 17728 - RNA, 21 nt, Artificial Sequence
  GATA2 Guide RNA
aaggacggcgucaauuaccag

SEQ ID NO: 17729 - RNA, 21 nt, Artificial Sequence
  GATA2 Guide RNA
aauuaccaggugucacugacg

SEQ ID NO: 17730 - RNA, 21 nt, Artificial Sequence
  GATA2 Guide RNA
aauugacgccguccuuguccu

SEQ ID NO: 17731 - RNA, 21 nt, Artificial Sequence
  GATA2 Guide RNA
acaaggacggcgucaauuacc

SEQ ID NO: 17732 - RNA, 21 nt, Artificial Sequence
  GATA2 Guide RNA
acaccugguaauugacgccgu

SEQ ID NO: 17733 - RNA, 21 nt, Artificial Sequence
  GATA2 Guide RNA
accugguaauugacgccgucc

SEQ ID NO: 17734 - RNA, 21 nt, Artificial Sequence
  GATA2 Guide RNA
acggcgucaauuaccaggugu

SEQ ID NO: 17735 - RNA, 21 nt, Artificial Sequence
  GATA2 Guide RNA
agaggacaaggacggcgucaa

SEQ ID NO: 17736 - RNA, 21 nt, Artificial Sequence
  GATA2 Guide RNA
aggacaaggacggcgucaauu

SEQ ID NO: 17737 - RNA, 21 nt, Artificial Sequence
  GATA2 Guide RNA
aggacggcgucaauuaccagg

SEQ ID NO: 17738 - RNA, 21 nt, Artificial Sequence
  GATA2 Guide RNA
aggagaggacaaggacggcgu

SEQ ID NO: 17739 - RNA, 21 nt, Artificial Sequence
  GATA2 Guide RNA
agugacaccugguaauugacg

SEQ ID NO: 17740 - RNA, 21 nt, Artificial Sequence
  GATA2 Guide RNA
auuaccaggugucacugacgg

SEQ ID NO: 17741 - RNA, 21 nt, Artificial Sequence
  GATA2 Guide RNA
auugacgccguccuuguccuc

SEQ ID NO: 17742 - RNA, 21 nt, Artificial Sequence
  GATA2 Guide RNA
caaggacggcgucaauuacca

SEQ ID NO: 17743 - RNA, 21 nt, Artificial Sequence
  GATA2 Guide RNA
caauuaccaggugucacugac

SEQ ID NO: 17744 - RNA, 21 nt, Artificial Sequence
  GATA2 Guide RNA
caccugguaauugacgccguc

SEQ ID NO: 17745 - RNA, 21 nt, Artificial Sequence
  GATA2 Guide RNA
cagugacaccugguaauugac

SEQ ID NO: 17746 - RNA, 21 nt, Artificial Sequence
  GATA2 Guide RNA
ccgucagugacaccugguaau

SEQ ID NO: 17747 - RNA, 21 nt, Artificial Sequence
  GATA2 Guide RNA
ccugguaauugacgccguccu

SEQ ID NO: 17748 - RNA, 21 nt, Artificial Sequence
  GATA2 Guide RNA
cggcgucaauuaccagguguc

SEQ ID NO: 17749 - RNA, 21 nt, Artificial Sequence
  GATA2 Guide RNA
cgucaauuaccaggugucacu

SEQ ID NO: 17750 - RNA, 21 nt, Artificial Sequence
  GATA2 Guide RNA
cgucagugacaccugguaauu

SEQ ID NO: 17751 - RNA, 21 nt, Artificial Sequence
  GATA2 Guide RNA
cuccgucagugacaccuggua

SEQ ID NO: 17752 - RNA, 21 nt, Artificial Sequence
  GATA2 Guide RNA
cucuccgucagugacaccugg

SEQ ID NO: 17753 - RNA, 21 nt, Artificial Sequence
  GATA2 Guide RNA
cugguaauugacgccguccuu

SEQ ID NO: 17754 - RNA, 21 nt, Artificial Sequence
  GATA2 Guide RNA
gacaaggacggcgucaauuac

SEQ ID NO: 17755 - RNA, 21 nt, Artificial Sequence
  GATA2 Guide RNA
gacaccugguaauugacgccg

SEQ ID NO: 17756 - RNA, 21 nt, Artificial Sequence
  GATA2 Guide RNA
gacggcgucaauuaccaggug

SEQ ID NO: 17757 - RNA, 21 nt, Artificial Sequence
  GATA2 Guide RNA
gagaggacaaggacggcguca

SEQ ID NO: 17758 - RNA, 21 nt, Artificial Sequence
  GATA2 Guide RNA
gaggacaaggacggcgucaau

SEQ ID NO: 17759 - RNA, 21 nt, Artificial Sequence
  GATA2 Guide RNA
gcgucaauuaccaggugucac

SEQ ID NO: 17760 - RNA, 21 nt, Artificial Sequence
  GATA2 Guide RNA
ggacaaggacggcgucaauua

SEQ ID NO: 17761 - RNA, 21 nt, Artificial Sequence
  GATA2 Guide RNA
ggacggcgucaauuaccaggu

SEQ ID NO: 17762 - RNA, 21 nt, Artificial Sequence
  GATA2 Guide RNA
ggagaggacaaggacggcguc

SEQ ID NO: 17763 - RNA, 21 nt, Artificial Sequence
  GATA2 Guide RNA
ggcgucaauuaccagguguca

SEQ ID NO: 17764 - RNA, 21 nt, Artificial Sequence
  GATA2 Guide RNA
gguaauugacgccguccuugu

SEQ ID NO: 17765 - RNA, 21 nt, Artificial Sequence
  GATA2 Guide RNA
guaauugacgccguccuuguc

SEQ ID NO: 17766 - RNA, 21 nt, Artificial Sequence
  GATA2 Guide RNA
gucaauuaccaggugucacug

SEQ ID NO: 17767 - RNA, 21 nt, Artificial Sequence
  GATA2 Guide RNA
gucagugacaccugguaauug

SEQ ID NO: 17768 - RNA, 21 nt, Artificial Sequence
  GATA2 Guide RNA
gugacaccugguaauugacgc

SEQ ID NO: 17769 - RNA, 21 nt, Artificial Sequence
  GATA2 Guide RNA
uaauugacgccguccuugucc

SEQ ID NO: 17770 - RNA, 21 nt, Artificial Sequence
  GATA2 Guide RNA
ucaauuaccaggugucacuga

SEQ ID NO: 17771 - RNA, 21 nt, Artificial Sequence
  GATA2 Guide RNA
ucagugacaccugguaauuga

SEQ ID NO: 17772 - RNA, 21 nt, Artificial Sequence
  GATA2 Guide RNA
uccgucagugacaccugguaa

SEQ ID NO: 17773 - RNA, 21 nt, Artificial Sequence
  GATA2 Guide RNA
ucuccgucagugacaccuggu

SEQ ID NO: 17774 - RNA, 21 nt, Artificial Sequence
  GATA2 Guide RNA
ugacaccugguaauugacgcc

SEQ ID NO: 17775 - RNA, 21 nt, Artificial Sequence
  GATA2 Guide RNA
ugguaauugacgccguccuug

SEQ ID NO: 17776 - RNA, 22 nt, Artificial Sequence
  GATA2 Guide RNA
aaggacggcgucaauuaccagg

SEQ ID NO: 17777 - RNA, 22 nt, Artificial Sequence
  GATA2 Guide RNA
aauuaccaggugucacugacgg

SEQ ID NO: 17778 - RNA, 22 nt, Artificial Sequence
  GATA2 Guide RNA
aauugacgccguccuuguccuc

SEQ ID NO: 17779 - RNA, 22 nt, Artificial Sequence
  GATA2 Guide RNA
acaaggacggcgucaauuacca

SEQ ID NO: 17780 - RNA, 22 nt, Artificial Sequence
  GATA2 Guide RNA
acaccugguaauugacgccguc

SEQ ID NO: 17781 - RNA, 22 nt, Artificial Sequence
  GATA2 Guide RNA
accugguaauugacgccguccu

SEQ ID NO: 17782 - RNA, 22 nt, Artificial Sequence
  GATA2 Guide RNA
acggcgucaauuaccagguguc

SEQ ID NO: 17783 - RNA, 22 nt, Artificial Sequence
  GATA2 Guide RNA
agaggacaaggacggcgucaau

SEQ ID NO: 17784 - RNA, 22 nt, Artificial Sequence
  GATA2 Guide RNA
aggacaaggacggcgucaauua

SEQ ID NO: 17785 - RNA, 22 nt, Artificial Sequence
  GATA2 Guide RNA
aggacggcgucaauuaccaggu

SEQ ID NO: 17786 - RNA, 22 nt, Artificial Sequence
  GATA2 Guide RNA
aggagaggacaaggacggcguc

SEQ ID NO: 17787 - RNA, 22 nt, Artificial Sequence
  GATA2 Guide RNA
agugacaccugguaauugacgc

SEQ ID NO: 17788 - RNA, 22 nt, Artificial Sequence
  GATA2 Guide RNA
auuaccaggugucacugacgga

SEQ ID NO: 17789 - RNA, 22 nt, Artificial Sequence
  GATA2 Guide RNA
auugacgccguccuuguccucu

SEQ ID NO: 17790 - RNA, 22 nt, Artificial Sequence
  GATA2 Guide RNA
caaggacggcgucaauuaccag

SEQ ID NO: 17791 - RNA, 22 nt, Artificial Sequence
  GATA2 Guide RNA
caauuaccaggugucacugacg

SEQ ID NO: 17792 - RNA, 22 nt, Artificial Sequence
  GATA2 Guide RNA
caccugguaauugacgccgucc

SEQ ID NO: 17793 - RNA, 22 nt, Artificial Sequence
  GATA2 Guide RNA
cagugacaccugguaauugacg

SEQ ID NO: 17794 - RNA, 22 nt, Artificial Sequence
  GATA2 Guide RNA
ccgucagugacaccugguaauu

SEQ ID NO: 17795 - RNA, 22 nt, Artificial Sequence
  GATA2 Guide RNA
ccugguaauugacgccguccuu

SEQ ID NO: 17796 - RNA, 22 nt, Artificial Sequence
  GATA2 Guide RNA
cggcgucaauuaccagguguca

SEQ ID NO: 17797 - RNA, 22 nt, Artificial Sequence
  GATA2 Guide RNA
cgucaauuaccaggugucacug

SEQ ID NO: 17798 - RNA, 22 nt, Artificial Sequence
  GATA2 Guide RNA
cgucagugacaccugguaauug

SEQ ID NO: 17799 - RNA, 22 nt, Artificial Sequence
  GATA2 Guide RNA
cuccgucagugacaccugguaa

SEQ ID NO: 17800 - RNA, 22 nt, Artificial Sequence
  GATA2 Guide RNA
cucuccgucagugacaccuggu

SEQ ID NO: 17801 - RNA, 22 nt, Artificial Sequence
  GATA2 Guide RNA
cugguaauugacgccguccuug

SEQ ID NO: 17802 - RNA, 22 nt, Artificial Sequence
  GATA2 Guide RNA
gacaaggacggcgucaauuacc

SEQ ID NO: 17803 - RNA, 22 nt, Artificial Sequence
  GATA2 Guide RNA
gacaccugguaauugacgccgu

SEQ ID NO: 17804 - RNA, 22 nt, Artificial Sequence
  GATA2 Guide RNA
gacggcgucaauuaccaggugu

SEQ ID NO: 17805 - RNA, 22 nt, Artificial Sequence
  GATA2 Guide RNA
gagaggacaaggacggcgucaa

SEQ ID NO: 17806 - RNA, 22 nt, Artificial Sequence
  GATA2 Guide RNA
gaggacaaggacggcgucaauu

SEQ ID NO: 17807 - RNA, 22 nt, Artificial Sequence
  GATA2 Guide RNA
gaggagaggacaaggacggcgu

SEQ ID NO: 17808 - RNA, 22 nt, Artificial Sequence
  GATA2 Guide RNA
gcgucaauuaccaggugucacu

SEQ ID NO: 17809 - RNA, 22 nt, Artificial Sequence
  GATA2 Guide RNA
gcucuccgucagugacaccugg

SEQ ID NO: 17810 - RNA, 22 nt, Artificial Sequence
  GATA2 Guide RNA
ggacaaggacggcgucaauuac

SEQ ID NO: 17811 - RNA, 22 nt, Artificial Sequence
  GATA2 Guide RNA
ggacggcgucaauuaccaggug

SEQ ID NO: 17812 - RNA, 22 nt, Artificial Sequence
  GATA2 Guide RNA
ggagaggacaaggacggcguca

SEQ ID NO: 17813 - RNA, 22 nt, Artificial Sequence
  GATA2 Guide RNA
ggcgucaauuaccaggugucac

SEQ ID NO: 17814 - RNA, 22 nt, Artificial Sequence
  GATA2 Guide RNA
gguaauugacgccguccuuguc

SEQ ID NO: 17815 - RNA, 22 nt, Artificial Sequence
  GATA2 Guide RNA
guaauugacgccguccuugucc

SEQ ID NO: 17816 - RNA, 22 nt, Artificial Sequence
  GATA2 Guide RNA
gucaauuaccaggugucacuga

SEQ ID NO: 17817 - RNA, 22 nt, Artificial Sequence
  GATA2 Guide RNA
gucagugacaccugguaauuga

SEQ ID NO: 17818 - RNA, 22 nt, Artificial Sequence
  GATA2 Guide RNA
gugacaccugguaauugacgcc

SEQ ID NO: 17819 - RNA, 22 nt, Artificial Sequence
  GATA2 Guide RNA
uaauugacgccguccuuguccu

SEQ ID NO: 17820 - RNA, 22 nt, Artificial Sequence
  GATA2 Guide RNA
ucaauuaccaggugucacugac

SEQ ID NO: 17821 - RNA, 22 nt, Artificial Sequence
  GATA2 Guide RNA
ucagugacaccugguaauugac

SEQ ID NO: 17822 - RNA, 22 nt, Artificial Sequence
  GATA2 Guide RNA
uccgucagugacaccugguaau

SEQ ID NO: 17823 - RNA, 22 nt, Artificial Sequence
  GATA2 Guide RNA
ucuccgucagugacaccuggua

SEQ ID NO: 17824 - RNA, 22 nt, Artificial Sequence
  GATA2 Guide RNA
ugacaccugguaauugacgccg

SEQ ID NO: 17825 - RNA, 22 nt, Artificial Sequence
  GATA2 Guide RNA
ugguaauugacgccguccuugu

SEQ ID NO: 17826 - RNA, 20 nt, Artificial Sequence
  GATA2 Guide RNA
aaggacggcgucgucaagua

SEQ ID NO: 17827 - RNA, 20 nt, Artificial Sequence
  GATA2 Guide RNA
acaaggacggcgucgucaag

SEQ ID NO: 17828 - RNA, 20 nt, Artificial Sequence
  GATA2 Guide RNA
acaccugguacuugacgacg

SEQ ID NO: 17829 - RNA, 20 nt, Artificial Sequence
  GATA2 Guide RNA
accugguacuugacgacgcc

SEQ ID NO: 17830 - RNA, 20 nt, Artificial Sequence
  GATA2 Guide RNA
acgacgccguccuuguccuc

SEQ ID NO: 17831 - RNA, 20 nt, Artificial Sequence
  GATA2 Guide RNA
acgccguccuuguccucucc

SEQ ID NO: 17832 - RNA, 20 nt, Artificial Sequence
  GATA2 Guide RNA
acggcgucgucaaguaccag

SEQ ID NO: 17833 - RNA, 20 nt, Artificial Sequence
  GATA2 Guide RNA
acuugacgacgccguccuug

SEQ ID NO: 17834 - RNA, 20 nt, Artificial Sequence
  GATA2 Guide RNA
agaggacaaggacggcgucg

SEQ ID NO: 17835 - RNA, 20 nt, Artificial Sequence
  GATA2 Guide RNA
agcccgaggagaggacaagg

SEQ ID NO: 17836 - RNA, 20 nt, Artificial Sequence
  GATA2 Guide RNA
aggacaaggacggcgucguc

SEQ ID NO: 17837 - RNA, 20 nt, Artificial Sequence
  GATA2 Guide RNA
aggacggcgucgucaaguac

SEQ ID NO: 17838 - RNA, 20 nt, Artificial Sequence
  GATA2 Guide RNA
aggagaggacaaggacggcg

SEQ ID NO: 17839 - RNA, 20 nt, Artificial Sequence
  GATA2 Guide RNA
caaggacggcgucgucaagu

SEQ ID NO: 17840 - RNA, 20 nt, Artificial Sequence
  GATA2 Guide RNA
caccugguacuugacgacgc

SEQ ID NO: 17841 - RNA, 20 nt, Artificial Sequence
  GATA2 Guide RNA
cccgaggagaggacaaggac

SEQ ID NO: 17842 - RNA, 20 nt, Artificial Sequence
  GATA2 Guide RNA
ccgaggagaggacaaggacg

SEQ ID NO: 17843 - RNA, 20 nt, Artificial Sequence
  GATA2 Guide RNA
ccguccuuguccucuccucg

SEQ ID NO: 17844 - RNA, 20 nt, Artificial Sequence
  GATA2 Guide RNA
ccugguacuugacgacgccg

SEQ ID NO: 17845 - RNA, 20 nt, Artificial Sequence
  GATA2 Guide RNA
cgacgccguccuuguccucu

SEQ ID NO: 17846 - RNA, 20 nt, Artificial Sequence
  GATA2 Guide RNA
cgaggagaggacaaggacgg

SEQ ID NO: 17847 - RNA, 20 nt, Artificial Sequence
  GATA2 Guide RNA
cgccguccuuguccucuccu

SEQ ID NO: 17848 - RNA, 20 nt, Artificial Sequence
  GATA2 Guide RNA
cggcgucgucaaguaccagg

SEQ ID NO: 17849 - RNA, 20 nt, Artificial Sequence
  GATA2 Guide RNA
cgucgucaaguaccaggugu

SEQ ID NO: 17850 - RNA, 20 nt, Artificial Sequence
  GATA2 Guide RNA
cugguacuugacgacgccgu

SEQ ID NO: 17851 - RNA, 20 nt, Artificial Sequence
  GATA2 Guide RNA
cuugacgacgccguccuugu

SEQ ID NO: 17852 - RNA, 20 nt, Artificial Sequence
  GATA2 Guide RNA
gacaaggacggcgucgucaa

SEQ ID NO: 17853 - RNA, 20 nt, Artificial Sequence
  GATA2 Guide RNA
gacaccugguacuugacgac

SEQ ID NO: 17854 - RNA, 20 nt, Artificial Sequence
  GATA2 Guide RNA
gacgacgccguccuuguccu

SEQ ID NO: 17855 - RNA, 20 nt, Artificial Sequence
  GATA2 Guide RNA
gacgccguccuuguccucuc

SEQ ID NO: 17856 - RNA, 20 nt, Artificial Sequence
  GATA2 Guide RNA
gacggcgucgucaaguacca

SEQ ID NO: 17857 - RNA, 20 nt, Artificial Sequence
  GATA2 Guide RNA
gaggacaaggacggcgucgu

SEQ ID NO: 17858 - RNA, 20 nt, Artificial Sequence
  GATA2 Guide RNA
gaggagaggacaaggacggc

SEQ ID NO: 17859 - RNA, 20 nt, Artificial Sequence
  GATA2 Guide RNA
gcccgaggagaggacaagga

SEQ ID NO: 17860 - RNA, 20 nt, Artificial Sequence
  GATA2 Guide RNA
gccguccuuguccucuccuc

SEQ ID NO: 17861 - RNA, 20 nt, Artificial Sequence
  GATA2 Guide RNA
gcgucgucaaguaccaggug

SEQ ID NO: 17862 - RNA, 20 nt, Artificial Sequence
  GATA2 Guide RNA
ggacaaggacggcgucguca

SEQ ID NO: 17863 - RNA, 20 nt, Artificial Sequence
  GATA2 Guide RNA
ggacggcgucgucaaguacc

SEQ ID NO: 17864 - RNA, 20 nt, Artificial Sequence
  GATA2 Guide RNA
ggcgucgucaaguaccaggu

SEQ ID NO: 17865 - RNA, 20 nt, Artificial Sequence
  GATA2 Guide RNA
gguacuugacgacgccgucc

SEQ ID NO: 17866 - RNA, 20 nt, Artificial Sequence
  GATA2 Guide RNA
guacuugacgacgccguccu

SEQ ID NO: 17867 - RNA, 20 nt, Artificial Sequence
  GATA2 Guide RNA
gucgucaaguaccagguguc

SEQ ID NO: 17868 - RNA, 20 nt, Artificial Sequence
  GATA2 Guide RNA
uacuugacgacgccguccuu

SEQ ID NO: 17869 - RNA, 20 nt, Artificial Sequence
  GATA2 Guide RNA
ugacaccugguacuugacga

SEQ ID NO: 17870 - RNA, 20 nt, Artificial Sequence
  GATA2 Guide RNA
ugacgacgccguccuugucc

SEQ ID NO: 17871 - RNA, 20 nt, Artificial Sequence
  GATA2 Guide RNA
ugguacuugacgacgccguc

SEQ ID NO: 17872 - RNA, 20 nt, Artificial Sequence
  GATA2 Guide RNA
uugacgacgccguccuuguc

SEQ ID NO: 17873 - RNA, 21 nt, Artificial Sequence
  GATA2 Guide RNA
aaggacggcgucgucaaguac

SEQ ID NO: 17874 - RNA, 21 nt, Artificial Sequence
  GATA2 Guide RNA
acaaggacggcgucgucaagu

SEQ ID NO: 17875 - RNA, 21 nt, Artificial Sequence
  GATA2 Guide RNA
acaccugguacuugacgacgc

SEQ ID NO: 17876 - RNA, 21 nt, Artificial Sequence
  GATA2 Guide RNA
accugguacuugacgacgccg

SEQ ID NO: 17877 - RNA, 21 nt, Artificial Sequence
  GATA2 Guide RNA
acgacgccguccuuguccucu

SEQ ID NO: 17878 - RNA, 21 nt, Artificial Sequence
  GATA2 Guide RNA
acgccguccuuguccucuccu

SEQ ID NO: 17879 - RNA, 21 nt, Artificial Sequence
  GATA2 Guide RNA
acggcgucgucaaguaccagg

SEQ ID NO: 17880 - RNA, 21 nt, Artificial Sequence
  GATA2 Guide RNA
acuugacgacgccguccuugu

SEQ ID NO: 17881 - RNA, 21 nt, Artificial Sequence
  GATA2 Guide RNA
agaggacaaggacggcgucgu

SEQ ID NO: 17882 - RNA, 21 nt, Artificial Sequence
  GATA2 Guide RNA
agcccgaggagaggacaagga

SEQ ID NO: 17883 - RNA, 21 nt, Artificial Sequence
  GATA2 Guide RNA
aggacaaggacggcgucguca

SEQ ID NO: 17884 - RNA, 21 nt, Artificial Sequence
  GATA2 Guide RNA
aggacggcgucgucaaguacc

SEQ ID NO: 17885 - RNA, 21 nt, Artificial Sequence
  GATA2 Guide RNA
caaggacggcgucgucaagua

SEQ ID NO: 17886 - RNA, 21 nt, Artificial Sequence
  GATA2 Guide RNA
caccugguacuugacgacgcc

SEQ ID NO: 17887 - RNA, 21 nt, Artificial Sequence
  GATA2 Guide RNA
cagcccgaggagaggacaagg

SEQ ID NO: 17888 - RNA, 21 nt, Artificial Sequence
  GATA2 Guide RNA
cccgaggagaggacaaggacg

SEQ ID NO: 17889 - RNA, 21 nt, Artificial Sequence
  GATA2 Guide RNA
ccgaggagaggacaaggacgg

SEQ ID NO: 17890 - RNA, 21 nt, Artificial Sequence
  GATA2 Guide RNA
ccguccuuguccucuccucgg

SEQ ID NO: 17891 - RNA, 21 nt, Artificial Sequence
  GATA2 Guide RNA
ccugguacuugacgacgccgu

SEQ ID NO: 17892 - RNA, 21 nt, Artificial Sequence
  GATA2 Guide RNA
cgacgccguccuuguccucuc

SEQ ID NO: 17893 - RNA, 21 nt, Artificial Sequence
  GATA2 Guide RNA
cgaggagaggacaaggacggc

SEQ ID NO: 17894 - RNA, 21 nt, Artificial Sequence
  GATA2 Guide RNA
cgccguccuuguccucuccuc

SEQ ID NO: 17895 - RNA, 21 nt, Artificial Sequence
  GATA2 Guide RNA
cggcgucgucaaguaccaggu

SEQ ID NO: 17896 - RNA, 21 nt, Artificial Sequence
  GATA2 Guide RNA
cgucgucaaguaccagguguc

SEQ ID NO: 17897 - RNA, 21 nt, Artificial Sequence
  GATA2 Guide RNA
cugguacuugacgacgccguc

SEQ ID NO: 17898 - RNA, 21 nt, Artificial Sequence
  GATA2 Guide RNA
cuugacgacgccguccuuguc

SEQ ID NO: 17899 - RNA, 21 nt, Artificial Sequence
  GATA2 Guide RNA
gacaaggacggcgucgucaag

SEQ ID NO: 17900 - RNA, 21 nt, Artificial Sequence
  GATA2 Guide RNA
gacaccugguacuugacgacg

SEQ ID NO: 17901 - RNA, 21 nt, Artificial Sequence
  GATA2 Guide RNA
gacgacgccguccuuguccuc

SEQ ID NO: 17902 - RNA, 21 nt, Artificial Sequence
  GATA2 Guide RNA
gacgccguccuuguccucucc

SEQ ID NO: 17903 - RNA, 21 nt, Artificial Sequence
  GATA2 Guide RNA
gacggcgucgucaaguaccag

SEQ ID NO: 17904 - RNA, 21 nt, Artificial Sequence
  GATA2 Guide RNA
gagaggacaaggacggcgucg

SEQ ID NO: 17905 - RNA, 21 nt, Artificial Sequence
  GATA2 Guide RNA
gaggacaaggacggcgucguc

SEQ ID NO: 17906 - RNA, 21 nt, Artificial Sequence
  GATA2 Guide RNA
gaggagaggacaaggacggcg

SEQ ID NO: 17907 - RNA, 21 nt, Artificial Sequence
  GATA2 Guide RNA
gcccgaggagaggacaaggac

SEQ ID NO: 17908 - RNA, 21 nt, Artificial Sequence
  GATA2 Guide RNA
gccguccuuguccucuccucg

SEQ ID NO: 17909 - RNA, 21 nt, Artificial Sequence
  GATA2 Guide RNA
gcgucgucaaguaccaggugu

SEQ ID NO: 17910 - RNA, 21 nt, Artificial Sequence
  GATA2 Guide RNA
ggacaaggacggcgucgucaa

SEQ ID NO: 17911 - RNA, 21 nt, Artificial Sequence
  GATA2 Guide RNA
ggacggcgucgucaaguacca

SEQ ID NO: 17912 - RNA, 21 nt, Artificial Sequence
  GATA2 Guide RNA
ggcgucgucaaguaccaggug

SEQ ID NO: 17913 - RNA, 21 nt, Artificial Sequence
  GATA2 Guide RNA
gguacuugacgacgccguccu

SEQ ID NO: 17914 - RNA, 21 nt, Artificial Sequence
  GATA2 Guide RNA
guacuugacgacgccguccuu

SEQ ID NO: 17915 - RNA, 21 nt, Artificial Sequence
  GATA2 Guide RNA
gucgucaaguaccagguguca

SEQ ID NO: 17916 - RNA, 21 nt, Artificial Sequence
  GATA2 Guide RNA
gugacaccugguacuugacga

SEQ ID NO: 17917 - RNA, 21 nt, Artificial Sequence
  GATA2 Guide RNA
uacuugacgacgccguccuug

SEQ ID NO: 17918 - RNA, 21 nt, Artificial Sequence
  GATA2 Guide RNA
ugacaccugguacuugacgac

SEQ ID NO: 17919 - RNA, 21 nt, Artificial Sequence
  GATA2 Guide RNA
ugacgacgccguccuuguccu

SEQ ID NO: 17920 - RNA, 21 nt, Artificial Sequence
  GATA2 Guide RNA
ugguacuugacgacgccgucc

SEQ ID NO: 17921 - RNA, 21 nt, Artificial Sequence
  GATA2 Guide RNA
uugacgacgccguccuugucc

SEQ ID NO: 17922 - RNA, 22 nt, Artificial Sequence
  GATA2 Guide RNA
aaggacggcgucgucaaguacc

SEQ ID NO: 17923 - RNA, 22 nt, Artificial Sequence
  GATA2 Guide RNA
acaaggacggcgucgucaagua

SEQ ID NO: 17924 - RNA, 22 nt, Artificial Sequence
  GATA2 Guide RNA
acaccugguacuugacgacgcc

SEQ ID NO: 17925 - RNA, 22 nt, Artificial Sequence
  GATA2 Guide RNA
accugguacuugacgacgccgu

SEQ ID NO: 17926 - RNA, 22 nt, Artificial Sequence
  GATA2 Guide RNA
acgacgccguccuuguccucuc

SEQ ID NO: 17927 - RNA, 22 nt, Artificial Sequence
  GATA2 Guide RNA
acgccguccuuguccucuccuc

SEQ ID NO: 17928 - RNA, 22 nt, Artificial Sequence
  GATA2 Guide RNA
acggcgucgucaaguaccaggu

SEQ ID NO: 17929 - RNA, 22 nt, Artificial Sequence
  GATA2 Guide RNA
acuugacgacgccguccuuguc

SEQ ID NO: 17930 - RNA, 22 nt, Artificial Sequence
  GATA2 Guide RNA
agaggacaaggacggcgucguc

SEQ ID NO: 17931 - RNA, 22 nt, Artificial Sequence
  GATA2 Guide RNA
agcccgaggagaggacaaggac

SEQ ID NO: 17932 - RNA, 22 nt, Artificial Sequence
  GATA2 Guide RNA
aggacaaggacggcgucgucaa

SEQ ID NO: 17933 - RNA, 22 nt, Artificial Sequence
  GATA2 Guide RNA
aggacggcgucgucaaguacca

SEQ ID NO: 17934 - RNA, 22 nt, Artificial Sequence
  GATA2 Guide RNA
agugacaccugguacuugacga

SEQ ID NO: 17935 - RNA, 22 nt, Artificial Sequence
  GATA2 Guide RNA
caaggacggcgucgucaaguac

SEQ ID NO: 17936 - RNA, 22 nt, Artificial Sequence
  GATA2 Guide RNA
caccugguacuugacgacgccg

SEQ ID NO: 17937 - RNA, 22 nt, Artificial Sequence
  GATA2 Guide RNA
cagcccgaggagaggacaagga

SEQ ID NO: 17938 - RNA, 22 nt, Artificial Sequence
  GATA2 Guide RNA
cccgaggagaggacaaggacgg

SEQ ID NO: 17939 - RNA, 22 nt, Artificial Sequence
  GATA2 Guide RNA
ccgaggagaggacaaggacggc

SEQ ID NO: 17940 - RNA, 22 nt, Artificial Sequence
  GATA2 Guide RNA
ccguccuuguccucuccucggg

SEQ ID NO: 17941 - RNA, 22 nt, Artificial Sequence
  GATA2 Guide RNA
ccugguacuugacgacgccguc

SEQ ID NO: 17942 - RNA, 22 nt, Artificial Sequence
  GATA2 Guide RNA
cgacgccguccuuguccucucc

SEQ ID NO: 17943 - RNA, 22 nt, Artificial Sequence
  GATA2 Guide RNA
cgaggagaggacaaggacggcg

SEQ ID NO: 17944 - RNA, 22 nt, Artificial Sequence
  GATA2 Guide RNA
cgccguccuuguccucuccucg

SEQ ID NO: 17945 - RNA, 22 nt, Artificial Sequence
  GATA2 Guide RNA
cggcgucgucaaguaccaggug

SEQ ID NO: 17946 - RNA, 22 nt, Artificial Sequence
  GATA2 Guide RNA
cgucgucaaguaccagguguca

SEQ ID NO: 17947 - RNA, 22 nt, Artificial Sequence
  GATA2 Guide RNA
cugguacuugacgacgccgucc

SEQ ID NO: 17948 - RNA, 22 nt, Artificial Sequence
  GATA2 Guide RNA
cuugacgacgccguccuugucc

SEQ ID NO: 17949 - RNA, 22 nt, Artificial Sequence
  GATA2 Guide RNA
gacaaggacggcgucgucaagu

SEQ ID NO: 17950 - RNA, 22 nt, Artificial Sequence
  GATA2 Guide RNA
gacaccugguacuugacgacgc

SEQ ID NO: 17951 - RNA, 22 nt, Artificial Sequence
  GATA2 Guide RNA
gacgacgccguccuuguccucu

SEQ ID NO: 17952 - RNA, 22 nt, Artificial Sequence
  GATA2 Guide RNA
gacgccguccuuguccucuccu

SEQ ID NO: 17953 - RNA, 22 nt, Artificial Sequence
  GATA2 Guide RNA
gacggcgucgucaaguaccagg

SEQ ID NO: 17954 - RNA, 22 nt, Artificial Sequence
  GATA2 Guide RNA
gagaggacaaggacggcgucgu

SEQ ID NO: 17955 - RNA, 22 nt, Artificial Sequence
  GATA2 Guide RNA
gaggacaaggacggcgucguca

SEQ ID NO: 17956 - RNA, 22 nt, Artificial Sequence
  GATA2 Guide RNA
gcagcccgaggagaggacaagg

SEQ ID NO: 17957 - RNA, 22 nt, Artificial Sequence
  GATA2 Guide RNA
gcccgaggagaggacaaggacg

SEQ ID NO: 17958 - RNA, 22 nt, Artificial Sequence
  GATA2 Guide RNA
gccguccuuguccucuccucgg

SEQ ID NO: 17959 - RNA, 22 nt, Artificial Sequence
  GATA2 Guide RNA
gcgucgucaaguaccagguguc

SEQ ID NO: 17960 - RNA, 22 nt, Artificial Sequence
  GATA2 Guide RNA
ggacaaggacggcgucgucaag

SEQ ID NO: 17961 - RNA, 22 nt, Artificial Sequence
  GATA2 Guide RNA
ggacggcgucgucaaguaccag

SEQ ID NO: 17962 - RNA, 22 nt, Artificial Sequence
  GATA2 Guide RNA
ggagaggacaaggacggcgucg

SEQ ID NO: 17963 - RNA, 22 nt, Artificial Sequence
  GATA2 Guide RNA
ggcgucgucaaguaccaggugu

SEQ ID NO: 17964 - RNA, 22 nt, Artificial Sequence
  GATA2 Guide RNA
gguacuugacgacgccguccuu

SEQ ID NO: 17965 - RNA, 22 nt, Artificial Sequence
  GATA2 Guide RNA
guacuugacgacgccguccuug

SEQ ID NO: 17966 - RNA, 22 nt, Artificial Sequence
  GATA2 Guide RNA
gucgucaaguaccaggugucac

SEQ ID NO: 17967 - RNA, 22 nt, Artificial Sequence
  GATA2 Guide RNA
gugacaccugguacuugacgac

SEQ ID NO: 17968 - RNA, 22 nt, Artificial Sequence
  GATA2 Guide RNA
uacuugacgacgccguccuugu

SEQ ID NO: 17969 - RNA, 22 nt, Artificial Sequence
  GATA2 Guide RNA
ugacaccugguacuugacgacg

SEQ ID NO: 17970 - RNA, 22 nt, Artificial Sequence
  GATA2 Guide RNA
ugacgacgccguccuuguccuc

SEQ ID NO: 17971 - RNA, 22 nt, Artificial Sequence
  GATA2 Guide RNA
ugguacuugacgacgccguccu

SEQ ID NO: 17972 - RNA, 22 nt, Artificial Sequence
  GATA2 Guide RNA
uugacgacgccguccuuguccu

SEQ ID NO: 17973 - RNA, 20 nt, Artificial Sequence
  GATA2 Guide RNA
aaggacggccucaaguacca

SEQ ID NO: 17974 - RNA, 20 nt, Artificial Sequence
  GATA2 Guide RNA
acaaggacggccucaaguac

SEQ ID NO: 17975 - RNA, 20 nt, Artificial Sequence
  GATA2 Guide RNA
acaccugguacuugaggccg

SEQ ID NO: 17976 - RNA, 20 nt, Artificial Sequence
  GATA2 Guide RNA
accugguacuugaggccguc

SEQ ID NO: 17977 - RNA, 20 nt, Artificial Sequence
  GATA2 Guide RNA
acggccucaaguaccaggug

SEQ ID NO: 17978 - RNA, 20 nt, Artificial Sequence
  GATA2 Guide RNA
acuugaggccguccuugucc

SEQ ID NO: 17979 - RNA, 20 nt, Artificial Sequence
  GATA2 Guide RNA
agaggacaaggacggccuca

SEQ ID NO: 17980 - RNA, 20 nt, Artificial Sequence
  GATA2 Guide RNA
aggacaaggacggccucaag

SEQ ID NO: 17981 - RNA, 20 nt, Artificial Sequence
  GATA2 Guide RNA
aggacggccucaaguaccag

SEQ ID NO: 17982 - RNA, 20 nt, Artificial Sequence
  GATA2 Guide RNA
aggagaggacaaggacggcc

SEQ ID NO: 17983 - RNA, 20 nt, Artificial Sequence
  GATA2 Guide RNA
aggccguccuuguccucucc

SEQ ID NO: 17984 - RNA, 20 nt, Artificial Sequence
  GATA2 Guide RNA
agugacaccugguacuugag

SEQ ID NO: 17985 - RNA, 20 nt, Artificial Sequence
  GATA2 Guide RNA
caaggacggccucaaguacc

SEQ ID NO: 17986 - RNA, 20 nt, Artificial Sequence
  GATA2 Guide RNA
caccugguacuugaggccgu

SEQ ID NO: 17987 - RNA, 20 nt, Artificial Sequence
  GATA2 Guide RNA
ccucaaguaccaggugucac

SEQ ID NO: 17988 - RNA, 20 nt, Artificial Sequence
  GATA2 Guide RNA
ccugguacuugaggccgucc

SEQ ID NO: 17989 - RNA, 20 nt, Artificial Sequence
  GATA2 Guide RNA
cggccucaaguaccaggugu

SEQ ID NO: 17990 - RNA, 20 nt, Artificial Sequence
  GATA2 Guide RNA
cugguacuugaggccguccu

SEQ ID NO: 17991 - RNA, 20 nt, Artificial Sequence
  GATA2 Guide RNA
cuugaggccguccuuguccu

SEQ ID NO: 17992 - RNA, 20 nt, Artificial Sequence
  GATA2 Guide RNA
gacaaggacggccucaagua

SEQ ID NO: 17993 - RNA, 20 nt, Artificial Sequence
  GATA2 Guide RNA
gacaccugguacuugaggcc

SEQ ID NO: 17994 - RNA, 20 nt, Artificial Sequence
  GATA2 Guide RNA
gacggccucaaguaccaggu

SEQ ID NO: 17995 - RNA, 20 nt, Artificial Sequence
  GATA2 Guide RNA
gagaggacaaggacggccuc

SEQ ID NO: 17996 - RNA, 20 nt, Artificial Sequence
  GATA2 Guide RNA
gaggacaaggacggccucaa

SEQ ID NO: 17997 - RNA, 20 nt, Artificial Sequence
  GATA2 Guide RNA
gaggccguccuuguccucuc

SEQ ID NO: 17998 - RNA, 20 nt, Artificial Sequence
  GATA2 Guide RNA
gccucaaguaccagguguca

SEQ ID NO: 17999 - RNA, 20 nt, Artificial Sequence
  GATA2 Guide RNA
ggacaaggacggccucaagu

SEQ ID NO: 18000 - RNA, 20 nt, Artificial Sequence
  GATA2 Guide RNA
ggacggccucaaguaccagg

SEQ ID NO: 18001 - RNA, 20 nt, Artificial Sequence
  GATA2 Guide RNA
ggagaggacaaggacggccu

SEQ ID NO: 18002 - RNA, 20 nt, Artificial Sequence
  GATA2 Guide RNA
ggccguccuuguccucuccu

SEQ ID NO: 18003 - RNA, 20 nt, Artificial Sequence
  GATA2 Guide RNA
ggccucaaguaccagguguc

SEQ ID NO: 18004 - RNA, 20 nt, Artificial Sequence
  GATA2 Guide RNA
gguacuugaggccguccuug

SEQ ID NO: 18005 - RNA, 20 nt, Artificial Sequence
  GATA2 Guide RNA
guacuugaggccguccuugu

SEQ ID NO: 18006 - RNA, 20 nt, Artificial Sequence
  GATA2 Guide RNA
gugacaccugguacuugagg

SEQ ID NO: 18007 - RNA, 20 nt, Artificial Sequence
  GATA2 Guide RNA
uacuugaggccguccuuguc

SEQ ID NO: 18008 - RNA, 20 nt, Artificial Sequence
  GATA2 Guide RNA
ugacaccugguacuugaggc

SEQ ID NO: 18009 - RNA, 20 nt, Artificial Sequence
  GATA2 Guide RNA
ugaggccguccuuguccucu

SEQ ID NO: 18010 - RNA, 20 nt, Artificial Sequence
  GATA2 Guide RNA
ugguacuugaggccguccuu

SEQ ID NO: 18011 - RNA, 20 nt, Artificial Sequence
  GATA2 Guide RNA
uugaggccguccuuguccuc

SEQ ID NO: 18012 - RNA, 21 nt, Artificial Sequence
  GATA2 Guide RNA
aaggacggccucaaguaccag

SEQ ID NO: 18013 - RNA, 21 nt, Artificial Sequence
  GATA2 Guide RNA
acaaggacggccucaaguacc

SEQ ID NO: 18014 - RNA, 21 nt, Artificial Sequence
  GATA2 Guide RNA
acaccugguacuugaggccgu

SEQ ID NO: 18015 - RNA, 21 nt, Artificial Sequence
  GATA2 Guide RNA
accugguacuugaggccgucc

SEQ ID NO: 18016 - RNA, 21 nt, Artificial Sequence
  GATA2 Guide RNA
acggccucaaguaccaggugu

SEQ ID NO: 18017 - RNA, 21 nt, Artificial Sequence
  GATA2 Guide RNA
acuugaggccguccuuguccu

SEQ ID NO: 18018 - RNA, 21 nt, Artificial Sequence
  GATA2 Guide RNA
agaggacaaggacggccucaa

SEQ ID NO: 18019 - RNA, 21 nt, Artificial Sequence
  GATA2 Guide RNA
aggacaaggacggccucaagu

SEQ ID NO: 18020 - RNA, 21 nt, Artificial Sequence
  GATA2 Guide RNA
aggacggccucaaguaccagg

SEQ ID NO: 18021 - RNA, 21 nt, Artificial Sequence
  GATA2 Guide RNA
aggagaggacaaggacggccu

SEQ ID NO: 18022 - RNA, 21 nt, Artificial Sequence
  GATA2 Guide RNA
aggccguccuuguccucuccu

SEQ ID NO: 18023 - RNA, 21 nt, Artificial Sequence
  GATA2 Guide RNA
agugacaccugguacuugagg

SEQ ID NO: 18024 - RNA, 21 nt, Artificial Sequence
  GATA2 Guide RNA
caaggacggccucaaguacca

SEQ ID NO: 18025 - RNA, 21 nt, Artificial Sequence
  GATA2 Guide RNA
caccugguacuugaggccguc

SEQ ID NO: 18026 - RNA, 21 nt, Artificial Sequence
  GATA2 Guide RNA
cagugacaccugguacuugag

SEQ ID NO: 18027 - RNA, 21 nt, Artificial Sequence
  GATA2 Guide RNA
ccucaaguaccaggugucacu

SEQ ID NO: 18028 - RNA, 21 nt, Artificial Sequence
  GATA2 Guide RNA
ccugguacuugaggccguccu

SEQ ID NO: 18029 - RNA, 21 nt, Artificial Sequence
  GATA2 Guide RNA
cggccucaaguaccagguguc

SEQ ID NO: 18030 - RNA, 21 nt, Artificial Sequence
  GATA2 Guide RNA
cugguacuugaggccguccuu

SEQ ID NO: 18031 - RNA, 21 nt, Artificial Sequence
  GATA2 Guide RNA
cuugaggccguccuuguccuc

SEQ ID NO: 18032 - RNA, 21 nt, Artificial Sequence
  GATA2 Guide RNA
gacaaggacggccucaaguac

SEQ ID NO: 18033 - RNA, 21 nt, Artificial Sequence
  GATA2 Guide RNA
gacaccugguacuugaggccg

SEQ ID NO: 18034 - RNA, 21 nt, Artificial Sequence
  GATA2 Guide RNA
gacggccucaaguaccaggug

SEQ ID NO: 18035 - RNA, 21 nt, Artificial Sequence
  GATA2 Guide RNA
gagaggacaaggacggccuca

SEQ ID NO: 18036 - RNA, 21 nt, Artificial Sequence
  GATA2 Guide RNA
gaggacaaggacggccucaag

SEQ ID NO: 18037 - RNA, 21 nt, Artificial Sequence
  GATA2 Guide RNA
gaggagaggacaaggacggcc

SEQ ID NO: 18038 - RNA, 21 nt, Artificial Sequence
  GATA2 Guide RNA
gaggccguccuuguccucucc

SEQ ID NO: 18039 - RNA, 21 nt, Artificial Sequence
  GATA2 Guide RNA
gccucaaguaccaggugucac

SEQ ID NO: 18040 - RNA, 21 nt, Artificial Sequence
  GATA2 Guide RNA
ggacaaggacggccucaagua

SEQ ID NO: 18041 - RNA, 21 nt, Artificial Sequence
  GATA2 Guide RNA
ggacggccucaaguaccaggu

SEQ ID NO: 18042 - RNA, 21 nt, Artificial Sequence
  GATA2 Guide RNA
ggagaggacaaggacggccuc

SEQ ID NO: 18043 - RNA, 21 nt, Artificial Sequence
  GATA2 Guide RNA
ggccguccuuguccucuccuc

SEQ ID NO: 18044 - RNA, 21 nt, Artificial Sequence
  GATA2 Guide RNA
ggccucaaguaccagguguca

SEQ ID NO: 18045 - RNA, 21 nt, Artificial Sequence
  GATA2 Guide RNA
gguacuugaggccguccuugu

SEQ ID NO: 18046 - RNA, 21 nt, Artificial Sequence
  GATA2 Guide RNA
guacuugaggccguccuuguc

SEQ ID NO: 18047 - RNA, 21 nt, Artificial Sequence
  GATA2 Guide RNA
gugacaccugguacuugaggc

SEQ ID NO: 18048 - RNA, 21 nt, Artificial Sequence
  GATA2 Guide RNA
uacuugaggccguccuugucc

SEQ ID NO: 18049 - RNA, 21 nt, Artificial Sequence
  GATA2 Guide RNA
ugacaccugguacuugaggcc

SEQ ID NO: 18050 - RNA, 21 nt, Artificial Sequence
  GATA2 Guide RNA
ugaggccguccuuguccucuc

SEQ ID NO: 18051 - RNA, 21 nt, Artificial Sequence
  GATA2 Guide RNA
ugguacuugaggccguccuug

SEQ ID NO: 18052 - RNA, 21 nt, Artificial Sequence
  GATA2 Guide RNA
uugaggccguccuuguccucu

SEQ ID NO: 18053 - RNA, 22 nt, Artificial Sequence
  GATA2 Guide RNA
aaggacggccucaaguaccagg

SEQ ID NO: 18054 - RNA, 22 nt, Artificial Sequence
  GATA2 Guide RNA
acaaggacggccucaaguacca

SEQ ID NO: 18055 - RNA, 22 nt, Artificial Sequence
  GATA2 Guide RNA
acaccugguacuugaggccguc

SEQ ID NO: 18056 - RNA, 22 nt, Artificial Sequence
  GATA2 Guide RNA
accugguacuugaggccguccu

SEQ ID NO: 18057 - RNA, 22 nt, Artificial Sequence
  GATA2 Guide RNA
acggccucaaguaccagguguc

SEQ ID NO: 18058 - RNA, 22 nt, Artificial Sequence
  GATA2 Guide RNA
acuugaggccguccuuguccuc

SEQ ID NO: 18059 - RNA, 22 nt, Artificial Sequence
  GATA2 Guide RNA
agaggacaaggacggccucaag

SEQ ID NO: 18060 - RNA, 22 nt, Artificial Sequence
  GATA2 Guide RNA
aggacaaggacggccucaagua

SEQ ID NO: 18061 - RNA, 22 nt, Artificial Sequence
  GATA2 Guide RNA
aggacggccucaaguaccaggu

SEQ ID NO: 18062 - RNA, 22 nt, Artificial Sequence
  GATA2 Guide RNA
aggagaggacaaggacggccuc

SEQ ID NO: 18063 - RNA, 22 nt, Artificial Sequence
  GATA2 Guide RNA
aggccguccuuguccucuccuc

SEQ ID NO: 18064 - RNA, 22 nt, Artificial Sequence
  GATA2 Guide RNA
agugacaccugguacuugaggc

SEQ ID NO: 18065 - RNA, 22 nt, Artificial Sequence
  GATA2 Guide RNA
caaggacggccucaaguaccag

SEQ ID NO: 18066 - RNA, 22 nt, Artificial Sequence
  GATA2 Guide RNA
caccugguacuugaggccgucc

SEQ ID NO: 18067 - RNA, 22 nt, Artificial Sequence
  GATA2 Guide RNA
cagugacaccugguacuugagg

SEQ ID NO: 18068 - RNA, 22 nt, Artificial Sequence
  GATA2 Guide RNA
ccgucagugacaccugguacuu

SEQ ID NO: 18069 - RNA, 22 nt, Artificial Sequence
  GATA2 Guide RNA
ccucaaguaccaggugucacug

SEQ ID NO: 18070 - RNA, 22 nt, Artificial Sequence
  GATA2 Guide RNA
ccugguacuugaggccguccuu

SEQ ID NO: 18071 - RNA, 22 nt, Artificial Sequence
  GATA2 Guide RNA
cgaggagaggacaaggacggcc

SEQ ID NO: 18072 - RNA, 22 nt, Artificial Sequence
  GATA2 Guide RNA
cggccucaaguaccagguguca

SEQ ID NO: 18073 - RNA, 22 nt, Artificial Sequence
  GATA2 Guide RNA
cugguacuugaggccguccuug

SEQ ID NO: 18074 - RNA, 22 nt, Artificial Sequence
  GATA2 Guide RNA
cuugaggccguccuuguccucu

SEQ ID NO: 18075 - RNA, 22 nt, Artificial Sequence
  GATA2 Guide RNA
gacaaggacggccucaaguacc

SEQ ID NO: 18076 - RNA, 22 nt, Artificial Sequence
  GATA2 Guide RNA
gacaccugguacuugaggccgu

SEQ ID NO: 18077 - RNA, 22 nt, Artificial Sequence
  GATA2 Guide RNA
gacggccucaaguaccaggugu

SEQ ID NO: 18078 - RNA, 22 nt, Artificial Sequence
  GATA2 Guide RNA
gagaggacaaggacggccucaa

SEQ ID NO: 18079 - RNA, 22 nt, Artificial Sequence
  GATA2 Guide RNA
gaggacaaggacggccucaagu

SEQ ID NO: 18080 - RNA, 22 nt, Artificial Sequence
  GATA2 Guide RNA
gaggagaggacaaggacggccu

SEQ ID NO: 18081 - RNA, 22 nt, Artificial Sequence
  GATA2 Guide RNA
gaggccguccuuguccucuccu

SEQ ID NO: 18082 - RNA, 22 nt, Artificial Sequence
  GATA2 Guide RNA
gccucaaguaccaggugucacu

SEQ ID NO: 18083 - RNA, 22 nt, Artificial Sequence
  GATA2 Guide RNA
ggacaaggacggccucaaguac

SEQ ID NO: 18084 - RNA, 22 nt, Artificial Sequence
  GATA2 Guide RNA
ggacggccucaaguaccaggug

SEQ ID NO: 18085 - RNA, 22 nt, Artificial Sequence
  GATA2 Guide RNA
ggagaggacaaggacggccuca

SEQ ID NO: 18086 - RNA, 22 nt, Artificial Sequence
  GATA2 Guide RNA
ggccguccuuguccucuccucg

SEQ ID NO: 18087 - RNA, 22 nt, Artificial Sequence
  GATA2 Guide RNA
ggccucaaguaccaggugucac

SEQ ID NO: 18088 - RNA, 22 nt, Artificial Sequence
  GATA2 Guide RNA
gguacuugaggccguccuuguc

SEQ ID NO: 18089 - RNA, 22 nt, Artificial Sequence
  GATA2 Guide RNA
guacuugaggccguccuugucc

SEQ ID NO: 18090 - RNA, 22 nt, Artificial Sequence
  GATA2 Guide RNA
gugacaccugguacuugaggcc

SEQ ID NO: 18091 - RNA, 22 nt, Artificial Sequence
  GATA2 Guide RNA
uacuugaggccguccuuguccu

SEQ ID NO: 18092 - RNA, 22 nt, Artificial Sequence
  GATA2 Guide RNA
ucagugacaccugguacuugag

SEQ ID NO: 18093 - RNA, 22 nt, Artificial Sequence
  GATA2 Guide RNA
ugacaccugguacuugaggccg

SEQ ID NO: 18094 - RNA, 22 nt, Artificial Sequence
  GATA2 Guide RNA
ugaggccguccuuguccucucc

SEQ ID NO: 18095 - RNA, 22 nt, Artificial Sequence
  GATA2 Guide RNA
ugguacuugaggccguccuugu

SEQ ID NO: 18096 - RNA, 22 nt, Artificial Sequence
  GATA2 Guide RNA
uugaggccguccuuguccucuc

SEQ ID NO: 18097 - RNA, 20 nt, Artificial Sequence
  GATA2 Guide RNA
aaggacagcgucaaguacca

SEQ ID NO: 18098 - RNA, 20 nt, Artificial Sequence
  GATA2 Guide RNA
acaaggacagcgucaaguac

SEQ ID NO: 18099 - RNA, 20 nt, Artificial Sequence
  GATA2 Guide RNA
acaccugguacuugacgcug

SEQ ID NO: 18100 - RNA, 20 nt, Artificial Sequence
  GATA2 Guide RNA
acagcgucaaguaccaggug

SEQ ID NO: 18101 - RNA, 20 nt, Artificial Sequence
  GATA2 Guide RNA
accugguacuugacgcuguc

SEQ ID NO: 18102 - RNA, 20 nt, Artificial Sequence
  GATA2 Guide RNA
acgcuguccuuguccucucc

SEQ ID NO: 18103 - RNA, 20 nt, Artificial Sequence
  GATA2 Guide RNA
acuugacgcuguccuugucc

SEQ ID NO: 18104 - RNA, 20 nt, Artificial Sequence
  GATA2 Guide RNA
agaggacaaggacagcguca

SEQ ID NO: 18105 - RNA, 20 nt, Artificial Sequence
  GATA2 Guide RNA
aggacaaggacagcgucaag

SEQ ID NO: 18106 - RNA, 20 nt, Artificial Sequence
  GATA2 Guide RNA
aggacagcgucaaguaccag

SEQ ID NO: 18107 - RNA, 20 nt, Artificial Sequence
  GATA2 Guide RNA
aggagaggacaaggacagcg

SEQ ID NO: 18108 - RNA, 20 nt, Artificial Sequence
  GATA2 Guide RNA
caaggacagcgucaaguacc

SEQ ID NO: 18109 - RNA, 20 nt, Artificial Sequence
  GATA2 Guide RNA
caccugguacuugacgcugu

SEQ ID NO: 18110 - RNA, 20 nt, Artificial Sequence
  GATA2 Guide RNA
cagcccgaggagaggacaag

SEQ ID NO: 18111 - RNA, 20 nt, Artificial Sequence
  GATA2 Guide RNA
cagcgucaaguaccaggugu

SEQ ID NO: 18112 - RNA, 20 nt, Artificial Sequence
  GATA2 Guide RNA
ccgaggagaggacaaggaca

SEQ ID NO: 18113 - RNA, 20 nt, Artificial Sequence
  GATA2 Guide RNA
ccugguacuugacgcugucc

SEQ ID NO: 18114 - RNA, 20 nt, Artificial Sequence
  GATA2 Guide RNA
cgaggagaggacaaggacag

SEQ ID NO: 18115 - RNA, 20 nt, Artificial Sequence
  GATA2 Guide RNA
cgcuguccuuguccucuccu

SEQ ID NO: 18116 - RNA, 20 nt, Artificial Sequence
  GATA2 Guide RNA
cugguacuugacgcuguccu

SEQ ID NO: 18117 - RNA, 20 nt, Artificial Sequence
  GATA2 Guide RNA
cuguccuuguccucuccucg

SEQ ID NO: 18118 - RNA, 20 nt, Artificial Sequence
  GATA2 Guide RNA
cuugacgcuguccuuguccu

SEQ ID NO: 18119 - RNA, 20 nt, Artificial Sequence
  GATA2 Guide RNA
gacaaggacagcgucaagua

SEQ ID NO: 18120 - RNA, 20 nt, Artificial Sequence
  GATA2 Guide RNA
gacaccugguacuugacgcu

SEQ ID NO: 18121 - RNA, 20 nt, Artificial Sequence
  GATA2 Guide RNA
gacagcgucaaguaccaggu

SEQ ID NO: 18122 - RNA, 20 nt, Artificial Sequence
  GATA2 Guide RNA
gacgcuguccuuguccucuc

SEQ ID NO: 18123 - RNA, 20 nt, Artificial Sequence
  GATA2 Guide RNA
gagaggacaaggacagcguc

SEQ ID NO: 18124 - RNA, 20 nt, Artificial Sequence
  GATA2 Guide RNA
gaggacaaggacagcgucaa

SEQ ID NO: 18125 - RNA, 20 nt, Artificial Sequence
  GATA2 Guide RNA
gaggagaggacaaggacagc

SEQ ID NO: 18126 - RNA, 20 nt, Artificial Sequence
  GATA2 Guide RNA
gcuguccuuguccucuccuc

SEQ ID NO: 18127 - RNA, 20 nt, Artificial Sequence
  GATA2 Guide RNA
ggacaaggacagcgucaagu

SEQ ID NO: 18128 - RNA, 20 nt, Artificial Sequence
  GATA2 Guide RNA
ggacagcgucaaguaccagg

SEQ ID NO: 18129 - RNA, 20 nt, Artificial Sequence
  GATA2 Guide RNA
ggagaggacaaggacagcgu

SEQ ID NO: 18130 - RNA, 20 nt, Artificial Sequence
  GATA2 Guide RNA
gguacuugacgcuguccuug

SEQ ID NO: 18131 - RNA, 20 nt, Artificial Sequence
  GATA2 Guide RNA
guacuugacgcuguccuugu

SEQ ID NO: 18132 - RNA, 20 nt, Artificial Sequence
  GATA2 Guide RNA
uacuugacgcuguccuuguc

SEQ ID NO: 18133 - RNA, 20 nt, Artificial Sequence
  GATA2 Guide RNA
ugacaccugguacuugacgc

SEQ ID NO: 18134 - RNA, 20 nt, Artificial Sequence
  GATA2 Guide RNA
ugacgcuguccuuguccucu

SEQ ID NO: 18135 - RNA, 20 nt, Artificial Sequence
  GATA2 Guide RNA
ugguacuugacgcuguccuu

SEQ ID NO: 18136 - RNA, 20 nt, Artificial Sequence
  GATA2 Guide RNA
uguccuuguccucuccucgg

SEQ ID NO: 18137 - RNA, 20 nt, Artificial Sequence
  GATA2 Guide RNA
uugacgcuguccuuguccuc

SEQ ID NO: 18138 - RNA, 21 nt, Artificial Sequence
  GATA2 Guide RNA
aaggacagcgucaaguaccag

SEQ ID NO: 18139 - RNA, 21 nt, Artificial Sequence
  GATA2 Guide RNA
acaaggacagcgucaaguacc

SEQ ID NO: 18140 - RNA, 21 nt, Artificial Sequence
  GATA2 Guide RNA
acaccugguacuugacgcugu

SEQ ID NO: 18141 - RNA, 21 nt, Artificial Sequence
  GATA2 Guide RNA
acagcgucaaguaccaggugu

SEQ ID NO: 18142 - RNA, 21 nt, Artificial Sequence
  GATA2 Guide RNA
accugguacuugacgcugucc

SEQ ID NO: 18143 - RNA, 21 nt, Artificial Sequence
  GATA2 Guide RNA
acgcuguccuuguccucuccu

SEQ ID NO: 18144 - RNA, 21 nt, Artificial Sequence
  GATA2 Guide RNA
acuugacgcuguccuuguccu

SEQ ID NO: 18145 - RNA, 21 nt, Artificial Sequence
  GATA2 Guide RNA
agaggacaaggacagcgucaa

SEQ ID NO: 18146 - RNA, 21 nt, Artificial Sequence
  GATA2 Guide RNA
aggacaaggacagcgucaagu

SEQ ID NO: 18147 - RNA, 21 nt, Artificial Sequence
  GATA2 Guide RNA
aggacagcgucaaguaccagg

SEQ ID NO: 18148 - RNA, 21 nt, Artificial Sequence
  GATA2 Guide RNA
aggagaggacaaggacagcgu

SEQ ID NO: 18149 - RNA, 21 nt, Artificial Sequence
  GATA2 Guide RNA
caaggacagcgucaaguacca

SEQ ID NO: 18150 - RNA, 21 nt, Artificial Sequence
  GATA2 Guide RNA
caccugguacuugacgcuguc

SEQ ID NO: 18151 - RNA, 21 nt, Artificial Sequence
  GATA2 Guide RNA
cagcgucaaguaccagguguc

SEQ ID NO: 18152 - RNA, 21 nt, Artificial Sequence
  GATA2 Guide RNA
cccgaggagaggacaaggaca

SEQ ID NO: 18153 - RNA, 21 nt, Artificial Sequence
  GATA2 Guide RNA
ccgaggagaggacaaggacag

SEQ ID NO: 18154 - RNA, 21 nt, Artificial Sequence
  GATA2 Guide RNA
ccugguacuugacgcuguccu

SEQ ID NO: 18155 - RNA, 21 nt, Artificial Sequence
  GATA2 Guide RNA
cgaggagaggacaaggacagc

SEQ ID NO: 18156 - RNA, 21 nt, Artificial Sequence
  GATA2 Guide RNA
cgcuguccuuguccucuccuc

SEQ ID NO: 18157 - RNA, 21 nt, Artificial Sequence
  GATA2 Guide RNA
cugguacuugacgcuguccuu

SEQ ID NO: 18158 - RNA, 21 nt, Artificial Sequence
  GATA2 Guide RNA
cuguccuuguccucuccucgg

SEQ ID NO: 18159 - RNA, 21 nt, Artificial Sequence
  GATA2 Guide RNA
cuugacgcuguccuuguccuc

SEQ ID NO: 18160 - RNA, 21 nt, Artificial Sequence
  GATA2 Guide RNA
gacaaggacagcgucaaguac

SEQ ID NO: 18161 - RNA, 21 nt, Artificial Sequence
  GATA2 Guide RNA
gacaccugguacuugacgcug

SEQ ID NO: 18162 - RNA, 21 nt, Artificial Sequence
  GATA2 Guide RNA
gacagcgucaaguaccaggug

SEQ ID NO: 18163 - RNA, 21 nt, Artificial Sequence
  GATA2 Guide RNA
gacgcuguccuuguccucucc

SEQ ID NO: 18164 - RNA, 21 nt, Artificial Sequence
  GATA2 Guide RNA
gagaggacaaggacagcguca

SEQ ID NO: 18165 - RNA, 21 nt, Artificial Sequence
  GATA2 Guide RNA
gaggacaaggacagcgucaag

SEQ ID NO: 18166 - RNA, 21 nt, Artificial Sequence
  GATA2 Guide RNA
gaggagaggacaaggacagcg

SEQ ID NO: 18167 - RNA, 21 nt, Artificial Sequence
  GATA2 Guide RNA
gcagcccgaggagaggacaag

SEQ ID NO: 18168 - RNA, 21 nt, Artificial Sequence
  GATA2 Guide RNA
gcuguccuuguccucuccucg

SEQ ID NO: 18169 - RNA, 21 nt, Artificial Sequence
  GATA2 Guide RNA
ggacaaggacagcgucaagua

SEQ ID NO: 18170 - RNA, 21 nt, Artificial Sequence
  GATA2 Guide RNA
ggacagcgucaaguaccaggu

SEQ ID NO: 18171 - RNA, 21 nt, Artificial Sequence
  GATA2 Guide RNA
ggagaggacaaggacagcguc

SEQ ID NO: 18172 - RNA, 21 nt, Artificial Sequence
  GATA2 Guide RNA
gguacuugacgcuguccuugu

SEQ ID NO: 18173 - RNA, 21 nt, Artificial Sequence
  GATA2 Guide RNA
guacuugacgcuguccuuguc

SEQ ID NO: 18174 - RNA, 21 nt, Artificial Sequence
  GATA2 Guide RNA
uacuugacgcuguccuugucc

SEQ ID NO: 18175 - RNA, 21 nt, Artificial Sequence
  GATA2 Guide RNA
ugacaccugguacuugacgcu

SEQ ID NO: 18176 - RNA, 21 nt, Artificial Sequence
  GATA2 Guide RNA
ugacgcuguccuuguccucuc

SEQ ID NO: 18177 - RNA, 21 nt, Artificial Sequence
  GATA2 Guide RNA
ugguacuugacgcuguccuug

SEQ ID NO: 18178 - RNA, 21 nt, Artificial Sequence
  GATA2 Guide RNA
uguccuuguccucuccucggg

SEQ ID NO: 18179 - RNA, 21 nt, Artificial Sequence
  GATA2 Guide RNA
uugacgcuguccuuguccucu

SEQ ID NO: 18180 - RNA, 22 nt, Artificial Sequence
  GATA2 Guide RNA
aaggacagcgucaaguaccagg

SEQ ID NO: 18181 - RNA, 22 nt, Artificial Sequence
  GATA2 Guide RNA
acaaggacagcgucaaguacca

SEQ ID NO: 18182 - RNA, 22 nt, Artificial Sequence
  GATA2 Guide RNA
acaccugguacuugacgcuguc

SEQ ID NO: 18183 - RNA, 22 nt, Artificial Sequence
  GATA2 Guide RNA
acagcgucaaguaccagguguc

SEQ ID NO: 18184 - RNA, 22 nt, Artificial Sequence
  GATA2 Guide RNA
accugguacuugacgcuguccu

SEQ ID NO: 18185 - RNA, 22 nt, Artificial Sequence
  GATA2 Guide RNA
acgcuguccuuguccucuccuc

SEQ ID NO: 18186 - RNA, 22 nt, Artificial Sequence
  GATA2 Guide RNA
acuugacgcuguccuuguccuc

SEQ ID NO: 18187 - RNA, 22 nt, Artificial Sequence
  GATA2 Guide RNA
agaggacaaggacagcgucaag

SEQ ID NO: 18188 - RNA, 22 nt, Artificial Sequence
  GATA2 Guide RNA
aggacaaggacagcgucaagua

SEQ ID NO: 18189 - RNA, 22 nt, Artificial Sequence
  GATA2 Guide RNA
aggacagcgucaaguaccaggu

SEQ ID NO: 18190 - RNA, 22 nt, Artificial Sequence
  GATA2 Guide RNA
aggagaggacaaggacagcguc

SEQ ID NO: 18191 - RNA, 22 nt, Artificial Sequence
  GATA2 Guide RNA
caaggacagcgucaaguaccag

SEQ ID NO: 18192 - RNA, 22 nt, Artificial Sequence
  GATA2 Guide RNA
caccugguacuugacgcugucc

SEQ ID NO: 18193 - RNA, 22 nt, Artificial Sequence
  GATA2 Guide RNA
cagcgucaaguaccagguguca

SEQ ID NO: 18194 - RNA, 22 nt, Artificial Sequence
  GATA2 Guide RNA
cccgaggagaggacaaggacag

SEQ ID NO: 18195 - RNA, 22 nt, Artificial Sequence
  GATA2 Guide RNA
ccgaggagaggacaaggacagc

SEQ ID NO: 18196 - RNA, 22 nt, Artificial Sequence
  GATA2 Guide RNA
ccugguacuugacgcuguccuu

SEQ ID NO: 18197 - RNA, 22 nt, Artificial Sequence
  GATA2 Guide RNA
cgaggagaggacaaggacagcg

SEQ ID NO: 18198 - RNA, 22 nt, Artificial Sequence
  GATA2 Guide RNA
cgcuguccuuguccucuccucg

SEQ ID NO: 18199 - RNA, 22 nt, Artificial Sequence
  GATA2 Guide RNA
cugguacuugacgcuguccuug

SEQ ID NO: 18200 - RNA, 22 nt, Artificial Sequence
  GATA2 Guide RNA
cuguccuuguccucuccucggg

SEQ ID NO: 18201 - RNA, 22 nt, Artificial Sequence
  GATA2 Guide RNA
cuugacgcuguccuuguccucu

SEQ ID NO: 18202 - RNA, 22 nt, Artificial Sequence
  GATA2 Guide RNA
gacaaggacagcgucaaguacc

SEQ ID NO: 18203 - RNA, 22 nt, Artificial Sequence
  GATA2 Guide RNA
gacaccugguacuugacgcugu

SEQ ID NO: 18204 - RNA, 22 nt, Artificial Sequence
  GATA2 Guide RNA
gacagcgucaaguaccaggugu

SEQ ID NO: 18205 - RNA, 22 nt, Artificial Sequence
  GATA2 Guide RNA
gacgcuguccuuguccucuccu

SEQ ID NO: 18206 - RNA, 22 nt, Artificial Sequence
  GATA2 Guide RNA
gagaggacaaggacagcgucaa

SEQ ID NO: 18207 - RNA, 22 nt, Artificial Sequence
  GATA2 Guide RNA
gaggacaaggacagcgucaagu

SEQ ID NO: 18208 - RNA, 22 nt, Artificial Sequence
  GATA2 Guide RNA
gaggagaggacaaggacagcgu

SEQ ID NO: 18209 - RNA, 22 nt, Artificial Sequence
  GATA2 Guide RNA
gcccgaggagaggacaaggaca

SEQ ID NO: 18210 - RNA, 22 nt, Artificial Sequence
  GATA2 Guide RNA
gcuguccuuguccucuccucgg

SEQ ID NO: 18211 - RNA, 22 nt, Artificial Sequence
  GATA2 Guide RNA
ggacaaggacagcgucaaguac

SEQ ID NO: 18212 - RNA, 22 nt, Artificial Sequence
  GATA2 Guide RNA
ggacagcgucaaguaccaggug

SEQ ID NO: 18213 - RNA, 22 nt, Artificial Sequence
  GATA2 Guide RNA
ggagaggacaaggacagcguca

SEQ ID NO: 18214 - RNA, 22 nt, Artificial Sequence
  GATA2 Guide RNA
gguacuugacgcuguccuuguc

SEQ ID NO: 18215 - RNA, 22 nt, Artificial Sequence
  GATA2 Guide RNA
guacuugacgcuguccuugucc

SEQ ID NO: 18216 - RNA, 22 nt, Artificial Sequence
  GATA2 Guide RNA
gugacaccugguacuugacgcu

SEQ ID NO: 18217 - RNA, 22 nt, Artificial Sequence
  GATA2 Guide RNA
uacuugacgcuguccuuguccu

SEQ ID NO: 18218 - RNA, 22 nt, Artificial Sequence
  GATA2 Guide RNA
ugacaccugguacuugacgcug

SEQ ID NO: 18219 - RNA, 22 nt, Artificial Sequence
  GATA2 Guide RNA
ugacgcuguccuuguccucucc

SEQ ID NO: 18220 - RNA, 22 nt, Artificial Sequence
  GATA2 Guide RNA
ugcagcccgaggagaggacaag

SEQ ID NO: 18221 - RNA, 22 nt, Artificial Sequence
  GATA2 Guide RNA
ugguacuugacgcuguccuugu

SEQ ID NO: 18222 - RNA, 22 nt, Artificial Sequence
  GATA2 Guide RNA
uguccuuguccucuccucgggc

SEQ ID NO: 18223 - RNA, 22 nt, Artificial Sequence
  GATA2 Guide RNA
uugacgcuguccuuguccucuc

SEQ ID NO: 18224 - RNA, 20 nt, Artificial Sequence
  GATA2 Guide RNA
aagaacggcgucaaguacca

SEQ ID NO: 18225 - RNA, 20 nt, Artificial Sequence
  GATA2 Guide RNA
acaagaacggcgucaaguac

SEQ ID NO: 18226 - RNA, 20 nt, Artificial Sequence
  GATA2 Guide RNA
acaccugguacuugacgccg

SEQ ID NO: 18227 - RNA, 20 nt, Artificial Sequence
  GATA2 Guide RNA
accugguacuugacgccguu

SEQ ID NO: 18228 - RNA, 20 nt, Artificial Sequence
  GATA2 Guide RNA
acgccguucuuguccucucc

SEQ ID NO: 18229 - RNA, 20 nt, Artificial Sequence
  GATA2 Guide RNA
acuugacgccguucuugucc

SEQ ID NO: 18230 - RNA, 20 nt, Artificial Sequence
  GATA2 Guide RNA
agaacggcgucaaguaccag

SEQ ID NO: 18231 - RNA, 20 nt, Artificial Sequence
  GATA2 Guide RNA
agaggacaagaacggcguca

SEQ ID NO: 18232 - RNA, 20 nt, Artificial Sequence
  GATA2 Guide RNA
agcccgaggagaggacaaga

SEQ ID NO: 18233 - RNA, 20 nt, Artificial Sequence
  GATA2 Guide RNA
aggacaagaacggcgucaag

SEQ ID NO: 18234 - RNA, 20 nt, Artificial Sequence
  GATA2 Guide RNA
aggagaggacaagaacggcg

SEQ ID NO: 18235 - RNA, 20 nt, Artificial Sequence
  GATA2 Guide RNA
caagaacggcgucaaguacc

SEQ ID NO: 18236 - RNA, 20 nt, Artificial Sequence
  GATA2 Guide RNA
caccugguacuugacgccgu

SEQ ID NO: 18237 - RNA, 20 nt, Artificial Sequence
  GATA2 Guide RNA
cccgaggagaggacaagaac

SEQ ID NO: 18238 - RNA, 20 nt, Artificial Sequence
  GATA2 Guide RNA
ccgaggagaggacaagaacg

SEQ ID NO: 18239 - RNA, 20 nt, Artificial Sequence
  GATA2 Guide RNA
ccguucuuguccucuccucg

SEQ ID NO: 18240 - RNA, 20 nt, Artificial Sequence
  GATA2 Guide RNA
ccugguacuugacgccguuc

SEQ ID NO: 18241 - RNA, 20 nt, Artificial Sequence
  GATA2 Guide RNA
cgaggagaggacaagaacgg

SEQ ID NO: 18242 - RNA, 20 nt, Artificial Sequence
  GATA2 Guide RNA
cgccguucuuguccucuccu

SEQ ID NO: 18243 - RNA, 20 nt, Artificial Sequence
  GATA2 Guide RNA
cguucuuguccucuccucgg

SEQ ID NO: 18244 - RNA, 20 nt, Artificial Sequence
  GATA2 Guide RNA
cugguacuugacgccguucu

SEQ ID NO: 18245 - RNA, 20 nt, Artificial Sequence
  GATA2 Guide RNA
cuugacgccguucuuguccu

SEQ ID NO: 18246 - RNA, 20 nt, Artificial Sequence
  GATA2 Guide RNA
gaacggcgucaaguaccagg

SEQ ID NO: 18247 - RNA, 20 nt, Artificial Sequence
  GATA2 Guide RNA
gacaagaacggcgucaagua

SEQ ID NO: 18248 - RNA, 20 nt, Artificial Sequence
  GATA2 Guide RNA
gacaccugguacuugacgcc

SEQ ID NO: 18249 - RNA, 20 nt, Artificial Sequence
  GATA2 Guide RNA
gacgccguucuuguccucuc

SEQ ID NO: 18250 - RNA, 20 nt, Artificial Sequence
  GATA2 Guide RNA
gagaggacaagaacggcguc

SEQ ID NO: 18251 - RNA, 20 nt, Artificial Sequence
  GATA2 Guide RNA
gaggacaagaacggcgucaa

SEQ ID NO: 18252 - RNA, 20 nt, Artificial Sequence
  GATA2 Guide RNA
gaggagaggacaagaacggc

SEQ ID NO: 18253 - RNA, 20 nt, Artificial Sequence
  GATA2 Guide RNA
gcagcccgaggagaggacaa

SEQ ID NO: 18254 - RNA, 20 nt, Artificial Sequence
  GATA2 Guide RNA
gcccgaggagaggacaagaa

SEQ ID NO: 18255 - RNA, 20 nt, Artificial Sequence
  GATA2 Guide RNA
gccguucuuguccucuccuc

SEQ ID NO: 18256 - RNA, 20 nt, Artificial Sequence
  GATA2 Guide RNA
ggacaagaacggcgucaagu

SEQ ID NO: 18257 - RNA, 20 nt, Artificial Sequence
  GATA2 Guide RNA
ggagaggacaagaacggcgu

SEQ ID NO: 18258 - RNA, 20 nt, Artificial Sequence
  GATA2 Guide RNA
gguacuugacgccguucuug

SEQ ID NO: 18259 - RNA, 20 nt, Artificial Sequence
  GATA2 Guide RNA
guacuugacgccguucuugu

SEQ ID NO: 18260 - RNA, 20 nt, Artificial Sequence
  GATA2 Guide RNA
gugcagcccgaggagaggac

SEQ ID NO: 18261 - RNA, 20 nt, Artificial Sequence
  GATA2 Guide RNA
guucuuguccucuccucggg

SEQ ID NO: 18262 - RNA, 20 nt, Artificial Sequence
  GATA2 Guide RNA
uacuugacgccguucuuguc

SEQ ID NO: 18263 - RNA, 20 nt, Artificial Sequence
  GATA2 Guide RNA
ucuuguccucuccucgggcu

SEQ ID NO: 18264 - RNA, 20 nt, Artificial Sequence
  GATA2 Guide RNA
ugacgccguucuuguccucu

SEQ ID NO: 18265 - RNA, 20 nt, Artificial Sequence
  GATA2 Guide RNA
ugcagcccgaggagaggaca

SEQ ID NO: 18266 - RNA, 20 nt, Artificial Sequence
  GATA2 Guide RNA
ugguacuugacgccguucuu

SEQ ID NO: 18267 - RNA, 20 nt, Artificial Sequence
  GATA2 Guide RNA
uucuuguccucuccucgggc

SEQ ID NO: 18268 - RNA, 20 nt, Artificial Sequence
  GATA2 Guide RNA
uugacgccguucuuguccuc

SEQ ID NO: 18269 - RNA, 21 nt, Artificial Sequence
  GATA2 Guide RNA
aagaacggcgucaaguaccag

SEQ ID NO: 18270 - RNA, 21 nt, Artificial Sequence
  GATA2 Guide RNA
acaagaacggcgucaaguacc

SEQ ID NO: 18271 - RNA, 21 nt, Artificial Sequence
  GATA2 Guide RNA
acaccugguacuugacgccgu

SEQ ID NO: 18272 - RNA, 21 nt, Artificial Sequence
  GATA2 Guide RNA
accugguacuugacgccguuc

SEQ ID NO: 18273 - RNA, 21 nt, Artificial Sequence
  GATA2 Guide RNA
acgccguucuuguccucuccu

SEQ ID NO: 18274 - RNA, 21 nt, Artificial Sequence
  GATA2 Guide RNA
acuugacgccguucuuguccu

SEQ ID NO: 18275 - RNA, 21 nt, Artificial Sequence
  GATA2 Guide RNA
agaacggcgucaaguaccagg

SEQ ID NO: 18276 - RNA, 21 nt, Artificial Sequence
  GATA2 Guide RNA
agaggacaagaacggcgucaa

SEQ ID NO: 18277 - RNA, 21 nt, Artificial Sequence
  GATA2 Guide RNA
agcccgaggagaggacaagaa

SEQ ID NO: 18278 - RNA, 21 nt, Artificial Sequence
  GATA2 Guide RNA
aggacaagaacggcgucaagu

SEQ ID NO: 18279 - RNA, 21 nt, Artificial Sequence
  GATA2 Guide RNA
aggagaggacaagaacggcgu

SEQ ID NO: 18280 - RNA, 21 nt, Artificial Sequence
  GATA2 Guide RNA
agugcagcccgaggagaggac

SEQ ID NO: 18281 - RNA, 21 nt, Artificial Sequence
  GATA2 Guide RNA
caagaacggcgucaaguacca

SEQ ID NO: 18282 - RNA, 21 nt, Artificial Sequence
  GATA2 Guide RNA
caccugguacuugacgccguu

SEQ ID NO: 18283 - RNA, 21 nt, Artificial Sequence
  GATA2 Guide RNA
cagcccgaggagaggacaaga

SEQ ID NO: 18284 - RNA, 21 nt, Artificial Sequence
  GATA2 Guide RNA
cccgaggagaggacaagaacg

SEQ ID NO: 18285 - RNA, 21 nt, Artificial Sequence
  GATA2 Guide RNA
ccgaggagaggacaagaacgg

SEQ ID NO: 18286 - RNA, 21 nt, Artificial Sequence
  GATA2 Guide RNA
ccguucuuguccucuccucgg

SEQ ID NO: 18287 - RNA, 21 nt, Artificial Sequence
  GATA2 Guide RNA
ccugguacuugacgccguucu

SEQ ID NO: 18288 - RNA, 21 nt, Artificial Sequence
  GATA2 Guide RNA
cgaggagaggacaagaacggc

SEQ ID NO: 18289 - RNA, 21 nt, Artificial Sequence
  GATA2 Guide RNA
cgccguucuuguccucuccuc

SEQ ID NO: 18290 - RNA, 21 nt, Artificial Sequence
  GATA2 Guide RNA
cguucuuguccucuccucggg

SEQ ID NO: 18291 - RNA, 21 nt, Artificial Sequence
  GATA2 Guide RNA
cugguacuugacgccguucuu

SEQ ID NO: 18292 - RNA, 21 nt, Artificial Sequence
  GATA2 Guide RNA
cuugacgccguucuuguccuc

SEQ ID NO: 18293 - RNA, 21 nt, Artificial Sequence
  GATA2 Guide RNA
gaacggcgucaaguaccaggu

SEQ ID NO: 18294 - RNA, 21 nt, Artificial Sequence
  GATA2 Guide RNA
gacaagaacggcgucaaguac

SEQ ID NO: 18295 - RNA, 21 nt, Artificial Sequence
  GATA2 Guide RNA
gacaccugguacuugacgccg

SEQ ID NO: 18296 - RNA, 21 nt, Artificial Sequence
  GATA2 Guide RNA
gacgccguucuuguccucucc

SEQ ID NO: 18297 - RNA, 21 nt, Artificial Sequence
  GATA2 Guide RNA
gagaggacaagaacggcguca

SEQ ID NO: 18298 - RNA, 21 nt, Artificial Sequence
  GATA2 Guide RNA
gaggacaagaacggcgucaag

SEQ ID NO: 18299 - RNA, 21 nt, Artificial Sequence
  GATA2 Guide RNA
gaggagaggacaagaacggcg

SEQ ID NO: 18300 - RNA, 21 nt, Artificial Sequence
  GATA2 Guide RNA
gcccgaggagaggacaagaac

SEQ ID NO: 18301 - RNA, 21 nt, Artificial Sequence
  GATA2 Guide RNA
gccguucuuguccucuccucg

SEQ ID NO: 18302 - RNA, 21 nt, Artificial Sequence
  GATA2 Guide RNA
ggacaagaacggcgucaagua

SEQ ID NO: 18303 - RNA, 21 nt, Artificial Sequence
  GATA2 Guide RNA
ggagaggacaagaacggcguc

SEQ ID NO: 18304 - RNA, 21 nt, Artificial Sequence
  GATA2 Guide RNA
gguacuugacgccguucuugu

SEQ ID NO: 18305 - RNA, 21 nt, Artificial Sequence
  GATA2 Guide RNA
guacuugacgccguucuuguc

SEQ ID NO: 18306 - RNA, 21 nt, Artificial Sequence
  GATA2 Guide RNA
gugcagcccgaggagaggaca

SEQ ID NO: 18307 - RNA, 21 nt, Artificial Sequence
  GATA2 Guide RNA
guucuuguccucuccucgggc

SEQ ID NO: 18308 - RNA, 21 nt, Artificial Sequence
  GATA2 Guide RNA
uacuugacgccguucuugucc

SEQ ID NO: 18309 - RNA, 21 nt, Artificial Sequence
  GATA2 Guide RNA
ucuuguccucuccucgggcug

SEQ ID NO: 18310 - RNA, 21 nt, Artificial Sequence
  GATA2 Guide RNA
ugacaccugguacuugacgcc

SEQ ID NO: 18311 - RNA, 21 nt, Artificial Sequence
  GATA2 Guide RNA
ugacgccguucuuguccucuc

SEQ ID NO: 18312 - RNA, 21 nt, Artificial Sequence
  GATA2 Guide RNA
ugcagcccgaggagaggacaa

SEQ ID NO: 18313 - RNA, 21 nt, Artificial Sequence
  GATA2 Guide RNA
ugguacuugacgccguucuug

SEQ ID NO: 18314 - RNA, 21 nt, Artificial Sequence
  GATA2 Guide RNA
uucuuguccucuccucgggcu

SEQ ID NO: 18315 - RNA, 21 nt, Artificial Sequence
  GATA2 Guide RNA
uugacgccguucuuguccucu

SEQ ID NO: 18316 - RNA, 22 nt, Artificial Sequence
  GATA2 Guide RNA
aagaacggcgucaaguaccagg

SEQ ID NO: 18317 - RNA, 22 nt, Artificial Sequence
  GATA2 Guide RNA
acaagaacggcgucaaguacca

SEQ ID NO: 18318 - RNA, 22 nt, Artificial Sequence
  GATA2 Guide RNA
acaccugguacuugacgccguu

SEQ ID NO: 18319 - RNA, 22 nt, Artificial Sequence
  GATA2 Guide RNA
accugguacuugacgccguucu

SEQ ID NO: 18320 - RNA, 22 nt, Artificial Sequence
  GATA2 Guide RNA
acgccguucuuguccucuccuc

SEQ ID NO: 18321 - RNA, 22 nt, Artificial Sequence
  GATA2 Guide RNA
acuugacgccguucuuguccuc

SEQ ID NO: 18322 - RNA, 22 nt, Artificial Sequence
  GATA2 Guide RNA
agaacggcgucaaguaccaggu

SEQ ID NO: 18323 - RNA, 22 nt, Artificial Sequence
  GATA2 Guide RNA
agaggacaagaacggcgucaag

SEQ ID NO: 18324 - RNA, 22 nt, Artificial Sequence
  GATA2 Guide RNA
agcccgaggagaggacaagaac

SEQ ID NO: 18325 - RNA, 22 nt, Artificial Sequence
  GATA2 Guide RNA
aggacaagaacggcgucaagua

SEQ ID NO: 18326 - RNA, 22 nt, Artificial Sequence
  GATA2 Guide RNA
aggagaggacaagaacggcguc

SEQ ID NO: 18327 - RNA, 22 nt, Artificial Sequence
  GATA2 Guide RNA
agugcagcccgaggagaggaca

SEQ ID NO: 18328 - RNA, 22 nt, Artificial Sequence
  GATA2 Guide RNA
caagaacggcgucaaguaccag

SEQ ID NO: 18329 - RNA, 22 nt, Artificial Sequence
  GATA2 Guide RNA
caccugguacuugacgccguuc

SEQ ID NO: 18330 - RNA, 22 nt, Artificial Sequence
  GATA2 Guide RNA
cagcccgaggagaggacaagaa

SEQ ID NO: 18331 - RNA, 22 nt, Artificial Sequence
  GATA2 Guide RNA
cccgaggagaggacaagaacgg

SEQ ID NO: 18332 - RNA, 22 nt, Artificial Sequence
  GATA2 Guide RNA
ccgaggagaggacaagaacggc

SEQ ID NO: 18333 - RNA, 22 nt, Artificial Sequence
  GATA2 Guide RNA
ccguucuuguccucuccucggg

SEQ ID NO: 18334 - RNA, 22 nt, Artificial Sequence
  GATA2 Guide RNA
ccugguacuugacgccguucuu

SEQ ID NO: 18335 - RNA, 22 nt, Artificial Sequence
  GATA2 Guide RNA
cgaggagaggacaagaacggcg

SEQ ID NO: 18336 - RNA, 22 nt, Artificial Sequence
  GATA2 Guide RNA
cgccguucuuguccucuccucg

SEQ ID NO: 18337 - RNA, 22 nt, Artificial Sequence
  GATA2 Guide RNA
cguucuuguccucuccucgggc

SEQ ID NO: 18338 - RNA, 22 nt, Artificial Sequence
  GATA2 Guide RNA
cugguacuugacgccguucuug

SEQ ID NO: 18339 - RNA, 22 nt, Artificial Sequence
  GATA2 Guide RNA
cuugacgccguucuuguccucu

SEQ ID NO: 18340 - RNA, 22 nt, Artificial Sequence
  GATA2 Guide RNA
gaacggcgucaaguaccaggug

SEQ ID NO: 18341 - RNA, 22 nt, Artificial Sequence
  GATA2 Guide RNA
gacaagaacggcgucaaguacc

SEQ ID NO: 18342 - RNA, 22 nt, Artificial Sequence
  GATA2 Guide RNA
gacaccugguacuugacgccgu

SEQ ID NO: 18343 - RNA, 22 nt, Artificial Sequence
  GATA2 Guide RNA
gacgccguucuuguccucuccu

SEQ ID NO: 18344 - RNA, 22 nt, Artificial Sequence
  GATA2 Guide RNA
gagaggacaagaacggcgucaa

SEQ ID NO: 18345 - RNA, 22 nt, Artificial Sequence
  GATA2 Guide RNA
gaggacaagaacggcgucaagu

SEQ ID NO: 18346 - RNA, 22 nt, Artificial Sequence
  GATA2 Guide RNA
gaggagaggacaagaacggcgu

SEQ ID NO: 18347 - RNA, 22 nt, Artificial Sequence
  GATA2 Guide RNA
gcagcccgaggagaggacaaga

SEQ ID NO: 18348 - RNA, 22 nt, Artificial Sequence
  GATA2 Guide RNA
gcccgaggagaggacaagaacg

SEQ ID NO: 18349 - RNA, 22 nt, Artificial Sequence
  GATA2 Guide RNA
gccguucuuguccucuccucgg

SEQ ID NO: 18350 - RNA, 22 nt, Artificial Sequence
  GATA2 Guide RNA
ggacaagaacggcgucaaguac

SEQ ID NO: 18351 - RNA, 22 nt, Artificial Sequence
  GATA2 Guide RNA
ggagaggacaagaacggcguca

SEQ ID NO: 18352 - RNA, 22 nt, Artificial Sequence
  GATA2 Guide RNA
gguacuugacgccguucuuguc

SEQ ID NO: 18353 - RNA, 22 nt, Artificial Sequence
  GATA2 Guide RNA
guacuugacgccguucuugucc

SEQ ID NO: 18354 - RNA, 22 nt, Artificial Sequence
  GATA2 Guide RNA
gugcagcccgaggagaggacaa

SEQ ID NO: 18355 - RNA, 22 nt, Artificial Sequence
  GATA2 Guide RNA
guucuuguccucuccucgggcu

SEQ ID NO: 18356 - RNA, 22 nt, Artificial Sequence
  GATA2 Guide RNA
uacuugacgccguucuuguccu

SEQ ID NO: 18357 - RNA, 22 nt, Artificial Sequence
  GATA2 Guide RNA
uagugcagcccgaggagaggac

SEQ ID NO: 18358 - RNA, 22 nt, Artificial Sequence
  GATA2 Guide RNA
ucuuguccucuccucgggcugc

SEQ ID NO: 18359 - RNA, 22 nt, Artificial Sequence
  GATA2 Guide RNA
ugacaccugguacuugacgccg

SEQ ID NO: 18360 - RNA, 22 nt, Artificial Sequence
  GATA2 Guide RNA
ugacgccguucuuguccucucc

SEQ ID NO: 18361 - RNA, 22 nt, Artificial Sequence
  GATA2 Guide RNA
ugguacuugacgccguucuugu

SEQ ID NO: 18362 - RNA, 22 nt, Artificial Sequence
  GATA2 Guide RNA
uucuuguccucuccucgggcug

SEQ ID NO: 18363 - RNA, 22 nt, Artificial Sequence
  GATA2 Guide RNA
uugacgccguucuuguccucuc

SEQ ID NO: 18364 - RNA, 20 nt, Artificial Sequence
  GATA2 Guide RNA
acaggacaaggacggcguca

SEQ ID NO: 18365 - RNA, 20 nt, Artificial Sequence
  GATA2 Guide RNA
acgccguccuuguccugucc

SEQ ID NO: 18366 - RNA, 20 nt, Artificial Sequence
  GATA2 Guide RNA
acuugacgccguccuugucc

SEQ ID NO: 18367 - RNA, 20 nt, Artificial Sequence
  GATA2 Guide RNA
agcccgaggacaggacaagg

SEQ ID NO: 18368 - RNA, 20 nt, Artificial Sequence
  GATA2 Guide RNA
aggacaggacaaggacggcg

SEQ ID NO: 18369 - RNA, 20 nt, Artificial Sequence
  GATA2 Guide RNA
agugcagcccgaggacagga

SEQ ID NO: 18370 - RNA, 20 nt, Artificial Sequence
  GATA2 Guide RNA
cagcccgaggacaggacaag

SEQ ID NO: 18371 - RNA, 20 nt, Artificial Sequence
  GATA2 Guide RNA
cccgaggacaggacaaggac

SEQ ID NO: 18372 - RNA, 20 nt, Artificial Sequence
  GATA2 Guide RNA
ccgaggacaggacaaggacg

SEQ ID NO: 18373 - RNA, 20 nt, Artificial Sequence
  GATA2 Guide RNA
ccguccuuguccuguccucg

SEQ ID NO: 18374 - RNA, 20 nt, Artificial Sequence
  GATA2 Guide RNA
ccuguccucgggcugcacua

SEQ ID NO: 18375 - RNA, 20 nt, Artificial Sequence
  GATA2 Guide RNA
ccuuguccuguccucgggcu

SEQ ID NO: 18376 - RNA, 20 nt, Artificial Sequence
  GATA2 Guide RNA
cgaggacaggacaaggacgg

SEQ ID NO: 18377 - RNA, 20 nt, Artificial Sequence
  GATA2 Guide RNA
cgccguccuuguccuguccu

SEQ ID NO: 18378 - RNA, 20 nt, Artificial Sequence
  GATA2 Guide RNA
cgggggguagugcagcccga

SEQ ID NO: 18379 - RNA, 20 nt, Artificial Sequence
  GATA2 Guide RNA
cguccuuguccuguccucgg

SEQ ID NO: 18380 - RNA, 20 nt, Artificial Sequence
  GATA2 Guide RNA
cuguccucgggcugcacuac

SEQ ID NO: 18381 - RNA, 20 nt, Artificial Sequence
  GATA2 Guide RNA
cuugacgccguccuuguccu

SEQ ID NO: 18382 - RNA, 20 nt, Artificial Sequence
  GATA2 Guide RNA
cuuguccuguccucgggcug

SEQ ID NO: 18383 - RNA, 20 nt, Artificial Sequence
  GATA2 Guide RNA
gacaggacaaggacggcguc

SEQ ID NO: 18384 - RNA, 20 nt, Artificial Sequence
  GATA2 Guide RNA
gacgccguccuuguccuguc

SEQ ID NO: 18385 - RNA, 20 nt, Artificial Sequence
  GATA2 Guide RNA
gaggacaggacaaggacggc

SEQ ID NO: 18386 - RNA, 20 nt, Artificial Sequence
  GATA2 Guide RNA
gcagcccgaggacaggacaa

SEQ ID NO: 18387 - RNA, 20 nt, Artificial Sequence
  GATA2 Guide RNA
gcccgaggacaggacaagga

SEQ ID NO: 18388 - RNA, 20 nt, Artificial Sequence
  GATA2 Guide RNA
gccguccuuguccuguccuc

SEQ ID NO: 18389 - RNA, 20 nt, Artificial Sequence
  GATA2 Guide RNA
ggacaggacaaggacggcgu

SEQ ID NO: 18390 - RNA, 20 nt, Artificial Sequence
  GATA2 Guide RNA
gggggguagugcagcccgag

SEQ ID NO: 18391 - RNA, 20 nt, Artificial Sequence
  GATA2 Guide RNA
ggggguagugcagcccgagg

SEQ ID NO: 18392 - RNA, 20 nt, Artificial Sequence
  GATA2 Guide RNA
gggguagugcagcccgagga

SEQ ID NO: 18393 - RNA, 20 nt, Artificial Sequence
  GATA2 Guide RNA
ggguagugcagcccgaggac

SEQ ID NO: 18394 - RNA, 20 nt, Artificial Sequence
  GATA2 Guide RNA
gguagugcagcccgaggaca

SEQ ID NO: 18395 - RNA, 20 nt, Artificial Sequence
  GATA2 Guide RNA
guagugcagcccgaggacag

SEQ ID NO: 18396 - RNA, 20 nt, Artificial Sequence
  GATA2 Guide RNA
guccucgggcugcacuaccc

SEQ ID NO: 18397 - RNA, 20 nt, Artificial Sequence
  GATA2 Guide RNA
guccuguccucgggcugcac

SEQ ID NO: 18398 - RNA, 20 nt, Artificial Sequence
  GATA2 Guide RNA
guccuuguccuguccucggg

SEQ ID NO: 18399 - RNA, 20 nt, Artificial Sequence
  GATA2 Guide RNA
gugcagcccgaggacaggac

SEQ ID NO: 18400 - RNA, 20 nt, Artificial Sequence
  GATA2 Guide RNA
uacuugacgccguccuuguc

SEQ ID NO: 18401 - RNA, 20 nt, Artificial Sequence
  GATA2 Guide RNA
uagugcagcccgaggacagg

SEQ ID NO: 18402 - RNA, 20 nt, Artificial Sequence
  GATA2 Guide RNA
uccuguccucgggcugcacu

SEQ ID NO: 18403 - RNA, 20 nt, Artificial Sequence
  GATA2 Guide RNA
uccuuguccuguccucgggc

SEQ ID NO: 18404 - RNA, 20 nt, Artificial Sequence
  GATA2 Guide RNA
ugacgccguccuuguccugu

SEQ ID NO: 18405 - RNA, 20 nt, Artificial Sequence
  GATA2 Guide RNA
ugcagcccgaggacaggaca

SEQ ID NO: 18406 - RNA, 20 nt, Artificial Sequence
  GATA2 Guide RNA
uguccucgggcugcacuacc

SEQ ID NO: 18407 - RNA, 20 nt, Artificial Sequence
  GATA2 Guide RNA
uguccuguccucgggcugca

SEQ ID NO: 18408 - RNA, 20 nt, Artificial Sequence
  GATA2 Guide RNA
uugacgccguccuuguccug

SEQ ID NO: 18409 - RNA, 20 nt, Artificial Sequence
  GATA2 Guide RNA
uuguccuguccucgggcugc

SEQ ID NO: 18410 - RNA, 21 nt, Artificial Sequence
  GATA2 Guide RNA
acaggacaaggacggcgucaa

SEQ ID NO: 18411 - RNA, 21 nt, Artificial Sequence
  GATA2 Guide RNA
acgccguccuuguccuguccu

SEQ ID NO: 18412 - RNA, 21 nt, Artificial Sequence
  GATA2 Guide RNA
acuugacgccguccuuguccu

SEQ ID NO: 18413 - RNA, 21 nt, Artificial Sequence
  GATA2 Guide RNA
agcccgaggacaggacaagga

SEQ ID NO: 18414 - RNA, 21 nt, Artificial Sequence
  GATA2 Guide RNA
aggacaggacaaggacggcgu

SEQ ID NO: 18415 - RNA, 21 nt, Artificial Sequence
  GATA2 Guide RNA
agugcagcccgaggacaggac

SEQ ID NO: 18416 - RNA, 21 nt, Artificial Sequence
  GATA2 Guide RNA
cagcccgaggacaggacaagg

SEQ ID NO: 18417 - RNA, 21 nt, Artificial Sequence
  GATA2 Guide RNA
cccgaggacaggacaaggacg

SEQ ID NO: 18418 - RNA, 21 nt, Artificial Sequence
  GATA2 Guide RNA
ccgaggacaggacaaggacgg

SEQ ID NO: 18419 - RNA, 21 nt, Artificial Sequence
  GATA2 Guide RNA
ccguccuuguccuguccucgg

SEQ ID NO: 18420 - RNA, 21 nt, Artificial Sequence
  GATA2 Guide RNA
ccuguccucgggcugcacuac

SEQ ID NO: 18421 - RNA, 21 nt, Artificial Sequence
  GATA2 Guide RNA
ccuuguccuguccucgggcug

SEQ ID NO: 18422 - RNA, 21 nt, Artificial Sequence
  GATA2 Guide RNA
cgaggacaggacaaggacggc

SEQ ID NO: 18423 - RNA, 21 nt, Artificial Sequence
  GATA2 Guide RNA
cgccguccuuguccuguccuc

SEQ ID NO: 18424 - RNA, 21 nt, Artificial Sequence
  GATA2 Guide RNA
cgggggguagugcagcccgag

SEQ ID NO: 18425 - RNA, 21 nt, Artificial Sequence
  GATA2 Guide RNA
cguccuuguccuguccucggg

SEQ ID NO: 18426 - RNA, 21 nt, Artificial Sequence
  GATA2 Guide RNA
cuguccucgggcugcacuacc

SEQ ID NO: 18427 - RNA, 21 nt, Artificial Sequence
  GATA2 Guide RNA
cuugacgccguccuuguccug

SEQ ID NO: 18428 - RNA, 21 nt, Artificial Sequence
  GATA2 Guide RNA
cuuguccuguccucgggcugc

SEQ ID NO: 18429 - RNA, 21 nt, Artificial Sequence
  GATA2 Guide RNA
gacaggacaaggacggcguca

SEQ ID NO: 18430 - RNA, 21 nt, Artificial Sequence
  GATA2 Guide RNA
gacgccguccuuguccugucc

SEQ ID NO: 18431 - RNA, 21 nt, Artificial Sequence
  GATA2 Guide RNA
gaggacaggacaaggacggcg

SEQ ID NO: 18432 - RNA, 21 nt, Artificial Sequence
  GATA2 Guide RNA
gcagcccgaggacaggacaag

SEQ ID NO: 18433 - RNA, 21 nt, Artificial Sequence
  GATA2 Guide RNA
gcccgaggacaggacaaggac

SEQ ID NO: 18434 - RNA, 21 nt, Artificial Sequence
  GATA2 Guide RNA
gccguccuuguccuguccucg

SEQ ID NO: 18435 - RNA, 21 nt, Artificial Sequence
  GATA2 Guide RNA
gcgggggguagugcagcccga

SEQ ID NO: 18436 - RNA, 21 nt, Artificial Sequence
  GATA2 Guide RNA
ggacaggacaaggacggcguc

SEQ ID NO: 18437 - RNA, 21 nt, Artificial Sequence
  GATA2 Guide RNA
gggggguagugcagcccgagg

SEQ ID NO: 18438 - RNA, 21 nt, Artificial Sequence
  GATA2 Guide RNA
ggggguagugcagcccgagga

SEQ ID NO: 18439 - RNA, 21 nt, Artificial Sequence
  GATA2 Guide RNA
gggguagugcagcccgaggac

SEQ ID NO: 18440 - RNA, 21 nt, Artificial Sequence
  GATA2 Guide RNA
ggguagugcagcccgaggaca

SEQ ID NO: 18441 - RNA, 21 nt, Artificial Sequence
  GATA2 Guide RNA
gguagugcagcccgaggacag

SEQ ID NO: 18442 - RNA, 21 nt, Artificial Sequence
  GATA2 Guide RNA
guacuugacgccguccuuguc

SEQ ID NO: 18443 - RNA, 21 nt, Artificial Sequence
  GATA2 Guide RNA
guagugcagcccgaggacagg

SEQ ID NO: 18444 - RNA, 21 nt, Artificial Sequence
  GATA2 Guide RNA
guccucgggcugcacuacccc

SEQ ID NO: 18445 - RNA, 21 nt, Artificial Sequence
  GATA2 Guide RNA
guccuguccucgggcugcacu

SEQ ID NO: 18446 - RNA, 21 nt, Artificial Sequence
  GATA2 Guide RNA
guccuuguccuguccucgggc

SEQ ID NO: 18447 - RNA, 21 nt, Artificial Sequence
  GATA2 Guide RNA
gugcagcccgaggacaggaca

SEQ ID NO: 18448 - RNA, 21 nt, Artificial Sequence
  GATA2 Guide RNA
uacuugacgccguccuugucc

SEQ ID NO: 18449 - RNA, 21 nt, Artificial Sequence
  GATA2 Guide RNA
uagugcagcccgaggacagga

SEQ ID NO: 18450 - RNA, 21 nt, Artificial Sequence
  GATA2 Guide RNA
uccuguccucgggcugcacua

SEQ ID NO: 18451 - RNA, 21 nt, Artificial Sequence
  GATA2 Guide RNA
uccuuguccuguccucgggcu

SEQ ID NO: 18452 - RNA, 21 nt, Artificial Sequence
  GATA2 Guide RNA
ugacgccguccuuguccuguc

SEQ ID NO: 18453 - RNA, 21 nt, Artificial Sequence
  GATA2 Guide RNA
ugcagcccgaggacaggacaa

SEQ ID NO: 18454 - RNA, 21 nt, Artificial Sequence
  GATA2 Guide RNA
uguccucgggcugcacuaccc

SEQ ID NO: 18455 - RNA, 21 nt, Artificial Sequence
  GATA2 Guide RNA
uguccuguccucgggcugcac

SEQ ID NO: 18456 - RNA, 21 nt, Artificial Sequence
  GATA2 Guide RNA
uugacgccguccuuguccugu

SEQ ID NO: 18457 - RNA, 21 nt, Artificial Sequence
  GATA2 Guide RNA
uuguccuguccucgggcugca

SEQ ID NO: 18458 - RNA, 22 nt, Artificial Sequence
  GATA2 Guide RNA
acaggacaaggacggcgucaag

SEQ ID NO: 18459 - RNA, 22 nt, Artificial Sequence
  GATA2 Guide RNA
acgccguccuuguccuguccuc

SEQ ID NO: 18460 - RNA, 22 nt, Artificial Sequence
  GATA2 Guide RNA
acuugacgccguccuuguccug

SEQ ID NO: 18461 - RNA, 22 nt, Artificial Sequence
  GATA2 Guide RNA
agcccgaggacaggacaaggac

SEQ ID NO: 18462 - RNA, 22 nt, Artificial Sequence
  GATA2 Guide RNA
aggacaggacaaggacggcguc

SEQ ID NO: 18463 - RNA, 22 nt, Artificial Sequence
  GATA2 Guide RNA
agugcagcccgaggacaggaca

SEQ ID NO: 18464 - RNA, 22 nt, Artificial Sequence
  GATA2 Guide RNA
cagcccgaggacaggacaagga

SEQ ID NO: 18465 - RNA, 22 nt, Artificial Sequence
  GATA2 Guide RNA
cccgaggacaggacaaggacgg

SEQ ID NO: 18466 - RNA, 22 nt, Artificial Sequence
  GATA2 Guide RNA
ccgaggacaggacaaggacggc

SEQ ID NO: 18467 - RNA, 22 nt, Artificial Sequence
  GATA2 Guide RNA
ccguccuuguccuguccucggg

SEQ ID NO: 18468 - RNA, 22 nt, Artificial Sequence
  GATA2 Guide RNA
ccuguccucgggcugcacuacc

SEQ ID NO: 18469 - RNA, 22 nt, Artificial Sequence
  GATA2 Guide RNA
ccuuguccuguccucgggcugc

SEQ ID NO: 18470 - RNA, 22 nt, Artificial Sequence
  GATA2 Guide RNA
cgaggacaggacaaggacggcg

SEQ ID NO: 18471 - RNA, 22 nt, Artificial Sequence
  GATA2 Guide RNA
cgccguccuuguccuguccucg

SEQ ID NO: 18472 - RNA, 22 nt, Artificial Sequence
  GATA2 Guide RNA
cgcgggggguagugcagcccga

SEQ ID NO: 18473 - RNA, 22 nt, Artificial Sequence
  GATA2 Guide RNA
cgggggguagugcagcccgagg

SEQ ID NO: 18474 - RNA, 22 nt, Artificial Sequence
  GATA2 Guide RNA
cguccuuguccuguccucgggc

SEQ ID NO: 18475 - RNA, 22 nt, Artificial Sequence
  GATA2 Guide RNA
cuguccucgggcugcacuaccc

SEQ ID NO: 18476 - RNA, 22 nt, Artificial Sequence
  GATA2 Guide RNA
cuugacgccguccuuguccugu

SEQ ID NO: 18477 - RNA, 22 nt, Artificial Sequence
  GATA2 Guide RNA
cuuguccuguccucgggcugca

SEQ ID NO: 18478 - RNA, 22 nt, Artificial Sequence
  GATA2 Guide RNA
gacaggacaaggacggcgucaa

SEQ ID NO: 18479 - RNA, 22 nt, Artificial Sequence
  GATA2 Guide RNA
gacgccguccuuguccuguccu

SEQ ID NO: 18480 - RNA, 22 nt, Artificial Sequence
  GATA2 Guide RNA
gaggacaggacaaggacggcgu

SEQ ID NO: 18481 - RNA, 22 nt, Artificial Sequence
  GATA2 Guide RNA
gcagcccgaggacaggacaagg

SEQ ID NO: 18482 - RNA, 22 nt, Artificial Sequence
  GATA2 Guide RNA
gcccgaggacaggacaaggacg

SEQ ID NO: 18483 - RNA, 22 nt, Artificial Sequence
  GATA2 Guide RNA
gccguccuuguccuguccucgg

SEQ ID NO: 18484 - RNA, 22 nt, Artificial Sequence
  GATA2 Guide RNA
gcgggggguagugcagcccgag

SEQ ID NO: 18485 - RNA, 22 nt, Artificial Sequence
  GATA2 Guide RNA
ggacaggacaaggacggcguca

SEQ ID NO: 18486 - RNA, 22 nt, Artificial Sequence
  GATA2 Guide RNA
gggggguagugcagcccgagga

SEQ ID NO: 18487 - RNA, 22 nt, Artificial Sequence
  GATA2 Guide RNA
ggggguagugcagcccgaggac

SEQ ID NO: 18488 - RNA, 22 nt, Artificial Sequence
  GATA2 Guide RNA
gggguagugcagcccgaggaca

SEQ ID NO: 18489 - RNA, 22 nt, Artificial Sequence
  GATA2 Guide RNA
ggguagugcagcccgaggacag

SEQ ID NO: 18490 - RNA, 22 nt, Artificial Sequence
  GATA2 Guide RNA
gguacuugacgccguccuuguc

SEQ ID NO: 18491 - RNA, 22 nt, Artificial Sequence
  GATA2 Guide RNA
gguagugcagcccgaggacagg

SEQ ID NO: 18492 - RNA, 22 nt, Artificial Sequence
  GATA2 Guide RNA
guacuugacgccguccuugucc

SEQ ID NO: 18493 - RNA, 22 nt, Artificial Sequence
  GATA2 Guide RNA
guagugcagcccgaggacagga

SEQ ID NO: 18494 - RNA, 22 nt, Artificial Sequence
  GATA2 Guide RNA
guccucgggcugcacuaccccc

SEQ ID NO: 18495 - RNA, 22 nt, Artificial Sequence
  GATA2 Guide RNA
guccuguccucgggcugcacua

SEQ ID NO: 18496 - RNA, 22 nt, Artificial Sequence
  GATA2 Guide RNA
guccuuguccuguccucgggcu

SEQ ID NO: 18497 - RNA, 22 nt, Artificial Sequence
  GATA2 Guide RNA
gugcagcccgaggacaggacaa

SEQ ID NO: 18498 - RNA, 22 nt, Artificial Sequence
  GATA2 Guide RNA
uacuugacgccguccuuguccu

SEQ ID NO: 18499 - RNA, 22 nt, Artificial Sequence
  GATA2 Guide RNA
uagugcagcccgaggacaggac

SEQ ID NO: 18500 - RNA, 22 nt, Artificial Sequence
  GATA2 Guide RNA
uccuguccucgggcugcacuac

SEQ ID NO: 18501 - RNA, 22 nt, Artificial Sequence
  GATA2 Guide RNA
uccuuguccuguccucgggcug

SEQ ID NO: 18502 - RNA, 22 nt, Artificial Sequence
  GATA2 Guide RNA
ugacgccguccuuguccugucc

SEQ ID NO: 18503 - RNA, 22 nt, Artificial Sequence
  GATA2 Guide RNA
ugcagcccgaggacaggacaag

SEQ ID NO: 18504 - RNA, 22 nt, Artificial Sequence
  GATA2 Guide RNA
uguccucgggcugcacuacccc

SEQ ID NO: 18505 - RNA, 22 nt, Artificial Sequence
  GATA2 Guide RNA
uguccuguccucgggcugcacu

SEQ ID NO: 18506 - RNA, 22 nt, Artificial Sequence
  GATA2 Guide RNA
uugacgccguccuuguccuguc

SEQ ID NO: 18507 - RNA, 22 nt, Artificial Sequence
  GATA2 Guide RNA
uuguccuguccucgggcugcac

SEQ ID NO: 18508 - RNA, 20 nt, Artificial Sequence
  GATA2 Guide RNA
aaccccccgcggaagaugag

SEQ ID NO: 18509 - RNA, 20 nt, Artificial Sequence
  GATA2 Guide RNA
accccccgcggaagaugagg

SEQ ID NO: 18510 - RNA, 20 nt, Artificial Sequence
  GATA2 Guide RNA
acuaaccccccgcggaagau

SEQ ID NO: 18511 - RNA, 20 nt, Artificial Sequence
  GATA2 Guide RNA
agccucaucuuccgcggggg

SEQ ID NO: 18512 - RNA, 20 nt, Artificial Sequence
  GATA2 Guide RNA
aucuuccgcgggggguuagu

SEQ ID NO: 18513 - RNA, 20 nt, Artificial Sequence
  GATA2 Guide RNA
cacuaaccccccgcggaaga

SEQ ID NO: 18514 - RNA, 20 nt, Artificial Sequence
  GATA2 Guide RNA
cagccucaucuuccgcgggg

SEQ ID NO: 18515 - RNA, 20 nt, Artificial Sequence
  GATA2 Guide RNA
caucuuccgcgggggguuag

SEQ ID NO: 18516 - RNA, 20 nt, Artificial Sequence
  GATA2 Guide RNA
ccagccucaucuuccgcggg

SEQ ID NO: 18517 - RNA, 20 nt, Artificial Sequence
  GATA2 Guide RNA
ccccccgcggaagaugaggc

SEQ ID NO: 18518 - RNA, 20 nt, Artificial Sequence
  GATA2 Guide RNA
ccgcgggggguuagugcagc

SEQ ID NO: 18519 - RNA, 20 nt, Artificial Sequence
  GATA2 Guide RNA
ccucaucuuccgcggggggu

SEQ ID NO: 18520 - RNA, 20 nt, Artificial Sequence
  GATA2 Guide RNA
ccucgggcugcacuaacccc

SEQ ID NO: 18521 - RNA, 20 nt, Artificial Sequence
  GATA2 Guide RNA
ccucuccucgggcugcacua

SEQ ID NO: 18522 - RNA, 20 nt, Artificial Sequence
  GATA2 Guide RNA
cgcgggggguuagugcagcc

SEQ ID NO: 18523 - RNA, 20 nt, Artificial Sequence
  GATA2 Guide RNA
cgggcugcacuaaccccccg

SEQ ID NO: 18524 - RNA, 20 nt, Artificial Sequence
  GATA2 Guide RNA
cgggggguuagugcagcccg

SEQ ID NO: 18525 - RNA, 20 nt, Artificial Sequence
  GATA2 Guide RNA
cuaaccccccgcggaagaug

SEQ ID NO: 18526 - RNA, 20 nt, Artificial Sequence
  GATA2 Guide RNA
cucaucuuccgcgggggguu

SEQ ID NO: 18527 - RNA, 20 nt, Artificial Sequence
  GATA2 Guide RNA
cuccucgggcugcacuaacc

SEQ ID NO: 18528 - RNA, 20 nt, Artificial Sequence
  GATA2 Guide RNA
cucgggcugcacuaaccccc

SEQ ID NO: 18529 - RNA, 20 nt, Artificial Sequence
  GATA2 Guide RNA
cucuccucgggcugcacuaa

SEQ ID NO: 18530 - RNA, 20 nt, Artificial Sequence
  GATA2 Guide RNA
cugcacuaaccccccgcgga

SEQ ID NO: 18531 - RNA, 20 nt, Artificial Sequence
  GATA2 Guide RNA
cuuccgcgggggguuagugc

SEQ ID NO: 18532 - RNA, 20 nt, Artificial Sequence
  GATA2 Guide RNA
gcacuaaccccccgcggaag

SEQ ID NO: 18533 - RNA, 20 nt, Artificial Sequence
  GATA2 Guide RNA
gccucaucuuccgcgggggg

SEQ ID NO: 18534 - RNA, 20 nt, Artificial Sequence
  GATA2 Guide RNA
gcgggggguuagugcagccc

SEQ ID NO: 18535 - RNA, 20 nt, Artificial Sequence
  GATA2 Guide RNA
gcugcacuaaccccccgcgg

SEQ ID NO: 18536 - RNA, 20 nt, Artificial Sequence
  GATA2 Guide RNA
ggcugcacuaaccccccgcg

SEQ ID NO: 18537 - RNA, 20 nt, Artificial Sequence
  GATA2 Guide RNA
gggcugcacuaaccccccgc

SEQ ID NO: 18538 - RNA, 20 nt, Artificial Sequence
  GATA2 Guide RNA
gggggguuagugcagcccga

SEQ ID NO: 18539 - RNA, 20 nt, Artificial Sequence
  GATA2 Guide RNA
ggggguuagugcagcccgag

SEQ ID NO: 18540 - RNA, 20 nt, Artificial Sequence
  GATA2 Guide RNA
gggguuagugcagcccgagg

SEQ ID NO: 18541 - RNA, 20 nt, Artificial Sequence
  GATA2 Guide RNA
ggguuagugcagcccgagga

SEQ ID NO: 18542 - RNA, 20 nt, Artificial Sequence
  GATA2 Guide RNA
gguuagugcagcccgaggag

SEQ ID NO: 18543 - RNA, 20 nt, Artificial Sequence
  GATA2 Guide RNA
guccucuccucgggcugcac

SEQ ID NO: 18544 - RNA, 20 nt, Artificial Sequence
  GATA2 Guide RNA
guuagugcagcccgaggaga

SEQ ID NO: 18545 - RNA, 20 nt, Artificial Sequence
  GATA2 Guide RNA
uaaccccccgcggaagauga

SEQ ID NO: 18546 - RNA, 20 nt, Artificial Sequence
  GATA2 Guide RNA
ucaucuuccgcgggggguua

SEQ ID NO: 18547 - RNA, 20 nt, Artificial Sequence
  GATA2 Guide RNA
uccagccucaucuuccgcgg

SEQ ID NO: 18548 - RNA, 20 nt, Artificial Sequence
  GATA2 Guide RNA
uccgcgggggguuagugcag

SEQ ID NO: 18549 - RNA, 20 nt, Artificial Sequence
  GATA2 Guide RNA
uccucgggcugcacuaaccc

SEQ ID NO: 18550 - RNA, 20 nt, Artificial Sequence
  GATA2 Guide RNA
uccucuccucgggcugcacu

SEQ ID NO: 18551 - RNA, 20 nt, Artificial Sequence
  GATA2 Guide RNA
ucgggcugcacuaacccccc

SEQ ID NO: 18552 - RNA, 20 nt, Artificial Sequence
  GATA2 Guide RNA
ucuccucgggcugcacuaac

SEQ ID NO: 18553 - RNA, 20 nt, Artificial Sequence
  GATA2 Guide RNA
ucuuccgcgggggguuagug

SEQ ID NO: 18554 - RNA, 20 nt, Artificial Sequence
  GATA2 Guide RNA
ugcacuaaccccccgcggaa

SEQ ID NO: 18555 - RNA, 20 nt, Artificial Sequence
  GATA2 Guide RNA
uuccgcgggggguuagugca

SEQ ID NO: 18556 - RNA, 21 nt, Artificial Sequence
  GATA2 Guide RNA
aaccccccgcggaagaugagg

SEQ ID NO: 18557 - RNA, 21 nt, Artificial Sequence
  GATA2 Guide RNA
accccccgcggaagaugaggc

SEQ ID NO: 18558 - RNA, 21 nt, Artificial Sequence
  GATA2 Guide RNA
acuaaccccccgcggaagaug

SEQ ID NO: 18559 - RNA, 21 nt, Artificial Sequence
  GATA2 Guide RNA
agccucaucuuccgcgggggg

SEQ ID NO: 18560 - RNA, 21 nt, Artificial Sequence
  GATA2 Guide RNA
aucuuccgcgggggguuagug

SEQ ID NO: 18561 - RNA, 21 nt, Artificial Sequence
  GATA2 Guide RNA
cacuaaccccccgcggaagau

SEQ ID NO: 18562 - RNA, 21 nt, Artificial Sequence
  GATA2 Guide RNA
cagccucaucuuccgcggggg

SEQ ID NO: 18563 - RNA, 21 nt, Artificial Sequence
  GATA2 Guide RNA
caucuuccgcgggggguuagu

SEQ ID NO: 18564 - RNA, 21 nt, Artificial Sequence
  GATA2 Guide RNA
ccagccucaucuuccgcgggg

SEQ ID NO: 18565 - RNA, 21 nt, Artificial Sequence
  GATA2 Guide RNA
ccccccgcggaagaugaggcu

SEQ ID NO: 18566 - RNA, 21 nt, Artificial Sequence
  GATA2 Guide RNA
ccgcgggggguuagugcagcc

SEQ ID NO: 18567 - RNA, 21 nt, Artificial Sequence
  GATA2 Guide RNA
ccucaucuuccgcgggggguu

SEQ ID NO: 18568 - RNA, 21 nt, Artificial Sequence
  GATA2 Guide RNA
ccucgggcugcacuaaccccc

SEQ ID NO: 18569 - RNA, 21 nt, Artificial Sequence
  GATA2 Guide RNA
ccucuccucgggcugcacuaa

SEQ ID NO: 18570 - RNA, 21 nt, Artificial Sequence
  GATA2 Guide RNA
cgcgggggguuagugcagccc

SEQ ID NO: 18571 - RNA, 21 nt, Artificial Sequence
  GATA2 Guide RNA
cgggcugcacuaaccccccgc

SEQ ID NO: 18572 - RNA, 21 nt, Artificial Sequence
  GATA2 Guide RNA
cgggggguuagugcagcccga

SEQ ID NO: 18573 - RNA, 21 nt, Artificial Sequence
  GATA2 Guide RNA
cuaaccccccgcggaagauga

SEQ ID NO: 18574 - RNA, 21 nt, Artificial Sequence
  GATA2 Guide RNA
cucaucuuccgcgggggguua

SEQ ID NO: 18575 - RNA, 21 nt, Artificial Sequence
  GATA2 Guide RNA
cuccagccucaucuuccgcgg

SEQ ID NO: 18576 - RNA, 21 nt, Artificial Sequence
  GATA2 Guide RNA
cuccucgggcugcacuaaccc

SEQ ID NO: 18577 - RNA, 21 nt, Artificial Sequence
  GATA2 Guide RNA
cucgggcugcacuaacccccc

SEQ ID NO: 18578 - RNA, 21 nt, Artificial Sequence
  GATA2 Guide RNA
cucuccucgggcugcacuaac

SEQ ID NO: 18579 - RNA, 21 nt, Artificial Sequence
  GATA2 Guide RNA
cugcacuaaccccccgcggaa

SEQ ID NO: 18580 - RNA, 21 nt, Artificial Sequence
  GATA2 Guide RNA
cuuccgcgggggguuagugca

SEQ ID NO: 18581 - RNA, 21 nt, Artificial Sequence
  GATA2 Guide RNA
gcacuaaccccccgcggaaga

SEQ ID NO: 18582 - RNA, 21 nt, Artificial Sequence
  GATA2 Guide RNA
gccucaucuuccgcggggggu

SEQ ID NO: 18583 - RNA, 21 nt, Artificial Sequence
  GATA2 Guide RNA
gcgggggguuagugcagcccg

SEQ ID NO: 18584 - RNA, 21 nt, Artificial Sequence
  GATA2 Guide RNA
gcugcacuaaccccccgcgga

SEQ ID NO: 18585 - RNA, 21 nt, Artificial Sequence
  GATA2 Guide RNA
ggcugcacuaaccccccgcgg

SEQ ID NO: 18586 - RNA, 21 nt, Artificial Sequence
  GATA2 Guide RNA
gggcugcacuaaccccccgcg

SEQ ID NO: 18587 - RNA, 21 nt, Artificial Sequence
  GATA2 Guide RNA
gggggguuagugcagcccgag

SEQ ID NO: 18588 - RNA, 21 nt, Artificial Sequence
  GATA2 Guide RNA
ggggguuagugcagcccgagg

SEQ ID NO: 18589 - RNA, 21 nt, Artificial Sequence
  GATA2 Guide RNA
gggguuagugcagcccgagga

SEQ ID NO: 18590 - RNA, 21 nt, Artificial Sequence
  GATA2 Guide RNA
ggguuagugcagcccgaggag

SEQ ID NO: 18591 - RNA, 21 nt, Artificial Sequence
  GATA2 Guide RNA
gguuagugcagcccgaggaga

SEQ ID NO: 18592 - RNA, 21 nt, Artificial Sequence
  GATA2 Guide RNA
guccucuccucgggcugcacu

SEQ ID NO: 18593 - RNA, 21 nt, Artificial Sequence
  GATA2 Guide RNA
guuagugcagcccgaggagag

SEQ ID NO: 18594 - RNA, 21 nt, Artificial Sequence
  GATA2 Guide RNA
uaaccccccgcggaagaugag

SEQ ID NO: 18595 - RNA, 21 nt, Artificial Sequence
  GATA2 Guide RNA
ucaucuuccgcgggggguuag

SEQ ID NO: 18596 - RNA, 21 nt, Artificial Sequence
  GATA2 Guide RNA
uccagccucaucuuccgcggg

SEQ ID NO: 18597 - RNA, 21 nt, Artificial Sequence
  GATA2 Guide RNA
uccgcgggggguuagugcagc

SEQ ID NO: 18598 - RNA, 21 nt, Artificial Sequence
  GATA2 Guide RNA
uccucgggcugcacuaacccc

SEQ ID NO: 18599 - RNA, 21 nt, Artificial Sequence
  GATA2 Guide RNA
uccucuccucgggcugcacua

SEQ ID NO: 18600 - RNA, 21 nt, Artificial Sequence
  GATA2 Guide RNA
ucgggcugcacuaaccccccg

SEQ ID NO: 18601 - RNA, 21 nt, Artificial Sequence
  GATA2 Guide RNA
ucuccucgggcugcacuaacc

SEQ ID NO: 18602 - RNA, 21 nt, Artificial Sequence
  GATA2 Guide RNA
ucuuccgcgggggguuagugc

SEQ ID NO: 18603 - RNA, 21 nt, Artificial Sequence
  GATA2 Guide RNA
ugcacuaaccccccgcggaag

SEQ ID NO: 18604 - RNA, 21 nt, Artificial Sequence
  GATA2 Guide RNA
uguccucuccucgggcugcac

SEQ ID NO: 18605 - RNA, 21 nt, Artificial Sequence
  GATA2 Guide RNA
uuccgcgggggguuagugcag

SEQ ID NO: 18606 - RNA, 22 nt, Artificial Sequence
  GATA2 Guide RNA
aaccccccgcggaagaugaggc

SEQ ID NO: 18607 - RNA, 22 nt, Artificial Sequence
  GATA2 Guide RNA
accccccgcggaagaugaggcu

SEQ ID NO: 18608 - RNA, 22 nt, Artificial Sequence
  GATA2 Guide RNA
acuaaccccccgcggaagauga

SEQ ID NO: 18609 - RNA, 22 nt, Artificial Sequence
  GATA2 Guide RNA
agccucaucuuccgcggggggu

SEQ ID NO: 18610 - RNA, 22 nt, Artificial Sequence
  GATA2 Guide RNA
aucuuccgcgggggguuagugc

SEQ ID NO: 18611 - RNA, 22 nt, Artificial Sequence
  GATA2 Guide RNA
cacuaaccccccgcggaagaug

SEQ ID NO: 18612 - RNA, 22 nt, Artificial Sequence
  GATA2 Guide RNA
cagccucaucuuccgcgggggg

SEQ ID NO: 18613 - RNA, 22 nt, Artificial Sequence
  GATA2 Guide RNA
caucuuccgcgggggguuagug

SEQ ID NO: 18614 - RNA, 22 nt, Artificial Sequence
  GATA2 Guide RNA
ccagccucaucuuccgcggggg

SEQ ID NO: 18615 - RNA, 22 nt, Artificial Sequence
  GATA2 Guide RNA
ccccccgcggaagaugaggcug

SEQ ID NO: 18616 - RNA, 22 nt, Artificial Sequence
  GATA2 Guide RNA
ccgcgggggguuagugcagccc

SEQ ID NO: 18617 - RNA, 22 nt, Artificial Sequence
  GATA2 Guide RNA
ccucaucuuccgcgggggguua

SEQ ID NO: 18618 - RNA, 22 nt, Artificial Sequence
  GATA2 Guide RNA
ccucgggcugcacuaacccccc

SEQ ID NO: 18619 - RNA, 22 nt, Artificial Sequence
  GATA2 Guide RNA
ccucuccucgggcugcacuaac

SEQ ID NO: 18620 - RNA, 22 nt, Artificial Sequence
  GATA2 Guide RNA
cgcgggggguuagugcagcccg

SEQ ID NO: 18621 - RNA, 22 nt, Artificial Sequence
  GATA2 Guide RNA
cgggcugcacuaaccccccgcg

SEQ ID NO: 18622 - RNA, 22 nt, Artificial Sequence
  GATA2 Guide RNA
cgggggguuagugcagcccgag

SEQ ID NO: 18623 - RNA, 22 nt, Artificial Sequence
  GATA2 Guide RNA
cuaaccccccgcggaagaugag

SEQ ID NO: 18624 - RNA, 22 nt, Artificial Sequence
  GATA2 Guide RNA
cucaucuuccgcgggggguuag

SEQ ID NO: 18625 - RNA, 22 nt, Artificial Sequence
  GATA2 Guide RNA
cuccagccucaucuuccgcggg

SEQ ID NO: 18626 - RNA, 22 nt, Artificial Sequence
  GATA2 Guide RNA
cuccucgggcugcacuaacccc

SEQ ID NO: 18627 - RNA, 22 nt, Artificial Sequence
  GATA2 Guide RNA
cucgggcugcacuaaccccccg

SEQ ID NO: 18628 - RNA, 22 nt, Artificial Sequence
  GATA2 Guide RNA
cucuccucgggcugcacuaacc

SEQ ID NO: 18629 - RNA, 22 nt, Artificial Sequence
  GATA2 Guide RNA
cugcacuaaccccccgcggaag

SEQ ID NO: 18630 - RNA, 22 nt, Artificial Sequence
  GATA2 Guide RNA
cuuccgcgggggguuagugcag

SEQ ID NO: 18631 - RNA, 22 nt, Artificial Sequence
  GATA2 Guide RNA
gcacuaaccccccgcggaagau

SEQ ID NO: 18632 - RNA, 22 nt, Artificial Sequence
  GATA2 Guide RNA
gccucaucuuccgcgggggguu

SEQ ID NO: 18633 - RNA, 22 nt, Artificial Sequence
  GATA2 Guide RNA
gcgggggguuagugcagcccga

SEQ ID NO: 18634 - RNA, 22 nt, Artificial Sequence
  GATA2 Guide RNA
gcugcacuaaccccccgcggaa

SEQ ID NO: 18635 - RNA, 22 nt, Artificial Sequence
  GATA2 Guide RNA
ggcugcacuaaccccccgcgga

SEQ ID NO: 18636 - RNA, 22 nt, Artificial Sequence
  GATA2 Guide RNA
gggcugcacuaaccccccgcgg

SEQ ID NO: 18637 - RNA, 22 nt, Artificial Sequence
  GATA2 Guide RNA
gggggguuagugcagcccgagg

SEQ ID NO: 18638 - RNA, 22 nt, Artificial Sequence
  GATA2 Guide RNA
ggggguuagugcagcccgagga

SEQ ID NO: 18639 - RNA, 22 nt, Artificial Sequence
  GATA2 Guide RNA
gggguuagugcagcccgaggag

SEQ ID NO: 18640 - RNA, 22 nt, Artificial Sequence
  GATA2 Guide RNA
ggguuagugcagcccgaggaga

SEQ ID NO: 18641 - RNA, 22 nt, Artificial Sequence
  GATA2 Guide RNA
gguuagugcagcccgaggagag

SEQ ID NO: 18642 - RNA, 22 nt, Artificial Sequence
  GATA2 Guide RNA
guccucuccucgggcugcacua

SEQ ID NO: 18643 - RNA, 22 nt, Artificial Sequence
  GATA2 Guide RNA
guuagugcagcccgaggagagg

SEQ ID NO: 18644 - RNA, 22 nt, Artificial Sequence
  GATA2 Guide RNA
uaaccccccgcggaagaugagg

SEQ ID NO: 18645 - RNA, 22 nt, Artificial Sequence
  GATA2 Guide RNA
ucaucuuccgcgggggguuagu

SEQ ID NO: 18646 - RNA, 22 nt, Artificial Sequence
  GATA2 Guide RNA
uccagccucaucuuccgcgggg

SEQ ID NO: 18647 - RNA, 22 nt, Artificial Sequence
  GATA2 Guide RNA
uccgcgggggguuagugcagcc

SEQ ID NO: 18648 - RNA, 22 nt, Artificial Sequence
  GATA2 Guide RNA
uccucgggcugcacuaaccccc

SEQ ID NO: 18649 - RNA, 22 nt, Artificial Sequence
  GATA2 Guide RNA
uccucuccucgggcugcacuaa

SEQ ID NO: 18650 - RNA, 22 nt, Artificial Sequence
  GATA2 Guide RNA
ucgggcugcacuaaccccccgc

SEQ ID NO: 18651 - RNA, 22 nt, Artificial Sequence
  GATA2 Guide RNA
ucuccagccucaucuuccgcgg

SEQ ID NO: 18652 - RNA, 22 nt, Artificial Sequence
  GATA2 Guide RNA
ucuccucgggcugcacuaaccc

SEQ ID NO: 18653 - RNA, 22 nt, Artificial Sequence
  GATA2 Guide RNA
ucuuccgcgggggguuagugca

SEQ ID NO: 18654 - RNA, 22 nt, Artificial Sequence
  GATA2 Guide RNA
ugcacuaaccccccgcggaaga

SEQ ID NO: 18655 - RNA, 22 nt, Artificial Sequence
  GATA2 Guide RNA
uguccucuccucgggcugcacu

SEQ ID NO: 18656 - RNA, 22 nt, Artificial Sequence
  GATA2 Guide RNA
uuccgcgggggguuagugcagc

SEQ ID NO: 18657 - RNA, 22 nt, Artificial Sequence
  GATA2 Guide RNA
uuguccucuccucgggcugcac

SEQ ID NO: 18658 - RNA, 20 nt, Artificial Sequence
  GATA2 Guide RNA
acuaucccccgcggaagaug

SEQ ID NO: 18659 - RNA, 20 nt, Artificial Sequence
  GATA2 Guide RNA
aucccccgcggaagaugagg

SEQ ID NO: 18660 - RNA, 20 nt, Artificial Sequence
  GATA2 Guide RNA
aucuuccgcgggggauagug

SEQ ID NO: 18661 - RNA, 20 nt, Artificial Sequence
  GATA2 Guide RNA
cacuaucccccgcggaagau

SEQ ID NO: 18662 - RNA, 20 nt, Artificial Sequence
  GATA2 Guide RNA
caucuuccgcgggggauagu

SEQ ID NO: 18663 - RNA, 20 nt, Artificial Sequence
  GATA2 Guide RNA
ccgcgggggauagugcagcc

SEQ ID NO: 18664 - RNA, 20 nt, Artificial Sequence
  GATA2 Guide RNA
ccucaucuuccgcgggggau

SEQ ID NO: 18665 - RNA, 20 nt, Artificial Sequence
  GATA2 Guide RNA
ccucgggcugcacuaucccc

SEQ ID NO: 18666 - RNA, 20 nt, Artificial Sequence
  GATA2 Guide RNA
cgcgggggauagugcagccc

SEQ ID NO: 18667 - RNA, 20 nt, Artificial Sequence
  GATA2 Guide RNA
cgggcugcacuaucccccgc

SEQ ID NO: 18668 - RNA, 20 nt, Artificial Sequence
  GATA2 Guide RNA
cgggggauagugcagcccga

SEQ ID NO: 18669 - RNA, 20 nt, Artificial Sequence
  GATA2 Guide RNA
cuaucccccgcggaagauga

SEQ ID NO: 18670 - RNA, 20 nt, Artificial Sequence
  GATA2 Guide RNA
cucaucuuccgcgggggaua

SEQ ID NO: 18671 - RNA, 20 nt, Artificial Sequence
  GATA2 Guide RNA
cuccucgggcugcacuaucc

SEQ ID NO: 18672 - RNA, 20 nt, Artificial Sequence
  GATA2 Guide RNA
cucgggcugcacuauccccc

SEQ ID NO: 18673 - RNA, 20 nt, Artificial Sequence
  GATA2 Guide RNA
cucuccucgggcugcacuau

SEQ ID NO: 18674 - RNA, 20 nt, Artificial Sequence
  GATA2 Guide RNA
cugcacuaucccccgcggaa

SEQ ID NO: 18675 - RNA, 20 nt, Artificial Sequence
  GATA2 Guide RNA
cuuccgcgggggauagugca

SEQ ID NO: 18676 - RNA, 20 nt, Artificial Sequence
  GATA2 Guide RNA
gauagugcagcccgaggaga

SEQ ID NO: 18677 - RNA, 20 nt, Artificial Sequence
  GATA2 Guide RNA
gcacuaucccccgcggaaga

SEQ ID NO: 18678 - RNA, 20 nt, Artificial Sequence
  GATA2 Guide RNA
gccucaucuuccgcggggga

SEQ ID NO: 18679 - RNA, 20 nt, Artificial Sequence
  GATA2 Guide RNA
gcgggggauagugcagcccg

SEQ ID NO: 18680 - RNA, 20 nt, Artificial Sequence
  GATA2 Guide RNA
gcugcacuaucccccgcgga

SEQ ID NO: 18681 - RNA, 20 nt, Artificial Sequence
  GATA2 Guide RNA
ggauagugcagcccgaggag

SEQ ID NO: 18682 - RNA, 20 nt, Artificial Sequence
  GATA2 Guide RNA
ggcugcacuaucccccgcgg

SEQ ID NO: 18683 - RNA, 20 nt, Artificial Sequence
  GATA2 Guide RNA
gggauagugcagcccgagga

SEQ ID NO: 18684 - RNA, 20 nt, Artificial Sequence
  GATA2 Guide RNA
gggcugcacuaucccccgcg

SEQ ID NO: 18685 - RNA, 20 nt, Artificial Sequence
  GATA2 Guide RNA
ggggauagugcagcccgagg

SEQ ID NO: 18686 - RNA, 20 nt, Artificial Sequence
  GATA2 Guide RNA
gggggauagugcagcccgag

SEQ ID NO: 18687 - RNA, 20 nt, Artificial Sequence
  GATA2 Guide RNA
uaucccccgcggaagaugag

SEQ ID NO: 18688 - RNA, 20 nt, Artificial Sequence
  GATA2 Guide RNA
ucaucuuccgcgggggauag

SEQ ID NO: 18689 - RNA, 20 nt, Artificial Sequence
  GATA2 Guide RNA
ucccccgcggaagaugaggc

SEQ ID NO: 18690 - RNA, 20 nt, Artificial Sequence
  GATA2 Guide RNA
uccgcgggggauagugcagc

SEQ ID NO: 18691 - RNA, 20 nt, Artificial Sequence
  GATA2 Guide RNA
uccucgggcugcacuauccc

SEQ ID NO: 18692 - RNA, 20 nt, Artificial Sequence
  GATA2 Guide RNA
ucgggcugcacuaucccccg

SEQ ID NO: 18693 - RNA, 20 nt, Artificial Sequence
  GATA2 Guide RNA
ucuccucgggcugcacuauc

SEQ ID NO: 18694 - RNA, 20 nt, Artificial Sequence
  GATA2 Guide RNA
ucuuccgcgggggauagugc

SEQ ID NO: 18695 - RNA, 20 nt, Artificial Sequence
  GATA2 Guide RNA
ugcacuaucccccgcggaag

SEQ ID NO: 18696 - RNA, 20 nt, Artificial Sequence
  GATA2 Guide RNA
uuccgcgggggauagugcag

SEQ ID NO: 18697 - RNA, 21 nt, Artificial Sequence
  GATA2 Guide RNA
acuaucccccgcggaagauga

SEQ ID NO: 18698 - RNA, 21 nt, Artificial Sequence
  GATA2 Guide RNA
agccucaucuuccgcggggga

SEQ ID NO: 18699 - RNA, 21 nt, Artificial Sequence
  GATA2 Guide RNA
aucccccgcggaagaugaggc

SEQ ID NO: 18700 - RNA, 21 nt, Artificial Sequence
  GATA2 Guide RNA
aucuuccgcgggggauagugc

SEQ ID NO: 18701 - RNA, 21 nt, Artificial Sequence
  GATA2 Guide RNA
cacuaucccccgcggaagaug

SEQ ID NO: 18702 - RNA, 21 nt, Artificial Sequence
  GATA2 Guide RNA
caucuuccgcgggggauagug

SEQ ID NO: 18703 - RNA, 21 nt, Artificial Sequence
  GATA2 Guide RNA
ccgcgggggauagugcagccc

SEQ ID NO: 18704 - RNA, 21 nt, Artificial Sequence
  GATA2 Guide RNA
ccucaucuuccgcgggggaua

SEQ ID NO: 18705 - RNA, 21 nt, Artificial Sequence
  GATA2 Guide RNA
ccucgggcugcacuauccccc

SEQ ID NO: 18706 - RNA, 21 nt, Artificial Sequence
  GATA2 Guide RNA
ccucuccucgggcugcacuau

SEQ ID NO: 18707 - RNA, 21 nt, Artificial Sequence
  GATA2 Guide RNA
cgcgggggauagugcagcccg

SEQ ID NO: 18708 - RNA, 21 nt, Artificial Sequence
  GATA2 Guide RNA
cgggcugcacuaucccccgcg

SEQ ID NO: 18709 - RNA, 21 nt, Artificial Sequence
  GATA2 Guide RNA
cgggggauagugcagcccgag

SEQ ID NO: 18710 - RNA, 21 nt, Artificial Sequence
  GATA2 Guide RNA
cuaucccccgcggaagaugag

SEQ ID NO: 18711 - RNA, 21 nt, Artificial Sequence
  GATA2 Guide RNA
cucaucuuccgcgggggauag

SEQ ID NO: 18712 - RNA, 21 nt, Artificial Sequence
  GATA2 Guide RNA
cuccucgggcugcacuauccc

SEQ ID NO: 18713 - RNA, 21 nt, Artificial Sequence
  GATA2 Guide RNA
cucgggcugcacuaucccccg

SEQ ID NO: 18714 - RNA, 21 nt, Artificial Sequence
  GATA2 Guide RNA
cucuccucgggcugcacuauc

SEQ ID NO: 18715 - RNA, 21 nt, Artificial Sequence
  GATA2 Guide RNA
cugcacuaucccccgcggaag

SEQ ID NO: 18716 - RNA, 21 nt, Artificial Sequence
  GATA2 Guide RNA
cuuccgcgggggauagugcag

SEQ ID NO: 18717 - RNA, 21 nt, Artificial Sequence
  GATA2 Guide RNA
gauagugcagcccgaggagag

SEQ ID NO: 18718 - RNA, 21 nt, Artificial Sequence
  GATA2 Guide RNA
gcacuaucccccgcggaagau

SEQ ID NO: 18719 - RNA, 21 nt, Artificial Sequence
  GATA2 Guide RNA
gccucaucuuccgcgggggau

SEQ ID NO: 18720 - RNA, 21 nt, Artificial Sequence
  GATA2 Guide RNA
gcgggggauagugcagcccga

SEQ ID NO: 18721 - RNA, 21 nt, Artificial Sequence
  GATA2 Guide RNA
gcugcacuaucccccgcggaa

SEQ ID NO: 18722 - RNA, 21 nt, Artificial Sequence
  GATA2 Guide RNA
ggauagugcagcccgaggaga

SEQ ID NO: 18723 - RNA, 21 nt, Artificial Sequence
  GATA2 Guide RNA
ggcugcacuaucccccgcgga

SEQ ID NO: 18724 - RNA, 21 nt, Artificial Sequence
  GATA2 Guide RNA
gggauagugcagcccgaggag

SEQ ID NO: 18725 - RNA, 21 nt, Artificial Sequence
  GATA2 Guide RNA
gggcugcacuaucccccgcgg

SEQ ID NO: 18726 - RNA, 21 nt, Artificial Sequence
  GATA2 Guide RNA
ggggauagugcagcccgagga

SEQ ID NO: 18727 - RNA, 21 nt, Artificial Sequence
  GATA2 Guide RNA
gggggauagugcagcccgagg

SEQ ID NO: 18728 - RNA, 21 nt, Artificial Sequence
  GATA2 Guide RNA
uaucccccgcggaagaugagg

SEQ ID NO: 18729 - RNA, 21 nt, Artificial Sequence
  GATA2 Guide RNA
ucaucuuccgcgggggauagu

SEQ ID NO: 18730 - RNA, 21 nt, Artificial Sequence
  GATA2 Guide RNA
ucccccgcggaagaugaggcu

SEQ ID NO: 18731 - RNA, 21 nt, Artificial Sequence
  GATA2 Guide RNA
uccgcgggggauagugcagcc

SEQ ID NO: 18732 - RNA, 21 nt, Artificial Sequence
  GATA2 Guide RNA
uccucgggcugcacuaucccc

SEQ ID NO: 18733 - RNA, 21 nt, Artificial Sequence
  GATA2 Guide RNA
ucgggcugcacuaucccccgc

SEQ ID NO: 18734 - RNA, 21 nt, Artificial Sequence
  GATA2 Guide RNA
ucuccucgggcugcacuaucc

SEQ ID NO: 18735 - RNA, 21 nt, Artificial Sequence
  GATA2 Guide RNA
ucuuccgcgggggauagugca

SEQ ID NO: 18736 - RNA, 21 nt, Artificial Sequence
  GATA2 Guide RNA
ugcacuaucccccgcggaaga

SEQ ID NO: 18737 - RNA, 21 nt, Artificial Sequence
  GATA2 Guide RNA
uuccgcgggggauagugcagc

SEQ ID NO: 18738 - RNA, 22 nt, Artificial Sequence
  GATA2 Guide RNA
acuaucccccgcggaagaugag

SEQ ID NO: 18739 - RNA, 22 nt, Artificial Sequence
  GATA2 Guide RNA
agccucaucuuccgcgggggau

SEQ ID NO: 18740 - RNA, 22 nt, Artificial Sequence
  GATA2 Guide RNA
aucccccgcggaagaugaggcu

SEQ ID NO: 18741 - RNA, 22 nt, Artificial Sequence
  GATA2 Guide RNA
aucuuccgcgggggauagugca

SEQ ID NO: 18742 - RNA, 22 nt, Artificial Sequence
  GATA2 Guide RNA
cacuaucccccgcggaagauga

SEQ ID NO: 18743 - RNA, 22 nt, Artificial Sequence
  GATA2 Guide RNA
cagccucaucuuccgcggggga

SEQ ID NO: 18744 - RNA, 22 nt, Artificial Sequence
  GATA2 Guide RNA
caucuuccgcgggggauagugc

SEQ ID NO: 18745 - RNA, 22 nt, Artificial Sequence
  GATA2 Guide RNA
ccgcgggggauagugcagcccg

SEQ ID NO: 18746 - RNA, 22 nt, Artificial Sequence
  GATA2 Guide RNA
ccucaucuuccgcgggggauag

SEQ ID NO: 18747 - RNA, 22 nt, Artificial Sequence
  GATA2 Guide RNA
ccucgggcugcacuaucccccg

SEQ ID NO: 18748 - RNA, 22 nt, Artificial Sequence
  GATA2 Guide RNA
ccucuccucgggcugcacuauc

SEQ ID NO: 18749 - RNA, 22 nt, Artificial Sequence
  GATA2 Guide RNA
cgcgggggauagugcagcccga

SEQ ID NO: 18750 - RNA, 22 nt, Artificial Sequence
  GATA2 Guide RNA
cgggcugcacuaucccccgcgg

SEQ ID NO: 18751 - RNA, 22 nt, Artificial Sequence
  GATA2 Guide RNA
cgggggauagugcagcccgagg

SEQ ID NO: 18752 - RNA, 22 nt, Artificial Sequence
  GATA2 Guide RNA
cuaucccccgcggaagaugagg

SEQ ID NO: 18753 - RNA, 22 nt, Artificial Sequence
  GATA2 Guide RNA
cucaucuuccgcgggggauagu

SEQ ID NO: 18754 - RNA, 22 nt, Artificial Sequence
  GATA2 Guide RNA
cuccucgggcugcacuaucccc

SEQ ID NO: 18755 - RNA, 22 nt, Artificial Sequence
  GATA2 Guide RNA
cucgggcugcacuaucccccgc

SEQ ID NO: 18756 - RNA, 22 nt, Artificial Sequence
  GATA2 Guide RNA
cucuccucgggcugcacuaucc

SEQ ID NO: 18757 - RNA, 22 nt, Artificial Sequence
  GATA2 Guide RNA
cugcacuaucccccgcggaaga

SEQ ID NO: 18758 - RNA, 22 nt, Artificial Sequence
  GATA2 Guide RNA
cuuccgcgggggauagugcagc

SEQ ID NO: 18759 - RNA, 22 nt, Artificial Sequence
  GATA2 Guide RNA
gauagugcagcccgaggagagg

SEQ ID NO: 18760 - RNA, 22 nt, Artificial Sequence
  GATA2 Guide RNA
gcacuaucccccgcggaagaug

SEQ ID NO: 18761 - RNA, 22 nt, Artificial Sequence
  GATA2 Guide RNA
gccucaucuuccgcgggggaua

SEQ ID NO: 18762 - RNA, 22 nt, Artificial Sequence
  GATA2 Guide RNA
gcgggggauagugcagcccgag

SEQ ID NO: 18763 - RNA, 22 nt, Artificial Sequence
  GATA2 Guide RNA
gcugcacuaucccccgcggaag

SEQ ID NO: 18764 - RNA, 22 nt, Artificial Sequence
  GATA2 Guide RNA
ggauagugcagcccgaggagag

SEQ ID NO: 18765 - RNA, 22 nt, Artificial Sequence
  GATA2 Guide RNA
ggcugcacuaucccccgcggaa

SEQ ID NO: 18766 - RNA, 22 nt, Artificial Sequence
  GATA2 Guide RNA
gggauagugcagcccgaggaga

SEQ ID NO: 18767 - RNA, 22 nt, Artificial Sequence
  GATA2 Guide RNA
gggcugcacuaucccccgcgga

SEQ ID NO: 18768 - RNA, 22 nt, Artificial Sequence
  GATA2 Guide RNA
ggggauagugcagcccgaggag

SEQ ID NO: 18769 - RNA, 22 nt, Artificial Sequence
  GATA2 Guide RNA
gggggauagugcagcccgagga

SEQ ID NO: 18770 - RNA, 22 nt, Artificial Sequence
  GATA2 Guide RNA
uaucccccgcggaagaugaggc

SEQ ID NO: 18771 - RNA, 22 nt, Artificial Sequence
  GATA2 Guide RNA
ucaucuuccgcgggggauagug

SEQ ID NO: 18772 - RNA, 22 nt, Artificial Sequence
  GATA2 Guide RNA
ucccccgcggaagaugaggcug

SEQ ID NO: 18773 - RNA, 22 nt, Artificial Sequence
  GATA2 Guide RNA
uccgcgggggauagugcagccc

SEQ ID NO: 18774 - RNA, 22 nt, Artificial Sequence
  GATA2 Guide RNA
uccucgggcugcacuauccccc

SEQ ID NO: 18775 - RNA, 22 nt, Artificial Sequence
  GATA2 Guide RNA
uccucuccucgggcugcacuau

SEQ ID NO: 18776 - RNA, 22 nt, Artificial Sequence
  GATA2 Guide RNA
ucgggcugcacuaucccccgcg

SEQ ID NO: 18777 - RNA, 22 nt, Artificial Sequence
  GATA2 Guide RNA
ucuccucgggcugcacuauccc

SEQ ID NO: 18778 - RNA, 22 nt, Artificial Sequence
  GATA2 Guide RNA
ucuuccgcgggggauagugcag

SEQ ID NO: 18779 - RNA, 22 nt, Artificial Sequence
  GATA2 Guide RNA
ugcacuaucccccgcggaagau

SEQ ID NO: 18780 - RNA, 22 nt, Artificial Sequence
  GATA2 Guide RNA
uuccgcgggggauagugcagcc

SEQ ID NO: 18781 - RNA, 20 nt, Artificial Sequence
  GATA2 Guide RNA
acccaccgcggaagaugagg

SEQ ID NO: 18782 - RNA, 20 nt, Artificial Sequence
  GATA2 Guide RNA
accgcggaagaugaggcugg

SEQ ID NO: 18783 - RNA, 20 nt, Artificial Sequence
  GATA2 Guide RNA
acuacccaccgcggaagaug

SEQ ID NO: 18784 - RNA, 20 nt, Artificial Sequence
  GATA2 Guide RNA
agccucaucuuccgcggugg

SEQ ID NO: 18785 - RNA, 20 nt, Artificial Sequence
  GATA2 Guide RNA
aucuuccgcgguggguagug

SEQ ID NO: 18786 - RNA, 20 nt, Artificial Sequence
  GATA2 Guide RNA
caccgcggaagaugaggcug

SEQ ID NO: 18787 - RNA, 20 nt, Artificial Sequence
  GATA2 Guide RNA
cacuacccaccgcggaagau

SEQ ID NO: 18788 - RNA, 20 nt, Artificial Sequence
  GATA2 Guide RNA
cagccucaucuuccgcggug

SEQ ID NO: 18789 - RNA, 20 nt, Artificial Sequence
  GATA2 Guide RNA
caucuuccgcgguggguagu

SEQ ID NO: 18790 - RNA, 20 nt, Artificial Sequence
  GATA2 Guide RNA
ccaccgcggaagaugaggcu

SEQ ID NO: 18791 - RNA, 20 nt, Artificial Sequence
  GATA2 Guide RNA
ccagccucaucuuccgcggu

SEQ ID NO: 18792 - RNA, 20 nt, Artificial Sequence
  GATA2 Guide RNA
cccaccgcggaagaugaggc

SEQ ID NO: 18793 - RNA, 20 nt, Artificial Sequence
  GATA2 Guide RNA
ccgcgguggguagugcagcc

SEQ ID NO: 18794 - RNA, 20 nt, Artificial Sequence
  GATA2 Guide RNA
ccucaucuuccgcggugggu

SEQ ID NO: 18795 - RNA, 20 nt, Artificial Sequence
  GATA2 Guide RNA
ccucgggcugcacuacccac

SEQ ID NO: 18796 - RNA, 20 nt, Artificial Sequence
  GATA2 Guide RNA
cgcgguggguagugcagccc

SEQ ID NO: 18797 - RNA, 20 nt, Artificial Sequence
  GATA2 Guide RNA
cgggcugcacuacccaccgc

SEQ ID NO: 18798 - RNA, 20 nt, Artificial Sequence
  GATA2 Guide RNA
cgguggguagugcagcccga

SEQ ID NO: 18799 - RNA, 20 nt, Artificial Sequence
  GATA2 Guide RNA
cuacccaccgcggaagauga

SEQ ID NO: 18800 - RNA, 20 nt, Artificial Sequence
  GATA2 Guide RNA
cucaucuuccgcggugggua

SEQ ID NO: 18801 - RNA, 20 nt, Artificial Sequence
  GATA2 Guide RNA
cuccagccucaucuuccgcg

SEQ ID NO: 18802 - RNA, 20 nt, Artificial Sequence
  GATA2 Guide RNA
cuccucgggcugcacuaccc

SEQ ID NO: 18803 - RNA, 20 nt, Artificial Sequence
  GATA2 Guide RNA
cucgggcugcacuacccacc

SEQ ID NO: 18804 - RNA, 20 nt, Artificial Sequence
  GATA2 Guide RNA
cucuccucgggcugcacuac

SEQ ID NO: 18805 - RNA, 20 nt, Artificial Sequence
  GATA2 Guide RNA
cugcacuacccaccgcggaa

SEQ ID NO: 18806 - RNA, 20 nt, Artificial Sequence
  GATA2 Guide RNA
cuuccgcgguggguagugca

SEQ ID NO: 18807 - RNA, 20 nt, Artificial Sequence
  GATA2 Guide RNA
gcacuacccaccgcggaaga

SEQ ID NO: 18808 - RNA, 20 nt, Artificial Sequence
  GATA2 Guide RNA
gccucaucuuccgcgguggg

SEQ ID NO: 18809 - RNA, 20 nt, Artificial Sequence
  GATA2 Guide RNA
gcgguggguagugcagcccg

SEQ ID NO: 18810 - RNA, 20 nt, Artificial Sequence
  GATA2 Guide RNA
gcugcacuacccaccgcgga

SEQ ID NO: 18811 - RNA, 20 nt, Artificial Sequence
  GATA2 Guide RNA
ggcugcacuacccaccgcgg

SEQ ID NO: 18812 - RNA, 20 nt, Artificial Sequence
  GATA2 Guide RNA
gggcugcacuacccaccgcg

SEQ ID NO: 18813 - RNA, 20 nt, Artificial Sequence
  GATA2 Guide RNA
gguggguagugcagcccgag

SEQ ID NO: 18814 - RNA, 20 nt, Artificial Sequence
  GATA2 Guide RNA
gucuccagccucaucuuccg

SEQ ID NO: 18815 - RNA, 20 nt, Artificial Sequence
  GATA2 Guide RNA
guggguagugcagcccgagg

SEQ ID NO: 18816 - RNA, 20 nt, Artificial Sequence
  GATA2 Guide RNA
uacccaccgcggaagaugag

SEQ ID NO: 18817 - RNA, 20 nt, Artificial Sequence
  GATA2 Guide RNA
ucaucuuccgcgguggguag

SEQ ID NO: 18818 - RNA, 20 nt, Artificial Sequence
  GATA2 Guide RNA
uccgcgguggguagugcagc

SEQ ID NO: 18819 - RNA, 20 nt, Artificial Sequence
  GATA2 Guide RNA
uccucgggcugcacuaccca

SEQ ID NO: 18820 - RNA, 20 nt, Artificial Sequence
  GATA2 Guide RNA
ucgggcugcacuacccaccg

SEQ ID NO: 18821 - RNA, 20 nt, Artificial Sequence
  GATA2 Guide RNA
ucuccagccucaucuuccgc

SEQ ID NO: 18822 - RNA, 20 nt, Artificial Sequence
  GATA2 Guide RNA
ucuccucgggcugcacuacc

SEQ ID NO: 18823 - RNA, 20 nt, Artificial Sequence
  GATA2 Guide RNA
ucuuccgcgguggguagugc

SEQ ID NO: 18824 - RNA, 20 nt, Artificial Sequence
  GATA2 Guide RNA
ugcacuacccaccgcggaag

SEQ ID NO: 18825 - RNA, 20 nt, Artificial Sequence
  GATA2 Guide RNA
uuccgcgguggguagugcag

SEQ ID NO: 18826 - RNA, 21 nt, Artificial Sequence
  GATA2 Guide RNA
acccaccgcggaagaugaggc

SEQ ID NO: 18827 - RNA, 21 nt, Artificial Sequence
  GATA2 Guide RNA
accgcggaagaugaggcugga

SEQ ID NO: 18828 - RNA, 21 nt, Artificial Sequence
  GATA2 Guide RNA
acuacccaccgcggaagauga

SEQ ID NO: 18829 - RNA, 21 nt, Artificial Sequence
  GATA2 Guide RNA
agccucaucuuccgcgguggg

SEQ ID NO: 18830 - RNA, 21 nt, Artificial Sequence
  GATA2 Guide RNA
aucuuccgcgguggguagugc

SEQ ID NO: 18831 - RNA, 21 nt, Artificial Sequence
  GATA2 Guide RNA
caccgcggaagaugaggcugg

SEQ ID NO: 18832 - RNA, 21 nt, Artificial Sequence
  GATA2 Guide RNA
cacuacccaccgcggaagaug

SEQ ID NO: 18833 - RNA, 21 nt, Artificial Sequence
  GATA2 Guide RNA
cagccucaucuuccgcggugg

SEQ ID NO: 18834 - RNA, 21 nt, Artificial Sequence
  GATA2 Guide RNA
caucuuccgcgguggguagug

SEQ ID NO: 18835 - RNA, 21 nt, Artificial Sequence
  GATA2 Guide RNA
ccaccgcggaagaugaggcug

SEQ ID NO: 18836 - RNA, 21 nt, Artificial Sequence
  GATA2 Guide RNA
ccagccucaucuuccgcggug

SEQ ID NO: 18837 - RNA, 21 nt, Artificial Sequence
  GATA2 Guide RNA
cccaccgcggaagaugaggcu

SEQ ID NO: 18838 - RNA, 21 nt, Artificial Sequence
  GATA2 Guide RNA
ccgcgguggguagugcagccc

SEQ ID NO: 18839 - RNA, 21 nt, Artificial Sequence
  GATA2 Guide RNA
ccucaucuuccgcggugggua

SEQ ID NO: 18840 - RNA, 21 nt, Artificial Sequence
  GATA2 Guide RNA
ccucgggcugcacuacccacc

SEQ ID NO: 18841 - RNA, 21 nt, Artificial Sequence
  GATA2 Guide RNA
ccucuccucgggcugcacuac

SEQ ID NO: 18842 - RNA, 21 nt, Artificial Sequence
  GATA2 Guide RNA
cgcgguggguagugcagcccg

SEQ ID NO: 18843 - RNA, 21 nt, Artificial Sequence
  GATA2 Guide RNA
cgggcugcacuacccaccgcg

SEQ ID NO: 18844 - RNA, 21 nt, Artificial Sequence
  GATA2 Guide RNA
cgguggguagugcagcccgag

SEQ ID NO: 18845 - RNA, 21 nt, Artificial Sequence
  GATA2 Guide RNA
cgucuccagccucaucuuccg

SEQ ID NO: 18846 - RNA, 21 nt, Artificial Sequence
  GATA2 Guide RNA
cuacccaccgcggaagaugag

SEQ ID NO: 18847 - RNA, 21 nt, Artificial Sequence
  GATA2 Guide RNA
cucaucuuccgcgguggguag

SEQ ID NO: 18848 - RNA, 21 nt, Artificial Sequence
  GATA2 Guide RNA
cuccucgggcugcacuaccca

SEQ ID NO: 18849 - RNA, 21 nt, Artificial Sequence
  GATA2 Guide RNA
cucgggcugcacuacccaccg

SEQ ID NO: 18850 - RNA, 21 nt, Artificial Sequence
  GATA2 Guide RNA
cucuccucgggcugcacuacc

SEQ ID NO: 18851 - RNA, 21 nt, Artificial Sequence
  GATA2 Guide RNA
cugcacuacccaccgcggaag

SEQ ID NO: 18852 - RNA, 21 nt, Artificial Sequence
  GATA2 Guide RNA
cuuccgcgguggguagugcag

SEQ ID NO: 18853 - RNA, 21 nt, Artificial Sequence
  GATA2 Guide RNA
gcacuacccaccgcggaagau

SEQ ID NO: 18854 - RNA, 21 nt, Artificial Sequence
  GATA2 Guide RNA
gccucaucuuccgcggugggu

SEQ ID NO: 18855 - RNA, 21 nt, Artificial Sequence
  GATA2 Guide RNA
gcgguggguagugcagcccga

SEQ ID NO: 18856 - RNA, 21 nt, Artificial Sequence
  GATA2 Guide RNA
gcugcacuacccaccgcggaa

SEQ ID NO: 18857 - RNA, 21 nt, Artificial Sequence
  GATA2 Guide RNA
ggcugcacuacccaccgcgga

SEQ ID NO: 18858 - RNA, 21 nt, Artificial Sequence
  GATA2 Guide RNA
gggcugcacuacccaccgcgg

SEQ ID NO: 18859 - RNA, 21 nt, Artificial Sequence
  GATA2 Guide RNA
gguggguagugcagcccgagg

SEQ ID NO: 18860 - RNA, 21 nt, Artificial Sequence
  GATA2 Guide RNA
gucuccagccucaucuuccgc

SEQ ID NO: 18861 - RNA, 21 nt, Artificial Sequence
  GATA2 Guide RNA
guggguagugcagcccgagga

SEQ ID NO: 18862 - RNA, 21 nt, Artificial Sequence
  GATA2 Guide RNA
uacccaccgcggaagaugagg

SEQ ID NO: 18863 - RNA, 21 nt, Artificial Sequence
  GATA2 Guide RNA
ucaucuuccgcgguggguagu

SEQ ID NO: 18864 - RNA, 21 nt, Artificial Sequence
  GATA2 Guide RNA
uccagccucaucuuccgcggu

SEQ ID NO: 18865 - RNA, 21 nt, Artificial Sequence
  GATA2 Guide RNA
uccgcgguggguagugcagcc

SEQ ID NO: 18866 - RNA, 21 nt, Artificial Sequence
  GATA2 Guide RNA
uccucgggcugcacuacccac

SEQ ID NO: 18867 - RNA, 21 nt, Artificial Sequence
  GATA2 Guide RNA
ucgggcugcacuacccaccgc

SEQ ID NO: 18868 - RNA, 21 nt, Artificial Sequence
  GATA2 Guide RNA
ucuccagccucaucuuccgcg

SEQ ID NO: 18869 - RNA, 21 nt, Artificial Sequence
  GATA2 Guide RNA
ucuccucgggcugcacuaccc

SEQ ID NO: 18870 - RNA, 21 nt, Artificial Sequence
  GATA2 Guide RNA
ucuuccgcgguggguagugca

SEQ ID NO: 18871 - RNA, 21 nt, Artificial Sequence
  GATA2 Guide RNA
ugcacuacccaccgcggaaga

SEQ ID NO: 18872 - RNA, 21 nt, Artificial Sequence
  GATA2 Guide RNA
uuccgcgguggguagugcagc

SEQ ID NO: 18873 - RNA, 22 nt, Artificial Sequence
  GATA2 Guide RNA
acccaccgcggaagaugaggcu

SEQ ID NO: 18874 - RNA, 22 nt, Artificial Sequence
  GATA2 Guide RNA
accgcggaagaugaggcuggag

SEQ ID NO: 18875 - RNA, 22 nt, Artificial Sequence
  GATA2 Guide RNA
acuacccaccgcggaagaugag

SEQ ID NO: 18876 - RNA, 22 nt, Artificial Sequence
  GATA2 Guide RNA
agccucaucuuccgcggugggu

SEQ ID NO: 18877 - RNA, 22 nt, Artificial Sequence
  GATA2 Guide RNA
aucuuccgcgguggguagugca

SEQ ID NO: 18878 - RNA, 22 nt, Artificial Sequence
  GATA2 Guide RNA
caccgcggaagaugaggcugga

SEQ ID NO: 18879 - RNA, 22 nt, Artificial Sequence
  GATA2 Guide RNA
cacuacccaccgcggaagauga

SEQ ID NO: 18880 - RNA, 22 nt, Artificial Sequence
  GATA2 Guide RNA
cagccucaucuuccgcgguggg

SEQ ID NO: 18881 - RNA, 22 nt, Artificial Sequence
  GATA2 Guide RNA
caucuuccgcgguggguagugc

SEQ ID NO: 18882 - RNA, 22 nt, Artificial Sequence
  GATA2 Guide RNA
ccaccgcggaagaugaggcugg

SEQ ID NO: 18883 - RNA, 22 nt, Artificial Sequence
  GATA2 Guide RNA
ccagccucaucuuccgcggugg

SEQ ID NO: 18884 - RNA, 22 nt, Artificial Sequence
  GATA2 Guide RNA
cccaccgcggaagaugaggcug

SEQ ID NO: 18885 - RNA, 22 nt, Artificial Sequence
  GATA2 Guide RNA
ccgcgguggguagugcagcccg

SEQ ID NO: 18886 - RNA, 22 nt, Artificial Sequence
  GATA2 Guide RNA
ccucaucuuccgcgguggguag

SEQ ID NO: 18887 - RNA, 22 nt, Artificial Sequence
  GATA2 Guide RNA
ccucgggcugcacuacccaccg

SEQ ID NO: 18888 - RNA, 22 nt, Artificial Sequence
  GATA2 Guide RNA
ccucuccucgggcugcacuacc

SEQ ID NO: 18889 - RNA, 22 nt, Artificial Sequence
  GATA2 Guide RNA
cgcgguggguagugcagcccga

SEQ ID NO: 18890 - RNA, 22 nt, Artificial Sequence
  GATA2 Guide RNA
cgggcugcacuacccaccgcgg

SEQ ID NO: 18891 - RNA, 22 nt, Artificial Sequence
  GATA2 Guide RNA
cgguggguagugcagcccgagg

SEQ ID NO: 18892 - RNA, 22 nt, Artificial Sequence
  GATA2 Guide RNA
cgucuccagccucaucuuccgc

SEQ ID NO: 18893 - RNA, 22 nt, Artificial Sequence
  GATA2 Guide RNA
cuacccaccgcggaagaugagg

SEQ ID NO: 18894 - RNA, 22 nt, Artificial Sequence
  GATA2 Guide RNA
cucaucuuccgcgguggguagu

SEQ ID NO: 18895 - RNA, 22 nt, Artificial Sequence
  GATA2 Guide RNA
cuccagccucaucuuccgcggu

SEQ ID NO: 18896 - RNA, 22 nt, Artificial Sequence
  GATA2 Guide RNA
cuccucgggcugcacuacccac

SEQ ID NO: 18897 - RNA, 22 nt, Artificial Sequence
  GATA2 Guide RNA
cucgggcugcacuacccaccgc

SEQ ID NO: 18898 - RNA, 22 nt, Artificial Sequence
  GATA2 Guide RNA
cucuccucgggcugcacuaccc

SEQ ID NO: 18899 - RNA, 22 nt, Artificial Sequence
  GATA2 Guide RNA
cugcacuacccaccgcggaaga

SEQ ID NO: 18900 - RNA, 22 nt, Artificial Sequence
  GATA2 Guide RNA
cuuccgcgguggguagugcagc

SEQ ID NO: 18901 - RNA, 22 nt, Artificial Sequence
  GATA2 Guide RNA
gcacuacccaccgcggaagaug

SEQ ID NO: 18902 - RNA, 22 nt, Artificial Sequence
  GATA2 Guide RNA
gccucaucuuccgcggugggua

SEQ ID NO: 18903 - RNA, 22 nt, Artificial Sequence
  GATA2 Guide RNA
gcgguggguagugcagcccgag

SEQ ID NO: 18904 - RNA, 22 nt, Artificial Sequence
  GATA2 Guide RNA
gcgucuccagccucaucuuccg

SEQ ID NO: 18905 - RNA, 22 nt, Artificial Sequence
  GATA2 Guide RNA
gcugcacuacccaccgcggaag

SEQ ID NO: 18906 - RNA, 22 nt, Artificial Sequence
  GATA2 Guide RNA
ggcugcacuacccaccgcggaa

SEQ ID NO: 18907 - RNA, 22 nt, Artificial Sequence
  GATA2 Guide RNA
gggcugcacuacccaccgcgga

SEQ ID NO: 18908 - RNA, 22 nt, Artificial Sequence
  GATA2 Guide RNA
gguggguagugcagcccgagga

SEQ ID NO: 18909 - RNA, 22 nt, Artificial Sequence
  GATA2 Guide RNA
gucuccagccucaucuuccgcg

SEQ ID NO: 18910 - RNA, 22 nt, Artificial Sequence
  GATA2 Guide RNA
guggguagugcagcccgaggag

SEQ ID NO: 18911 - RNA, 22 nt, Artificial Sequence
  GATA2 Guide RNA
uacccaccgcggaagaugaggc

SEQ ID NO: 18912 - RNA, 22 nt, Artificial Sequence
  GATA2 Guide RNA
ucaucuuccgcgguggguagug

SEQ ID NO: 18913 - RNA, 22 nt, Artificial Sequence
  GATA2 Guide RNA
uccagccucaucuuccgcggug

SEQ ID NO: 18914 - RNA, 22 nt, Artificial Sequence
  GATA2 Guide RNA
uccgcgguggguagugcagccc

SEQ ID NO: 18915 - RNA, 22 nt, Artificial Sequence
  GATA2 Guide RNA
uccucgggcugcacuacccacc

SEQ ID NO: 18916 - RNA, 22 nt, Artificial Sequence
  GATA2 Guide RNA
uccucuccucgggcugcacuac

SEQ ID NO: 18917 - RNA, 22 nt, Artificial Sequence
  GATA2 Guide RNA
ucgggcugcacuacccaccgcg

SEQ ID NO: 18918 - RNA, 22 nt, Artificial Sequence
  GATA2 Guide RNA
ucuccucgggcugcacuaccca

SEQ ID NO: 18919 - RNA, 22 nt, Artificial Sequence
  GATA2 Guide RNA
ucuuccgcgguggguagugcag

SEQ ID NO: 18920 - RNA, 22 nt, Artificial Sequence
  GATA2 Guide RNA
ugcacuacccaccgcggaagau

SEQ ID NO: 18921 - RNA, 22 nt, Artificial Sequence
  GATA2 Guide RNA
uuccgcgguggguagugcagcc

SEQ ID NO: 18922 - RNA, 20 nt, Artificial Sequence
  GATA2 Guide RNA
aagaugaggcuggagacgca

SEQ ID NO: 18923 - RNA, 20 nt, Artificial Sequence
  GATA2 Guide RNA
aagcgcggaagaugaggcug

SEQ ID NO: 18924 - RNA, 20 nt, Artificial Sequence
  GATA2 Guide RNA
accccccgcggaagcgcgga

SEQ ID NO: 18925 - RNA, 20 nt, Artificial Sequence
  GATA2 Guide RNA
acuaccccccgcggaagcgc

SEQ ID NO: 18926 - RNA, 20 nt, Artificial Sequence
  GATA2 Guide RNA
agaugaggcuggagacgcag

SEQ ID NO: 18927 - RNA, 20 nt, Artificial Sequence
  GATA2 Guide RNA
agccucaucuuccgcgcuuc

SEQ ID NO: 18928 - RNA, 20 nt, Artificial Sequence
  GATA2 Guide RNA
agcgcggaagaugaggcugg

SEQ ID NO: 18929 - RNA, 20 nt, Artificial Sequence
  GATA2 Guide RNA
aucuuccgcgcuuccgcggg

SEQ ID NO: 18930 - RNA, 20 nt, Artificial Sequence
  GATA2 Guide RNA
augaggcuggagacgcagcc

SEQ ID NO: 18931 - RNA, 20 nt, Artificial Sequence
  GATA2 Guide RNA
cacuaccccccgcggaagcg

SEQ ID NO: 18932 - RNA, 20 nt, Artificial Sequence
  GATA2 Guide RNA
cagccucaucuuccgcgcuu

SEQ ID NO: 18933 - RNA, 20 nt, Artificial Sequence
  GATA2 Guide RNA
caucuuccgcgcuuccgcgg

SEQ ID NO: 18934 - RNA, 20 nt, Artificial Sequence
  GATA2 Guide RNA
ccagccucaucuuccgcgcu

SEQ ID NO: 18935 - RNA, 20 nt, Artificial Sequence
  GATA2 Guide RNA
ccccccgcggaagcgcggaa

SEQ ID NO: 18936 - RNA, 20 nt, Artificial Sequence
  GATA2 Guide RNA
cccccgcggaagcgcggaag

SEQ ID NO: 18937 - RNA, 20 nt, Artificial Sequence
  GATA2 Guide RNA
ccccgcggaagcgcggaaga

SEQ ID NO: 18938 - RNA, 20 nt, Artificial Sequence
  GATA2 Guide RNA
cccgcggaagcgcggaagau

SEQ ID NO: 18939 - RNA, 20 nt, Artificial Sequence
  GATA2 Guide RNA
ccgcgcuuccgcggggggua

SEQ ID NO: 18940 - RNA, 20 nt, Artificial Sequence
  GATA2 Guide RNA
ccgcggaagcgcggaagaug

SEQ ID NO: 18941 - RNA, 20 nt, Artificial Sequence
  GATA2 Guide RNA
ccucaucuuccgcgcuuccg

SEQ ID NO: 18942 - RNA, 20 nt, Artificial Sequence
  GATA2 Guide RNA
cgcgcuuccgcgggggguag

SEQ ID NO: 18943 - RNA, 20 nt, Artificial Sequence
  GATA2 Guide RNA
cgcggaagaugaggcuggag

SEQ ID NO: 18944 - RNA, 20 nt, Artificial Sequence
  GATA2 Guide RNA
cgcggaagcgcggaagauga

SEQ ID NO: 18945 - RNA, 20 nt, Artificial Sequence
  GATA2 Guide RNA
cgcuuccgcgggggguagug

SEQ ID NO: 18946 - RNA, 20 nt, Artificial Sequence
  GATA2 Guide RNA
cggaagaugaggcuggagac

SEQ ID NO: 18947 - RNA, 20 nt, Artificial Sequence
  GATA2 Guide RNA
cggaagcgcggaagaugagg

SEQ ID NO: 18948 - RNA, 20 nt, Artificial Sequence
  GATA2 Guide RNA
cgggggcugcgucuccagcc

SEQ ID NO: 18949 - RNA, 20 nt, Artificial Sequence
  GATA2 Guide RNA
cgucuccagccucaucuucc

SEQ ID NO: 18950 - RNA, 20 nt, Artificial Sequence
  GATA2 Guide RNA
cuaccccccgcggaagcgcg

SEQ ID NO: 18951 - RNA, 20 nt, Artificial Sequence
  GATA2 Guide RNA
cucaucuuccgcgcuuccgc

SEQ ID NO: 18952 - RNA, 20 nt, Artificial Sequence
  GATA2 Guide RNA
cugcacuaccccccgcggaa

SEQ ID NO: 18953 - RNA, 20 nt, Artificial Sequence
  GATA2 Guide RNA
cugcgucuccagccucaucu

SEQ ID NO: 18954 - RNA, 20 nt, Artificial Sequence
  GATA2 Guide RNA
cuuccgcgcuuccgcggggg

SEQ ID NO: 18955 - RNA, 20 nt, Artificial Sequence
  GATA2 Guide RNA
gaagaugaggcuggagacgc

SEQ ID NO: 18956 - RNA, 20 nt, Artificial Sequence
  GATA2 Guide RNA
gaagcgcggaagaugaggcu

SEQ ID NO: 18957 - RNA, 20 nt, Artificial Sequence
  GATA2 Guide RNA
gaugaggcuggagacgcagc

SEQ ID NO: 18958 - RNA, 20 nt, Artificial Sequence
  GATA2 Guide RNA
gcacuaccccccgcggaagc

SEQ ID NO: 18959 - RNA, 20 nt, Artificial Sequence
  GATA2 Guide RNA
gccucaucuuccgcgcuucc

SEQ ID NO: 18960 - RNA, 20 nt, Artificial Sequence
  GATA2 Guide RNA
gcgcggaagaugaggcugga

SEQ ID NO: 18961 - RNA, 20 nt, Artificial Sequence
  GATA2 Guide RNA
gcgcuuccgcgggggguagu

SEQ ID NO: 18962 - RNA, 20 nt, Artificial Sequence
  GATA2 Guide RNA
gcggaagaugaggcuggaga

SEQ ID NO: 18963 - RNA, 20 nt, Artificial Sequence
  GATA2 Guide RNA
gcggaagcgcggaagaugag

SEQ ID NO: 18964 - RNA, 20 nt, Artificial Sequence
  GATA2 Guide RNA
gcgucuccagccucaucuuc

SEQ ID NO: 18965 - RNA, 20 nt, Artificial Sequence
  GATA2 Guide RNA
gcugcacuaccccccgcgga

SEQ ID NO: 18966 - RNA, 20 nt, Artificial Sequence
  GATA2 Guide RNA
gcugcgucuccagccucauc

SEQ ID NO: 18967 - RNA, 20 nt, Artificial Sequence
  GATA2 Guide RNA
ggaagaugaggcuggagacg

SEQ ID NO: 18968 - RNA, 20 nt, Artificial Sequence
  GATA2 Guide RNA
ggaagcgcggaagaugaggc

SEQ ID NO: 18969 - RNA, 20 nt, Artificial Sequence
  GATA2 Guide RNA
ggcugcgucuccagccucau

SEQ ID NO: 18970 - RNA, 20 nt, Artificial Sequence
  GATA2 Guide RNA
gggcugcgucuccagccuca

SEQ ID NO: 18971 - RNA, 20 nt, Artificial Sequence
  GATA2 Guide RNA
ggggcugcgucuccagccuc

SEQ ID NO: 18972 - RNA, 20 nt, Artificial Sequence
  GATA2 Guide RNA
gggggcugcgucuccagccu

SEQ ID NO: 18973 - RNA, 20 nt, Artificial Sequence
  GATA2 Guide RNA
uaccccccgcggaagcgcgg

SEQ ID NO: 18974 - RNA, 20 nt, Artificial Sequence
  GATA2 Guide RNA
ucaucuuccgcgcuuccgcg

SEQ ID NO: 18975 - RNA, 20 nt, Artificial Sequence
  GATA2 Guide RNA
uccagccucaucuuccgcgc

SEQ ID NO: 18976 - RNA, 20 nt, Artificial Sequence
  GATA2 Guide RNA
uccgcgcuuccgcggggggu

SEQ ID NO: 18977 - RNA, 20 nt, Artificial Sequence
  GATA2 Guide RNA
ucuuccgcgcuuccgcgggg

SEQ ID NO: 18978 - RNA, 20 nt, Artificial Sequence
  GATA2 Guide RNA
ugcacuaccccccgcggaag

SEQ ID NO: 18979 - RNA, 20 nt, Artificial Sequence
  GATA2 Guide RNA
ugcgucuccagccucaucuu

SEQ ID NO: 18980 - RNA, 20 nt, Artificial Sequence
  GATA2 Guide RNA
uuccgcgcuuccgcgggggg

SEQ ID NO: 18981 - RNA, 21 nt, Artificial Sequence
  GATA2 Guide RNA
aagaugaggcuggagacgcag

SEQ ID NO: 18982 - RNA, 21 nt, Artificial Sequence
  GATA2 Guide RNA
aagcgcggaagaugaggcugg

SEQ ID NO: 18983 - RNA, 21 nt, Artificial Sequence
  GATA2 Guide RNA
accccccgcggaagcgcggaa

SEQ ID NO: 18984 - RNA, 21 nt, Artificial Sequence
  GATA2 Guide RNA
acgggggcugcgucuccagcc

SEQ ID NO: 18985 - RNA, 21 nt, Artificial Sequence
  GATA2 Guide RNA
acuaccccccgcggaagcgcg

SEQ ID NO: 18986 - RNA, 21 nt, Artificial Sequence
  GATA2 Guide RNA
agaugaggcuggagacgcagc

SEQ ID NO: 18987 - RNA, 21 nt, Artificial Sequence
  GATA2 Guide RNA
agccucaucuuccgcgcuucc

SEQ ID NO: 18988 - RNA, 21 nt, Artificial Sequence
  GATA2 Guide RNA
agcgcggaagaugaggcugga

SEQ ID NO: 18989 - RNA, 21 nt, Artificial Sequence
  GATA2 Guide RNA
aucuuccgcgcuuccgcgggg

SEQ ID NO: 18990 - RNA, 21 nt, Artificial Sequence
  GATA2 Guide RNA
augaggcuggagacgcagccc

SEQ ID NO: 18991 - RNA, 21 nt, Artificial Sequence
  GATA2 Guide RNA
cacuaccccccgcggaagcgc

SEQ ID NO: 18992 - RNA, 21 nt, Artificial Sequence
  GATA2 Guide RNA
cagccucaucuuccgcgcuuc

SEQ ID NO: 18993 - RNA, 21 nt, Artificial Sequence
  GATA2 Guide RNA
caucuuccgcgcuuccgcggg

SEQ ID NO: 18994 - RNA, 21 nt, Artificial Sequence
  GATA2 Guide RNA
ccagccucaucuuccgcgcuu

SEQ ID NO: 18995 - RNA, 21 nt, Artificial Sequence
  GATA2 Guide RNA
cccccgcggaagcgcggaaga

SEQ ID NO: 18996 - RNA, 21 nt, Artificial Sequence
  GATA2 Guide RNA
ccccgcggaagcgcggaagau

SEQ ID NO: 18997 - RNA, 21 nt, Artificial Sequence
  GATA2 Guide RNA
cccgcggaagcgcggaagaug

SEQ ID NO: 18998 - RNA, 21 nt, Artificial Sequence
  GATA2 Guide RNA
ccgcggaagcgcggaagauga

SEQ ID NO: 18999 - RNA, 21 nt, Artificial Sequence
  GATA2 Guide RNA
ccucaucuuccgcgcuuccgc

SEQ ID NO: 19000 - RNA, 21 nt, Artificial Sequence
  GATA2 Guide RNA
cgcgcuuccgcgggggguagu

SEQ ID NO: 19001 - RNA, 21 nt, Artificial Sequence
  GATA2 Guide RNA
cgcggaagaugaggcuggaga

SEQ ID NO: 19002 - RNA, 21 nt, Artificial Sequence
  GATA2 Guide RNA
cgcggaagcgcggaagaugag

SEQ ID NO: 19003 - RNA, 21 nt, Artificial Sequence
  GATA2 Guide RNA
cgcuuccgcgggggguagugc

SEQ ID NO: 19004 - RNA, 21 nt, Artificial Sequence
  GATA2 Guide RNA
cggaagaugaggcuggagacg

SEQ ID NO: 19005 - RNA, 21 nt, Artificial Sequence
  GATA2 Guide RNA
cggaagcgcggaagaugaggc

SEQ ID NO: 19006 - RNA, 21 nt, Artificial Sequence
  GATA2 Guide RNA
cgggggcugcgucuccagccu

SEQ ID NO: 19007 - RNA, 21 nt, Artificial Sequence
  GATA2 Guide RNA
cucaucuuccgcgcuuccgcg

SEQ ID NO: 19008 - RNA, 21 nt, Artificial Sequence
  GATA2 Guide RNA
cuccagccucaucuuccgcgc

SEQ ID NO: 19009 - RNA, 21 nt, Artificial Sequence
  GATA2 Guide RNA
cugcacuaccccccgcggaag

SEQ ID NO: 19010 - RNA, 21 nt, Artificial Sequence
  GATA2 Guide RNA
cugcgucuccagccucaucuu

SEQ ID NO: 19011 - RNA, 21 nt, Artificial Sequence
  GATA2 Guide RNA
gaagaugaggcuggagacgca

SEQ ID NO: 19012 - RNA, 21 nt, Artificial Sequence
  GATA2 Guide RNA
gaagcgcggaagaugaggcug

SEQ ID NO: 19013 - RNA, 21 nt, Artificial Sequence
  GATA2 Guide RNA
gaugaggcuggagacgcagcc

SEQ ID NO: 19014 - RNA, 21 nt, Artificial Sequence
  GATA2 Guide RNA
gcacuaccccccgcggaagcg

SEQ ID NO: 19015 - RNA, 21 nt, Artificial Sequence
  GATA2 Guide RNA
gccucaucuuccgcgcuuccg

SEQ ID NO: 19016 - RNA, 21 nt, Artificial Sequence
  GATA2 Guide RNA
gcgcggaagaugaggcuggag

SEQ ID NO: 19017 - RNA, 21 nt, Artificial Sequence
  GATA2 Guide RNA
gcgcuuccgcgggggguagug

SEQ ID NO: 19018 - RNA, 21 nt, Artificial Sequence
  GATA2 Guide RNA
gcggaagaugaggcuggagac

SEQ ID NO: 19019 - RNA, 21 nt, Artificial Sequence
  GATA2 Guide RNA
gcggaagcgcggaagaugagg

SEQ ID NO: 19020 - RNA, 21 nt, Artificial Sequence
  GATA2 Guide RNA
gcgucuccagccucaucuucc

SEQ ID NO: 19021 - RNA, 21 nt, Artificial Sequence
  GATA2 Guide RNA
gcugcacuaccccccgcggaa

SEQ ID NO: 19022 - RNA, 21 nt, Artificial Sequence
  GATA2 Guide RNA
gcugcgucuccagccucaucu

SEQ ID NO: 19023 - RNA, 21 nt, Artificial Sequence
  GATA2 Guide RNA
ggaagaugaggcuggagacgc

SEQ ID NO: 19024 - RNA, 21 nt, Artificial Sequence
  GATA2 Guide RNA
ggaagcgcggaagaugaggcu

SEQ ID NO: 19025 - RNA, 21 nt, Artificial Sequence
  GATA2 Guide RNA
ggcugcacuaccccccgcgga

SEQ ID NO: 19026 - RNA, 21 nt, Artificial Sequence
  GATA2 Guide RNA
ggcugcgucuccagccucauc

SEQ ID NO: 19027 - RNA, 21 nt, Artificial Sequence
  GATA2 Guide RNA
gggcugcgucuccagccucau

SEQ ID NO: 19028 - RNA, 21 nt, Artificial Sequence
  GATA2 Guide RNA
ggggcugcgucuccagccuca

SEQ ID NO: 19029 - RNA, 21 nt, Artificial Sequence
  GATA2 Guide RNA
gggggcugcgucuccagccuc

SEQ ID NO: 19030 - RNA, 21 nt, Artificial Sequence
  GATA2 Guide RNA
uaccccccgcggaagcgcgga

SEQ ID NO: 19031 - RNA, 21 nt, Artificial Sequence
  GATA2 Guide RNA
ucaucuuccgcgcuuccgcgg

SEQ ID NO: 19032 - RNA, 21 nt, Artificial Sequence
  GATA2 Guide RNA
uccagccucaucuuccgcgcu

SEQ ID NO: 19033 - RNA, 21 nt, Artificial Sequence
  GATA2 Guide RNA
uccgcgcuuccgcggggggua

SEQ ID NO: 19034 - RNA, 21 nt, Artificial Sequence
  GATA2 Guide RNA
ucuuccgcgcuuccgcggggg

SEQ ID NO: 19035 - RNA, 21 nt, Artificial Sequence
  GATA2 Guide RNA
ugcacuaccccccgcggaagc

SEQ ID NO: 19036 - RNA, 21 nt, Artificial Sequence
  GATA2 Guide RNA
ugcgucuccagccucaucuuc

SEQ ID NO: 19037 - RNA, 21 nt, Artificial Sequence
  GATA2 Guide RNA
uuccgcgcuuccgcggggggu

SEQ ID NO: 19038 - RNA, 22 nt, Artificial Sequence
  GATA2 Guide RNA
aagaugaggcuggagacgcagc

SEQ ID NO: 19039 - RNA, 22 nt, Artificial Sequence
  GATA2 Guide RNA
aagcgcggaagaugaggcugga

SEQ ID NO: 19040 - RNA, 22 nt, Artificial Sequence
  GATA2 Guide RNA
accccccgcggaagcgcggaag

SEQ ID NO: 19041 - RNA, 22 nt, Artificial Sequence
  GATA2 Guide RNA
acgggggcugcgucuccagccu

SEQ ID NO: 19042 - RNA, 22 nt, Artificial Sequence
  GATA2 Guide RNA
acuaccccccgcggaagcgcgg

SEQ ID NO: 19043 - RNA, 22 nt, Artificial Sequence
  GATA2 Guide RNA
agaugaggcuggagacgcagcc

SEQ ID NO: 19044 - RNA, 22 nt, Artificial Sequence
  GATA2 Guide RNA
agccucaucuuccgcgcuuccg

SEQ ID NO: 19045 - RNA, 22 nt, Artificial Sequence
  GATA2 Guide RNA
agcgcggaagaugaggcuggag

SEQ ID NO: 19046 - RNA, 22 nt, Artificial Sequence
  GATA2 Guide RNA
aucuuccgcgcuuccgcggggg

SEQ ID NO: 19047 - RNA, 22 nt, Artificial Sequence
  GATA2 Guide RNA
augaggcuggagacgcagcccc

SEQ ID NO: 19048 - RNA, 22 nt, Artificial Sequence
  GATA2 Guide RNA
cacgggggcugcgucuccagcc

SEQ ID NO: 19049 - RNA, 22 nt, Artificial Sequence
  GATA2 Guide RNA
cacuaccccccgcggaagcgcg

SEQ ID NO: 19050 - RNA, 22 nt, Artificial Sequence
  GATA2 Guide RNA
cagccucaucuuccgcgcuucc

SEQ ID NO: 19051 - RNA, 22 nt, Artificial Sequence
  GATA2 Guide RNA
caucuuccgcgcuuccgcgggg

SEQ ID NO: 19052 - RNA, 22 nt, Artificial Sequence
  GATA2 Guide RNA
ccagccucaucuuccgcgcuuc

SEQ ID NO: 19053 - RNA, 22 nt, Artificial Sequence
  GATA2 Guide RNA
ccccccgcggaagcgcggaaga

SEQ ID NO: 19054 - RNA, 22 nt, Artificial Sequence
  GATA2 Guide RNA
cccccgcggaagcgcggaagau

SEQ ID NO: 19055 - RNA, 22 nt, Artificial Sequence
  GATA2 Guide RNA
ccccgcggaagcgcggaagaug

SEQ ID NO: 19056 - RNA, 22 nt, Artificial Sequence
  GATA2 Guide RNA
cccgcggaagcgcggaagauga

SEQ ID NO: 19057 - RNA, 22 nt, Artificial Sequence
  GATA2 Guide RNA
ccgcgcuuccgcgggggguagu

SEQ ID NO: 19058 - RNA, 22 nt, Artificial Sequence
  GATA2 Guide RNA
ccgcggaagcgcggaagaugag

SEQ ID NO: 19059 - RNA, 22 nt, Artificial Sequence
  GATA2 Guide RNA
ccucaucuuccgcgcuuccgcg

SEQ ID NO: 19060 - RNA, 22 nt, Artificial Sequence
  GATA2 Guide RNA
cgcgcuuccgcgggggguagug

SEQ ID NO: 19061 - RNA, 22 nt, Artificial Sequence
  GATA2 Guide RNA
cgcggaagaugaggcuggagac

SEQ ID NO: 19062 - RNA, 22 nt, Artificial Sequence
  GATA2 Guide RNA
cgcggaagcgcggaagaugagg

SEQ ID NO: 19063 - RNA, 22 nt, Artificial Sequence
  GATA2 Guide RNA
cgcuuccgcgggggguagugca

SEQ ID NO: 19064 - RNA, 22 nt, Artificial Sequence
  GATA2 Guide RNA
cggaagaugaggcuggagacgc

SEQ ID NO: 19065 - RNA, 22 nt, Artificial Sequence
  GATA2 Guide RNA
cggaagcgcggaagaugaggcu

SEQ ID NO: 19066 - RNA, 22 nt, Artificial Sequence
  GATA2 Guide RNA
cgggggcugcgucuccagccuc

SEQ ID NO: 19067 - RNA, 22 nt, Artificial Sequence
  GATA2 Guide RNA
cuaccccccgcggaagcgcgga

SEQ ID NO: 19068 - RNA, 22 nt, Artificial Sequence
  GATA2 Guide RNA
cucaucuuccgcgcuuccgcgg

SEQ ID NO: 19069 - RNA, 22 nt, Artificial Sequence
  GATA2 Guide RNA
cuccagccucaucuuccgcgcu

SEQ ID NO: 19070 - RNA, 22 nt, Artificial Sequence
  GATA2 Guide RNA
cugcacuaccccccgcggaagc

SEQ ID NO: 19071 - RNA, 22 nt, Artificial Sequence
  GATA2 Guide RNA
cugcgucuccagccucaucuuc

SEQ ID NO: 19072 - RNA, 22 nt, Artificial Sequence
  GATA2 Guide RNA
cuuccgcgcuuccgcggggggu

SEQ ID NO: 19073 - RNA, 22 nt, Artificial Sequence
  GATA2 Guide RNA
gaagaugaggcuggagacgcag

SEQ ID NO: 19074 - RNA, 22 nt, Artificial Sequence
  GATA2 Guide RNA
gaagcgcggaagaugaggcugg

SEQ ID NO: 19075 - RNA, 22 nt, Artificial Sequence
  GATA2 Guide RNA
gaugaggcuggagacgcagccc

SEQ ID NO: 19076 - RNA, 22 nt, Artificial Sequence
  GATA2 Guide RNA
gcacuaccccccgcggaagcgc

SEQ ID NO: 19077 - RNA, 22 nt, Artificial Sequence
  GATA2 Guide RNA
gccucaucuuccgcgcuuccgc

SEQ ID NO: 19078 - RNA, 22 nt, Artificial Sequence
  GATA2 Guide RNA
gcgcggaagaugaggcuggaga

SEQ ID NO: 19079 - RNA, 22 nt, Artificial Sequence
  GATA2 Guide RNA
gcgcuuccgcgggggguagugc

SEQ ID NO: 19080 - RNA, 22 nt, Artificial Sequence
  GATA2 Guide RNA
gcggaagaugaggcuggagacg

SEQ ID NO: 19081 - RNA, 22 nt, Artificial Sequence
  GATA2 Guide RNA
gcggaagcgcggaagaugaggc

SEQ ID NO: 19082 - RNA, 22 nt, Artificial Sequence
  GATA2 Guide RNA
gcugcacuaccccccgcggaag

SEQ ID NO: 19083 - RNA, 22 nt, Artificial Sequence
  GATA2 Guide RNA
gcugcgucuccagccucaucuu

SEQ ID NO: 19084 - RNA, 22 nt, Artificial Sequence
  GATA2 Guide RNA
ggaagaugaggcuggagacgca

SEQ ID NO: 19085 - RNA, 22 nt, Artificial Sequence
  GATA2 Guide RNA
ggaagcgcggaagaugaggcug

SEQ ID NO: 19086 - RNA, 22 nt, Artificial Sequence
  GATA2 Guide RNA
ggcugcacuaccccccgcggaa

SEQ ID NO: 19087 - RNA, 22 nt, Artificial Sequence
  GATA2 Guide RNA
ggcugcgucuccagccucaucu

SEQ ID NO: 19088 - RNA, 22 nt, Artificial Sequence
  GATA2 Guide RNA
gggcugcacuaccccccgcgga

SEQ ID NO: 19089 - RNA, 22 nt, Artificial Sequence
  GATA2 Guide RNA
gggcugcgucuccagccucauc

SEQ ID NO: 19090 - RNA, 22 nt, Artificial Sequence
  GATA2 Guide RNA
ggggcugcgucuccagccucau

SEQ ID NO: 19091 - RNA, 22 nt, Artificial Sequence
  GATA2 Guide RNA
gggggcugcgucuccagccuca

SEQ ID NO: 19092 - RNA, 22 nt, Artificial Sequence
  GATA2 Guide RNA
uaccccccgcggaagcgcggaa

SEQ ID NO: 19093 - RNA, 22 nt, Artificial Sequence
  GATA2 Guide RNA
ucaucuuccgcgcuuccgcggg

SEQ ID NO: 19094 - RNA, 22 nt, Artificial Sequence
  GATA2 Guide RNA
uccagccucaucuuccgcgcuu

SEQ ID NO: 19095 - RNA, 22 nt, Artificial Sequence
  GATA2 Guide RNA
uccgcgcuuccgcgggggguag

SEQ ID NO: 19096 - RNA, 22 nt, Artificial Sequence
  GATA2 Guide RNA
ucuccagccucaucuuccgcgc

SEQ ID NO: 19097 - RNA, 22 nt, Artificial Sequence
  GATA2 Guide RNA
ucuuccgcgcuuccgcgggggg

SEQ ID NO: 19098 - RNA, 22 nt, Artificial Sequence
  GATA2 Guide RNA
ugcacuaccccccgcggaagcg

SEQ ID NO: 19099 - RNA, 22 nt, Artificial Sequence
  GATA2 Guide RNA
ugcgucuccagccucaucuucc

SEQ ID NO: 19100 - RNA, 22 nt, Artificial Sequence
  GATA2 Guide RNA
uuccgcgcuuccgcggggggua

SEQ ID NO: 19101 - RNA, 20 nt, Artificial Sequence
  GATA2 Guide RNA
accccccacggaagaugagg

SEQ ID NO: 19102 - RNA, 20 nt, Artificial Sequence
  GATA2 Guide RNA
acggaagaugaggcuggaga

SEQ ID NO: 19103 - RNA, 20 nt, Artificial Sequence
  GATA2 Guide RNA
acuaccccccacggaagaug

SEQ ID NO: 19104 - RNA, 20 nt, Artificial Sequence
  GATA2 Guide RNA
agccucaucuuccguggggg

SEQ ID NO: 19105 - RNA, 20 nt, Artificial Sequence
  GATA2 Guide RNA
aucuuccgugggggguagug

SEQ ID NO: 19106 - RNA, 20 nt, Artificial Sequence
  GATA2 Guide RNA
cacggaagaugaggcuggag

SEQ ID NO: 19107 - RNA, 20 nt, Artificial Sequence
  GATA2 Guide RNA
cacuaccccccacggaagau

SEQ ID NO: 19108 - RNA, 20 nt, Artificial Sequence
  GATA2 Guide RNA
cagccucaucuuccgugggg

SEQ ID NO: 19109 - RNA, 20 nt, Artificial Sequence
  GATA2 Guide RNA
caucuuccgugggggguagu

SEQ ID NO: 19110 - RNA, 20 nt, Artificial Sequence
  GATA2 Guide RNA
ccacggaagaugaggcugga

SEQ ID NO: 19111 - RNA, 20 nt, Artificial Sequence
  GATA2 Guide RNA
ccagccucaucuuccguggg

SEQ ID NO: 19112 - RNA, 20 nt, Artificial Sequence
  GATA2 Guide RNA
cccacggaagaugaggcugg

SEQ ID NO: 19113 - RNA, 20 nt, Artificial Sequence
  GATA2 Guide RNA
ccccacggaagaugaggcug

SEQ ID NO: 19114 - RNA, 20 nt, Artificial Sequence
  GATA2 Guide RNA
cccccacggaagaugaggcu

SEQ ID NO: 19115 - RNA, 20 nt, Artificial Sequence
  GATA2 Guide RNA
ccccccacggaagaugaggc

SEQ ID NO: 19116 - RNA, 20 nt, Artificial Sequence
  GATA2 Guide RNA
ccgugggggguagugcagcc

SEQ ID NO: 19117 - RNA, 20 nt, Artificial Sequence
  GATA2 Guide RNA
ccucaucuuccguggggggu

SEQ ID NO: 19118 - RNA, 20 nt, Artificial Sequence
  GATA2 Guide RNA
ccucgggcugcacuaccccc

SEQ ID NO: 19119 - RNA, 20 nt, Artificial Sequence
  GATA2 Guide RNA
cgggcugcacuaccccccac

SEQ ID NO: 19120 - RNA, 20 nt, Artificial Sequence
  GATA2 Guide RNA
cgugggggguagugcagccc

SEQ ID NO: 19121 - RNA, 20 nt, Artificial Sequence
  GATA2 Guide RNA
cuaccccccacggaagauga

SEQ ID NO: 19122 - RNA, 20 nt, Artificial Sequence
  GATA2 Guide RNA
cucaucuuccguggggggua

SEQ ID NO: 19123 - RNA, 20 nt, Artificial Sequence
  GATA2 Guide RNA
cuccagccucaucuuccgug

SEQ ID NO: 19124 - RNA, 20 nt, Artificial Sequence
  GATA2 Guide RNA
cucgggcugcacuacccccc

SEQ ID NO: 19125 - RNA, 20 nt, Artificial Sequence
  GATA2 Guide RNA
cugcacuaccccccacggaa

SEQ ID NO: 19126 - RNA, 20 nt, Artificial Sequence
  GATA2 Guide RNA
cuuccgugggggguagugca

SEQ ID NO: 19127 - RNA, 20 nt, Artificial Sequence
  GATA2 Guide RNA
gcacuaccccccacggaaga

SEQ ID NO: 19128 - RNA, 20 nt, Artificial Sequence
  GATA2 Guide RNA
gccucaucuuccgugggggg

SEQ ID NO: 19129 - RNA, 20 nt, Artificial Sequence
  GATA2 Guide RNA
gcugcacuaccccccacgga

SEQ ID NO: 19130 - RNA, 20 nt, Artificial Sequence
  GATA2 Guide RNA
ggcugcacuaccccccacgg

SEQ ID NO: 19131 - RNA, 20 nt, Artificial Sequence
  GATA2 Guide RNA
gggcugcacuaccccccacg

SEQ ID NO: 19132 - RNA, 20 nt, Artificial Sequence
  GATA2 Guide RNA
gugggggguagugcagcccg

SEQ ID NO: 19133 - RNA, 20 nt, Artificial Sequence
  GATA2 Guide RNA
uaccccccacggaagaugag

SEQ ID NO: 19134 - RNA, 20 nt, Artificial Sequence
  GATA2 Guide RNA
ucaucuuccgugggggguag

SEQ ID NO: 19135 - RNA, 20 nt, Artificial Sequence
  GATA2 Guide RNA
uccagccucaucuuccgugg

SEQ ID NO: 19136 - RNA, 20 nt, Artificial Sequence
  GATA2 Guide RNA
uccgugggggguagugcagc

SEQ ID NO: 19137 - RNA, 20 nt, Artificial Sequence
  GATA2 Guide RNA
uccucgggcugcacuacccc

SEQ ID NO: 19138 - RNA, 20 nt, Artificial Sequence
  GATA2 Guide RNA
ucgggcugcacuacccccca

SEQ ID NO: 19139 - RNA, 20 nt, Artificial Sequence
  GATA2 Guide RNA
ucuccagccucaucuuccgu

SEQ ID NO: 19140 - RNA, 20 nt, Artificial Sequence
  GATA2 Guide RNA
ucuuccgugggggguagugc

SEQ ID NO: 19141 - RNA, 20 nt, Artificial Sequence
  GATA2 Guide RNA
ugcacuaccccccacggaag

SEQ ID NO: 19142 - RNA, 20 nt, Artificial Sequence
  GATA2 Guide RNA
uuccgugggggguagugcag

SEQ ID NO: 19143 - RNA, 21 nt, Artificial Sequence
  GATA2 Guide RNA
accccccacggaagaugaggc

SEQ ID NO: 19144 - RNA, 21 nt, Artificial Sequence
  GATA2 Guide RNA
acggaagaugaggcuggagac

SEQ ID NO: 19145 - RNA, 21 nt, Artificial Sequence
  GATA2 Guide RNA
acuaccccccacggaagauga

SEQ ID NO: 19146 - RNA, 21 nt, Artificial Sequence
  GATA2 Guide RNA
agccucaucuuccgugggggg

SEQ ID NO: 19147 - RNA, 21 nt, Artificial Sequence
  GATA2 Guide RNA
aucuuccgugggggguagugc

SEQ ID NO: 19148 - RNA, 21 nt, Artificial Sequence
  GATA2 Guide RNA
cacggaagaugaggcuggaga

SEQ ID NO: 19149 - RNA, 21 nt, Artificial Sequence
  GATA2 Guide RNA
cacuaccccccacggaagaug

SEQ ID NO: 19150 - RNA, 21 nt, Artificial Sequence
  GATA2 Guide RNA
cagccucaucuuccguggggg

SEQ ID NO: 19151 - RNA, 21 nt, Artificial Sequence
  GATA2 Guide RNA
caucuuccgugggggguagug

SEQ ID NO: 19152 - RNA, 21 nt, Artificial Sequence
  GATA2 Guide RNA
ccacggaagaugaggcuggag

SEQ ID NO: 19153 - RNA, 21 nt, Artificial Sequence
  GATA2 Guide RNA
ccagccucaucuuccgugggg

SEQ ID NO: 19154 - RNA, 21 nt, Artificial Sequence
  GATA2 Guide RNA
cccacggaagaugaggcugga

SEQ ID NO: 19155 - RNA, 21 nt, Artificial Sequence
  GATA2 Guide RNA
ccccacggaagaugaggcugg

SEQ ID NO: 19156 - RNA, 21 nt, Artificial Sequence
  GATA2 Guide RNA
cccccacggaagaugaggcug

SEQ ID NO: 19157 - RNA, 21 nt, Artificial Sequence
  GATA2 Guide RNA
ccccccacggaagaugaggcu

SEQ ID NO: 19158 - RNA, 21 nt, Artificial Sequence
  GATA2 Guide RNA
ccgugggggguagugcagccc

SEQ ID NO: 19159 - RNA, 21 nt, Artificial Sequence
  GATA2 Guide RNA
ccucaucuuccguggggggua

SEQ ID NO: 19160 - RNA, 21 nt, Artificial Sequence
  GATA2 Guide RNA
ccucgggcugcacuacccccc

SEQ ID NO: 19161 - RNA, 21 nt, Artificial Sequence
  GATA2 Guide RNA
cgggcugcacuaccccccacg

SEQ ID NO: 19162 - RNA, 21 nt, Artificial Sequence
  GATA2 Guide RNA
cgugggggguagugcagcccg

SEQ ID NO: 19163 - RNA, 21 nt, Artificial Sequence
  GATA2 Guide RNA
cuaccccccacggaagaugag

SEQ ID NO: 19164 - RNA, 21 nt, Artificial Sequence
  GATA2 Guide RNA
cucaucuuccgugggggguag

SEQ ID NO: 19165 - RNA, 21 nt, Artificial Sequence
  GATA2 Guide RNA
cuccagccucaucuuccgugg

SEQ ID NO: 19166 - RNA, 21 nt, Artificial Sequence
  GATA2 Guide RNA
cuccucgggcugcacuacccc

SEQ ID NO: 19167 - RNA, 21 nt, Artificial Sequence
  GATA2 Guide RNA
cucgggcugcacuacccccca

SEQ ID NO: 19168 - RNA, 21 nt, Artificial Sequence
  GATA2 Guide RNA
cugcacuaccccccacggaag

SEQ ID NO: 19169 - RNA, 21 nt, Artificial Sequence
  GATA2 Guide RNA
cuuccgugggggguagugcag

SEQ ID NO: 19170 - RNA, 21 nt, Artificial Sequence
  GATA2 Guide RNA
gcacuaccccccacggaagau

SEQ ID NO: 19171 - RNA, 21 nt, Artificial Sequence
  GATA2 Guide RNA
gccucaucuuccguggggggu

SEQ ID NO: 19172 - RNA, 21 nt, Artificial Sequence
  GATA2 Guide RNA
gcugcacuaccccccacggaa

SEQ ID NO: 19173 - RNA, 21 nt, Artificial Sequence
  GATA2 Guide RNA
ggcugcacuaccccccacgga

SEQ ID NO: 19174 - RNA, 21 nt, Artificial Sequence
  GATA2 Guide RNA
gggcugcacuaccccccacgg

SEQ ID NO: 19175 - RNA, 21 nt, Artificial Sequence
  GATA2 Guide RNA
gucuccagccucaucuuccgu

SEQ ID NO: 19176 - RNA, 21 nt, Artificial Sequence
  GATA2 Guide RNA
gugggggguagugcagcccga

SEQ ID NO: 19177 - RNA, 21 nt, Artificial Sequence
  GATA2 Guide RNA
uaccccccacggaagaugagg

SEQ ID NO: 19178 - RNA, 21 nt, Artificial Sequence
  GATA2 Guide RNA
ucaucuuccgugggggguagu

SEQ ID NO: 19179 - RNA, 21 nt, Artificial Sequence
  GATA2 Guide RNA
uccagccucaucuuccguggg

SEQ ID NO: 19180 - RNA, 21 nt, Artificial Sequence
  GATA2 Guide RNA
uccgugggggguagugcagcc

SEQ ID NO: 19181 - RNA, 21 nt, Artificial Sequence
  GATA2 Guide RNA
uccucgggcugcacuaccccc

SEQ ID NO: 19182 - RNA, 21 nt, Artificial Sequence
  GATA2 Guide RNA
ucgggcugcacuaccccccac

SEQ ID NO: 19183 - RNA, 21 nt, Artificial Sequence
  GATA2 Guide RNA
ucuccagccucaucuuccgug

SEQ ID NO: 19184 - RNA, 21 nt, Artificial Sequence
  GATA2 Guide RNA
ucuuccgugggggguagugca

SEQ ID NO: 19185 - RNA, 21 nt, Artificial Sequence
  GATA2 Guide RNA
ugcacuaccccccacggaaga

SEQ ID NO: 19186 - RNA, 21 nt, Artificial Sequence
  GATA2 Guide RNA
uuccgugggggguagugcagc

SEQ ID NO: 19187 - RNA, 22 nt, Artificial Sequence
  GATA2 Guide RNA
accccccacggaagaugaggcu

SEQ ID NO: 19188 - RNA, 22 nt, Artificial Sequence
  GATA2 Guide RNA
acggaagaugaggcuggagacg

SEQ ID NO: 19189 - RNA, 22 nt, Artificial Sequence
  GATA2 Guide RNA
acuaccccccacggaagaugag

SEQ ID NO: 19190 - RNA, 22 nt, Artificial Sequence
  GATA2 Guide RNA
agccucaucuuccguggggggu

SEQ ID NO: 19191 - RNA, 22 nt, Artificial Sequence
  GATA2 Guide RNA
aucuuccgugggggguagugca

SEQ ID NO: 19192 - RNA, 22 nt, Artificial Sequence
  GATA2 Guide RNA
cacggaagaugaggcuggagac

SEQ ID NO: 19193 - RNA, 22 nt, Artificial Sequence
  GATA2 Guide RNA
cacuaccccccacggaagauga

SEQ ID NO: 19194 - RNA, 22 nt, Artificial Sequence
  GATA2 Guide RNA
cagccucaucuuccgugggggg

SEQ ID NO: 19195 - RNA, 22 nt, Artificial Sequence
  GATA2 Guide RNA
caucuuccgugggggguagugc

SEQ ID NO: 19196 - RNA, 22 nt, Artificial Sequence
  GATA2 Guide RNA
ccacggaagaugaggcuggaga

SEQ ID NO: 19197 - RNA, 22 nt, Artificial Sequence
  GATA2 Guide RNA
ccagccucaucuuccguggggg

SEQ ID NO: 19198 - RNA, 22 nt, Artificial Sequence
  GATA2 Guide RNA
cccacggaagaugaggcuggag

SEQ ID NO: 19199 - RNA, 22 nt, Artificial Sequence
  GATA2 Guide RNA
ccccacggaagaugaggcugga

SEQ ID NO: 19200 - RNA, 22 nt, Artificial Sequence
  GATA2 Guide RNA
cccccacggaagaugaggcugg

SEQ ID NO: 19201 - RNA, 22 nt, Artificial Sequence
  GATA2 Guide RNA
ccccccacggaagaugaggcug

SEQ ID NO: 19202 - RNA, 22 nt, Artificial Sequence
  GATA2 Guide RNA
ccgugggggguagugcagcccg

SEQ ID NO: 19203 - RNA, 22 nt, Artificial Sequence
  GATA2 Guide RNA
ccucaucuuccgugggggguag

SEQ ID NO: 19204 - RNA, 22 nt, Artificial Sequence
  GATA2 Guide RNA
ccucgggcugcacuacccccca

SEQ ID NO: 19205 - RNA, 22 nt, Artificial Sequence
  GATA2 Guide RNA
cgggcugcacuaccccccacgg

SEQ ID NO: 19206 - RNA, 22 nt, Artificial Sequence
  GATA2 Guide RNA
cgucuccagccucaucuuccgu

SEQ ID NO: 19207 - RNA, 22 nt, Artificial Sequence
  GATA2 Guide RNA
cgugggggguagugcagcccga

SEQ ID NO: 19208 - RNA, 22 nt, Artificial Sequence
  GATA2 Guide RNA
cuaccccccacggaagaugagg

SEQ ID NO: 19209 - RNA, 22 nt, Artificial Sequence
  GATA2 Guide RNA
cucaucuuccgugggggguagu

SEQ ID NO: 19210 - RNA, 22 nt, Artificial Sequence
  GATA2 Guide RNA
cuccagccucaucuuccguggg

SEQ ID NO: 19211 - RNA, 22 nt, Artificial Sequence
  GATA2 Guide RNA
cuccucgggcugcacuaccccc

SEQ ID NO: 19212 - RNA, 22 nt, Artificial Sequence
  GATA2 Guide RNA
cucgggcugcacuaccccccac

SEQ ID NO: 19213 - RNA, 22 nt, Artificial Sequence
  GATA2 Guide RNA
cugcacuaccccccacggaaga

SEQ ID NO: 19214 - RNA, 22 nt, Artificial Sequence
  GATA2 Guide RNA
cuuccgugggggguagugcagc

SEQ ID NO: 19215 - RNA, 22 nt, Artificial Sequence
  GATA2 Guide RNA
gcacuaccccccacggaagaug

SEQ ID NO: 19216 - RNA, 22 nt, Artificial Sequence
  GATA2 Guide RNA
gccucaucuuccguggggggua

SEQ ID NO: 19217 - RNA, 22 nt, Artificial Sequence
  GATA2 Guide RNA
gcugcacuaccccccacggaag

SEQ ID NO: 19218 - RNA, 22 nt, Artificial Sequence
  GATA2 Guide RNA
ggcugcacuaccccccacggaa

SEQ ID NO: 19219 - RNA, 22 nt, Artificial Sequence
  GATA2 Guide RNA
gggcugcacuaccccccacgga

SEQ ID NO: 19220 - RNA, 22 nt, Artificial Sequence
  GATA2 Guide RNA
gucuccagccucaucuuccgug

SEQ ID NO: 19221 - RNA, 22 nt, Artificial Sequence
  GATA2 Guide RNA
gugggggguagugcagcccgag

SEQ ID NO: 19222 - RNA, 22 nt, Artificial Sequence
  GATA2 Guide RNA
uaccccccacggaagaugaggc

SEQ ID NO: 19223 - RNA, 22 nt, Artificial Sequence
  GATA2 Guide RNA
ucaucuuccgugggggguagug

SEQ ID NO: 19224 - RNA, 22 nt, Artificial Sequence
  GATA2 Guide RNA
uccagccucaucuuccgugggg

SEQ ID NO: 19225 - RNA, 22 nt, Artificial Sequence
  GATA2 Guide RNA
uccgugggggguagugcagccc

SEQ ID NO: 19226 - RNA, 22 nt, Artificial Sequence
  GATA2 Guide RNA
uccucgggcugcacuacccccc

SEQ ID NO: 19227 - RNA, 22 nt, Artificial Sequence
  GATA2 Guide RNA
ucgggcugcacuaccccccacg

SEQ ID NO: 19228 - RNA, 22 nt, Artificial Sequence
  GATA2 Guide RNA
ucuccagccucaucuuccgugg

SEQ ID NO: 19229 - RNA, 22 nt, Artificial Sequence
  GATA2 Guide RNA
ucuccucgggcugcacuacccc

SEQ ID NO: 19230 - RNA, 22 nt, Artificial Sequence
  GATA2 Guide RNA
ucuuccgugggggguagugcag

SEQ ID NO: 19231 - RNA, 22 nt, Artificial Sequence
  GATA2 Guide RNA
ugcacuaccccccacggaagau

SEQ ID NO: 19232 - RNA, 22 nt, Artificial Sequence
  GATA2 Guide RNA
uuccgugggggguagugcagcc

SEQ ID NO: 19233 - RNA, 20 nt, Artificial Sequence
  GATA2 Guide RNA
accccccguggaagaugagg

SEQ ID NO: 19234 - RNA, 20 nt, Artificial Sequence
  GATA2 Guide RNA
acuaccccccguggaagaug

SEQ ID NO: 19235 - RNA, 20 nt, Artificial Sequence
  GATA2 Guide RNA
agccucaucuuccacggggg

SEQ ID NO: 19236 - RNA, 20 nt, Artificial Sequence
  GATA2 Guide RNA
aucuuccacgggggguagug

SEQ ID NO: 19237 - RNA, 20 nt, Artificial Sequence
  GATA2 Guide RNA
cacgggggguagugcagccc

SEQ ID NO: 19238 - RNA, 20 nt, Artificial Sequence
  GATA2 Guide RNA
cacuaccccccguggaagau

SEQ ID NO: 19239 - RNA, 20 nt, Artificial Sequence
  GATA2 Guide RNA
cagccucaucuuccacgggg

SEQ ID NO: 19240 - RNA, 20 nt, Artificial Sequence
  GATA2 Guide RNA
caucuuccacgggggguagu

SEQ ID NO: 19241 - RNA, 20 nt, Artificial Sequence
  GATA2 Guide RNA
ccacgggggguagugcagcc

SEQ ID NO: 19242 - RNA, 20 nt, Artificial Sequence
  GATA2 Guide RNA
ccagccucaucuuccacggg

SEQ ID NO: 19243 - RNA, 20 nt, Artificial Sequence
  GATA2 Guide RNA
ccccccguggaagaugaggc

SEQ ID NO: 19244 - RNA, 20 nt, Artificial Sequence
  GATA2 Guide RNA
cccccguggaagaugaggcu

SEQ ID NO: 19245 - RNA, 20 nt, Artificial Sequence
  GATA2 Guide RNA
ccccguggaagaugaggcug

SEQ ID NO: 19246 - RNA, 20 nt, Artificial Sequence
  GATA2 Guide RNA
cccguggaagaugaggcugg

SEQ ID NO: 19247 - RNA, 20 nt, Artificial Sequence
  GATA2 Guide RNA
ccguggaagaugaggcugga

SEQ ID NO: 19248 - RNA, 20 nt, Artificial Sequence
  GATA2 Guide RNA
ccucaucuuccacggggggu

SEQ ID NO: 19249 - RNA, 20 nt, Artificial Sequence
  GATA2 Guide RNA
cgggcugcacuaccccccgu

SEQ ID NO: 19250 - RNA, 20 nt, Artificial Sequence
  GATA2 Guide RNA
cguggaagaugaggcuggag

SEQ ID NO: 19251 - RNA, 20 nt, Artificial Sequence
  GATA2 Guide RNA
cuaccccccguggaagauga

SEQ ID NO: 19252 - RNA, 20 nt, Artificial Sequence
  GATA2 Guide RNA
cucaucuuccacggggggua

SEQ ID NO: 19253 - RNA, 20 nt, Artificial Sequence
  GATA2 Guide RNA
cuccagccucaucuuccacg

SEQ ID NO: 19254 - RNA, 20 nt, Artificial Sequence
  GATA2 Guide RNA
cugcacuaccccccguggaa

SEQ ID NO: 19255 - RNA, 20 nt, Artificial Sequence
  GATA2 Guide RNA
cuuccacgggggguagugca

SEQ ID NO: 19256 - RNA, 20 nt, Artificial Sequence
  GATA2 Guide RNA
gcacuaccccccguggaaga

SEQ ID NO: 19257 - RNA, 20 nt, Artificial Sequence
  GATA2 Guide RNA
gccucaucuuccacgggggg

SEQ ID NO: 19258 - RNA, 20 nt, Artificial Sequence
  GATA2 Guide RNA
gcugcacuaccccccgugga

SEQ ID NO: 19259 - RNA, 20 nt, Artificial Sequence
  GATA2 Guide RNA
ggcugcacuaccccccgugg

SEQ ID NO: 19260 - RNA, 20 nt, Artificial Sequence
  GATA2 Guide RNA
gggcugcacuaccccccgug

SEQ ID NO: 19261 - RNA, 20 nt, Artificial Sequence
  GATA2 Guide RNA
gucuccagccucaucuucca

SEQ ID NO: 19262 - RNA, 20 nt, Artificial Sequence
  GATA2 Guide RNA
guggaagaugaggcuggaga

SEQ ID NO: 19263 - RNA, 20 nt, Artificial Sequence
  GATA2 Guide RNA
uaccccccguggaagaugag

SEQ ID NO: 19264 - RNA, 20 nt, Artificial Sequence
  GATA2 Guide RNA
ucaucuuccacgggggguag

SEQ ID NO: 19265 - RNA, 20 nt, Artificial Sequence
  GATA2 Guide RNA
uccacgggggguagugcagc

SEQ ID NO: 19266 - RNA, 20 nt, Artificial Sequence
  GATA2 Guide RNA
uccagccucaucuuccacgg

SEQ ID NO: 19267 - RNA, 20 nt, Artificial Sequence
  GATA2 Guide RNA
ucgggcugcacuaccccccg

SEQ ID NO: 19268 - RNA, 20 nt, Artificial Sequence
  GATA2 Guide RNA
ucuccagccucaucuuccac

SEQ ID NO: 19269 - RNA, 20 nt, Artificial Sequence
  GATA2 Guide RNA
ucuuccacgggggguagugc

SEQ ID NO: 19270 - RNA, 20 nt, Artificial Sequence
  GATA2 Guide RNA
ugcacuaccccccguggaag

SEQ ID NO: 19271 - RNA, 20 nt, Artificial Sequence
  GATA2 Guide RNA
uggaagaugaggcuggagac

SEQ ID NO: 19272 - RNA, 20 nt, Artificial Sequence
  GATA2 Guide RNA
uuccacgggggguagugcag

SEQ ID NO: 19273 - RNA, 21 nt, Artificial Sequence
  GATA2 Guide RNA
accccccguggaagaugaggc

SEQ ID NO: 19274 - RNA, 21 nt, Artificial Sequence
  GATA2 Guide RNA
acuaccccccguggaagauga

SEQ ID NO: 19275 - RNA, 21 nt, Artificial Sequence
  GATA2 Guide RNA
agccucaucuuccacgggggg

SEQ ID NO: 19276 - RNA, 21 nt, Artificial Sequence
  GATA2 Guide RNA
aucuuccacgggggguagugc

SEQ ID NO: 19277 - RNA, 21 nt, Artificial Sequence
  GATA2 Guide RNA
cacgggggguagugcagcccg

SEQ ID NO: 19278 - RNA, 21 nt, Artificial Sequence
  GATA2 Guide RNA
cacuaccccccguggaagaug

SEQ ID NO: 19279 - RNA, 21 nt, Artificial Sequence
  GATA2 Guide RNA
cagccucaucuuccacggggg

SEQ ID NO: 19280 - RNA, 21 nt, Artificial Sequence
  GATA2 Guide RNA
caucuuccacgggggguagug

SEQ ID NO: 19281 - RNA, 21 nt, Artificial Sequence
  GATA2 Guide RNA
ccacgggggguagugcagccc

SEQ ID NO: 19282 - RNA, 21 nt, Artificial Sequence
  GATA2 Guide RNA
ccagccucaucuuccacgggg

SEQ ID NO: 19283 - RNA, 21 nt, Artificial Sequence
  GATA2 Guide RNA
ccccccguggaagaugaggcu

SEQ ID NO: 19284 - RNA, 21 nt, Artificial Sequence
  GATA2 Guide RNA
cccccguggaagaugaggcug

SEQ ID NO: 19285 - RNA, 21 nt, Artificial Sequence
  GATA2 Guide RNA
ccccguggaagaugaggcugg

SEQ ID NO: 19286 - RNA, 21 nt, Artificial Sequence
  GATA2 Guide RNA
cccguggaagaugaggcugga

SEQ ID NO: 19287 - RNA, 21 nt, Artificial Sequence
  GATA2 Guide RNA
ccguggaagaugaggcuggag

SEQ ID NO: 19288 - RNA, 21 nt, Artificial Sequence
  GATA2 Guide RNA
ccucaucuuccacggggggua

SEQ ID NO: 19289 - RNA, 21 nt, Artificial Sequence
  GATA2 Guide RNA
cgggcugcacuaccccccgug

SEQ ID NO: 19290 - RNA, 21 nt, Artificial Sequence
  GATA2 Guide RNA
cgucuccagccucaucuucca

SEQ ID NO: 19291 - RNA, 21 nt, Artificial Sequence
  GATA2 Guide RNA
cguggaagaugaggcuggaga

SEQ ID NO: 19292 - RNA, 21 nt, Artificial Sequence
  GATA2 Guide RNA
cuaccccccguggaagaugag

SEQ ID NO: 19293 - RNA, 21 nt, Artificial Sequence
  GATA2 Guide RNA
cucaucuuccacgggggguag

SEQ ID NO: 19294 - RNA, 21 nt, Artificial Sequence
  GATA2 Guide RNA
cuccagccucaucuuccacgg

SEQ ID NO: 19295 - RNA, 21 nt, Artificial Sequence
  GATA2 Guide RNA
cucgggcugcacuaccccccg

SEQ ID NO: 19296 - RNA, 21 nt, Artificial Sequence
  GATA2 Guide RNA
cugcacuaccccccguggaag

SEQ ID NO: 19297 - RNA, 21 nt, Artificial Sequence
  GATA2 Guide RNA
cuuccacgggggguagugcag

SEQ ID NO: 19298 - RNA, 21 nt, Artificial Sequence
  GATA2 Guide RNA
gcacuaccccccguggaagau

SEQ ID NO: 19299 - RNA, 21 nt, Artificial Sequence
  GATA2 Guide RNA
gccucaucuuccacggggggu

SEQ ID NO: 19300 - RNA, 21 nt, Artificial Sequence
  GATA2 Guide RNA
gcugcacuaccccccguggaa

SEQ ID NO: 19301 - RNA, 21 nt, Artificial Sequence
  GATA2 Guide RNA
ggcugcacuaccccccgugga

SEQ ID NO: 19302 - RNA, 21 nt, Artificial Sequence
  GATA2 Guide RNA
gggcugcacuaccccccgugg

SEQ ID NO: 19303 - RNA, 21 nt, Artificial Sequence
  GATA2 Guide RNA
gucuccagccucaucuuccac

SEQ ID NO: 19304 - RNA, 21 nt, Artificial Sequence
  GATA2 Guide RNA
guggaagaugaggcuggagac

SEQ ID NO: 19305 - RNA, 21 nt, Artificial Sequence
  GATA2 Guide RNA
uaccccccguggaagaugagg

SEQ ID NO: 19306 - RNA, 21 nt, Artificial Sequence
  GATA2 Guide RNA
ucaucuuccacgggggguagu

SEQ ID NO: 19307 - RNA, 21 nt, Artificial Sequence
  GATA2 Guide RNA
uccacgggggguagugcagcc

SEQ ID NO: 19308 - RNA, 21 nt, Artificial Sequence
  GATA2 Guide RNA
uccagccucaucuuccacggg

SEQ ID NO: 19309 - RNA, 21 nt, Artificial Sequence
  GATA2 Guide RNA
ucgggcugcacuaccccccgu

SEQ ID NO: 19310 - RNA, 21 nt, Artificial Sequence
  GATA2 Guide RNA
ucuccagccucaucuuccacg

SEQ ID NO: 19311 - RNA, 21 nt, Artificial Sequence
  GATA2 Guide RNA
ucuuccacgggggguagugca

SEQ ID NO: 19312 - RNA, 21 nt, Artificial Sequence
  GATA2 Guide RNA
ugcacuaccccccguggaaga

SEQ ID NO: 19313 - RNA, 21 nt, Artificial Sequence
  GATA2 Guide RNA
uggaagaugaggcuggagacg

SEQ ID NO: 19314 - RNA, 21 nt, Artificial Sequence
  GATA2 Guide RNA
uuccacgggggguagugcagc

SEQ ID NO: 19315 - RNA, 22 nt, Artificial Sequence
  GATA2 Guide RNA
accccccguggaagaugaggcu

SEQ ID NO: 19316 - RNA, 22 nt, Artificial Sequence
  GATA2 Guide RNA
acuaccccccguggaagaugag

SEQ ID NO: 19317 - RNA, 22 nt, Artificial Sequence
  GATA2 Guide RNA
agccucaucuuccacggggggu

SEQ ID NO: 19318 - RNA, 22 nt, Artificial Sequence
  GATA2 Guide RNA
aucuuccacgggggguagugca

SEQ ID NO: 19319 - RNA, 22 nt, Artificial Sequence
  GATA2 Guide RNA
cacgggggguagugcagcccga

SEQ ID NO: 19320 - RNA, 22 nt, Artificial Sequence
  GATA2 Guide RNA
cacuaccccccguggaagauga

SEQ ID NO: 19321 - RNA, 22 nt, Artificial Sequence
  GATA2 Guide RNA
cagccucaucuuccacgggggg

SEQ ID NO: 19322 - RNA, 22 nt, Artificial Sequence
  GATA2 Guide RNA
caucuuccacgggggguagugc

SEQ ID NO: 19323 - RNA, 22 nt, Artificial Sequence
  GATA2 Guide RNA
ccacgggggguagugcagcccg

SEQ ID NO: 19324 - RNA, 22 nt, Artificial Sequence
  GATA2 Guide RNA
ccagccucaucuuccacggggg

SEQ ID NO: 19325 - RNA, 22 nt, Artificial Sequence
  GATA2 Guide RNA
ccccccguggaagaugaggcug

SEQ ID NO: 19326 - RNA, 22 nt, Artificial Sequence
  GATA2 Guide RNA
cccccguggaagaugaggcugg

SEQ ID NO: 19327 - RNA, 22 nt, Artificial Sequence
  GATA2 Guide RNA
ccccguggaagaugaggcugga

SEQ ID NO: 19328 - RNA, 22 nt, Artificial Sequence
  GATA2 Guide RNA
cccguggaagaugaggcuggag

SEQ ID NO: 19329 - RNA, 22 nt, Artificial Sequence
  GATA2 Guide RNA
ccguggaagaugaggcuggaga

SEQ ID NO: 19330 - RNA, 22 nt, Artificial Sequence
  GATA2 Guide RNA
ccucaucuuccacgggggguag

SEQ ID NO: 19331 - RNA, 22 nt, Artificial Sequence
  GATA2 Guide RNA
ccucgggcugcacuaccccccg

SEQ ID NO: 19332 - RNA, 22 nt, Artificial Sequence
  GATA2 Guide RNA
cgggcugcacuaccccccgugg

SEQ ID NO: 19333 - RNA, 22 nt, Artificial Sequence
  GATA2 Guide RNA
cgucuccagccucaucuuccac

SEQ ID NO: 19334 - RNA, 22 nt, Artificial Sequence
  GATA2 Guide RNA
cguggaagaugaggcuggagac

SEQ ID NO: 19335 - RNA, 22 nt, Artificial Sequence
  GATA2 Guide RNA
cuaccccccguggaagaugagg

SEQ ID NO: 19336 - RNA, 22 nt, Artificial Sequence
  GATA2 Guide RNA
cucaucuuccacgggggguagu

SEQ ID NO: 19337 - RNA, 22 nt, Artificial Sequence
  GATA2 Guide RNA
cuccagccucaucuuccacggg

SEQ ID NO: 19338 - RNA, 22 nt, Artificial Sequence
  GATA2 Guide RNA
cucgggcugcacuaccccccgu

SEQ ID NO: 19339 - RNA, 22 nt, Artificial Sequence
  GATA2 Guide RNA
cugcacuaccccccguggaaga

SEQ ID NO: 19340 - RNA, 22 nt, Artificial Sequence
  GATA2 Guide RNA
cuuccacgggggguagugcagc

SEQ ID NO: 19341 - RNA, 22 nt, Artificial Sequence
  GATA2 Guide RNA
gcacuaccccccguggaagaug

SEQ ID NO: 19342 - RNA, 22 nt, Artificial Sequence
  GATA2 Guide RNA
gccucaucuuccacggggggua

SEQ ID NO: 19343 - RNA, 22 nt, Artificial Sequence
  GATA2 Guide RNA
gcgucuccagccucaucuucca

SEQ ID NO: 19344 - RNA, 22 nt, Artificial Sequence
  GATA2 Guide RNA
gcugcacuaccccccguggaag

SEQ ID NO: 19345 - RNA, 22 nt, Artificial Sequence
  GATA2 Guide RNA
ggcugcacuaccccccguggaa

SEQ ID NO: 19346 - RNA, 22 nt, Artificial Sequence
  GATA2 Guide RNA
gggcugcacuaccccccgugga

SEQ ID NO: 19347 - RNA, 22 nt, Artificial Sequence
  GATA2 Guide RNA
gucuccagccucaucuuccacg

SEQ ID NO: 19348 - RNA, 22 nt, Artificial Sequence
  GATA2 Guide RNA
guggaagaugaggcuggagacg

SEQ ID NO: 19349 - RNA, 22 nt, Artificial Sequence
  GATA2 Guide RNA
uaccccccguggaagaugaggc

SEQ ID NO: 19350 - RNA, 22 nt, Artificial Sequence
  GATA2 Guide RNA
ucaucuuccacgggggguagug

SEQ ID NO: 19351 - RNA, 22 nt, Artificial Sequence
  GATA2 Guide RNA
uccacgggggguagugcagccc

SEQ ID NO: 19352 - RNA, 22 nt, Artificial Sequence
  GATA2 Guide RNA
uccagccucaucuuccacgggg

SEQ ID NO: 19353 - RNA, 22 nt, Artificial Sequence
  GATA2 Guide RNA
ucgggcugcacuaccccccgug

SEQ ID NO: 19354 - RNA, 22 nt, Artificial Sequence
  GATA2 Guide RNA
ucuccagccucaucuuccacgg

SEQ ID NO: 19355 - RNA, 22 nt, Artificial Sequence
  GATA2 Guide RNA
ucuuccacgggggguagugcag

SEQ ID NO: 19356 - RNA, 22 nt, Artificial Sequence
  GATA2 Guide RNA
ugcacuaccccccguggaagau

SEQ ID NO: 19357 - RNA, 22 nt, Artificial Sequence
  GATA2 Guide RNA
uggaagaugaggcuggagacgc

SEQ ID NO: 19358 - RNA, 22 nt, Artificial Sequence
  GATA2 Guide RNA
uuccacgggggguagugcagcc

SEQ ID NO: 19359 - RNA, 20 nt, Artificial Sequence
  GATA2 Guide RNA
aaacgcagcccccguggugc

SEQ ID NO: 19360 - RNA, 20 nt, Artificial Sequence
  GATA2 Guide RNA
aacgcagcccccguggugcu

SEQ ID NO: 19361 - RNA, 20 nt, Artificial Sequence
  GATA2 Guide RNA
aagaugaggcuggaaacgca

SEQ ID NO: 19362 - RNA, 20 nt, Artificial Sequence
  GATA2 Guide RNA
accacgggggcugcguuucc

SEQ ID NO: 19363 - RNA, 20 nt, Artificial Sequence
  GATA2 Guide RNA
acgggggcugcguuuccagc

SEQ ID NO: 19364 - RNA, 20 nt, Artificial Sequence
  GATA2 Guide RNA
agaugaggcuggaaacgcag

SEQ ID NO: 19365 - RNA, 20 nt, Artificial Sequence
  GATA2 Guide RNA
agcaccacgggggcugcguu

SEQ ID NO: 19366 - RNA, 20 nt, Artificial Sequence
  GATA2 Guide RNA
aggcuggaaacgcagccccc

SEQ ID NO: 19367 - RNA, 20 nt, Artificial Sequence
  GATA2 Guide RNA
augaggcuggaaacgcagcc

SEQ ID NO: 19368 - RNA, 20 nt, Artificial Sequence
  GATA2 Guide RNA
caccacgggggcugcguuuc

SEQ ID NO: 19369 - RNA, 20 nt, Artificial Sequence
  GATA2 Guide RNA
cacgggggcugcguuuccag

SEQ ID NO: 19370 - RNA, 20 nt, Artificial Sequence
  GATA2 Guide RNA
ccacgggggcugcguuucca

SEQ ID NO: 19371 - RNA, 20 nt, Artificial Sequence
  GATA2 Guide RNA
ccccgcggaagaugaggcug

SEQ ID NO: 19372 - RNA, 20 nt, Artificial Sequence
  GATA2 Guide RNA
cccgcggaagaugaggcugg

SEQ ID NO: 19373 - RNA, 20 nt, Artificial Sequence
  GATA2 Guide RNA
cccuagcaccacgggggcug

SEQ ID NO: 19374 - RNA, 20 nt, Artificial Sequence
  GATA2 Guide RNA
ccgcggaagaugaggcugga

SEQ ID NO: 19375 - RNA, 20 nt, Artificial Sequence
  GATA2 Guide RNA
ccuagcaccacgggggcugc

SEQ ID NO: 19376 - RNA, 20 nt, Artificial Sequence
  GATA2 Guide RNA
cgcggaagaugaggcuggaa

SEQ ID NO: 19377 - RNA, 20 nt, Artificial Sequence
  GATA2 Guide RNA
cggaagaugaggcuggaaac

SEQ ID NO: 19378 - RNA, 20 nt, Artificial Sequence
  GATA2 Guide RNA
cgggggcugcguuuccagcc

SEQ ID NO: 19379 - RNA, 20 nt, Artificial Sequence
  GATA2 Guide RNA
cguuuccagccucaucuucc

SEQ ID NO: 19380 - RNA, 20 nt, Artificial Sequence
  GATA2 Guide RNA
cuagcaccacgggggcugcg

SEQ ID NO: 19381 - RNA, 20 nt, Artificial Sequence
  GATA2 Guide RNA
cugcguuuccagccucaucu

SEQ ID NO: 19382 - RNA, 20 nt, Artificial Sequence
  GATA2 Guide RNA
cuggaaacgcagcccccgug

SEQ ID NO: 19383 - RNA, 20 nt, Artificial Sequence
  GATA2 Guide RNA
gaaacgcagcccccguggug

SEQ ID NO: 19384 - RNA, 20 nt, Artificial Sequence
  GATA2 Guide RNA
gaagaugaggcuggaaacgc

SEQ ID NO: 19385 - RNA, 20 nt, Artificial Sequence
  GATA2 Guide RNA
gaggcuggaaacgcagcccc

SEQ ID NO: 19386 - RNA, 20 nt, Artificial Sequence
  GATA2 Guide RNA
gaugaggcuggaaacgcagc

SEQ ID NO: 19387 - RNA, 20 nt, Artificial Sequence
  GATA2 Guide RNA
gcaccacgggggcugcguuu

SEQ ID NO: 19388 - RNA, 20 nt, Artificial Sequence
  GATA2 Guide RNA
gcggaagaugaggcuggaaa

SEQ ID NO: 19389 - RNA, 20 nt, Artificial Sequence
  GATA2 Guide RNA
gcguuuccagccucaucuuc

SEQ ID NO: 19390 - RNA, 20 nt, Artificial Sequence
  GATA2 Guide RNA
gcugcguuuccagccucauc

SEQ ID NO: 19391 - RNA, 20 nt, Artificial Sequence
  GATA2 Guide RNA
gcuggaaacgcagcccccgu

SEQ ID NO: 19392 - RNA, 20 nt, Artificial Sequence
  GATA2 Guide RNA
ggaaacgcagcccccguggu

SEQ ID NO: 19393 - RNA, 20 nt, Artificial Sequence
  GATA2 Guide RNA
ggaagaugaggcuggaaacg

SEQ ID NO: 19394 - RNA, 20 nt, Artificial Sequence
  GATA2 Guide RNA
ggcugcguuuccagccucau

SEQ ID NO: 19395 - RNA, 20 nt, Artificial Sequence
  GATA2 Guide RNA
ggcuggaaacgcagcccccg

SEQ ID NO: 19396 - RNA, 20 nt, Artificial Sequence
  GATA2 Guide RNA
gggcugcguuuccagccuca

SEQ ID NO: 19397 - RNA, 20 nt, Artificial Sequence
  GATA2 Guide RNA
ggggcugcguuuccagccuc

SEQ ID NO: 19398 - RNA, 20 nt, Artificial Sequence
  GATA2 Guide RNA
gggggcugcguuuccagccu

SEQ ID NO: 19399 - RNA, 20 nt, Artificial Sequence
  GATA2 Guide RNA
guuuccagccucaucuuccg

SEQ ID NO: 19400 - RNA, 20 nt, Artificial Sequence
  GATA2 Guide RNA
uagcaccacgggggcugcgu

SEQ ID NO: 19401 - RNA, 20 nt, Artificial Sequence
  GATA2 Guide RNA
ugaggcuggaaacgcagccc

SEQ ID NO: 19402 - RNA, 20 nt, Artificial Sequence
  GATA2 Guide RNA
ugcguuuccagccucaucuu

SEQ ID NO: 19403 - RNA, 20 nt, Artificial Sequence
  GATA2 Guide RNA
uggaaacgcagcccccgugg

SEQ ID NO: 19404 - RNA, 20 nt, Artificial Sequence
  GATA2 Guide RNA
uuuccagccucaucuuccgc

SEQ ID NO: 19405 - RNA, 21 nt, Artificial Sequence
  GATA2 Guide RNA
aaacgcagcccccguggugcu

SEQ ID NO: 19406 - RNA, 21 nt, Artificial Sequence
  GATA2 Guide RNA
aacgcagcccccguggugcua

SEQ ID NO: 19407 - RNA, 21 nt, Artificial Sequence
  GATA2 Guide RNA
aagaugaggcuggaaacgcag

SEQ ID NO: 19408 - RNA, 21 nt, Artificial Sequence
  GATA2 Guide RNA
accacgggggcugcguuucca

SEQ ID NO: 19409 - RNA, 21 nt, Artificial Sequence
  GATA2 Guide RNA
acccuagcaccacgggggcug

SEQ ID NO: 19410 - RNA, 21 nt, Artificial Sequence
  GATA2 Guide RNA
acgggggcugcguuuccagcc

SEQ ID NO: 19411 - RNA, 21 nt, Artificial Sequence
  GATA2 Guide RNA
agaugaggcuggaaacgcagc

SEQ ID NO: 19412 - RNA, 21 nt, Artificial Sequence
  GATA2 Guide RNA
agcaccacgggggcugcguuu

SEQ ID NO: 19413 - RNA, 21 nt, Artificial Sequence
  GATA2 Guide RNA
aggcuggaaacgcagcccccg

SEQ ID NO: 19414 - RNA, 21 nt, Artificial Sequence
  GATA2 Guide RNA
augaggcuggaaacgcagccc

SEQ ID NO: 19415 - RNA, 21 nt, Artificial Sequence
  GATA2 Guide RNA
caccacgggggcugcguuucc

SEQ ID NO: 19416 - RNA, 21 nt, Artificial Sequence
  GATA2 Guide RNA
cacgggggcugcguuuccagc

SEQ ID NO: 19417 - RNA, 21 nt, Artificial Sequence
  GATA2 Guide RNA
ccacgggggcugcguuuccag

SEQ ID NO: 19418 - RNA, 21 nt, Artificial Sequence
  GATA2 Guide RNA
cccccgcggaagaugaggcug

SEQ ID NO: 19419 - RNA, 21 nt, Artificial Sequence
  GATA2 Guide RNA
ccccgcggaagaugaggcugg

SEQ ID NO: 19420 - RNA, 21 nt, Artificial Sequence
  GATA2 Guide RNA
cccgcggaagaugaggcugga

SEQ ID NO: 19421 - RNA, 21 nt, Artificial Sequence
  GATA2 Guide RNA
cccuagcaccacgggggcugc

SEQ ID NO: 19422 - RNA, 21 nt, Artificial Sequence
  GATA2 Guide RNA
ccgcggaagaugaggcuggaa

SEQ ID NO: 19423 - RNA, 21 nt, Artificial Sequence
  GATA2 Guide RNA
ccuagcaccacgggggcugcg

SEQ ID NO: 19424 - RNA, 21 nt, Artificial Sequence
  GATA2 Guide RNA
cgcggaagaugaggcuggaaa

SEQ ID NO: 19425 - RNA, 21 nt, Artificial Sequence
  GATA2 Guide RNA
cggaagaugaggcuggaaacg

SEQ ID NO: 19426 - RNA, 21 nt, Artificial Sequence
  GATA2 Guide RNA
cgggggcugcguuuccagccu

SEQ ID NO: 19427 - RNA, 21 nt, Artificial Sequence
  GATA2 Guide RNA
cguuuccagccucaucuuccg

SEQ ID NO: 19428 - RNA, 21 nt, Artificial Sequence
  GATA2 Guide RNA
cuagcaccacgggggcugcgu

SEQ ID NO: 19429 - RNA, 21 nt, Artificial Sequence
  GATA2 Guide RNA
cugcguuuccagccucaucuu

SEQ ID NO: 19430 - RNA, 21 nt, Artificial Sequence
  GATA2 Guide RNA
cuggaaacgcagcccccgugg

SEQ ID NO: 19431 - RNA, 21 nt, Artificial Sequence
  GATA2 Guide RNA
gaaacgcagcccccguggugc

SEQ ID NO: 19432 - RNA, 21 nt, Artificial Sequence
  GATA2 Guide RNA
gaagaugaggcuggaaacgca

SEQ ID NO: 19433 - RNA, 21 nt, Artificial Sequence
  GATA2 Guide RNA
gaggcuggaaacgcagccccc

SEQ ID NO: 19434 - RNA, 21 nt, Artificial Sequence
  GATA2 Guide RNA
gaugaggcuggaaacgcagcc

SEQ ID NO: 19435 - RNA, 21 nt, Artificial Sequence
  GATA2 Guide RNA
gcaccacgggggcugcguuuc

SEQ ID NO: 19436 - RNA, 21 nt, Artificial Sequence
  GATA2 Guide RNA
gcggaagaugaggcuggaaac

SEQ ID NO: 19437 - RNA, 21 nt, Artificial Sequence
  GATA2 Guide RNA
gcguuuccagccucaucuucc

SEQ ID NO: 19438 - RNA, 21 nt, Artificial Sequence
  GATA2 Guide RNA
gcugcguuuccagccucaucu

SEQ ID NO: 19439 - RNA, 21 nt, Artificial Sequence
  GATA2 Guide RNA
gcuggaaacgcagcccccgug

SEQ ID NO: 19440 - RNA, 21 nt, Artificial Sequence
  GATA2 Guide RNA
ggaaacgcagcccccguggug

SEQ ID NO: 19441 - RNA, 21 nt, Artificial Sequence
  GATA2 Guide RNA
ggaagaugaggcuggaaacgc

SEQ ID NO: 19442 - RNA, 21 nt, Artificial Sequence
  GATA2 Guide RNA
ggcugcguuuccagccucauc

SEQ ID NO: 19443 - RNA, 21 nt, Artificial Sequence
  GATA2 Guide RNA
ggcuggaaacgcagcccccgu

SEQ ID NO: 19444 - RNA, 21 nt, Artificial Sequence
  GATA2 Guide RNA
gggcugcguuuccagccucau

SEQ ID NO: 19445 - RNA, 21 nt, Artificial Sequence
  GATA2 Guide RNA
ggggcugcguuuccagccuca

SEQ ID NO: 19446 - RNA, 21 nt, Artificial Sequence
  GATA2 Guide RNA
gggggcugcguuuccagccuc

SEQ ID NO: 19447 - RNA, 21 nt, Artificial Sequence
  GATA2 Guide RNA
guuuccagccucaucuuccgc

SEQ ID NO: 19448 - RNA, 21 nt, Artificial Sequence
  GATA2 Guide RNA
uagcaccacgggggcugcguu

SEQ ID NO: 19449 - RNA, 21 nt, Artificial Sequence
  GATA2 Guide RNA
ugaggcuggaaacgcagcccc

SEQ ID NO: 19450 - RNA, 21 nt, Artificial Sequence
  GATA2 Guide RNA
ugcguuuccagccucaucuuc

SEQ ID NO: 19451 - RNA, 21 nt, Artificial Sequence
  GATA2 Guide RNA
uggaaacgcagcccccguggu

SEQ ID NO: 19452 - RNA, 21 nt, Artificial Sequence
  GATA2 Guide RNA
uuuccagccucaucuuccgcg

SEQ ID NO: 19453 - RNA, 22 nt, Artificial Sequence
  GATA2 Guide RNA
aaacgcagcccccguggugcua

SEQ ID NO: 19454 - RNA, 22 nt, Artificial Sequence
  GATA2 Guide RNA
aacgcagcccccguggugcuag

SEQ ID NO: 19455 - RNA, 22 nt, Artificial Sequence
  GATA2 Guide RNA
aagaugaggcuggaaacgcagc

SEQ ID NO: 19456 - RNA, 22 nt, Artificial Sequence
  GATA2 Guide RNA
accacgggggcugcguuuccag

SEQ ID NO: 19457 - RNA, 22 nt, Artificial Sequence
  GATA2 Guide RNA
acccuagcaccacgggggcugc

SEQ ID NO: 19458 - RNA, 22 nt, Artificial Sequence
  GATA2 Guide RNA
acgggggcugcguuuccagccu

SEQ ID NO: 19459 - RNA, 22 nt, Artificial Sequence
  GATA2 Guide RNA
agaugaggcuggaaacgcagcc

SEQ ID NO: 19460 - RNA, 22 nt, Artificial Sequence
  GATA2 Guide RNA
agcaccacgggggcugcguuuc

SEQ ID NO: 19461 - RNA, 22 nt, Artificial Sequence
  GATA2 Guide RNA
aggcuggaaacgcagcccccgu

SEQ ID NO: 19462 - RNA, 22 nt, Artificial Sequence
  GATA2 Guide RNA
augaggcuggaaacgcagcccc

SEQ ID NO: 19463 - RNA, 22 nt, Artificial Sequence
  GATA2 Guide RNA
caccacgggggcugcguuucca

SEQ ID NO: 19464 - RNA, 22 nt, Artificial Sequence
  GATA2 Guide RNA
cacgggggcugcguuuccagcc

SEQ ID NO: 19465 - RNA, 22 nt, Artificial Sequence
  GATA2 Guide RNA
ccacgggggcugcguuuccagc

SEQ ID NO: 19466 - RNA, 22 nt, Artificial Sequence
  GATA2 Guide RNA
cccccgcggaagaugaggcugg

SEQ ID NO: 19467 - RNA, 22 nt, Artificial Sequence
  GATA2 Guide RNA
ccccgcggaagaugaggcugga

SEQ ID NO: 19468 - RNA, 22 nt, Artificial Sequence
  GATA2 Guide RNA
cccgcggaagaugaggcuggaa

SEQ ID NO: 19469 - RNA, 22 nt, Artificial Sequence
  GATA2 Guide RNA
cccuagcaccacgggggcugcg

SEQ ID NO: 19470 - RNA, 22 nt, Artificial Sequence
  GATA2 Guide RNA
ccgcggaagaugaggcuggaaa

SEQ ID NO: 19471 - RNA, 22 nt, Artificial Sequence
  GATA2 Guide RNA
ccuagcaccacgggggcugcgu

SEQ ID NO: 19472 - RNA, 22 nt, Artificial Sequence
  GATA2 Guide RNA
cgcggaagaugaggcuggaaac

SEQ ID NO: 19473 - RNA, 22 nt, Artificial Sequence
  GATA2 Guide RNA
cggaagaugaggcuggaaacgc

SEQ ID NO: 19474 - RNA, 22 nt, Artificial Sequence
  GATA2 Guide RNA
cgggggcugcguuuccagccuc

SEQ ID NO: 19475 - RNA, 22 nt, Artificial Sequence
  GATA2 Guide RNA
cguuuccagccucaucuuccgc

SEQ ID NO: 19476 - RNA, 22 nt, Artificial Sequence
  GATA2 Guide RNA
cuagcaccacgggggcugcguu

SEQ ID NO: 19477 - RNA, 22 nt, Artificial Sequence
  GATA2 Guide RNA
cugcguuuccagccucaucuuc

SEQ ID NO: 19478 - RNA, 22 nt, Artificial Sequence
  GATA2 Guide RNA
cuggaaacgcagcccccguggu

SEQ ID NO: 19479 - RNA, 22 nt, Artificial Sequence
  GATA2 Guide RNA
gaaacgcagcccccguggugcu

SEQ ID NO: 19480 - RNA, 22 nt, Artificial Sequence
  GATA2 Guide RNA
gaagaugaggcuggaaacgcag

SEQ ID NO: 19481 - RNA, 22 nt, Artificial Sequence
  GATA2 Guide RNA
gacccuagcaccacgggggcug

SEQ ID NO: 19482 - RNA, 22 nt, Artificial Sequence
  GATA2 Guide RNA
gaggcuggaaacgcagcccccg

SEQ ID NO: 19483 - RNA, 22 nt, Artificial Sequence
  GATA2 Guide RNA
gaugaggcuggaaacgcagccc

SEQ ID NO: 19484 - RNA, 22 nt, Artificial Sequence
  GATA2 Guide RNA
gcaccacgggggcugcguuucc

SEQ ID NO: 19485 - RNA, 22 nt, Artificial Sequence
  GATA2 Guide RNA
gcggaagaugaggcuggaaacg

SEQ ID NO: 19486 - RNA, 22 nt, Artificial Sequence
  GATA2 Guide RNA
gcguuuccagccucaucuuccg

SEQ ID NO: 19487 - RNA, 22 nt, Artificial Sequence
  GATA2 Guide RNA
gcugcguuuccagccucaucuu

SEQ ID NO: 19488 - RNA, 22 nt, Artificial Sequence
  GATA2 Guide RNA
gcuggaaacgcagcccccgugg

SEQ ID NO: 19489 - RNA, 22 nt, Artificial Sequence
  GATA2 Guide RNA
ggaaacgcagcccccguggugc

SEQ ID NO: 19490 - RNA, 22 nt, Artificial Sequence
  GATA2 Guide RNA
ggaagaugaggcuggaaacgca

SEQ ID NO: 19491 - RNA, 22 nt, Artificial Sequence
  GATA2 Guide RNA
ggcugcguuuccagccucaucu

SEQ ID NO: 19492 - RNA, 22 nt, Artificial Sequence
  GATA2 Guide RNA
ggcuggaaacgcagcccccgug

SEQ ID NO: 19493 - RNA, 22 nt, Artificial Sequence
  GATA2 Guide RNA
gggcugcguuuccagccucauc

SEQ ID NO: 19494 - RNA, 22 nt, Artificial Sequence
  GATA2 Guide RNA
ggggcugcguuuccagccucau

SEQ ID NO: 19495 - RNA, 22 nt, Artificial Sequence
  GATA2 Guide RNA
gggggcugcguuuccagccuca

SEQ ID NO: 19496 - RNA, 22 nt, Artificial Sequence
  GATA2 Guide RNA
guuuccagccucaucuuccgcg

SEQ ID NO: 19497 - RNA, 22 nt, Artificial Sequence
  GATA2 Guide RNA
uagcaccacgggggcugcguuu

SEQ ID NO: 19498 - RNA, 22 nt, Artificial Sequence
  GATA2 Guide RNA
ugaggcuggaaacgcagccccc

SEQ ID NO: 19499 - RNA, 22 nt, Artificial Sequence
  GATA2 Guide RNA
ugcguuuccagccucaucuucc

SEQ ID NO: 19500 - RNA, 22 nt, Artificial Sequence
  GATA2 Guide RNA
uggaaacgcagcccccguggug

SEQ ID NO: 19501 - RNA, 22 nt, Artificial Sequence
  GATA2 Guide RNA
uuuccagccucaucuuccgcgg

SEQ ID NO: 19502 - RNA, 20 nt, Artificial Sequence
  GATA2 Guide RNA
accacggggacugcgucucc

SEQ ID NO: 19503 - RNA, 20 nt, Artificial Sequence
  GATA2 Guide RNA
acccuagcaccacggggacu

SEQ ID NO: 19504 - RNA, 20 nt, Artificial Sequence
  GATA2 Guide RNA
acgcaguccccguggugcua

SEQ ID NO: 19505 - RNA, 20 nt, Artificial Sequence
  GATA2 Guide RNA
acggggacugcgucuccagc

SEQ ID NO: 19506 - RNA, 20 nt, Artificial Sequence
  GATA2 Guide RNA
agacgcaguccccguggugc

SEQ ID NO: 19507 - RNA, 20 nt, Artificial Sequence
  GATA2 Guide RNA
agcaccacggggacugcguc

SEQ ID NO: 19508 - RNA, 20 nt, Artificial Sequence
  GATA2 Guide RNA
aggcuggagacgcagucccc

SEQ ID NO: 19509 - RNA, 20 nt, Artificial Sequence
  GATA2 Guide RNA
aguccccguggugcuagggu

SEQ ID NO: 19510 - RNA, 20 nt, Artificial Sequence
  GATA2 Guide RNA
augaggcuggagacgcaguc

SEQ ID NO: 19511 - RNA, 20 nt, Artificial Sequence
  GATA2 Guide RNA
caccacggggacugcgucuc

SEQ ID NO: 19512 - RNA, 20 nt, Artificial Sequence
  GATA2 Guide RNA
cacggggacugcgucuccag

SEQ ID NO: 19513 - RNA, 20 nt, Artificial Sequence
  GATA2 Guide RNA
caguccccguggugcuaggg

SEQ ID NO: 19514 - RNA, 20 nt, Artificial Sequence
  GATA2 Guide RNA
ccacggggacugcgucucca

SEQ ID NO: 19515 - RNA, 20 nt, Artificial Sequence
  GATA2 Guide RNA
cccuagcaccacggggacug

SEQ ID NO: 19516 - RNA, 20 nt, Artificial Sequence
  GATA2 Guide RNA
ccuagcaccacggggacugc

SEQ ID NO: 19517 - RNA, 20 nt, Artificial Sequence
  GATA2 Guide RNA
ccugacccuagcaccacggg

SEQ ID NO: 19518 - RNA, 20 nt, Artificial Sequence
  GATA2 Guide RNA
cgcaguccccguggugcuag

SEQ ID NO: 19519 - RNA, 20 nt, Artificial Sequence
  GATA2 Guide RNA
cggggacugcgucuccagcc

SEQ ID NO: 19520 - RNA, 20 nt, Artificial Sequence
  GATA2 Guide RNA
cuagcaccacggggacugcg

SEQ ID NO: 19521 - RNA, 20 nt, Artificial Sequence
  GATA2 Guide RNA
cuccugacccuagcaccacg

SEQ ID NO: 19522 - RNA, 20 nt, Artificial Sequence
  GATA2 Guide RNA
cugacccuagcaccacgggg

SEQ ID NO: 19523 - RNA, 20 nt, Artificial Sequence
  GATA2 Guide RNA
cuggagacgcaguccccgug

SEQ ID NO: 19524 - RNA, 20 nt, Artificial Sequence
  GATA2 Guide RNA
gacccuagcaccacggggac

SEQ ID NO: 19525 - RNA, 20 nt, Artificial Sequence
  GATA2 Guide RNA
gacgcaguccccguggugcu

SEQ ID NO: 19526 - RNA, 20 nt, Artificial Sequence
  GATA2 Guide RNA
gacugcgucuccagccucau

SEQ ID NO: 19527 - RNA, 20 nt, Artificial Sequence
  GATA2 Guide RNA
gagacgcaguccccguggug

SEQ ID NO: 19528 - RNA, 20 nt, Artificial Sequence
  GATA2 Guide RNA
gaggcuggagacgcaguccc

SEQ ID NO: 19529 - RNA, 20 nt, Artificial Sequence
  GATA2 Guide RNA
gaugaggcuggagacgcagu

SEQ ID NO: 19530 - RNA, 20 nt, Artificial Sequence
  GATA2 Guide RNA
gcaccacggggacugcgucu

SEQ ID NO: 19531 - RNA, 20 nt, Artificial Sequence
  GATA2 Guide RNA
gcaguccccguggugcuagg

SEQ ID NO: 19532 - RNA, 20 nt, Artificial Sequence
  GATA2 Guide RNA
gcuggagacgcaguccccgu

SEQ ID NO: 19533 - RNA, 20 nt, Artificial Sequence
  GATA2 Guide RNA
ggacugcgucuccagccuca

SEQ ID NO: 19534 - RNA, 20 nt, Artificial Sequence
  GATA2 Guide RNA
ggagacgcaguccccguggu

SEQ ID NO: 19535 - RNA, 20 nt, Artificial Sequence
  GATA2 Guide RNA
ggcuggagacgcaguccccg

SEQ ID NO: 19536 - RNA, 20 nt, Artificial Sequence
  GATA2 Guide RNA
gggacugcgucuccagccuc

SEQ ID NO: 19537 - RNA, 20 nt, Artificial Sequence
  GATA2 Guide RNA
ggggacugcgucuccagccu

SEQ ID NO: 19538 - RNA, 20 nt, Artificial Sequence
  GATA2 Guide RNA
guccccguggugcuaggguc

SEQ ID NO: 19539 - RNA, 20 nt, Artificial Sequence
  GATA2 Guide RNA
uagcaccacggggacugcgu

SEQ ID NO: 19540 - RNA, 20 nt, Artificial Sequence
  GATA2 Guide RNA
uccccguggugcuaggguca

SEQ ID NO: 19541 - RNA, 20 nt, Artificial Sequence
  GATA2 Guide RNA
uccugacccuagcaccacgg

SEQ ID NO: 19542 - RNA, 20 nt, Artificial Sequence
  GATA2 Guide RNA
ugacccuagcaccacgggga

SEQ ID NO: 19543 - RNA, 20 nt, Artificial Sequence
  GATA2 Guide RNA
ugaggcuggagacgcagucc

SEQ ID NO: 19544 - RNA, 20 nt, Artificial Sequence
  GATA2 Guide RNA
uggagacgcaguccccgugg

SEQ ID NO: 19545 - RNA, 21 nt, Artificial Sequence
  GATA2 Guide RNA
accacggggacugcgucucca

SEQ ID NO: 19546 - RNA, 21 nt, Artificial Sequence
  GATA2 Guide RNA
acccuagcaccacggggacug

SEQ ID NO: 19547 - RNA, 21 nt, Artificial Sequence
  GATA2 Guide RNA
acgcaguccccguggugcuag

SEQ ID NO: 19548 - RNA, 21 nt, Artificial Sequence
  GATA2 Guide RNA
acggggacugcgucuccagcc

SEQ ID NO: 19549 - RNA, 21 nt, Artificial Sequence
  GATA2 Guide RNA
agacgcaguccccguggugcu

SEQ ID NO: 19550 - RNA, 21 nt, Artificial Sequence
  GATA2 Guide RNA
agaugaggcuggagacgcagu

SEQ ID NO: 19551 - RNA, 21 nt, Artificial Sequence
  GATA2 Guide RNA
agcaccacggggacugcgucu

SEQ ID NO: 19552 - RNA, 21 nt, Artificial Sequence
  GATA2 Guide RNA
aggcuggagacgcaguccccg

SEQ ID NO: 19553 - RNA, 21 nt, Artificial Sequence
  GATA2 Guide RNA
aguccccguggugcuaggguc

SEQ ID NO: 19554 - RNA, 21 nt, Artificial Sequence
  GATA2 Guide RNA
augaggcuggagacgcagucc

SEQ ID NO: 19555 - RNA, 21 nt, Artificial Sequence
  GATA2 Guide RNA
caccacggggacugcgucucc

SEQ ID NO: 19556 - RNA, 21 nt, Artificial Sequence
  GATA2 Guide RNA
cacggggacugcgucuccagc

SEQ ID NO: 19557 - RNA, 21 nt, Artificial Sequence
  GATA2 Guide RNA
caguccccguggugcuagggu

SEQ ID NO: 19558 - RNA, 21 nt, Artificial Sequence
  GATA2 Guide RNA
ccacggggacugcgucuccag

SEQ ID NO: 19559 - RNA, 21 nt, Artificial Sequence
  GATA2 Guide RNA
cccuagcaccacggggacugc

SEQ ID NO: 19560 - RNA, 21 nt, Artificial Sequence
  GATA2 Guide RNA
ccuagcaccacggggacugcg

SEQ ID NO: 19561 - RNA, 21 nt, Artificial Sequence
  GATA2 Guide RNA
ccugacccuagcaccacgggg

SEQ ID NO: 19562 - RNA, 21 nt, Artificial Sequence
  GATA2 Guide RNA
cgcaguccccguggugcuagg

SEQ ID NO: 19563 - RNA, 21 nt, Artificial Sequence
  GATA2 Guide RNA
cggggacugcgucuccagccu

SEQ ID NO: 19564 - RNA, 21 nt, Artificial Sequence
  GATA2 Guide RNA
cuagcaccacggggacugcgu

SEQ ID NO: 19565 - RNA, 21 nt, Artificial Sequence
  GATA2 Guide RNA
cuccugacccuagcaccacgg

SEQ ID NO: 19566 - RNA, 21 nt, Artificial Sequence
  GATA2 Guide RNA
cugacccuagcaccacgggga

SEQ ID NO: 19567 - RNA, 21 nt, Artificial Sequence
  GATA2 Guide RNA
cuggagacgcaguccccgugg

SEQ ID NO: 19568 - RNA, 21 nt, Artificial Sequence
  GATA2 Guide RNA
gacccuagcaccacggggacu

SEQ ID NO: 19569 - RNA, 21 nt, Artificial Sequence
  GATA2 Guide RNA
gacgcaguccccguggugcua

SEQ ID NO: 19570 - RNA, 21 nt, Artificial Sequence
  GATA2 Guide RNA
gacugcgucuccagccucauc

SEQ ID NO: 19571 - RNA, 21 nt, Artificial Sequence
  GATA2 Guide RNA
gagacgcaguccccguggugc

SEQ ID NO: 19572 - RNA, 21 nt, Artificial Sequence
  GATA2 Guide RNA
gaggcuggagacgcagucccc

SEQ ID NO: 19573 - RNA, 21 nt, Artificial Sequence
  GATA2 Guide RNA
gaugaggcuggagacgcaguc

SEQ ID NO: 19574 - RNA, 21 nt, Artificial Sequence
  GATA2 Guide RNA
gcaccacggggacugcgucuc

SEQ ID NO: 19575 - RNA, 21 nt, Artificial Sequence
  GATA2 Guide RNA
gcaguccccguggugcuaggg

SEQ ID NO: 19576 - RNA, 21 nt, Artificial Sequence
  GATA2 Guide RNA
gcuggagacgcaguccccgug

SEQ ID NO: 19577 - RNA, 21 nt, Artificial Sequence
  GATA2 Guide RNA
ggacugcgucuccagccucau

SEQ ID NO: 19578 - RNA, 21 nt, Artificial Sequence
  GATA2 Guide RNA
ggagacgcaguccccguggug

SEQ ID NO: 19579 - RNA, 21 nt, Artificial Sequence
  GATA2 Guide RNA
ggcuggagacgcaguccccgu

SEQ ID NO: 19580 - RNA, 21 nt, Artificial Sequence
  GATA2 Guide RNA
gggacugcgucuccagccuca

SEQ ID NO: 19581 - RNA, 21 nt, Artificial Sequence
  GATA2 Guide RNA
ggggacugcgucuccagccuc

SEQ ID NO: 19582 - RNA, 21 nt, Artificial Sequence
  GATA2 Guide RNA
guccccguggugcuaggguca

SEQ ID NO: 19583 - RNA, 21 nt, Artificial Sequence
  GATA2 Guide RNA
uagcaccacggggacugcguc

SEQ ID NO: 19584 - RNA, 21 nt, Artificial Sequence
  GATA2 Guide RNA
uccccguggugcuagggucag

SEQ ID NO: 19585 - RNA, 21 nt, Artificial Sequence
  GATA2 Guide RNA
uccugacccuagcaccacggg

SEQ ID NO: 19586 - RNA, 21 nt, Artificial Sequence
  GATA2 Guide RNA
ucuccugacccuagcaccacg

SEQ ID NO: 19587 - RNA, 21 nt, Artificial Sequence
  GATA2 Guide RNA
ugacccuagcaccacggggac

SEQ ID NO: 19588 - RNA, 21 nt, Artificial Sequence
  GATA2 Guide RNA
ugaggcuggagacgcaguccc

SEQ ID NO: 19589 - RNA, 21 nt, Artificial Sequence
  GATA2 Guide RNA
uggagacgcaguccccguggu

SEQ ID NO: 19590 - RNA, 22 nt, Artificial Sequence
  GATA2 Guide RNA
aagaugaggcuggagacgcagu

SEQ ID NO: 19591 - RNA, 22 nt, Artificial Sequence
  GATA2 Guide RNA
accacggggacugcgucuccag

SEQ ID NO: 19592 - RNA, 22 nt, Artificial Sequence
  GATA2 Guide RNA
acccuagcaccacggggacugc

SEQ ID NO: 19593 - RNA, 22 nt, Artificial Sequence
  GATA2 Guide RNA
acgcaguccccguggugcuagg

SEQ ID NO: 19594 - RNA, 22 nt, Artificial Sequence
  GATA2 Guide RNA
acggggacugcgucuccagccu

SEQ ID NO: 19595 - RNA, 22 nt, Artificial Sequence
  GATA2 Guide RNA
agacgcaguccccguggugcua

SEQ ID NO: 19596 - RNA, 22 nt, Artificial Sequence
  GATA2 Guide RNA
agaugaggcuggagacgcaguc

SEQ ID NO: 19597 - RNA, 22 nt, Artificial Sequence
  GATA2 Guide RNA
agcaccacggggacugcgucuc

SEQ ID NO: 19598 - RNA, 22 nt, Artificial Sequence
  GATA2 Guide RNA
aggcuggagacgcaguccccgu

SEQ ID NO: 19599 - RNA, 22 nt, Artificial Sequence
  GATA2 Guide RNA
aguccccguggugcuaggguca

SEQ ID NO: 19600 - RNA, 22 nt, Artificial Sequence
  GATA2 Guide RNA
augaggcuggagacgcaguccc

SEQ ID NO: 19601 - RNA, 22 nt, Artificial Sequence
  GATA2 Guide RNA
caccacggggacugcgucucca

SEQ ID NO: 19602 - RNA, 22 nt, Artificial Sequence
  GATA2 Guide RNA
cacggggacugcgucuccagcc

SEQ ID NO: 19603 - RNA, 22 nt, Artificial Sequence
  GATA2 Guide RNA
caguccccguggugcuaggguc

SEQ ID NO: 19604 - RNA, 22 nt, Artificial Sequence
  GATA2 Guide RNA
ccacggggacugcgucuccagc

SEQ ID NO: 19605 - RNA, 22 nt, Artificial Sequence
  GATA2 Guide RNA
cccuagcaccacggggacugcg

SEQ ID NO: 19606 - RNA, 22 nt, Artificial Sequence
  GATA2 Guide RNA
ccuagcaccacggggacugcgu

SEQ ID NO: 19607 - RNA, 22 nt, Artificial Sequence
  GATA2 Guide RNA
ccugacccuagcaccacgggga

SEQ ID NO: 19608 - RNA, 22 nt, Artificial Sequence
  GATA2 Guide RNA
cgcaguccccguggugcuaggg

SEQ ID NO: 19609 - RNA, 22 nt, Artificial Sequence
  GATA2 Guide RNA
cggggacugcgucuccagccuc

SEQ ID NO: 19610 - RNA, 22 nt, Artificial Sequence
  GATA2 Guide RNA
cuagcaccacggggacugcguc

SEQ ID NO: 19611 - RNA, 22 nt, Artificial Sequence
  GATA2 Guide RNA
cuccugacccuagcaccacggg

SEQ ID NO: 19612 - RNA, 22 nt, Artificial Sequence
  GATA2 Guide RNA
cugacccuagcaccacggggac

SEQ ID NO: 19613 - RNA, 22 nt, Artificial Sequence
  GATA2 Guide RNA
cuggagacgcaguccccguggu

SEQ ID NO: 19614 - RNA, 22 nt, Artificial Sequence
  GATA2 Guide RNA
gacccuagcaccacggggacug

SEQ ID NO: 19615 - RNA, 22 nt, Artificial Sequence
  GATA2 Guide RNA
gacgcaguccccguggugcuag

SEQ ID NO: 19616 - RNA, 22 nt, Artificial Sequence
  GATA2 Guide RNA
gacugcgucuccagccucaucu

SEQ ID NO: 19617 - RNA, 22 nt, Artificial Sequence
  GATA2 Guide RNA
gagacgcaguccccguggugcu

SEQ ID NO: 19618 - RNA, 22 nt, Artificial Sequence
  GATA2 Guide RNA
gaggcuggagacgcaguccccg

SEQ ID NO: 19619 - RNA, 22 nt, Artificial Sequence
  GATA2 Guide RNA
gaugaggcuggagacgcagucc

SEQ ID NO: 19620 - RNA, 22 nt, Artificial Sequence
  GATA2 Guide RNA
gcaccacggggacugcgucucc

SEQ ID NO: 19621 - RNA, 22 nt, Artificial Sequence
  GATA2 Guide RNA
gcaguccccguggugcuagggu

SEQ ID NO: 19622 - RNA, 22 nt, Artificial Sequence
  GATA2 Guide RNA
gcuggagacgcaguccccgugg

SEQ ID NO: 19623 - RNA, 22 nt, Artificial Sequence
  GATA2 Guide RNA
ggacugcgucuccagccucauc

SEQ ID NO: 19624 - RNA, 22 nt, Artificial Sequence
  GATA2 Guide RNA
ggagacgcaguccccguggugc

SEQ ID NO: 19625 - RNA, 22 nt, Artificial Sequence
  GATA2 Guide RNA
ggcuggagacgcaguccccgug

SEQ ID NO: 19626 - RNA, 22 nt, Artificial Sequence
  GATA2 Guide RNA
gggacugcgucuccagccucau

SEQ ID NO: 19627 - RNA, 22 nt, Artificial Sequence
  GATA2 Guide RNA
ggggacugcgucuccagccuca

SEQ ID NO: 19628 - RNA, 22 nt, Artificial Sequence
  GATA2 Guide RNA
guccccguggugcuagggucag

SEQ ID NO: 19629 - RNA, 22 nt, Artificial Sequence
  GATA2 Guide RNA
gucuccugacccuagcaccacg

SEQ ID NO: 19630 - RNA, 22 nt, Artificial Sequence
  GATA2 Guide RNA
uagcaccacggggacugcgucu

SEQ ID NO: 19631 - RNA, 22 nt, Artificial Sequence
  GATA2 Guide RNA
uccccguggugcuagggucagg

SEQ ID NO: 19632 - RNA, 22 nt, Artificial Sequence
  GATA2 Guide RNA
uccugacccuagcaccacgggg

SEQ ID NO: 19633 - RNA, 22 nt, Artificial Sequence
  GATA2 Guide RNA
ucuccugacccuagcaccacgg

SEQ ID NO: 19634 - RNA, 22 nt, Artificial Sequence
  GATA2 Guide RNA
ugacccuagcaccacggggacu

SEQ ID NO: 19635 - RNA, 22 nt, Artificial Sequence
  GATA2 Guide RNA
ugaggcuggagacgcagucccc

SEQ ID NO: 19636 - RNA, 22 nt, Artificial Sequence
  GATA2 Guide RNA
uggagacgcaguccccguggug

SEQ ID NO: 19637 - RNA, 20 nt, Artificial Sequence
  GATA2 Guide RNA
accacgggugcugcgucucc

SEQ ID NO: 19638 - RNA, 20 nt, Artificial Sequence
  GATA2 Guide RNA
acccguggugcuagggucag

SEQ ID NO: 19639 - RNA, 20 nt, Artificial Sequence
  GATA2 Guide RNA
acccuagcaccacgggugcu

SEQ ID NO: 19640 - RNA, 20 nt, Artificial Sequence
  GATA2 Guide RNA
acgcagcacccguggugcua

SEQ ID NO: 19641 - RNA, 20 nt, Artificial Sequence
  GATA2 Guide RNA
acgggugcugcgucuccagc

SEQ ID NO: 19642 - RNA, 20 nt, Artificial Sequence
  GATA2 Guide RNA
agacgcagcacccguggugc

SEQ ID NO: 19643 - RNA, 20 nt, Artificial Sequence
  GATA2 Guide RNA
agcaccacgggugcugcguc

SEQ ID NO: 19644 - RNA, 20 nt, Artificial Sequence
  GATA2 Guide RNA
agcacccguggugcuagggu

SEQ ID NO: 19645 - RNA, 20 nt, Artificial Sequence
  GATA2 Guide RNA
aggcuggagacgcagcaccc

SEQ ID NO: 19646 - RNA, 20 nt, Artificial Sequence
  GATA2 Guide RNA
augaggcuggagacgcagca

SEQ ID NO: 19647 - RNA, 20 nt, Artificial Sequence
  GATA2 Guide RNA
caccacgggugcugcgucuc

SEQ ID NO: 19648 - RNA, 20 nt, Artificial Sequence
  GATA2 Guide RNA
cacccguggugcuaggguca

SEQ ID NO: 19649 - RNA, 20 nt, Artificial Sequence
  GATA2 Guide RNA
cacgggugcugcgucuccag

SEQ ID NO: 19650 - RNA, 20 nt, Artificial Sequence
  GATA2 Guide RNA
cagcacccguggugcuaggg

SEQ ID NO: 19651 - RNA, 20 nt, Artificial Sequence
  GATA2 Guide RNA
ccacgggugcugcgucucca

SEQ ID NO: 19652 - RNA, 20 nt, Artificial Sequence
  GATA2 Guide RNA
cccuagcaccacgggugcug

SEQ ID NO: 19653 - RNA, 20 nt, Artificial Sequence
  GATA2 Guide RNA
ccuagcaccacgggugcugc

SEQ ID NO: 19654 - RNA, 20 nt, Artificial Sequence
  GATA2 Guide RNA
cgcagcacccguggugcuag

SEQ ID NO: 19655 - RNA, 20 nt, Artificial Sequence
  GATA2 Guide RNA
cgggugcugcgucuccagcc

SEQ ID NO: 19656 - RNA, 20 nt, Artificial Sequence
  GATA2 Guide RNA
cuagcaccacgggugcugcg

SEQ ID NO: 19657 - RNA, 20 nt, Artificial Sequence
  GATA2 Guide RNA
cugacccuagcaccacgggu

SEQ ID NO: 19658 - RNA, 20 nt, Artificial Sequence
  GATA2 Guide RNA
cuggagacgcagcacccgug

SEQ ID NO: 19659 - RNA, 20 nt, Artificial Sequence
  GATA2 Guide RNA
gacccuagcaccacgggugc

SEQ ID NO: 19660 - RNA, 20 nt, Artificial Sequence
  GATA2 Guide RNA
gacgcagcacccguggugcu

SEQ ID NO: 19661 - RNA, 20 nt, Artificial Sequence
  GATA2 Guide RNA
gagacgcagcacccguggug

SEQ ID NO: 19662 - RNA, 20 nt, Artificial Sequence
  GATA2 Guide RNA
gaggcuggagacgcagcacc

SEQ ID NO: 19663 - RNA, 20 nt, Artificial Sequence
  GATA2 Guide RNA
gcaccacgggugcugcgucu

SEQ ID NO: 19664 - RNA, 20 nt, Artificial Sequence
  GATA2 Guide RNA
gcacccguggugcuaggguc

SEQ ID NO: 19665 - RNA, 20 nt, Artificial Sequence
  GATA2 Guide RNA
gcagcacccguggugcuagg

SEQ ID NO: 19666 - RNA, 20 nt, Artificial Sequence
  GATA2 Guide RNA
gcuggagacgcagcacccgu

SEQ ID NO: 19667 - RNA, 20 nt, Artificial Sequence
  GATA2 Guide RNA
ggagacgcagcacccguggu

SEQ ID NO: 19668 - RNA, 20 nt, Artificial Sequence
  GATA2 Guide RNA
ggcuggagacgcagcacccg

SEQ ID NO: 19669 - RNA, 20 nt, Artificial Sequence
  GATA2 Guide RNA
gggugcugcgucuccagccu

SEQ ID NO: 19670 - RNA, 20 nt, Artificial Sequence
  GATA2 Guide RNA
ggugcugcgucuccagccuc

SEQ ID NO: 19671 - RNA, 20 nt, Artificial Sequence
  GATA2 Guide RNA
gugcugcgucuccagccuca

SEQ ID NO: 19672 - RNA, 20 nt, Artificial Sequence
  GATA2 Guide RNA
uagcaccacgggugcugcgu

SEQ ID NO: 19673 - RNA, 20 nt, Artificial Sequence
  GATA2 Guide RNA
ucuccugacccuagcaccac

SEQ ID NO: 19674 - RNA, 20 nt, Artificial Sequence
  GATA2 Guide RNA
ugacccuagcaccacgggug

SEQ ID NO: 19675 - RNA, 20 nt, Artificial Sequence
  GATA2 Guide RNA
ugaggcuggagacgcagcac

SEQ ID NO: 19676 - RNA, 20 nt, Artificial Sequence
  GATA2 Guide RNA
uggagacgcagcacccgugg

SEQ ID NO: 19677 - RNA, 21 nt, Artificial Sequence
  GATA2 Guide RNA
accacgggugcugcgucucca

SEQ ID NO: 19678 - RNA, 21 nt, Artificial Sequence
  GATA2 Guide RNA
acccguggugcuagggucagg

SEQ ID NO: 19679 - RNA, 21 nt, Artificial Sequence
  GATA2 Guide RNA
acccuagcaccacgggugcug

SEQ ID NO: 19680 - RNA, 21 nt, Artificial Sequence
  GATA2 Guide RNA
acgcagcacccguggugcuag

SEQ ID NO: 19681 - RNA, 21 nt, Artificial Sequence
  GATA2 Guide RNA
acgggugcugcgucuccagcc

SEQ ID NO: 19682 - RNA, 21 nt, Artificial Sequence
  GATA2 Guide RNA
agacgcagcacccguggugcu

SEQ ID NO: 19683 - RNA, 21 nt, Artificial Sequence
  GATA2 Guide RNA
agcaccacgggugcugcgucu

SEQ ID NO: 19684 - RNA, 21 nt, Artificial Sequence
  GATA2 Guide RNA
agcacccguggugcuaggguc

SEQ ID NO: 19685 - RNA, 21 nt, Artificial Sequence
  GATA2 Guide RNA
aggcuggagacgcagcacccg

SEQ ID NO: 19686 - RNA, 21 nt, Artificial Sequence
  GATA2 Guide RNA
augaggcuggagacgcagcac

SEQ ID NO: 19687 - RNA, 21 nt, Artificial Sequence
  GATA2 Guide RNA
caccacgggugcugcgucucc

SEQ ID NO: 19688 - RNA, 21 nt, Artificial Sequence
  GATA2 Guide RNA
cacccguggugcuagggucag

SEQ ID NO: 19689 - RNA, 21 nt, Artificial Sequence
  GATA2 Guide RNA
cacgggugcugcgucuccagc

SEQ ID NO: 19690 - RNA, 21 nt, Artificial Sequence
  GATA2 Guide RNA
cagcacccguggugcuagggu

SEQ ID NO: 19691 - RNA, 21 nt, Artificial Sequence
  GATA2 Guide RNA
ccacgggugcugcgucuccag

SEQ ID NO: 19692 - RNA, 21 nt, Artificial Sequence
  GATA2 Guide RNA
cccuagcaccacgggugcugc

SEQ ID NO: 19693 - RNA, 21 nt, Artificial Sequence
  GATA2 Guide RNA
ccuagcaccacgggugcugcg

SEQ ID NO: 19694 - RNA, 21 nt, Artificial Sequence
  GATA2 Guide RNA
ccugacccuagcaccacgggu

SEQ ID NO: 19695 - RNA, 21 nt, Artificial Sequence
  GATA2 Guide RNA
cgcagcacccguggugcuagg

SEQ ID NO: 19696 - RNA, 21 nt, Artificial Sequence
  GATA2 Guide RNA
cgggugcugcgucuccagccu

SEQ ID NO: 19697 - RNA, 21 nt, Artificial Sequence
  GATA2 Guide RNA
cuagcaccacgggugcugcgu

SEQ ID NO: 19698 - RNA, 21 nt, Artificial Sequence
  GATA2 Guide RNA
cugacccuagcaccacgggug

SEQ ID NO: 19699 - RNA, 21 nt, Artificial Sequence
  GATA2 Guide RNA
cuggagacgcagcacccgugg

SEQ ID NO: 19700 - RNA, 21 nt, Artificial Sequence
  GATA2 Guide RNA
gacccuagcaccacgggugcu

SEQ ID NO: 19701 - RNA, 21 nt, Artificial Sequence
  GATA2 Guide RNA
gacgcagcacccguggugcua

SEQ ID NO: 19702 - RNA, 21 nt, Artificial Sequence
  GATA2 Guide RNA
gagacgcagcacccguggugc

SEQ ID NO: 19703 - RNA, 21 nt, Artificial Sequence
  GATA2 Guide RNA
gaggcuggagacgcagcaccc

SEQ ID NO: 19704 - RNA, 21 nt, Artificial Sequence
  GATA2 Guide RNA
gaugaggcuggagacgcagca

SEQ ID NO: 19705 - RNA, 21 nt, Artificial Sequence
  GATA2 Guide RNA
gcaccacgggugcugcgucuc

SEQ ID NO: 19706 - RNA, 21 nt, Artificial Sequence
  GATA2 Guide RNA
gcacccguggugcuaggguca

SEQ ID NO: 19707 - RNA, 21 nt, Artificial Sequence
  GATA2 Guide RNA
gcagcacccguggugcuaggg

SEQ ID NO: 19708 - RNA, 21 nt, Artificial Sequence
  GATA2 Guide RNA
gcuggagacgcagcacccgug

SEQ ID NO: 19709 - RNA, 21 nt, Artificial Sequence
  GATA2 Guide RNA
ggagacgcagcacccguggug

SEQ ID NO: 19710 - RNA, 21 nt, Artificial Sequence
  GATA2 Guide RNA
ggcuggagacgcagcacccgu

SEQ ID NO: 19711 - RNA, 21 nt, Artificial Sequence
  GATA2 Guide RNA
gggugcugcgucuccagccuc

SEQ ID NO: 19712 - RNA, 21 nt, Artificial Sequence
  GATA2 Guide RNA
ggugcugcgucuccagccuca

SEQ ID NO: 19713 - RNA, 21 nt, Artificial Sequence
  GATA2 Guide RNA
gucuccugacccuagcaccac

SEQ ID NO: 19714 - RNA, 21 nt, Artificial Sequence
  GATA2 Guide RNA
gugcugcgucuccagccucau

SEQ ID NO: 19715 - RNA, 21 nt, Artificial Sequence
  GATA2 Guide RNA
uagcaccacgggugcugcguc

SEQ ID NO: 19716 - RNA, 21 nt, Artificial Sequence
  GATA2 Guide RNA
ugacccuagcaccacgggugc

SEQ ID NO: 19717 - RNA, 21 nt, Artificial Sequence
  GATA2 Guide RNA
ugaggcuggagacgcagcacc

SEQ ID NO: 19718 - RNA, 21 nt, Artificial Sequence
  GATA2 Guide RNA
uggagacgcagcacccguggu

SEQ ID NO: 19719 - RNA, 22 nt, Artificial Sequence
  GATA2 Guide RNA
accacgggugcugcgucuccag

SEQ ID NO: 19720 - RNA, 22 nt, Artificial Sequence
  GATA2 Guide RNA
acccguggugcuagggucagga

SEQ ID NO: 19721 - RNA, 22 nt, Artificial Sequence
  GATA2 Guide RNA
acccuagcaccacgggugcugc

SEQ ID NO: 19722 - RNA, 22 nt, Artificial Sequence
  GATA2 Guide RNA
acgcagcacccguggugcuagg

SEQ ID NO: 19723 - RNA, 22 nt, Artificial Sequence
  GATA2 Guide RNA
acgggugcugcgucuccagccu

SEQ ID NO: 19724 - RNA, 22 nt, Artificial Sequence
  GATA2 Guide RNA
agacgcagcacccguggugcua

SEQ ID NO: 19725 - RNA, 22 nt, Artificial Sequence
  GATA2 Guide RNA
agaugaggcuggagacgcagca

SEQ ID NO: 19726 - RNA, 22 nt, Artificial Sequence
  GATA2 Guide RNA
agcaccacgggugcugcgucuc

SEQ ID NO: 19727 - RNA, 22 nt, Artificial Sequence
  GATA2 Guide RNA
agcacccguggugcuaggguca

SEQ ID NO: 19728 - RNA, 22 nt, Artificial Sequence
  GATA2 Guide RNA
aggcuggagacgcagcacccgu

SEQ ID NO: 19729 - RNA, 22 nt, Artificial Sequence
  GATA2 Guide RNA
augaggcuggagacgcagcacc

SEQ ID NO: 19730 - RNA, 22 nt, Artificial Sequence
  GATA2 Guide RNA
caccacgggugcugcgucucca

SEQ ID NO: 19731 - RNA, 22 nt, Artificial Sequence
  GATA2 Guide RNA
cacccguggugcuagggucagg

SEQ ID NO: 19732 - RNA, 22 nt, Artificial Sequence
  GATA2 Guide RNA
cacgggugcugcgucuccagcc

SEQ ID NO: 19733 - RNA, 22 nt, Artificial Sequence
  GATA2 Guide RNA
cagcacccguggugcuaggguc

SEQ ID NO: 19734 - RNA, 22 nt, Artificial Sequence
  GATA2 Guide RNA
ccacgggugcugcgucuccagc

SEQ ID NO: 19735 - RNA, 22 nt, Artificial Sequence
  GATA2 Guide RNA
cccuagcaccacgggugcugcg

SEQ ID NO: 19736 - RNA, 22 nt, Artificial Sequence
  GATA2 Guide RNA
ccuagcaccacgggugcugcgu

SEQ ID NO: 19737 - RNA, 22 nt, Artificial Sequence
  GATA2 Guide RNA
ccugacccuagcaccacgggug

SEQ ID NO: 19738 - RNA, 22 nt, Artificial Sequence
  GATA2 Guide RNA
cgcagcacccguggugcuaggg

SEQ ID NO: 19739 - RNA, 22 nt, Artificial Sequence
  GATA2 Guide RNA
cgggugcugcgucuccagccuc

SEQ ID NO: 19740 - RNA, 22 nt, Artificial Sequence
  GATA2 Guide RNA
cuagcaccacgggugcugcguc

SEQ ID NO: 19741 - RNA, 22 nt, Artificial Sequence
  GATA2 Guide RNA
cugacccuagcaccacgggugc

SEQ ID NO: 19742 - RNA, 22 nt, Artificial Sequence
  GATA2 Guide RNA
cuggagacgcagcacccguggu

SEQ ID NO: 19743 - RNA, 22 nt, Artificial Sequence
  GATA2 Guide RNA
gacccuagcaccacgggugcug

SEQ ID NO: 19744 - RNA, 22 nt, Artificial Sequence
  GATA2 Guide RNA
gacgcagcacccguggugcuag

SEQ ID NO: 19745 - RNA, 22 nt, Artificial Sequence
  GATA2 Guide RNA
gagacgcagcacccguggugcu

SEQ ID NO: 19746 - RNA, 22 nt, Artificial Sequence
  GATA2 Guide RNA
gaggcuggagacgcagcacccg

SEQ ID NO: 19747 - RNA, 22 nt, Artificial Sequence
  GATA2 Guide RNA
gaugaggcuggagacgcagcac

SEQ ID NO: 19748 - RNA, 22 nt, Artificial Sequence
  GATA2 Guide RNA
gcaccacgggugcugcgucucc

SEQ ID NO: 19749 - RNA, 22 nt, Artificial Sequence
  GATA2 Guide RNA
gcacccguggugcuagggucag

SEQ ID NO: 19750 - RNA, 22 nt, Artificial Sequence
  GATA2 Guide RNA
gcagcacccguggugcuagggu

SEQ ID NO: 19751 - RNA, 22 nt, Artificial Sequence
  GATA2 Guide RNA
gcuggagacgcagcacccgugg

SEQ ID NO: 19752 - RNA, 22 nt, Artificial Sequence
  GATA2 Guide RNA
ggagacgcagcacccguggugc

SEQ ID NO: 19753 - RNA, 22 nt, Artificial Sequence
  GATA2 Guide RNA
ggcuggagacgcagcacccgug

SEQ ID NO: 19754 - RNA, 22 nt, Artificial Sequence
  GATA2 Guide RNA
gggugcugcgucuccagccuca

SEQ ID NO: 19755 - RNA, 22 nt, Artificial Sequence
  GATA2 Guide RNA
ggugcugcgucuccagccucau

SEQ ID NO: 19756 - RNA, 22 nt, Artificial Sequence
  GATA2 Guide RNA
gugcugcgucuccagccucauc

SEQ ID NO: 19757 - RNA, 22 nt, Artificial Sequence
  GATA2 Guide RNA
uagcaccacgggugcugcgucu

SEQ ID NO: 19758 - RNA, 22 nt, Artificial Sequence
  GATA2 Guide RNA
uccugacccuagcaccacgggu

SEQ ID NO: 19759 - RNA, 22 nt, Artificial Sequence
  GATA2 Guide RNA
ugacccuagcaccacgggugcu

SEQ ID NO: 19760 - RNA, 22 nt, Artificial Sequence
  GATA2 Guide RNA
ugaggcuggagacgcagcaccc

SEQ ID NO: 19761 - RNA, 22 nt, Artificial Sequence
  GATA2 Guide RNA
uggagacgcagcacccguggug

SEQ ID NO: 19762 - RNA, 22 nt, Artificial Sequence
  GATA2 Guide RNA
ugucuccugacccuagcaccac

SEQ ID NO: 19763 - RNA, 20 nt, Artificial Sequence
  GATA2 Guide RNA
aagugucuccugacccuagc

SEQ ID NO: 19764 - RNA, 20 nt, Artificial Sequence
  GATA2 Guide RNA
acccuagcagcacgggggcu

SEQ ID NO: 19765 - RNA, 20 nt, Artificial Sequence
  GATA2 Guide RNA
acgcagcccccgugcugcua

SEQ ID NO: 19766 - RNA, 20 nt, Artificial Sequence
  GATA2 Guide RNA
agaagugucuccugacccua

SEQ ID NO: 19767 - RNA, 20 nt, Artificial Sequence
  GATA2 Guide RNA
agacgcagcccccgugcugc

SEQ ID NO: 19768 - RNA, 20 nt, Artificial Sequence
  GATA2 Guide RNA
agcacgggggcugcgucucc

SEQ ID NO: 19769 - RNA, 20 nt, Artificial Sequence
  GATA2 Guide RNA
agcagcacgggggcugcguc

SEQ ID NO: 19770 - RNA, 20 nt, Artificial Sequence
  GATA2 Guide RNA
agcccccgugcugcuagggu

SEQ ID NO: 19771 - RNA, 20 nt, Artificial Sequence
  GATA2 Guide RNA
agugucuccugacccuagca

SEQ ID NO: 19772 - RNA, 20 nt, Artificial Sequence
  GATA2 Guide RNA
cagcacgggggcugcgucuc

SEQ ID NO: 19773 - RNA, 20 nt, Artificial Sequence
  GATA2 Guide RNA
cagcccccgugcugcuaggg

SEQ ID NO: 19774 - RNA, 20 nt, Artificial Sequence
  GATA2 Guide RNA
cccccgugcugcuaggguca

SEQ ID NO: 19775 - RNA, 20 nt, Artificial Sequence
  GATA2 Guide RNA
ccccgugcugcuagggucag

SEQ ID NO: 19776 - RNA, 20 nt, Artificial Sequence
  GATA2 Guide RNA
cccgugcugcuagggucagg

SEQ ID NO: 19777 - RNA, 20 nt, Artificial Sequence
  GATA2 Guide RNA
cccuagcagcacgggggcug

SEQ ID NO: 19778 - RNA, 20 nt, Artificial Sequence
  GATA2 Guide RNA
ccgugcugcuagggucagga

SEQ ID NO: 19779 - RNA, 20 nt, Artificial Sequence
  GATA2 Guide RNA
ccuagcagcacgggggcugc

SEQ ID NO: 19780 - RNA, 20 nt, Artificial Sequence
  GATA2 Guide RNA
ccugacccuagcagcacggg

SEQ ID NO: 19781 - RNA, 20 nt, Artificial Sequence
  GATA2 Guide RNA
cgcagcccccgugcugcuag

SEQ ID NO: 19782 - RNA, 20 nt, Artificial Sequence
  GATA2 Guide RNA
cgugcugcuagggucaggag

SEQ ID NO: 19783 - RNA, 20 nt, Artificial Sequence
  GATA2 Guide RNA
cuagcagcacgggggcugcg

SEQ ID NO: 19784 - RNA, 20 nt, Artificial Sequence
  GATA2 Guide RNA
cuccugacccuagcagcacg

SEQ ID NO: 19785 - RNA, 20 nt, Artificial Sequence
  GATA2 Guide RNA
cugacccuagcagcacgggg

SEQ ID NO: 19786 - RNA, 20 nt, Artificial Sequence
  GATA2 Guide RNA
cugcuagggucaggagacac

SEQ ID NO: 19787 - RNA, 20 nt, Artificial Sequence
  GATA2 Guide RNA
cuggagacgcagcccccgug

SEQ ID NO: 19788 - RNA, 20 nt, Artificial Sequence
  GATA2 Guide RNA
gaagugucuccugacccuag

SEQ ID NO: 19789 - RNA, 20 nt, Artificial Sequence
  GATA2 Guide RNA
gacccuagcagcacgggggc

SEQ ID NO: 19790 - RNA, 20 nt, Artificial Sequence
  GATA2 Guide RNA
gacgcagcccccgugcugcu

SEQ ID NO: 19791 - RNA, 20 nt, Artificial Sequence
  GATA2 Guide RNA
gagacgcagcccccgugcug

SEQ ID NO: 19792 - RNA, 20 nt, Artificial Sequence
  GATA2 Guide RNA
gcagcacgggggcugcgucu

SEQ ID NO: 19793 - RNA, 20 nt, Artificial Sequence
  GATA2 Guide RNA
gcagcccccgugcugcuagg

SEQ ID NO: 19794 - RNA, 20 nt, Artificial Sequence
  GATA2 Guide RNA
gcccccgugcugcuaggguc

SEQ ID NO: 19795 - RNA, 20 nt, Artificial Sequence
  GATA2 Guide RNA
gcugcuagggucaggagaca

SEQ ID NO: 19796 - RNA, 20 nt, Artificial Sequence
  GATA2 Guide RNA
gcuggagacgcagcccccgu

SEQ ID NO: 19797 - RNA, 20 nt, Artificial Sequence
  GATA2 Guide RNA
ggagacgcagcccccgugcu

SEQ ID NO: 19798 - RNA, 20 nt, Artificial Sequence
  GATA2 Guide RNA
ggcuggagacgcagcccccg

SEQ ID NO: 19799 - RNA, 20 nt, Artificial Sequence
  GATA2 Guide RNA
gucuccugacccuagcagca

SEQ ID NO: 19800 - RNA, 20 nt, Artificial Sequence
  GATA2 Guide RNA
gugcugcuagggucaggaga

SEQ ID NO: 19801 - RNA, 20 nt, Artificial Sequence
  GATA2 Guide RNA
gugucuccugacccuagcag

SEQ ID NO: 19802 - RNA, 20 nt, Artificial Sequence
  GATA2 Guide RNA
uagcagcacgggggcugcgu

SEQ ID NO: 19803 - RNA, 20 nt, Artificial Sequence
  GATA2 Guide RNA
uccugacccuagcagcacgg

SEQ ID NO: 19804 - RNA, 20 nt, Artificial Sequence
  GATA2 Guide RNA
ucuccugacccuagcagcac

SEQ ID NO: 19805 - RNA, 20 nt, Artificial Sequence
  GATA2 Guide RNA
ugacccuagcagcacggggg

SEQ ID NO: 19806 - RNA, 20 nt, Artificial Sequence
  GATA2 Guide RNA
ugcugcuagggucaggagac

SEQ ID NO: 19807 - RNA, 20 nt, Artificial Sequence
  GATA2 Guide RNA
uggagacgcagcccccgugc

SEQ ID NO: 19808 - RNA, 20 nt, Artificial Sequence
  GATA2 Guide RNA
ugucuccugacccuagcagc

SEQ ID NO: 19809 - RNA, 21 nt, Artificial Sequence
  GATA2 Guide RNA
aagaagugucuccugacccua

SEQ ID NO: 19810 - RNA, 21 nt, Artificial Sequence
  GATA2 Guide RNA
aagugucuccugacccuagca

SEQ ID NO: 19811 - RNA, 21 nt, Artificial Sequence
  GATA2 Guide RNA
acccuagcagcacgggggcug

SEQ ID NO: 19812 - RNA, 21 nt, Artificial Sequence
  GATA2 Guide RNA
acgcagcccccgugcugcuag

SEQ ID NO: 19813 - RNA, 21 nt, Artificial Sequence
  GATA2 Guide RNA
agaagugucuccugacccuag

SEQ ID NO: 19814 - RNA, 21 nt, Artificial Sequence
  GATA2 Guide RNA
agacgcagcccccgugcugcu

SEQ ID NO: 19815 - RNA, 21 nt, Artificial Sequence
  GATA2 Guide RNA
agcacgggggcugcgucucca

SEQ ID NO: 19816 - RNA, 21 nt, Artificial Sequence
  GATA2 Guide RNA
agcagcacgggggcugcgucu

SEQ ID NO: 19817 - RNA, 21 nt, Artificial Sequence
  GATA2 Guide RNA
agcccccgugcugcuaggguc

SEQ ID NO: 19818 - RNA, 21 nt, Artificial Sequence
  GATA2 Guide RNA
aggcuggagacgcagcccccg

SEQ ID NO: 19819 - RNA, 21 nt, Artificial Sequence
  GATA2 Guide RNA
agugucuccugacccuagcag

SEQ ID NO: 19820 - RNA, 21 nt, Artificial Sequence
  GATA2 Guide RNA
cagcacgggggcugcgucucc

SEQ ID NO: 19821 - RNA, 21 nt, Artificial Sequence
  GATA2 Guide RNA
cagcccccgugcugcuagggu

SEQ ID NO: 19822 - RNA, 21 nt, Artificial Sequence
  GATA2 Guide RNA
cccccgugcugcuagggucag

SEQ ID NO: 19823 - RNA, 21 nt, Artificial Sequence
  GATA2 Guide RNA
ccccgugcugcuagggucagg

SEQ ID NO: 19824 - RNA, 21 nt, Artificial Sequence
  GATA2 Guide RNA
cccgugcugcuagggucagga

SEQ ID NO: 19825 - RNA, 21 nt, Artificial Sequence
  GATA2 Guide RNA
cccuagcagcacgggggcugc

SEQ ID NO: 19826 - RNA, 21 nt, Artificial Sequence
  GATA2 Guide RNA
ccgugcugcuagggucaggag

SEQ ID NO: 19827 - RNA, 21 nt, Artificial Sequence
  GATA2 Guide RNA
ccuagcagcacgggggcugcg

SEQ ID NO: 19828 - RNA, 21 nt, Artificial Sequence
  GATA2 Guide RNA
ccugacccuagcagcacgggg

SEQ ID NO: 19829 - RNA, 21 nt, Artificial Sequence
  GATA2 Guide RNA
cgcagcccccgugcugcuagg

SEQ ID NO: 19830 - RNA, 21 nt, Artificial Sequence
  GATA2 Guide RNA
cgugcugcuagggucaggaga

SEQ ID NO: 19831 - RNA, 21 nt, Artificial Sequence
  GATA2 Guide RNA
cuagcagcacgggggcugcgu

SEQ ID NO: 19832 - RNA, 21 nt, Artificial Sequence
  GATA2 Guide RNA
cuccugacccuagcagcacgg

SEQ ID NO: 19833 - RNA, 21 nt, Artificial Sequence
  GATA2 Guide RNA
cugacccuagcagcacggggg

SEQ ID NO: 19834 - RNA, 21 nt, Artificial Sequence
  GATA2 Guide RNA
cugcuagggucaggagacacu

SEQ ID NO: 19835 - RNA, 21 nt, Artificial Sequence
  GATA2 Guide RNA
cuggagacgcagcccccgugc

SEQ ID NO: 19836 - RNA, 21 nt, Artificial Sequence
  GATA2 Guide RNA
gaagugucuccugacccuagc

SEQ ID NO: 19837 - RNA, 21 nt, Artificial Sequence
  GATA2 Guide RNA
gacccuagcagcacgggggcu

SEQ ID NO: 19838 - RNA, 21 nt, Artificial Sequence
  GATA2 Guide RNA
gacgcagcccccgugcugcua

SEQ ID NO: 19839 - RNA, 21 nt, Artificial Sequence
  GATA2 Guide RNA
gagacgcagcccccgugcugc

SEQ ID NO: 19840 - RNA, 21 nt, Artificial Sequence
  GATA2 Guide RNA
gcagcacgggggcugcgucuc

SEQ ID NO: 19841 - RNA, 21 nt, Artificial Sequence
  GATA2 Guide RNA
gcagcccccgugcugcuaggg

SEQ ID NO: 19842 - RNA, 21 nt, Artificial Sequence
  GATA2 Guide RNA
gcccccgugcugcuaggguca

SEQ ID NO: 19843 - RNA, 21 nt, Artificial Sequence
  GATA2 Guide RNA
gcugcuagggucaggagacac

SEQ ID NO: 19844 - RNA, 21 nt, Artificial Sequence
  GATA2 Guide RNA
gcuggagacgcagcccccgug

SEQ ID NO: 19845 - RNA, 21 nt, Artificial Sequence
  GATA2 Guide RNA
ggagacgcagcccccgugcug

SEQ ID NO: 19846 - RNA, 21 nt, Artificial Sequence
  GATA2 Guide RNA
ggcuggagacgcagcccccgu

SEQ ID NO: 19847 - RNA, 21 nt, Artificial Sequence
  GATA2 Guide RNA
gucuccugacccuagcagcac

SEQ ID NO: 19848 - RNA, 21 nt, Artificial Sequence
  GATA2 Guide RNA
gugcugcuagggucaggagac

SEQ ID NO: 19849 - RNA, 21 nt, Artificial Sequence
  GATA2 Guide RNA
gugucuccugacccuagcagc

SEQ ID NO: 19850 - RNA, 21 nt, Artificial Sequence
  GATA2 Guide RNA
uagcagcacgggggcugcguc

SEQ ID NO: 19851 - RNA, 21 nt, Artificial Sequence
  GATA2 Guide RNA
uccugacccuagcagcacggg

SEQ ID NO: 19852 - RNA, 21 nt, Artificial Sequence
  GATA2 Guide RNA
ucuccugacccuagcagcacg

SEQ ID NO: 19853 - RNA, 21 nt, Artificial Sequence
  GATA2 Guide RNA
ugacccuagcagcacgggggc

SEQ ID NO: 19854 - RNA, 21 nt, Artificial Sequence
  GATA2 Guide RNA
ugcugcuagggucaggagaca

SEQ ID NO: 19855 - RNA, 21 nt, Artificial Sequence
  GATA2 Guide RNA
uggagacgcagcccccgugcu

SEQ ID NO: 19856 - RNA, 21 nt, Artificial Sequence
  GATA2 Guide RNA
ugucuccugacccuagcagca

SEQ ID NO: 19857 - RNA, 22 nt, Artificial Sequence
  GATA2 Guide RNA
aaagaagugucuccugacccua

SEQ ID NO: 19858 - RNA, 22 nt, Artificial Sequence
  GATA2 Guide RNA
aagaagugucuccugacccuag

SEQ ID NO: 19859 - RNA, 22 nt, Artificial Sequence
  GATA2 Guide RNA
aagugucuccugacccuagcag

SEQ ID NO: 19860 - RNA, 22 nt, Artificial Sequence
  GATA2 Guide RNA
acccuagcagcacgggggcugc

SEQ ID NO: 19861 - RNA, 22 nt, Artificial Sequence
  GATA2 Guide RNA
acgcagcccccgugcugcuagg

SEQ ID NO: 19862 - RNA, 22 nt, Artificial Sequence
  GATA2 Guide RNA
agaagugucuccugacccuagc

SEQ ID NO: 19863 - RNA, 22 nt, Artificial Sequence
  GATA2 Guide RNA
agacgcagcccccgugcugcua

SEQ ID NO: 19864 - RNA, 22 nt, Artificial Sequence
  GATA2 Guide RNA
agcacgggggcugcgucuccag

SEQ ID NO: 19865 - RNA, 22 nt, Artificial Sequence
  GATA2 Guide RNA
agcagcacgggggcugcgucuc

SEQ ID NO: 19866 - RNA, 22 nt, Artificial Sequence
  GATA2 Guide RNA
agcccccgugcugcuaggguca

SEQ ID NO: 19867 - RNA, 22 nt, Artificial Sequence
  GATA2 Guide RNA
aggcuggagacgcagcccccgu

SEQ ID NO: 19868 - RNA, 22 nt, Artificial Sequence
  GATA2 Guide RNA
agugucuccugacccuagcagc

SEQ ID NO: 19869 - RNA, 22 nt, Artificial Sequence
  GATA2 Guide RNA
cagcacgggggcugcgucucca

SEQ ID NO: 19870 - RNA, 22 nt, Artificial Sequence
  GATA2 Guide RNA
cagcccccgugcugcuaggguc

SEQ ID NO: 19871 - RNA, 22 nt, Artificial Sequence
  GATA2 Guide RNA
cccccgugcugcuagggucagg

SEQ ID NO: 19872 - RNA, 22 nt, Artificial Sequence
  GATA2 Guide RNA
ccccgugcugcuagggucagga

SEQ ID NO: 19873 - RNA, 22 nt, Artificial Sequence
  GATA2 Guide RNA
cccgugcugcuagggucaggag

SEQ ID NO: 19874 - RNA, 22 nt, Artificial Sequence
  GATA2 Guide RNA
cccuagcagcacgggggcugcg

SEQ ID NO: 19875 - RNA, 22 nt, Artificial Sequence
  GATA2 Guide RNA
ccgugcugcuagggucaggaga

SEQ ID NO: 19876 - RNA, 22 nt, Artificial Sequence
  GATA2 Guide RNA
ccuagcagcacgggggcugcgu

SEQ ID NO: 19877 - RNA, 22 nt, Artificial Sequence
  GATA2 Guide RNA
ccugacccuagcagcacggggg

SEQ ID NO: 19878 - RNA, 22 nt, Artificial Sequence
  GATA2 Guide RNA
cgcagcccccgugcugcuaggg

SEQ ID NO: 19879 - RNA, 22 nt, Artificial Sequence
  GATA2 Guide RNA
cgugcugcuagggucaggagac

SEQ ID NO: 19880 - RNA, 22 nt, Artificial Sequence
  GATA2 Guide RNA
cuagcagcacgggggcugcguc

SEQ ID NO: 19881 - RNA, 22 nt, Artificial Sequence
  GATA2 Guide RNA
cuccugacccuagcagcacggg

SEQ ID NO: 19882 - RNA, 22 nt, Artificial Sequence
  GATA2 Guide RNA
cugacccuagcagcacgggggc

SEQ ID NO: 19883 - RNA, 22 nt, Artificial Sequence
  GATA2 Guide RNA
cugcuagggucaggagacacuu

SEQ ID NO: 19884 - RNA, 22 nt, Artificial Sequence
  GATA2 Guide RNA
cuggagacgcagcccccgugcu

SEQ ID NO: 19885 - RNA, 22 nt, Artificial Sequence
  GATA2 Guide RNA
gaagugucuccugacccuagca

SEQ ID NO: 19886 - RNA, 22 nt, Artificial Sequence
  GATA2 Guide RNA
gacccuagcagcacgggggcug

SEQ ID NO: 19887 - RNA, 22 nt, Artificial Sequence
  GATA2 Guide RNA
gacgcagcccccgugcugcuag

SEQ ID NO: 19888 - RNA, 22 nt, Artificial Sequence
  GATA2 Guide RNA
gagacgcagcccccgugcugcu

SEQ ID NO: 19889 - RNA, 22 nt, Artificial Sequence
  GATA2 Guide RNA
gaggcuggagacgcagcccccg

SEQ ID NO: 19890 - RNA, 22 nt, Artificial Sequence
  GATA2 Guide RNA
gcagcacgggggcugcgucucc

SEQ ID NO: 19891 - RNA, 22 nt, Artificial Sequence
  GATA2 Guide RNA
gcagcccccgugcugcuagggu

SEQ ID NO: 19892 - RNA, 22 nt, Artificial Sequence
  GATA2 Guide RNA
gcccccgugcugcuagggucag

SEQ ID NO: 19893 - RNA, 22 nt, Artificial Sequence
  GATA2 Guide RNA
gcugcuagggucaggagacacu

SEQ ID NO: 19894 - RNA, 22 nt, Artificial Sequence
  GATA2 Guide RNA
gcuggagacgcagcccccgugc

SEQ ID NO: 19895 - RNA, 22 nt, Artificial Sequence
  GATA2 Guide RNA
ggagacgcagcccccgugcugc

SEQ ID NO: 19896 - RNA, 22 nt, Artificial Sequence
  GATA2 Guide RNA
ggcuggagacgcagcccccgug

SEQ ID NO: 19897 - RNA, 22 nt, Artificial Sequence
  GATA2 Guide RNA
gucuccugacccuagcagcacg

SEQ ID NO: 19898 - RNA, 22 nt, Artificial Sequence
  GATA2 Guide RNA
gugcugcuagggucaggagaca

SEQ ID NO: 19899 - RNA, 22 nt, Artificial Sequence
  GATA2 Guide RNA
gugucuccugacccuagcagca

SEQ ID NO: 19900 - RNA, 22 nt, Artificial Sequence
  GATA2 Guide RNA
uagcagcacgggggcugcgucu

SEQ ID NO: 19901 - RNA, 22 nt, Artificial Sequence
  GATA2 Guide RNA
uccugacccuagcagcacgggg

SEQ ID NO: 19902 - RNA, 22 nt, Artificial Sequence
  GATA2 Guide RNA
ucuccugacccuagcagcacgg

SEQ ID NO: 19903 - RNA, 22 nt, Artificial Sequence
  GATA2 Guide RNA
ugacccuagcagcacgggggcu

SEQ ID NO: 19904 - RNA, 22 nt, Artificial Sequence
  GATA2 Guide RNA
ugcugcuagggucaggagacac

SEQ ID NO: 19905 - RNA, 22 nt, Artificial Sequence
  GATA2 Guide RNA
uggagacgcagcccccgugcug

SEQ ID NO: 19906 - RNA, 22 nt, Artificial Sequence
  GATA2 Guide RNA
ugucuccugacccuagcagcac

SEQ ID NO: 19907 - RNA, 20 nt, Artificial Sequence
  GATA2 Guide RNA
aaagaaaugucuccugaccc

SEQ ID NO: 19908 - RNA, 20 nt, Artificial Sequence
  GATA2 Guide RNA
aaaugucuccugacccuagc

SEQ ID NO: 19909 - RNA, 20 nt, Artificial Sequence
  GATA2 Guide RNA
aagaaaugucuccugacccu

SEQ ID NO: 19910 - RNA, 20 nt, Artificial Sequence
  GATA2 Guide RNA
aaugucuccugacccuagca

SEQ ID NO: 19911 - RNA, 20 nt, Artificial Sequence
  GATA2 Guide RNA
acauuucuuuggguggcgug

SEQ ID NO: 19912 - RNA, 20 nt, Artificial Sequence
  GATA2 Guide RNA
acccaaagaaaugucuccug

SEQ ID NO: 19913 - RNA, 20 nt, Artificial Sequence
  GATA2 Guide RNA
acccacgccacccaaagaaa

SEQ ID NO: 19914 - RNA, 20 nt, Artificial Sequence
  GATA2 Guide RNA
acgccacccaaagaaauguc

SEQ ID NO: 19915 - RNA, 20 nt, Artificial Sequence
  GATA2 Guide RNA
agaaaugucuccugacccua

SEQ ID NO: 19916 - RNA, 20 nt, Artificial Sequence
  GATA2 Guide RNA
agacauuucuuuggguggcg

SEQ ID NO: 19917 - RNA, 20 nt, Artificial Sequence
  GATA2 Guide RNA
aggagacauuucuuugggug

SEQ ID NO: 19918 - RNA, 20 nt, Artificial Sequence
  GATA2 Guide RNA
agggucaggagacauuucuu

SEQ ID NO: 19919 - RNA, 20 nt, Artificial Sequence
  GATA2 Guide RNA
auuucuuuggguggcguggg

SEQ ID NO: 19920 - RNA, 20 nt, Artificial Sequence
  GATA2 Guide RNA
caaagaaaugucuccugacc

SEQ ID NO: 19921 - RNA, 20 nt, Artificial Sequence
  GATA2 Guide RNA
cacccaaagaaaugucuccu

SEQ ID NO: 19922 - RNA, 20 nt, Artificial Sequence
  GATA2 Guide RNA
cacccacgccacccaaagaa

SEQ ID NO: 19923 - RNA, 20 nt, Artificial Sequence
  GATA2 Guide RNA
cacgccacccaaagaaaugu

SEQ ID NO: 19924 - RNA, 20 nt, Artificial Sequence
  GATA2 Guide RNA
caggagacauuucuuugggu

SEQ ID NO: 19925 - RNA, 20 nt, Artificial Sequence
  GATA2 Guide RNA
cauuucuuuggguggcgugg

SEQ ID NO: 19926 - RNA, 20 nt, Artificial Sequence
  GATA2 Guide RNA
ccaaagaaaugucuccugac

SEQ ID NO: 19927 - RNA, 20 nt, Artificial Sequence
  GATA2 Guide RNA
ccacccaaagaaaugucucc

SEQ ID NO: 19928 - RNA, 20 nt, Artificial Sequence
  GATA2 Guide RNA
ccacccacgccacccaaaga

SEQ ID NO: 19929 - RNA, 20 nt, Artificial Sequence
  GATA2 Guide RNA
ccacgccacccaaagaaaug

SEQ ID NO: 19930 - RNA, 20 nt, Artificial Sequence
  GATA2 Guide RNA
cccaaagaaaugucuccuga

SEQ ID NO: 19931 - RNA, 20 nt, Artificial Sequence
  GATA2 Guide RNA
cccacccacgccacccaaag

SEQ ID NO: 19932 - RNA, 20 nt, Artificial Sequence
  GATA2 Guide RNA
cccacgccacccaaagaaau

SEQ ID NO: 19933 - RNA, 20 nt, Artificial Sequence
  GATA2 Guide RNA
cgccacccaaagaaaugucu

SEQ ID NO: 19934 - RNA, 20 nt, Artificial Sequence
  GATA2 Guide RNA
cuagggucaggagacauuuc

SEQ ID NO: 19935 - RNA, 20 nt, Artificial Sequence
  GATA2 Guide RNA
gaaaugucuccugacccuag

SEQ ID NO: 19936 - RNA, 20 nt, Artificial Sequence
  GATA2 Guide RNA
gacauuucuuuggguggcgu

SEQ ID NO: 19937 - RNA, 20 nt, Artificial Sequence
  GATA2 Guide RNA
gagacauuucuuuggguggc

SEQ ID NO: 19938 - RNA, 20 nt, Artificial Sequence
  GATA2 Guide RNA
gccacccaaagaaaugucuc

SEQ ID NO: 19939 - RNA, 20 nt, Artificial Sequence
  GATA2 Guide RNA
gcuagggucaggagacauuu

SEQ ID NO: 19940 - RNA, 20 nt, Artificial Sequence
  GATA2 Guide RNA
ggagacauuucuuugggugg

SEQ ID NO: 19941 - RNA, 20 nt, Artificial Sequence
  GATA2 Guide RNA
gggucaggagacauuucuuu

SEQ ID NO: 19942 - RNA, 20 nt, Artificial Sequence
  GATA2 Guide RNA
ggucaggagacauuucuuug

SEQ ID NO: 19943 - RNA, 20 nt, Artificial Sequence
  GATA2 Guide RNA
ggugcuagggucaggagaca

SEQ ID NO: 19944 - RNA, 20 nt, Artificial Sequence
  GATA2 Guide RNA
gucaggagacauuucuuugg

SEQ ID NO: 19945 - RNA, 20 nt, Artificial Sequence
  GATA2 Guide RNA
gugcuagggucaggagacau

SEQ ID NO: 19946 - RNA, 20 nt, Artificial Sequence
  GATA2 Guide RNA
guggugcuagggucaggaga

SEQ ID NO: 19947 - RNA, 20 nt, Artificial Sequence
  GATA2 Guide RNA
uagggucaggagacauuucu

SEQ ID NO: 19948 - RNA, 20 nt, Artificial Sequence
  GATA2 Guide RNA
ucaggagacauuucuuuggg

SEQ ID NO: 19949 - RNA, 20 nt, Artificial Sequence
  GATA2 Guide RNA
ucccacccacgccacccaaa

SEQ ID NO: 19950 - RNA, 20 nt, Artificial Sequence
  GATA2 Guide RNA
ugcuagggucaggagacauu

SEQ ID NO: 19951 - RNA, 20 nt, Artificial Sequence
  GATA2 Guide RNA
uggugcuagggucaggagac

SEQ ID NO: 19952 - RNA, 20 nt, Artificial Sequence
  GATA2 Guide RNA
uuucuuuggguggcgugggu

SEQ ID NO: 19953 - RNA, 21 nt, Artificial Sequence
  GATA2 Guide RNA
aaagaaaugucuccugacccu

SEQ ID NO: 19954 - RNA, 21 nt, Artificial Sequence
  GATA2 Guide RNA
aaaugucuccugacccuagca

SEQ ID NO: 19955 - RNA, 21 nt, Artificial Sequence
  GATA2 Guide RNA
aagaaaugucuccugacccua

SEQ ID NO: 19956 - RNA, 21 nt, Artificial Sequence
  GATA2 Guide RNA
aaugucuccugacccuagcac

SEQ ID NO: 19957 - RNA, 21 nt, Artificial Sequence
  GATA2 Guide RNA
acauuucuuuggguggcgugg

SEQ ID NO: 19958 - RNA, 21 nt, Artificial Sequence
  GATA2 Guide RNA
acccaaagaaaugucuccuga

SEQ ID NO: 19959 - RNA, 21 nt, Artificial Sequence
  GATA2 Guide RNA
acccacgccacccaaagaaau

SEQ ID NO: 19960 - RNA, 21 nt, Artificial Sequence
  GATA2 Guide RNA
acgccacccaaagaaaugucu

SEQ ID NO: 19961 - RNA, 21 nt, Artificial Sequence
  GATA2 Guide RNA
agaaaugucuccugacccuag

SEQ ID NO: 19962 - RNA, 21 nt, Artificial Sequence
  GATA2 Guide RNA
agacauuucuuuggguggcgu

SEQ ID NO: 19963 - RNA, 21 nt, Artificial Sequence
  GATA2 Guide RNA
aggagacauuucuuugggugg

SEQ ID NO: 19964 - RNA, 21 nt, Artificial Sequence
  GATA2 Guide RNA
agggucaggagacauuucuuu

SEQ ID NO: 19965 - RNA, 21 nt, Artificial Sequence
  GATA2 Guide RNA
auuucuuuggguggcgugggu

SEQ ID NO: 19966 - RNA, 21 nt, Artificial Sequence
  GATA2 Guide RNA
caaagaaaugucuccugaccc

SEQ ID NO: 19967 - RNA, 21 nt, Artificial Sequence
  GATA2 Guide RNA
cacccaaagaaaugucuccug

SEQ ID NO: 19968 - RNA, 21 nt, Artificial Sequence
  GATA2 Guide RNA
cacccacgccacccaaagaaa

SEQ ID NO: 19969 - RNA, 21 nt, Artificial Sequence
  GATA2 Guide RNA
cacgccacccaaagaaauguc

SEQ ID NO: 19970 - RNA, 21 nt, Artificial Sequence
  GATA2 Guide RNA
caggagacauuucuuugggug

SEQ ID NO: 19971 - RNA, 21 nt, Artificial Sequence
  GATA2 Guide RNA
cauuucuuuggguggcguggg

SEQ ID NO: 19972 - RNA, 21 nt, Artificial Sequence
  GATA2 Guide RNA
ccaaagaaaugucuccugacc

SEQ ID NO: 19973 - RNA, 21 nt, Artificial Sequence
  GATA2 Guide RNA
ccacccaaagaaaugucuccu

SEQ ID NO: 19974 - RNA, 21 nt, Artificial Sequence
  GATA2 Guide RNA
ccacccacgccacccaaagaa

SEQ ID NO: 19975 - RNA, 21 nt, Artificial Sequence
  GATA2 Guide RNA
ccacgccacccaaagaaaugu

SEQ ID NO: 19976 - RNA, 21 nt, Artificial Sequence
  GATA2 Guide RNA
cccaaagaaaugucuccugac

SEQ ID NO: 19977 - RNA, 21 nt, Artificial Sequence
  GATA2 Guide RNA
cccacccacgccacccaaaga

SEQ ID NO: 19978 - RNA, 21 nt, Artificial Sequence
  GATA2 Guide RNA
cccacgccacccaaagaaaug

SEQ ID NO: 19979 - RNA, 21 nt, Artificial Sequence
  GATA2 Guide RNA
cgccacccaaagaaaugucuc

SEQ ID NO: 19980 - RNA, 21 nt, Artificial Sequence
  GATA2 Guide RNA
cguggugcuagggucaggaga

SEQ ID NO: 19981 - RNA, 21 nt, Artificial Sequence
  GATA2 Guide RNA
cuagggucaggagacauuucu

SEQ ID NO: 19982 - RNA, 21 nt, Artificial Sequence
  GATA2 Guide RNA
gaaaugucuccugacccuagc

SEQ ID NO: 19983 - RNA, 21 nt, Artificial Sequence
  GATA2 Guide RNA
gacauuucuuuggguggcgug

SEQ ID NO: 19984 - RNA, 21 nt, Artificial Sequence
  GATA2 Guide RNA
gagacauuucuuuggguggcg

SEQ ID NO: 19985 - RNA, 21 nt, Artificial Sequence
  GATA2 Guide RNA
gccacccaaagaaaugucucc

SEQ ID NO: 19986 - RNA, 21 nt, Artificial Sequence
  GATA2 Guide RNA
gcuagggucaggagacauuuc

SEQ ID NO: 19987 - RNA, 21 nt, Artificial Sequence
  GATA2 Guide RNA
ggagacauuucuuuggguggc

SEQ ID NO: 19988 - RNA, 21 nt, Artificial Sequence
  GATA2 Guide RNA
gggucaggagacauuucuuug

SEQ ID NO: 19989 - RNA, 21 nt, Artificial Sequence
  GATA2 Guide RNA
ggucaggagacauuucuuugg

SEQ ID NO: 19990 - RNA, 21 nt, Artificial Sequence
  GATA2 Guide RNA
ggugcuagggucaggagacau

SEQ ID NO: 19991 - RNA, 21 nt, Artificial Sequence
  GATA2 Guide RNA
gucaggagacauuucuuuggg

SEQ ID NO: 19992 - RNA, 21 nt, Artificial Sequence
  GATA2 Guide RNA
gugcuagggucaggagacauu

SEQ ID NO: 19993 - RNA, 21 nt, Artificial Sequence
  GATA2 Guide RNA
guggugcuagggucaggagac

SEQ ID NO: 19994 - RNA, 21 nt, Artificial Sequence
  GATA2 Guide RNA
uagggucaggagacauuucuu

SEQ ID NO: 19995 - RNA, 21 nt, Artificial Sequence
  GATA2 Guide RNA
ucaggagacauuucuuugggu

SEQ ID NO: 19996 - RNA, 21 nt, Artificial Sequence
  GATA2 Guide RNA
ucccacccacgccacccaaag

SEQ ID NO: 19997 - RNA, 21 nt, Artificial Sequence
  GATA2 Guide RNA
ugcuagggucaggagacauuu

SEQ ID NO: 19998 - RNA, 21 nt, Artificial Sequence
  GATA2 Guide RNA
uggugcuagggucaggagaca

SEQ ID NO: 19999 - RNA, 21 nt, Artificial Sequence
  GATA2 Guide RNA
uucccacccacgccacccaaa

SEQ ID NO: 20000 - RNA, 21 nt, Artificial Sequence
  GATA2 Guide RNA
uuucuuuggguggcgugggug

SEQ ID NO: 20001 - RNA, 22 nt, Artificial Sequence
  GATA2 Guide RNA
aaagaaaugucuccugacccua

SEQ ID NO: 20002 - RNA, 22 nt, Artificial Sequence
  GATA2 Guide RNA
aaaugucuccugacccuagcac

SEQ ID NO: 20003 - RNA, 22 nt, Artificial Sequence
  GATA2 Guide RNA
aagaaaugucuccugacccuag

SEQ ID NO: 20004 - RNA, 22 nt, Artificial Sequence
  GATA2 Guide RNA
aaugucuccugacccuagcacc

SEQ ID NO: 20005 - RNA, 22 nt, Artificial Sequence
  GATA2 Guide RNA
acauuucuuuggguggcguggg

SEQ ID NO: 20006 - RNA, 22 nt, Artificial Sequence
  GATA2 Guide RNA
acccaaagaaaugucuccugac

SEQ ID NO: 20007 - RNA, 22 nt, Artificial Sequence
  GATA2 Guide RNA
acccacgccacccaaagaaaug

SEQ ID NO: 20008 - RNA, 22 nt, Artificial Sequence
  GATA2 Guide RNA
acgccacccaaagaaaugucuc

SEQ ID NO: 20009 - RNA, 22 nt, Artificial Sequence
  GATA2 Guide RNA
agaaaugucuccugacccuagc

SEQ ID NO: 20010 - RNA, 22 nt, Artificial Sequence
  GATA2 Guide RNA
agacauuucuuuggguggcgug

SEQ ID NO: 20011 - RNA, 22 nt, Artificial Sequence
  GATA2 Guide RNA
aggagacauuucuuuggguggc

SEQ ID NO: 20012 - RNA, 22 nt, Artificial Sequence
  GATA2 Guide RNA
agggucaggagacauuucuuug

SEQ ID NO: 20013 - RNA, 22 nt, Artificial Sequence
  GATA2 Guide RNA
auuucuuuggguggcgugggug

SEQ ID NO: 20014 - RNA, 22 nt, Artificial Sequence
  GATA2 Guide RNA
caaagaaaugucuccugacccu

SEQ ID NO: 20015 - RNA, 22 nt, Artificial Sequence
  GATA2 Guide RNA
cacccaaagaaaugucuccuga

SEQ ID NO: 20016 - RNA, 22 nt, Artificial Sequence
  GATA2 Guide RNA
cacccacgccacccaaagaaau

SEQ ID NO: 20017 - RNA, 22 nt, Artificial Sequence
  GATA2 Guide RNA
cacgccacccaaagaaaugucu

SEQ ID NO: 20018 - RNA, 22 nt, Artificial Sequence
  GATA2 Guide RNA
caggagacauuucuuugggugg

SEQ ID NO: 20019 - RNA, 22 nt, Artificial Sequence
  GATA2 Guide RNA
cauuucuuuggguggcgugggu

SEQ ID NO: 20020 - RNA, 22 nt, Artificial Sequence
  GATA2 Guide RNA
ccaaagaaaugucuccugaccc

SEQ ID NO: 20021 - RNA, 22 nt, Artificial Sequence
  GATA2 Guide RNA
ccacccaaagaaaugucuccug

SEQ ID NO: 20022 - RNA, 22 nt, Artificial Sequence
  GATA2 Guide RNA
ccacccacgccacccaaagaaa

SEQ ID NO: 20023 - RNA, 22 nt, Artificial Sequence
  GATA2 Guide RNA
ccacgccacccaaagaaauguc

SEQ ID NO: 20024 - RNA, 22 nt, Artificial Sequence
  GATA2 Guide RNA
cccaaagaaaugucuccugacc

SEQ ID NO: 20025 - RNA, 22 nt, Artificial Sequence
  GATA2 Guide RNA
cccacccacgccacccaaagaa

SEQ ID NO: 20026 - RNA, 22 nt, Artificial Sequence
  GATA2 Guide RNA
cccacgccacccaaagaaaugu

SEQ ID NO: 20027 - RNA, 22 nt, Artificial Sequence
  GATA2 Guide RNA
ccguggugcuagggucaggaga

SEQ ID NO: 20028 - RNA, 22 nt, Artificial Sequence
  GATA2 Guide RNA
cgccacccaaagaaaugucucc

SEQ ID NO: 20029 - RNA, 22 nt, Artificial Sequence
  GATA2 Guide RNA
cguggugcuagggucaggagac

SEQ ID NO: 20030 - RNA, 22 nt, Artificial Sequence
  GATA2 Guide RNA
cuagggucaggagacauuucuu

SEQ ID NO: 20031 - RNA, 22 nt, Artificial Sequence
  GATA2 Guide RNA
cuucccacccacgccacccaaa

SEQ ID NO: 20032 - RNA, 22 nt, Artificial Sequence
  GATA2 Guide RNA
gaaaugucuccugacccuagca

SEQ ID NO: 20033 - RNA, 22 nt, Artificial Sequence
  GATA2 Guide RNA
gacauuucuuuggguggcgugg

SEQ ID NO: 20034 - RNA, 22 nt, Artificial Sequence
  GATA2 Guide RNA
gagacauuucuuuggguggcgu

SEQ ID NO: 20035 - RNA, 22 nt, Artificial Sequence
  GATA2 Guide RNA
gccacccaaagaaaugucuccu

SEQ ID NO: 20036 - RNA, 22 nt, Artificial Sequence
  GATA2 Guide RNA
gcuagggucaggagacauuucu

SEQ ID NO: 20037 - RNA, 22 nt, Artificial Sequence
  GATA2 Guide RNA
ggagacauuucuuuggguggcg

SEQ ID NO: 20038 - RNA, 22 nt, Artificial Sequence
  GATA2 Guide RNA
gggucaggagacauuucuuugg

SEQ ID NO: 20039 - RNA, 22 nt, Artificial Sequence
  GATA2 Guide RNA
ggucaggagacauuucuuuggg

SEQ ID NO: 20040 - RNA, 22 nt, Artificial Sequence
  GATA2 Guide RNA
ggugcuagggucaggagacauu

SEQ ID NO: 20041 - RNA, 22 nt, Artificial Sequence
  GATA2 Guide RNA
gucaggagacauuucuuugggu

SEQ ID NO: 20042 - RNA, 22 nt, Artificial Sequence
  GATA2 Guide RNA
gugcuagggucaggagacauuu

SEQ ID NO: 20043 - RNA, 22 nt, Artificial Sequence
  GATA2 Guide RNA
guggugcuagggucaggagaca

SEQ ID NO: 20044 - RNA, 22 nt, Artificial Sequence
  GATA2 Guide RNA
uagggucaggagacauuucuuu

SEQ ID NO: 20045 - RNA, 22 nt, Artificial Sequence
  GATA2 Guide RNA
ucaggagacauuucuuugggug

SEQ ID NO: 20046 - RNA, 22 nt, Artificial Sequence
  GATA2 Guide RNA
ucccacccacgccacccaaaga

SEQ ID NO: 20047 - RNA, 22 nt, Artificial Sequence
  GATA2 Guide RNA
ugcuagggucaggagacauuuc

SEQ ID NO: 20048 - RNA, 22 nt, Artificial Sequence
  GATA2 Guide RNA
uggugcuagggucaggagacau

SEQ ID NO: 20049 - RNA, 22 nt, Artificial Sequence
  GATA2 Guide RNA
uucccacccacgccacccaaag

SEQ ID NO: 20050 - RNA, 22 nt, Artificial Sequence
  GATA2 Guide RNA
uuucuuuggguggcgugggugg

SEQ ID NO: 20051 - RNA, 20 nt, Artificial Sequence
  GATA2 Guide RNA
aaagcagugucuccugaccc

SEQ ID NO: 20052 - RNA, 20 nt, Artificial Sequence
  GATA2 Guide RNA
aagcagugucuccugacccu

SEQ ID NO: 20053 - RNA, 20 nt, Artificial Sequence
  GATA2 Guide RNA
acacugcuuuggguggcgug

SEQ ID NO: 20054 - RNA, 20 nt, Artificial Sequence
  GATA2 Guide RNA
acccaaagcagugucuccug

SEQ ID NO: 20055 - RNA, 20 nt, Artificial Sequence
  GATA2 Guide RNA
acccacgccacccaaagcag

SEQ ID NO: 20056 - RNA, 20 nt, Artificial Sequence
  GATA2 Guide RNA
acgccacccaaagcaguguc

SEQ ID NO: 20057 - RNA, 20 nt, Artificial Sequence
  GATA2 Guide RNA
acugcuuuggguggcguggg

SEQ ID NO: 20058 - RNA, 20 nt, Artificial Sequence
  GATA2 Guide RNA
agacacugcuuuggguggcg

SEQ ID NO: 20059 - RNA, 20 nt, Artificial Sequence
  GATA2 Guide RNA
agcagugucuccugacccua

SEQ ID NO: 20060 - RNA, 20 nt, Artificial Sequence
  GATA2 Guide RNA
aggagacacugcuuugggug

SEQ ID NO: 20061 - RNA, 20 nt, Artificial Sequence
  GATA2 Guide RNA
agggucaggagacacugcuu

SEQ ID NO: 20062 - RNA, 20 nt, Artificial Sequence
  GATA2 Guide RNA
caaagcagugucuccugacc

SEQ ID NO: 20063 - RNA, 20 nt, Artificial Sequence
  GATA2 Guide RNA
cacccaaagcagugucuccu

SEQ ID NO: 20064 - RNA, 20 nt, Artificial Sequence
  GATA2 Guide RNA
cacccacgccacccaaagca

SEQ ID NO: 20065 - RNA, 20 nt, Artificial Sequence
  GATA2 Guide RNA
cacgccacccaaagcagugu

SEQ ID NO: 20066 - RNA, 20 nt, Artificial Sequence
  GATA2 Guide RNA
cacugcuuuggguggcgugg

SEQ ID NO: 20067 - RNA, 20 nt, Artificial Sequence
  GATA2 Guide RNA
caggagacacugcuuugggu

SEQ ID NO: 20068 - RNA, 20 nt, Artificial Sequence
  GATA2 Guide RNA
ccaaagcagugucuccugac

SEQ ID NO: 20069 - RNA, 20 nt, Artificial Sequence
  GATA2 Guide RNA
ccacccaaagcagugucucc

SEQ ID NO: 20070 - RNA, 20 nt, Artificial Sequence
  GATA2 Guide RNA
ccacccacgccacccaaagc

SEQ ID NO: 20071 - RNA, 20 nt, Artificial Sequence
  GATA2 Guide RNA
ccacgccacccaaagcagug

SEQ ID NO: 20072 - RNA, 20 nt, Artificial Sequence
  GATA2 Guide RNA
cccaaagcagugucuccuga

SEQ ID NO: 20073 - RNA, 20 nt, Artificial Sequence
  GATA2 Guide RNA
cccacgccacccaaagcagu

SEQ ID NO: 20074 - RNA, 20 nt, Artificial Sequence
  GATA2 Guide RNA
cgccacccaaagcagugucu

SEQ ID NO: 20075 - RNA, 20 nt, Artificial Sequence
  GATA2 Guide RNA
cuagggucaggagacacugc

SEQ ID NO: 20076 - RNA, 20 nt, Artificial Sequence
  GATA2 Guide RNA
cugcuuuggguggcgugggu

SEQ ID NO: 20077 - RNA, 20 nt, Artificial Sequence
  GATA2 Guide RNA
cuucccacccacgccaccca

SEQ ID NO: 20078 - RNA, 20 nt, Artificial Sequence
  GATA2 Guide RNA
gacacugcuuuggguggcgu

SEQ ID NO: 20079 - RNA, 20 nt, Artificial Sequence
  GATA2 Guide RNA
gagacacugcuuuggguggc

SEQ ID NO: 20080 - RNA, 20 nt, Artificial Sequence
  GATA2 Guide RNA
gcagugucuccugacccuag

SEQ ID NO: 20081 - RNA, 20 nt, Artificial Sequence
  GATA2 Guide RNA
gccacccaaagcagugucuc

SEQ ID NO: 20082 - RNA, 20 nt, Artificial Sequence
  GATA2 Guide RNA
gcuagggucaggagacacug

SEQ ID NO: 20083 - RNA, 20 nt, Artificial Sequence
  GATA2 Guide RNA
gcuuuggguggcgugggugg

SEQ ID NO: 20084 - RNA, 20 nt, Artificial Sequence
  GATA2 Guide RNA
ggagacacugcuuugggugg

SEQ ID NO: 20085 - RNA, 20 nt, Artificial Sequence
  GATA2 Guide RNA
gggucaggagacacugcuuu

SEQ ID NO: 20086 - RNA, 20 nt, Artificial Sequence
  GATA2 Guide RNA
ggucaggagacacugcuuug

SEQ ID NO: 20087 - RNA, 20 nt, Artificial Sequence
  GATA2 Guide RNA
gucaggagacacugcuuugg

SEQ ID NO: 20088 - RNA, 20 nt, Artificial Sequence
  GATA2 Guide RNA
gugcuagggucaggagacac

SEQ ID NO: 20089 - RNA, 20 nt, Artificial Sequence
  GATA2 Guide RNA
uagggucaggagacacugcu

SEQ ID NO: 20090 - RNA, 20 nt, Artificial Sequence
  GATA2 Guide RNA
ucaggagacacugcuuuggg

SEQ ID NO: 20091 - RNA, 20 nt, Artificial Sequence
  GATA2 Guide RNA
ugcuagggucaggagacacu

SEQ ID NO: 20092 - RNA, 20 nt, Artificial Sequence
  GATA2 Guide RNA
ugcuuuggguggcgugggug

SEQ ID NO: 20093 - RNA, 20 nt, Artificial Sequence
  GATA2 Guide RNA
uucccacccacgccacccaa

SEQ ID NO: 20094 - RNA, 21 nt, Artificial Sequence
  GATA2 Guide RNA
aaagcagugucuccugacccu

SEQ ID NO: 20095 - RNA, 21 nt, Artificial Sequence
  GATA2 Guide RNA
aagcagugucuccugacccua

SEQ ID NO: 20096 - RNA, 21 nt, Artificial Sequence
  GATA2 Guide RNA
acacugcuuuggguggcgugg

SEQ ID NO: 20097 - RNA, 21 nt, Artificial Sequence
  GATA2 Guide RNA
acccaaagcagugucuccuga

SEQ ID NO: 20098 - RNA, 21 nt, Artificial Sequence
  GATA2 Guide RNA
acccacgccacccaaagcagu

SEQ ID NO: 20099 - RNA, 21 nt, Artificial Sequence
  GATA2 Guide RNA
acgccacccaaagcagugucu

SEQ ID NO: 20100 - RNA, 21 nt, Artificial Sequence
  GATA2 Guide RNA
acugcuuuggguggcgugggu

SEQ ID NO: 20101 - RNA, 21 nt, Artificial Sequence
  GATA2 Guide RNA
agacacugcuuuggguggcgu

SEQ ID NO: 20102 - RNA, 21 nt, Artificial Sequence
  GATA2 Guide RNA
agcagugucuccugacccuag

SEQ ID NO: 20103 - RNA, 21 nt, Artificial Sequence
  GATA2 Guide RNA
aggagacacugcuuugggugg

SEQ ID NO: 20104 - RNA, 21 nt, Artificial Sequence
  GATA2 Guide RNA
agggucaggagacacugcuuu

SEQ ID NO: 20105 - RNA, 21 nt, Artificial Sequence
  GATA2 Guide RNA
caaagcagugucuccugaccc

SEQ ID NO: 20106 - RNA, 21 nt, Artificial Sequence
  GATA2 Guide RNA
cacccaaagcagugucuccug

SEQ ID NO: 20107 - RNA, 21 nt, Artificial Sequence
  GATA2 Guide RNA
cacccacgccacccaaagcag

SEQ ID NO: 20108 - RNA, 21 nt, Artificial Sequence
  GATA2 Guide RNA
cacgccacccaaagcaguguc

SEQ ID NO: 20109 - RNA, 21 nt, Artificial Sequence
  GATA2 Guide RNA
cacugcuuuggguggcguggg

SEQ ID NO: 20110 - RNA, 21 nt, Artificial Sequence
  GATA2 Guide RNA
caggagacacugcuuugggug

SEQ ID NO: 20111 - RNA, 21 nt, Artificial Sequence
  GATA2 Guide RNA
ccaaagcagugucuccugacc

SEQ ID NO: 20112 - RNA, 21 nt, Artificial Sequence
  GATA2 Guide RNA
ccacccaaagcagugucuccu

SEQ ID NO: 20113 - RNA, 21 nt, Artificial Sequence
  GATA2 Guide RNA
ccacccacgccacccaaagca

SEQ ID NO: 20114 - RNA, 21 nt, Artificial Sequence
  GATA2 Guide RNA
ccacgccacccaaagcagugu

SEQ ID NO: 20115 - RNA, 21 nt, Artificial Sequence
  GATA2 Guide RNA
cccaaagcagugucuccugac

SEQ ID NO: 20116 - RNA, 21 nt, Artificial Sequence
  GATA2 Guide RNA
cccacccacgccacccaaagc

SEQ ID NO: 20117 - RNA, 21 nt, Artificial Sequence
  GATA2 Guide RNA
cccacgccacccaaagcagug

SEQ ID NO: 20118 - RNA, 21 nt, Artificial Sequence
  GATA2 Guide RNA
cgccacccaaagcagugucuc

SEQ ID NO: 20119 - RNA, 21 nt, Artificial Sequence
  GATA2 Guide RNA
cuagggucaggagacacugcu

SEQ ID NO: 20120 - RNA, 21 nt, Artificial Sequence
  GATA2 Guide RNA
cugcuuuggguggcgugggug

SEQ ID NO: 20121 - RNA, 21 nt, Artificial Sequence
  GATA2 Guide RNA
cuucccacccacgccacccaa

SEQ ID NO: 20122 - RNA, 21 nt, Artificial Sequence
  GATA2 Guide RNA
gacacugcuuuggguggcgug

SEQ ID NO: 20123 - RNA, 21 nt, Artificial Sequence
  GATA2 Guide RNA
gagacacugcuuuggguggcg

SEQ ID NO: 20124 - RNA, 21 nt, Artificial Sequence
  GATA2 Guide RNA
gcagugucuccugacccuagc

SEQ ID NO: 20125 - RNA, 21 nt, Artificial Sequence
  GATA2 Guide RNA
gccacccaaagcagugucucc

SEQ ID NO: 20126 - RNA, 21 nt, Artificial Sequence
  GATA2 Guide RNA
gcuagggucaggagacacugc

SEQ ID NO: 20127 - RNA, 21 nt, Artificial Sequence
  GATA2 Guide RNA
gcuucccacccacgccaccca

SEQ ID NO: 20128 - RNA, 21 nt, Artificial Sequence
  GATA2 Guide RNA
gcuuuggguggcguggguggg

SEQ ID NO: 20129 - RNA, 21 nt, Artificial Sequence
  GATA2 Guide RNA
ggagacacugcuuuggguggc

SEQ ID NO: 20130 - RNA, 21 nt, Artificial Sequence
  GATA2 Guide RNA
gggucaggagacacugcuuug

SEQ ID NO: 20131 - RNA, 21 nt, Artificial Sequence
  GATA2 Guide RNA
ggucaggagacacugcuuugg

SEQ ID NO: 20132 - RNA, 21 nt, Artificial Sequence
  GATA2 Guide RNA
ggugcuagggucaggagacac

SEQ ID NO: 20133 - RNA, 21 nt, Artificial Sequence
  GATA2 Guide RNA
gucaggagacacugcuuuggg

SEQ ID NO: 20134 - RNA, 21 nt, Artificial Sequence
  GATA2 Guide RNA
gugcuagggucaggagacacu

SEQ ID NO: 20135 - RNA, 21 nt, Artificial Sequence
  GATA2 Guide RNA
uagggucaggagacacugcuu

SEQ ID NO: 20136 - RNA, 21 nt, Artificial Sequence
  GATA2 Guide RNA
ucaggagacacugcuuugggu

SEQ ID NO: 20137 - RNA, 21 nt, Artificial Sequence
  GATA2 Guide RNA
ugcuagggucaggagacacug

SEQ ID NO: 20138 - RNA, 21 nt, Artificial Sequence
  GATA2 Guide RNA
ugcuuuggguggcgugggugg

SEQ ID NO: 20139 - RNA, 22 nt, Artificial Sequence
  GATA2 Guide RNA
aaagcagugucuccugacccua

SEQ ID NO: 20140 - RNA, 22 nt, Artificial Sequence
  GATA2 Guide RNA
aagcagugucuccugacccuag

SEQ ID NO: 20141 - RNA, 22 nt, Artificial Sequence
  GATA2 Guide RNA
acacugcuuuggguggcguggg

SEQ ID NO: 20142 - RNA, 22 nt, Artificial Sequence
  GATA2 Guide RNA
acccaaagcagugucuccugac

SEQ ID NO: 20143 - RNA, 22 nt, Artificial Sequence
  GATA2 Guide RNA
acccacgccacccaaagcagug

SEQ ID NO: 20144 - RNA, 22 nt, Artificial Sequence
  GATA2 Guide RNA
acgccacccaaagcagugucuc

SEQ ID NO: 20145 - RNA, 22 nt, Artificial Sequence
  GATA2 Guide RNA
acugcuuuggguggcgugggug

SEQ ID NO: 20146 - RNA, 22 nt, Artificial Sequence
  GATA2 Guide RNA
agacacugcuuuggguggcgug

SEQ ID NO: 20147 - RNA, 22 nt, Artificial Sequence
  GATA2 Guide RNA
agcagugucuccugacccuagc

SEQ ID NO: 20148 - RNA, 22 nt, Artificial Sequence
  GATA2 Guide RNA
aggagacacugcuuuggguggc

SEQ ID NO: 20149 - RNA, 22 nt, Artificial Sequence
  GATA2 Guide RNA
agggucaggagacacugcuuug

SEQ ID NO: 20150 - RNA, 22 nt, Artificial Sequence
  GATA2 Guide RNA
caaagcagugucuccugacccu

SEQ ID NO: 20151 - RNA, 22 nt, Artificial Sequence
  GATA2 Guide RNA
cacccaaagcagugucuccuga

SEQ ID NO: 20152 - RNA, 22 nt, Artificial Sequence
  GATA2 Guide RNA
cacccacgccacccaaagcagu

SEQ ID NO: 20153 - RNA, 22 nt, Artificial Sequence
  GATA2 Guide RNA
cacgccacccaaagcagugucu

SEQ ID NO: 20154 - RNA, 22 nt, Artificial Sequence
  GATA2 Guide RNA
cacugcuuuggguggcgugggu

SEQ ID NO: 20155 - RNA, 22 nt, Artificial Sequence
  GATA2 Guide RNA
caggagacacugcuuugggugg

SEQ ID NO: 20156 - RNA, 22 nt, Artificial Sequence
  GATA2 Guide RNA
ccaaagcagugucuccugaccc

SEQ ID NO: 20157 - RNA, 22 nt, Artificial Sequence
  GATA2 Guide RNA
ccacccaaagcagugucuccug

SEQ ID NO: 20158 - RNA, 22 nt, Artificial Sequence
  GATA2 Guide RNA
ccacccacgccacccaaagcag

SEQ ID NO: 20159 - RNA, 22 nt, Artificial Sequence
  GATA2 Guide RNA
ccacgccacccaaagcaguguc

SEQ ID NO: 20160 - RNA, 22 nt, Artificial Sequence
  GATA2 Guide RNA
cccaaagcagugucuccugacc

SEQ ID NO: 20161 - RNA, 22 nt, Artificial Sequence
  GATA2 Guide RNA
cccacccacgccacccaaagca

SEQ ID NO: 20162 - RNA, 22 nt, Artificial Sequence
  GATA2 Guide RNA
cccacgccacccaaagcagugu

SEQ ID NO: 20163 - RNA, 22 nt, Artificial Sequence
  GATA2 Guide RNA
cgccacccaaagcagugucucc

SEQ ID NO: 20164 - RNA, 22 nt, Artificial Sequence
  GATA2 Guide RNA
cuagggucaggagacacugcuu

SEQ ID NO: 20165 - RNA, 22 nt, Artificial Sequence
  GATA2 Guide RNA
cugcuuuggguggcgugggugg

SEQ ID NO: 20166 - RNA, 22 nt, Artificial Sequence
  GATA2 Guide RNA
gacacugcuuuggguggcgugg

SEQ ID NO: 20167 - RNA, 22 nt, Artificial Sequence
  GATA2 Guide RNA
gagacacugcuuuggguggcgu

SEQ ID NO: 20168 - RNA, 22 nt, Artificial Sequence
  GATA2 Guide RNA
gcagugucuccugacccuagca

SEQ ID NO: 20169 - RNA, 22 nt, Artificial Sequence
  GATA2 Guide RNA
gccacccaaagcagugucuccu

SEQ ID NO: 20170 - RNA, 22 nt, Artificial Sequence
  GATA2 Guide RNA
gcuagggucaggagacacugcu

SEQ ID NO: 20171 - RNA, 22 nt, Artificial Sequence
  GATA2 Guide RNA
gcuucccacccacgccacccaa

SEQ ID NO: 20172 - RNA, 22 nt, Artificial Sequence
  GATA2 Guide RNA
gcuuuggguggcguggguggga

SEQ ID NO: 20173 - RNA, 22 nt, Artificial Sequence
  GATA2 Guide RNA
ggagacacugcuuuggguggcg

SEQ ID NO: 20174 - RNA, 22 nt, Artificial Sequence
  GATA2 Guide RNA
ggcuucccacccacgccaccca

SEQ ID NO: 20175 - RNA, 22 nt, Artificial Sequence
  GATA2 Guide RNA
gggucaggagacacugcuuugg

SEQ ID NO: 20176 - RNA, 22 nt, Artificial Sequence
  GATA2 Guide RNA
ggucaggagacacugcuuuggg

SEQ ID NO: 20177 - RNA, 22 nt, Artificial Sequence
  GATA2 Guide RNA
ggugcuagggucaggagacacu

SEQ ID NO: 20178 - RNA, 22 nt, Artificial Sequence
  GATA2 Guide RNA
gucaggagacacugcuuugggu

SEQ ID NO: 20179 - RNA, 22 nt, Artificial Sequence
  GATA2 Guide RNA
gugcuagggucaggagacacug

SEQ ID NO: 20180 - RNA, 22 nt, Artificial Sequence
  GATA2 Guide RNA
uagggucaggagacacugcuuu

SEQ ID NO: 20181 - RNA, 22 nt, Artificial Sequence
  GATA2 Guide RNA
ucaggagacacugcuuugggug

SEQ ID NO: 20182 - RNA, 22 nt, Artificial Sequence
  GATA2 Guide RNA
ucccacccacgccacccaaagc

SEQ ID NO: 20183 - RNA, 22 nt, Artificial Sequence
  GATA2 Guide RNA
ugcuagggucaggagacacugc

SEQ ID NO: 20184 - RNA, 22 nt, Artificial Sequence
  GATA2 Guide RNA
ugcuuuggguggcguggguggg

SEQ ID NO: 20185 - RNA, 22 nt, Artificial Sequence
  GATA2 Guide RNA
uggugcuagggucaggagacac

SEQ ID NO: 20186 - RNA, 20 nt, Artificial Sequence
  GATA2 Guide RNA
acacuucuuuggauggcgug

SEQ ID NO: 20187 - RNA, 20 nt, Artificial Sequence
  GATA2 Guide RNA
acccacgccauccaaagaag

SEQ ID NO: 20188 - RNA, 20 nt, Artificial Sequence
  GATA2 Guide RNA
acgccauccaaagaaguguc

SEQ ID NO: 20189 - RNA, 20 nt, Artificial Sequence
  GATA2 Guide RNA
acuucuuuggauggcguggg

SEQ ID NO: 20190 - RNA, 20 nt, Artificial Sequence
  GATA2 Guide RNA
agacacuucuuuggauggcg

SEQ ID NO: 20191 - RNA, 20 nt, Artificial Sequence
  GATA2 Guide RNA
aggagacacuucuuuggaug

SEQ ID NO: 20192 - RNA, 20 nt, Artificial Sequence
  GATA2 Guide RNA
auccaaagaagugucuccug

SEQ ID NO: 20193 - RNA, 20 nt, Artificial Sequence
  GATA2 Guide RNA
auggcgugggugggaagccg

SEQ ID NO: 20194 - RNA, 20 nt, Artificial Sequence
  GATA2 Guide RNA
cacccacgccauccaaagaa

SEQ ID NO: 20195 - RNA, 20 nt, Artificial Sequence
  GATA2 Guide RNA
cacgccauccaaagaagugu

SEQ ID NO: 20196 - RNA, 20 nt, Artificial Sequence
  GATA2 Guide RNA
cacuucuuuggauggcgugg

SEQ ID NO: 20197 - RNA, 20 nt, Artificial Sequence
  GATA2 Guide RNA
caggagacacuucuuuggau

SEQ ID NO: 20198 - RNA, 20 nt, Artificial Sequence
  GATA2 Guide RNA
cauccaaagaagugucuccu

SEQ ID NO: 20199 - RNA, 20 nt, Artificial Sequence
  GATA2 Guide RNA
ccacccacgccauccaaaga

SEQ ID NO: 20200 - RNA, 20 nt, Artificial Sequence
  GATA2 Guide RNA
ccacgccauccaaagaagug

SEQ ID NO: 20201 - RNA, 20 nt, Artificial Sequence
  GATA2 Guide RNA
ccauccaaagaagugucucc

SEQ ID NO: 20202 - RNA, 20 nt, Artificial Sequence
  GATA2 Guide RNA
cccacccacgccauccaaag

SEQ ID NO: 20203 - RNA, 20 nt, Artificial Sequence
  GATA2 Guide RNA
cccacgccauccaaagaagu

SEQ ID NO: 20204 - RNA, 20 nt, Artificial Sequence
  GATA2 Guide RNA
cgccauccaaagaagugucu

SEQ ID NO: 20205 - RNA, 20 nt, Artificial Sequence
  GATA2 Guide RNA
cggcuucccacccacgccau

SEQ ID NO: 20206 - RNA, 20 nt, Artificial Sequence
  GATA2 Guide RNA
cuucccacccacgccaucca

SEQ ID NO: 20207 - RNA, 20 nt, Artificial Sequence
  GATA2 Guide RNA
cuucuuuggauggcgugggu

SEQ ID NO: 20208 - RNA, 20 nt, Artificial Sequence
  GATA2 Guide RNA
cuuuggauggcguggguggg

SEQ ID NO: 20209 - RNA, 20 nt, Artificial Sequence
  GATA2 Guide RNA
gacacuucuuuggauggcgu

SEQ ID NO: 20210 - RNA, 20 nt, Artificial Sequence
  GATA2 Guide RNA
gagacacuucuuuggauggc

SEQ ID NO: 20211 - RNA, 20 nt, Artificial Sequence
  GATA2 Guide RNA
gauggcgugggugggaagcc

SEQ ID NO: 20212 - RNA, 20 nt, Artificial Sequence
  GATA2 Guide RNA
gccauccaaagaagugucuc

SEQ ID NO: 20213 - RNA, 20 nt, Artificial Sequence
  GATA2 Guide RNA
gcuucccacccacgccaucc

SEQ ID NO: 20214 - RNA, 20 nt, Artificial Sequence
  GATA2 Guide RNA
ggagacacuucuuuggaugg

SEQ ID NO: 20215 - RNA, 20 nt, Artificial Sequence
  GATA2 Guide RNA
ggauggcgugggugggaagc

SEQ ID NO: 20216 - RNA, 20 nt, Artificial Sequence
  GATA2 Guide RNA
ggcuucccacccacgccauc

SEQ ID NO: 20217 - RNA, 20 nt, Artificial Sequence
  GATA2 Guide RNA
gggucaggagacacuucuuu

SEQ ID NO: 20218 - RNA, 20 nt, Artificial Sequence
  GATA2 Guide RNA
ggucaggagacacuucuuug

SEQ ID NO: 20219 - RNA, 20 nt, Artificial Sequence
  GATA2 Guide RNA
gucaggagacacuucuuugg

SEQ ID NO: 20220 - RNA, 20 nt, Artificial Sequence
  GATA2 Guide RNA
ucaggagacacuucuuugga

SEQ ID NO: 20221 - RNA, 20 nt, Artificial Sequence
  GATA2 Guide RNA
ucccacccacgccauccaaa

SEQ ID NO: 20222 - RNA, 20 nt, Artificial Sequence
  GATA2 Guide RNA
ucggcuucccacccacgcca

SEQ ID NO: 20223 - RNA, 20 nt, Artificial Sequence
  GATA2 Guide RNA
ucuuuggauggcgugggugg

SEQ ID NO: 20224 - RNA, 20 nt, Artificial Sequence
  GATA2 Guide RNA
uggauggcgugggugggaag

SEQ ID NO: 20225 - RNA, 20 nt, Artificial Sequence
  GATA2 Guide RNA
uucccacccacgccauccaa

SEQ ID NO: 20226 - RNA, 20 nt, Artificial Sequence
  GATA2 Guide RNA
uucggcuucccacccacgcc

SEQ ID NO: 20227 - RNA, 20 nt, Artificial Sequence
  GATA2 Guide RNA
uucuuuggauggcgugggug

SEQ ID NO: 20228 - RNA, 20 nt, Artificial Sequence
  GATA2 Guide RNA
uuggauggcgugggugggaa

SEQ ID NO: 20229 - RNA, 20 nt, Artificial Sequence
  GATA2 Guide RNA
uuucggcuucccacccacgc

SEQ ID NO: 20230 - RNA, 20 nt, Artificial Sequence
  GATA2 Guide RNA
uuuggauggcguggguggga

SEQ ID NO: 20231 - RNA, 20 nt, Artificial Sequence
  GATA2 Guide RNA
uuuucggcuucccacccacg

SEQ ID NO: 20232 - RNA, 21 nt, Artificial Sequence
  GATA2 Guide RNA
acacuucuuuggauggcgugg

SEQ ID NO: 20233 - RNA, 21 nt, Artificial Sequence
  GATA2 Guide RNA
acccacgccauccaaagaagu

SEQ ID NO: 20234 - RNA, 21 nt, Artificial Sequence
  GATA2 Guide RNA
acgccauccaaagaagugucu

SEQ ID NO: 20235 - RNA, 21 nt, Artificial Sequence
  GATA2 Guide RNA
acuucuuuggauggcgugggu

SEQ ID NO: 20236 - RNA, 21 nt, Artificial Sequence
  GATA2 Guide RNA
agacacuucuuuggauggcgu

SEQ ID NO: 20237 - RNA, 21 nt, Artificial Sequence
  GATA2 Guide RNA
aggagacacuucuuuggaugg

SEQ ID NO: 20238 - RNA, 21 nt, Artificial Sequence
  GATA2 Guide RNA
agggucaggagacacuucuuu

SEQ ID NO: 20239 - RNA, 21 nt, Artificial Sequence
  GATA2 Guide RNA
auccaaagaagugucuccuga

SEQ ID NO: 20240 - RNA, 21 nt, Artificial Sequence
  GATA2 Guide RNA
auggcgugggugggaagccga

SEQ ID NO: 20241 - RNA, 21 nt, Artificial Sequence
  GATA2 Guide RNA
cacccacgccauccaaagaag

SEQ ID NO: 20242 - RNA, 21 nt, Artificial Sequence
  GATA2 Guide RNA
cacgccauccaaagaaguguc

SEQ ID NO: 20243 - RNA, 21 nt, Artificial Sequence
  GATA2 Guide RNA
cacuucuuuggauggcguggg

SEQ ID NO: 20244 - RNA, 21 nt, Artificial Sequence
  GATA2 Guide RNA
caggagacacuucuuuggaug

SEQ ID NO: 20245 - RNA, 21 nt, Artificial Sequence
  GATA2 Guide RNA
cauccaaagaagugucuccug

SEQ ID NO: 20246 - RNA, 21 nt, Artificial Sequence
  GATA2 Guide RNA
ccacccacgccauccaaagaa

SEQ ID NO: 20247 - RNA, 21 nt, Artificial Sequence
  GATA2 Guide RNA
ccacgccauccaaagaagugu

SEQ ID NO: 20248 - RNA, 21 nt, Artificial Sequence
  GATA2 Guide RNA
ccauccaaagaagugucuccu

SEQ ID NO: 20249 - RNA, 21 nt, Artificial Sequence
  GATA2 Guide RNA
cccacccacgccauccaaaga

SEQ ID NO: 20250 - RNA, 21 nt, Artificial Sequence
  GATA2 Guide RNA
cccacgccauccaaagaagug

SEQ ID NO: 20251 - RNA, 21 nt, Artificial Sequence
  GATA2 Guide RNA
cgccauccaaagaagugucuc

SEQ ID NO: 20252 - RNA, 21 nt, Artificial Sequence
  GATA2 Guide RNA
cggcuucccacccacgccauc

SEQ ID NO: 20253 - RNA, 21 nt, Artificial Sequence
  GATA2 Guide RNA
cuucccacccacgccauccaa

SEQ ID NO: 20254 - RNA, 21 nt, Artificial Sequence
  GATA2 Guide RNA
cuucuuuggauggcgugggug

SEQ ID NO: 20255 - RNA, 21 nt, Artificial Sequence
  GATA2 Guide RNA
cuuuggauggcguggguggga

SEQ ID NO: 20256 - RNA, 21 nt, Artificial Sequence
  GATA2 Guide RNA
cuuuucggcuucccacccacg

SEQ ID NO: 20257 - RNA, 21 nt, Artificial Sequence
  GATA2 Guide RNA
gacacuucuuuggauggcgug

SEQ ID NO: 20258 - RNA, 21 nt, Artificial Sequence
  GATA2 Guide RNA
gagacacuucuuuggauggcg

SEQ ID NO: 20259 - RNA, 21 nt, Artificial Sequence
  GATA2 Guide RNA
gauggcgugggugggaagccg

SEQ ID NO: 20260 - RNA, 21 nt, Artificial Sequence
  GATA2 Guide RNA
gccauccaaagaagugucucc

SEQ ID NO: 20261 - RNA, 21 nt, Artificial Sequence
  GATA2 Guide RNA
gcuucccacccacgccaucca

SEQ ID NO: 20262 - RNA, 21 nt, Artificial Sequence
  GATA2 Guide RNA
ggagacacuucuuuggauggc

SEQ ID NO: 20263 - RNA, 21 nt, Artificial Sequence
  GATA2 Guide RNA
ggauggcgugggugggaagcc

SEQ ID NO: 20264 - RNA, 21 nt, Artificial Sequence
  GATA2 Guide RNA
ggcuucccacccacgccaucc

SEQ ID NO: 20265 - RNA, 21 nt, Artificial Sequence
  GATA2 Guide RNA
gggucaggagacacuucuuug

SEQ ID NO: 20266 - RNA, 21 nt, Artificial Sequence
  GATA2 Guide RNA
ggucaggagacacuucuuugg

SEQ ID NO: 20267 - RNA, 21 nt, Artificial Sequence
  GATA2 Guide RNA
gucaggagacacuucuuugga

SEQ ID NO: 20268 - RNA, 21 nt, Artificial Sequence
  GATA2 Guide RNA
ucaggagacacuucuuuggau

SEQ ID NO: 20269 - RNA, 21 nt, Artificial Sequence
  GATA2 Guide RNA
ucccacccacgccauccaaag

SEQ ID NO: 20270 - RNA, 21 nt, Artificial Sequence
  GATA2 Guide RNA
ucggcuucccacccacgccau

SEQ ID NO: 20271 - RNA, 21 nt, Artificial Sequence
  GATA2 Guide RNA
ucuuuggauggcguggguggg

SEQ ID NO: 20272 - RNA, 21 nt, Artificial Sequence
  GATA2 Guide RNA
uggauggcgugggugggaagc

SEQ ID NO: 20273 - RNA, 21 nt, Artificial Sequence
  GATA2 Guide RNA
uucccacccacgccauccaaa

SEQ ID NO: 20274 - RNA, 21 nt, Artificial Sequence
  GATA2 Guide RNA
uucggcuucccacccacgcca

SEQ ID NO: 20275 - RNA, 21 nt, Artificial Sequence
  GATA2 Guide RNA
uucuuuggauggcgugggugg

SEQ ID NO: 20276 - RNA, 21 nt, Artificial Sequence
  GATA2 Guide RNA
uuggauggcgugggugggaag

SEQ ID NO: 20277 - RNA, 21 nt, Artificial Sequence
  GATA2 Guide RNA
uuucggcuucccacccacgcc

SEQ ID NO: 20278 - RNA, 21 nt, Artificial Sequence
  GATA2 Guide RNA
uuuggauggcgugggugggaa

SEQ ID NO: 20279 - RNA, 21 nt, Artificial Sequence
  GATA2 Guide RNA
uuuucggcuucccacccacgc

SEQ ID NO: 20280 - RNA, 22 nt, Artificial Sequence
  GATA2 Guide RNA
acacuucuuuggauggcguggg

SEQ ID NO: 20281 - RNA, 22 nt, Artificial Sequence
  GATA2 Guide RNA
acccacgccauccaaagaagug

SEQ ID NO: 20282 - RNA, 22 nt, Artificial Sequence
  GATA2 Guide RNA
acgccauccaaagaagugucuc

SEQ ID NO: 20283 - RNA, 22 nt, Artificial Sequence
  GATA2 Guide RNA
acuucuuuggauggcgugggug

SEQ ID NO: 20284 - RNA, 22 nt, Artificial Sequence
  GATA2 Guide RNA
agacacuucuuuggauggcgug

SEQ ID NO: 20285 - RNA, 22 nt, Artificial Sequence
  GATA2 Guide RNA
aggagacacuucuuuggauggc

SEQ ID NO: 20286 - RNA, 22 nt, Artificial Sequence
  GATA2 Guide RNA
agggucaggagacacuucuuug

SEQ ID NO: 20287 - RNA, 22 nt, Artificial Sequence
  GATA2 Guide RNA
auccaaagaagugucuccugac

SEQ ID NO: 20288 - RNA, 22 nt, Artificial Sequence
  GATA2 Guide RNA
auggcgugggugggaagccgaa

SEQ ID NO: 20289 - RNA, 22 nt, Artificial Sequence
  GATA2 Guide RNA
cacccacgccauccaaagaagu

SEQ ID NO: 20290 - RNA, 22 nt, Artificial Sequence
  GATA2 Guide RNA
cacgccauccaaagaagugucu

SEQ ID NO: 20291 - RNA, 22 nt, Artificial Sequence
  GATA2 Guide RNA
cacuucuuuggauggcgugggu

SEQ ID NO: 20292 - RNA, 22 nt, Artificial Sequence
  GATA2 Guide RNA
caggagacacuucuuuggaugg

SEQ ID NO: 20293 - RNA, 22 nt, Artificial Sequence
  GATA2 Guide RNA
cauccaaagaagugucuccuga

SEQ ID NO: 20294 - RNA, 22 nt, Artificial Sequence
  GATA2 Guide RNA
ccacccacgccauccaaagaag

SEQ ID NO: 20295 - RNA, 22 nt, Artificial Sequence
  GATA2 Guide RNA
ccacgccauccaaagaaguguc

SEQ ID NO: 20296 - RNA, 22 nt, Artificial Sequence
  GATA2 Guide RNA
ccauccaaagaagugucuccug

SEQ ID NO: 20297 - RNA, 22 nt, Artificial Sequence
  GATA2 Guide RNA
cccacccacgccauccaaagaa

SEQ ID NO: 20298 - RNA, 22 nt, Artificial Sequence
  GATA2 Guide RNA
cccacgccauccaaagaagugu

SEQ ID NO: 20299 - RNA, 22 nt, Artificial Sequence
  GATA2 Guide RNA
ccuuuucggcuucccacccacg

SEQ ID NO: 20300 - RNA, 22 nt, Artificial Sequence
  GATA2 Guide RNA
cgccauccaaagaagugucucc

SEQ ID NO: 20301 - RNA, 22 nt, Artificial Sequence
  GATA2 Guide RNA
cggcuucccacccacgccaucc

SEQ ID NO: 20302 - RNA, 22 nt, Artificial Sequence
  GATA2 Guide RNA
cuucccacccacgccauccaaa

SEQ ID NO: 20303 - RNA, 22 nt, Artificial Sequence
  GATA2 Guide RNA
cuucuuuggauggcgugggugg

SEQ ID NO: 20304 - RNA, 22 nt, Artificial Sequence
  GATA2 Guide RNA
cuuuggauggcgugggugggaa

SEQ ID NO: 20305 - RNA, 22 nt, Artificial Sequence
  GATA2 Guide RNA
cuuuucggcuucccacccacgc

SEQ ID NO: 20306 - RNA, 22 nt, Artificial Sequence
  GATA2 Guide RNA
gacacuucuuuggauggcgugg

SEQ ID NO: 20307 - RNA, 22 nt, Artificial Sequence
  GATA2 Guide RNA
gagacacuucuuuggauggcgu

SEQ ID NO: 20308 - RNA, 22 nt, Artificial Sequence
  GATA2 Guide RNA
gauggcgugggugggaagccga

SEQ ID NO: 20309 - RNA, 22 nt, Artificial Sequence
  GATA2 Guide RNA
gccauccaaagaagugucuccu

SEQ ID NO: 20310 - RNA, 22 nt, Artificial Sequence
  GATA2 Guide RNA
gcuucccacccacgccauccaa

SEQ ID NO: 20311 - RNA, 22 nt, Artificial Sequence
  GATA2 Guide RNA
ggagacacuucuuuggauggcg

SEQ ID NO: 20312 - RNA, 22 nt, Artificial Sequence
  GATA2 Guide RNA
ggauggcgugggugggaagccg

SEQ ID NO: 20313 - RNA, 22 nt, Artificial Sequence
  GATA2 Guide RNA
ggcuucccacccacgccaucca

SEQ ID NO: 20314 - RNA, 22 nt, Artificial Sequence
  GATA2 Guide RNA
gggucaggagacacuucuuugg

SEQ ID NO: 20315 - RNA, 22 nt, Artificial Sequence
  GATA2 Guide RNA
ggucaggagacacuucuuugga

SEQ ID NO: 20316 - RNA, 22 nt, Artificial Sequence
  GATA2 Guide RNA
gucaggagacacuucuuuggau

SEQ ID NO: 20317 - RNA, 22 nt, Artificial Sequence
  GATA2 Guide RNA
uagggucaggagacacuucuuu

SEQ ID NO: 20318 - RNA, 22 nt, Artificial Sequence
  GATA2 Guide RNA
ucaggagacacuucuuuggaug

SEQ ID NO: 20319 - RNA, 22 nt, Artificial Sequence
  GATA2 Guide RNA
ucccacccacgccauccaaaga

SEQ ID NO: 20320 - RNA, 22 nt, Artificial Sequence
  GATA2 Guide RNA
ucggcuucccacccacgccauc

SEQ ID NO: 20321 - RNA, 22 nt, Artificial Sequence
  GATA2 Guide RNA
ucuuuggauggcguggguggga

SEQ ID NO: 20322 - RNA, 22 nt, Artificial Sequence
  GATA2 Guide RNA
uggauggcgugggugggaagcc

SEQ ID NO: 20323 - RNA, 22 nt, Artificial Sequence
  GATA2 Guide RNA
uucccacccacgccauccaaag

SEQ ID NO: 20324 - RNA, 22 nt, Artificial Sequence
  GATA2 Guide RNA
uucggcuucccacccacgccau

SEQ ID NO: 20325 - RNA, 22 nt, Artificial Sequence
  GATA2 Guide RNA
uucuuuggauggcguggguggg

SEQ ID NO: 20326 - RNA, 22 nt, Artificial Sequence
  GATA2 Guide RNA
uuggauggcgugggugggaagc

SEQ ID NO: 20327 - RNA, 22 nt, Artificial Sequence
  GATA2 Guide RNA
uuucggcuucccacccacgcca

SEQ ID NO: 20328 - RNA, 22 nt, Artificial Sequence
  GATA2 Guide RNA
uuuggauggcgugggugggaag

SEQ ID NO: 20329 - RNA, 22 nt, Artificial Sequence
  GATA2 Guide RNA
uuuucggcuucccacccacgcc

SEQ ID NO: 20330 - RNA, 20 nt, Artificial Sequence
  GATA2 Guide RNA
acacuucuuuggguggcggg

SEQ ID NO: 20331 - RNA, 20 nt, Artificial Sequence
  GATA2 Guide RNA
acccccgccacccaaagaag

SEQ ID NO: 20332 - RNA, 20 nt, Artificial Sequence
  GATA2 Guide RNA
accuuuucggcuucccaccc

SEQ ID NO: 20333 - RNA, 20 nt, Artificial Sequence
  GATA2 Guide RNA
acuucuuuggguggcggggg

SEQ ID NO: 20334 - RNA, 20 nt, Artificial Sequence
  GATA2 Guide RNA
agacacuucuuuggguggcg

SEQ ID NO: 20335 - RNA, 20 nt, Artificial Sequence
  GATA2 Guide RNA
cacccccgccacccaaagaa

SEQ ID NO: 20336 - RNA, 20 nt, Artificial Sequence
  GATA2 Guide RNA
caccuuuucggcuucccacc

SEQ ID NO: 20337 - RNA, 20 nt, Artificial Sequence
  GATA2 Guide RNA
cacuucuuuggguggcgggg

SEQ ID NO: 20338 - RNA, 20 nt, Artificial Sequence
  GATA2 Guide RNA
ccacccccgccacccaaaga

SEQ ID NO: 20339 - RNA, 20 nt, Artificial Sequence
  GATA2 Guide RNA
ccaccuuuucggcuucccac

SEQ ID NO: 20340 - RNA, 20 nt, Artificial Sequence
  GATA2 Guide RNA
cccacccccgccacccaaag

SEQ ID NO: 20341 - RNA, 20 nt, Artificial Sequence
  GATA2 Guide RNA
cccaccuuuucggcuuccca

SEQ ID NO: 20342 - RNA, 20 nt, Artificial Sequence
  GATA2 Guide RNA
cccccgccacccaaagaagu

SEQ ID NO: 20343 - RNA, 20 nt, Artificial Sequence
  GATA2 Guide RNA
ccccgccacccaaagaagug

SEQ ID NO: 20344 - RNA, 20 nt, Artificial Sequence
  GATA2 Guide RNA
cccgccacccaaagaagugu

SEQ ID NO: 20345 - RNA, 20 nt, Artificial Sequence
  GATA2 Guide RNA
ccuuuucggcuucccacccc

SEQ ID NO: 20346 - RNA, 20 nt, Artificial Sequence
  GATA2 Guide RNA
cggcuucccacccccgccac

SEQ ID NO: 20347 - RNA, 20 nt, Artificial Sequence
  GATA2 Guide RNA
cgggggugggaagccgaaaa

SEQ ID NO: 20348 - RNA, 20 nt, Artificial Sequence
  GATA2 Guide RNA
cuucccacccccgccaccca

SEQ ID NO: 20349 - RNA, 20 nt, Artificial Sequence
  GATA2 Guide RNA
cuucuuuggguggcgggggu

SEQ ID NO: 20350 - RNA, 20 nt, Artificial Sequence
  GATA2 Guide RNA
cuuuggguggcggggguggg

SEQ ID NO: 20351 - RNA, 20 nt, Artificial Sequence
  GATA2 Guide RNA
cuuuucggcuucccaccccc

SEQ ID NO: 20352 - RNA, 20 nt, Artificial Sequence
  GATA2 Guide RNA
gacacuucuuuggguggcgg

SEQ ID NO: 20353 - RNA, 20 nt, Artificial Sequence
  GATA2 Guide RNA
gagacacuucuuuggguggc

SEQ ID NO: 20354 - RNA, 20 nt, Artificial Sequence
  GATA2 Guide RNA
gcgggggugggaagccgaaa

SEQ ID NO: 20355 - RNA, 20 nt, Artificial Sequence
  GATA2 Guide RNA
gcuucccacccccgccaccc

SEQ ID NO: 20356 - RNA, 20 nt, Artificial Sequence
  GATA2 Guide RNA
ggagacacuucuuugggugg

SEQ ID NO: 20357 - RNA, 20 nt, Artificial Sequence
  GATA2 Guide RNA
ggcgggggugggaagccgaa

SEQ ID NO: 20358 - RNA, 20 nt, Artificial Sequence
  GATA2 Guide RNA
ggcuucccacccccgccacc

SEQ ID NO: 20359 - RNA, 20 nt, Artificial Sequence
  GATA2 Guide RNA
gggggugggaagccgaaaag

SEQ ID NO: 20360 - RNA, 20 nt, Artificial Sequence
  GATA2 Guide RNA
ggggugggaagccgaaaagg

SEQ ID NO: 20361 - RNA, 20 nt, Artificial Sequence
  GATA2 Guide RNA
ggguggcgggggugggaagc

SEQ ID NO: 20362 - RNA, 20 nt, Artificial Sequence
  GATA2 Guide RNA
gguggcgggggugggaagcc

SEQ ID NO: 20363 - RNA, 20 nt, Artificial Sequence
  GATA2 Guide RNA
guggcgggggugggaagccg

SEQ ID NO: 20364 - RNA, 20 nt, Artificial Sequence
  GATA2 Guide RNA
ucccacccccgccacccaaa

SEQ ID NO: 20365 - RNA, 20 nt, Artificial Sequence
  GATA2 Guide RNA
ucggcuucccacccccgcca

SEQ ID NO: 20366 - RNA, 20 nt, Artificial Sequence
  GATA2 Guide RNA
ucuuuggguggcgggggugg

SEQ ID NO: 20367 - RNA, 20 nt, Artificial Sequence
  GATA2 Guide RNA
uggcgggggugggaagccga

SEQ ID NO: 20368 - RNA, 20 nt, Artificial Sequence
  GATA2 Guide RNA
uggguggcgggggugggaag

SEQ ID NO: 20369 - RNA, 20 nt, Artificial Sequence
  GATA2 Guide RNA
uucccacccccgccacccaa

SEQ ID NO: 20370 - RNA, 20 nt, Artificial Sequence
  GATA2 Guide RNA
uucggcuucccacccccgcc

SEQ ID NO: 20371 - RNA, 20 nt, Artificial Sequence
  GATA2 Guide RNA
uucuuuggguggcgggggug

SEQ ID NO: 20372 - RNA, 20 nt, Artificial Sequence
  GATA2 Guide RNA
uuggguggcgggggugggaa

SEQ ID NO: 20373 - RNA, 20 nt, Artificial Sequence
  GATA2 Guide RNA
uuucggcuucccacccccgc

SEQ ID NO: 20374 - RNA, 20 nt, Artificial Sequence
  GATA2 Guide RNA
uuuggguggcggggguggga

SEQ ID NO: 20375 - RNA, 20 nt, Artificial Sequence
  GATA2 Guide RNA
uuuucggcuucccacccccg

SEQ ID NO: 20376 - RNA, 21 nt, Artificial Sequence
  GATA2 Guide RNA
acacuucuuuggguggcgggg

SEQ ID NO: 20377 - RNA, 21 nt, Artificial Sequence
  GATA2 Guide RNA
acccccgccacccaaagaagu

SEQ ID NO: 20378 - RNA, 21 nt, Artificial Sequence
  GATA2 Guide RNA
accuuuucggcuucccacccc

SEQ ID NO: 20379 - RNA, 21 nt, Artificial Sequence
  GATA2 Guide RNA
acuucuuuggguggcgggggu

SEQ ID NO: 20380 - RNA, 21 nt, Artificial Sequence
  GATA2 Guide RNA
agacacuucuuuggguggcgg

SEQ ID NO: 20381 - RNA, 21 nt, Artificial Sequence
  GATA2 Guide RNA
aggagacacuucuuugggugg

SEQ ID NO: 20382 - RNA, 21 nt, Artificial Sequence
  GATA2 Guide RNA
cacccccgccacccaaagaag

SEQ ID NO: 20383 - RNA, 21 nt, Artificial Sequence
  GATA2 Guide RNA
caccuuuucggcuucccaccc

SEQ ID NO: 20384 - RNA, 21 nt, Artificial Sequence
  GATA2 Guide RNA
cacuucuuuggguggcggggg

SEQ ID NO: 20385 - RNA, 21 nt, Artificial Sequence
  GATA2 Guide RNA
ccacccccgccacccaaagaa

SEQ ID NO: 20386 - RNA, 21 nt, Artificial Sequence
  GATA2 Guide RNA
ccaccuuuucggcuucccacc

SEQ ID NO: 20387 - RNA, 21 nt, Artificial Sequence
  GATA2 Guide RNA
cccacccccgccacccaaaga

SEQ ID NO: 20388 - RNA, 21 nt, Artificial Sequence
  GATA2 Guide RNA
cccaccuuuucggcuucccac

SEQ ID NO: 20389 - RNA, 21 nt, Artificial Sequence
  GATA2 Guide RNA
cccccgccacccaaagaagug

SEQ ID NO: 20390 - RNA, 21 nt, Artificial Sequence
  GATA2 Guide RNA
ccccgccacccaaagaagugu

SEQ ID NO: 20391 - RNA, 21 nt, Artificial Sequence
  GATA2 Guide RNA
cccgccacccaaagaaguguc

SEQ ID NO: 20392 - RNA, 21 nt, Artificial Sequence
  GATA2 Guide RNA
ccuuuucggcuucccaccccc

SEQ ID NO: 20393 - RNA, 21 nt, Artificial Sequence
  GATA2 Guide RNA
cgggggugggaagccgaaaag

SEQ ID NO: 20394 - RNA, 21 nt, Artificial Sequence
  GATA2 Guide RNA
cuucccacccccgccacccaa

SEQ ID NO: 20395 - RNA, 21 nt, Artificial Sequence
  GATA2 Guide RNA
cuucuuuggguggcgggggug

SEQ ID NO: 20396 - RNA, 21 nt, Artificial Sequence
  GATA2 Guide RNA
cuuuggguggcggggguggga

SEQ ID NO: 20397 - RNA, 21 nt, Artificial Sequence
  GATA2 Guide RNA
cuuuucggcuucccacccccg

SEQ ID NO: 20398 - RNA, 21 nt, Artificial Sequence
  GATA2 Guide RNA
gacacuucuuuggguggcggg

SEQ ID NO: 20399 - RNA, 21 nt, Artificial Sequence
  GATA2 Guide RNA
gagacacuucuuuggguggcg

SEQ ID NO: 20400 - RNA, 21 nt, Artificial Sequence
  GATA2 Guide RNA
gcgggggugggaagccgaaaa

SEQ ID NO: 20401 - RNA, 21 nt, Artificial Sequence
  GATA2 Guide RNA
gcuucccacccccgccaccca

SEQ ID NO: 20402 - RNA, 21 nt, Artificial Sequence
  GATA2 Guide RNA
ggagacacuucuuuggguggc

SEQ ID NO: 20403 - RNA, 21 nt, Artificial Sequence
  GATA2 Guide RNA
ggcgggggugggaagccgaaa

SEQ ID NO: 20404 - RNA, 21 nt, Artificial Sequence
  GATA2 Guide RNA
gggggugggaagccgaaaagg

SEQ ID NO: 20405 - RNA, 21 nt, Artificial Sequence
  GATA2 Guide RNA
ggggugggaagccgaaaaggu

SEQ ID NO: 20406 - RNA, 21 nt, Artificial Sequence
  GATA2 Guide RNA
guggcgggggugggaagccga

SEQ ID NO: 20407 - RNA, 21 nt, Artificial Sequence
  GATA2 Guide RNA
ucccacccccgccacccaaag

SEQ ID NO: 20408 - RNA, 21 nt, Artificial Sequence
  GATA2 Guide RNA
ucccaccuuuucggcuuccca

SEQ ID NO: 20409 - RNA, 21 nt, Artificial Sequence
  GATA2 Guide RNA
ucggcuucccacccccgccac

SEQ ID NO: 20410 - RNA, 21 nt, Artificial Sequence
  GATA2 Guide RNA
ucuuuggguggcggggguggg

SEQ ID NO: 20411 - RNA, 21 nt, Artificial Sequence
  GATA2 Guide RNA
uggcgggggugggaagccgaa

SEQ ID NO: 20412 - RNA, 21 nt, Artificial Sequence
  GATA2 Guide RNA
uggguggcgggggugggaagc

SEQ ID NO: 20413 - RNA, 21 nt, Artificial Sequence
  GATA2 Guide RNA
uucccacccccgccacccaaa

SEQ ID NO: 20414 - RNA, 21 nt, Artificial Sequence
  GATA2 Guide RNA
uucggcuucccacccccgcca

SEQ ID NO: 20415 - RNA, 21 nt, Artificial Sequence
  GATA2 Guide RNA
uucuuuggguggcgggggugg

SEQ ID NO: 20416 - RNA, 21 nt, Artificial Sequence
  GATA2 Guide RNA
uuggguggcgggggugggaag

SEQ ID NO: 20417 - RNA, 21 nt, Artificial Sequence
  GATA2 Guide RNA
uuucggcuucccacccccgcc

SEQ ID NO: 20418 - RNA, 21 nt, Artificial Sequence
  GATA2 Guide RNA
uuuggguggcgggggugggaa

SEQ ID NO: 20419 - RNA, 21 nt, Artificial Sequence
  GATA2 Guide RNA
uuuucggcuucccacccccgc

SEQ ID NO: 20420 - RNA, 22 nt, Artificial Sequence
  GATA2 Guide RNA
acacuucuuuggguggcggggg

SEQ ID NO: 20421 - RNA, 22 nt, Artificial Sequence
  GATA2 Guide RNA
acccccgccacccaaagaagug

SEQ ID NO: 20422 - RNA, 22 nt, Artificial Sequence
  GATA2 Guide RNA
accuuuucggcuucccaccccc

SEQ ID NO: 20423 - RNA, 22 nt, Artificial Sequence
  GATA2 Guide RNA
acuucuuuggguggcgggggug

SEQ ID NO: 20424 - RNA, 22 nt, Artificial Sequence
  GATA2 Guide RNA
agacacuucuuuggguggcggg

SEQ ID NO: 20425 - RNA, 22 nt, Artificial Sequence
  GATA2 Guide RNA
aggagacacuucuuuggguggc

SEQ ID NO: 20426 - RNA, 22 nt, Artificial Sequence
  GATA2 Guide RNA
cacccccgccacccaaagaagu

SEQ ID NO: 20427 - RNA, 22 nt, Artificial Sequence
  GATA2 Guide RNA
caccuuuucggcuucccacccc

SEQ ID NO: 20428 - RNA, 22 nt, Artificial Sequence
  GATA2 Guide RNA
cacuucuuuggguggcgggggu

SEQ ID NO: 20429 - RNA, 22 nt, Artificial Sequence
  GATA2 Guide RNA
caggagacacuucuuugggugg

SEQ ID NO: 20430 - RNA, 22 nt, Artificial Sequence
  GATA2 Guide RNA
ccacccccgccacccaaagaag

SEQ ID NO: 20431 - RNA, 22 nt, Artificial Sequence
  GATA2 Guide RNA
ccaccuuuucggcuucccaccc

SEQ ID NO: 20432 - RNA, 22 nt, Artificial Sequence
  GATA2 Guide RNA
cccacccccgccacccaaagaa

SEQ ID NO: 20433 - RNA, 22 nt, Artificial Sequence
  GATA2 Guide RNA
cccaccuuuucggcuucccacc

SEQ ID NO: 20434 - RNA, 22 nt, Artificial Sequence
  GATA2 Guide RNA
cccccgccacccaaagaagugu

SEQ ID NO: 20435 - RNA, 22 nt, Artificial Sequence
  GATA2 Guide RNA
ccccgccacccaaagaaguguc

SEQ ID NO: 20436 - RNA, 22 nt, Artificial Sequence
  GATA2 Guide RNA
cccgccacccaaagaagugucu

SEQ ID NO: 20437 - RNA, 22 nt, Artificial Sequence
  GATA2 Guide RNA
ccuuuucggcuucccacccccg

SEQ ID NO: 20438 - RNA, 22 nt, Artificial Sequence
  GATA2 Guide RNA
cgggggugggaagccgaaaagg

SEQ ID NO: 20439 - RNA, 22 nt, Artificial Sequence
  GATA2 Guide RNA
cucccaccuuuucggcuuccca

SEQ ID NO: 20440 - RNA, 22 nt, Artificial Sequence
  GATA2 Guide RNA
cuucccacccccgccacccaaa

SEQ ID NO: 20441 - RNA, 22 nt, Artificial Sequence
  GATA2 Guide RNA
cuucuuuggguggcgggggugg

SEQ ID NO: 20442 - RNA, 22 nt, Artificial Sequence
  GATA2 Guide RNA
cuuuggguggcgggggugggaa

SEQ ID NO: 20443 - RNA, 22 nt, Artificial Sequence
  GATA2 Guide RNA
cuuuucggcuucccacccccgc

SEQ ID NO: 20444 - RNA, 22 nt, Artificial Sequence
  GATA2 Guide RNA
gacacuucuuuggguggcgggg

SEQ ID NO: 20445 - RNA, 22 nt, Artificial Sequence
  GATA2 Guide RNA
gagacacuucuuuggguggcgg

SEQ ID NO: 20446 - RNA, 22 nt, Artificial Sequence
  GATA2 Guide RNA
gcgggggugggaagccgaaaag

SEQ ID NO: 20447 - RNA, 22 nt, Artificial Sequence
  GATA2 Guide RNA
gcuucccacccccgccacccaa

SEQ ID NO: 20448 - RNA, 22 nt, Artificial Sequence
  GATA2 Guide RNA
ggagacacuucuuuggguggcg

SEQ ID NO: 20449 - RNA, 22 nt, Artificial Sequence
  GATA2 Guide RNA
ggcgggggugggaagccgaaaa

SEQ ID NO: 20450 - RNA, 22 nt, Artificial Sequence
  GATA2 Guide RNA
ggcuucccacccccgccaccca

SEQ ID NO: 20451 - RNA, 22 nt, Artificial Sequence
  GATA2 Guide RNA
gggggugggaagccgaaaaggu

SEQ ID NO: 20452 - RNA, 22 nt, Artificial Sequence
  GATA2 Guide RNA
ggggugggaagccgaaaaggug

SEQ ID NO: 20453 - RNA, 22 nt, Artificial Sequence
  GATA2 Guide RNA
gguggcgggggugggaagccga

SEQ ID NO: 20454 - RNA, 22 nt, Artificial Sequence
  GATA2 Guide RNA
guggcgggggugggaagccgaa

SEQ ID NO: 20455 - RNA, 22 nt, Artificial Sequence
  GATA2 Guide RNA
ucccacccccgccacccaaaga

SEQ ID NO: 20456 - RNA, 22 nt, Artificial Sequence
  GATA2 Guide RNA
ucccaccuuuucggcuucccac

SEQ ID NO: 20457 - RNA, 22 nt, Artificial Sequence
  GATA2 Guide RNA
ucggcuucccacccccgccacc

SEQ ID NO: 20458 - RNA, 22 nt, Artificial Sequence
  GATA2 Guide RNA
ucuuuggguggcggggguggga

SEQ ID NO: 20459 - RNA, 22 nt, Artificial Sequence
  GATA2 Guide RNA
uggcgggggugggaagccgaaa

SEQ ID NO: 20460 - RNA, 22 nt, Artificial Sequence
  GATA2 Guide RNA
uggguggcgggggugggaagcc

SEQ ID NO: 20461 - RNA, 22 nt, Artificial Sequence
  GATA2 Guide RNA
uucccacccccgccacccaaag

SEQ ID NO: 20462 - RNA, 22 nt, Artificial Sequence
  GATA2 Guide RNA
uucggcuucccacccccgccac

SEQ ID NO: 20463 - RNA, 22 nt, Artificial Sequence
  GATA2 Guide RNA
uucuuuggguggcggggguggg

SEQ ID NO: 20464 - RNA, 22 nt, Artificial Sequence
  GATA2 Guide RNA
uuggguggcgggggugggaagc

SEQ ID NO: 20465 - RNA, 22 nt, Artificial Sequence
  GATA2 Guide RNA
uuucggcuucccacccccgcca

SEQ ID NO: 20466 - RNA, 22 nt, Artificial Sequence
  GATA2 Guide RNA
uuuggguggcgggggugggaag

SEQ ID NO: 20467 - RNA, 22 nt, Artificial Sequence
  GATA2 Guide RNA
uuuucggcuucccacccccgcc

SEQ ID NO: 20468 - RNA, 20 nt, Artificial Sequence
  GATA2 Guide RNA
acacuucuuuggguggcgug

SEQ ID NO: 20469 - RNA, 20 nt, Artificial Sequence
  GATA2 Guide RNA
accuuuucggcuucccaucc

SEQ ID NO: 20470 - RNA, 20 nt, Artificial Sequence
  GATA2 Guide RNA
acuucuuuggguggcgugga

SEQ ID NO: 20471 - RNA, 20 nt, Artificial Sequence
  GATA2 Guide RNA
auccacgccacccaaagaag

SEQ ID NO: 20472 - RNA, 20 nt, Artificial Sequence
  GATA2 Guide RNA
augggaagccgaaaaggugg

SEQ ID NO: 20473 - RNA, 20 nt, Artificial Sequence
  GATA2 Guide RNA
caccuuuucggcuucccauc

SEQ ID NO: 20474 - RNA, 20 nt, Artificial Sequence
  GATA2 Guide RNA
cacuucuuuggguggcgugg

SEQ ID NO: 20475 - RNA, 20 nt, Artificial Sequence
  GATA2 Guide RNA
cauccacgccacccaaagaa

SEQ ID NO: 20476 - RNA, 20 nt, Artificial Sequence
  GATA2 Guide RNA
ccaccuuuucggcuucccau

SEQ ID NO: 20477 - RNA, 20 nt, Artificial Sequence
  GATA2 Guide RNA
ccauccacgccacccaaaga

SEQ ID NO: 20478 - RNA, 20 nt, Artificial Sequence
  GATA2 Guide RNA
cccauccacgccacccaaag

SEQ ID NO: 20479 - RNA, 20 nt, Artificial Sequence
  GATA2 Guide RNA
ccuuuucggcuucccaucca

SEQ ID NO: 20480 - RNA, 20 nt, Artificial Sequence
  GATA2 Guide RNA
cggcuucccauccacgccac

SEQ ID NO: 20481 - RNA, 20 nt, Artificial Sequence
  GATA2 Guide RNA
cguggaugggaagccgaaaa

SEQ ID NO: 20482 - RNA, 20 nt, Artificial Sequence
  GATA2 Guide RNA
cucccaccuuuucggcuucc

SEQ ID NO: 20483 - RNA, 20 nt, Artificial Sequence
  GATA2 Guide RNA
cuucccauccacgccaccca

SEQ ID NO: 20484 - RNA, 20 nt, Artificial Sequence
  GATA2 Guide RNA
cuucuuuggguggcguggau

SEQ ID NO: 20485 - RNA, 20 nt, Artificial Sequence
  GATA2 Guide RNA
cuuuggguggcguggauggg

SEQ ID NO: 20486 - RNA, 20 nt, Artificial Sequence
  GATA2 Guide RNA
cuuuucggcuucccauccac

SEQ ID NO: 20487 - RNA, 20 nt, Artificial Sequence
  GATA2 Guide RNA
gacacuucuuuggguggcgu

SEQ ID NO: 20488 - RNA, 20 nt, Artificial Sequence
  GATA2 Guide RNA
gaugggaagccgaaaaggug

SEQ ID NO: 20489 - RNA, 20 nt, Artificial Sequence
  GATA2 Guide RNA
gcguggaugggaagccgaaa

SEQ ID NO: 20490 - RNA, 20 nt, Artificial Sequence
  GATA2 Guide RNA
gcucccaccuuuucggcuuc

SEQ ID NO: 20491 - RNA, 20 nt, Artificial Sequence
  GATA2 Guide RNA
gcuucccauccacgccaccc

SEQ ID NO: 20492 - RNA, 20 nt, Artificial Sequence
  GATA2 Guide RNA
ggaugggaagccgaaaaggu

SEQ ID NO: 20493 - RNA, 20 nt, Artificial Sequence
  GATA2 Guide RNA
ggcguggaugggaagccgaa

SEQ ID NO: 20494 - RNA, 20 nt, Artificial Sequence
  GATA2 Guide RNA
ggcuucccauccacgccacc

SEQ ID NO: 20495 - RNA, 20 nt, Artificial Sequence
  GATA2 Guide RNA
ggguggcguggaugggaagc

SEQ ID NO: 20496 - RNA, 20 nt, Artificial Sequence
  GATA2 Guide RNA
gguggcguggaugggaagcc

SEQ ID NO: 20497 - RNA, 20 nt, Artificial Sequence
  GATA2 Guide RNA
guggaugggaagccgaaaag

SEQ ID NO: 20498 - RNA, 20 nt, Artificial Sequence
  GATA2 Guide RNA
guggcguggaugggaagccg

SEQ ID NO: 20499 - RNA, 20 nt, Artificial Sequence
  GATA2 Guide RNA
ucccaccuuuucggcuuccc

SEQ ID NO: 20500 - RNA, 20 nt, Artificial Sequence
  GATA2 Guide RNA
ucccauccacgccacccaaa

SEQ ID NO: 20501 - RNA, 20 nt, Artificial Sequence
  GATA2 Guide RNA
ucggcuucccauccacgcca

SEQ ID NO: 20502 - RNA, 20 nt, Artificial Sequence
  GATA2 Guide RNA
ucuuuggguggcguggaugg

SEQ ID NO: 20503 - RNA, 20 nt, Artificial Sequence
  GATA2 Guide RNA
uggaugggaagccgaaaagg

SEQ ID NO: 20504 - RNA, 20 nt, Artificial Sequence
  GATA2 Guide RNA
uggcguggaugggaagccga

SEQ ID NO: 20505 - RNA, 20 nt, Artificial Sequence
  GATA2 Guide RNA
uggguggcguggaugggaag

SEQ ID NO: 20506 - RNA, 20 nt, Artificial Sequence
  GATA2 Guide RNA
uucccauccacgccacccaa

SEQ ID NO: 20507 - RNA, 20 nt, Artificial Sequence
  GATA2 Guide RNA
uucggcuucccauccacgcc

SEQ ID NO: 20508 - RNA, 20 nt, Artificial Sequence
  GATA2 Guide RNA
uucuuuggguggcguggaug

SEQ ID NO: 20509 - RNA, 20 nt, Artificial Sequence
  GATA2 Guide RNA
uuggguggcguggaugggaa

SEQ ID NO: 20510 - RNA, 20 nt, Artificial Sequence
  GATA2 Guide RNA
uuucggcuucccauccacgc

SEQ ID NO: 20511 - RNA, 20 nt, Artificial Sequence
  GATA2 Guide RNA
uuuggguggcguggauggga

SEQ ID NO: 20512 - RNA, 20 nt, Artificial Sequence
  GATA2 Guide RNA
uuuucggcuucccauccacg

SEQ ID NO: 20513 - RNA, 21 nt, Artificial Sequence
  GATA2 Guide RNA
acacuucuuuggguggcgugg

SEQ ID NO: 20514 - RNA, 21 nt, Artificial Sequence
  GATA2 Guide RNA
accuuuucggcuucccaucca

SEQ ID NO: 20515 - RNA, 21 nt, Artificial Sequence
  GATA2 Guide RNA
acuucuuuggguggcguggau

SEQ ID NO: 20516 - RNA, 21 nt, Artificial Sequence
  GATA2 Guide RNA
agacacuucuuuggguggcgu

SEQ ID NO: 20517 - RNA, 21 nt, Artificial Sequence
  GATA2 Guide RNA
auccacgccacccaaagaagu

SEQ ID NO: 20518 - RNA, 21 nt, Artificial Sequence
  GATA2 Guide RNA
augggaagccgaaaagguggg

SEQ ID NO: 20519 - RNA, 21 nt, Artificial Sequence
  GATA2 Guide RNA
caccuuuucggcuucccaucc

SEQ ID NO: 20520 - RNA, 21 nt, Artificial Sequence
  GATA2 Guide RNA
cacuucuuuggguggcgugga

SEQ ID NO: 20521 - RNA, 21 nt, Artificial Sequence
  GATA2 Guide RNA
cauccacgccacccaaagaag

SEQ ID NO: 20522 - RNA, 21 nt, Artificial Sequence
  GATA2 Guide RNA
ccaccuuuucggcuucccauc

SEQ ID NO: 20523 - RNA, 21 nt, Artificial Sequence
  GATA2 Guide RNA
ccauccacgccacccaaagaa

SEQ ID NO: 20524 - RNA, 21 nt, Artificial Sequence
  GATA2 Guide RNA
cccaccuuuucggcuucccau

SEQ ID NO: 20525 - RNA, 21 nt, Artificial Sequence
  GATA2 Guide RNA
cccauccacgccacccaaaga

SEQ ID NO: 20526 - RNA, 21 nt, Artificial Sequence
  GATA2 Guide RNA
ccuuuucggcuucccauccac

SEQ ID NO: 20527 - RNA, 21 nt, Artificial Sequence
  GATA2 Guide RNA
cggcuucccauccacgccacc

SEQ ID NO: 20528 - RNA, 21 nt, Artificial Sequence
  GATA2 Guide RNA
cguggaugggaagccgaaaag

SEQ ID NO: 20529 - RNA, 21 nt, Artificial Sequence
  GATA2 Guide RNA
cucccaccuuuucggcuuccc

SEQ ID NO: 20530 - RNA, 21 nt, Artificial Sequence
  GATA2 Guide RNA
cuucccauccacgccacccaa

SEQ ID NO: 20531 - RNA, 21 nt, Artificial Sequence
  GATA2 Guide RNA
cuucuuuggguggcguggaug

SEQ ID NO: 20532 - RNA, 21 nt, Artificial Sequence
  GATA2 Guide RNA
cuuuggguggcguggauggga

SEQ ID NO: 20533 - RNA, 21 nt, Artificial Sequence
  GATA2 Guide RNA
cuuuucggcuucccauccacg

SEQ ID NO: 20534 - RNA, 21 nt, Artificial Sequence
  GATA2 Guide RNA
gacacuucuuuggguggcgug

SEQ ID NO: 20535 - RNA, 21 nt, Artificial Sequence
  GATA2 Guide RNA
gaugggaagccgaaaaggugg

SEQ ID NO: 20536 - RNA, 21 nt, Artificial Sequence
  GATA2 Guide RNA
gcguggaugggaagccgaaaa

SEQ ID NO: 20537 - RNA, 21 nt, Artificial Sequence
  GATA2 Guide RNA
gcucccaccuuuucggcuucc

SEQ ID NO: 20538 - RNA, 21 nt, Artificial Sequence
  GATA2 Guide RNA
gcuucccauccacgccaccca

SEQ ID NO: 20539 - RNA, 21 nt, Artificial Sequence
  GATA2 Guide RNA
ggaugggaagccgaaaaggug

SEQ ID NO: 20540 - RNA, 21 nt, Artificial Sequence
  GATA2 Guide RNA
ggcguggaugggaagccgaaa

SEQ ID NO: 20541 - RNA, 21 nt, Artificial Sequence
  GATA2 Guide RNA
ggcucccaccuuuucggcuuc

SEQ ID NO: 20542 - RNA, 21 nt, Artificial Sequence
  GATA2 Guide RNA
ggcuucccauccacgccaccc

SEQ ID NO: 20543 - RNA, 21 nt, Artificial Sequence
  GATA2 Guide RNA
ggguggcguggaugggaagcc

SEQ ID NO: 20544 - RNA, 21 nt, Artificial Sequence
  GATA2 Guide RNA
gguggcguggaugggaagccg

SEQ ID NO: 20545 - RNA, 21 nt, Artificial Sequence
  GATA2 Guide RNA
guggaugggaagccgaaaagg

SEQ ID NO: 20546 - RNA, 21 nt, Artificial Sequence
  GATA2 Guide RNA
guggcguggaugggaagccga

SEQ ID NO: 20547 - RNA, 21 nt, Artificial Sequence
  GATA2 Guide RNA
ucccauccacgccacccaaag

SEQ ID NO: 20548 - RNA, 21 nt, Artificial Sequence
  GATA2 Guide RNA
ucggcuucccauccacgccac

SEQ ID NO: 20549 - RNA, 21 nt, Artificial Sequence
  GATA2 Guide RNA
ucuuuggguggcguggauggg

SEQ ID NO: 20550 - RNA, 21 nt, Artificial Sequence
  GATA2 Guide RNA
uggaugggaagccgaaaaggu

SEQ ID NO: 20551 - RNA, 21 nt, Artificial Sequence
  GATA2 Guide RNA
uggcguggaugggaagccgaa

SEQ ID NO: 20552 - RNA, 21 nt, Artificial Sequence
  GATA2 Guide RNA
uggguggcguggaugggaagc

SEQ ID NO: 20553 - RNA, 21 nt, Artificial Sequence
  GATA2 Guide RNA
uucccauccacgccacccaaa

SEQ ID NO: 20554 - RNA, 21 nt, Artificial Sequence
  GATA2 Guide RNA
uucggcuucccauccacgcca

SEQ ID NO: 20555 - RNA, 21 nt, Artificial Sequence
  GATA2 Guide RNA
uucuuuggguggcguggaugg

SEQ ID NO: 20556 - RNA, 21 nt, Artificial Sequence
  GATA2 Guide RNA
uuggguggcguggaugggaag

SEQ ID NO: 20557 - RNA, 21 nt, Artificial Sequence
  GATA2 Guide RNA
uuucggcuucccauccacgcc

SEQ ID NO: 20558 - RNA, 21 nt, Artificial Sequence
  GATA2 Guide RNA
uuuggguggcguggaugggaa

SEQ ID NO: 20559 - RNA, 21 nt, Artificial Sequence
  GATA2 Guide RNA
uuuucggcuucccauccacgc

SEQ ID NO: 20560 - RNA, 22 nt, Artificial Sequence
  GATA2 Guide RNA
acacuucuuuggguggcgugga

SEQ ID NO: 20561 - RNA, 22 nt, Artificial Sequence
  GATA2 Guide RNA
accuuuucggcuucccauccac

SEQ ID NO: 20562 - RNA, 22 nt, Artificial Sequence
  GATA2 Guide RNA
acuucuuuggguggcguggaug

SEQ ID NO: 20563 - RNA, 22 nt, Artificial Sequence
  GATA2 Guide RNA
agacacuucuuuggguggcgug

SEQ ID NO: 20564 - RNA, 22 nt, Artificial Sequence
  GATA2 Guide RNA
auccacgccacccaaagaagug

SEQ ID NO: 20565 - RNA, 22 nt, Artificial Sequence
  GATA2 Guide RNA
augggaagccgaaaagguggga

SEQ ID NO: 20566 - RNA, 22 nt, Artificial Sequence
  GATA2 Guide RNA
caccuuuucggcuucccaucca

SEQ ID NO: 20567 - RNA, 22 nt, Artificial Sequence
  GATA2 Guide RNA
cacuucuuuggguggcguggau

SEQ ID NO: 20568 - RNA, 22 nt, Artificial Sequence
  GATA2 Guide RNA
cauccacgccacccaaagaagu

SEQ ID NO: 20569 - RNA, 22 nt, Artificial Sequence
  GATA2 Guide RNA
ccaccuuuucggcuucccaucc

SEQ ID NO: 20570 - RNA, 22 nt, Artificial Sequence
  GATA2 Guide RNA
ccauccacgccacccaaagaag

SEQ ID NO: 20571 - RNA, 22 nt, Artificial Sequence
  GATA2 Guide RNA
cccaccuuuucggcuucccauc

SEQ ID NO: 20572 - RNA, 22 nt, Artificial Sequence
  GATA2 Guide RNA
cccauccacgccacccaaagaa

SEQ ID NO: 20573 - RNA, 22 nt, Artificial Sequence
  GATA2 Guide RNA
ccuuuucggcuucccauccacg

SEQ ID NO: 20574 - RNA, 22 nt, Artificial Sequence
  GATA2 Guide RNA
cggcuucccauccacgccaccc

SEQ ID NO: 20575 - RNA, 22 nt, Artificial Sequence
  GATA2 Guide RNA
cguggaugggaagccgaaaagg

SEQ ID NO: 20576 - RNA, 22 nt, Artificial Sequence
  GATA2 Guide RNA
cuucccauccacgccacccaaa

SEQ ID NO: 20577 - RNA, 22 nt, Artificial Sequence
  GATA2 Guide RNA
cuucuuuggguggcguggaugg

SEQ ID NO: 20578 - RNA, 22 nt, Artificial Sequence
  GATA2 Guide RNA
cuuuggguggcguggaugggaa

SEQ ID NO: 20579 - RNA, 22 nt, Artificial Sequence
  GATA2 Guide RNA
cuuuucggcuucccauccacgc

SEQ ID NO: 20580 - RNA, 22 nt, Artificial Sequence
  GATA2 Guide RNA
gacacuucuuuggguggcgugg

SEQ ID NO: 20581 - RNA, 22 nt, Artificial Sequence
  GATA2 Guide RNA
gagacacuucuuuggguggcgu

SEQ ID NO: 20582 - RNA, 22 nt, Artificial Sequence
  GATA2 Guide RNA
gaugggaagccgaaaagguggg

SEQ ID NO: 20583 - RNA, 22 nt, Artificial Sequence
  GATA2 Guide RNA
gcguggaugggaagccgaaaag

SEQ ID NO: 20584 - RNA, 22 nt, Artificial Sequence
  GATA2 Guide RNA
gcucccaccuuuucggcuuccc

SEQ ID NO: 20585 - RNA, 22 nt, Artificial Sequence
  GATA2 Guide RNA
gcuucccauccacgccacccaa

SEQ ID NO: 20586 - RNA, 22 nt, Artificial Sequence
  GATA2 Guide RNA
ggaugggaagccgaaaaggugg

SEQ ID NO: 20587 - RNA, 22 nt, Artificial Sequence
  GATA2 Guide RNA
ggcguggaugggaagccgaaaa

SEQ ID NO: 20588 - RNA, 22 nt, Artificial Sequence
  GATA2 Guide RNA
ggcucccaccuuuucggcuucc

SEQ ID NO: 20589 - RNA, 22 nt, Artificial Sequence
  GATA2 Guide RNA
ggcuucccauccacgccaccca

SEQ ID NO: 20590 - RNA, 22 nt, Artificial Sequence
  GATA2 Guide RNA
ggguggcguggaugggaagccg

SEQ ID NO: 20591 - RNA, 22 nt, Artificial Sequence
  GATA2 Guide RNA
gguggcguggaugggaagccga

SEQ ID NO: 20592 - RNA, 22 nt, Artificial Sequence
  GATA2 Guide RNA
guggaugggaagccgaaaaggu

SEQ ID NO: 20593 - RNA, 22 nt, Artificial Sequence
  GATA2 Guide RNA
guggcguggaugggaagccgaa

SEQ ID NO: 20594 - RNA, 22 nt, Artificial Sequence
  GATA2 Guide RNA
ucccaccuuuucggcuucccau

SEQ ID NO: 20595 - RNA, 22 nt, Artificial Sequence
  GATA2 Guide RNA
ucccauccacgccacccaaaga

SEQ ID NO: 20596 - RNA, 22 nt, Artificial Sequence
  GATA2 Guide RNA
ucggcuucccauccacgccacc

SEQ ID NO: 20597 - RNA, 22 nt, Artificial Sequence
  GATA2 Guide RNA
ucuuuggguggcguggauggga

SEQ ID NO: 20598 - RNA, 22 nt, Artificial Sequence
  GATA2 Guide RNA
uggaugggaagccgaaaaggug

SEQ ID NO: 20599 - RNA, 22 nt, Artificial Sequence
  GATA2 Guide RNA
uggcguggaugggaagccgaaa

SEQ ID NO: 20600 - RNA, 22 nt, Artificial Sequence
  GATA2 Guide RNA
uggcucccaccuuuucggcuuc

SEQ ID NO: 20601 - RNA, 22 nt, Artificial Sequence
  GATA2 Guide RNA
uggguggcguggaugggaagcc

SEQ ID NO: 20602 - RNA, 22 nt, Artificial Sequence
  GATA2 Guide RNA
uucccauccacgccacccaaag

SEQ ID NO: 20603 - RNA, 22 nt, Artificial Sequence
  GATA2 Guide RNA
uucggcuucccauccacgccac

SEQ ID NO: 20604 - RNA, 22 nt, Artificial Sequence
  GATA2 Guide RNA
uucuuuggguggcguggauggg

SEQ ID NO: 20605 - RNA, 22 nt, Artificial Sequence
  GATA2 Guide RNA
uuggguggcguggaugggaagc

SEQ ID NO: 20606 - RNA, 22 nt, Artificial Sequence
  GATA2 Guide RNA
uuucggcuucccauccacgcca

SEQ ID NO: 20607 - RNA, 22 nt, Artificial Sequence
  GATA2 Guide RNA
uuuggguggcguggaugggaag

SEQ ID NO: 20608 - RNA, 22 nt, Artificial Sequence
  GATA2 Guide RNA
uuuucggcuucccauccacgcc

SEQ ID NO: 20609 - RNA, 20 nt, Artificial Sequence
  GATA2 Guide RNA
aaaaggugggagccagauug

SEQ ID NO: 20610 - RNA, 20 nt, Artificial Sequence
  GATA2 Guide RNA
aaaggugggagccagauugg

SEQ ID NO: 20611 - RNA, 20 nt, Artificial Sequence
  GATA2 Guide RNA
aaggugggagccagauuggg

SEQ ID NO: 20612 - RNA, 20 nt, Artificial Sequence
  GATA2 Guide RNA
aaucuggcucccaccuuuuc

SEQ ID NO: 20613 - RNA, 20 nt, Artificial Sequence
  GATA2 Guide RNA
acagcagcccaaucuggcuc

SEQ ID NO: 20614 - RNA, 20 nt, Artificial Sequence
  GATA2 Guide RNA
accccuacagcagcccaauc

SEQ ID NO: 20615 - RNA, 20 nt, Artificial Sequence
  GATA2 Guide RNA
agauugggcugcuguagggg

SEQ ID NO: 20616 - RNA, 20 nt, Artificial Sequence
  GATA2 Guide RNA
agcagcccaaucuggcuccc

SEQ ID NO: 20617 - RNA, 20 nt, Artificial Sequence
  GATA2 Guide RNA
agccagauugggcugcugua

SEQ ID NO: 20618 - RNA, 20 nt, Artificial Sequence
  GATA2 Guide RNA
agcccaaucuggcucccacc

SEQ ID NO: 20619 - RNA, 20 nt, Artificial Sequence
  GATA2 Guide RNA
agccgaaaaggugggagcca

SEQ ID NO: 20620 - RNA, 20 nt, Artificial Sequence
  GATA2 Guide RNA
aggugggagccagauugggc

SEQ ID NO: 20621 - RNA, 20 nt, Artificial Sequence
  GATA2 Guide RNA
auugggcugcuguaggggug

SEQ ID NO: 20622 - RNA, 20 nt, Artificial Sequence
  GATA2 Guide RNA
caaucuggcucccaccuuuu

SEQ ID NO: 20623 - RNA, 20 nt, Artificial Sequence
  GATA2 Guide RNA
caccccuacagcagcccaau

SEQ ID NO: 20624 - RNA, 20 nt, Artificial Sequence
  GATA2 Guide RNA
cagauugggcugcuguaggg

SEQ ID NO: 20625 - RNA, 20 nt, Artificial Sequence
  GATA2 Guide RNA
cagcagcccaaucuggcucc

SEQ ID NO: 20626 - RNA, 20 nt, Artificial Sequence
  GATA2 Guide RNA
cagcccaaucuggcucccac

SEQ ID NO: 20627 - RNA, 20 nt, Artificial Sequence
  GATA2 Guide RNA
ccaaucuggcucccaccuuu

SEQ ID NO: 20628 - RNA, 20 nt, Artificial Sequence
  GATA2 Guide RNA
ccagauugggcugcuguagg

SEQ ID NO: 20629 - RNA, 20 nt, Artificial Sequence
  GATA2 Guide RNA
cccaaucuggcucccaccuu

SEQ ID NO: 20630 - RNA, 20 nt, Artificial Sequence
  GATA2 Guide RNA
ccccuacagcagcccaaucu

SEQ ID NO: 20631 - RNA, 20 nt, Artificial Sequence
  GATA2 Guide RNA
cccuacagcagcccaaucug

SEQ ID NO: 20632 - RNA, 20 nt, Artificial Sequence
  GATA2 Guide RNA
cccucaccccuacagcagcc

SEQ ID NO: 20633 - RNA, 20 nt, Artificial Sequence
  GATA2 Guide RNA
ccgaaaaggugggagccaga

SEQ ID NO: 20634 - RNA, 20 nt, Artificial Sequence
  GATA2 Guide RNA
ccuacagcagcccaaucugg

SEQ ID NO: 20635 - RNA, 20 nt, Artificial Sequence
  GATA2 Guide RNA
ccucaccccuacagcagccc

SEQ ID NO: 20636 - RNA, 20 nt, Artificial Sequence
  GATA2 Guide RNA
cgaaaaggugggagccagau

SEQ ID NO: 20637 - RNA, 20 nt, Artificial Sequence
  GATA2 Guide RNA
cuacagcagcccaaucuggc

SEQ ID NO: 20638 - RNA, 20 nt, Artificial Sequence
  GATA2 Guide RNA
cucaccccuacagcagccca

SEQ ID NO: 20639 - RNA, 20 nt, Artificial Sequence
  GATA2 Guide RNA
gaaaaggugggagccagauu

SEQ ID NO: 20640 - RNA, 20 nt, Artificial Sequence
  GATA2 Guide RNA
gagccagauugggcugcugu

SEQ ID NO: 20641 - RNA, 20 nt, Artificial Sequence
  GATA2 Guide RNA
gauugggcugcuguaggggu

SEQ ID NO: 20642 - RNA, 20 nt, Artificial Sequence
  GATA2 Guide RNA
gcagcccaaucuggcuccca

SEQ ID NO: 20643 - RNA, 20 nt, Artificial Sequence
  GATA2 Guide RNA
gccagauugggcugcuguag

SEQ ID NO: 20644 - RNA, 20 nt, Artificial Sequence
  GATA2 Guide RNA
gcccaaucuggcucccaccu

SEQ ID NO: 20645 - RNA, 20 nt, Artificial Sequence
  GATA2 Guide RNA
gccgaaaaggugggagccag

SEQ ID NO: 20646 - RNA, 20 nt, Artificial Sequence
  GATA2 Guide RNA
ggagccagauugggcugcug

SEQ ID NO: 20647 - RNA, 20 nt, Artificial Sequence
  GATA2 Guide RNA
gggagccagauugggcugcu

SEQ ID NO: 20648 - RNA, 20 nt, Artificial Sequence
  GATA2 Guide RNA
ggugggagccagauugggcu

SEQ ID NO: 20649 - RNA, 20 nt, Artificial Sequence
  GATA2 Guide RNA
gugggagccagauugggcug

SEQ ID NO: 20650 - RNA, 20 nt, Artificial Sequence
  GATA2 Guide RNA
uacagcagcccaaucuggcu

SEQ ID NO: 20651 - RNA, 20 nt, Artificial Sequence
  GATA2 Guide RNA
ucaccccuacagcagcccaa

SEQ ID NO: 20652 - RNA, 20 nt, Artificial Sequence
  GATA2 Guide RNA
ucccucaccccuacagcagc

SEQ ID NO: 20653 - RNA, 20 nt, Artificial Sequence
  GATA2 Guide RNA
ugggagccagauugggcugc

SEQ ID NO: 20654 - RNA, 20 nt, Artificial Sequence
  GATA2 Guide RNA
uugggcugcuguagggguga

SEQ ID NO: 20655 - RNA, 21 nt, Artificial Sequence
  GATA2 Guide RNA
aaaaggugggagccagauugg

SEQ ID NO: 20656 - RNA, 21 nt, Artificial Sequence
  GATA2 Guide RNA
aaaggugggagccagauuggg

SEQ ID NO: 20657 - RNA, 21 nt, Artificial Sequence
  GATA2 Guide RNA
aagccgaaaaggugggagcca

SEQ ID NO: 20658 - RNA, 21 nt, Artificial Sequence
  GATA2 Guide RNA
aaggugggagccagauugggc

SEQ ID NO: 20659 - RNA, 21 nt, Artificial Sequence
  GATA2 Guide RNA
aaucuggcucccaccuuuucg

SEQ ID NO: 20660 - RNA, 21 nt, Artificial Sequence
  GATA2 Guide RNA
acagcagcccaaucuggcucc

SEQ ID NO: 20661 - RNA, 21 nt, Artificial Sequence
  GATA2 Guide RNA
accccuacagcagcccaaucu

SEQ ID NO: 20662 - RNA, 21 nt, Artificial Sequence
  GATA2 Guide RNA
agauugggcugcuguaggggu

SEQ ID NO: 20663 - RNA, 21 nt, Artificial Sequence
  GATA2 Guide RNA
agcagcccaaucuggcuccca

SEQ ID NO: 20664 - RNA, 21 nt, Artificial Sequence
  GATA2 Guide RNA
agccagauugggcugcuguag

SEQ ID NO: 20665 - RNA, 21 nt, Artificial Sequence
  GATA2 Guide RNA
agcccaaucuggcucccaccu

SEQ ID NO: 20666 - RNA, 21 nt, Artificial Sequence
  GATA2 Guide RNA
agccgaaaaggugggagccag

SEQ ID NO: 20667 - RNA, 21 nt, Artificial Sequence
  GATA2 Guide RNA
aggugggagccagauugggcu

SEQ ID NO: 20668 - RNA, 21 nt, Artificial Sequence
  GATA2 Guide RNA
auugggcugcuguagggguga

SEQ ID NO: 20669 - RNA, 21 nt, Artificial Sequence
  GATA2 Guide RNA
caaucuggcucccaccuuuuc

SEQ ID NO: 20670 - RNA, 21 nt, Artificial Sequence
  GATA2 Guide RNA
caccccuacagcagcccaauc

SEQ ID NO: 20671 - RNA, 21 nt, Artificial Sequence
  GATA2 Guide RNA
cagauugggcugcuguagggg

SEQ ID NO: 20672 - RNA, 21 nt, Artificial Sequence
  GATA2 Guide RNA
cagcagcccaaucuggcuccc

SEQ ID NO: 20673 - RNA, 21 nt, Artificial Sequence
  GATA2 Guide RNA
cagcccaaucuggcucccacc

SEQ ID NO: 20674 - RNA, 21 nt, Artificial Sequence
  GATA2 Guide RNA
ccaaucuggcucccaccuuuu

SEQ ID NO: 20675 - RNA, 21 nt, Artificial Sequence
  GATA2 Guide RNA
ccagauugggcugcuguaggg

SEQ ID NO: 20676 - RNA, 21 nt, Artificial Sequence
  GATA2 Guide RNA
cccaaucuggcucccaccuuu

SEQ ID NO: 20677 - RNA, 21 nt, Artificial Sequence
  GATA2 Guide RNA
ccccuacagcagcccaaucug

SEQ ID NO: 20678 - RNA, 21 nt, Artificial Sequence
  GATA2 Guide RNA
cccuacagcagcccaaucugg

SEQ ID NO: 20679 - RNA, 21 nt, Artificial Sequence
  GATA2 Guide RNA
cccucaccccuacagcagccc

SEQ ID NO: 20680 - RNA, 21 nt, Artificial Sequence
  GATA2 Guide RNA
ccgaaaaggugggagccagau

SEQ ID NO: 20681 - RNA, 21 nt, Artificial Sequence
  GATA2 Guide RNA
ccuacagcagcccaaucuggc

SEQ ID NO: 20682 - RNA, 21 nt, Artificial Sequence
  GATA2 Guide RNA
ccucaccccuacagcagccca

SEQ ID NO: 20683 - RNA, 21 nt, Artificial Sequence
  GATA2 Guide RNA
cgaaaaggugggagccagauu

SEQ ID NO: 20684 - RNA, 21 nt, Artificial Sequence
  GATA2 Guide RNA
cuacagcagcccaaucuggcu

SEQ ID NO: 20685 - RNA, 21 nt, Artificial Sequence
  GATA2 Guide RNA
cucaccccuacagcagcccaa

SEQ ID NO: 20686 - RNA, 21 nt, Artificial Sequence
  GATA2 Guide RNA
cucccucaccccuacagcagc

SEQ ID NO: 20687 - RNA, 21 nt, Artificial Sequence
  GATA2 Guide RNA
gaaaaggugggagccagauug

SEQ ID NO: 20688 - RNA, 21 nt, Artificial Sequence
  GATA2 Guide RNA
gagccagauugggcugcugua

SEQ ID NO: 20689 - RNA, 21 nt, Artificial Sequence
  GATA2 Guide RNA
gauugggcugcuguaggggug

SEQ ID NO: 20690 - RNA, 21 nt, Artificial Sequence
  GATA2 Guide RNA
gcagcccaaucuggcucccac

SEQ ID NO: 20691 - RNA, 21 nt, Artificial Sequence
  GATA2 Guide RNA
gccagauugggcugcuguagg

SEQ ID NO: 20692 - RNA, 21 nt, Artificial Sequence
  GATA2 Guide RNA
gcccaaucuggcucccaccuu

SEQ ID NO: 20693 - RNA, 21 nt, Artificial Sequence
  GATA2 Guide RNA
gccgaaaaggugggagccaga

SEQ ID NO: 20694 - RNA, 21 nt, Artificial Sequence
  GATA2 Guide RNA
ggagccagauugggcugcugu

SEQ ID NO: 20695 - RNA, 21 nt, Artificial Sequence
  GATA2 Guide RNA
gggagccagauugggcugcug

SEQ ID NO: 20696 - RNA, 21 nt, Artificial Sequence
  GATA2 Guide RNA
ggugggagccagauugggcug

SEQ ID NO: 20697 - RNA, 21 nt, Artificial Sequence
  GATA2 Guide RNA
gugggagccagauugggcugc

SEQ ID NO: 20698 - RNA, 21 nt, Artificial Sequence
  GATA2 Guide RNA
uacagcagcccaaucuggcuc

SEQ ID NO: 20699 - RNA, 21 nt, Artificial Sequence
  GATA2 Guide RNA
ucaccccuacagcagcccaau

SEQ ID NO: 20700 - RNA, 21 nt, Artificial Sequence
  GATA2 Guide RNA
ucccucaccccuacagcagcc

SEQ ID NO: 20701 - RNA, 21 nt, Artificial Sequence
  GATA2 Guide RNA
ugggagccagauugggcugcu

SEQ ID NO: 20702 - RNA, 21 nt, Artificial Sequence
  GATA2 Guide RNA
uugggcugcuguaggggugag

SEQ ID NO: 20703 - RNA, 22 nt, Artificial Sequence
  GATA2 Guide RNA
aaaaggugggagccagauuggg

SEQ ID NO: 20704 - RNA, 22 nt, Artificial Sequence
  GATA2 Guide RNA
aaaggugggagccagauugggc

SEQ ID NO: 20705 - RNA, 22 nt, Artificial Sequence
  GATA2 Guide RNA
aagccgaaaaggugggagccag

SEQ ID NO: 20706 - RNA, 22 nt, Artificial Sequence
  GATA2 Guide RNA
aaggugggagccagauugggcu

SEQ ID NO: 20707 - RNA, 22 nt, Artificial Sequence
  GATA2 Guide RNA
aaucuggcucccaccuuuucgg

SEQ ID NO: 20708 - RNA, 22 nt, Artificial Sequence
  GATA2 Guide RNA
acagcagcccaaucuggcuccc

SEQ ID NO: 20709 - RNA, 22 nt, Artificial Sequence
  GATA2 Guide RNA
accccuacagcagcccaaucug

SEQ ID NO: 20710 - RNA, 22 nt, Artificial Sequence
  GATA2 Guide RNA
agauugggcugcuguaggggug

SEQ ID NO: 20711 - RNA, 22 nt, Artificial Sequence
  GATA2 Guide RNA
agcagcccaaucuggcucccac

SEQ ID NO: 20712 - RNA, 22 nt, Artificial Sequence
  GATA2 Guide RNA
agccagauugggcugcuguagg

SEQ ID NO: 20713 - RNA, 22 nt, Artificial Sequence
  GATA2 Guide RNA
agcccaaucuggcucccaccuu

SEQ ID NO: 20714 - RNA, 22 nt, Artificial Sequence
  GATA2 Guide RNA
agccgaaaaggugggagccaga

SEQ ID NO: 20715 - RNA, 22 nt, Artificial Sequence
  GATA2 Guide RNA
aggugggagccagauugggcug

SEQ ID NO: 20716 - RNA, 22 nt, Artificial Sequence
  GATA2 Guide RNA
auugggcugcuguaggggugag

SEQ ID NO: 20717 - RNA, 22 nt, Artificial Sequence
  GATA2 Guide RNA
caaucuggcucccaccuuuucg

SEQ ID NO: 20718 - RNA, 22 nt, Artificial Sequence
  GATA2 Guide RNA
caccccuacagcagcccaaucu

SEQ ID NO: 20719 - RNA, 22 nt, Artificial Sequence
  GATA2 Guide RNA
cagauugggcugcuguaggggu

SEQ ID NO: 20720 - RNA, 22 nt, Artificial Sequence
  GATA2 Guide RNA
cagcagcccaaucuggcuccca

SEQ ID NO: 20721 - RNA, 22 nt, Artificial Sequence
  GATA2 Guide RNA
cagcccaaucuggcucccaccu

SEQ ID NO: 20722 - RNA, 22 nt, Artificial Sequence
  GATA2 Guide RNA
ccaaucuggcucccaccuuuuc

SEQ ID NO: 20723 - RNA, 22 nt, Artificial Sequence
  GATA2 Guide RNA
ccagauugggcugcuguagggg

SEQ ID NO: 20724 - RNA, 22 nt, Artificial Sequence
  GATA2 Guide RNA
cccaaucuggcucccaccuuuu

SEQ ID NO: 20725 - RNA, 22 nt, Artificial Sequence
  GATA2 Guide RNA
ccccuacagcagcccaaucugg

SEQ ID NO: 20726 - RNA, 22 nt, Artificial Sequence
  GATA2 Guide RNA
cccuacagcagcccaaucuggc

SEQ ID NO: 20727 - RNA, 22 nt, Artificial Sequence
  GATA2 Guide RNA
cccucaccccuacagcagccca

SEQ ID NO: 20728 - RNA, 22 nt, Artificial Sequence
  GATA2 Guide RNA
ccgaaaaggugggagccagauu

SEQ ID NO: 20729 - RNA, 22 nt, Artificial Sequence
  GATA2 Guide RNA
ccuacagcagcccaaucuggcu

SEQ ID NO: 20730 - RNA, 22 nt, Artificial Sequence
  GATA2 Guide RNA
ccucaccccuacagcagcccaa

SEQ ID NO: 20731 - RNA, 22 nt, Artificial Sequence
  GATA2 Guide RNA
ccucccucaccccuacagcagc

SEQ ID NO: 20732 - RNA, 22 nt, Artificial Sequence
  GATA2 Guide RNA
cgaaaaggugggagccagauug

SEQ ID NO: 20733 - RNA, 22 nt, Artificial Sequence
  GATA2 Guide RNA
cuacagcagcccaaucuggcuc

SEQ ID NO: 20734 - RNA, 22 nt, Artificial Sequence
  GATA2 Guide RNA
cucaccccuacagcagcccaau

SEQ ID NO: 20735 - RNA, 22 nt, Artificial Sequence
  GATA2 Guide RNA
cucccucaccccuacagcagcc

SEQ ID NO: 20736 - RNA, 22 nt, Artificial Sequence
  GATA2 Guide RNA
gaaaaggugggagccagauugg

SEQ ID NO: 20737 - RNA, 22 nt, Artificial Sequence
  GATA2 Guide RNA
gaagccgaaaaggugggagcca

SEQ ID NO: 20738 - RNA, 22 nt, Artificial Sequence
  GATA2 Guide RNA
gagccagauugggcugcuguag

SEQ ID NO: 20739 - RNA, 22 nt, Artificial Sequence
  GATA2 Guide RNA
gauugggcugcuguagggguga

SEQ ID NO: 20740 - RNA, 22 nt, Artificial Sequence
  GATA2 Guide RNA
gcagcccaaucuggcucccacc

SEQ ID NO: 20741 - RNA, 22 nt, Artificial Sequence
  GATA2 Guide RNA
gccagauugggcugcuguaggg

SEQ ID NO: 20742 - RNA, 22 nt, Artificial Sequence
  GATA2 Guide RNA
gcccaaucuggcucccaccuuu

SEQ ID NO: 20743 - RNA, 22 nt, Artificial Sequence
  GATA2 Guide RNA
gccgaaaaggugggagccagau

SEQ ID NO: 20744 - RNA, 22 nt, Artificial Sequence
  GATA2 Guide RNA
ggagccagauugggcugcugua

SEQ ID NO: 20745 - RNA, 22 nt, Artificial Sequence
  GATA2 Guide RNA
gggagccagauugggcugcugu

SEQ ID NO: 20746 - RNA, 22 nt, Artificial Sequence
  GATA2 Guide RNA
ggugggagccagauugggcugc

SEQ ID NO: 20747 - RNA, 22 nt, Artificial Sequence
  GATA2 Guide RNA
gugggagccagauugggcugcu

SEQ ID NO: 20748 - RNA, 22 nt, Artificial Sequence
  GATA2 Guide RNA
uacagcagcccaaucuggcucc

SEQ ID NO: 20749 - RNA, 22 nt, Artificial Sequence
  GATA2 Guide RNA
ucaccccuacagcagcccaauc

SEQ ID NO: 20750 - RNA, 22 nt, Artificial Sequence
  GATA2 Guide RNA
ucccucaccccuacagcagccc

SEQ ID NO: 20751 - RNA, 22 nt, Artificial Sequence
  GATA2 Guide RNA
ugggagccagauugggcugcug

SEQ ID NO: 20752 - RNA, 22 nt, Artificial Sequence
  GATA2 Guide RNA
uugggcugcuguaggggugagg

SEQ ID NO: 20753 - RNA, 20 nt, Artificial Sequence
  GATA2 Guide RNA
aaaaggugggagccagagag

SEQ ID NO: 20754 - RNA, 20 nt, Artificial Sequence
  GATA2 Guide RNA
aaaggugggagccagagagg

SEQ ID NO: 20755 - RNA, 20 nt, Artificial Sequence
  GATA2 Guide RNA
aaggugggagccagagaggg

SEQ ID NO: 20756 - RNA, 20 nt, Artificial Sequence
  GATA2 Guide RNA
acagcagcccucucuggcuc

SEQ ID NO: 20757 - RNA, 20 nt, Artificial Sequence
  GATA2 Guide RNA
accccuacagcagcccucuc

SEQ ID NO: 20758 - RNA, 20 nt, Artificial Sequence
  GATA2 Guide RNA
agagagggcugcuguagggg

SEQ ID NO: 20759 - RNA, 20 nt, Artificial Sequence
  GATA2 Guide RNA
agagggcugcuguaggggug

SEQ ID NO: 20760 - RNA, 20 nt, Artificial Sequence
  GATA2 Guide RNA
agcagcccucucuggcuccc

SEQ ID NO: 20761 - RNA, 20 nt, Artificial Sequence
  GATA2 Guide RNA
agccagagagggcugcugua

SEQ ID NO: 20762 - RNA, 20 nt, Artificial Sequence
  GATA2 Guide RNA
agcccucucuggcucccacc

SEQ ID NO: 20763 - RNA, 20 nt, Artificial Sequence
  GATA2 Guide RNA
agggcugcuguaggggugag

SEQ ID NO: 20764 - RNA, 20 nt, Artificial Sequence
  GATA2 Guide RNA
aggugggagccagagagggc

SEQ ID NO: 20765 - RNA, 20 nt, Artificial Sequence
  GATA2 Guide RNA
caccccuacagcagcccucu

SEQ ID NO: 20766 - RNA, 20 nt, Artificial Sequence
  GATA2 Guide RNA
cagagagggcugcuguaggg

SEQ ID NO: 20767 - RNA, 20 nt, Artificial Sequence
  GATA2 Guide RNA
cagcagcccucucuggcucc

SEQ ID NO: 20768 - RNA, 20 nt, Artificial Sequence
  GATA2 Guide RNA
cagcccucucuggcucccac

SEQ ID NO: 20769 - RNA, 20 nt, Artificial Sequence
  GATA2 Guide RNA
ccagagagggcugcuguagg

SEQ ID NO: 20770 - RNA, 20 nt, Artificial Sequence
  GATA2 Guide RNA
ccccuacagcagcccucucu

SEQ ID NO: 20771 - RNA, 20 nt, Artificial Sequence
  GATA2 Guide RNA
cccuacagcagcccucucug

SEQ ID NO: 20772 - RNA, 20 nt, Artificial Sequence
  GATA2 Guide RNA
cccucucuggcucccaccuu

SEQ ID NO: 20773 - RNA, 20 nt, Artificial Sequence
  GATA2 Guide RNA
ccuacagcagcccucucugg

SEQ ID NO: 20774 - RNA, 20 nt, Artificial Sequence
  GATA2 Guide RNA
ccucucuggcucccaccuuu

SEQ ID NO: 20775 - RNA, 20 nt, Artificial Sequence
  GATA2 Guide RNA
cgaaaaggugggagccagag

SEQ ID NO: 20776 - RNA, 20 nt, Artificial Sequence
  GATA2 Guide RNA
cuacagcagcccucucuggc

SEQ ID NO: 20777 - RNA, 20 nt, Artificial Sequence
  GATA2 Guide RNA
cucaccccuacagcagcccu

SEQ ID NO: 20778 - RNA, 20 nt, Artificial Sequence
  GATA2 Guide RNA
cucccucaccccuacagcag

SEQ ID NO: 20779 - RNA, 20 nt, Artificial Sequence
  GATA2 Guide RNA
cucucuggcucccaccuuuu

SEQ ID NO: 20780 - RNA, 20 nt, Artificial Sequence
  GATA2 Guide RNA
gaaaaggugggagccagaga

SEQ ID NO: 20781 - RNA, 20 nt, Artificial Sequence
  GATA2 Guide RNA
gagagggcugcuguaggggu

SEQ ID NO: 20782 - RNA, 20 nt, Artificial Sequence
  GATA2 Guide RNA
gagccagagagggcugcugu

SEQ ID NO: 20783 - RNA, 20 nt, Artificial Sequence
  GATA2 Guide RNA
gagggcugcuguagggguga

SEQ ID NO: 20784 - RNA, 20 nt, Artificial Sequence
  GATA2 Guide RNA
gcagcccucucuggcuccca

SEQ ID NO: 20785 - RNA, 20 nt, Artificial Sequence
  GATA2 Guide RNA
gccagagagggcugcuguag

SEQ ID NO: 20786 - RNA, 20 nt, Artificial Sequence
  GATA2 Guide RNA
gcccucucuggcucccaccu

SEQ ID NO: 20787 - RNA, 20 nt, Artificial Sequence
  GATA2 Guide RNA
ggagccagagagggcugcug

SEQ ID NO: 20788 - RNA, 20 nt, Artificial Sequence
  GATA2 Guide RNA
gggagccagagagggcugcu

SEQ ID NO: 20789 - RNA, 20 nt, Artificial Sequence
  GATA2 Guide RNA
ggugggagccagagagggcu

SEQ ID NO: 20790 - RNA, 20 nt, Artificial Sequence
  GATA2 Guide RNA
gugggagccagagagggcug

SEQ ID NO: 20791 - RNA, 20 nt, Artificial Sequence
  GATA2 Guide RNA
uacagcagcccucucuggcu

SEQ ID NO: 20792 - RNA, 20 nt, Artificial Sequence
  GATA2 Guide RNA
ucaccccuacagcagcccuc

SEQ ID NO: 20793 - RNA, 20 nt, Artificial Sequence
  GATA2 Guide RNA
ugggagccagagagggcugc

SEQ ID NO: 20794 - RNA, 21 nt, Artificial Sequence
  GATA2 Guide RNA
aaaaggugggagccagagagg

SEQ ID NO: 20795 - RNA, 21 nt, Artificial Sequence
  GATA2 Guide RNA
aaaggugggagccagagaggg

SEQ ID NO: 20796 - RNA, 21 nt, Artificial Sequence
  GATA2 Guide RNA
aaggugggagccagagagggc

SEQ ID NO: 20797 - RNA, 21 nt, Artificial Sequence
  GATA2 Guide RNA
acagcagcccucucuggcucc

SEQ ID NO: 20798 - RNA, 21 nt, Artificial Sequence
  GATA2 Guide RNA
accccuacagcagcccucucu

SEQ ID NO: 20799 - RNA, 21 nt, Artificial Sequence
  GATA2 Guide RNA
agagagggcugcuguaggggu

SEQ ID NO: 20800 - RNA, 21 nt, Artificial Sequence
  GATA2 Guide RNA
agagggcugcuguagggguga

SEQ ID NO: 20801 - RNA, 21 nt, Artificial Sequence
  GATA2 Guide RNA
agcagcccucucuggcuccca

SEQ ID NO: 20802 - RNA, 21 nt, Artificial Sequence
  GATA2 Guide RNA
agccagagagggcugcuguag

SEQ ID NO: 20803 - RNA, 21 nt, Artificial Sequence
  GATA2 Guide RNA
agcccucucuggcucccaccu

SEQ ID NO: 20804 - RNA, 21 nt, Artificial Sequence
  GATA2 Guide RNA
agggcugcuguaggggugagg

SEQ ID NO: 20805 - RNA, 21 nt, Artificial Sequence
  GATA2 Guide RNA
aggugggagccagagagggcu

SEQ ID NO: 20806 - RNA, 21 nt, Artificial Sequence
  GATA2 Guide RNA
caccccuacagcagcccucuc

SEQ ID NO: 20807 - RNA, 21 nt, Artificial Sequence
  GATA2 Guide RNA
cagagagggcugcuguagggg

SEQ ID NO: 20808 - RNA, 21 nt, Artificial Sequence
  GATA2 Guide RNA
cagcagcccucucuggcuccc

SEQ ID NO: 20809 - RNA, 21 nt, Artificial Sequence
  GATA2 Guide RNA
cagcccucucuggcucccacc

SEQ ID NO: 20810 - RNA, 21 nt, Artificial Sequence
  GATA2 Guide RNA
ccagagagggcugcuguaggg

SEQ ID NO: 20811 - RNA, 21 nt, Artificial Sequence
  GATA2 Guide RNA
ccccuacagcagcccucucug

SEQ ID NO: 20812 - RNA, 21 nt, Artificial Sequence
  GATA2 Guide RNA
cccuacagcagcccucucugg

SEQ ID NO: 20813 - RNA, 21 nt, Artificial Sequence
  GATA2 Guide RNA
cccucucuggcucccaccuuu

SEQ ID NO: 20814 - RNA, 21 nt, Artificial Sequence
  GATA2 Guide RNA
ccgaaaaggugggagccagag

SEQ ID NO: 20815 - RNA, 21 nt, Artificial Sequence
  GATA2 Guide RNA
ccuacagcagcccucucuggc

SEQ ID NO: 20816 - RNA, 21 nt, Artificial Sequence
  GATA2 Guide RNA
ccucaccccuacagcagcccu

SEQ ID NO: 20817 - RNA, 21 nt, Artificial Sequence
  GATA2 Guide RNA
ccucccucaccccuacagcag

SEQ ID NO: 20818 - RNA, 21 nt, Artificial Sequence
  GATA2 Guide RNA
ccucucuggcucccaccuuuu

SEQ ID NO: 20819 - RNA, 21 nt, Artificial Sequence
  GATA2 Guide RNA
cgaaaaggugggagccagaga

SEQ ID NO: 20820 - RNA, 21 nt, Artificial Sequence
  GATA2 Guide RNA
cuacagcagcccucucuggcu

SEQ ID NO: 20821 - RNA, 21 nt, Artificial Sequence
  GATA2 Guide RNA
cucaccccuacagcagcccuc

SEQ ID NO: 20822 - RNA, 21 nt, Artificial Sequence
  GATA2 Guide RNA
cucucuggcucccaccuuuuc

SEQ ID NO: 20823 - RNA, 21 nt, Artificial Sequence
  GATA2 Guide RNA
gaaaaggugggagccagagag

SEQ ID NO: 20824 - RNA, 21 nt, Artificial Sequence
  GATA2 Guide RNA
gagagggcugcuguaggggug

SEQ ID NO: 20825 - RNA, 21 nt, Artificial Sequence
  GATA2 Guide RNA
gagccagagagggcugcugua

SEQ ID NO: 20826 - RNA, 21 nt, Artificial Sequence
  GATA2 Guide RNA
gagggcugcuguaggggugag

SEQ ID NO: 20827 - RNA, 21 nt, Artificial Sequence
  GATA2 Guide RNA
gcagcccucucuggcucccac

SEQ ID NO: 20828 - RNA, 21 nt, Artificial Sequence
  GATA2 Guide RNA
gccagagagggcugcuguagg

SEQ ID NO: 20829 - RNA, 21 nt, Artificial Sequence
  GATA2 Guide RNA
gcccucucuggcucccaccuu

SEQ ID NO: 20830 - RNA, 21 nt, Artificial Sequence
  GATA2 Guide RNA
ggagccagagagggcugcugu

SEQ ID NO: 20831 - RNA, 21 nt, Artificial Sequence
  GATA2 Guide RNA
gggagccagagagggcugcug

SEQ ID NO: 20832 - RNA, 21 nt, Artificial Sequence
  GATA2 Guide RNA
ggugggagccagagagggcug

SEQ ID NO: 20833 - RNA, 21 nt, Artificial Sequence
  GATA2 Guide RNA
gugggagccagagagggcugc

SEQ ID NO: 20834 - RNA, 21 nt, Artificial Sequence
  GATA2 Guide RNA
uacagcagcccucucuggcuc

SEQ ID NO: 20835 - RNA, 21 nt, Artificial Sequence
  GATA2 Guide RNA
ucaccccuacagcagcccucu

SEQ ID NO: 20836 - RNA, 21 nt, Artificial Sequence
  GATA2 Guide RNA
ugggagccagagagggcugcu

SEQ ID NO: 20837 - RNA, 22 nt, Artificial Sequence
  GATA2 Guide RNA
aaaaggugggagccagagaggg

SEQ ID NO: 20838 - RNA, 22 nt, Artificial Sequence
  GATA2 Guide RNA
aaaggugggagccagagagggc

SEQ ID NO: 20839 - RNA, 22 nt, Artificial Sequence
  GATA2 Guide RNA
aaggugggagccagagagggcu

SEQ ID NO: 20840 - RNA, 22 nt, Artificial Sequence
  GATA2 Guide RNA
acagcagcccucucuggcuccc

SEQ ID NO: 20841 - RNA, 22 nt, Artificial Sequence
  GATA2 Guide RNA
accccuacagcagcccucucug

SEQ ID NO: 20842 - RNA, 22 nt, Artificial Sequence
  GATA2 Guide RNA
agagagggcugcuguaggggug

SEQ ID NO: 20843 - RNA, 22 nt, Artificial Sequence
  GATA2 Guide RNA
agagggcugcuguaggggugag

SEQ ID NO: 20844 - RNA, 22 nt, Artificial Sequence
  GATA2 Guide RNA
agcagcccucucuggcucccac

SEQ ID NO: 20845 - RNA, 22 nt, Artificial Sequence
  GATA2 Guide RNA
agccagagagggcugcuguagg

SEQ ID NO: 20846 - RNA, 22 nt, Artificial Sequence
  GATA2 Guide RNA
agcccucucuggcucccaccuu

SEQ ID NO: 20847 - RNA, 22 nt, Artificial Sequence
  GATA2 Guide RNA
agggcugcuguaggggugaggg

SEQ ID NO: 20848 - RNA, 22 nt, Artificial Sequence
  GATA2 Guide RNA
aggugggagccagagagggcug

SEQ ID NO: 20849 - RNA, 22 nt, Artificial Sequence
  GATA2 Guide RNA
caccccuacagcagcccucucu

SEQ ID NO: 20850 - RNA, 22 nt, Artificial Sequence
  GATA2 Guide RNA
cagagagggcugcuguaggggu

SEQ ID NO: 20851 - RNA, 22 nt, Artificial Sequence
  GATA2 Guide RNA
cagcagcccucucuggcuccca

SEQ ID NO: 20852 - RNA, 22 nt, Artificial Sequence
  GATA2 Guide RNA
cagcccucucuggcucccaccu

SEQ ID NO: 20853 - RNA, 22 nt, Artificial Sequence
  GATA2 Guide RNA
ccagagagggcugcuguagggg

SEQ ID NO: 20854 - RNA, 22 nt, Artificial Sequence
  GATA2 Guide RNA
ccccuacagcagcccucucugg

SEQ ID NO: 20855 - RNA, 22 nt, Artificial Sequence
  GATA2 Guide RNA
cccuacagcagcccucucuggc

SEQ ID NO: 20856 - RNA, 22 nt, Artificial Sequence
  GATA2 Guide RNA
cccucaccccuacagcagcccu

SEQ ID NO: 20857 - RNA, 22 nt, Artificial Sequence
  GATA2 Guide RNA
cccucucuggcucccaccuuuu

SEQ ID NO: 20858 - RNA, 22 nt, Artificial Sequence
  GATA2 Guide RNA
ccgaaaaggugggagccagaga

SEQ ID NO: 20859 - RNA, 22 nt, Artificial Sequence
  GATA2 Guide RNA
ccuacagcagcccucucuggcu

SEQ ID NO: 20860 - RNA, 22 nt, Artificial Sequence
  GATA2 Guide RNA
ccucaccccuacagcagcccuc

SEQ ID NO: 20861 - RNA, 22 nt, Artificial Sequence
  GATA2 Guide RNA
ccucucuggcucccaccuuuuc

SEQ ID NO: 20862 - RNA, 22 nt, Artificial Sequence
  GATA2 Guide RNA
cgaaaaggugggagccagagag

SEQ ID NO: 20863 - RNA, 22 nt, Artificial Sequence
  GATA2 Guide RNA
cuacagcagcccucucuggcuc

SEQ ID NO: 20864 - RNA, 22 nt, Artificial Sequence
  GATA2 Guide RNA
cucaccccuacagcagcccucu

SEQ ID NO: 20865 - RNA, 22 nt, Artificial Sequence
  GATA2 Guide RNA
cucucuggcucccaccuuuucg

SEQ ID NO: 20866 - RNA, 22 nt, Artificial Sequence
  GATA2 Guide RNA
gaaaaggugggagccagagagg

SEQ ID NO: 20867 - RNA, 22 nt, Artificial Sequence
  GATA2 Guide RNA
gagagggcugcuguagggguga

SEQ ID NO: 20868 - RNA, 22 nt, Artificial Sequence
  GATA2 Guide RNA
gagccagagagggcugcuguag

SEQ ID NO: 20869 - RNA, 22 nt, Artificial Sequence
  GATA2 Guide RNA
gagggcugcuguaggggugagg

SEQ ID NO: 20870 - RNA, 22 nt, Artificial Sequence
  GATA2 Guide RNA
gcagcccucucuggcucccacc

SEQ ID NO: 20871 - RNA, 22 nt, Artificial Sequence
  GATA2 Guide RNA
gccagagagggcugcuguaggg

SEQ ID NO: 20872 - RNA, 22 nt, Artificial Sequence
  GATA2 Guide RNA
gcccucucuggcucccaccuuu

SEQ ID NO: 20873 - RNA, 22 nt, Artificial Sequence
  GATA2 Guide RNA
gccgaaaaggugggagccagag

SEQ ID NO: 20874 - RNA, 22 nt, Artificial Sequence
  GATA2 Guide RNA
gccucccucaccccuacagcag

SEQ ID NO: 20875 - RNA, 22 nt, Artificial Sequence
  GATA2 Guide RNA
ggagccagagagggcugcugua

SEQ ID NO: 20876 - RNA, 22 nt, Artificial Sequence
  GATA2 Guide RNA
gggagccagagagggcugcugu

SEQ ID NO: 20877 - RNA, 22 nt, Artificial Sequence
  GATA2 Guide RNA
ggugggagccagagagggcugc

SEQ ID NO: 20878 - RNA, 22 nt, Artificial Sequence
  GATA2 Guide RNA
gugggagccagagagggcugcu

SEQ ID NO: 20879 - RNA, 22 nt, Artificial Sequence
  GATA2 Guide RNA
uacagcagcccucucuggcucc

SEQ ID NO: 20880 - RNA, 22 nt, Artificial Sequence
  GATA2 Guide RNA
ucaccccuacagcagcccucuc

SEQ ID NO: 20881 - RNA, 22 nt, Artificial Sequence
  GATA2 Guide RNA
ugggagccagagagggcugcug

SEQ ID NO: 20882 - RNA, 20 nt, Artificial Sequence
  GATA2 Guide RNA
accucuacagcagcccacuc

SEQ ID NO: 20883 - RNA, 20 nt, Artificial Sequence
  GATA2 Guide RNA
agaggugagggaggccacug

SEQ ID NO: 20884 - RNA, 20 nt, Artificial Sequence
  GATA2 Guide RNA
agagugggcugcuguagagg

SEQ ID NO: 20885 - RNA, 20 nt, Artificial Sequence
  GATA2 Guide RNA
agccagagugggcugcugua

SEQ ID NO: 20886 - RNA, 20 nt, Artificial Sequence
  GATA2 Guide RNA
agcucaguggccucccucac

SEQ ID NO: 20887 - RNA, 20 nt, Artificial Sequence
  GATA2 Guide RNA
aggugagggaggccacugag

SEQ ID NO: 20888 - RNA, 20 nt, Artificial Sequence
  GATA2 Guide RNA
aguggccucccucaccucua

SEQ ID NO: 20889 - RNA, 20 nt, Artificial Sequence
  GATA2 Guide RNA
agugggcugcuguagaggug

SEQ ID NO: 20890 - RNA, 20 nt, Artificial Sequence
  GATA2 Guide RNA
caccucuacagcagcccacu

SEQ ID NO: 20891 - RNA, 20 nt, Artificial Sequence
  GATA2 Guide RNA
cagagugggcugcuguagag

SEQ ID NO: 20892 - RNA, 20 nt, Artificial Sequence
  GATA2 Guide RNA
caguggccucccucaccucu

SEQ ID NO: 20893 - RNA, 20 nt, Artificial Sequence
  GATA2 Guide RNA
ccagagugggcugcuguaga

SEQ ID NO: 20894 - RNA, 20 nt, Artificial Sequence
  GATA2 Guide RNA
cccucaccucuacagcagcc

SEQ ID NO: 20895 - RNA, 20 nt, Artificial Sequence
  GATA2 Guide RNA
ccucaccucuacagcagccc

SEQ ID NO: 20896 - RNA, 20 nt, Artificial Sequence
  GATA2 Guide RNA
ccucccucaccucuacagca

SEQ ID NO: 20897 - RNA, 20 nt, Artificial Sequence
  GATA2 Guide RNA
ccucuacagcagcccacucu

SEQ ID NO: 20898 - RNA, 20 nt, Artificial Sequence
  GATA2 Guide RNA
cucaccucuacagcagccca

SEQ ID NO: 20899 - RNA, 20 nt, Artificial Sequence
  GATA2 Guide RNA
cucaguggccucccucaccu

SEQ ID NO: 20900 - RNA, 20 nt, Artificial Sequence
  GATA2 Guide RNA
cucccucaccucuacagcag

SEQ ID NO: 20901 - RNA, 20 nt, Artificial Sequence
  GATA2 Guide RNA
cucuacagcagcccacucug

SEQ ID NO: 20902 - RNA, 20 nt, Artificial Sequence
  GATA2 Guide RNA
cugcuguagaggugagggag

SEQ ID NO: 20903 - RNA, 20 nt, Artificial Sequence
  GATA2 Guide RNA
cuguagaggugagggaggcc

SEQ ID NO: 20904 - RNA, 20 nt, Artificial Sequence
  GATA2 Guide RNA
gagccagagugggcugcugu

SEQ ID NO: 20905 - RNA, 20 nt, Artificial Sequence
  GATA2 Guide RNA
gagcucaguggccucccuca

SEQ ID NO: 20906 - RNA, 20 nt, Artificial Sequence
  GATA2 Guide RNA
gaggugagggaggccacuga

SEQ ID NO: 20907 - RNA, 20 nt, Artificial Sequence
  GATA2 Guide RNA
gagugggcugcuguagaggu

SEQ ID NO: 20908 - RNA, 20 nt, Artificial Sequence
  GATA2 Guide RNA
gccagagugggcugcuguag

SEQ ID NO: 20909 - RNA, 20 nt, Artificial Sequence
  GATA2 Guide RNA
gccucccucaccucuacagc

SEQ ID NO: 20910 - RNA, 20 nt, Artificial Sequence
  GATA2 Guide RNA
gcucaguggccucccucacc

SEQ ID NO: 20911 - RNA, 20 nt, Artificial Sequence
  GATA2 Guide RNA
gcugcuguagaggugaggga

SEQ ID NO: 20912 - RNA, 20 nt, Artificial Sequence
  GATA2 Guide RNA
gcuguagaggugagggaggc

SEQ ID NO: 20913 - RNA, 20 nt, Artificial Sequence
  GATA2 Guide RNA
ggagcucaguggccucccuc

SEQ ID NO: 20914 - RNA, 20 nt, Artificial Sequence
  GATA2 Guide RNA
ggccucccucaccucuacag

SEQ ID NO: 20915 - RNA, 20 nt, Artificial Sequence
  GATA2 Guide RNA
ggcugcuguagaggugaggg

SEQ ID NO: 20916 - RNA, 20 nt, Artificial Sequence
  GATA2 Guide RNA
gggcugcuguagaggugagg

SEQ ID NO: 20917 - RNA, 20 nt, Artificial Sequence
  GATA2 Guide RNA
guagaggugagggaggccac

SEQ ID NO: 20918 - RNA, 20 nt, Artificial Sequence
  GATA2 Guide RNA
guggccucccucaccucuac

SEQ ID NO: 20919 - RNA, 20 nt, Artificial Sequence
  GATA2 Guide RNA
gugggcugcuguagagguga

SEQ ID NO: 20920 - RNA, 20 nt, Artificial Sequence
  GATA2 Guide RNA
uagaggugagggaggccacu

SEQ ID NO: 20921 - RNA, 20 nt, Artificial Sequence
  GATA2 Guide RNA
ucaccucuacagcagcccac

SEQ ID NO: 20922 - RNA, 20 nt, Artificial Sequence
  GATA2 Guide RNA
ucaguggccucccucaccuc

SEQ ID NO: 20923 - RNA, 20 nt, Artificial Sequence
  GATA2 Guide RNA
ucccucaccucuacagcagc

SEQ ID NO: 20924 - RNA, 20 nt, Artificial Sequence
  GATA2 Guide RNA
ugcuguagaggugagggagg

SEQ ID NO: 20925 - RNA, 20 nt, Artificial Sequence
  GATA2 Guide RNA
uggccucccucaccucuaca

SEQ ID NO: 20926 - RNA, 20 nt, Artificial Sequence
  GATA2 Guide RNA
ugggcugcuguagaggugag

SEQ ID NO: 20927 - RNA, 20 nt, Artificial Sequence
  GATA2 Guide RNA
uguagaggugagggaggcca

SEQ ID NO: 20928 - RNA, 21 nt, Artificial Sequence
  GATA2 Guide RNA
accucuacagcagcccacucu

SEQ ID NO: 20929 - RNA, 21 nt, Artificial Sequence
  GATA2 Guide RNA
agaggugagggaggccacuga

SEQ ID NO: 20930 - RNA, 21 nt, Artificial Sequence
  GATA2 Guide RNA
agagugggcugcuguagaggu

SEQ ID NO: 20931 - RNA, 21 nt, Artificial Sequence
  GATA2 Guide RNA
agccagagugggcugcuguag

SEQ ID NO: 20932 - RNA, 21 nt, Artificial Sequence
  GATA2 Guide RNA
agcucaguggccucccucacc

SEQ ID NO: 20933 - RNA, 21 nt, Artificial Sequence
  GATA2 Guide RNA
aggugagggaggccacugagc

SEQ ID NO: 20934 - RNA, 21 nt, Artificial Sequence
  GATA2 Guide RNA
aguggccucccucaccucuac

SEQ ID NO: 20935 - RNA, 21 nt, Artificial Sequence
  GATA2 Guide RNA
agugggcugcuguagagguga

SEQ ID NO: 20936 - RNA, 21 nt, Artificial Sequence
  GATA2 Guide RNA
caccucuacagcagcccacuc

SEQ ID NO: 20937 - RNA, 21 nt, Artificial Sequence
  GATA2 Guide RNA
cagagugggcugcuguagagg

SEQ ID NO: 20938 - RNA, 21 nt, Artificial Sequence
  GATA2 Guide RNA
caguggccucccucaccucua

SEQ ID NO: 20939 - RNA, 21 nt, Artificial Sequence
  GATA2 Guide RNA
ccagagugggcugcuguagag

SEQ ID NO: 20940 - RNA, 21 nt, Artificial Sequence
  GATA2 Guide RNA
cccucaccucuacagcagccc

SEQ ID NO: 20941 - RNA, 21 nt, Artificial Sequence
  GATA2 Guide RNA
ccucaccucuacagcagccca

SEQ ID NO: 20942 - RNA, 21 nt, Artificial Sequence
  GATA2 Guide RNA
ccucccucaccucuacagcag

SEQ ID NO: 20943 - RNA, 21 nt, Artificial Sequence
  GATA2 Guide RNA
ccucuacagcagcccacucug

SEQ ID NO: 20944 - RNA, 21 nt, Artificial Sequence
  GATA2 Guide RNA
cucaccucuacagcagcccac

SEQ ID NO: 20945 - RNA, 21 nt, Artificial Sequence
  GATA2 Guide RNA
cucaguggccucccucaccuc

SEQ ID NO: 20946 - RNA, 21 nt, Artificial Sequence
  GATA2 Guide RNA
cucccucaccucuacagcagc

SEQ ID NO: 20947 - RNA, 21 nt, Artificial Sequence
  GATA2 Guide RNA
cucuacagcagcccacucugg

SEQ ID NO: 20948 - RNA, 21 nt, Artificial Sequence
  GATA2 Guide RNA
cugcuguagaggugagggagg

SEQ ID NO: 20949 - RNA, 21 nt, Artificial Sequence
  GATA2 Guide RNA
cuguagaggugagggaggcca

SEQ ID NO: 20950 - RNA, 21 nt, Artificial Sequence
  GATA2 Guide RNA
gagccagagugggcugcugua

SEQ ID NO: 20951 - RNA, 21 nt, Artificial Sequence
  GATA2 Guide RNA
gagcucaguggccucccucac

SEQ ID NO: 20952 - RNA, 21 nt, Artificial Sequence
  GATA2 Guide RNA
gaggugagggaggccacugag

SEQ ID NO: 20953 - RNA, 21 nt, Artificial Sequence
  GATA2 Guide RNA
gagugggcugcuguagaggug

SEQ ID NO: 20954 - RNA, 21 nt, Artificial Sequence
  GATA2 Guide RNA
gccagagugggcugcuguaga

SEQ ID NO: 20955 - RNA, 21 nt, Artificial Sequence
  GATA2 Guide RNA
gccucccucaccucuacagca

SEQ ID NO: 20956 - RNA, 21 nt, Artificial Sequence
  GATA2 Guide RNA
gcucaguggccucccucaccu

SEQ ID NO: 20957 - RNA, 21 nt, Artificial Sequence
  GATA2 Guide RNA
gcugcuguagaggugagggag

SEQ ID NO: 20958 - RNA, 21 nt, Artificial Sequence
  GATA2 Guide RNA
gcuguagaggugagggaggcc

SEQ ID NO: 20959 - RNA, 21 nt, Artificial Sequence
  GATA2 Guide RNA
ggagccagagugggcugcugu

SEQ ID NO: 20960 - RNA, 21 nt, Artificial Sequence
  GATA2 Guide RNA
ggagcucaguggccucccuca

SEQ ID NO: 20961 - RNA, 21 nt, Artificial Sequence
  GATA2 Guide RNA
ggccucccucaccucuacagc

SEQ ID NO: 20962 - RNA, 21 nt, Artificial Sequence
  GATA2 Guide RNA
ggcugcuguagaggugaggga

SEQ ID NO: 20963 - RNA, 21 nt, Artificial Sequence
  GATA2 Guide RNA
gggagcucaguggccucccuc

SEQ ID NO: 20964 - RNA, 21 nt, Artificial Sequence
  GATA2 Guide RNA
gggcugcuguagaggugaggg

SEQ ID NO: 20965 - RNA, 21 nt, Artificial Sequence
  GATA2 Guide RNA
guagaggugagggaggccacu

SEQ ID NO: 20966 - RNA, 21 nt, Artificial Sequence
  GATA2 Guide RNA
guggccucccucaccucuaca

SEQ ID NO: 20967 - RNA, 21 nt, Artificial Sequence
  GATA2 Guide RNA
gugggcugcuguagaggugag

SEQ ID NO: 20968 - RNA, 21 nt, Artificial Sequence
  GATA2 Guide RNA
uagaggugagggaggccacug

SEQ ID NO: 20969 - RNA, 21 nt, Artificial Sequence
  GATA2 Guide RNA
ucaccucuacagcagcccacu

SEQ ID NO: 20970 - RNA, 21 nt, Artificial Sequence
  GATA2 Guide RNA
ucaguggccucccucaccucu

SEQ ID NO: 20971 - RNA, 21 nt, Artificial Sequence
  GATA2 Guide RNA
ucccucaccucuacagcagcc

SEQ ID NO: 20972 - RNA, 21 nt, Artificial Sequence
  GATA2 Guide RNA
ugcuguagaggugagggaggc

SEQ ID NO: 20973 - RNA, 21 nt, Artificial Sequence
  GATA2 Guide RNA
uggccucccucaccucuacag

SEQ ID NO: 20974 - RNA, 21 nt, Artificial Sequence
  GATA2 Guide RNA
ugggcugcuguagaggugagg

SEQ ID NO: 20975 - RNA, 21 nt, Artificial Sequence
  GATA2 Guide RNA
uguagaggugagggaggccac

SEQ ID NO: 20976 - RNA, 22 nt, Artificial Sequence
  GATA2 Guide RNA
accucuacagcagcccacucug

SEQ ID NO: 20977 - RNA, 22 nt, Artificial Sequence
  GATA2 Guide RNA
agaggugagggaggccacugag

SEQ ID NO: 20978 - RNA, 22 nt, Artificial Sequence
  GATA2 Guide RNA
agagugggcugcuguagaggug

SEQ ID NO: 20979 - RNA, 22 nt, Artificial Sequence
  GATA2 Guide RNA
agccagagugggcugcuguaga

SEQ ID NO: 20980 - RNA, 22 nt, Artificial Sequence
  GATA2 Guide RNA
agcucaguggccucccucaccu

SEQ ID NO: 20981 - RNA, 22 nt, Artificial Sequence
  GATA2 Guide RNA
aggugagggaggccacugagcu

SEQ ID NO: 20982 - RNA, 22 nt, Artificial Sequence
  GATA2 Guide RNA
aguggccucccucaccucuaca

SEQ ID NO: 20983 - RNA, 22 nt, Artificial Sequence
  GATA2 Guide RNA
agugggcugcuguagaggugag

SEQ ID NO: 20984 - RNA, 22 nt, Artificial Sequence
  GATA2 Guide RNA
caccucuacagcagcccacucu

SEQ ID NO: 20985 - RNA, 22 nt, Artificial Sequence
  GATA2 Guide RNA
cagagugggcugcuguagaggu

SEQ ID NO: 20986 - RNA, 22 nt, Artificial Sequence
  GATA2 Guide RNA
caguggccucccucaccucuac

SEQ ID NO: 20987 - RNA, 22 nt, Artificial Sequence
  GATA2 Guide RNA
ccagagugggcugcuguagagg

SEQ ID NO: 20988 - RNA, 22 nt, Artificial Sequence
  GATA2 Guide RNA
cccucaccucuacagcagccca

SEQ ID NO: 20989 - RNA, 22 nt, Artificial Sequence
  GATA2 Guide RNA
ccucaccucuacagcagcccac

SEQ ID NO: 20990 - RNA, 22 nt, Artificial Sequence
  GATA2 Guide RNA
ccucccucaccucuacagcagc

SEQ ID NO: 20991 - RNA, 22 nt, Artificial Sequence
  GATA2 Guide RNA
ccucuacagcagcccacucugg

SEQ ID NO: 20992 - RNA, 22 nt, Artificial Sequence
  GATA2 Guide RNA
cgggagcucaguggccucccuc

SEQ ID NO: 20993 - RNA, 22 nt, Artificial Sequence
  GATA2 Guide RNA
cucaccucuacagcagcccacu

SEQ ID NO: 20994 - RNA, 22 nt, Artificial Sequence
  GATA2 Guide RNA
cucaguggccucccucaccucu

SEQ ID NO: 20995 - RNA, 22 nt, Artificial Sequence
  GATA2 Guide RNA
cucccucaccucuacagcagcc

SEQ ID NO: 20996 - RNA, 22 nt, Artificial Sequence
  GATA2 Guide RNA
cucuacagcagcccacucuggc

SEQ ID NO: 20997 - RNA, 22 nt, Artificial Sequence
  GATA2 Guide RNA
cugcuguagaggugagggaggc

SEQ ID NO: 20998 - RNA, 22 nt, Artificial Sequence
  GATA2 Guide RNA
cuguagaggugagggaggccac

SEQ ID NO: 20999 - RNA, 22 nt, Artificial Sequence
  GATA2 Guide RNA
gagccagagugggcugcuguag

SEQ ID NO: 21000 - RNA, 22 nt, Artificial Sequence
  GATA2 Guide RNA
gagcucaguggccucccucacc

SEQ ID NO: 21001 - RNA, 22 nt, Artificial Sequence
  GATA2 Guide RNA
gaggugagggaggccacugagc

SEQ ID NO: 21002 - RNA, 22 nt, Artificial Sequence
  GATA2 Guide RNA
gagugggcugcuguagagguga

SEQ ID NO: 21003 - RNA, 22 nt, Artificial Sequence
  GATA2 Guide RNA
gccagagugggcugcuguagag

SEQ ID NO: 21004 - RNA, 22 nt, Artificial Sequence
  GATA2 Guide RNA
gccucccucaccucuacagcag

SEQ ID NO: 21005 - RNA, 22 nt, Artificial Sequence
  GATA2 Guide RNA
gcucaguggccucccucaccuc

SEQ ID NO: 21006 - RNA, 22 nt, Artificial Sequence
  GATA2 Guide RNA
gcugcuguagaggugagggagg

SEQ ID NO: 21007 - RNA, 22 nt, Artificial Sequence
  GATA2 Guide RNA
gcuguagaggugagggaggcca

SEQ ID NO: 21008 - RNA, 22 nt, Artificial Sequence
  GATA2 Guide RNA
ggagccagagugggcugcugua

SEQ ID NO: 21009 - RNA, 22 nt, Artificial Sequence
  GATA2 Guide RNA
ggagcucaguggccucccucac

SEQ ID NO: 21010 - RNA, 22 nt, Artificial Sequence
  GATA2 Guide RNA
ggccucccucaccucuacagca

SEQ ID NO: 21011 - RNA, 22 nt, Artificial Sequence
  GATA2 Guide RNA
ggcugcuguagaggugagggag

SEQ ID NO: 21012 - RNA, 22 nt, Artificial Sequence
  GATA2 Guide RNA
gggagccagagugggcugcugu

SEQ ID NO: 21013 - RNA, 22 nt, Artificial Sequence
  GATA2 Guide RNA
gggagcucaguggccucccuca

SEQ ID NO: 21014 - RNA, 22 nt, Artificial Sequence
  GATA2 Guide RNA
gggcugcuguagaggugaggga

SEQ ID NO: 21015 - RNA, 22 nt, Artificial Sequence
  GATA2 Guide RNA
guagaggugagggaggccacug

SEQ ID NO: 21016 - RNA, 22 nt, Artificial Sequence
  GATA2 Guide RNA
guggccucccucaccucuacag

SEQ ID NO: 21017 - RNA, 22 nt, Artificial Sequence
  GATA2 Guide RNA
gugggcugcuguagaggugagg

SEQ ID NO: 21018 - RNA, 22 nt, Artificial Sequence
  GATA2 Guide RNA
uagaggugagggaggccacuga

SEQ ID NO: 21019 - RNA, 22 nt, Artificial Sequence
  GATA2 Guide RNA
ucaccucuacagcagcccacuc

SEQ ID NO: 21020 - RNA, 22 nt, Artificial Sequence
  GATA2 Guide RNA
ucaguggccucccucaccucua

SEQ ID NO: 21021 - RNA, 22 nt, Artificial Sequence
  GATA2 Guide RNA
ucccucaccucuacagcagccc

SEQ ID NO: 21022 - RNA, 22 nt, Artificial Sequence
  GATA2 Guide RNA
ugcuguagaggugagggaggcc

SEQ ID NO: 21023 - RNA, 22 nt, Artificial Sequence
  GATA2 Guide RNA
uggccucccucaccucuacagc

SEQ ID NO: 21024 - RNA, 22 nt, Artificial Sequence
  GATA2 Guide RNA
ugggcugcuguagaggugaggg

SEQ ID NO: 21025 - RNA, 22 nt, Artificial Sequence
  GATA2 Guide RNA
uguagaggugagggaggccacu

SEQ ID NO: 21026 - RNA, 20 nt, Artificial Sequence
  GATA2 Guide RNA
acacugagcucccgcugccu

SEQ ID NO: 21027 - RNA, 20 nt, Artificial Sequence
  GATA2 Guide RNA
agcgggagcucaguguccuc

SEQ ID NO: 21028 - RNA, 20 nt, Artificial Sequence
  GATA2 Guide RNA
agcucaguguccucccucac

SEQ ID NO: 21029 - RNA, 20 nt, Artificial Sequence
  GATA2 Guide RNA
aggacacugagcucccgcug

SEQ ID NO: 21030 - RNA, 20 nt, Artificial Sequence
  GATA2 Guide RNA
aggcagcgggagcucagugu

SEQ ID NO: 21031 - RNA, 20 nt, Artificial Sequence
  GATA2 Guide RNA
agggaggacacugagcuccc

SEQ ID NO: 21032 - RNA, 20 nt, Artificial Sequence
  GATA2 Guide RNA
aggggugagggaggacacug

SEQ ID NO: 21033 - RNA, 20 nt, Artificial Sequence
  GATA2 Guide RNA
aguguccucccucaccccua

SEQ ID NO: 21034 - RNA, 20 nt, Artificial Sequence
  GATA2 Guide RNA
cagcgggagcucaguguccu

SEQ ID NO: 21035 - RNA, 20 nt, Artificial Sequence
  GATA2 Guide RNA
caguguccucccucaccccu

SEQ ID NO: 21036 - RNA, 20 nt, Artificial Sequence
  GATA2 Guide RNA
cgggagcucaguguccuccc

SEQ ID NO: 21037 - RNA, 20 nt, Artificial Sequence
  GATA2 Guide RNA
cucaguguccucccucaccc

SEQ ID NO: 21038 - RNA, 20 nt, Artificial Sequence
  GATA2 Guide RNA
cugcuguaggggugagggag

SEQ ID NO: 21039 - RNA, 20 nt, Artificial Sequence
  GATA2 Guide RNA
cuguaggggugagggaggac

SEQ ID NO: 21040 - RNA, 20 nt, Artificial Sequence
  GATA2 Guide RNA
gacacugagcucccgcugcc

SEQ ID NO: 21041 - RNA, 20 nt, Artificial Sequence
  GATA2 Guide RNA
gagcucaguguccucccuca

SEQ ID NO: 21042 - RNA, 20 nt, Artificial Sequence
  GATA2 Guide RNA
gaggacacugagcucccgcu

SEQ ID NO: 21043 - RNA, 20 nt, Artificial Sequence
  GATA2 Guide RNA
gaggcagcgggagcucagug

SEQ ID NO: 21044 - RNA, 20 nt, Artificial Sequence
  GATA2 Guide RNA
gagggaggacacugagcucc

SEQ ID NO: 21045 - RNA, 20 nt, Artificial Sequence
  GATA2 Guide RNA
gcagcgggagcucagugucc

SEQ ID NO: 21046 - RNA, 20 nt, Artificial Sequence
  GATA2 Guide RNA
gcgggagcucaguguccucc

SEQ ID NO: 21047 - RNA, 20 nt, Artificial Sequence
  GATA2 Guide RNA
gcucaguguccucccucacc

SEQ ID NO: 21048 - RNA, 20 nt, Artificial Sequence
  GATA2 Guide RNA
gcugcuguaggggugaggga

SEQ ID NO: 21049 - RNA, 20 nt, Artificial Sequence
  GATA2 Guide RNA
gcuguaggggugagggagga

SEQ ID NO: 21050 - RNA, 20 nt, Artificial Sequence
  GATA2 Guide RNA
ggacacugagcucccgcugc

SEQ ID NO: 21051 - RNA, 20 nt, Artificial Sequence
  GATA2 Guide RNA
ggagcucaguguccucccuc

SEQ ID NO: 21052 - RNA, 20 nt, Artificial Sequence
  GATA2 Guide RNA
ggaggacacugagcucccgc

SEQ ID NO: 21053 - RNA, 20 nt, Artificial Sequence
  GATA2 Guide RNA
ggaggcagcgggagcucagu

SEQ ID NO: 21054 - RNA, 20 nt, Artificial Sequence
  GATA2 Guide RNA
ggcagcgggagcucaguguc

SEQ ID NO: 21055 - RNA, 20 nt, Artificial Sequence
  GATA2 Guide RNA
gggagcucaguguccucccu

SEQ ID NO: 21056 - RNA, 20 nt, Artificial Sequence
  GATA2 Guide RNA
gggaggacacugagcucccg

SEQ ID NO: 21057 - RNA, 20 nt, Artificial Sequence
  GATA2 Guide RNA
gggaggcagcgggagcucag

SEQ ID NO: 21058 - RNA, 20 nt, Artificial Sequence
  GATA2 Guide RNA
ggggaggcagcgggagcuca

SEQ ID NO: 21059 - RNA, 20 nt, Artificial Sequence
  GATA2 Guide RNA
ggggugagggaggacacuga

SEQ ID NO: 21060 - RNA, 20 nt, Artificial Sequence
  GATA2 Guide RNA
gggugagggaggacacugag

SEQ ID NO: 21061 - RNA, 20 nt, Artificial Sequence
  GATA2 Guide RNA
ggugagggaggacacugagc

SEQ ID NO: 21062 - RNA, 20 nt, Artificial Sequence
  GATA2 Guide RNA
guaggggugagggaggacac

SEQ ID NO: 21063 - RNA, 20 nt, Artificial Sequence
  GATA2 Guide RNA
guccucccucaccccuacag

SEQ ID NO: 21064 - RNA, 20 nt, Artificial Sequence
  GATA2 Guide RNA
gugagggaggacacugagcu

SEQ ID NO: 21065 - RNA, 20 nt, Artificial Sequence
  GATA2 Guide RNA
guguccucccucaccccuac

SEQ ID NO: 21066 - RNA, 20 nt, Artificial Sequence
  GATA2 Guide RNA
uaggggugagggaggacacu

SEQ ID NO: 21067 - RNA, 20 nt, Artificial Sequence
  GATA2 Guide RNA
ucaguguccucccucacccc

SEQ ID NO: 21068 - RNA, 20 nt, Artificial Sequence
  GATA2 Guide RNA
ugagggaggacacugagcuc

SEQ ID NO: 21069 - RNA, 20 nt, Artificial Sequence
  GATA2 Guide RNA
ugcuguaggggugagggagg

SEQ ID NO: 21070 - RNA, 20 nt, Artificial Sequence
  GATA2 Guide RNA
uguaggggugagggaggaca

SEQ ID NO: 21071 - RNA, 20 nt, Artificial Sequence
  GATA2 Guide RNA
uguccucccucaccccuaca

SEQ ID NO: 21072 - RNA, 21 nt, Artificial Sequence
  GATA2 Guide RNA
acacugagcucccgcugccuc

SEQ ID NO: 21073 - RNA, 21 nt, Artificial Sequence
  GATA2 Guide RNA
agcgggagcucaguguccucc

SEQ ID NO: 21074 - RNA, 21 nt, Artificial Sequence
  GATA2 Guide RNA
agcucaguguccucccucacc

SEQ ID NO: 21075 - RNA, 21 nt, Artificial Sequence
  GATA2 Guide RNA
aggacacugagcucccgcugc

SEQ ID NO: 21076 - RNA, 21 nt, Artificial Sequence
  GATA2 Guide RNA
aggcagcgggagcucaguguc

SEQ ID NO: 21077 - RNA, 21 nt, Artificial Sequence
  GATA2 Guide RNA
agggaggacacugagcucccg

SEQ ID NO: 21078 - RNA, 21 nt, Artificial Sequence
  GATA2 Guide RNA
aggggugagggaggacacuga

SEQ ID NO: 21079 - RNA, 21 nt, Artificial Sequence
  GATA2 Guide RNA
aguguccucccucaccccuac

SEQ ID NO: 21080 - RNA, 21 nt, Artificial Sequence
  GATA2 Guide RNA
cagcgggagcucaguguccuc

SEQ ID NO: 21081 - RNA, 21 nt, Artificial Sequence
  GATA2 Guide RNA
caguguccucccucaccccua

SEQ ID NO: 21082 - RNA, 21 nt, Artificial Sequence
  GATA2 Guide RNA
cgggagcucaguguccucccu

SEQ ID NO: 21083 - RNA, 21 nt, Artificial Sequence
  GATA2 Guide RNA
cucaguguccucccucacccc

SEQ ID NO: 21084 - RNA, 21 nt, Artificial Sequence
  GATA2 Guide RNA
cugcuguaggggugagggagg

SEQ ID NO: 21085 - RNA, 21 nt, Artificial Sequence
  GATA2 Guide RNA
cuguaggggugagggaggaca

SEQ ID NO: 21086 - RNA, 21 nt, Artificial Sequence
  GATA2 Guide RNA
gacacugagcucccgcugccu

SEQ ID NO: 21087 - RNA, 21 nt, Artificial Sequence
  GATA2 Guide RNA
gagcucaguguccucccucac

SEQ ID NO: 21088 - RNA, 21 nt, Artificial Sequence
  GATA2 Guide RNA
gaggacacugagcucccgcug

SEQ ID NO: 21089 - RNA, 21 nt, Artificial Sequence
  GATA2 Guide RNA
gaggcagcgggagcucagugu

SEQ ID NO: 21090 - RNA, 21 nt, Artificial Sequence
  GATA2 Guide RNA
gagggaggacacugagcuccc

SEQ ID NO: 21091 - RNA, 21 nt, Artificial Sequence
  GATA2 Guide RNA
gcagcgggagcucaguguccu

SEQ ID NO: 21092 - RNA, 21 nt, Artificial Sequence
  GATA2 Guide RNA
gcgggagcucaguguccuccc

SEQ ID NO: 21093 - RNA, 21 nt, Artificial Sequence
  GATA2 Guide RNA
gcucaguguccucccucaccc

SEQ ID NO: 21094 - RNA, 21 nt, Artificial Sequence
  GATA2 Guide RNA
gcugcuguaggggugagggag

SEQ ID NO: 21095 - RNA, 21 nt, Artificial Sequence
  GATA2 Guide RNA
gcuguaggggugagggaggac

SEQ ID NO: 21096 - RNA, 21 nt, Artificial Sequence
  GATA2 Guide RNA
ggacacugagcucccgcugcc

SEQ ID NO: 21097 - RNA, 21 nt, Artificial Sequence
  GATA2 Guide RNA
ggagcucaguguccucccuca

SEQ ID NO: 21098 - RNA, 21 nt, Artificial Sequence
  GATA2 Guide RNA
ggaggacacugagcucccgcu

SEQ ID NO: 21099 - RNA, 21 nt, Artificial Sequence
  GATA2 Guide RNA
ggaggcagcgggagcucagug

SEQ ID NO: 21100 - RNA, 21 nt, Artificial Sequence
  GATA2 Guide RNA
ggcagcgggagcucagugucc

SEQ ID NO: 21101 - RNA, 21 nt, Artificial Sequence
  GATA2 Guide RNA
ggcugcuguaggggugaggga

SEQ ID NO: 21102 - RNA, 21 nt, Artificial Sequence
  GATA2 Guide RNA
gggagcucaguguccucccuc

SEQ ID NO: 21103 - RNA, 21 nt, Artificial Sequence
  GATA2 Guide RNA
gggaggacacugagcucccgc

SEQ ID NO: 21104 - RNA, 21 nt, Artificial Sequence
  GATA2 Guide RNA
gggaggcagcgggagcucagu

SEQ ID NO: 21105 - RNA, 21 nt, Artificial Sequence
  GATA2 Guide RNA
ggggaggcagcgggagcucag

SEQ ID NO: 21106 - RNA, 21 nt, Artificial Sequence
  GATA2 Guide RNA
gggggaggcagcgggagcuca

SEQ ID NO: 21107 - RNA, 21 nt, Artificial Sequence
  GATA2 Guide RNA
ggggugagggaggacacugag

SEQ ID NO: 21108 - RNA, 21 nt, Artificial Sequence
  GATA2 Guide RNA
gggugagggaggacacugagc

SEQ ID NO: 21109 - RNA, 21 nt, Artificial Sequence
  GATA2 Guide RNA
ggugagggaggacacugagcu

SEQ ID NO: 21110 - RNA, 21 nt, Artificial Sequence
  GATA2 Guide RNA
guaggggugagggaggacacu

SEQ ID NO: 21111 - RNA, 21 nt, Artificial Sequence
  GATA2 Guide RNA
guccucccucaccccuacagc

SEQ ID NO: 21112 - RNA, 21 nt, Artificial Sequence
  GATA2 Guide RNA
gugagggaggacacugagcuc

SEQ ID NO: 21113 - RNA, 21 nt, Artificial Sequence
  GATA2 Guide RNA
guguccucccucaccccuaca

SEQ ID NO: 21114 - RNA, 21 nt, Artificial Sequence
  GATA2 Guide RNA
uaggggugagggaggacacug

SEQ ID NO: 21115 - RNA, 21 nt, Artificial Sequence
  GATA2 Guide RNA
ucaguguccucccucaccccu

SEQ ID NO: 21116 - RNA, 21 nt, Artificial Sequence
  GATA2 Guide RNA
ugagggaggacacugagcucc

SEQ ID NO: 21117 - RNA, 21 nt, Artificial Sequence
  GATA2 Guide RNA
ugcuguaggggugagggagga

SEQ ID NO: 21118 - RNA, 21 nt, Artificial Sequence
  GATA2 Guide RNA
uguaggggugagggaggacac

SEQ ID NO: 21119 - RNA, 21 nt, Artificial Sequence
  GATA2 Guide RNA
uguccucccucaccccuacag

SEQ ID NO: 21120 - RNA, 22 nt, Artificial Sequence
  GATA2 Guide RNA
acacugagcucccgcugccucc

SEQ ID NO: 21121 - RNA, 22 nt, Artificial Sequence
  GATA2 Guide RNA
agcgggagcucaguguccuccc

SEQ ID NO: 21122 - RNA, 22 nt, Artificial Sequence
  GATA2 Guide RNA
agcucaguguccucccucaccc

SEQ ID NO: 21123 - RNA, 22 nt, Artificial Sequence
  GATA2 Guide RNA
aggacacugagcucccgcugcc

SEQ ID NO: 21124 - RNA, 22 nt, Artificial Sequence
  GATA2 Guide RNA
aggcagcgggagcucagugucc

SEQ ID NO: 21125 - RNA, 22 nt, Artificial Sequence
  GATA2 Guide RNA
agggaggacacugagcucccgc

SEQ ID NO: 21126 - RNA, 22 nt, Artificial Sequence
  GATA2 Guide RNA
aggggugagggaggacacugag

SEQ ID NO: 21127 - RNA, 22 nt, Artificial Sequence
  GATA2 Guide RNA
aguguccucccucaccccuaca

SEQ ID NO: 21128 - RNA, 22 nt, Artificial Sequence
  GATA2 Guide RNA
cagcgggagcucaguguccucc

SEQ ID NO: 21129 - RNA, 22 nt, Artificial Sequence
  GATA2 Guide RNA
caguguccucccucaccccuac

SEQ ID NO: 21130 - RNA, 22 nt, Artificial Sequence
  GATA2 Guide RNA
cgggagcucaguguccucccuc

SEQ ID NO: 21131 - RNA, 22 nt, Artificial Sequence
  GATA2 Guide RNA
cgggggaggcagcgggagcuca

SEQ ID NO: 21132 - RNA, 22 nt, Artificial Sequence
  GATA2 Guide RNA
cucaguguccucccucaccccu

SEQ ID NO: 21133 - RNA, 22 nt, Artificial Sequence
  GATA2 Guide RNA
cugcuguaggggugagggagga

SEQ ID NO: 21134 - RNA, 22 nt, Artificial Sequence
  GATA2 Guide RNA
cuguaggggugagggaggacac

SEQ ID NO: 21135 - RNA, 22 nt, Artificial Sequence
  GATA2 Guide RNA
gacacugagcucccgcugccuc

SEQ ID NO: 21136 - RNA, 22 nt, Artificial Sequence
  GATA2 Guide RNA
gagcucaguguccucccucacc

SEQ ID NO: 21137 - RNA, 22 nt, Artificial Sequence
  GATA2 Guide RNA
gaggacacugagcucccgcugc

SEQ ID NO: 21138 - RNA, 22 nt, Artificial Sequence
  GATA2 Guide RNA
gaggcagcgggagcucaguguc

SEQ ID NO: 21139 - RNA, 22 nt, Artificial Sequence
  GATA2 Guide RNA
gagggaggacacugagcucccg

SEQ ID NO: 21140 - RNA, 22 nt, Artificial Sequence
  GATA2 Guide RNA
gcagcgggagcucaguguccuc

SEQ ID NO: 21141 - RNA, 22 nt, Artificial Sequence
  GATA2 Guide RNA
gcgggagcucaguguccucccu

SEQ ID NO: 21142 - RNA, 22 nt, Artificial Sequence
  GATA2 Guide RNA
gcucaguguccucccucacccc

SEQ ID NO: 21143 - RNA, 22 nt, Artificial Sequence
  GATA2 Guide RNA
gcugcuguaggggugagggagg

SEQ ID NO: 21144 - RNA, 22 nt, Artificial Sequence
  GATA2 Guide RNA
gcuguaggggugagggaggaca

SEQ ID NO: 21145 - RNA, 22 nt, Artificial Sequence
  GATA2 Guide RNA
ggacacugagcucccgcugccu

SEQ ID NO: 21146 - RNA, 22 nt, Artificial Sequence
  GATA2 Guide RNA
ggagcucaguguccucccucac

SEQ ID NO: 21147 - RNA, 22 nt, Artificial Sequence
  GATA2 Guide RNA
ggaggacacugagcucccgcug

SEQ ID NO: 21148 - RNA, 22 nt, Artificial Sequence
  GATA2 Guide RNA
ggaggcagcgggagcucagugu

SEQ ID NO: 21149 - RNA, 22 nt, Artificial Sequence
  GATA2 Guide RNA
ggcagcgggagcucaguguccu

SEQ ID NO: 21150 - RNA, 22 nt, Artificial Sequence
  GATA2 Guide RNA
ggcugcuguaggggugagggag

SEQ ID NO: 21151 - RNA, 22 nt, Artificial Sequence
  GATA2 Guide RNA
gggagcucaguguccucccuca

SEQ ID NO: 21152 - RNA, 22 nt, Artificial Sequence
  GATA2 Guide RNA
gggaggacacugagcucccgcu

SEQ ID NO: 21153 - RNA, 22 nt, Artificial Sequence
  GATA2 Guide RNA
gggaggcagcgggagcucagug

SEQ ID NO: 21154 - RNA, 22 nt, Artificial Sequence
  GATA2 Guide RNA
gggcugcuguaggggugaggga

SEQ ID NO: 21155 - RNA, 22 nt, Artificial Sequence
  GATA2 Guide RNA
ggggaggcagcgggagcucagu

SEQ ID NO: 21156 - RNA, 22 nt, Artificial Sequence
  GATA2 Guide RNA
gggggaggcagcgggagcucag

SEQ ID NO: 21157 - RNA, 22 nt, Artificial Sequence
  GATA2 Guide RNA
ggggugagggaggacacugagc

SEQ ID NO: 21158 - RNA, 22 nt, Artificial Sequence
  GATA2 Guide RNA
gggugagggaggacacugagcu

SEQ ID NO: 21159 - RNA, 22 nt, Artificial Sequence
  GATA2 Guide RNA
ggugagggaggacacugagcuc

SEQ ID NO: 21160 - RNA, 22 nt, Artificial Sequence
  GATA2 Guide RNA
guaggggugagggaggacacug

SEQ ID NO: 21161 - RNA, 22 nt, Artificial Sequence
  GATA2 Guide RNA
guccucccucaccccuacagca

SEQ ID NO: 21162 - RNA, 22 nt, Artificial Sequence
  GATA2 Guide RNA
gugagggaggacacugagcucc

SEQ ID NO: 21163 - RNA, 22 nt, Artificial Sequence
  GATA2 Guide RNA
guguccucccucaccccuacag

SEQ ID NO: 21164 - RNA, 22 nt, Artificial Sequence
  GATA2 Guide RNA
uaggggugagggaggacacuga

SEQ ID NO: 21165 - RNA, 22 nt, Artificial Sequence
  GATA2 Guide RNA
ucaguguccucccucaccccua

SEQ ID NO: 21166 - RNA, 22 nt, Artificial Sequence
  GATA2 Guide RNA
ugagggaggacacugagcuccc

SEQ ID NO: 21167 - RNA, 22 nt, Artificial Sequence
  GATA2 Guide RNA
ugcuguaggggugagggaggac

SEQ ID NO: 21168 - RNA, 22 nt, Artificial Sequence
  GATA2 Guide RNA
uguaggggugagggaggacacu

SEQ ID NO: 21169 - RNA, 22 nt, Artificial Sequence
  GATA2 Guide RNA
uguccucccucaccccuacagc

SEQ ID NO: 21170 - RNA, 20 nt, Artificial Sequence
  GATA2 Guide RNA
acugagcuccugcugccucc

SEQ ID NO: 21171 - RNA, 20 nt, Artificial Sequence
  GATA2 Guide RNA
agcaggagcucaguggccuc

SEQ ID NO: 21172 - RNA, 20 nt, Artificial Sequence
  GATA2 Guide RNA
agcgggggaggcagcaggag

SEQ ID NO: 21173 - RNA, 20 nt, Artificial Sequence
  GATA2 Guide RNA
agcuccugcugccucccccg

SEQ ID NO: 21174 - RNA, 20 nt, Artificial Sequence
  GATA2 Guide RNA
aggcagcaggagcucagugg

SEQ ID NO: 21175 - RNA, 20 nt, Artificial Sequence
  GATA2 Guide RNA
aggccacugagcuccugcug

SEQ ID NO: 21176 - RNA, 20 nt, Artificial Sequence
  GATA2 Guide RNA
agggaggccacugagcuccu

SEQ ID NO: 21177 - RNA, 20 nt, Artificial Sequence
  GATA2 Guide RNA
cacugagcuccugcugccuc

SEQ ID NO: 21178 - RNA, 20 nt, Artificial Sequence
  GATA2 Guide RNA
cagcaggagcucaguggccu

SEQ ID NO: 21179 - RNA, 20 nt, Artificial Sequence
  GATA2 Guide RNA
caggagcucaguggccuccc

SEQ ID NO: 21180 - RNA, 20 nt, Artificial Sequence
  GATA2 Guide RNA
ccacugagcuccugcugccu

SEQ ID NO: 21181 - RNA, 20 nt, Artificial Sequence
  GATA2 Guide RNA
ccugcugccucccccgcucc

SEQ ID NO: 21182 - RNA, 20 nt, Artificial Sequence
  GATA2 Guide RNA
cgggggaggcagcaggagcu

SEQ ID NO: 21183 - RNA, 20 nt, Artificial Sequence
  GATA2 Guide RNA
cuccugcugccucccccgcu

SEQ ID NO: 21184 - RNA, 20 nt, Artificial Sequence
  GATA2 Guide RNA
cugagcuccugcugccuccc

SEQ ID NO: 21185 - RNA, 20 nt, Artificial Sequence
  GATA2 Guide RNA
cugcugccucccccgcuccc

SEQ ID NO: 21186 - RNA, 20 nt, Artificial Sequence
  GATA2 Guide RNA
gagcgggggaggcagcagga

SEQ ID NO: 21187 - RNA, 20 nt, Artificial Sequence
  GATA2 Guide RNA
gagcuccugcugccuccccc

SEQ ID NO: 21188 - RNA, 20 nt, Artificial Sequence
  GATA2 Guide RNA
gaggcagcaggagcucagug

SEQ ID NO: 21189 - RNA, 20 nt, Artificial Sequence
  GATA2 Guide RNA
gaggccacugagcuccugcu

SEQ ID NO: 21190 - RNA, 20 nt, Artificial Sequence
  GATA2 Guide RNA
gagggaggccacugagcucc

SEQ ID NO: 21191 - RNA, 20 nt, Artificial Sequence
  GATA2 Guide RNA
gcagcaggagcucaguggcc

SEQ ID NO: 21192 - RNA, 20 nt, Artificial Sequence
  GATA2 Guide RNA
gcaggagcucaguggccucc

SEQ ID NO: 21193 - RNA, 20 nt, Artificial Sequence
  GATA2 Guide RNA
gccacugagcuccugcugcc

SEQ ID NO: 21194 - RNA, 20 nt, Artificial Sequence
  GATA2 Guide RNA
gcgggggaggcagcaggagc

SEQ ID NO: 21195 - RNA, 20 nt, Artificial Sequence
  GATA2 Guide RNA
gcuccugcugccucccccgc

SEQ ID NO: 21196 - RNA, 20 nt, Artificial Sequence
  GATA2 Guide RNA
ggagcgggggaggcagcagg

SEQ ID NO: 21197 - RNA, 20 nt, Artificial Sequence
  GATA2 Guide RNA
ggaggcagcaggagcucagu

SEQ ID NO: 21198 - RNA, 20 nt, Artificial Sequence
  GATA2 Guide RNA
ggaggccacugagcuccugc

SEQ ID NO: 21199 - RNA, 20 nt, Artificial Sequence
  GATA2 Guide RNA
ggcagcaggagcucaguggc

SEQ ID NO: 21200 - RNA, 20 nt, Artificial Sequence
  GATA2 Guide RNA
ggccacugagcuccugcugc

SEQ ID NO: 21201 - RNA, 20 nt, Artificial Sequence
  GATA2 Guide RNA
gggagcgggggaggcagcag

SEQ ID NO: 21202 - RNA, 20 nt, Artificial Sequence
  GATA2 Guide RNA
gggaggcagcaggagcucag

SEQ ID NO: 21203 - RNA, 20 nt, Artificial Sequence
  GATA2 Guide RNA
gggaggccacugagcuccug

SEQ ID NO: 21204 - RNA, 20 nt, Artificial Sequence
  GATA2 Guide RNA
ggggaggcagcaggagcuca

SEQ ID NO: 21205 - RNA, 20 nt, Artificial Sequence
  GATA2 Guide RNA
gggggaggcagcaggagcuc

SEQ ID NO: 21206 - RNA, 20 nt, Artificial Sequence
  GATA2 Guide RNA
gggugggagcgggggaggca

SEQ ID NO: 21207 - RNA, 20 nt, Artificial Sequence
  GATA2 Guide RNA
ggugggagcgggggaggcag

SEQ ID NO: 21208 - RNA, 20 nt, Artificial Sequence
  GATA2 Guide RNA
gugagggaggccacugagcu

SEQ ID NO: 21209 - RNA, 20 nt, Artificial Sequence
  GATA2 Guide RNA
gugggagcgggggaggcagc

SEQ ID NO: 21210 - RNA, 20 nt, Artificial Sequence
  GATA2 Guide RNA
uccugcugccucccccgcuc

SEQ ID NO: 21211 - RNA, 20 nt, Artificial Sequence
  GATA2 Guide RNA
ugagcuccugcugccucccc

SEQ ID NO: 21212 - RNA, 20 nt, Artificial Sequence
  GATA2 Guide RNA
ugagggaggccacugagcuc

SEQ ID NO: 21213 - RNA, 20 nt, Artificial Sequence
  GATA2 Guide RNA
ugcugccucccccgcuccca

SEQ ID NO: 21214 - RNA, 20 nt, Artificial Sequence
  GATA2 Guide RNA
ugggagcgggggaggcagca

SEQ ID NO: 21215 - RNA, 21 nt, Artificial Sequence
  GATA2 Guide RNA
acugagcuccugcugccuccc

SEQ ID NO: 21216 - RNA, 21 nt, Artificial Sequence
  GATA2 Guide RNA
agcaggagcucaguggccucc

SEQ ID NO: 21217 - RNA, 21 nt, Artificial Sequence
  GATA2 Guide RNA
agcgggggaggcagcaggagc

SEQ ID NO: 21218 - RNA, 21 nt, Artificial Sequence
  GATA2 Guide RNA
agcuccugcugccucccccgc

SEQ ID NO: 21219 - RNA, 21 nt, Artificial Sequence
  GATA2 Guide RNA
aggcagcaggagcucaguggc

SEQ ID NO: 21220 - RNA, 21 nt, Artificial Sequence
  GATA2 Guide RNA
aggccacugagcuccugcugc

SEQ ID NO: 21221 - RNA, 21 nt, Artificial Sequence
  GATA2 Guide RNA
agggaggccacugagcuccug

SEQ ID NO: 21222 - RNA, 21 nt, Artificial Sequence
  GATA2 Guide RNA
cacugagcuccugcugccucc

SEQ ID NO: 21223 - RNA, 21 nt, Artificial Sequence
  GATA2 Guide RNA
cagcaggagcucaguggccuc

SEQ ID NO: 21224 - RNA, 21 nt, Artificial Sequence
  GATA2 Guide RNA
caggagcucaguggccucccu

SEQ ID NO: 21225 - RNA, 21 nt, Artificial Sequence
  GATA2 Guide RNA
ccacugagcuccugcugccuc

SEQ ID NO: 21226 - RNA, 21 nt, Artificial Sequence
  GATA2 Guide RNA
cgggggaggcagcaggagcuc

SEQ ID NO: 21227 - RNA, 21 nt, Artificial Sequence
  GATA2 Guide RNA
cuccugcugccucccccgcuc

SEQ ID NO: 21228 - RNA, 21 nt, Artificial Sequence
  GATA2 Guide RNA
cugagcuccugcugccucccc

SEQ ID NO: 21229 - RNA, 21 nt, Artificial Sequence
  GATA2 Guide RNA
cugcugccucccccgcuccca

SEQ ID NO: 21230 - RNA, 21 nt, Artificial Sequence
  GATA2 Guide RNA
gagcgggggaggcagcaggag

SEQ ID NO: 21231 - RNA, 21 nt, Artificial Sequence
  GATA2 Guide RNA
gagcuccugcugccucccccg

SEQ ID NO: 21232 - RNA, 21 nt, Artificial Sequence
  GATA2 Guide RNA
gaggcagcaggagcucagugg

SEQ ID NO: 21233 - RNA, 21 nt, Artificial Sequence
  GATA2 Guide RNA
gaggccacugagcuccugcug

SEQ ID NO: 21234 - RNA, 21 nt, Artificial Sequence
  GATA2 Guide RNA
gagggaggccacugagcuccu

SEQ ID NO: 21235 - RNA, 21 nt, Artificial Sequence
  GATA2 Guide RNA
gcagcaggagcucaguggccu

SEQ ID NO: 21236 - RNA, 21 nt, Artificial Sequence
  GATA2 Guide RNA
gcaggagcucaguggccuccc

SEQ ID NO: 21237 - RNA, 21 nt, Artificial Sequence
  GATA2 Guide RNA
gccacugagcuccugcugccu

SEQ ID NO: 21238 - RNA, 21 nt, Artificial Sequence
  GATA2 Guide RNA
gcgggggaggcagcaggagcu

SEQ ID NO: 21239 - RNA, 21 nt, Artificial Sequence
  GATA2 Guide RNA
gcuccugcugccucccccgcu

SEQ ID NO: 21240 - RNA, 21 nt, Artificial Sequence
  GATA2 Guide RNA
ggagcgggggaggcagcagga

SEQ ID NO: 21241 - RNA, 21 nt, Artificial Sequence
  GATA2 Guide RNA
ggaggcagcaggagcucagug

SEQ ID NO: 21242 - RNA, 21 nt, Artificial Sequence
  GATA2 Guide RNA
ggaggccacugagcuccugcu

SEQ ID NO: 21243 - RNA, 21 nt, Artificial Sequence
  GATA2 Guide RNA
ggcagcaggagcucaguggcc

SEQ ID NO: 21244 - RNA, 21 nt, Artificial Sequence
  GATA2 Guide RNA
ggccacugagcuccugcugcc

SEQ ID NO: 21245 - RNA, 21 nt, Artificial Sequence
  GATA2 Guide RNA
gggaggcagcaggagcucagu

SEQ ID NO: 21246 - RNA, 21 nt, Artificial Sequence
  GATA2 Guide RNA
gggaggccacugagcuccugc

SEQ ID NO: 21247 - RNA, 21 nt, Artificial Sequence
  GATA2 Guide RNA
ggggaggcagcaggagcucag

SEQ ID NO: 21248 - RNA, 21 nt, Artificial Sequence
  GATA2 Guide RNA
gggggaggcagcaggagcuca

SEQ ID NO: 21249 - RNA, 21 nt, Artificial Sequence
  GATA2 Guide RNA
ggugagggaggccacugagcu

SEQ ID NO: 21250 - RNA, 21 nt, Artificial Sequence
  GATA2 Guide RNA
gugagggaggccacugagcuc

SEQ ID NO: 21251 - RNA, 21 nt, Artificial Sequence
  GATA2 Guide RNA
gugggagcgggggaggcagca

SEQ ID NO: 21252 - RNA, 21 nt, Artificial Sequence
  GATA2 Guide RNA
uccugcugccucccccgcucc

SEQ ID NO: 21253 - RNA, 21 nt, Artificial Sequence
  GATA2 Guide RNA
ugagcuccugcugccuccccc

SEQ ID NO: 21254 - RNA, 21 nt, Artificial Sequence
  GATA2 Guide RNA
ugagggaggccacugagcucc

SEQ ID NO: 21255 - RNA, 21 nt, Artificial Sequence
  GATA2 Guide RNA
ugcugccucccccgcucccac

SEQ ID NO: 21256 - RNA, 21 nt, Artificial Sequence
  GATA2 Guide RNA
ugggagcgggggaggcagcag

SEQ ID NO: 21257 - RNA, 22 nt, Artificial Sequence
  GATA2 Guide RNA
acugagcuccugcugccucccc

SEQ ID NO: 21258 - RNA, 22 nt, Artificial Sequence
  GATA2 Guide RNA
agcaggagcucaguggccuccc

SEQ ID NO: 21259 - RNA, 22 nt, Artificial Sequence
  GATA2 Guide RNA
agcgggggaggcagcaggagcu

SEQ ID NO: 21260 - RNA, 22 nt, Artificial Sequence
  GATA2 Guide RNA
agcuccugcugccucccccgcu

SEQ ID NO: 21261 - RNA, 22 nt, Artificial Sequence
  GATA2 Guide RNA
aggcagcaggagcucaguggcc

SEQ ID NO: 21262 - RNA, 22 nt, Artificial Sequence
  GATA2 Guide RNA
aggccacugagcuccugcugcc

SEQ ID NO: 21263 - RNA, 22 nt, Artificial Sequence
  GATA2 Guide RNA
agggaggccacugagcuccugc

SEQ ID NO: 21264 - RNA, 22 nt, Artificial Sequence
  GATA2 Guide RNA
cacugagcuccugcugccuccc

SEQ ID NO: 21265 - RNA, 22 nt, Artificial Sequence
  GATA2 Guide RNA
cagcaggagcucaguggccucc

SEQ ID NO: 21266 - RNA, 22 nt, Artificial Sequence
  GATA2 Guide RNA
caggagcucaguggccucccuc

SEQ ID NO: 21267 - RNA, 22 nt, Artificial Sequence
  GATA2 Guide RNA
ccacugagcuccugcugccucc

SEQ ID NO: 21268 - RNA, 22 nt, Artificial Sequence
  GATA2 Guide RNA
ccugcugccucccccgcuccca

SEQ ID NO: 21269 - RNA, 22 nt, Artificial Sequence
  GATA2 Guide RNA
cgggggaggcagcaggagcuca

SEQ ID NO: 21270 - RNA, 22 nt, Artificial Sequence
  GATA2 Guide RNA
cuccugcugccucccccgcucc

SEQ ID NO: 21271 - RNA, 22 nt, Artificial Sequence
  GATA2 Guide RNA
cugagcuccugcugccuccccc

SEQ ID NO: 21272 - RNA, 22 nt, Artificial Sequence
  GATA2 Guide RNA
cugcugccucccccgcucccac

SEQ ID NO: 21273 - RNA, 22 nt, Artificial Sequence
  GATA2 Guide RNA
gagcgggggaggcagcaggagc

SEQ ID NO: 21274 - RNA, 22 nt, Artificial Sequence
  GATA2 Guide RNA
gagcuccugcugccucccccgc

SEQ ID NO: 21275 - RNA, 22 nt, Artificial Sequence
  GATA2 Guide RNA
gaggcagcaggagcucaguggc

SEQ ID NO: 21276 - RNA, 22 nt, Artificial Sequence
  GATA2 Guide RNA
gaggccacugagcuccugcugc

SEQ ID NO: 21277 - RNA, 22 nt, Artificial Sequence
  GATA2 Guide RNA
gagggaggccacugagcuccug

SEQ ID NO: 21278 - RNA, 22 nt, Artificial Sequence
  GATA2 Guide RNA
gcagcaggagcucaguggccuc

SEQ ID NO: 21279 - RNA, 22 nt, Artificial Sequence
  GATA2 Guide RNA
gcaggagcucaguggccucccu

SEQ ID NO: 21280 - RNA, 22 nt, Artificial Sequence
  GATA2 Guide RNA
gccacugagcuccugcugccuc

SEQ ID NO: 21281 - RNA, 22 nt, Artificial Sequence
  GATA2 Guide RNA
gcgggggaggcagcaggagcuc

SEQ ID NO: 21282 - RNA, 22 nt, Artificial Sequence
  GATA2 Guide RNA
gcuccugcugccucccccgcuc

SEQ ID NO: 21283 - RNA, 22 nt, Artificial Sequence
  GATA2 Guide RNA
ggagcgggggaggcagcaggag

SEQ ID NO: 21284 - RNA, 22 nt, Artificial Sequence
  GATA2 Guide RNA
ggaggcagcaggagcucagugg

SEQ ID NO: 21285 - RNA, 22 nt, Artificial Sequence
  GATA2 Guide RNA
ggaggccacugagcuccugcug

SEQ ID NO: 21286 - RNA, 22 nt, Artificial Sequence
  GATA2 Guide RNA
ggcagcaggagcucaguggccu

SEQ ID NO: 21287 - RNA, 22 nt, Artificial Sequence
  GATA2 Guide RNA
ggccacugagcuccugcugccu

SEQ ID NO: 21288 - RNA, 22 nt, Artificial Sequence
  GATA2 Guide RNA
gggagcgggggaggcagcagga

SEQ ID NO: 21289 - RNA, 22 nt, Artificial Sequence
  GATA2 Guide RNA
gggaggcagcaggagcucagug

SEQ ID NO: 21290 - RNA, 22 nt, Artificial Sequence
  GATA2 Guide RNA
gggaggccacugagcuccugcu

SEQ ID NO: 21291 - RNA, 22 nt, Artificial Sequence
  GATA2 Guide RNA
ggggaggcagcaggagcucagu

SEQ ID NO: 21292 - RNA, 22 nt, Artificial Sequence
  GATA2 Guide RNA
gggggaggcagcaggagcucag

SEQ ID NO: 21293 - RNA, 22 nt, Artificial Sequence
  GATA2 Guide RNA
gggugagggaggccacugagcu

SEQ ID NO: 21294 - RNA, 22 nt, Artificial Sequence
  GATA2 Guide RNA
ggugagggaggccacugagcuc

SEQ ID NO: 21295 - RNA, 22 nt, Artificial Sequence
  GATA2 Guide RNA
ggugggagcgggggaggcagca

SEQ ID NO: 21296 - RNA, 22 nt, Artificial Sequence
  GATA2 Guide RNA
gugagggaggccacugagcucc

SEQ ID NO: 21297 - RNA, 22 nt, Artificial Sequence
  GATA2 Guide RNA
gugggagcgggggaggcagcag

SEQ ID NO: 21298 - RNA, 22 nt, Artificial Sequence
  GATA2 Guide RNA
uccugcugccucccccgcuccc

SEQ ID NO: 21299 - RNA, 22 nt, Artificial Sequence
  GATA2 Guide RNA
ugagcuccugcugccucccccg

SEQ ID NO: 21300 - RNA, 22 nt, Artificial Sequence
  GATA2 Guide RNA
ugagggaggccacugagcuccu

SEQ ID NO: 21301 - RNA, 22 nt, Artificial Sequence
  GATA2 Guide RNA
ugcugccucccccgcucccacc

SEQ ID NO: 21302 - RNA, 22 nt, Artificial Sequence
  GATA2 Guide RNA
ugggagcgggggaggcagcagg

SEQ ID NO: 21303 - RNA, 20 nt, Artificial Sequence
  GATA2 Guide RNA
acugagcucccucugccucc

SEQ ID NO: 21304 - RNA, 20 nt, Artificial Sequence
  GATA2 Guide RNA
agagggagcucaguggccuc

SEQ ID NO: 21305 - RNA, 20 nt, Artificial Sequence
  GATA2 Guide RNA
agcgggggaggcagagggag

SEQ ID NO: 21306 - RNA, 20 nt, Artificial Sequence
  GATA2 Guide RNA
agcucccucugccucccccg

SEQ ID NO: 21307 - RNA, 20 nt, Artificial Sequence
  GATA2 Guide RNA
aggcagagggagcucagugg

SEQ ID NO: 21308 - RNA, 20 nt, Artificial Sequence
  GATA2 Guide RNA
aggccacugagcucccucug

SEQ ID NO: 21309 - RNA, 20 nt, Artificial Sequence
  GATA2 Guide RNA
agggaggccacugagcuccc

SEQ ID NO: 21310 - RNA, 20 nt, Artificial Sequence
  GATA2 Guide RNA
cacugagcucccucugccuc

SEQ ID NO: 21311 - RNA, 20 nt, Artificial Sequence
  GATA2 Guide RNA
cagagggagcucaguggccu

SEQ ID NO: 21312 - RNA, 20 nt, Artificial Sequence
  GATA2 Guide RNA
ccacugagcucccucugccu

SEQ ID NO: 21313 - RNA, 20 nt, Artificial Sequence
  GATA2 Guide RNA
cccucugccucccccgcucc

SEQ ID NO: 21314 - RNA, 20 nt, Artificial Sequence
  GATA2 Guide RNA
ccucugccucccccgcuccc

SEQ ID NO: 21315 - RNA, 20 nt, Artificial Sequence
  GATA2 Guide RNA
cgggggaggcagagggagcu

SEQ ID NO: 21316 - RNA, 20 nt, Artificial Sequence
  GATA2 Guide RNA
cucccucugccucccccgcu

SEQ ID NO: 21317 - RNA, 20 nt, Artificial Sequence
  GATA2 Guide RNA
cucugccucccccgcuccca

SEQ ID NO: 21318 - RNA, 20 nt, Artificial Sequence
  GATA2 Guide RNA
cugagcucccucugccuccc

SEQ ID NO: 21319 - RNA, 20 nt, Artificial Sequence
  GATA2 Guide RNA
gagcgggggaggcagaggga

SEQ ID NO: 21320 - RNA, 20 nt, Artificial Sequence
  GATA2 Guide RNA
gagcucccucugccuccccc

SEQ ID NO: 21321 - RNA, 20 nt, Artificial Sequence
  GATA2 Guide RNA
gaggcagagggagcucagug

SEQ ID NO: 21322 - RNA, 20 nt, Artificial Sequence
  GATA2 Guide RNA
gaggccacugagcucccucu

SEQ ID NO: 21323 - RNA, 20 nt, Artificial Sequence
  GATA2 Guide RNA
gagggagcucaguggccucc

SEQ ID NO: 21324 - RNA, 20 nt, Artificial Sequence
  GATA2 Guide RNA
gcagagggagcucaguggcc

SEQ ID NO: 21325 - RNA, 20 nt, Artificial Sequence
  GATA2 Guide RNA
gccacugagcucccucugcc

SEQ ID NO: 21326 - RNA, 20 nt, Artificial Sequence
  GATA2 Guide RNA
gcgggggaggcagagggagc

SEQ ID NO: 21327 - RNA, 20 nt, Artificial Sequence
  GATA2 Guide RNA
gcucccucugccucccccgc

SEQ ID NO: 21328 - RNA, 20 nt, Artificial Sequence
  GATA2 Guide RNA
ggagcgggggaggcagaggg

SEQ ID NO: 21329 - RNA, 20 nt, Artificial Sequence
  GATA2 Guide RNA
ggaggcagagggagcucagu

SEQ ID NO: 21330 - RNA, 20 nt, Artificial Sequence
  GATA2 Guide RNA
ggaggccacugagcucccuc

SEQ ID NO: 21331 - RNA, 20 nt, Artificial Sequence
  GATA2 Guide RNA
ggcagagggagcucaguggc

SEQ ID NO: 21332 - RNA, 20 nt, Artificial Sequence
  GATA2 Guide RNA
ggccacugagcucccucugc

SEQ ID NO: 21333 - RNA, 20 nt, Artificial Sequence
  GATA2 Guide RNA
gggagcgggggaggcagagg

SEQ ID NO: 21334 - RNA, 20 nt, Artificial Sequence
  GATA2 Guide RNA
gggaggcagagggagcucag

SEQ ID NO: 21335 - RNA, 20 nt, Artificial Sequence
  GATA2 Guide RNA
gggaggccacugagcucccu

SEQ ID NO: 21336 - RNA, 20 nt, Artificial Sequence
  GATA2 Guide RNA
ggggaggcagagggagcuca

SEQ ID NO: 21337 - RNA, 20 nt, Artificial Sequence
  GATA2 Guide RNA
gggggaggcagagggagcuc

SEQ ID NO: 21338 - RNA, 20 nt, Artificial Sequence
  GATA2 Guide RNA
gugggagcgggggaggcaga

SEQ ID NO: 21339 - RNA, 20 nt, Artificial Sequence
  GATA2 Guide RNA
ucccucugccucccccgcuc

SEQ ID NO: 21340 - RNA, 20 nt, Artificial Sequence
  GATA2 Guide RNA
ucugccucccccgcucccac

SEQ ID NO: 21341 - RNA, 20 nt, Artificial Sequence
  GATA2 Guide RNA
ugagcucccucugccucccc

SEQ ID NO: 21342 - RNA, 20 nt, Artificial Sequence
  GATA2 Guide RNA
ugggagcgggggaggcagag

SEQ ID NO: 21343 - RNA, 21 nt, Artificial Sequence
  GATA2 Guide RNA
acugagcucccucugccuccc

SEQ ID NO: 21344 - RNA, 21 nt, Artificial Sequence
  GATA2 Guide RNA
agagggagcucaguggccucc

SEQ ID NO: 21345 - RNA, 21 nt, Artificial Sequence
  GATA2 Guide RNA
agcgggggaggcagagggagc

SEQ ID NO: 21346 - RNA, 21 nt, Artificial Sequence
  GATA2 Guide RNA
agcucccucugccucccccgc

SEQ ID NO: 21347 - RNA, 21 nt, Artificial Sequence
  GATA2 Guide RNA
aggcagagggagcucaguggc

SEQ ID NO: 21348 - RNA, 21 nt, Artificial Sequence
  GATA2 Guide RNA
aggccacugagcucccucugc

SEQ ID NO: 21349 - RNA, 21 nt, Artificial Sequence
  GATA2 Guide RNA
agggaggccacugagcucccu

SEQ ID NO: 21350 - RNA, 21 nt, Artificial Sequence
  GATA2 Guide RNA
cacugagcucccucugccucc

SEQ ID NO: 21351 - RNA, 21 nt, Artificial Sequence
  GATA2 Guide RNA
cagagggagcucaguggccuc

SEQ ID NO: 21352 - RNA, 21 nt, Artificial Sequence
  GATA2 Guide RNA
ccacugagcucccucugccuc

SEQ ID NO: 21353 - RNA, 21 nt, Artificial Sequence
  GATA2 Guide RNA
ccucugccucccccgcuccca

SEQ ID NO: 21354 - RNA, 21 nt, Artificial Sequence
  GATA2 Guide RNA
cgggggaggcagagggagcuc

SEQ ID NO: 21355 - RNA, 21 nt, Artificial Sequence
  GATA2 Guide RNA
cucccucugccucccccgcuc

SEQ ID NO: 21356 - RNA, 21 nt, Artificial Sequence
  GATA2 Guide RNA
cucugccucccccgcucccac

SEQ ID NO: 21357 - RNA, 21 nt, Artificial Sequence
  GATA2 Guide RNA
cugagcucccucugccucccc

SEQ ID NO: 21358 - RNA, 21 nt, Artificial Sequence
  GATA2 Guide RNA
gagcgggggaggcagagggag

SEQ ID NO: 21359 - RNA, 21 nt, Artificial Sequence
  GATA2 Guide RNA
gagcucccucugccucccccg

SEQ ID NO: 21360 - RNA, 21 nt, Artificial Sequence
  GATA2 Guide RNA
gaggcagagggagcucagugg

SEQ ID NO: 21361 - RNA, 21 nt, Artificial Sequence
  GATA2 Guide RNA
gaggccacugagcucccucug

SEQ ID NO: 21362 - RNA, 21 nt, Artificial Sequence
  GATA2 Guide RNA
gagggagcucaguggccuccc

SEQ ID NO: 21363 - RNA, 21 nt, Artificial Sequence
  GATA2 Guide RNA
gagggaggccacugagcuccc

SEQ ID NO: 21364 - RNA, 21 nt, Artificial Sequence
  GATA2 Guide RNA
gcagagggagcucaguggccu

SEQ ID NO: 21365 - RNA, 21 nt, Artificial Sequence
  GATA2 Guide RNA
gccacugagcucccucugccu

SEQ ID NO: 21366 - RNA, 21 nt, Artificial Sequence
  GATA2 Guide RNA
gcgggggaggcagagggagcu

SEQ ID NO: 21367 - RNA, 21 nt, Artificial Sequence
  GATA2 Guide RNA
gcucccucugccucccccgcu

SEQ ID NO: 21368 - RNA, 21 nt, Artificial Sequence
  GATA2 Guide RNA
ggagcgggggaggcagaggga

SEQ ID NO: 21369 - RNA, 21 nt, Artificial Sequence
  GATA2 Guide RNA
ggaggcagagggagcucagug

SEQ ID NO: 21370 - RNA, 21 nt, Artificial Sequence
  GATA2 Guide RNA
ggaggccacugagcucccucu

SEQ ID NO: 21371 - RNA, 21 nt, Artificial Sequence
  GATA2 Guide RNA
ggcagagggagcucaguggcc

SEQ ID NO: 21372 - RNA, 21 nt, Artificial Sequence
  GATA2 Guide RNA
ggccacugagcucccucugcc

SEQ ID NO: 21373 - RNA, 21 nt, Artificial Sequence
  GATA2 Guide RNA
gggaggcagagggagcucagu

SEQ ID NO: 21374 - RNA, 21 nt, Artificial Sequence
  GATA2 Guide RNA
gggaggccacugagcucccuc

SEQ ID NO: 21375 - RNA, 21 nt, Artificial Sequence
  GATA2 Guide RNA
ggggaggcagagggagcucag

SEQ ID NO: 21376 - RNA, 21 nt, Artificial Sequence
  GATA2 Guide RNA
gggggaggcagagggagcuca

SEQ ID NO: 21377 - RNA, 21 nt, Artificial Sequence
  GATA2 Guide RNA
ggugggagcgggggaggcaga

SEQ ID NO: 21378 - RNA, 21 nt, Artificial Sequence
  GATA2 Guide RNA
gugggagcgggggaggcagag

SEQ ID NO: 21379 - RNA, 21 nt, Artificial Sequence
  GATA2 Guide RNA
ucccucugccucccccgcucc

SEQ ID NO: 21380 - RNA, 21 nt, Artificial Sequence
  GATA2 Guide RNA
ucugccucccccgcucccacc

SEQ ID NO: 21381 - RNA, 21 nt, Artificial Sequence
  GATA2 Guide RNA
ugagcucccucugccuccccc

SEQ ID NO: 21382 - RNA, 21 nt, Artificial Sequence
  GATA2 Guide RNA
ugggagcgggggaggcagagg

SEQ ID NO: 21383 - RNA, 22 nt, Artificial Sequence
  GATA2 Guide RNA
acugagcucccucugccucccc

SEQ ID NO: 21384 - RNA, 22 nt, Artificial Sequence
  GATA2 Guide RNA
agagggagcucaguggccuccc

SEQ ID NO: 21385 - RNA, 22 nt, Artificial Sequence
  GATA2 Guide RNA
agcgggggaggcagagggagcu

SEQ ID NO: 21386 - RNA, 22 nt, Artificial Sequence
  GATA2 Guide RNA
agcucccucugccucccccgcu

SEQ ID NO: 21387 - RNA, 22 nt, Artificial Sequence
  GATA2 Guide RNA
aggcagagggagcucaguggcc

SEQ ID NO: 21388 - RNA, 22 nt, Artificial Sequence
  GATA2 Guide RNA
aggccacugagcucccucugcc

SEQ ID NO: 21389 - RNA, 22 nt, Artificial Sequence
  GATA2 Guide RNA
agggaggccacugagcucccuc

SEQ ID NO: 21390 - RNA, 22 nt, Artificial Sequence
  GATA2 Guide RNA
cacugagcucccucugccuccc

SEQ ID NO: 21391 - RNA, 22 nt, Artificial Sequence
  GATA2 Guide RNA
cagagggagcucaguggccucc

SEQ ID NO: 21392 - RNA, 22 nt, Artificial Sequence
  GATA2 Guide RNA
ccacugagcucccucugccucc

SEQ ID NO: 21393 - RNA, 22 nt, Artificial Sequence
  GATA2 Guide RNA
cccucugccucccccgcuccca

SEQ ID NO: 21394 - RNA, 22 nt, Artificial Sequence
  GATA2 Guide RNA
ccucugccucccccgcucccac

SEQ ID NO: 21395 - RNA, 22 nt, Artificial Sequence
  GATA2 Guide RNA
cgggggaggcagagggagcuca

SEQ ID NO: 21396 - RNA, 22 nt, Artificial Sequence
  GATA2 Guide RNA
cucccucugccucccccgcucc

SEQ ID NO: 21397 - RNA, 22 nt, Artificial Sequence
  GATA2 Guide RNA
cucugccucccccgcucccacc

SEQ ID NO: 21398 - RNA, 22 nt, Artificial Sequence
  GATA2 Guide RNA
cugagcucccucugccuccccc

SEQ ID NO: 21399 - RNA, 22 nt, Artificial Sequence
  GATA2 Guide RNA
gagcgggggaggcagagggagc

SEQ ID NO: 21400 - RNA, 22 nt, Artificial Sequence
  GATA2 Guide RNA
gagcucccucugccucccccgc

SEQ ID NO: 21401 - RNA, 22 nt, Artificial Sequence
  GATA2 Guide RNA
gaggcagagggagcucaguggc

SEQ ID NO: 21402 - RNA, 22 nt, Artificial Sequence
  GATA2 Guide RNA
gaggccacugagcucccucugc

SEQ ID NO: 21403 - RNA, 22 nt, Artificial Sequence
  GATA2 Guide RNA
gagggagcucaguggccucccu

SEQ ID NO: 21404 - RNA, 22 nt, Artificial Sequence
  GATA2 Guide RNA
gagggaggccacugagcucccu

SEQ ID NO: 21405 - RNA, 22 nt, Artificial Sequence
  GATA2 Guide RNA
gcagagggagcucaguggccuc

SEQ ID NO: 21406 - RNA, 22 nt, Artificial Sequence
  GATA2 Guide RNA
gccacugagcucccucugccuc

SEQ ID NO: 21407 - RNA, 22 nt, Artificial Sequence
  GATA2 Guide RNA
gcgggggaggcagagggagcuc

SEQ ID NO: 21408 - RNA, 22 nt, Artificial Sequence
  GATA2 Guide RNA
gcucccucugccucccccgcuc

SEQ ID NO: 21409 - RNA, 22 nt, Artificial Sequence
  GATA2 Guide RNA
ggagcgggggaggcagagggag

SEQ ID NO: 21410 - RNA, 22 nt, Artificial Sequence
  GATA2 Guide RNA
ggaggcagagggagcucagugg

SEQ ID NO: 21411 - RNA, 22 nt, Artificial Sequence
  GATA2 Guide RNA
ggaggccacugagcucccucug

SEQ ID NO: 21412 - RNA, 22 nt, Artificial Sequence
  GATA2 Guide RNA
ggcagagggagcucaguggccu

SEQ ID NO: 21413 - RNA, 22 nt, Artificial Sequence
  GATA2 Guide RNA
ggccacugagcucccucugccu

SEQ ID NO: 21414 - RNA, 22 nt, Artificial Sequence
  GATA2 Guide RNA
gggagcgggggaggcagaggga

SEQ ID NO: 21415 - RNA, 22 nt, Artificial Sequence
  GATA2 Guide RNA
gggaggcagagggagcucagug

SEQ ID NO: 21416 - RNA, 22 nt, Artificial Sequence
  GATA2 Guide RNA
gggaggccacugagcucccucu

SEQ ID NO: 21417 - RNA, 22 nt, Artificial Sequence
  GATA2 Guide RNA
ggggaggcagagggagcucagu

SEQ ID NO: 21418 - RNA, 22 nt, Artificial Sequence
  GATA2 Guide RNA
gggggaggcagagggagcucag

SEQ ID NO: 21419 - RNA, 22 nt, Artificial Sequence
  GATA2 Guide RNA
gggugggagcgggggaggcaga

SEQ ID NO: 21420 - RNA, 22 nt, Artificial Sequence
  GATA2 Guide RNA
ggugggagcgggggaggcagag

SEQ ID NO: 21421 - RNA, 22 nt, Artificial Sequence
  GATA2 Guide RNA
gugggagcgggggaggcagagg

SEQ ID NO: 21422 - RNA, 22 nt, Artificial Sequence
  GATA2 Guide RNA
ucccucugccucccccgcuccc

SEQ ID NO: 21423 - RNA, 22 nt, Artificial Sequence
  GATA2 Guide RNA
ucugccucccccgcucccaccc

SEQ ID NO: 21424 - RNA, 22 nt, Artificial Sequence
  GATA2 Guide RNA
ugagcucccucugccucccccg

SEQ ID NO: 21425 - RNA, 22 nt, Artificial Sequence
  GATA2 Guide RNA
ugagggaggccacugagcuccc

SEQ ID NO: 21426 - RNA, 22 nt, Artificial Sequence
  GATA2 Guide RNA
ugggagcgggggaggcagaggg

SEQ ID NO: 21427 - RNA, 20 nt, Artificial Sequence
  GATA2 Guide RNA
aacgggagcucaguggccuc

SEQ ID NO: 21428 - RNA, 20 nt, Artificial Sequence
  GATA2 Guide RNA
acugagcucccguugccucc

SEQ ID NO: 21429 - RNA, 20 nt, Artificial Sequence
  GATA2 Guide RNA
agcgggggaggcaacgggag

SEQ ID NO: 21430 - RNA, 20 nt, Artificial Sequence
  GATA2 Guide RNA
agcucccguugccucccccg

SEQ ID NO: 21431 - RNA, 20 nt, Artificial Sequence
  GATA2 Guide RNA
aggcaacgggagcucagugg

SEQ ID NO: 21432 - RNA, 20 nt, Artificial Sequence
  GATA2 Guide RNA
aggccacugagcucccguug

SEQ ID NO: 21433 - RNA, 20 nt, Artificial Sequence
  GATA2 Guide RNA
caacgggagcucaguggccu

SEQ ID NO: 21434 - RNA, 20 nt, Artificial Sequence
  GATA2 Guide RNA
cacugagcucccguugccuc

SEQ ID NO: 21435 - RNA, 20 nt, Artificial Sequence
  GATA2 Guide RNA
ccacugagcucccguugccu

SEQ ID NO: 21436 - RNA, 20 nt, Artificial Sequence
  GATA2 Guide RNA
cccguugccucccccgcucc

SEQ ID NO: 21437 - RNA, 20 nt, Artificial Sequence
  GATA2 Guide RNA
ccguugccucccccgcuccc

SEQ ID NO: 21438 - RNA, 20 nt, Artificial Sequence
  GATA2 Guide RNA
cgggggaggcaacgggagcu

SEQ ID NO: 21439 - RNA, 20 nt, Artificial Sequence
  GATA2 Guide RNA
cguugccucccccgcuccca

SEQ ID NO: 21440 - RNA, 20 nt, Artificial Sequence
  GATA2 Guide RNA
cucccguugccucccccgcu

SEQ ID NO: 21441 - RNA, 20 nt, Artificial Sequence
  GATA2 Guide RNA
cugagcucccguugccuccc

SEQ ID NO: 21442 - RNA, 20 nt, Artificial Sequence
  GATA2 Guide RNA
gagcgggggaggcaacggga

SEQ ID NO: 21443 - RNA, 20 nt, Artificial Sequence
  GATA2 Guide RNA
gagcucccguugccuccccc

SEQ ID NO: 21444 - RNA, 20 nt, Artificial Sequence
  GATA2 Guide RNA
gaggcaacgggagcucagug

SEQ ID NO: 21445 - RNA, 20 nt, Artificial Sequence
  GATA2 Guide RNA
gaggccacugagcucccguu

SEQ ID NO: 21446 - RNA, 20 nt, Artificial Sequence
  GATA2 Guide RNA
gcaacgggagcucaguggcc

SEQ ID NO: 21447 - RNA, 20 nt, Artificial Sequence
  GATA2 Guide RNA
gccacugagcucccguugcc

SEQ ID NO: 21448 - RNA, 20 nt, Artificial Sequence
  GATA2 Guide RNA
gcgggggaggcaacgggagc

SEQ ID NO: 21449 - RNA, 20 nt, Artificial Sequence
  GATA2 Guide RNA
gcucccguugccucccccgc

SEQ ID NO: 21450 - RNA, 20 nt, Artificial Sequence
  GATA2 Guide RNA
ggagcgggggaggcaacggg

SEQ ID NO: 21451 - RNA, 20 nt, Artificial Sequence
  GATA2 Guide RNA
ggaggcaacgggagcucagu

SEQ ID NO: 21452 - RNA, 20 nt, Artificial Sequence
  GATA2 Guide RNA
ggaggccacugagcucccgu

SEQ ID NO: 21453 - RNA, 20 nt, Artificial Sequence
  GATA2 Guide RNA
ggcaacgggagcucaguggc

SEQ ID NO: 21454 - RNA, 20 nt, Artificial Sequence
  GATA2 Guide RNA
ggccacugagcucccguugc

SEQ ID NO: 21455 - RNA, 20 nt, Artificial Sequence
  GATA2 Guide RNA
gggagcgggggaggcaacgg

SEQ ID NO: 21456 - RNA, 20 nt, Artificial Sequence
  GATA2 Guide RNA
gggaggcaacgggagcucag

SEQ ID NO: 21457 - RNA, 20 nt, Artificial Sequence
  GATA2 Guide RNA
gggaggccacugagcucccg

SEQ ID NO: 21458 - RNA, 20 nt, Artificial Sequence
  GATA2 Guide RNA
ggggaggcaacgggagcuca

SEQ ID NO: 21459 - RNA, 20 nt, Artificial Sequence
  GATA2 Guide RNA
gggggaggcaacgggagcuc

SEQ ID NO: 21460 - RNA, 20 nt, Artificial Sequence
  GATA2 Guide RNA
ggugggagcgggggaggcaa

SEQ ID NO: 21461 - RNA, 20 nt, Artificial Sequence
  GATA2 Guide RNA
gugggagcgggggaggcaac

SEQ ID NO: 21462 - RNA, 20 nt, Artificial Sequence
  GATA2 Guide RNA
guugccucccccgcucccac

SEQ ID NO: 21463 - RNA, 20 nt, Artificial Sequence
  GATA2 Guide RNA
ucccguugccucccccgcuc

SEQ ID NO: 21464 - RNA, 20 nt, Artificial Sequence
  GATA2 Guide RNA
ugagcucccguugccucccc

SEQ ID NO: 21465 - RNA, 20 nt, Artificial Sequence
  GATA2 Guide RNA
ugggagcgggggaggcaacg

SEQ ID NO: 21466 - RNA, 20 nt, Artificial Sequence
  GATA2 Guide RNA
ugggggugggagcgggggag

SEQ ID NO: 21467 - RNA, 20 nt, Artificial Sequence
  GATA2 Guide RNA
uugccucccccgcucccacc

SEQ ID NO: 21468 - RNA, 21 nt, Artificial Sequence
  GATA2 Guide RNA
aacgggagcucaguggccucc

SEQ ID NO: 21469 - RNA, 21 nt, Artificial Sequence
  GATA2 Guide RNA
acugagcucccguugccuccc

SEQ ID NO: 21470 - RNA, 21 nt, Artificial Sequence
  GATA2 Guide RNA
agcgggggaggcaacgggagc

SEQ ID NO: 21471 - RNA, 21 nt, Artificial Sequence
  GATA2 Guide RNA
agcucccguugccucccccgc

SEQ ID NO: 21472 - RNA, 21 nt, Artificial Sequence
  GATA2 Guide RNA
aggcaacgggagcucaguggc

SEQ ID NO: 21473 - RNA, 21 nt, Artificial Sequence
  GATA2 Guide RNA
aggccacugagcucccguugc

SEQ ID NO: 21474 - RNA, 21 nt, Artificial Sequence
  GATA2 Guide RNA
agggaggccacugagcucccg

SEQ ID NO: 21475 - RNA, 21 nt, Artificial Sequence
  GATA2 Guide RNA
caacgggagcucaguggccuc

SEQ ID NO: 21476 - RNA, 21 nt, Artificial Sequence
  GATA2 Guide RNA
cacugagcucccguugccucc

SEQ ID NO: 21477 - RNA, 21 nt, Artificial Sequence
  GATA2 Guide RNA
ccacugagcucccguugccuc

SEQ ID NO: 21478 - RNA, 21 nt, Artificial Sequence
  GATA2 Guide RNA
ccguugccucccccgcuccca

SEQ ID NO: 21479 - RNA, 21 nt, Artificial Sequence
  GATA2 Guide RNA
cgggggaggcaacgggagcuc

SEQ ID NO: 21480 - RNA, 21 nt, Artificial Sequence
  GATA2 Guide RNA
cguugccucccccgcucccac

SEQ ID NO: 21481 - RNA, 21 nt, Artificial Sequence
  GATA2 Guide RNA
cucccguugccucccccgcuc

SEQ ID NO: 21482 - RNA, 21 nt, Artificial Sequence
  GATA2 Guide RNA
cugagcucccguugccucccc

SEQ ID NO: 21483 - RNA, 21 nt, Artificial Sequence
  GATA2 Guide RNA
gagcgggggaggcaacgggag

SEQ ID NO: 21484 - RNA, 21 nt, Artificial Sequence
  GATA2 Guide RNA
gagcucccguugccucccccg

SEQ ID NO: 21485 - RNA, 21 nt, Artificial Sequence
  GATA2 Guide RNA
gaggcaacgggagcucagugg

SEQ ID NO: 21486 - RNA, 21 nt, Artificial Sequence
  GATA2 Guide RNA
gaggccacugagcucccguug

SEQ ID NO: 21487 - RNA, 21 nt, Artificial Sequence
  GATA2 Guide RNA
gcaacgggagcucaguggccu

SEQ ID NO: 21488 - RNA, 21 nt, Artificial Sequence
  GATA2 Guide RNA
gccacugagcucccguugccu

SEQ ID NO: 21489 - RNA, 21 nt, Artificial Sequence
  GATA2 Guide RNA
gcgggggaggcaacgggagcu

SEQ ID NO: 21490 - RNA, 21 nt, Artificial Sequence
  GATA2 Guide RNA
gcucccguugccucccccgcu

SEQ ID NO: 21491 - RNA, 21 nt, Artificial Sequence
  GATA2 Guide RNA
ggagcgggggaggcaacggga

SEQ ID NO: 21492 - RNA, 21 nt, Artificial Sequence
  GATA2 Guide RNA
ggaggcaacgggagcucagug

SEQ ID NO: 21493 - RNA, 21 nt, Artificial Sequence
  GATA2 Guide RNA
ggaggccacugagcucccguu

SEQ ID NO: 21494 - RNA, 21 nt, Artificial Sequence
  GATA2 Guide RNA
ggcaacgggagcucaguggcc

SEQ ID NO: 21495 - RNA, 21 nt, Artificial Sequence
  GATA2 Guide RNA
ggccacugagcucccguugcc

SEQ ID NO: 21496 - RNA, 21 nt, Artificial Sequence
  GATA2 Guide RNA
gggaggcaacgggagcucagu

SEQ ID NO: 21497 - RNA, 21 nt, Artificial Sequence
  GATA2 Guide RNA
gggaggccacugagcucccgu

SEQ ID NO: 21498 - RNA, 21 nt, Artificial Sequence
  GATA2 Guide RNA
ggggaggcaacgggagcucag

SEQ ID NO: 21499 - RNA, 21 nt, Artificial Sequence
  GATA2 Guide RNA
gggggaggcaacgggagcuca

SEQ ID NO: 21500 - RNA, 21 nt, Artificial Sequence
  GATA2 Guide RNA
gggugggagcgggggaggcaa

SEQ ID NO: 21501 - RNA, 21 nt, Artificial Sequence
  GATA2 Guide RNA
ggugggagcgggggaggcaac

SEQ ID NO: 21502 - RNA, 21 nt, Artificial Sequence
  GATA2 Guide RNA
gugggagcgggggaggcaacg

SEQ ID NO: 21503 - RNA, 21 nt, Artificial Sequence
  GATA2 Guide RNA
guugccucccccgcucccacc

SEQ ID NO: 21504 - RNA, 21 nt, Artificial Sequence
  GATA2 Guide RNA
ucccguugccucccccgcucc

SEQ ID NO: 21505 - RNA, 21 nt, Artificial Sequence
  GATA2 Guide RNA
ugagcucccguugccuccccc

SEQ ID NO: 21506 - RNA, 21 nt, Artificial Sequence
  GATA2 Guide RNA
ugggagcgggggaggcaacgg

SEQ ID NO: 21507 - RNA, 21 nt, Artificial Sequence
  GATA2 Guide RNA
uugccucccccgcucccaccc

SEQ ID NO: 21508 - RNA, 22 nt, Artificial Sequence
  GATA2 Guide RNA
aacgggagcucaguggccuccc

SEQ ID NO: 21509 - RNA, 22 nt, Artificial Sequence
  GATA2 Guide RNA
acugagcucccguugccucccc

SEQ ID NO: 21510 - RNA, 22 nt, Artificial Sequence
  GATA2 Guide RNA
agcgggggaggcaacgggagcu

SEQ ID NO: 21511 - RNA, 22 nt, Artificial Sequence
  GATA2 Guide RNA
agcucccguugccucccccgcu

SEQ ID NO: 21512 - RNA, 22 nt, Artificial Sequence
  GATA2 Guide RNA
aggcaacgggagcucaguggcc

SEQ ID NO: 21513 - RNA, 22 nt, Artificial Sequence
  GATA2 Guide RNA
aggccacugagcucccguugcc

SEQ ID NO: 21514 - RNA, 22 nt, Artificial Sequence
  GATA2 Guide RNA
agggaggccacugagcucccgu

SEQ ID NO: 21515 - RNA, 22 nt, Artificial Sequence
  GATA2 Guide RNA
caacgggagcucaguggccucc

SEQ ID NO: 21516 - RNA, 22 nt, Artificial Sequence
  GATA2 Guide RNA
cacugagcucccguugccuccc

SEQ ID NO: 21517 - RNA, 22 nt, Artificial Sequence
  GATA2 Guide RNA
ccacugagcucccguugccucc

SEQ ID NO: 21518 - RNA, 22 nt, Artificial Sequence
  GATA2 Guide RNA
cccguugccucccccgcuccca

SEQ ID NO: 21519 - RNA, 22 nt, Artificial Sequence
  GATA2 Guide RNA
ccguugccucccccgcucccac

SEQ ID NO: 21520 - RNA, 22 nt, Artificial Sequence
  GATA2 Guide RNA
cgggggaggcaacgggagcuca

SEQ ID NO: 21521 - RNA, 22 nt, Artificial Sequence
  GATA2 Guide RNA
cguugccucccccgcucccacc

SEQ ID NO: 21522 - RNA, 22 nt, Artificial Sequence
  GATA2 Guide RNA
cucccguugccucccccgcucc

SEQ ID NO: 21523 - RNA, 22 nt, Artificial Sequence
  GATA2 Guide RNA
cugagcucccguugccuccccc

SEQ ID NO: 21524 - RNA, 22 nt, Artificial Sequence
  GATA2 Guide RNA
gagcgggggaggcaacgggagc

SEQ ID NO: 21525 - RNA, 22 nt, Artificial Sequence
  GATA2 Guide RNA
gagcucccguugccucccccgc

SEQ ID NO: 21526 - RNA, 22 nt, Artificial Sequence
  GATA2 Guide RNA
gaggcaacgggagcucaguggc

SEQ ID NO: 21527 - RNA, 22 nt, Artificial Sequence
  GATA2 Guide RNA
gaggccacugagcucccguugc

SEQ ID NO: 21528 - RNA, 22 nt, Artificial Sequence
  GATA2 Guide RNA
gagggaggccacugagcucccg

SEQ ID NO: 21529 - RNA, 22 nt, Artificial Sequence
  GATA2 Guide RNA
gcaacgggagcucaguggccuc

SEQ ID NO: 21530 - RNA, 22 nt, Artificial Sequence
  GATA2 Guide RNA
gccacugagcucccguugccuc

SEQ ID NO: 21531 - RNA, 22 nt, Artificial Sequence
  GATA2 Guide RNA
gcgggggaggcaacgggagcuc

SEQ ID NO: 21532 - RNA, 22 nt, Artificial Sequence
  GATA2 Guide RNA
gcucccguugccucccccgcuc

SEQ ID NO: 21533 - RNA, 22 nt, Artificial Sequence
  GATA2 Guide RNA
ggagcgggggaggcaacgggag

SEQ ID NO: 21534 - RNA, 22 nt, Artificial Sequence
  GATA2 Guide RNA
ggaggcaacgggagcucagugg

SEQ ID NO: 21535 - RNA, 22 nt, Artificial Sequence
  GATA2 Guide RNA
ggaggccacugagcucccguug

SEQ ID NO: 21536 - RNA, 22 nt, Artificial Sequence
  GATA2 Guide RNA
ggcaacgggagcucaguggccu

SEQ ID NO: 21537 - RNA, 22 nt, Artificial Sequence
  GATA2 Guide RNA
ggccacugagcucccguugccu

SEQ ID NO: 21538 - RNA, 22 nt, Artificial Sequence
  GATA2 Guide RNA
gggagcgggggaggcaacggga

SEQ ID NO: 21539 - RNA, 22 nt, Artificial Sequence
  GATA2 Guide RNA
gggaggcaacgggagcucagug

SEQ ID NO: 21540 - RNA, 22 nt, Artificial Sequence
  GATA2 Guide RNA
gggaggccacugagcucccguu

SEQ ID NO: 21541 - RNA, 22 nt, Artificial Sequence
  GATA2 Guide RNA
ggggaggcaacgggagcucagu

SEQ ID NO: 21542 - RNA, 22 nt, Artificial Sequence
  GATA2 Guide RNA
gggggaggcaacgggagcucag

SEQ ID NO: 21543 - RNA, 22 nt, Artificial Sequence
  GATA2 Guide RNA
ggggugggagcgggggaggcaa

SEQ ID NO: 21544 - RNA, 22 nt, Artificial Sequence
  GATA2 Guide RNA
gggugggagcgggggaggcaac

SEQ ID NO: 21545 - RNA, 22 nt, Artificial Sequence
  GATA2 Guide RNA
ggugggagcgggggaggcaacg

SEQ ID NO: 21546 - RNA, 22 nt, Artificial Sequence
  GATA2 Guide RNA
gugggagcgggggaggcaacgg

SEQ ID NO: 21547 - RNA, 22 nt, Artificial Sequence
  GATA2 Guide RNA
guugccucccccgcucccaccc

SEQ ID NO: 21548 - RNA, 22 nt, Artificial Sequence
  GATA2 Guide RNA
ucccguugccucccccgcuccc

SEQ ID NO: 21549 - RNA, 22 nt, Artificial Sequence
  GATA2 Guide RNA
ugagcucccguugccucccccg

SEQ ID NO: 21550 - RNA, 22 nt, Artificial Sequence
  GATA2 Guide RNA
ugggagcgggggaggcaacggg

SEQ ID NO: 21551 - RNA, 22 nt, Artificial Sequence
  GATA2 Guide RNA
uugccucccccgcucccacccc

SEQ ID NO: 21552 - RNA, 20 nt, Artificial Sequence
  GATA2 Guide RNA
acccaggggcuggggguggg

SEQ ID NO: 21553 - RNA, 20 nt, Artificial Sequence
  GATA2 Guide RNA
acugagcucccgcugccucc

SEQ ID NO: 21554 - RNA, 20 nt, Artificial Sequence
  GATA2 Guide RNA
agcaggggaggcagcgggag

SEQ ID NO: 21555 - RNA, 20 nt, Artificial Sequence
  GATA2 Guide RNA
agcucccgcugccuccccug

SEQ ID NO: 21556 - RNA, 20 nt, Artificial Sequence
  GATA2 Guide RNA
aggggcugggggugggagca

SEQ ID NO: 21557 - RNA, 20 nt, Artificial Sequence
  GATA2 Guide RNA
caggggaggcagcgggagcu

SEQ ID NO: 21558 - RNA, 20 nt, Artificial Sequence
  GATA2 Guide RNA
caggggcugggggugggagc

SEQ ID NO: 21559 - RNA, 20 nt, Artificial Sequence
  GATA2 Guide RNA
ccaggggcugggggugggag

SEQ ID NO: 21560 - RNA, 20 nt, Artificial Sequence
  GATA2 Guide RNA
cccaggggcuggggguggga

SEQ ID NO: 21561 - RNA, 20 nt, Artificial Sequence
  GATA2 Guide RNA
ccccugcucccacccccagc

SEQ ID NO: 21562 - RNA, 20 nt, Artificial Sequence
  GATA2 Guide RNA
cccgcugccuccccugcucc

SEQ ID NO: 21563 - RNA, 20 nt, Artificial Sequence
  GATA2 Guide RNA
cccugcucccacccccagcc

SEQ ID NO: 21564 - RNA, 20 nt, Artificial Sequence
  GATA2 Guide RNA
ccgcugccuccccugcuccc

SEQ ID NO: 21565 - RNA, 20 nt, Artificial Sequence
  GATA2 Guide RNA
ccuccccugcucccaccccc

SEQ ID NO: 21566 - RNA, 20 nt, Artificial Sequence
  GATA2 Guide RNA
ccugcucccacccccagccc

SEQ ID NO: 21567 - RNA, 20 nt, Artificial Sequence
  GATA2 Guide RNA
cgcugccuccccugcuccca

SEQ ID NO: 21568 - RNA, 20 nt, Artificial Sequence
  GATA2 Guide RNA
cuccccugcucccaccccca

SEQ ID NO: 21569 - RNA, 20 nt, Artificial Sequence
  GATA2 Guide RNA
cucccgcugccuccccugcu

SEQ ID NO: 21570 - RNA, 20 nt, Artificial Sequence
  GATA2 Guide RNA
cugagcucccgcugccuccc

SEQ ID NO: 21571 - RNA, 20 nt, Artificial Sequence
  GATA2 Guide RNA
cugccuccccugcucccacc

SEQ ID NO: 21572 - RNA, 20 nt, Artificial Sequence
  GATA2 Guide RNA
cugcucccacccccagcccc

SEQ ID NO: 21573 - RNA, 20 nt, Artificial Sequence
  GATA2 Guide RNA
cugggggugggagcagggga

SEQ ID NO: 21574 - RNA, 20 nt, Artificial Sequence
  GATA2 Guide RNA
gagcaggggaggcagcggga

SEQ ID NO: 21575 - RNA, 20 nt, Artificial Sequence
  GATA2 Guide RNA
gagcucccgcugccuccccu

SEQ ID NO: 21576 - RNA, 20 nt, Artificial Sequence
  GATA2 Guide RNA
gcaggggaggcagcgggagc

SEQ ID NO: 21577 - RNA, 20 nt, Artificial Sequence
  GATA2 Guide RNA
gccuccccugcucccacccc

SEQ ID NO: 21578 - RNA, 20 nt, Artificial Sequence
  GATA2 Guide RNA
gcucccgcugccuccccugc

SEQ ID NO: 21579 - RNA, 20 nt, Artificial Sequence
  GATA2 Guide RNA
gcugccuccccugcucccac

SEQ ID NO: 21580 - RNA, 20 nt, Artificial Sequence
  GATA2 Guide RNA
gcugggggugggagcagggg

SEQ ID NO: 21581 - RNA, 20 nt, Artificial Sequence
  GATA2 Guide RNA
ggagcaggggaggcagcggg

SEQ ID NO: 21582 - RNA, 20 nt, Artificial Sequence
  GATA2 Guide RNA
ggcugggggugggagcaggg

SEQ ID NO: 21583 - RNA, 20 nt, Artificial Sequence
  GATA2 Guide RNA
gggagcaggggaggcagcgg

SEQ ID NO: 21584 - RNA, 20 nt, Artificial Sequence
  GATA2 Guide RNA
gggcugggggugggagcagg

SEQ ID NO: 21585 - RNA, 20 nt, Artificial Sequence
  GATA2 Guide RNA
ggggcugggggugggagcag

SEQ ID NO: 21586 - RNA, 20 nt, Artificial Sequence
  GATA2 Guide RNA
gggggugggagcaggggagg

SEQ ID NO: 21587 - RNA, 20 nt, Artificial Sequence
  GATA2 Guide RNA
ggggugggagcaggggaggc

SEQ ID NO: 21588 - RNA, 20 nt, Artificial Sequence
  GATA2 Guide RNA
gggugggagcaggggaggca

SEQ ID NO: 21589 - RNA, 20 nt, Artificial Sequence
  GATA2 Guide RNA
ggugggagcaggggaggcag

SEQ ID NO: 21590 - RNA, 20 nt, Artificial Sequence
  GATA2 Guide RNA
gugggagcaggggaggcagc

SEQ ID NO: 21591 - RNA, 20 nt, Artificial Sequence
  GATA2 Guide RNA
uccccugcucccacccccag

SEQ ID NO: 21592 - RNA, 20 nt, Artificial Sequence
  GATA2 Guide RNA
ucccgcugccuccccugcuc

SEQ ID NO: 21593 - RNA, 20 nt, Artificial Sequence
  GATA2 Guide RNA
ugagcucccgcugccucccc

SEQ ID NO: 21594 - RNA, 20 nt, Artificial Sequence
  GATA2 Guide RNA
ugccuccccugcucccaccc

SEQ ID NO: 21595 - RNA, 20 nt, Artificial Sequence
  GATA2 Guide RNA
ugcucccacccccagccccu

SEQ ID NO: 21596 - RNA, 20 nt, Artificial Sequence
  GATA2 Guide RNA
ugggagcaggggaggcagcg

SEQ ID NO: 21597 - RNA, 20 nt, Artificial Sequence
  GATA2 Guide RNA
ugggggugggagcaggggag

SEQ ID NO: 21598 - RNA, 21 nt, Artificial Sequence
  GATA2 Guide RNA
acccaggggcuggggguggga

SEQ ID NO: 21599 - RNA, 21 nt, Artificial Sequence
  GATA2 Guide RNA
acugagcucccgcugccuccc

SEQ ID NO: 21600 - RNA, 21 nt, Artificial Sequence
  GATA2 Guide RNA
agcaggggaggcagcgggagc

SEQ ID NO: 21601 - RNA, 21 nt, Artificial Sequence
  GATA2 Guide RNA
agcucccgcugccuccccugc

SEQ ID NO: 21602 - RNA, 21 nt, Artificial Sequence
  GATA2 Guide RNA
aggggcugggggugggagcag

SEQ ID NO: 21603 - RNA, 21 nt, Artificial Sequence
  GATA2 Guide RNA
cacugagcucccgcugccucc

SEQ ID NO: 21604 - RNA, 21 nt, Artificial Sequence
  GATA2 Guide RNA
caggggaggcagcgggagcuc

SEQ ID NO: 21605 - RNA, 21 nt, Artificial Sequence
  GATA2 Guide RNA
caggggcugggggugggagca

SEQ ID NO: 21606 - RNA, 21 nt, Artificial Sequence
  GATA2 Guide RNA
ccgcugccuccccugcuccca

SEQ ID NO: 21607 - RNA, 21 nt, Artificial Sequence
  GATA2 Guide RNA
ccuccccugcucccaccccca

SEQ ID NO: 21608 - RNA, 21 nt, Artificial Sequence
  GATA2 Guide RNA
cgcugccuccccugcucccac

SEQ ID NO: 21609 - RNA, 21 nt, Artificial Sequence
  GATA2 Guide RNA
cuccccugcucccacccccag

SEQ ID NO: 21610 - RNA, 21 nt, Artificial Sequence
  GATA2 Guide RNA
cucccgcugccuccccugcuc

SEQ ID NO: 21611 - RNA, 21 nt, Artificial Sequence
  GATA2 Guide RNA
cugagcucccgcugccucccc

SEQ ID NO: 21612 - RNA, 21 nt, Artificial Sequence
  GATA2 Guide RNA
cugccuccccugcucccaccc

SEQ ID NO: 21613 - RNA, 21 nt, Artificial Sequence
  GATA2 Guide RNA
cugcucccacccccagccccu

SEQ ID NO: 21614 - RNA, 21 nt, Artificial Sequence
  GATA2 Guide RNA
cugggggugggagcaggggag

SEQ ID NO: 21615 - RNA, 21 nt, Artificial Sequence
  GATA2 Guide RNA
gagcaggggaggcagcgggag

SEQ ID NO: 21616 - RNA, 21 nt, Artificial Sequence
  GATA2 Guide RNA
gagcucccgcugccuccccug

SEQ ID NO: 21617 - RNA, 21 nt, Artificial Sequence
  GATA2 Guide RNA
gcaggggaggcagcgggagcu

SEQ ID NO: 21618 - RNA, 21 nt, Artificial Sequence
  GATA2 Guide RNA
gcucccgcugccuccccugcu

SEQ ID NO: 21619 - RNA, 21 nt, Artificial Sequence
  GATA2 Guide RNA
gcugccuccccugcucccacc

SEQ ID NO: 21620 - RNA, 21 nt, Artificial Sequence
  GATA2 Guide RNA
gcugggggugggagcagggga

SEQ ID NO: 21621 - RNA, 21 nt, Artificial Sequence
  GATA2 Guide RNA
ggagcaggggaggcagcggga

SEQ ID NO: 21622 - RNA, 21 nt, Artificial Sequence
  GATA2 Guide RNA
ggggugggagcaggggaggca

SEQ ID NO: 21623 - RNA, 21 nt, Artificial Sequence
  GATA2 Guide RNA
gggugggagcaggggaggcag

SEQ ID NO: 21624 - RNA, 21 nt, Artificial Sequence
  GATA2 Guide RNA
ggugggagcaggggaggcagc

SEQ ID NO: 21625 - RNA, 21 nt, Artificial Sequence
  GATA2 Guide RNA
gugggagcaggggaggcagcg

SEQ ID NO: 21626 - RNA, 21 nt, Artificial Sequence
  GATA2 Guide RNA
uacccaggggcuggggguggg

SEQ ID NO: 21627 - RNA, 21 nt, Artificial Sequence
  GATA2 Guide RNA
uccccugcucccacccccagc

SEQ ID NO: 21628 - RNA, 21 nt, Artificial Sequence
  GATA2 Guide RNA
ucccgcugccuccccugcucc

SEQ ID NO: 21629 - RNA, 21 nt, Artificial Sequence
  GATA2 Guide RNA
ugagcucccgcugccuccccu

SEQ ID NO: 21630 - RNA, 21 nt, Artificial Sequence
  GATA2 Guide RNA
ugccuccccugcucccacccc

SEQ ID NO: 21631 - RNA, 21 nt, Artificial Sequence
  GATA2 Guide RNA
ugcucccacccccagccccug

SEQ ID NO: 21632 - RNA, 21 nt, Artificial Sequence
  GATA2 Guide RNA
ugggagcaggggaggcagcgg

SEQ ID NO: 21633 - RNA, 21 nt, Artificial Sequence
  GATA2 Guide RNA
ugggggugggagcaggggagg

SEQ ID NO: 21634 - RNA, 22 nt, Artificial Sequence
  GATA2 Guide RNA
acccaggggcugggggugggag

SEQ ID NO: 21635 - RNA, 22 nt, Artificial Sequence
  GATA2 Guide RNA
acugagcucccgcugccucccc

SEQ ID NO: 21636 - RNA, 22 nt, Artificial Sequence
  GATA2 Guide RNA
agcaggggaggcagcgggagcu

SEQ ID NO: 21637 - RNA, 22 nt, Artificial Sequence
  GATA2 Guide RNA
agcucccgcugccuccccugcu

SEQ ID NO: 21638 - RNA, 22 nt, Artificial Sequence
  GATA2 Guide RNA
aggggcugggggugggagcagg

SEQ ID NO: 21639 - RNA, 22 nt, Artificial Sequence
  GATA2 Guide RNA
cacugagcucccgcugccuccc

SEQ ID NO: 21640 - RNA, 22 nt, Artificial Sequence
  GATA2 Guide RNA
caggggaggcagcgggagcuca

SEQ ID NO: 21641 - RNA, 22 nt, Artificial Sequence
  GATA2 Guide RNA
caggggcugggggugggagcag

SEQ ID NO: 21642 - RNA, 22 nt, Artificial Sequence
  GATA2 Guide RNA
ccacugagcucccgcugccucc

SEQ ID NO: 21643 - RNA, 22 nt, Artificial Sequence
  GATA2 Guide RNA
ccaggggcugggggugggagca

SEQ ID NO: 21644 - RNA, 22 nt, Artificial Sequence
  GATA2 Guide RNA
cccgcugccuccccugcuccca

SEQ ID NO: 21645 - RNA, 22 nt, Artificial Sequence
  GATA2 Guide RNA
ccgcugccuccccugcucccac

SEQ ID NO: 21646 - RNA, 22 nt, Artificial Sequence
  GATA2 Guide RNA
ccuccccugcucccacccccag

SEQ ID NO: 21647 - RNA, 22 nt, Artificial Sequence
  GATA2 Guide RNA
ccugcucccacccccagccccu

SEQ ID NO: 21648 - RNA, 22 nt, Artificial Sequence
  GATA2 Guide RNA
cgcugccuccccugcucccacc

SEQ ID NO: 21649 - RNA, 22 nt, Artificial Sequence
  GATA2 Guide RNA
cuccccugcucccacccccagc

SEQ ID NO: 21650 - RNA, 22 nt, Artificial Sequence
  GATA2 Guide RNA
cucccgcugccuccccugcucc

SEQ ID NO: 21651 - RNA, 22 nt, Artificial Sequence
  GATA2 Guide RNA
cugagcucccgcugccuccccu

SEQ ID NO: 21652 - RNA, 22 nt, Artificial Sequence
  GATA2 Guide RNA
cugccuccccugcucccacccc

SEQ ID NO: 21653 - RNA, 22 nt, Artificial Sequence
  GATA2 Guide RNA
cugcucccacccccagccccug

SEQ ID NO: 21654 - RNA, 22 nt, Artificial Sequence
  GATA2 Guide RNA
cugggggugggagcaggggagg

SEQ ID NO: 21655 - RNA, 22 nt, Artificial Sequence
  GATA2 Guide RNA
gagcaggggaggcagcgggagc

SEQ ID NO: 21656 - RNA, 22 nt, Artificial Sequence
  GATA2 Guide RNA
gagcucccgcugccuccccugc

SEQ ID NO: 21657 - RNA, 22 nt, Artificial Sequence
  GATA2 Guide RNA
gcaggggaggcagcgggagcuc

SEQ ID NO: 21658 - RNA, 22 nt, Artificial Sequence
  GATA2 Guide RNA
gccuccccugcucccaccccca

SEQ ID NO: 21659 - RNA, 22 nt, Artificial Sequence
  GATA2 Guide RNA
gcucccgcugccuccccugcuc

SEQ ID NO: 21660 - RNA, 22 nt, Artificial Sequence
  GATA2 Guide RNA
gcugccuccccugcucccaccc

SEQ ID NO: 21661 - RNA, 22 nt, Artificial Sequence
  GATA2 Guide RNA
gcugggggugggagcaggggag

SEQ ID NO: 21662 - RNA, 22 nt, Artificial Sequence
  GATA2 Guide RNA
ggagcaggggaggcagcgggag

SEQ ID NO: 21663 - RNA, 22 nt, Artificial Sequence
  GATA2 Guide RNA
ggcugggggugggagcagggga

SEQ ID NO: 21664 - RNA, 22 nt, Artificial Sequence
  GATA2 Guide RNA
gggagcaggggaggcagcggga

SEQ ID NO: 21665 - RNA, 22 nt, Artificial Sequence
  GATA2 Guide RNA
gggggugggagcaggggaggca

SEQ ID NO: 21666 - RNA, 22 nt, Artificial Sequence
  GATA2 Guide RNA
ggggugggagcaggggaggcag

SEQ ID NO: 21667 - RNA, 22 nt, Artificial Sequence
  GATA2 Guide RNA
gggugggagcaggggaggcagc

SEQ ID NO: 21668 - RNA, 22 nt, Artificial Sequence
  GATA2 Guide RNA
ggugggagcaggggaggcagcg

SEQ ID NO: 21669 - RNA, 22 nt, Artificial Sequence
  GATA2 Guide RNA
guacccaggggcuggggguggg

SEQ ID NO: 21670 - RNA, 22 nt, Artificial Sequence
  GATA2 Guide RNA
gugggagcaggggaggcagcgg

SEQ ID NO: 21671 - RNA, 22 nt, Artificial Sequence
  GATA2 Guide RNA
uacccaggggcuggggguggga

SEQ ID NO: 21672 - RNA, 22 nt, Artificial Sequence
  GATA2 Guide RNA
uccccugcucccacccccagcc

SEQ ID NO: 21673 - RNA, 22 nt, Artificial Sequence
  GATA2 Guide RNA
ucccgcugccuccccugcuccc

SEQ ID NO: 21674 - RNA, 22 nt, Artificial Sequence
  GATA2 Guide RNA
ugagcucccgcugccuccccug

SEQ ID NO: 21675 - RNA, 22 nt, Artificial Sequence
  GATA2 Guide RNA
ugccuccccugcucccaccccc

SEQ ID NO: 21676 - RNA, 22 nt, Artificial Sequence
  GATA2 Guide RNA
ugcucccacccccagccccugg

SEQ ID NO: 21677 - RNA, 22 nt, Artificial Sequence
  GATA2 Guide RNA
ugggagcaggggaggcagcggg

SEQ ID NO: 21678 - RNA, 22 nt, Artificial Sequence
  GATA2 Guide RNA
ugggggugggagcaggggaggc

SEQ ID NO: 21679 - RNA, 20 nt, Artificial Sequence
  GATA2 Guide RNA
acccccagccccuagguaca

SEQ ID NO: 21680 - RNA, 20 nt, Artificial Sequence
  GATA2 Guide RNA
accuaggggcuggggguggg

SEQ ID NO: 21681 - RNA, 20 nt, Artificial Sequence
  GATA2 Guide RNA
acucucuguguaccuagggg

SEQ ID NO: 21682 - RNA, 20 nt, Artificial Sequence
  GATA2 Guide RNA
agccccuagguacacagaga

SEQ ID NO: 21683 - RNA, 20 nt, Artificial Sequence
  GATA2 Guide RNA
aggcccacucucuguguacc

SEQ ID NO: 21684 - RNA, 20 nt, Artificial Sequence
  GATA2 Guide RNA
agguacacagagagugggcc

SEQ ID NO: 21685 - RNA, 20 nt, Artificial Sequence
  GATA2 Guide RNA
cacccccagccccuagguac

SEQ ID NO: 21686 - RNA, 20 nt, Artificial Sequence
  GATA2 Guide RNA
cacucucuguguaccuaggg

SEQ ID NO: 21687 - RNA, 20 nt, Artificial Sequence
  GATA2 Guide RNA
cagccccuagguacacagag

SEQ ID NO: 21688 - RNA, 20 nt, Artificial Sequence
  GATA2 Guide RNA
ccacccccagccccuaggua

SEQ ID NO: 21689 - RNA, 20 nt, Artificial Sequence
  GATA2 Guide RNA
ccacucucuguguaccuagg

SEQ ID NO: 21690 - RNA, 20 nt, Artificial Sequence
  GATA2 Guide RNA
ccagccccuagguacacaga

SEQ ID NO: 21691 - RNA, 20 nt, Artificial Sequence
  GATA2 Guide RNA
cccacccccagccccuaggu

SEQ ID NO: 21692 - RNA, 20 nt, Artificial Sequence
  GATA2 Guide RNA
cccacucucuguguaccuag

SEQ ID NO: 21693 - RNA, 20 nt, Artificial Sequence
  GATA2 Guide RNA
cccagccccuagguacacag

SEQ ID NO: 21694 - RNA, 20 nt, Artificial Sequence
  GATA2 Guide RNA
ccccagccccuagguacaca

SEQ ID NO: 21695 - RNA, 20 nt, Artificial Sequence
  GATA2 Guide RNA
cccccagccccuagguacac

SEQ ID NO: 21696 - RNA, 20 nt, Artificial Sequence
  GATA2 Guide RNA
ccccuagguacacagagagu

SEQ ID NO: 21697 - RNA, 20 nt, Artificial Sequence
  GATA2 Guide RNA
cccuagguacacagagagug

SEQ ID NO: 21698 - RNA, 20 nt, Artificial Sequence
  GATA2 Guide RNA
ccuaggggcuggggguggga

SEQ ID NO: 21699 - RNA, 20 nt, Artificial Sequence
  GATA2 Guide RNA
ccuagguacacagagagugg

SEQ ID NO: 21700 - RNA, 20 nt, Artificial Sequence
  GATA2 Guide RNA
cgcucccacccccagccccu

SEQ ID NO: 21701 - RNA, 20 nt, Artificial Sequence
  GATA2 Guide RNA
cuaggggcugggggugggag

SEQ ID NO: 21702 - RNA, 20 nt, Artificial Sequence
  GATA2 Guide RNA
cuagguacacagagaguggg

SEQ ID NO: 21703 - RNA, 20 nt, Artificial Sequence
  GATA2 Guide RNA
cucccacccccagccccuag

SEQ ID NO: 21704 - RNA, 20 nt, Artificial Sequence
  GATA2 Guide RNA
cucucuguguaccuaggggc

SEQ ID NO: 21705 - RNA, 20 nt, Artificial Sequence
  GATA2 Guide RNA
cucuguguaccuaggggcug

SEQ ID NO: 21706 - RNA, 20 nt, Artificial Sequence
  GATA2 Guide RNA
cuguguaccuaggggcuggg

SEQ ID NO: 21707 - RNA, 20 nt, Artificial Sequence
  GATA2 Guide RNA
gaggcccacucucuguguac

SEQ ID NO: 21708 - RNA, 20 nt, Artificial Sequence
  GATA2 Guide RNA
gcccacucucuguguaccua

SEQ ID NO: 21709 - RNA, 20 nt, Artificial Sequence
  GATA2 Guide RNA
gccccuagguacacagagag

SEQ ID NO: 21710 - RNA, 20 nt, Artificial Sequence
  GATA2 Guide RNA
gcucccacccccagccccua

SEQ ID NO: 21711 - RNA, 20 nt, Artificial Sequence
  GATA2 Guide RNA
ggaggcccacucucugugua

SEQ ID NO: 21712 - RNA, 20 nt, Artificial Sequence
  GATA2 Guide RNA
ggcccacucucuguguaccu

SEQ ID NO: 21713 - RNA, 20 nt, Artificial Sequence
  GATA2 Guide RNA
guaccuaggggcugggggug

SEQ ID NO: 21714 - RNA, 20 nt, Artificial Sequence
  GATA2 Guide RNA
guguaccuaggggcuggggg

SEQ ID NO: 21715 - RNA, 20 nt, Artificial Sequence
  GATA2 Guide RNA
uaccuaggggcugggggugg

SEQ ID NO: 21716 - RNA, 20 nt, Artificial Sequence
  GATA2 Guide RNA
uagguacacagagagugggc

SEQ ID NO: 21717 - RNA, 20 nt, Artificial Sequence
  GATA2 Guide RNA
ucccacccccagccccuagg

SEQ ID NO: 21718 - RNA, 20 nt, Artificial Sequence
  GATA2 Guide RNA
ucucuguguaccuaggggcu

SEQ ID NO: 21719 - RNA, 20 nt, Artificial Sequence
  GATA2 Guide RNA
ucuguguaccuaggggcugg

SEQ ID NO: 21720 - RNA, 20 nt, Artificial Sequence
  GATA2 Guide RNA
uggaggcccacucucugugu

SEQ ID NO: 21721 - RNA, 20 nt, Artificial Sequence
  GATA2 Guide RNA
uguaccuaggggcugggggu

SEQ ID NO: 21722 - RNA, 20 nt, Artificial Sequence
  GATA2 Guide RNA
uguguaccuaggggcugggg

SEQ ID NO: 21723 - RNA, 21 nt, Artificial Sequence
  GATA2 Guide RNA
acccccagccccuagguacac

SEQ ID NO: 21724 - RNA, 21 nt, Artificial Sequence
  GATA2 Guide RNA
accuaggggcuggggguggga

SEQ ID NO: 21725 - RNA, 21 nt, Artificial Sequence
  GATA2 Guide RNA
acucucuguguaccuaggggc

SEQ ID NO: 21726 - RNA, 21 nt, Artificial Sequence
  GATA2 Guide RNA
agccccuagguacacagagag

SEQ ID NO: 21727 - RNA, 21 nt, Artificial Sequence
  GATA2 Guide RNA
aggcccacucucuguguaccu

SEQ ID NO: 21728 - RNA, 21 nt, Artificial Sequence
  GATA2 Guide RNA
agguacacagagagugggccu

SEQ ID NO: 21729 - RNA, 21 nt, Artificial Sequence
  GATA2 Guide RNA
cacccccagccccuagguaca

SEQ ID NO: 21730 - RNA, 21 nt, Artificial Sequence
  GATA2 Guide RNA
cacucucuguguaccuagggg

SEQ ID NO: 21731 - RNA, 21 nt, Artificial Sequence
  GATA2 Guide RNA
cagccccuagguacacagaga

SEQ ID NO: 21732 - RNA, 21 nt, Artificial Sequence
  GATA2 Guide RNA
ccacccccagccccuagguac

SEQ ID NO: 21733 - RNA, 21 nt, Artificial Sequence
  GATA2 Guide RNA
ccacucucuguguaccuaggg

SEQ ID NO: 21734 - RNA, 21 nt, Artificial Sequence
  GATA2 Guide RNA
ccagccccuagguacacagag

SEQ ID NO: 21735 - RNA, 21 nt, Artificial Sequence
  GATA2 Guide RNA
cccacccccagccccuaggua

SEQ ID NO: 21736 - RNA, 21 nt, Artificial Sequence
  GATA2 Guide RNA
cccacucucuguguaccuagg

SEQ ID NO: 21737 - RNA, 21 nt, Artificial Sequence
  GATA2 Guide RNA
cccagccccuagguacacaga

SEQ ID NO: 21738 - RNA, 21 nt, Artificial Sequence
  GATA2 Guide RNA
ccccagccccuagguacacag

SEQ ID NO: 21739 - RNA, 21 nt, Artificial Sequence
  GATA2 Guide RNA
cccccagccccuagguacaca

SEQ ID NO: 21740 - RNA, 21 nt, Artificial Sequence
  GATA2 Guide RNA
ccccuagguacacagagagug

SEQ ID NO: 21741 - RNA, 21 nt, Artificial Sequence
  GATA2 Guide RNA
cccuagguacacagagagugg

SEQ ID NO: 21742 - RNA, 21 nt, Artificial Sequence
  GATA2 Guide RNA
ccuaggggcugggggugggag

SEQ ID NO: 21743 - RNA, 21 nt, Artificial Sequence
  GATA2 Guide RNA
ccuagguacacagagaguggg

SEQ ID NO: 21744 - RNA, 21 nt, Artificial Sequence
  GATA2 Guide RNA
cgcucccacccccagccccua

SEQ ID NO: 21745 - RNA, 21 nt, Artificial Sequence
  GATA2 Guide RNA
cuaggggcugggggugggagc

SEQ ID NO: 21746 - RNA, 21 nt, Artificial Sequence
  GATA2 Guide RNA
cuagguacacagagagugggc

SEQ ID NO: 21747 - RNA, 21 nt, Artificial Sequence
  GATA2 Guide RNA
cucccacccccagccccuagg

SEQ ID NO: 21748 - RNA, 21 nt, Artificial Sequence
  GATA2 Guide RNA
cucucuguguaccuaggggcu

SEQ ID NO: 21749 - RNA, 21 nt, Artificial Sequence
  GATA2 Guide RNA
cucuguguaccuaggggcugg

SEQ ID NO: 21750 - RNA, 21 nt, Artificial Sequence
  GATA2 Guide RNA
cuggaggcccacucucugugu

SEQ ID NO: 21751 - RNA, 21 nt, Artificial Sequence
  GATA2 Guide RNA
cuguguaccuaggggcugggg

SEQ ID NO: 21752 - RNA, 21 nt, Artificial Sequence
  GATA2 Guide RNA
gaggcccacucucuguguacc

SEQ ID NO: 21753 - RNA, 21 nt, Artificial Sequence
  GATA2 Guide RNA
gcccacucucuguguaccuag

SEQ ID NO: 21754 - RNA, 21 nt, Artificial Sequence
  GATA2 Guide RNA
gccccuagguacacagagagu

SEQ ID NO: 21755 - RNA, 21 nt, Artificial Sequence
  GATA2 Guide RNA
gcucccacccccagccccuag

SEQ ID NO: 21756 - RNA, 21 nt, Artificial Sequence
  GATA2 Guide RNA
ggaggcccacucucuguguac

SEQ ID NO: 21757 - RNA, 21 nt, Artificial Sequence
  GATA2 Guide RNA
ggcccacucucuguguaccua

SEQ ID NO: 21758 - RNA, 21 nt, Artificial Sequence
  GATA2 Guide RNA
guaccuaggggcugggggugg

SEQ ID NO: 21759 - RNA, 21 nt, Artificial Sequence
  GATA2 Guide RNA
guguaccuaggggcugggggu

SEQ ID NO: 21760 - RNA, 21 nt, Artificial Sequence
  GATA2 Guide RNA
uaccuaggggcuggggguggg

SEQ ID NO: 21761 - RNA, 21 nt, Artificial Sequence
  GATA2 Guide RNA
uagguacacagagagugggcc

SEQ ID NO: 21762 - RNA, 21 nt, Artificial Sequence
  GATA2 Guide RNA
ucccacccccagccccuaggu

SEQ ID NO: 21763 - RNA, 21 nt, Artificial Sequence
  GATA2 Guide RNA
ucucuguguaccuaggggcug

SEQ ID NO: 21764 - RNA, 21 nt, Artificial Sequence
  GATA2 Guide RNA
ucuguguaccuaggggcuggg

SEQ ID NO: 21765 - RNA, 21 nt, Artificial Sequence
  GATA2 Guide RNA
uggaggcccacucucugugua

SEQ ID NO: 21766 - RNA, 21 nt, Artificial Sequence
  GATA2 Guide RNA
uguaccuaggggcugggggug

SEQ ID NO: 21767 - RNA, 21 nt, Artificial Sequence
  GATA2 Guide RNA
uguguaccuaggggcuggggg

SEQ ID NO: 21768 - RNA, 22 nt, Artificial Sequence
  GATA2 Guide RNA
acccccagccccuagguacaca

SEQ ID NO: 21769 - RNA, 22 nt, Artificial Sequence
  GATA2 Guide RNA
accuaggggcugggggugggag

SEQ ID NO: 21770 - RNA, 22 nt, Artificial Sequence
  GATA2 Guide RNA
acucucuguguaccuaggggcu

SEQ ID NO: 21771 - RNA, 22 nt, Artificial Sequence
  GATA2 Guide RNA
agccccuagguacacagagagu

SEQ ID NO: 21772 - RNA, 22 nt, Artificial Sequence
  GATA2 Guide RNA
aggcccacucucuguguaccua

SEQ ID NO: 21773 - RNA, 22 nt, Artificial Sequence
  GATA2 Guide RNA
agguacacagagagugggccuc

SEQ ID NO: 21774 - RNA, 22 nt, Artificial Sequence
  GATA2 Guide RNA
cacccccagccccuagguacac

SEQ ID NO: 21775 - RNA, 22 nt, Artificial Sequence
  GATA2 Guide RNA
cacucucuguguaccuaggggc

SEQ ID NO: 21776 - RNA, 22 nt, Artificial Sequence
  GATA2 Guide RNA
cagccccuagguacacagagag

SEQ ID NO: 21777 - RNA, 22 nt, Artificial Sequence
  GATA2 Guide RNA
ccacccccagccccuagguaca

SEQ ID NO: 21778 - RNA, 22 nt, Artificial Sequence
  GATA2 Guide RNA
ccacucucuguguaccuagggg

SEQ ID NO: 21779 - RNA, 22 nt, Artificial Sequence
  GATA2 Guide RNA
ccagccccuagguacacagaga

SEQ ID NO: 21780 - RNA, 22 nt, Artificial Sequence
  GATA2 Guide RNA
cccacccccagccccuagguac

SEQ ID NO: 21781 - RNA, 22 nt, Artificial Sequence
  GATA2 Guide RNA
cccacucucuguguaccuaggg

SEQ ID NO: 21782 - RNA, 22 nt, Artificial Sequence
  GATA2 Guide RNA
cccagccccuagguacacagag

SEQ ID NO: 21783 - RNA, 22 nt, Artificial Sequence
  GATA2 Guide RNA
ccccagccccuagguacacaga

SEQ ID NO: 21784 - RNA, 22 nt, Artificial Sequence
  GATA2 Guide RNA
cccccagccccuagguacacag

SEQ ID NO: 21785 - RNA, 22 nt, Artificial Sequence
  GATA2 Guide RNA
ccccuagguacacagagagugg

SEQ ID NO: 21786 - RNA, 22 nt, Artificial Sequence
  GATA2 Guide RNA
cccuagguacacagagaguggg

SEQ ID NO: 21787 - RNA, 22 nt, Artificial Sequence
  GATA2 Guide RNA
ccgcucccacccccagccccua

SEQ ID NO: 21788 - RNA, 22 nt, Artificial Sequence
  GATA2 Guide RNA
ccuaggggcugggggugggagc

SEQ ID NO: 21789 - RNA, 22 nt, Artificial Sequence
  GATA2 Guide RNA
ccuagguacacagagagugggc

SEQ ID NO: 21790 - RNA, 22 nt, Artificial Sequence
  GATA2 Guide RNA
ccuggaggcccacucucugugu

SEQ ID NO: 21791 - RNA, 22 nt, Artificial Sequence
  GATA2 Guide RNA
cgcucccacccccagccccuag

SEQ ID NO: 21792 - RNA, 22 nt, Artificial Sequence
  GATA2 Guide RNA
cuaggggcugggggugggagcg

SEQ ID NO: 21793 - RNA, 22 nt, Artificial Sequence
  GATA2 Guide RNA
cuagguacacagagagugggcc

SEQ ID NO: 21794 - RNA, 22 nt, Artificial Sequence
  GATA2 Guide RNA
cucccacccccagccccuaggu

SEQ ID NO: 21795 - RNA, 22 nt, Artificial Sequence
  GATA2 Guide RNA
cucucuguguaccuaggggcug

SEQ ID NO: 21796 - RNA, 22 nt, Artificial Sequence
  GATA2 Guide RNA
cucuguguaccuaggggcuggg

SEQ ID NO: 21797 - RNA, 22 nt, Artificial Sequence
  GATA2 Guide RNA
cuggaggcccacucucugugua

SEQ ID NO: 21798 - RNA, 22 nt, Artificial Sequence
  GATA2 Guide RNA
cuguguaccuaggggcuggggg

SEQ ID NO: 21799 - RNA, 22 nt, Artificial Sequence
  GATA2 Guide RNA
gaggcccacucucuguguaccu

SEQ ID NO: 21800 - RNA, 22 nt, Artificial Sequence
  GATA2 Guide RNA
gcccacucucuguguaccuagg

SEQ ID NO: 21801 - RNA, 22 nt, Artificial Sequence
  GATA2 Guide RNA
gccccuagguacacagagagug

SEQ ID NO: 21802 - RNA, 22 nt, Artificial Sequence
  GATA2 Guide RNA
gcucccacccccagccccuagg

SEQ ID NO: 21803 - RNA, 22 nt, Artificial Sequence
  GATA2 Guide RNA
ggaggcccacucucuguguacc

SEQ ID NO: 21804 - RNA, 22 nt, Artificial Sequence
  GATA2 Guide RNA
ggcccacucucuguguaccuag

SEQ ID NO: 21805 - RNA, 22 nt, Artificial Sequence
  GATA2 Guide RNA
guaccuaggggcuggggguggg

SEQ ID NO: 21806 - RNA, 22 nt, Artificial Sequence
  GATA2 Guide RNA
guguaccuaggggcugggggug

SEQ ID NO: 21807 - RNA, 22 nt, Artificial Sequence
  GATA2 Guide RNA
uaccuaggggcuggggguggga

SEQ ID NO: 21808 - RNA, 22 nt, Artificial Sequence
  GATA2 Guide RNA
uagguacacagagagugggccu

SEQ ID NO: 21809 - RNA, 22 nt, Artificial Sequence
  GATA2 Guide RNA
ucccacccccagccccuaggua

SEQ ID NO: 21810 - RNA, 22 nt, Artificial Sequence
  GATA2 Guide RNA
ucucuguguaccuaggggcugg

SEQ ID NO: 21811 - RNA, 22 nt, Artificial Sequence
  GATA2 Guide RNA
ucuguguaccuaggggcugggg

SEQ ID NO: 21812 - RNA, 22 nt, Artificial Sequence
  GATA2 Guide RNA
uggaggcccacucucuguguac

SEQ ID NO: 21813 - RNA, 22 nt, Artificial Sequence
  GATA2 Guide RNA
uguaccuaggggcugggggugg

SEQ ID NO: 21814 - RNA, 22 nt, Artificial Sequence
  GATA2 Guide RNA
uguguaccuaggggcugggggu

SEQ ID NO: 21815 - RNA, 20 nt, Artificial Sequence
  GATA2 Guide RNA
acccccagccccuggguacg

SEQ ID NO: 21816 - RNA, 20 nt, Artificial Sequence
  GATA2 Guide RNA
acgcagagagugggccucca

SEQ ID NO: 21817 - RNA, 20 nt, Artificial Sequence
  GATA2 Guide RNA
acucucugcguacccagggg

SEQ ID NO: 21818 - RNA, 20 nt, Artificial Sequence
  GATA2 Guide RNA
agccccuggguacgcagaga

SEQ ID NO: 21819 - RNA, 20 nt, Artificial Sequence
  GATA2 Guide RNA
aggcccacucucugcguacc

SEQ ID NO: 21820 - RNA, 20 nt, Artificial Sequence
  GATA2 Guide RNA
aggcccuggaggcccacucu

SEQ ID NO: 21821 - RNA, 20 nt, Artificial Sequence
  GATA2 Guide RNA
cacccccagccccuggguac

SEQ ID NO: 21822 - RNA, 20 nt, Artificial Sequence
  GATA2 Guide RNA
cacucucugcguacccaggg

SEQ ID NO: 21823 - RNA, 20 nt, Artificial Sequence
  GATA2 Guide RNA
cagccccuggguacgcagag

SEQ ID NO: 21824 - RNA, 20 nt, Artificial Sequence
  GATA2 Guide RNA
ccacccccagccccugggua

SEQ ID NO: 21825 - RNA, 20 nt, Artificial Sequence
  GATA2 Guide RNA
ccacucucugcguacccagg

SEQ ID NO: 21826 - RNA, 20 nt, Artificial Sequence
  GATA2 Guide RNA
ccagccccuggguacgcaga

SEQ ID NO: 21827 - RNA, 20 nt, Artificial Sequence
  GATA2 Guide RNA
cccacccccagccccugggu

SEQ ID NO: 21828 - RNA, 20 nt, Artificial Sequence
  GATA2 Guide RNA
cccacucucugcguacccag

SEQ ID NO: 21829 - RNA, 20 nt, Artificial Sequence
  GATA2 Guide RNA
cccagccccuggguacgcag

SEQ ID NO: 21830 - RNA, 20 nt, Artificial Sequence
  GATA2 Guide RNA
ccccagccccuggguacgca

SEQ ID NO: 21831 - RNA, 20 nt, Artificial Sequence
  GATA2 Guide RNA
cccccagccccuggguacgc

SEQ ID NO: 21832 - RNA, 20 nt, Artificial Sequence
  GATA2 Guide RNA
ccccuggguacgcagagagu

SEQ ID NO: 21833 - RNA, 20 nt, Artificial Sequence
  GATA2 Guide RNA
cccuggaggcccacucucug

SEQ ID NO: 21834 - RNA, 20 nt, Artificial Sequence
  GATA2 Guide RNA
cccuggguacgcagagagug

SEQ ID NO: 21835 - RNA, 20 nt, Artificial Sequence
  GATA2 Guide RNA
ccuggaggcccacucucugc

SEQ ID NO: 21836 - RNA, 20 nt, Artificial Sequence
  GATA2 Guide RNA
ccuggguacgcagagagugg

SEQ ID NO: 21837 - RNA, 20 nt, Artificial Sequence
  GATA2 Guide RNA
cgcagagagugggccuccag

SEQ ID NO: 21838 - RNA, 20 nt, Artificial Sequence
  GATA2 Guide RNA
cucucugcguacccaggggc

SEQ ID NO: 21839 - RNA, 20 nt, Artificial Sequence
  GATA2 Guide RNA
cucugcguacccaggggcug

SEQ ID NO: 21840 - RNA, 20 nt, Artificial Sequence
  GATA2 Guide RNA
cugcguacccaggggcuggg

SEQ ID NO: 21841 - RNA, 20 nt, Artificial Sequence
  GATA2 Guide RNA
cuggaggcccacucucugcg

SEQ ID NO: 21842 - RNA, 20 nt, Artificial Sequence
  GATA2 Guide RNA
cuggguacgcagagaguggg

SEQ ID NO: 21843 - RNA, 20 nt, Artificial Sequence
  GATA2 Guide RNA
gaggcccacucucugcguac

SEQ ID NO: 21844 - RNA, 20 nt, Artificial Sequence
  GATA2 Guide RNA
gcagagagugggccuccagg

SEQ ID NO: 21845 - RNA, 20 nt, Artificial Sequence
  GATA2 Guide RNA
gcccacucucugcguaccca

SEQ ID NO: 21846 - RNA, 20 nt, Artificial Sequence
  GATA2 Guide RNA
gccccuggguacgcagagag

SEQ ID NO: 21847 - RNA, 20 nt, Artificial Sequence
  GATA2 Guide RNA
gcccuggaggcccacucucu

SEQ ID NO: 21848 - RNA, 20 nt, Artificial Sequence
  GATA2 Guide RNA
gcguacccaggggcuggggg

SEQ ID NO: 21849 - RNA, 20 nt, Artificial Sequence
  GATA2 Guide RNA
ggaggcccacucucugcgua

SEQ ID NO: 21850 - RNA, 20 nt, Artificial Sequence
  GATA2 Guide RNA
ggcccacucucugcguaccc

SEQ ID NO: 21851 - RNA, 20 nt, Artificial Sequence
  GATA2 Guide RNA
ggcccuggaggcccacucuc

SEQ ID NO: 21852 - RNA, 20 nt, Artificial Sequence
  GATA2 Guide RNA
ggguacgcagagagugggcc

SEQ ID NO: 21853 - RNA, 20 nt, Artificial Sequence
  GATA2 Guide RNA
gguacgcagagagugggccu

SEQ ID NO: 21854 - RNA, 20 nt, Artificial Sequence
  GATA2 Guide RNA
guacgcagagagugggccuc

SEQ ID NO: 21855 - RNA, 20 nt, Artificial Sequence
  GATA2 Guide RNA
uacgcagagagugggccucc

SEQ ID NO: 21856 - RNA, 20 nt, Artificial Sequence
  GATA2 Guide RNA
ucucugcguacccaggggcu

SEQ ID NO: 21857 - RNA, 20 nt, Artificial Sequence
  GATA2 Guide RNA
ucugcguacccaggggcugg

SEQ ID NO: 21858 - RNA, 20 nt, Artificial Sequence
  GATA2 Guide RNA
ugcguacccaggggcugggg

SEQ ID NO: 21859 - RNA, 20 nt, Artificial Sequence
  GATA2 Guide RNA
uggaggcccacucucugcgu

SEQ ID NO: 21860 - RNA, 20 nt, Artificial Sequence
  GATA2 Guide RNA
uggguacgcagagagugggc

SEQ ID NO: 21861 - RNA, 21 nt, Artificial Sequence
  GATA2 Guide RNA
acccccagccccuggguacgc

SEQ ID NO: 21862 - RNA, 21 nt, Artificial Sequence
  GATA2 Guide RNA
acgcagagagugggccuccag

SEQ ID NO: 21863 - RNA, 21 nt, Artificial Sequence
  GATA2 Guide RNA
acucucugcguacccaggggc

SEQ ID NO: 21864 - RNA, 21 nt, Artificial Sequence
  GATA2 Guide RNA
agccccuggguacgcagagag

SEQ ID NO: 21865 - RNA, 21 nt, Artificial Sequence
  GATA2 Guide RNA
aggcccacucucugcguaccc

SEQ ID NO: 21866 - RNA, 21 nt, Artificial Sequence
  GATA2 Guide RNA
aggcccuggaggcccacucuc

SEQ ID NO: 21867 - RNA, 21 nt, Artificial Sequence
  GATA2 Guide RNA
cacccccagccccuggguacg

SEQ ID NO: 21868 - RNA, 21 nt, Artificial Sequence
  GATA2 Guide RNA
cacucucugcguacccagggg

SEQ ID NO: 21869 - RNA, 21 nt, Artificial Sequence
  GATA2 Guide RNA
cagccccuggguacgcagaga

SEQ ID NO: 21870 - RNA, 21 nt, Artificial Sequence
  GATA2 Guide RNA
ccacccccagccccuggguac

SEQ ID NO: 21871 - RNA, 21 nt, Artificial Sequence
  GATA2 Guide RNA
ccacucucugcguacccaggg

SEQ ID NO: 21872 - RNA, 21 nt, Artificial Sequence
  GATA2 Guide RNA
ccagccccuggguacgcagag

SEQ ID NO: 21873 - RNA, 21 nt, Artificial Sequence
  GATA2 Guide RNA
cccacccccagccccugggua

SEQ ID NO: 21874 - RNA, 21 nt, Artificial Sequence
  GATA2 Guide RNA
cccacucucugcguacccagg

SEQ ID NO: 21875 - RNA, 21 nt, Artificial Sequence
  GATA2 Guide RNA
cccagccccuggguacgcaga

SEQ ID NO: 21876 - RNA, 21 nt, Artificial Sequence
  GATA2 Guide RNA
ccccagccccuggguacgcag

SEQ ID NO: 21877 - RNA, 21 nt, Artificial Sequence
  GATA2 Guide RNA
cccccagccccuggguacgca

SEQ ID NO: 21878 - RNA, 21 nt, Artificial Sequence
  GATA2 Guide RNA
ccccuggguacgcagagagug

SEQ ID NO: 21879 - RNA, 21 nt, Artificial Sequence
  GATA2 Guide RNA
cccuggaggcccacucucugc

SEQ ID NO: 21880 - RNA, 21 nt, Artificial Sequence
  GATA2 Guide RNA
cccuggguacgcagagagugg

SEQ ID NO: 21881 - RNA, 21 nt, Artificial Sequence
  GATA2 Guide RNA
ccuggaggcccacucucugcg

SEQ ID NO: 21882 - RNA, 21 nt, Artificial Sequence
  GATA2 Guide RNA
ccuggguacgcagagaguggg

SEQ ID NO: 21883 - RNA, 21 nt, Artificial Sequence
  GATA2 Guide RNA
cgcagagagugggccuccagg

SEQ ID NO: 21884 - RNA, 21 nt, Artificial Sequence
  GATA2 Guide RNA
cucucugcguacccaggggcu

SEQ ID NO: 21885 - RNA, 21 nt, Artificial Sequence
  GATA2 Guide RNA
cucugcguacccaggggcugg

SEQ ID NO: 21886 - RNA, 21 nt, Artificial Sequence
  GATA2 Guide RNA
cugcguacccaggggcugggg

SEQ ID NO: 21887 - RNA, 21 nt, Artificial Sequence
  GATA2 Guide RNA
cuggaggcccacucucugcgu

SEQ ID NO: 21888 - RNA, 21 nt, Artificial Sequence
  GATA2 Guide RNA
cuggguacgcagagagugggc

SEQ ID NO: 21889 - RNA, 21 nt, Artificial Sequence
  GATA2 Guide RNA
gaggcccacucucugcguacc

SEQ ID NO: 21890 - RNA, 21 nt, Artificial Sequence
  GATA2 Guide RNA
gaggcccuggaggcccacucu

SEQ ID NO: 21891 - RNA, 21 nt, Artificial Sequence
  GATA2 Guide RNA
gcagagagugggccuccaggg

SEQ ID NO: 21892 - RNA, 21 nt, Artificial Sequence
  GATA2 Guide RNA
gcccacucucugcguacccag

SEQ ID NO: 21893 - RNA, 21 nt, Artificial Sequence
  GATA2 Guide RNA
gccccuggguacgcagagagu

SEQ ID NO: 21894 - RNA, 21 nt, Artificial Sequence
  GATA2 Guide RNA
gcccuggaggcccacucucug

SEQ ID NO: 21895 - RNA, 21 nt, Artificial Sequence
  GATA2 Guide RNA
gcguacccaggggcugggggu

SEQ ID NO: 21896 - RNA, 21 nt, Artificial Sequence
  GATA2 Guide RNA
ggaggcccacucucugcguac

SEQ ID NO: 21897 - RNA, 21 nt, Artificial Sequence
  GATA2 Guide RNA
ggcccacucucugcguaccca

SEQ ID NO: 21898 - RNA, 21 nt, Artificial Sequence
  GATA2 Guide RNA
ggcccuggaggcccacucucu

SEQ ID NO: 21899 - RNA, 21 nt, Artificial Sequence
  GATA2 Guide RNA
ggguacgcagagagugggccu

SEQ ID NO: 21900 - RNA, 21 nt, Artificial Sequence
  GATA2 Guide RNA
gguacgcagagagugggccuc

SEQ ID NO: 21901 - RNA, 21 nt, Artificial Sequence
  GATA2 Guide RNA
guacgcagagagugggccucc

SEQ ID NO: 21902 - RNA, 21 nt, Artificial Sequence
  GATA2 Guide RNA
uacgcagagagugggccucca

SEQ ID NO: 21903 - RNA, 21 nt, Artificial Sequence
  GATA2 Guide RNA
ucccacccccagccccugggu

SEQ ID NO: 21904 - RNA, 21 nt, Artificial Sequence
  GATA2 Guide RNA
ucucugcguacccaggggcug

SEQ ID NO: 21905 - RNA, 21 nt, Artificial Sequence
  GATA2 Guide RNA
ucugcguacccaggggcuggg

SEQ ID NO: 21906 - RNA, 21 nt, Artificial Sequence
  GATA2 Guide RNA
ugcguacccaggggcuggggg

SEQ ID NO: 21907 - RNA, 21 nt, Artificial Sequence
  GATA2 Guide RNA
uggaggcccacucucugcgua

SEQ ID NO: 21908 - RNA, 21 nt, Artificial Sequence
  GATA2 Guide RNA
uggguacgcagagagugggcc

SEQ ID NO: 21909 - RNA, 22 nt, Artificial Sequence
  GATA2 Guide RNA
acccccagccccuggguacgca

SEQ ID NO: 21910 - RNA, 22 nt, Artificial Sequence
  GATA2 Guide RNA
acgcagagagugggccuccagg

SEQ ID NO: 21911 - RNA, 22 nt, Artificial Sequence
  GATA2 Guide RNA
acucucugcguacccaggggcu

SEQ ID NO: 21912 - RNA, 22 nt, Artificial Sequence
  GATA2 Guide RNA
agccccuggguacgcagagagu

SEQ ID NO: 21913 - RNA, 22 nt, Artificial Sequence
  GATA2 Guide RNA
aggcccacucucugcguaccca

SEQ ID NO: 21914 - RNA, 22 nt, Artificial Sequence
  GATA2 Guide RNA
aggcccuggaggcccacucucu

SEQ ID NO: 21915 - RNA, 22 nt, Artificial Sequence
  GATA2 Guide RNA
cacccccagccccuggguacgc

SEQ ID NO: 21916 - RNA, 22 nt, Artificial Sequence
  GATA2 Guide RNA
cacucucugcguacccaggggc

SEQ ID NO: 21917 - RNA, 22 nt, Artificial Sequence
  GATA2 Guide RNA
cagccccuggguacgcagagag

SEQ ID NO: 21918 - RNA, 22 nt, Artificial Sequence
  GATA2 Guide RNA
ccacccccagccccuggguacg

SEQ ID NO: 21919 - RNA, 22 nt, Artificial Sequence
  GATA2 Guide RNA
ccacucucugcguacccagggg

SEQ ID NO: 21920 - RNA, 22 nt, Artificial Sequence
  GATA2 Guide RNA
ccagccccuggguacgcagaga

SEQ ID NO: 21921 - RNA, 22 nt, Artificial Sequence
  GATA2 Guide RNA
cccacccccagccccuggguac

SEQ ID NO: 21922 - RNA, 22 nt, Artificial Sequence
  GATA2 Guide RNA
cccacucucugcguacccaggg

SEQ ID NO: 21923 - RNA, 22 nt, Artificial Sequence
  GATA2 Guide RNA
cccagccccuggguacgcagag

SEQ ID NO: 21924 - RNA, 22 nt, Artificial Sequence
  GATA2 Guide RNA
ccccagccccuggguacgcaga

SEQ ID NO: 21925 - RNA, 22 nt, Artificial Sequence
  GATA2 Guide RNA
cccccagccccuggguacgcag

SEQ ID NO: 21926 - RNA, 22 nt, Artificial Sequence
  GATA2 Guide RNA
ccccuggguacgcagagagugg

SEQ ID NO: 21927 - RNA, 22 nt, Artificial Sequence
  GATA2 Guide RNA
cccuggaggcccacucucugcg

SEQ ID NO: 21928 - RNA, 22 nt, Artificial Sequence
  GATA2 Guide RNA
cccuggguacgcagagaguggg

SEQ ID NO: 21929 - RNA, 22 nt, Artificial Sequence
  GATA2 Guide RNA
ccuggaggcccacucucugcgu

SEQ ID NO: 21930 - RNA, 22 nt, Artificial Sequence
  GATA2 Guide RNA
ccuggguacgcagagagugggc

SEQ ID NO: 21931 - RNA, 22 nt, Artificial Sequence
  GATA2 Guide RNA
cgcagagagugggccuccaggg

SEQ ID NO: 21932 - RNA, 22 nt, Artificial Sequence
  GATA2 Guide RNA
cucccacccccagccccugggu

SEQ ID NO: 21933 - RNA, 22 nt, Artificial Sequence
  GATA2 Guide RNA
cucucugcguacccaggggcug

SEQ ID NO: 21934 - RNA, 22 nt, Artificial Sequence
  GATA2 Guide RNA
cucugcguacccaggggcuggg

SEQ ID NO: 21935 - RNA, 22 nt, Artificial Sequence
  GATA2 Guide RNA
cugcguacccaggggcuggggg

SEQ ID NO: 21936 - RNA, 22 nt, Artificial Sequence
  GATA2 Guide RNA
cuggaggcccacucucugcgua

SEQ ID NO: 21937 - RNA, 22 nt, Artificial Sequence
  GATA2 Guide RNA
cuggguacgcagagagugggcc

SEQ ID NO: 21938 - RNA, 22 nt, Artificial Sequence
  GATA2 Guide RNA
gaggcccacucucugcguaccc

SEQ ID NO: 21939 - RNA, 22 nt, Artificial Sequence
  GATA2 Guide RNA
gaggcccuggaggcccacucuc

SEQ ID NO: 21940 - RNA, 22 nt, Artificial Sequence
  GATA2 Guide RNA
gcagagagugggccuccagggc

SEQ ID NO: 21941 - RNA, 22 nt, Artificial Sequence
  GATA2 Guide RNA
gcccacucucugcguacccagg

SEQ ID NO: 21942 - RNA, 22 nt, Artificial Sequence
  GATA2 Guide RNA
gccccuggguacgcagagagug

SEQ ID NO: 21943 - RNA, 22 nt, Artificial Sequence
  GATA2 Guide RNA
gcccuggaggcccacucucugc

SEQ ID NO: 21944 - RNA, 22 nt, Artificial Sequence
  GATA2 Guide RNA
gcguacccaggggcugggggug

SEQ ID NO: 21945 - RNA, 22 nt, Artificial Sequence
  GATA2 Guide RNA
ggaggcccacucucugcguacc

SEQ ID NO: 21946 - RNA, 22 nt, Artificial Sequence
  GATA2 Guide RNA
ggaggcccuggaggcccacucu

SEQ ID NO: 21947 - RNA, 22 nt, Artificial Sequence
  GATA2 Guide RNA
ggcccacucucugcguacccag

SEQ ID NO: 21948 - RNA, 22 nt, Artificial Sequence
  GATA2 Guide RNA
ggcccuggaggcccacucucug

SEQ ID NO: 21949 - RNA, 22 nt, Artificial Sequence
  GATA2 Guide RNA
ggguacgcagagagugggccuc

SEQ ID NO: 21950 - RNA, 22 nt, Artificial Sequence
  GATA2 Guide RNA
gguacgcagagagugggccucc

SEQ ID NO: 21951 - RNA, 22 nt, Artificial Sequence
  GATA2 Guide RNA
guacgcagagagugggccucca

SEQ ID NO: 21952 - RNA, 22 nt, Artificial Sequence
  GATA2 Guide RNA
uacgcagagagugggccuccag

SEQ ID NO: 21953 - RNA, 22 nt, Artificial Sequence
  GATA2 Guide RNA
ucccacccccagccccugggua

SEQ ID NO: 21954 - RNA, 22 nt, Artificial Sequence
  GATA2 Guide RNA
ucucugcguacccaggggcugg

SEQ ID NO: 21955 - RNA, 22 nt, Artificial Sequence
  GATA2 Guide RNA
ucugcguacccaggggcugggg

SEQ ID NO: 21956 - RNA, 22 nt, Artificial Sequence
  GATA2 Guide RNA
ugcguacccaggggcugggggu

SEQ ID NO: 21957 - RNA, 22 nt, Artificial Sequence
  GATA2 Guide RNA
uggaggcccacucucugcguac

SEQ ID NO: 21958 - RNA, 22 nt, Artificial Sequence
  GATA2 Guide RNA
uggguacgcagagagugggccu

SEQ ID NO: 21959 - RNA, 20 nt, Artificial Sequence
  GATA2 Guide RNA
acacagagggugggccucca

SEQ ID NO: 21960 - RNA, 20 nt, Artificial Sequence
  GATA2 Guide RNA
acagagggugggccuccagg

SEQ ID NO: 21961 - RNA, 20 nt, Artificial Sequence
  GATA2 Guide RNA
acccucuguguacccagggg

SEQ ID NO: 21962 - RNA, 20 nt, Artificial Sequence
  GATA2 Guide RNA
agagggugggccuccagggc

SEQ ID NO: 21963 - RNA, 20 nt, Artificial Sequence
  GATA2 Guide RNA
agccccuggguacacagagg

SEQ ID NO: 21964 - RNA, 20 nt, Artificial Sequence
  GATA2 Guide RNA
aggcccacccucuguguacc

SEQ ID NO: 21965 - RNA, 20 nt, Artificial Sequence
  GATA2 Guide RNA
aggcccuggaggcccacccu

SEQ ID NO: 21966 - RNA, 20 nt, Artificial Sequence
  GATA2 Guide RNA
agggugggccuccagggccu

SEQ ID NO: 21967 - RNA, 20 nt, Artificial Sequence
  GATA2 Guide RNA
cacagagggugggccuccag

SEQ ID NO: 21968 - RNA, 20 nt, Artificial Sequence
  GATA2 Guide RNA
cacccucuguguacccaggg

SEQ ID NO: 21969 - RNA, 20 nt, Artificial Sequence
  GATA2 Guide RNA
cagagggugggccuccaggg

SEQ ID NO: 21970 - RNA, 20 nt, Artificial Sequence
  GATA2 Guide RNA
cagccccuggguacacagag

SEQ ID NO: 21971 - RNA, 20 nt, Artificial Sequence
  GATA2 Guide RNA
ccacccucuguguacccagg

SEQ ID NO: 21972 - RNA, 20 nt, Artificial Sequence
  GATA2 Guide RNA
ccagccccuggguacacaga

SEQ ID NO: 21973 - RNA, 20 nt, Artificial Sequence
  GATA2 Guide RNA
cccacccucuguguacccag

SEQ ID NO: 21974 - RNA, 20 nt, Artificial Sequence
  GATA2 Guide RNA
cccagccccuggguacacag

SEQ ID NO: 21975 - RNA, 20 nt, Artificial Sequence
  GATA2 Guide RNA
ccccuggguacacagagggu

SEQ ID NO: 21976 - RNA, 20 nt, Artificial Sequence
  GATA2 Guide RNA
cccucuguguacccaggggc

SEQ ID NO: 21977 - RNA, 20 nt, Artificial Sequence
  GATA2 Guide RNA
cccuggaggcccacccucug

SEQ ID NO: 21978 - RNA, 20 nt, Artificial Sequence
  GATA2 Guide RNA
cccuggguacacagagggug

SEQ ID NO: 21979 - RNA, 20 nt, Artificial Sequence
  GATA2 Guide RNA
ccuggaggcccacccucugu

SEQ ID NO: 21980 - RNA, 20 nt, Artificial Sequence
  GATA2 Guide RNA
ccuggguacacagagggugg

SEQ ID NO: 21981 - RNA, 20 nt, Artificial Sequence
  GATA2 Guide RNA
cuggaggcccacccucugug

SEQ ID NO: 21982 - RNA, 20 nt, Artificial Sequence
  GATA2 Guide RNA
cuggaggcccuggaggccca

SEQ ID NO: 21983 - RNA, 20 nt, Artificial Sequence
  GATA2 Guide RNA
cuggguacacagaggguggg

SEQ ID NO: 21984 - RNA, 20 nt, Artificial Sequence
  GATA2 Guide RNA
gaggcccacccucuguguac

SEQ ID NO: 21985 - RNA, 20 nt, Artificial Sequence
  GATA2 Guide RNA
gaggcccuggaggcccaccc

SEQ ID NO: 21986 - RNA, 20 nt, Artificial Sequence
  GATA2 Guide RNA
gagggugggccuccagggcc

SEQ ID NO: 21987 - RNA, 20 nt, Artificial Sequence
  GATA2 Guide RNA
gcccacccucuguguaccca

SEQ ID NO: 21988 - RNA, 20 nt, Artificial Sequence
  GATA2 Guide RNA
gccccuggguacacagaggg

SEQ ID NO: 21989 - RNA, 20 nt, Artificial Sequence
  GATA2 Guide RNA
gcccuggaggcccacccucu

SEQ ID NO: 21990 - RNA, 20 nt, Artificial Sequence
  GATA2 Guide RNA
gcuggaggcccuggaggccc

SEQ ID NO: 21991 - RNA, 20 nt, Artificial Sequence
  GATA2 Guide RNA
ggaggcccacccucugugua

SEQ ID NO: 21992 - RNA, 20 nt, Artificial Sequence
  GATA2 Guide RNA
ggaggcccuggaggcccacc

SEQ ID NO: 21993 - RNA, 20 nt, Artificial Sequence
  GATA2 Guide RNA
ggcccacccucuguguaccc

SEQ ID NO: 21994 - RNA, 20 nt, Artificial Sequence
  GATA2 Guide RNA
ggcccuggaggcccacccuc

SEQ ID NO: 21995 - RNA, 20 nt, Artificial Sequence
  GATA2 Guide RNA
ggguacacagagggugggcc

SEQ ID NO: 21996 - RNA, 20 nt, Artificial Sequence
  GATA2 Guide RNA
gggugggccuccagggccuc

SEQ ID NO: 21997 - RNA, 20 nt, Artificial Sequence
  GATA2 Guide RNA
gguacacagagggugggccu

SEQ ID NO: 21998 - RNA, 20 nt, Artificial Sequence
  GATA2 Guide RNA
ggugggccuccagggccucc

SEQ ID NO: 21999 - RNA, 20 nt, Artificial Sequence
  GATA2 Guide RNA
guacacagagggugggccuc

SEQ ID NO: 22000 - RNA, 20 nt, Artificial Sequence
  GATA2 Guide RNA
uacacagagggugggccucc

SEQ ID NO: 22001 - RNA, 20 nt, Artificial Sequence
  GATA2 Guide RNA
ugcuggaggcccuggaggcc

SEQ ID NO: 22002 - RNA, 20 nt, Artificial Sequence
  GATA2 Guide RNA
uggaggcccacccucugugu

SEQ ID NO: 22003 - RNA, 20 nt, Artificial Sequence
  GATA2 Guide RNA
uggaggcccuggaggcccac

SEQ ID NO: 22004 - RNA, 20 nt, Artificial Sequence
  GATA2 Guide RNA
uggguacacagagggugggc

SEQ ID NO: 22005 - RNA, 21 nt, Artificial Sequence
  GATA2 Guide RNA
acacagagggugggccuccag

SEQ ID NO: 22006 - RNA, 21 nt, Artificial Sequence
  GATA2 Guide RNA
acagagggugggccuccaggg

SEQ ID NO: 22007 - RNA, 21 nt, Artificial Sequence
  GATA2 Guide RNA
acccucuguguacccaggggc

SEQ ID NO: 22008 - RNA, 21 nt, Artificial Sequence
  GATA2 Guide RNA
agagggugggccuccagggcc

SEQ ID NO: 22009 - RNA, 21 nt, Artificial Sequence
  GATA2 Guide RNA
agccccuggguacacagaggg

SEQ ID NO: 22010 - RNA, 21 nt, Artificial Sequence
  GATA2 Guide RNA
aggcccacccucuguguaccc

SEQ ID NO: 22011 - RNA, 21 nt, Artificial Sequence
  GATA2 Guide RNA
aggcccuggaggcccacccuc

SEQ ID NO: 22012 - RNA, 21 nt, Artificial Sequence
  GATA2 Guide RNA
agggugggccuccagggccuc

SEQ ID NO: 22013 - RNA, 21 nt, Artificial Sequence
  GATA2 Guide RNA
cacagagggugggccuccagg

SEQ ID NO: 22014 - RNA, 21 nt, Artificial Sequence
  GATA2 Guide RNA
cacccucuguguacccagggg

SEQ ID NO: 22015 - RNA, 21 nt, Artificial Sequence
  GATA2 Guide RNA
cagagggugggccuccagggc

SEQ ID NO: 22016 - RNA, 21 nt, Artificial Sequence
  GATA2 Guide RNA
cagccccuggguacacagagg

SEQ ID NO: 22017 - RNA, 21 nt, Artificial Sequence
  GATA2 Guide RNA
ccacccucuguguacccaggg

SEQ ID NO: 22018 - RNA, 21 nt, Artificial Sequence
  GATA2 Guide RNA
ccagccccuggguacacagag

SEQ ID NO: 22019 - RNA, 21 nt, Artificial Sequence
  GATA2 Guide RNA
cccacccucuguguacccagg

SEQ ID NO: 22020 - RNA, 21 nt, Artificial Sequence
  GATA2 Guide RNA
cccagccccuggguacacaga

SEQ ID NO: 22021 - RNA, 21 nt, Artificial Sequence
  GATA2 Guide RNA
ccccagccccuggguacacag

SEQ ID NO: 22022 - RNA, 21 nt, Artificial Sequence
  GATA2 Guide RNA
ccccuggguacacagagggug

SEQ ID NO: 22023 - RNA, 21 nt, Artificial Sequence
  GATA2 Guide RNA
cccucuguguacccaggggcu

SEQ ID NO: 22024 - RNA, 21 nt, Artificial Sequence
  GATA2 Guide RNA
cccuggaggcccacccucugu

SEQ ID NO: 22025 - RNA, 21 nt, Artificial Sequence
  GATA2 Guide RNA
cccuggguacacagagggugg

SEQ ID NO: 22026 - RNA, 21 nt, Artificial Sequence
  GATA2 Guide RNA
ccuggaggcccacccucugug

SEQ ID NO: 22027 - RNA, 21 nt, Artificial Sequence
  GATA2 Guide RNA
ccuggguacacagaggguggg

SEQ ID NO: 22028 - RNA, 21 nt, Artificial Sequence
  GATA2 Guide RNA
cugcuggaggcccuggaggcc

SEQ ID NO: 22029 - RNA, 21 nt, Artificial Sequence
  GATA2 Guide RNA
cuggaggcccacccucugugu

SEQ ID NO: 22030 - RNA, 21 nt, Artificial Sequence
  GATA2 Guide RNA
cuggaggcccuggaggcccac

SEQ ID NO: 22031 - RNA, 21 nt, Artificial Sequence
  GATA2 Guide RNA
cuggguacacagagggugggc

SEQ ID NO: 22032 - RNA, 21 nt, Artificial Sequence
  GATA2 Guide RNA
gaggcccacccucuguguacc

SEQ ID NO: 22033 - RNA, 21 nt, Artificial Sequence
  GATA2 Guide RNA
gaggcccuggaggcccacccu

SEQ ID NO: 22034 - RNA, 21 nt, Artificial Sequence
  GATA2 Guide RNA
gagggugggccuccagggccu

SEQ ID NO: 22035 - RNA, 21 nt, Artificial Sequence
  GATA2 Guide RNA
gcccacccucuguguacccag

SEQ ID NO: 22036 - RNA, 21 nt, Artificial Sequence
  GATA2 Guide RNA
gccccuggguacacagagggu

SEQ ID NO: 22037 - RNA, 21 nt, Artificial Sequence
  GATA2 Guide RNA
gcccuggaggcccacccucug

SEQ ID NO: 22038 - RNA, 21 nt, Artificial Sequence
  GATA2 Guide RNA
gcuggaggcccuggaggccca

SEQ ID NO: 22039 - RNA, 21 nt, Artificial Sequence
  GATA2 Guide RNA
ggaggcccacccucuguguac

SEQ ID NO: 22040 - RNA, 21 nt, Artificial Sequence
  GATA2 Guide RNA
ggcccacccucuguguaccca

SEQ ID NO: 22041 - RNA, 21 nt, Artificial Sequence
  GATA2 Guide RNA
ggcccuggaggcccacccucu

SEQ ID NO: 22042 - RNA, 21 nt, Artificial Sequence
  GATA2 Guide RNA
ggguacacagagggugggccu

SEQ ID NO: 22043 - RNA, 21 nt, Artificial Sequence
  GATA2 Guide RNA
gguacacagagggugggccuc

SEQ ID NO: 22044 - RNA, 21 nt, Artificial Sequence
  GATA2 Guide RNA
ggugggccuccagggccucca

SEQ ID NO: 22045 - RNA, 21 nt, Artificial Sequence
  GATA2 Guide RNA
guacacagagggugggccucc

SEQ ID NO: 22046 - RNA, 21 nt, Artificial Sequence
  GATA2 Guide RNA
uacacagagggugggccucca

SEQ ID NO: 22047 - RNA, 21 nt, Artificial Sequence
  GATA2 Guide RNA
ugcuggaggcccuggaggccc

SEQ ID NO: 22048 - RNA, 21 nt, Artificial Sequence
  GATA2 Guide RNA
uggaggcccacccucugugua

SEQ ID NO: 22049 - RNA, 21 nt, Artificial Sequence
  GATA2 Guide RNA
uggaggcccuggaggcccacc

SEQ ID NO: 22050 - RNA, 21 nt, Artificial Sequence
  GATA2 Guide RNA
uggguacacagagggugggcc

SEQ ID NO: 22051 - RNA, 22 nt, Artificial Sequence
  GATA2 Guide RNA
acacagagggugggccuccagg

SEQ ID NO: 22052 - RNA, 22 nt, Artificial Sequence
  GATA2 Guide RNA
acagagggugggccuccagggc

SEQ ID NO: 22053 - RNA, 22 nt, Artificial Sequence
  GATA2 Guide RNA
acccucuguguacccaggggcu

SEQ ID NO: 22054 - RNA, 22 nt, Artificial Sequence
  GATA2 Guide RNA
agagggugggccuccagggccu

SEQ ID NO: 22055 - RNA, 22 nt, Artificial Sequence
  GATA2 Guide RNA
agccccuggguacacagagggu

SEQ ID NO: 22056 - RNA, 22 nt, Artificial Sequence
  GATA2 Guide RNA
aggcccacccucuguguaccca

SEQ ID NO: 22057 - RNA, 22 nt, Artificial Sequence
  GATA2 Guide RNA
aggcccuggaggcccacccucu

SEQ ID NO: 22058 - RNA, 22 nt, Artificial Sequence
  GATA2 Guide RNA
agggugggccuccagggccucc

SEQ ID NO: 22059 - RNA, 22 nt, Artificial Sequence
  GATA2 Guide RNA
cacagagggugggccuccaggg

SEQ ID NO: 22060 - RNA, 22 nt, Artificial Sequence
  GATA2 Guide RNA
cacccucuguguacccaggggc

SEQ ID NO: 22061 - RNA, 22 nt, Artificial Sequence
  GATA2 Guide RNA
cagagggugggccuccagggcc

SEQ ID NO: 22062 - RNA, 22 nt, Artificial Sequence
  GATA2 Guide RNA
cagccccuggguacacagaggg

SEQ ID NO: 22063 - RNA, 22 nt, Artificial Sequence
  GATA2 Guide RNA
ccacccucuguguacccagggg

SEQ ID NO: 22064 - RNA, 22 nt, Artificial Sequence
  GATA2 Guide RNA
ccagccccuggguacacagagg

SEQ ID NO: 22065 - RNA, 22 nt, Artificial Sequence
  GATA2 Guide RNA
cccacccucuguguacccaggg

SEQ ID NO: 22066 - RNA, 22 nt, Artificial Sequence
  GATA2 Guide RNA
cccagccccuggguacacagag

SEQ ID NO: 22067 - RNA, 22 nt, Artificial Sequence
  GATA2 Guide RNA
ccccagccccuggguacacaga

SEQ ID NO: 22068 - RNA, 22 nt, Artificial Sequence
  GATA2 Guide RNA
cccccagccccuggguacacag

SEQ ID NO: 22069 - RNA, 22 nt, Artificial Sequence
  GATA2 Guide RNA
ccccuggguacacagagggugg

SEQ ID NO: 22070 - RNA, 22 nt, Artificial Sequence
  GATA2 Guide RNA
cccucuguguacccaggggcug

SEQ ID NO: 22071 - RNA, 22 nt, Artificial Sequence
  GATA2 Guide RNA
cccuggaggcccacccucugug

SEQ ID NO: 22072 - RNA, 22 nt, Artificial Sequence
  GATA2 Guide RNA
cccuggguacacagaggguggg

SEQ ID NO: 22073 - RNA, 22 nt, Artificial Sequence
  GATA2 Guide RNA
ccuggaggcccacccucugugu

SEQ ID NO: 22074 - RNA, 22 nt, Artificial Sequence
  GATA2 Guide RNA
ccuggguacacagagggugggc

SEQ ID NO: 22075 - RNA, 22 nt, Artificial Sequence
  GATA2 Guide RNA
cugcuggaggcccuggaggccc

SEQ ID NO: 22076 - RNA, 22 nt, Artificial Sequence
  GATA2 Guide RNA
cuggaggcccacccucugugua

SEQ ID NO: 22077 - RNA, 22 nt, Artificial Sequence
  GATA2 Guide RNA
cuggaggcccuggaggcccacc

SEQ ID NO: 22078 - RNA, 22 nt, Artificial Sequence
  GATA2 Guide RNA
cuggguacacagagggugggcc

SEQ ID NO: 22079 - RNA, 22 nt, Artificial Sequence
  GATA2 Guide RNA
gaggcccacccucuguguaccc

SEQ ID NO: 22080 - RNA, 22 nt, Artificial Sequence
  GATA2 Guide RNA
gaggcccuggaggcccacccuc

SEQ ID NO: 22081 - RNA, 22 nt, Artificial Sequence
  GATA2 Guide RNA
gagggugggccuccagggccuc

SEQ ID NO: 22082 - RNA, 22 nt, Artificial Sequence
  GATA2 Guide RNA
gcccacccucuguguacccagg

SEQ ID NO: 22083 - RNA, 22 nt, Artificial Sequence
  GATA2 Guide RNA
gccccuggguacacagagggug

SEQ ID NO: 22084 - RNA, 22 nt, Artificial Sequence
  GATA2 Guide RNA
gcccuggaggcccacccucugu

SEQ ID NO: 22085 - RNA, 22 nt, Artificial Sequence
  GATA2 Guide RNA
gcugcuggaggcccuggaggcc

SEQ ID NO: 22086 - RNA, 22 nt, Artificial Sequence
  GATA2 Guide RNA
gcuggaggcccuggaggcccac

SEQ ID NO: 22087 - RNA, 22 nt, Artificial Sequence
  GATA2 Guide RNA
ggaggcccacccucuguguacc

SEQ ID NO: 22088 - RNA, 22 nt, Artificial Sequence
  GATA2 Guide RNA
ggaggcccuggaggcccacccu

SEQ ID NO: 22089 - RNA, 22 nt, Artificial Sequence
  GATA2 Guide RNA
ggcccacccucuguguacccag

SEQ ID NO: 22090 - RNA, 22 nt, Artificial Sequence
  GATA2 Guide RNA
ggcccuggaggcccacccucug

SEQ ID NO: 22091 - RNA, 22 nt, Artificial Sequence
  GATA2 Guide RNA
ggguacacagagggugggccuc

SEQ ID NO: 22092 - RNA, 22 nt, Artificial Sequence
  GATA2 Guide RNA
gggugggccuccagggccucca

SEQ ID NO: 22093 - RNA, 22 nt, Artificial Sequence
  GATA2 Guide RNA
gguacacagagggugggccucc

SEQ ID NO: 22094 - RNA, 22 nt, Artificial Sequence
  GATA2 Guide RNA
ggugggccuccagggccuccag

SEQ ID NO: 22095 - RNA, 22 nt, Artificial Sequence
  GATA2 Guide RNA
guacacagagggugggccucca

SEQ ID NO: 22096 - RNA, 22 nt, Artificial Sequence
  GATA2 Guide RNA
uacacagagggugggccuccag

SEQ ID NO: 22097 - RNA, 22 nt, Artificial Sequence
  GATA2 Guide RNA
ugcuggaggcccuggaggccca

SEQ ID NO: 22098 - RNA, 22 nt, Artificial Sequence
  GATA2 Guide RNA
uggaggcccacccucuguguac

SEQ ID NO: 22099 - RNA, 22 nt, Artificial Sequence
  GATA2 Guide RNA
uggaggcccuggaggcccaccc

SEQ ID NO: 22100 - RNA, 22 nt, Artificial Sequence
  GATA2 Guide RNA
uggguacacagagggugggccu

SEQ ID NO: 22101 - RNA, 20 nt, Artificial Sequence
  GATA2 Guide RNA
acacagagagugagccucca

SEQ ID NO: 22102 - RNA, 20 nt, Artificial Sequence
  GATA2 Guide RNA
acagagagugagccuccagg

SEQ ID NO: 22103 - RNA, 20 nt, Artificial Sequence
  GATA2 Guide RNA
agagagugagccuccagggc

SEQ ID NO: 22104 - RNA, 20 nt, Artificial Sequence
  GATA2 Guide RNA
agagugagccuccagggccu

SEQ ID NO: 22105 - RNA, 20 nt, Artificial Sequence
  GATA2 Guide RNA
agccuccagggccuccagca

SEQ ID NO: 22106 - RNA, 20 nt, Artificial Sequence
  GATA2 Guide RNA
agcugcuggaggcccuggag

SEQ ID NO: 22107 - RNA, 20 nt, Artificial Sequence
  GATA2 Guide RNA
aggcccuggaggcucacucu

SEQ ID NO: 22108 - RNA, 20 nt, Artificial Sequence
  GATA2 Guide RNA
aggcucacucucuguguacc

SEQ ID NO: 22109 - RNA, 20 nt, Artificial Sequence
  GATA2 Guide RNA
agugagccuccagggccucc

SEQ ID NO: 22110 - RNA, 20 nt, Artificial Sequence
  GATA2 Guide RNA
cacagagagugagccuccag

SEQ ID NO: 22111 - RNA, 20 nt, Artificial Sequence
  GATA2 Guide RNA
cagagagugagccuccaggg

SEQ ID NO: 22112 - RNA, 20 nt, Artificial Sequence
  GATA2 Guide RNA
cagcugcuggaggcccugga

SEQ ID NO: 22113 - RNA, 20 nt, Artificial Sequence
  GATA2 Guide RNA
ccccuggguacacagagagu

SEQ ID NO: 22114 - RNA, 20 nt, Artificial Sequence
  GATA2 Guide RNA
cccuggaggcucacucucug

SEQ ID NO: 22115 - RNA, 20 nt, Artificial Sequence
  GATA2 Guide RNA
cccuggguacacagagagug

SEQ ID NO: 22116 - RNA, 20 nt, Artificial Sequence
  GATA2 Guide RNA
ccuggaggcucacucucugu

SEQ ID NO: 22117 - RNA, 20 nt, Artificial Sequence
  GATA2 Guide RNA
ccuggguacacagagaguga

SEQ ID NO: 22118 - RNA, 20 nt, Artificial Sequence
  GATA2 Guide RNA
cucacucucuguguacccag

SEQ ID NO: 22119 - RNA, 20 nt, Artificial Sequence
  GATA2 Guide RNA
cugcuggaggcccuggaggc

SEQ ID NO: 22120 - RNA, 20 nt, Artificial Sequence
  GATA2 Guide RNA
cuggaggcccuggaggcuca

SEQ ID NO: 22121 - RNA, 20 nt, Artificial Sequence
  GATA2 Guide RNA
cuggaggcucacucucugug

SEQ ID NO: 22122 - RNA, 20 nt, Artificial Sequence
  GATA2 Guide RNA
cuggguacacagagagugag

SEQ ID NO: 22123 - RNA, 20 nt, Artificial Sequence
  GATA2 Guide RNA
gagagugagccuccagggcc

SEQ ID NO: 22124 - RNA, 20 nt, Artificial Sequence
  GATA2 Guide RNA
gagccuccagggccuccagc

SEQ ID NO: 22125 - RNA, 20 nt, Artificial Sequence
  GATA2 Guide RNA
gaggcccuggaggcucacuc

SEQ ID NO: 22126 - RNA, 20 nt, Artificial Sequence
  GATA2 Guide RNA
gaggcucacucucuguguac

SEQ ID NO: 22127 - RNA, 20 nt, Artificial Sequence
  GATA2 Guide RNA
gagugagccuccagggccuc

SEQ ID NO: 22128 - RNA, 20 nt, Artificial Sequence
  GATA2 Guide RNA
gccccuggguacacagagag

SEQ ID NO: 22129 - RNA, 20 nt, Artificial Sequence
  GATA2 Guide RNA
gcccuggaggcucacucucu

SEQ ID NO: 22130 - RNA, 20 nt, Artificial Sequence
  GATA2 Guide RNA
gcucacucucuguguaccca

SEQ ID NO: 22131 - RNA, 20 nt, Artificial Sequence
  GATA2 Guide RNA
gcugcuggaggcccuggagg

SEQ ID NO: 22132 - RNA, 20 nt, Artificial Sequence
  GATA2 Guide RNA
gcuggaggcccuggaggcuc

SEQ ID NO: 22133 - RNA, 20 nt, Artificial Sequence
  GATA2 Guide RNA
ggaggcccuggaggcucacu

SEQ ID NO: 22134 - RNA, 20 nt, Artificial Sequence
  GATA2 Guide RNA
ggaggcucacucucugugua

SEQ ID NO: 22135 - RNA, 20 nt, Artificial Sequence
  GATA2 Guide RNA
ggcccuggaggcucacucuc

SEQ ID NO: 22136 - RNA, 20 nt, Artificial Sequence
  GATA2 Guide RNA
ggcucacucucuguguaccc

SEQ ID NO: 22137 - RNA, 20 nt, Artificial Sequence
  GATA2 Guide RNA
ggguacacagagagugagcc

SEQ ID NO: 22138 - RNA, 20 nt, Artificial Sequence
  GATA2 Guide RNA
gguacacagagagugagccu

SEQ ID NO: 22139 - RNA, 20 nt, Artificial Sequence
  GATA2 Guide RNA
guacacagagagugagccuc

SEQ ID NO: 22140 - RNA, 20 nt, Artificial Sequence
  GATA2 Guide RNA
gugagccuccagggccucca

SEQ ID NO: 22141 - RNA, 20 nt, Artificial Sequence
  GATA2 Guide RNA
uacacagagagugagccucc

SEQ ID NO: 22142 - RNA, 20 nt, Artificial Sequence
  GATA2 Guide RNA
ugagccuccagggccuccag

SEQ ID NO: 22143 - RNA, 20 nt, Artificial Sequence
  GATA2 Guide RNA
ugcuggaggcccuggaggcu

SEQ ID NO: 22144 - RNA, 20 nt, Artificial Sequence
  GATA2 Guide RNA
uggaggcccuggaggcucac

SEQ ID NO: 22145 - RNA, 20 nt, Artificial Sequence
  GATA2 Guide RNA
uggaggcucacucucugugu

SEQ ID NO: 22146 - RNA, 20 nt, Artificial Sequence
  GATA2 Guide RNA
uggguacacagagagugagc

SEQ ID NO: 22147 - RNA, 21 nt, Artificial Sequence
  GATA2 Guide RNA
acacagagagugagccuccag

SEQ ID NO: 22148 - RNA, 21 nt, Artificial Sequence
  GATA2 Guide RNA
acagagagugagccuccaggg

SEQ ID NO: 22149 - RNA, 21 nt, Artificial Sequence
  GATA2 Guide RNA
agagagugagccuccagggcc

SEQ ID NO: 22150 - RNA, 21 nt, Artificial Sequence
  GATA2 Guide RNA
agagugagccuccagggccuc

SEQ ID NO: 22151 - RNA, 21 nt, Artificial Sequence
  GATA2 Guide RNA
agccccuggguacacagagag

SEQ ID NO: 22152 - RNA, 21 nt, Artificial Sequence
  GATA2 Guide RNA
agccuccagggccuccagcag

SEQ ID NO: 22153 - RNA, 21 nt, Artificial Sequence
  GATA2 Guide RNA
agcugcuggaggcccuggagg

SEQ ID NO: 22154 - RNA, 21 nt, Artificial Sequence
  GATA2 Guide RNA
aggcccuggaggcucacucuc

SEQ ID NO: 22155 - RNA, 21 nt, Artificial Sequence
  GATA2 Guide RNA
aggcucacucucuguguaccc

SEQ ID NO: 22156 - RNA, 21 nt, Artificial Sequence
  GATA2 Guide RNA
agugagccuccagggccucca

SEQ ID NO: 22157 - RNA, 21 nt, Artificial Sequence
  GATA2 Guide RNA
cacagagagugagccuccagg

SEQ ID NO: 22158 - RNA, 21 nt, Artificial Sequence
  GATA2 Guide RNA
cagagagugagccuccagggc

SEQ ID NO: 22159 - RNA, 21 nt, Artificial Sequence
  GATA2 Guide RNA
cagcugcuggaggcccuggag

SEQ ID NO: 22160 - RNA, 21 nt, Artificial Sequence
  GATA2 Guide RNA
ccccuggguacacagagagug

SEQ ID NO: 22161 - RNA, 21 nt, Artificial Sequence
  GATA2 Guide RNA
cccuggaggcucacucucugu

SEQ ID NO: 22162 - RNA, 21 nt, Artificial Sequence
  GATA2 Guide RNA
cccuggguacacagagaguga

SEQ ID NO: 22163 - RNA, 21 nt, Artificial Sequence
  GATA2 Guide RNA
ccuggaggcucacucucugug

SEQ ID NO: 22164 - RNA, 21 nt, Artificial Sequence
  GATA2 Guide RNA
ccuggguacacagagagugag

SEQ ID NO: 22165 - RNA, 21 nt, Artificial Sequence
  GATA2 Guide RNA
cucacucucuguguacccagg

SEQ ID NO: 22166 - RNA, 21 nt, Artificial Sequence
  GATA2 Guide RNA
cugcuggaggcccuggaggcu

SEQ ID NO: 22167 - RNA, 21 nt, Artificial Sequence
  GATA2 Guide RNA
cuggaggcccuggaggcucac

SEQ ID NO: 22168 - RNA, 21 nt, Artificial Sequence
  GATA2 Guide RNA
cuggaggcucacucucugugu

SEQ ID NO: 22169 - RNA, 21 nt, Artificial Sequence
  GATA2 Guide RNA
cuggguacacagagagugagc

SEQ ID NO: 22170 - RNA, 21 nt, Artificial Sequence
  GATA2 Guide RNA
gagagugagccuccagggccu

SEQ ID NO: 22171 - RNA, 21 nt, Artificial Sequence
  GATA2 Guide RNA
gagccuccagggccuccagca

SEQ ID NO: 22172 - RNA, 21 nt, Artificial Sequence
  GATA2 Guide RNA
gaggcccuggaggcucacucu

SEQ ID NO: 22173 - RNA, 21 nt, Artificial Sequence
  GATA2 Guide RNA
gaggcucacucucuguguacc

SEQ ID NO: 22174 - RNA, 21 nt, Artificial Sequence
  GATA2 Guide RNA
gagugagccuccagggccucc

SEQ ID NO: 22175 - RNA, 21 nt, Artificial Sequence
  GATA2 Guide RNA
gccccuggguacacagagagu

SEQ ID NO: 22176 - RNA, 21 nt, Artificial Sequence
  GATA2 Guide RNA
gcccuggaggcucacucucug

SEQ ID NO: 22177 - RNA, 21 nt, Artificial Sequence
  GATA2 Guide RNA
gcucacucucuguguacccag

SEQ ID NO: 22178 - RNA, 21 nt, Artificial Sequence
  GATA2 Guide RNA
gcugcuggaggcccuggaggc

SEQ ID NO: 22179 - RNA, 21 nt, Artificial Sequence
  GATA2 Guide RNA
gcuggaggcccuggaggcuca

SEQ ID NO: 22180 - RNA, 21 nt, Artificial Sequence
  GATA2 Guide RNA
ggaggcccuggaggcucacuc

SEQ ID NO: 22181 - RNA, 21 nt, Artificial Sequence
  GATA2 Guide RNA
ggaggcucacucucuguguac

SEQ ID NO: 22182 - RNA, 21 nt, Artificial Sequence
  GATA2 Guide RNA
ggcccuggaggcucacucucu

SEQ ID NO: 22183 - RNA, 21 nt, Artificial Sequence
  GATA2 Guide RNA
ggcucacucucuguguaccca

SEQ ID NO: 22184 - RNA, 21 nt, Artificial Sequence
  GATA2 Guide RNA
ggguacacagagagugagccu

SEQ ID NO: 22185 - RNA, 21 nt, Artificial Sequence
  GATA2 Guide RNA
gguacacagagagugagccuc

SEQ ID NO: 22186 - RNA, 21 nt, Artificial Sequence
  GATA2 Guide RNA
guacacagagagugagccucc

SEQ ID NO: 22187 - RNA, 21 nt, Artificial Sequence
  GATA2 Guide RNA
gugagccuccagggccuccag

SEQ ID NO: 22188 - RNA, 21 nt, Artificial Sequence
  GATA2 Guide RNA
uacacagagagugagccucca

SEQ ID NO: 22189 - RNA, 21 nt, Artificial Sequence
  GATA2 Guide RNA
ucagcugcuggaggcccugga

SEQ ID NO: 22190 - RNA, 21 nt, Artificial Sequence
  GATA2 Guide RNA
ugagccuccagggccuccagc

SEQ ID NO: 22191 - RNA, 21 nt, Artificial Sequence
  GATA2 Guide RNA
ugcuggaggcccuggaggcuc

SEQ ID NO: 22192 - RNA, 21 nt, Artificial Sequence
  GATA2 Guide RNA
uggaggcccuggaggcucacu

SEQ ID NO: 22193 - RNA, 21 nt, Artificial Sequence
  GATA2 Guide RNA
uggaggcucacucucugugua

SEQ ID NO: 22194 - RNA, 21 nt, Artificial Sequence
  GATA2 Guide RNA
uggguacacagagagugagcc

SEQ ID NO: 22195 - RNA, 22 nt, Artificial Sequence
  GATA2 Guide RNA
acacagagagugagccuccagg

SEQ ID NO: 22196 - RNA, 22 nt, Artificial Sequence
  GATA2 Guide RNA
acagagagugagccuccagggc

SEQ ID NO: 22197 - RNA, 22 nt, Artificial Sequence
  GATA2 Guide RNA
agagagugagccuccagggccu

SEQ ID NO: 22198 - RNA, 22 nt, Artificial Sequence
  GATA2 Guide RNA
agagugagccuccagggccucc

SEQ ID NO: 22199 - RNA, 22 nt, Artificial Sequence
  GATA2 Guide RNA
agccccuggguacacagagagu

SEQ ID NO: 22200 - RNA, 22 nt, Artificial Sequence
  GATA2 Guide RNA
agccuccagggccuccagcagc

SEQ ID NO: 22201 - RNA, 22 nt, Artificial Sequence
  GATA2 Guide RNA
agcugcuggaggcccuggaggc

SEQ ID NO: 22202 - RNA, 22 nt, Artificial Sequence
  GATA2 Guide RNA
aggcccuggaggcucacucucu

SEQ ID NO: 22203 - RNA, 22 nt, Artificial Sequence
  GATA2 Guide RNA
aggcucacucucuguguaccca

SEQ ID NO: 22204 - RNA, 22 nt, Artificial Sequence
  GATA2 Guide RNA
agugagccuccagggccuccag

SEQ ID NO: 22205 - RNA, 22 nt, Artificial Sequence
  GATA2 Guide RNA
cacagagagugagccuccaggg

SEQ ID NO: 22206 - RNA, 22 nt, Artificial Sequence
  GATA2 Guide RNA
cagagagugagccuccagggcc

SEQ ID NO: 22207 - RNA, 22 nt, Artificial Sequence
  GATA2 Guide RNA
cagccccuggguacacagagag

SEQ ID NO: 22208 - RNA, 22 nt, Artificial Sequence
  GATA2 Guide RNA
cagcugcuggaggcccuggagg

SEQ ID NO: 22209 - RNA, 22 nt, Artificial Sequence
  GATA2 Guide RNA
ccccuggguacacagagaguga

SEQ ID NO: 22210 - RNA, 22 nt, Artificial Sequence
  GATA2 Guide RNA
cccuggaggcucacucucugug

SEQ ID NO: 22211 - RNA, 22 nt, Artificial Sequence
  GATA2 Guide RNA
cccuggguacacagagagugag

SEQ ID NO: 22212 - RNA, 22 nt, Artificial Sequence
  GATA2 Guide RNA
ccuggaggcucacucucugugu

SEQ ID NO: 22213 - RNA, 22 nt, Artificial Sequence
  GATA2 Guide RNA
ccuggguacacagagagugagc

SEQ ID NO: 22214 - RNA, 22 nt, Artificial Sequence
  GATA2 Guide RNA
cucacucucuguguacccaggg

SEQ ID NO: 22215 - RNA, 22 nt, Artificial Sequence
  GATA2 Guide RNA
cucagcugcuggaggcccugga

SEQ ID NO: 22216 - RNA, 22 nt, Artificial Sequence
  GATA2 Guide RNA
cugcuggaggcccuggaggcuc

SEQ ID NO: 22217 - RNA, 22 nt, Artificial Sequence
  GATA2 Guide RNA
cuggaggcccuggaggcucacu

SEQ ID NO: 22218 - RNA, 22 nt, Artificial Sequence
  GATA2 Guide RNA
cuggaggcucacucucugugua

SEQ ID NO: 22219 - RNA, 22 nt, Artificial Sequence
  GATA2 Guide RNA
cuggguacacagagagugagcc

SEQ ID NO: 22220 - RNA, 22 nt, Artificial Sequence
  GATA2 Guide RNA
gagagugagccuccagggccuc

SEQ ID NO: 22221 - RNA, 22 nt, Artificial Sequence
  GATA2 Guide RNA
gagccuccagggccuccagcag

SEQ ID NO: 22222 - RNA, 22 nt, Artificial Sequence
  GATA2 Guide RNA
gaggcccuggaggcucacucuc

SEQ ID NO: 22223 - RNA, 22 nt, Artificial Sequence
  GATA2 Guide RNA
gaggcucacucucuguguaccc

SEQ ID NO: 22224 - RNA, 22 nt, Artificial Sequence
  GATA2 Guide RNA
gagugagccuccagggccucca

SEQ ID NO: 22225 - RNA, 22 nt, Artificial Sequence
  GATA2 Guide RNA
gccccuggguacacagagagug

SEQ ID NO: 22226 - RNA, 22 nt, Artificial Sequence
  GATA2 Guide RNA
gcccuggaggcucacucucugu

SEQ ID NO: 22227 - RNA, 22 nt, Artificial Sequence
  GATA2 Guide RNA
gcucacucucuguguacccagg

SEQ ID NO: 22228 - RNA, 22 nt, Artificial Sequence
  GATA2 Guide RNA
gcugcuggaggcccuggaggcu

SEQ ID NO: 22229 - RNA, 22 nt, Artificial Sequence
  GATA2 Guide RNA
gcuggaggcccuggaggcucac

SEQ ID NO: 22230 - RNA, 22 nt, Artificial Sequence
  GATA2 Guide RNA
ggaggcccuggaggcucacucu

SEQ ID NO: 22231 - RNA, 22 nt, Artificial Sequence
  GATA2 Guide RNA
ggaggcucacucucuguguacc

SEQ ID NO: 22232 - RNA, 22 nt, Artificial Sequence
  GATA2 Guide RNA
ggcccuggaggcucacucucug

SEQ ID NO: 22233 - RNA, 22 nt, Artificial Sequence
  GATA2 Guide RNA
ggcucacucucuguguacccag

SEQ ID NO: 22234 - RNA, 22 nt, Artificial Sequence
  GATA2 Guide RNA
ggguacacagagagugagccuc

SEQ ID NO: 22235 - RNA, 22 nt, Artificial Sequence
  GATA2 Guide RNA
gguacacagagagugagccucc

SEQ ID NO: 22236 - RNA, 22 nt, Artificial Sequence
  GATA2 Guide RNA
guacacagagagugagccucca

SEQ ID NO: 22237 - RNA, 22 nt, Artificial Sequence
  GATA2 Guide RNA
gugagccuccagggccuccagc

SEQ ID NO: 22238 - RNA, 22 nt, Artificial Sequence
  GATA2 Guide RNA
uacacagagagugagccuccag

SEQ ID NO: 22239 - RNA, 22 nt, Artificial Sequence
  GATA2 Guide RNA
ucagcugcuggaggcccuggag

SEQ ID NO: 22240 - RNA, 22 nt, Artificial Sequence
  GATA2 Guide RNA
ugagccuccagggccuccagca

SEQ ID NO: 22241 - RNA, 22 nt, Artificial Sequence
  GATA2 Guide RNA
ugcuggaggcccuggaggcuca

SEQ ID NO: 22242 - RNA, 22 nt, Artificial Sequence
  GATA2 Guide RNA
uggaggcccuggaggcucacuc

SEQ ID NO: 22243 - RNA, 22 nt, Artificial Sequence
  GATA2 Guide RNA
uggaggcucacucucuguguac

SEQ ID NO: 22244 - RNA, 22 nt, Artificial Sequence
  GATA2 Guide RNA
uggguacacagagagugagccu

SEQ ID NO: 22245 - RNA, 20 nt, Artificial Sequence
  GATA2 Guide RNA
aagcccuggaggcccacucu

SEQ ID NO: 22246 - RNA, 20 nt, Artificial Sequence
  GATA2 Guide RNA
acagagagugggccuccagg

SEQ ID NO: 22247 - RNA, 20 nt, Artificial Sequence
  GATA2 Guide RNA
accccucagcugcuggaagc

SEQ ID NO: 22248 - RNA, 20 nt, Artificial Sequence
  GATA2 Guide RNA
acugcaccccucagcugcug

SEQ ID NO: 22249 - RNA, 20 nt, Artificial Sequence
  GATA2 Guide RNA
agagagugggccuccagggc

SEQ ID NO: 22250 - RNA, 20 nt, Artificial Sequence
  GATA2 Guide RNA
agagugggccuccagggcuu

SEQ ID NO: 22251 - RNA, 20 nt, Artificial Sequence
  GATA2 Guide RNA
agcugcuggaagcccuggag

SEQ ID NO: 22252 - RNA, 20 nt, Artificial Sequence
  GATA2 Guide RNA
agggcuuccagcagcugagg

SEQ ID NO: 22253 - RNA, 20 nt, Artificial Sequence
  GATA2 Guide RNA
agugggccuccagggcuucc

SEQ ID NO: 22254 - RNA, 20 nt, Artificial Sequence
  GATA2 Guide RNA
caccccucagcugcuggaag

SEQ ID NO: 22255 - RNA, 20 nt, Artificial Sequence
  GATA2 Guide RNA
cacugcaccccucagcugcu

SEQ ID NO: 22256 - RNA, 20 nt, Artificial Sequence
  GATA2 Guide RNA
cagagagugggccuccaggg

SEQ ID NO: 22257 - RNA, 20 nt, Artificial Sequence
  GATA2 Guide RNA
cagcugcuggaagcccugga

SEQ ID NO: 22258 - RNA, 20 nt, Artificial Sequence
  GATA2 Guide RNA
cagggcuuccagcagcugag

SEQ ID NO: 22259 - RNA, 20 nt, Artificial Sequence
  GATA2 Guide RNA
ccagggcuuccagcagcuga

SEQ ID NO: 22260 - RNA, 20 nt, Artificial Sequence
  GATA2 Guide RNA
ccccucagcugcuggaagcc

SEQ ID NO: 22261 - RNA, 20 nt, Artificial Sequence
  GATA2 Guide RNA
cccucagcugcuggaagccc

SEQ ID NO: 22262 - RNA, 20 nt, Artificial Sequence
  GATA2 Guide RNA
ccucagcugcuggaagcccu

SEQ ID NO: 22263 - RNA, 20 nt, Artificial Sequence
  GATA2 Guide RNA
ccuccagggcuuccagcagc

SEQ ID NO: 22264 - RNA, 20 nt, Artificial Sequence
  GATA2 Guide RNA
cucagcugcuggaagcccug

SEQ ID NO: 22265 - RNA, 20 nt, Artificial Sequence
  GATA2 Guide RNA
cuccagggcuuccagcagcu

SEQ ID NO: 22266 - RNA, 20 nt, Artificial Sequence
  GATA2 Guide RNA
cugcaccccucagcugcugg

SEQ ID NO: 22267 - RNA, 20 nt, Artificial Sequence
  GATA2 Guide RNA
cugcuggaagcccuggaggc

SEQ ID NO: 22268 - RNA, 20 nt, Artificial Sequence
  GATA2 Guide RNA
cuggaagcccuggaggccca

SEQ ID NO: 22269 - RNA, 20 nt, Artificial Sequence
  GATA2 Guide RNA
cuuccagcagcugaggggug

SEQ ID NO: 22270 - RNA, 20 nt, Artificial Sequence
  GATA2 Guide RNA
gaagcccuggaggcccacuc

SEQ ID NO: 22271 - RNA, 20 nt, Artificial Sequence
  GATA2 Guide RNA
gagagugggccuccagggcu

SEQ ID NO: 22272 - RNA, 20 nt, Artificial Sequence
  GATA2 Guide RNA
gagugggccuccagggcuuc

SEQ ID NO: 22273 - RNA, 20 nt, Artificial Sequence
  GATA2 Guide RNA
gcaccccucagcugcuggaa

SEQ ID NO: 22274 - RNA, 20 nt, Artificial Sequence
  GATA2 Guide RNA
gccuccagggcuuccagcag

SEQ ID NO: 22275 - RNA, 20 nt, Artificial Sequence
  GATA2 Guide RNA
gcugcuggaagcccuggagg

SEQ ID NO: 22276 - RNA, 20 nt, Artificial Sequence
  GATA2 Guide RNA
gcuggaagcccuggaggccc

SEQ ID NO: 22277 - RNA, 20 nt, Artificial Sequence
  GATA2 Guide RNA
gcuuccagcagcugaggggu

SEQ ID NO: 22278 - RNA, 20 nt, Artificial Sequence
  GATA2 Guide RNA
ggaagcccuggaggcccacu

SEQ ID NO: 22279 - RNA, 20 nt, Artificial Sequence
  GATA2 Guide RNA
ggccuccagggcuuccagca

SEQ ID NO: 22280 - RNA, 20 nt, Artificial Sequence
  GATA2 Guide RNA
ggcuuccagcagcugagggg

SEQ ID NO: 22281 - RNA, 20 nt, Artificial Sequence
  GATA2 Guide RNA
gggccuccagggcuuccagc

SEQ ID NO: 22282 - RNA, 20 nt, Artificial Sequence
  GATA2 Guide RNA
gggcuuccagcagcugaggg

SEQ ID NO: 22283 - RNA, 20 nt, Artificial Sequence
  GATA2 Guide RNA
gugggccuccagggcuucca

SEQ ID NO: 22284 - RNA, 20 nt, Artificial Sequence
  GATA2 Guide RNA
ucagcugcuggaagcccugg

SEQ ID NO: 22285 - RNA, 20 nt, Artificial Sequence
  GATA2 Guide RNA
uccagggcuuccagcagcug

SEQ ID NO: 22286 - RNA, 20 nt, Artificial Sequence
  GATA2 Guide RNA
ugcaccccucagcugcugga

SEQ ID NO: 22287 - RNA, 20 nt, Artificial Sequence
  GATA2 Guide RNA
ugcuggaagcccuggaggcc

SEQ ID NO: 22288 - RNA, 20 nt, Artificial Sequence
  GATA2 Guide RNA
uggaagcccuggaggcccac

SEQ ID NO: 22289 - RNA, 20 nt, Artificial Sequence
  GATA2 Guide RNA
ugggccuccagggcuuccag

SEQ ID NO: 22290 - RNA, 20 nt, Artificial Sequence
  GATA2 Guide RNA
uuccagcagcugaggggugc

SEQ ID NO: 22291 - RNA, 21 nt, Artificial Sequence
  GATA2 Guide RNA
aagcccuggaggcccacucuc

SEQ ID NO: 22292 - RNA, 21 nt, Artificial Sequence
  GATA2 Guide RNA
acagagagugggccuccaggg

SEQ ID NO: 22293 - RNA, 21 nt, Artificial Sequence
  GATA2 Guide RNA
accccucagcugcuggaagcc

SEQ ID NO: 22294 - RNA, 21 nt, Artificial Sequence
  GATA2 Guide RNA
acugcaccccucagcugcugg

SEQ ID NO: 22295 - RNA, 21 nt, Artificial Sequence
  GATA2 Guide RNA
agagagugggccuccagggcu

SEQ ID NO: 22296 - RNA, 21 nt, Artificial Sequence
  GATA2 Guide RNA
agagugggccuccagggcuuc

SEQ ID NO: 22297 - RNA, 21 nt, Artificial Sequence
  GATA2 Guide RNA
agcugcuggaagcccuggagg

SEQ ID NO: 22298 - RNA, 21 nt, Artificial Sequence
  GATA2 Guide RNA
agggcuuccagcagcugaggg

SEQ ID NO: 22299 - RNA, 21 nt, Artificial Sequence
  GATA2 Guide RNA
agugggccuccagggcuucca

SEQ ID NO: 22300 - RNA, 21 nt, Artificial Sequence
  GATA2 Guide RNA
cacagagagugggccuccagg

SEQ ID NO: 22301 - RNA, 21 nt, Artificial Sequence
  GATA2 Guide RNA
caccccucagcugcuggaagc

SEQ ID NO: 22302 - RNA, 21 nt, Artificial Sequence
  GATA2 Guide RNA
cacugcaccccucagcugcug

SEQ ID NO: 22303 - RNA, 21 nt, Artificial Sequence
  GATA2 Guide RNA
cagagagugggccuccagggc

SEQ ID NO: 22304 - RNA, 21 nt, Artificial Sequence
  GATA2 Guide RNA
cagcugcuggaagcccuggag

SEQ ID NO: 22305 - RNA, 21 nt, Artificial Sequence
  GATA2 Guide RNA
cagggcuuccagcagcugagg

SEQ ID NO: 22306 - RNA, 21 nt, Artificial Sequence
  GATA2 Guide RNA
ccacugcaccccucagcugcu

SEQ ID NO: 22307 - RNA, 21 nt, Artificial Sequence
  GATA2 Guide RNA
ccagggcuuccagcagcugag

SEQ ID NO: 22308 - RNA, 21 nt, Artificial Sequence
  GATA2 Guide RNA
ccccucagcugcuggaagccc

SEQ ID NO: 22309 - RNA, 21 nt, Artificial Sequence
  GATA2 Guide RNA
cccucagcugcuggaagcccu

SEQ ID NO: 22310 - RNA, 21 nt, Artificial Sequence
  GATA2 Guide RNA
ccucagcugcuggaagcccug

SEQ ID NO: 22311 - RNA, 21 nt, Artificial Sequence
  GATA2 Guide RNA
ccuccagggcuuccagcagcu

SEQ ID NO: 22312 - RNA, 21 nt, Artificial Sequence
  GATA2 Guide RNA
cucagcugcuggaagcccugg

SEQ ID NO: 22313 - RNA, 21 nt, Artificial Sequence
  GATA2 Guide RNA
cuccagggcuuccagcagcug

SEQ ID NO: 22314 - RNA, 21 nt, Artificial Sequence
  GATA2 Guide RNA
cugcaccccucagcugcugga

SEQ ID NO: 22315 - RNA, 21 nt, Artificial Sequence
  GATA2 Guide RNA
cugcuggaagcccuggaggcc

SEQ ID NO: 22316 - RNA, 21 nt, Artificial Sequence
  GATA2 Guide RNA
cuggaagcccuggaggcccac

SEQ ID NO: 22317 - RNA, 21 nt, Artificial Sequence
  GATA2 Guide RNA
cuuccagcagcugaggggugc

SEQ ID NO: 22318 - RNA, 21 nt, Artificial Sequence
  GATA2 Guide RNA
gaagcccuggaggcccacucu

SEQ ID NO: 22319 - RNA, 21 nt, Artificial Sequence
  GATA2 Guide RNA
gagagugggccuccagggcuu

SEQ ID NO: 22320 - RNA, 21 nt, Artificial Sequence
  GATA2 Guide RNA
gagugggccuccagggcuucc

SEQ ID NO: 22321 - RNA, 21 nt, Artificial Sequence
  GATA2 Guide RNA
gcaccccucagcugcuggaag

SEQ ID NO: 22322 - RNA, 21 nt, Artificial Sequence
  GATA2 Guide RNA
gccuccagggcuuccagcagc

SEQ ID NO: 22323 - RNA, 21 nt, Artificial Sequence
  GATA2 Guide RNA
gcugcuggaagcccuggaggc

SEQ ID NO: 22324 - RNA, 21 nt, Artificial Sequence
  GATA2 Guide RNA
gcuggaagcccuggaggccca

SEQ ID NO: 22325 - RNA, 21 nt, Artificial Sequence
  GATA2 Guide RNA
gcuuccagcagcugaggggug

SEQ ID NO: 22326 - RNA, 21 nt, Artificial Sequence
  GATA2 Guide RNA
ggaagcccuggaggcccacuc

SEQ ID NO: 22327 - RNA, 21 nt, Artificial Sequence
  GATA2 Guide RNA
ggccuccagggcuuccagcag

SEQ ID NO: 22328 - RNA, 21 nt, Artificial Sequence
  GATA2 Guide RNA
ggcuuccagcagcugaggggu

SEQ ID NO: 22329 - RNA, 21 nt, Artificial Sequence
  GATA2 Guide RNA
gggccuccagggcuuccagca

SEQ ID NO: 22330 - RNA, 21 nt, Artificial Sequence
  GATA2 Guide RNA
gggcuuccagcagcugagggg

SEQ ID NO: 22331 - RNA, 21 nt, Artificial Sequence
  GATA2 Guide RNA
gugggccuccagggcuuccag

SEQ ID NO: 22332 - RNA, 21 nt, Artificial Sequence
  GATA2 Guide RNA
ucagcugcuggaagcccugga

SEQ ID NO: 22333 - RNA, 21 nt, Artificial Sequence
  GATA2 Guide RNA
uccagggcuuccagcagcuga

SEQ ID NO: 22334 - RNA, 21 nt, Artificial Sequence
  GATA2 Guide RNA
ugcaccccucagcugcuggaa

SEQ ID NO: 22335 - RNA, 21 nt, Artificial Sequence
  GATA2 Guide RNA
ugcuggaagcccuggaggccc

SEQ ID NO: 22336 - RNA, 21 nt, Artificial Sequence
  GATA2 Guide RNA
uggaagcccuggaggcccacu

SEQ ID NO: 22337 - RNA, 21 nt, Artificial Sequence
  GATA2 Guide RNA
ugggccuccagggcuuccagc

SEQ ID NO: 22338 - RNA, 21 nt, Artificial Sequence
  GATA2 Guide RNA
uuccagcagcugaggggugca

SEQ ID NO: 22339 - RNA, 22 nt, Artificial Sequence
  GATA2 Guide RNA
aagcccuggaggcccacucucu

SEQ ID NO: 22340 - RNA, 22 nt, Artificial Sequence
  GATA2 Guide RNA
acacagagagugggccuccagg

SEQ ID NO: 22341 - RNA, 22 nt, Artificial Sequence
  GATA2 Guide RNA
acagagagugggccuccagggc

SEQ ID NO: 22342 - RNA, 22 nt, Artificial Sequence
  GATA2 Guide RNA
accccucagcugcuggaagccc

SEQ ID NO: 22343 - RNA, 22 nt, Artificial Sequence
  GATA2 Guide RNA
acugcaccccucagcugcugga

SEQ ID NO: 22344 - RNA, 22 nt, Artificial Sequence
  GATA2 Guide RNA
agagagugggccuccagggcuu

SEQ ID NO: 22345 - RNA, 22 nt, Artificial Sequence
  GATA2 Guide RNA
agagugggccuccagggcuucc

SEQ ID NO: 22346 - RNA, 22 nt, Artificial Sequence
  GATA2 Guide RNA
agcugcuggaagcccuggaggc

SEQ ID NO: 22347 - RNA, 22 nt, Artificial Sequence
  GATA2 Guide RNA
agggcuuccagcagcugagggg

SEQ ID NO: 22348 - RNA, 22 nt, Artificial Sequence
  GATA2 Guide RNA
agugggccuccagggcuuccag

SEQ ID NO: 22349 - RNA, 22 nt, Artificial Sequence
  GATA2 Guide RNA
cacagagagugggccuccaggg

SEQ ID NO: 22350 - RNA, 22 nt, Artificial Sequence
  GATA2 Guide RNA
caccccucagcugcuggaagcc

SEQ ID NO: 22351 - RNA, 22 nt, Artificial Sequence
  GATA2 Guide RNA
cacugcaccccucagcugcugg

SEQ ID NO: 22352 - RNA, 22 nt, Artificial Sequence
  GATA2 Guide RNA
cagagagugggccuccagggcu

SEQ ID NO: 22353 - RNA, 22 nt, Artificial Sequence
  GATA2 Guide RNA
cagcugcuggaagcccuggagg

SEQ ID NO: 22354 - RNA, 22 nt, Artificial Sequence
  GATA2 Guide RNA
cagggcuuccagcagcugaggg

SEQ ID NO: 22355 - RNA, 22 nt, Artificial Sequence
  GATA2 Guide RNA
ccacugcaccccucagcugcug

SEQ ID NO: 22356 - RNA, 22 nt, Artificial Sequence
  GATA2 Guide RNA
ccagggcuuccagcagcugagg

SEQ ID NO: 22357 - RNA, 22 nt, Artificial Sequence
  GATA2 Guide RNA
ccccucagcugcuggaagcccu

SEQ ID NO: 22358 - RNA, 22 nt, Artificial Sequence
  GATA2 Guide RNA
cccucagcugcuggaagcccug

SEQ ID NO: 22359 - RNA, 22 nt, Artificial Sequence
  GATA2 Guide RNA
ccucagcugcuggaagcccugg

SEQ ID NO: 22360 - RNA, 22 nt, Artificial Sequence
  GATA2 Guide RNA
ccuccagggcuuccagcagcug

SEQ ID NO: 22361 - RNA, 22 nt, Artificial Sequence
  GATA2 Guide RNA
cucagcugcuggaagcccugga

SEQ ID NO: 22362 - RNA, 22 nt, Artificial Sequence
  GATA2 Guide RNA
cuccagggcuuccagcagcuga

SEQ ID NO: 22363 - RNA, 22 nt, Artificial Sequence
  GATA2 Guide RNA
cugcaccccucagcugcuggaa

SEQ ID NO: 22364 - RNA, 22 nt, Artificial Sequence
  GATA2 Guide RNA
cugcuggaagcccuggaggccc

SEQ ID NO: 22365 - RNA, 22 nt, Artificial Sequence
  GATA2 Guide RNA
cuggaagcccuggaggcccacu

SEQ ID NO: 22366 - RNA, 22 nt, Artificial Sequence
  GATA2 Guide RNA
cuuccagcagcugaggggugca

SEQ ID NO: 22367 - RNA, 22 nt, Artificial Sequence
  GATA2 Guide RNA
gaagcccuggaggcccacucuc

SEQ ID NO: 22368 - RNA, 22 nt, Artificial Sequence
  GATA2 Guide RNA
gagagugggccuccagggcuuc

SEQ ID NO: 22369 - RNA, 22 nt, Artificial Sequence
  GATA2 Guide RNA
gagugggccuccagggcuucca

SEQ ID NO: 22370 - RNA, 22 nt, Artificial Sequence
  GATA2 Guide RNA
gcaccccucagcugcuggaagc

SEQ ID NO: 22371 - RNA, 22 nt, Artificial Sequence
  GATA2 Guide RNA
gccacugcaccccucagcugcu

SEQ ID NO: 22372 - RNA, 22 nt, Artificial Sequence
  GATA2 Guide RNA
gccuccagggcuuccagcagcu

SEQ ID NO: 22373 - RNA, 22 nt, Artificial Sequence
  GATA2 Guide RNA
gcugcuggaagcccuggaggcc

SEQ ID NO: 22374 - RNA, 22 nt, Artificial Sequence
  GATA2 Guide RNA
gcuggaagcccuggaggcccac

SEQ ID NO: 22375 - RNA, 22 nt, Artificial Sequence
  GATA2 Guide RNA
gcuuccagcagcugaggggugc

SEQ ID NO: 22376 - RNA, 22 nt, Artificial Sequence
  GATA2 Guide RNA
ggaagcccuggaggcccacucu

SEQ ID NO: 22377 - RNA, 22 nt, Artificial Sequence
  GATA2 Guide RNA
ggccuccagggcuuccagcagc

SEQ ID NO: 22378 - RNA, 22 nt, Artificial Sequence
  GATA2 Guide RNA
ggcuuccagcagcugaggggug

SEQ ID NO: 22379 - RNA, 22 nt, Artificial Sequence
  GATA2 Guide RNA
gggccuccagggcuuccagcag

SEQ ID NO: 22380 - RNA, 22 nt, Artificial Sequence
  GATA2 Guide RNA
gggcuuccagcagcugaggggu

SEQ ID NO: 22381 - RNA, 22 nt, Artificial Sequence
  GATA2 Guide RNA
gugggccuccagggcuuccagc

SEQ ID NO: 22382 - RNA, 22 nt, Artificial Sequence
  GATA2 Guide RNA
ucagcugcuggaagcccuggag

SEQ ID NO: 22383 - RNA, 22 nt, Artificial Sequence
  GATA2 Guide RNA
uccagggcuuccagcagcugag

SEQ ID NO: 22384 - RNA, 22 nt, Artificial Sequence
  GATA2 Guide RNA
ugcaccccucagcugcuggaag

SEQ ID NO: 22385 - RNA, 22 nt, Artificial Sequence
  GATA2 Guide RNA
ugcuggaagcccuggaggccca

SEQ ID NO: 22386 - RNA, 22 nt, Artificial Sequence
  GATA2 Guide RNA
uggaagcccuggaggcccacuc

SEQ ID NO: 22387 - RNA, 22 nt, Artificial Sequence
  GATA2 Guide RNA
ugggccuccagggcuuccagca

SEQ ID NO: 22388 - RNA, 22 nt, Artificial Sequence
  GATA2 Guide RNA
uuccagcagcugaggggugcag

SEQ ID NO: 22389 - RNA, 20 nt, Artificial Sequence
  GATA2 Guide RNA
aagacgccacugcgccccuc

SEQ ID NO: 22390 - RNA, 20 nt, Artificial Sequence
  GATA2 Guide RNA
acgccacugcgccccucagc

SEQ ID NO: 22391 - RNA, 20 nt, Artificial Sequence
  GATA2 Guide RNA
acugcgccccucagcugcug

SEQ ID NO: 22392 - RNA, 20 nt, Artificial Sequence
  GATA2 Guide RNA
agacgccacugcgccccuca

SEQ ID NO: 22393 - RNA, 20 nt, Artificial Sequence
  GATA2 Guide RNA
agcagcugaggggcgcagug

SEQ ID NO: 22394 - RNA, 20 nt, Artificial Sequence
  GATA2 Guide RNA
agcugaggggcgcaguggcg

SEQ ID NO: 22395 - RNA, 20 nt, Artificial Sequence
  GATA2 Guide RNA
agggccuccagcagcugagg

SEQ ID NO: 22396 - RNA, 20 nt, Artificial Sequence
  GATA2 Guide RNA
aggggcgcaguggcgucuug

SEQ ID NO: 22397 - RNA, 20 nt, Artificial Sequence
  GATA2 Guide RNA
caagacgccacugcgccccu

SEQ ID NO: 22398 - RNA, 20 nt, Artificial Sequence
  GATA2 Guide RNA
cacugcgccccucagcugcu

SEQ ID NO: 22399 - RNA, 20 nt, Artificial Sequence
  GATA2 Guide RNA
cagcagcugaggggcgcagu

SEQ ID NO: 22400 - RNA, 20 nt, Artificial Sequence
  GATA2 Guide RNA
cagcugaggggcgcaguggc

SEQ ID NO: 22401 - RNA, 20 nt, Artificial Sequence
  GATA2 Guide RNA
ccaagacgccacugcgcccc

SEQ ID NO: 22402 - RNA, 20 nt, Artificial Sequence
  GATA2 Guide RNA
ccacugcgccccucagcugc

SEQ ID NO: 22403 - RNA, 20 nt, Artificial Sequence
  GATA2 Guide RNA
ccagcagcugaggggcgcag

SEQ ID NO: 22404 - RNA, 20 nt, Artificial Sequence
  GATA2 Guide RNA
ccccuucuccaagacgccac

SEQ ID NO: 22405 - RNA, 20 nt, Artificial Sequence
  GATA2 Guide RNA
cccuucuccaagacgccacu

SEQ ID NO: 22406 - RNA, 20 nt, Artificial Sequence
  GATA2 Guide RNA
ccuccagcagcugaggggcg

SEQ ID NO: 22407 - RNA, 20 nt, Artificial Sequence
  GATA2 Guide RNA
ccuucuccaagacgccacug

SEQ ID NO: 22408 - RNA, 20 nt, Artificial Sequence
  GATA2 Guide RNA
cgcaguggcgucuuggagaa

SEQ ID NO: 22409 - RNA, 20 nt, Artificial Sequence
  GATA2 Guide RNA
cgccacugcgccccucagcu

SEQ ID NO: 22410 - RNA, 20 nt, Artificial Sequence
  GATA2 Guide RNA
cgccccucagcugcuggagg

SEQ ID NO: 22411 - RNA, 20 nt, Artificial Sequence
  GATA2 Guide RNA
cuccaagacgccacugcgcc

SEQ ID NO: 22412 - RNA, 20 nt, Artificial Sequence
  GATA2 Guide RNA
cuccagcagcugaggggcgc

SEQ ID NO: 22413 - RNA, 20 nt, Artificial Sequence
  GATA2 Guide RNA
cugaggggcgcaguggcguc

SEQ ID NO: 22414 - RNA, 20 nt, Artificial Sequence
  GATA2 Guide RNA
cugcgccccucagcugcugg

SEQ ID NO: 22415 - RNA, 20 nt, Artificial Sequence
  GATA2 Guide RNA
cuucuccaagacgccacugc

SEQ ID NO: 22416 - RNA, 20 nt, Artificial Sequence
  GATA2 Guide RNA
gacgccacugcgccccucag

SEQ ID NO: 22417 - RNA, 20 nt, Artificial Sequence
  GATA2 Guide RNA
gaggggcgcaguggcgucuu

SEQ ID NO: 22418 - RNA, 20 nt, Artificial Sequence
  GATA2 Guide RNA
gcagcugaggggcgcagugg

SEQ ID NO: 22419 - RNA, 20 nt, Artificial Sequence
  GATA2 Guide RNA
gccacugcgccccucagcug

SEQ ID NO: 22420 - RNA, 20 nt, Artificial Sequence
  GATA2 Guide RNA
gccuccagcagcugaggggc

SEQ ID NO: 22421 - RNA, 20 nt, Artificial Sequence
  GATA2 Guide RNA
gcgcaguggcgucuuggaga

SEQ ID NO: 22422 - RNA, 20 nt, Artificial Sequence
  GATA2 Guide RNA
gcgccccucagcugcuggag

SEQ ID NO: 22423 - RNA, 20 nt, Artificial Sequence
  GATA2 Guide RNA
gcugaggggcgcaguggcgu

SEQ ID NO: 22424 - RNA, 20 nt, Artificial Sequence
  GATA2 Guide RNA
ggccuccagcagcugagggg

SEQ ID NO: 22425 - RNA, 20 nt, Artificial Sequence
  GATA2 Guide RNA
ggcgcaguggcgucuuggag

SEQ ID NO: 22426 - RNA, 20 nt, Artificial Sequence
  GATA2 Guide RNA
gggccuccagcagcugaggg

SEQ ID NO: 22427 - RNA, 20 nt, Artificial Sequence
  GATA2 Guide RNA
gggcgcaguggcgucuugga

SEQ ID NO: 22428 - RNA, 20 nt, Artificial Sequence
  GATA2 Guide RNA
ggggcgcaguggcgucuugg

SEQ ID NO: 22429 - RNA, 20 nt, Artificial Sequence
  GATA2 Guide RNA
uccaagacgccacugcgccc

SEQ ID NO: 22430 - RNA, 20 nt, Artificial Sequence
  GATA2 Guide RNA
uccagcagcugaggggcgca

SEQ ID NO: 22431 - RNA, 20 nt, Artificial Sequence
  GATA2 Guide RNA
ucuccaagacgccacugcgc

SEQ ID NO: 22432 - RNA, 20 nt, Artificial Sequence
  GATA2 Guide RNA
ugaggggcgcaguggcgucu

SEQ ID NO: 22433 - RNA, 20 nt, Artificial Sequence
  GATA2 Guide RNA
ugcgccccucagcugcugga

SEQ ID NO: 22434 - RNA, 20 nt, Artificial Sequence
  GATA2 Guide RNA
uucuccaagacgccacugcg

SEQ ID NO: 22435 - RNA, 21 nt, Artificial Sequence
  GATA2 Guide RNA
aagacgccacugcgccccuca

SEQ ID NO: 22436 - RNA, 21 nt, Artificial Sequence
  GATA2 Guide RNA
acgccacugcgccccucagcu

SEQ ID NO: 22437 - RNA, 21 nt, Artificial Sequence
  GATA2 Guide RNA
acugcgccccucagcugcugg

SEQ ID NO: 22438 - RNA, 21 nt, Artificial Sequence
  GATA2 Guide RNA
agacgccacugcgccccucag

SEQ ID NO: 22439 - RNA, 21 nt, Artificial Sequence
  GATA2 Guide RNA
agcagcugaggggcgcagugg

SEQ ID NO: 22440 - RNA, 21 nt, Artificial Sequence
  GATA2 Guide RNA
agcugaggggcgcaguggcgu

SEQ ID NO: 22441 - RNA, 21 nt, Artificial Sequence
  GATA2 Guide RNA
agggccuccagcagcugaggg

SEQ ID NO: 22442 - RNA, 21 nt, Artificial Sequence
  GATA2 Guide RNA
aggggcgcaguggcgucuugg

SEQ ID NO: 22443 - RNA, 21 nt, Artificial Sequence
  GATA2 Guide RNA
caagacgccacugcgccccuc

SEQ ID NO: 22444 - RNA, 21 nt, Artificial Sequence
  GATA2 Guide RNA
cacugcgccccucagcugcug

SEQ ID NO: 22445 - RNA, 21 nt, Artificial Sequence
  GATA2 Guide RNA
cagcagcugaggggcgcagug

SEQ ID NO: 22446 - RNA, 21 nt, Artificial Sequence
  GATA2 Guide RNA
cagcugaggggcgcaguggcg

SEQ ID NO: 22447 - RNA, 21 nt, Artificial Sequence
  GATA2 Guide RNA
cagggccuccagcagcugagg

SEQ ID NO: 22448 - RNA, 21 nt, Artificial Sequence
  GATA2 Guide RNA
ccaagacgccacugcgccccu

SEQ ID NO: 22449 - RNA, 21 nt, Artificial Sequence
  GATA2 Guide RNA
ccacugcgccccucagcugcu

SEQ ID NO: 22450 - RNA, 21 nt, Artificial Sequence
  GATA2 Guide RNA
ccagcagcugaggggcgcagu

SEQ ID NO: 22451 - RNA, 21 nt, Artificial Sequence
  GATA2 Guide RNA
ccccuucuccaagacgccacu

SEQ ID NO: 22452 - RNA, 21 nt, Artificial Sequence
  GATA2 Guide RNA
cccuucuccaagacgccacug

SEQ ID NO: 22453 - RNA, 21 nt, Artificial Sequence
  GATA2 Guide RNA
ccuccagcagcugaggggcgc

SEQ ID NO: 22454 - RNA, 21 nt, Artificial Sequence
  GATA2 Guide RNA
ccuucuccaagacgccacugc

SEQ ID NO: 22455 - RNA, 21 nt, Artificial Sequence
  GATA2 Guide RNA
cgcaguggcgucuuggagaag

SEQ ID NO: 22456 - RNA, 21 nt, Artificial Sequence
  GATA2 Guide RNA
cgccacugcgccccucagcug

SEQ ID NO: 22457 - RNA, 21 nt, Artificial Sequence
  GATA2 Guide RNA
cgccccucagcugcuggaggc

SEQ ID NO: 22458 - RNA, 21 nt, Artificial Sequence
  GATA2 Guide RNA
cuccaagacgccacugcgccc

SEQ ID NO: 22459 - RNA, 21 nt, Artificial Sequence
  GATA2 Guide RNA
cuccagcagcugaggggcgca

SEQ ID NO: 22460 - RNA, 21 nt, Artificial Sequence
  GATA2 Guide RNA
cugaggggcgcaguggcgucu

SEQ ID NO: 22461 - RNA, 21 nt, Artificial Sequence
  GATA2 Guide RNA
cugcgccccucagcugcugga

SEQ ID NO: 22462 - RNA, 21 nt, Artificial Sequence
  GATA2 Guide RNA
cuucuccaagacgccacugcg

SEQ ID NO: 22463 - RNA, 21 nt, Artificial Sequence
  GATA2 Guide RNA
gacgccacugcgccccucagc

SEQ ID NO: 22464 - RNA, 21 nt, Artificial Sequence
  GATA2 Guide RNA
gaggggcgcaguggcgucuug

SEQ ID NO: 22465 - RNA, 21 nt, Artificial Sequence
  GATA2 Guide RNA
gcagcugaggggcgcaguggc

SEQ ID NO: 22466 - RNA, 21 nt, Artificial Sequence
  GATA2 Guide RNA
gccacugcgccccucagcugc

SEQ ID NO: 22467 - RNA, 21 nt, Artificial Sequence
  GATA2 Guide RNA
gccccuucuccaagacgccac

SEQ ID NO: 22468 - RNA, 21 nt, Artificial Sequence
  GATA2 Guide RNA
gccuccagcagcugaggggcg

SEQ ID NO: 22469 - RNA, 21 nt, Artificial Sequence
  GATA2 Guide RNA
gcgcaguggcgucuuggagaa

SEQ ID NO: 22470 - RNA, 21 nt, Artificial Sequence
  GATA2 Guide RNA
gcgccccucagcugcuggagg

SEQ ID NO: 22471 - RNA, 21 nt, Artificial Sequence
  GATA2 Guide RNA
gcugaggggcgcaguggcguc

SEQ ID NO: 22472 - RNA, 21 nt, Artificial Sequence
  GATA2 Guide RNA
ggccuccagcagcugaggggc

SEQ ID NO: 22473 - RNA, 21 nt, Artificial Sequence
  GATA2 Guide RNA
ggcgcaguggcgucuuggaga

SEQ ID NO: 22474 - RNA, 21 nt, Artificial Sequence
  GATA2 Guide RNA
gggccuccagcagcugagggg

SEQ ID NO: 22475 - RNA, 21 nt, Artificial Sequence
  GATA2 Guide RNA
gggcgcaguggcgucuuggag

SEQ ID NO: 22476 - RNA, 21 nt, Artificial Sequence
  GATA2 Guide RNA
ggggcgcaguggcgucuugga

SEQ ID NO: 22477 - RNA, 21 nt, Artificial Sequence
  GATA2 Guide RNA
uccaagacgccacugcgcccc

SEQ ID NO: 22478 - RNA, 21 nt, Artificial Sequence
  GATA2 Guide RNA
uccagcagcugaggggcgcag

SEQ ID NO: 22479 - RNA, 21 nt, Artificial Sequence
  GATA2 Guide RNA
ucuccaagacgccacugcgcc

SEQ ID NO: 22480 - RNA, 21 nt, Artificial Sequence
  GATA2 Guide RNA
ugaggggcgcaguggcgucuu

SEQ ID NO: 22481 - RNA, 21 nt, Artificial Sequence
  GATA2 Guide RNA
ugcgccccucagcugcuggag

SEQ ID NO: 22482 - RNA, 21 nt, Artificial Sequence
  GATA2 Guide RNA
uucuccaagacgccacugcgc

SEQ ID NO: 22483 - RNA, 22 nt, Artificial Sequence
  GATA2 Guide RNA
aagacgccacugcgccccucag

SEQ ID NO: 22484 - RNA, 22 nt, Artificial Sequence
  GATA2 Guide RNA
acgccacugcgccccucagcug

SEQ ID NO: 22485 - RNA, 22 nt, Artificial Sequence
  GATA2 Guide RNA
acugcgccccucagcugcugga

SEQ ID NO: 22486 - RNA, 22 nt, Artificial Sequence
  GATA2 Guide RNA
agacgccacugcgccccucagc

SEQ ID NO: 22487 - RNA, 22 nt, Artificial Sequence
  GATA2 Guide RNA
agcagcugaggggcgcaguggc

SEQ ID NO: 22488 - RNA, 22 nt, Artificial Sequence
  GATA2 Guide RNA
agccccuucuccaagacgccac

SEQ ID NO: 22489 - RNA, 22 nt, Artificial Sequence
  GATA2 Guide RNA
agcugaggggcgcaguggcguc

SEQ ID NO: 22490 - RNA, 22 nt, Artificial Sequence
  GATA2 Guide RNA
agggccuccagcagcugagggg

SEQ ID NO: 22491 - RNA, 22 nt, Artificial Sequence
  GATA2 Guide RNA
aggggcgcaguggcgucuugga

SEQ ID NO: 22492 - RNA, 22 nt, Artificial Sequence
  GATA2 Guide RNA
caagacgccacugcgccccuca

SEQ ID NO: 22493 - RNA, 22 nt, Artificial Sequence
  GATA2 Guide RNA
cacugcgccccucagcugcugg

SEQ ID NO: 22494 - RNA, 22 nt, Artificial Sequence
  GATA2 Guide RNA
cagcagcugaggggcgcagugg

SEQ ID NO: 22495 - RNA, 22 nt, Artificial Sequence
  GATA2 Guide RNA
cagcugaggggcgcaguggcgu

SEQ ID NO: 22496 - RNA, 22 nt, Artificial Sequence
  GATA2 Guide RNA
cagggccuccagcagcugaggg

SEQ ID NO: 22497 - RNA, 22 nt, Artificial Sequence
  GATA2 Guide RNA
ccaagacgccacugcgccccuc

SEQ ID NO: 22498 - RNA, 22 nt, Artificial Sequence
  GATA2 Guide RNA
ccacugcgccccucagcugcug

SEQ ID NO: 22499 - RNA, 22 nt, Artificial Sequence
  GATA2 Guide RNA
ccagcagcugaggggcgcagug

SEQ ID NO: 22500 - RNA, 22 nt, Artificial Sequence
  GATA2 Guide RNA
ccagggccuccagcagcugagg

SEQ ID NO: 22501 - RNA, 22 nt, Artificial Sequence
  GATA2 Guide RNA
ccccuucuccaagacgccacug

SEQ ID NO: 22502 - RNA, 22 nt, Artificial Sequence
  GATA2 Guide RNA
cccuucuccaagacgccacugc

SEQ ID NO: 22503 - RNA, 22 nt, Artificial Sequence
  GATA2 Guide RNA
ccuccagcagcugaggggcgca

SEQ ID NO: 22504 - RNA, 22 nt, Artificial Sequence
  GATA2 Guide RNA
ccuucuccaagacgccacugcg

SEQ ID NO: 22505 - RNA, 22 nt, Artificial Sequence
  GATA2 Guide RNA
cgcaguggcgucuuggagaagg

SEQ ID NO: 22506 - RNA, 22 nt, Artificial Sequence
  GATA2 Guide RNA
cgccacugcgccccucagcugc

SEQ ID NO: 22507 - RNA, 22 nt, Artificial Sequence
  GATA2 Guide RNA
cgccccucagcugcuggaggcc

SEQ ID NO: 22508 - RNA, 22 nt, Artificial Sequence
  GATA2 Guide RNA
cuccaagacgccacugcgcccc

SEQ ID NO: 22509 - RNA, 22 nt, Artificial Sequence
  GATA2 Guide RNA
cuccagcagcugaggggcgcag

SEQ ID NO: 22510 - RNA, 22 nt, Artificial Sequence
  GATA2 Guide RNA
cugaggggcgcaguggcgucuu

SEQ ID NO: 22511 - RNA, 22 nt, Artificial Sequence
  GATA2 Guide RNA
cugcgccccucagcugcuggag

SEQ ID NO: 22512 - RNA, 22 nt, Artificial Sequence
  GATA2 Guide RNA
cuucuccaagacgccacugcgc

SEQ ID NO: 22513 - RNA, 22 nt, Artificial Sequence
  GATA2 Guide RNA
gacgccacugcgccccucagcu

SEQ ID NO: 22514 - RNA, 22 nt, Artificial Sequence
  GATA2 Guide RNA
gaggggcgcaguggcgucuugg

SEQ ID NO: 22515 - RNA, 22 nt, Artificial Sequence
  GATA2 Guide RNA
gcagcugaggggcgcaguggcg

SEQ ID NO: 22516 - RNA, 22 nt, Artificial Sequence
  GATA2 Guide RNA
gccacugcgccccucagcugcu

SEQ ID NO: 22517 - RNA, 22 nt, Artificial Sequence
  GATA2 Guide RNA
gccccuucuccaagacgccacu

SEQ ID NO: 22518 - RNA, 22 nt, Artificial Sequence
  GATA2 Guide RNA
gccuccagcagcugaggggcgc

SEQ ID NO: 22519 - RNA, 22 nt, Artificial Sequence
  GATA2 Guide RNA
gcgcaguggcgucuuggagaag

SEQ ID NO: 22520 - RNA, 22 nt, Artificial Sequence
  GATA2 Guide RNA
gcgccccucagcugcuggaggc

SEQ ID NO: 22521 - RNA, 22 nt, Artificial Sequence
  GATA2 Guide RNA
gcugaggggcgcaguggcgucu

SEQ ID NO: 22522 - RNA, 22 nt, Artificial Sequence
  GATA2 Guide RNA
ggccuccagcagcugaggggcg

SEQ ID NO: 22523 - RNA, 22 nt, Artificial Sequence
  GATA2 Guide RNA
ggcgcaguggcgucuuggagaa

SEQ ID NO: 22524 - RNA, 22 nt, Artificial Sequence
  GATA2 Guide RNA
gggccuccagcagcugaggggc

SEQ ID NO: 22525 - RNA, 22 nt, Artificial Sequence
  GATA2 Guide RNA
gggcgcaguggcgucuuggaga

SEQ ID NO: 22526 - RNA, 22 nt, Artificial Sequence
  GATA2 Guide RNA
ggggcgcaguggcgucuuggag

SEQ ID NO: 22527 - RNA, 22 nt, Artificial Sequence
  GATA2 Guide RNA
uccaagacgccacugcgccccu

SEQ ID NO: 22528 - RNA, 22 nt, Artificial Sequence
  GATA2 Guide RNA
uccagcagcugaggggcgcagu

SEQ ID NO: 22529 - RNA, 22 nt, Artificial Sequence
  GATA2 Guide RNA
ucuccaagacgccacugcgccc

SEQ ID NO: 22530 - RNA, 22 nt, Artificial Sequence
  GATA2 Guide RNA
ugaggggcgcaguggcgucuug

SEQ ID NO: 22531 - RNA, 22 nt, Artificial Sequence
  GATA2 Guide RNA
ugcgccccucagcugcuggagg

SEQ ID NO: 22532 - RNA, 22 nt, Artificial Sequence
  GATA2 Guide RNA
uucuccaagacgccacugcgcc

SEQ ID NO: 22533 - RNA, 20 nt, Artificial Sequence
  GATA2 Guide RNA
aagaagccacugcaccccuc

SEQ ID NO: 22534 - RNA, 20 nt, Artificial Sequence
  GATA2 Guide RNA
aagccacugcaccccucagc

SEQ ID NO: 22535 - RNA, 20 nt, Artificial Sequence
  GATA2 Guide RNA
accgugagccccuucuccaa

SEQ ID NO: 22536 - RNA, 20 nt, Artificial Sequence
  GATA2 Guide RNA
agaagccacugcaccccuca

SEQ ID NO: 22537 - RNA, 20 nt, Artificial Sequence
  GATA2 Guide RNA
agcagcugaggggugcagug

SEQ ID NO: 22538 - RNA, 20 nt, Artificial Sequence
  GATA2 Guide RNA
agccccuucuccaagaagcc

SEQ ID NO: 22539 - RNA, 20 nt, Artificial Sequence
  GATA2 Guide RNA
agcugaggggugcaguggcu

SEQ ID NO: 22540 - RNA, 20 nt, Artificial Sequence
  GATA2 Guide RNA
aggggugcaguggcuucuug

SEQ ID NO: 22541 - RNA, 20 nt, Artificial Sequence
  GATA2 Guide RNA
aguggcuucuuggagaaggg

SEQ ID NO: 22542 - RNA, 20 nt, Artificial Sequence
  GATA2 Guide RNA
caagaagccacugcaccccu

SEQ ID NO: 22543 - RNA, 20 nt, Artificial Sequence
  GATA2 Guide RNA
cagcugaggggugcaguggc

SEQ ID NO: 22544 - RNA, 20 nt, Artificial Sequence
  GATA2 Guide RNA
caguggcuucuuggagaagg

SEQ ID NO: 22545 - RNA, 20 nt, Artificial Sequence
  GATA2 Guide RNA
ccaagaagccacugcacccc

SEQ ID NO: 22546 - RNA, 20 nt, Artificial Sequence
  GATA2 Guide RNA
ccccuucuccaagaagccac

SEQ ID NO: 22547 - RNA, 20 nt, Artificial Sequence
  GATA2 Guide RNA
cccuucuccaagaagccacu

SEQ ID NO: 22548 - RNA, 20 nt, Artificial Sequence
  GATA2 Guide RNA
ccgugagccccuucuccaag

SEQ ID NO: 22549 - RNA, 20 nt, Artificial Sequence
  GATA2 Guide RNA
ccuucuccaagaagccacug

SEQ ID NO: 22550 - RNA, 20 nt, Artificial Sequence
  GATA2 Guide RNA
cgugagccccuucuccaaga

SEQ ID NO: 22551 - RNA, 20 nt, Artificial Sequence
  GATA2 Guide RNA
cuccaagaagccacugcacc

SEQ ID NO: 22552 - RNA, 20 nt, Artificial Sequence
  GATA2 Guide RNA
cugaggggugcaguggcuuc

SEQ ID NO: 22553 - RNA, 20 nt, Artificial Sequence
  GATA2 Guide RNA
cuucuccaagaagccacugc

SEQ ID NO: 22554 - RNA, 20 nt, Artificial Sequence
  GATA2 Guide RNA
cuucuuggagaaggggcuca

SEQ ID NO: 22555 - RNA, 20 nt, Artificial Sequence
  GATA2 Guide RNA
gaagccacugcaccccucag

SEQ ID NO: 22556 - RNA, 20 nt, Artificial Sequence
  GATA2 Guide RNA
gaccgugagccccuucucca

SEQ ID NO: 22557 - RNA, 20 nt, Artificial Sequence
  GATA2 Guide RNA
gagccccuucuccaagaagc

SEQ ID NO: 22558 - RNA, 20 nt, Artificial Sequence
  GATA2 Guide RNA
gaggggugcaguggcuucuu

SEQ ID NO: 22559 - RNA, 20 nt, Artificial Sequence
  GATA2 Guide RNA
gcagcugaggggugcagugg

SEQ ID NO: 22560 - RNA, 20 nt, Artificial Sequence
  GATA2 Guide RNA
gcaguggcuucuuggagaag

SEQ ID NO: 22561 - RNA, 20 nt, Artificial Sequence
  GATA2 Guide RNA
gccccuucuccaagaagcca

SEQ ID NO: 22562 - RNA, 20 nt, Artificial Sequence
  GATA2 Guide RNA
gcugaggggugcaguggcuu

SEQ ID NO: 22563 - RNA, 20 nt, Artificial Sequence
  GATA2 Guide RNA
gcuucuuggagaaggggcuc

SEQ ID NO: 22564 - RNA, 20 nt, Artificial Sequence
  GATA2 Guide RNA
ggcuucuuggagaaggggcu

SEQ ID NO: 22565 - RNA, 20 nt, Artificial Sequence
  GATA2 Guide RNA
ggggugcaguggcuucuugg

SEQ ID NO: 22566 - RNA, 20 nt, Artificial Sequence
  GATA2 Guide RNA
gggugcaguggcuucuugga

SEQ ID NO: 22567 - RNA, 20 nt, Artificial Sequence
  GATA2 Guide RNA
ggugcaguggcuucuuggag

SEQ ID NO: 22568 - RNA, 20 nt, Artificial Sequence
  GATA2 Guide RNA
gugagccccuucuccaagaa

SEQ ID NO: 22569 - RNA, 20 nt, Artificial Sequence
  GATA2 Guide RNA
gugcaguggcuucuuggaga

SEQ ID NO: 22570 - RNA, 20 nt, Artificial Sequence
  GATA2 Guide RNA
guggcuucuuggagaagggg

SEQ ID NO: 22571 - RNA, 20 nt, Artificial Sequence
  GATA2 Guide RNA
uccaagaagccacugcaccc

SEQ ID NO: 22572 - RNA, 20 nt, Artificial Sequence
  GATA2 Guide RNA
ucuccaagaagccacugcac

SEQ ID NO: 22573 - RNA, 20 nt, Artificial Sequence
  GATA2 Guide RNA
ugagccccuucuccaagaag

SEQ ID NO: 22574 - RNA, 20 nt, Artificial Sequence
  GATA2 Guide RNA
ugaggggugcaguggcuucu

SEQ ID NO: 22575 - RNA, 20 nt, Artificial Sequence
  GATA2 Guide RNA
ugcaguggcuucuuggagaa

SEQ ID NO: 22576 - RNA, 20 nt, Artificial Sequence
  GATA2 Guide RNA
uggcuucuuggagaaggggc

SEQ ID NO: 22577 - RNA, 20 nt, Artificial Sequence
  GATA2 Guide RNA
uucuccaagaagccacugca

SEQ ID NO: 22578 - RNA, 20 nt, Artificial Sequence
  GATA2 Guide RNA
uucuuggagaaggggcucac

SEQ ID NO: 22579 - RNA, 21 nt, Artificial Sequence
  GATA2 Guide RNA
aagaagccacugcaccccuca

SEQ ID NO: 22580 - RNA, 21 nt, Artificial Sequence
  GATA2 Guide RNA
aagccacugcaccccucagcu

SEQ ID NO: 22581 - RNA, 21 nt, Artificial Sequence
  GATA2 Guide RNA
accgugagccccuucuccaag

SEQ ID NO: 22582 - RNA, 21 nt, Artificial Sequence
  GATA2 Guide RNA
agaagccacugcaccccucag

SEQ ID NO: 22583 - RNA, 21 nt, Artificial Sequence
  GATA2 Guide RNA
agcagcugaggggugcagugg

SEQ ID NO: 22584 - RNA, 21 nt, Artificial Sequence
  GATA2 Guide RNA
agccccuucuccaagaagcca

SEQ ID NO: 22585 - RNA, 21 nt, Artificial Sequence
  GATA2 Guide RNA
agcugaggggugcaguggcuu

SEQ ID NO: 22586 - RNA, 21 nt, Artificial Sequence
  GATA2 Guide RNA
aggggugcaguggcuucuugg

SEQ ID NO: 22587 - RNA, 21 nt, Artificial Sequence
  GATA2 Guide RNA
aguggcuucuuggagaagggg

SEQ ID NO: 22588 - RNA, 21 nt, Artificial Sequence
  GATA2 Guide RNA
caagaagccacugcaccccuc

SEQ ID NO: 22589 - RNA, 21 nt, Artificial Sequence
  GATA2 Guide RNA
cagcagcugaggggugcagug

SEQ ID NO: 22590 - RNA, 21 nt, Artificial Sequence
  GATA2 Guide RNA
cagcugaggggugcaguggcu

SEQ ID NO: 22591 - RNA, 21 nt, Artificial Sequence
  GATA2 Guide RNA
caguggcuucuuggagaaggg

SEQ ID NO: 22592 - RNA, 21 nt, Artificial Sequence
  GATA2 Guide RNA
ccaagaagccacugcaccccu

SEQ ID NO: 22593 - RNA, 21 nt, Artificial Sequence
  GATA2 Guide RNA
ccccuucuccaagaagccacu

SEQ ID NO: 22594 - RNA, 21 nt, Artificial Sequence
  GATA2 Guide RNA
cccuucuccaagaagccacug

SEQ ID NO: 22595 - RNA, 21 nt, Artificial Sequence
  GATA2 Guide RNA
ccgugagccccuucuccaaga

SEQ ID NO: 22596 - RNA, 21 nt, Artificial Sequence
  GATA2 Guide RNA
ccuucuccaagaagccacugc

SEQ ID NO: 22597 - RNA, 21 nt, Artificial Sequence
  GATA2 Guide RNA
cgugagccccuucuccaagaa

SEQ ID NO: 22598 - RNA, 21 nt, Artificial Sequence
  GATA2 Guide RNA
cuccaagaagccacugcaccc

SEQ ID NO: 22599 - RNA, 21 nt, Artificial Sequence
  GATA2 Guide RNA
cugaggggugcaguggcuucu

SEQ ID NO: 22600 - RNA, 21 nt, Artificial Sequence
  GATA2 Guide RNA
cuucuccaagaagccacugca

SEQ ID NO: 22601 - RNA, 21 nt, Artificial Sequence
  GATA2 Guide RNA
cuucuuggagaaggggcucac

SEQ ID NO: 22602 - RNA, 21 nt, Artificial Sequence
  GATA2 Guide RNA
gaagccacugcaccccucagc

SEQ ID NO: 22603 - RNA, 21 nt, Artificial Sequence
  GATA2 Guide RNA
gaccgugagccccuucuccaa

SEQ ID NO: 22604 - RNA, 21 nt, Artificial Sequence
  GATA2 Guide RNA
gagccccuucuccaagaagcc

SEQ ID NO: 22605 - RNA, 21 nt, Artificial Sequence
  GATA2 Guide RNA
gaggggugcaguggcuucuug

SEQ ID NO: 22606 - RNA, 21 nt, Artificial Sequence
  GATA2 Guide RNA
gcagcugaggggugcaguggc

SEQ ID NO: 22607 - RNA, 21 nt, Artificial Sequence
  GATA2 Guide RNA
gcaguggcuucuuggagaagg

SEQ ID NO: 22608 - RNA, 21 nt, Artificial Sequence
  GATA2 Guide RNA
gccccuucuccaagaagccac

SEQ ID NO: 22609 - RNA, 21 nt, Artificial Sequence
  GATA2 Guide RNA
gcugaggggugcaguggcuuc

SEQ ID NO: 22610 - RNA, 21 nt, Artificial Sequence
  GATA2 Guide RNA
gcuucuuggagaaggggcuca

SEQ ID NO: 22611 - RNA, 21 nt, Artificial Sequence
  GATA2 Guide RNA
ggaccgugagccccuucucca

SEQ ID NO: 22612 - RNA, 21 nt, Artificial Sequence
  GATA2 Guide RNA
ggcuucuuggagaaggggcuc

SEQ ID NO: 22613 - RNA, 21 nt, Artificial Sequence
  GATA2 Guide RNA
ggggugcaguggcuucuugga

SEQ ID NO: 22614 - RNA, 21 nt, Artificial Sequence
  GATA2 Guide RNA
gggugcaguggcuucuuggag

SEQ ID NO: 22615 - RNA, 21 nt, Artificial Sequence
  GATA2 Guide RNA
ggugcaguggcuucuuggaga

SEQ ID NO: 22616 - RNA, 21 nt, Artificial Sequence
  GATA2 Guide RNA
gugagccccuucuccaagaag

SEQ ID NO: 22617 - RNA, 21 nt, Artificial Sequence
  GATA2 Guide RNA
gugcaguggcuucuuggagaa

SEQ ID NO: 22618 - RNA, 21 nt, Artificial Sequence
  GATA2 Guide RNA
guggcuucuuggagaaggggc

SEQ ID NO: 22619 - RNA, 21 nt, Artificial Sequence
  GATA2 Guide RNA
uccaagaagccacugcacccc

SEQ ID NO: 22620 - RNA, 21 nt, Artificial Sequence
  GATA2 Guide RNA
ucuccaagaagccacugcacc

SEQ ID NO: 22621 - RNA, 21 nt, Artificial Sequence
  GATA2 Guide RNA
ugagccccuucuccaagaagc

SEQ ID NO: 22622 - RNA, 21 nt, Artificial Sequence
  GATA2 Guide RNA
ugaggggugcaguggcuucuu

SEQ ID NO: 22623 - RNA, 21 nt, Artificial Sequence
  GATA2 Guide RNA
ugcaguggcuucuuggagaag

SEQ ID NO: 22624 - RNA, 21 nt, Artificial Sequence
  GATA2 Guide RNA
uggcuucuuggagaaggggcu

SEQ ID NO: 22625 - RNA, 21 nt, Artificial Sequence
  GATA2 Guide RNA
uucuccaagaagccacugcac

SEQ ID NO: 22626 - RNA, 21 nt, Artificial Sequence
  GATA2 Guide RNA
uucuuggagaaggggcucacg

SEQ ID NO: 22627 - RNA, 22 nt, Artificial Sequence
  GATA2 Guide RNA
aagaagccacugcaccccucag

SEQ ID NO: 22628 - RNA, 22 nt, Artificial Sequence
  GATA2 Guide RNA
aagccacugcaccccucagcug

SEQ ID NO: 22629 - RNA, 22 nt, Artificial Sequence
  GATA2 Guide RNA
accgugagccccuucuccaaga

SEQ ID NO: 22630 - RNA, 22 nt, Artificial Sequence
  GATA2 Guide RNA
agaagccacugcaccccucagc

SEQ ID NO: 22631 - RNA, 22 nt, Artificial Sequence
  GATA2 Guide RNA
agcagcugaggggugcaguggc

SEQ ID NO: 22632 - RNA, 22 nt, Artificial Sequence
  GATA2 Guide RNA
agccccuucuccaagaagccac

SEQ ID NO: 22633 - RNA, 22 nt, Artificial Sequence
  GATA2 Guide RNA
agcugaggggugcaguggcuuc

SEQ ID NO: 22634 - RNA, 22 nt, Artificial Sequence
  GATA2 Guide RNA
aggggugcaguggcuucuugga

SEQ ID NO: 22635 - RNA, 22 nt, Artificial Sequence
  GATA2 Guide RNA
aguggcuucuuggagaaggggc

SEQ ID NO: 22636 - RNA, 22 nt, Artificial Sequence
  GATA2 Guide RNA
caagaagccacugcaccccuca

SEQ ID NO: 22637 - RNA, 22 nt, Artificial Sequence
  GATA2 Guide RNA
cagcagcugaggggugcagugg

SEQ ID NO: 22638 - RNA, 22 nt, Artificial Sequence
  GATA2 Guide RNA
cagcugaggggugcaguggcuu

SEQ ID NO: 22639 - RNA, 22 nt, Artificial Sequence
  GATA2 Guide RNA
caguggcuucuuggagaagggg

SEQ ID NO: 22640 - RNA, 22 nt, Artificial Sequence
  GATA2 Guide RNA
ccaagaagccacugcaccccuc

SEQ ID NO: 22641 - RNA, 22 nt, Artificial Sequence
  GATA2 Guide RNA
ccagcagcugaggggugcagug

SEQ ID NO: 22642 - RNA, 22 nt, Artificial Sequence
  GATA2 Guide RNA
ccccuucuccaagaagccacug

SEQ ID NO: 22643 - RNA, 22 nt, Artificial Sequence
  GATA2 Guide RNA
cccuucuccaagaagccacugc

SEQ ID NO: 22644 - RNA, 22 nt, Artificial Sequence
  GATA2 Guide RNA
ccgugagccccuucuccaagaa

SEQ ID NO: 22645 - RNA, 22 nt, Artificial Sequence
  GATA2 Guide RNA
ccuucuccaagaagccacugca

SEQ ID NO: 22646 - RNA, 22 nt, Artificial Sequence
  GATA2 Guide RNA
cgugagccccuucuccaagaag

SEQ ID NO: 22647 - RNA, 22 nt, Artificial Sequence
  GATA2 Guide RNA
cuccaagaagccacugcacccc

SEQ ID NO: 22648 - RNA, 22 nt, Artificial Sequence
  GATA2 Guide RNA
cugaggggugcaguggcuucuu

SEQ ID NO: 22649 - RNA, 22 nt, Artificial Sequence
  GATA2 Guide RNA
cuucuccaagaagccacugcac

SEQ ID NO: 22650 - RNA, 22 nt, Artificial Sequence
  GATA2 Guide RNA
cuucuuggagaaggggcucacg

SEQ ID NO: 22651 - RNA, 22 nt, Artificial Sequence
  GATA2 Guide RNA
gaagccacugcaccccucagcu

SEQ ID NO: 22652 - RNA, 22 nt, Artificial Sequence
  GATA2 Guide RNA
gaccgugagccccuucuccaag

SEQ ID NO: 22653 - RNA, 22 nt, Artificial Sequence
  GATA2 Guide RNA
gagccccuucuccaagaagcca

SEQ ID NO: 22654 - RNA, 22 nt, Artificial Sequence
  GATA2 Guide RNA
gaggggugcaguggcuucuugg

SEQ ID NO: 22655 - RNA, 22 nt, Artificial Sequence
  GATA2 Guide RNA
gcagcugaggggugcaguggcu

SEQ ID NO: 22656 - RNA, 22 nt, Artificial Sequence
  GATA2 Guide RNA
gcaguggcuucuuggagaaggg

SEQ ID NO: 22657 - RNA, 22 nt, Artificial Sequence
  GATA2 Guide RNA
gccccuucuccaagaagccacu

SEQ ID NO: 22658 - RNA, 22 nt, Artificial Sequence
  GATA2 Guide RNA
gcugaggggugcaguggcuucu

SEQ ID NO: 22659 - RNA, 22 nt, Artificial Sequence
  GATA2 Guide RNA
gcuucuuggagaaggggcucac

SEQ ID NO: 22660 - RNA, 22 nt, Artificial Sequence
  GATA2 Guide RNA
ggaccgugagccccuucuccaa

SEQ ID NO: 22661 - RNA, 22 nt, Artificial Sequence
  GATA2 Guide RNA
ggcuucuuggagaaggggcuca

SEQ ID NO: 22662 - RNA, 22 nt, Artificial Sequence
  GATA2 Guide RNA
ggggugcaguggcuucuuggag

SEQ ID NO: 22663 - RNA, 22 nt, Artificial Sequence
  GATA2 Guide RNA
gggugcaguggcuucuuggaga

SEQ ID NO: 22664 - RNA, 22 nt, Artificial Sequence
  GATA2 Guide RNA
ggugcaguggcuucuuggagaa

SEQ ID NO: 22665 - RNA, 22 nt, Artificial Sequence
  GATA2 Guide RNA
gugagccccuucuccaagaagc

SEQ ID NO: 22666 - RNA, 22 nt, Artificial Sequence
  GATA2 Guide RNA
gugcaguggcuucuuggagaag

SEQ ID NO: 22667 - RNA, 22 nt, Artificial Sequence
  GATA2 Guide RNA
guggcuucuuggagaaggggcu

SEQ ID NO: 22668 - RNA, 22 nt, Artificial Sequence
  GATA2 Guide RNA
uccaagaagccacugcaccccu

SEQ ID NO: 22669 - RNA, 22 nt, Artificial Sequence
  GATA2 Guide RNA
ucuccaagaagccacugcaccc

SEQ ID NO: 22670 - RNA, 22 nt, Artificial Sequence
  GATA2 Guide RNA
ugagccccuucuccaagaagcc

SEQ ID NO: 22671 - RNA, 22 nt, Artificial Sequence
  GATA2 Guide RNA
ugaggggugcaguggcuucuug

SEQ ID NO: 22672 - RNA, 22 nt, Artificial Sequence
  GATA2 Guide RNA
ugcaguggcuucuuggagaagg

SEQ ID NO: 22673 - RNA, 22 nt, Artificial Sequence
  GATA2 Guide RNA
uggaccgugagccccuucucca

SEQ ID NO: 22674 - RNA, 22 nt, Artificial Sequence
  GATA2 Guide RNA
uggcuucuuggagaaggggcuc

SEQ ID NO: 22675 - RNA, 22 nt, Artificial Sequence
  GATA2 Guide RNA
uucuccaagaagccacugcacc

SEQ ID NO: 22676 - RNA, 22 nt, Artificial Sequence
  GATA2 Guide RNA
uucuuggagaaggggcucacgg

SEQ ID NO: 22677 - RNA, 20 nt, Artificial Sequence
  GATA2 Guide RNA
aaccccuggaccgugagcuc

SEQ ID NO: 22678 - RNA, 20 nt, Artificial Sequence
  GATA2 Guide RNA
aaggagcucacgguccaggg

SEQ ID NO: 22679 - RNA, 20 nt, Artificial Sequence
  GATA2 Guide RNA
acaaccccuggaccgugagc

SEQ ID NO: 22680 - RNA, 20 nt, Artificial Sequence
  GATA2 Guide RNA
accacaaccccuggaccgug

SEQ ID NO: 22681 - RNA, 20 nt, Artificial Sequence
  GATA2 Guide RNA
accccuggaccgugagcucc

SEQ ID NO: 22682 - RNA, 20 nt, Artificial Sequence
  GATA2 Guide RNA
accgugagcuccuucuccaa

SEQ ID NO: 22683 - RNA, 20 nt, Artificial Sequence
  GATA2 Guide RNA
agaaggagcucacgguccag

SEQ ID NO: 22684 - RNA, 20 nt, Artificial Sequence
  GATA2 Guide RNA
agcucacgguccagggguug

SEQ ID NO: 22685 - RNA, 20 nt, Artificial Sequence
  GATA2 Guide RNA
agcuccuucuccaagacgcc

SEQ ID NO: 22686 - RNA, 20 nt, Artificial Sequence
  GATA2 Guide RNA
aggagcucacgguccagggg

SEQ ID NO: 22687 - RNA, 20 nt, Artificial Sequence
  GATA2 Guide RNA
aguggcgucuuggagaagga

SEQ ID NO: 22688 - RNA, 20 nt, Artificial Sequence
  GATA2 Guide RNA
caaccccuggaccgugagcu

SEQ ID NO: 22689 - RNA, 20 nt, Artificial Sequence
  GATA2 Guide RNA
cacaaccccuggaccgugag

SEQ ID NO: 22690 - RNA, 20 nt, Artificial Sequence
  GATA2 Guide RNA
caguggcgucuuggagaagg

SEQ ID NO: 22691 - RNA, 20 nt, Artificial Sequence
  GATA2 Guide RNA
ccacaaccccuggaccguga

SEQ ID NO: 22692 - RNA, 20 nt, Artificial Sequence
  GATA2 Guide RNA
ccccuggaccgugagcuccu

SEQ ID NO: 22693 - RNA, 20 nt, Artificial Sequence
  GATA2 Guide RNA
cccuggaccgugagcuccuu

SEQ ID NO: 22694 - RNA, 20 nt, Artificial Sequence
  GATA2 Guide RNA
ccgugagcuccuucuccaag

SEQ ID NO: 22695 - RNA, 20 nt, Artificial Sequence
  GATA2 Guide RNA
ccuggaccgugagcuccuuc

SEQ ID NO: 22696 - RNA, 20 nt, Artificial Sequence
  GATA2 Guide RNA
cgucuuggagaaggagcuca

SEQ ID NO: 22697 - RNA, 20 nt, Artificial Sequence
  GATA2 Guide RNA
cgugagcuccuucuccaaga

SEQ ID NO: 22698 - RNA, 20 nt, Artificial Sequence
  GATA2 Guide RNA
cuccuucuccaagacgccac

SEQ ID NO: 22699 - RNA, 20 nt, Artificial Sequence
  GATA2 Guide RNA
cuggaccgugagcuccuucu

SEQ ID NO: 22700 - RNA, 20 nt, Artificial Sequence
  GATA2 Guide RNA
cuuggagaaggagcucacgg

SEQ ID NO: 22701 - RNA, 20 nt, Artificial Sequence
  GATA2 Guide RNA
gaaggagcucacgguccagg

SEQ ID NO: 22702 - RNA, 20 nt, Artificial Sequence
  GATA2 Guide RNA
gaccgugagcuccuucucca

SEQ ID NO: 22703 - RNA, 20 nt, Artificial Sequence
  GATA2 Guide RNA
gagaaggagcucacggucca

SEQ ID NO: 22704 - RNA, 20 nt, Artificial Sequence
  GATA2 Guide RNA
gagcucacgguccagggguu

SEQ ID NO: 22705 - RNA, 20 nt, Artificial Sequence
  GATA2 Guide RNA
gagcuccuucuccaagacgc

SEQ ID NO: 22706 - RNA, 20 nt, Artificial Sequence
  GATA2 Guide RNA
gcaguggcgucuuggagaag

SEQ ID NO: 22707 - RNA, 20 nt, Artificial Sequence
  GATA2 Guide RNA
gcgucuuggagaaggagcuc

SEQ ID NO: 22708 - RNA, 20 nt, Artificial Sequence
  GATA2 Guide RNA
gcuccuucuccaagacgcca

SEQ ID NO: 22709 - RNA, 20 nt, Artificial Sequence
  GATA2 Guide RNA
ggaccgugagcuccuucucc

SEQ ID NO: 22710 - RNA, 20 nt, Artificial Sequence
  GATA2 Guide RNA
ggagaaggagcucacggucc

SEQ ID NO: 22711 - RNA, 20 nt, Artificial Sequence
  GATA2 Guide RNA
ggagcucacgguccaggggu

SEQ ID NO: 22712 - RNA, 20 nt, Artificial Sequence
  GATA2 Guide RNA
ggcgucuuggagaaggagcu

SEQ ID NO: 22713 - RNA, 20 nt, Artificial Sequence
  GATA2 Guide RNA
gucuuggagaaggagcucac

SEQ ID NO: 22714 - RNA, 20 nt, Artificial Sequence
  GATA2 Guide RNA
gugagcuccuucuccaagac

SEQ ID NO: 22715 - RNA, 20 nt, Artificial Sequence
  GATA2 Guide RNA
guggcgucuuggagaaggag

SEQ ID NO: 22716 - RNA, 20 nt, Artificial Sequence
  GATA2 Guide RNA
ucuuggagaaggagcucacg

SEQ ID NO: 22717 - RNA, 20 nt, Artificial Sequence
  GATA2 Guide RNA
ugagcuccuucuccaagacg

SEQ ID NO: 22718 - RNA, 20 nt, Artificial Sequence
  GATA2 Guide RNA
ugcaguggcgucuuggagaa

SEQ ID NO: 22719 - RNA, 20 nt, Artificial Sequence
  GATA2 Guide RNA
uggaccgugagcuccuucuc

SEQ ID NO: 22720 - RNA, 20 nt, Artificial Sequence
  GATA2 Guide RNA
uggagaaggagcucacgguc

SEQ ID NO: 22721 - RNA, 20 nt, Artificial Sequence
  GATA2 Guide RNA
uggcgucuuggagaaggagc

SEQ ID NO: 22722 - RNA, 20 nt, Artificial Sequence
  GATA2 Guide RNA
uuggagaaggagcucacggu

SEQ ID NO: 22723 - RNA, 21 nt, Artificial Sequence
  GATA2 Guide RNA
aaccccuggaccgugagcucc

SEQ ID NO: 22724 - RNA, 21 nt, Artificial Sequence
  GATA2 Guide RNA
aaggagcucacgguccagggg

SEQ ID NO: 22725 - RNA, 21 nt, Artificial Sequence
  GATA2 Guide RNA
acaaccccuggaccgugagcu

SEQ ID NO: 22726 - RNA, 21 nt, Artificial Sequence
  GATA2 Guide RNA
accacaaccccuggaccguga

SEQ ID NO: 22727 - RNA, 21 nt, Artificial Sequence
  GATA2 Guide RNA
accccuggaccgugagcuccu

SEQ ID NO: 22728 - RNA, 21 nt, Artificial Sequence
  GATA2 Guide RNA
accgugagcuccuucuccaag

SEQ ID NO: 22729 - RNA, 21 nt, Artificial Sequence
  GATA2 Guide RNA
agaaggagcucacgguccagg

SEQ ID NO: 22730 - RNA, 21 nt, Artificial Sequence
  GATA2 Guide RNA
agcucacgguccagggguugu

SEQ ID NO: 22731 - RNA, 21 nt, Artificial Sequence
  GATA2 Guide RNA
agcuccuucuccaagacgcca

SEQ ID NO: 22732 - RNA, 21 nt, Artificial Sequence
  GATA2 Guide RNA
aggagcucacgguccaggggu

SEQ ID NO: 22733 - RNA, 21 nt, Artificial Sequence
  GATA2 Guide RNA
aguggcgucuuggagaaggag

SEQ ID NO: 22734 - RNA, 21 nt, Artificial Sequence
  GATA2 Guide RNA
caaccccuggaccgugagcuc

SEQ ID NO: 22735 - RNA, 21 nt, Artificial Sequence
  GATA2 Guide RNA
cacaaccccuggaccgugagc

SEQ ID NO: 22736 - RNA, 21 nt, Artificial Sequence
  GATA2 Guide RNA
caccacaaccccuggaccgug

SEQ ID NO: 22737 - RNA, 21 nt, Artificial Sequence
  GATA2 Guide RNA
caguggcgucuuggagaagga

SEQ ID NO: 22738 - RNA, 21 nt, Artificial Sequence
  GATA2 Guide RNA
ccacaaccccuggaccgugag

SEQ ID NO: 22739 - RNA, 21 nt, Artificial Sequence
  GATA2 Guide RNA
ccccuggaccgugagcuccuu

SEQ ID NO: 22740 - RNA, 21 nt, Artificial Sequence
  GATA2 Guide RNA
cccuggaccgugagcuccuuc

SEQ ID NO: 22741 - RNA, 21 nt, Artificial Sequence
  GATA2 Guide RNA
ccgugagcuccuucuccaaga

SEQ ID NO: 22742 - RNA, 21 nt, Artificial Sequence
  GATA2 Guide RNA
ccuggaccgugagcuccuucu

SEQ ID NO: 22743 - RNA, 21 nt, Artificial Sequence
  GATA2 Guide RNA
cgucuuggagaaggagcucac

SEQ ID NO: 22744 - RNA, 21 nt, Artificial Sequence
  GATA2 Guide RNA
cgugagcuccuucuccaagac

SEQ ID NO: 22745 - RNA, 21 nt, Artificial Sequence
  GATA2 Guide RNA
cuccuucuccaagacgccacu

SEQ ID NO: 22746 - RNA, 21 nt, Artificial Sequence
  GATA2 Guide RNA
cuggaccgugagcuccuucuc

SEQ ID NO: 22747 - RNA, 21 nt, Artificial Sequence
  GATA2 Guide RNA
cuuggagaaggagcucacggu

SEQ ID NO: 22748 - RNA, 21 nt, Artificial Sequence
  GATA2 Guide RNA
gaaggagcucacgguccaggg

SEQ ID NO: 22749 - RNA, 21 nt, Artificial Sequence
  GATA2 Guide RNA
gaccgugagcuccuucuccaa

SEQ ID NO: 22750 - RNA, 21 nt, Artificial Sequence
  GATA2 Guide RNA
gagaaggagcucacgguccag

SEQ ID NO: 22751 - RNA, 21 nt, Artificial Sequence
  GATA2 Guide RNA
gagcucacgguccagggguug

SEQ ID NO: 22752 - RNA, 21 nt, Artificial Sequence
  GATA2 Guide RNA
gagcuccuucuccaagacgcc

SEQ ID NO: 22753 - RNA, 21 nt, Artificial Sequence
  GATA2 Guide RNA
gcaguggcgucuuggagaagg

SEQ ID NO: 22754 - RNA, 21 nt, Artificial Sequence
  GATA2 Guide RNA
gcgucuuggagaaggagcuca

SEQ ID NO: 22755 - RNA, 21 nt, Artificial Sequence
  GATA2 Guide RNA
gcuccuucuccaagacgccac

SEQ ID NO: 22756 - RNA, 21 nt, Artificial Sequence
  GATA2 Guide RNA
ggaccgugagcuccuucucca

SEQ ID NO: 22757 - RNA, 21 nt, Artificial Sequence
  GATA2 Guide RNA
ggagaaggagcucacggucca

SEQ ID NO: 22758 - RNA, 21 nt, Artificial Sequence
  GATA2 Guide RNA
ggagcucacgguccagggguu

SEQ ID NO: 22759 - RNA, 21 nt, Artificial Sequence
  GATA2 Guide RNA
ggcgucuuggagaaggagcuc

SEQ ID NO: 22760 - RNA, 21 nt, Artificial Sequence
  GATA2 Guide RNA
gucuuggagaaggagcucacg

SEQ ID NO: 22761 - RNA, 21 nt, Artificial Sequence
  GATA2 Guide RNA
gugagcuccuucuccaagacg

SEQ ID NO: 22762 - RNA, 21 nt, Artificial Sequence
  GATA2 Guide RNA
gugcaguggcgucuuggagaa

SEQ ID NO: 22763 - RNA, 21 nt, Artificial Sequence
  GATA2 Guide RNA
guggcgucuuggagaaggagc

SEQ ID NO: 22764 - RNA, 21 nt, Artificial Sequence
  GATA2 Guide RNA
ucuuggagaaggagcucacgg

SEQ ID NO: 22765 - RNA, 21 nt, Artificial Sequence
  GATA2 Guide RNA
ugagcuccuucuccaagacgc

SEQ ID NO: 22766 - RNA, 21 nt, Artificial Sequence
  GATA2 Guide RNA
ugcaguggcgucuuggagaag

SEQ ID NO: 22767 - RNA, 21 nt, Artificial Sequence
  GATA2 Guide RNA
uggaccgugagcuccuucucc

SEQ ID NO: 22768 - RNA, 21 nt, Artificial Sequence
  GATA2 Guide RNA
uggagaaggagcucacggucc

SEQ ID NO: 22769 - RNA, 21 nt, Artificial Sequence
  GATA2 Guide RNA
uggcgucuuggagaaggagcu

SEQ ID NO: 22770 - RNA, 21 nt, Artificial Sequence
  GATA2 Guide RNA
uuggagaaggagcucacgguc

SEQ ID NO: 22771 - RNA, 22 nt, Artificial Sequence
  GATA2 Guide RNA
aaccccuggaccgugagcuccu

SEQ ID NO: 22772 - RNA, 22 nt, Artificial Sequence
  GATA2 Guide RNA
aaggagcucacgguccaggggu

SEQ ID NO: 22773 - RNA, 22 nt, Artificial Sequence
  GATA2 Guide RNA
acaaccccuggaccgugagcuc

SEQ ID NO: 22774 - RNA, 22 nt, Artificial Sequence
  GATA2 Guide RNA
accacaaccccuggaccgugag

SEQ ID NO: 22775 - RNA, 22 nt, Artificial Sequence
  GATA2 Guide RNA
accccuggaccgugagcuccuu

SEQ ID NO: 22776 - RNA, 22 nt, Artificial Sequence
  GATA2 Guide RNA
accgugagcuccuucuccaaga

SEQ ID NO: 22777 - RNA, 22 nt, Artificial Sequence
  GATA2 Guide RNA
agaaggagcucacgguccaggg

SEQ ID NO: 22778 - RNA, 22 nt, Artificial Sequence
  GATA2 Guide RNA
agcucacgguccagggguugug

SEQ ID NO: 22779 - RNA, 22 nt, Artificial Sequence
  GATA2 Guide RNA
agcuccuucuccaagacgccac

SEQ ID NO: 22780 - RNA, 22 nt, Artificial Sequence
  GATA2 Guide RNA
aggagcucacgguccagggguu

SEQ ID NO: 22781 - RNA, 22 nt, Artificial Sequence
  GATA2 Guide RNA
aguggcgucuuggagaaggagc

SEQ ID NO: 22782 - RNA, 22 nt, Artificial Sequence
  GATA2 Guide RNA
caaccccuggaccgugagcucc

SEQ ID NO: 22783 - RNA, 22 nt, Artificial Sequence
  GATA2 Guide RNA
cacaaccccuggaccgugagcu

SEQ ID NO: 22784 - RNA, 22 nt, Artificial Sequence
  GATA2 Guide RNA
caccacaaccccuggaccguga

SEQ ID NO: 22785 - RNA, 22 nt, Artificial Sequence
  GATA2 Guide RNA
caguggcgucuuggagaaggag

SEQ ID NO: 22786 - RNA, 22 nt, Artificial Sequence
  GATA2 Guide RNA
ccacaaccccuggaccgugagc

SEQ ID NO: 22787 - RNA, 22 nt, Artificial Sequence
  GATA2 Guide RNA
ccaccacaaccccuggaccgug

SEQ ID NO: 22788 - RNA, 22 nt, Artificial Sequence
  GATA2 Guide RNA
ccccuggaccgugagcuccuuc

SEQ ID NO: 22789 - RNA, 22 nt, Artificial Sequence
  GATA2 Guide RNA
cccuggaccgugagcuccuucu

SEQ ID NO: 22790 - RNA, 22 nt, Artificial Sequence
  GATA2 Guide RNA
ccgugagcuccuucuccaagac

SEQ ID NO: 22791 - RNA, 22 nt, Artificial Sequence
  GATA2 Guide RNA
ccuggaccgugagcuccuucuc

SEQ ID NO: 22792 - RNA, 22 nt, Artificial Sequence
  GATA2 Guide RNA
cgucuuggagaaggagcucacg

SEQ ID NO: 22793 - RNA, 22 nt, Artificial Sequence
  GATA2 Guide RNA
cgugagcuccuucuccaagacg

SEQ ID NO: 22794 - RNA, 22 nt, Artificial Sequence
  GATA2 Guide RNA
cuccuucuccaagacgccacug

SEQ ID NO: 22795 - RNA, 22 nt, Artificial Sequence
  GATA2 Guide RNA
cuggaccgugagcuccuucucc

SEQ ID NO: 22796 - RNA, 22 nt, Artificial Sequence
  GATA2 Guide RNA
cuuggagaaggagcucacgguc

SEQ ID NO: 22797 - RNA, 22 nt, Artificial Sequence
  GATA2 Guide RNA
gaaggagcucacgguccagggg

SEQ ID NO: 22798 - RNA, 22 nt, Artificial Sequence
  GATA2 Guide RNA
gaccgugagcuccuucuccaag

SEQ ID NO: 22799 - RNA, 22 nt, Artificial Sequence
  GATA2 Guide RNA
gagaaggagcucacgguccagg

SEQ ID NO: 22800 - RNA, 22 nt, Artificial Sequence
  GATA2 Guide RNA
gagcucacgguccagggguugu

SEQ ID NO: 22801 - RNA, 22 nt, Artificial Sequence
  GATA2 Guide RNA
gagcuccuucuccaagacgcca

SEQ ID NO: 22802 - RNA, 22 nt, Artificial Sequence
  GATA2 Guide RNA
gcaguggcgucuuggagaagga

SEQ ID NO: 22803 - RNA, 22 nt, Artificial Sequence
  GATA2 Guide RNA
gcgucuuggagaaggagcucac

SEQ ID NO: 22804 - RNA, 22 nt, Artificial Sequence
  GATA2 Guide RNA
gcuccuucuccaagacgccacu

SEQ ID NO: 22805 - RNA, 22 nt, Artificial Sequence
  GATA2 Guide RNA
ggaccgugagcuccuucuccaa

SEQ ID NO: 22806 - RNA, 22 nt, Artificial Sequence
  GATA2 Guide RNA
ggagaaggagcucacgguccag

SEQ ID NO: 22807 - RNA, 22 nt, Artificial Sequence
  GATA2 Guide RNA
ggagcucacgguccagggguug

SEQ ID NO: 22808 - RNA, 22 nt, Artificial Sequence
  GATA2 Guide RNA
ggcgucuuggagaaggagcuca

SEQ ID NO: 22809 - RNA, 22 nt, Artificial Sequence
  GATA2 Guide RNA
ggugcaguggcgucuuggagaa

SEQ ID NO: 22810 - RNA, 22 nt, Artificial Sequence
  GATA2 Guide RNA
gucuuggagaaggagcucacgg

SEQ ID NO: 22811 - RNA, 22 nt, Artificial Sequence
  GATA2 Guide RNA
gugagcuccuucuccaagacgc

SEQ ID NO: 22812 - RNA, 22 nt, Artificial Sequence
  GATA2 Guide RNA
gugcaguggcgucuuggagaag

SEQ ID NO: 22813 - RNA, 22 nt, Artificial Sequence
  GATA2 Guide RNA
guggcgucuuggagaaggagcu

SEQ ID NO: 22814 - RNA, 22 nt, Artificial Sequence
  GATA2 Guide RNA
ucuuggagaaggagcucacggu

SEQ ID NO: 22815 - RNA, 22 nt, Artificial Sequence
  GATA2 Guide RNA
ugagcuccuucuccaagacgcc

SEQ ID NO: 22816 - RNA, 22 nt, Artificial Sequence
  GATA2 Guide RNA
ugcaguggcgucuuggagaagg

SEQ ID NO: 22817 - RNA, 22 nt, Artificial Sequence
  GATA2 Guide RNA
uggaccgugagcuccuucucca

SEQ ID NO: 22818 - RNA, 22 nt, Artificial Sequence
  GATA2 Guide RNA
uggagaaggagcucacggucca

SEQ ID NO: 22819 - RNA, 22 nt, Artificial Sequence
  GATA2 Guide RNA
uggcgucuuggagaaggagcuc

SEQ ID NO: 22820 - RNA, 22 nt, Artificial Sequence
  GATA2 Guide RNA
uuggagaaggagcucacggucc

SEQ ID NO: 22821 - RNA, 20 nt, Artificial Sequence
  GATA2 Guide RNA
aaccccuuggaccgugagcc

SEQ ID NO: 22822 - RNA, 20 nt, Artificial Sequence
  GATA2 Guide RNA
aaggggcucacgguccaagg

SEQ ID NO: 22823 - RNA, 20 nt, Artificial Sequence
  GATA2 Guide RNA
aagggguugugguggugggc

SEQ ID NO: 22824 - RNA, 20 nt, Artificial Sequence
  GATA2 Guide RNA
acaaccccuuggaccgugag

SEQ ID NO: 22825 - RNA, 20 nt, Artificial Sequence
  GATA2 Guide RNA
accacaaccccuuggaccgu

SEQ ID NO: 22826 - RNA, 20 nt, Artificial Sequence
  GATA2 Guide RNA
accaccacaaccccuuggac

SEQ ID NO: 22827 - RNA, 20 nt, Artificial Sequence
  GATA2 Guide RNA
accccuuggaccgugagccc

SEQ ID NO: 22828 - RNA, 20 nt, Artificial Sequence
  GATA2 Guide RNA
acgguccaagggguuguggu

SEQ ID NO: 22829 - RNA, 20 nt, Artificial Sequence
  GATA2 Guide RNA
agaaggggcucacgguccaa

SEQ ID NO: 22830 - RNA, 20 nt, Artificial Sequence
  GATA2 Guide RNA
aggggcucacgguccaaggg

SEQ ID NO: 22831 - RNA, 20 nt, Artificial Sequence
  GATA2 Guide RNA
agggguugugguggugggcc

SEQ ID NO: 22832 - RNA, 20 nt, Artificial Sequence
  GATA2 Guide RNA
caaccccuuggaccgugagc

SEQ ID NO: 22833 - RNA, 20 nt, Artificial Sequence
  GATA2 Guide RNA
caagggguuguggugguggg

SEQ ID NO: 22834 - RNA, 20 nt, Artificial Sequence
  GATA2 Guide RNA
cacaaccccuuggaccguga

SEQ ID NO: 22835 - RNA, 20 nt, Artificial Sequence
  GATA2 Guide RNA
caccacaaccccuuggaccg

SEQ ID NO: 22836 - RNA, 20 nt, Artificial Sequence
  GATA2 Guide RNA
caccaccacaaccccuugga

SEQ ID NO: 22837 - RNA, 20 nt, Artificial Sequence
  GATA2 Guide RNA
cacgguccaagggguugugg

SEQ ID NO: 22838 - RNA, 20 nt, Artificial Sequence
  GATA2 Guide RNA
ccaagggguugugguggugg

SEQ ID NO: 22839 - RNA, 20 nt, Artificial Sequence
  GATA2 Guide RNA
ccacaaccccuuggaccgug

SEQ ID NO: 22840 - RNA, 20 nt, Artificial Sequence
  GATA2 Guide RNA
ccaccacaaccccuuggacc

SEQ ID NO: 22841 - RNA, 20 nt, Artificial Sequence
  GATA2 Guide RNA
ccaccaccacaaccccuugg

SEQ ID NO: 22842 - RNA, 20 nt, Artificial Sequence
  GATA2 Guide RNA
cccaccaccacaaccccuug

SEQ ID NO: 22843 - RNA, 20 nt, Artificial Sequence
  GATA2 Guide RNA
ccccuuggaccgugagcccc

SEQ ID NO: 22844 - RNA, 20 nt, Artificial Sequence
  GATA2 Guide RNA
cccuuggaccgugagccccu

SEQ ID NO: 22845 - RNA, 20 nt, Artificial Sequence
  GATA2 Guide RNA
ccuuggaccgugagccccuu

SEQ ID NO: 22846 - RNA, 20 nt, Artificial Sequence
  GATA2 Guide RNA
cggcccaccaccacaacccc

SEQ ID NO: 22847 - RNA, 20 nt, Artificial Sequence
  GATA2 Guide RNA
cgguccaagggguuguggug

SEQ ID NO: 22848 - RNA, 20 nt, Artificial Sequence
  GATA2 Guide RNA
cucacgguccaagggguugu

SEQ ID NO: 22849 - RNA, 20 nt, Artificial Sequence
  GATA2 Guide RNA
cugcggcccaccaccacaac

SEQ ID NO: 22850 - RNA, 20 nt, Artificial Sequence
  GATA2 Guide RNA
cuuggaccgugagccccuuc

SEQ ID NO: 22851 - RNA, 20 nt, Artificial Sequence
  GATA2 Guide RNA
gaaggggcucacgguccaag

SEQ ID NO: 22852 - RNA, 20 nt, Artificial Sequence
  GATA2 Guide RNA
gagaaggggcucacggucca

SEQ ID NO: 22853 - RNA, 20 nt, Artificial Sequence
  GATA2 Guide RNA
gcccaccaccacaaccccuu

SEQ ID NO: 22854 - RNA, 20 nt, Artificial Sequence
  GATA2 Guide RNA
gcggcccaccaccacaaccc

SEQ ID NO: 22855 - RNA, 20 nt, Artificial Sequence
  GATA2 Guide RNA
gcucacgguccaagggguug

SEQ ID NO: 22856 - RNA, 20 nt, Artificial Sequence
  GATA2 Guide RNA
gcugcggcccaccaccacaa

SEQ ID NO: 22857 - RNA, 20 nt, Artificial Sequence
  GATA2 Guide RNA
ggagaaggggcucacggucc

SEQ ID NO: 22858 - RNA, 20 nt, Artificial Sequence
  GATA2 Guide RNA
ggcccaccaccacaaccccu

SEQ ID NO: 22859 - RNA, 20 nt, Artificial Sequence
  GATA2 Guide RNA
ggcucacgguccaagggguu

SEQ ID NO: 22860 - RNA, 20 nt, Artificial Sequence
  GATA2 Guide RNA
gggcucacgguccaaggggu

SEQ ID NO: 22861 - RNA, 20 nt, Artificial Sequence
  GATA2 Guide RNA
ggggcucacgguccaagggg

SEQ ID NO: 22862 - RNA, 20 nt, Artificial Sequence
  GATA2 Guide RNA
gggguugugguggugggccg

SEQ ID NO: 22863 - RNA, 20 nt, Artificial Sequence
  GATA2 Guide RNA
gguccaagggguuguggugg

SEQ ID NO: 22864 - RNA, 20 nt, Artificial Sequence
  GATA2 Guide RNA
guccaagggguugugguggu

SEQ ID NO: 22865 - RNA, 20 nt, Artificial Sequence
  GATA2 Guide RNA
ucacgguccaagggguugug

SEQ ID NO: 22866 - RNA, 20 nt, Artificial Sequence
  GATA2 Guide RNA
uccaagggguugugguggug

SEQ ID NO: 22867 - RNA, 20 nt, Artificial Sequence
  GATA2 Guide RNA
ugcggcccaccaccacaacc

SEQ ID NO: 22868 - RNA, 20 nt, Artificial Sequence
  GATA2 Guide RNA
uggagaaggggcucacgguc

SEQ ID NO: 22869 - RNA, 21 nt, Artificial Sequence
  GATA2 Guide RNA
aaccccuuggaccgugagccc

SEQ ID NO: 22870 - RNA, 21 nt, Artificial Sequence
  GATA2 Guide RNA
aaggggcucacgguccaaggg

SEQ ID NO: 22871 - RNA, 21 nt, Artificial Sequence
  GATA2 Guide RNA
aagggguugugguggugggcc

SEQ ID NO: 22872 - RNA, 21 nt, Artificial Sequence
  GATA2 Guide RNA
acaaccccuuggaccgugagc

SEQ ID NO: 22873 - RNA, 21 nt, Artificial Sequence
  GATA2 Guide RNA
accacaaccccuuggaccgug

SEQ ID NO: 22874 - RNA, 21 nt, Artificial Sequence
  GATA2 Guide RNA
accaccacaaccccuuggacc

SEQ ID NO: 22875 - RNA, 21 nt, Artificial Sequence
  GATA2 Guide RNA
accccuuggaccgugagcccc

SEQ ID NO: 22876 - RNA, 21 nt, Artificial Sequence
  GATA2 Guide RNA
acgguccaagggguuguggug

SEQ ID NO: 22877 - RNA, 21 nt, Artificial Sequence
  GATA2 Guide RNA
agaaggggcucacgguccaag

SEQ ID NO: 22878 - RNA, 21 nt, Artificial Sequence
  GATA2 Guide RNA
aggggcucacgguccaagggg

SEQ ID NO: 22879 - RNA, 21 nt, Artificial Sequence
  GATA2 Guide RNA
agggguugugguggugggccg

SEQ ID NO: 22880 - RNA, 21 nt, Artificial Sequence
  GATA2 Guide RNA
caaccccuuggaccgugagcc

SEQ ID NO: 22881 - RNA, 21 nt, Artificial Sequence
  GATA2 Guide RNA
caagggguugugguggugggc

SEQ ID NO: 22882 - RNA, 21 nt, Artificial Sequence
  GATA2 Guide RNA
cacaaccccuuggaccgugag

SEQ ID NO: 22883 - RNA, 21 nt, Artificial Sequence
  GATA2 Guide RNA
caccacaaccccuuggaccgu

SEQ ID NO: 22884 - RNA, 21 nt, Artificial Sequence
  GATA2 Guide RNA
caccaccacaaccccuuggac

SEQ ID NO: 22885 - RNA, 21 nt, Artificial Sequence
  GATA2 Guide RNA
cacgguccaagggguuguggu

SEQ ID NO: 22886 - RNA, 21 nt, Artificial Sequence
  GATA2 Guide RNA
ccaagggguuguggugguggg

SEQ ID NO: 22887 - RNA, 21 nt, Artificial Sequence
  GATA2 Guide RNA
ccacaaccccuuggaccguga

SEQ ID NO: 22888 - RNA, 21 nt, Artificial Sequence
  GATA2 Guide RNA
ccaccacaaccccuuggaccg

SEQ ID NO: 22889 - RNA, 21 nt, Artificial Sequence
  GATA2 Guide RNA
ccaccaccacaaccccuugga

SEQ ID NO: 22890 - RNA, 21 nt, Artificial Sequence
  GATA2 Guide RNA
cccaccaccacaaccccuugg

SEQ ID NO: 22891 - RNA, 21 nt, Artificial Sequence
  GATA2 Guide RNA
ccccuuggaccgugagccccu

SEQ ID NO: 22892 - RNA, 21 nt, Artificial Sequence
  GATA2 Guide RNA
cccuuggaccgugagccccuu

SEQ ID NO: 22893 - RNA, 21 nt, Artificial Sequence
  GATA2 Guide RNA
ccuuggaccgugagccccuuc

SEQ ID NO: 22894 - RNA, 21 nt, Artificial Sequence
  GATA2 Guide RNA
cgcugcggcccaccaccacaa

SEQ ID NO: 22895 - RNA, 21 nt, Artificial Sequence
  GATA2 Guide RNA
cggcccaccaccacaaccccu

SEQ ID NO: 22896 - RNA, 21 nt, Artificial Sequence
  GATA2 Guide RNA
cgguccaagggguuguggugg

SEQ ID NO: 22897 - RNA, 21 nt, Artificial Sequence
  GATA2 Guide RNA
cucacgguccaagggguugug

SEQ ID NO: 22898 - RNA, 21 nt, Artificial Sequence
  GATA2 Guide RNA
cugcggcccaccaccacaacc

SEQ ID NO: 22899 - RNA, 21 nt, Artificial Sequence
  GATA2 Guide RNA
cuuggaccgugagccccuucu

SEQ ID NO: 22900 - RNA, 21 nt, Artificial Sequence
  GATA2 Guide RNA
gaaggggcucacgguccaagg

SEQ ID NO: 22901 - RNA, 21 nt, Artificial Sequence
  GATA2 Guide RNA
gagaaggggcucacgguccaa

SEQ ID NO: 22902 - RNA, 21 nt, Artificial Sequence
  GATA2 Guide RNA
gcccaccaccacaaccccuug

SEQ ID NO: 22903 - RNA, 21 nt, Artificial Sequence
  GATA2 Guide RNA
gcggcccaccaccacaacccc

SEQ ID NO: 22904 - RNA, 21 nt, Artificial Sequence
  GATA2 Guide RNA
gcucacgguccaagggguugu

SEQ ID NO: 22905 - RNA, 21 nt, Artificial Sequence
  GATA2 Guide RNA
gcugcggcccaccaccacaac

SEQ ID NO: 22906 - RNA, 21 nt, Artificial Sequence
  GATA2 Guide RNA
ggagaaggggcucacggucca

SEQ ID NO: 22907 - RNA, 21 nt, Artificial Sequence
  GATA2 Guide RNA
ggcccaccaccacaaccccuu

SEQ ID NO: 22908 - RNA, 21 nt, Artificial Sequence
  GATA2 Guide RNA
ggcucacgguccaagggguug

SEQ ID NO: 22909 - RNA, 21 nt, Artificial Sequence
  GATA2 Guide RNA
gggcucacgguccaagggguu

SEQ ID NO: 22910 - RNA, 21 nt, Artificial Sequence
  GATA2 Guide RNA
ggggcucacgguccaaggggu

SEQ ID NO: 22911 - RNA, 21 nt, Artificial Sequence
  GATA2 Guide RNA
gggguugugguggugggccgc

SEQ ID NO: 22912 - RNA, 21 nt, Artificial Sequence
  GATA2 Guide RNA
gguccaagggguugugguggu

SEQ ID NO: 22913 - RNA, 21 nt, Artificial Sequence
  GATA2 Guide RNA
guccaagggguugugguggug

SEQ ID NO: 22914 - RNA, 21 nt, Artificial Sequence
  GATA2 Guide RNA
ucacgguccaagggguugugg

SEQ ID NO: 22915 - RNA, 21 nt, Artificial Sequence
  GATA2 Guide RNA
uccaagggguugugguggugg

SEQ ID NO: 22916 - RNA, 21 nt, Artificial Sequence
  GATA2 Guide RNA
ugcggcccaccaccacaaccc

SEQ ID NO: 22917 - RNA, 21 nt, Artificial Sequence
  GATA2 Guide RNA
uggagaaggggcucacggucc

SEQ ID NO: 22918 - RNA, 21 nt, Artificial Sequence
  GATA2 Guide RNA
uuggagaaggggcucacgguc

SEQ ID NO: 22919 - RNA, 22 nt, Artificial Sequence
  GATA2 Guide RNA
aaccccuuggaccgugagcccc

SEQ ID NO: 22920 - RNA, 22 nt, Artificial Sequence
  GATA2 Guide RNA
aaggggcucacgguccaagggg

SEQ ID NO: 22921 - RNA, 22 nt, Artificial Sequence
  GATA2 Guide RNA
aagggguugugguggugggccg

SEQ ID NO: 22922 - RNA, 22 nt, Artificial Sequence
  GATA2 Guide RNA
acaaccccuuggaccgugagcc

SEQ ID NO: 22923 - RNA, 22 nt, Artificial Sequence
  GATA2 Guide RNA
accacaaccccuuggaccguga

SEQ ID NO: 22924 - RNA, 22 nt, Artificial Sequence
  GATA2 Guide RNA
accaccacaaccccuuggaccg

SEQ ID NO: 22925 - RNA, 22 nt, Artificial Sequence
  GATA2 Guide RNA
accccuuggaccgugagccccu

SEQ ID NO: 22926 - RNA, 22 nt, Artificial Sequence
  GATA2 Guide RNA
acgguccaagggguuguggugg

SEQ ID NO: 22927 - RNA, 22 nt, Artificial Sequence
  GATA2 Guide RNA
agaaggggcucacgguccaagg

SEQ ID NO: 22928 - RNA, 22 nt, Artificial Sequence
  GATA2 Guide RNA
aggggcucacgguccaaggggu

SEQ ID NO: 22929 - RNA, 22 nt, Artificial Sequence
  GATA2 Guide RNA
agggguugugguggugggccgc

SEQ ID NO: 22930 - RNA, 22 nt, Artificial Sequence
  GATA2 Guide RNA
caaccccuuggaccgugagccc

SEQ ID NO: 22931 - RNA, 22 nt, Artificial Sequence
  GATA2 Guide RNA
caagggguugugguggugggcc

SEQ ID NO: 22932 - RNA, 22 nt, Artificial Sequence
  GATA2 Guide RNA
cacaaccccuuggaccgugagc

SEQ ID NO: 22933 - RNA, 22 nt, Artificial Sequence
  GATA2 Guide RNA
caccacaaccccuuggaccgug

SEQ ID NO: 22934 - RNA, 22 nt, Artificial Sequence
  GATA2 Guide RNA
caccaccacaaccccuuggacc

SEQ ID NO: 22935 - RNA, 22 nt, Artificial Sequence
  GATA2 Guide RNA
cacgguccaagggguuguggug

SEQ ID NO: 22936 - RNA, 22 nt, Artificial Sequence
  GATA2 Guide RNA
ccaagggguugugguggugggc

SEQ ID NO: 22937 - RNA, 22 nt, Artificial Sequence
  GATA2 Guide RNA
ccacaaccccuuggaccgugag

SEQ ID NO: 22938 - RNA, 22 nt, Artificial Sequence
  GATA2 Guide RNA
ccaccacaaccccuuggaccgu

SEQ ID NO: 22939 - RNA, 22 nt, Artificial Sequence
  GATA2 Guide RNA
ccaccaccacaaccccuuggac

SEQ ID NO: 22940 - RNA, 22 nt, Artificial Sequence
  GATA2 Guide RNA
cccaccaccacaaccccuugga

SEQ ID NO: 22941 - RNA, 22 nt, Artificial Sequence
  GATA2 Guide RNA
ccccuuggaccgugagccccuu

SEQ ID NO: 22942 - RNA, 22 nt, Artificial Sequence
  GATA2 Guide RNA
cccuuggaccgugagccccuuc

SEQ ID NO: 22943 - RNA, 22 nt, Artificial Sequence
  GATA2 Guide RNA
ccgcugcggcccaccaccacaa

SEQ ID NO: 22944 - RNA, 22 nt, Artificial Sequence
  GATA2 Guide RNA
ccuuggaccgugagccccuucu

SEQ ID NO: 22945 - RNA, 22 nt, Artificial Sequence
  GATA2 Guide RNA
cgcugcggcccaccaccacaac

SEQ ID NO: 22946 - RNA, 22 nt, Artificial Sequence
  GATA2 Guide RNA
cggcccaccaccacaaccccuu

SEQ ID NO: 22947 - RNA, 22 nt, Artificial Sequence
  GATA2 Guide RNA
cgguccaagggguugugguggu

SEQ ID NO: 22948 - RNA, 22 nt, Artificial Sequence
  GATA2 Guide RNA
cucacgguccaagggguugugg

SEQ ID NO: 22949 - RNA, 22 nt, Artificial Sequence
  GATA2 Guide RNA
cugcggcccaccaccacaaccc

SEQ ID NO: 22950 - RNA, 22 nt, Artificial Sequence
  GATA2 Guide RNA
cuuggaccgugagccccuucuc

SEQ ID NO: 22951 - RNA, 22 nt, Artificial Sequence
  GATA2 Guide RNA
cuuggagaaggggcucacgguc

SEQ ID NO: 22952 - RNA, 22 nt, Artificial Sequence
  GATA2 Guide RNA
gaaggggcucacgguccaaggg

SEQ ID NO: 22953 - RNA, 22 nt, Artificial Sequence
  GATA2 Guide RNA
gagaaggggcucacgguccaag

SEQ ID NO: 22954 - RNA, 22 nt, Artificial Sequence
  GATA2 Guide RNA
gcccaccaccacaaccccuugg

SEQ ID NO: 22955 - RNA, 22 nt, Artificial Sequence
  GATA2 Guide RNA
gcggcccaccaccacaaccccu

SEQ ID NO: 22956 - RNA, 22 nt, Artificial Sequence
  GATA2 Guide RNA
gcucacgguccaagggguugug

SEQ ID NO: 22957 - RNA, 22 nt, Artificial Sequence
  GATA2 Guide RNA
gcugcggcccaccaccacaacc

SEQ ID NO: 22958 - RNA, 22 nt, Artificial Sequence
  GATA2 Guide RNA
ggagaaggggcucacgguccaa

SEQ ID NO: 22959 - RNA, 22 nt, Artificial Sequence
  GATA2 Guide RNA
ggcccaccaccacaaccccuug

SEQ ID NO: 22960 - RNA, 22 nt, Artificial Sequence
  GATA2 Guide RNA
ggcucacgguccaagggguugu

SEQ ID NO: 22961 - RNA, 22 nt, Artificial Sequence
  GATA2 Guide RNA
gggcucacgguccaagggguug

SEQ ID NO: 22962 - RNA, 22 nt, Artificial Sequence
  GATA2 Guide RNA
ggggcucacgguccaagggguu

SEQ ID NO: 22963 - RNA, 22 nt, Artificial Sequence
  GATA2 Guide RNA
gggguugugguggugggccgca

SEQ ID NO: 22964 - RNA, 22 nt, Artificial Sequence
  GATA2 Guide RNA
gguccaagggguugugguggug

SEQ ID NO: 22965 - RNA, 22 nt, Artificial Sequence
  GATA2 Guide RNA
guccaagggguugugguggugg

SEQ ID NO: 22966 - RNA, 22 nt, Artificial Sequence
  GATA2 Guide RNA
ucacgguccaagggguuguggu

SEQ ID NO: 22967 - RNA, 22 nt, Artificial Sequence
  GATA2 Guide RNA
uccaagggguuguggugguggg

SEQ ID NO: 22968 - RNA, 22 nt, Artificial Sequence
  GATA2 Guide RNA
ugcggcccaccaccacaacccc

SEQ ID NO: 22969 - RNA, 22 nt, Artificial Sequence
  GATA2 Guide RNA
uggagaaggggcucacggucca

SEQ ID NO: 22970 - RNA, 22 nt, Artificial Sequence
  GATA2 Guide RNA
uuggagaaggggcucacggucc

SEQ ID NO: 22971 - RNA, 20 nt, Artificial Sequence
  GATA2 Guide RNA
accaccgcaaccccuggacc

SEQ ID NO: 22972 - RNA, 20 nt, Artificial Sequence
  GATA2 Guide RNA
accgcaaccccuggaccgug

SEQ ID NO: 22973 - RNA, 20 nt, Artificial Sequence
  GATA2 Guide RNA
acgguccagggguugcggug

SEQ ID NO: 22974 - RNA, 20 nt, Artificial Sequence
  GATA2 Guide RNA
agggguugcgguggugggcc

SEQ ID NO: 22975 - RNA, 20 nt, Artificial Sequence
  GATA2 Guide RNA
caccaccgcaaccccuggac

SEQ ID NO: 22976 - RNA, 20 nt, Artificial Sequence
  GATA2 Guide RNA
caccgcaaccccuggaccgu

SEQ ID NO: 22977 - RNA, 20 nt, Artificial Sequence
  GATA2 Guide RNA
cacgguccagggguugcggu

SEQ ID NO: 22978 - RNA, 20 nt, Artificial Sequence
  GATA2 Guide RNA
cagggguugcgguggugggc

SEQ ID NO: 22979 - RNA, 20 nt, Artificial Sequence
  GATA2 Guide RNA
ccaccaccgcaaccccugga

SEQ ID NO: 22980 - RNA, 20 nt, Artificial Sequence
  GATA2 Guide RNA
ccaccgcaaccccuggaccg

SEQ ID NO: 22981 - RNA, 20 nt, Artificial Sequence
  GATA2 Guide RNA
ccagggguugcggugguggg

SEQ ID NO: 22982 - RNA, 20 nt, Artificial Sequence
  GATA2 Guide RNA
cccaccaccgcaaccccugg

SEQ ID NO: 22983 - RNA, 20 nt, Artificial Sequence
  GATA2 Guide RNA
ccgcaaccccuggaccguga

SEQ ID NO: 22984 - RNA, 20 nt, Artificial Sequence
  GATA2 Guide RNA
cgcaaccccuggaccgugag

SEQ ID NO: 22985 - RNA, 20 nt, Artificial Sequence
  GATA2 Guide RNA
cgcugcggcccaccaccgca

SEQ ID NO: 22986 - RNA, 20 nt, Artificial Sequence
  GATA2 Guide RNA
cggcccaccaccgcaacccc

SEQ ID NO: 22987 - RNA, 20 nt, Artificial Sequence
  GATA2 Guide RNA
cgguccagggguugcggugg

SEQ ID NO: 22988 - RNA, 20 nt, Artificial Sequence
  GATA2 Guide RNA
cucacgguccagggguugcg

SEQ ID NO: 22989 - RNA, 20 nt, Artificial Sequence
  GATA2 Guide RNA
cucugccgcugcggcccacc

SEQ ID NO: 22990 - RNA, 20 nt, Artificial Sequence
  GATA2 Guide RNA
cugccgcugcggcccaccac

SEQ ID NO: 22991 - RNA, 20 nt, Artificial Sequence
  GATA2 Guide RNA
cugcggcccaccaccgcaac

SEQ ID NO: 22992 - RNA, 20 nt, Artificial Sequence
  GATA2 Guide RNA
gcccaccaccgcaaccccug

SEQ ID NO: 22993 - RNA, 20 nt, Artificial Sequence
  GATA2 Guide RNA
gcggcccaccaccgcaaccc

SEQ ID NO: 22994 - RNA, 20 nt, Artificial Sequence
  GATA2 Guide RNA
gcucacgguccagggguugc

SEQ ID NO: 22995 - RNA, 20 nt, Artificial Sequence
  GATA2 Guide RNA
gcugcggcccaccaccgcaa

SEQ ID NO: 22996 - RNA, 20 nt, Artificial Sequence
  GATA2 Guide RNA
ggcccaccaccgcaaccccu

SEQ ID NO: 22997 - RNA, 20 nt, Artificial Sequence
  GATA2 Guide RNA
ggcucacgguccagggguug

SEQ ID NO: 22998 - RNA, 20 nt, Artificial Sequence
  GATA2 Guide RNA
gggcucacgguccagggguu

SEQ ID NO: 22999 - RNA, 20 nt, Artificial Sequence
  GATA2 Guide RNA
ggggcucacgguccaggggu

SEQ ID NO: 23000 - RNA, 20 nt, Artificial Sequence
  GATA2 Guide RNA
gggguugcgguggugggccg

SEQ ID NO: 23001 - RNA, 20 nt, Artificial Sequence
  GATA2 Guide RNA
ggguugcgguggugggccgc

SEQ ID NO: 23002 - RNA, 20 nt, Artificial Sequence
  GATA2 Guide RNA
gguccagggguugcgguggu

SEQ ID NO: 23003 - RNA, 20 nt, Artificial Sequence
  GATA2 Guide RNA
gguugcgguggugggccgca

SEQ ID NO: 23004 - RNA, 20 nt, Artificial Sequence
  GATA2 Guide RNA
guccagggguugcgguggug

SEQ ID NO: 23005 - RNA, 20 nt, Artificial Sequence
  GATA2 Guide RNA
guugcgguggugggccgcag

SEQ ID NO: 23006 - RNA, 20 nt, Artificial Sequence
  GATA2 Guide RNA
ucacgguccagggguugcgg

SEQ ID NO: 23007 - RNA, 20 nt, Artificial Sequence
  GATA2 Guide RNA
uccagggguugcgguggugg

SEQ ID NO: 23008 - RNA, 20 nt, Artificial Sequence
  GATA2 Guide RNA
ucugccgcugcggcccacca

SEQ ID NO: 23009 - RNA, 20 nt, Artificial Sequence
  GATA2 Guide RNA
ugccgcugcggcccaccacc

SEQ ID NO: 23010 - RNA, 20 nt, Artificial Sequence
  GATA2 Guide RNA
ugcggcccaccaccgcaacc

SEQ ID NO: 23011 - RNA, 20 nt, Artificial Sequence
  GATA2 Guide RNA
ugcgguggugggccgcagcg

SEQ ID NO: 23012 - RNA, 20 nt, Artificial Sequence
  GATA2 Guide RNA
uugcgguggugggccgcagc

SEQ ID NO: 23013 - RNA, 21 nt, Artificial Sequence
  GATA2 Guide RNA
accaccgcaaccccuggaccg

SEQ ID NO: 23014 - RNA, 21 nt, Artificial Sequence
  GATA2 Guide RNA
accgcaaccccuggaccguga

SEQ ID NO: 23015 - RNA, 21 nt, Artificial Sequence
  GATA2 Guide RNA
acgguccagggguugcggugg

SEQ ID NO: 23016 - RNA, 21 nt, Artificial Sequence
  GATA2 Guide RNA
aggggcucacgguccaggggu

SEQ ID NO: 23017 - RNA, 21 nt, Artificial Sequence
  GATA2 Guide RNA
agggguugcgguggugggccg

SEQ ID NO: 23018 - RNA, 21 nt, Artificial Sequence
  GATA2 Guide RNA
caccaccgcaaccccuggacc

SEQ ID NO: 23019 - RNA, 21 nt, Artificial Sequence
  GATA2 Guide RNA
caccgcaaccccuggaccgug

SEQ ID NO: 23020 - RNA, 21 nt, Artificial Sequence
  GATA2 Guide RNA
cacgguccagggguugcggug

SEQ ID NO: 23021 - RNA, 21 nt, Artificial Sequence
  GATA2 Guide RNA
cagggguugcgguggugggcc

SEQ ID NO: 23022 - RNA, 21 nt, Artificial Sequence
  GATA2 Guide RNA
ccaccaccgcaaccccuggac

SEQ ID NO: 23023 - RNA, 21 nt, Artificial Sequence
  GATA2 Guide RNA
ccaccgcaaccccuggaccgu

SEQ ID NO: 23024 - RNA, 21 nt, Artificial Sequence
  GATA2 Guide RNA
ccagggguugcgguggugggc

SEQ ID NO: 23025 - RNA, 21 nt, Artificial Sequence
  GATA2 Guide RNA
cccaccaccgcaaccccugga

SEQ ID NO: 23026 - RNA, 21 nt, Artificial Sequence
  GATA2 Guide RNA
ccgcaaccccuggaccgugag

SEQ ID NO: 23027 - RNA, 21 nt, Artificial Sequence
  GATA2 Guide RNA
cgcaaccccuggaccgugagc

SEQ ID NO: 23028 - RNA, 21 nt, Artificial Sequence
  GATA2 Guide RNA
cgcugcggcccaccaccgcaa

SEQ ID NO: 23029 - RNA, 21 nt, Artificial Sequence
  GATA2 Guide RNA
cggcccaccaccgcaaccccu

SEQ ID NO: 23030 - RNA, 21 nt, Artificial Sequence
  GATA2 Guide RNA
cgguccagggguugcgguggu

SEQ ID NO: 23031 - RNA, 21 nt, Artificial Sequence
  GATA2 Guide RNA
cucacgguccagggguugcgg

SEQ ID NO: 23032 - RNA, 21 nt, Artificial Sequence
  GATA2 Guide RNA
cucugccgcugcggcccacca

SEQ ID NO: 23033 - RNA, 21 nt, Artificial Sequence
  GATA2 Guide RNA
cugcggcccaccaccgcaacc

SEQ ID NO: 23034 - RNA, 21 nt, Artificial Sequence
  GATA2 Guide RNA
gcccaccaccgcaaccccugg

SEQ ID NO: 23035 - RNA, 21 nt, Artificial Sequence
  GATA2 Guide RNA
gcucacgguccagggguugcg

SEQ ID NO: 23036 - RNA, 21 nt, Artificial Sequence
  GATA2 Guide RNA
gcugcggcccaccaccgcaac

SEQ ID NO: 23037 - RNA, 21 nt, Artificial Sequence
  GATA2 Guide RNA
ggcccaccaccgcaaccccug

SEQ ID NO: 23038 - RNA, 21 nt, Artificial Sequence
  GATA2 Guide RNA
ggcucacgguccagggguugc

SEQ ID NO: 23039 - RNA, 21 nt, Artificial Sequence
  GATA2 Guide RNA
gggcucacgguccagggguug

SEQ ID NO: 23040 - RNA, 21 nt, Artificial Sequence
  GATA2 Guide RNA
ggggcucacgguccagggguu

SEQ ID NO: 23041 - RNA, 21 nt, Artificial Sequence
  GATA2 Guide RNA
ggguugcgguggugggccgca

SEQ ID NO: 23042 - RNA, 21 nt, Artificial Sequence
  GATA2 Guide RNA
gguccagggguugcgguggug

SEQ ID NO: 23043 - RNA, 21 nt, Artificial Sequence
  GATA2 Guide RNA
gguugcgguggugggccgcag

SEQ ID NO: 23044 - RNA, 21 nt, Artificial Sequence
  GATA2 Guide RNA
guccagggguugcgguggugg

SEQ ID NO: 23045 - RNA, 21 nt, Artificial Sequence
  GATA2 Guide RNA
guugcgguggugggccgcagc

SEQ ID NO: 23046 - RNA, 21 nt, Artificial Sequence
  GATA2 Guide RNA
ucacgguccagggguugcggu

SEQ ID NO: 23047 - RNA, 21 nt, Artificial Sequence
  GATA2 Guide RNA
uccagggguugcggugguggg

SEQ ID NO: 23048 - RNA, 21 nt, Artificial Sequence
  GATA2 Guide RNA
ucucugccgcugcggcccacc

SEQ ID NO: 23049 - RNA, 21 nt, Artificial Sequence
  GATA2 Guide RNA
ucugccgcugcggcccaccac

SEQ ID NO: 23050 - RNA, 21 nt, Artificial Sequence
  GATA2 Guide RNA
ugcggcccaccaccgcaaccc

SEQ ID NO: 23051 - RNA, 21 nt, Artificial Sequence
  GATA2 Guide RNA
uugcgguggugggccgcagcg

SEQ ID NO: 23052 - RNA, 22 nt, Artificial Sequence
  GATA2 Guide RNA
aaggggcucacgguccaggggu

SEQ ID NO: 23053 - RNA, 22 nt, Artificial Sequence
  GATA2 Guide RNA
accaccgcaaccccuggaccgu

SEQ ID NO: 23054 - RNA, 22 nt, Artificial Sequence
  GATA2 Guide RNA
accgcaaccccuggaccgugag

SEQ ID NO: 23055 - RNA, 22 nt, Artificial Sequence
  GATA2 Guide RNA
acgguccagggguugcgguggu

SEQ ID NO: 23056 - RNA, 22 nt, Artificial Sequence
  GATA2 Guide RNA
aggggcucacgguccagggguu

SEQ ID NO: 23057 - RNA, 22 nt, Artificial Sequence
  GATA2 Guide RNA
agggguugcgguggugggccgc

SEQ ID NO: 23058 - RNA, 22 nt, Artificial Sequence
  GATA2 Guide RNA
caccaccgcaaccccuggaccg

SEQ ID NO: 23059 - RNA, 22 nt, Artificial Sequence
  GATA2 Guide RNA
caccgcaaccccuggaccguga

SEQ ID NO: 23060 - RNA, 22 nt, Artificial Sequence
  GATA2 Guide RNA
cacgguccagggguugcggugg

SEQ ID NO: 23061 - RNA, 22 nt, Artificial Sequence
  GATA2 Guide RNA
cagggguugcgguggugggccg

SEQ ID NO: 23062 - RNA, 22 nt, Artificial Sequence
  GATA2 Guide RNA
ccaccaccgcaaccccuggacc

SEQ ID NO: 23063 - RNA, 22 nt, Artificial Sequence
  GATA2 Guide RNA
ccaccgcaaccccuggaccgug

SEQ ID NO: 23064 - RNA, 22 nt, Artificial Sequence
  GATA2 Guide RNA
ccagggguugcgguggugggcc

SEQ ID NO: 23065 - RNA, 22 nt, Artificial Sequence
  GATA2 Guide RNA
cccaccaccgcaaccccuggac

SEQ ID NO: 23066 - RNA, 22 nt, Artificial Sequence
  GATA2 Guide RNA
ccgcaaccccuggaccgugagc

SEQ ID NO: 23067 - RNA, 22 nt, Artificial Sequence
  GATA2 Guide RNA
ccgcugcggcccaccaccgcaa

SEQ ID NO: 23068 - RNA, 22 nt, Artificial Sequence
  GATA2 Guide RNA
cgcaaccccuggaccgugagcc

SEQ ID NO: 23069 - RNA, 22 nt, Artificial Sequence
  GATA2 Guide RNA
cgcugcggcccaccaccgcaac

SEQ ID NO: 23070 - RNA, 22 nt, Artificial Sequence
  GATA2 Guide RNA
cggcccaccaccgcaaccccug

SEQ ID NO: 23071 - RNA, 22 nt, Artificial Sequence
  GATA2 Guide RNA
cgguccagggguugcgguggug

SEQ ID NO: 23072 - RNA, 22 nt, Artificial Sequence
  GATA2 Guide RNA
cucacgguccagggguugcggu

SEQ ID NO: 23073 - RNA, 22 nt, Artificial Sequence
  GATA2 Guide RNA
cucucugccgcugcggcccacc

SEQ ID NO: 23074 - RNA, 22 nt, Artificial Sequence
  GATA2 Guide RNA
cucugccgcugcggcccaccac

SEQ ID NO: 23075 - RNA, 22 nt, Artificial Sequence
  GATA2 Guide RNA
cugcggcccaccaccgcaaccc

SEQ ID NO: 23076 - RNA, 22 nt, Artificial Sequence
  GATA2 Guide RNA
gcccaccaccgcaaccccugga

SEQ ID NO: 23077 - RNA, 22 nt, Artificial Sequence
  GATA2 Guide RNA
gcggcccaccaccgcaaccccu

SEQ ID NO: 23078 - RNA, 22 nt, Artificial Sequence
  GATA2 Guide RNA
gcucacgguccagggguugcgg

SEQ ID NO: 23079 - RNA, 22 nt, Artificial Sequence
  GATA2 Guide RNA
gcugcggcccaccaccgcaacc

SEQ ID NO: 23080 - RNA, 22 nt, Artificial Sequence
  GATA2 Guide RNA
ggcccaccaccgcaaccccugg

SEQ ID NO: 23081 - RNA, 22 nt, Artificial Sequence
  GATA2 Guide RNA
ggcucacgguccagggguugcg

SEQ ID NO: 23082 - RNA, 22 nt, Artificial Sequence
  GATA2 Guide RNA
gggcucacgguccagggguugc

SEQ ID NO: 23083 - RNA, 22 nt, Artificial Sequence
  GATA2 Guide RNA
ggggcucacgguccagggguug

SEQ ID NO: 23084 - RNA, 22 nt, Artificial Sequence
  GATA2 Guide RNA
gggguugcgguggugggccgca

SEQ ID NO: 23085 - RNA, 22 nt, Artificial Sequence
  GATA2 Guide RNA
ggguugcgguggugggccgcag

SEQ ID NO: 23086 - RNA, 22 nt, Artificial Sequence
  GATA2 Guide RNA
gguccagggguugcgguggugg

SEQ ID NO: 23087 - RNA, 22 nt, Artificial Sequence
  GATA2 Guide RNA
gguugcgguggugggccgcagc

SEQ ID NO: 23088 - RNA, 22 nt, Artificial Sequence
  GATA2 Guide RNA
guccagggguugcggugguggg

SEQ ID NO: 23089 - RNA, 22 nt, Artificial Sequence
  GATA2 Guide RNA
guugcgguggugggccgcagcg

SEQ ID NO: 23090 - RNA, 22 nt, Artificial Sequence
  GATA2 Guide RNA
ucacgguccagggguugcggug

SEQ ID NO: 23091 - RNA, 22 nt, Artificial Sequence
  GATA2 Guide RNA
uccagggguugcgguggugggc

SEQ ID NO: 23092 - RNA, 22 nt, Artificial Sequence
  GATA2 Guide RNA
ucucugccgcugcggcccacca

SEQ ID NO: 23093 - RNA, 22 nt, Artificial Sequence
  GATA2 Guide RNA
ucugccgcugcggcccaccacc

SEQ ID NO: 23094 - RNA, 22 nt, Artificial Sequence
  GATA2 Guide RNA
ugcggcccaccaccgcaacccc

SEQ ID NO: 23095 - RNA, 22 nt, Artificial Sequence
  GATA2 Guide RNA
uugcgguggugggccgcagcgg

SEQ ID NO: 23096 - RNA, 20 nt, Artificial Sequence
  GATA2 Guide RNA
aaagcagcccucucugccgc

SEQ ID NO: 23097 - RNA, 20 nt, Artificial Sequence
  GATA2 Guide RNA
aagcagcccucucugccgcu

SEQ ID NO: 23098 - RNA, 20 nt, Artificial Sequence
  GATA2 Guide RNA
agcagcccucucugccgcug

SEQ ID NO: 23099 - RNA, 20 nt, Artificial Sequence
  GATA2 Guide RNA
agcccucucugccgcugcag

SEQ ID NO: 23100 - RNA, 20 nt, Artificial Sequence
  GATA2 Guide RNA
agggguugugguggugggcu

SEQ ID NO: 23101 - RNA, 20 nt, Artificial Sequence
  GATA2 Guide RNA
cagcccaccaccacaacccc

SEQ ID NO: 23102 - RNA, 20 nt, Artificial Sequence
  GATA2 Guide RNA
cagcccucucugccgcugca

SEQ ID NO: 23103 - RNA, 20 nt, Artificial Sequence
  GATA2 Guide RNA
cagggguugugguggugggc

SEQ ID NO: 23104 - RNA, 20 nt, Artificial Sequence
  GATA2 Guide RNA
ccagggguuguggugguggg

SEQ ID NO: 23105 - RNA, 20 nt, Artificial Sequence
  GATA2 Guide RNA
cccucucugccgcugcagcc

SEQ ID NO: 23106 - RNA, 20 nt, Artificial Sequence
  GATA2 Guide RNA
ccgcugcagcccaccaccac

SEQ ID NO: 23107 - RNA, 20 nt, Artificial Sequence
  GATA2 Guide RNA
ccucucugccgcugcagccc

SEQ ID NO: 23108 - RNA, 20 nt, Artificial Sequence
  GATA2 Guide RNA
cgcugcagcccaccaccaca

SEQ ID NO: 23109 - RNA, 20 nt, Artificial Sequence
  GATA2 Guide RNA
cucucugccgcugcagccca

SEQ ID NO: 23110 - RNA, 20 nt, Artificial Sequence
  GATA2 Guide RNA
cucugccgcugcagcccacc

SEQ ID NO: 23111 - RNA, 20 nt, Artificial Sequence
  GATA2 Guide RNA
cugcagcccaccaccacaac

SEQ ID NO: 23112 - RNA, 20 nt, Artificial Sequence
  GATA2 Guide RNA
cugcagcggcagagagggcu

SEQ ID NO: 23113 - RNA, 20 nt, Artificial Sequence
  GATA2 Guide RNA
cugccgcugcagcccaccac

SEQ ID NO: 23114 - RNA, 20 nt, Artificial Sequence
  GATA2 Guide RNA
gcagcccaccaccacaaccc

SEQ ID NO: 23115 - RNA, 20 nt, Artificial Sequence
  GATA2 Guide RNA
gcagcccucucugccgcugc

SEQ ID NO: 23116 - RNA, 20 nt, Artificial Sequence
  GATA2 Guide RNA
gcccucucugccgcugcagc

SEQ ID NO: 23117 - RNA, 20 nt, Artificial Sequence
  GATA2 Guide RNA
gccgcugcagcccaccacca

SEQ ID NO: 23118 - RNA, 20 nt, Artificial Sequence
  GATA2 Guide RNA
gcugcagcccaccaccacaa

SEQ ID NO: 23119 - RNA, 20 nt, Artificial Sequence
  GATA2 Guide RNA
gcugcagcggcagagagggc

SEQ ID NO: 23120 - RNA, 20 nt, Artificial Sequence
  GATA2 Guide RNA
ggcugcagcggcagagaggg

SEQ ID NO: 23121 - RNA, 20 nt, Artificial Sequence
  GATA2 Guide RNA
gggcugcagcggcagagagg

SEQ ID NO: 23122 - RNA, 20 nt, Artificial Sequence
  GATA2 Guide RNA
gggguugugguggugggcug

SEQ ID NO: 23123 - RNA, 20 nt, Artificial Sequence
  GATA2 Guide RNA
ggguugugguggugggcugc

SEQ ID NO: 23124 - RNA, 20 nt, Artificial Sequence
  GATA2 Guide RNA
ggugggcugcagcggcagag

SEQ ID NO: 23125 - RNA, 20 nt, Artificial Sequence
  GATA2 Guide RNA
gguggugggcugcagcggca

SEQ ID NO: 23126 - RNA, 20 nt, Artificial Sequence
  GATA2 Guide RNA
gguugugguggugggcugca

SEQ ID NO: 23127 - RNA, 20 nt, Artificial Sequence
  GATA2 Guide RNA
gugggcugcagcggcagaga

SEQ ID NO: 23128 - RNA, 20 nt, Artificial Sequence
  GATA2 Guide RNA
guggugggcugcagcggcag

SEQ ID NO: 23129 - RNA, 20 nt, Artificial Sequence
  GATA2 Guide RNA
gugguggugggcugcagcgg

SEQ ID NO: 23130 - RNA, 20 nt, Artificial Sequence
  GATA2 Guide RNA
guugugguggugggcugcag

SEQ ID NO: 23131 - RNA, 20 nt, Artificial Sequence
  GATA2 Guide RNA
uccagggguugugguggugg

SEQ ID NO: 23132 - RNA, 20 nt, Artificial Sequence
  GATA2 Guide RNA
ucucugccgcugcagcccac

SEQ ID NO: 23133 - RNA, 20 nt, Artificial Sequence
  GATA2 Guide RNA
ucugccgcugcagcccacca

SEQ ID NO: 23134 - RNA, 20 nt, Artificial Sequence
  GATA2 Guide RNA
ugcagcccaccaccacaacc

SEQ ID NO: 23135 - RNA, 20 nt, Artificial Sequence
  GATA2 Guide RNA
ugcagcggcagagagggcug

SEQ ID NO: 23136 - RNA, 20 nt, Artificial Sequence
  GATA2 Guide RNA
ugccgcugcagcccaccacc

SEQ ID NO: 23137 - RNA, 20 nt, Artificial Sequence
  GATA2 Guide RNA
ugggcugcagcggcagagag

SEQ ID NO: 23138 - RNA, 20 nt, Artificial Sequence
  GATA2 Guide RNA
uggugggcugcagcggcaga

SEQ ID NO: 23139 - RNA, 20 nt, Artificial Sequence
  GATA2 Guide RNA
ugguggugggcugcagcggc

SEQ ID NO: 23140 - RNA, 20 nt, Artificial Sequence
  GATA2 Guide RNA
ugugguggugggcugcagcg

SEQ ID NO: 23141 - RNA, 20 nt, Artificial Sequence
  GATA2 Guide RNA
uugugguggugggcugcagc

SEQ ID NO: 23142 - RNA, 21 nt, Artificial Sequence
  GATA2 Guide RNA
aaagcagcccucucugccgcu

SEQ ID NO: 23143 - RNA, 21 nt, Artificial Sequence
  GATA2 Guide RNA
aagcagcccucucugccgcug

SEQ ID NO: 23144 - RNA, 21 nt, Artificial Sequence
  GATA2 Guide RNA
agcagcccucucugccgcugc

SEQ ID NO: 23145 - RNA, 21 nt, Artificial Sequence
  GATA2 Guide RNA
agcccucucugccgcugcagc

SEQ ID NO: 23146 - RNA, 21 nt, Artificial Sequence
  GATA2 Guide RNA
agggguugugguggugggcug

SEQ ID NO: 23147 - RNA, 21 nt, Artificial Sequence
  GATA2 Guide RNA
caaagcagcccucucugccgc

SEQ ID NO: 23148 - RNA, 21 nt, Artificial Sequence
  GATA2 Guide RNA
cagcccaccaccacaaccccu

SEQ ID NO: 23149 - RNA, 21 nt, Artificial Sequence
  GATA2 Guide RNA
cagcccucucugccgcugcag

SEQ ID NO: 23150 - RNA, 21 nt, Artificial Sequence
  GATA2 Guide RNA
cagggguugugguggugggcu

SEQ ID NO: 23151 - RNA, 21 nt, Artificial Sequence
  GATA2 Guide RNA
ccagggguugugguggugggc

SEQ ID NO: 23152 - RNA, 21 nt, Artificial Sequence
  GATA2 Guide RNA
cccucucugccgcugcagccc

SEQ ID NO: 23153 - RNA, 21 nt, Artificial Sequence
  GATA2 Guide RNA
ccgcugcagcccaccaccaca

SEQ ID NO: 23154 - RNA, 21 nt, Artificial Sequence
  GATA2 Guide RNA
ccucucugccgcugcagccca

SEQ ID NO: 23155 - RNA, 21 nt, Artificial Sequence
  GATA2 Guide RNA
cgcugcagcccaccaccacaa

SEQ ID NO: 23156 - RNA, 21 nt, Artificial Sequence
  GATA2 Guide RNA
cucucugccgcugcagcccac

SEQ ID NO: 23157 - RNA, 21 nt, Artificial Sequence
  GATA2 Guide RNA
cucugccgcugcagcccacca

SEQ ID NO: 23158 - RNA, 21 nt, Artificial Sequence
  GATA2 Guide RNA
cugcagcccaccaccacaacc

SEQ ID NO: 23159 - RNA, 21 nt, Artificial Sequence
  GATA2 Guide RNA
cugcagcggcagagagggcug

SEQ ID NO: 23160 - RNA, 21 nt, Artificial Sequence
  GATA2 Guide RNA
cugccgcugcagcccaccacc

SEQ ID NO: 23161 - RNA, 21 nt, Artificial Sequence
  GATA2 Guide RNA
gcagcccaccaccacaacccc

SEQ ID NO: 23162 - RNA, 21 nt, Artificial Sequence
  GATA2 Guide RNA
gcagcccucucugccgcugca

SEQ ID NO: 23163 - RNA, 21 nt, Artificial Sequence
  GATA2 Guide RNA
gcccucucugccgcugcagcc

SEQ ID NO: 23164 - RNA, 21 nt, Artificial Sequence
  GATA2 Guide RNA
gccgcugcagcccaccaccac

SEQ ID NO: 23165 - RNA, 21 nt, Artificial Sequence
  GATA2 Guide RNA
gcugcagcccaccaccacaac

SEQ ID NO: 23166 - RNA, 21 nt, Artificial Sequence
  GATA2 Guide RNA
gcugcagcggcagagagggcu

SEQ ID NO: 23167 - RNA, 21 nt, Artificial Sequence
  GATA2 Guide RNA
ggcugcagcggcagagagggc

SEQ ID NO: 23168 - RNA, 21 nt, Artificial Sequence
  GATA2 Guide RNA
gggcugcagcggcagagaggg

SEQ ID NO: 23169 - RNA, 21 nt, Artificial Sequence
  GATA2 Guide RNA
gggguugugguggugggcugc

SEQ ID NO: 23170 - RNA, 21 nt, Artificial Sequence
  GATA2 Guide RNA
ggguugugguggugggcugca

SEQ ID NO: 23171 - RNA, 21 nt, Artificial Sequence
  GATA2 Guide RNA
ggugggcugcagcggcagaga

SEQ ID NO: 23172 - RNA, 21 nt, Artificial Sequence
  GATA2 Guide RNA
gguggugggcugcagcggcag

SEQ ID NO: 23173 - RNA, 21 nt, Artificial Sequence
  GATA2 Guide RNA
gguugugguggugggcugcag

SEQ ID NO: 23174 - RNA, 21 nt, Artificial Sequence
  GATA2 Guide RNA
guccagggguugugguggugg

SEQ ID NO: 23175 - RNA, 21 nt, Artificial Sequence
  GATA2 Guide RNA
gugggcugcagcggcagagag

SEQ ID NO: 23176 - RNA, 21 nt, Artificial Sequence
  GATA2 Guide RNA
guggugggcugcagcggcaga

SEQ ID NO: 23177 - RNA, 21 nt, Artificial Sequence
  GATA2 Guide RNA
gugguggugggcugcagcggc

SEQ ID NO: 23178 - RNA, 21 nt, Artificial Sequence
  GATA2 Guide RNA
guugugguggugggcugcagc

SEQ ID NO: 23179 - RNA, 21 nt, Artificial Sequence
  GATA2 Guide RNA
uccagggguuguggugguggg

SEQ ID NO: 23180 - RNA, 21 nt, Artificial Sequence
  GATA2 Guide RNA
ucucugccgcugcagcccacc

SEQ ID NO: 23181 - RNA, 21 nt, Artificial Sequence
  GATA2 Guide RNA
ucugccgcugcagcccaccac

SEQ ID NO: 23182 - RNA, 21 nt, Artificial Sequence
  GATA2 Guide RNA
ugcagcccaccaccacaaccc

SEQ ID NO: 23183 - RNA, 21 nt, Artificial Sequence
  GATA2 Guide RNA
ugcagcggcagagagggcugc

SEQ ID NO: 23184 - RNA, 21 nt, Artificial Sequence
  GATA2 Guide RNA
ugccgcugcagcccaccacca

SEQ ID NO: 23185 - RNA, 21 nt, Artificial Sequence
  GATA2 Guide RNA
ugggcugcagcggcagagagg

SEQ ID NO: 23186 - RNA, 21 nt, Artificial Sequence
  GATA2 Guide RNA
uggugggcugcagcggcagag

SEQ ID NO: 23187 - RNA, 21 nt, Artificial Sequence
  GATA2 Guide RNA
ugguggugggcugcagcggca

SEQ ID NO: 23188 - RNA, 21 nt, Artificial Sequence
  GATA2 Guide RNA
ugugguggugggcugcagcgg

SEQ ID NO: 23189 - RNA, 21 nt, Artificial Sequence
  GATA2 Guide RNA
uugugguggugggcugcagcg

SEQ ID NO: 23190 - RNA, 22 nt, Artificial Sequence
  GATA2 Guide RNA
aaagcagcccucucugccgcug

SEQ ID NO: 23191 - RNA, 22 nt, Artificial Sequence
  GATA2 Guide RNA
aagcagcccucucugccgcugc

SEQ ID NO: 23192 - RNA, 22 nt, Artificial Sequence
  GATA2 Guide RNA
agcagcccucucugccgcugca

SEQ ID NO: 23193 - RNA, 22 nt, Artificial Sequence
  GATA2 Guide RNA
agcccucucugccgcugcagcc

SEQ ID NO: 23194 - RNA, 22 nt, Artificial Sequence
  GATA2 Guide RNA
agggguugugguggugggcugc

SEQ ID NO: 23195 - RNA, 22 nt, Artificial Sequence
  GATA2 Guide RNA
caaagcagcccucucugccgcu

SEQ ID NO: 23196 - RNA, 22 nt, Artificial Sequence
  GATA2 Guide RNA
cagcccaccaccacaaccccug

SEQ ID NO: 23197 - RNA, 22 nt, Artificial Sequence
  GATA2 Guide RNA
cagcccucucugccgcugcagc

SEQ ID NO: 23198 - RNA, 22 nt, Artificial Sequence
  GATA2 Guide RNA
cagggguugugguggugggcug

SEQ ID NO: 23199 - RNA, 22 nt, Artificial Sequence
  GATA2 Guide RNA
ccagggguugugguggugggcu

SEQ ID NO: 23200 - RNA, 22 nt, Artificial Sequence
  GATA2 Guide RNA
cccucucugccgcugcagccca

SEQ ID NO: 23201 - RNA, 22 nt, Artificial Sequence
  GATA2 Guide RNA
ccgcugcagcccaccaccacaa

SEQ ID NO: 23202 - RNA, 22 nt, Artificial Sequence
  GATA2 Guide RNA
ccucucugccgcugcagcccac

SEQ ID NO: 23203 - RNA, 22 nt, Artificial Sequence
  GATA2 Guide RNA
cgcugcagcccaccaccacaac

SEQ ID NO: 23204 - RNA, 22 nt, Artificial Sequence
  GATA2 Guide RNA
cucucugccgcugcagcccacc

SEQ ID NO: 23205 - RNA, 22 nt, Artificial Sequence
  GATA2 Guide RNA
cucugccgcugcagcccaccac

SEQ ID NO: 23206 - RNA, 22 nt, Artificial Sequence
  GATA2 Guide RNA
cugcagcccaccaccacaaccc

SEQ ID NO: 23207 - RNA, 22 nt, Artificial Sequence
  GATA2 Guide RNA
cugcagcggcagagagggcugc

SEQ ID NO: 23208 - RNA, 22 nt, Artificial Sequence
  GATA2 Guide RNA
cugccgcugcagcccaccacca

SEQ ID NO: 23209 - RNA, 22 nt, Artificial Sequence
  GATA2 Guide RNA
gcaaagcagcccucucugccgc

SEQ ID NO: 23210 - RNA, 22 nt, Artificial Sequence
  GATA2 Guide RNA
gcagcccaccaccacaaccccu

SEQ ID NO: 23211 - RNA, 22 nt, Artificial Sequence
  GATA2 Guide RNA
gcagcccucucugccgcugcag

SEQ ID NO: 23212 - RNA, 22 nt, Artificial Sequence
  GATA2 Guide RNA
gcccucucugccgcugcagccc

SEQ ID NO: 23213 - RNA, 22 nt, Artificial Sequence
  GATA2 Guide RNA
gccgcugcagcccaccaccaca

SEQ ID NO: 23214 - RNA, 22 nt, Artificial Sequence
  GATA2 Guide RNA
gcugcagcccaccaccacaacc

SEQ ID NO: 23215 - RNA, 22 nt, Artificial Sequence
  GATA2 Guide RNA
gcugcagcggcagagagggcug

SEQ ID NO: 23216 - RNA, 22 nt, Artificial Sequence
  GATA2 Guide RNA
ggcugcagcggcagagagggcu

SEQ ID NO: 23217 - RNA, 22 nt, Artificial Sequence
  GATA2 Guide RNA
gggcugcagcggcagagagggc

SEQ ID NO: 23218 - RNA, 22 nt, Artificial Sequence
  GATA2 Guide RNA
gggguugugguggugggcugca

SEQ ID NO: 23219 - RNA, 22 nt, Artificial Sequence
  GATA2 Guide RNA
ggguugugguggugggcugcag

SEQ ID NO: 23220 - RNA, 22 nt, Artificial Sequence
  GATA2 Guide RNA
gguccagggguugugguggugg

SEQ ID NO: 23221 - RNA, 22 nt, Artificial Sequence
  GATA2 Guide RNA
ggugggcugcagcggcagagag

SEQ ID NO: 23222 - RNA, 22 nt, Artificial Sequence
  GATA2 Guide RNA
gguggugggcugcagcggcaga

SEQ ID NO: 23223 - RNA, 22 nt, Artificial Sequence
  GATA2 Guide RNA
gguugugguggugggcugcagc

SEQ ID NO: 23224 - RNA, 22 nt, Artificial Sequence
  GATA2 Guide RNA
guccagggguuguggugguggg

SEQ ID NO: 23225 - RNA, 22 nt, Artificial Sequence
  GATA2 Guide RNA
gugggcugcagcggcagagagg

SEQ ID NO: 23226 - RNA, 22 nt, Artificial Sequence
  GATA2 Guide RNA
guggugggcugcagcggcagag

SEQ ID NO: 23227 - RNA, 22 nt, Artificial Sequence
  GATA2 Guide RNA
gugguggugggcugcagcggca

SEQ ID NO: 23228 - RNA, 22 nt, Artificial Sequence
  GATA2 Guide RNA
guugugguggugggcugcagcg

SEQ ID NO: 23229 - RNA, 22 nt, Artificial Sequence
  GATA2 Guide RNA
uccagggguugugguggugggc

SEQ ID NO: 23230 - RNA, 22 nt, Artificial Sequence
  GATA2 Guide RNA
ucucugccgcugcagcccacca

SEQ ID NO: 23231 - RNA, 22 nt, Artificial Sequence
  GATA2 Guide RNA
ucugccgcugcagcccaccacc

SEQ ID NO: 23232 - RNA, 22 nt, Artificial Sequence
  GATA2 Guide RNA
ugcagcccaccaccacaacccc

SEQ ID NO: 23233 - RNA, 22 nt, Artificial Sequence
  GATA2 Guide RNA
ugcagcggcagagagggcugcu

SEQ ID NO: 23234 - RNA, 22 nt, Artificial Sequence
  GATA2 Guide RNA
ugccgcugcagcccaccaccac

SEQ ID NO: 23235 - RNA, 22 nt, Artificial Sequence
  GATA2 Guide RNA
ugggcugcagcggcagagaggg

SEQ ID NO: 23236 - RNA, 22 nt, Artificial Sequence
  GATA2 Guide RNA
uggugggcugcagcggcagaga

SEQ ID NO: 23237 - RNA, 22 nt, Artificial Sequence
  GATA2 Guide RNA
ugguggugggcugcagcggcag

SEQ ID NO: 23238 - RNA, 22 nt, Artificial Sequence
  GATA2 Guide RNA
ugugguggugggcugcagcggc

SEQ ID NO: 23239 - RNA, 22 nt, Artificial Sequence
  GATA2 Guide RNA
uugugguggugggcugcagcgg

SEQ ID NO: 23240 - RNA, 20 nt, Artificial Sequence
  GATA2 Guide RNA
aaagcagcccucucucugcc

SEQ ID NO: 23241 - RNA, 20 nt, Artificial Sequence
  GATA2 Guide RNA
aagcagcccucucucugccg

SEQ ID NO: 23242 - RNA, 20 nt, Artificial Sequence
  GATA2 Guide RNA
acgggggcaaagcagcccuc

SEQ ID NO: 23243 - RNA, 20 nt, Artificial Sequence
  GATA2 Guide RNA
agagagagggcugcuuugcc

SEQ ID NO: 23244 - RNA, 20 nt, Artificial Sequence
  GATA2 Guide RNA
agagagggcugcuuugcccc

SEQ ID NO: 23245 - RNA, 20 nt, Artificial Sequence
  GATA2 Guide RNA
agagggcugcuuugcccccg

SEQ ID NO: 23246 - RNA, 20 nt, Artificial Sequence
  GATA2 Guide RNA
agcagcccucucucugccgc

SEQ ID NO: 23247 - RNA, 20 nt, Artificial Sequence
  GATA2 Guide RNA
agcccucucucugccgcugc

SEQ ID NO: 23248 - RNA, 20 nt, Artificial Sequence
  GATA2 Guide RNA
agcggcagagagagggcugc

SEQ ID NO: 23249 - RNA, 20 nt, Artificial Sequence
  GATA2 Guide RNA
agggcugcuuugcccccguc

SEQ ID NO: 23250 - RNA, 20 nt, Artificial Sequence
  GATA2 Guide RNA
caaagcagcccucucucugc

SEQ ID NO: 23251 - RNA, 20 nt, Artificial Sequence
  GATA2 Guide RNA
cagagagagggcugcuuugc

SEQ ID NO: 23252 - RNA, 20 nt, Artificial Sequence
  GATA2 Guide RNA
cagcccucucucugccgcug

SEQ ID NO: 23253 - RNA, 20 nt, Artificial Sequence
  GATA2 Guide RNA
cagcggcagagagagggcug

SEQ ID NO: 23254 - RNA, 20 nt, Artificial Sequence
  GATA2 Guide RNA
cccucucucugccgcugcgg

SEQ ID NO: 23255 - RNA, 20 nt, Artificial Sequence
  GATA2 Guide RNA
ccgcagcggcagagagaggg

SEQ ID NO: 23256 - RNA, 20 nt, Artificial Sequence
  GATA2 Guide RNA
ccucucucugccgcugcggc

SEQ ID NO: 23257 - RNA, 20 nt, Artificial Sequence
  GATA2 Guide RNA
cgcagcggcagagagagggc

SEQ ID NO: 23258 - RNA, 20 nt, Artificial Sequence
  GATA2 Guide RNA
cggcagagagagggcugcuu

SEQ ID NO: 23259 - RNA, 20 nt, Artificial Sequence
  GATA2 Guide RNA
cgggggcaaagcagcccucu

SEQ ID NO: 23260 - RNA, 20 nt, Artificial Sequence
  GATA2 Guide RNA
cucucucugccgcugcggcc

SEQ ID NO: 23261 - RNA, 20 nt, Artificial Sequence
  GATA2 Guide RNA
cuggacgggggcaaagcagc

SEQ ID NO: 23262 - RNA, 20 nt, Artificial Sequence
  GATA2 Guide RNA
gacgggggcaaagcagcccu

SEQ ID NO: 23263 - RNA, 20 nt, Artificial Sequence
  GATA2 Guide RNA
gagagagggcugcuuugccc

SEQ ID NO: 23264 - RNA, 20 nt, Artificial Sequence
  GATA2 Guide RNA
gagagggcugcuuugccccc

SEQ ID NO: 23265 - RNA, 20 nt, Artificial Sequence
  GATA2 Guide RNA
gagggcugcuuugcccccgu

SEQ ID NO: 23266 - RNA, 20 nt, Artificial Sequence
  GATA2 Guide RNA
gcaaagcagcccucucucug

SEQ ID NO: 23267 - RNA, 20 nt, Artificial Sequence
  GATA2 Guide RNA
gcagagagagggcugcuuug

SEQ ID NO: 23268 - RNA, 20 nt, Artificial Sequence
  GATA2 Guide RNA
gcagcccucucucugccgcu

SEQ ID NO: 23269 - RNA, 20 nt, Artificial Sequence
  GATA2 Guide RNA
gcagcggcagagagagggcu

SEQ ID NO: 23270 - RNA, 20 nt, Artificial Sequence
  GATA2 Guide RNA
gcccucucucugccgcugcg

SEQ ID NO: 23271 - RNA, 20 nt, Artificial Sequence
  GATA2 Guide RNA
gccgcagcggcagagagagg

SEQ ID NO: 23272 - RNA, 20 nt, Artificial Sequence
  GATA2 Guide RNA
gcggcagagagagggcugcu

SEQ ID NO: 23273 - RNA, 20 nt, Artificial Sequence
  GATA2 Guide RNA
gcuggacgggggcaaagcag

SEQ ID NO: 23274 - RNA, 20 nt, Artificial Sequence
  GATA2 Guide RNA
ggacgggggcaaagcagccc

SEQ ID NO: 23275 - RNA, 20 nt, Artificial Sequence
  GATA2 Guide RNA
ggcaaagcagcccucucucu

SEQ ID NO: 23276 - RNA, 20 nt, Artificial Sequence
  GATA2 Guide RNA
ggcagagagagggcugcuuu

SEQ ID NO: 23277 - RNA, 20 nt, Artificial Sequence
  GATA2 Guide RNA
ggccgcagcggcagagagag

SEQ ID NO: 23278 - RNA, 20 nt, Artificial Sequence
  GATA2 Guide RNA
ggcugcuuugcccccgucca

SEQ ID NO: 23279 - RNA, 20 nt, Artificial Sequence
  GATA2 Guide RNA
ggcuggacgggggcaaagca

SEQ ID NO: 23280 - RNA, 20 nt, Artificial Sequence
  GATA2 Guide RNA
gggcaaagcagcccucucuc

SEQ ID NO: 23281 - RNA, 20 nt, Artificial Sequence
  GATA2 Guide RNA
gggccgcagcggcagagaga

SEQ ID NO: 23282 - RNA, 20 nt, Artificial Sequence
  GATA2 Guide RNA
gggcugcuuugcccccgucc

SEQ ID NO: 23283 - RNA, 20 nt, Artificial Sequence
  GATA2 Guide RNA
ggggcaaagcagcccucucu

SEQ ID NO: 23284 - RNA, 20 nt, Artificial Sequence
  GATA2 Guide RNA
gggggcaaagcagcccucuc

SEQ ID NO: 23285 - RNA, 20 nt, Artificial Sequence
  GATA2 Guide RNA
ggugggccgcagcggcagag

SEQ ID NO: 23286 - RNA, 20 nt, Artificial Sequence
  GATA2 Guide RNA
gugggccgcagcggcagaga

SEQ ID NO: 23287 - RNA, 20 nt, Artificial Sequence
  GATA2 Guide RNA
uggacgggggcaaagcagcc

SEQ ID NO: 23288 - RNA, 20 nt, Artificial Sequence
  GATA2 Guide RNA
uggcuggacgggggcaaagc

SEQ ID NO: 23289 - RNA, 20 nt, Artificial Sequence
  GATA2 Guide RNA
ugggccgcagcggcagagag

SEQ ID NO: 23290 - RNA, 21 nt, Artificial Sequence
  GATA2 Guide RNA
aaagcagcccucucucugccg

SEQ ID NO: 23291 - RNA, 21 nt, Artificial Sequence
  GATA2 Guide RNA
aagcagcccucucucugccgc

SEQ ID NO: 23292 - RNA, 21 nt, Artificial Sequence
  GATA2 Guide RNA
acgggggcaaagcagcccucu

SEQ ID NO: 23293 - RNA, 21 nt, Artificial Sequence
  GATA2 Guide RNA
agagagagggcugcuuugccc

SEQ ID NO: 23294 - RNA, 21 nt, Artificial Sequence
  GATA2 Guide RNA
agagagggcugcuuugccccc

SEQ ID NO: 23295 - RNA, 21 nt, Artificial Sequence
  GATA2 Guide RNA
agagggcugcuuugcccccgu

SEQ ID NO: 23296 - RNA, 21 nt, Artificial Sequence
  GATA2 Guide RNA
agcagcccucucucugccgcu

SEQ ID NO: 23297 - RNA, 21 nt, Artificial Sequence
  GATA2 Guide RNA
agcccucucucugccgcugcg

SEQ ID NO: 23298 - RNA, 21 nt, Artificial Sequence
  GATA2 Guide RNA
agcggcagagagagggcugcu

SEQ ID NO: 23299 - RNA, 21 nt, Artificial Sequence
  GATA2 Guide RNA
agggcugcuuugcccccgucc

SEQ ID NO: 23300 - RNA, 21 nt, Artificial Sequence
  GATA2 Guide RNA
caaagcagcccucucucugcc

SEQ ID NO: 23301 - RNA, 21 nt, Artificial Sequence
  GATA2 Guide RNA
cagagagagggcugcuuugcc

SEQ ID NO: 23302 - RNA, 21 nt, Artificial Sequence
  GATA2 Guide RNA
cagcccucucucugccgcugc

SEQ ID NO: 23303 - RNA, 21 nt, Artificial Sequence
  GATA2 Guide RNA
cagcggcagagagagggcugc

SEQ ID NO: 23304 - RNA, 21 nt, Artificial Sequence
  GATA2 Guide RNA
cccucucucugccgcugcggc

SEQ ID NO: 23305 - RNA, 21 nt, Artificial Sequence
  GATA2 Guide RNA
ccgcagcggcagagagagggc

SEQ ID NO: 23306 - RNA, 21 nt, Artificial Sequence
  GATA2 Guide RNA
ccucucucugccgcugcggcc

SEQ ID NO: 23307 - RNA, 21 nt, Artificial Sequence
  GATA2 Guide RNA
cgcagcggcagagagagggcu

SEQ ID NO: 23308 - RNA, 21 nt, Artificial Sequence
  GATA2 Guide RNA
cggcagagagagggcugcuuu

SEQ ID NO: 23309 - RNA, 21 nt, Artificial Sequence
  GATA2 Guide RNA
cgggggcaaagcagcccucuc

SEQ ID NO: 23310 - RNA, 21 nt, Artificial Sequence
  GATA2 Guide RNA
cucucucugccgcugcggccc

SEQ ID NO: 23311 - RNA, 21 nt, Artificial Sequence
  GATA2 Guide RNA
cuggacgggggcaaagcagcc

SEQ ID NO: 23312 - RNA, 21 nt, Artificial Sequence
  GATA2 Guide RNA
cuggcuggacgggggcaaagc

SEQ ID NO: 23313 - RNA, 21 nt, Artificial Sequence
  GATA2 Guide RNA
gacgggggcaaagcagcccuc

SEQ ID NO: 23314 - RNA, 21 nt, Artificial Sequence
  GATA2 Guide RNA
gagagagggcugcuuugcccc

SEQ ID NO: 23315 - RNA, 21 nt, Artificial Sequence
  GATA2 Guide RNA
gagagggcugcuuugcccccg

SEQ ID NO: 23316 - RNA, 21 nt, Artificial Sequence
  GATA2 Guide RNA
gagggcugcuuugcccccguc

SEQ ID NO: 23317 - RNA, 21 nt, Artificial Sequence
  GATA2 Guide RNA
gcaaagcagcccucucucugc

SEQ ID NO: 23318 - RNA, 21 nt, Artificial Sequence
  GATA2 Guide RNA
gcagagagagggcugcuuugc

SEQ ID NO: 23319 - RNA, 21 nt, Artificial Sequence
  GATA2 Guide RNA
gcagcccucucucugccgcug

SEQ ID NO: 23320 - RNA, 21 nt, Artificial Sequence
  GATA2 Guide RNA
gcagcggcagagagagggcug

SEQ ID NO: 23321 - RNA, 21 nt, Artificial Sequence
  GATA2 Guide RNA
gcccucucucugccgcugcgg

SEQ ID NO: 23322 - RNA, 21 nt, Artificial Sequence
  GATA2 Guide RNA
gccgcagcggcagagagaggg

SEQ ID NO: 23323 - RNA, 21 nt, Artificial Sequence
  GATA2 Guide RNA
gcggcagagagagggcugcuu

SEQ ID NO: 23324 - RNA, 21 nt, Artificial Sequence
  GATA2 Guide RNA
gcuggacgggggcaaagcagc

SEQ ID NO: 23325 - RNA, 21 nt, Artificial Sequence
  GATA2 Guide RNA
ggacgggggcaaagcagcccu

SEQ ID NO: 23326 - RNA, 21 nt, Artificial Sequence
  GATA2 Guide RNA
ggcaaagcagcccucucucug

SEQ ID NO: 23327 - RNA, 21 nt, Artificial Sequence
  GATA2 Guide RNA
ggcagagagagggcugcuuug

SEQ ID NO: 23328 - RNA, 21 nt, Artificial Sequence
  GATA2 Guide RNA
ggccgcagcggcagagagagg

SEQ ID NO: 23329 - RNA, 21 nt, Artificial Sequence
  GATA2 Guide RNA
ggcugcuuugcccccguccag

SEQ ID NO: 23330 - RNA, 21 nt, Artificial Sequence
  GATA2 Guide RNA
ggcuggacgggggcaaagcag

SEQ ID NO: 23331 - RNA, 21 nt, Artificial Sequence
  GATA2 Guide RNA
gggcaaagcagcccucucucu

SEQ ID NO: 23332 - RNA, 21 nt, Artificial Sequence
  GATA2 Guide RNA
gggccgcagcggcagagagag

SEQ ID NO: 23333 - RNA, 21 nt, Artificial Sequence
  GATA2 Guide RNA
gggcugcuuugcccccgucca

SEQ ID NO: 23334 - RNA, 21 nt, Artificial Sequence
  GATA2 Guide RNA
ggggcaaagcagcccucucuc

SEQ ID NO: 23335 - RNA, 21 nt, Artificial Sequence
  GATA2 Guide RNA
gggggcaaagcagcccucucu

SEQ ID NO: 23336 - RNA, 21 nt, Artificial Sequence
  GATA2 Guide RNA
ggugggccgcagcggcagaga

SEQ ID NO: 23337 - RNA, 21 nt, Artificial Sequence
  GATA2 Guide RNA
gugggccgcagcggcagagag

SEQ ID NO: 23338 - RNA, 21 nt, Artificial Sequence
  GATA2 Guide RNA
uggacgggggcaaagcagccc

SEQ ID NO: 23339 - RNA, 21 nt, Artificial Sequence
  GATA2 Guide RNA
uggcuggacgggggcaaagca

SEQ ID NO: 23340 - RNA, 21 nt, Artificial Sequence
  GATA2 Guide RNA
ugggccgcagcggcagagaga

SEQ ID NO: 23341 - RNA, 21 nt, Artificial Sequence
  GATA2 Guide RNA
uggugggccgcagcggcagag

SEQ ID NO: 23342 - RNA, 22 nt, Artificial Sequence
  GATA2 Guide RNA
aaagcagcccucucucugccgc

SEQ ID NO: 23343 - RNA, 22 nt, Artificial Sequence
  GATA2 Guide RNA
aagcagcccucucucugccgcu

SEQ ID NO: 23344 - RNA, 22 nt, Artificial Sequence
  GATA2 Guide RNA
acgggggcaaagcagcccucuc

SEQ ID NO: 23345 - RNA, 22 nt, Artificial Sequence
  GATA2 Guide RNA
agagagagggcugcuuugcccc

SEQ ID NO: 23346 - RNA, 22 nt, Artificial Sequence
  GATA2 Guide RNA
agagagggcugcuuugcccccg

SEQ ID NO: 23347 - RNA, 22 nt, Artificial Sequence
  GATA2 Guide RNA
agagggcugcuuugcccccguc

SEQ ID NO: 23348 - RNA, 22 nt, Artificial Sequence
  GATA2 Guide RNA
agcagcccucucucugccgcug

SEQ ID NO: 23349 - RNA, 22 nt, Artificial Sequence
  GATA2 Guide RNA
agcccucucucugccgcugcgg

SEQ ID NO: 23350 - RNA, 22 nt, Artificial Sequence
  GATA2 Guide RNA
agcggcagagagagggcugcuu

SEQ ID NO: 23351 - RNA, 22 nt, Artificial Sequence
  GATA2 Guide RNA
agggcugcuuugcccccgucca

SEQ ID NO: 23352 - RNA, 22 nt, Artificial Sequence
  GATA2 Guide RNA
caaagcagcccucucucugccg

SEQ ID NO: 23353 - RNA, 22 nt, Artificial Sequence
  GATA2 Guide RNA
cagagagagggcugcuuugccc

SEQ ID NO: 23354 - RNA, 22 nt, Artificial Sequence
  GATA2 Guide RNA
cagcccucucucugccgcugcg

SEQ ID NO: 23355 - RNA, 22 nt, Artificial Sequence
  GATA2 Guide RNA
cagcggcagagagagggcugcu

SEQ ID NO: 23356 - RNA, 22 nt, Artificial Sequence
  GATA2 Guide RNA
cccucucucugccgcugcggcc

SEQ ID NO: 23357 - RNA, 22 nt, Artificial Sequence
  GATA2 Guide RNA
ccgcagcggcagagagagggcu

SEQ ID NO: 23358 - RNA, 22 nt, Artificial Sequence
  GATA2 Guide RNA
ccucucucugccgcugcggccc

SEQ ID NO: 23359 - RNA, 22 nt, Artificial Sequence
  GATA2 Guide RNA
ccuggcuggacgggggcaaagc

SEQ ID NO: 23360 - RNA, 22 nt, Artificial Sequence
  GATA2 Guide RNA
cgcagcggcagagagagggcug

SEQ ID NO: 23361 - RNA, 22 nt, Artificial Sequence
  GATA2 Guide RNA
cggcagagagagggcugcuuug

SEQ ID NO: 23362 - RNA, 22 nt, Artificial Sequence
  GATA2 Guide RNA
cgggggcaaagcagcccucucu

SEQ ID NO: 23363 - RNA, 22 nt, Artificial Sequence
  GATA2 Guide RNA
cucucucugccgcugcggccca

SEQ ID NO: 23364 - RNA, 22 nt, Artificial Sequence
  GATA2 Guide RNA
cuggacgggggcaaagcagccc

SEQ ID NO: 23365 - RNA, 22 nt, Artificial Sequence
  GATA2 Guide RNA
cuggcuggacgggggcaaagca

SEQ ID NO: 23366 - RNA, 22 nt, Artificial Sequence
  GATA2 Guide RNA
gacgggggcaaagcagcccucu

SEQ ID NO: 23367 - RNA, 22 nt, Artificial Sequence
  GATA2 Guide RNA
gagagagggcugcuuugccccc

SEQ ID NO: 23368 - RNA, 22 nt, Artificial Sequence
  GATA2 Guide RNA
gagagggcugcuuugcccccgu

SEQ ID NO: 23369 - RNA, 22 nt, Artificial Sequence
  GATA2 Guide RNA
gagggcugcuuugcccccgucc

SEQ ID NO: 23370 - RNA, 22 nt, Artificial Sequence
  GATA2 Guide RNA
gcaaagcagcccucucucugcc

SEQ ID NO: 23371 - RNA, 22 nt, Artificial Sequence
  GATA2 Guide RNA
gcagagagagggcugcuuugcc

SEQ ID NO: 23372 - RNA, 22 nt, Artificial Sequence
  GATA2 Guide RNA
gcagcccucucucugccgcugc

SEQ ID NO: 23373 - RNA, 22 nt, Artificial Sequence
  GATA2 Guide RNA
gcagcggcagagagagggcugc

SEQ ID NO: 23374 - RNA, 22 nt, Artificial Sequence
  GATA2 Guide RNA
gcccucucucugccgcugcggc

SEQ ID NO: 23375 - RNA, 22 nt, Artificial Sequence
  GATA2 Guide RNA
gccgcagcggcagagagagggc

SEQ ID NO: 23376 - RNA, 22 nt, Artificial Sequence
  GATA2 Guide RNA
gcggcagagagagggcugcuuu

SEQ ID NO: 23377 - RNA, 22 nt, Artificial Sequence
  GATA2 Guide RNA
gcuggacgggggcaaagcagcc

SEQ ID NO: 23378 - RNA, 22 nt, Artificial Sequence
  GATA2 Guide RNA
ggacgggggcaaagcagcccuc

SEQ ID NO: 23379 - RNA, 22 nt, Artificial Sequence
  GATA2 Guide RNA
ggcaaagcagcccucucucugc

SEQ ID NO: 23380 - RNA, 22 nt, Artificial Sequence
  GATA2 Guide RNA
ggcagagagagggcugcuuugc

SEQ ID NO: 23381 - RNA, 22 nt, Artificial Sequence
  GATA2 Guide RNA
ggccgcagcggcagagagaggg

SEQ ID NO: 23382 - RNA, 22 nt, Artificial Sequence
  GATA2 Guide RNA
ggcugcuuugcccccguccagc

SEQ ID NO: 23383 - RNA, 22 nt, Artificial Sequence
  GATA2 Guide RNA
ggcuggacgggggcaaagcagc

SEQ ID NO: 23384 - RNA, 22 nt, Artificial Sequence
  GATA2 Guide RNA
gggcaaagcagcccucucucug

SEQ ID NO: 23385 - RNA, 22 nt, Artificial Sequence
  GATA2 Guide RNA
gggccgcagcggcagagagagg

SEQ ID NO: 23386 - RNA, 22 nt, Artificial Sequence
  GATA2 Guide RNA
gggcugcuuugcccccguccag

SEQ ID NO: 23387 - RNA, 22 nt, Artificial Sequence
  GATA2 Guide RNA
ggggcaaagcagcccucucucu

SEQ ID NO: 23388 - RNA, 22 nt, Artificial Sequence
  GATA2 Guide RNA
gggggcaaagcagcccucucuc

SEQ ID NO: 23389 - RNA, 22 nt, Artificial Sequence
  GATA2 Guide RNA
ggugggccgcagcggcagagag

SEQ ID NO: 23390 - RNA, 22 nt, Artificial Sequence
  GATA2 Guide RNA
gugggccgcagcggcagagaga

SEQ ID NO: 23391 - RNA, 22 nt, Artificial Sequence
  GATA2 Guide RNA
guggugggccgcagcggcagag

SEQ ID NO: 23392 - RNA, 22 nt, Artificial Sequence
  GATA2 Guide RNA
uggacgggggcaaagcagcccu

SEQ ID NO: 23393 - RNA, 22 nt, Artificial Sequence
  GATA2 Guide RNA
uggcuggacgggggcaaagcag

SEQ ID NO: 23394 - RNA, 22 nt, Artificial Sequence
  GATA2 Guide RNA
ugggccgcagcggcagagagag

SEQ ID NO: 23395 - RNA, 22 nt, Artificial Sequence
  GATA2 Guide RNA
uggugggccgcagcggcagaga

SEQ ID NO: 23396 - RNA, 20 nt, Artificial Sequence
  GATA2 Guide RNA
aaagcaguccucucugccgc

SEQ ID NO: 23397 - RNA, 20 nt, Artificial Sequence
  GATA2 Guide RNA
aagcaguccucucugccgcu

SEQ ID NO: 23398 - RNA, 20 nt, Artificial Sequence
  GATA2 Guide RNA
acgggggcaaagcaguccuc

SEQ ID NO: 23399 - RNA, 20 nt, Artificial Sequence
  GATA2 Guide RNA
acugcuuugcccccguccag

SEQ ID NO: 23400 - RNA, 20 nt, Artificial Sequence
  GATA2 Guide RNA
agagaggacugcuuugcccc

SEQ ID NO: 23401 - RNA, 20 nt, Artificial Sequence
  GATA2 Guide RNA
agaggacugcuuugcccccg

SEQ ID NO: 23402 - RNA, 20 nt, Artificial Sequence
  GATA2 Guide RNA
agcaguccucucugccgcug

SEQ ID NO: 23403 - RNA, 20 nt, Artificial Sequence
  GATA2 Guide RNA
agcggcagagaggacugcuu

SEQ ID NO: 23404 - RNA, 20 nt, Artificial Sequence
  GATA2 Guide RNA
aggacugcuuugcccccguc

SEQ ID NO: 23405 - RNA, 20 nt, Artificial Sequence
  GATA2 Guide RNA
aguccucucugccgcugcgg

SEQ ID NO: 23406 - RNA, 20 nt, Artificial Sequence
  GATA2 Guide RNA
caaagcaguccucucugccg

SEQ ID NO: 23407 - RNA, 20 nt, Artificial Sequence
  GATA2 Guide RNA
cagagaggacugcuuugccc

SEQ ID NO: 23408 - RNA, 20 nt, Artificial Sequence
  GATA2 Guide RNA
cagcggcagagaggacugcu

SEQ ID NO: 23409 - RNA, 20 nt, Artificial Sequence
  GATA2 Guide RNA
caguccucucugccgcugcg

SEQ ID NO: 23410 - RNA, 20 nt, Artificial Sequence
  GATA2 Guide RNA
ccgcagcggcagagaggacu

SEQ ID NO: 23411 - RNA, 20 nt, Artificial Sequence
  GATA2 Guide RNA
cgcagcggcagagaggacug

SEQ ID NO: 23412 - RNA, 20 nt, Artificial Sequence
  GATA2 Guide RNA
cggcagagaggacugcuuug

SEQ ID NO: 23413 - RNA, 20 nt, Artificial Sequence
  GATA2 Guide RNA
cgggggcaaagcaguccucu

SEQ ID NO: 23414 - RNA, 20 nt, Artificial Sequence
  GATA2 Guide RNA
cuggacgggggcaaagcagu

SEQ ID NO: 23415 - RNA, 20 nt, Artificial Sequence
  GATA2 Guide RNA
cuggcuggacgggggcaaag

SEQ ID NO: 23416 - RNA, 20 nt, Artificial Sequence
  GATA2 Guide RNA
gacgggggcaaagcaguccu

SEQ ID NO: 23417 - RNA, 20 nt, Artificial Sequence
  GATA2 Guide RNA
gacugcuuugcccccgucca

SEQ ID NO: 23418 - RNA, 20 nt, Artificial Sequence
  GATA2 Guide RNA
gagaggacugcuuugccccc

SEQ ID NO: 23419 - RNA, 20 nt, Artificial Sequence
  GATA2 Guide RNA
gaggacugcuuugcccccgu

SEQ ID NO: 23420 - RNA, 20 nt, Artificial Sequence
  GATA2 Guide RNA
gcaaagcaguccucucugcc

SEQ ID NO: 23421 - RNA, 20 nt, Artificial Sequence
  GATA2 Guide RNA
gcagagaggacugcuuugcc

SEQ ID NO: 23422 - RNA, 20 nt, Artificial Sequence
  GATA2 Guide RNA
gcagcggcagagaggacugc

SEQ ID NO: 23423 - RNA, 20 nt, Artificial Sequence
  GATA2 Guide RNA
gcaguccucucugccgcugc

SEQ ID NO: 23424 - RNA, 20 nt, Artificial Sequence
  GATA2 Guide RNA
gccgcagcggcagagaggac

SEQ ID NO: 23425 - RNA, 20 nt, Artificial Sequence
  GATA2 Guide RNA
gcggcagagaggacugcuuu

SEQ ID NO: 23426 - RNA, 20 nt, Artificial Sequence
  GATA2 Guide RNA
ggacgggggcaaagcagucc

SEQ ID NO: 23427 - RNA, 20 nt, Artificial Sequence
  GATA2 Guide RNA
ggacugcuuugcccccgucc

SEQ ID NO: 23428 - RNA, 20 nt, Artificial Sequence
  GATA2 Guide RNA
ggcaaagcaguccucucugc

SEQ ID NO: 23429 - RNA, 20 nt, Artificial Sequence
  GATA2 Guide RNA
ggcagagaggacugcuuugc

SEQ ID NO: 23430 - RNA, 20 nt, Artificial Sequence
  GATA2 Guide RNA
ggccgcagcggcagagagga

SEQ ID NO: 23431 - RNA, 20 nt, Artificial Sequence
  GATA2 Guide RNA
gggcaaagcaguccucucug

SEQ ID NO: 23432 - RNA, 20 nt, Artificial Sequence
  GATA2 Guide RNA
gggccgcagcggcagagagg

SEQ ID NO: 23433 - RNA, 20 nt, Artificial Sequence
  GATA2 Guide RNA
ggggcaaagcaguccucucu

SEQ ID NO: 23434 - RNA, 20 nt, Artificial Sequence
  GATA2 Guide RNA
gggggcaaagcaguccucuc

SEQ ID NO: 23435 - RNA, 20 nt, Artificial Sequence
  GATA2 Guide RNA
guccucucugccgcugcggc

SEQ ID NO: 23436 - RNA, 20 nt, Artificial Sequence
  GATA2 Guide RNA
uggacgggggcaaagcaguc

SEQ ID NO: 23437 - RNA, 21 nt, Artificial Sequence
  GATA2 Guide RNA
aaagcaguccucucugccgcu

SEQ ID NO: 23438 - RNA, 21 nt, Artificial Sequence
  GATA2 Guide RNA
aagcaguccucucugccgcug

SEQ ID NO: 23439 - RNA, 21 nt, Artificial Sequence
  GATA2 Guide RNA
acgggggcaaagcaguccucu

SEQ ID NO: 23440 - RNA, 21 nt, Artificial Sequence
  GATA2 Guide RNA
acugcuuugcccccguccagc

SEQ ID NO: 23441 - RNA, 21 nt, Artificial Sequence
  GATA2 Guide RNA
agagaggacugcuuugccccc

SEQ ID NO: 23442 - RNA, 21 nt, Artificial Sequence
  GATA2 Guide RNA
agaggacugcuuugcccccgu

SEQ ID NO: 23443 - RNA, 21 nt, Artificial Sequence
  GATA2 Guide RNA
agcaguccucucugccgcugc

SEQ ID NO: 23444 - RNA, 21 nt, Artificial Sequence
  GATA2 Guide RNA
agcggcagagaggacugcuuu

SEQ ID NO: 23445 - RNA, 21 nt, Artificial Sequence
  GATA2 Guide RNA
aggacugcuuugcccccgucc

SEQ ID NO: 23446 - RNA, 21 nt, Artificial Sequence
  GATA2 Guide RNA
aguccucucugccgcugcggc

SEQ ID NO: 23447 - RNA, 21 nt, Artificial Sequence
  GATA2 Guide RNA
caaagcaguccucucugccgc

SEQ ID NO: 23448 - RNA, 21 nt, Artificial Sequence
  GATA2 Guide RNA
cagagaggacugcuuugcccc

SEQ ID NO: 23449 - RNA, 21 nt, Artificial Sequence
  GATA2 Guide RNA
cagcggcagagaggacugcuu

SEQ ID NO: 23450 - RNA, 21 nt, Artificial Sequence
  GATA2 Guide RNA
caguccucucugccgcugcgg

SEQ ID NO: 23451 - RNA, 21 nt, Artificial Sequence
  GATA2 Guide RNA
ccgcagcggcagagaggacug

SEQ ID NO: 23452 - RNA, 21 nt, Artificial Sequence
  GATA2 Guide RNA
ccuggcuggacgggggcaaag

SEQ ID NO: 23453 - RNA, 21 nt, Artificial Sequence
  GATA2 Guide RNA
cgcagcggcagagaggacugc

SEQ ID NO: 23454 - RNA, 21 nt, Artificial Sequence
  GATA2 Guide RNA
cggcagagaggacugcuuugc

SEQ ID NO: 23455 - RNA, 21 nt, Artificial Sequence
  GATA2 Guide RNA
cgggggcaaagcaguccucuc

SEQ ID NO: 23456 - RNA, 21 nt, Artificial Sequence
  GATA2 Guide RNA
cuggacgggggcaaagcaguc

SEQ ID NO: 23457 - RNA, 21 nt, Artificial Sequence
  GATA2 Guide RNA
gacgggggcaaagcaguccuc

SEQ ID NO: 23458 - RNA, 21 nt, Artificial Sequence
  GATA2 Guide RNA
gacugcuuugcccccguccag

SEQ ID NO: 23459 - RNA, 21 nt, Artificial Sequence
  GATA2 Guide RNA
gagaggacugcuuugcccccg

SEQ ID NO: 23460 - RNA, 21 nt, Artificial Sequence
  GATA2 Guide RNA
gaggacugcuuugcccccguc

SEQ ID NO: 23461 - RNA, 21 nt, Artificial Sequence
  GATA2 Guide RNA
gcaaagcaguccucucugccg

SEQ ID NO: 23462 - RNA, 21 nt, Artificial Sequence
  GATA2 Guide RNA
gcagagaggacugcuuugccc

SEQ ID NO: 23463 - RNA, 21 nt, Artificial Sequence
  GATA2 Guide RNA
gcagcggcagagaggacugcu

SEQ ID NO: 23464 - RNA, 21 nt, Artificial Sequence
  GATA2 Guide RNA
gcaguccucucugccgcugcg

SEQ ID NO: 23465 - RNA, 21 nt, Artificial Sequence
  GATA2 Guide RNA
gccgcagcggcagagaggacu

SEQ ID NO: 23466 - RNA, 21 nt, Artificial Sequence
  GATA2 Guide RNA
gcggcagagaggacugcuuug

SEQ ID NO: 23467 - RNA, 21 nt, Artificial Sequence
  GATA2 Guide RNA
gcuggacgggggcaaagcagu

SEQ ID NO: 23468 - RNA, 21 nt, Artificial Sequence
  GATA2 Guide RNA
ggacgggggcaaagcaguccu

SEQ ID NO: 23469 - RNA, 21 nt, Artificial Sequence
  GATA2 Guide RNA
ggacugcuuugcccccgucca

SEQ ID NO: 23470 - RNA, 21 nt, Artificial Sequence
  GATA2 Guide RNA
ggcaaagcaguccucucugcc

SEQ ID NO: 23471 - RNA, 21 nt, Artificial Sequence
  GATA2 Guide RNA
ggcagagaggacugcuuugcc

SEQ ID NO: 23472 - RNA, 21 nt, Artificial Sequence
  GATA2 Guide RNA
ggccgcagcggcagagaggac

SEQ ID NO: 23473 - RNA, 21 nt, Artificial Sequence
  GATA2 Guide RNA
gggcaaagcaguccucucugc

SEQ ID NO: 23474 - RNA, 21 nt, Artificial Sequence
  GATA2 Guide RNA
gggccgcagcggcagagagga

SEQ ID NO: 23475 - RNA, 21 nt, Artificial Sequence
  GATA2 Guide RNA
ggggcaaagcaguccucucug

SEQ ID NO: 23476 - RNA, 21 nt, Artificial Sequence
  GATA2 Guide RNA
gggggcaaagcaguccucucu

SEQ ID NO: 23477 - RNA, 21 nt, Artificial Sequence
  GATA2 Guide RNA
guccucucugccgcugcggcc

SEQ ID NO: 23478 - RNA, 21 nt, Artificial Sequence
  GATA2 Guide RNA
uggacgggggcaaagcagucc

SEQ ID NO: 23479 - RNA, 21 nt, Artificial Sequence
  GATA2 Guide RNA
ugggccgcagcggcagagagg

SEQ ID NO: 23480 - RNA, 22 nt, Artificial Sequence
  GATA2 Guide RNA
aaagcaguccucucugccgcug

SEQ ID NO: 23481 - RNA, 22 nt, Artificial Sequence
  GATA2 Guide RNA
aagcaguccucucugccgcugc

SEQ ID NO: 23482 - RNA, 22 nt, Artificial Sequence
  GATA2 Guide RNA
acgggggcaaagcaguccucuc

SEQ ID NO: 23483 - RNA, 22 nt, Artificial Sequence
  GATA2 Guide RNA
acugcuuugcccccguccagcc

SEQ ID NO: 23484 - RNA, 22 nt, Artificial Sequence
  GATA2 Guide RNA
agagaggacugcuuugcccccg

SEQ ID NO: 23485 - RNA, 22 nt, Artificial Sequence
  GATA2 Guide RNA
agaggacugcuuugcccccguc

SEQ ID NO: 23486 - RNA, 22 nt, Artificial Sequence
  GATA2 Guide RNA
agcaguccucucugccgcugcg

SEQ ID NO: 23487 - RNA, 22 nt, Artificial Sequence
  GATA2 Guide RNA
agcggcagagaggacugcuuug

SEQ ID NO: 23488 - RNA, 22 nt, Artificial Sequence
  GATA2 Guide RNA
aggacugcuuugcccccgucca

SEQ ID NO: 23489 - RNA, 22 nt, Artificial Sequence
  GATA2 Guide RNA
aguccucucugccgcugcggcc

SEQ ID NO: 23490 - RNA, 22 nt, Artificial Sequence
  GATA2 Guide RNA
caaagcaguccucucugccgcu

SEQ ID NO: 23491 - RNA, 22 nt, Artificial Sequence
  GATA2 Guide RNA
cagagaggacugcuuugccccc

SEQ ID NO: 23492 - RNA, 22 nt, Artificial Sequence
  GATA2 Guide RNA
cagcggcagagaggacugcuuu

SEQ ID NO: 23493 - RNA, 22 nt, Artificial Sequence
  GATA2 Guide RNA
caguccucucugccgcugcggc

SEQ ID NO: 23494 - RNA, 22 nt, Artificial Sequence
  GATA2 Guide RNA
cccuggcuggacgggggcaaag

SEQ ID NO: 23495 - RNA, 22 nt, Artificial Sequence
  GATA2 Guide RNA
ccgcagcggcagagaggacugc

SEQ ID NO: 23496 - RNA, 22 nt, Artificial Sequence
  GATA2 Guide RNA
cgcagcggcagagaggacugcu

SEQ ID NO: 23497 - RNA, 22 nt, Artificial Sequence
  GATA2 Guide RNA
cggcagagaggacugcuuugcc

SEQ ID NO: 23498 - RNA, 22 nt, Artificial Sequence
  GATA2 Guide RNA
cgggggcaaagcaguccucucu

SEQ ID NO: 23499 - RNA, 22 nt, Artificial Sequence
  GATA2 Guide RNA
cuggacgggggcaaagcagucc

SEQ ID NO: 23500 - RNA, 22 nt, Artificial Sequence
  GATA2 Guide RNA
gacgggggcaaagcaguccucu

SEQ ID NO: 23501 - RNA, 22 nt, Artificial Sequence
  GATA2 Guide RNA
gacugcuuugcccccguccagc

SEQ ID NO: 23502 - RNA, 22 nt, Artificial Sequence
  GATA2 Guide RNA
gagaggacugcuuugcccccgu

SEQ ID NO: 23503 - RNA, 22 nt, Artificial Sequence
  GATA2 Guide RNA
gaggacugcuuugcccccgucc

SEQ ID NO: 23504 - RNA, 22 nt, Artificial Sequence
  GATA2 Guide RNA
gcaaagcaguccucucugccgc

SEQ ID NO: 23505 - RNA, 22 nt, Artificial Sequence
  GATA2 Guide RNA
gcagagaggacugcuuugcccc

SEQ ID NO: 23506 - RNA, 22 nt, Artificial Sequence
  GATA2 Guide RNA
gcagcggcagagaggacugcuu

SEQ ID NO: 23507 - RNA, 22 nt, Artificial Sequence
  GATA2 Guide RNA
gcaguccucucugccgcugcgg

SEQ ID NO: 23508 - RNA, 22 nt, Artificial Sequence
  GATA2 Guide RNA
gccgcagcggcagagaggacug

SEQ ID NO: 23509 - RNA, 22 nt, Artificial Sequence
  GATA2 Guide RNA
gcggcagagaggacugcuuugc

SEQ ID NO: 23510 - RNA, 22 nt, Artificial Sequence
  GATA2 Guide RNA
gcuggacgggggcaaagcaguc

SEQ ID NO: 23511 - RNA, 22 nt, Artificial Sequence
  GATA2 Guide RNA
ggacgggggcaaagcaguccuc

SEQ ID NO: 23512 - RNA, 22 nt, Artificial Sequence
  GATA2 Guide RNA
ggacugcuuugcccccguccag

SEQ ID NO: 23513 - RNA, 22 nt, Artificial Sequence
  GATA2 Guide RNA
ggcaaagcaguccucucugccg

SEQ ID NO: 23514 - RNA, 22 nt, Artificial Sequence
  GATA2 Guide RNA
ggcagagaggacugcuuugccc

SEQ ID NO: 23515 - RNA, 22 nt, Artificial Sequence
  GATA2 Guide RNA
ggccgcagcggcagagaggacu

SEQ ID NO: 23516 - RNA, 22 nt, Artificial Sequence
  GATA2 Guide RNA
ggcuggacgggggcaaagcagu

SEQ ID NO: 23517 - RNA, 22 nt, Artificial Sequence
  GATA2 Guide RNA
gggcaaagcaguccucucugcc

SEQ ID NO: 23518 - RNA, 22 nt, Artificial Sequence
  GATA2 Guide RNA
gggccgcagcggcagagaggac

SEQ ID NO: 23519 - RNA, 22 nt, Artificial Sequence
  GATA2 Guide RNA
ggggcaaagcaguccucucugc

SEQ ID NO: 23520 - RNA, 22 nt, Artificial Sequence
  GATA2 Guide RNA
gggggcaaagcaguccucucug

SEQ ID NO: 23521 - RNA, 22 nt, Artificial Sequence
  GATA2 Guide RNA
guccucucugccgcugcggccc

SEQ ID NO: 23522 - RNA, 22 nt, Artificial Sequence
  GATA2 Guide RNA
gugggccgcagcggcagagagg

SEQ ID NO: 23523 - RNA, 22 nt, Artificial Sequence
  GATA2 Guide RNA
uggacgggggcaaagcaguccu

SEQ ID NO: 23524 - RNA, 22 nt, Artificial Sequence
  GATA2 Guide RNA
ugggccgcagcggcagagagga

SEQ ID NO: 23525 - RNA, 20 nt, Artificial Sequence
  GATA2 Guide RNA
aaagcaucccucucugccgc

SEQ ID NO: 23526 - RNA, 20 nt, Artificial Sequence
  GATA2 Guide RNA
aagcaucccucucugccgcu

SEQ ID NO: 23527 - RNA, 20 nt, Artificial Sequence
  GATA2 Guide RNA
acgggggcaaagcaucccuc

SEQ ID NO: 23528 - RNA, 20 nt, Artificial Sequence
  GATA2 Guide RNA
agagagggaugcuuugcccc

SEQ ID NO: 23529 - RNA, 20 nt, Artificial Sequence
  GATA2 Guide RNA
agagggaugcuuugcccccg

SEQ ID NO: 23530 - RNA, 20 nt, Artificial Sequence
  GATA2 Guide RNA
agcaucccucucugccgcug

SEQ ID NO: 23531 - RNA, 20 nt, Artificial Sequence
  GATA2 Guide RNA
agcggcagagagggaugcuu

SEQ ID NO: 23532 - RNA, 20 nt, Artificial Sequence
  GATA2 Guide RNA
agggaugcuuugcccccguc

SEQ ID NO: 23533 - RNA, 20 nt, Artificial Sequence
  GATA2 Guide RNA
aucccucucugccgcugcgg

SEQ ID NO: 23534 - RNA, 20 nt, Artificial Sequence
  GATA2 Guide RNA
augcuuugcccccguccagc

SEQ ID NO: 23535 - RNA, 20 nt, Artificial Sequence
  GATA2 Guide RNA
caaagcaucccucucugccg

SEQ ID NO: 23536 - RNA, 20 nt, Artificial Sequence
  GATA2 Guide RNA
cagagagggaugcuuugccc

SEQ ID NO: 23537 - RNA, 20 nt, Artificial Sequence
  GATA2 Guide RNA
cagcggcagagagggaugcu

SEQ ID NO: 23538 - RNA, 20 nt, Artificial Sequence
  GATA2 Guide RNA
caucccucucugccgcugcg

SEQ ID NO: 23539 - RNA, 20 nt, Artificial Sequence
  GATA2 Guide RNA
ccgcagcggcagagagggau

SEQ ID NO: 23540 - RNA, 20 nt, Artificial Sequence
  GATA2 Guide RNA
ccuggcuggacgggggcaaa

SEQ ID NO: 23541 - RNA, 20 nt, Artificial Sequence
  GATA2 Guide RNA
cgcagcggcagagagggaug

SEQ ID NO: 23542 - RNA, 20 nt, Artificial Sequence
  GATA2 Guide RNA
cggcagagagggaugcuuug

SEQ ID NO: 23543 - RNA, 20 nt, Artificial Sequence
  GATA2 Guide RNA
cgggggcaaagcaucccucu

SEQ ID NO: 23544 - RNA, 20 nt, Artificial Sequence
  GATA2 Guide RNA
cuggacgggggcaaagcauc

SEQ ID NO: 23545 - RNA, 20 nt, Artificial Sequence
  GATA2 Guide RNA
gacgggggcaaagcaucccu

SEQ ID NO: 23546 - RNA, 20 nt, Artificial Sequence
  GATA2 Guide RNA
gagagggaugcuuugccccc

SEQ ID NO: 23547 - RNA, 20 nt, Artificial Sequence
  GATA2 Guide RNA
gagggaugcuuugcccccgu

SEQ ID NO: 23548 - RNA, 20 nt, Artificial Sequence
  GATA2 Guide RNA
gaugcuuugcccccguccag

SEQ ID NO: 23549 - RNA, 20 nt, Artificial Sequence
  GATA2 Guide RNA
gcaaagcaucccucucugcc

SEQ ID NO: 23550 - RNA, 20 nt, Artificial Sequence
  GATA2 Guide RNA
gcagagagggaugcuuugcc

SEQ ID NO: 23551 - RNA, 20 nt, Artificial Sequence
  GATA2 Guide RNA
gcagcggcagagagggaugc

SEQ ID NO: 23552 - RNA, 20 nt, Artificial Sequence
  GATA2 Guide RNA
gcaucccucucugccgcugc

SEQ ID NO: 23553 - RNA, 20 nt, Artificial Sequence
  GATA2 Guide RNA
gccgcagcggcagagaggga

SEQ ID NO: 23554 - RNA, 20 nt, Artificial Sequence
  GATA2 Guide RNA
gcggcagagagggaugcuuu

SEQ ID NO: 23555 - RNA, 20 nt, Artificial Sequence
  GATA2 Guide RNA
gcuggacgggggcaaagcau

SEQ ID NO: 23556 - RNA, 20 nt, Artificial Sequence
  GATA2 Guide RNA
ggacgggggcaaagcauccc

SEQ ID NO: 23557 - RNA, 20 nt, Artificial Sequence
  GATA2 Guide RNA
ggaugcuuugcccccgucca

SEQ ID NO: 23558 - RNA, 20 nt, Artificial Sequence
  GATA2 Guide RNA
ggcaaagcaucccucucugc

SEQ ID NO: 23559 - RNA, 20 nt, Artificial Sequence
  GATA2 Guide RNA
ggcagagagggaugcuuugc

SEQ ID NO: 23560 - RNA, 20 nt, Artificial Sequence
  GATA2 Guide RNA
ggccgcagcggcagagaggg

SEQ ID NO: 23561 - RNA, 20 nt, Artificial Sequence
  GATA2 Guide RNA
gggaugcuuugcccccgucc

SEQ ID NO: 23562 - RNA, 20 nt, Artificial Sequence
  GATA2 Guide RNA
gggcaaagcaucccucucug

SEQ ID NO: 23563 - RNA, 20 nt, Artificial Sequence
  GATA2 Guide RNA
ggggcaaagcaucccucucu

SEQ ID NO: 23564 - RNA, 20 nt, Artificial Sequence
  GATA2 Guide RNA
gggggcaaagcaucccucuc

SEQ ID NO: 23565 - RNA, 20 nt, Artificial Sequence
  GATA2 Guide RNA
uggacgggggcaaagcaucc

SEQ ID NO: 23566 - RNA, 21 nt, Artificial Sequence
  GATA2 Guide RNA
aaagcaucccucucugccgcu

SEQ ID NO: 23567 - RNA, 21 nt, Artificial Sequence
  GATA2 Guide RNA
aagcaucccucucugccgcug

SEQ ID NO: 23568 - RNA, 21 nt, Artificial Sequence
  GATA2 Guide RNA
acgggggcaaagcaucccucu

SEQ ID NO: 23569 - RNA, 21 nt, Artificial Sequence
  GATA2 Guide RNA
agagagggaugcuuugccccc

SEQ ID NO: 23570 - RNA, 21 nt, Artificial Sequence
  GATA2 Guide RNA
agagggaugcuuugcccccgu

SEQ ID NO: 23571 - RNA, 21 nt, Artificial Sequence
  GATA2 Guide RNA
agcaucccucucugccgcugc

SEQ ID NO: 23572 - RNA, 21 nt, Artificial Sequence
  GATA2 Guide RNA
agcggcagagagggaugcuuu

SEQ ID NO: 23573 - RNA, 21 nt, Artificial Sequence
  GATA2 Guide RNA
agggaugcuuugcccccgucc

SEQ ID NO: 23574 - RNA, 21 nt, Artificial Sequence
  GATA2 Guide RNA
aucccucucugccgcugcggc

SEQ ID NO: 23575 - RNA, 21 nt, Artificial Sequence
  GATA2 Guide RNA
augcuuugcccccguccagcc

SEQ ID NO: 23576 - RNA, 21 nt, Artificial Sequence
  GATA2 Guide RNA
caaagcaucccucucugccgc

SEQ ID NO: 23577 - RNA, 21 nt, Artificial Sequence
  GATA2 Guide RNA
cagagagggaugcuuugcccc

SEQ ID NO: 23578 - RNA, 21 nt, Artificial Sequence
  GATA2 Guide RNA
cagcggcagagagggaugcuu

SEQ ID NO: 23579 - RNA, 21 nt, Artificial Sequence
  GATA2 Guide RNA
caucccucucugccgcugcgg

SEQ ID NO: 23580 - RNA, 21 nt, Artificial Sequence
  GATA2 Guide RNA
cccuggcuggacgggggcaaa

SEQ ID NO: 23581 - RNA, 21 nt, Artificial Sequence
  GATA2 Guide RNA
ccgcagcggcagagagggaug

SEQ ID NO: 23582 - RNA, 21 nt, Artificial Sequence
  GATA2 Guide RNA
cgcagcggcagagagggaugc

SEQ ID NO: 23583 - RNA, 21 nt, Artificial Sequence
  GATA2 Guide RNA
cggcagagagggaugcuuugc

SEQ ID NO: 23584 - RNA, 21 nt, Artificial Sequence
  GATA2 Guide RNA
cgggggcaaagcaucccucuc

SEQ ID NO: 23585 - RNA, 21 nt, Artificial Sequence
  GATA2 Guide RNA
cuggacgggggcaaagcaucc

SEQ ID NO: 23586 - RNA, 21 nt, Artificial Sequence
  GATA2 Guide RNA
gacgggggcaaagcaucccuc

SEQ ID NO: 23587 - RNA, 21 nt, Artificial Sequence
  GATA2 Guide RNA
gagagggaugcuuugcccccg

SEQ ID NO: 23588 - RNA, 21 nt, Artificial Sequence
  GATA2 Guide RNA
gagggaugcuuugcccccguc

SEQ ID NO: 23589 - RNA, 21 nt, Artificial Sequence
  GATA2 Guide RNA
gaugcuuugcccccguccagc

SEQ ID NO: 23590 - RNA, 21 nt, Artificial Sequence
  GATA2 Guide RNA
gcaaagcaucccucucugccg

SEQ ID NO: 23591 - RNA, 21 nt, Artificial Sequence
  GATA2 Guide RNA
gcagagagggaugcuuugccc

SEQ ID NO: 23592 - RNA, 21 nt, Artificial Sequence
  GATA2 Guide RNA
gcagcggcagagagggaugcu

SEQ ID NO: 23593 - RNA, 21 nt, Artificial Sequence
  GATA2 Guide RNA
gcaucccucucugccgcugcg

SEQ ID NO: 23594 - RNA, 21 nt, Artificial Sequence
  GATA2 Guide RNA
gccgcagcggcagagagggau

SEQ ID NO: 23595 - RNA, 21 nt, Artificial Sequence
  GATA2 Guide RNA
gcggcagagagggaugcuuug

SEQ ID NO: 23596 - RNA, 21 nt, Artificial Sequence
  GATA2 Guide RNA
gcuggacgggggcaaagcauc

SEQ ID NO: 23597 - RNA, 21 nt, Artificial Sequence
  GATA2 Guide RNA
ggacgggggcaaagcaucccu

SEQ ID NO: 23598 - RNA, 21 nt, Artificial Sequence
  GATA2 Guide RNA
ggaugcuuugcccccguccag

SEQ ID NO: 23599 - RNA, 21 nt, Artificial Sequence
  GATA2 Guide RNA
ggcaaagcaucccucucugcc

SEQ ID NO: 23600 - RNA, 21 nt, Artificial Sequence
  GATA2 Guide RNA
ggcagagagggaugcuuugcc

SEQ ID NO: 23601 - RNA, 21 nt, Artificial Sequence
  GATA2 Guide RNA
ggccgcagcggcagagaggga

SEQ ID NO: 23602 - RNA, 21 nt, Artificial Sequence
  GATA2 Guide RNA
ggcuggacgggggcaaagcau

SEQ ID NO: 23603 - RNA, 21 nt, Artificial Sequence
  GATA2 Guide RNA
gggaugcuuugcccccgucca

SEQ ID NO: 23604 - RNA, 21 nt, Artificial Sequence
  GATA2 Guide RNA
gggcaaagcaucccucucugc

SEQ ID NO: 23605 - RNA, 21 nt, Artificial Sequence
  GATA2 Guide RNA
ggggcaaagcaucccucucug

SEQ ID NO: 23606 - RNA, 21 nt, Artificial Sequence
  GATA2 Guide RNA
gggggcaaagcaucccucucu

SEQ ID NO: 23607 - RNA, 21 nt, Artificial Sequence
  GATA2 Guide RNA
uggacgggggcaaagcauccc

SEQ ID NO: 23608 - RNA, 22 nt, Artificial Sequence
  GATA2 Guide RNA
aaagcaucccucucugccgcug

SEQ ID NO: 23609 - RNA, 22 nt, Artificial Sequence
  GATA2 Guide RNA
aagcaucccucucugccgcugc

SEQ ID NO: 23610 - RNA, 22 nt, Artificial Sequence
  GATA2 Guide RNA
acgggggcaaagcaucccucuc

SEQ ID NO: 23611 - RNA, 22 nt, Artificial Sequence
  GATA2 Guide RNA
agagagggaugcuuugcccccg

SEQ ID NO: 23612 - RNA, 22 nt, Artificial Sequence
  GATA2 Guide RNA
agagggaugcuuugcccccguc

SEQ ID NO: 23613 - RNA, 22 nt, Artificial Sequence
  GATA2 Guide RNA
agcaucccucucugccgcugcg

SEQ ID NO: 23614 - RNA, 22 nt, Artificial Sequence
  GATA2 Guide RNA
agcggcagagagggaugcuuug

SEQ ID NO: 23615 - RNA, 22 nt, Artificial Sequence
  GATA2 Guide RNA
agggaugcuuugcccccgucca

SEQ ID NO: 23616 - RNA, 22 nt, Artificial Sequence
  GATA2 Guide RNA
aucccucucugccgcugcggcc

SEQ ID NO: 23617 - RNA, 22 nt, Artificial Sequence
  GATA2 Guide RNA
augcuuugcccccguccagcca

SEQ ID NO: 23618 - RNA, 22 nt, Artificial Sequence
  GATA2 Guide RNA
caaagcaucccucucugccgcu

SEQ ID NO: 23619 - RNA, 22 nt, Artificial Sequence
  GATA2 Guide RNA
cagagagggaugcuuugccccc

SEQ ID NO: 23620 - RNA, 22 nt, Artificial Sequence
  GATA2 Guide RNA
cagcggcagagagggaugcuuu

SEQ ID NO: 23621 - RNA, 22 nt, Artificial Sequence
  GATA2 Guide RNA
caucccucucugccgcugcggc

SEQ ID NO: 23622 - RNA, 22 nt, Artificial Sequence
  GATA2 Guide RNA
ccgcagcggcagagagggaugc

SEQ ID NO: 23623 - RNA, 22 nt, Artificial Sequence
  GATA2 Guide RNA
cgcagcggcagagagggaugcu

SEQ ID NO: 23624 - RNA, 22 nt, Artificial Sequence
  GATA2 Guide RNA
cggcagagagggaugcuuugcc

SEQ ID NO: 23625 - RNA, 22 nt, Artificial Sequence
  GATA2 Guide RNA
cgggggcaaagcaucccucucu

SEQ ID NO: 23626 - RNA, 22 nt, Artificial Sequence
  GATA2 Guide RNA
cuggacgggggcaaagcauccc

SEQ ID NO: 23627 - RNA, 22 nt, Artificial Sequence
  GATA2 Guide RNA
gacgggggcaaagcaucccucu

SEQ ID NO: 23628 - RNA, 22 nt, Artificial Sequence
  GATA2 Guide RNA
gagagggaugcuuugcccccgu

SEQ ID NO: 23629 - RNA, 22 nt, Artificial Sequence
  GATA2 Guide RNA
gagggaugcuuugcccccgucc

SEQ ID NO: 23630 - RNA, 22 nt, Artificial Sequence
  GATA2 Guide RNA
gaugcuuugcccccguccagcc

SEQ ID NO: 23631 - RNA, 22 nt, Artificial Sequence
  GATA2 Guide RNA
gcaaagcaucccucucugccgc

SEQ ID NO: 23632 - RNA, 22 nt, Artificial Sequence
  GATA2 Guide RNA
gcagagagggaugcuuugcccc

SEQ ID NO: 23633 - RNA, 22 nt, Artificial Sequence
  GATA2 Guide RNA
gcagcggcagagagggaugcuu

SEQ ID NO: 23634 - RNA, 22 nt, Artificial Sequence
  GATA2 Guide RNA
gcaucccucucugccgcugcgg

SEQ ID NO: 23635 - RNA, 22 nt, Artificial Sequence
  GATA2 Guide RNA
gcccuggcuggacgggggcaaa

SEQ ID NO: 23636 - RNA, 22 nt, Artificial Sequence
  GATA2 Guide RNA
gccgcagcggcagagagggaug

SEQ ID NO: 23637 - RNA, 22 nt, Artificial Sequence
  GATA2 Guide RNA
gcggcagagagggaugcuuugc

SEQ ID NO: 23638 - RNA, 22 nt, Artificial Sequence
  GATA2 Guide RNA
gcuggacgggggcaaagcaucc

SEQ ID NO: 23639 - RNA, 22 nt, Artificial Sequence
  GATA2 Guide RNA
ggacgggggcaaagcaucccuc

SEQ ID NO: 23640 - RNA, 22 nt, Artificial Sequence
  GATA2 Guide RNA
ggaugcuuugcccccguccagc

SEQ ID NO: 23641 - RNA, 22 nt, Artificial Sequence
  GATA2 Guide RNA
ggcaaagcaucccucucugccg

SEQ ID NO: 23642 - RNA, 22 nt, Artificial Sequence
  GATA2 Guide RNA
ggcagagagggaugcuuugccc

SEQ ID NO: 23643 - RNA, 22 nt, Artificial Sequence
  GATA2 Guide RNA
ggccgcagcggcagagagggau

SEQ ID NO: 23644 - RNA, 22 nt, Artificial Sequence
  GATA2 Guide RNA
ggcuggacgggggcaaagcauc

SEQ ID NO: 23645 - RNA, 22 nt, Artificial Sequence
  GATA2 Guide RNA
gggaugcuuugcccccguccag

SEQ ID NO: 23646 - RNA, 22 nt, Artificial Sequence
  GATA2 Guide RNA
gggcaaagcaucccucucugcc

SEQ ID NO: 23647 - RNA, 22 nt, Artificial Sequence
  GATA2 Guide RNA
gggccgcagcggcagagaggga

SEQ ID NO: 23648 - RNA, 22 nt, Artificial Sequence
  GATA2 Guide RNA
ggggcaaagcaucccucucugc

SEQ ID NO: 23649 - RNA, 22 nt, Artificial Sequence
  GATA2 Guide RNA
gggggcaaagcaucccucucug

SEQ ID NO: 23650 - RNA, 22 nt, Artificial Sequence
  GATA2 Guide RNA
uggacgggggcaaagcaucccu

SEQ ID NO: 23651 - RNA, 22 nt, Artificial Sequence
  GATA2 Guide RNA
uggcuggacgggggcaaagcau

SEQ ID NO: 23652 - RNA, 22 nt, Artificial Sequence
  GATA2 Guide RNA
ugggccgcagcggcagagaggg

SEQ ID NO: 23653 - RNA, 20 nt, Artificial Sequence
  GATA2 Guide RNA
acggggcaaagcagcccucu

SEQ ID NO: 23654 - RNA, 20 nt, Artificial Sequence
  GATA2 Guide RNA
agagggcugcuuugccccgu

SEQ ID NO: 23655 - RNA, 20 nt, Artificial Sequence
  GATA2 Guide RNA
agcggcagagagggcugcuu

SEQ ID NO: 23656 - RNA, 20 nt, Artificial Sequence
  GATA2 Guide RNA
agggcugcuuugccccgucc

SEQ ID NO: 23657 - RNA, 20 nt, Artificial Sequence
  GATA2 Guide RNA
cagagagggcugcuuugccc

SEQ ID NO: 23658 - RNA, 20 nt, Artificial Sequence
  GATA2 Guide RNA
cagcggcagagagggcugcu

SEQ ID NO: 23659 - RNA, 20 nt, Artificial Sequence
  GATA2 Guide RNA
cccuggcuggacggggcaaa

SEQ ID NO: 23660 - RNA, 20 nt, Artificial Sequence
  GATA2 Guide RNA
ccuggcuggacggggcaaag

SEQ ID NO: 23661 - RNA, 20 nt, Artificial Sequence
  GATA2 Guide RNA
cggcagagagggcugcuuug

SEQ ID NO: 23662 - RNA, 20 nt, Artificial Sequence
  GATA2 Guide RNA
cggggcaaagcagcccucuc

SEQ ID NO: 23663 - RNA, 20 nt, Artificial Sequence
  GATA2 Guide RNA
cugcuuugccccguccagcc

SEQ ID NO: 23664 - RNA, 20 nt, Artificial Sequence
  GATA2 Guide RNA
cuggacggggcaaagcagcc

SEQ ID NO: 23665 - RNA, 20 nt, Artificial Sequence
  GATA2 Guide RNA
cuggcuggacggggcaaagc

SEQ ID NO: 23666 - RNA, 20 nt, Artificial Sequence
  GATA2 Guide RNA
cuuugccccguccagccagg

SEQ ID NO: 23667 - RNA, 20 nt, Artificial Sequence
  GATA2 Guide RNA
gacggggcaaagcagcccuc

SEQ ID NO: 23668 - RNA, 20 nt, Artificial Sequence
  GATA2 Guide RNA
gagagggcugcuuugccccg

SEQ ID NO: 23669 - RNA, 20 nt, Artificial Sequence
  GATA2 Guide RNA
gagggcugcuuugccccguc

SEQ ID NO: 23670 - RNA, 20 nt, Artificial Sequence
  GATA2 Guide RNA
gcaaagcagcccucucugcc

SEQ ID NO: 23671 - RNA, 20 nt, Artificial Sequence
  GATA2 Guide RNA
gcagagagggcugcuuugcc

SEQ ID NO: 23672 - RNA, 20 nt, Artificial Sequence
  GATA2 Guide RNA
gccccguccagccagggcaa

SEQ ID NO: 23673 - RNA, 20 nt, Artificial Sequence
  GATA2 Guide RNA
gcccuggcuggacggggcaa

SEQ ID NO: 23674 - RNA, 20 nt, Artificial Sequence
  GATA2 Guide RNA
gcggcagagagggcugcuuu

SEQ ID NO: 23675 - RNA, 20 nt, Artificial Sequence
  GATA2 Guide RNA
gcugcuuugccccguccagc

SEQ ID NO: 23676 - RNA, 20 nt, Artificial Sequence
  GATA2 Guide RNA
gcuggacggggcaaagcagc

SEQ ID NO: 23677 - RNA, 20 nt, Artificial Sequence
  GATA2 Guide RNA
gcuuugccccguccagccag

SEQ ID NO: 23678 - RNA, 20 nt, Artificial Sequence
  GATA2 Guide RNA
ggacggggcaaagcagcccu

SEQ ID NO: 23679 - RNA, 20 nt, Artificial Sequence
  GATA2 Guide RNA
ggcaaagcagcccucucugc

SEQ ID NO: 23680 - RNA, 20 nt, Artificial Sequence
  GATA2 Guide RNA
ggcagagagggcugcuuugc

SEQ ID NO: 23681 - RNA, 20 nt, Artificial Sequence
  GATA2 Guide RNA
ggcugcuuugccccguccag

SEQ ID NO: 23682 - RNA, 20 nt, Artificial Sequence
  GATA2 Guide RNA
ggcuggacggggcaaagcag

SEQ ID NO: 23683 - RNA, 20 nt, Artificial Sequence
  GATA2 Guide RNA
gggcaaagcagcccucucug

SEQ ID NO: 23684 - RNA, 20 nt, Artificial Sequence
  GATA2 Guide RNA
gggcugcuuugccccgucca

SEQ ID NO: 23685 - RNA, 20 nt, Artificial Sequence
  GATA2 Guide RNA
ggguuugcccuggcuggacg

SEQ ID NO: 23686 - RNA, 20 nt, Artificial Sequence
  GATA2 Guide RNA
gguuugcccuggcuggacgg

SEQ ID NO: 23687 - RNA, 20 nt, Artificial Sequence
  GATA2 Guide RNA
guuugcccuggcuggacggg

SEQ ID NO: 23688 - RNA, 20 nt, Artificial Sequence
  GATA2 Guide RNA
ugccccguccagccagggca

SEQ ID NO: 23689 - RNA, 20 nt, Artificial Sequence
  GATA2 Guide RNA
ugcccuggcuggacggggca

SEQ ID NO: 23690 - RNA, 20 nt, Artificial Sequence
  GATA2 Guide RNA
ugcuuugccccguccagcca

SEQ ID NO: 23691 - RNA, 20 nt, Artificial Sequence
  GATA2 Guide RNA
uggacggggcaaagcagccc

SEQ ID NO: 23692 - RNA, 20 nt, Artificial Sequence
  GATA2 Guide RNA
uggcuggacggggcaaagca

SEQ ID NO: 23693 - RNA, 20 nt, Artificial Sequence
  GATA2 Guide RNA
uugccccguccagccagggc

SEQ ID NO: 23694 - RNA, 20 nt, Artificial Sequence
  GATA2 Guide RNA
uugcccuggcuggacggggc

SEQ ID NO: 23695 - RNA, 20 nt, Artificial Sequence
  GATA2 Guide RNA
uuugccccguccagccaggg

SEQ ID NO: 23696 - RNA, 20 nt, Artificial Sequence
  GATA2 Guide RNA
uuugcccuggcuggacgggg

SEQ ID NO: 23697 - RNA, 21 nt, Artificial Sequence
  GATA2 Guide RNA
acggggcaaagcagcccucuc

SEQ ID NO: 23698 - RNA, 21 nt, Artificial Sequence
  GATA2 Guide RNA
agagagggcugcuuugccccg

SEQ ID NO: 23699 - RNA, 21 nt, Artificial Sequence
  GATA2 Guide RNA
agagggcugcuuugccccguc

SEQ ID NO: 23700 - RNA, 21 nt, Artificial Sequence
  GATA2 Guide RNA
agcggcagagagggcugcuuu

SEQ ID NO: 23701 - RNA, 21 nt, Artificial Sequence
  GATA2 Guide RNA
agggcugcuuugccccgucca

SEQ ID NO: 23702 - RNA, 21 nt, Artificial Sequence
  GATA2 Guide RNA
cagagagggcugcuuugcccc

SEQ ID NO: 23703 - RNA, 21 nt, Artificial Sequence
  GATA2 Guide RNA
cagcggcagagagggcugcuu

SEQ ID NO: 23704 - RNA, 21 nt, Artificial Sequence
  GATA2 Guide RNA
cccuggcuggacggggcaaag

SEQ ID NO: 23705 - RNA, 21 nt, Artificial Sequence
  GATA2 Guide RNA
ccuggcuggacggggcaaagc

SEQ ID NO: 23706 - RNA, 21 nt, Artificial Sequence
  GATA2 Guide RNA
cggcagagagggcugcuuugc

SEQ ID NO: 23707 - RNA, 21 nt, Artificial Sequence
  GATA2 Guide RNA
cggggcaaagcagcccucucu

SEQ ID NO: 23708 - RNA, 21 nt, Artificial Sequence
  GATA2 Guide RNA
cggguuugcccuggcuggacg

SEQ ID NO: 23709 - RNA, 21 nt, Artificial Sequence
  GATA2 Guide RNA
cugcuuugccccguccagcca

SEQ ID NO: 23710 - RNA, 21 nt, Artificial Sequence
  GATA2 Guide RNA
cuggacggggcaaagcagccc

SEQ ID NO: 23711 - RNA, 21 nt, Artificial Sequence
  GATA2 Guide RNA
cuggcuggacggggcaaagca

SEQ ID NO: 23712 - RNA, 21 nt, Artificial Sequence
  GATA2 Guide RNA
cuuugccccguccagccaggg

SEQ ID NO: 23713 - RNA, 21 nt, Artificial Sequence
  GATA2 Guide RNA
gacggggcaaagcagcccucu

SEQ ID NO: 23714 - RNA, 21 nt, Artificial Sequence
  GATA2 Guide RNA
gagagggcugcuuugccccgu

SEQ ID NO: 23715 - RNA, 21 nt, Artificial Sequence
  GATA2 Guide RNA
gagggcugcuuugccccgucc

SEQ ID NO: 23716 - RNA, 21 nt, Artificial Sequence
  GATA2 Guide RNA
gcaaagcagcccucucugccg

SEQ ID NO: 23717 - RNA, 21 nt, Artificial Sequence
  GATA2 Guide RNA
gcagagagggcugcuuugccc

SEQ ID NO: 23718 - RNA, 21 nt, Artificial Sequence
  GATA2 Guide RNA
gcagcggcagagagggcugcu

SEQ ID NO: 23719 - RNA, 21 nt, Artificial Sequence
  GATA2 Guide RNA
gccccguccagccagggcaaa

SEQ ID NO: 23720 - RNA, 21 nt, Artificial Sequence
  GATA2 Guide RNA
gcccuggcuggacggggcaaa

SEQ ID NO: 23721 - RNA, 21 nt, Artificial Sequence
  GATA2 Guide RNA
gcggcagagagggcugcuuug

SEQ ID NO: 23722 - RNA, 21 nt, Artificial Sequence
  GATA2 Guide RNA
gcugcuuugccccguccagcc

SEQ ID NO: 23723 - RNA, 21 nt, Artificial Sequence
  GATA2 Guide RNA
gcuggacggggcaaagcagcc

SEQ ID NO: 23724 - RNA, 21 nt, Artificial Sequence
  GATA2 Guide RNA
gcuuugccccguccagccagg

SEQ ID NO: 23725 - RNA, 21 nt, Artificial Sequence
  GATA2 Guide RNA
ggacggggcaaagcagcccuc

SEQ ID NO: 23726 - RNA, 21 nt, Artificial Sequence
  GATA2 Guide RNA
ggcaaagcagcccucucugcc

SEQ ID NO: 23727 - RNA, 21 nt, Artificial Sequence
  GATA2 Guide RNA
ggcagagagggcugcuuugcc

SEQ ID NO: 23728 - RNA, 21 nt, Artificial Sequence
  GATA2 Guide RNA
ggcugcuuugccccguccagc

SEQ ID NO: 23729 - RNA, 21 nt, Artificial Sequence
  GATA2 Guide RNA
ggcuggacggggcaaagcagc

SEQ ID NO: 23730 - RNA, 21 nt, Artificial Sequence
  GATA2 Guide RNA
gggcaaagcagcccucucugc

SEQ ID NO: 23731 - RNA, 21 nt, Artificial Sequence
  GATA2 Guide RNA
gggcugcuuugccccguccag

SEQ ID NO: 23732 - RNA, 21 nt, Artificial Sequence
  GATA2 Guide RNA
ggggcaaagcagcccucucug

SEQ ID NO: 23733 - RNA, 21 nt, Artificial Sequence
  GATA2 Guide RNA
ggguuugcccuggcuggacgg

SEQ ID NO: 23734 - RNA, 21 nt, Artificial Sequence
  GATA2 Guide RNA
gguuugcccuggcuggacggg

SEQ ID NO: 23735 - RNA, 21 nt, Artificial Sequence
  GATA2 Guide RNA
guuugcccuggcuggacgggg

SEQ ID NO: 23736 - RNA, 21 nt, Artificial Sequence
  GATA2 Guide RNA
ugccccguccagccagggcaa

SEQ ID NO: 23737 - RNA, 21 nt, Artificial Sequence
  GATA2 Guide RNA
ugcccuggcuggacggggcaa

SEQ ID NO: 23738 - RNA, 21 nt, Artificial Sequence
  GATA2 Guide RNA
ugcuuugccccguccagccag

SEQ ID NO: 23739 - RNA, 21 nt, Artificial Sequence
  GATA2 Guide RNA
uggacggggcaaagcagcccu

SEQ ID NO: 23740 - RNA, 21 nt, Artificial Sequence
  GATA2 Guide RNA
uggcuggacggggcaaagcag

SEQ ID NO: 23741 - RNA, 21 nt, Artificial Sequence
  GATA2 Guide RNA
uugccccguccagccagggca

SEQ ID NO: 23742 - RNA, 21 nt, Artificial Sequence
  GATA2 Guide RNA
uugcccuggcuggacggggca

SEQ ID NO: 23743 - RNA, 21 nt, Artificial Sequence
  GATA2 Guide RNA
uuugccccguccagccagggc

SEQ ID NO: 23744 - RNA, 21 nt, Artificial Sequence
  GATA2 Guide RNA
uuugcccuggcuggacggggc

SEQ ID NO: 23745 - RNA, 22 nt, Artificial Sequence
  GATA2 Guide RNA
acggggcaaagcagcccucucu

SEQ ID NO: 23746 - RNA, 22 nt, Artificial Sequence
  GATA2 Guide RNA
agagagggcugcuuugccccgu

SEQ ID NO: 23747 - RNA, 22 nt, Artificial Sequence
  GATA2 Guide RNA
agagggcugcuuugccccgucc

SEQ ID NO: 23748 - RNA, 22 nt, Artificial Sequence
  GATA2 Guide RNA
agcggcagagagggcugcuuug

SEQ ID NO: 23749 - RNA, 22 nt, Artificial Sequence
  GATA2 Guide RNA
agggcugcuuugccccguccag

SEQ ID NO: 23750 - RNA, 22 nt, Artificial Sequence
  GATA2 Guide RNA
cagagagggcugcuuugccccg

SEQ ID NO: 23751 - RNA, 22 nt, Artificial Sequence
  GATA2 Guide RNA
cagcggcagagagggcugcuuu

SEQ ID NO: 23752 - RNA, 22 nt, Artificial Sequence
  GATA2 Guide RNA
cccuggcuggacggggcaaagc

SEQ ID NO: 23753 - RNA, 22 nt, Artificial Sequence
  GATA2 Guide RNA
ccggguuugcccuggcuggacg

SEQ ID NO: 23754 - RNA, 22 nt, Artificial Sequence
  GATA2 Guide RNA
ccuggcuggacggggcaaagca

SEQ ID NO: 23755 - RNA, 22 nt, Artificial Sequence
  GATA2 Guide RNA
cgcagcggcagagagggcugcu

SEQ ID NO: 23756 - RNA, 22 nt, Artificial Sequence
  GATA2 Guide RNA
cggcagagagggcugcuuugcc

SEQ ID NO: 23757 - RNA, 22 nt, Artificial Sequence
  GATA2 Guide RNA
cggggcaaagcagcccucucug

SEQ ID NO: 23758 - RNA, 22 nt, Artificial Sequence
  GATA2 Guide RNA
cggguuugcccuggcuggacgg

SEQ ID NO: 23759 - RNA, 22 nt, Artificial Sequence
  GATA2 Guide RNA
cugcuuugccccguccagccag

SEQ ID NO: 23760 - RNA, 22 nt, Artificial Sequence
  GATA2 Guide RNA
cuggacggggcaaagcagcccu

SEQ ID NO: 23761 - RNA, 22 nt, Artificial Sequence
  GATA2 Guide RNA
cuggcuggacggggcaaagcag

SEQ ID NO: 23762 - RNA, 22 nt, Artificial Sequence
  GATA2 Guide RNA
cuuugccccguccagccagggc

SEQ ID NO: 23763 - RNA, 22 nt, Artificial Sequence
  GATA2 Guide RNA
gacggggcaaagcagcccucuc

SEQ ID NO: 23764 - RNA, 22 nt, Artificial Sequence
  GATA2 Guide RNA
gagagggcugcuuugccccguc

SEQ ID NO: 23765 - RNA, 22 nt, Artificial Sequence
  GATA2 Guide RNA
gagggcugcuuugccccgucca

SEQ ID NO: 23766 - RNA, 22 nt, Artificial Sequence
  GATA2 Guide RNA
gcagagagggcugcuuugcccc

SEQ ID NO: 23767 - RNA, 22 nt, Artificial Sequence
  GATA2 Guide RNA
gcagcggcagagagggcugcuu

SEQ ID NO: 23768 - RNA, 22 nt, Artificial Sequence
  GATA2 Guide RNA
gccccguccagccagggcaaac

SEQ ID NO: 23769 - RNA, 22 nt, Artificial Sequence
  GATA2 Guide RNA
gcccuggcuggacggggcaaag

SEQ ID NO: 23770 - RNA, 22 nt, Artificial Sequence
  GATA2 Guide RNA
gcggcagagagggcugcuuugc

SEQ ID NO: 23771 - RNA, 22 nt, Artificial Sequence
  GATA2 Guide RNA
gcugcuuugccccguccagcca

SEQ ID NO: 23772 - RNA, 22 nt, Artificial Sequence
  GATA2 Guide RNA
gcuggacggggcaaagcagccc

SEQ ID NO: 23773 - RNA, 22 nt, Artificial Sequence
  GATA2 Guide RNA
gcuuugccccguccagccaggg

SEQ ID NO: 23774 - RNA, 22 nt, Artificial Sequence
  GATA2 Guide RNA
ggacggggcaaagcagcccucu

SEQ ID NO: 23775 - RNA, 22 nt, Artificial Sequence
  GATA2 Guide RNA
ggcaaagcagcccucucugccg

SEQ ID NO: 23776 - RNA, 22 nt, Artificial Sequence
  GATA2 Guide RNA
ggcagagagggcugcuuugccc

SEQ ID NO: 23777 - RNA, 22 nt, Artificial Sequence
  GATA2 Guide RNA
ggcugcuuugccccguccagcc

SEQ ID NO: 23778 - RNA, 22 nt, Artificial Sequence
  GATA2 Guide RNA
ggcuggacggggcaaagcagcc

SEQ ID NO: 23779 - RNA, 22 nt, Artificial Sequence
  GATA2 Guide RNA
gggcaaagcagcccucucugcc

SEQ ID NO: 23780 - RNA, 22 nt, Artificial Sequence
  GATA2 Guide RNA
gggcugcuuugccccguccagc

SEQ ID NO: 23781 - RNA, 22 nt, Artificial Sequence
  GATA2 Guide RNA
ggggcaaagcagcccucucugc

SEQ ID NO: 23782 - RNA, 22 nt, Artificial Sequence
  GATA2 Guide RNA
ggguuugcccuggcuggacggg

SEQ ID NO: 23783 - RNA, 22 nt, Artificial Sequence
  GATA2 Guide RNA
gguuugcccuggcuggacgggg

SEQ ID NO: 23784 - RNA, 22 nt, Artificial Sequence
  GATA2 Guide RNA
guuugcccuggcuggacggggc

SEQ ID NO: 23785 - RNA, 22 nt, Artificial Sequence
  GATA2 Guide RNA
ugccccguccagccagggcaaa

SEQ ID NO: 23786 - RNA, 22 nt, Artificial Sequence
  GATA2 Guide RNA
ugcccuggcuggacggggcaaa

SEQ ID NO: 23787 - RNA, 22 nt, Artificial Sequence
  GATA2 Guide RNA
ugcuuugccccguccagccagg

SEQ ID NO: 23788 - RNA, 22 nt, Artificial Sequence
  GATA2 Guide RNA
uggacggggcaaagcagcccuc

SEQ ID NO: 23789 - RNA, 22 nt, Artificial Sequence
  GATA2 Guide RNA
uggcuggacggggcaaagcagc

SEQ ID NO: 23790 - RNA, 22 nt, Artificial Sequence
  GATA2 Guide RNA
uugccccguccagccagggcaa

SEQ ID NO: 23791 - RNA, 22 nt, Artificial Sequence
  GATA2 Guide RNA
uugcccuggcuggacggggcaa

SEQ ID NO: 23792 - RNA, 22 nt, Artificial Sequence
  GATA2 Guide RNA
uuugccccguccagccagggca

SEQ ID NO: 23793 - RNA, 22 nt, Artificial Sequence
  GATA2 Guide RNA
uuugcccuggcuggacggggca

SEQ ID NO: 23794 - RNA, 20 nt, Artificial Sequence
  GATA2 Guide RNA
acggggacaaagcagcccuc

SEQ ID NO: 23795 - RNA, 20 nt, Artificial Sequence
  GATA2 Guide RNA
agagagggcugcuuuguccc

SEQ ID NO: 23796 - RNA, 20 nt, Artificial Sequence
  GATA2 Guide RNA
agagggcugcuuuguccccg

SEQ ID NO: 23797 - RNA, 20 nt, Artificial Sequence
  GATA2 Guide RNA
agggcugcuuuguccccguc

SEQ ID NO: 23798 - RNA, 20 nt, Artificial Sequence
  GATA2 Guide RNA
cagagagggcugcuuugucc

SEQ ID NO: 23799 - RNA, 20 nt, Artificial Sequence
  GATA2 Guide RNA
cccuggcuggacggggacaa

SEQ ID NO: 23800 - RNA, 20 nt, Artificial Sequence
  GATA2 Guide RNA
ccuggcuggacggggacaaa

SEQ ID NO: 23801 - RNA, 20 nt, Artificial Sequence
  GATA2 Guide RNA
cggggacaaagcagcccucu

SEQ ID NO: 23802 - RNA, 20 nt, Artificial Sequence
  GATA2 Guide RNA
cugcuuuguccccguccagc

SEQ ID NO: 23803 - RNA, 20 nt, Artificial Sequence
  GATA2 Guide RNA
cuggacggggacaaagcagc

SEQ ID NO: 23804 - RNA, 20 nt, Artificial Sequence
  GATA2 Guide RNA
cuggcuggacggggacaaag

SEQ ID NO: 23805 - RNA, 20 nt, Artificial Sequence
  GATA2 Guide RNA
cuuuguccccguccagccag

SEQ ID NO: 23806 - RNA, 20 nt, Artificial Sequence
  GATA2 Guide RNA
gacaaagcagcccucucugc

SEQ ID NO: 23807 - RNA, 20 nt, Artificial Sequence
  GATA2 Guide RNA
gacggggacaaagcagcccu

SEQ ID NO: 23808 - RNA, 20 nt, Artificial Sequence
  GATA2 Guide RNA
gagagggcugcuuugucccc

SEQ ID NO: 23809 - RNA, 20 nt, Artificial Sequence
  GATA2 Guide RNA
gagggcugcuuuguccccgu

SEQ ID NO: 23810 - RNA, 20 nt, Artificial Sequence
  GATA2 Guide RNA
gcagagagggcugcuuuguc

SEQ ID NO: 23811 - RNA, 20 nt, Artificial Sequence
  GATA2 Guide RNA
gcccuggcuggacggggaca

SEQ ID NO: 23812 - RNA, 20 nt, Artificial Sequence
  GATA2 Guide RNA
gcugcuuuguccccguccag

SEQ ID NO: 23813 - RNA, 20 nt, Artificial Sequence
  GATA2 Guide RNA
gcuggacggggacaaagcag

SEQ ID NO: 23814 - RNA, 20 nt, Artificial Sequence
  GATA2 Guide RNA
gcuuuguccccguccagcca

SEQ ID NO: 23815 - RNA, 20 nt, Artificial Sequence
  GATA2 Guide RNA
ggacaaagcagcccucucug

SEQ ID NO: 23816 - RNA, 20 nt, Artificial Sequence
  GATA2 Guide RNA
ggacggggacaaagcagccc

SEQ ID NO: 23817 - RNA, 20 nt, Artificial Sequence
  GATA2 Guide RNA
ggcagagagggcugcuuugu

SEQ ID NO: 23818 - RNA, 20 nt, Artificial Sequence
  GATA2 Guide RNA
ggcugcuuuguccccgucca

SEQ ID NO: 23819 - RNA, 20 nt, Artificial Sequence
  GATA2 Guide RNA
ggcuggacggggacaaagca

SEQ ID NO: 23820 - RNA, 20 nt, Artificial Sequence
  GATA2 Guide RNA
gggacaaagcagcccucucu

SEQ ID NO: 23821 - RNA, 20 nt, Artificial Sequence
  GATA2 Guide RNA
gggcugcuuuguccccgucc

SEQ ID NO: 23822 - RNA, 20 nt, Artificial Sequence
  GATA2 Guide RNA
ggggacaaagcagcccucuc

SEQ ID NO: 23823 - RNA, 20 nt, Artificial Sequence
  GATA2 Guide RNA
guccccguccagccagggca

SEQ ID NO: 23824 - RNA, 20 nt, Artificial Sequence
  GATA2 Guide RNA
uccccguccagccagggcaa

SEQ ID NO: 23825 - RNA, 20 nt, Artificial Sequence
  GATA2 Guide RNA
ugcccuggcuggacggggac

SEQ ID NO: 23826 - RNA, 20 nt, Artificial Sequence
  GATA2 Guide RNA
ugcuuuguccccguccagcc

SEQ ID NO: 23827 - RNA, 20 nt, Artificial Sequence
  GATA2 Guide RNA
uggacggggacaaagcagcc

SEQ ID NO: 23828 - RNA, 20 nt, Artificial Sequence
  GATA2 Guide RNA
uggcuggacggggacaaagc

SEQ ID NO: 23829 - RNA, 20 nt, Artificial Sequence
  GATA2 Guide RNA
uguccccguccagccagggc

SEQ ID NO: 23830 - RNA, 20 nt, Artificial Sequence
  GATA2 Guide RNA
uugcccuggcuggacgggga

SEQ ID NO: 23831 - RNA, 20 nt, Artificial Sequence
  GATA2 Guide RNA
uuguccccguccagccaggg

SEQ ID NO: 23832 - RNA, 20 nt, Artificial Sequence
  GATA2 Guide RNA
uuuguccccguccagccagg

SEQ ID NO: 23833 - RNA, 21 nt, Artificial Sequence
  GATA2 Guide RNA
acggggacaaagcagcccucu

SEQ ID NO: 23834 - RNA, 21 nt, Artificial Sequence
  GATA2 Guide RNA
agagagggcugcuuugucccc

SEQ ID NO: 23835 - RNA, 21 nt, Artificial Sequence
  GATA2 Guide RNA
agagggcugcuuuguccccgu

SEQ ID NO: 23836 - RNA, 21 nt, Artificial Sequence
  GATA2 Guide RNA
agggcugcuuuguccccgucc

SEQ ID NO: 23837 - RNA, 21 nt, Artificial Sequence
  GATA2 Guide RNA
cagagagggcugcuuuguccc

SEQ ID NO: 23838 - RNA, 21 nt, Artificial Sequence
  GATA2 Guide RNA
cccuggcuggacggggacaaa

SEQ ID NO: 23839 - RNA, 21 nt, Artificial Sequence
  GATA2 Guide RNA
ccuggcuggacggggacaaag

SEQ ID NO: 23840 - RNA, 21 nt, Artificial Sequence
  GATA2 Guide RNA
cggcagagagggcugcuuugu

SEQ ID NO: 23841 - RNA, 21 nt, Artificial Sequence
  GATA2 Guide RNA
cggggacaaagcagcccucuc

SEQ ID NO: 23842 - RNA, 21 nt, Artificial Sequence
  GATA2 Guide RNA
cugcuuuguccccguccagcc

SEQ ID NO: 23843 - RNA, 21 nt, Artificial Sequence
  GATA2 Guide RNA
cuggacggggacaaagcagcc

SEQ ID NO: 23844 - RNA, 21 nt, Artificial Sequence
  GATA2 Guide RNA
cuggcuggacggggacaaagc

SEQ ID NO: 23845 - RNA, 21 nt, Artificial Sequence
  GATA2 Guide RNA
cuuuguccccguccagccagg

SEQ ID NO: 23846 - RNA, 21 nt, Artificial Sequence
  GATA2 Guide RNA
gacaaagcagcccucucugcc

SEQ ID NO: 23847 - RNA, 21 nt, Artificial Sequence
  GATA2 Guide RNA
gacggggacaaagcagcccuc

SEQ ID NO: 23848 - RNA, 21 nt, Artificial Sequence
  GATA2 Guide RNA
gagagggcugcuuuguccccg

SEQ ID NO: 23849 - RNA, 21 nt, Artificial Sequence
  GATA2 Guide RNA
gagggcugcuuuguccccguc

SEQ ID NO: 23850 - RNA, 21 nt, Artificial Sequence
  GATA2 Guide RNA
gcagagagggcugcuuugucc

SEQ ID NO: 23851 - RNA, 21 nt, Artificial Sequence
  GATA2 Guide RNA
gcccuggcuggacggggacaa

SEQ ID NO: 23852 - RNA, 21 nt, Artificial Sequence
  GATA2 Guide RNA
gcugcuuuguccccguccagc

SEQ ID NO: 23853 - RNA, 21 nt, Artificial Sequence
  GATA2 Guide RNA
gcuggacggggacaaagcagc

SEQ ID NO: 23854 - RNA, 21 nt, Artificial Sequence
  GATA2 Guide RNA
gcuuuguccccguccagccag

SEQ ID NO: 23855 - RNA, 21 nt, Artificial Sequence
  GATA2 Guide RNA
ggacaaagcagcccucucugc

SEQ ID NO: 23856 - RNA, 21 nt, Artificial Sequence
  GATA2 Guide RNA
ggacggggacaaagcagcccu

SEQ ID NO: 23857 - RNA, 21 nt, Artificial Sequence
  GATA2 Guide RNA
ggcagagagggcugcuuuguc

SEQ ID NO: 23858 - RNA, 21 nt, Artificial Sequence
  GATA2 Guide RNA
ggcugcuuuguccccguccag

SEQ ID NO: 23859 - RNA, 21 nt, Artificial Sequence
  GATA2 Guide RNA
ggcuggacggggacaaagcag

SEQ ID NO: 23860 - RNA, 21 nt, Artificial Sequence
  GATA2 Guide RNA
gggacaaagcagcccucucug

SEQ ID NO: 23861 - RNA, 21 nt, Artificial Sequence
  GATA2 Guide RNA
gggcugcuuuguccccgucca

SEQ ID NO: 23862 - RNA, 21 nt, Artificial Sequence
  GATA2 Guide RNA
ggggacaaagcagcccucucu

SEQ ID NO: 23863 - RNA, 21 nt, Artificial Sequence
  GATA2 Guide RNA
guccccguccagccagggcaa

SEQ ID NO: 23864 - RNA, 21 nt, Artificial Sequence
  GATA2 Guide RNA
uccccguccagccagggcaaa

SEQ ID NO: 23865 - RNA, 21 nt, Artificial Sequence
  GATA2 Guide RNA
ugcccuggcuggacggggaca

SEQ ID NO: 23866 - RNA, 21 nt, Artificial Sequence
  GATA2 Guide RNA
ugcuuuguccccguccagcca

SEQ ID NO: 23867 - RNA, 21 nt, Artificial Sequence
  GATA2 Guide RNA
uggacggggacaaagcagccc

SEQ ID NO: 23868 - RNA, 21 nt, Artificial Sequence
  GATA2 Guide RNA
uggcuggacggggacaaagca

SEQ ID NO: 23869 - RNA, 21 nt, Artificial Sequence
  GATA2 Guide RNA
uguccccguccagccagggca

SEQ ID NO: 23870 - RNA, 21 nt, Artificial Sequence
  GATA2 Guide RNA
uugcccuggcuggacggggac

SEQ ID NO: 23871 - RNA, 21 nt, Artificial Sequence
  GATA2 Guide RNA
uuguccccguccagccagggc

SEQ ID NO: 23872 - RNA, 21 nt, Artificial Sequence
  GATA2 Guide RNA
uuugcccuggcuggacgggga

SEQ ID NO: 23873 - RNA, 21 nt, Artificial Sequence
  GATA2 Guide RNA
uuuguccccguccagccaggg

SEQ ID NO: 23874 - RNA, 22 nt, Artificial Sequence
  GATA2 Guide RNA
acggggacaaagcagcccucuc

SEQ ID NO: 23875 - RNA, 22 nt, Artificial Sequence
  GATA2 Guide RNA
agagagggcugcuuuguccccg

SEQ ID NO: 23876 - RNA, 22 nt, Artificial Sequence
  GATA2 Guide RNA
agagggcugcuuuguccccguc

SEQ ID NO: 23877 - RNA, 22 nt, Artificial Sequence
  GATA2 Guide RNA
agggcugcuuuguccccgucca

SEQ ID NO: 23878 - RNA, 22 nt, Artificial Sequence
  GATA2 Guide RNA
cagagagggcugcuuugucccc

SEQ ID NO: 23879 - RNA, 22 nt, Artificial Sequence
  GATA2 Guide RNA
cccuggcuggacggggacaaag

SEQ ID NO: 23880 - RNA, 22 nt, Artificial Sequence
  GATA2 Guide RNA
ccuggcuggacggggacaaagc

SEQ ID NO: 23881 - RNA, 22 nt, Artificial Sequence
  GATA2 Guide RNA
cggcagagagggcugcuuuguc

SEQ ID NO: 23882 - RNA, 22 nt, Artificial Sequence
  GATA2 Guide RNA
cggggacaaagcagcccucucu

SEQ ID NO: 23883 - RNA, 22 nt, Artificial Sequence
  GATA2 Guide RNA
cugcuuuguccccguccagcca

SEQ ID NO: 23884 - RNA, 22 nt, Artificial Sequence
  GATA2 Guide RNA
cuggacggggacaaagcagccc

SEQ ID NO: 23885 - RNA, 22 nt, Artificial Sequence
  GATA2 Guide RNA
cuggcuggacggggacaaagca

SEQ ID NO: 23886 - RNA, 22 nt, Artificial Sequence
  GATA2 Guide RNA
cuuuguccccguccagccaggg

SEQ ID NO: 23887 - RNA, 22 nt, Artificial Sequence
  GATA2 Guide RNA
gacaaagcagcccucucugccg

SEQ ID NO: 23888 - RNA, 22 nt, Artificial Sequence
  GATA2 Guide RNA
gacggggacaaagcagcccucu

SEQ ID NO: 23889 - RNA, 22 nt, Artificial Sequence
  GATA2 Guide RNA
gagagggcugcuuuguccccgu

SEQ ID NO: 23890 - RNA, 22 nt, Artificial Sequence
  GATA2 Guide RNA
gagggcugcuuuguccccgucc

SEQ ID NO: 23891 - RNA, 22 nt, Artificial Sequence
  GATA2 Guide RNA
gcagagagggcugcuuuguccc

SEQ ID NO: 23892 - RNA, 22 nt, Artificial Sequence
  GATA2 Guide RNA
gcccuggcuggacggggacaaa

SEQ ID NO: 23893 - RNA, 22 nt, Artificial Sequence
  GATA2 Guide RNA
gcggcagagagggcugcuuugu

SEQ ID NO: 23894 - RNA, 22 nt, Artificial Sequence
  GATA2 Guide RNA
gcugcuuuguccccguccagcc

SEQ ID NO: 23895 - RNA, 22 nt, Artificial Sequence
  GATA2 Guide RNA
gcuggacggggacaaagcagcc

SEQ ID NO: 23896 - RNA, 22 nt, Artificial Sequence
  GATA2 Guide RNA
gcuuuguccccguccagccagg

SEQ ID NO: 23897 - RNA, 22 nt, Artificial Sequence
  GATA2 Guide RNA
ggacaaagcagcccucucugcc

SEQ ID NO: 23898 - RNA, 22 nt, Artificial Sequence
  GATA2 Guide RNA
ggacggggacaaagcagcccuc

SEQ ID NO: 23899 - RNA, 22 nt, Artificial Sequence
  GATA2 Guide RNA
ggcagagagggcugcuuugucc

SEQ ID NO: 23900 - RNA, 22 nt, Artificial Sequence
  GATA2 Guide RNA
ggcugcuuuguccccguccagc

SEQ ID NO: 23901 - RNA, 22 nt, Artificial Sequence
  GATA2 Guide RNA
ggcuggacggggacaaagcagc

SEQ ID NO: 23902 - RNA, 22 nt, Artificial Sequence
  GATA2 Guide RNA
gggacaaagcagcccucucugc

SEQ ID NO: 23903 - RNA, 22 nt, Artificial Sequence
  GATA2 Guide RNA
gggcugcuuuguccccguccag

SEQ ID NO: 23904 - RNA, 22 nt, Artificial Sequence
  GATA2 Guide RNA
ggggacaaagcagcccucucug

SEQ ID NO: 23905 - RNA, 22 nt, Artificial Sequence
  GATA2 Guide RNA
guccccguccagccagggcaaa

SEQ ID NO: 23906 - RNA, 22 nt, Artificial Sequence
  GATA2 Guide RNA
guuugcccuggcuggacgggga

SEQ ID NO: 23907 - RNA, 22 nt, Artificial Sequence
  GATA2 Guide RNA
uccccguccagccagggcaaac

SEQ ID NO: 23908 - RNA, 22 nt, Artificial Sequence
  GATA2 Guide RNA
ugcccuggcuggacggggacaa

SEQ ID NO: 23909 - RNA, 22 nt, Artificial Sequence
  GATA2 Guide RNA
ugcuuuguccccguccagccag

SEQ ID NO: 23910 - RNA, 22 nt, Artificial Sequence
  GATA2 Guide RNA
uggacggggacaaagcagcccu

SEQ ID NO: 23911 - RNA, 22 nt, Artificial Sequence
  GATA2 Guide RNA
uggcuggacggggacaaagcag

SEQ ID NO: 23912 - RNA, 22 nt, Artificial Sequence
  GATA2 Guide RNA
uguccccguccagccagggcaa

SEQ ID NO: 23913 - RNA, 22 nt, Artificial Sequence
  GATA2 Guide RNA
uugcccuggcuggacggggaca

SEQ ID NO: 23914 - RNA, 22 nt, Artificial Sequence
  GATA2 Guide RNA
uuguccccguccagccagggca

SEQ ID NO: 23915 - RNA, 22 nt, Artificial Sequence
  GATA2 Guide RNA
uuugcccuggcuggacggggac

SEQ ID NO: 23916 - RNA, 22 nt, Artificial Sequence
  GATA2 Guide RNA
uuuguccccguccagccagggc

SEQ ID NO: 23917 - RNA, 20 nt, Artificial Sequence
  GATA2 Guide RNA
aacguccagccagggcaaac

SEQ ID NO: 23918 - RNA, 20 nt, Artificial Sequence
  GATA2 Guide RNA
acguuggcaaagcagcccuc

SEQ ID NO: 23919 - RNA, 20 nt, Artificial Sequence
  GATA2 Guide RNA
agagagggcugcuuugccaa

SEQ ID NO: 23920 - RNA, 20 nt, Artificial Sequence
  GATA2 Guide RNA
agagggcugcuuugccaacg

SEQ ID NO: 23921 - RNA, 20 nt, Artificial Sequence
  GATA2 Guide RNA
agggcugcuuugccaacguc

SEQ ID NO: 23922 - RNA, 20 nt, Artificial Sequence
  GATA2 Guide RNA
caacguccagccagggcaaa

SEQ ID NO: 23923 - RNA, 20 nt, Artificial Sequence
  GATA2 Guide RNA
cagagagggcugcuuugcca

SEQ ID NO: 23924 - RNA, 20 nt, Artificial Sequence
  GATA2 Guide RNA
ccaacguccagccagggcaa

SEQ ID NO: 23925 - RNA, 20 nt, Artificial Sequence
  GATA2 Guide RNA
cccuggcuggacguuggcaa

SEQ ID NO: 23926 - RNA, 20 nt, Artificial Sequence
  GATA2 Guide RNA
ccggguuugcccuggcugga

SEQ ID NO: 23927 - RNA, 20 nt, Artificial Sequence
  GATA2 Guide RNA
ccuggcuggacguuggcaaa

SEQ ID NO: 23928 - RNA, 20 nt, Artificial Sequence
  GATA2 Guide RNA
cggguuugcccuggcuggac

SEQ ID NO: 23929 - RNA, 20 nt, Artificial Sequence
  GATA2 Guide RNA
cguuggcaaagcagcccucu

SEQ ID NO: 23930 - RNA, 20 nt, Artificial Sequence
  GATA2 Guide RNA
cugcuuugccaacguccagc

SEQ ID NO: 23931 - RNA, 20 nt, Artificial Sequence
  GATA2 Guide RNA
cuggacguuggcaaagcagc

SEQ ID NO: 23932 - RNA, 20 nt, Artificial Sequence
  GATA2 Guide RNA
cuggcuggacguuggcaaag

SEQ ID NO: 23933 - RNA, 20 nt, Artificial Sequence
  GATA2 Guide RNA
cuuugccaacguccagccag

SEQ ID NO: 23934 - RNA, 20 nt, Artificial Sequence
  GATA2 Guide RNA
gacguuggcaaagcagcccu

SEQ ID NO: 23935 - RNA, 20 nt, Artificial Sequence
  GATA2 Guide RNA
gagagggcugcuuugccaac

SEQ ID NO: 23936 - RNA, 20 nt, Artificial Sequence
  GATA2 Guide RNA
gagggcugcuuugccaacgu

SEQ ID NO: 23937 - RNA, 20 nt, Artificial Sequence
  GATA2 Guide RNA
gccaacguccagccagggca

SEQ ID NO: 23938 - RNA, 20 nt, Artificial Sequence
  GATA2 Guide RNA
gcccuggcuggacguuggca

SEQ ID NO: 23939 - RNA, 20 nt, Artificial Sequence
  GATA2 Guide RNA
gcugcuuugccaacguccag

SEQ ID NO: 23940 - RNA, 20 nt, Artificial Sequence
  GATA2 Guide RNA
gcuggacguuggcaaagcag

SEQ ID NO: 23941 - RNA, 20 nt, Artificial Sequence
  GATA2 Guide RNA
gcuuugccaacguccagcca

SEQ ID NO: 23942 - RNA, 20 nt, Artificial Sequence
  GATA2 Guide RNA
ggacguuggcaaagcagccc

SEQ ID NO: 23943 - RNA, 20 nt, Artificial Sequence
  GATA2 Guide RNA
ggcugcuuugccaacgucca

SEQ ID NO: 23944 - RNA, 20 nt, Artificial Sequence
  GATA2 Guide RNA
ggcuggacguuggcaaagca

SEQ ID NO: 23945 - RNA, 20 nt, Artificial Sequence
  GATA2 Guide RNA
gggcugcuuugccaacgucc

SEQ ID NO: 23946 - RNA, 20 nt, Artificial Sequence
  GATA2 Guide RNA
gguuugcccuggcuggacgu

SEQ ID NO: 23947 - RNA, 20 nt, Artificial Sequence
  GATA2 Guide RNA
guuggcaaagcagcccucuc

SEQ ID NO: 23948 - RNA, 20 nt, Artificial Sequence
  GATA2 Guide RNA
guuugcccuggcuggacguu

SEQ ID NO: 23949 - RNA, 20 nt, Artificial Sequence
  GATA2 Guide RNA
ugccaacguccagccagggc

SEQ ID NO: 23950 - RNA, 20 nt, Artificial Sequence
  GATA2 Guide RNA
ugcccuggcuggacguuggc

SEQ ID NO: 23951 - RNA, 20 nt, Artificial Sequence
  GATA2 Guide RNA
ugcuuugccaacguccagcc

SEQ ID NO: 23952 - RNA, 20 nt, Artificial Sequence
  GATA2 Guide RNA
uggacguuggcaaagcagcc

SEQ ID NO: 23953 - RNA, 20 nt, Artificial Sequence
  GATA2 Guide RNA
uggcuggacguuggcaaagc

SEQ ID NO: 23954 - RNA, 20 nt, Artificial Sequence
  GATA2 Guide RNA
uugccaacguccagccaggg

SEQ ID NO: 23955 - RNA, 20 nt, Artificial Sequence
  GATA2 Guide RNA
uugcccuggcuggacguugg

SEQ ID NO: 23956 - RNA, 20 nt, Artificial Sequence
  GATA2 Guide RNA
uuggcaaagcagcccucucu

SEQ ID NO: 23957 - RNA, 20 nt, Artificial Sequence
  GATA2 Guide RNA
uuugccaacguccagccagg

SEQ ID NO: 23958 - RNA, 20 nt, Artificial Sequence
  GATA2 Guide RNA
uuugcccuggcuggacguug

SEQ ID NO: 23959 - RNA, 21 nt, Artificial Sequence
  GATA2 Guide RNA
aacguccagccagggcaaacc

SEQ ID NO: 23960 - RNA, 21 nt, Artificial Sequence
  GATA2 Guide RNA
acguuggcaaagcagcccucu

SEQ ID NO: 23961 - RNA, 21 nt, Artificial Sequence
  GATA2 Guide RNA
agagagggcugcuuugccaac

SEQ ID NO: 23962 - RNA, 21 nt, Artificial Sequence
  GATA2 Guide RNA
agagggcugcuuugccaacgu

SEQ ID NO: 23963 - RNA, 21 nt, Artificial Sequence
  GATA2 Guide RNA
agggcugcuuugccaacgucc

SEQ ID NO: 23964 - RNA, 21 nt, Artificial Sequence
  GATA2 Guide RNA
caacguccagccagggcaaac

SEQ ID NO: 23965 - RNA, 21 nt, Artificial Sequence
  GATA2 Guide RNA
cagagagggcugcuuugccaa

SEQ ID NO: 23966 - RNA, 21 nt, Artificial Sequence
  GATA2 Guide RNA
ccaacguccagccagggcaaa

SEQ ID NO: 23967 - RNA, 21 nt, Artificial Sequence
  GATA2 Guide RNA
cccggguuugcccuggcugga

SEQ ID NO: 23968 - RNA, 21 nt, Artificial Sequence
  GATA2 Guide RNA
cccuggcuggacguuggcaaa

SEQ ID NO: 23969 - RNA, 21 nt, Artificial Sequence
  GATA2 Guide RNA
ccggguuugcccuggcuggac

SEQ ID NO: 23970 - RNA, 21 nt, Artificial Sequence
  GATA2 Guide RNA
ccuggcuggacguuggcaaag

SEQ ID NO: 23971 - RNA, 21 nt, Artificial Sequence
  GATA2 Guide RNA
cguuggcaaagcagcccucuc

SEQ ID NO: 23972 - RNA, 21 nt, Artificial Sequence
  GATA2 Guide RNA
cugcuuugccaacguccagcc

SEQ ID NO: 23973 - RNA, 21 nt, Artificial Sequence
  GATA2 Guide RNA
cuggacguuggcaaagcagcc

SEQ ID NO: 23974 - RNA, 21 nt, Artificial Sequence
  GATA2 Guide RNA
cuggcuggacguuggcaaagc

SEQ ID NO: 23975 - RNA, 21 nt, Artificial Sequence
  GATA2 Guide RNA
cuuugccaacguccagccagg

SEQ ID NO: 23976 - RNA, 21 nt, Artificial Sequence
  GATA2 Guide RNA
gacguuggcaaagcagcccuc

SEQ ID NO: 23977 - RNA, 21 nt, Artificial Sequence
  GATA2 Guide RNA
gagagggcugcuuugccaacg

SEQ ID NO: 23978 - RNA, 21 nt, Artificial Sequence
  GATA2 Guide RNA
gagggcugcuuugccaacguc

SEQ ID NO: 23979 - RNA, 21 nt, Artificial Sequence
  GATA2 Guide RNA
gcagagagggcugcuuugcca

SEQ ID NO: 23980 - RNA, 21 nt, Artificial Sequence
  GATA2 Guide RNA
gccaacguccagccagggcaa

SEQ ID NO: 23981 - RNA, 21 nt, Artificial Sequence
  GATA2 Guide RNA
gcccuggcuggacguuggcaa

SEQ ID NO: 23982 - RNA, 21 nt, Artificial Sequence
  GATA2 Guide RNA
gcugcuuugccaacguccagc

SEQ ID NO: 23983 - RNA, 21 nt, Artificial Sequence
  GATA2 Guide RNA
gcuggacguuggcaaagcagc

SEQ ID NO: 23984 - RNA, 21 nt, Artificial Sequence
  GATA2 Guide RNA
gcuuugccaacguccagccag

SEQ ID NO: 23985 - RNA, 21 nt, Artificial Sequence
  GATA2 Guide RNA
ggacguuggcaaagcagcccu

SEQ ID NO: 23986 - RNA, 21 nt, Artificial Sequence
  GATA2 Guide RNA
ggcugcuuugccaacguccag

SEQ ID NO: 23987 - RNA, 21 nt, Artificial Sequence
  GATA2 Guide RNA
ggcuggacguuggcaaagcag

SEQ ID NO: 23988 - RNA, 21 nt, Artificial Sequence
  GATA2 Guide RNA
gggcugcuuugccaacgucca

SEQ ID NO: 23989 - RNA, 21 nt, Artificial Sequence
  GATA2 Guide RNA
ggguuugcccuggcuggacgu

SEQ ID NO: 23990 - RNA, 21 nt, Artificial Sequence
  GATA2 Guide RNA
gguuugcccuggcuggacguu

SEQ ID NO: 23991 - RNA, 21 nt, Artificial Sequence
  GATA2 Guide RNA
guuggcaaagcagcccucucu

SEQ ID NO: 23992 - RNA, 21 nt, Artificial Sequence
  GATA2 Guide RNA
guuugcccuggcuggacguug

SEQ ID NO: 23993 - RNA, 21 nt, Artificial Sequence
  GATA2 Guide RNA
ugccaacguccagccagggca

SEQ ID NO: 23994 - RNA, 21 nt, Artificial Sequence
  GATA2 Guide RNA
ugcccuggcuggacguuggca

SEQ ID NO: 23995 - RNA, 21 nt, Artificial Sequence
  GATA2 Guide RNA
ugcuuugccaacguccagcca

SEQ ID NO: 23996 - RNA, 21 nt, Artificial Sequence
  GATA2 Guide RNA
uggacguuggcaaagcagccc

SEQ ID NO: 23997 - RNA, 21 nt, Artificial Sequence
  GATA2 Guide RNA
uggcuggacguuggcaaagca

SEQ ID NO: 23998 - RNA, 21 nt, Artificial Sequence
  GATA2 Guide RNA
uugccaacguccagccagggc

SEQ ID NO: 23999 - RNA, 21 nt, Artificial Sequence
  GATA2 Guide RNA
uugcccuggcuggacguuggc

SEQ ID NO: 24000 - RNA, 21 nt, Artificial Sequence
  GATA2 Guide RNA
uuggcaaagcagcccucucug

SEQ ID NO: 24001 - RNA, 21 nt, Artificial Sequence
  GATA2 Guide RNA
uuugccaacguccagccaggg

SEQ ID NO: 24002 - RNA, 21 nt, Artificial Sequence
  GATA2 Guide RNA
uuugcccuggcuggacguugg

SEQ ID NO: 24003 - RNA, 22 nt, Artificial Sequence
  GATA2 Guide RNA
aacguccagccagggcaaaccc

SEQ ID NO: 24004 - RNA, 22 nt, Artificial Sequence
  GATA2 Guide RNA
acguuggcaaagcagcccucuc

SEQ ID NO: 24005 - RNA, 22 nt, Artificial Sequence
  GATA2 Guide RNA
agagagggcugcuuugccaacg

SEQ ID NO: 24006 - RNA, 22 nt, Artificial Sequence
  GATA2 Guide RNA
agagggcugcuuugccaacguc

SEQ ID NO: 24007 - RNA, 22 nt, Artificial Sequence
  GATA2 Guide RNA
agggcugcuuugccaacgucca

SEQ ID NO: 24008 - RNA, 22 nt, Artificial Sequence
  GATA2 Guide RNA
caacguccagccagggcaaacc

SEQ ID NO: 24009 - RNA, 22 nt, Artificial Sequence
  GATA2 Guide RNA
cagagagggcugcuuugccaac

SEQ ID NO: 24010 - RNA, 22 nt, Artificial Sequence
  GATA2 Guide RNA
ccaacguccagccagggcaaac

SEQ ID NO: 24011 - RNA, 22 nt, Artificial Sequence
  GATA2 Guide RNA
cccggguuugcccuggcuggac

SEQ ID NO: 24012 - RNA, 22 nt, Artificial Sequence
  GATA2 Guide RNA
cccuggcuggacguuggcaaag

SEQ ID NO: 24013 - RNA, 22 nt, Artificial Sequence
  GATA2 Guide RNA
ccuggcuggacguuggcaaagc

SEQ ID NO: 24014 - RNA, 22 nt, Artificial Sequence
  GATA2 Guide RNA
cggguuugcccuggcuggacgu

SEQ ID NO: 24015 - RNA, 22 nt, Artificial Sequence
  GATA2 Guide RNA
cguuggcaaagcagcccucucu

SEQ ID NO: 24016 - RNA, 22 nt, Artificial Sequence
  GATA2 Guide RNA
cugcuuugccaacguccagcca

SEQ ID NO: 24017 - RNA, 22 nt, Artificial Sequence
  GATA2 Guide RNA
cuggacguuggcaaagcagccc

SEQ ID NO: 24018 - RNA, 22 nt, Artificial Sequence
  GATA2 Guide RNA
cuggcuggacguuggcaaagca

SEQ ID NO: 24019 - RNA, 22 nt, Artificial Sequence
  GATA2 Guide RNA
cuuugccaacguccagccaggg

SEQ ID NO: 24020 - RNA, 22 nt, Artificial Sequence
  GATA2 Guide RNA
gacguuggcaaagcagcccucu

SEQ ID NO: 24021 - RNA, 22 nt, Artificial Sequence
  GATA2 Guide RNA
gagagggcugcuuugccaacgu

SEQ ID NO: 24022 - RNA, 22 nt, Artificial Sequence
  GATA2 Guide RNA
gagggcugcuuugccaacgucc

SEQ ID NO: 24023 - RNA, 22 nt, Artificial Sequence
  GATA2 Guide RNA
gcagagagggcugcuuugccaa

SEQ ID NO: 24024 - RNA, 22 nt, Artificial Sequence
  GATA2 Guide RNA
gccaacguccagccagggcaaa

SEQ ID NO: 24025 - RNA, 22 nt, Artificial Sequence
  GATA2 Guide RNA
gcccggguuugcccuggcugga

SEQ ID NO: 24026 - RNA, 22 nt, Artificial Sequence
  GATA2 Guide RNA
gcccuggcuggacguuggcaaa

SEQ ID NO: 24027 - RNA, 22 nt, Artificial Sequence
  GATA2 Guide RNA
gcugcuuugccaacguccagcc

SEQ ID NO: 24028 - RNA, 22 nt, Artificial Sequence
  GATA2 Guide RNA
gcuggacguuggcaaagcagcc

SEQ ID NO: 24029 - RNA, 22 nt, Artificial Sequence
  GATA2 Guide RNA
gcuuugccaacguccagccagg

SEQ ID NO: 24030 - RNA, 22 nt, Artificial Sequence
  GATA2 Guide RNA
ggacguuggcaaagcagcccuc

SEQ ID NO: 24031 - RNA, 22 nt, Artificial Sequence
  GATA2 Guide RNA
ggcagagagggcugcuuugcca

SEQ ID NO: 24032 - RNA, 22 nt, Artificial Sequence
  GATA2 Guide RNA
ggcugcuuugccaacguccagc

SEQ ID NO: 24033 - RNA, 22 nt, Artificial Sequence
  GATA2 Guide RNA
ggcuggacguuggcaaagcagc

SEQ ID NO: 24034 - RNA, 22 nt, Artificial Sequence
  GATA2 Guide RNA
gggcugcuuugccaacguccag

SEQ ID NO: 24035 - RNA, 22 nt, Artificial Sequence
  GATA2 Guide RNA
ggguuugcccuggcuggacguu

SEQ ID NO: 24036 - RNA, 22 nt, Artificial Sequence
  GATA2 Guide RNA
gguuugcccuggcuggacguug

SEQ ID NO: 24037 - RNA, 22 nt, Artificial Sequence
  GATA2 Guide RNA
guuggcaaagcagcccucucug

SEQ ID NO: 24038 - RNA, 22 nt, Artificial Sequence
  GATA2 Guide RNA
guuugcccuggcuggacguugg

SEQ ID NO: 24039 - RNA, 22 nt, Artificial Sequence
  GATA2 Guide RNA
ugccaacguccagccagggcaa

SEQ ID NO: 24040 - RNA, 22 nt, Artificial Sequence
  GATA2 Guide RNA
ugcccuggcuggacguuggcaa

SEQ ID NO: 24041 - RNA, 22 nt, Artificial Sequence
  GATA2 Guide RNA
ugcuuugccaacguccagccag

SEQ ID NO: 24042 - RNA, 22 nt, Artificial Sequence
  GATA2 Guide RNA
uggacguuggcaaagcagcccu

SEQ ID NO: 24043 - RNA, 22 nt, Artificial Sequence
  GATA2 Guide RNA
uggcuggacguuggcaaagcag

SEQ ID NO: 24044 - RNA, 22 nt, Artificial Sequence
  GATA2 Guide RNA
uugccaacguccagccagggca

SEQ ID NO: 24045 - RNA, 22 nt, Artificial Sequence
  GATA2 Guide RNA
uugcccuggcuggacguuggca

SEQ ID NO: 24046 - RNA, 22 nt, Artificial Sequence
  GATA2 Guide RNA
uuggcaaagcagcccucucugc

SEQ ID NO: 24047 - RNA, 22 nt, Artificial Sequence
  GATA2 Guide RNA
uuugccaacguccagccagggc

SEQ ID NO: 24048 - RNA, 22 nt, Artificial Sequence
  GATA2 Guide RNA
uuugcccuggcuggacguuggc

SEQ ID NO: 24049 - RNA, 20 nt, Artificial Sequence
  GATA2 Guide RNA
aaacccuggcugugcaacaa

SEQ ID NO: 24050 - RNA, 20 nt, Artificial Sequence
  GATA2 Guide RNA
aacccuggcugugcaacaag

SEQ ID NO: 24051 - RNA, 20 nt, Artificial Sequence
  GATA2 Guide RNA
acacuuguugcacagccagg

SEQ ID NO: 24052 - RNA, 20 nt, Artificial Sequence
  GATA2 Guide RNA
acagccaggguuugcccugg

SEQ ID NO: 24053 - RNA, 20 nt, Artificial Sequence
  GATA2 Guide RNA
acccuggcugugcaacaagu

SEQ ID NO: 24054 - RNA, 20 nt, Artificial Sequence
  GATA2 Guide RNA
acuuguugcacagccagggu

SEQ ID NO: 24055 - RNA, 20 nt, Artificial Sequence
  GATA2 Guide RNA
agccagggcaaacccuggcu

SEQ ID NO: 24056 - RNA, 20 nt, Artificial Sequence
  GATA2 Guide RNA
agccaggguuugcccuggcu

SEQ ID NO: 24057 - RNA, 20 nt, Artificial Sequence
  GATA2 Guide RNA
agggcaaacccuggcugugc

SEQ ID NO: 24058 - RNA, 20 nt, Artificial Sequence
  GATA2 Guide RNA
caaacccuggcugugcaaca

SEQ ID NO: 24059 - RNA, 20 nt, Artificial Sequence
  GATA2 Guide RNA
cacacuuguugcacagccag

SEQ ID NO: 24060 - RNA, 20 nt, Artificial Sequence
  GATA2 Guide RNA
cacagccaggguuugcccug

SEQ ID NO: 24061 - RNA, 20 nt, Artificial Sequence
  GATA2 Guide RNA
cacuuguugcacagccaggg

SEQ ID NO: 24062 - RNA, 20 nt, Artificial Sequence
  GATA2 Guide RNA
cagccagggcaaacccuggc

SEQ ID NO: 24063 - RNA, 20 nt, Artificial Sequence
  GATA2 Guide RNA
cagccaggguuugcccuggc

SEQ ID NO: 24064 - RNA, 20 nt, Artificial Sequence
  GATA2 Guide RNA
cagggcaaacccuggcugug

SEQ ID NO: 24065 - RNA, 20 nt, Artificial Sequence
  GATA2 Guide RNA
caggguuugcccuggcugga

SEQ ID NO: 24066 - RNA, 20 nt, Artificial Sequence
  GATA2 Guide RNA
ccacacuuguugcacagcca

SEQ ID NO: 24067 - RNA, 20 nt, Artificial Sequence
  GATA2 Guide RNA
ccagccagggcaaacccugg

SEQ ID NO: 24068 - RNA, 20 nt, Artificial Sequence
  GATA2 Guide RNA
ccagggcaaacccuggcugu

SEQ ID NO: 24069 - RNA, 20 nt, Artificial Sequence
  GATA2 Guide RNA
ccaggguuugcccuggcugg

SEQ ID NO: 24070 - RNA, 20 nt, Artificial Sequence
  GATA2 Guide RNA
cccacacuuguugcacagcc

SEQ ID NO: 24071 - RNA, 20 nt, Artificial Sequence
  GATA2 Guide RNA
cccguccagccagggcaaac

SEQ ID NO: 24072 - RNA, 20 nt, Artificial Sequence
  GATA2 Guide RNA
cccuggcugugcaacaagug

SEQ ID NO: 24073 - RNA, 20 nt, Artificial Sequence
  GATA2 Guide RNA
ccgcccacacuuguugcaca

SEQ ID NO: 24074 - RNA, 20 nt, Artificial Sequence
  GATA2 Guide RNA
ccguccagccagggcaaacc

SEQ ID NO: 24075 - RNA, 20 nt, Artificial Sequence
  GATA2 Guide RNA
ccuggcugugcaacaagugu

SEQ ID NO: 24076 - RNA, 20 nt, Artificial Sequence
  GATA2 Guide RNA
cgcccacacuuguugcacag

SEQ ID NO: 24077 - RNA, 20 nt, Artificial Sequence
  GATA2 Guide RNA
cguccagccagggcaaaccc

SEQ ID NO: 24078 - RNA, 20 nt, Artificial Sequence
  GATA2 Guide RNA
cuggcugugcaacaagugug

SEQ ID NO: 24079 - RNA, 20 nt, Artificial Sequence
  GATA2 Guide RNA
cuuguugcacagccaggguu

SEQ ID NO: 24080 - RNA, 20 nt, Artificial Sequence
  GATA2 Guide RNA
gcaaacccuggcugugcaac

SEQ ID NO: 24081 - RNA, 20 nt, Artificial Sequence
  GATA2 Guide RNA
gcacagccaggguuugcccu

SEQ ID NO: 24082 - RNA, 20 nt, Artificial Sequence
  GATA2 Guide RNA
gccagggcaaacccuggcug

SEQ ID NO: 24083 - RNA, 20 nt, Artificial Sequence
  GATA2 Guide RNA
gccaggguuugcccuggcug

SEQ ID NO: 24084 - RNA, 20 nt, Artificial Sequence
  GATA2 Guide RNA
gcccacacuuguugcacagc

SEQ ID NO: 24085 - RNA, 20 nt, Artificial Sequence
  GATA2 Guide RNA
ggcaaacccuggcugugcaa

SEQ ID NO: 24086 - RNA, 20 nt, Artificial Sequence
  GATA2 Guide RNA
gggcaaacccuggcugugca

SEQ ID NO: 24087 - RNA, 20 nt, Artificial Sequence
  GATA2 Guide RNA
guccagccagggcaaacccu

SEQ ID NO: 24088 - RNA, 20 nt, Artificial Sequence
  GATA2 Guide RNA
guugcacagccaggguuugc

SEQ ID NO: 24089 - RNA, 20 nt, Artificial Sequence
  GATA2 Guide RNA
uccagccagggcaaacccug

SEQ ID NO: 24090 - RNA, 20 nt, Artificial Sequence
  GATA2 Guide RNA
ugcacagccaggguuugccc

SEQ ID NO: 24091 - RNA, 20 nt, Artificial Sequence
  GATA2 Guide RNA
uggcugugcaacaagugugg

SEQ ID NO: 24092 - RNA, 20 nt, Artificial Sequence
  GATA2 Guide RNA
uguugcacagccaggguuug

SEQ ID NO: 24093 - RNA, 20 nt, Artificial Sequence
  GATA2 Guide RNA
uugcacagccaggguuugcc

SEQ ID NO: 24094 - RNA, 20 nt, Artificial Sequence
  GATA2 Guide RNA
uuguugcacagccaggguuu

SEQ ID NO: 24095 - RNA, 21 nt, Artificial Sequence
  GATA2 Guide RNA
aaacccuggcugugcaacaag

SEQ ID NO: 24096 - RNA, 21 nt, Artificial Sequence
  GATA2 Guide RNA
aacccuggcugugcaacaagu

SEQ ID NO: 24097 - RNA, 21 nt, Artificial Sequence
  GATA2 Guide RNA
acacuuguugcacagccaggg

SEQ ID NO: 24098 - RNA, 21 nt, Artificial Sequence
  GATA2 Guide RNA
acagccaggguuugcccuggc

SEQ ID NO: 24099 - RNA, 21 nt, Artificial Sequence
  GATA2 Guide RNA
acccuggcugugcaacaagug

SEQ ID NO: 24100 - RNA, 21 nt, Artificial Sequence
  GATA2 Guide RNA
acuuguugcacagccaggguu

SEQ ID NO: 24101 - RNA, 21 nt, Artificial Sequence
  GATA2 Guide RNA
agccagggcaaacccuggcug

SEQ ID NO: 24102 - RNA, 21 nt, Artificial Sequence
  GATA2 Guide RNA
agccaggguuugcccuggcug

SEQ ID NO: 24103 - RNA, 21 nt, Artificial Sequence
  GATA2 Guide RNA
agggcaaacccuggcugugca

SEQ ID NO: 24104 - RNA, 21 nt, Artificial Sequence
  GATA2 Guide RNA
caaacccuggcugugcaacaa

SEQ ID NO: 24105 - RNA, 21 nt, Artificial Sequence
  GATA2 Guide RNA
cacacuuguugcacagccagg

SEQ ID NO: 24106 - RNA, 21 nt, Artificial Sequence
  GATA2 Guide RNA
cacagccaggguuugcccugg

SEQ ID NO: 24107 - RNA, 21 nt, Artificial Sequence
  GATA2 Guide RNA
cacuuguugcacagccagggu

SEQ ID NO: 24108 - RNA, 21 nt, Artificial Sequence
  GATA2 Guide RNA
cagccagggcaaacccuggcu

SEQ ID NO: 24109 - RNA, 21 nt, Artificial Sequence
  GATA2 Guide RNA
cagccaggguuugcccuggcu

SEQ ID NO: 24110 - RNA, 21 nt, Artificial Sequence
  GATA2 Guide RNA
cagggcaaacccuggcugugc

SEQ ID NO: 24111 - RNA, 21 nt, Artificial Sequence
  GATA2 Guide RNA
caggguuugcccuggcuggac

SEQ ID NO: 24112 - RNA, 21 nt, Artificial Sequence
  GATA2 Guide RNA
ccacacuuguugcacagccag

SEQ ID NO: 24113 - RNA, 21 nt, Artificial Sequence
  GATA2 Guide RNA
ccagccagggcaaacccuggc

SEQ ID NO: 24114 - RNA, 21 nt, Artificial Sequence
  GATA2 Guide RNA
ccagggcaaacccuggcugug

SEQ ID NO: 24115 - RNA, 21 nt, Artificial Sequence
  GATA2 Guide RNA
ccaggguuugcccuggcugga

SEQ ID NO: 24116 - RNA, 21 nt, Artificial Sequence
  GATA2 Guide RNA
cccacacuuguugcacagcca

SEQ ID NO: 24117 - RNA, 21 nt, Artificial Sequence
  GATA2 Guide RNA
ccccguccagccagggcaaac

SEQ ID NO: 24118 - RNA, 21 nt, Artificial Sequence
  GATA2 Guide RNA
cccguccagccagggcaaacc

SEQ ID NO: 24119 - RNA, 21 nt, Artificial Sequence
  GATA2 Guide RNA
cccuggcugugcaacaagugu

SEQ ID NO: 24120 - RNA, 21 nt, Artificial Sequence
  GATA2 Guide RNA
ccgcccacacuuguugcacag

SEQ ID NO: 24121 - RNA, 21 nt, Artificial Sequence
  GATA2 Guide RNA
ccguccagccagggcaaaccc

SEQ ID NO: 24122 - RNA, 21 nt, Artificial Sequence
  GATA2 Guide RNA
ccuggcugugcaacaagugug

SEQ ID NO: 24123 - RNA, 21 nt, Artificial Sequence
  GATA2 Guide RNA
cgcccacacuuguugcacagc

SEQ ID NO: 24124 - RNA, 21 nt, Artificial Sequence
  GATA2 Guide RNA
cguccagccagggcaaacccu

SEQ ID NO: 24125 - RNA, 21 nt, Artificial Sequence
  GATA2 Guide RNA
cuggcugugcaacaagugugg

SEQ ID NO: 24126 - RNA, 21 nt, Artificial Sequence
  GATA2 Guide RNA
cuuguugcacagccaggguuu

SEQ ID NO: 24127 - RNA, 21 nt, Artificial Sequence
  GATA2 Guide RNA
gcaaacccuggcugugcaaca

SEQ ID NO: 24128 - RNA, 21 nt, Artificial Sequence
  GATA2 Guide RNA
gcacagccaggguuugcccug

SEQ ID NO: 24129 - RNA, 21 nt, Artificial Sequence
  GATA2 Guide RNA
gccagggcaaacccuggcugu

SEQ ID NO: 24130 - RNA, 21 nt, Artificial Sequence
  GATA2 Guide RNA
gccaggguuugcccuggcugg

SEQ ID NO: 24131 - RNA, 21 nt, Artificial Sequence
  GATA2 Guide RNA
gcccacacuuguugcacagcc

SEQ ID NO: 24132 - RNA, 21 nt, Artificial Sequence
  GATA2 Guide RNA
gccgcccacacuuguugcaca

SEQ ID NO: 24133 - RNA, 21 nt, Artificial Sequence
  GATA2 Guide RNA
ggcaaacccuggcugugcaac

SEQ ID NO: 24134 - RNA, 21 nt, Artificial Sequence
  GATA2 Guide RNA
gggcaaacccuggcugugcaa

SEQ ID NO: 24135 - RNA, 21 nt, Artificial Sequence
  GATA2 Guide RNA
guccagccagggcaaacccug

SEQ ID NO: 24136 - RNA, 21 nt, Artificial Sequence
  GATA2 Guide RNA
guugcacagccaggguuugcc

SEQ ID NO: 24137 - RNA, 21 nt, Artificial Sequence
  GATA2 Guide RNA
uccagccagggcaaacccugg

SEQ ID NO: 24138 - RNA, 21 nt, Artificial Sequence
  GATA2 Guide RNA
ugcacagccaggguuugcccu

SEQ ID NO: 24139 - RNA, 21 nt, Artificial Sequence
  GATA2 Guide RNA
uggcugugcaacaaguguggg

SEQ ID NO: 24140 - RNA, 21 nt, Artificial Sequence
  GATA2 Guide RNA
uguugcacagccaggguuugc

SEQ ID NO: 24141 - RNA, 21 nt, Artificial Sequence
  GATA2 Guide RNA
uugcacagccaggguuugccc

SEQ ID NO: 24142 - RNA, 21 nt, Artificial Sequence
  GATA2 Guide RNA
uuguugcacagccaggguuug

SEQ ID NO: 24143 - RNA, 22 nt, Artificial Sequence
  GATA2 Guide RNA
aaacccuggcugugcaacaagu

SEQ ID NO: 24144 - RNA, 22 nt, Artificial Sequence
  GATA2 Guide RNA
aacccuggcugugcaacaagug

SEQ ID NO: 24145 - RNA, 22 nt, Artificial Sequence
  GATA2 Guide RNA
acacuuguugcacagccagggu

SEQ ID NO: 24146 - RNA, 22 nt, Artificial Sequence
  GATA2 Guide RNA
acagccaggguuugcccuggcu

SEQ ID NO: 24147 - RNA, 22 nt, Artificial Sequence
  GATA2 Guide RNA
acccuggcugugcaacaagugu

SEQ ID NO: 24148 - RNA, 22 nt, Artificial Sequence
  GATA2 Guide RNA
acuuguugcacagccaggguuu

SEQ ID NO: 24149 - RNA, 22 nt, Artificial Sequence
  GATA2 Guide RNA
agccagggcaaacccuggcugu

SEQ ID NO: 24150 - RNA, 22 nt, Artificial Sequence
  GATA2 Guide RNA
agccaggguuugcccuggcugg

SEQ ID NO: 24151 - RNA, 22 nt, Artificial Sequence
  GATA2 Guide RNA
agggcaaacccuggcugugcaa

SEQ ID NO: 24152 - RNA, 22 nt, Artificial Sequence
  GATA2 Guide RNA
caaacccuggcugugcaacaag

SEQ ID NO: 24153 - RNA, 22 nt, Artificial Sequence
  GATA2 Guide RNA
cacacuuguugcacagccaggg

SEQ ID NO: 24154 - RNA, 22 nt, Artificial Sequence
  GATA2 Guide RNA
cacagccaggguuugcccuggc

SEQ ID NO: 24155 - RNA, 22 nt, Artificial Sequence
  GATA2 Guide RNA
cacuuguugcacagccaggguu

SEQ ID NO: 24156 - RNA, 22 nt, Artificial Sequence
  GATA2 Guide RNA
cagccagggcaaacccuggcug

SEQ ID NO: 24157 - RNA, 22 nt, Artificial Sequence
  GATA2 Guide RNA
cagccaggguuugcccuggcug

SEQ ID NO: 24158 - RNA, 22 nt, Artificial Sequence
  GATA2 Guide RNA
cagggcaaacccuggcugugca

SEQ ID NO: 24159 - RNA, 22 nt, Artificial Sequence
  GATA2 Guide RNA
caggguuugcccuggcuggacg

SEQ ID NO: 24160 - RNA, 22 nt, Artificial Sequence
  GATA2 Guide RNA
ccacacuuguugcacagccagg

SEQ ID NO: 24161 - RNA, 22 nt, Artificial Sequence
  GATA2 Guide RNA
ccagccagggcaaacccuggcu

SEQ ID NO: 24162 - RNA, 22 nt, Artificial Sequence
  GATA2 Guide RNA
ccagggcaaacccuggcugugc

SEQ ID NO: 24163 - RNA, 22 nt, Artificial Sequence
  GATA2 Guide RNA
ccaggguuugcccuggcuggac

SEQ ID NO: 24164 - RNA, 22 nt, Artificial Sequence
  GATA2 Guide RNA
cccacacuuguugcacagccag

SEQ ID NO: 24165 - RNA, 22 nt, Artificial Sequence
  GATA2 Guide RNA
cccccguccagccagggcaaac

SEQ ID NO: 24166 - RNA, 22 nt, Artificial Sequence
  GATA2 Guide RNA
ccccguccagccagggcaaacc

SEQ ID NO: 24167 - RNA, 22 nt, Artificial Sequence
  GATA2 Guide RNA
cccguccagccagggcaaaccc

SEQ ID NO: 24168 - RNA, 22 nt, Artificial Sequence
  GATA2 Guide RNA
cccuggcugugcaacaagugug

SEQ ID NO: 24169 - RNA, 22 nt, Artificial Sequence
  GATA2 Guide RNA
ccgcccacacuuguugcacagc

SEQ ID NO: 24170 - RNA, 22 nt, Artificial Sequence
  GATA2 Guide RNA
ccguccagccagggcaaacccu

SEQ ID NO: 24171 - RNA, 22 nt, Artificial Sequence
  GATA2 Guide RNA
ccuggcugugcaacaagugugg

SEQ ID NO: 24172 - RNA, 22 nt, Artificial Sequence
  GATA2 Guide RNA
cgcccacacuuguugcacagcc

SEQ ID NO: 24173 - RNA, 22 nt, Artificial Sequence
  GATA2 Guide RNA
cguccagccagggcaaacccug

SEQ ID NO: 24174 - RNA, 22 nt, Artificial Sequence
  GATA2 Guide RNA
cuggcugugcaacaaguguggg

SEQ ID NO: 24175 - RNA, 22 nt, Artificial Sequence
  GATA2 Guide RNA
cuuguugcacagccaggguuug

SEQ ID NO: 24176 - RNA, 22 nt, Artificial Sequence
  GATA2 Guide RNA
gcaaacccuggcugugcaacaa

SEQ ID NO: 24177 - RNA, 22 nt, Artificial Sequence
  GATA2 Guide RNA
gcacagccaggguuugcccugg

SEQ ID NO: 24178 - RNA, 22 nt, Artificial Sequence
  GATA2 Guide RNA
gccagggcaaacccuggcugug

SEQ ID NO: 24179 - RNA, 22 nt, Artificial Sequence
  GATA2 Guide RNA
gccaggguuugcccuggcugga

SEQ ID NO: 24180 - RNA, 22 nt, Artificial Sequence
  GATA2 Guide RNA
gcccacacuuguugcacagcca

SEQ ID NO: 24181 - RNA, 22 nt, Artificial Sequence
  GATA2 Guide RNA
gccgcccacacuuguugcacag

SEQ ID NO: 24182 - RNA, 22 nt, Artificial Sequence
  GATA2 Guide RNA
ggcaaacccuggcugugcaaca

SEQ ID NO: 24183 - RNA, 22 nt, Artificial Sequence
  GATA2 Guide RNA
gggcaaacccuggcugugcaac

SEQ ID NO: 24184 - RNA, 22 nt, Artificial Sequence
  GATA2 Guide RNA
guccagccagggcaaacccugg

SEQ ID NO: 24185 - RNA, 22 nt, Artificial Sequence
  GATA2 Guide RNA
guugcacagccaggguuugccc

SEQ ID NO: 24186 - RNA, 22 nt, Artificial Sequence
  GATA2 Guide RNA
uccagccagggcaaacccuggc

SEQ ID NO: 24187 - RNA, 22 nt, Artificial Sequence
  GATA2 Guide RNA
ugcacagccaggguuugcccug

SEQ ID NO: 24188 - RNA, 22 nt, Artificial Sequence
  GATA2 Guide RNA
ugccgcccacacuuguugcaca

SEQ ID NO: 24189 - RNA, 22 nt, Artificial Sequence
  GATA2 Guide RNA
uggcugugcaacaagugugggc

SEQ ID NO: 24190 - RNA, 22 nt, Artificial Sequence
  GATA2 Guide RNA
uguugcacagccaggguuugcc

SEQ ID NO: 24191 - RNA, 22 nt, Artificial Sequence
  GATA2 Guide RNA
uugcacagccaggguuugcccu

SEQ ID NO: 24192 - RNA, 22 nt, Artificial Sequence
  GATA2 Guide RNA
uuguugcacagccaggguuugc

SEQ ID NO: 24193 - RNA, 20 nt, Artificial Sequence
  GATA2 Guide RNA
acaucuggccugccggucag

SEQ ID NO: 24194 - RNA, 20 nt, Artificial Sequence
  GATA2 Guide RNA
accggcaggccagaugugcc

SEQ ID NO: 24195 - RNA, 20 nt, Artificial Sequence
  GATA2 Guide RNA
agcccgccugaccggcaggc

SEQ ID NO: 24196 - RNA, 20 nt, Artificial Sequence
  GATA2 Guide RNA
aucuggccugccggucaggc

SEQ ID NO: 24197 - RNA, 20 nt, Artificial Sequence
  GATA2 Guide RNA
cacaucuggccugccgguca

SEQ ID NO: 24198 - RNA, 20 nt, Artificial Sequence
  GATA2 Guide RNA
cagcccgccugaccggcagg

SEQ ID NO: 24199 - RNA, 20 nt, Artificial Sequence
  GATA2 Guide RNA
caucuggccugccggucagg

SEQ ID NO: 24200 - RNA, 20 nt, Artificial Sequence
  GATA2 Guide RNA
cccgccugaccggcaggcca

SEQ ID NO: 24201 - RNA, 20 nt, Artificial Sequence
  GATA2 Guide RNA
ccgccugaccggcaggccag

SEQ ID NO: 24202 - RNA, 20 nt, Artificial Sequence
  GATA2 Guide RNA
ccggcaggccagaugugccg

SEQ ID NO: 24203 - RNA, 20 nt, Artificial Sequence
  GATA2 Guide RNA
ccugaccggcaggccagaug

SEQ ID NO: 24204 - RNA, 20 nt, Artificial Sequence
  GATA2 Guide RNA
ccugccggucaggcgggcug

SEQ ID NO: 24205 - RNA, 20 nt, Artificial Sequence
  GATA2 Guide RNA
cgcagcccgccugaccggca

SEQ ID NO: 24206 - RNA, 20 nt, Artificial Sequence
  GATA2 Guide RNA
cgccugaccggcaggccaga

SEQ ID NO: 24207 - RNA, 20 nt, Artificial Sequence
  GATA2 Guide RNA
cggcacaucuggccugccgg

SEQ ID NO: 24208 - RNA, 20 nt, Artificial Sequence
  GATA2 Guide RNA
cggcaggccagaugugccgc

SEQ ID NO: 24209 - RNA, 20 nt, Artificial Sequence
  GATA2 Guide RNA
cugaccggcaggccagaugu

SEQ ID NO: 24210 - RNA, 20 nt, Artificial Sequence
  GATA2 Guide RNA
cugccggucaggcgggcugc

SEQ ID NO: 24211 - RNA, 20 nt, Artificial Sequence
  GATA2 Guide RNA
cuggccugccggucaggcgg

SEQ ID NO: 24212 - RNA, 20 nt, Artificial Sequence
  GATA2 Guide RNA
gaccggcaggccagaugugc

SEQ ID NO: 24213 - RNA, 20 nt, Artificial Sequence
  GATA2 Guide RNA
gcacaucuggccugccgguc

SEQ ID NO: 24214 - RNA, 20 nt, Artificial Sequence
  GATA2 Guide RNA
gcagcccgccugaccggcag

SEQ ID NO: 24215 - RNA, 20 nt, Artificial Sequence
  GATA2 Guide RNA
gcaggccagaugugccgccc

SEQ ID NO: 24216 - RNA, 20 nt, Artificial Sequence
  GATA2 Guide RNA
gccugaccggcaggccagau

SEQ ID NO: 24217 - RNA, 20 nt, Artificial Sequence
  GATA2 Guide RNA
gccugccggucaggcgggcu

SEQ ID NO: 24218 - RNA, 20 nt, Artificial Sequence
  GATA2 Guide RNA
gcggcacaucuggccugccg

SEQ ID NO: 24219 - RNA, 20 nt, Artificial Sequence
  GATA2 Guide RNA
ggcacaucuggccugccggu

SEQ ID NO: 24220 - RNA, 20 nt, Artificial Sequence
  GATA2 Guide RNA
ggcaggccagaugugccgcc

SEQ ID NO: 24221 - RNA, 20 nt, Artificial Sequence
  GATA2 Guide RNA
ggcggcacaucuggccugcc

SEQ ID NO: 24222 - RNA, 20 nt, Artificial Sequence
  GATA2 Guide RNA
gggcggcacaucuggccugc

SEQ ID NO: 24223 - RNA, 20 nt, Artificial Sequence
  GATA2 Guide RNA
gugggcggcacaucuggccu

SEQ ID NO: 24224 - RNA, 20 nt, Artificial Sequence
  GATA2 Guide RNA
gugugggcggcacaucuggc

SEQ ID NO: 24225 - RNA, 20 nt, Artificial Sequence
  GATA2 Guide RNA
ucuggccugccggucaggcg

SEQ ID NO: 24226 - RNA, 20 nt, Artificial Sequence
  GATA2 Guide RNA
ugaccggcaggccagaugug

SEQ ID NO: 24227 - RNA, 20 nt, Artificial Sequence
  GATA2 Guide RNA
ugcccgcagcccgccugacc

SEQ ID NO: 24228 - RNA, 20 nt, Artificial Sequence
  GATA2 Guide RNA
ugccggucaggcgggcugcg

SEQ ID NO: 24229 - RNA, 20 nt, Artificial Sequence
  GATA2 Guide RNA
uggccugccggucaggcggg

SEQ ID NO: 24230 - RNA, 20 nt, Artificial Sequence
  GATA2 Guide RNA
ugggcggcacaucuggccug

SEQ ID NO: 24231 - RNA, 20 nt, Artificial Sequence
  GATA2 Guide RNA
ugugggcggcacaucuggcc

SEQ ID NO: 24232 - RNA, 20 nt, Artificial Sequence
  GATA2 Guide RNA
uugcccgcagcccgccugac

SEQ ID NO: 24233 - RNA, 20 nt, Artificial Sequence
  GATA2 Guide RNA
uuugcccgcagcccgccuga

SEQ ID NO: 24234 - RNA, 21 nt, Artificial Sequence
  GATA2 Guide RNA
acaucuggccugccggucagg

SEQ ID NO: 24235 - RNA, 21 nt, Artificial Sequence
  GATA2 Guide RNA
accggcaggccagaugugccg

SEQ ID NO: 24236 - RNA, 21 nt, Artificial Sequence
  GATA2 Guide RNA
agugugggcggcacaucuggc

SEQ ID NO: 24237 - RNA, 21 nt, Artificial Sequence
  GATA2 Guide RNA
aucuggccugccggucaggcg

SEQ ID NO: 24238 - RNA, 21 nt, Artificial Sequence
  GATA2 Guide RNA
cacaucuggccugccggucag

SEQ ID NO: 24239 - RNA, 21 nt, Artificial Sequence
  GATA2 Guide RNA
caucuggccugccggucaggc

SEQ ID NO: 24240 - RNA, 21 nt, Artificial Sequence
  GATA2 Guide RNA
ccgccugaccggcaggccaga

SEQ ID NO: 24241 - RNA, 21 nt, Artificial Sequence
  GATA2 Guide RNA
ccggcaggccagaugugccgc

SEQ ID NO: 24242 - RNA, 21 nt, Artificial Sequence
  GATA2 Guide RNA
ccugaccggcaggccagaugu

SEQ ID NO: 24243 - RNA, 21 nt, Artificial Sequence
  GATA2 Guide RNA
cgccugaccggcaggccagau

SEQ ID NO: 24244 - RNA, 21 nt, Artificial Sequence
  GATA2 Guide RNA
cggcacaucuggccugccggu

SEQ ID NO: 24245 - RNA, 21 nt, Artificial Sequence
  GATA2 Guide RNA
cggcaggccagaugugccgcc

SEQ ID NO: 24246 - RNA, 21 nt, Artificial Sequence
  GATA2 Guide RNA
cugaccggcaggccagaugug

SEQ ID NO: 24247 - RNA, 21 nt, Artificial Sequence
  GATA2 Guide RNA
cuuugcccgcagcccgccuga

SEQ ID NO: 24248 - RNA, 21 nt, Artificial Sequence
  GATA2 Guide RNA
gaccggcaggccagaugugcc

SEQ ID NO: 24249 - RNA, 21 nt, Artificial Sequence
  GATA2 Guide RNA
gcacaucuggccugccgguca

SEQ ID NO: 24250 - RNA, 21 nt, Artificial Sequence
  GATA2 Guide RNA
gcaggccagaugugccgccca

SEQ ID NO: 24251 - RNA, 21 nt, Artificial Sequence
  GATA2 Guide RNA
gccugaccggcaggccagaug

SEQ ID NO: 24252 - RNA, 21 nt, Artificial Sequence
  GATA2 Guide RNA
gcggcacaucuggccugccgg

SEQ ID NO: 24253 - RNA, 21 nt, Artificial Sequence
  GATA2 Guide RNA
ggcacaucuggccugccgguc

SEQ ID NO: 24254 - RNA, 21 nt, Artificial Sequence
  GATA2 Guide RNA
ggcaggccagaugugccgccc

SEQ ID NO: 24255 - RNA, 21 nt, Artificial Sequence
  GATA2 Guide RNA
ggcggcacaucuggccugccg

SEQ ID NO: 24256 - RNA, 21 nt, Artificial Sequence
  GATA2 Guide RNA
gggcggcacaucuggccugcc

SEQ ID NO: 24257 - RNA, 21 nt, Artificial Sequence
  GATA2 Guide RNA
gugggcggcacaucuggccug

SEQ ID NO: 24258 - RNA, 21 nt, Artificial Sequence
  GATA2 Guide RNA
gugugggcggcacaucuggcc

SEQ ID NO: 24259 - RNA, 21 nt, Artificial Sequence
  GATA2 Guide RNA
ucuggccugccggucaggcgg

SEQ ID NO: 24260 - RNA, 21 nt, Artificial Sequence
  GATA2 Guide RNA
ugaccggcaggccagaugugc

SEQ ID NO: 24261 - RNA, 21 nt, Artificial Sequence
  GATA2 Guide RNA
ugggcggcacaucuggccugc

SEQ ID NO: 24262 - RNA, 21 nt, Artificial Sequence
  GATA2 Guide RNA
ugugggcggcacaucuggccu

SEQ ID NO: 24263 - RNA, 21 nt, Artificial Sequence
  GATA2 Guide RNA
uugcccgcagcccgccugacc

SEQ ID NO: 24264 - RNA, 21 nt, Artificial Sequence
  GATA2 Guide RNA
uuugcccgcagcccgccugac

SEQ ID NO: 24265 - RNA, 22 nt, Artificial Sequence
  GATA2 Guide RNA
aagugugggcggcacaucuggc

SEQ ID NO: 24266 - RNA, 22 nt, Artificial Sequence
  GATA2 Guide RNA
acaucuggccugccggucaggc

SEQ ID NO: 24267 - RNA, 22 nt, Artificial Sequence
  GATA2 Guide RNA
accggcaggccagaugugccgc

SEQ ID NO: 24268 - RNA, 22 nt, Artificial Sequence
  GATA2 Guide RNA
agcccgccugaccggcaggcca

SEQ ID NO: 24269 - RNA, 22 nt, Artificial Sequence
  GATA2 Guide RNA
agugugggcggcacaucuggcc

SEQ ID NO: 24270 - RNA, 22 nt, Artificial Sequence
  GATA2 Guide RNA
aucuggccugccggucaggcgg

SEQ ID NO: 24271 - RNA, 22 nt, Artificial Sequence
  GATA2 Guide RNA
cacaucuggccugccggucagg

SEQ ID NO: 24272 - RNA, 22 nt, Artificial Sequence
  GATA2 Guide RNA
caucuggccugccggucaggcg

SEQ ID NO: 24273 - RNA, 22 nt, Artificial Sequence
  GATA2 Guide RNA
cccgccugaccggcaggccaga

SEQ ID NO: 24274 - RNA, 22 nt, Artificial Sequence
  GATA2 Guide RNA
ccgccugaccggcaggccagau

SEQ ID NO: 24275 - RNA, 22 nt, Artificial Sequence
  GATA2 Guide RNA
ccggcaggccagaugugccgcc

SEQ ID NO: 24276 - RNA, 22 nt, Artificial Sequence
  GATA2 Guide RNA
ccugaccggcaggccagaugug

SEQ ID NO: 24277 - RNA, 22 nt, Artificial Sequence
  GATA2 Guide RNA
cgccugaccggcaggccagaug

SEQ ID NO: 24278 - RNA, 22 nt, Artificial Sequence
  GATA2 Guide RNA
cggcacaucuggccugccgguc

SEQ ID NO: 24279 - RNA, 22 nt, Artificial Sequence
  GATA2 Guide RNA
cggcaggccagaugugccgccc

SEQ ID NO: 24280 - RNA, 22 nt, Artificial Sequence
  GATA2 Guide RNA
cugaccggcaggccagaugugc

SEQ ID NO: 24281 - RNA, 22 nt, Artificial Sequence
  GATA2 Guide RNA
cuuugcccgcagcccgccugac

SEQ ID NO: 24282 - RNA, 22 nt, Artificial Sequence
  GATA2 Guide RNA
gaccggcaggccagaugugccg

SEQ ID NO: 24283 - RNA, 22 nt, Artificial Sequence
  GATA2 Guide RNA
gcacaucuggccugccggucag

SEQ ID NO: 24284 - RNA, 22 nt, Artificial Sequence
  GATA2 Guide RNA
gcaggccagaugugccgcccac

SEQ ID NO: 24285 - RNA, 22 nt, Artificial Sequence
  GATA2 Guide RNA
gccugaccggcaggccagaugu

SEQ ID NO: 24286 - RNA, 22 nt, Artificial Sequence
  GATA2 Guide RNA
gcggcacaucuggccugccggu

SEQ ID NO: 24287 - RNA, 22 nt, Artificial Sequence
  GATA2 Guide RNA
ggcacaucuggccugccgguca

SEQ ID NO: 24288 - RNA, 22 nt, Artificial Sequence
  GATA2 Guide RNA
ggcaggccagaugugccgccca

SEQ ID NO: 24289 - RNA, 22 nt, Artificial Sequence
  GATA2 Guide RNA
ggcggcacaucuggccugccgg

SEQ ID NO: 24290 - RNA, 22 nt, Artificial Sequence
  GATA2 Guide RNA
gggcggcacaucuggccugccg

SEQ ID NO: 24291 - RNA, 22 nt, Artificial Sequence
  GATA2 Guide RNA
gugggcggcacaucuggccugc

SEQ ID NO: 24292 - RNA, 22 nt, Artificial Sequence
  GATA2 Guide RNA
gugugggcggcacaucuggccu

SEQ ID NO: 24293 - RNA, 22 nt, Artificial Sequence
  GATA2 Guide RNA
ucuggccugccggucaggcggg

SEQ ID NO: 24294 - RNA, 22 nt, Artificial Sequence
  GATA2 Guide RNA
ucuuugcccgcagcccgccuga

SEQ ID NO: 24295 - RNA, 22 nt, Artificial Sequence
  GATA2 Guide RNA
ugaccggcaggccagaugugcc

SEQ ID NO: 24296 - RNA, 22 nt, Artificial Sequence
  GATA2 Guide RNA
uggccugccggucaggcgggcu

SEQ ID NO: 24297 - RNA, 22 nt, Artificial Sequence
  GATA2 Guide RNA
ugggcggcacaucuggccugcc

SEQ ID NO: 24298 - RNA, 22 nt, Artificial Sequence
  GATA2 Guide RNA
ugugggcggcacaucuggccug

SEQ ID NO: 24299 - RNA, 22 nt, Artificial Sequence
  GATA2 Guide RNA
uugcccgcagcccgccugaccg

SEQ ID NO: 24300 - RNA, 22 nt, Artificial Sequence
  GATA2 Guide RNA
uuugcccgcagcccgccugacc

SEQ ID NO: 24301 - RNA, 20 nt, Artificial Sequence
  GATA2 Guide RNA
acaucuggccugcggucagg

SEQ ID NO: 24302 - RNA, 20 nt, Artificial Sequence
  GATA2 Guide RNA
accgcaggccagaugugccg

SEQ ID NO: 24303 - RNA, 20 nt, Artificial Sequence
  GATA2 Guide RNA
agcccgccugaccgcaggcc

SEQ ID NO: 24304 - RNA, 20 nt, Artificial Sequence
  GATA2 Guide RNA
aucuggccugcggucaggcg

SEQ ID NO: 24305 - RNA, 20 nt, Artificial Sequence
  GATA2 Guide RNA
cacaucuggccugcggucag

SEQ ID NO: 24306 - RNA, 20 nt, Artificial Sequence
  GATA2 Guide RNA
cagcccgccugaccgcaggc

SEQ ID NO: 24307 - RNA, 20 nt, Artificial Sequence
  GATA2 Guide RNA
caucuggccugcggucaggc

SEQ ID NO: 24308 - RNA, 20 nt, Artificial Sequence
  GATA2 Guide RNA
cccgccugaccgcaggccag

SEQ ID NO: 24309 - RNA, 20 nt, Artificial Sequence
  GATA2 Guide RNA
ccgcagcccgccugaccgca

SEQ ID NO: 24310 - RNA, 20 nt, Artificial Sequence
  GATA2 Guide RNA
ccgcaggccagaugugccgc

SEQ ID NO: 24311 - RNA, 20 nt, Artificial Sequence
  GATA2 Guide RNA
ccgccugaccgcaggccaga

SEQ ID NO: 24312 - RNA, 20 nt, Artificial Sequence
  GATA2 Guide RNA
ccugaccgcaggccagaugu

SEQ ID NO: 24313 - RNA, 20 nt, Artificial Sequence
  GATA2 Guide RNA
ccugcggucaggcgggcugc

SEQ ID NO: 24314 - RNA, 20 nt, Artificial Sequence
  GATA2 Guide RNA
cgcagcccgccugaccgcag

SEQ ID NO: 24315 - RNA, 20 nt, Artificial Sequence
  GATA2 Guide RNA
cgcaggccagaugugccgcc

SEQ ID NO: 24316 - RNA, 20 nt, Artificial Sequence
  GATA2 Guide RNA
cgccugaccgcaggccagau

SEQ ID NO: 24317 - RNA, 20 nt, Artificial Sequence
  GATA2 Guide RNA
cggcacaucuggccugcggu

SEQ ID NO: 24318 - RNA, 20 nt, Artificial Sequence
  GATA2 Guide RNA
cugaccgcaggccagaugug

SEQ ID NO: 24319 - RNA, 20 nt, Artificial Sequence
  GATA2 Guide RNA
cugcggucaggcgggcugcg

SEQ ID NO: 24320 - RNA, 20 nt, Artificial Sequence
  GATA2 Guide RNA
cuggccugcggucaggcggg

SEQ ID NO: 24321 - RNA, 20 nt, Artificial Sequence
  GATA2 Guide RNA
gaccgcaggccagaugugcc

SEQ ID NO: 24322 - RNA, 20 nt, Artificial Sequence
  GATA2 Guide RNA
gcacaucuggccugcgguca

SEQ ID NO: 24323 - RNA, 20 nt, Artificial Sequence
  GATA2 Guide RNA
gcagcccgccugaccgcagg

SEQ ID NO: 24324 - RNA, 20 nt, Artificial Sequence
  GATA2 Guide RNA
gcccgccugaccgcaggcca

SEQ ID NO: 24325 - RNA, 20 nt, Artificial Sequence
  GATA2 Guide RNA
gccugaccgcaggccagaug

SEQ ID NO: 24326 - RNA, 20 nt, Artificial Sequence
  GATA2 Guide RNA
gccugcggucaggcgggcug

SEQ ID NO: 24327 - RNA, 20 nt, Artificial Sequence
  GATA2 Guide RNA
gcggcacaucuggccugcgg

SEQ ID NO: 24328 - RNA, 20 nt, Artificial Sequence
  GATA2 Guide RNA
ggcacaucuggccugcgguc

SEQ ID NO: 24329 - RNA, 20 nt, Artificial Sequence
  GATA2 Guide RNA
ggccugcggucaggcgggcu

SEQ ID NO: 24330 - RNA, 20 nt, Artificial Sequence
  GATA2 Guide RNA
ggcggcacaucuggccugcg

SEQ ID NO: 24331 - RNA, 20 nt, Artificial Sequence
  GATA2 Guide RNA
ucuggccugcggucaggcgg

SEQ ID NO: 24332 - RNA, 20 nt, Artificial Sequence
  GATA2 Guide RNA
ugaccgcaggccagaugugc

SEQ ID NO: 24333 - RNA, 20 nt, Artificial Sequence
  GATA2 Guide RNA
ugcggucaggcgggcugcgg

SEQ ID NO: 24334 - RNA, 20 nt, Artificial Sequence
  GATA2 Guide RNA
uggccugcggucaggcgggc

SEQ ID NO: 24335 - RNA, 21 nt, Artificial Sequence
  GATA2 Guide RNA
acaucuggccugcggucaggc

SEQ ID NO: 24336 - RNA, 21 nt, Artificial Sequence
  GATA2 Guide RNA
accgcaggccagaugugccgc

SEQ ID NO: 24337 - RNA, 21 nt, Artificial Sequence
  GATA2 Guide RNA
agcccgccugaccgcaggcca

SEQ ID NO: 24338 - RNA, 21 nt, Artificial Sequence
  GATA2 Guide RNA
aucuggccugcggucaggcgg

SEQ ID NO: 24339 - RNA, 21 nt, Artificial Sequence
  GATA2 Guide RNA
cacaucuggccugcggucagg

SEQ ID NO: 24340 - RNA, 21 nt, Artificial Sequence
  GATA2 Guide RNA
caucuggccugcggucaggcg

SEQ ID NO: 24341 - RNA, 21 nt, Artificial Sequence
  GATA2 Guide RNA
cccgccugaccgcaggccaga

SEQ ID NO: 24342 - RNA, 21 nt, Artificial Sequence
  GATA2 Guide RNA
ccgcaggccagaugugccgcc

SEQ ID NO: 24343 - RNA, 21 nt, Artificial Sequence
  GATA2 Guide RNA
ccgccugaccgcaggccagau

SEQ ID NO: 24344 - RNA, 21 nt, Artificial Sequence
  GATA2 Guide RNA
ccugaccgcaggccagaugug

SEQ ID NO: 24345 - RNA, 21 nt, Artificial Sequence
  GATA2 Guide RNA
cgcaggccagaugugccgccc

SEQ ID NO: 24346 - RNA, 21 nt, Artificial Sequence
  GATA2 Guide RNA
cgccugaccgcaggccagaug

SEQ ID NO: 24347 - RNA, 21 nt, Artificial Sequence
  GATA2 Guide RNA
cggcacaucuggccugcgguc

SEQ ID NO: 24348 - RNA, 21 nt, Artificial Sequence
  GATA2 Guide RNA
cugaccgcaggccagaugugc

SEQ ID NO: 24349 - RNA, 21 nt, Artificial Sequence
  GATA2 Guide RNA
gaccgcaggccagaugugccg

SEQ ID NO: 24350 - RNA, 21 nt, Artificial Sequence
  GATA2 Guide RNA
gcacaucuggccugcggucag

SEQ ID NO: 24351 - RNA, 21 nt, Artificial Sequence
  GATA2 Guide RNA
gccugaccgcaggccagaugu

SEQ ID NO: 24352 - RNA, 21 nt, Artificial Sequence
  GATA2 Guide RNA
gcggcacaucuggccugcggu

SEQ ID NO: 24353 - RNA, 21 nt, Artificial Sequence
  GATA2 Guide RNA
ggcacaucuggccugcgguca

SEQ ID NO: 24354 - RNA, 21 nt, Artificial Sequence
  GATA2 Guide RNA
ggcggcacaucuggccugcgg

SEQ ID NO: 24355 - RNA, 21 nt, Artificial Sequence
  GATA2 Guide RNA
gggcggcacaucuggccugcg

SEQ ID NO: 24356 - RNA, 21 nt, Artificial Sequence
  GATA2 Guide RNA
ucuggccugcggucaggcggg

SEQ ID NO: 24357 - RNA, 21 nt, Artificial Sequence
  GATA2 Guide RNA
ugaccgcaggccagaugugcc

SEQ ID NO: 24358 - RNA, 21 nt, Artificial Sequence
  GATA2 Guide RNA
uggccugcggucaggcgggcu

SEQ ID NO: 24359 - RNA, 22 nt, Artificial Sequence
  GATA2 Guide RNA
acaucuggccugcggucaggcg

SEQ ID NO: 24360 - RNA, 22 nt, Artificial Sequence
  GATA2 Guide RNA
accgcaggccagaugugccgcc

SEQ ID NO: 24361 - RNA, 22 nt, Artificial Sequence
  GATA2 Guide RNA
agcccgccugaccgcaggccag

SEQ ID NO: 24362 - RNA, 22 nt, Artificial Sequence
  GATA2 Guide RNA
aucuggccugcggucaggcggg

SEQ ID NO: 24363 - RNA, 22 nt, Artificial Sequence
  GATA2 Guide RNA
cacaucuggccugcggucaggc

SEQ ID NO: 24364 - RNA, 22 nt, Artificial Sequence
  GATA2 Guide RNA
cagcccgccugaccgcaggcca

SEQ ID NO: 24365 - RNA, 22 nt, Artificial Sequence
  GATA2 Guide RNA
caucuggccugcggucaggcgg

SEQ ID NO: 24366 - RNA, 22 nt, Artificial Sequence
  GATA2 Guide RNA
cccgccugaccgcaggccagau

SEQ ID NO: 24367 - RNA, 22 nt, Artificial Sequence
  GATA2 Guide RNA
ccgcaggccagaugugccgccc

SEQ ID NO: 24368 - RNA, 22 nt, Artificial Sequence
  GATA2 Guide RNA
ccgccugaccgcaggccagaug

SEQ ID NO: 24369 - RNA, 22 nt, Artificial Sequence
  GATA2 Guide RNA
ccugaccgcaggccagaugugc

SEQ ID NO: 24370 - RNA, 22 nt, Artificial Sequence
  GATA2 Guide RNA
cgcaggccagaugugccgccca

SEQ ID NO: 24371 - RNA, 22 nt, Artificial Sequence
  GATA2 Guide RNA
cgccugaccgcaggccagaugu

SEQ ID NO: 24372 - RNA, 22 nt, Artificial Sequence
  GATA2 Guide RNA
cggcacaucuggccugcgguca

SEQ ID NO: 24373 - RNA, 22 nt, Artificial Sequence
  GATA2 Guide RNA
cugaccgcaggccagaugugcc

SEQ ID NO: 24374 - RNA, 22 nt, Artificial Sequence
  GATA2 Guide RNA
cuggccugcggucaggcgggcu

SEQ ID NO: 24375 - RNA, 22 nt, Artificial Sequence
  GATA2 Guide RNA
gaccgcaggccagaugugccgc

SEQ ID NO: 24376 - RNA, 22 nt, Artificial Sequence
  GATA2 Guide RNA
gcacaucuggccugcggucagg

SEQ ID NO: 24377 - RNA, 22 nt, Artificial Sequence
  GATA2 Guide RNA
gcccgccugaccgcaggccaga

SEQ ID NO: 24378 - RNA, 22 nt, Artificial Sequence
  GATA2 Guide RNA
gccugaccgcaggccagaugug

SEQ ID NO: 24379 - RNA, 22 nt, Artificial Sequence
  GATA2 Guide RNA
gcggcacaucuggccugcgguc

SEQ ID NO: 24380 - RNA, 22 nt, Artificial Sequence
  GATA2 Guide RNA
ggcacaucuggccugcggucag

SEQ ID NO: 24381 - RNA, 22 nt, Artificial Sequence
  GATA2 Guide RNA
ggcggcacaucuggccugcggu

SEQ ID NO: 24382 - RNA, 22 nt, Artificial Sequence
  GATA2 Guide RNA
gggcggcacaucuggccugcgg

SEQ ID NO: 24383 - RNA, 22 nt, Artificial Sequence
  GATA2 Guide RNA
ucuggccugcggucaggcgggc

SEQ ID NO: 24384 - RNA, 22 nt, Artificial Sequence
  GATA2 Guide RNA
ugaccgcaggccagaugugccg

SEQ ID NO: 24385 - RNA, 22 nt, Artificial Sequence
  GATA2 Guide RNA
uggccugcggucaggcgggcug

SEQ ID NO: 24386 - RNA, 22 nt, Artificial Sequence
  GATA2 Guide RNA
ugggcggcacaucuggccugcg

SEQ ID NO: 24387 - RNA, 20 nt, Artificial Sequence
  GATA2 Guide RNA
acaucuggccuccggucagg

SEQ ID NO: 24388 - RNA, 20 nt, Artificial Sequence
  GATA2 Guide RNA
agcccggccugaccggaggc

SEQ ID NO: 24389 - RNA, 20 nt, Artificial Sequence
  GATA2 Guide RNA
aggccgggcugcgggcaaag

SEQ ID NO: 24390 - RNA, 20 nt, Artificial Sequence
  GATA2 Guide RNA
aucuggccuccggucaggcc

SEQ ID NO: 24391 - RNA, 20 nt, Artificial Sequence
  GATA2 Guide RNA
cacaucuggccuccggucag

SEQ ID NO: 24392 - RNA, 20 nt, Artificial Sequence
  GATA2 Guide RNA
cagcccggccugaccggagg

SEQ ID NO: 24393 - RNA, 20 nt, Artificial Sequence
  GATA2 Guide RNA
caggccgggcugcgggcaaa

SEQ ID NO: 24394 - RNA, 20 nt, Artificial Sequence
  GATA2 Guide RNA
caucuggccuccggucaggc

SEQ ID NO: 24395 - RNA, 20 nt, Artificial Sequence
  GATA2 Guide RNA
cccggccugaccggaggcca

SEQ ID NO: 24396 - RNA, 20 nt, Artificial Sequence
  GATA2 Guide RNA
ccggccugaccggaggccag

SEQ ID NO: 24397 - RNA, 20 nt, Artificial Sequence
  GATA2 Guide RNA
ccgggcugcgggcaaagaga

SEQ ID NO: 24398 - RNA, 20 nt, Artificial Sequence
  GATA2 Guide RNA
ccuccggucaggccgggcug

SEQ ID NO: 24399 - RNA, 20 nt, Artificial Sequence
  GATA2 Guide RNA
ccucucucucuuugcccgca

SEQ ID NO: 24400 - RNA, 20 nt, Artificial Sequence
  GATA2 Guide RNA
cgcagcccggccugaccgga

SEQ ID NO: 24401 - RNA, 20 nt, Artificial Sequence
  GATA2 Guide RNA
cggccugaccggaggccaga

SEQ ID NO: 24402 - RNA, 20 nt, Artificial Sequence
  GATA2 Guide RNA
cgggcugcgggcaaagagag

SEQ ID NO: 24403 - RNA, 20 nt, Artificial Sequence
  GATA2 Guide RNA
cuccggucaggccgggcugc

SEQ ID NO: 24404 - RNA, 20 nt, Artificial Sequence
  GATA2 Guide RNA
cucucucucuuugcccgcag

SEQ ID NO: 24405 - RNA, 20 nt, Artificial Sequence
  GATA2 Guide RNA
cucucucuuugcccgcagcc

SEQ ID NO: 24406 - RNA, 20 nt, Artificial Sequence
  GATA2 Guide RNA
cucucuuugcccgcagcccg

SEQ ID NO: 24407 - RNA, 20 nt, Artificial Sequence
  GATA2 Guide RNA
cucuuugcccgcagcccggc

SEQ ID NO: 24408 - RNA, 20 nt, Artificial Sequence
  GATA2 Guide RNA
cuggccuccggucaggccgg

SEQ ID NO: 24409 - RNA, 20 nt, Artificial Sequence
  GATA2 Guide RNA
cuuugcccgcagcccggccu

SEQ ID NO: 24410 - RNA, 20 nt, Artificial Sequence
  GATA2 Guide RNA
gcagcccggccugaccggag

SEQ ID NO: 24411 - RNA, 20 nt, Artificial Sequence
  GATA2 Guide RNA
gccgggcugcgggcaaagag

SEQ ID NO: 24412 - RNA, 20 nt, Artificial Sequence
  GATA2 Guide RNA
gccuccggucaggccgggcu

SEQ ID NO: 24413 - RNA, 20 nt, Artificial Sequence
  GATA2 Guide RNA
ggccgggcugcgggcaaaga

SEQ ID NO: 24414 - RNA, 20 nt, Artificial Sequence
  GATA2 Guide RNA
gggcugcgggcaaagagaga

SEQ ID NO: 24415 - RNA, 20 nt, Artificial Sequence
  GATA2 Guide RNA
gucaggccgggcugcgggca

SEQ ID NO: 24416 - RNA, 20 nt, Artificial Sequence
  GATA2 Guide RNA
ucaggccgggcugcgggcaa

SEQ ID NO: 24417 - RNA, 20 nt, Artificial Sequence
  GATA2 Guide RNA
uccggucaggccgggcugcg

SEQ ID NO: 24418 - RNA, 20 nt, Artificial Sequence
  GATA2 Guide RNA
ucucucucuuugcccgcagc

SEQ ID NO: 24419 - RNA, 20 nt, Artificial Sequence
  GATA2 Guide RNA
ucucucuuugcccgcagccc

SEQ ID NO: 24420 - RNA, 20 nt, Artificial Sequence
  GATA2 Guide RNA
ucucuuugcccgcagcccgg

SEQ ID NO: 24421 - RNA, 20 nt, Artificial Sequence
  GATA2 Guide RNA
ucuggccuccggucaggccg

SEQ ID NO: 24422 - RNA, 20 nt, Artificial Sequence
  GATA2 Guide RNA
ucuuugcccgcagcccggcc

SEQ ID NO: 24423 - RNA, 20 nt, Artificial Sequence
  GATA2 Guide RNA
ugcccgcagcccggccugac

SEQ ID NO: 24424 - RNA, 20 nt, Artificial Sequence
  GATA2 Guide RNA
uggccuccggucaggccggg

SEQ ID NO: 24425 - RNA, 20 nt, Artificial Sequence
  GATA2 Guide RNA
uugcccgcagcccggccuga

SEQ ID NO: 24426 - RNA, 20 nt, Artificial Sequence
  GATA2 Guide RNA
uuugcccgcagcccggccug

SEQ ID NO: 24427 - RNA, 21 nt, Artificial Sequence
  GATA2 Guide RNA
acaucuggccuccggucaggc

SEQ ID NO: 24428 - RNA, 21 nt, Artificial Sequence
  GATA2 Guide RNA
aggccgggcugcgggcaaaga

SEQ ID NO: 24429 - RNA, 21 nt, Artificial Sequence
  GATA2 Guide RNA
aucuggccuccggucaggccg

SEQ ID NO: 24430 - RNA, 21 nt, Artificial Sequence
  GATA2 Guide RNA
cacaucuggccuccggucagg

SEQ ID NO: 24431 - RNA, 21 nt, Artificial Sequence
  GATA2 Guide RNA
caggccgggcugcgggcaaag

SEQ ID NO: 24432 - RNA, 21 nt, Artificial Sequence
  GATA2 Guide RNA
caucuggccuccggucaggcc

SEQ ID NO: 24433 - RNA, 21 nt, Artificial Sequence
  GATA2 Guide RNA
ccggccugaccggaggccaga

SEQ ID NO: 24434 - RNA, 21 nt, Artificial Sequence
  GATA2 Guide RNA
ccgggcugcgggcaaagagag

SEQ ID NO: 24435 - RNA, 21 nt, Artificial Sequence
  GATA2 Guide RNA
ccucucucucuuugcccgcag

SEQ ID NO: 24436 - RNA, 21 nt, Artificial Sequence
  GATA2 Guide RNA
cggccugaccggaggccagau

SEQ ID NO: 24437 - RNA, 21 nt, Artificial Sequence
  GATA2 Guide RNA
cgggcugcgggcaaagagaga

SEQ ID NO: 24438 - RNA, 21 nt, Artificial Sequence
  GATA2 Guide RNA
cucucucucuuugcccgcagc

SEQ ID NO: 24439 - RNA, 21 nt, Artificial Sequence
  GATA2 Guide RNA
cucucucuuugcccgcagccc

SEQ ID NO: 24440 - RNA, 21 nt, Artificial Sequence
  GATA2 Guide RNA
cucucuuugcccgcagcccgg

SEQ ID NO: 24441 - RNA, 21 nt, Artificial Sequence
  GATA2 Guide RNA
cucuuugcccgcagcccggcc

SEQ ID NO: 24442 - RNA, 21 nt, Artificial Sequence
  GATA2 Guide RNA
cuuugcccgcagcccggccug

SEQ ID NO: 24443 - RNA, 21 nt, Artificial Sequence
  GATA2 Guide RNA
gcacaucuggccuccggucag

SEQ ID NO: 24444 - RNA, 21 nt, Artificial Sequence
  GATA2 Guide RNA
gccgggcugcgggcaaagaga

SEQ ID NO: 24445 - RNA, 21 nt, Artificial Sequence
  GATA2 Guide RNA
ggccgggcugcgggcaaagag

SEQ ID NO: 24446 - RNA, 21 nt, Artificial Sequence
  GATA2 Guide RNA
gggcugcgggcaaagagagag

SEQ ID NO: 24447 - RNA, 21 nt, Artificial Sequence
  GATA2 Guide RNA
gucaggccgggcugcgggcaa

SEQ ID NO: 24448 - RNA, 21 nt, Artificial Sequence
  GATA2 Guide RNA
ucaggccgggcugcgggcaaa

SEQ ID NO: 24449 - RNA, 21 nt, Artificial Sequence
  GATA2 Guide RNA
uccucucucucuuugcccgca

SEQ ID NO: 24450 - RNA, 21 nt, Artificial Sequence
  GATA2 Guide RNA
ucucucucuuugcccgcagcc

SEQ ID NO: 24451 - RNA, 21 nt, Artificial Sequence
  GATA2 Guide RNA
ucucucuuugcccgcagcccg

SEQ ID NO: 24452 - RNA, 21 nt, Artificial Sequence
  GATA2 Guide RNA
ucucuuugcccgcagcccggc

SEQ ID NO: 24453 - RNA, 21 nt, Artificial Sequence
  GATA2 Guide RNA
ucuggccuccggucaggccgg

SEQ ID NO: 24454 - RNA, 21 nt, Artificial Sequence
  GATA2 Guide RNA
ucuuugcccgcagcccggccu

SEQ ID NO: 24455 - RNA, 21 nt, Artificial Sequence
  GATA2 Guide RNA
uugcccgcagcccggccugac

SEQ ID NO: 24456 - RNA, 21 nt, Artificial Sequence
  GATA2 Guide RNA
uuugcccgcagcccggccuga

SEQ ID NO: 24457 - RNA, 22 nt, Artificial Sequence
  GATA2 Guide RNA
acaucuggccuccggucaggcc

SEQ ID NO: 24458 - RNA, 22 nt, Artificial Sequence
  GATA2 Guide RNA
agcccggccugaccggaggcca

SEQ ID NO: 24459 - RNA, 22 nt, Artificial Sequence
  GATA2 Guide RNA
aggccgggcugcgggcaaagag

SEQ ID NO: 24460 - RNA, 22 nt, Artificial Sequence
  GATA2 Guide RNA
auccucucucucuuugcccgca

SEQ ID NO: 24461 - RNA, 22 nt, Artificial Sequence
  GATA2 Guide RNA
aucuggccuccggucaggccgg

SEQ ID NO: 24462 - RNA, 22 nt, Artificial Sequence
  GATA2 Guide RNA
cacaucuggccuccggucaggc

SEQ ID NO: 24463 - RNA, 22 nt, Artificial Sequence
  GATA2 Guide RNA
caggccgggcugcgggcaaaga

SEQ ID NO: 24464 - RNA, 22 nt, Artificial Sequence
  GATA2 Guide RNA
caucuggccuccggucaggccg

SEQ ID NO: 24465 - RNA, 22 nt, Artificial Sequence
  GATA2 Guide RNA
cccggccugaccggaggccaga

SEQ ID NO: 24466 - RNA, 22 nt, Artificial Sequence
  GATA2 Guide RNA
ccggccugaccggaggccagau

SEQ ID NO: 24467 - RNA, 22 nt, Artificial Sequence
  GATA2 Guide RNA
ccgggcugcgggcaaagagaga

SEQ ID NO: 24468 - RNA, 22 nt, Artificial Sequence
  GATA2 Guide RNA
ccucucucucuuugcccgcagc

SEQ ID NO: 24469 - RNA, 22 nt, Artificial Sequence
  GATA2 Guide RNA
cggccugaccggaggccagaug

SEQ ID NO: 24470 - RNA, 22 nt, Artificial Sequence
  GATA2 Guide RNA
cgggcugcgggcaaagagagag

SEQ ID NO: 24471 - RNA, 22 nt, Artificial Sequence
  GATA2 Guide RNA
cucucucucuuugcccgcagcc

SEQ ID NO: 24472 - RNA, 22 nt, Artificial Sequence
  GATA2 Guide RNA
cucucucuuugcccgcagcccg

SEQ ID NO: 24473 - RNA, 22 nt, Artificial Sequence
  GATA2 Guide RNA
cucucuuugcccgcagcccggc

SEQ ID NO: 24474 - RNA, 22 nt, Artificial Sequence
  GATA2 Guide RNA
cucuuugcccgcagcccggccu

SEQ ID NO: 24475 - RNA, 22 nt, Artificial Sequence
  GATA2 Guide RNA
cuuugcccgcagcccggccuga

SEQ ID NO: 24476 - RNA, 22 nt, Artificial Sequence
  GATA2 Guide RNA
gcacaucuggccuccggucagg

SEQ ID NO: 24477 - RNA, 22 nt, Artificial Sequence
  GATA2 Guide RNA
gccgggcugcgggcaaagagag

SEQ ID NO: 24478 - RNA, 22 nt, Artificial Sequence
  GATA2 Guide RNA
ggcacaucuggccuccggucag

SEQ ID NO: 24479 - RNA, 22 nt, Artificial Sequence
  GATA2 Guide RNA
ggccgggcugcgggcaaagaga

SEQ ID NO: 24480 - RNA, 22 nt, Artificial Sequence
  GATA2 Guide RNA
gggcugcgggcaaagagagaga

SEQ ID NO: 24481 - RNA, 22 nt, Artificial Sequence
  GATA2 Guide RNA
ggucaggccgggcugcgggcaa

SEQ ID NO: 24482 - RNA, 22 nt, Artificial Sequence
  GATA2 Guide RNA
gucaggccgggcugcgggcaaa

SEQ ID NO: 24483 - RNA, 22 nt, Artificial Sequence
  GATA2 Guide RNA
ucaggccgggcugcgggcaaag

SEQ ID NO: 24484 - RNA, 22 nt, Artificial Sequence
  GATA2 Guide RNA
uccucucucucuuugcccgcag

SEQ ID NO: 24485 - RNA, 22 nt, Artificial Sequence
  GATA2 Guide RNA
ucucucucuuugcccgcagccc

SEQ ID NO: 24486 - RNA, 22 nt, Artificial Sequence
  GATA2 Guide RNA
ucucucuuugcccgcagcccgg

SEQ ID NO: 24487 - RNA, 22 nt, Artificial Sequence
  GATA2 Guide RNA
ucucuuugcccgcagcccggcc

SEQ ID NO: 24488 - RNA, 22 nt, Artificial Sequence
  GATA2 Guide RNA
ucuggccuccggucaggccggg

SEQ ID NO: 24489 - RNA, 22 nt, Artificial Sequence
  GATA2 Guide RNA
ucuuugcccgcagcccggccug

SEQ ID NO: 24490 - RNA, 22 nt, Artificial Sequence
  GATA2 Guide RNA
uggccuccggucaggccgggcu

SEQ ID NO: 24491 - RNA, 22 nt, Artificial Sequence
  GATA2 Guide RNA
uugcccgcagcccggccugacc

SEQ ID NO: 24492 - RNA, 22 nt, Artificial Sequence
  GATA2 Guide RNA
uuugcccgcagcccggccugac

SEQ ID NO: 24493 - RNA, 20 nt, Artificial Sequence
  GATA2 Guide RNA
acagccccgcgcgcggugag

SEQ ID NO: 24494 - RNA, 20 nt, Artificial Sequence
  GATA2 Guide RNA
accacgggcccagugcucac

SEQ ID NO: 24495 - RNA, 20 nt, Artificial Sequence
  GATA2 Guide RNA
accgcgcgcggggcuguagg

SEQ ID NO: 24496 - RNA, 20 nt, Artificial Sequence
  GATA2 Guide RNA
acgggcccagugcucaccgc

SEQ ID NO: 24497 - RNA, 20 nt, Artificial Sequence
  GATA2 Guide RNA
agccccgcgcgcggugagca

SEQ ID NO: 24498 - RNA, 20 nt, Artificial Sequence
  GATA2 Guide RNA
agugcucaccgcgcgcgggg

SEQ ID NO: 24499 - RNA, 20 nt, Artificial Sequence
  GATA2 Guide RNA
caccgcgcgcggggcuguag

SEQ ID NO: 24500 - RNA, 20 nt, Artificial Sequence
  GATA2 Guide RNA
cacgggcccagugcucaccg

SEQ ID NO: 24501 - RNA, 20 nt, Artificial Sequence
  GATA2 Guide RNA
cagugcucaccgcgcgcggg

SEQ ID NO: 24502 - RNA, 20 nt, Artificial Sequence
  GATA2 Guide RNA
ccacgggcccagugcucacc

SEQ ID NO: 24503 - RNA, 20 nt, Artificial Sequence
  GATA2 Guide RNA
ccagugcucaccgcgcgcgg

SEQ ID NO: 24504 - RNA, 20 nt, Artificial Sequence
  GATA2 Guide RNA
cccagugcucaccgcgcgcg

SEQ ID NO: 24505 - RNA, 20 nt, Artificial Sequence
  GATA2 Guide RNA
ccccgcgcgcggugagcacu

SEQ ID NO: 24506 - RNA, 20 nt, Artificial Sequence
  GATA2 Guide RNA
cccgcgcgcggugagcacug

SEQ ID NO: 24507 - RNA, 20 nt, Artificial Sequence
  GATA2 Guide RNA
ccgcgcgcggggcuguagga

SEQ ID NO: 24508 - RNA, 20 nt, Artificial Sequence
  GATA2 Guide RNA
ccgcgcgcggugagcacugg

SEQ ID NO: 24509 - RNA, 20 nt, Artificial Sequence
  GATA2 Guide RNA
ccuacagccccgcgcgcggu

SEQ ID NO: 24510 - RNA, 20 nt, Artificial Sequence
  GATA2 Guide RNA
cgcgcgcggggcuguaggag

SEQ ID NO: 24511 - RNA, 20 nt, Artificial Sequence
  GATA2 Guide RNA
cgcgcgcggugagcacuggg

SEQ ID NO: 24512 - RNA, 20 nt, Artificial Sequence
  GATA2 Guide RNA
cgcgcggggcuguaggagac

SEQ ID NO: 24513 - RNA, 20 nt, Artificial Sequence
  GATA2 Guide RNA
cgcgcggugagcacugggcc

SEQ ID NO: 24514 - RNA, 20 nt, Artificial Sequence
  GATA2 Guide RNA
cgcggugagcacugggcccg

SEQ ID NO: 24515 - RNA, 20 nt, Artificial Sequence
  GATA2 Guide RNA
cgcgucuccuacagccccgc

SEQ ID NO: 24516 - RNA, 20 nt, Artificial Sequence
  GATA2 Guide RNA
cgggcccagugcucaccgcg

SEQ ID NO: 24517 - RNA, 20 nt, Artificial Sequence
  GATA2 Guide RNA
cgucuccuacagccccgcgc

SEQ ID NO: 24518 - RNA, 20 nt, Artificial Sequence
  GATA2 Guide RNA
cuacagccccgcgcgcggug

SEQ ID NO: 24519 - RNA, 20 nt, Artificial Sequence
  GATA2 Guide RNA
cucaccgcgcgcggggcugu

SEQ ID NO: 24520 - RNA, 20 nt, Artificial Sequence
  GATA2 Guide RNA
cuccuacagccccgcgcgcg

SEQ ID NO: 24521 - RNA, 20 nt, Artificial Sequence
  GATA2 Guide RNA
gcccagugcucaccgcgcgc

SEQ ID NO: 24522 - RNA, 20 nt, Artificial Sequence
  GATA2 Guide RNA
gcgcgcggggcuguaggaga

SEQ ID NO: 24523 - RNA, 20 nt, Artificial Sequence
  GATA2 Guide RNA
gcgcgcggugagcacugggc

SEQ ID NO: 24524 - RNA, 20 nt, Artificial Sequence
  GATA2 Guide RNA
gcgcggugagcacugggccc

SEQ ID NO: 24525 - RNA, 20 nt, Artificial Sequence
  GATA2 Guide RNA
gcgcgucuccuacagccccg

SEQ ID NO: 24526 - RNA, 20 nt, Artificial Sequence
  GATA2 Guide RNA
gcgucuccuacagccccgcg

SEQ ID NO: 24527 - RNA, 20 nt, Artificial Sequence
  GATA2 Guide RNA
ggcccagugcucaccgcgcg

SEQ ID NO: 24528 - RNA, 20 nt, Artificial Sequence
  GATA2 Guide RNA
gggcccagugcucaccgcgc

SEQ ID NO: 24529 - RNA, 20 nt, Artificial Sequence
  GATA2 Guide RNA
gucuccuacagccccgcgcg

SEQ ID NO: 24530 - RNA, 20 nt, Artificial Sequence
  GATA2 Guide RNA
uacagccccgcgcgcgguga

SEQ ID NO: 24531 - RNA, 20 nt, Artificial Sequence
  GATA2 Guide RNA
ucaccgcgcgcggggcugua

SEQ ID NO: 24532 - RNA, 20 nt, Artificial Sequence
  GATA2 Guide RNA
uccuacagccccgcgcgcgg

SEQ ID NO: 24533 - RNA, 20 nt, Artificial Sequence
  GATA2 Guide RNA
ucuccuacagccccgcgcgc

SEQ ID NO: 24534 - RNA, 20 nt, Artificial Sequence
  GATA2 Guide RNA
ugcucaccgcgcgcggggcu

SEQ ID NO: 24535 - RNA, 21 nt, Artificial Sequence
  GATA2 Guide RNA
accacgggcccagugcucacc

SEQ ID NO: 24536 - RNA, 21 nt, Artificial Sequence
  GATA2 Guide RNA
accgcgcgcggggcuguagga

SEQ ID NO: 24537 - RNA, 21 nt, Artificial Sequence
  GATA2 Guide RNA
acgggcccagugcucaccgcg

SEQ ID NO: 24538 - RNA, 21 nt, Artificial Sequence
  GATA2 Guide RNA
caccacgggcccagugcucac

SEQ ID NO: 24539 - RNA, 21 nt, Artificial Sequence
  GATA2 Guide RNA
cacgggcccagugcucaccgc

SEQ ID NO: 24540 - RNA, 21 nt, Artificial Sequence
  GATA2 Guide RNA
ccacgggcccagugcucaccg

SEQ ID NO: 24541 - RNA, 21 nt, Artificial Sequence
  GATA2 Guide RNA
cgcgcgcggggcuguaggaga

SEQ ID NO: 24542 - RNA, 21 nt, Artificial Sequence
  GATA2 Guide RNA
cgcgcggggcuguaggagacg

SEQ ID NO: 24543 - RNA, 21 nt, Artificial Sequence
  GATA2 Guide RNA
cgcgcgucuccuacagccccg

SEQ ID NO: 24544 - RNA, 21 nt, Artificial Sequence
  GATA2 Guide RNA
cgcggugagcacugggcccgu

SEQ ID NO: 24545 - RNA, 21 nt, Artificial Sequence
  GATA2 Guide RNA
cgcgucuccuacagccccgcg

SEQ ID NO: 24546 - RNA, 21 nt, Artificial Sequence
  GATA2 Guide RNA
cgucuccuacagccccgcgcg

SEQ ID NO: 24547 - RNA, 21 nt, Artificial Sequence
  GATA2 Guide RNA
cuacagccccgcgcgcgguga

SEQ ID NO: 24548 - RNA, 21 nt, Artificial Sequence
  GATA2 Guide RNA
cucaccgcgcgcggggcugua

SEQ ID NO: 24549 - RNA, 21 nt, Artificial Sequence
  GATA2 Guide RNA
gcgcgcggggcuguaggagac

SEQ ID NO: 24550 - RNA, 21 nt, Artificial Sequence
  GATA2 Guide RNA
gcgcgucuccuacagccccgc

SEQ ID NO: 24551 - RNA, 21 nt, Artificial Sequence
  GATA2 Guide RNA
gcgucuccuacagccccgcgc

SEQ ID NO: 24552 - RNA, 21 nt, Artificial Sequence
  GATA2 Guide RNA
gucuccuacagccccgcgcgc

SEQ ID NO: 24553 - RNA, 21 nt, Artificial Sequence
  GATA2 Guide RNA
uacagccccgcgcgcggugag

SEQ ID NO: 24554 - RNA, 21 nt, Artificial Sequence
  GATA2 Guide RNA
ucaccgcgcgcggggcuguag

SEQ ID NO: 24555 - RNA, 21 nt, Artificial Sequence
  GATA2 Guide RNA
uccuacagccccgcgcgcggu

SEQ ID NO: 24556 - RNA, 21 nt, Artificial Sequence
  GATA2 Guide RNA
ucuccuacagccccgcgcgcg

SEQ ID NO: 24557 - RNA, 22 nt, Artificial Sequence
  GATA2 Guide RNA
acagccccgcgcgcggugagca

SEQ ID NO: 24558 - RNA, 22 nt, Artificial Sequence
  GATA2 Guide RNA
accacgggcccagugcucaccg

SEQ ID NO: 24559 - RNA, 22 nt, Artificial Sequence
  GATA2 Guide RNA
accgcgcgcggggcuguaggag

SEQ ID NO: 24560 - RNA, 22 nt, Artificial Sequence
  GATA2 Guide RNA
acgggcccagugcucaccgcgc

SEQ ID NO: 24561 - RNA, 22 nt, Artificial Sequence
  GATA2 Guide RNA
agccccgcgcgcggugagcacu

SEQ ID NO: 24562 - RNA, 22 nt, Artificial Sequence
  GATA2 Guide RNA
agugcucaccgcgcgcggggcu

SEQ ID NO: 24563 - RNA, 22 nt, Artificial Sequence
  GATA2 Guide RNA
caccacgggcccagugcucacc

SEQ ID NO: 24564 - RNA, 22 nt, Artificial Sequence
  GATA2 Guide RNA
caccgcgcgcggggcuguagga

SEQ ID NO: 24565 - RNA, 22 nt, Artificial Sequence
  GATA2 Guide RNA
cacgggcccagugcucaccgcg

SEQ ID NO: 24566 - RNA, 22 nt, Artificial Sequence
  GATA2 Guide RNA
ccacgggcccagugcucaccgc

SEQ ID NO: 24567 - RNA, 22 nt, Artificial Sequence
  GATA2 Guide RNA
ccgcgcgcggggcuguaggaga

SEQ ID NO: 24568 - RNA, 22 nt, Artificial Sequence
  GATA2 Guide RNA
ccuacagccccgcgcgcgguga

SEQ ID NO: 24569 - RNA, 22 nt, Artificial Sequence
  GATA2 Guide RNA
cgcgcgcggggcuguaggagac

SEQ ID NO: 24570 - RNA, 22 nt, Artificial Sequence
  GATA2 Guide RNA
cgcgcggggcuguaggagacgc

SEQ ID NO: 24571 - RNA, 22 nt, Artificial Sequence
  GATA2 Guide RNA
cgcgcgucuccuacagccccgc

SEQ ID NO: 24572 - RNA, 22 nt, Artificial Sequence
  GATA2 Guide RNA
cgcggugagcacugggcccgug

SEQ ID NO: 24573 - RNA, 22 nt, Artificial Sequence
  GATA2 Guide RNA
cgcgucuccuacagccccgcgc

SEQ ID NO: 24574 - RNA, 22 nt, Artificial Sequence
  GATA2 Guide RNA
cgucuccuacagccccgcgcgc

SEQ ID NO: 24575 - RNA, 22 nt, Artificial Sequence
  GATA2 Guide RNA
cuacagccccgcgcgcggugag

SEQ ID NO: 24576 - RNA, 22 nt, Artificial Sequence
  GATA2 Guide RNA
cucaccgcgcgcggggcuguag

SEQ ID NO: 24577 - RNA, 22 nt, Artificial Sequence
  GATA2 Guide RNA
cuccuacagccccgcgcgcggu

SEQ ID NO: 24578 - RNA, 22 nt, Artificial Sequence
  GATA2 Guide RNA
gcgcgcggggcuguaggagacg

SEQ ID NO: 24579 - RNA, 22 nt, Artificial Sequence
  GATA2 Guide RNA
gcgcgcgucuccuacagccccg

SEQ ID NO: 24580 - RNA, 22 nt, Artificial Sequence
  GATA2 Guide RNA
gcgcggugagcacugggcccgu

SEQ ID NO: 24581 - RNA, 22 nt, Artificial Sequence
  GATA2 Guide RNA
gcgcgucuccuacagccccgcg

SEQ ID NO: 24582 - RNA, 22 nt, Artificial Sequence
  GATA2 Guide RNA
gcgucuccuacagccccgcgcg

SEQ ID NO: 24583 - RNA, 22 nt, Artificial Sequence
  GATA2 Guide RNA
gcucaccgcgcgcggggcugua

SEQ ID NO: 24584 - RNA, 22 nt, Artificial Sequence
  GATA2 Guide RNA
gucuccuacagccccgcgcgcg

SEQ ID NO: 24585 - RNA, 22 nt, Artificial Sequence
  GATA2 Guide RNA
uacagccccgcgcgcggugagc

SEQ ID NO: 24586 - RNA, 22 nt, Artificial Sequence
  GATA2 Guide RNA
ucaccacgggcccagugcucac

SEQ ID NO: 24587 - RNA, 22 nt, Artificial Sequence
  GATA2 Guide RNA
ucaccgcgcgcggggcuguagg

SEQ ID NO: 24588 - RNA, 22 nt, Artificial Sequence
  GATA2 Guide RNA
uccuacagccccgcgcgcggug

SEQ ID NO: 24589 - RNA, 22 nt, Artificial Sequence
  GATA2 Guide RNA
ucuccuacagccccgcgcgcgg

SEQ ID NO: 24590 - RNA, 22 nt, Artificial Sequence
  GATA2 Guide RNA
ugcucaccgcgcgcggggcugu

SEQ ID NO: 24591 - RNA, 20 nt, Artificial Sequence
  GATA2 Guide RNA
acagccccgggcacggugag

SEQ ID NO: 24592 - RNA, 20 nt, Artificial Sequence
  GATA2 Guide RNA
accgugcccggggcuguagg

SEQ ID NO: 24593 - RNA, 20 nt, Artificial Sequence
  GATA2 Guide RNA
acgggcccagugcucaccgu

SEQ ID NO: 24594 - RNA, 20 nt, Artificial Sequence
  GATA2 Guide RNA
agccccgggcacggugagca

SEQ ID NO: 24595 - RNA, 20 nt, Artificial Sequence
  GATA2 Guide RNA
agugcucaccgugcccgggg

SEQ ID NO: 24596 - RNA, 20 nt, Artificial Sequence
  GATA2 Guide RNA
caccgugcccggggcuguag

SEQ ID NO: 24597 - RNA, 20 nt, Artificial Sequence
  GATA2 Guide RNA
cagccccgggcacggugagc

SEQ ID NO: 24598 - RNA, 20 nt, Artificial Sequence
  GATA2 Guide RNA
cagugcucaccgugcccggg

SEQ ID NO: 24599 - RNA, 20 nt, Artificial Sequence
  GATA2 Guide RNA
ccagugcucaccgugcccgg

SEQ ID NO: 24600 - RNA, 20 nt, Artificial Sequence
  GATA2 Guide RNA
cccagugcucaccgugcccg

SEQ ID NO: 24601 - RNA, 20 nt, Artificial Sequence
  GATA2 Guide RNA
ccccgggcacggugagcacu

SEQ ID NO: 24602 - RNA, 20 nt, Artificial Sequence
  GATA2 Guide RNA
cccgggcacggugagcacug

SEQ ID NO: 24603 - RNA, 20 nt, Artificial Sequence
  GATA2 Guide RNA
cccggggcuguaggagacgc

SEQ ID NO: 24604 - RNA, 20 nt, Artificial Sequence
  GATA2 Guide RNA
ccgggcacggugagcacugg

SEQ ID NO: 24605 - RNA, 20 nt, Artificial Sequence
  GATA2 Guide RNA
ccggggcuguaggagacgcg

SEQ ID NO: 24606 - RNA, 20 nt, Artificial Sequence
  GATA2 Guide RNA
ccgugcccggggcuguagga

SEQ ID NO: 24607 - RNA, 20 nt, Artificial Sequence
  GATA2 Guide RNA
ccuacagccccgggcacggu

SEQ ID NO: 24608 - RNA, 20 nt, Artificial Sequence
  GATA2 Guide RNA
cgcgcgucuccuacagcccc

SEQ ID NO: 24609 - RNA, 20 nt, Artificial Sequence
  GATA2 Guide RNA
cgcgucuccuacagccccgg

SEQ ID NO: 24610 - RNA, 20 nt, Artificial Sequence
  GATA2 Guide RNA
cgggcacggugagcacuggg

SEQ ID NO: 24611 - RNA, 20 nt, Artificial Sequence
  GATA2 Guide RNA
cgggcccagugcucaccgug

SEQ ID NO: 24612 - RNA, 20 nt, Artificial Sequence
  GATA2 Guide RNA
cgucuccuacagccccgggc

SEQ ID NO: 24613 - RNA, 20 nt, Artificial Sequence
  GATA2 Guide RNA
cgugcccggggcuguaggag

SEQ ID NO: 24614 - RNA, 20 nt, Artificial Sequence
  GATA2 Guide RNA
cuacagccccgggcacggug

SEQ ID NO: 24615 - RNA, 20 nt, Artificial Sequence
  GATA2 Guide RNA
cucaccgugcccggggcugu

SEQ ID NO: 24616 - RNA, 20 nt, Artificial Sequence
  GATA2 Guide RNA
cuccuacagccccgggcacg

SEQ ID NO: 24617 - RNA, 20 nt, Artificial Sequence
  GATA2 Guide RNA
gcccagugcucaccgugccc

SEQ ID NO: 24618 - RNA, 20 nt, Artificial Sequence
  GATA2 Guide RNA
gccccgggcacggugagcac

SEQ ID NO: 24619 - RNA, 20 nt, Artificial Sequence
  GATA2 Guide RNA
gcccggggcuguaggagacg

SEQ ID NO: 24620 - RNA, 20 nt, Artificial Sequence
  GATA2 Guide RNA
gcgcgcgucuccuacagccc

SEQ ID NO: 24621 - RNA, 20 nt, Artificial Sequence
  GATA2 Guide RNA
gcgucuccuacagccccggg

SEQ ID NO: 24622 - RNA, 20 nt, Artificial Sequence
  GATA2 Guide RNA
gcucaccgugcccggggcug

SEQ ID NO: 24623 - RNA, 20 nt, Artificial Sequence
  GATA2 Guide RNA
ggcccagugcucaccgugcc

SEQ ID NO: 24624 - RNA, 20 nt, Artificial Sequence
  GATA2 Guide RNA
ggcgcgcgucuccuacagcc

SEQ ID NO: 24625 - RNA, 20 nt, Artificial Sequence
  GATA2 Guide RNA
gggcacggugagcacugggc

SEQ ID NO: 24626 - RNA, 20 nt, Artificial Sequence
  GATA2 Guide RNA
gggcccagugcucaccgugc

SEQ ID NO: 24627 - RNA, 20 nt, Artificial Sequence
  GATA2 Guide RNA
gucuccuacagccccgggca

SEQ ID NO: 24628 - RNA, 20 nt, Artificial Sequence
  GATA2 Guide RNA
gugcccggggcuguaggaga

SEQ ID NO: 24629 - RNA, 20 nt, Artificial Sequence
  GATA2 Guide RNA
gugcucaccgugcccggggc

SEQ ID NO: 24630 - RNA, 20 nt, Artificial Sequence
  GATA2 Guide RNA
uacagccccgggcacgguga

SEQ ID NO: 24631 - RNA, 20 nt, Artificial Sequence
  GATA2 Guide RNA
ucaccgugcccggggcugua

SEQ ID NO: 24632 - RNA, 20 nt, Artificial Sequence
  GATA2 Guide RNA
uccuacagccccgggcacgg

SEQ ID NO: 24633 - RNA, 20 nt, Artificial Sequence
  GATA2 Guide RNA
ucuccuacagccccgggcac

SEQ ID NO: 24634 - RNA, 20 nt, Artificial Sequence
  GATA2 Guide RNA
ugcccggggcuguaggagac

SEQ ID NO: 24635 - RNA, 20 nt, Artificial Sequence
  GATA2 Guide RNA
ugcucaccgugcccggggcu

SEQ ID NO: 24636 - RNA, 21 nt, Artificial Sequence
  GATA2 Guide RNA
acagccccgggcacggugagc

SEQ ID NO: 24637 - RNA, 21 nt, Artificial Sequence
  GATA2 Guide RNA
accgugcccggggcuguagga

SEQ ID NO: 24638 - RNA, 21 nt, Artificial Sequence
  GATA2 Guide RNA
acgggcccagugcucaccgug

SEQ ID NO: 24639 - RNA, 21 nt, Artificial Sequence
  GATA2 Guide RNA
agccccgggcacggugagcac

SEQ ID NO: 24640 - RNA, 21 nt, Artificial Sequence
  GATA2 Guide RNA
agugcucaccgugcccggggc

SEQ ID NO: 24641 - RNA, 21 nt, Artificial Sequence
  GATA2 Guide RNA
caccgugcccggggcuguagg

SEQ ID NO: 24642 - RNA, 21 nt, Artificial Sequence
  GATA2 Guide RNA
cacgggcccagugcucaccgu

SEQ ID NO: 24643 - RNA, 21 nt, Artificial Sequence
  GATA2 Guide RNA
cagccccgggcacggugagca

SEQ ID NO: 24644 - RNA, 21 nt, Artificial Sequence
  GATA2 Guide RNA
cagugcucaccgugcccgggg

SEQ ID NO: 24645 - RNA, 21 nt, Artificial Sequence
  GATA2 Guide RNA
ccagugcucaccgugcccggg

SEQ ID NO: 24646 - RNA, 21 nt, Artificial Sequence
  GATA2 Guide RNA
cccagugcucaccgugcccgg

SEQ ID NO: 24647 - RNA, 21 nt, Artificial Sequence
  GATA2 Guide RNA
ccccgggcacggugagcacug

SEQ ID NO: 24648 - RNA, 21 nt, Artificial Sequence
  GATA2 Guide RNA
cccgggcacggugagcacugg

SEQ ID NO: 24649 - RNA, 21 nt, Artificial Sequence
  GATA2 Guide RNA
cccggggcuguaggagacgcg

SEQ ID NO: 24650 - RNA, 21 nt, Artificial Sequence
  GATA2 Guide RNA
ccgggcacggugagcacuggg

SEQ ID NO: 24651 - RNA, 21 nt, Artificial Sequence
  GATA2 Guide RNA
ccggggcuguaggagacgcgc

SEQ ID NO: 24652 - RNA, 21 nt, Artificial Sequence
  GATA2 Guide RNA
ccgugcccggggcuguaggag

SEQ ID NO: 24653 - RNA, 21 nt, Artificial Sequence
  GATA2 Guide RNA
ccuacagccccgggcacggug

SEQ ID NO: 24654 - RNA, 21 nt, Artificial Sequence
  GATA2 Guide RNA
cgcgucuccuacagccccggg

SEQ ID NO: 24655 - RNA, 21 nt, Artificial Sequence
  GATA2 Guide RNA
cgggcacggugagcacugggc

SEQ ID NO: 24656 - RNA, 21 nt, Artificial Sequence
  GATA2 Guide RNA
cgggcccagugcucaccgugc

SEQ ID NO: 24657 - RNA, 21 nt, Artificial Sequence
  GATA2 Guide RNA
cgucuccuacagccccgggca

SEQ ID NO: 24658 - RNA, 21 nt, Artificial Sequence
  GATA2 Guide RNA
cgugcccggggcuguaggaga

SEQ ID NO: 24659 - RNA, 21 nt, Artificial Sequence
  GATA2 Guide RNA
cuacagccccgggcacgguga

SEQ ID NO: 24660 - RNA, 21 nt, Artificial Sequence
  GATA2 Guide RNA
cucaccgugcccggggcugua

SEQ ID NO: 24661 - RNA, 21 nt, Artificial Sequence
  GATA2 Guide RNA
cuccuacagccccgggcacgg

SEQ ID NO: 24662 - RNA, 21 nt, Artificial Sequence
  GATA2 Guide RNA
gcccagugcucaccgugcccg

SEQ ID NO: 24663 - RNA, 21 nt, Artificial Sequence
  GATA2 Guide RNA
gccccgggcacggugagcacu

SEQ ID NO: 24664 - RNA, 21 nt, Artificial Sequence
  GATA2 Guide RNA
gcccggggcuguaggagacgc

SEQ ID NO: 24665 - RNA, 21 nt, Artificial Sequence
  GATA2 Guide RNA
gcgcgcgucuccuacagcccc

SEQ ID NO: 24666 - RNA, 21 nt, Artificial Sequence
  GATA2 Guide RNA
gcgcgucuccuacagccccgg

SEQ ID NO: 24667 - RNA, 21 nt, Artificial Sequence
  GATA2 Guide RNA
gcgucuccuacagccccgggc

SEQ ID NO: 24668 - RNA, 21 nt, Artificial Sequence
  GATA2 Guide RNA
gcucaccgugcccggggcugu

SEQ ID NO: 24669 - RNA, 21 nt, Artificial Sequence
  GATA2 Guide RNA
ggcccagugcucaccgugccc

SEQ ID NO: 24670 - RNA, 21 nt, Artificial Sequence
  GATA2 Guide RNA
ggcgcgcgucuccuacagccc

SEQ ID NO: 24671 - RNA, 21 nt, Artificial Sequence
  GATA2 Guide RNA
gggcacggugagcacugggcc

SEQ ID NO: 24672 - RNA, 21 nt, Artificial Sequence
  GATA2 Guide RNA
gggcccagugcucaccgugcc

SEQ ID NO: 24673 - RNA, 21 nt, Artificial Sequence
  GATA2 Guide RNA
gggcgcgcgucuccuacagcc

SEQ ID NO: 24674 - RNA, 21 nt, Artificial Sequence
  GATA2 Guide RNA
gucuccuacagccccgggcac

SEQ ID NO: 24675 - RNA, 21 nt, Artificial Sequence
  GATA2 Guide RNA
gugcccggggcuguaggagac

SEQ ID NO: 24676 - RNA, 21 nt, Artificial Sequence
  GATA2 Guide RNA
gugcucaccgugcccggggcu

SEQ ID NO: 24677 - RNA, 21 nt, Artificial Sequence
  GATA2 Guide RNA
uacagccccgggcacggugag

SEQ ID NO: 24678 - RNA, 21 nt, Artificial Sequence
  GATA2 Guide RNA
ucaccgugcccggggcuguag

SEQ ID NO: 24679 - RNA, 21 nt, Artificial Sequence
  GATA2 Guide RNA
uccuacagccccgggcacggu

SEQ ID NO: 24680 - RNA, 21 nt, Artificial Sequence
  GATA2 Guide RNA
ucuccuacagccccgggcacg

SEQ ID NO: 24681 - RNA, 21 nt, Artificial Sequence
  GATA2 Guide RNA
ugcccggggcuguaggagacg

SEQ ID NO: 24682 - RNA, 21 nt, Artificial Sequence
  GATA2 Guide RNA
ugcucaccgugcccggggcug

SEQ ID NO: 24683 - RNA, 22 nt, Artificial Sequence
  GATA2 Guide RNA
acagccccgggcacggugagca

SEQ ID NO: 24684 - RNA, 22 nt, Artificial Sequence
  GATA2 Guide RNA
accgugcccggggcuguaggag

SEQ ID NO: 24685 - RNA, 22 nt, Artificial Sequence
  GATA2 Guide RNA
acgggcccagugcucaccgugc

SEQ ID NO: 24686 - RNA, 22 nt, Artificial Sequence
  GATA2 Guide RNA
agccccgggcacggugagcacu

SEQ ID NO: 24687 - RNA, 22 nt, Artificial Sequence
  GATA2 Guide RNA
agugcucaccgugcccggggcu

SEQ ID NO: 24688 - RNA, 22 nt, Artificial Sequence
  GATA2 Guide RNA
caccgugcccggggcuguagga

SEQ ID NO: 24689 - RNA, 22 nt, Artificial Sequence
  GATA2 Guide RNA
cacgggcccagugcucaccgug

SEQ ID NO: 24690 - RNA, 22 nt, Artificial Sequence
  GATA2 Guide RNA
cagccccgggcacggugagcac

SEQ ID NO: 24691 - RNA, 22 nt, Artificial Sequence
  GATA2 Guide RNA
cagugcucaccgugcccggggc

SEQ ID NO: 24692 - RNA, 22 nt, Artificial Sequence
  GATA2 Guide RNA
ccacgggcccagugcucaccgu

SEQ ID NO: 24693 - RNA, 22 nt, Artificial Sequence
  GATA2 Guide RNA
ccagugcucaccgugcccgggg

SEQ ID NO: 24694 - RNA, 22 nt, Artificial Sequence
  GATA2 Guide RNA
cccagugcucaccgugcccggg

SEQ ID NO: 24695 - RNA, 22 nt, Artificial Sequence
  GATA2 Guide RNA
ccccgggcacggugagcacugg

SEQ ID NO: 24696 - RNA, 22 nt, Artificial Sequence
  GATA2 Guide RNA
cccgggcacggugagcacuggg

SEQ ID NO: 24697 - RNA, 22 nt, Artificial Sequence
  GATA2 Guide RNA
cccggggcuguaggagacgcgc

SEQ ID NO: 24698 - RNA, 22 nt, Artificial Sequence
  GATA2 Guide RNA
ccgggcacggugagcacugggc

SEQ ID NO: 24699 - RNA, 22 nt, Artificial Sequence
  GATA2 Guide RNA
ccggggcuguaggagacgcgcg

SEQ ID NO: 24700 - RNA, 22 nt, Artificial Sequence
  GATA2 Guide RNA
ccgugcccggggcuguaggaga

SEQ ID NO: 24701 - RNA, 22 nt, Artificial Sequence
  GATA2 Guide RNA
ccuacagccccgggcacgguga

SEQ ID NO: 24702 - RNA, 22 nt, Artificial Sequence
  GATA2 Guide RNA
cgcgcgucuccuacagccccgg

SEQ ID NO: 24703 - RNA, 22 nt, Artificial Sequence
  GATA2 Guide RNA
cgcgucuccuacagccccgggc

SEQ ID NO: 24704 - RNA, 22 nt, Artificial Sequence
  GATA2 Guide RNA
cgggcacggugagcacugggcc

SEQ ID NO: 24705 - RNA, 22 nt, Artificial Sequence
  GATA2 Guide RNA
cgggcccagugcucaccgugcc

SEQ ID NO: 24706 - RNA, 22 nt, Artificial Sequence
  GATA2 Guide RNA
cgggcgcgcgucuccuacagcc

SEQ ID NO: 24707 - RNA, 22 nt, Artificial Sequence
  GATA2 Guide RNA
cgucuccuacagccccgggcac

SEQ ID NO: 24708 - RNA, 22 nt, Artificial Sequence
  GATA2 Guide RNA
cgugcccggggcuguaggagac

SEQ ID NO: 24709 - RNA, 22 nt, Artificial Sequence
  GATA2 Guide RNA
cuacagccccgggcacggugag

SEQ ID NO: 24710 - RNA, 22 nt, Artificial Sequence
  GATA2 Guide RNA
cucaccgugcccggggcuguag

SEQ ID NO: 24711 - RNA, 22 nt, Artificial Sequence
  GATA2 Guide RNA
cuccuacagccccgggcacggu

SEQ ID NO: 24712 - RNA, 22 nt, Artificial Sequence
  GATA2 Guide RNA
gcccagugcucaccgugcccgg

SEQ ID NO: 24713 - RNA, 22 nt, Artificial Sequence
  GATA2 Guide RNA
gccccgggcacggugagcacug

SEQ ID NO: 24714 - RNA, 22 nt, Artificial Sequence
  GATA2 Guide RNA
gcccggggcuguaggagacgcg

SEQ ID NO: 24715 - RNA, 22 nt, Artificial Sequence
  GATA2 Guide RNA
gcgcgucuccuacagccccggg

SEQ ID NO: 24716 - RNA, 22 nt, Artificial Sequence
  GATA2 Guide RNA
gcgucuccuacagccccgggca

SEQ ID NO: 24717 - RNA, 22 nt, Artificial Sequence
  GATA2 Guide RNA
gcucaccgugcccggggcugua

SEQ ID NO: 24718 - RNA, 22 nt, Artificial Sequence
  GATA2 Guide RNA
ggcccagugcucaccgugcccg

SEQ ID NO: 24719 - RNA, 22 nt, Artificial Sequence
  GATA2 Guide RNA
ggcgcgcgucuccuacagcccc

SEQ ID NO: 24720 - RNA, 22 nt, Artificial Sequence
  GATA2 Guide RNA
gggcacggugagcacugggccc

SEQ ID NO: 24721 - RNA, 22 nt, Artificial Sequence
  GATA2 Guide RNA
gggcccagugcucaccgugccc

SEQ ID NO: 24722 - RNA, 22 nt, Artificial Sequence
  GATA2 Guide RNA
gggcgcgcgucuccuacagccc

SEQ ID NO: 24723 - RNA, 22 nt, Artificial Sequence
  GATA2 Guide RNA
gucuccuacagccccgggcacg

SEQ ID NO: 24724 - RNA, 22 nt, Artificial Sequence
  GATA2 Guide RNA
gugcccggggcuguaggagacg

SEQ ID NO: 24725 - RNA, 22 nt, Artificial Sequence
  GATA2 Guide RNA
gugcucaccgugcccggggcug

SEQ ID NO: 24726 - RNA, 22 nt, Artificial Sequence
  GATA2 Guide RNA
uacagccccgggcacggugagc

SEQ ID NO: 24727 - RNA, 22 nt, Artificial Sequence
  GATA2 Guide RNA
ucaccgugcccggggcuguagg

SEQ ID NO: 24728 - RNA, 22 nt, Artificial Sequence
  GATA2 Guide RNA
uccuacagccccgggcacggug

SEQ ID NO: 24729 - RNA, 22 nt, Artificial Sequence
  GATA2 Guide RNA
ucuccuacagccccgggcacgg

SEQ ID NO: 24730 - RNA, 22 nt, Artificial Sequence
  GATA2 Guide RNA
ugcccggggcuguaggagacgc

SEQ ID NO: 24731 - RNA, 22 nt, Artificial Sequence
  GATA2 Guide RNA
ugcucaccgugcccggggcugu

SEQ ID NO: 24732 - RNA, 20 nt, Artificial Sequence
  GATA2 Guide RNA
aaccccgcucacgcgcgggc

SEQ ID NO: 24733 - RNA, 20 nt, Artificial Sequence
  GATA2 Guide RNA
acgcgcgggcgcacgucucc

SEQ ID NO: 24734 - RNA, 20 nt, Artificial Sequence
  GATA2 Guide RNA
acgugcgcccgcgcgugagc

SEQ ID NO: 24735 - RNA, 20 nt, Artificial Sequence
  GATA2 Guide RNA
agacgugcgcccgcgcguga

SEQ ID NO: 24736 - RNA, 20 nt, Artificial Sequence
  GATA2 Guide RNA
aggagacgugcgcccgcgcg

SEQ ID NO: 24737 - RNA, 20 nt, Artificial Sequence
  GATA2 Guide RNA
caaccccgcucacgcgcggg

SEQ ID NO: 24738 - RNA, 20 nt, Artificial Sequence
  GATA2 Guide RNA
cacgcgcgggcgcacgucuc

SEQ ID NO: 24739 - RNA, 20 nt, Artificial Sequence
  GATA2 Guide RNA
cacgucuccuacagccccgc

SEQ ID NO: 24740 - RNA, 20 nt, Artificial Sequence
  GATA2 Guide RNA
cgcacgucuccuacagcccc

SEQ ID NO: 24741 - RNA, 20 nt, Artificial Sequence
  GATA2 Guide RNA
cgcgcgggcgcacgucuccu

SEQ ID NO: 24742 - RNA, 20 nt, Artificial Sequence
  GATA2 Guide RNA
cgcgggcgcacgucuccuac

SEQ ID NO: 24743 - RNA, 20 nt, Artificial Sequence
  GATA2 Guide RNA
cgcggggcuguaggagacgu

SEQ ID NO: 24744 - RNA, 20 nt, Artificial Sequence
  GATA2 Guide RNA
cgggcgcacgucuccuacag

SEQ ID NO: 24745 - RNA, 20 nt, Artificial Sequence
  GATA2 Guide RNA
cggggcuguaggagacgugc

SEQ ID NO: 24746 - RNA, 20 nt, Artificial Sequence
  GATA2 Guide RNA
cucacgcgcgggcgcacguc

SEQ ID NO: 24747 - RNA, 20 nt, Artificial Sequence
  GATA2 Guide RNA
cuguaggagacgugcgcccg

SEQ ID NO: 24748 - RNA, 20 nt, Artificial Sequence
  GATA2 Guide RNA
gacgugcgcccgcgcgugag

SEQ ID NO: 24749 - RNA, 20 nt, Artificial Sequence
  GATA2 Guide RNA
gagacgugcgcccgcgcgug

SEQ ID NO: 24750 - RNA, 20 nt, Artificial Sequence
  GATA2 Guide RNA
gcacgucuccuacagccccg

SEQ ID NO: 24751 - RNA, 20 nt, Artificial Sequence
  GATA2 Guide RNA
gcgcacgucuccuacagccc

SEQ ID NO: 24752 - RNA, 20 nt, Artificial Sequence
  GATA2 Guide RNA
gcgcgggcgcacgucuccua

SEQ ID NO: 24753 - RNA, 20 nt, Artificial Sequence
  GATA2 Guide RNA
gcgcggggcuguaggagacg

SEQ ID NO: 24754 - RNA, 20 nt, Artificial Sequence
  GATA2 Guide RNA
gcgggcgcacgucuccuaca

SEQ ID NO: 24755 - RNA, 20 nt, Artificial Sequence
  GATA2 Guide RNA
gcggggcuguaggagacgug

SEQ ID NO: 24756 - RNA, 20 nt, Artificial Sequence
  GATA2 Guide RNA
gcucacgcgcgggcgcacgu

SEQ ID NO: 24757 - RNA, 20 nt, Artificial Sequence
  GATA2 Guide RNA
gcuguaggagacgugcgccc

SEQ ID NO: 24758 - RNA, 20 nt, Artificial Sequence
  GATA2 Guide RNA
ggagacgugcgcccgcgcgu

SEQ ID NO: 24759 - RNA, 20 nt, Artificial Sequence
  GATA2 Guide RNA
ggcgcacgucuccuacagcc

SEQ ID NO: 24760 - RNA, 20 nt, Artificial Sequence
  GATA2 Guide RNA
ggcuguaggagacgugcgcc

SEQ ID NO: 24761 - RNA, 20 nt, Artificial Sequence
  GATA2 Guide RNA
gggcgcacgucuccuacagc

SEQ ID NO: 24762 - RNA, 20 nt, Artificial Sequence
  GATA2 Guide RNA
gggcuguaggagacgugcgc

SEQ ID NO: 24763 - RNA, 20 nt, Artificial Sequence
  GATA2 Guide RNA
ggggcuguaggagacgugcg

SEQ ID NO: 24764 - RNA, 20 nt, Artificial Sequence
  GATA2 Guide RNA
guaggagacgugcgcccgcg

SEQ ID NO: 24765 - RNA, 20 nt, Artificial Sequence
  GATA2 Guide RNA
gugcgcggggcuguaggaga

SEQ ID NO: 24766 - RNA, 20 nt, Artificial Sequence
  GATA2 Guide RNA
uaggagacgugcgcccgcgc

SEQ ID NO: 24767 - RNA, 20 nt, Artificial Sequence
  GATA2 Guide RNA
ucacgcgcgggcgcacgucu

SEQ ID NO: 24768 - RNA, 20 nt, Artificial Sequence
  GATA2 Guide RNA
ugcgcggggcuguaggagac

SEQ ID NO: 24769 - RNA, 20 nt, Artificial Sequence
  GATA2 Guide RNA
uguaggagacgugcgcccgc

SEQ ID NO: 24770 - RNA, 21 nt, Artificial Sequence
  GATA2 Guide RNA
acgcgcgggcgcacgucuccu

SEQ ID NO: 24771 - RNA, 21 nt, Artificial Sequence
  GATA2 Guide RNA
agacgugcgcccgcgcgugag

SEQ ID NO: 24772 - RNA, 21 nt, Artificial Sequence
  GATA2 Guide RNA
aggagacgugcgcccgcgcgu

SEQ ID NO: 24773 - RNA, 21 nt, Artificial Sequence
  GATA2 Guide RNA
cacgucuccuacagccccgcg

SEQ ID NO: 24774 - RNA, 21 nt, Artificial Sequence
  GATA2 Guide RNA
cgcacgucuccuacagccccg

SEQ ID NO: 24775 - RNA, 21 nt, Artificial Sequence
  GATA2 Guide RNA
cgcgcgggcgcacgucuccua

SEQ ID NO: 24776 - RNA, 21 nt, Artificial Sequence
  GATA2 Guide RNA
cgcgggcgcacgucuccuaca

SEQ ID NO: 24777 - RNA, 21 nt, Artificial Sequence
  GATA2 Guide RNA
cgcggggcuguaggagacgug

SEQ ID NO: 24778 - RNA, 21 nt, Artificial Sequence
  GATA2 Guide RNA
cgggcgcacgucuccuacagc

SEQ ID NO: 24779 - RNA, 21 nt, Artificial Sequence
  GATA2 Guide RNA
cggggcuguaggagacgugcg

SEQ ID NO: 24780 - RNA, 21 nt, Artificial Sequence
  GATA2 Guide RNA
cgugcgcggggcuguaggaga

SEQ ID NO: 24781 - RNA, 21 nt, Artificial Sequence
  GATA2 Guide RNA
cucacgcgcgggcgcacgucu

SEQ ID NO: 24782 - RNA, 21 nt, Artificial Sequence
  GATA2 Guide RNA
cuguaggagacgugcgcccgc

SEQ ID NO: 24783 - RNA, 21 nt, Artificial Sequence
  GATA2 Guide RNA
gagacgugcgcccgcgcguga

SEQ ID NO: 24784 - RNA, 21 nt, Artificial Sequence
  GATA2 Guide RNA
gcacgucuccuacagccccgc

SEQ ID NO: 24785 - RNA, 21 nt, Artificial Sequence
  GATA2 Guide RNA
gcgcacgucuccuacagcccc

SEQ ID NO: 24786 - RNA, 21 nt, Artificial Sequence
  GATA2 Guide RNA
gcgcgggcgcacgucuccuac

SEQ ID NO: 24787 - RNA, 21 nt, Artificial Sequence
  GATA2 Guide RNA
gcgcggggcuguaggagacgu

SEQ ID NO: 24788 - RNA, 21 nt, Artificial Sequence
  GATA2 Guide RNA
gcgggcgcacgucuccuacag

SEQ ID NO: 24789 - RNA, 21 nt, Artificial Sequence
  GATA2 Guide RNA
gcggggcuguaggagacgugc

SEQ ID NO: 24790 - RNA, 21 nt, Artificial Sequence
  GATA2 Guide RNA
gcuguaggagacgugcgcccg

SEQ ID NO: 24791 - RNA, 21 nt, Artificial Sequence
  GATA2 Guide RNA
ggcgcacgucuccuacagccc

SEQ ID NO: 24792 - RNA, 21 nt, Artificial Sequence
  GATA2 Guide RNA
ggcuguaggagacgugcgccc

SEQ ID NO: 24793 - RNA, 21 nt, Artificial Sequence
  GATA2 Guide RNA
gggcgcacgucuccuacagcc

SEQ ID NO: 24794 - RNA, 21 nt, Artificial Sequence
  GATA2 Guide RNA
gggcuguaggagacgugcgcc

SEQ ID NO: 24795 - RNA, 21 nt, Artificial Sequence
  GATA2 Guide RNA
ggggcuguaggagacgugcgc

SEQ ID NO: 24796 - RNA, 21 nt, Artificial Sequence
  GATA2 Guide RNA
guaggagacgugcgcccgcgc

SEQ ID NO: 24797 - RNA, 21 nt, Artificial Sequence
  GATA2 Guide RNA
gugcgcggggcuguaggagac

SEQ ID NO: 24798 - RNA, 21 nt, Artificial Sequence
  GATA2 Guide RNA
uaggagacgugcgcccgcgcg

SEQ ID NO: 24799 - RNA, 21 nt, Artificial Sequence
  GATA2 Guide RNA
ucacgcgcgggcgcacgucuc

SEQ ID NO: 24800 - RNA, 21 nt, Artificial Sequence
  GATA2 Guide RNA
ugcgcggggcuguaggagacg

SEQ ID NO: 24801 - RNA, 21 nt, Artificial Sequence
  GATA2 Guide RNA
uguaggagacgugcgcccgcg

SEQ ID NO: 24802 - RNA, 22 nt, Artificial Sequence
  GATA2 Guide RNA
acgcgcgggcgcacgucuccua

SEQ ID NO: 24803 - RNA, 22 nt, Artificial Sequence
  GATA2 Guide RNA
agacgugcgcccgcgcgugagc

SEQ ID NO: 24804 - RNA, 22 nt, Artificial Sequence
  GATA2 Guide RNA
aggagacgugcgcccgcgcgug

SEQ ID NO: 24805 - RNA, 22 nt, Artificial Sequence
  GATA2 Guide RNA
cacgcgcgggcgcacgucuccu

SEQ ID NO: 24806 - RNA, 22 nt, Artificial Sequence
  GATA2 Guide RNA
cacgucuccuacagccccgcgc

SEQ ID NO: 24807 - RNA, 22 nt, Artificial Sequence
  GATA2 Guide RNA
ccgugcgcggggcuguaggaga

SEQ ID NO: 24808 - RNA, 22 nt, Artificial Sequence
  GATA2 Guide RNA
cgcacgucuccuacagccccgc

SEQ ID NO: 24809 - RNA, 22 nt, Artificial Sequence
  GATA2 Guide RNA
cgcgcgggcgcacgucuccuac

SEQ ID NO: 24810 - RNA, 22 nt, Artificial Sequence
  GATA2 Guide RNA
cgcgggcgcacgucuccuacag

SEQ ID NO: 24811 - RNA, 22 nt, Artificial Sequence
  GATA2 Guide RNA
cgcggggcuguaggagacgugc

SEQ ID NO: 24812 - RNA, 22 nt, Artificial Sequence
  GATA2 Guide RNA
cgggcgcacgucuccuacagcc

SEQ ID NO: 24813 - RNA, 22 nt, Artificial Sequence
  GATA2 Guide RNA
cggggcuguaggagacgugcgc

SEQ ID NO: 24814 - RNA, 22 nt, Artificial Sequence
  GATA2 Guide RNA
cgugcgcggggcuguaggagac

SEQ ID NO: 24815 - RNA, 22 nt, Artificial Sequence
  GATA2 Guide RNA
cucacgcgcgggcgcacgucuc

SEQ ID NO: 24816 - RNA, 22 nt, Artificial Sequence
  GATA2 Guide RNA
cuguaggagacgugcgcccgcg

SEQ ID NO: 24817 - RNA, 22 nt, Artificial Sequence
  GATA2 Guide RNA
gagacgugcgcccgcgcgugag

SEQ ID NO: 24818 - RNA, 22 nt, Artificial Sequence
  GATA2 Guide RNA
gcacgucuccuacagccccgcg

SEQ ID NO: 24819 - RNA, 22 nt, Artificial Sequence
  GATA2 Guide RNA
gcgcacgucuccuacagccccg

SEQ ID NO: 24820 - RNA, 22 nt, Artificial Sequence
  GATA2 Guide RNA
gcgcgggcgcacgucuccuaca

SEQ ID NO: 24821 - RNA, 22 nt, Artificial Sequence
  GATA2 Guide RNA
gcgcggggcuguaggagacgug

SEQ ID NO: 24822 - RNA, 22 nt, Artificial Sequence
  GATA2 Guide RNA
gcgggcgcacgucuccuacagc

SEQ ID NO: 24823 - RNA, 22 nt, Artificial Sequence
  GATA2 Guide RNA
gcggggcuguaggagacgugcg

SEQ ID NO: 24824 - RNA, 22 nt, Artificial Sequence
  GATA2 Guide RNA
gcucacgcgcgggcgcacgucu

SEQ ID NO: 24825 - RNA, 22 nt, Artificial Sequence
  GATA2 Guide RNA
gcuguaggagacgugcgcccgc

SEQ ID NO: 24826 - RNA, 22 nt, Artificial Sequence
  GATA2 Guide RNA
ggagacgugcgcccgcgcguga

SEQ ID NO: 24827 - RNA, 22 nt, Artificial Sequence
  GATA2 Guide RNA
ggcgcacgucuccuacagcccc

SEQ ID NO: 24828 - RNA, 22 nt, Artificial Sequence
  GATA2 Guide RNA
ggcuguaggagacgugcgcccg

SEQ ID NO: 24829 - RNA, 22 nt, Artificial Sequence
  GATA2 Guide RNA
gggcgcacgucuccuacagccc

SEQ ID NO: 24830 - RNA, 22 nt, Artificial Sequence
  GATA2 Guide RNA
gggcuguaggagacgugcgccc

SEQ ID NO: 24831 - RNA, 22 nt, Artificial Sequence
  GATA2 Guide RNA
ggggcuguaggagacgugcgcc

SEQ ID NO: 24832 - RNA, 22 nt, Artificial Sequence
  GATA2 Guide RNA
guaggagacgugcgcccgcgcg

SEQ ID NO: 24833 - RNA, 22 nt, Artificial Sequence
  GATA2 Guide RNA
gugcgcggggcuguaggagacg

SEQ ID NO: 24834 - RNA, 22 nt, Artificial Sequence
  GATA2 Guide RNA
uaggagacgugcgcccgcgcgu

SEQ ID NO: 24835 - RNA, 22 nt, Artificial Sequence
  GATA2 Guide RNA
ucacgcgcgggcgcacgucucc

SEQ ID NO: 24836 - RNA, 22 nt, Artificial Sequence
  GATA2 Guide RNA
ugcgcggggcuguaggagacgu

SEQ ID NO: 24837 - RNA, 22 nt, Artificial Sequence
  GATA2 Guide RNA
uguaggagacgugcgcccgcgc

SEQ ID NO: 24838 - RNA, 20 nt, Artificial Sequence
  GATA2 Guide RNA
accccgcucacgcgcgggcu

SEQ ID NO: 24839 - RNA, 20 nt, Artificial Sequence
  GATA2 Guide RNA
acgcgagcccgcgcgugagc

SEQ ID NO: 24840 - RNA, 20 nt, Artificial Sequence
  GATA2 Guide RNA
acgcgcgggcucgcgucucc

SEQ ID NO: 24841 - RNA, 20 nt, Artificial Sequence
  GATA2 Guide RNA
agacgcgagcccgcgcguga

SEQ ID NO: 24842 - RNA, 20 nt, Artificial Sequence
  GATA2 Guide RNA
agcccgcgcgugagcggggu

SEQ ID NO: 24843 - RNA, 20 nt, Artificial Sequence
  GATA2 Guide RNA
aggagacgcgagcccgcgcg

SEQ ID NO: 24844 - RNA, 20 nt, Artificial Sequence
  GATA2 Guide RNA
cacgcgcgggcucgcgucuc

SEQ ID NO: 24845 - RNA, 20 nt, Artificial Sequence
  GATA2 Guide RNA
ccaaccccgcucacgcgcgg

SEQ ID NO: 24846 - RNA, 20 nt, Artificial Sequence
  GATA2 Guide RNA
cgcgcgggcucgcgucuccu

SEQ ID NO: 24847 - RNA, 20 nt, Artificial Sequence
  GATA2 Guide RNA
cgcgggcucgcgucuccuac

SEQ ID NO: 24848 - RNA, 20 nt, Artificial Sequence
  GATA2 Guide RNA
cgcggggcuguaggagacgc

SEQ ID NO: 24849 - RNA, 20 nt, Artificial Sequence
  GATA2 Guide RNA
cgggcucgcgucuccuacag

SEQ ID NO: 24850 - RNA, 20 nt, Artificial Sequence
  GATA2 Guide RNA
cggggcuguaggagacgcga

SEQ ID NO: 24851 - RNA, 20 nt, Artificial Sequence
  GATA2 Guide RNA
cucacgcgcgggcucgcguc

SEQ ID NO: 24852 - RNA, 20 nt, Artificial Sequence
  GATA2 Guide RNA
cucgcgucuccuacagcccc

SEQ ID NO: 24853 - RNA, 20 nt, Artificial Sequence
  GATA2 Guide RNA
cuguaggagacgcgagcccg

SEQ ID NO: 24854 - RNA, 20 nt, Artificial Sequence
  GATA2 Guide RNA
gacgcgagcccgcgcgugag

SEQ ID NO: 24855 - RNA, 20 nt, Artificial Sequence
  GATA2 Guide RNA
gagacgcgagcccgcgcgug

SEQ ID NO: 24856 - RNA, 20 nt, Artificial Sequence
  GATA2 Guide RNA
gccaaccccgcucacgcgcg

SEQ ID NO: 24857 - RNA, 20 nt, Artificial Sequence
  GATA2 Guide RNA
gcgcgggcucgcgucuccua

SEQ ID NO: 24858 - RNA, 20 nt, Artificial Sequence
  GATA2 Guide RNA
gcgggcucgcgucuccuaca

SEQ ID NO: 24859 - RNA, 20 nt, Artificial Sequence
  GATA2 Guide RNA
gcggggcuguaggagacgcg

SEQ ID NO: 24860 - RNA, 20 nt, Artificial Sequence
  GATA2 Guide RNA
gcucacgcgcgggcucgcgu

SEQ ID NO: 24861 - RNA, 20 nt, Artificial Sequence
  GATA2 Guide RNA
gcucgcgucuccuacagccc

SEQ ID NO: 24862 - RNA, 20 nt, Artificial Sequence
  GATA2 Guide RNA
gcuguaggagacgcgagccc

SEQ ID NO: 24863 - RNA, 20 nt, Artificial Sequence
  GATA2 Guide RNA
ggagacgcgagcccgcgcgu

SEQ ID NO: 24864 - RNA, 20 nt, Artificial Sequence
  GATA2 Guide RNA
ggcucgcgucuccuacagcc

SEQ ID NO: 24865 - RNA, 20 nt, Artificial Sequence
  GATA2 Guide RNA
ggcuguaggagacgcgagcc

SEQ ID NO: 24866 - RNA, 20 nt, Artificial Sequence
  GATA2 Guide RNA
gggcucgcgucuccuacagc

SEQ ID NO: 24867 - RNA, 20 nt, Artificial Sequence
  GATA2 Guide RNA
gggcuguaggagacgcgagc

SEQ ID NO: 24868 - RNA, 20 nt, Artificial Sequence
  GATA2 Guide RNA
ggggcuguaggagacgcgag

SEQ ID NO: 24869 - RNA, 20 nt, Artificial Sequence
  GATA2 Guide RNA
guaggagacgcgagcccgcg

SEQ ID NO: 24870 - RNA, 20 nt, Artificial Sequence
  GATA2 Guide RNA
uaggagacgcgagcccgcgc

SEQ ID NO: 24871 - RNA, 20 nt, Artificial Sequence
  GATA2 Guide RNA
ucacgcgcgggcucgcgucu

SEQ ID NO: 24872 - RNA, 20 nt, Artificial Sequence
  GATA2 Guide RNA
uguaggagacgcgagcccgc

SEQ ID NO: 24873 - RNA, 21 nt, Artificial Sequence
  GATA2 Guide RNA
aaccccgcucacgcgcgggcu

SEQ ID NO: 24874 - RNA, 21 nt, Artificial Sequence
  GATA2 Guide RNA
acgcgcgggcucgcgucuccu

SEQ ID NO: 24875 - RNA, 21 nt, Artificial Sequence
  GATA2 Guide RNA
agacgcgagcccgcgcgugag

SEQ ID NO: 24876 - RNA, 21 nt, Artificial Sequence
  GATA2 Guide RNA
agcccgcgcgugagcgggguu

SEQ ID NO: 24877 - RNA, 21 nt, Artificial Sequence
  GATA2 Guide RNA
aggagacgcgagcccgcgcgu

SEQ ID NO: 24878 - RNA, 21 nt, Artificial Sequence
  GATA2 Guide RNA
cgcgcgggcucgcgucuccua

SEQ ID NO: 24879 - RNA, 21 nt, Artificial Sequence
  GATA2 Guide RNA
cgcgggcucgcgucuccuaca

SEQ ID NO: 24880 - RNA, 21 nt, Artificial Sequence
  GATA2 Guide RNA
cgcggggcuguaggagacgcg

SEQ ID NO: 24881 - RNA, 21 nt, Artificial Sequence
  GATA2 Guide RNA
cgggcucgcgucuccuacagc

SEQ ID NO: 24882 - RNA, 21 nt, Artificial Sequence
  GATA2 Guide RNA
cggggcuguaggagacgcgag

SEQ ID NO: 24883 - RNA, 21 nt, Artificial Sequence
  GATA2 Guide RNA
cucacgcgcgggcucgcgucu

SEQ ID NO: 24884 - RNA, 21 nt, Artificial Sequence
  GATA2 Guide RNA
cucgcgucuccuacagccccg

SEQ ID NO: 24885 - RNA, 21 nt, Artificial Sequence
  GATA2 Guide RNA
cuguaggagacgcgagcccgc

SEQ ID NO: 24886 - RNA, 21 nt, Artificial Sequence
  GATA2 Guide RNA
gagacgcgagcccgcgcguga

SEQ ID NO: 24887 - RNA, 21 nt, Artificial Sequence
  GATA2 Guide RNA
gcgcgggcucgcgucuccuac

SEQ ID NO: 24888 - RNA, 21 nt, Artificial Sequence
  GATA2 Guide RNA
gcgcggggcuguaggagacgc

SEQ ID NO: 24889 - RNA, 21 nt, Artificial Sequence
  GATA2 Guide RNA
gcgggcucgcgucuccuacag

SEQ ID NO: 24890 - RNA, 21 nt, Artificial Sequence
  GATA2 Guide RNA
gcggggcuguaggagacgcga

SEQ ID NO: 24891 - RNA, 21 nt, Artificial Sequence
  GATA2 Guide RNA
gcucgcgucuccuacagcccc

SEQ ID NO: 24892 - RNA, 21 nt, Artificial Sequence
  GATA2 Guide RNA
gcuguaggagacgcgagcccg

SEQ ID NO: 24893 - RNA, 21 nt, Artificial Sequence
  GATA2 Guide RNA
ggcucgcgucuccuacagccc

SEQ ID NO: 24894 - RNA, 21 nt, Artificial Sequence
  GATA2 Guide RNA
ggcuguaggagacgcgagccc

SEQ ID NO: 24895 - RNA, 21 nt, Artificial Sequence
  GATA2 Guide RNA
gggcucgcgucuccuacagcc

SEQ ID NO: 24896 - RNA, 21 nt, Artificial Sequence
  GATA2 Guide RNA
gggcuguaggagacgcgagcc

SEQ ID NO: 24897 - RNA, 21 nt, Artificial Sequence
  GATA2 Guide RNA
ggggcuguaggagacgcgagc

SEQ ID NO: 24898 - RNA, 21 nt, Artificial Sequence
  GATA2 Guide RNA
guaggagacgcgagcccgcgc

SEQ ID NO: 24899 - RNA, 21 nt, Artificial Sequence
  GATA2 Guide RNA
uaggagacgcgagcccgcgcg

SEQ ID NO: 24900 - RNA, 21 nt, Artificial Sequence
  GATA2 Guide RNA
ucacgcgcgggcucgcgucuc

SEQ ID NO: 24901 - RNA, 21 nt, Artificial Sequence
  GATA2 Guide RNA
ugccaaccccgcucacgcgcg

SEQ ID NO: 24902 - RNA, 21 nt, Artificial Sequence
  GATA2 Guide RNA
uguaggagacgcgagcccgcg

SEQ ID NO: 24903 - RNA, 22 nt, Artificial Sequence
  GATA2 Guide RNA
aaccccgcucacgcgcgggcuc

SEQ ID NO: 24904 - RNA, 22 nt, Artificial Sequence
  GATA2 Guide RNA
acgcgcgggcucgcgucuccua

SEQ ID NO: 24905 - RNA, 22 nt, Artificial Sequence
  GATA2 Guide RNA
agacgcgagcccgcgcgugagc

SEQ ID NO: 24906 - RNA, 22 nt, Artificial Sequence
  GATA2 Guide RNA
agcccgcgcgugagcgggguug

SEQ ID NO: 24907 - RNA, 22 nt, Artificial Sequence
  GATA2 Guide RNA
aggagacgcgagcccgcgcgug

SEQ ID NO: 24908 - RNA, 22 nt, Artificial Sequence
  GATA2 Guide RNA
augccaaccccgcucacgcgcg

SEQ ID NO: 24909 - RNA, 22 nt, Artificial Sequence
  GATA2 Guide RNA
caaccccgcucacgcgcgggcu

SEQ ID NO: 24910 - RNA, 22 nt, Artificial Sequence
  GATA2 Guide RNA
cacgcgcgggcucgcgucuccu

SEQ ID NO: 24911 - RNA, 22 nt, Artificial Sequence
  GATA2 Guide RNA
cgcgcgggcucgcgucuccuac

SEQ ID NO: 24912 - RNA, 22 nt, Artificial Sequence
  GATA2 Guide RNA
cgcgggcucgcgucuccuacag

SEQ ID NO: 24913 - RNA, 22 nt, Artificial Sequence
  GATA2 Guide RNA
cgcggggcuguaggagacgcga

SEQ ID NO: 24914 - RNA, 22 nt, Artificial Sequence
  GATA2 Guide RNA
cgggcucgcgucuccuacagcc

SEQ ID NO: 24915 - RNA, 22 nt, Artificial Sequence
  GATA2 Guide RNA
cggggcuguaggagacgcgagc

SEQ ID NO: 24916 - RNA, 22 nt, Artificial Sequence
  GATA2 Guide RNA
cucacgcgcgggcucgcgucuc

SEQ ID NO: 24917 - RNA, 22 nt, Artificial Sequence
  GATA2 Guide RNA
cucgcgucuccuacagccccgc

SEQ ID NO: 24918 - RNA, 22 nt, Artificial Sequence
  GATA2 Guide RNA
cuguaggagacgcgagcccgcg

SEQ ID NO: 24919 - RNA, 22 nt, Artificial Sequence
  GATA2 Guide RNA
gagacgcgagcccgcgcgugag

SEQ ID NO: 24920 - RNA, 22 nt, Artificial Sequence
  GATA2 Guide RNA
gagcccgcgcgugagcgggguu

SEQ ID NO: 24921 - RNA, 22 nt, Artificial Sequence
  GATA2 Guide RNA
gcgcgggcucgcgucuccuaca

SEQ ID NO: 24922 - RNA, 22 nt, Artificial Sequence
  GATA2 Guide RNA
gcgcggggcuguaggagacgcg

SEQ ID NO: 24923 - RNA, 22 nt, Artificial Sequence
  GATA2 Guide RNA
gcgggcucgcgucuccuacagc

SEQ ID NO: 24924 - RNA, 22 nt, Artificial Sequence
  GATA2 Guide RNA
gcggggcuguaggagacgcgag

SEQ ID NO: 24925 - RNA, 22 nt, Artificial Sequence
  GATA2 Guide RNA
gcucacgcgcgggcucgcgucu

SEQ ID NO: 24926 - RNA, 22 nt, Artificial Sequence
  GATA2 Guide RNA
gcucgcgucuccuacagccccg

SEQ ID NO: 24927 - RNA, 22 nt, Artificial Sequence
  GATA2 Guide RNA
gcuguaggagacgcgagcccgc

SEQ ID NO: 24928 - RNA, 22 nt, Artificial Sequence
  GATA2 Guide RNA
ggagacgcgagcccgcgcguga

SEQ ID NO: 24929 - RNA, 22 nt, Artificial Sequence
  GATA2 Guide RNA
ggcucgcgucuccuacagcccc

SEQ ID NO: 24930 - RNA, 22 nt, Artificial Sequence
  GATA2 Guide RNA
ggcuguaggagacgcgagcccg

SEQ ID NO: 24931 - RNA, 22 nt, Artificial Sequence
  GATA2 Guide RNA
gggcucgcgucuccuacagccc

SEQ ID NO: 24932 - RNA, 22 nt, Artificial Sequence
  GATA2 Guide RNA
gggcuguaggagacgcgagccc

SEQ ID NO: 24933 - RNA, 22 nt, Artificial Sequence
  GATA2 Guide RNA
ggggcuguaggagacgcgagcc

SEQ ID NO: 24934 - RNA, 22 nt, Artificial Sequence
  GATA2 Guide RNA
guaggagacgcgagcccgcgcg

SEQ ID NO: 24935 - RNA, 22 nt, Artificial Sequence
  GATA2 Guide RNA
uaggagacgcgagcccgcgcgu

SEQ ID NO: 24936 - RNA, 22 nt, Artificial Sequence
  GATA2 Guide RNA
ucacgcgcgggcucgcgucucc

SEQ ID NO: 24937 - RNA, 22 nt, Artificial Sequence
  GATA2 Guide RNA
ugccaaccccgcucacgcgcgg

SEQ ID NO: 24938 - RNA, 22 nt, Artificial Sequence
  GATA2 Guide RNA
ugcgcggggcuguaggagacgc

SEQ ID NO: 24939 - RNA, 22 nt, Artificial Sequence
  GATA2 Guide RNA
uguaggagacgcgagcccgcgc

SEQ ID NO: 24940 - RNA, 20 nt, Artificial Sequence
  GATA2 Guide RNA
aaccccuacuaugucaaccc

SEQ ID NO: 24941 - RNA, 20 nt, Artificial Sequence
  GATA2 Guide RNA
acauaguagggguugcccug

SEQ ID NO: 24942 - RNA, 20 nt, Artificial Sequence
  GATA2 Guide RNA
accccuacuaugucaacccc

SEQ ID NO: 24943 - RNA, 20 nt, Artificial Sequence
  GATA2 Guide RNA
acuaugucaaccccgcucac

SEQ ID NO: 24944 - RNA, 20 nt, Artificial Sequence
  GATA2 Guide RNA
agcgggguugacauaguagg

SEQ ID NO: 24945 - RNA, 20 nt, Artificial Sequence
  GATA2 Guide RNA
agggcaaccccuacuauguc

SEQ ID NO: 24946 - RNA, 20 nt, Artificial Sequence
  GATA2 Guide RNA
augucaaccccgcucacgcg

SEQ ID NO: 24947 - RNA, 20 nt, Artificial Sequence
  GATA2 Guide RNA
caaccccuacuaugucaacc

SEQ ID NO: 24948 - RNA, 20 nt, Artificial Sequence
  GATA2 Guide RNA
cagggcaaccccuacuaugu

SEQ ID NO: 24949 - RNA, 20 nt, Artificial Sequence
  GATA2 Guide RNA
ccccuacuaugucaaccccg

SEQ ID NO: 24950 - RNA, 20 nt, Artificial Sequence
  GATA2 Guide RNA
cccgcgcgugagcgggguug

SEQ ID NO: 24951 - RNA, 20 nt, Artificial Sequence
  GATA2 Guide RNA
cccuacuaugucaaccccgc

SEQ ID NO: 24952 - RNA, 20 nt, Artificial Sequence
  GATA2 Guide RNA
ccgcgcgugagcgggguuga

SEQ ID NO: 24953 - RNA, 20 nt, Artificial Sequence
  GATA2 Guide RNA
ccuacuaugucaaccccgcu

SEQ ID NO: 24954 - RNA, 20 nt, Artificial Sequence
  GATA2 Guide RNA
cgcagggcaaccccuacuau

SEQ ID NO: 24955 - RNA, 20 nt, Artificial Sequence
  GATA2 Guide RNA
cgcgcgugagcgggguugac

SEQ ID NO: 24956 - RNA, 20 nt, Artificial Sequence
  GATA2 Guide RNA
cgcgugagcgggguugacau

SEQ ID NO: 24957 - RNA, 20 nt, Artificial Sequence
  GATA2 Guide RNA
cgggguugacauaguagggg

SEQ ID NO: 24958 - RNA, 20 nt, Artificial Sequence
  GATA2 Guide RNA
cgugagcgggguugacauag

SEQ ID NO: 24959 - RNA, 20 nt, Artificial Sequence
  GATA2 Guide RNA
cuacuaugucaaccccgcuc

SEQ ID NO: 24960 - RNA, 20 nt, Artificial Sequence
  GATA2 Guide RNA
cuaugucaaccccgcucacg

SEQ ID NO: 24961 - RNA, 20 nt, Artificial Sequence
  GATA2 Guide RNA
cucgcagggcaaccccuacu

SEQ ID NO: 24962 - RNA, 20 nt, Artificial Sequence
  GATA2 Guide RNA
gacauaguagggguugcccu

SEQ ID NO: 24963 - RNA, 20 nt, Artificial Sequence
  GATA2 Guide RNA
gagcgggguugacauaguag

SEQ ID NO: 24964 - RNA, 20 nt, Artificial Sequence
  GATA2 Guide RNA
gcaaccccuacuaugucaac

SEQ ID NO: 24965 - RNA, 20 nt, Artificial Sequence
  GATA2 Guide RNA
gcagggcaaccccuacuaug

SEQ ID NO: 24966 - RNA, 20 nt, Artificial Sequence
  GATA2 Guide RNA
gcccgcgcgugagcgggguu

SEQ ID NO: 24967 - RNA, 20 nt, Artificial Sequence
  GATA2 Guide RNA
gcgcgugagcgggguugaca

SEQ ID NO: 24968 - RNA, 20 nt, Artificial Sequence
  GATA2 Guide RNA
gcgggguugacauaguaggg

SEQ ID NO: 24969 - RNA, 20 nt, Artificial Sequence
  GATA2 Guide RNA
gcgugagcgggguugacaua

SEQ ID NO: 24970 - RNA, 20 nt, Artificial Sequence
  GATA2 Guide RNA
ggcaaccccuacuaugucaa

SEQ ID NO: 24971 - RNA, 20 nt, Artificial Sequence
  GATA2 Guide RNA
gggcaaccccuacuauguca

SEQ ID NO: 24972 - RNA, 20 nt, Artificial Sequence
  GATA2 Guide RNA
gggguugacauaguaggggu

SEQ ID NO: 24973 - RNA, 20 nt, Artificial Sequence
  GATA2 Guide RNA
ggguugacauaguagggguu

SEQ ID NO: 24974 - RNA, 20 nt, Artificial Sequence
  GATA2 Guide RNA
gguugacauaguagggguug

SEQ ID NO: 24975 - RNA, 20 nt, Artificial Sequence
  GATA2 Guide RNA
gucaaccccgcucacgcgcg

SEQ ID NO: 24976 - RNA, 20 nt, Artificial Sequence
  GATA2 Guide RNA
gugagcgggguugacauagu

SEQ ID NO: 24977 - RNA, 20 nt, Artificial Sequence
  GATA2 Guide RNA
guugacauaguagggguugc

SEQ ID NO: 24978 - RNA, 20 nt, Artificial Sequence
  GATA2 Guide RNA
uacuaugucaaccccgcuca

SEQ ID NO: 24979 - RNA, 20 nt, Artificial Sequence
  GATA2 Guide RNA
uaugucaaccccgcucacgc

SEQ ID NO: 24980 - RNA, 20 nt, Artificial Sequence
  GATA2 Guide RNA
ucgcagggcaaccccuacua

SEQ ID NO: 24981 - RNA, 20 nt, Artificial Sequence
  GATA2 Guide RNA
ugacauaguagggguugccc

SEQ ID NO: 24982 - RNA, 20 nt, Artificial Sequence
  GATA2 Guide RNA
ugagcgggguugacauagua

SEQ ID NO: 24983 - RNA, 20 nt, Artificial Sequence
  GATA2 Guide RNA
ugucaaccccgcucacgcgc

SEQ ID NO: 24984 - RNA, 20 nt, Artificial Sequence
  GATA2 Guide RNA
uugacauaguagggguugcc

SEQ ID NO: 24985 - RNA, 21 nt, Artificial Sequence
  GATA2 Guide RNA
aaccccuacuaugucaacccc

SEQ ID NO: 24986 - RNA, 21 nt, Artificial Sequence
  GATA2 Guide RNA
acauaguagggguugcccugc

SEQ ID NO: 24987 - RNA, 21 nt, Artificial Sequence
  GATA2 Guide RNA
accccuacuaugucaaccccg

SEQ ID NO: 24988 - RNA, 21 nt, Artificial Sequence
  GATA2 Guide RNA
acuaugucaaccccgcucacg

SEQ ID NO: 24989 - RNA, 21 nt, Artificial Sequence
  GATA2 Guide RNA
acucgcagggcaaccccuacu

SEQ ID NO: 24990 - RNA, 21 nt, Artificial Sequence
  GATA2 Guide RNA
agcgggguugacauaguaggg

SEQ ID NO: 24991 - RNA, 21 nt, Artificial Sequence
  GATA2 Guide RNA
agggcaaccccuacuauguca

SEQ ID NO: 24992 - RNA, 21 nt, Artificial Sequence
  GATA2 Guide RNA
augucaaccccgcucacgcgc

SEQ ID NO: 24993 - RNA, 21 nt, Artificial Sequence
  GATA2 Guide RNA
caaccccuacuaugucaaccc

SEQ ID NO: 24994 - RNA, 21 nt, Artificial Sequence
  GATA2 Guide RNA
cagggcaaccccuacuauguc

SEQ ID NO: 24995 - RNA, 21 nt, Artificial Sequence
  GATA2 Guide RNA
ccccuacuaugucaaccccgc

SEQ ID NO: 24996 - RNA, 21 nt, Artificial Sequence
  GATA2 Guide RNA
cccgcgcgugagcgggguuga

SEQ ID NO: 24997 - RNA, 21 nt, Artificial Sequence
  GATA2 Guide RNA
cccuacuaugucaaccccgcu

SEQ ID NO: 24998 - RNA, 21 nt, Artificial Sequence
  GATA2 Guide RNA
ccgcgcgugagcgggguugac

SEQ ID NO: 24999 - RNA, 21 nt, Artificial Sequence
  GATA2 Guide RNA
ccuacuaugucaaccccgcuc

SEQ ID NO: 25000 - RNA, 21 nt, Artificial Sequence
  GATA2 Guide RNA
cgcagggcaaccccuacuaug

SEQ ID NO: 25001 - RNA, 21 nt, Artificial Sequence
  GATA2 Guide RNA
cgcgcgugagcgggguugaca

SEQ ID NO: 25002 - RNA, 21 nt, Artificial Sequence
  GATA2 Guide RNA
cgcgugagcgggguugacaua

SEQ ID NO: 25003 - RNA, 21 nt, Artificial Sequence
  GATA2 Guide RNA
cgggguugacauaguaggggu

SEQ ID NO: 25004 - RNA, 21 nt, Artificial Sequence
  GATA2 Guide RNA
cgugagcgggguugacauagu

SEQ ID NO: 25005 - RNA, 21 nt, Artificial Sequence
  GATA2 Guide RNA
cuacuaugucaaccccgcuca

SEQ ID NO: 25006 - RNA, 21 nt, Artificial Sequence
  GATA2 Guide RNA
cuaugucaaccccgcucacgc

SEQ ID NO: 25007 - RNA, 21 nt, Artificial Sequence
  GATA2 Guide RNA
cucgcagggcaaccccuacua

SEQ ID NO: 25008 - RNA, 21 nt, Artificial Sequence
  GATA2 Guide RNA
gacauaguagggguugcccug

SEQ ID NO: 25009 - RNA, 21 nt, Artificial Sequence
  GATA2 Guide RNA
gagcgggguugacauaguagg

SEQ ID NO: 25010 - RNA, 21 nt, Artificial Sequence
  GATA2 Guide RNA
gcaaccccuacuaugucaacc

SEQ ID NO: 25011 - RNA, 21 nt, Artificial Sequence
  GATA2 Guide RNA
gcagggcaaccccuacuaugu

SEQ ID NO: 25012 - RNA, 21 nt, Artificial Sequence
  GATA2 Guide RNA
gcgcgugagcgggguugacau

SEQ ID NO: 25013 - RNA, 21 nt, Artificial Sequence
  GATA2 Guide RNA
gcgggguugacauaguagggg

SEQ ID NO: 25014 - RNA, 21 nt, Artificial Sequence
  GATA2 Guide RNA
gcgugagcgggguugacauag

SEQ ID NO: 25015 - RNA, 21 nt, Artificial Sequence
  GATA2 Guide RNA
ggcaaccccuacuaugucaac

SEQ ID NO: 25016 - RNA, 21 nt, Artificial Sequence
  GATA2 Guide RNA
gggcaaccccuacuaugucaa

SEQ ID NO: 25017 - RNA, 21 nt, Artificial Sequence
  GATA2 Guide RNA
gggguugacauaguagggguu

SEQ ID NO: 25018 - RNA, 21 nt, Artificial Sequence
  GATA2 Guide RNA
ggguugacauaguagggguug

SEQ ID NO: 25019 - RNA, 21 nt, Artificial Sequence
  GATA2 Guide RNA
gguugacauaguagggguugc

SEQ ID NO: 25020 - RNA, 21 nt, Artificial Sequence
  GATA2 Guide RNA
gucaaccccgcucacgcgcgg

SEQ ID NO: 25021 - RNA, 21 nt, Artificial Sequence
  GATA2 Guide RNA
gugagcgggguugacauagua

SEQ ID NO: 25022 - RNA, 21 nt, Artificial Sequence
  GATA2 Guide RNA
guugacauaguagggguugcc

SEQ ID NO: 25023 - RNA, 21 nt, Artificial Sequence
  GATA2 Guide RNA
uacuaugucaaccccgcucac

SEQ ID NO: 25024 - RNA, 21 nt, Artificial Sequence
  GATA2 Guide RNA
uaugucaaccccgcucacgcg

SEQ ID NO: 25025 - RNA, 21 nt, Artificial Sequence
  GATA2 Guide RNA
ucgcagggcaaccccuacuau

SEQ ID NO: 25026 - RNA, 21 nt, Artificial Sequence
  GATA2 Guide RNA
ugacauaguagggguugcccu

SEQ ID NO: 25027 - RNA, 21 nt, Artificial Sequence
  GATA2 Guide RNA
ugagcgggguugacauaguag

SEQ ID NO: 25028 - RNA, 21 nt, Artificial Sequence
  GATA2 Guide RNA
ugucaaccccgcucacgcgcg

SEQ ID NO: 25029 - RNA, 21 nt, Artificial Sequence
  GATA2 Guide RNA
uugacauaguagggguugccc

SEQ ID NO: 25030 - RNA, 22 nt, Artificial Sequence
  GATA2 Guide RNA
aaccccuacuaugucaaccccg

SEQ ID NO: 25031 - RNA, 22 nt, Artificial Sequence
  GATA2 Guide RNA
acauaguagggguugcccugcg

SEQ ID NO: 25032 - RNA, 22 nt, Artificial Sequence
  GATA2 Guide RNA
accccuacuaugucaaccccgc

SEQ ID NO: 25033 - RNA, 22 nt, Artificial Sequence
  GATA2 Guide RNA
acuaugucaaccccgcucacgc

SEQ ID NO: 25034 - RNA, 22 nt, Artificial Sequence
  GATA2 Guide RNA
acucgcagggcaaccccuacua

SEQ ID NO: 25035 - RNA, 22 nt, Artificial Sequence
  GATA2 Guide RNA
agcgggguugacauaguagggg

SEQ ID NO: 25036 - RNA, 22 nt, Artificial Sequence
  GATA2 Guide RNA
agggcaaccccuacuaugucaa

SEQ ID NO: 25037 - RNA, 22 nt, Artificial Sequence
  GATA2 Guide RNA
augucaaccccgcucacgcgcg

SEQ ID NO: 25038 - RNA, 22 nt, Artificial Sequence
  GATA2 Guide RNA
caaccccuacuaugucaacccc

SEQ ID NO: 25039 - RNA, 22 nt, Artificial Sequence
  GATA2 Guide RNA
cagggcaaccccuacuauguca

SEQ ID NO: 25040 - RNA, 22 nt, Artificial Sequence
  GATA2 Guide RNA
ccccuacuaugucaaccccgcu

SEQ ID NO: 25041 - RNA, 22 nt, Artificial Sequence
  GATA2 Guide RNA
cccgcgcgugagcgggguugac

SEQ ID NO: 25042 - RNA, 22 nt, Artificial Sequence
  GATA2 Guide RNA
cccuacuaugucaaccccgcuc

SEQ ID NO: 25043 - RNA, 22 nt, Artificial Sequence
  GATA2 Guide RNA
ccgcgcgugagcgggguugaca

SEQ ID NO: 25044 - RNA, 22 nt, Artificial Sequence
  GATA2 Guide RNA
ccuacuaugucaaccccgcuca

SEQ ID NO: 25045 - RNA, 22 nt, Artificial Sequence
  GATA2 Guide RNA
cgcagggcaaccccuacuaugu

SEQ ID NO: 25046 - RNA, 22 nt, Artificial Sequence
  GATA2 Guide RNA
cgcgcgugagcgggguugacau

SEQ ID NO: 25047 - RNA, 22 nt, Artificial Sequence
  GATA2 Guide RNA
cgcgugagcgggguugacauag

SEQ ID NO: 25048 - RNA, 22 nt, Artificial Sequence
  GATA2 Guide RNA
cgggguugacauaguagggguu

SEQ ID NO: 25049 - RNA, 22 nt, Artificial Sequence
  GATA2 Guide RNA
cgugagcgggguugacauagua

SEQ ID NO: 25050 - RNA, 22 nt, Artificial Sequence
  GATA2 Guide RNA
cuacuaugucaaccccgcucac

SEQ ID NO: 25051 - RNA, 22 nt, Artificial Sequence
  GATA2 Guide RNA
cuaugucaaccccgcucacgcg

SEQ ID NO: 25052 - RNA, 22 nt, Artificial Sequence
  GATA2 Guide RNA
cucgcagggcaaccccuacuau

SEQ ID NO: 25053 - RNA, 22 nt, Artificial Sequence
  GATA2 Guide RNA
gacauaguagggguugcccugc

SEQ ID NO: 25054 - RNA, 22 nt, Artificial Sequence
  GATA2 Guide RNA
gacucgcagggcaaccccuacu

SEQ ID NO: 25055 - RNA, 22 nt, Artificial Sequence
  GATA2 Guide RNA
gagcgggguugacauaguaggg

SEQ ID NO: 25056 - RNA, 22 nt, Artificial Sequence
  GATA2 Guide RNA
gcaaccccuacuaugucaaccc

SEQ ID NO: 25057 - RNA, 22 nt, Artificial Sequence
  GATA2 Guide RNA
gcagggcaaccccuacuauguc

SEQ ID NO: 25058 - RNA, 22 nt, Artificial Sequence
  GATA2 Guide RNA
gcccgcgcgugagcgggguuga

SEQ ID NO: 25059 - RNA, 22 nt, Artificial Sequence
  GATA2 Guide RNA
gcgcgugagcgggguugacaua

SEQ ID NO: 25060 - RNA, 22 nt, Artificial Sequence
  GATA2 Guide RNA
gcgggguugacauaguaggggu

SEQ ID NO: 25061 - RNA, 22 nt, Artificial Sequence
  GATA2 Guide RNA
gcgugagcgggguugacauagu

SEQ ID NO: 25062 - RNA, 22 nt, Artificial Sequence
  GATA2 Guide RNA
ggcaaccccuacuaugucaacc

SEQ ID NO: 25063 - RNA, 22 nt, Artificial Sequence
  GATA2 Guide RNA
gggcaaccccuacuaugucaac

SEQ ID NO: 25064 - RNA, 22 nt, Artificial Sequence
  GATA2 Guide RNA
gggguugacauaguagggguug

SEQ ID NO: 25065 - RNA, 22 nt, Artificial Sequence
  GATA2 Guide RNA
ggguugacauaguagggguugc

SEQ ID NO: 25066 - RNA, 22 nt, Artificial Sequence
  GATA2 Guide RNA
gguugacauaguagggguugcc

SEQ ID NO: 25067 - RNA, 22 nt, Artificial Sequence
  GATA2 Guide RNA
gucaaccccgcucacgcgcggg

SEQ ID NO: 25068 - RNA, 22 nt, Artificial Sequence
  GATA2 Guide RNA
gugagcgggguugacauaguag

SEQ ID NO: 25069 - RNA, 22 nt, Artificial Sequence
  GATA2 Guide RNA
guugacauaguagggguugccc

SEQ ID NO: 25070 - RNA, 22 nt, Artificial Sequence
  GATA2 Guide RNA
uacuaugucaaccccgcucacg

SEQ ID NO: 25071 - RNA, 22 nt, Artificial Sequence
  GATA2 Guide RNA
uaugucaaccccgcucacgcgc

SEQ ID NO: 25072 - RNA, 22 nt, Artificial Sequence
  GATA2 Guide RNA
ucgcagggcaaccccuacuaug

SEQ ID NO: 25073 - RNA, 22 nt, Artificial Sequence
  GATA2 Guide RNA
ugacauaguagggguugcccug

SEQ ID NO: 25074 - RNA, 22 nt, Artificial Sequence
  GATA2 Guide RNA
ugagcgggguugacauaguagg

SEQ ID NO: 25075 - RNA, 22 nt, Artificial Sequence
  GATA2 Guide RNA
ugucaaccccgcucacgcgcgg

SEQ ID NO: 25076 - RNA, 22 nt, Artificial Sequence
  GATA2 Guide RNA
uugacauaguagggguugcccu

SEQ ID NO: 25077 - RNA, 20 nt, Artificial Sequence
  GATA2 Guide RNA
aaccccugcuaugccaaccc

SEQ ID NO: 25078 - RNA, 20 nt, Artificial Sequence
  GATA2 Guide RNA
accccugcuaugccaacccc

SEQ ID NO: 25079 - RNA, 20 nt, Artificial Sequence
  GATA2 Guide RNA
acucgcagggcaaccccugc

SEQ ID NO: 25080 - RNA, 20 nt, Artificial Sequence
  GATA2 Guide RNA
agcagggguugcccugcgag

SEQ ID NO: 25081 - RNA, 20 nt, Artificial Sequence
  GATA2 Guide RNA
agcgggguuggcauagcagg

SEQ ID NO: 25082 - RNA, 20 nt, Artificial Sequence
  GATA2 Guide RNA
agggcaaccccugcuaugcc

SEQ ID NO: 25083 - RNA, 20 nt, Artificial Sequence
  GATA2 Guide RNA
auagcagggguugcccugcg

SEQ ID NO: 25084 - RNA, 20 nt, Artificial Sequence
  GATA2 Guide RNA
caaccccugcuaugccaacc

SEQ ID NO: 25085 - RNA, 20 nt, Artificial Sequence
  GATA2 Guide RNA
cagggcaaccccugcuaugc

SEQ ID NO: 25086 - RNA, 20 nt, Artificial Sequence
  GATA2 Guide RNA
cagggguugcccugcgaguc

SEQ ID NO: 25087 - RNA, 20 nt, Artificial Sequence
  GATA2 Guide RNA
cauagcagggguugcccugc

SEQ ID NO: 25088 - RNA, 20 nt, Artificial Sequence
  GATA2 Guide RNA
ccccugcuaugccaaccccg

SEQ ID NO: 25089 - RNA, 20 nt, Artificial Sequence
  GATA2 Guide RNA
cccugcuaugccaaccccgc

SEQ ID NO: 25090 - RNA, 20 nt, Artificial Sequence
  GATA2 Guide RNA
ccucgacucgcagggcaacc

SEQ ID NO: 25091 - RNA, 20 nt, Artificial Sequence
  GATA2 Guide RNA
ccugcuaugccaaccccgcu

SEQ ID NO: 25092 - RNA, 20 nt, Artificial Sequence
  GATA2 Guide RNA
cgacucgcagggcaaccccu

SEQ ID NO: 25093 - RNA, 20 nt, Artificial Sequence
  GATA2 Guide RNA
cgcagggcaaccccugcuau

SEQ ID NO: 25094 - RNA, 20 nt, Artificial Sequence
  GATA2 Guide RNA
cgcgugagcgggguuggcau

SEQ ID NO: 25095 - RNA, 20 nt, Artificial Sequence
  GATA2 Guide RNA
cgggguuggcauagcagggg

SEQ ID NO: 25096 - RNA, 20 nt, Artificial Sequence
  GATA2 Guide RNA
cgugagcgggguuggcauag

SEQ ID NO: 25097 - RNA, 20 nt, Artificial Sequence
  GATA2 Guide RNA
cucgacucgcagggcaaccc

SEQ ID NO: 25098 - RNA, 20 nt, Artificial Sequence
  GATA2 Guide RNA
cucgcagggcaaccccugcu

SEQ ID NO: 25099 - RNA, 20 nt, Artificial Sequence
  GATA2 Guide RNA
cugcuaugccaaccccgcuc

SEQ ID NO: 25100 - RNA, 20 nt, Artificial Sequence
  GATA2 Guide RNA
gacucgcagggcaaccccug

SEQ ID NO: 25101 - RNA, 20 nt, Artificial Sequence
  GATA2 Guide RNA
gagcgggguuggcauagcag

SEQ ID NO: 25102 - RNA, 20 nt, Artificial Sequence
  GATA2 Guide RNA
gcaaccccugcuaugccaac

SEQ ID NO: 25103 - RNA, 20 nt, Artificial Sequence
  GATA2 Guide RNA
gcagggcaaccccugcuaug

SEQ ID NO: 25104 - RNA, 20 nt, Artificial Sequence
  GATA2 Guide RNA
gcagggguugcccugcgagu

SEQ ID NO: 25105 - RNA, 20 nt, Artificial Sequence
  GATA2 Guide RNA
gcauagcagggguugcccug

SEQ ID NO: 25106 - RNA, 20 nt, Artificial Sequence
  GATA2 Guide RNA
gcgggguuggcauagcaggg

SEQ ID NO: 25107 - RNA, 20 nt, Artificial Sequence
  GATA2 Guide RNA
gcgugagcgggguuggcaua

SEQ ID NO: 25108 - RNA, 20 nt, Artificial Sequence
  GATA2 Guide RNA
ggcaaccccugcuaugccaa

SEQ ID NO: 25109 - RNA, 20 nt, Artificial Sequence
  GATA2 Guide RNA
ggcauagcagggguugcccu

SEQ ID NO: 25110 - RNA, 20 nt, Artificial Sequence
  GATA2 Guide RNA
gggcaaccccugcuaugcca

SEQ ID NO: 25111 - RNA, 20 nt, Artificial Sequence
  GATA2 Guide RNA
gggguuggcauagcaggggu

SEQ ID NO: 25112 - RNA, 20 nt, Artificial Sequence
  GATA2 Guide RNA
ggguuggcauagcagggguu

SEQ ID NO: 25113 - RNA, 20 nt, Artificial Sequence
  GATA2 Guide RNA
gguuggcauagcagggguug

SEQ ID NO: 25114 - RNA, 20 nt, Artificial Sequence
  GATA2 Guide RNA
gugagcgggguuggcauagc

SEQ ID NO: 25115 - RNA, 20 nt, Artificial Sequence
  GATA2 Guide RNA
guuggcauagcagggguugc

SEQ ID NO: 25116 - RNA, 20 nt, Artificial Sequence
  GATA2 Guide RNA
uagcagggguugcccugcga

SEQ ID NO: 25117 - RNA, 20 nt, Artificial Sequence
  GATA2 Guide RNA
ucgacucgcagggcaacccc

SEQ ID NO: 25118 - RNA, 20 nt, Artificial Sequence
  GATA2 Guide RNA
ucgcagggcaaccccugcua

SEQ ID NO: 25119 - RNA, 20 nt, Artificial Sequence
  GATA2 Guide RNA
ugagcgggguuggcauagca

SEQ ID NO: 25120 - RNA, 20 nt, Artificial Sequence
  GATA2 Guide RNA
ugcuaugccaaccccgcuca

SEQ ID NO: 25121 - RNA, 20 nt, Artificial Sequence
  GATA2 Guide RNA
uggcauagcagggguugccc

SEQ ID NO: 25122 - RNA, 20 nt, Artificial Sequence
  GATA2 Guide RNA
uuggcauagcagggguugcc

SEQ ID NO: 25123 - RNA, 21 nt, Artificial Sequence
  GATA2 Guide RNA
aaccccugcuaugccaacccc

SEQ ID NO: 25124 - RNA, 21 nt, Artificial Sequence
  GATA2 Guide RNA
accccugcuaugccaaccccg

SEQ ID NO: 25125 - RNA, 21 nt, Artificial Sequence
  GATA2 Guide RNA
accucgacucgcagggcaacc

SEQ ID NO: 25126 - RNA, 21 nt, Artificial Sequence
  GATA2 Guide RNA
acucgcagggcaaccccugcu

SEQ ID NO: 25127 - RNA, 21 nt, Artificial Sequence
  GATA2 Guide RNA
agcagggguugcccugcgagu

SEQ ID NO: 25128 - RNA, 21 nt, Artificial Sequence
  GATA2 Guide RNA
agcgggguuggcauagcaggg

SEQ ID NO: 25129 - RNA, 21 nt, Artificial Sequence
  GATA2 Guide RNA
agggcaaccccugcuaugcca

SEQ ID NO: 25130 - RNA, 21 nt, Artificial Sequence
  GATA2 Guide RNA
auagcagggguugcccugcga

SEQ ID NO: 25131 - RNA, 21 nt, Artificial Sequence
  GATA2 Guide RNA
caaccccugcuaugccaaccc

SEQ ID NO: 25132 - RNA, 21 nt, Artificial Sequence
  GATA2 Guide RNA
cagggcaaccccugcuaugcc

SEQ ID NO: 25133 - RNA, 21 nt, Artificial Sequence
  GATA2 Guide RNA
cagggguugcccugcgagucg

SEQ ID NO: 25134 - RNA, 21 nt, Artificial Sequence
  GATA2 Guide RNA
cauagcagggguugcccugcg

SEQ ID NO: 25135 - RNA, 21 nt, Artificial Sequence
  GATA2 Guide RNA
ccccugcuaugccaaccccgc

SEQ ID NO: 25136 - RNA, 21 nt, Artificial Sequence
  GATA2 Guide RNA
cccugcuaugccaaccccgcu

SEQ ID NO: 25137 - RNA, 21 nt, Artificial Sequence
  GATA2 Guide RNA
ccucgacucgcagggcaaccc

SEQ ID NO: 25138 - RNA, 21 nt, Artificial Sequence
  GATA2 Guide RNA
ccugcuaugccaaccccgcuc

SEQ ID NO: 25139 - RNA, 21 nt, Artificial Sequence
  GATA2 Guide RNA
cgacucgcagggcaaccccug

SEQ ID NO: 25140 - RNA, 21 nt, Artificial Sequence
  GATA2 Guide RNA
cgcagggcaaccccugcuaug

SEQ ID NO: 25141 - RNA, 21 nt, Artificial Sequence
  GATA2 Guide RNA
cgcgugagcgggguuggcaua

SEQ ID NO: 25142 - RNA, 21 nt, Artificial Sequence
  GATA2 Guide RNA
cgggguuggcauagcaggggu

SEQ ID NO: 25143 - RNA, 21 nt, Artificial Sequence
  GATA2 Guide RNA
cgugagcgggguuggcauagc

SEQ ID NO: 25144 - RNA, 21 nt, Artificial Sequence
  GATA2 Guide RNA
cucgacucgcagggcaacccc

SEQ ID NO: 25145 - RNA, 21 nt, Artificial Sequence
  GATA2 Guide RNA
cucgcagggcaaccccugcua

SEQ ID NO: 25146 - RNA, 21 nt, Artificial Sequence
  GATA2 Guide RNA
cugcuaugccaaccccgcuca

SEQ ID NO: 25147 - RNA, 21 nt, Artificial Sequence
  GATA2 Guide RNA
gacucgcagggcaaccccugc

SEQ ID NO: 25148 - RNA, 21 nt, Artificial Sequence
  GATA2 Guide RNA
gagcgggguuggcauagcagg

SEQ ID NO: 25149 - RNA, 21 nt, Artificial Sequence
  GATA2 Guide RNA
gcaaccccugcuaugccaacc

SEQ ID NO: 25150 - RNA, 21 nt, Artificial Sequence
  GATA2 Guide RNA
gcagggcaaccccugcuaugc

SEQ ID NO: 25151 - RNA, 21 nt, Artificial Sequence
  GATA2 Guide RNA
gcagggguugcccugcgaguc

SEQ ID NO: 25152 - RNA, 21 nt, Artificial Sequence
  GATA2 Guide RNA
gcauagcagggguugcccugc

SEQ ID NO: 25153 - RNA, 21 nt, Artificial Sequence
  GATA2 Guide RNA
gcgcgugagcgggguuggcau

SEQ ID NO: 25154 - RNA, 21 nt, Artificial Sequence
  GATA2 Guide RNA
gcgggguuggcauagcagggg

SEQ ID NO: 25155 - RNA, 21 nt, Artificial Sequence
  GATA2 Guide RNA
gcgugagcgggguuggcauag

SEQ ID NO: 25156 - RNA, 21 nt, Artificial Sequence
  GATA2 Guide RNA
ggcaaccccugcuaugccaac

SEQ ID NO: 25157 - RNA, 21 nt, Artificial Sequence
  GATA2 Guide RNA
ggcauagcagggguugcccug

SEQ ID NO: 25158 - RNA, 21 nt, Artificial Sequence
  GATA2 Guide RNA
gggcaaccccugcuaugccaa

SEQ ID NO: 25159 - RNA, 21 nt, Artificial Sequence
  GATA2 Guide RNA
gggguuggcauagcagggguu

SEQ ID NO: 25160 - RNA, 21 nt, Artificial Sequence
  GATA2 Guide RNA
ggguuggcauagcagggguug

SEQ ID NO: 25161 - RNA, 21 nt, Artificial Sequence
  GATA2 Guide RNA
gguuggcauagcagggguugc

SEQ ID NO: 25162 - RNA, 21 nt, Artificial Sequence
  GATA2 Guide RNA
gugagcgggguuggcauagca

SEQ ID NO: 25163 - RNA, 21 nt, Artificial Sequence
  GATA2 Guide RNA
guuggcauagcagggguugcc

SEQ ID NO: 25164 - RNA, 21 nt, Artificial Sequence
  GATA2 Guide RNA
uagcagggguugcccugcgag

SEQ ID NO: 25165 - RNA, 21 nt, Artificial Sequence
  GATA2 Guide RNA
ucgacucgcagggcaaccccu

SEQ ID NO: 25166 - RNA, 21 nt, Artificial Sequence
  GATA2 Guide RNA
ucgcagggcaaccccugcuau

SEQ ID NO: 25167 - RNA, 21 nt, Artificial Sequence
  GATA2 Guide RNA
ugagcgggguuggcauagcag

SEQ ID NO: 25168 - RNA, 21 nt, Artificial Sequence
  GATA2 Guide RNA
ugcuaugccaaccccgcucac

SEQ ID NO: 25169 - RNA, 21 nt, Artificial Sequence
  GATA2 Guide RNA
uggcauagcagggguugcccu

SEQ ID NO: 25170 - RNA, 21 nt, Artificial Sequence
  GATA2 Guide RNA
uuggcauagcagggguugccc

SEQ ID NO: 25171 - RNA, 22 nt, Artificial Sequence
  GATA2 Guide RNA
aaccccugcuaugccaaccccg

SEQ ID NO: 25172 - RNA, 22 nt, Artificial Sequence
  GATA2 Guide RNA
accccugcuaugccaaccccgc

SEQ ID NO: 25173 - RNA, 22 nt, Artificial Sequence
  GATA2 Guide RNA
accucgacucgcagggcaaccc

SEQ ID NO: 25174 - RNA, 22 nt, Artificial Sequence
  GATA2 Guide RNA
acucgcagggcaaccccugcua

SEQ ID NO: 25175 - RNA, 22 nt, Artificial Sequence
  GATA2 Guide RNA
agcagggguugcccugcgaguc

SEQ ID NO: 25176 - RNA, 22 nt, Artificial Sequence
  GATA2 Guide RNA
agcgggguuggcauagcagggg

SEQ ID NO: 25177 - RNA, 22 nt, Artificial Sequence
  GATA2 Guide RNA
agggcaaccccugcuaugccaa

SEQ ID NO: 25178 - RNA, 22 nt, Artificial Sequence
  GATA2 Guide RNA
auagcagggguugcccugcgag

SEQ ID NO: 25179 - RNA, 22 nt, Artificial Sequence
  GATA2 Guide RNA
caaccccugcuaugccaacccc

SEQ ID NO: 25180 - RNA, 22 nt, Artificial Sequence
  GATA2 Guide RNA
caccucgacucgcagggcaacc

SEQ ID NO: 25181 - RNA, 22 nt, Artificial Sequence
  GATA2 Guide RNA
cagggcaaccccugcuaugcca

SEQ ID NO: 25182 - RNA, 22 nt, Artificial Sequence
  GATA2 Guide RNA
cagggguugcccugcgagucga

SEQ ID NO: 25183 - RNA, 22 nt, Artificial Sequence
  GATA2 Guide RNA
cauagcagggguugcccugcga

SEQ ID NO: 25184 - RNA, 22 nt, Artificial Sequence
  GATA2 Guide RNA
ccccugcuaugccaaccccgcu

SEQ ID NO: 25185 - RNA, 22 nt, Artificial Sequence
  GATA2 Guide RNA
cccugcuaugccaaccccgcuc

SEQ ID NO: 25186 - RNA, 22 nt, Artificial Sequence
  GATA2 Guide RNA
ccucgacucgcagggcaacccc

SEQ ID NO: 25187 - RNA, 22 nt, Artificial Sequence
  GATA2 Guide RNA
ccugcuaugccaaccccgcuca

SEQ ID NO: 25188 - RNA, 22 nt, Artificial Sequence
  GATA2 Guide RNA
cgacucgcagggcaaccccugc

SEQ ID NO: 25189 - RNA, 22 nt, Artificial Sequence
  GATA2 Guide RNA
cgcagggcaaccccugcuaugc

SEQ ID NO: 25190 - RNA, 22 nt, Artificial Sequence
  GATA2 Guide RNA
cgcgcgugagcgggguuggcau

SEQ ID NO: 25191 - RNA, 22 nt, Artificial Sequence
  GATA2 Guide RNA
cgcgugagcgggguuggcauag

SEQ ID NO: 25192 - RNA, 22 nt, Artificial Sequence
  GATA2 Guide RNA
cgggguuggcauagcagggguu

SEQ ID NO: 25193 - RNA, 22 nt, Artificial Sequence
  GATA2 Guide RNA
cgugagcgggguuggcauagca

SEQ ID NO: 25194 - RNA, 22 nt, Artificial Sequence
  GATA2 Guide RNA
cucgacucgcagggcaaccccu

SEQ ID NO: 25195 - RNA, 22 nt, Artificial Sequence
  GATA2 Guide RNA
cucgcagggcaaccccugcuau

SEQ ID NO: 25196 - RNA, 22 nt, Artificial Sequence
  GATA2 Guide RNA
cugcuaugccaaccccgcucac

SEQ ID NO: 25197 - RNA, 22 nt, Artificial Sequence
  GATA2 Guide RNA
gacucgcagggcaaccccugcu

SEQ ID NO: 25198 - RNA, 22 nt, Artificial Sequence
  GATA2 Guide RNA
gagcgggguuggcauagcaggg

SEQ ID NO: 25199 - RNA, 22 nt, Artificial Sequence
  GATA2 Guide RNA
gcaaccccugcuaugccaaccc

SEQ ID NO: 25200 - RNA, 22 nt, Artificial Sequence
  GATA2 Guide RNA
gcagggcaaccccugcuaugcc

SEQ ID NO: 25201 - RNA, 22 nt, Artificial Sequence
  GATA2 Guide RNA
gcagggguugcccugcgagucg

SEQ ID NO: 25202 - RNA, 22 nt, Artificial Sequence
  GATA2 Guide RNA
gcauagcagggguugcccugcg

SEQ ID NO: 25203 - RNA, 22 nt, Artificial Sequence
  GATA2 Guide RNA
gcgcgugagcgggguuggcaua

SEQ ID NO: 25204 - RNA, 22 nt, Artificial Sequence
  GATA2 Guide RNA
gcgggguuggcauagcaggggu

SEQ ID NO: 25205 - RNA, 22 nt, Artificial Sequence
  GATA2 Guide RNA
gcgugagcgggguuggcauagc

SEQ ID NO: 25206 - RNA, 22 nt, Artificial Sequence
  GATA2 Guide RNA
ggcaaccccugcuaugccaacc

SEQ ID NO: 25207 - RNA, 22 nt, Artificial Sequence
  GATA2 Guide RNA
ggcauagcagggguugcccugc

SEQ ID NO: 25208 - RNA, 22 nt, Artificial Sequence
  GATA2 Guide RNA
gggcaaccccugcuaugccaac

SEQ ID NO: 25209 - RNA, 22 nt, Artificial Sequence
  GATA2 Guide RNA
gggguuggcauagcagggguug

SEQ ID NO: 25210 - RNA, 22 nt, Artificial Sequence
  GATA2 Guide RNA
ggguuggcauagcagggguugc

SEQ ID NO: 25211 - RNA, 22 nt, Artificial Sequence
  GATA2 Guide RNA
gguuggcauagcagggguugcc

SEQ ID NO: 25212 - RNA, 22 nt, Artificial Sequence
  GATA2 Guide RNA
gugagcgggguuggcauagcag

SEQ ID NO: 25213 - RNA, 22 nt, Artificial Sequence
  GATA2 Guide RNA
guuggcauagcagggguugccc

SEQ ID NO: 25214 - RNA, 22 nt, Artificial Sequence
  GATA2 Guide RNA
uagcagggguugcccugcgagu

SEQ ID NO: 25215 - RNA, 22 nt, Artificial Sequence
  GATA2 Guide RNA
ucgacucgcagggcaaccccug

SEQ ID NO: 25216 - RNA, 22 nt, Artificial Sequence
  GATA2 Guide RNA
ucgcagggcaaccccugcuaug

SEQ ID NO: 25217 - RNA, 22 nt, Artificial Sequence
  GATA2 Guide RNA
ugagcgggguuggcauagcagg

SEQ ID NO: 25218 - RNA, 22 nt, Artificial Sequence
  GATA2 Guide RNA
ugcuaugccaaccccgcucacg

SEQ ID NO: 25219 - RNA, 22 nt, Artificial Sequence
  GATA2 Guide RNA
uggcauagcagggguugcccug

SEQ ID NO: 25220 - RNA, 22 nt, Artificial Sequence
  GATA2 Guide RNA
uuggcauagcagggguugcccu

SEQ ID NO: 25221 - RNA, 20 nt, Artificial Sequence
  GATA2 Guide RNA
aaucaccucgacgcgcaggg

SEQ ID NO: 25222 - RNA, 20 nt, Artificial Sequence
  GATA2 Guide RNA
accucgacgcgcagggcaac

SEQ ID NO: 25223 - RNA, 20 nt, Artificial Sequence
  GATA2 Guide RNA
acgcgcagggcaaccccuac

SEQ ID NO: 25224 - RNA, 20 nt, Artificial Sequence
  GATA2 Guide RNA
acgucuucuucaaucaccuc

SEQ ID NO: 25225 - RNA, 20 nt, Artificial Sequence
  GATA2 Guide RNA
agggguugcccugcgcgucg

SEQ ID NO: 25226 - RNA, 20 nt, Artificial Sequence
  GATA2 Guide RNA
aguagggguugcccugcgcg

SEQ ID NO: 25227 - RNA, 20 nt, Artificial Sequence
  GATA2 Guide RNA
auaguagggguugcccugcg

SEQ ID NO: 25228 - RNA, 20 nt, Artificial Sequence
  GATA2 Guide RNA
aucaccucgacgcgcagggc

SEQ ID NO: 25229 - RNA, 20 nt, Artificial Sequence
  GATA2 Guide RNA
caaucaccucgacgcgcagg

SEQ ID NO: 25230 - RNA, 20 nt, Artificial Sequence
  GATA2 Guide RNA
caccucgacgcgcagggcaa

SEQ ID NO: 25231 - RNA, 20 nt, Artificial Sequence
  GATA2 Guide RNA
cauaguagggguugcccugc

SEQ ID NO: 25232 - RNA, 20 nt, Artificial Sequence
  GATA2 Guide RNA
cccugcgcgucgaggugauu

SEQ ID NO: 25233 - RNA, 20 nt, Artificial Sequence
  GATA2 Guide RNA
ccucgacgcgcagggcaacc

SEQ ID NO: 25234 - RNA, 20 nt, Artificial Sequence
  GATA2 Guide RNA
ccugcgcgucgaggugauug

SEQ ID NO: 25235 - RNA, 20 nt, Artificial Sequence
  GATA2 Guide RNA
cgacgcgcagggcaaccccu

SEQ ID NO: 25236 - RNA, 20 nt, Artificial Sequence
  GATA2 Guide RNA
cgcgcagggcaaccccuacu

SEQ ID NO: 25237 - RNA, 20 nt, Artificial Sequence
  GATA2 Guide RNA
cgcgucgaggugauugaaga

SEQ ID NO: 25238 - RNA, 20 nt, Artificial Sequence
  GATA2 Guide RNA
cgucgaggugauugaagaag

SEQ ID NO: 25239 - RNA, 20 nt, Artificial Sequence
  GATA2 Guide RNA
cgucuucuucaaucaccucg

SEQ ID NO: 25240 - RNA, 20 nt, Artificial Sequence
  GATA2 Guide RNA
cucgacgcgcagggcaaccc

SEQ ID NO: 25241 - RNA, 20 nt, Artificial Sequence
  GATA2 Guide RNA
cugcgcgucgaggugauuga

SEQ ID NO: 25242 - RNA, 20 nt, Artificial Sequence
  GATA2 Guide RNA
cuucaaucaccucgacgcgc

SEQ ID NO: 25243 - RNA, 20 nt, Artificial Sequence
  GATA2 Guide RNA
cuucuucaaucaccucgacg

SEQ ID NO: 25244 - RNA, 20 nt, Artificial Sequence
  GATA2 Guide RNA
gacgcgcagggcaaccccua

SEQ ID NO: 25245 - RNA, 20 nt, Artificial Sequence
  GATA2 Guide RNA
gcauaguagggguugcccug

SEQ ID NO: 25246 - RNA, 20 nt, Artificial Sequence
  GATA2 Guide RNA
gcccugcgcgucgaggugau

SEQ ID NO: 25247 - RNA, 20 nt, Artificial Sequence
  GATA2 Guide RNA
gcgcgucgaggugauugaag

SEQ ID NO: 25248 - RNA, 20 nt, Artificial Sequence
  GATA2 Guide RNA
gcgucgaggugauugaagaa

SEQ ID NO: 25249 - RNA, 20 nt, Artificial Sequence
  GATA2 Guide RNA
gggguugcccugcgcgucga

SEQ ID NO: 25250 - RNA, 20 nt, Artificial Sequence
  GATA2 Guide RNA
ggguugcccugcgcgucgag

SEQ ID NO: 25251 - RNA, 20 nt, Artificial Sequence
  GATA2 Guide RNA
gguugcccugcgcgucgagg

SEQ ID NO: 25252 - RNA, 20 nt, Artificial Sequence
  GATA2 Guide RNA
guagggguugcccugcgcgu

SEQ ID NO: 25253 - RNA, 20 nt, Artificial Sequence
  GATA2 Guide RNA
gucuucuucaaucaccucga

SEQ ID NO: 25254 - RNA, 20 nt, Artificial Sequence
  GATA2 Guide RNA
guugcccugcgcgucgaggu

SEQ ID NO: 25255 - RNA, 20 nt, Artificial Sequence
  GATA2 Guide RNA
uagggguugcccugcgcguc

SEQ ID NO: 25256 - RNA, 20 nt, Artificial Sequence
  GATA2 Guide RNA
uaguagggguugcccugcgc

SEQ ID NO: 25257 - RNA, 20 nt, Artificial Sequence
  GATA2 Guide RNA
ucaaucaccucgacgcgcag

SEQ ID NO: 25258 - RNA, 20 nt, Artificial Sequence
  GATA2 Guide RNA
ucaccucgacgcgcagggca

SEQ ID NO: 25259 - RNA, 20 nt, Artificial Sequence
  GATA2 Guide RNA
ucgacgcgcagggcaacccc

SEQ ID NO: 25260 - RNA, 20 nt, Artificial Sequence
  GATA2 Guide RNA
ucuucaaucaccucgacgcg

SEQ ID NO: 25261 - RNA, 20 nt, Artificial Sequence
  GATA2 Guide RNA
ucuucuucaaucaccucgac

SEQ ID NO: 25262 - RNA, 20 nt, Artificial Sequence
  GATA2 Guide RNA
ugcccugcgcgucgagguga

SEQ ID NO: 25263 - RNA, 20 nt, Artificial Sequence
  GATA2 Guide RNA
ugcgcgucgaggugauugaa

SEQ ID NO: 25264 - RNA, 20 nt, Artificial Sequence
  GATA2 Guide RNA
uucaaucaccucgacgcgca

SEQ ID NO: 25265 - RNA, 20 nt, Artificial Sequence
  GATA2 Guide RNA
uucuucaaucaccucgacgc

SEQ ID NO: 25266 - RNA, 20 nt, Artificial Sequence
  GATA2 Guide RNA
uugcccugcgcgucgaggug

SEQ ID NO: 25267 - RNA, 21 nt, Artificial Sequence
  GATA2 Guide RNA
aaucaccucgacgcgcagggc

SEQ ID NO: 25268 - RNA, 21 nt, Artificial Sequence
  GATA2 Guide RNA
accucgacgcgcagggcaacc

SEQ ID NO: 25269 - RNA, 21 nt, Artificial Sequence
  GATA2 Guide RNA
acgcgcagggcaaccccuacu

SEQ ID NO: 25270 - RNA, 21 nt, Artificial Sequence
  GATA2 Guide RNA
acgucuucuucaaucaccucg

SEQ ID NO: 25271 - RNA, 21 nt, Artificial Sequence
  GATA2 Guide RNA
agggguugcccugcgcgucga

SEQ ID NO: 25272 - RNA, 21 nt, Artificial Sequence
  GATA2 Guide RNA
aguagggguugcccugcgcgu

SEQ ID NO: 25273 - RNA, 21 nt, Artificial Sequence
  GATA2 Guide RNA
auaguagggguugcccugcgc

SEQ ID NO: 25274 - RNA, 21 nt, Artificial Sequence
  GATA2 Guide RNA
aucaccucgacgcgcagggca

SEQ ID NO: 25275 - RNA, 21 nt, Artificial Sequence
  GATA2 Guide RNA
caaucaccucgacgcgcaggg

SEQ ID NO: 25276 - RNA, 21 nt, Artificial Sequence
  GATA2 Guide RNA
caccucgacgcgcagggcaac

SEQ ID NO: 25277 - RNA, 21 nt, Artificial Sequence
  GATA2 Guide RNA
cauaguagggguugcccugcg

SEQ ID NO: 25278 - RNA, 21 nt, Artificial Sequence
  GATA2 Guide RNA
cccugcgcgucgaggugauug

SEQ ID NO: 25279 - RNA, 21 nt, Artificial Sequence
  GATA2 Guide RNA
ccucgacgcgcagggcaaccc

SEQ ID NO: 25280 - RNA, 21 nt, Artificial Sequence
  GATA2 Guide RNA
ccugcgcgucgaggugauuga

SEQ ID NO: 25281 - RNA, 21 nt, Artificial Sequence
  GATA2 Guide RNA
cgacgcgcagggcaaccccua

SEQ ID NO: 25282 - RNA, 21 nt, Artificial Sequence
  GATA2 Guide RNA
cgcgcagggcaaccccuacua

SEQ ID NO: 25283 - RNA, 21 nt, Artificial Sequence
  GATA2 Guide RNA
cgcgucgaggugauugaagaa

SEQ ID NO: 25284 - RNA, 21 nt, Artificial Sequence
  GATA2 Guide RNA
cgucgaggugauugaagaaga

SEQ ID NO: 25285 - RNA, 21 nt, Artificial Sequence
  GATA2 Guide RNA
cgucuucuucaaucaccucga

SEQ ID NO: 25286 - RNA, 21 nt, Artificial Sequence
  GATA2 Guide RNA
cucgacgcgcagggcaacccc

SEQ ID NO: 25287 - RNA, 21 nt, Artificial Sequence
  GATA2 Guide RNA
cugcgcgucgaggugauugaa

SEQ ID NO: 25288 - RNA, 21 nt, Artificial Sequence
  GATA2 Guide RNA
cuucaaucaccucgacgcgca

SEQ ID NO: 25289 - RNA, 21 nt, Artificial Sequence
  GATA2 Guide RNA
cuucuucaaucaccucgacgc

SEQ ID NO: 25290 - RNA, 21 nt, Artificial Sequence
  GATA2 Guide RNA
gacgcgcagggcaaccccuac

SEQ ID NO: 25291 - RNA, 21 nt, Artificial Sequence
  GATA2 Guide RNA
gacgucuucuucaaucaccuc

SEQ ID NO: 25292 - RNA, 21 nt, Artificial Sequence
  GATA2 Guide RNA
gcauaguagggguugcccugc

SEQ ID NO: 25293 - RNA, 21 nt, Artificial Sequence
  GATA2 Guide RNA
gcccugcgcgucgaggugauu

SEQ ID NO: 25294 - RNA, 21 nt, Artificial Sequence
  GATA2 Guide RNA
gcgcgucgaggugauugaaga

SEQ ID NO: 25295 - RNA, 21 nt, Artificial Sequence
  GATA2 Guide RNA
gcgucgaggugauugaagaag

SEQ ID NO: 25296 - RNA, 21 nt, Artificial Sequence
  GATA2 Guide RNA
ggcauaguagggguugcccug

SEQ ID NO: 25297 - RNA, 21 nt, Artificial Sequence
  GATA2 Guide RNA
gggguugcccugcgcgucgag

SEQ ID NO: 25298 - RNA, 21 nt, Artificial Sequence
  GATA2 Guide RNA
ggguugcccugcgcgucgagg

SEQ ID NO: 25299 - RNA, 21 nt, Artificial Sequence
  GATA2 Guide RNA
gguugcccugcgcgucgaggu

SEQ ID NO: 25300 - RNA, 21 nt, Artificial Sequence
  GATA2 Guide RNA
guagggguugcccugcgcguc

SEQ ID NO: 25301 - RNA, 21 nt, Artificial Sequence
  GATA2 Guide RNA
gucuucuucaaucaccucgac

SEQ ID NO: 25302 - RNA, 21 nt, Artificial Sequence
  GATA2 Guide RNA
guugcccugcgcgucgaggug

SEQ ID NO: 25303 - RNA, 21 nt, Artificial Sequence
  GATA2 Guide RNA
uagggguugcccugcgcgucg

SEQ ID NO: 25304 - RNA, 21 nt, Artificial Sequence
  GATA2 Guide RNA
uaguagggguugcccugcgcg

SEQ ID NO: 25305 - RNA, 21 nt, Artificial Sequence
  GATA2 Guide RNA
ucaaucaccucgacgcgcagg

SEQ ID NO: 25306 - RNA, 21 nt, Artificial Sequence
  GATA2 Guide RNA
ucaccucgacgcgcagggcaa

SEQ ID NO: 25307 - RNA, 21 nt, Artificial Sequence
  GATA2 Guide RNA
ucgacgcgcagggcaaccccu

SEQ ID NO: 25308 - RNA, 21 nt, Artificial Sequence
  GATA2 Guide RNA
ucuucaaucaccucgacgcgc

SEQ ID NO: 25309 - RNA, 21 nt, Artificial Sequence
  GATA2 Guide RNA
ucuucuucaaucaccucgacg

SEQ ID NO: 25310 - RNA, 21 nt, Artificial Sequence
  GATA2 Guide RNA
ugcccugcgcgucgaggugau

SEQ ID NO: 25311 - RNA, 21 nt, Artificial Sequence
  GATA2 Guide RNA
ugcgcgucgaggugauugaag

SEQ ID NO: 25312 - RNA, 21 nt, Artificial Sequence
  GATA2 Guide RNA
uucaaucaccucgacgcgcag

SEQ ID NO: 25313 - RNA, 21 nt, Artificial Sequence
  GATA2 Guide RNA
uucuucaaucaccucgacgcg

SEQ ID NO: 25314 - RNA, 21 nt, Artificial Sequence
  GATA2 Guide RNA
uugcccugcgcgucgagguga

SEQ ID NO: 25315 - RNA, 22 nt, Artificial Sequence
  GATA2 Guide RNA
aaucaccucgacgcgcagggca

SEQ ID NO: 25316 - RNA, 22 nt, Artificial Sequence
  GATA2 Guide RNA
accucgacgcgcagggcaaccc

SEQ ID NO: 25317 - RNA, 22 nt, Artificial Sequence
  GATA2 Guide RNA
acgcgcagggcaaccccuacua

SEQ ID NO: 25318 - RNA, 22 nt, Artificial Sequence
  GATA2 Guide RNA
acgucuucuucaaucaccucga

SEQ ID NO: 25319 - RNA, 22 nt, Artificial Sequence
  GATA2 Guide RNA
agggguugcccugcgcgucgag

SEQ ID NO: 25320 - RNA, 22 nt, Artificial Sequence
  GATA2 Guide RNA
aguagggguugcccugcgcguc

SEQ ID NO: 25321 - RNA, 22 nt, Artificial Sequence
  GATA2 Guide RNA
auaguagggguugcccugcgcg

SEQ ID NO: 25322 - RNA, 22 nt, Artificial Sequence
  GATA2 Guide RNA
aucaccucgacgcgcagggcaa

SEQ ID NO: 25323 - RNA, 22 nt, Artificial Sequence
  GATA2 Guide RNA
caaucaccucgacgcgcagggc

SEQ ID NO: 25324 - RNA, 22 nt, Artificial Sequence
  GATA2 Guide RNA
caccucgacgcgcagggcaacc

SEQ ID NO: 25325 - RNA, 22 nt, Artificial Sequence
  GATA2 Guide RNA
cauaguagggguugcccugcgc

SEQ ID NO: 25326 - RNA, 22 nt, Artificial Sequence
  GATA2 Guide RNA
cccugcgcgucgaggugauuga

SEQ ID NO: 25327 - RNA, 22 nt, Artificial Sequence
  GATA2 Guide RNA
ccucgacgcgcagggcaacccc

SEQ ID NO: 25328 - RNA, 22 nt, Artificial Sequence
  GATA2 Guide RNA
ccugcgcgucgaggugauugaa

SEQ ID NO: 25329 - RNA, 22 nt, Artificial Sequence
  GATA2 Guide RNA
cgacgcgcagggcaaccccuac

SEQ ID NO: 25330 - RNA, 22 nt, Artificial Sequence
  GATA2 Guide RNA
cgcgcagggcaaccccuacuau

SEQ ID NO: 25331 - RNA, 22 nt, Artificial Sequence
  GATA2 Guide RNA
cgcgucgaggugauugaagaag

SEQ ID NO: 25332 - RNA, 22 nt, Artificial Sequence
  GATA2 Guide RNA
cgucgaggugauugaagaagac

SEQ ID NO: 25333 - RNA, 22 nt, Artificial Sequence
  GATA2 Guide RNA
cgucuucuucaaucaccucgac

SEQ ID NO: 25334 - RNA, 22 nt, Artificial Sequence
  GATA2 Guide RNA
cucgacgcgcagggcaaccccu

SEQ ID NO: 25335 - RNA, 22 nt, Artificial Sequence
  GATA2 Guide RNA
cugcgcgucgaggugauugaag

SEQ ID NO: 25336 - RNA, 22 nt, Artificial Sequence
  GATA2 Guide RNA
cuucaaucaccucgacgcgcag

SEQ ID NO: 25337 - RNA, 22 nt, Artificial Sequence
  GATA2 Guide RNA
cuucuucaaucaccucgacgcg

SEQ ID NO: 25338 - RNA, 22 nt, Artificial Sequence
  GATA2 Guide RNA
gacgcgcagggcaaccccuacu

SEQ ID NO: 25339 - RNA, 22 nt, Artificial Sequence
  GATA2 Guide RNA
gacgucuucuucaaucaccucg

SEQ ID NO: 25340 - RNA, 22 nt, Artificial Sequence
  GATA2 Guide RNA
gcauaguagggguugcccugcg

SEQ ID NO: 25341 - RNA, 22 nt, Artificial Sequence
  GATA2 Guide RNA
gcccugcgcgucgaggugauug

SEQ ID NO: 25342 - RNA, 22 nt, Artificial Sequence
  GATA2 Guide RNA
gcgcgucgaggugauugaagaa

SEQ ID NO: 25343 - RNA, 22 nt, Artificial Sequence
  GATA2 Guide RNA
gcgucgaggugauugaagaaga

SEQ ID NO: 25344 - RNA, 22 nt, Artificial Sequence
  GATA2 Guide RNA
ggacgucuucuucaaucaccuc

SEQ ID NO: 25345 - RNA, 22 nt, Artificial Sequence
  GATA2 Guide RNA
ggcauaguagggguugcccugc

SEQ ID NO: 25346 - RNA, 22 nt, Artificial Sequence
  GATA2 Guide RNA
gggguugcccugcgcgucgagg

SEQ ID NO: 25347 - RNA, 22 nt, Artificial Sequence
  GATA2 Guide RNA
ggguugcccugcgcgucgaggu

SEQ ID NO: 25348 - RNA, 22 nt, Artificial Sequence
  GATA2 Guide RNA
gguugcccugcgcgucgaggug

SEQ ID NO: 25349 - RNA, 22 nt, Artificial Sequence
  GATA2 Guide RNA
guagggguugcccugcgcgucg

SEQ ID NO: 25350 - RNA, 22 nt, Artificial Sequence
  GATA2 Guide RNA
gucuucuucaaucaccucgacg

SEQ ID NO: 25351 - RNA, 22 nt, Artificial Sequence
  GATA2 Guide RNA
guugcccugcgcgucgagguga

SEQ ID NO: 25352 - RNA, 22 nt, Artificial Sequence
  GATA2 Guide RNA
uagggguugcccugcgcgucga

SEQ ID NO: 25353 - RNA, 22 nt, Artificial Sequence
  GATA2 Guide RNA
uaguagggguugcccugcgcgu

SEQ ID NO: 25354 - RNA, 22 nt, Artificial Sequence
  GATA2 Guide RNA
ucaaucaccucgacgcgcaggg

SEQ ID NO: 25355 - RNA, 22 nt, Artificial Sequence
  GATA2 Guide RNA
ucaccucgacgcgcagggcaac

SEQ ID NO: 25356 - RNA, 22 nt, Artificial Sequence
  GATA2 Guide RNA
ucgacgcgcagggcaaccccua

SEQ ID NO: 25357 - RNA, 22 nt, Artificial Sequence
  GATA2 Guide RNA
ucuucaaucaccucgacgcgca

SEQ ID NO: 25358 - RNA, 22 nt, Artificial Sequence
  GATA2 Guide RNA
ucuucuucaaucaccucgacgc

SEQ ID NO: 25359 - RNA, 22 nt, Artificial Sequence
  GATA2 Guide RNA
ugcccugcgcgucgaggugauu

SEQ ID NO: 25360 - RNA, 22 nt, Artificial Sequence
  GATA2 Guide RNA
ugcgcgucgaggugauugaaga

SEQ ID NO: 25361 - RNA, 22 nt, Artificial Sequence
  GATA2 Guide RNA
uggcauaguagggguugcccug

SEQ ID NO: 25362 - RNA, 22 nt, Artificial Sequence
  GATA2 Guide RNA
uucaaucaccucgacgcgcagg

SEQ ID NO: 25363 - RNA, 22 nt, Artificial Sequence
  GATA2 Guide RNA
uucuucaaucaccucgacgcgc

SEQ ID NO: 25364 - RNA, 22 nt, Artificial Sequence
  GATA2 Guide RNA
uugcccugcgcgucgaggugau

SEQ ID NO: 25365 - RNA, 20 nt, Artificial Sequence
  GATA2 Guide RNA
acgagguggacgucuucuuc

SEQ ID NO: 25366 - RNA, 20 nt, Artificial Sequence
  GATA2 Guide RNA
acgucuucuucagucaccuc

SEQ ID NO: 25367 - RNA, 20 nt, Artificial Sequence
  GATA2 Guide RNA
acugaagaagacguccaccu

SEQ ID NO: 25368 - RNA, 20 nt, Artificial Sequence
  GATA2 Guide RNA
agacgagguggacgucuucu

SEQ ID NO: 25369 - RNA, 20 nt, Artificial Sequence
  GATA2 Guide RNA
aggugacugaagaagacguc

SEQ ID NO: 25370 - RNA, 20 nt, Artificial Sequence
  GATA2 Guide RNA
agguggacgucuucuucagu

SEQ ID NO: 25371 - RNA, 20 nt, Artificial Sequence
  GATA2 Guide RNA
agucaccucgacucgcaggg

SEQ ID NO: 25372 - RNA, 20 nt, Artificial Sequence
  GATA2 Guide RNA
agucgaggugacugaagaag

SEQ ID NO: 25373 - RNA, 20 nt, Artificial Sequence
  GATA2 Guide RNA
cagucaccucgacucgcagg

SEQ ID NO: 25374 - RNA, 20 nt, Artificial Sequence
  GATA2 Guide RNA
cccugcgagucgaggugacu

SEQ ID NO: 25375 - RNA, 20 nt, Artificial Sequence
  GATA2 Guide RNA
ccugcgagucgaggugacug

SEQ ID NO: 25376 - RNA, 20 nt, Artificial Sequence
  GATA2 Guide RNA
cgaggugacugaagaagacg

SEQ ID NO: 25377 - RNA, 20 nt, Artificial Sequence
  GATA2 Guide RNA
cgagguggacgucuucuuca

SEQ ID NO: 25378 - RNA, 20 nt, Artificial Sequence
  GATA2 Guide RNA
cgagucgaggugacugaaga

SEQ ID NO: 25379 - RNA, 20 nt, Artificial Sequence
  GATA2 Guide RNA
cgucuucuucagucaccucg

SEQ ID NO: 25380 - RNA, 20 nt, Artificial Sequence
  GATA2 Guide RNA
cugaagaagacguccaccuc

SEQ ID NO: 25381 - RNA, 20 nt, Artificial Sequence
  GATA2 Guide RNA
cugcgagucgaggugacuga

SEQ ID NO: 25382 - RNA, 20 nt, Artificial Sequence
  GATA2 Guide RNA
cuucagucaccucgacucgc

SEQ ID NO: 25383 - RNA, 20 nt, Artificial Sequence
  GATA2 Guide RNA
cuucuucagucaccucgacu

SEQ ID NO: 25384 - RNA, 20 nt, Artificial Sequence
  GATA2 Guide RNA
gacgagguggacgucuucuu

SEQ ID NO: 25385 - RNA, 20 nt, Artificial Sequence
  GATA2 Guide RNA
gacgucuucuucagucaccu

SEQ ID NO: 25386 - RNA, 20 nt, Artificial Sequence
  GATA2 Guide RNA
gacugaagaagacguccacc

SEQ ID NO: 25387 - RNA, 20 nt, Artificial Sequence
  GATA2 Guide RNA
gaggugacugaagaagacgu

SEQ ID NO: 25388 - RNA, 20 nt, Artificial Sequence
  GATA2 Guide RNA
gagguggacgucuucuucag

SEQ ID NO: 25389 - RNA, 20 nt, Artificial Sequence
  GATA2 Guide RNA
gagucgaggugacugaagaa

SEQ ID NO: 25390 - RNA, 20 nt, Artificial Sequence
  GATA2 Guide RNA
gcccugcgagucgaggugac

SEQ ID NO: 25391 - RNA, 20 nt, Artificial Sequence
  GATA2 Guide RNA
gcgagucgaggugacugaag

SEQ ID NO: 25392 - RNA, 20 nt, Artificial Sequence
  GATA2 Guide RNA
ggacgucuucuucagucacc

SEQ ID NO: 25393 - RNA, 20 nt, Artificial Sequence
  GATA2 Guide RNA
ggugacugaagaagacgucc

SEQ ID NO: 25394 - RNA, 20 nt, Artificial Sequence
  GATA2 Guide RNA
gguggacgucuucuucaguc

SEQ ID NO: 25395 - RNA, 20 nt, Artificial Sequence
  GATA2 Guide RNA
gucgaggugacugaagaaga

SEQ ID NO: 25396 - RNA, 20 nt, Artificial Sequence
  GATA2 Guide RNA
gucuucuucagucaccucga

SEQ ID NO: 25397 - RNA, 20 nt, Artificial Sequence
  GATA2 Guide RNA
gugacugaagaagacgucca

SEQ ID NO: 25398 - RNA, 20 nt, Artificial Sequence
  GATA2 Guide RNA
guggacgucuucuucaguca

SEQ ID NO: 25399 - RNA, 20 nt, Artificial Sequence
  GATA2 Guide RNA
guugcccugcgagucgaggu

SEQ ID NO: 25400 - RNA, 20 nt, Artificial Sequence
  GATA2 Guide RNA
ucagucaccucgacucgcag

SEQ ID NO: 25401 - RNA, 20 nt, Artificial Sequence
  GATA2 Guide RNA
ucgaggugacugaagaagac

SEQ ID NO: 25402 - RNA, 20 nt, Artificial Sequence
  GATA2 Guide RNA
ucuucagucaccucgacucg

SEQ ID NO: 25403 - RNA, 20 nt, Artificial Sequence
  GATA2 Guide RNA
ucuucuucagucaccucgac

SEQ ID NO: 25404 - RNA, 20 nt, Artificial Sequence
  GATA2 Guide RNA
ugacugaagaagacguccac

SEQ ID NO: 25405 - RNA, 20 nt, Artificial Sequence
  GATA2 Guide RNA
ugcccugcgagucgagguga

SEQ ID NO: 25406 - RNA, 20 nt, Artificial Sequence
  GATA2 Guide RNA
ugcgagucgaggugacugaa

SEQ ID NO: 25407 - RNA, 20 nt, Artificial Sequence
  GATA2 Guide RNA
uggacgucuucuucagucac

SEQ ID NO: 25408 - RNA, 20 nt, Artificial Sequence
  GATA2 Guide RNA
uucagucaccucgacucgca

SEQ ID NO: 25409 - RNA, 20 nt, Artificial Sequence
  GATA2 Guide RNA
uucuucagucaccucgacuc

SEQ ID NO: 25410 - RNA, 20 nt, Artificial Sequence
  GATA2 Guide RNA
uugcccugcgagucgaggug

SEQ ID NO: 25411 - RNA, 21 nt, Artificial Sequence
  GATA2 Guide RNA
acgagguggacgucuucuuca

SEQ ID NO: 25412 - RNA, 21 nt, Artificial Sequence
  GATA2 Guide RNA
acgucuucuucagucaccucg

SEQ ID NO: 25413 - RNA, 21 nt, Artificial Sequence
  GATA2 Guide RNA
acugaagaagacguccaccuc

SEQ ID NO: 25414 - RNA, 21 nt, Artificial Sequence
  GATA2 Guide RNA
agacgagguggacgucuucuu

SEQ ID NO: 25415 - RNA, 21 nt, Artificial Sequence
  GATA2 Guide RNA
aggugacugaagaagacgucc

SEQ ID NO: 25416 - RNA, 21 nt, Artificial Sequence
  GATA2 Guide RNA
agguggacgucuucuucaguc

SEQ ID NO: 25417 - RNA, 21 nt, Artificial Sequence
  GATA2 Guide RNA
agucaccucgacucgcagggc

SEQ ID NO: 25418 - RNA, 21 nt, Artificial Sequence
  GATA2 Guide RNA
agucgaggugacugaagaaga

SEQ ID NO: 25419 - RNA, 21 nt, Artificial Sequence
  GATA2 Guide RNA
cagacgagguggacgucuucu

SEQ ID NO: 25420 - RNA, 21 nt, Artificial Sequence
  GATA2 Guide RNA
cagucaccucgacucgcaggg

SEQ ID NO: 25421 - RNA, 21 nt, Artificial Sequence
  GATA2 Guide RNA
cccugcgagucgaggugacug

SEQ ID NO: 25422 - RNA, 21 nt, Artificial Sequence
  GATA2 Guide RNA
ccugcgagucgaggugacuga

SEQ ID NO: 25423 - RNA, 21 nt, Artificial Sequence
  GATA2 Guide RNA
cgaggugacugaagaagacgu

SEQ ID NO: 25424 - RNA, 21 nt, Artificial Sequence
  GATA2 Guide RNA
cgagguggacgucuucuucag

SEQ ID NO: 25425 - RNA, 21 nt, Artificial Sequence
  GATA2 Guide RNA
cgagucgaggugacugaagaa

SEQ ID NO: 25426 - RNA, 21 nt, Artificial Sequence
  GATA2 Guide RNA
cgucuucuucagucaccucga

SEQ ID NO: 25427 - RNA, 21 nt, Artificial Sequence
  GATA2 Guide RNA
cugaagaagacguccaccucg

SEQ ID NO: 25428 - RNA, 21 nt, Artificial Sequence
  GATA2 Guide RNA
cugcgagucgaggugacugaa

SEQ ID NO: 25429 - RNA, 21 nt, Artificial Sequence
  GATA2 Guide RNA
cuucagucaccucgacucgca

SEQ ID NO: 25430 - RNA, 21 nt, Artificial Sequence
  GATA2 Guide RNA
cuucuucagucaccucgacuc

SEQ ID NO: 25431 - RNA, 21 nt, Artificial Sequence
  GATA2 Guide RNA
gacgagguggacgucuucuuc

SEQ ID NO: 25432 - RNA, 21 nt, Artificial Sequence
  GATA2 Guide RNA
gacgucuucuucagucaccuc

SEQ ID NO: 25433 - RNA, 21 nt, Artificial Sequence
  GATA2 Guide RNA
gacugaagaagacguccaccu

SEQ ID NO: 25434 - RNA, 21 nt, Artificial Sequence
  GATA2 Guide RNA
gaggugacugaagaagacguc

SEQ ID NO: 25435 - RNA, 21 nt, Artificial Sequence
  GATA2 Guide RNA
gagguggacgucuucuucagu

SEQ ID NO: 25436 - RNA, 21 nt, Artificial Sequence
  GATA2 Guide RNA
gagucgaggugacugaagaag

SEQ ID NO: 25437 - RNA, 21 nt, Artificial Sequence
  GATA2 Guide RNA
gcccugcgagucgaggugacu

SEQ ID NO: 25438 - RNA, 21 nt, Artificial Sequence
  GATA2 Guide RNA
gcgagucgaggugacugaaga

SEQ ID NO: 25439 - RNA, 21 nt, Artificial Sequence
  GATA2 Guide RNA
ggacgucuucuucagucaccu

SEQ ID NO: 25440 - RNA, 21 nt, Artificial Sequence
  GATA2 Guide RNA
ggugacugaagaagacgucca

SEQ ID NO: 25441 - RNA, 21 nt, Artificial Sequence
  GATA2 Guide RNA
gguggacgucuucuucaguca

SEQ ID NO: 25442 - RNA, 21 nt, Artificial Sequence
  GATA2 Guide RNA
gguugcccugcgagucgaggu

SEQ ID NO: 25443 - RNA, 21 nt, Artificial Sequence
  GATA2 Guide RNA
gucgaggugacugaagaagac

SEQ ID NO: 25444 - RNA, 21 nt, Artificial Sequence
  GATA2 Guide RNA
gucuucuucagucaccucgac

SEQ ID NO: 25445 - RNA, 21 nt, Artificial Sequence
  GATA2 Guide RNA
gugacugaagaagacguccac

SEQ ID NO: 25446 - RNA, 21 nt, Artificial Sequence
  GATA2 Guide RNA
guggacgucuucuucagucac

SEQ ID NO: 25447 - RNA, 21 nt, Artificial Sequence
  GATA2 Guide RNA
guugcccugcgagucgaggug

SEQ ID NO: 25448 - RNA, 21 nt, Artificial Sequence
  GATA2 Guide RNA
ucagucaccucgacucgcagg

SEQ ID NO: 25449 - RNA, 21 nt, Artificial Sequence
  GATA2 Guide RNA
ucgaggugacugaagaagacg

SEQ ID NO: 25450 - RNA, 21 nt, Artificial Sequence
  GATA2 Guide RNA
ucuucagucaccucgacucgc

SEQ ID NO: 25451 - RNA, 21 nt, Artificial Sequence
  GATA2 Guide RNA
ucuucuucagucaccucgacu

SEQ ID NO: 25452 - RNA, 21 nt, Artificial Sequence
  GATA2 Guide RNA
ugacugaagaagacguccacc

SEQ ID NO: 25453 - RNA, 21 nt, Artificial Sequence
  GATA2 Guide RNA
ugcccugcgagucgaggugac

SEQ ID NO: 25454 - RNA, 21 nt, Artificial Sequence
  GATA2 Guide RNA
ugcgagucgaggugacugaag

SEQ ID NO: 25455 - RNA, 21 nt, Artificial Sequence
  GATA2 Guide RNA
uggacgucuucuucagucacc

SEQ ID NO: 25456 - RNA, 21 nt, Artificial Sequence
  GATA2 Guide RNA
uucagucaccucgacucgcag

SEQ ID NO: 25457 - RNA, 21 nt, Artificial Sequence
  GATA2 Guide RNA
uucuucagucaccucgacucg

SEQ ID NO: 25458 - RNA, 21 nt, Artificial Sequence
  GATA2 Guide RNA
uugcccugcgagucgagguga

SEQ ID NO: 25459 - RNA, 22 nt, Artificial Sequence
  GATA2 Guide RNA
acgagguggacgucuucuucag

SEQ ID NO: 25460 - RNA, 22 nt, Artificial Sequence
  GATA2 Guide RNA
acgucuucuucagucaccucga

SEQ ID NO: 25461 - RNA, 22 nt, Artificial Sequence
  GATA2 Guide RNA
acugaagaagacguccaccucg

SEQ ID NO: 25462 - RNA, 22 nt, Artificial Sequence
  GATA2 Guide RNA
agacgagguggacgucuucuuc

SEQ ID NO: 25463 - RNA, 22 nt, Artificial Sequence
  GATA2 Guide RNA
aggugacugaagaagacgucca

SEQ ID NO: 25464 - RNA, 22 nt, Artificial Sequence
  GATA2 Guide RNA
agguggacgucuucuucaguca

SEQ ID NO: 25465 - RNA, 22 nt, Artificial Sequence
  GATA2 Guide RNA
agucaccucgacucgcagggca

SEQ ID NO: 25466 - RNA, 22 nt, Artificial Sequence
  GATA2 Guide RNA
agucgaggugacugaagaagac

SEQ ID NO: 25467 - RNA, 22 nt, Artificial Sequence
  GATA2 Guide RNA
cagacgagguggacgucuucuu

SEQ ID NO: 25468 - RNA, 22 nt, Artificial Sequence
  GATA2 Guide RNA
cagucaccucgacucgcagggc

SEQ ID NO: 25469 - RNA, 22 nt, Artificial Sequence
  GATA2 Guide RNA
ccagacgagguggacgucuucu

SEQ ID NO: 25470 - RNA, 22 nt, Artificial Sequence
  GATA2 Guide RNA
cccugcgagucgaggugacuga

SEQ ID NO: 25471 - RNA, 22 nt, Artificial Sequence
  GATA2 Guide RNA
ccugcgagucgaggugacugaa

SEQ ID NO: 25472 - RNA, 22 nt, Artificial Sequence
  GATA2 Guide RNA
cgaggugacugaagaagacguc

SEQ ID NO: 25473 - RNA, 22 nt, Artificial Sequence
  GATA2 Guide RNA
cgagguggacgucuucuucagu

SEQ ID NO: 25474 - RNA, 22 nt, Artificial Sequence
  GATA2 Guide RNA
cgagucgaggugacugaagaag

SEQ ID NO: 25475 - RNA, 22 nt, Artificial Sequence
  GATA2 Guide RNA
cgucuucuucagucaccucgac

SEQ ID NO: 25476 - RNA, 22 nt, Artificial Sequence
  GATA2 Guide RNA
cugaagaagacguccaccucgu

SEQ ID NO: 25477 - RNA, 22 nt, Artificial Sequence
  GATA2 Guide RNA
cugcgagucgaggugacugaag

SEQ ID NO: 25478 - RNA, 22 nt, Artificial Sequence
  GATA2 Guide RNA
cuucagucaccucgacucgcag

SEQ ID NO: 25479 - RNA, 22 nt, Artificial Sequence
  GATA2 Guide RNA
cuucuucagucaccucgacucg

SEQ ID NO: 25480 - RNA, 22 nt, Artificial Sequence
  GATA2 Guide RNA
gacgagguggacgucuucuuca

SEQ ID NO: 25481 - RNA, 22 nt, Artificial Sequence
  GATA2 Guide RNA
gacgucuucuucagucaccucg

SEQ ID NO: 25482 - RNA, 22 nt, Artificial Sequence
  GATA2 Guide RNA
gacugaagaagacguccaccuc

SEQ ID NO: 25483 - RNA, 22 nt, Artificial Sequence
  GATA2 Guide RNA
gaggugacugaagaagacgucc

SEQ ID NO: 25484 - RNA, 22 nt, Artificial Sequence
  GATA2 Guide RNA
gagguggacgucuucuucaguc

SEQ ID NO: 25485 - RNA, 22 nt, Artificial Sequence
  GATA2 Guide RNA
gagucgaggugacugaagaaga

SEQ ID NO: 25486 - RNA, 22 nt, Artificial Sequence
  GATA2 Guide RNA
gcccugcgagucgaggugacug

SEQ ID NO: 25487 - RNA, 22 nt, Artificial Sequence
  GATA2 Guide RNA
gcgagucgaggugacugaagaa

SEQ ID NO: 25488 - RNA, 22 nt, Artificial Sequence
  GATA2 Guide RNA
ggacgucuucuucagucaccuc

SEQ ID NO: 25489 - RNA, 22 nt, Artificial Sequence
  GATA2 Guide RNA
ggguugcccugcgagucgaggu

SEQ ID NO: 25490 - RNA, 22 nt, Artificial Sequence
  GATA2 Guide RNA
ggugacugaagaagacguccac

SEQ ID NO: 25491 - RNA, 22 nt, Artificial Sequence
  GATA2 Guide RNA
gguggacgucuucuucagucac

SEQ ID NO: 25492 - RNA, 22 nt, Artificial Sequence
  GATA2 Guide RNA
gguugcccugcgagucgaggug

SEQ ID NO: 25493 - RNA, 22 nt, Artificial Sequence
  GATA2 Guide RNA
gucgaggugacugaagaagacg

SEQ ID NO: 25494 - RNA, 22 nt, Artificial Sequence
  GATA2 Guide RNA
gucuucuucagucaccucgacu

SEQ ID NO: 25495 - RNA, 22 nt, Artificial Sequence
  GATA2 Guide RNA
gugacugaagaagacguccacc

SEQ ID NO: 25496 - RNA, 22 nt, Artificial Sequence
  GATA2 Guide RNA
guggacgucuucuucagucacc

SEQ ID NO: 25497 - RNA, 22 nt, Artificial Sequence
  GATA2 Guide RNA
guugcccugcgagucgagguga

SEQ ID NO: 25498 - RNA, 22 nt, Artificial Sequence
  GATA2 Guide RNA
ucagucaccucgacucgcaggg

SEQ ID NO: 25499 - RNA, 22 nt, Artificial Sequence
  GATA2 Guide RNA
ucgaggugacugaagaagacgu

SEQ ID NO: 25500 - RNA, 22 nt, Artificial Sequence
  GATA2 Guide RNA
ucuucagucaccucgacucgca

SEQ ID NO: 25501 - RNA, 22 nt, Artificial Sequence
  GATA2 Guide RNA
ucuucuucagucaccucgacuc

SEQ ID NO: 25502 - RNA, 22 nt, Artificial Sequence
  GATA2 Guide RNA
ugacugaagaagacguccaccu

SEQ ID NO: 25503 - RNA, 22 nt, Artificial Sequence
  GATA2 Guide RNA
ugcccugcgagucgaggugacu

SEQ ID NO: 25504 - RNA, 22 nt, Artificial Sequence
  GATA2 Guide RNA
ugcgagucgaggugacugaaga

SEQ ID NO: 25505 - RNA, 22 nt, Artificial Sequence
  GATA2 Guide RNA
uggacgucuucuucagucaccu

SEQ ID NO: 25506 - RNA, 22 nt, Artificial Sequence
  GATA2 Guide RNA
uucagucaccucgacucgcagg

SEQ ID NO: 25507 - RNA, 22 nt, Artificial Sequence
  GATA2 Guide RNA
uucuucagucaccucgacucgc

SEQ ID NO: 25508 - RNA, 22 nt, Artificial Sequence
  GATA2 Guide RNA
uugcccugcgagucgaggugac

SEQ ID NO: 25509 - RNA, 20 nt, Artificial Sequence
  GATA2 Guide RNA
aagaugacguccaccucguc

SEQ ID NO: 25510 - RNA, 20 nt, Artificial Sequence
  GATA2 Guide RNA
acgagguggacgucaucuuc

SEQ ID NO: 25511 - RNA, 20 nt, Artificial Sequence
  GATA2 Guide RNA
acgucaucuucaaucaccuc

SEQ ID NO: 25512 - RNA, 20 nt, Artificial Sequence
  GATA2 Guide RNA
agacgagguggacgucaucu

SEQ ID NO: 25513 - RNA, 20 nt, Artificial Sequence
  GATA2 Guide RNA
agaugacguccaccucgucu

SEQ ID NO: 25514 - RNA, 20 nt, Artificial Sequence
  GATA2 Guide RNA
aggugauugaagaugacguc

SEQ ID NO: 25515 - RNA, 20 nt, Artificial Sequence
  GATA2 Guide RNA
agguggacgucaucuucaau

SEQ ID NO: 25516 - RNA, 20 nt, Artificial Sequence
  GATA2 Guide RNA
agucgaggugauugaagaug

SEQ ID NO: 25517 - RNA, 20 nt, Artificial Sequence
  GATA2 Guide RNA
augacguccaccucgucugg

SEQ ID NO: 25518 - RNA, 20 nt, Artificial Sequence
  GATA2 Guide RNA
auugaagaugacguccaccu

SEQ ID NO: 25519 - RNA, 20 nt, Artificial Sequence
  GATA2 Guide RNA
cagacgagguggacgucauc

SEQ ID NO: 25520 - RNA, 20 nt, Artificial Sequence
  GATA2 Guide RNA
caucuucaaucaccucgacu

SEQ ID NO: 25521 - RNA, 20 nt, Artificial Sequence
  GATA2 Guide RNA
ccagacgagguggacgucau

SEQ ID NO: 25522 - RNA, 20 nt, Artificial Sequence
  GATA2 Guide RNA
ccuccagacgagguggacgu

SEQ ID NO: 25523 - RNA, 20 nt, Artificial Sequence
  GATA2 Guide RNA
cgaggugauugaagaugacg

SEQ ID NO: 25524 - RNA, 20 nt, Artificial Sequence
  GATA2 Guide RNA
cgagguggacgucaucuuca

SEQ ID NO: 25525 - RNA, 20 nt, Artificial Sequence
  GATA2 Guide RNA
cgagucgaggugauugaaga

SEQ ID NO: 25526 - RNA, 20 nt, Artificial Sequence
  GATA2 Guide RNA
cgucaucuucaaucaccucg

SEQ ID NO: 25527 - RNA, 20 nt, Artificial Sequence
  GATA2 Guide RNA
cuccagacgagguggacguc

SEQ ID NO: 25528 - RNA, 20 nt, Artificial Sequence
  GATA2 Guide RNA
gaagaugacguccaccucgu

SEQ ID NO: 25529 - RNA, 20 nt, Artificial Sequence
  GATA2 Guide RNA
gacgagguggacgucaucuu

SEQ ID NO: 25530 - RNA, 20 nt, Artificial Sequence
  GATA2 Guide RNA
gacgucaucuucaaucaccu

SEQ ID NO: 25531 - RNA, 20 nt, Artificial Sequence
  GATA2 Guide RNA
gaggugauugaagaugacgu

SEQ ID NO: 25532 - RNA, 20 nt, Artificial Sequence
  GATA2 Guide RNA
gagguggacgucaucuucaa

SEQ ID NO: 25533 - RNA, 20 nt, Artificial Sequence
  GATA2 Guide RNA
gagucgaggugauugaagau

SEQ ID NO: 25534 - RNA, 20 nt, Artificial Sequence
  GATA2 Guide RNA
gaugacguccaccucgucug

SEQ ID NO: 25535 - RNA, 20 nt, Artificial Sequence
  GATA2 Guide RNA
gauugaagaugacguccacc

SEQ ID NO: 25536 - RNA, 20 nt, Artificial Sequence
  GATA2 Guide RNA
gccuccagacgagguggacg

SEQ ID NO: 25537 - RNA, 20 nt, Artificial Sequence
  GATA2 Guide RNA
gcgagucgaggugauugaag

SEQ ID NO: 25538 - RNA, 20 nt, Artificial Sequence
  GATA2 Guide RNA
ggacgucaucuucaaucacc

SEQ ID NO: 25539 - RNA, 20 nt, Artificial Sequence
  GATA2 Guide RNA
ggugauugaagaugacgucc

SEQ ID NO: 25540 - RNA, 20 nt, Artificial Sequence
  GATA2 Guide RNA
gguggacgucaucuucaauc

SEQ ID NO: 25541 - RNA, 20 nt, Artificial Sequence
  GATA2 Guide RNA
gucaucuucaaucaccucga

SEQ ID NO: 25542 - RNA, 20 nt, Artificial Sequence
  GATA2 Guide RNA
gucgaggugauugaagauga

SEQ ID NO: 25543 - RNA, 20 nt, Artificial Sequence
  GATA2 Guide RNA
gugauugaagaugacgucca

SEQ ID NO: 25544 - RNA, 20 nt, Artificial Sequence
  GATA2 Guide RNA
guggacgucaucuucaauca

SEQ ID NO: 25545 - RNA, 20 nt, Artificial Sequence
  GATA2 Guide RNA
ucaucuucaaucaccucgac

SEQ ID NO: 25546 - RNA, 20 nt, Artificial Sequence
  GATA2 Guide RNA
uccagacgagguggacguca

SEQ ID NO: 25547 - RNA, 20 nt, Artificial Sequence
  GATA2 Guide RNA
ucgaggugauugaagaugac

SEQ ID NO: 25548 - RNA, 20 nt, Artificial Sequence
  GATA2 Guide RNA
ugaagaugacguccaccucg

SEQ ID NO: 25549 - RNA, 20 nt, Artificial Sequence
  GATA2 Guide RNA
ugacguccaccucgucugga

SEQ ID NO: 25550 - RNA, 20 nt, Artificial Sequence
  GATA2 Guide RNA
ugauugaagaugacguccac

SEQ ID NO: 25551 - RNA, 20 nt, Artificial Sequence
  GATA2 Guide RNA
ugccuccagacgagguggac

SEQ ID NO: 25552 - RNA, 20 nt, Artificial Sequence
  GATA2 Guide RNA
ugcgagucgaggugauugaa

SEQ ID NO: 25553 - RNA, 20 nt, Artificial Sequence
  GATA2 Guide RNA
uggacgucaucuucaaucac

SEQ ID NO: 25554 - RNA, 20 nt, Artificial Sequence
  GATA2 Guide RNA
uugaagaugacguccaccuc

SEQ ID NO: 25555 - RNA, 21 nt, Artificial Sequence
  GATA2 Guide RNA
aagaugacguccaccucgucu

SEQ ID NO: 25556 - RNA, 21 nt, Artificial Sequence
  GATA2 Guide RNA
acgagguggacgucaucuuca

SEQ ID NO: 25557 - RNA, 21 nt, Artificial Sequence
  GATA2 Guide RNA
acgucaucuucaaucaccucg

SEQ ID NO: 25558 - RNA, 21 nt, Artificial Sequence
  GATA2 Guide RNA
agacgagguggacgucaucuu

SEQ ID NO: 25559 - RNA, 21 nt, Artificial Sequence
  GATA2 Guide RNA
agaugacguccaccucgucug

SEQ ID NO: 25560 - RNA, 21 nt, Artificial Sequence
  GATA2 Guide RNA
aggugauugaagaugacgucc

SEQ ID NO: 25561 - RNA, 21 nt, Artificial Sequence
  GATA2 Guide RNA
agguggacgucaucuucaauc

SEQ ID NO: 25562 - RNA, 21 nt, Artificial Sequence
  GATA2 Guide RNA
agucgaggugauugaagauga

SEQ ID NO: 25563 - RNA, 21 nt, Artificial Sequence
  GATA2 Guide RNA
augacguccaccucgucugga

SEQ ID NO: 25564 - RNA, 21 nt, Artificial Sequence
  GATA2 Guide RNA
auugaagaugacguccaccuc

SEQ ID NO: 25565 - RNA, 21 nt, Artificial Sequence
  GATA2 Guide RNA
cagacgagguggacgucaucu

SEQ ID NO: 25566 - RNA, 21 nt, Artificial Sequence
  GATA2 Guide RNA
caucuucaaucaccucgacuc

SEQ ID NO: 25567 - RNA, 21 nt, Artificial Sequence
  GATA2 Guide RNA
ccagacgagguggacgucauc

SEQ ID NO: 25568 - RNA, 21 nt, Artificial Sequence
  GATA2 Guide RNA
ccuccagacgagguggacguc

SEQ ID NO: 25569 - RNA, 21 nt, Artificial Sequence
  GATA2 Guide RNA
cgaggugauugaagaugacgu

SEQ ID NO: 25570 - RNA, 21 nt, Artificial Sequence
  GATA2 Guide RNA
cgagguggacgucaucuucaa

SEQ ID NO: 25571 - RNA, 21 nt, Artificial Sequence
  GATA2 Guide RNA
cgagucgaggugauugaagau

SEQ ID NO: 25572 - RNA, 21 nt, Artificial Sequence
  GATA2 Guide RNA
cgucaucuucaaucaccucga

SEQ ID NO: 25573 - RNA, 21 nt, Artificial Sequence
  GATA2 Guide RNA
cuccagacgagguggacguca

SEQ ID NO: 25574 - RNA, 21 nt, Artificial Sequence
  GATA2 Guide RNA
cugccuccagacgagguggac

SEQ ID NO: 25575 - RNA, 21 nt, Artificial Sequence
  GATA2 Guide RNA
cugcgagucgaggugauugaa

SEQ ID NO: 25576 - RNA, 21 nt, Artificial Sequence
  GATA2 Guide RNA
gaagaugacguccaccucguc

SEQ ID NO: 25577 - RNA, 21 nt, Artificial Sequence
  GATA2 Guide RNA
gacgagguggacgucaucuuc

SEQ ID NO: 25578 - RNA, 21 nt, Artificial Sequence
  GATA2 Guide RNA
gacgucaucuucaaucaccuc

SEQ ID NO: 25579 - RNA, 21 nt, Artificial Sequence
  GATA2 Guide RNA
gaggugauugaagaugacguc

SEQ ID NO: 25580 - RNA, 21 nt, Artificial Sequence
  GATA2 Guide RNA
gagguggacgucaucuucaau

SEQ ID NO: 25581 - RNA, 21 nt, Artificial Sequence
  GATA2 Guide RNA
gagucgaggugauugaagaug

SEQ ID NO: 25582 - RNA, 21 nt, Artificial Sequence
  GATA2 Guide RNA
gaugacguccaccucgucugg

SEQ ID NO: 25583 - RNA, 21 nt, Artificial Sequence
  GATA2 Guide RNA
gauugaagaugacguccaccu

SEQ ID NO: 25584 - RNA, 21 nt, Artificial Sequence
  GATA2 Guide RNA
gccuccagacgagguggacgu

SEQ ID NO: 25585 - RNA, 21 nt, Artificial Sequence
  GATA2 Guide RNA
gcgagucgaggugauugaaga

SEQ ID NO: 25586 - RNA, 21 nt, Artificial Sequence
  GATA2 Guide RNA
ggacgucaucuucaaucaccu

SEQ ID NO: 25587 - RNA, 21 nt, Artificial Sequence
  GATA2 Guide RNA
ggugauugaagaugacgucca

SEQ ID NO: 25588 - RNA, 21 nt, Artificial Sequence
  GATA2 Guide RNA
gguggacgucaucuucaauca

SEQ ID NO: 25589 - RNA, 21 nt, Artificial Sequence
  GATA2 Guide RNA
gucaucuucaaucaccucgac

SEQ ID NO: 25590 - RNA, 21 nt, Artificial Sequence
  GATA2 Guide RNA
gucgaggugauugaagaugac

SEQ ID NO: 25591 - RNA, 21 nt, Artificial Sequence
  GATA2 Guide RNA
gugauugaagaugacguccac

SEQ ID NO: 25592 - RNA, 21 nt, Artificial Sequence
  GATA2 Guide RNA
guggacgucaucuucaaucac

SEQ ID NO: 25593 - RNA, 21 nt, Artificial Sequence
  GATA2 Guide RNA
ucaucuucaaucaccucgacu

SEQ ID NO: 25594 - RNA, 21 nt, Artificial Sequence
  GATA2 Guide RNA
uccagacgagguggacgucau

SEQ ID NO: 25595 - RNA, 21 nt, Artificial Sequence
  GATA2 Guide RNA
ucgaggugauugaagaugacg

SEQ ID NO: 25596 - RNA, 21 nt, Artificial Sequence
  GATA2 Guide RNA
ugaagaugacguccaccucgu

SEQ ID NO: 25597 - RNA, 21 nt, Artificial Sequence
  GATA2 Guide RNA
ugacguccaccucgucuggag

SEQ ID NO: 25598 - RNA, 21 nt, Artificial Sequence
  GATA2 Guide RNA
ugauugaagaugacguccacc

SEQ ID NO: 25599 - RNA, 21 nt, Artificial Sequence
  GATA2 Guide RNA
ugccuccagacgagguggacg

SEQ ID NO: 25600 - RNA, 21 nt, Artificial Sequence
  GATA2 Guide RNA
ugcgagucgaggugauugaag

SEQ ID NO: 25601 - RNA, 21 nt, Artificial Sequence
  GATA2 Guide RNA
uggacgucaucuucaaucacc

SEQ ID NO: 25602 - RNA, 21 nt, Artificial Sequence
  GATA2 Guide RNA
uugaagaugacguccaccucg

SEQ ID NO: 25603 - RNA, 22 nt, Artificial Sequence
  GATA2 Guide RNA
aagaugacguccaccucgucug

SEQ ID NO: 25604 - RNA, 22 nt, Artificial Sequence
  GATA2 Guide RNA
acgagguggacgucaucuucaa

SEQ ID NO: 25605 - RNA, 22 nt, Artificial Sequence
  GATA2 Guide RNA
acgucaucuucaaucaccucga

SEQ ID NO: 25606 - RNA, 22 nt, Artificial Sequence
  GATA2 Guide RNA
agacgagguggacgucaucuuc

SEQ ID NO: 25607 - RNA, 22 nt, Artificial Sequence
  GATA2 Guide RNA
agaugacguccaccucgucugg

SEQ ID NO: 25608 - RNA, 22 nt, Artificial Sequence
  GATA2 Guide RNA
aggugauugaagaugacgucca

SEQ ID NO: 25609 - RNA, 22 nt, Artificial Sequence
  GATA2 Guide RNA
agguggacgucaucuucaauca

SEQ ID NO: 25610 - RNA, 22 nt, Artificial Sequence
  GATA2 Guide RNA
agucgaggugauugaagaugac

SEQ ID NO: 25611 - RNA, 22 nt, Artificial Sequence
  GATA2 Guide RNA
augacguccaccucgucuggag

SEQ ID NO: 25612 - RNA, 22 nt, Artificial Sequence
  GATA2 Guide RNA
auugaagaugacguccaccucg

SEQ ID NO: 25613 - RNA, 22 nt, Artificial Sequence
  GATA2 Guide RNA
cagacgagguggacgucaucuu

SEQ ID NO: 25614 - RNA, 22 nt, Artificial Sequence
  GATA2 Guide RNA
caucuucaaucaccucgacucg

SEQ ID NO: 25615 - RNA, 22 nt, Artificial Sequence
  GATA2 Guide RNA
ccagacgagguggacgucaucu

SEQ ID NO: 25616 - RNA, 22 nt, Artificial Sequence
  GATA2 Guide RNA
ccuccagacgagguggacguca

SEQ ID NO: 25617 - RNA, 22 nt, Artificial Sequence
  GATA2 Guide RNA
ccugcgagucgaggugauugaa

SEQ ID NO: 25618 - RNA, 22 nt, Artificial Sequence
  GATA2 Guide RNA
cgaggugauugaagaugacguc

SEQ ID NO: 25619 - RNA, 22 nt, Artificial Sequence
  GATA2 Guide RNA
cgagguggacgucaucuucaau

SEQ ID NO: 25620 - RNA, 22 nt, Artificial Sequence
  GATA2 Guide RNA
cgagucgaggugauugaagaug

SEQ ID NO: 25621 - RNA, 22 nt, Artificial Sequence
  GATA2 Guide RNA
cgucaucuucaaucaccucgac

SEQ ID NO: 25622 - RNA, 22 nt, Artificial Sequence
  GATA2 Guide RNA
cuccagacgagguggacgucau

SEQ ID NO: 25623 - RNA, 22 nt, Artificial Sequence
  GATA2 Guide RNA
cugccuccagacgagguggacg

SEQ ID NO: 25624 - RNA, 22 nt, Artificial Sequence
  GATA2 Guide RNA
cugcgagucgaggugauugaag

SEQ ID NO: 25625 - RNA, 22 nt, Artificial Sequence
  GATA2 Guide RNA
gaagaugacguccaccucgucu

SEQ ID NO: 25626 - RNA, 22 nt, Artificial Sequence
  GATA2 Guide RNA
gacgagguggacgucaucuuca

SEQ ID NO: 25627 - RNA, 22 nt, Artificial Sequence
  GATA2 Guide RNA
gacgucaucuucaaucaccucg

SEQ ID NO: 25628 - RNA, 22 nt, Artificial Sequence
  GATA2 Guide RNA
gaggugauugaagaugacgucc

SEQ ID NO: 25629 - RNA, 22 nt, Artificial Sequence
  GATA2 Guide RNA
gagguggacgucaucuucaauc

SEQ ID NO: 25630 - RNA, 22 nt, Artificial Sequence
  GATA2 Guide RNA
gagucgaggugauugaagauga

SEQ ID NO: 25631 - RNA, 22 nt, Artificial Sequence
  GATA2 Guide RNA
gaugacguccaccucgucugga

SEQ ID NO: 25632 - RNA, 22 nt, Artificial Sequence
  GATA2 Guide RNA
gauugaagaugacguccaccuc

SEQ ID NO: 25633 - RNA, 22 nt, Artificial Sequence
  GATA2 Guide RNA
gccuccagacgagguggacguc

SEQ ID NO: 25634 - RNA, 22 nt, Artificial Sequence
  GATA2 Guide RNA
gcgagucgaggugauugaagau

SEQ ID NO: 25635 - RNA, 22 nt, Artificial Sequence
  GATA2 Guide RNA
gcugccuccagacgagguggac

SEQ ID NO: 25636 - RNA, 22 nt, Artificial Sequence
  GATA2 Guide RNA
ggacgucaucuucaaucaccuc

SEQ ID NO: 25637 - RNA, 22 nt, Artificial Sequence
  GATA2 Guide RNA
ggugauugaagaugacguccac

SEQ ID NO: 25638 - RNA, 22 nt, Artificial Sequence
  GATA2 Guide RNA
gguggacgucaucuucaaucac

SEQ ID NO: 25639 - RNA, 22 nt, Artificial Sequence
  GATA2 Guide RNA
gucaucuucaaucaccucgacu

SEQ ID NO: 25640 - RNA, 22 nt, Artificial Sequence
  GATA2 Guide RNA
gucgaggugauugaagaugacg

SEQ ID NO: 25641 - RNA, 22 nt, Artificial Sequence
  GATA2 Guide RNA
gugauugaagaugacguccacc

SEQ ID NO: 25642 - RNA, 22 nt, Artificial Sequence
  GATA2 Guide RNA
guggacgucaucuucaaucacc

SEQ ID NO: 25643 - RNA, 22 nt, Artificial Sequence
  GATA2 Guide RNA
ucaucuucaaucaccucgacuc

SEQ ID NO: 25644 - RNA, 22 nt, Artificial Sequence
  GATA2 Guide RNA
uccagacgagguggacgucauc

SEQ ID NO: 25645 - RNA, 22 nt, Artificial Sequence
  GATA2 Guide RNA
ucgaggugauugaagaugacgu

SEQ ID NO: 25646 - RNA, 22 nt, Artificial Sequence
  GATA2 Guide RNA
ugaagaugacguccaccucguc

SEQ ID NO: 25647 - RNA, 22 nt, Artificial Sequence
  GATA2 Guide RNA
ugacguccaccucgucuggagg

SEQ ID NO: 25648 - RNA, 22 nt, Artificial Sequence
  GATA2 Guide RNA
ugauugaagaugacguccaccu

SEQ ID NO: 25649 - RNA, 22 nt, Artificial Sequence
  GATA2 Guide RNA
ugccuccagacgagguggacgu

SEQ ID NO: 25650 - RNA, 22 nt, Artificial Sequence
  GATA2 Guide RNA
ugcgagucgaggugauugaaga

SEQ ID NO: 25651 - RNA, 22 nt, Artificial Sequence
  GATA2 Guide RNA
uggacgucaucuucaaucaccu

SEQ ID NO: 25652 - RNA, 22 nt, Artificial Sequence
  GATA2 Guide RNA
uugaagaugacguccaccucgu

SEQ ID NO: 25653 - RNA, 20 nt, Artificial Sequence
  GATA2 Guide RNA
aagaagauguccaccucguc

SEQ ID NO: 25654 - RNA, 20 nt, Artificial Sequence
  GATA2 Guide RNA
aagauguccaccucgucugg

SEQ ID NO: 25655 - RNA, 20 nt, Artificial Sequence
  GATA2 Guide RNA
acaucuucuucaaucaccuc

SEQ ID NO: 25656 - RNA, 20 nt, Artificial Sequence
  GATA2 Guide RNA
acgagguggacaucuucuuc

SEQ ID NO: 25657 - RNA, 20 nt, Artificial Sequence
  GATA2 Guide RNA
agaagauguccaccucgucu

SEQ ID NO: 25658 - RNA, 20 nt, Artificial Sequence
  GATA2 Guide RNA
agacgagguggacaucuucu

SEQ ID NO: 25659 - RNA, 20 nt, Artificial Sequence
  GATA2 Guide RNA
agauguccaccucgucugga

SEQ ID NO: 25660 - RNA, 20 nt, Artificial Sequence
  GATA2 Guide RNA
aggugauugaagaagauguc

SEQ ID NO: 25661 - RNA, 20 nt, Artificial Sequence
  GATA2 Guide RNA
agguggacaucuucuucaau

SEQ ID NO: 25662 - RNA, 20 nt, Artificial Sequence
  GATA2 Guide RNA
agucgaggugauugaagaag

SEQ ID NO: 25663 - RNA, 20 nt, Artificial Sequence
  GATA2 Guide RNA
auguccaccucgucuggagg

SEQ ID NO: 25664 - RNA, 20 nt, Artificial Sequence
  GATA2 Guide RNA
auugaagaagauguccaccu

SEQ ID NO: 25665 - RNA, 20 nt, Artificial Sequence
  GATA2 Guide RNA
cagacgagguggacaucuuc

SEQ ID NO: 25666 - RNA, 20 nt, Artificial Sequence
  GATA2 Guide RNA
caucuucuucaaucaccucg

SEQ ID NO: 25667 - RNA, 20 nt, Artificial Sequence
  GATA2 Guide RNA
ccagacgagguggacaucuu

SEQ ID NO: 25668 - RNA, 20 nt, Artificial Sequence
  GATA2 Guide RNA
ccuccagacgagguggacau

SEQ ID NO: 25669 - RNA, 20 nt, Artificial Sequence
  GATA2 Guide RNA
cgaggugauugaagaagaug

SEQ ID NO: 25670 - RNA, 20 nt, Artificial Sequence
  GATA2 Guide RNA
cgagguggacaucuucuuca

SEQ ID NO: 25671 - RNA, 20 nt, Artificial Sequence
  GATA2 Guide RNA
cuccagacgagguggacauc

SEQ ID NO: 25672 - RNA, 20 nt, Artificial Sequence
  GATA2 Guide RNA
cugccuccagacgaggugga

SEQ ID NO: 25673 - RNA, 20 nt, Artificial Sequence
  GATA2 Guide RNA
gaagaagauguccaccucgu

SEQ ID NO: 25674 - RNA, 20 nt, Artificial Sequence
  GATA2 Guide RNA
gaagauguccaccucgucug

SEQ ID NO: 25675 - RNA, 20 nt, Artificial Sequence
  GATA2 Guide RNA
gacaucuucuucaaucaccu

SEQ ID NO: 25676 - RNA, 20 nt, Artificial Sequence
  GATA2 Guide RNA
gacgagguggacaucuucuu

SEQ ID NO: 25677 - RNA, 20 nt, Artificial Sequence
  GATA2 Guide RNA
gaggugauugaagaagaugu

SEQ ID NO: 25678 - RNA, 20 nt, Artificial Sequence
  GATA2 Guide RNA
gagguggacaucuucuucaa

SEQ ID NO: 25679 - RNA, 20 nt, Artificial Sequence
  GATA2 Guide RNA
gagucgaggugauugaagaa

SEQ ID NO: 25680 - RNA, 20 nt, Artificial Sequence
  GATA2 Guide RNA
gauguccaccucgucuggag

SEQ ID NO: 25681 - RNA, 20 nt, Artificial Sequence
  GATA2 Guide RNA
gauugaagaagauguccacc

SEQ ID NO: 25682 - RNA, 20 nt, Artificial Sequence
  GATA2 Guide RNA
gccuccagacgagguggaca

SEQ ID NO: 25683 - RNA, 20 nt, Artificial Sequence
  GATA2 Guide RNA
gcugccuccagacgaggugg

SEQ ID NO: 25684 - RNA, 20 nt, Artificial Sequence
  GATA2 Guide RNA
ggacaucuucuucaaucacc

SEQ ID NO: 25685 - RNA, 20 nt, Artificial Sequence
  GATA2 Guide RNA
ggugauugaagaagaugucc

SEQ ID NO: 25686 - RNA, 20 nt, Artificial Sequence
  GATA2 Guide RNA
gguggacaucuucuucaauc

SEQ ID NO: 25687 - RNA, 20 nt, Artificial Sequence
  GATA2 Guide RNA
gucgaggugauugaagaaga

SEQ ID NO: 25688 - RNA, 20 nt, Artificial Sequence
  GATA2 Guide RNA
gugauugaagaagaugucca

SEQ ID NO: 25689 - RNA, 20 nt, Artificial Sequence
  GATA2 Guide RNA
guggacaucuucuucaauca

SEQ ID NO: 25690 - RNA, 20 nt, Artificial Sequence
  GATA2 Guide RNA
uccagacgagguggacaucu

SEQ ID NO: 25691 - RNA, 20 nt, Artificial Sequence
  GATA2 Guide RNA
ucgaggugauugaagaagau

SEQ ID NO: 25692 - RNA, 20 nt, Artificial Sequence
  GATA2 Guide RNA
ugaagaagauguccaccucg

SEQ ID NO: 25693 - RNA, 20 nt, Artificial Sequence
  GATA2 Guide RNA
ugauugaagaagauguccac

SEQ ID NO: 25694 - RNA, 20 nt, Artificial Sequence
  GATA2 Guide RNA
ugcugccuccagacgaggug

SEQ ID NO: 25695 - RNA, 20 nt, Artificial Sequence
  GATA2 Guide RNA
uggacaucuucuucaaucac

SEQ ID NO: 25696 - RNA, 20 nt, Artificial Sequence
  GATA2 Guide RNA
uguccaccucgucuggaggc

SEQ ID NO: 25697 - RNA, 20 nt, Artificial Sequence
  GATA2 Guide RNA
uugaagaagauguccaccuc

SEQ ID NO: 25698 - RNA, 21 nt, Artificial Sequence
  GATA2 Guide RNA
aagaagauguccaccucgucu

SEQ ID NO: 25699 - RNA, 21 nt, Artificial Sequence
  GATA2 Guide RNA
aagauguccaccucgucugga

SEQ ID NO: 25700 - RNA, 21 nt, Artificial Sequence
  GATA2 Guide RNA
acaucuucuucaaucaccucg

SEQ ID NO: 25701 - RNA, 21 nt, Artificial Sequence
  GATA2 Guide RNA
acgagguggacaucuucuuca

SEQ ID NO: 25702 - RNA, 21 nt, Artificial Sequence
  GATA2 Guide RNA
agaagauguccaccucgucug

SEQ ID NO: 25703 - RNA, 21 nt, Artificial Sequence
  GATA2 Guide RNA
agacgagguggacaucuucuu

SEQ ID NO: 25704 - RNA, 21 nt, Artificial Sequence
  GATA2 Guide RNA
agauguccaccucgucuggag

SEQ ID NO: 25705 - RNA, 21 nt, Artificial Sequence
  GATA2 Guide RNA
aggugauugaagaagaugucc

SEQ ID NO: 25706 - RNA, 21 nt, Artificial Sequence
  GATA2 Guide RNA
agguggacaucuucuucaauc

SEQ ID NO: 25707 - RNA, 21 nt, Artificial Sequence
  GATA2 Guide RNA
agucgaggugauugaagaaga

SEQ ID NO: 25708 - RNA, 21 nt, Artificial Sequence
  GATA2 Guide RNA
auguccaccucgucuggaggc

SEQ ID NO: 25709 - RNA, 21 nt, Artificial Sequence
  GATA2 Guide RNA
auugaagaagauguccaccuc

SEQ ID NO: 25710 - RNA, 21 nt, Artificial Sequence
  GATA2 Guide RNA
cagacgagguggacaucuucu

SEQ ID NO: 25711 - RNA, 21 nt, Artificial Sequence
  GATA2 Guide RNA
caucuucuucaaucaccucga

SEQ ID NO: 25712 - RNA, 21 nt, Artificial Sequence
  GATA2 Guide RNA
ccagacgagguggacaucuuc

SEQ ID NO: 25713 - RNA, 21 nt, Artificial Sequence
  GATA2 Guide RNA
ccuccagacgagguggacauc

SEQ ID NO: 25714 - RNA, 21 nt, Artificial Sequence
  GATA2 Guide RNA
cgaggugauugaagaagaugu

SEQ ID NO: 25715 - RNA, 21 nt, Artificial Sequence
  GATA2 Guide RNA
cgagguggacaucuucuucaa

SEQ ID NO: 25716 - RNA, 21 nt, Artificial Sequence
  GATA2 Guide RNA
cgagucgaggugauugaagaa

SEQ ID NO: 25717 - RNA, 21 nt, Artificial Sequence
  GATA2 Guide RNA
cuccagacgagguggacaucu

SEQ ID NO: 25718 - RNA, 21 nt, Artificial Sequence
  GATA2 Guide RNA
cugcugccuccagacgaggug

SEQ ID NO: 25719 - RNA, 21 nt, Artificial Sequence
  GATA2 Guide RNA
gaagaagauguccaccucguc

SEQ ID NO: 25720 - RNA, 21 nt, Artificial Sequence
  GATA2 Guide RNA
gaagauguccaccucgucugg

SEQ ID NO: 25721 - RNA, 21 nt, Artificial Sequence
  GATA2 Guide RNA
gacaucuucuucaaucaccuc

SEQ ID NO: 25722 - RNA, 21 nt, Artificial Sequence
  GATA2 Guide RNA
gacgagguggacaucuucuuc

SEQ ID NO: 25723 - RNA, 21 nt, Artificial Sequence
  GATA2 Guide RNA
gaggugauugaagaagauguc

SEQ ID NO: 25724 - RNA, 21 nt, Artificial Sequence
  GATA2 Guide RNA
gagguggacaucuucuucaau

SEQ ID NO: 25725 - RNA, 21 nt, Artificial Sequence
  GATA2 Guide RNA
gagucgaggugauugaagaag

SEQ ID NO: 25726 - RNA, 21 nt, Artificial Sequence
  GATA2 Guide RNA
gauguccaccucgucuggagg

SEQ ID NO: 25727 - RNA, 21 nt, Artificial Sequence
  GATA2 Guide RNA
gauugaagaagauguccaccu

SEQ ID NO: 25728 - RNA, 21 nt, Artificial Sequence
  GATA2 Guide RNA
gccuccagacgagguggacau

SEQ ID NO: 25729 - RNA, 21 nt, Artificial Sequence
  GATA2 Guide RNA
gcugccuccagacgaggugga

SEQ ID NO: 25730 - RNA, 21 nt, Artificial Sequence
  GATA2 Guide RNA
ggacaucuucuucaaucaccu

SEQ ID NO: 25731 - RNA, 21 nt, Artificial Sequence
  GATA2 Guide RNA
ggugauugaagaagaugucca

SEQ ID NO: 25732 - RNA, 21 nt, Artificial Sequence
  GATA2 Guide RNA
gguggacaucuucuucaauca

SEQ ID NO: 25733 - RNA, 21 nt, Artificial Sequence
  GATA2 Guide RNA
gucgaggugauugaagaagau

SEQ ID NO: 25734 - RNA, 21 nt, Artificial Sequence
  GATA2 Guide RNA
gugauugaagaagauguccac

SEQ ID NO: 25735 - RNA, 21 nt, Artificial Sequence
  GATA2 Guide RNA
guggacaucuucuucaaucac

SEQ ID NO: 25736 - RNA, 21 nt, Artificial Sequence
  GATA2 Guide RNA
uccagacgagguggacaucuu

SEQ ID NO: 25737 - RNA, 21 nt, Artificial Sequence
  GATA2 Guide RNA
ucgaggugauugaagaagaug

SEQ ID NO: 25738 - RNA, 21 nt, Artificial Sequence
  GATA2 Guide RNA
ugaagaagauguccaccucgu

SEQ ID NO: 25739 - RNA, 21 nt, Artificial Sequence
  GATA2 Guide RNA
ugauugaagaagauguccacc

SEQ ID NO: 25740 - RNA, 21 nt, Artificial Sequence
  GATA2 Guide RNA
ugccuccagacgagguggaca

SEQ ID NO: 25741 - RNA, 21 nt, Artificial Sequence
  GATA2 Guide RNA
ugcugccuccagacgaggugg

SEQ ID NO: 25742 - RNA, 21 nt, Artificial Sequence
  GATA2 Guide RNA
uggacaucuucuucaaucacc

SEQ ID NO: 25743 - RNA, 21 nt, Artificial Sequence
  GATA2 Guide RNA
uguccaccucgucuggaggca

SEQ ID NO: 25744 - RNA, 21 nt, Artificial Sequence
  GATA2 Guide RNA
uugaagaagauguccaccucg

SEQ ID NO: 25745 - RNA, 22 nt, Artificial Sequence
  GATA2 Guide RNA
aagaagauguccaccucgucug

SEQ ID NO: 25746 - RNA, 22 nt, Artificial Sequence
  GATA2 Guide RNA
aagauguccaccucgucuggag

SEQ ID NO: 25747 - RNA, 22 nt, Artificial Sequence
  GATA2 Guide RNA
acaucuucuucaaucaccucga

SEQ ID NO: 25748 - RNA, 22 nt, Artificial Sequence
  GATA2 Guide RNA
acgagguggacaucuucuucaa

SEQ ID NO: 25749 - RNA, 22 nt, Artificial Sequence
  GATA2 Guide RNA
agaagauguccaccucgucugg

SEQ ID NO: 25750 - RNA, 22 nt, Artificial Sequence
  GATA2 Guide RNA
agacgagguggacaucuucuuc

SEQ ID NO: 25751 - RNA, 22 nt, Artificial Sequence
  GATA2 Guide RNA
agauguccaccucgucuggagg

SEQ ID NO: 25752 - RNA, 22 nt, Artificial Sequence
  GATA2 Guide RNA
aggugauugaagaagaugucca

SEQ ID NO: 25753 - RNA, 22 nt, Artificial Sequence
  GATA2 Guide RNA
agguggacaucuucuucaauca

SEQ ID NO: 25754 - RNA, 22 nt, Artificial Sequence
  GATA2 Guide RNA
agucgaggugauugaagaagau

SEQ ID NO: 25755 - RNA, 22 nt, Artificial Sequence
  GATA2 Guide RNA
auguccaccucgucuggaggca

SEQ ID NO: 25756 - RNA, 22 nt, Artificial Sequence
  GATA2 Guide RNA
auugaagaagauguccaccucg

SEQ ID NO: 25757 - RNA, 22 nt, Artificial Sequence
  GATA2 Guide RNA
cagacgagguggacaucuucuu

SEQ ID NO: 25758 - RNA, 22 nt, Artificial Sequence
  GATA2 Guide RNA
caucuucuucaaucaccucgac

SEQ ID NO: 25759 - RNA, 22 nt, Artificial Sequence
  GATA2 Guide RNA
ccagacgagguggacaucuucu

SEQ ID NO: 25760 - RNA, 22 nt, Artificial Sequence
  GATA2 Guide RNA
ccuccagacgagguggacaucu

SEQ ID NO: 25761 - RNA, 22 nt, Artificial Sequence
  GATA2 Guide RNA
cgaggugauugaagaagauguc

SEQ ID NO: 25762 - RNA, 22 nt, Artificial Sequence
  GATA2 Guide RNA
cgagguggacaucuucuucaau

SEQ ID NO: 25763 - RNA, 22 nt, Artificial Sequence
  GATA2 Guide RNA
cgagucgaggugauugaagaag

SEQ ID NO: 25764 - RNA, 22 nt, Artificial Sequence
  GATA2 Guide RNA
cuccagacgagguggacaucuu

SEQ ID NO: 25765 - RNA, 22 nt, Artificial Sequence
  GATA2 Guide RNA
cugccuccagacgagguggaca

SEQ ID NO: 25766 - RNA, 22 nt, Artificial Sequence
  GATA2 Guide RNA
cugcugccuccagacgaggugg

SEQ ID NO: 25767 - RNA, 22 nt, Artificial Sequence
  GATA2 Guide RNA
gaagaagauguccaccucgucu

SEQ ID NO: 25768 - RNA, 22 nt, Artificial Sequence
  GATA2 Guide RNA
gaagauguccaccucgucugga

SEQ ID NO: 25769 - RNA, 22 nt, Artificial Sequence
  GATA2 Guide RNA
gacaucuucuucaaucaccucg

SEQ ID NO: 25770 - RNA, 22 nt, Artificial Sequence
  GATA2 Guide RNA
gacgagguggacaucuucuuca

SEQ ID NO: 25771 - RNA, 22 nt, Artificial Sequence
  GATA2 Guide RNA
gaggugauugaagaagaugucc

SEQ ID NO: 25772 - RNA, 22 nt, Artificial Sequence
  GATA2 Guide RNA
gagguggacaucuucuucaauc

SEQ ID NO: 25773 - RNA, 22 nt, Artificial Sequence
  GATA2 Guide RNA
gagucgaggugauugaagaaga

SEQ ID NO: 25774 - RNA, 22 nt, Artificial Sequence
  GATA2 Guide RNA
gauguccaccucgucuggaggc

SEQ ID NO: 25775 - RNA, 22 nt, Artificial Sequence
  GATA2 Guide RNA
gauugaagaagauguccaccuc

SEQ ID NO: 25776 - RNA, 22 nt, Artificial Sequence
  GATA2 Guide RNA
gccuccagacgagguggacauc

SEQ ID NO: 25777 - RNA, 22 nt, Artificial Sequence
  GATA2 Guide RNA
gcgagucgaggugauugaagaa

SEQ ID NO: 25778 - RNA, 22 nt, Artificial Sequence
  GATA2 Guide RNA
gcugcugccuccagacgaggug

SEQ ID NO: 25779 - RNA, 22 nt, Artificial Sequence
  GATA2 Guide RNA
ggacaucuucuucaaucaccuc

SEQ ID NO: 25780 - RNA, 22 nt, Artificial Sequence
  GATA2 Guide RNA
ggugauugaagaagauguccac

SEQ ID NO: 25781 - RNA, 22 nt, Artificial Sequence
  GATA2 Guide RNA
gguggacaucuucuucaaucac

SEQ ID NO: 25782 - RNA, 22 nt, Artificial Sequence
  GATA2 Guide RNA
gucgaggugauugaagaagaug

SEQ ID NO: 25783 - RNA, 22 nt, Artificial Sequence
  GATA2 Guide RNA
gugauugaagaagauguccacc

SEQ ID NO: 25784 - RNA, 22 nt, Artificial Sequence
  GATA2 Guide RNA
guggacaucuucuucaaucacc

SEQ ID NO: 25785 - RNA, 22 nt, Artificial Sequence
  GATA2 Guide RNA
uccagacgagguggacaucuuc

SEQ ID NO: 25786 - RNA, 22 nt, Artificial Sequence
  GATA2 Guide RNA
ucgaggugauugaagaagaugu

SEQ ID NO: 25787 - RNA, 22 nt, Artificial Sequence
  GATA2 Guide RNA
ugaagaagauguccaccucguc

SEQ ID NO: 25788 - RNA, 22 nt, Artificial Sequence
  GATA2 Guide RNA
ugauugaagaagauguccaccu

SEQ ID NO: 25789 - RNA, 22 nt, Artificial Sequence
  GATA2 Guide RNA
ugccuccagacgagguggacau

SEQ ID NO: 25790 - RNA, 22 nt, Artificial Sequence
  GATA2 Guide RNA
ugcugccuccagacgaggugga

SEQ ID NO: 25791 - RNA, 22 nt, Artificial Sequence
  GATA2 Guide RNA
uggacaucuucuucaaucaccu

SEQ ID NO: 25792 - RNA, 22 nt, Artificial Sequence
  GATA2 Guide RNA
uguccaccucgucuggaggcag

SEQ ID NO: 25793 - RNA, 22 nt, Artificial Sequence
  GATA2 Guide RNA
uugaagaagauguccaccucgu

SEQ ID NO: 25794 - RNA, 20 nt, Artificial Sequence
  GATA2 Guide RNA
aagaagacguucaccucguc

SEQ ID NO: 25795 - RNA, 20 nt, Artificial Sequence
  GATA2 Guide RNA
aagacguucaccucgucugg

SEQ ID NO: 25796 - RNA, 20 nt, Artificial Sequence
  GATA2 Guide RNA
acgaggugaacgucuucuuc

SEQ ID NO: 25797 - RNA, 20 nt, Artificial Sequence
  GATA2 Guide RNA
acguucaccucgucuggagg

SEQ ID NO: 25798 - RNA, 20 nt, Artificial Sequence
  GATA2 Guide RNA
agaagacguucaccucgucu

SEQ ID NO: 25799 - RNA, 20 nt, Artificial Sequence
  GATA2 Guide RNA
agacgaggugaacgucuucu

SEQ ID NO: 25800 - RNA, 20 nt, Artificial Sequence
  GATA2 Guide RNA
agacguucaccucgucugga

SEQ ID NO: 25801 - RNA, 20 nt, Artificial Sequence
  GATA2 Guide RNA
agcugcugccuccagacgag

SEQ ID NO: 25802 - RNA, 20 nt, Artificial Sequence
  GATA2 Guide RNA
aggugaacgucuucuucaau

SEQ ID NO: 25803 - RNA, 20 nt, Artificial Sequence
  GATA2 Guide RNA
aggugauugaagaagacguu

SEQ ID NO: 25804 - RNA, 20 nt, Artificial Sequence
  GATA2 Guide RNA
auugaagaagacguucaccu

SEQ ID NO: 25805 - RNA, 20 nt, Artificial Sequence
  GATA2 Guide RNA
cagacgaggugaacgucuuc

SEQ ID NO: 25806 - RNA, 20 nt, Artificial Sequence
  GATA2 Guide RNA
ccagacgaggugaacgucuu

SEQ ID NO: 25807 - RNA, 20 nt, Artificial Sequence
  GATA2 Guide RNA
ccuccagacgaggugaacgu

SEQ ID NO: 25808 - RNA, 20 nt, Artificial Sequence
  GATA2 Guide RNA
cgaggugaacgucuucuuca

SEQ ID NO: 25809 - RNA, 20 nt, Artificial Sequence
  GATA2 Guide RNA
cgaggugauugaagaagacg

SEQ ID NO: 25810 - RNA, 20 nt, Artificial Sequence
  GATA2 Guide RNA
cguucaccucgucuggaggc

SEQ ID NO: 25811 - RNA, 20 nt, Artificial Sequence
  GATA2 Guide RNA
cuccagacgaggugaacguc

SEQ ID NO: 25812 - RNA, 20 nt, Artificial Sequence
  GATA2 Guide RNA
cugccuccagacgaggugaa

SEQ ID NO: 25813 - RNA, 20 nt, Artificial Sequence
  GATA2 Guide RNA
cugcugccuccagacgaggu

SEQ ID NO: 25814 - RNA, 20 nt, Artificial Sequence
  GATA2 Guide RNA
gaacgucuucuucaaucacc

SEQ ID NO: 25815 - RNA, 20 nt, Artificial Sequence
  GATA2 Guide RNA
gaagaagacguucaccucgu

SEQ ID NO: 25816 - RNA, 20 nt, Artificial Sequence
  GATA2 Guide RNA
gaagacguucaccucgucug

SEQ ID NO: 25817 - RNA, 20 nt, Artificial Sequence
  GATA2 Guide RNA
gacgaggugaacgucuucuu

SEQ ID NO: 25818 - RNA, 20 nt, Artificial Sequence
  GATA2 Guide RNA
gacguucaccucgucuggag

SEQ ID NO: 25819 - RNA, 20 nt, Artificial Sequence
  GATA2 Guide RNA
gaggugaacgucuucuucaa

SEQ ID NO: 25820 - RNA, 20 nt, Artificial Sequence
  GATA2 Guide RNA
gaggugauugaagaagacgu

SEQ ID NO: 25821 - RNA, 20 nt, Artificial Sequence
  GATA2 Guide RNA
gauugaagaagacguucacc

SEQ ID NO: 25822 - RNA, 20 nt, Artificial Sequence
  GATA2 Guide RNA
gccuccagacgaggugaacg

SEQ ID NO: 25823 - RNA, 20 nt, Artificial Sequence
  GATA2 Guide RNA
gcugccuccagacgagguga

SEQ ID NO: 25824 - RNA, 20 nt, Artificial Sequence
  GATA2 Guide RNA
gcugcugccuccagacgagg

SEQ ID NO: 25825 - RNA, 20 nt, Artificial Sequence
  GATA2 Guide RNA
ggugaacgucuucuucaauc

SEQ ID NO: 25826 - RNA, 20 nt, Artificial Sequence
  GATA2 Guide RNA
ggugauugaagaagacguuc

SEQ ID NO: 25827 - RNA, 20 nt, Artificial Sequence
  GATA2 Guide RNA
gugaacgucuucuucaauca

SEQ ID NO: 25828 - RNA, 20 nt, Artificial Sequence
  GATA2 Guide RNA
gugauugaagaagacguuca

SEQ ID NO: 25829 - RNA, 20 nt, Artificial Sequence
  GATA2 Guide RNA
guucaccucgucuggaggca

SEQ ID NO: 25830 - RNA, 20 nt, Artificial Sequence
  GATA2 Guide RNA
ucaccucgucuggaggcagc

SEQ ID NO: 25831 - RNA, 20 nt, Artificial Sequence
  GATA2 Guide RNA
uccagacgaggugaacgucu

SEQ ID NO: 25832 - RNA, 20 nt, Artificial Sequence
  GATA2 Guide RNA
ucgaggugauugaagaagac

SEQ ID NO: 25833 - RNA, 20 nt, Artificial Sequence
  GATA2 Guide RNA
ugaacgucuucuucaaucac

SEQ ID NO: 25834 - RNA, 20 nt, Artificial Sequence
  GATA2 Guide RNA
ugaagaagacguucaccucg

SEQ ID NO: 25835 - RNA, 20 nt, Artificial Sequence
  GATA2 Guide RNA
ugauugaagaagacguucac

SEQ ID NO: 25836 - RNA, 20 nt, Artificial Sequence
  GATA2 Guide RNA
ugccuccagacgaggugaac

SEQ ID NO: 25837 - RNA, 20 nt, Artificial Sequence
  GATA2 Guide RNA
uucaccucgucuggaggcag

SEQ ID NO: 25838 - RNA, 20 nt, Artificial Sequence
  GATA2 Guide RNA
uugaagaagacguucaccuc

SEQ ID NO: 25839 - RNA, 21 nt, Artificial Sequence
  GATA2 Guide RNA
aagaagacguucaccucgucu

SEQ ID NO: 25840 - RNA, 21 nt, Artificial Sequence
  GATA2 Guide RNA
aagacguucaccucgucugga

SEQ ID NO: 25841 - RNA, 21 nt, Artificial Sequence
  GATA2 Guide RNA
acgaggugaacgucuucuuca

SEQ ID NO: 25842 - RNA, 21 nt, Artificial Sequence
  GATA2 Guide RNA
acguucaccucgucuggaggc

SEQ ID NO: 25843 - RNA, 21 nt, Artificial Sequence
  GATA2 Guide RNA
agaagacguucaccucgucug

SEQ ID NO: 25844 - RNA, 21 nt, Artificial Sequence
  GATA2 Guide RNA
agacgaggugaacgucuucuu

SEQ ID NO: 25845 - RNA, 21 nt, Artificial Sequence
  GATA2 Guide RNA
agacguucaccucgucuggag

SEQ ID NO: 25846 - RNA, 21 nt, Artificial Sequence
  GATA2 Guide RNA
agcugcugccuccagacgagg

SEQ ID NO: 25847 - RNA, 21 nt, Artificial Sequence
  GATA2 Guide RNA
aggugaacgucuucuucaauc

SEQ ID NO: 25848 - RNA, 21 nt, Artificial Sequence
  GATA2 Guide RNA
aggugauugaagaagacguuc

SEQ ID NO: 25849 - RNA, 21 nt, Artificial Sequence
  GATA2 Guide RNA
auugaagaagacguucaccuc

SEQ ID NO: 25850 - RNA, 21 nt, Artificial Sequence
  GATA2 Guide RNA
cagacgaggugaacgucuucu

SEQ ID NO: 25851 - RNA, 21 nt, Artificial Sequence
  GATA2 Guide RNA
cagcugcugccuccagacgag

SEQ ID NO: 25852 - RNA, 21 nt, Artificial Sequence
  GATA2 Guide RNA
ccagacgaggugaacgucuuc

SEQ ID NO: 25853 - RNA, 21 nt, Artificial Sequence
  GATA2 Guide RNA
ccuccagacgaggugaacguc

SEQ ID NO: 25854 - RNA, 21 nt, Artificial Sequence
  GATA2 Guide RNA
cgaggugaacgucuucuucaa

SEQ ID NO: 25855 - RNA, 21 nt, Artificial Sequence
  GATA2 Guide RNA
cgaggugauugaagaagacgu

SEQ ID NO: 25856 - RNA, 21 nt, Artificial Sequence
  GATA2 Guide RNA
cguucaccucgucuggaggca

SEQ ID NO: 25857 - RNA, 21 nt, Artificial Sequence
  GATA2 Guide RNA
cuccagacgaggugaacgucu

SEQ ID NO: 25858 - RNA, 21 nt, Artificial Sequence
  GATA2 Guide RNA
cugccuccagacgaggugaac

SEQ ID NO: 25859 - RNA, 21 nt, Artificial Sequence
  GATA2 Guide RNA
gaacgucuucuucaaucaccu

SEQ ID NO: 25860 - RNA, 21 nt, Artificial Sequence
  GATA2 Guide RNA
gaagaagacguucaccucguc

SEQ ID NO: 25861 - RNA, 21 nt, Artificial Sequence
  GATA2 Guide RNA
gaagacguucaccucgucugg

SEQ ID NO: 25862 - RNA, 21 nt, Artificial Sequence
  GATA2 Guide RNA
gacgaggugaacgucuucuuc

SEQ ID NO: 25863 - RNA, 21 nt, Artificial Sequence
  GATA2 Guide RNA
gacguucaccucgucuggagg

SEQ ID NO: 25864 - RNA, 21 nt, Artificial Sequence
  GATA2 Guide RNA
gaggugaacgucuucuucaau

SEQ ID NO: 25865 - RNA, 21 nt, Artificial Sequence
  GATA2 Guide RNA
gaggugauugaagaagacguu

SEQ ID NO: 25866 - RNA, 21 nt, Artificial Sequence
  GATA2 Guide RNA
gauugaagaagacguucaccu

SEQ ID NO: 25867 - RNA, 21 nt, Artificial Sequence
  GATA2 Guide RNA
gccuccagacgaggugaacgu

SEQ ID NO: 25868 - RNA, 21 nt, Artificial Sequence
  GATA2 Guide RNA
gcugccuccagacgaggugaa

SEQ ID NO: 25869 - RNA, 21 nt, Artificial Sequence
  GATA2 Guide RNA
gcugcugccuccagacgaggu

SEQ ID NO: 25870 - RNA, 21 nt, Artificial Sequence
  GATA2 Guide RNA
ggugaacgucuucuucaauca

SEQ ID NO: 25871 - RNA, 21 nt, Artificial Sequence
  GATA2 Guide RNA
ggugauugaagaagacguuca

SEQ ID NO: 25872 - RNA, 21 nt, Artificial Sequence
  GATA2 Guide RNA
gucgaggugauugaagaagac

SEQ ID NO: 25873 - RNA, 21 nt, Artificial Sequence
  GATA2 Guide RNA
gugaacgucuucuucaaucac

SEQ ID NO: 25874 - RNA, 21 nt, Artificial Sequence
  GATA2 Guide RNA
gugauugaagaagacguucac

SEQ ID NO: 25875 - RNA, 21 nt, Artificial Sequence
  GATA2 Guide RNA
guucaccucgucuggaggcag

SEQ ID NO: 25876 - RNA, 21 nt, Artificial Sequence
  GATA2 Guide RNA
ucaccucgucuggaggcagca

SEQ ID NO: 25877 - RNA, 21 nt, Artificial Sequence
  GATA2 Guide RNA
uccagacgaggugaacgucuu

SEQ ID NO: 25878 - RNA, 21 nt, Artificial Sequence
  GATA2 Guide RNA
ucgaggugauugaagaagacg

SEQ ID NO: 25879 - RNA, 21 nt, Artificial Sequence
  GATA2 Guide RNA
ugaacgucuucuucaaucacc

SEQ ID NO: 25880 - RNA, 21 nt, Artificial Sequence
  GATA2 Guide RNA
ugaagaagacguucaccucgu

SEQ ID NO: 25881 - RNA, 21 nt, Artificial Sequence
  GATA2 Guide RNA
ugauugaagaagacguucacc

SEQ ID NO: 25882 - RNA, 21 nt, Artificial Sequence
  GATA2 Guide RNA
ugccuccagacgaggugaacg

SEQ ID NO: 25883 - RNA, 21 nt, Artificial Sequence
  GATA2 Guide RNA
ugcugccuccagacgagguga

SEQ ID NO: 25884 - RNA, 21 nt, Artificial Sequence
  GATA2 Guide RNA
uucaccucgucuggaggcagc

SEQ ID NO: 25885 - RNA, 21 nt, Artificial Sequence
  GATA2 Guide RNA
uugaagaagacguucaccucg

SEQ ID NO: 25886 - RNA, 22 nt, Artificial Sequence
  GATA2 Guide RNA
aagaagacguucaccucgucug

SEQ ID NO: 25887 - RNA, 22 nt, Artificial Sequence
  GATA2 Guide RNA
aagacguucaccucgucuggag

SEQ ID NO: 25888 - RNA, 22 nt, Artificial Sequence
  GATA2 Guide RNA
acgaggugaacgucuucuucaa

SEQ ID NO: 25889 - RNA, 22 nt, Artificial Sequence
  GATA2 Guide RNA
acguucaccucgucuggaggca

SEQ ID NO: 25890 - RNA, 22 nt, Artificial Sequence
  GATA2 Guide RNA
agaagacguucaccucgucugg

SEQ ID NO: 25891 - RNA, 22 nt, Artificial Sequence
  GATA2 Guide RNA
agacgaggugaacgucuucuuc

SEQ ID NO: 25892 - RNA, 22 nt, Artificial Sequence
  GATA2 Guide RNA
agacguucaccucgucuggagg

SEQ ID NO: 25893 - RNA, 22 nt, Artificial Sequence
  GATA2 Guide RNA
agcugcugccuccagacgaggu

SEQ ID NO: 25894 - RNA, 22 nt, Artificial Sequence
  GATA2 Guide RNA
aggugaacgucuucuucaauca

SEQ ID NO: 25895 - RNA, 22 nt, Artificial Sequence
  GATA2 Guide RNA
aggugauugaagaagacguuca

SEQ ID NO: 25896 - RNA, 22 nt, Artificial Sequence
  GATA2 Guide RNA
agucgaggugauugaagaagac

SEQ ID NO: 25897 - RNA, 22 nt, Artificial Sequence
  GATA2 Guide RNA
auugaagaagacguucaccucg

SEQ ID NO: 25898 - RNA, 22 nt, Artificial Sequence
  GATA2 Guide RNA
cagacgaggugaacgucuucuu

SEQ ID NO: 25899 - RNA, 22 nt, Artificial Sequence
  GATA2 Guide RNA
cagcugcugccuccagacgagg

SEQ ID NO: 25900 - RNA, 22 nt, Artificial Sequence
  GATA2 Guide RNA
ccagacgaggugaacgucuucu

SEQ ID NO: 25901 - RNA, 22 nt, Artificial Sequence
  GATA2 Guide RNA
ccuccagacgaggugaacgucu

SEQ ID NO: 25902 - RNA, 22 nt, Artificial Sequence
  GATA2 Guide RNA
cgaggugaacgucuucuucaau

SEQ ID NO: 25903 - RNA, 22 nt, Artificial Sequence
  GATA2 Guide RNA
cgaggugauugaagaagacguu

SEQ ID NO: 25904 - RNA, 22 nt, Artificial Sequence
  GATA2 Guide RNA
cguucaccucgucuggaggcag

SEQ ID NO: 25905 - RNA, 22 nt, Artificial Sequence
  GATA2 Guide RNA
cuccagacgaggugaacgucuu

SEQ ID NO: 25906 - RNA, 22 nt, Artificial Sequence
  GATA2 Guide RNA
cugccuccagacgaggugaacg

SEQ ID NO: 25907 - RNA, 22 nt, Artificial Sequence
  GATA2 Guide RNA
cugcugccuccagacgagguga

SEQ ID NO: 25908 - RNA, 22 nt, Artificial Sequence
  GATA2 Guide RNA
gaacgucuucuucaaucaccuc

SEQ ID NO: 25909 - RNA, 22 nt, Artificial Sequence
  GATA2 Guide RNA
gaagaagacguucaccucgucu

SEQ ID NO: 25910 - RNA, 22 nt, Artificial Sequence
  GATA2 Guide RNA
gaagacguucaccucgucugga

SEQ ID NO: 25911 - RNA, 22 nt, Artificial Sequence
  GATA2 Guide RNA
gacgaggugaacgucuucuuca

SEQ ID NO: 25912 - RNA, 22 nt, Artificial Sequence
  GATA2 Guide RNA
gacguucaccucgucuggaggc

SEQ ID NO: 25913 - RNA, 22 nt, Artificial Sequence
  GATA2 Guide RNA
gaggugaacgucuucuucaauc

SEQ ID NO: 25914 - RNA, 22 nt, Artificial Sequence
  GATA2 Guide RNA
gaggugauugaagaagacguuc

SEQ ID NO: 25915 - RNA, 22 nt, Artificial Sequence
  GATA2 Guide RNA
gauugaagaagacguucaccuc

SEQ ID NO: 25916 - RNA, 22 nt, Artificial Sequence
  GATA2 Guide RNA
gcagcugcugccuccagacgag

SEQ ID NO: 25917 - RNA, 22 nt, Artificial Sequence
  GATA2 Guide RNA
gccuccagacgaggugaacguc

SEQ ID NO: 25918 - RNA, 22 nt, Artificial Sequence
  GATA2 Guide RNA
gcugccuccagacgaggugaac

SEQ ID NO: 25919 - RNA, 22 nt, Artificial Sequence
  GATA2 Guide RNA
ggugaacgucuucuucaaucac

SEQ ID NO: 25920 - RNA, 22 nt, Artificial Sequence
  GATA2 Guide RNA
ggugauugaagaagacguucac

SEQ ID NO: 25921 - RNA, 22 nt, Artificial Sequence
  GATA2 Guide RNA
gucgaggugauugaagaagacg

SEQ ID NO: 25922 - RNA, 22 nt, Artificial Sequence
  GATA2 Guide RNA
gugaacgucuucuucaaucacc

SEQ ID NO: 25923 - RNA, 22 nt, Artificial Sequence
  GATA2 Guide RNA
gugauugaagaagacguucacc

SEQ ID NO: 25924 - RNA, 22 nt, Artificial Sequence
  GATA2 Guide RNA
guucaccucgucuggaggcagc

SEQ ID NO: 25925 - RNA, 22 nt, Artificial Sequence
  GATA2 Guide RNA
ucaccucgucuggaggcagcag

SEQ ID NO: 25926 - RNA, 22 nt, Artificial Sequence
  GATA2 Guide RNA
uccagacgaggugaacgucuuc

SEQ ID NO: 25927 - RNA, 22 nt, Artificial Sequence
  GATA2 Guide RNA
ucgaggugauugaagaagacgu

SEQ ID NO: 25928 - RNA, 22 nt, Artificial Sequence
  GATA2 Guide RNA
ugaacgucuucuucaaucaccu

SEQ ID NO: 25929 - RNA, 22 nt, Artificial Sequence
  GATA2 Guide RNA
ugaagaagacguucaccucguc

SEQ ID NO: 25930 - RNA, 22 nt, Artificial Sequence
  GATA2 Guide RNA
ugauugaagaagacguucaccu

SEQ ID NO: 25931 - RNA, 22 nt, Artificial Sequence
  GATA2 Guide RNA
ugccuccagacgaggugaacgu

SEQ ID NO: 25932 - RNA, 22 nt, Artificial Sequence
  GATA2 Guide RNA
ugcugccuccagacgaggugaa

SEQ ID NO: 25933 - RNA, 22 nt, Artificial Sequence
  GATA2 Guide RNA
uucaccucgucuggaggcagca

SEQ ID NO: 25934 - RNA, 22 nt, Artificial Sequence
  GATA2 Guide RNA
uugaagaagacguucaccucgu

SEQ ID NO: 25935 - RNA, 20 nt, Artificial Sequence
  GATA2 Guide RNA
aacccgcgcagcugcuggcu

SEQ ID NO: 25936 - RNA, 20 nt, Artificial Sequence
  GATA2 Guide RNA
aagacguccaccucgucugg

SEQ ID NO: 25937 - RNA, 20 nt, Artificial Sequence
  GATA2 Guide RNA
acauggaacccgcgcagcug

SEQ ID NO: 25938 - RNA, 20 nt, Artificial Sequence
  GATA2 Guide RNA
acccgcgcagcugcuggcuc

SEQ ID NO: 25939 - RNA, 20 nt, Artificial Sequence
  GATA2 Guide RNA
accucgucuggagccagcag

SEQ ID NO: 25940 - RNA, 20 nt, Artificial Sequence
  GATA2 Guide RNA
acguccaccucgucuggagc

SEQ ID NO: 25941 - RNA, 20 nt, Artificial Sequence
  GATA2 Guide RNA
agacguccaccucgucugga

SEQ ID NO: 25942 - RNA, 20 nt, Artificial Sequence
  GATA2 Guide RNA
agccagcagcugcgcggguu

SEQ ID NO: 25943 - RNA, 20 nt, Artificial Sequence
  GATA2 Guide RNA
agcugcuggcuccagacgag

SEQ ID NO: 25944 - RNA, 20 nt, Artificial Sequence
  GATA2 Guide RNA
auggaacccgcgcagcugcu

SEQ ID NO: 25945 - RNA, 20 nt, Artificial Sequence
  GATA2 Guide RNA
caccucgucuggagccagca

SEQ ID NO: 25946 - RNA, 20 nt, Artificial Sequence
  GATA2 Guide RNA
cagcugcuggcuccagacga

SEQ ID NO: 25947 - RNA, 20 nt, Artificial Sequence
  GATA2 Guide RNA
cauggaacccgcgcagcugc

SEQ ID NO: 25948 - RNA, 20 nt, Artificial Sequence
  GATA2 Guide RNA
ccaccucgucuggagccagc

SEQ ID NO: 25949 - RNA, 20 nt, Artificial Sequence
  GATA2 Guide RNA
ccagcagcugcgcggguucc

SEQ ID NO: 25950 - RNA, 20 nt, Artificial Sequence
  GATA2 Guide RNA
cccgcgcagcugcuggcucc

SEQ ID NO: 25951 - RNA, 20 nt, Artificial Sequence
  GATA2 Guide RNA
ccgcgcagcugcuggcucca

SEQ ID NO: 25952 - RNA, 20 nt, Artificial Sequence
  GATA2 Guide RNA
ccucgucuggagccagcagc

SEQ ID NO: 25953 - RNA, 20 nt, Artificial Sequence
  GATA2 Guide RNA
cgcagcugcuggcuccagac

SEQ ID NO: 25954 - RNA, 20 nt, Artificial Sequence
  GATA2 Guide RNA
cgcgcagcugcuggcuccag

SEQ ID NO: 25955 - RNA, 20 nt, Artificial Sequence
  GATA2 Guide RNA
cguccaccucgucuggagcc

SEQ ID NO: 25956 - RNA, 20 nt, Artificial Sequence
  GATA2 Guide RNA
cgucuggagccagcagcugc

SEQ ID NO: 25957 - RNA, 20 nt, Artificial Sequence
  GATA2 Guide RNA
cucgucuggagccagcagcu

SEQ ID NO: 25958 - RNA, 20 nt, Artificial Sequence
  GATA2 Guide RNA
cugcuggcuccagacgaggu

SEQ ID NO: 25959 - RNA, 20 nt, Artificial Sequence
  GATA2 Guide RNA
cuggagccagcagcugcgcg

SEQ ID NO: 25960 - RNA, 20 nt, Artificial Sequence
  GATA2 Guide RNA
cuggcuccagacgaggugga

SEQ ID NO: 25961 - RNA, 20 nt, Artificial Sequence
  GATA2 Guide RNA
gaacccgcgcagcugcuggc

SEQ ID NO: 25962 - RNA, 20 nt, Artificial Sequence
  GATA2 Guide RNA
gacguccaccucgucuggag

SEQ ID NO: 25963 - RNA, 20 nt, Artificial Sequence
  GATA2 Guide RNA
gagccagcagcugcgcgggu

SEQ ID NO: 25964 - RNA, 20 nt, Artificial Sequence
  GATA2 Guide RNA
gcagcugcuggcuccagacg

SEQ ID NO: 25965 - RNA, 20 nt, Artificial Sequence
  GATA2 Guide RNA
gccagcagcugcgcggguuc

SEQ ID NO: 25966 - RNA, 20 nt, Artificial Sequence
  GATA2 Guide RNA
gcgcagcugcuggcuccaga

SEQ ID NO: 25967 - RNA, 20 nt, Artificial Sequence
  GATA2 Guide RNA
gcugcuggcuccagacgagg

SEQ ID NO: 25968 - RNA, 20 nt, Artificial Sequence
  GATA2 Guide RNA
gcuggcuccagacgaggugg

SEQ ID NO: 25969 - RNA, 20 nt, Artificial Sequence
  GATA2 Guide RNA
ggaacccgcgcagcugcugg

SEQ ID NO: 25970 - RNA, 20 nt, Artificial Sequence
  GATA2 Guide RNA
ggagccagcagcugcgcggg

SEQ ID NO: 25971 - RNA, 20 nt, Artificial Sequence
  GATA2 Guide RNA
ggcuccagacgagguggacg

SEQ ID NO: 25972 - RNA, 20 nt, Artificial Sequence
  GATA2 Guide RNA
guccaccucgucuggagcca

SEQ ID NO: 25973 - RNA, 20 nt, Artificial Sequence
  GATA2 Guide RNA
gucuggagccagcagcugcg

SEQ ID NO: 25974 - RNA, 20 nt, Artificial Sequence
  GATA2 Guide RNA
uccaccucgucuggagccag

SEQ ID NO: 25975 - RNA, 20 nt, Artificial Sequence
  GATA2 Guide RNA
ucgucuggagccagcagcug

SEQ ID NO: 25976 - RNA, 20 nt, Artificial Sequence
  GATA2 Guide RNA
ucuggagccagcagcugcgc

SEQ ID NO: 25977 - RNA, 20 nt, Artificial Sequence
  GATA2 Guide RNA
ugcuggcuccagacgaggug

SEQ ID NO: 25978 - RNA, 20 nt, Artificial Sequence
  GATA2 Guide RNA
uggaacccgcgcagcugcug

SEQ ID NO: 25979 - RNA, 20 nt, Artificial Sequence
  GATA2 Guide RNA
uggagccagcagcugcgcgg

SEQ ID NO: 25980 - RNA, 20 nt, Artificial Sequence
  GATA2 Guide RNA
uggcuccagacgagguggac

SEQ ID NO: 25981 - RNA, 21 nt, Artificial Sequence
  GATA2 Guide RNA
aacccgcgcagcugcuggcuc

SEQ ID NO: 25982 - RNA, 21 nt, Artificial Sequence
  GATA2 Guide RNA
aagacguccaccucgucugga

SEQ ID NO: 25983 - RNA, 21 nt, Artificial Sequence
  GATA2 Guide RNA
acauggaacccgcgcagcugc

SEQ ID NO: 25984 - RNA, 21 nt, Artificial Sequence
  GATA2 Guide RNA
acccgcgcagcugcuggcucc

SEQ ID NO: 25985 - RNA, 21 nt, Artificial Sequence
  GATA2 Guide RNA
accucgucuggagccagcagc

SEQ ID NO: 25986 - RNA, 21 nt, Artificial Sequence
  GATA2 Guide RNA
acguccaccucgucuggagcc

SEQ ID NO: 25987 - RNA, 21 nt, Artificial Sequence
  GATA2 Guide RNA
agacguccaccucgucuggag

SEQ ID NO: 25988 - RNA, 21 nt, Artificial Sequence
  GATA2 Guide RNA
agccagcagcugcgcggguuc

SEQ ID NO: 25989 - RNA, 21 nt, Artificial Sequence
  GATA2 Guide RNA
agcugcuggcuccagacgagg

SEQ ID NO: 25990 - RNA, 21 nt, Artificial Sequence
  GATA2 Guide RNA
auggaacccgcgcagcugcug

SEQ ID NO: 25991 - RNA, 21 nt, Artificial Sequence
  GATA2 Guide RNA
caccucgucuggagccagcag

SEQ ID NO: 25992 - RNA, 21 nt, Artificial Sequence
  GATA2 Guide RNA
cagcugcuggcuccagacgag

SEQ ID NO: 25993 - RNA, 21 nt, Artificial Sequence
  GATA2 Guide RNA
cauggaacccgcgcagcugcu

SEQ ID NO: 25994 - RNA, 21 nt, Artificial Sequence
  GATA2 Guide RNA
ccaccucgucuggagccagca

SEQ ID NO: 25995 - RNA, 21 nt, Artificial Sequence
  GATA2 Guide RNA
ccagcagcugcgcggguucca

SEQ ID NO: 25996 - RNA, 21 nt, Artificial Sequence
  GATA2 Guide RNA
cccgcgcagcugcuggcucca

SEQ ID NO: 25997 - RNA, 21 nt, Artificial Sequence
  GATA2 Guide RNA
ccgcgcagcugcuggcuccag

SEQ ID NO: 25998 - RNA, 21 nt, Artificial Sequence
  GATA2 Guide RNA
ccucgucuggagccagcagcu

SEQ ID NO: 25999 - RNA, 21 nt, Artificial Sequence
  GATA2 Guide RNA
cgcagcugcuggcuccagacg

SEQ ID NO: 26000 - RNA, 21 nt, Artificial Sequence
  GATA2 Guide RNA
cgcgcagcugcuggcuccaga

SEQ ID NO: 26001 - RNA, 21 nt, Artificial Sequence
  GATA2 Guide RNA
cguccaccucgucuggagcca

SEQ ID NO: 26002 - RNA, 21 nt, Artificial Sequence
  GATA2 Guide RNA
cgucuggagccagcagcugcg

SEQ ID NO: 26003 - RNA, 21 nt, Artificial Sequence
  GATA2 Guide RNA
cucgucuggagccagcagcug

SEQ ID NO: 26004 - RNA, 21 nt, Artificial Sequence
  GATA2 Guide RNA
cugcuggcuccagacgaggug

SEQ ID NO: 26005 - RNA, 21 nt, Artificial Sequence
  GATA2 Guide RNA
cuggagccagcagcugcgcgg

SEQ ID NO: 26006 - RNA, 21 nt, Artificial Sequence
  GATA2 Guide RNA
cuggcuccagacgagguggac

SEQ ID NO: 26007 - RNA, 21 nt, Artificial Sequence
  GATA2 Guide RNA
gaacccgcgcagcugcuggcu

SEQ ID NO: 26008 - RNA, 21 nt, Artificial Sequence
  GATA2 Guide RNA
gaagacguccaccucgucugg

SEQ ID NO: 26009 - RNA, 21 nt, Artificial Sequence
  GATA2 Guide RNA
gacguccaccucgucuggagc

SEQ ID NO: 26010 - RNA, 21 nt, Artificial Sequence
  GATA2 Guide RNA
gagccagcagcugcgcggguu

SEQ ID NO: 26011 - RNA, 21 nt, Artificial Sequence
  GATA2 Guide RNA
gcagcugcuggcuccagacga

SEQ ID NO: 26012 - RNA, 21 nt, Artificial Sequence
  GATA2 Guide RNA
gccagcagcugcgcggguucc

SEQ ID NO: 26013 - RNA, 21 nt, Artificial Sequence
  GATA2 Guide RNA
gcgcagcugcuggcuccagac

SEQ ID NO: 26014 - RNA, 21 nt, Artificial Sequence
  GATA2 Guide RNA
gcugcuggcuccagacgaggu

SEQ ID NO: 26015 - RNA, 21 nt, Artificial Sequence
  GATA2 Guide RNA
gcuggcuccagacgaggugga

SEQ ID NO: 26016 - RNA, 21 nt, Artificial Sequence
  GATA2 Guide RNA
ggaacccgcgcagcugcuggc

SEQ ID NO: 26017 - RNA, 21 nt, Artificial Sequence
  GATA2 Guide RNA
ggagccagcagcugcgcgggu

SEQ ID NO: 26018 - RNA, 21 nt, Artificial Sequence
  GATA2 Guide RNA
ggcuccagacgagguggacgu

SEQ ID NO: 26019 - RNA, 21 nt, Artificial Sequence
  GATA2 Guide RNA
guccaccucgucuggagccag

SEQ ID NO: 26020 - RNA, 21 nt, Artificial Sequence
  GATA2 Guide RNA
gucuggagccagcagcugcgc

SEQ ID NO: 26021 - RNA, 21 nt, Artificial Sequence
  GATA2 Guide RNA
uacauggaacccgcgcagcug

SEQ ID NO: 26022 - RNA, 21 nt, Artificial Sequence
  GATA2 Guide RNA
uccaccucgucuggagccagc

SEQ ID NO: 26023 - RNA, 21 nt, Artificial Sequence
  GATA2 Guide RNA
ucgucuggagccagcagcugc

SEQ ID NO: 26024 - RNA, 21 nt, Artificial Sequence
  GATA2 Guide RNA
ucuggagccagcagcugcgcg

SEQ ID NO: 26025 - RNA, 21 nt, Artificial Sequence
  GATA2 Guide RNA
ugcuggcuccagacgaggugg

SEQ ID NO: 26026 - RNA, 21 nt, Artificial Sequence
  GATA2 Guide RNA
uggaacccgcgcagcugcugg

SEQ ID NO: 26027 - RNA, 21 nt, Artificial Sequence
  GATA2 Guide RNA
uggagccagcagcugcgcggg

SEQ ID NO: 26028 - RNA, 21 nt, Artificial Sequence
  GATA2 Guide RNA
uggcuccagacgagguggacg

SEQ ID NO: 26029 - RNA, 22 nt, Artificial Sequence
  GATA2 Guide RNA
aacccgcgcagcugcuggcucc

SEQ ID NO: 26030 - RNA, 22 nt, Artificial Sequence
  GATA2 Guide RNA
aagacguccaccucgucuggag

SEQ ID NO: 26031 - RNA, 22 nt, Artificial Sequence
  GATA2 Guide RNA
acauggaacccgcgcagcugcu

SEQ ID NO: 26032 - RNA, 22 nt, Artificial Sequence
  GATA2 Guide RNA
acccgcgcagcugcuggcucca

SEQ ID NO: 26033 - RNA, 22 nt, Artificial Sequence
  GATA2 Guide RNA
accucgucuggagccagcagcu

SEQ ID NO: 26034 - RNA, 22 nt, Artificial Sequence
  GATA2 Guide RNA
acguccaccucgucuggagcca

SEQ ID NO: 26035 - RNA, 22 nt, Artificial Sequence
  GATA2 Guide RNA
agaagacguccaccucgucugg

SEQ ID NO: 26036 - RNA, 22 nt, Artificial Sequence
  GATA2 Guide RNA
agacguccaccucgucuggagc

SEQ ID NO: 26037 - RNA, 22 nt, Artificial Sequence
  GATA2 Guide RNA
agccagcagcugcgcggguucc

SEQ ID NO: 26038 - RNA, 22 nt, Artificial Sequence
  GATA2 Guide RNA
agcugcuggcuccagacgaggu

SEQ ID NO: 26039 - RNA, 22 nt, Artificial Sequence
  GATA2 Guide RNA
auggaacccgcgcagcugcugg

SEQ ID NO: 26040 - RNA, 22 nt, Artificial Sequence
  GATA2 Guide RNA
caccucgucuggagccagcagc

SEQ ID NO: 26041 - RNA, 22 nt, Artificial Sequence
  GATA2 Guide RNA
cagcugcuggcuccagacgagg

SEQ ID NO: 26042 - RNA, 22 nt, Artificial Sequence
  GATA2 Guide RNA
cauggaacccgcgcagcugcug

SEQ ID NO: 26043 - RNA, 22 nt, Artificial Sequence
  GATA2 Guide RNA
ccaccucgucuggagccagcag

SEQ ID NO: 26044 - RNA, 22 nt, Artificial Sequence
  GATA2 Guide RNA
ccagcagcugcgcggguuccau

SEQ ID NO: 26045 - RNA, 22 nt, Artificial Sequence
  GATA2 Guide RNA
cccgcgcagcugcuggcuccag

SEQ ID NO: 26046 - RNA, 22 nt, Artificial Sequence
  GATA2 Guide RNA
ccgcgcagcugcuggcuccaga

SEQ ID NO: 26047 - RNA, 22 nt, Artificial Sequence
  GATA2 Guide RNA
ccucgucuggagccagcagcug

SEQ ID NO: 26048 - RNA, 22 nt, Artificial Sequence
  GATA2 Guide RNA
cgcagcugcuggcuccagacga

SEQ ID NO: 26049 - RNA, 22 nt, Artificial Sequence
  GATA2 Guide RNA
cgcgcagcugcuggcuccagac

SEQ ID NO: 26050 - RNA, 22 nt, Artificial Sequence
  GATA2 Guide RNA
cguccaccucgucuggagccag

SEQ ID NO: 26051 - RNA, 22 nt, Artificial Sequence
  GATA2 Guide RNA
cgucuggagccagcagcugcgc

SEQ ID NO: 26052 - RNA, 22 nt, Artificial Sequence
  GATA2 Guide RNA
cuacauggaacccgcgcagcug

SEQ ID NO: 26053 - RNA, 22 nt, Artificial Sequence
  GATA2 Guide RNA
cucgucuggagccagcagcugc

SEQ ID NO: 26054 - RNA, 22 nt, Artificial Sequence
  GATA2 Guide RNA
cugcuggcuccagacgaggugg

SEQ ID NO: 26055 - RNA, 22 nt, Artificial Sequence
  GATA2 Guide RNA
cuggagccagcagcugcgcggg

SEQ ID NO: 26056 - RNA, 22 nt, Artificial Sequence
  GATA2 Guide RNA
cuggcuccagacgagguggacg

SEQ ID NO: 26057 - RNA, 22 nt, Artificial Sequence
  GATA2 Guide RNA
gaacccgcgcagcugcuggcuc

SEQ ID NO: 26058 - RNA, 22 nt, Artificial Sequence
  GATA2 Guide RNA
gaagacguccaccucgucugga

SEQ ID NO: 26059 - RNA, 22 nt, Artificial Sequence
  GATA2 Guide RNA
gacguccaccucgucuggagcc

SEQ ID NO: 26060 - RNA, 22 nt, Artificial Sequence
  GATA2 Guide RNA
gagccagcagcugcgcggguuc

SEQ ID NO: 26061 - RNA, 22 nt, Artificial Sequence
  GATA2 Guide RNA
gcagcugcuggcuccagacgag

SEQ ID NO: 26062 - RNA, 22 nt, Artificial Sequence
  GATA2 Guide RNA
gccagcagcugcgcggguucca

SEQ ID NO: 26063 - RNA, 22 nt, Artificial Sequence
  GATA2 Guide RNA
gcgcagcugcuggcuccagacg

SEQ ID NO: 26064 - RNA, 22 nt, Artificial Sequence
  GATA2 Guide RNA
gcugcuggcuccagacgaggug

SEQ ID NO: 26065 - RNA, 22 nt, Artificial Sequence
  GATA2 Guide RNA
gcuggcuccagacgagguggac

SEQ ID NO: 26066 - RNA, 22 nt, Artificial Sequence
  GATA2 Guide RNA
ggaacccgcgcagcugcuggcu

SEQ ID NO: 26067 - RNA, 22 nt, Artificial Sequence
  GATA2 Guide RNA
ggagccagcagcugcgcggguu

SEQ ID NO: 26068 - RNA, 22 nt, Artificial Sequence
  GATA2 Guide RNA
ggcuccagacgagguggacguc

SEQ ID NO: 26069 - RNA, 22 nt, Artificial Sequence
  GATA2 Guide RNA
guccaccucgucuggagccagc

SEQ ID NO: 26070 - RNA, 22 nt, Artificial Sequence
  GATA2 Guide RNA
gucuggagccagcagcugcgcg

SEQ ID NO: 26071 - RNA, 22 nt, Artificial Sequence
  GATA2 Guide RNA
uacauggaacccgcgcagcugc

SEQ ID NO: 26072 - RNA, 22 nt, Artificial Sequence
  GATA2 Guide RNA
uccaccucgucuggagccagca

SEQ ID NO: 26073 - RNA, 22 nt, Artificial Sequence
  GATA2 Guide RNA
ucgucuggagccagcagcugcg

SEQ ID NO: 26074 - RNA, 22 nt, Artificial Sequence
  GATA2 Guide RNA
ucuggagccagcagcugcgcgg

SEQ ID NO: 26075 - RNA, 22 nt, Artificial Sequence
  GATA2 Guide RNA
ugcuggcuccagacgaggugga

SEQ ID NO: 26076 - RNA, 22 nt, Artificial Sequence
  GATA2 Guide RNA
uggaacccgcgcagcugcuggc

SEQ ID NO: 26077 - RNA, 22 nt, Artificial Sequence
  GATA2 Guide RNA
uggagccagcagcugcgcgggu

SEQ ID NO: 26078 - RNA, 22 nt, Artificial Sequence
  GATA2 Guide RNA
uggcuccagacgagguggacgu

SEQ ID NO: 26079 - RNA, 20 nt, Artificial Sequence
  GATA2 Guide RNA
aacuacacggaacccgcgca

SEQ ID NO: 26080 - RNA, 20 nt, Artificial Sequence
  GATA2 Guide RNA
acaacuacacggaacccgcg

SEQ ID NO: 26081 - RNA, 20 nt, Artificial Sequence
  GATA2 Guide RNA
acacggaacccgcgcagcug

SEQ ID NO: 26082 - RNA, 20 nt, Artificial Sequence
  GATA2 Guide RNA
acggaacccgcgcagcugcu

SEQ ID NO: 26083 - RNA, 20 nt, Artificial Sequence
  GATA2 Guide RNA
acuacacggaacccgcgcag

SEQ ID NO: 26084 - RNA, 20 nt, Artificial Sequence
  GATA2 Guide RNA
agcagcugcgcggguuccgu

SEQ ID NO: 26085 - RNA, 20 nt, Artificial Sequence
  GATA2 Guide RNA
agcugcgcggguuccgugua

SEQ ID NO: 26086 - RNA, 20 nt, Artificial Sequence
  GATA2 Guide RNA
aggcagcagcugcgcggguu

SEQ ID NO: 26087 - RNA, 20 nt, Artificial Sequence
  GATA2 Guide RNA
caacuacacggaacccgcgc

SEQ ID NO: 26088 - RNA, 20 nt, Artificial Sequence
  GATA2 Guide RNA
cacaacuacacggaacccgc

SEQ ID NO: 26089 - RNA, 20 nt, Artificial Sequence
  GATA2 Guide RNA
cacggaacccgcgcagcugc

SEQ ID NO: 26090 - RNA, 20 nt, Artificial Sequence
  GATA2 Guide RNA
cagcagcugcgcggguuccg

SEQ ID NO: 26091 - RNA, 20 nt, Artificial Sequence
  GATA2 Guide RNA
cagcugcgcggguuccgugu

SEQ ID NO: 26092 - RNA, 20 nt, Artificial Sequence
  GATA2 Guide RNA
cccgggccuggcgcacaacu

SEQ ID NO: 26093 - RNA, 20 nt, Artificial Sequence
  GATA2 Guide RNA
ccgggccuggcgcacaacua

SEQ ID NO: 26094 - RNA, 20 nt, Artificial Sequence
  GATA2 Guide RNA
ccguguaguugugcgccagg

SEQ ID NO: 26095 - RNA, 20 nt, Artificial Sequence
  GATA2 Guide RNA
ccuggcgcacaacuacacgg

SEQ ID NO: 26096 - RNA, 20 nt, Artificial Sequence
  GATA2 Guide RNA
cgcacaacuacacggaaccc

SEQ ID NO: 26097 - RNA, 20 nt, Artificial Sequence
  GATA2 Guide RNA
cgcggguuccguguaguugu

SEQ ID NO: 26098 - RNA, 20 nt, Artificial Sequence
  GATA2 Guide RNA
cgggccuggcgcacaacuac

SEQ ID NO: 26099 - RNA, 20 nt, Artificial Sequence
  GATA2 Guide RNA
cggguuccguguaguugugc

SEQ ID NO: 26100 - RNA, 20 nt, Artificial Sequence
  GATA2 Guide RNA
cguguaguugugcgccaggc

SEQ ID NO: 26101 - RNA, 20 nt, Artificial Sequence
  GATA2 Guide RNA
cuacacggaacccgcgcagc

SEQ ID NO: 26102 - RNA, 20 nt, Artificial Sequence
  GATA2 Guide RNA
cugcgcggguuccguguagu

SEQ ID NO: 26103 - RNA, 20 nt, Artificial Sequence
  GATA2 Guide RNA
cuggcgcacaacuacacgga

SEQ ID NO: 26104 - RNA, 20 nt, Artificial Sequence
  GATA2 Guide RNA
gcacaacuacacggaacccg

SEQ ID NO: 26105 - RNA, 20 nt, Artificial Sequence
  GATA2 Guide RNA
gcagcagcugcgcggguucc

SEQ ID NO: 26106 - RNA, 20 nt, Artificial Sequence
  GATA2 Guide RNA
gcagcugcgcggguuccgug

SEQ ID NO: 26107 - RNA, 20 nt, Artificial Sequence
  GATA2 Guide RNA
gccuggcgcacaacuacacg

SEQ ID NO: 26108 - RNA, 20 nt, Artificial Sequence
  GATA2 Guide RNA
gcgcacaacuacacggaacc

SEQ ID NO: 26109 - RNA, 20 nt, Artificial Sequence
  GATA2 Guide RNA
gcgcggguuccguguaguug

SEQ ID NO: 26110 - RNA, 20 nt, Artificial Sequence
  GATA2 Guide RNA
gcggguuccguguaguugug

SEQ ID NO: 26111 - RNA, 20 nt, Artificial Sequence
  GATA2 Guide RNA
gcugcgcggguuccguguag

SEQ ID NO: 26112 - RNA, 20 nt, Artificial Sequence
  GATA2 Guide RNA
ggcagcagcugcgcggguuc

SEQ ID NO: 26113 - RNA, 20 nt, Artificial Sequence
  GATA2 Guide RNA
ggccuggcgcacaacuacac

SEQ ID NO: 26114 - RNA, 20 nt, Artificial Sequence
  GATA2 Guide RNA
ggcgcacaacuacacggaac

SEQ ID NO: 26115 - RNA, 20 nt, Artificial Sequence
  GATA2 Guide RNA
gggccuggcgcacaacuaca

SEQ ID NO: 26116 - RNA, 20 nt, Artificial Sequence
  GATA2 Guide RNA
ggguuccguguaguugugcg

SEQ ID NO: 26117 - RNA, 20 nt, Artificial Sequence
  GATA2 Guide RNA
gguuccguguaguugugcgc

SEQ ID NO: 26118 - RNA, 20 nt, Artificial Sequence
  GATA2 Guide RNA
guguaguugugcgccaggcc

SEQ ID NO: 26119 - RNA, 20 nt, Artificial Sequence
  GATA2 Guide RNA
guuccguguaguugugcgcc

SEQ ID NO: 26120 - RNA, 20 nt, Artificial Sequence
  GATA2 Guide RNA
uacacggaacccgcgcagcu

SEQ ID NO: 26121 - RNA, 20 nt, Artificial Sequence
  GATA2 Guide RNA
uccguguaguugugcgccag

SEQ ID NO: 26122 - RNA, 20 nt, Artificial Sequence
  GATA2 Guide RNA
ugcgcggguuccguguaguu

SEQ ID NO: 26123 - RNA, 20 nt, Artificial Sequence
  GATA2 Guide RNA
uggcgcacaacuacacggaa

SEQ ID NO: 26124 - RNA, 20 nt, Artificial Sequence
  GATA2 Guide RNA
uuccguguaguugugcgcca

SEQ ID NO: 26125 - RNA, 21 nt, Artificial Sequence
  GATA2 Guide RNA
aacuacacggaacccgcgcag

SEQ ID NO: 26126 - RNA, 21 nt, Artificial Sequence
  GATA2 Guide RNA
acaacuacacggaacccgcgc

SEQ ID NO: 26127 - RNA, 21 nt, Artificial Sequence
  GATA2 Guide RNA
acacggaacccgcgcagcugc

SEQ ID NO: 26128 - RNA, 21 nt, Artificial Sequence
  GATA2 Guide RNA
acccgggccuggcgcacaacu

SEQ ID NO: 26129 - RNA, 21 nt, Artificial Sequence
  GATA2 Guide RNA
acggaacccgcgcagcugcug

SEQ ID NO: 26130 - RNA, 21 nt, Artificial Sequence
  GATA2 Guide RNA
acuacacggaacccgcgcagc

SEQ ID NO: 26131 - RNA, 21 nt, Artificial Sequence
  GATA2 Guide RNA
agcagcugcgcggguuccgug

SEQ ID NO: 26132 - RNA, 21 nt, Artificial Sequence
  GATA2 Guide RNA
agcugcgcggguuccguguag

SEQ ID NO: 26133 - RNA, 21 nt, Artificial Sequence
  GATA2 Guide RNA
aggcagcagcugcgcggguuc

SEQ ID NO: 26134 - RNA, 21 nt, Artificial Sequence
  GATA2 Guide RNA
caacuacacggaacccgcgca

SEQ ID NO: 26135 - RNA, 21 nt, Artificial Sequence
  GATA2 Guide RNA
cacaacuacacggaacccgcg

SEQ ID NO: 26136 - RNA, 21 nt, Artificial Sequence
  GATA2 Guide RNA
cacggaacccgcgcagcugcu

SEQ ID NO: 26137 - RNA, 21 nt, Artificial Sequence
  GATA2 Guide RNA
cagcagcugcgcggguuccgu

SEQ ID NO: 26138 - RNA, 21 nt, Artificial Sequence
  GATA2 Guide RNA
cagcugcgcggguuccgugua

SEQ ID NO: 26139 - RNA, 21 nt, Artificial Sequence
  GATA2 Guide RNA
cccgggccuggcgcacaacua

SEQ ID NO: 26140 - RNA, 21 nt, Artificial Sequence
  GATA2 Guide RNA
ccgggccuggcgcacaacuac

SEQ ID NO: 26141 - RNA, 21 nt, Artificial Sequence
  GATA2 Guide RNA
ccguguaguugugcgccaggc

SEQ ID NO: 26142 - RNA, 21 nt, Artificial Sequence
  GATA2 Guide RNA
ccuggcgcacaacuacacgga

SEQ ID NO: 26143 - RNA, 21 nt, Artificial Sequence
  GATA2 Guide RNA
cgcacaacuacacggaacccg

SEQ ID NO: 26144 - RNA, 21 nt, Artificial Sequence
  GATA2 Guide RNA
cgcggguuccguguaguugug

SEQ ID NO: 26145 - RNA, 21 nt, Artificial Sequence
  GATA2 Guide RNA
cgggccuggcgcacaacuaca

SEQ ID NO: 26146 - RNA, 21 nt, Artificial Sequence
  GATA2 Guide RNA
cggguuccguguaguugugcg

SEQ ID NO: 26147 - RNA, 21 nt, Artificial Sequence
  GATA2 Guide RNA
cguguaguugugcgccaggcc

SEQ ID NO: 26148 - RNA, 21 nt, Artificial Sequence
  GATA2 Guide RNA
cuacacggaacccgcgcagcu

SEQ ID NO: 26149 - RNA, 21 nt, Artificial Sequence
  GATA2 Guide RNA
cugcgcggguuccguguaguu

SEQ ID NO: 26150 - RNA, 21 nt, Artificial Sequence
  GATA2 Guide RNA
cuggcgcacaacuacacggaa

SEQ ID NO: 26151 - RNA, 21 nt, Artificial Sequence
  GATA2 Guide RNA
gaggcagcagcugcgcggguu

SEQ ID NO: 26152 - RNA, 21 nt, Artificial Sequence
  GATA2 Guide RNA
gcacaacuacacggaacccgc

SEQ ID NO: 26153 - RNA, 21 nt, Artificial Sequence
  GATA2 Guide RNA
gcagcagcugcgcggguuccg

SEQ ID NO: 26154 - RNA, 21 nt, Artificial Sequence
  GATA2 Guide RNA
gcagcugcgcggguuccgugu

SEQ ID NO: 26155 - RNA, 21 nt, Artificial Sequence
  GATA2 Guide RNA
gccuggcgcacaacuacacgg

SEQ ID NO: 26156 - RNA, 21 nt, Artificial Sequence
  GATA2 Guide RNA
gcgcacaacuacacggaaccc

SEQ ID NO: 26157 - RNA, 21 nt, Artificial Sequence
  GATA2 Guide RNA
gcgcggguuccguguaguugu

SEQ ID NO: 26158 - RNA, 21 nt, Artificial Sequence
  GATA2 Guide RNA
gcggguuccguguaguugugc

SEQ ID NO: 26159 - RNA, 21 nt, Artificial Sequence
  GATA2 Guide RNA
gcugcgcggguuccguguagu

SEQ ID NO: 26160 - RNA, 21 nt, Artificial Sequence
  GATA2 Guide RNA
ggcagcagcugcgcggguucc

SEQ ID NO: 26161 - RNA, 21 nt, Artificial Sequence
  GATA2 Guide RNA
ggccuggcgcacaacuacacg

SEQ ID NO: 26162 - RNA, 21 nt, Artificial Sequence
  GATA2 Guide RNA
ggcgcacaacuacacggaacc

SEQ ID NO: 26163 - RNA, 21 nt, Artificial Sequence
  GATA2 Guide RNA
gggccuggcgcacaacuacac

SEQ ID NO: 26164 - RNA, 21 nt, Artificial Sequence
  GATA2 Guide RNA
ggguuccguguaguugugcgc

SEQ ID NO: 26165 - RNA, 21 nt, Artificial Sequence
  GATA2 Guide RNA
gguuccguguaguugugcgcc

SEQ ID NO: 26166 - RNA, 21 nt, Artificial Sequence
  GATA2 Guide RNA
guguaguugugcgccaggccc

SEQ ID NO: 26167 - RNA, 21 nt, Artificial Sequence
  GATA2 Guide RNA
guuccguguaguugugcgcca

SEQ ID NO: 26168 - RNA, 21 nt, Artificial Sequence
  GATA2 Guide RNA
uacacggaacccgcgcagcug

SEQ ID NO: 26169 - RNA, 21 nt, Artificial Sequence
  GATA2 Guide RNA
uccguguaguugugcgccagg

SEQ ID NO: 26170 - RNA, 21 nt, Artificial Sequence
  GATA2 Guide RNA
ugcgcggguuccguguaguug

SEQ ID NO: 26171 - RNA, 21 nt, Artificial Sequence
  GATA2 Guide RNA
uggcgcacaacuacacggaac

SEQ ID NO: 26172 - RNA, 21 nt, Artificial Sequence
  GATA2 Guide RNA
uuccguguaguugugcgccag

SEQ ID NO: 26173 - RNA, 22 nt, Artificial Sequence
  GATA2 Guide RNA
aacuacacggaacccgcgcagc

SEQ ID NO: 26174 - RNA, 22 nt, Artificial Sequence
  GATA2 Guide RNA
acaacuacacggaacccgcgca

SEQ ID NO: 26175 - RNA, 22 nt, Artificial Sequence
  GATA2 Guide RNA
acacggaacccgcgcagcugcu

SEQ ID NO: 26176 - RNA, 22 nt, Artificial Sequence
  GATA2 Guide RNA
acccgggccuggcgcacaacua

SEQ ID NO: 26177 - RNA, 22 nt, Artificial Sequence
  GATA2 Guide RNA
acggaacccgcgcagcugcugc

SEQ ID NO: 26178 - RNA, 22 nt, Artificial Sequence
  GATA2 Guide RNA
acuacacggaacccgcgcagcu

SEQ ID NO: 26179 - RNA, 22 nt, Artificial Sequence
  GATA2 Guide RNA
agcagcugcgcggguuccgugu

SEQ ID NO: 26180 - RNA, 22 nt, Artificial Sequence
  GATA2 Guide RNA
agcugcgcggguuccguguagu

SEQ ID NO: 26181 - RNA, 22 nt, Artificial Sequence
  GATA2 Guide RNA
aggcagcagcugcgcggguucc

SEQ ID NO: 26182 - RNA, 22 nt, Artificial Sequence
  GATA2 Guide RNA
caacuacacggaacccgcgcag

SEQ ID NO: 26183 - RNA, 22 nt, Artificial Sequence
  GATA2 Guide RNA
cacaacuacacggaacccgcgc

SEQ ID NO: 26184 - RNA, 22 nt, Artificial Sequence
  GATA2 Guide RNA
cacccgggccuggcgcacaacu

SEQ ID NO: 26185 - RNA, 22 nt, Artificial Sequence
  GATA2 Guide RNA
cacggaacccgcgcagcugcug

SEQ ID NO: 26186 - RNA, 22 nt, Artificial Sequence
  GATA2 Guide RNA
cagcagcugcgcggguuccgug

SEQ ID NO: 26187 - RNA, 22 nt, Artificial Sequence
  GATA2 Guide RNA
cagcugcgcggguuccguguag

SEQ ID NO: 26188 - RNA, 22 nt, Artificial Sequence
  GATA2 Guide RNA
cccgggccuggcgcacaacuac

SEQ ID NO: 26189 - RNA, 22 nt, Artificial Sequence
  GATA2 Guide RNA
ccgggccuggcgcacaacuaca

SEQ ID NO: 26190 - RNA, 22 nt, Artificial Sequence
  GATA2 Guide RNA
ccguguaguugugcgccaggcc

SEQ ID NO: 26191 - RNA, 22 nt, Artificial Sequence
  GATA2 Guide RNA
ccuggcgcacaacuacacggaa

SEQ ID NO: 26192 - RNA, 22 nt, Artificial Sequence
  GATA2 Guide RNA
cgcacaacuacacggaacccgc

SEQ ID NO: 26193 - RNA, 22 nt, Artificial Sequence
  GATA2 Guide RNA
cgcggguuccguguaguugugc

SEQ ID NO: 26194 - RNA, 22 nt, Artificial Sequence
  GATA2 Guide RNA
cgggccuggcgcacaacuacac

SEQ ID NO: 26195 - RNA, 22 nt, Artificial Sequence
  GATA2 Guide RNA
cggguuccguguaguugugcgc

SEQ ID NO: 26196 - RNA, 22 nt, Artificial Sequence
  GATA2 Guide RNA
cguguaguugugcgccaggccc

SEQ ID NO: 26197 - RNA, 22 nt, Artificial Sequence
  GATA2 Guide RNA
cuacacggaacccgcgcagcug

SEQ ID NO: 26198 - RNA, 22 nt, Artificial Sequence
  GATA2 Guide RNA
cugcgcggguuccguguaguug

SEQ ID NO: 26199 - RNA, 22 nt, Artificial Sequence
  GATA2 Guide RNA
cuggcgcacaacuacacggaac

SEQ ID NO: 26200 - RNA, 22 nt, Artificial Sequence
  GATA2 Guide RNA
gaggcagcagcugcgcggguuc

SEQ ID NO: 26201 - RNA, 22 nt, Artificial Sequence
  GATA2 Guide RNA
gcacaacuacacggaacccgcg

SEQ ID NO: 26202 - RNA, 22 nt, Artificial Sequence
  GATA2 Guide RNA
gcagcagcugcgcggguuccgu

SEQ ID NO: 26203 - RNA, 22 nt, Artificial Sequence
  GATA2 Guide RNA
gcagcugcgcggguuccgugua

SEQ ID NO: 26204 - RNA, 22 nt, Artificial Sequence
  GATA2 Guide RNA
gccuggcgcacaacuacacgga

SEQ ID NO: 26205 - RNA, 22 nt, Artificial Sequence
  GATA2 Guide RNA
gcgcacaacuacacggaacccg

SEQ ID NO: 26206 - RNA, 22 nt, Artificial Sequence
  GATA2 Guide RNA
gcgcggguuccguguaguugug

SEQ ID NO: 26207 - RNA, 22 nt, Artificial Sequence
  GATA2 Guide RNA
gcggguuccguguaguugugcg

SEQ ID NO: 26208 - RNA, 22 nt, Artificial Sequence
  GATA2 Guide RNA
gcugcgcggguuccguguaguu

SEQ ID NO: 26209 - RNA, 22 nt, Artificial Sequence
  GATA2 Guide RNA
ggaggcagcagcugcgcggguu

SEQ ID NO: 26210 - RNA, 22 nt, Artificial Sequence
  GATA2 Guide RNA
ggcagcagcugcgcggguuccg

SEQ ID NO: 26211 - RNA, 22 nt, Artificial Sequence
  GATA2 Guide RNA
ggccuggcgcacaacuacacgg

SEQ ID NO: 26212 - RNA, 22 nt, Artificial Sequence
  GATA2 Guide RNA
ggcgcacaacuacacggaaccc

SEQ ID NO: 26213 - RNA, 22 nt, Artificial Sequence
  GATA2 Guide RNA
gggccuggcgcacaacuacacg

SEQ ID NO: 26214 - RNA, 22 nt, Artificial Sequence
  GATA2 Guide RNA
ggguuccguguaguugugcgcc

SEQ ID NO: 26215 - RNA, 22 nt, Artificial Sequence
  GATA2 Guide RNA
gguuccguguaguugugcgcca

SEQ ID NO: 26216 - RNA, 22 nt, Artificial Sequence
  GATA2 Guide RNA
guguaguugugcgccaggcccg

SEQ ID NO: 26217 - RNA, 22 nt, Artificial Sequence
  GATA2 Guide RNA
guuccguguaguugugcgccag

SEQ ID NO: 26218 - RNA, 22 nt, Artificial Sequence
  GATA2 Guide RNA
uacacggaacccgcgcagcugc

SEQ ID NO: 26219 - RNA, 22 nt, Artificial Sequence
  GATA2 Guide RNA
uccguguaguugugcgccaggc

SEQ ID NO: 26220 - RNA, 22 nt, Artificial Sequence
  GATA2 Guide RNA
ugcgcggguuccguguaguugu

SEQ ID NO: 26221 - RNA, 22 nt, Artificial Sequence
  GATA2 Guide RNA
uggcgcacaacuacacggaacc

SEQ ID NO: 26222 - RNA, 22 nt, Artificial Sequence
  GATA2 Guide RNA
uuccguguaguugugcgccagg

SEQ ID NO: 26223 - RNA, 20 nt, Artificial Sequence
  GATA2 Guide RNA
acaccacccgggucuggcgc

SEQ ID NO: 26224 - RNA, 20 nt, Artificial Sequence
  GATA2 Guide RNA
accacccgggucuggcgcac

SEQ ID NO: 26225 - RNA, 20 nt, Artificial Sequence
  GATA2 Guide RNA
accccgacucacaccacccg

SEQ ID NO: 26226 - RNA, 20 nt, Artificial Sequence
  GATA2 Guide RNA
acccgggucuggcgcacaac

SEQ ID NO: 26227 - RNA, 20 nt, Artificial Sequence
  GATA2 Guide RNA
acccggguggugugagucgg

SEQ ID NO: 26228 - RNA, 20 nt, Artificial Sequence
  GATA2 Guide RNA
acucacaccacccgggucug

SEQ ID NO: 26229 - RNA, 20 nt, Artificial Sequence
  GATA2 Guide RNA
agacccggguggugugaguc

SEQ ID NO: 26230 - RNA, 20 nt, Artificial Sequence
  GATA2 Guide RNA
aguugugcgccagacccggg

SEQ ID NO: 26231 - RNA, 20 nt, Artificial Sequence
  GATA2 Guide RNA
auguaguugugcgccagacc

SEQ ID NO: 26232 - RNA, 20 nt, Artificial Sequence
  GATA2 Guide RNA
cacaccacccgggucuggcg

SEQ ID NO: 26233 - RNA, 20 nt, Artificial Sequence
  GATA2 Guide RNA
caccacccgggucuggcgca

SEQ ID NO: 26234 - RNA, 20 nt, Artificial Sequence
  GATA2 Guide RNA
caccccgacucacaccaccc

SEQ ID NO: 26235 - RNA, 20 nt, Artificial Sequence
  GATA2 Guide RNA
cacccgggucuggcgcacaa

SEQ ID NO: 26236 - RNA, 20 nt, Artificial Sequence
  GATA2 Guide RNA
cagacccggguggugugagu

SEQ ID NO: 26237 - RNA, 20 nt, Artificial Sequence
  GATA2 Guide RNA
cauguaguugugcgccagac

SEQ ID NO: 26238 - RNA, 20 nt, Artificial Sequence
  GATA2 Guide RNA
ccacccgggucuggcgcaca

SEQ ID NO: 26239 - RNA, 20 nt, Artificial Sequence
  GATA2 Guide RNA
ccagacccggguggugugag

SEQ ID NO: 26240 - RNA, 20 nt, Artificial Sequence
  GATA2 Guide RNA
ccauguaguugugcgccaga

SEQ ID NO: 26241 - RNA, 20 nt, Artificial Sequence
  GATA2 Guide RNA
ccccgacucacaccacccgg

SEQ ID NO: 26242 - RNA, 20 nt, Artificial Sequence
  GATA2 Guide RNA
cccgacucacaccacccggg

SEQ ID NO: 26243 - RNA, 20 nt, Artificial Sequence
  GATA2 Guide RNA
cccgggucuggcgcacaacu

SEQ ID NO: 26244 - RNA, 20 nt, Artificial Sequence
  GATA2 Guide RNA
ccgacucacaccacccgggu

SEQ ID NO: 26245 - RNA, 20 nt, Artificial Sequence
  GATA2 Guide RNA
ccgggucuggcgcacaacua

SEQ ID NO: 26246 - RNA, 20 nt, Artificial Sequence
  GATA2 Guide RNA
cgacucacaccacccggguc

SEQ ID NO: 26247 - RNA, 20 nt, Artificial Sequence
  GATA2 Guide RNA
cgccagacccggguggugug

SEQ ID NO: 26248 - RNA, 20 nt, Artificial Sequence
  GATA2 Guide RNA
cgggucuggcgcacaacuac

SEQ ID NO: 26249 - RNA, 20 nt, Artificial Sequence
  GATA2 Guide RNA
cucacaccacccgggucugg

SEQ ID NO: 26250 - RNA, 20 nt, Artificial Sequence
  GATA2 Guide RNA
gacccggguggugugagucg

SEQ ID NO: 26251 - RNA, 20 nt, Artificial Sequence
  GATA2 Guide RNA
gacucacaccacccgggucu

SEQ ID NO: 26252 - RNA, 20 nt, Artificial Sequence
  GATA2 Guide RNA
gccagacccgggugguguga

SEQ ID NO: 26253 - RNA, 20 nt, Artificial Sequence
  GATA2 Guide RNA
gcgccagacccggguggugu

SEQ ID NO: 26254 - RNA, 20 nt, Artificial Sequence
  GATA2 Guide RNA
gggucuggcgcacaacuaca

SEQ ID NO: 26255 - RNA, 20 nt, Artificial Sequence
  GATA2 Guide RNA
ggucuggcgcacaacuacau

SEQ ID NO: 26256 - RNA, 20 nt, Artificial Sequence
  GATA2 Guide RNA
guaguugugcgccagacccg

SEQ ID NO: 26257 - RNA, 20 nt, Artificial Sequence
  GATA2 Guide RNA
gucuggcgcacaacuacaug

SEQ ID NO: 26258 - RNA, 20 nt, Artificial Sequence
  GATA2 Guide RNA
gugcgccagacccggguggu

SEQ ID NO: 26259 - RNA, 20 nt, Artificial Sequence
  GATA2 Guide RNA
guuccauguaguugugcgcc

SEQ ID NO: 26260 - RNA, 20 nt, Artificial Sequence
  GATA2 Guide RNA
guugugcgccagacccgggu

SEQ ID NO: 26261 - RNA, 20 nt, Artificial Sequence
  GATA2 Guide RNA
uaguugugcgccagacccgg

SEQ ID NO: 26262 - RNA, 20 nt, Artificial Sequence
  GATA2 Guide RNA
ucacaccacccgggucuggc

SEQ ID NO: 26263 - RNA, 20 nt, Artificial Sequence
  GATA2 Guide RNA
uccauguaguugugcgccag

SEQ ID NO: 26264 - RNA, 20 nt, Artificial Sequence
  GATA2 Guide RNA
ugcgccagacccggguggug

SEQ ID NO: 26265 - RNA, 20 nt, Artificial Sequence
  GATA2 Guide RNA
uguaguugugcgccagaccc

SEQ ID NO: 26266 - RNA, 20 nt, Artificial Sequence
  GATA2 Guide RNA
ugugcgccagacccgggugg

SEQ ID NO: 26267 - RNA, 20 nt, Artificial Sequence
  GATA2 Guide RNA
uuccauguaguugugcgcca

SEQ ID NO: 26268 - RNA, 20 nt, Artificial Sequence
  GATA2 Guide RNA
uugugcgccagacccgggug

SEQ ID NO: 26269 - RNA, 21 nt, Artificial Sequence
  GATA2 Guide RNA
acaccacccgggucuggcgca

SEQ ID NO: 26270 - RNA, 21 nt, Artificial Sequence
  GATA2 Guide RNA
accacccgggucuggcgcaca

SEQ ID NO: 26271 - RNA, 21 nt, Artificial Sequence
  GATA2 Guide RNA
accccgacucacaccacccgg

SEQ ID NO: 26272 - RNA, 21 nt, Artificial Sequence
  GATA2 Guide RNA
acccgggucuggcgcacaacu

SEQ ID NO: 26273 - RNA, 21 nt, Artificial Sequence
  GATA2 Guide RNA
acccggguggugugagucggg

SEQ ID NO: 26274 - RNA, 21 nt, Artificial Sequence
  GATA2 Guide RNA
acucacaccacccgggucugg

SEQ ID NO: 26275 - RNA, 21 nt, Artificial Sequence
  GATA2 Guide RNA
agacccggguggugugagucg

SEQ ID NO: 26276 - RNA, 21 nt, Artificial Sequence
  GATA2 Guide RNA
aguugugcgccagacccgggu

SEQ ID NO: 26277 - RNA, 21 nt, Artificial Sequence
  GATA2 Guide RNA
auguaguugugcgccagaccc

SEQ ID NO: 26278 - RNA, 21 nt, Artificial Sequence
  GATA2 Guide RNA
cacaccacccgggucuggcgc

SEQ ID NO: 26279 - RNA, 21 nt, Artificial Sequence
  GATA2 Guide RNA
caccacccgggucuggcgcac

SEQ ID NO: 26280 - RNA, 21 nt, Artificial Sequence
  GATA2 Guide RNA
caccccgacucacaccacccg

SEQ ID NO: 26281 - RNA, 21 nt, Artificial Sequence
  GATA2 Guide RNA
cacccgggucuggcgcacaac

SEQ ID NO: 26282 - RNA, 21 nt, Artificial Sequence
  GATA2 Guide RNA
cagacccggguggugugaguc

SEQ ID NO: 26283 - RNA, 21 nt, Artificial Sequence
  GATA2 Guide RNA
cauguaguugugcgccagacc

SEQ ID NO: 26284 - RNA, 21 nt, Artificial Sequence
  GATA2 Guide RNA
ccacccgggucuggcgcacaa

SEQ ID NO: 26285 - RNA, 21 nt, Artificial Sequence
  GATA2 Guide RNA
ccagacccggguggugugagu

SEQ ID NO: 26286 - RNA, 21 nt, Artificial Sequence
  GATA2 Guide RNA
ccauguaguugugcgccagac

SEQ ID NO: 26287 - RNA, 21 nt, Artificial Sequence
  GATA2 Guide RNA
ccccgacucacaccacccggg

SEQ ID NO: 26288 - RNA, 21 nt, Artificial Sequence
  GATA2 Guide RNA
cccgacucacaccacccgggu

SEQ ID NO: 26289 - RNA, 21 nt, Artificial Sequence
  GATA2 Guide RNA
cccgggucuggcgcacaacua

SEQ ID NO: 26290 - RNA, 21 nt, Artificial Sequence
  GATA2 Guide RNA
ccgacucacaccacccggguc

SEQ ID NO: 26291 - RNA, 21 nt, Artificial Sequence
  GATA2 Guide RNA
ccgggucuggcgcacaacuac

SEQ ID NO: 26292 - RNA, 21 nt, Artificial Sequence
  GATA2 Guide RNA
cgacucacaccacccgggucu

SEQ ID NO: 26293 - RNA, 21 nt, Artificial Sequence
  GATA2 Guide RNA
cgccagacccgggugguguga

SEQ ID NO: 26294 - RNA, 21 nt, Artificial Sequence
  GATA2 Guide RNA
cgggucuggcgcacaacuaca

SEQ ID NO: 26295 - RNA, 21 nt, Artificial Sequence
  GATA2 Guide RNA
cucacaccacccgggucuggc

SEQ ID NO: 26296 - RNA, 21 nt, Artificial Sequence
  GATA2 Guide RNA
gacccggguggugugagucgg

SEQ ID NO: 26297 - RNA, 21 nt, Artificial Sequence
  GATA2 Guide RNA
gacucacaccacccgggucug

SEQ ID NO: 26298 - RNA, 21 nt, Artificial Sequence
  GATA2 Guide RNA
gcaccccgacucacaccaccc

SEQ ID NO: 26299 - RNA, 21 nt, Artificial Sequence
  GATA2 Guide RNA
gccagacccggguggugugag

SEQ ID NO: 26300 - RNA, 21 nt, Artificial Sequence
  GATA2 Guide RNA
gcgccagacccggguggugug

SEQ ID NO: 26301 - RNA, 21 nt, Artificial Sequence
  GATA2 Guide RNA
gggucuggcgcacaacuacau

SEQ ID NO: 26302 - RNA, 21 nt, Artificial Sequence
  GATA2 Guide RNA
ggucuggcgcacaacuacaug

SEQ ID NO: 26303 - RNA, 21 nt, Artificial Sequence
  GATA2 Guide RNA
gguuccauguaguugugcgcc

SEQ ID NO: 26304 - RNA, 21 nt, Artificial Sequence
  GATA2 Guide RNA
guaguugugcgccagacccgg

SEQ ID NO: 26305 - RNA, 21 nt, Artificial Sequence
  GATA2 Guide RNA
gucuggcgcacaacuacaugg

SEQ ID NO: 26306 - RNA, 21 nt, Artificial Sequence
  GATA2 Guide RNA
gugcgccagacccggguggug

SEQ ID NO: 26307 - RNA, 21 nt, Artificial Sequence
  GATA2 Guide RNA
guuccauguaguugugcgcca

SEQ ID NO: 26308 - RNA, 21 nt, Artificial Sequence
  GATA2 Guide RNA
guugugcgccagacccgggug

SEQ ID NO: 26309 - RNA, 21 nt, Artificial Sequence
  GATA2 Guide RNA
uaguugugcgccagacccggg

SEQ ID NO: 26310 - RNA, 21 nt, Artificial Sequence
  GATA2 Guide RNA
ucacaccacccgggucuggcg

SEQ ID NO: 26311 - RNA, 21 nt, Artificial Sequence
  GATA2 Guide RNA
uccauguaguugugcgccaga

SEQ ID NO: 26312 - RNA, 21 nt, Artificial Sequence
  GATA2 Guide RNA
ugcgccagacccggguggugu

SEQ ID NO: 26313 - RNA, 21 nt, Artificial Sequence
  GATA2 Guide RNA
uguaguugugcgccagacccg

SEQ ID NO: 26314 - RNA, 21 nt, Artificial Sequence
  GATA2 Guide RNA
ugugcgccagacccggguggu

SEQ ID NO: 26315 - RNA, 21 nt, Artificial Sequence
  GATA2 Guide RNA
uuccauguaguugugcgccag

SEQ ID NO: 26316 - RNA, 21 nt, Artificial Sequence
  GATA2 Guide RNA
uugugcgccagacccgggugg

SEQ ID NO: 26317 - RNA, 22 nt, Artificial Sequence
  GATA2 Guide RNA
acaccacccgggucuggcgcac

SEQ ID NO: 26318 - RNA, 22 nt, Artificial Sequence
  GATA2 Guide RNA
accacccgggucuggcgcacaa

SEQ ID NO: 26319 - RNA, 22 nt, Artificial Sequence
  GATA2 Guide RNA
accccgacucacaccacccggg

SEQ ID NO: 26320 - RNA, 22 nt, Artificial Sequence
  GATA2 Guide RNA
acccgggucuggcgcacaacua

SEQ ID NO: 26321 - RNA, 22 nt, Artificial Sequence
  GATA2 Guide RNA
acccggguggugugagucgggg

SEQ ID NO: 26322 - RNA, 22 nt, Artificial Sequence
  GATA2 Guide RNA
acucacaccacccgggucuggc

SEQ ID NO: 26323 - RNA, 22 nt, Artificial Sequence
  GATA2 Guide RNA
agacccggguggugugagucgg

SEQ ID NO: 26324 - RNA, 22 nt, Artificial Sequence
  GATA2 Guide RNA
agcaccccgacucacaccaccc

SEQ ID NO: 26325 - RNA, 22 nt, Artificial Sequence
  GATA2 Guide RNA
aguugugcgccagacccgggug

SEQ ID NO: 26326 - RNA, 22 nt, Artificial Sequence
  GATA2 Guide RNA
auguaguugugcgccagacccg

SEQ ID NO: 26327 - RNA, 22 nt, Artificial Sequence
  GATA2 Guide RNA
cacaccacccgggucuggcgca

SEQ ID NO: 26328 - RNA, 22 nt, Artificial Sequence
  GATA2 Guide RNA
caccacccgggucuggcgcaca

SEQ ID NO: 26329 - RNA, 22 nt, Artificial Sequence
  GATA2 Guide RNA
caccccgacucacaccacccgg

SEQ ID NO: 26330 - RNA, 22 nt, Artificial Sequence
  GATA2 Guide RNA
cacccgggucuggcgcacaacu

SEQ ID NO: 26331 - RNA, 22 nt, Artificial Sequence
  GATA2 Guide RNA
cagacccggguggugugagucg

SEQ ID NO: 26332 - RNA, 22 nt, Artificial Sequence
  GATA2 Guide RNA
cauguaguugugcgccagaccc

SEQ ID NO: 26333 - RNA, 22 nt, Artificial Sequence
  GATA2 Guide RNA
ccacccgggucuggcgcacaac

SEQ ID NO: 26334 - RNA, 22 nt, Artificial Sequence
  GATA2 Guide RNA
ccagacccggguggugugaguc

SEQ ID NO: 26335 - RNA, 22 nt, Artificial Sequence
  GATA2 Guide RNA
ccauguaguugugcgccagacc

SEQ ID NO: 26336 - RNA, 22 nt, Artificial Sequence
  GATA2 Guide RNA
ccccgacucacaccacccgggu

SEQ ID NO: 26337 - RNA, 22 nt, Artificial Sequence
  GATA2 Guide RNA
cccgacucacaccacccggguc

SEQ ID NO: 26338 - RNA, 22 nt, Artificial Sequence
  GATA2 Guide RNA
cccgggucuggcgcacaacuac

SEQ ID NO: 26339 - RNA, 22 nt, Artificial Sequence
  GATA2 Guide RNA
ccgacucacaccacccgggucu

SEQ ID NO: 26340 - RNA, 22 nt, Artificial Sequence
  GATA2 Guide RNA
ccgggucuggcgcacaacuaca

SEQ ID NO: 26341 - RNA, 22 nt, Artificial Sequence
  GATA2 Guide RNA
cgacucacaccacccgggucug

SEQ ID NO: 26342 - RNA, 22 nt, Artificial Sequence
  GATA2 Guide RNA
cgccagacccggguggugugag

SEQ ID NO: 26343 - RNA, 22 nt, Artificial Sequence
  GATA2 Guide RNA
cgggucuggcgcacaacuacau

SEQ ID NO: 26344 - RNA, 22 nt, Artificial Sequence
  GATA2 Guide RNA
cucacaccacccgggucuggcg

SEQ ID NO: 26345 - RNA, 22 nt, Artificial Sequence
  GATA2 Guide RNA
gacccggguggugugagucggg

SEQ ID NO: 26346 - RNA, 22 nt, Artificial Sequence
  GATA2 Guide RNA
gacucacaccacccgggucugg

SEQ ID NO: 26347 - RNA, 22 nt, Artificial Sequence
  GATA2 Guide RNA
gcaccccgacucacaccacccg

SEQ ID NO: 26348 - RNA, 22 nt, Artificial Sequence
  GATA2 Guide RNA
gccagacccggguggugugagu

SEQ ID NO: 26349 - RNA, 22 nt, Artificial Sequence
  GATA2 Guide RNA
gcgccagacccgggugguguga

SEQ ID NO: 26350 - RNA, 22 nt, Artificial Sequence
  GATA2 Guide RNA
gggucuggcgcacaacuacaug

SEQ ID NO: 26351 - RNA, 22 nt, Artificial Sequence
  GATA2 Guide RNA
ggguuccauguaguugugcgcc

SEQ ID NO: 26352 - RNA, 22 nt, Artificial Sequence
  GATA2 Guide RNA
ggucuggcgcacaacuacaugg

SEQ ID NO: 26353 - RNA, 22 nt, Artificial Sequence
  GATA2 Guide RNA
gguuccauguaguugugcgcca

SEQ ID NO: 26354 - RNA, 22 nt, Artificial Sequence
  GATA2 Guide RNA
guaguugugcgccagacccggg

SEQ ID NO: 26355 - RNA, 22 nt, Artificial Sequence
  GATA2 Guide RNA
gucuggcgcacaacuacaugga

SEQ ID NO: 26356 - RNA, 22 nt, Artificial Sequence
  GATA2 Guide RNA
gugcgccagacccggguggugu

SEQ ID NO: 26357 - RNA, 22 nt, Artificial Sequence
  GATA2 Guide RNA
guuccauguaguugugcgccag

SEQ ID NO: 26358 - RNA, 22 nt, Artificial Sequence
  GATA2 Guide RNA
guugugcgccagacccgggugg

SEQ ID NO: 26359 - RNA, 22 nt, Artificial Sequence
  GATA2 Guide RNA
uaguugugcgccagacccgggu

SEQ ID NO: 26360 - RNA, 22 nt, Artificial Sequence
  GATA2 Guide RNA
ucacaccacccgggucuggcgc

SEQ ID NO: 26361 - RNA, 22 nt, Artificial Sequence
  GATA2 Guide RNA
uccauguaguugugcgccagac

SEQ ID NO: 26362 - RNA, 22 nt, Artificial Sequence
  GATA2 Guide RNA
ugcgccagacccggguggugug

SEQ ID NO: 26363 - RNA, 22 nt, Artificial Sequence
  GATA2 Guide RNA
uguaguugugcgccagacccgg

SEQ ID NO: 26364 - RNA, 22 nt, Artificial Sequence
  GATA2 Guide RNA
ugugcgccagacccggguggug

SEQ ID NO: 26365 - RNA, 22 nt, Artificial Sequence
  GATA2 Guide RNA
uuccauguaguugugcgccaga

SEQ ID NO: 26366 - RNA, 22 nt, Artificial Sequence
  GATA2 Guide RNA
uugugcgccagacccggguggu

SEQ ID NO: 26367 - RNA, 20 nt, Artificial Sequence
  GATA2 Guide RNA
acaacccgggccuggcgcac

SEQ ID NO: 26368 - RNA, 20 nt, Artificial Sequence
  GATA2 Guide RNA
acacaacccgggccuggcgc

SEQ ID NO: 26369 - RNA, 20 nt, Artificial Sequence
  GATA2 Guide RNA
accccgacucacacaacccg

SEQ ID NO: 26370 - RNA, 20 nt, Artificial Sequence
  GATA2 Guide RNA
acucacacaacccgggccug

SEQ ID NO: 26371 - RNA, 20 nt, Artificial Sequence
  GATA2 Guide RNA
agcaccccgacucacacaac

SEQ ID NO: 26372 - RNA, 20 nt, Artificial Sequence
  GATA2 Guide RNA
aggcccggguugugugaguc

SEQ ID NO: 26373 - RNA, 20 nt, Artificial Sequence
  GATA2 Guide RNA
aguugugcgccaggcccggg

SEQ ID NO: 26374 - RNA, 20 nt, Artificial Sequence
  GATA2 Guide RNA
augcgcagcaccccgacuca

SEQ ID NO: 26375 - RNA, 20 nt, Artificial Sequence
  GATA2 Guide RNA
caacccgggccuggcgcaca

SEQ ID NO: 26376 - RNA, 20 nt, Artificial Sequence
  GATA2 Guide RNA
cacaacccgggccuggcgca

SEQ ID NO: 26377 - RNA, 20 nt, Artificial Sequence
  GATA2 Guide RNA
cacacaacccgggccuggcg

SEQ ID NO: 26378 - RNA, 20 nt, Artificial Sequence
  GATA2 Guide RNA
caccccgacucacacaaccc

SEQ ID NO: 26379 - RNA, 20 nt, Artificial Sequence
  GATA2 Guide RNA
cagcaccccgacucacacaa

SEQ ID NO: 26380 - RNA, 20 nt, Artificial Sequence
  GATA2 Guide RNA
caggcccggguugugugagu

SEQ ID NO: 26381 - RNA, 20 nt, Artificial Sequence
  GATA2 Guide RNA
ccaggcccggguugugugag

SEQ ID NO: 26382 - RNA, 20 nt, Artificial Sequence
  GATA2 Guide RNA
ccccgacucacacaacccgg

SEQ ID NO: 26383 - RNA, 20 nt, Artificial Sequence
  GATA2 Guide RNA
cccgacucacacaacccggg

SEQ ID NO: 26384 - RNA, 20 nt, Artificial Sequence
  GATA2 Guide RNA
cccggguugugugagucggg

SEQ ID NO: 26385 - RNA, 20 nt, Artificial Sequence
  GATA2 Guide RNA
ccgacucacacaacccgggc

SEQ ID NO: 26386 - RNA, 20 nt, Artificial Sequence
  GATA2 Guide RNA
ccggguugugugagucgggg

SEQ ID NO: 26387 - RNA, 20 nt, Artificial Sequence
  GATA2 Guide RNA
cgacucacacaacccgggcc

SEQ ID NO: 26388 - RNA, 20 nt, Artificial Sequence
  GATA2 Guide RNA
cgcagcaccccgacucacac

SEQ ID NO: 26389 - RNA, 20 nt, Artificial Sequence
  GATA2 Guide RNA
cgccaggcccggguugugug

SEQ ID NO: 26390 - RNA, 20 nt, Artificial Sequence
  GATA2 Guide RNA
cggguugugugagucggggu

SEQ ID NO: 26391 - RNA, 20 nt, Artificial Sequence
  GATA2 Guide RNA
cucacacaacccgggccugg

SEQ ID NO: 26392 - RNA, 20 nt, Artificial Sequence
  GATA2 Guide RNA
gacucacacaacccgggccu

SEQ ID NO: 26393 - RNA, 20 nt, Artificial Sequence
  GATA2 Guide RNA
gcaccccgacucacacaacc

SEQ ID NO: 26394 - RNA, 20 nt, Artificial Sequence
  GATA2 Guide RNA
gcagcaccccgacucacaca

SEQ ID NO: 26395 - RNA, 20 nt, Artificial Sequence
  GATA2 Guide RNA
gccaggcccggguuguguga

SEQ ID NO: 26396 - RNA, 20 nt, Artificial Sequence
  GATA2 Guide RNA
gcccggguugugugagucgg

SEQ ID NO: 26397 - RNA, 20 nt, Artificial Sequence
  GATA2 Guide RNA
gcgcagcaccccgacucaca

SEQ ID NO: 26398 - RNA, 20 nt, Artificial Sequence
  GATA2 Guide RNA
gcgccaggcccggguugugu

SEQ ID NO: 26399 - RNA, 20 nt, Artificial Sequence
  GATA2 Guide RNA
ggcccggguugugugagucg

SEQ ID NO: 26400 - RNA, 20 nt, Artificial Sequence
  GATA2 Guide RNA
ggguugugugagucggggug

SEQ ID NO: 26401 - RNA, 20 nt, Artificial Sequence
  GATA2 Guide RNA
gguugugugagucggggugc

SEQ ID NO: 26402 - RNA, 20 nt, Artificial Sequence
  GATA2 Guide RNA
gugcgccaggcccggguugu

SEQ ID NO: 26403 - RNA, 20 nt, Artificial Sequence
  GATA2 Guide RNA
guugugcgccaggcccgggu

SEQ ID NO: 26404 - RNA, 20 nt, Artificial Sequence
  GATA2 Guide RNA
guugugugagucggggugcu

SEQ ID NO: 26405 - RNA, 20 nt, Artificial Sequence
  GATA2 Guide RNA
uaguugugcgccaggcccgg

SEQ ID NO: 26406 - RNA, 20 nt, Artificial Sequence
  GATA2 Guide RNA
ucacacaacccgggccuggc

SEQ ID NO: 26407 - RNA, 20 nt, Artificial Sequence
  GATA2 Guide RNA
ugcgcagcaccccgacucac

SEQ ID NO: 26408 - RNA, 20 nt, Artificial Sequence
  GATA2 Guide RNA
ugcgccaggcccggguugug

SEQ ID NO: 26409 - RNA, 20 nt, Artificial Sequence
  GATA2 Guide RNA
ugugcgccaggcccggguug

SEQ ID NO: 26410 - RNA, 20 nt, Artificial Sequence
  GATA2 Guide RNA
ugugugagucggggugcugc

SEQ ID NO: 26411 - RNA, 20 nt, Artificial Sequence
  GATA2 Guide RNA
uugugcgccaggcccggguu

SEQ ID NO: 26412 - RNA, 20 nt, Artificial Sequence
  GATA2 Guide RNA
uugugugagucggggugcug

SEQ ID NO: 26413 - RNA, 21 nt, Artificial Sequence
  GATA2 Guide RNA
aaugcgcagcaccccgacuca

SEQ ID NO: 26414 - RNA, 21 nt, Artificial Sequence
  GATA2 Guide RNA
acaacccgggccuggcgcaca

SEQ ID NO: 26415 - RNA, 21 nt, Artificial Sequence
  GATA2 Guide RNA
acacaacccgggccuggcgca

SEQ ID NO: 26416 - RNA, 21 nt, Artificial Sequence
  GATA2 Guide RNA
accccgacucacacaacccgg

SEQ ID NO: 26417 - RNA, 21 nt, Artificial Sequence
  GATA2 Guide RNA
acucacacaacccgggccugg

SEQ ID NO: 26418 - RNA, 21 nt, Artificial Sequence
  GATA2 Guide RNA
agcaccccgacucacacaacc

SEQ ID NO: 26419 - RNA, 21 nt, Artificial Sequence
  GATA2 Guide RNA
aggcccggguugugugagucg

SEQ ID NO: 26420 - RNA, 21 nt, Artificial Sequence
  GATA2 Guide RNA
aguugugcgccaggcccgggu

SEQ ID NO: 26421 - RNA, 21 nt, Artificial Sequence
  GATA2 Guide RNA
augcgcagcaccccgacucac

SEQ ID NO: 26422 - RNA, 21 nt, Artificial Sequence
  GATA2 Guide RNA
caacccgggccuggcgcacaa

SEQ ID NO: 26423 - RNA, 21 nt, Artificial Sequence
  GATA2 Guide RNA
cacaacccgggccuggcgcac

SEQ ID NO: 26424 - RNA, 21 nt, Artificial Sequence
  GATA2 Guide RNA
cacacaacccgggccuggcgc

SEQ ID NO: 26425 - RNA, 21 nt, Artificial Sequence
  GATA2 Guide RNA
caccccgacucacacaacccg

SEQ ID NO: 26426 - RNA, 21 nt, Artificial Sequence
  GATA2 Guide RNA
cagcaccccgacucacacaac

SEQ ID NO: 26427 - RNA, 21 nt, Artificial Sequence
  GATA2 Guide RNA
caggcccggguugugugaguc

SEQ ID NO: 26428 - RNA, 21 nt, Artificial Sequence
  GATA2 Guide RNA
ccaggcccggguugugugagu

SEQ ID NO: 26429 - RNA, 21 nt, Artificial Sequence
  GATA2 Guide RNA
ccccgacucacacaacccggg

SEQ ID NO: 26430 - RNA, 21 nt, Artificial Sequence
  GATA2 Guide RNA
cccgacucacacaacccgggc

SEQ ID NO: 26431 - RNA, 21 nt, Artificial Sequence
  GATA2 Guide RNA
cccggguugugugagucgggg

SEQ ID NO: 26432 - RNA, 21 nt, Artificial Sequence
  GATA2 Guide RNA
ccgacucacacaacccgggcc

SEQ ID NO: 26433 - RNA, 21 nt, Artificial Sequence
  GATA2 Guide RNA
ccggguugugugagucggggu

SEQ ID NO: 26434 - RNA, 21 nt, Artificial Sequence
  GATA2 Guide RNA
cgacucacacaacccgggccu

SEQ ID NO: 26435 - RNA, 21 nt, Artificial Sequence
  GATA2 Guide RNA
cgcagcaccccgacucacaca

SEQ ID NO: 26436 - RNA, 21 nt, Artificial Sequence
  GATA2 Guide RNA
cgccaggcccggguuguguga

SEQ ID NO: 26437 - RNA, 21 nt, Artificial Sequence
  GATA2 Guide RNA
cggguugugugagucggggug

SEQ ID NO: 26438 - RNA, 21 nt, Artificial Sequence
  GATA2 Guide RNA
cucacacaacccgggccuggc

SEQ ID NO: 26439 - RNA, 21 nt, Artificial Sequence
  GATA2 Guide RNA
gacucacacaacccgggccug

SEQ ID NO: 26440 - RNA, 21 nt, Artificial Sequence
  GATA2 Guide RNA
gcaccccgacucacacaaccc

SEQ ID NO: 26441 - RNA, 21 nt, Artificial Sequence
  GATA2 Guide RNA
gcagcaccccgacucacacaa

SEQ ID NO: 26442 - RNA, 21 nt, Artificial Sequence
  GATA2 Guide RNA
gccaggcccggguugugugag

SEQ ID NO: 26443 - RNA, 21 nt, Artificial Sequence
  GATA2 Guide RNA
gcccggguugugugagucggg

SEQ ID NO: 26444 - RNA, 21 nt, Artificial Sequence
  GATA2 Guide RNA
gcgcagcaccccgacucacac

SEQ ID NO: 26445 - RNA, 21 nt, Artificial Sequence
  GATA2 Guide RNA
gcgccaggcccggguugugug

SEQ ID NO: 26446 - RNA, 21 nt, Artificial Sequence
  GATA2 Guide RNA
ggcccggguugugugagucgg

SEQ ID NO: 26447 - RNA, 21 nt, Artificial Sequence
  GATA2 Guide RNA
ggguugugugagucggggugc

SEQ ID NO: 26448 - RNA, 21 nt, Artificial Sequence
  GATA2 Guide RNA
gguugugugagucggggugcu

SEQ ID NO: 26449 - RNA, 21 nt, Artificial Sequence
  GATA2 Guide RNA
guaguugugcgccaggcccgg

SEQ ID NO: 26450 - RNA, 21 nt, Artificial Sequence
  GATA2 Guide RNA
gugcgccaggcccggguugug

SEQ ID NO: 26451 - RNA, 21 nt, Artificial Sequence
  GATA2 Guide RNA
guugugcgccaggcccggguu

SEQ ID NO: 26452 - RNA, 21 nt, Artificial Sequence
  GATA2 Guide RNA
guugugugagucggggugcug

SEQ ID NO: 26453 - RNA, 21 nt, Artificial Sequence
  GATA2 Guide RNA
uaguugugcgccaggcccggg

SEQ ID NO: 26454 - RNA, 21 nt, Artificial Sequence
  GATA2 Guide RNA
ucacacaacccgggccuggcg

SEQ ID NO: 26455 - RNA, 21 nt, Artificial Sequence
  GATA2 Guide RNA
ugcgcagcaccccgacucaca

SEQ ID NO: 26456 - RNA, 21 nt, Artificial Sequence
  GATA2 Guide RNA
ugcgccaggcccggguugugu

SEQ ID NO: 26457 - RNA, 21 nt, Artificial Sequence
  GATA2 Guide RNA
ugugcgccaggcccggguugu

SEQ ID NO: 26458 - RNA, 21 nt, Artificial Sequence
  GATA2 Guide RNA
ugugugagucggggugcugcg

SEQ ID NO: 26459 - RNA, 21 nt, Artificial Sequence
  GATA2 Guide RNA
uugugcgccaggcccggguug

SEQ ID NO: 26460 - RNA, 21 nt, Artificial Sequence
  GATA2 Guide RNA
uugugugagucggggugcugc

SEQ ID NO: 26461 - RNA, 22 nt, Artificial Sequence
  GATA2 Guide RNA
aaugcgcagcaccccgacucac

SEQ ID NO: 26462 - RNA, 22 nt, Artificial Sequence
  GATA2 Guide RNA
acaacccgggccuggcgcacaa

SEQ ID NO: 26463 - RNA, 22 nt, Artificial Sequence
  GATA2 Guide RNA
acacaacccgggccuggcgcac

SEQ ID NO: 26464 - RNA, 22 nt, Artificial Sequence
  GATA2 Guide RNA
accccgacucacacaacccggg

SEQ ID NO: 26465 - RNA, 22 nt, Artificial Sequence
  GATA2 Guide RNA
acucacacaacccgggccuggc

SEQ ID NO: 26466 - RNA, 22 nt, Artificial Sequence
  GATA2 Guide RNA
agcaccccgacucacacaaccc

SEQ ID NO: 26467 - RNA, 22 nt, Artificial Sequence
  GATA2 Guide RNA
aggcccggguugugugagucgg

SEQ ID NO: 26468 - RNA, 22 nt, Artificial Sequence
  GATA2 Guide RNA
aguugugcgccaggcccggguu

SEQ ID NO: 26469 - RNA, 22 nt, Artificial Sequence
  GATA2 Guide RNA
augcgcagcaccccgacucaca

SEQ ID NO: 26470 - RNA, 22 nt, Artificial Sequence
  GATA2 Guide RNA
caacccgggccuggcgcacaac

SEQ ID NO: 26471 - RNA, 22 nt, Artificial Sequence
  GATA2 Guide RNA
cacaacccgggccuggcgcaca

SEQ ID NO: 26472 - RNA, 22 nt, Artificial Sequence
  GATA2 Guide RNA
cacacaacccgggccuggcgca

SEQ ID NO: 26473 - RNA, 22 nt, Artificial Sequence
  GATA2 Guide RNA
caccccgacucacacaacccgg

SEQ ID NO: 26474 - RNA, 22 nt, Artificial Sequence
  GATA2 Guide RNA
cagcaccccgacucacacaacc

SEQ ID NO: 26475 - RNA, 22 nt, Artificial Sequence
  GATA2 Guide RNA
caggcccggguugugugagucg

SEQ ID NO: 26476 - RNA, 22 nt, Artificial Sequence
  GATA2 Guide RNA
ccaggcccggguugugugaguc

SEQ ID NO: 26477 - RNA, 22 nt, Artificial Sequence
  GATA2 Guide RNA
ccccgacucacacaacccgggc

SEQ ID NO: 26478 - RNA, 22 nt, Artificial Sequence
  GATA2 Guide RNA
cccgacucacacaacccgggcc

SEQ ID NO: 26479 - RNA, 22 nt, Artificial Sequence
  GATA2 Guide RNA
cccggguugugugagucggggu

SEQ ID NO: 26480 - RNA, 22 nt, Artificial Sequence
  GATA2 Guide RNA
ccgacucacacaacccgggccu

SEQ ID NO: 26481 - RNA, 22 nt, Artificial Sequence
  GATA2 Guide RNA
ccggguugugugagucggggug

SEQ ID NO: 26482 - RNA, 22 nt, Artificial Sequence
  GATA2 Guide RNA
cgacucacacaacccgggccug

SEQ ID NO: 26483 - RNA, 22 nt, Artificial Sequence
  GATA2 Guide RNA
cgcagcaccccgacucacacaa

SEQ ID NO: 26484 - RNA, 22 nt, Artificial Sequence
  GATA2 Guide RNA
cgccaggcccggguugugugag

SEQ ID NO: 26485 - RNA, 22 nt, Artificial Sequence
  GATA2 Guide RNA
cggguugugugagucggggugc

SEQ ID NO: 26486 - RNA, 22 nt, Artificial Sequence
  GATA2 Guide RNA
cucacacaacccgggccuggcg

SEQ ID NO: 26487 - RNA, 22 nt, Artificial Sequence
  GATA2 Guide RNA
gaaugcgcagcaccccgacuca

SEQ ID NO: 26488 - RNA, 22 nt, Artificial Sequence
  GATA2 Guide RNA
gacucacacaacccgggccugg

SEQ ID NO: 26489 - RNA, 22 nt, Artificial Sequence
  GATA2 Guide RNA
gcaccccgacucacacaacccg

SEQ ID NO: 26490 - RNA, 22 nt, Artificial Sequence
  GATA2 Guide RNA
gcagcaccccgacucacacaac

SEQ ID NO: 26491 - RNA, 22 nt, Artificial Sequence
  GATA2 Guide RNA
gccaggcccggguugugugagu

SEQ ID NO: 26492 - RNA, 22 nt, Artificial Sequence
  GATA2 Guide RNA
gcccggguugugugagucgggg

SEQ ID NO: 26493 - RNA, 22 nt, Artificial Sequence
  GATA2 Guide RNA
gcgcagcaccccgacucacaca

SEQ ID NO: 26494 - RNA, 22 nt, Artificial Sequence
  GATA2 Guide RNA
gcgccaggcccggguuguguga

SEQ ID NO: 26495 - RNA, 22 nt, Artificial Sequence
  GATA2 Guide RNA
ggcccggguugugugagucggg

SEQ ID NO: 26496 - RNA, 22 nt, Artificial Sequence
  GATA2 Guide RNA
ggguugugugagucggggugcu

SEQ ID NO: 26497 - RNA, 22 nt, Artificial Sequence
  GATA2 Guide RNA
gguugugugagucggggugcug

SEQ ID NO: 26498 - RNA, 22 nt, Artificial Sequence
  GATA2 Guide RNA
guaguugugcgccaggcccggg

SEQ ID NO: 26499 - RNA, 22 nt, Artificial Sequence
  GATA2 Guide RNA
gugcgccaggcccggguugugu

SEQ ID NO: 26500 - RNA, 22 nt, Artificial Sequence
  GATA2 Guide RNA
guugugcgccaggcccggguug

SEQ ID NO: 26501 - RNA, 22 nt, Artificial Sequence
  GATA2 Guide RNA
guugugugagucggggugcugc

SEQ ID NO: 26502 - RNA, 22 nt, Artificial Sequence
  GATA2 Guide RNA
uaguugugcgccaggcccgggu

SEQ ID NO: 26503 - RNA, 22 nt, Artificial Sequence
  GATA2 Guide RNA
ucacacaacccgggccuggcgc

SEQ ID NO: 26504 - RNA, 22 nt, Artificial Sequence
  GATA2 Guide RNA
ugcgcagcaccccgacucacac

SEQ ID NO: 26505 - RNA, 22 nt, Artificial Sequence
  GATA2 Guide RNA
ugcgccaggcccggguugugug

SEQ ID NO: 26506 - RNA, 22 nt, Artificial Sequence
  GATA2 Guide RNA
uguaguugugcgccaggcccgg

SEQ ID NO: 26507 - RNA, 22 nt, Artificial Sequence
  GATA2 Guide RNA
ugugcgccaggcccggguugug

SEQ ID NO: 26508 - RNA, 22 nt, Artificial Sequence
  GATA2 Guide RNA
ugugugagucggggugcugcgc

SEQ ID NO: 26509 - RNA, 22 nt, Artificial Sequence
  GATA2 Guide RNA
uugugcgccaggcccggguugu

SEQ ID NO: 26510 - RNA, 22 nt, Artificial Sequence
  GATA2 Guide RNA
uugugugagucggggugcugcg

SEQ ID NO: 26511 - RNA, 20 nt, Artificial Sequence
  GATA2 Guide RNA
aaugcgcagcaccccguguc

SEQ ID NO: 26512 - RNA, 20 nt, Artificial Sequence
  GATA2 Guide RNA
acacggggugcugcgcauuc

SEQ ID NO: 26513 - RNA, 20 nt, Artificial Sequence
  GATA2 Guide RNA
accccguguccucacaccac

SEQ ID NO: 26514 - RNA, 20 nt, Artificial Sequence
  GATA2 Guide RNA
acggggugcugcgcauucag

SEQ ID NO: 26515 - RNA, 20 nt, Artificial Sequence
  GATA2 Guide RNA
agcaccccguguccucacac

SEQ ID NO: 26516 - RNA, 20 nt, Artificial Sequence
  GATA2 Guide RNA
aggacacggggugcugcgca

SEQ ID NO: 26517 - RNA, 20 nt, Artificial Sequence
  GATA2 Guide RNA
aggcccggguggugugagga

SEQ ID NO: 26518 - RNA, 20 nt, Artificial Sequence
  GATA2 Guide RNA
augcgcagcaccccgugucc

SEQ ID NO: 26519 - RNA, 20 nt, Artificial Sequence
  GATA2 Guide RNA
caccccguguccucacacca

SEQ ID NO: 26520 - RNA, 20 nt, Artificial Sequence
  GATA2 Guide RNA
cacggggugcugcgcauuca

SEQ ID NO: 26521 - RNA, 20 nt, Artificial Sequence
  GATA2 Guide RNA
cagcaccccguguccucaca

SEQ ID NO: 26522 - RNA, 20 nt, Artificial Sequence
  GATA2 Guide RNA
caggcccggguggugugagg

SEQ ID NO: 26523 - RNA, 20 nt, Artificial Sequence
  GATA2 Guide RNA
ccaggcccggguggugugag

SEQ ID NO: 26524 - RNA, 20 nt, Artificial Sequence
  GATA2 Guide RNA
ccccguguccucacaccacc

SEQ ID NO: 26525 - RNA, 20 nt, Artificial Sequence
  GATA2 Guide RNA
cccggguggugugaggacac

SEQ ID NO: 26526 - RNA, 20 nt, Artificial Sequence
  GATA2 Guide RNA
cccguguccucacaccaccc

SEQ ID NO: 26527 - RNA, 20 nt, Artificial Sequence
  GATA2 Guide RNA
ccggguggugugaggacacg

SEQ ID NO: 26528 - RNA, 20 nt, Artificial Sequence
  GATA2 Guide RNA
ccguguccucacaccacccg

SEQ ID NO: 26529 - RNA, 20 nt, Artificial Sequence
  GATA2 Guide RNA
cgcagcaccccguguccuca

SEQ ID NO: 26530 - RNA, 20 nt, Artificial Sequence
  GATA2 Guide RNA
cgccaggcccggguggugug

SEQ ID NO: 26531 - RNA, 20 nt, Artificial Sequence
  GATA2 Guide RNA
cggguggugugaggacacgg

SEQ ID NO: 26532 - RNA, 20 nt, Artificial Sequence
  GATA2 Guide RNA
cgugcugaaugcgcagcacc

SEQ ID NO: 26533 - RNA, 20 nt, Artificial Sequence
  GATA2 Guide RNA
cguguccucacaccacccgg

SEQ ID NO: 26534 - RNA, 20 nt, Artificial Sequence
  GATA2 Guide RNA
cugaaugcgcagcaccccgu

SEQ ID NO: 26535 - RNA, 20 nt, Artificial Sequence
  GATA2 Guide RNA
gaaugcgcagcaccccgugu

SEQ ID NO: 26536 - RNA, 20 nt, Artificial Sequence
  GATA2 Guide RNA
gacacggggugcugcgcauu

SEQ ID NO: 26537 - RNA, 20 nt, Artificial Sequence
  GATA2 Guide RNA
gaggacacggggugcugcgc

SEQ ID NO: 26538 - RNA, 20 nt, Artificial Sequence
  GATA2 Guide RNA
gcaccccguguccucacacc

SEQ ID NO: 26539 - RNA, 20 nt, Artificial Sequence
  GATA2 Guide RNA
gcagcaccccguguccucac

SEQ ID NO: 26540 - RNA, 20 nt, Artificial Sequence
  GATA2 Guide RNA
gccaggcccgggugguguga

SEQ ID NO: 26541 - RNA, 20 nt, Artificial Sequence
  GATA2 Guide RNA
gcccggguggugugaggaca

SEQ ID NO: 26542 - RNA, 20 nt, Artificial Sequence
  GATA2 Guide RNA
gcgcagcaccccguguccuc

SEQ ID NO: 26543 - RNA, 20 nt, Artificial Sequence
  GATA2 Guide RNA
gcugaaugcgcagcaccccg

SEQ ID NO: 26544 - RNA, 20 nt, Artificial Sequence
  GATA2 Guide RNA
ggacacggggugcugcgcau

SEQ ID NO: 26545 - RNA, 20 nt, Artificial Sequence
  GATA2 Guide RNA
ggcccggguggugugaggac

SEQ ID NO: 26546 - RNA, 20 nt, Artificial Sequence
  GATA2 Guide RNA
ggguggugugaggacacggg

SEQ ID NO: 26547 - RNA, 20 nt, Artificial Sequence
  GATA2 Guide RNA
gguggugugaggacacgggg

SEQ ID NO: 26548 - RNA, 20 nt, Artificial Sequence
  GATA2 Guide RNA
ggugugaggacacggggugc

SEQ ID NO: 26549 - RNA, 20 nt, Artificial Sequence
  GATA2 Guide RNA
guccucacaccacccgggcc

SEQ ID NO: 26550 - RNA, 20 nt, Artificial Sequence
  GATA2 Guide RNA
gugaggacacggggugcugc

SEQ ID NO: 26551 - RNA, 20 nt, Artificial Sequence
  GATA2 Guide RNA
gugcugaaugcgcagcaccc

SEQ ID NO: 26552 - RNA, 20 nt, Artificial Sequence
  GATA2 Guide RNA
guggugugaggacacggggu

SEQ ID NO: 26553 - RNA, 20 nt, Artificial Sequence
  GATA2 Guide RNA
guguccucacaccacccggg

SEQ ID NO: 26554 - RNA, 20 nt, Artificial Sequence
  GATA2 Guide RNA
gugugaggacacggggugcu

SEQ ID NO: 26555 - RNA, 20 nt, Artificial Sequence
  GATA2 Guide RNA
uccucacaccacccgggccu

SEQ ID NO: 26556 - RNA, 20 nt, Artificial Sequence
  GATA2 Guide RNA
ugaaugcgcagcaccccgug

SEQ ID NO: 26557 - RNA, 20 nt, Artificial Sequence
  GATA2 Guide RNA
ugaggacacggggugcugcg

SEQ ID NO: 26558 - RNA, 20 nt, Artificial Sequence
  GATA2 Guide RNA
ugcgcagcaccccguguccu

SEQ ID NO: 26559 - RNA, 20 nt, Artificial Sequence
  GATA2 Guide RNA
ugcugaaugcgcagcacccc

SEQ ID NO: 26560 - RNA, 20 nt, Artificial Sequence
  GATA2 Guide RNA
uggugugaggacacggggug

SEQ ID NO: 26561 - RNA, 20 nt, Artificial Sequence
  GATA2 Guide RNA
uguccucacaccacccgggc

SEQ ID NO: 26562 - RNA, 20 nt, Artificial Sequence
  GATA2 Guide RNA
ugugaggacacggggugcug

SEQ ID NO: 26563 - RNA, 21 nt, Artificial Sequence
  GATA2 Guide RNA
aaugcgcagcaccccgugucc

SEQ ID NO: 26564 - RNA, 21 nt, Artificial Sequence
  GATA2 Guide RNA
acacggggugcugcgcauuca

SEQ ID NO: 26565 - RNA, 21 nt, Artificial Sequence
  GATA2 Guide RNA
accccguguccucacaccacc

SEQ ID NO: 26566 - RNA, 21 nt, Artificial Sequence
  GATA2 Guide RNA
acggggugcugcgcauucagc

SEQ ID NO: 26567 - RNA, 21 nt, Artificial Sequence
  GATA2 Guide RNA
agcaccccguguccucacacc

SEQ ID NO: 26568 - RNA, 21 nt, Artificial Sequence
  GATA2 Guide RNA
aggacacggggugcugcgcau

SEQ ID NO: 26569 - RNA, 21 nt, Artificial Sequence
  GATA2 Guide RNA
aggcccggguggugugaggac

SEQ ID NO: 26570 - RNA, 21 nt, Artificial Sequence
  GATA2 Guide RNA
augcgcagcaccccguguccu

SEQ ID NO: 26571 - RNA, 21 nt, Artificial Sequence
  GATA2 Guide RNA
caccccguguccucacaccac

SEQ ID NO: 26572 - RNA, 21 nt, Artificial Sequence
  GATA2 Guide RNA
cacggggugcugcgcauucag

SEQ ID NO: 26573 - RNA, 21 nt, Artificial Sequence
  GATA2 Guide RNA
cagcaccccguguccucacac

SEQ ID NO: 26574 - RNA, 21 nt, Artificial Sequence
  GATA2 Guide RNA
caggcccggguggugugagga

SEQ ID NO: 26575 - RNA, 21 nt, Artificial Sequence
  GATA2 Guide RNA
ccaggcccggguggugugagg

SEQ ID NO: 26576 - RNA, 21 nt, Artificial Sequence
  GATA2 Guide RNA
ccccguguccucacaccaccc

SEQ ID NO: 26577 - RNA, 21 nt, Artificial Sequence
  GATA2 Guide RNA
cccggguggugugaggacacg

SEQ ID NO: 26578 - RNA, 21 nt, Artificial Sequence
  GATA2 Guide RNA
cccguguccucacaccacccg

SEQ ID NO: 26579 - RNA, 21 nt, Artificial Sequence
  GATA2 Guide RNA
ccggguggugugaggacacgg

SEQ ID NO: 26580 - RNA, 21 nt, Artificial Sequence
  GATA2 Guide RNA
ccgugcugaaugcgcagcacc

SEQ ID NO: 26581 - RNA, 21 nt, Artificial Sequence
  GATA2 Guide RNA
ccguguccucacaccacccgg

SEQ ID NO: 26582 - RNA, 21 nt, Artificial Sequence
  GATA2 Guide RNA
cgcagcaccccguguccucac

SEQ ID NO: 26583 - RNA, 21 nt, Artificial Sequence
  GATA2 Guide RNA
cgccaggcccgggugguguga

SEQ ID NO: 26584 - RNA, 21 nt, Artificial Sequence
  GATA2 Guide RNA
cggguggugugaggacacggg

SEQ ID NO: 26585 - RNA, 21 nt, Artificial Sequence
  GATA2 Guide RNA
cgugcugaaugcgcagcaccc

SEQ ID NO: 26586 - RNA, 21 nt, Artificial Sequence
  GATA2 Guide RNA
cguguccucacaccacccggg

SEQ ID NO: 26587 - RNA, 21 nt, Artificial Sequence
  GATA2 Guide RNA
cugaaugcgcagcaccccgug

SEQ ID NO: 26588 - RNA, 21 nt, Artificial Sequence
  GATA2 Guide RNA
gaaugcgcagcaccccguguc

SEQ ID NO: 26589 - RNA, 21 nt, Artificial Sequence
  GATA2 Guide RNA
gacacggggugcugcgcauuc

SEQ ID NO: 26590 - RNA, 21 nt, Artificial Sequence
  GATA2 Guide RNA
gaggacacggggugcugcgca

SEQ ID NO: 26591 - RNA, 21 nt, Artificial Sequence
  GATA2 Guide RNA
gcaccccguguccucacacca

SEQ ID NO: 26592 - RNA, 21 nt, Artificial Sequence
  GATA2 Guide RNA
gcagcaccccguguccucaca

SEQ ID NO: 26593 - RNA, 21 nt, Artificial Sequence
  GATA2 Guide RNA
gccaggcccggguggugugag

SEQ ID NO: 26594 - RNA, 21 nt, Artificial Sequence
  GATA2 Guide RNA
gcccggguggugugaggacac

SEQ ID NO: 26595 - RNA, 21 nt, Artificial Sequence
  GATA2 Guide RNA
gcgcagcaccccguguccuca

SEQ ID NO: 26596 - RNA, 21 nt, Artificial Sequence
  GATA2 Guide RNA
gcugaaugcgcagcaccccgu

SEQ ID NO: 26597 - RNA, 21 nt, Artificial Sequence
  GATA2 Guide RNA
ggacacggggugcugcgcauu

SEQ ID NO: 26598 - RNA, 21 nt, Artificial Sequence
  GATA2 Guide RNA
ggcccggguggugugaggaca

SEQ ID NO: 26599 - RNA, 21 nt, Artificial Sequence
  GATA2 Guide RNA
ggguggugugaggacacgggg

SEQ ID NO: 26600 - RNA, 21 nt, Artificial Sequence
  GATA2 Guide RNA
gguggugugaggacacggggu

SEQ ID NO: 26601 - RNA, 21 nt, Artificial Sequence
  GATA2 Guide RNA
ggugugaggacacggggugcu

SEQ ID NO: 26602 - RNA, 21 nt, Artificial Sequence
  GATA2 Guide RNA
guccucacaccacccgggccu

SEQ ID NO: 26603 - RNA, 21 nt, Artificial Sequence
  GATA2 Guide RNA
gugaggacacggggugcugcg

SEQ ID NO: 26604 - RNA, 21 nt, Artificial Sequence
  GATA2 Guide RNA
gugcugaaugcgcagcacccc

SEQ ID NO: 26605 - RNA, 21 nt, Artificial Sequence
  GATA2 Guide RNA
guggugugaggacacggggug

SEQ ID NO: 26606 - RNA, 21 nt, Artificial Sequence
  GATA2 Guide RNA
guguccucacaccacccgggc

SEQ ID NO: 26607 - RNA, 21 nt, Artificial Sequence
  GATA2 Guide RNA
gugugaggacacggggugcug

SEQ ID NO: 26608 - RNA, 21 nt, Artificial Sequence
  GATA2 Guide RNA
uccucacaccacccgggccug

SEQ ID NO: 26609 - RNA, 21 nt, Artificial Sequence
  GATA2 Guide RNA
ugaaugcgcagcaccccgugu

SEQ ID NO: 26610 - RNA, 21 nt, Artificial Sequence
  GATA2 Guide RNA
ugaggacacggggugcugcgc

SEQ ID NO: 26611 - RNA, 21 nt, Artificial Sequence
  GATA2 Guide RNA
ugcgcagcaccccguguccuc

SEQ ID NO: 26612 - RNA, 21 nt, Artificial Sequence
  GATA2 Guide RNA
ugcugaaugcgcagcaccccg

SEQ ID NO: 26613 - RNA, 21 nt, Artificial Sequence
  GATA2 Guide RNA
uggugugaggacacggggugc

SEQ ID NO: 26614 - RNA, 21 nt, Artificial Sequence
  GATA2 Guide RNA
uguccucacaccacccgggcc

SEQ ID NO: 26615 - RNA, 21 nt, Artificial Sequence
  GATA2 Guide RNA
ugugaggacacggggugcugc

SEQ ID NO: 26616 - RNA, 22 nt, Artificial Sequence
  GATA2 Guide RNA
aaugcgcagcaccccguguccu

SEQ ID NO: 26617 - RNA, 22 nt, Artificial Sequence
  GATA2 Guide RNA
acacggggugcugcgcauucag

SEQ ID NO: 26618 - RNA, 22 nt, Artificial Sequence
  GATA2 Guide RNA
accccguguccucacaccaccc

SEQ ID NO: 26619 - RNA, 22 nt, Artificial Sequence
  GATA2 Guide RNA
acggggugcugcgcauucagca

SEQ ID NO: 26620 - RNA, 22 nt, Artificial Sequence
  GATA2 Guide RNA
agcaccccguguccucacacca

SEQ ID NO: 26621 - RNA, 22 nt, Artificial Sequence
  GATA2 Guide RNA
aggacacggggugcugcgcauu

SEQ ID NO: 26622 - RNA, 22 nt, Artificial Sequence
  GATA2 Guide RNA
aggcccggguggugugaggaca

SEQ ID NO: 26623 - RNA, 22 nt, Artificial Sequence
  GATA2 Guide RNA
augcgcagcaccccguguccuc

SEQ ID NO: 26624 - RNA, 22 nt, Artificial Sequence
  GATA2 Guide RNA
caccccguguccucacaccacc

SEQ ID NO: 26625 - RNA, 22 nt, Artificial Sequence
  GATA2 Guide RNA
cacggggugcugcgcauucagc

SEQ ID NO: 26626 - RNA, 22 nt, Artificial Sequence
  GATA2 Guide RNA
cagcaccccguguccucacacc

SEQ ID NO: 26627 - RNA, 22 nt, Artificial Sequence
  GATA2 Guide RNA
caggcccggguggugugaggac

SEQ ID NO: 26628 - RNA, 22 nt, Artificial Sequence
  GATA2 Guide RNA
ccaggcccggguggugugagga

SEQ ID NO: 26629 - RNA, 22 nt, Artificial Sequence
  GATA2 Guide RNA
ccccguguccucacaccacccg

SEQ ID NO: 26630 - RNA, 22 nt, Artificial Sequence
  GATA2 Guide RNA
cccggguggugugaggacacgg

SEQ ID NO: 26631 - RNA, 22 nt, Artificial Sequence
  GATA2 Guide RNA
cccguguccucacaccacccgg

SEQ ID NO: 26632 - RNA, 22 nt, Artificial Sequence
  GATA2 Guide RNA
ccggguggugugaggacacggg

SEQ ID NO: 26633 - RNA, 22 nt, Artificial Sequence
  GATA2 Guide RNA
ccgugcugaaugcgcagcaccc

SEQ ID NO: 26634 - RNA, 22 nt, Artificial Sequence
  GATA2 Guide RNA
ccguguccucacaccacccggg

SEQ ID NO: 26635 - RNA, 22 nt, Artificial Sequence
  GATA2 Guide RNA
cgcagcaccccguguccucaca

SEQ ID NO: 26636 - RNA, 22 nt, Artificial Sequence
  GATA2 Guide RNA
cgccaggcccggguggugugag

SEQ ID NO: 26637 - RNA, 22 nt, Artificial Sequence
  GATA2 Guide RNA
cggguggugugaggacacgggg

SEQ ID NO: 26638 - RNA, 22 nt, Artificial Sequence
  GATA2 Guide RNA
cgugcugaaugcgcagcacccc

SEQ ID NO: 26639 - RNA, 22 nt, Artificial Sequence
  GATA2 Guide RNA
cguguccucacaccacccgggc

SEQ ID NO: 26640 - RNA, 22 nt, Artificial Sequence
  GATA2 Guide RNA
cugaaugcgcagcaccccgugu

SEQ ID NO: 26641 - RNA, 22 nt, Artificial Sequence
  GATA2 Guide RNA
gaaugcgcagcaccccgugucc

SEQ ID NO: 26642 - RNA, 22 nt, Artificial Sequence
  GATA2 Guide RNA
gacacggggugcugcgcauuca

SEQ ID NO: 26643 - RNA, 22 nt, Artificial Sequence
  GATA2 Guide RNA
gaggacacggggugcugcgcau

SEQ ID NO: 26644 - RNA, 22 nt, Artificial Sequence
  GATA2 Guide RNA
gcaccccguguccucacaccac

SEQ ID NO: 26645 - RNA, 22 nt, Artificial Sequence
  GATA2 Guide RNA
gcagcaccccguguccucacac

SEQ ID NO: 26646 - RNA, 22 nt, Artificial Sequence
  GATA2 Guide RNA
gccaggcccggguggugugagg

SEQ ID NO: 26647 - RNA, 22 nt, Artificial Sequence
  GATA2 Guide RNA
gcccggguggugugaggacacg

SEQ ID NO: 26648 - RNA, 22 nt, Artificial Sequence
  GATA2 Guide RNA
gccgugcugaaugcgcagcacc

SEQ ID NO: 26649 - RNA, 22 nt, Artificial Sequence
  GATA2 Guide RNA
gcgcagcaccccguguccucac

SEQ ID NO: 26650 - RNA, 22 nt, Artificial Sequence
  GATA2 Guide RNA
gcgccaggcccgggugguguga

SEQ ID NO: 26651 - RNA, 22 nt, Artificial Sequence
  GATA2 Guide RNA
gcugaaugcgcagcaccccgug

SEQ ID NO: 26652 - RNA, 22 nt, Artificial Sequence
  GATA2 Guide RNA
ggacacggggugcugcgcauuc

SEQ ID NO: 26653 - RNA, 22 nt, Artificial Sequence
  GATA2 Guide RNA
ggcccggguggugugaggacac

SEQ ID NO: 26654 - RNA, 22 nt, Artificial Sequence
  GATA2 Guide RNA
ggguggugugaggacacggggu

SEQ ID NO: 26655 - RNA, 22 nt, Artificial Sequence
  GATA2 Guide RNA
gguggugugaggacacggggug

SEQ ID NO: 26656 - RNA, 22 nt, Artificial Sequence
  GATA2 Guide RNA
ggugugaggacacggggugcug

SEQ ID NO: 26657 - RNA, 22 nt, Artificial Sequence
  GATA2 Guide RNA
guccucacaccacccgggccug

SEQ ID NO: 26658 - RNA, 22 nt, Artificial Sequence
  GATA2 Guide RNA
gugaggacacggggugcugcgc

SEQ ID NO: 26659 - RNA, 22 nt, Artificial Sequence
  GATA2 Guide RNA
gugcugaaugcgcagcaccccg

SEQ ID NO: 26660 - RNA, 22 nt, Artificial Sequence
  GATA2 Guide RNA
guggugugaggacacggggugc

SEQ ID NO: 26661 - RNA, 22 nt, Artificial Sequence
  GATA2 Guide RNA
guguccucacaccacccgggcc

SEQ ID NO: 26662 - RNA, 22 nt, Artificial Sequence
  GATA2 Guide RNA
gugugaggacacggggugcugc

SEQ ID NO: 26663 - RNA, 22 nt, Artificial Sequence
  GATA2 Guide RNA
uccucacaccacccgggccugg

SEQ ID NO: 26664 - RNA, 22 nt, Artificial Sequence
  GATA2 Guide RNA
ugaaugcgcagcaccccguguc

SEQ ID NO: 26665 - RNA, 22 nt, Artificial Sequence
  GATA2 Guide RNA
ugaggacacggggugcugcgca

SEQ ID NO: 26666 - RNA, 22 nt, Artificial Sequence
  GATA2 Guide RNA
ugcgcagcaccccguguccuca

SEQ ID NO: 26667 - RNA, 22 nt, Artificial Sequence
  GATA2 Guide RNA
ugcgccaggcccggguggugug

SEQ ID NO: 26668 - RNA, 22 nt, Artificial Sequence
  GATA2 Guide RNA
ugcugaaugcgcagcaccccgu

SEQ ID NO: 26669 - RNA, 22 nt, Artificial Sequence
  GATA2 Guide RNA
uggugugaggacacggggugcu

SEQ ID NO: 26670 - RNA, 22 nt, Artificial Sequence
  GATA2 Guide RNA
uguccucacaccacccgggccu

SEQ ID NO: 26671 - RNA, 22 nt, Artificial Sequence
  GATA2 Guide RNA
ugugaggacacggggugcugcg

SEQ ID NO: 26672 - RNA, 20 nt, Artificial Sequence
  GATA2 Guide RNA
aaugcgcagcaccgcgacuc

SEQ ID NO: 26673 - RNA, 20 nt, Artificial Sequence
  GATA2 Guide RNA
accgcgacucacaccacccg

SEQ ID NO: 26674 - RNA, 20 nt, Artificial Sequence
  GATA2 Guide RNA
agcaccgcgacucacaccac

SEQ ID NO: 26675 - RNA, 20 nt, Artificial Sequence
  GATA2 Guide RNA
aggcccggguggugugaguc

SEQ ID NO: 26676 - RNA, 20 nt, Artificial Sequence
  GATA2 Guide RNA
agucgcggugcugcgcauuc

SEQ ID NO: 26677 - RNA, 20 nt, Artificial Sequence
  GATA2 Guide RNA
augcgcagcaccgcgacuca

SEQ ID NO: 26678 - RNA, 20 nt, Artificial Sequence
  GATA2 Guide RNA
caccgcgacucacaccaccc

SEQ ID NO: 26679 - RNA, 20 nt, Artificial Sequence
  GATA2 Guide RNA
cagcaccgcgacucacacca

SEQ ID NO: 26680 - RNA, 20 nt, Artificial Sequence
  GATA2 Guide RNA
caggcccggguggugugagu

SEQ ID NO: 26681 - RNA, 20 nt, Artificial Sequence
  GATA2 Guide RNA
cccggguggugugagucgcg

SEQ ID NO: 26682 - RNA, 20 nt, Artificial Sequence
  GATA2 Guide RNA
ccgcgacucacaccacccgg

SEQ ID NO: 26683 - RNA, 20 nt, Artificial Sequence
  GATA2 Guide RNA
ccggguggugugagucgcgg

SEQ ID NO: 26684 - RNA, 20 nt, Artificial Sequence
  GATA2 Guide RNA
ccgugcugaaugcgcagcac

SEQ ID NO: 26685 - RNA, 20 nt, Artificial Sequence
  GATA2 Guide RNA
cgcagcaccgcgacucacac

SEQ ID NO: 26686 - RNA, 20 nt, Artificial Sequence
  GATA2 Guide RNA
cgcgacucacaccacccggg

SEQ ID NO: 26687 - RNA, 20 nt, Artificial Sequence
  GATA2 Guide RNA
cgcggugcugcgcauucagc

SEQ ID NO: 26688 - RNA, 20 nt, Artificial Sequence
  GATA2 Guide RNA
cggguggugugagucgcggu

SEQ ID NO: 26689 - RNA, 20 nt, Artificial Sequence
  GATA2 Guide RNA
cggugcugcgcauucagcac

SEQ ID NO: 26690 - RNA, 20 nt, Artificial Sequence
  GATA2 Guide RNA
cugaaugcgcagcaccgcga

SEQ ID NO: 26691 - RNA, 20 nt, Artificial Sequence
  GATA2 Guide RNA
gaaugcgcagcaccgcgacu

SEQ ID NO: 26692 - RNA, 20 nt, Artificial Sequence
  GATA2 Guide RNA
gagucgcggugcugcgcauu

SEQ ID NO: 26693 - RNA, 20 nt, Artificial Sequence
  GATA2 Guide RNA
gcaccgcgacucacaccacc

SEQ ID NO: 26694 - RNA, 20 nt, Artificial Sequence
  GATA2 Guide RNA
gcagcaccgcgacucacacc

SEQ ID NO: 26695 - RNA, 20 nt, Artificial Sequence
  GATA2 Guide RNA
gcccggguggugugagucgc

SEQ ID NO: 26696 - RNA, 20 nt, Artificial Sequence
  GATA2 Guide RNA
gccgugcugaaugcgcagca

SEQ ID NO: 26697 - RNA, 20 nt, Artificial Sequence
  GATA2 Guide RNA
gcgcagcaccgcgacucaca

SEQ ID NO: 26698 - RNA, 20 nt, Artificial Sequence
  GATA2 Guide RNA
gcggugcugcgcauucagca

SEQ ID NO: 26699 - RNA, 20 nt, Artificial Sequence
  GATA2 Guide RNA
gcugaaugcgcagcaccgcg

SEQ ID NO: 26700 - RNA, 20 nt, Artificial Sequence
  GATA2 Guide RNA
ggcccggguggugugagucg

SEQ ID NO: 26701 - RNA, 20 nt, Artificial Sequence
  GATA2 Guide RNA
ggccgugcugaaugcgcagc

SEQ ID NO: 26702 - RNA, 20 nt, Artificial Sequence
  GATA2 Guide RNA
ggguggugugagucgcggug

SEQ ID NO: 26703 - RNA, 20 nt, Artificial Sequence
  GATA2 Guide RNA
gguggugugagucgcggugc

SEQ ID NO: 26704 - RNA, 20 nt, Artificial Sequence
  GATA2 Guide RNA
ggugugagucgcggugcugc

SEQ ID NO: 26705 - RNA, 20 nt, Artificial Sequence
  GATA2 Guide RNA
gucgcggugcugcgcauuca

SEQ ID NO: 26706 - RNA, 20 nt, Artificial Sequence
  GATA2 Guide RNA
gugagucgcggugcugcgca

SEQ ID NO: 26707 - RNA, 20 nt, Artificial Sequence
  GATA2 Guide RNA
gugcugaaugcgcagcaccg

SEQ ID NO: 26708 - RNA, 20 nt, Artificial Sequence
  GATA2 Guide RNA
guggugugagucgcggugcu

SEQ ID NO: 26709 - RNA, 20 nt, Artificial Sequence
  GATA2 Guide RNA
gugugagucgcggugcugcg

SEQ ID NO: 26710 - RNA, 20 nt, Artificial Sequence
  GATA2 Guide RNA
ucgcggugcugcgcauucag

SEQ ID NO: 26711 - RNA, 20 nt, Artificial Sequence
  GATA2 Guide RNA
ugaaugcgcagcaccgcgac

SEQ ID NO: 26712 - RNA, 20 nt, Artificial Sequence
  GATA2 Guide RNA
ugagucgcggugcugcgcau

SEQ ID NO: 26713 - RNA, 20 nt, Artificial Sequence
  GATA2 Guide RNA
ugcgcagcaccgcgacucac

SEQ ID NO: 26714 - RNA, 20 nt, Artificial Sequence
  GATA2 Guide RNA
ugcugaaugcgcagcaccgc

SEQ ID NO: 26715 - RNA, 20 nt, Artificial Sequence
  GATA2 Guide RNA
uggugugagucgcggugcug

SEQ ID NO: 26716 - RNA, 20 nt, Artificial Sequence
  GATA2 Guide RNA
ugugagucgcggugcugcgc

SEQ ID NO: 26717 - RNA, 21 nt, Artificial Sequence
  GATA2 Guide RNA
aaugcgcagcaccgcgacuca

SEQ ID NO: 26718 - RNA, 21 nt, Artificial Sequence
  GATA2 Guide RNA
accgcgacucacaccacccgg

SEQ ID NO: 26719 - RNA, 21 nt, Artificial Sequence
  GATA2 Guide RNA
agcaccgcgacucacaccacc

SEQ ID NO: 26720 - RNA, 21 nt, Artificial Sequence
  GATA2 Guide RNA
aggcccggguggugugagucg

SEQ ID NO: 26721 - RNA, 21 nt, Artificial Sequence
  GATA2 Guide RNA
agucgcggugcugcgcauuca

SEQ ID NO: 26722 - RNA, 21 nt, Artificial Sequence
  GATA2 Guide RNA
augcgcagcaccgcgacucac

SEQ ID NO: 26723 - RNA, 21 nt, Artificial Sequence
  GATA2 Guide RNA
caccgcgacucacaccacccg

SEQ ID NO: 26724 - RNA, 21 nt, Artificial Sequence
  GATA2 Guide RNA
cagcaccgcgacucacaccac

SEQ ID NO: 26725 - RNA, 21 nt, Artificial Sequence
  GATA2 Guide RNA
caggcccggguggugugaguc

SEQ ID NO: 26726 - RNA, 21 nt, Artificial Sequence
  GATA2 Guide RNA
ccaggcccggguggugugagu

SEQ ID NO: 26727 - RNA, 21 nt, Artificial Sequence
  GATA2 Guide RNA
cccggguggugugagucgcgg

SEQ ID NO: 26728 - RNA, 21 nt, Artificial Sequence
  GATA2 Guide RNA
ccgcgacucacaccacccggg

SEQ ID NO: 26729 - RNA, 21 nt, Artificial Sequence
  GATA2 Guide RNA
ccggguggugugagucgcggu

SEQ ID NO: 26730 - RNA, 21 nt, Artificial Sequence
  GATA2 Guide RNA
cgcagcaccgcgacucacacc

SEQ ID NO: 26731 - RNA, 21 nt, Artificial Sequence
  GATA2 Guide RNA
cgcgacucacaccacccgggc

SEQ ID NO: 26732 - RNA, 21 nt, Artificial Sequence
  GATA2 Guide RNA
cgcggugcugcgcauucagca

SEQ ID NO: 26733 - RNA, 21 nt, Artificial Sequence
  GATA2 Guide RNA
cggccgugcugaaugcgcagc

SEQ ID NO: 26734 - RNA, 21 nt, Artificial Sequence
  GATA2 Guide RNA
cggguggugugagucgcggug

SEQ ID NO: 26735 - RNA, 21 nt, Artificial Sequence
  GATA2 Guide RNA
cggugcugcgcauucagcacg

SEQ ID NO: 26736 - RNA, 21 nt, Artificial Sequence
  GATA2 Guide RNA
cgugcugaaugcgcagcaccg

SEQ ID NO: 26737 - RNA, 21 nt, Artificial Sequence
  GATA2 Guide RNA
cugaaugcgcagcaccgcgac

SEQ ID NO: 26738 - RNA, 21 nt, Artificial Sequence
  GATA2 Guide RNA
gaaugcgcagcaccgcgacuc

SEQ ID NO: 26739 - RNA, 21 nt, Artificial Sequence
  GATA2 Guide RNA
gagucgcggugcugcgcauuc

SEQ ID NO: 26740 - RNA, 21 nt, Artificial Sequence
  GATA2 Guide RNA
gcaccgcgacucacaccaccc

SEQ ID NO: 26741 - RNA, 21 nt, Artificial Sequence
  GATA2 Guide RNA
gcagcaccgcgacucacacca

SEQ ID NO: 26742 - RNA, 21 nt, Artificial Sequence
  GATA2 Guide RNA
gcccggguggugugagucgcg

SEQ ID NO: 26743 - RNA, 21 nt, Artificial Sequence
  GATA2 Guide RNA
gccgugcugaaugcgcagcac

SEQ ID NO: 26744 - RNA, 21 nt, Artificial Sequence
  GATA2 Guide RNA
gcgcagcaccgcgacucacac

SEQ ID NO: 26745 - RNA, 21 nt, Artificial Sequence
  GATA2 Guide RNA
gcggugcugcgcauucagcac

SEQ ID NO: 26746 - RNA, 21 nt, Artificial Sequence
  GATA2 Guide RNA
gcugaaugcgcagcaccgcga

SEQ ID NO: 26747 - RNA, 21 nt, Artificial Sequence
  GATA2 Guide RNA
ggcccggguggugugagucgc

SEQ ID NO: 26748 - RNA, 21 nt, Artificial Sequence
  GATA2 Guide RNA
ggccgugcugaaugcgcagca

SEQ ID NO: 26749 - RNA, 21 nt, Artificial Sequence
  GATA2 Guide RNA
ggguggugugagucgcggugc

SEQ ID NO: 26750 - RNA, 21 nt, Artificial Sequence
  GATA2 Guide RNA
gguggugugagucgcggugcu

SEQ ID NO: 26751 - RNA, 21 nt, Artificial Sequence
  GATA2 Guide RNA
ggugugagucgcggugcugcg

SEQ ID NO: 26752 - RNA, 21 nt, Artificial Sequence
  GATA2 Guide RNA
gucgcggugcugcgcauucag

SEQ ID NO: 26753 - RNA, 21 nt, Artificial Sequence
  GATA2 Guide RNA
gugagucgcggugcugcgcau

SEQ ID NO: 26754 - RNA, 21 nt, Artificial Sequence
  GATA2 Guide RNA
gugcugaaugcgcagcaccgc

SEQ ID NO: 26755 - RNA, 21 nt, Artificial Sequence
  GATA2 Guide RNA
guggugugagucgcggugcug

SEQ ID NO: 26756 - RNA, 21 nt, Artificial Sequence
  GATA2 Guide RNA
gugugagucgcggugcugcgc

SEQ ID NO: 26757 - RNA, 21 nt, Artificial Sequence
  GATA2 Guide RNA
ucgcggugcugcgcauucagc

SEQ ID NO: 26758 - RNA, 21 nt, Artificial Sequence
  GATA2 Guide RNA
ugaaugcgcagcaccgcgacu

SEQ ID NO: 26759 - RNA, 21 nt, Artificial Sequence
  GATA2 Guide RNA
ugagucgcggugcugcgcauu

SEQ ID NO: 26760 - RNA, 21 nt, Artificial Sequence
  GATA2 Guide RNA
ugcgcagcaccgcgacucaca

SEQ ID NO: 26761 - RNA, 21 nt, Artificial Sequence
  GATA2 Guide RNA
ugcugaaugcgcagcaccgcg

SEQ ID NO: 26762 - RNA, 21 nt, Artificial Sequence
  GATA2 Guide RNA
uggugugagucgcggugcugc

SEQ ID NO: 26763 - RNA, 21 nt, Artificial Sequence
  GATA2 Guide RNA
ugugagucgcggugcugcgca

SEQ ID NO: 26764 - RNA, 22 nt, Artificial Sequence
  GATA2 Guide RNA
aaugcgcagcaccgcgacucac

SEQ ID NO: 26765 - RNA, 22 nt, Artificial Sequence
  GATA2 Guide RNA
accgcgacucacaccacccggg

SEQ ID NO: 26766 - RNA, 22 nt, Artificial Sequence
  GATA2 Guide RNA
agcaccgcgacucacaccaccc

SEQ ID NO: 26767 - RNA, 22 nt, Artificial Sequence
  GATA2 Guide RNA
aggcccggguggugugagucgc

SEQ ID NO: 26768 - RNA, 22 nt, Artificial Sequence
  GATA2 Guide RNA
agucgcggugcugcgcauucag

SEQ ID NO: 26769 - RNA, 22 nt, Artificial Sequence
  GATA2 Guide RNA
augcgcagcaccgcgacucaca

SEQ ID NO: 26770 - RNA, 22 nt, Artificial Sequence
  GATA2 Guide RNA
caccgcgacucacaccacccgg

SEQ ID NO: 26771 - RNA, 22 nt, Artificial Sequence
  GATA2 Guide RNA
cagcaccgcgacucacaccacc

SEQ ID NO: 26772 - RNA, 22 nt, Artificial Sequence
  GATA2 Guide RNA
caggcccggguggugugagucg

SEQ ID NO: 26773 - RNA, 22 nt, Artificial Sequence
  GATA2 Guide RNA
ccaggcccggguggugugaguc

SEQ ID NO: 26774 - RNA, 22 nt, Artificial Sequence
  GATA2 Guide RNA
cccggguggugugagucgcggu

SEQ ID NO: 26775 - RNA, 22 nt, Artificial Sequence
  GATA2 Guide RNA
ccgcgacucacaccacccgggc

SEQ ID NO: 26776 - RNA, 22 nt, Artificial Sequence
  GATA2 Guide RNA
ccggccgugcugaaugcgcagc

SEQ ID NO: 26777 - RNA, 22 nt, Artificial Sequence
  GATA2 Guide RNA
ccggguggugugagucgcggug

SEQ ID NO: 26778 - RNA, 22 nt, Artificial Sequence
  GATA2 Guide RNA
ccgugcugaaugcgcagcaccg

SEQ ID NO: 26779 - RNA, 22 nt, Artificial Sequence
  GATA2 Guide RNA
cgcagcaccgcgacucacacca

SEQ ID NO: 26780 - RNA, 22 nt, Artificial Sequence
  GATA2 Guide RNA
cgcgacucacaccacccgggcc

SEQ ID NO: 26781 - RNA, 22 nt, Artificial Sequence
  GATA2 Guide RNA
cgcggugcugcgcauucagcac

SEQ ID NO: 26782 - RNA, 22 nt, Artificial Sequence
  GATA2 Guide RNA
cggccgugcugaaugcgcagca

SEQ ID NO: 26783 - RNA, 22 nt, Artificial Sequence
  GATA2 Guide RNA
cggguggugugagucgcggugc

SEQ ID NO: 26784 - RNA, 22 nt, Artificial Sequence
  GATA2 Guide RNA
cggugcugcgcauucagcacgg

SEQ ID NO: 26785 - RNA, 22 nt, Artificial Sequence
  GATA2 Guide RNA
cgugcugaaugcgcagcaccgc

SEQ ID NO: 26786 - RNA, 22 nt, Artificial Sequence
  GATA2 Guide RNA
cugaaugcgcagcaccgcgacu

SEQ ID NO: 26787 - RNA, 22 nt, Artificial Sequence
  GATA2 Guide RNA
gaaugcgcagcaccgcgacuca

SEQ ID NO: 26788 - RNA, 22 nt, Artificial Sequence
  GATA2 Guide RNA
gagucgcggugcugcgcauuca

SEQ ID NO: 26789 - RNA, 22 nt, Artificial Sequence
  GATA2 Guide RNA
gcaccgcgacucacaccacccg

SEQ ID NO: 26790 - RNA, 22 nt, Artificial Sequence
  GATA2 Guide RNA
gcagcaccgcgacucacaccac

SEQ ID NO: 26791 - RNA, 22 nt, Artificial Sequence
  GATA2 Guide RNA
gccaggcccggguggugugagu

SEQ ID NO: 26792 - RNA, 22 nt, Artificial Sequence
  GATA2 Guide RNA
gcccggguggugugagucgcgg

SEQ ID NO: 26793 - RNA, 22 nt, Artificial Sequence
  GATA2 Guide RNA
gcgcagcaccgcgacucacacc

SEQ ID NO: 26794 - RNA, 22 nt, Artificial Sequence
  GATA2 Guide RNA
gcggugcugcgcauucagcacg

SEQ ID NO: 26795 - RNA, 22 nt, Artificial Sequence
  GATA2 Guide RNA
gcugaaugcgcagcaccgcgac

SEQ ID NO: 26796 - RNA, 22 nt, Artificial Sequence
  GATA2 Guide RNA
ggcccggguggugugagucgcg

SEQ ID NO: 26797 - RNA, 22 nt, Artificial Sequence
  GATA2 Guide RNA
ggccgugcugaaugcgcagcac

SEQ ID NO: 26798 - RNA, 22 nt, Artificial Sequence
  GATA2 Guide RNA
ggguggugugagucgcggugcu

SEQ ID NO: 26799 - RNA, 22 nt, Artificial Sequence
  GATA2 Guide RNA
gguggugugagucgcggugcug

SEQ ID NO: 26800 - RNA, 22 nt, Artificial Sequence
  GATA2 Guide RNA
ggugugagucgcggugcugcgc

SEQ ID NO: 26801 - RNA, 22 nt, Artificial Sequence
  GATA2 Guide RNA
gucgcggugcugcgcauucagc

SEQ ID NO: 26802 - RNA, 22 nt, Artificial Sequence
  GATA2 Guide RNA
gugagucgcggugcugcgcauu

SEQ ID NO: 26803 - RNA, 22 nt, Artificial Sequence
  GATA2 Guide RNA
gugcugaaugcgcagcaccgcg

SEQ ID NO: 26804 - RNA, 22 nt, Artificial Sequence
  GATA2 Guide RNA
guggugugagucgcggugcugc

SEQ ID NO: 26805 - RNA, 22 nt, Artificial Sequence
  GATA2 Guide RNA
gugugagucgcggugcugcgca

SEQ ID NO: 26806 - RNA, 22 nt, Artificial Sequence
  GATA2 Guide RNA
ucgcggugcugcgcauucagca

SEQ ID NO: 26807 - RNA, 22 nt, Artificial Sequence
  GATA2 Guide RNA
ugaaugcgcagcaccgcgacuc

SEQ ID NO: 26808 - RNA, 22 nt, Artificial Sequence
  GATA2 Guide RNA
ugagucgcggugcugcgcauuc

SEQ ID NO: 26809 - RNA, 22 nt, Artificial Sequence
  GATA2 Guide RNA
ugcgcagcaccgcgacucacac

SEQ ID NO: 26810 - RNA, 22 nt, Artificial Sequence
  GATA2 Guide RNA
ugcugaaugcgcagcaccgcga

SEQ ID NO: 26811 - RNA, 22 nt, Artificial Sequence
  GATA2 Guide RNA
uggugugagucgcggugcugcg

SEQ ID NO: 26812 - RNA, 22 nt, Artificial Sequence
  GATA2 Guide RNA
ugugagucgcggugcugcgcau

SEQ ID NO: 26813 - RNA, 20 nt, Artificial Sequence
  GATA2 Guide RNA
aaugcgcagcuccccgacuc

SEQ ID NO: 26814 - RNA, 20 nt, Artificial Sequence
  GATA2 Guide RNA
agcuccccgacucacaccac

SEQ ID NO: 26815 - RNA, 20 nt, Artificial Sequence
  GATA2 Guide RNA
agcugcgcauucagcacggc

SEQ ID NO: 26816 - RNA, 20 nt, Artificial Sequence
  GATA2 Guide RNA
agucggggagcugcgcauuc

SEQ ID NO: 26817 - RNA, 20 nt, Artificial Sequence
  GATA2 Guide RNA
augcgcagcuccccgacuca

SEQ ID NO: 26818 - RNA, 20 nt, Artificial Sequence
  GATA2 Guide RNA
cagcuccccgacucacacca

SEQ ID NO: 26819 - RNA, 20 nt, Artificial Sequence
  GATA2 Guide RNA
cccggccgugcugaaugcgc

SEQ ID NO: 26820 - RNA, 20 nt, Artificial Sequence
  GATA2 Guide RNA
cccggguggugugagucggg

SEQ ID NO: 26821 - RNA, 20 nt, Artificial Sequence
  GATA2 Guide RNA
ccggccgugcugaaugcgca

SEQ ID NO: 26822 - RNA, 20 nt, Artificial Sequence
  GATA2 Guide RNA
ccggguggugugagucgggg

SEQ ID NO: 26823 - RNA, 20 nt, Artificial Sequence
  GATA2 Guide RNA
ccgugcugaaugcgcagcuc

SEQ ID NO: 26824 - RNA, 20 nt, Artificial Sequence
  GATA2 Guide RNA
cgcagcuccccgacucacac

SEQ ID NO: 26825 - RNA, 20 nt, Artificial Sequence
  GATA2 Guide RNA
cggccgugcugaaugcgcag

SEQ ID NO: 26826 - RNA, 20 nt, Artificial Sequence
  GATA2 Guide RNA
cggggagcugcgcauucagc

SEQ ID NO: 26827 - RNA, 20 nt, Artificial Sequence
  GATA2 Guide RNA
cggguggugugagucgggga

SEQ ID NO: 26828 - RNA, 20 nt, Artificial Sequence
  GATA2 Guide RNA
cgugcugaaugcgcagcucc

SEQ ID NO: 26829 - RNA, 20 nt, Artificial Sequence
  GATA2 Guide RNA
cuccccgacucacaccaccc

SEQ ID NO: 26830 - RNA, 20 nt, Artificial Sequence
  GATA2 Guide RNA
cugaaugcgcagcuccccga

SEQ ID NO: 26831 - RNA, 20 nt, Artificial Sequence
  GATA2 Guide RNA
gaaugcgcagcuccccgacu

SEQ ID NO: 26832 - RNA, 20 nt, Artificial Sequence
  GATA2 Guide RNA
gagcugcgcauucagcacgg

SEQ ID NO: 26833 - RNA, 20 nt, Artificial Sequence
  GATA2 Guide RNA
gagucggggagcugcgcauu

SEQ ID NO: 26834 - RNA, 20 nt, Artificial Sequence
  GATA2 Guide RNA
gcagcuccccgacucacacc

SEQ ID NO: 26835 - RNA, 20 nt, Artificial Sequence
  GATA2 Guide RNA
gcccggguggugugagucgg

SEQ ID NO: 26836 - RNA, 20 nt, Artificial Sequence
  GATA2 Guide RNA
gccgugcugaaugcgcagcu

SEQ ID NO: 26837 - RNA, 20 nt, Artificial Sequence
  GATA2 Guide RNA
gcgcagcuccccgacucaca

SEQ ID NO: 26838 - RNA, 20 nt, Artificial Sequence
  GATA2 Guide RNA
gcuccccgacucacaccacc

SEQ ID NO: 26839 - RNA, 20 nt, Artificial Sequence
  GATA2 Guide RNA
gcugaaugcgcagcuccccg

SEQ ID NO: 26840 - RNA, 20 nt, Artificial Sequence
  GATA2 Guide RNA
ggagcugcgcauucagcacg

SEQ ID NO: 26841 - RNA, 20 nt, Artificial Sequence
  GATA2 Guide RNA
gggagcugcgcauucagcac

SEQ ID NO: 26842 - RNA, 20 nt, Artificial Sequence
  GATA2 Guide RNA
ggggagcugcgcauucagca

SEQ ID NO: 26843 - RNA, 20 nt, Artificial Sequence
  GATA2 Guide RNA
ggguggugugagucggggag

SEQ ID NO: 26844 - RNA, 20 nt, Artificial Sequence
  GATA2 Guide RNA
gguggugugagucggggagc

SEQ ID NO: 26845 - RNA, 20 nt, Artificial Sequence
  GATA2 Guide RNA
ggugugagucggggagcugc

SEQ ID NO: 26846 - RNA, 20 nt, Artificial Sequence
  GATA2 Guide RNA
gucggggagcugcgcauuca

SEQ ID NO: 26847 - RNA, 20 nt, Artificial Sequence
  GATA2 Guide RNA
gugagucggggagcugcgca

SEQ ID NO: 26848 - RNA, 20 nt, Artificial Sequence
  GATA2 Guide RNA
gugcugaaugcgcagcuccc

SEQ ID NO: 26849 - RNA, 20 nt, Artificial Sequence
  GATA2 Guide RNA
guggugugagucggggagcu

SEQ ID NO: 26850 - RNA, 20 nt, Artificial Sequence
  GATA2 Guide RNA
gugugagucggggagcugcg

SEQ ID NO: 26851 - RNA, 20 nt, Artificial Sequence
  GATA2 Guide RNA
ucggggagcugcgcauucag

SEQ ID NO: 26852 - RNA, 20 nt, Artificial Sequence
  GATA2 Guide RNA
ugaaugcgcagcuccccgac

SEQ ID NO: 26853 - RNA, 20 nt, Artificial Sequence
  GATA2 Guide RNA
ugagucggggagcugcgcau

SEQ ID NO: 26854 - RNA, 20 nt, Artificial Sequence
  GATA2 Guide RNA
ugcgcagcuccccgacucac

SEQ ID NO: 26855 - RNA, 20 nt, Artificial Sequence
  GATA2 Guide RNA
ugcugaaugcgcagcucccc

SEQ ID NO: 26856 - RNA, 20 nt, Artificial Sequence
  GATA2 Guide RNA
uggugugagucggggagcug

SEQ ID NO: 26857 - RNA, 20 nt, Artificial Sequence
  GATA2 Guide RNA
ugugagucggggagcugcgc

SEQ ID NO: 26858 - RNA, 21 nt, Artificial Sequence
  GATA2 Guide RNA
aaugcgcagcuccccgacuca

SEQ ID NO: 26859 - RNA, 21 nt, Artificial Sequence
  GATA2 Guide RNA
acccggccgugcugaaugcgc

SEQ ID NO: 26860 - RNA, 21 nt, Artificial Sequence
  GATA2 Guide RNA
agcuccccgacucacaccacc

SEQ ID NO: 26861 - RNA, 21 nt, Artificial Sequence
  GATA2 Guide RNA
agcugcgcauucagcacggcc

SEQ ID NO: 26862 - RNA, 21 nt, Artificial Sequence
  GATA2 Guide RNA
agucggggagcugcgcauuca

SEQ ID NO: 26863 - RNA, 21 nt, Artificial Sequence
  GATA2 Guide RNA
augcgcagcuccccgacucac

SEQ ID NO: 26864 - RNA, 21 nt, Artificial Sequence
  GATA2 Guide RNA
cagcuccccgacucacaccac

SEQ ID NO: 26865 - RNA, 21 nt, Artificial Sequence
  GATA2 Guide RNA
cccggccgugcugaaugcgca

SEQ ID NO: 26866 - RNA, 21 nt, Artificial Sequence
  GATA2 Guide RNA
cccggguggugugagucgggg

SEQ ID NO: 26867 - RNA, 21 nt, Artificial Sequence
  GATA2 Guide RNA
ccggccgugcugaaugcgcag

SEQ ID NO: 26868 - RNA, 21 nt, Artificial Sequence
  GATA2 Guide RNA
ccggguggugugagucgggga

SEQ ID NO: 26869 - RNA, 21 nt, Artificial Sequence
  GATA2 Guide RNA
ccgugcugaaugcgcagcucc

SEQ ID NO: 26870 - RNA, 21 nt, Artificial Sequence
  GATA2 Guide RNA
cgcagcuccccgacucacacc

SEQ ID NO: 26871 - RNA, 21 nt, Artificial Sequence
  GATA2 Guide RNA
cggggagcugcgcauucagca

SEQ ID NO: 26872 - RNA, 21 nt, Artificial Sequence
  GATA2 Guide RNA
cggguggugugagucggggag

SEQ ID NO: 26873 - RNA, 21 nt, Artificial Sequence
  GATA2 Guide RNA
cgugcugaaugcgcagcuccc

SEQ ID NO: 26874 - RNA, 21 nt, Artificial Sequence
  GATA2 Guide RNA
cuccccgacucacaccacccg

SEQ ID NO: 26875 - RNA, 21 nt, Artificial Sequence
  GATA2 Guide RNA
cugaaugcgcagcuccccgac

SEQ ID NO: 26876 - RNA, 21 nt, Artificial Sequence
  GATA2 Guide RNA
gaaugcgcagcuccccgacuc

SEQ ID NO: 26877 - RNA, 21 nt, Artificial Sequence
  GATA2 Guide RNA
gagcugcgcauucagcacggc

SEQ ID NO: 26878 - RNA, 21 nt, Artificial Sequence
  GATA2 Guide RNA
gagucggggagcugcgcauuc

SEQ ID NO: 26879 - RNA, 21 nt, Artificial Sequence
  GATA2 Guide RNA
gcagcuccccgacucacacca

SEQ ID NO: 26880 - RNA, 21 nt, Artificial Sequence
  GATA2 Guide RNA
gcccggguggugugagucggg

SEQ ID NO: 26881 - RNA, 21 nt, Artificial Sequence
  GATA2 Guide RNA
gccgugcugaaugcgcagcuc

SEQ ID NO: 26882 - RNA, 21 nt, Artificial Sequence
  GATA2 Guide RNA
gcgcagcuccccgacucacac

SEQ ID NO: 26883 - RNA, 21 nt, Artificial Sequence
  GATA2 Guide RNA
gcuccccgacucacaccaccc

SEQ ID NO: 26884 - RNA, 21 nt, Artificial Sequence
  GATA2 Guide RNA
gcugaaugcgcagcuccccga

SEQ ID NO: 26885 - RNA, 21 nt, Artificial Sequence
  GATA2 Guide RNA
ggagcugcgcauucagcacgg

SEQ ID NO: 26886 - RNA, 21 nt, Artificial Sequence
  GATA2 Guide RNA
ggcccggguggugugagucgg

SEQ ID NO: 26887 - RNA, 21 nt, Artificial Sequence
  GATA2 Guide RNA
ggccgugcugaaugcgcagcu

SEQ ID NO: 26888 - RNA, 21 nt, Artificial Sequence
  GATA2 Guide RNA
gggagcugcgcauucagcacg

SEQ ID NO: 26889 - RNA, 21 nt, Artificial Sequence
  GATA2 Guide RNA
ggggagcugcgcauucagcac

SEQ ID NO: 26890 - RNA, 21 nt, Artificial Sequence
  GATA2 Guide RNA
ggguggugugagucggggagc

SEQ ID NO: 26891 - RNA, 21 nt, Artificial Sequence
  GATA2 Guide RNA
gguggugugagucggggagcu

SEQ ID NO: 26892 - RNA, 21 nt, Artificial Sequence
  GATA2 Guide RNA
ggugugagucggggagcugcg

SEQ ID NO: 26893 - RNA, 21 nt, Artificial Sequence
  GATA2 Guide RNA
gucggggagcugcgcauucag

SEQ ID NO: 26894 - RNA, 21 nt, Artificial Sequence
  GATA2 Guide RNA
gugagucggggagcugcgcau

SEQ ID NO: 26895 - RNA, 21 nt, Artificial Sequence
  GATA2 Guide RNA
gugcugaaugcgcagcucccc

SEQ ID NO: 26896 - RNA, 21 nt, Artificial Sequence
  GATA2 Guide RNA
guggugugagucggggagcug

SEQ ID NO: 26897 - RNA, 21 nt, Artificial Sequence
  GATA2 Guide RNA
gugugagucggggagcugcgc

SEQ ID NO: 26898 - RNA, 21 nt, Artificial Sequence
  GATA2 Guide RNA
ucggggagcugcgcauucagc

SEQ ID NO: 26899 - RNA, 21 nt, Artificial Sequence
  GATA2 Guide RNA
ugaaugcgcagcuccccgacu

SEQ ID NO: 26900 - RNA, 21 nt, Artificial Sequence
  GATA2 Guide RNA
ugagucggggagcugcgcauu

SEQ ID NO: 26901 - RNA, 21 nt, Artificial Sequence
  GATA2 Guide RNA
ugcgcagcuccccgacucaca

SEQ ID NO: 26902 - RNA, 21 nt, Artificial Sequence
  GATA2 Guide RNA
ugcugaaugcgcagcuccccg

SEQ ID NO: 26903 - RNA, 21 nt, Artificial Sequence
  GATA2 Guide RNA
uggugugagucggggagcugc

SEQ ID NO: 26904 - RNA, 21 nt, Artificial Sequence
  GATA2 Guide RNA
ugugagucggggagcugcgca

SEQ ID NO: 26905 - RNA, 22 nt, Artificial Sequence
  GATA2 Guide RNA
aaugcgcagcuccccgacucac

SEQ ID NO: 26906 - RNA, 22 nt, Artificial Sequence
  GATA2 Guide RNA
acccggccgugcugaaugcgca

SEQ ID NO: 26907 - RNA, 22 nt, Artificial Sequence
  GATA2 Guide RNA
agcuccccgacucacaccaccc

SEQ ID NO: 26908 - RNA, 22 nt, Artificial Sequence
  GATA2 Guide RNA
agcugcgcauucagcacggccg

SEQ ID NO: 26909 - RNA, 22 nt, Artificial Sequence
  GATA2 Guide RNA
aggcccggguggugugagucgg

SEQ ID NO: 26910 - RNA, 22 nt, Artificial Sequence
  GATA2 Guide RNA
agucggggagcugcgcauucag

SEQ ID NO: 26911 - RNA, 22 nt, Artificial Sequence
  GATA2 Guide RNA
augcgcagcuccccgacucaca

SEQ ID NO: 26912 - RNA, 22 nt, Artificial Sequence
  GATA2 Guide RNA
cacccggccgugcugaaugcgc

SEQ ID NO: 26913 - RNA, 22 nt, Artificial Sequence
  GATA2 Guide RNA
cagcuccccgacucacaccacc

SEQ ID NO: 26914 - RNA, 22 nt, Artificial Sequence
  GATA2 Guide RNA
cccggccgugcugaaugcgcag

SEQ ID NO: 26915 - RNA, 22 nt, Artificial Sequence
  GATA2 Guide RNA
cccggguggugugagucgggga

SEQ ID NO: 26916 - RNA, 22 nt, Artificial Sequence
  GATA2 Guide RNA
ccggguggugugagucggggag

SEQ ID NO: 26917 - RNA, 22 nt, Artificial Sequence
  GATA2 Guide RNA
ccgugcugaaugcgcagcuccc

SEQ ID NO: 26918 - RNA, 22 nt, Artificial Sequence
  GATA2 Guide RNA
cgcagcuccccgacucacacca

SEQ ID NO: 26919 - RNA, 22 nt, Artificial Sequence
  GATA2 Guide RNA
cggccgugcugaaugcgcagcu

SEQ ID NO: 26920 - RNA, 22 nt, Artificial Sequence
  GATA2 Guide RNA
cggggagcugcgcauucagcac

SEQ ID NO: 26921 - RNA, 22 nt, Artificial Sequence
  GATA2 Guide RNA
cggguggugugagucggggagc

SEQ ID NO: 26922 - RNA, 22 nt, Artificial Sequence
  GATA2 Guide RNA
cgugcugaaugcgcagcucccc

SEQ ID NO: 26923 - RNA, 22 nt, Artificial Sequence
  GATA2 Guide RNA
cuccccgacucacaccacccgg

SEQ ID NO: 26924 - RNA, 22 nt, Artificial Sequence
  GATA2 Guide RNA
cugaaugcgcagcuccccgacu

SEQ ID NO: 26925 - RNA, 22 nt, Artificial Sequence
  GATA2 Guide RNA
gaaugcgcagcuccccgacuca

SEQ ID NO: 26926 - RNA, 22 nt, Artificial Sequence
  GATA2 Guide RNA
gagcugcgcauucagcacggcc

SEQ ID NO: 26927 - RNA, 22 nt, Artificial Sequence
  GATA2 Guide RNA
gagucggggagcugcgcauuca

SEQ ID NO: 26928 - RNA, 22 nt, Artificial Sequence
  GATA2 Guide RNA
gcagcuccccgacucacaccac

SEQ ID NO: 26929 - RNA, 22 nt, Artificial Sequence
  GATA2 Guide RNA
gcccggguggugugagucgggg

SEQ ID NO: 26930 - RNA, 22 nt, Artificial Sequence
  GATA2 Guide RNA
gccgugcugaaugcgcagcucc

SEQ ID NO: 26931 - RNA, 22 nt, Artificial Sequence
  GATA2 Guide RNA
gcgcagcuccccgacucacacc

SEQ ID NO: 26932 - RNA, 22 nt, Artificial Sequence
  GATA2 Guide RNA
gcuccccgacucacaccacccg

SEQ ID NO: 26933 - RNA, 22 nt, Artificial Sequence
  GATA2 Guide RNA
gcugaaugcgcagcuccccgac

SEQ ID NO: 26934 - RNA, 22 nt, Artificial Sequence
  GATA2 Guide RNA
ggagcugcgcauucagcacggc

SEQ ID NO: 26935 - RNA, 22 nt, Artificial Sequence
  GATA2 Guide RNA
ggcccggguggugugagucggg

SEQ ID NO: 26936 - RNA, 22 nt, Artificial Sequence
  GATA2 Guide RNA
ggccgugcugaaugcgcagcuc

SEQ ID NO: 26937 - RNA, 22 nt, Artificial Sequence
  GATA2 Guide RNA
gggagcugcgcauucagcacgg

SEQ ID NO: 26938 - RNA, 22 nt, Artificial Sequence
  GATA2 Guide RNA
ggggagcugcgcauucagcacg

SEQ ID NO: 26939 - RNA, 22 nt, Artificial Sequence
  GATA2 Guide RNA
ggguggugugagucggggagcu

SEQ ID NO: 26940 - RNA, 22 nt, Artificial Sequence
  GATA2 Guide RNA
gguggugugagucggggagcug

SEQ ID NO: 26941 - RNA, 22 nt, Artificial Sequence
  GATA2 Guide RNA
ggugugagucggggagcugcgc

SEQ ID NO: 26942 - RNA, 22 nt, Artificial Sequence
  GATA2 Guide RNA
gucggggagcugcgcauucagc

SEQ ID NO: 26943 - RNA, 22 nt, Artificial Sequence
  GATA2 Guide RNA
gugagucggggagcugcgcauu

SEQ ID NO: 26944 - RNA, 22 nt, Artificial Sequence
  GATA2 Guide RNA
gugcugaaugcgcagcuccccg

SEQ ID NO: 26945 - RNA, 22 nt, Artificial Sequence
  GATA2 Guide RNA
guggugugagucggggagcugc

SEQ ID NO: 26946 - RNA, 22 nt, Artificial Sequence
  GATA2 Guide RNA
gugugagucggggagcugcgca

SEQ ID NO: 26947 - RNA, 22 nt, Artificial Sequence
  GATA2 Guide RNA
ucggggagcugcgcauucagca

SEQ ID NO: 26948 - RNA, 22 nt, Artificial Sequence
  GATA2 Guide RNA
ugaaugcgcagcuccccgacuc

SEQ ID NO: 26949 - RNA, 22 nt, Artificial Sequence
  GATA2 Guide RNA
ugagucggggagcugcgcauuc

SEQ ID NO: 26950 - RNA, 22 nt, Artificial Sequence
  GATA2 Guide RNA
ugcgcagcuccccgacucacac

SEQ ID NO: 26951 - RNA, 22 nt, Artificial Sequence
  GATA2 Guide RNA
ugcugaaugcgcagcuccccga

SEQ ID NO: 26952 - RNA, 22 nt, Artificial Sequence
  GATA2 Guide RNA
uggugugagucggggagcugcg

SEQ ID NO: 26953 - RNA, 22 nt, Artificial Sequence
  GATA2 Guide RNA
ugugagucggggagcugcgcau

SEQ ID NO: 26954 - RNA, 20 nt, Artificial Sequence
  GATA2 Guide RNA
aaugcgccgcaccccgacuc

SEQ ID NO: 26955 - RNA, 20 nt, Artificial Sequence
  GATA2 Guide RNA
acccggccgugcugaaugcg

SEQ ID NO: 26956 - RNA, 20 nt, Artificial Sequence
  GATA2 Guide RNA
agucggggugcggcgcauuc

SEQ ID NO: 26957 - RNA, 20 nt, Artificial Sequence
  GATA2 Guide RNA
augcgccgcaccccgacuca

SEQ ID NO: 26958 - RNA, 20 nt, Artificial Sequence
  GATA2 Guide RNA
cacccggccgugcugaaugc

SEQ ID NO: 26959 - RNA, 20 nt, Artificial Sequence
  GATA2 Guide RNA
ccgcaccccgacucacacca

SEQ ID NO: 26960 - RNA, 20 nt, Artificial Sequence
  GATA2 Guide RNA
ccggccgugcugaaugcgcc

SEQ ID NO: 26961 - RNA, 20 nt, Artificial Sequence
  GATA2 Guide RNA
ccgugcugaaugcgccgcac

SEQ ID NO: 26962 - RNA, 20 nt, Artificial Sequence
  GATA2 Guide RNA
cgccgcaccccgacucacac

SEQ ID NO: 26963 - RNA, 20 nt, Artificial Sequence
  GATA2 Guide RNA
cggccgugcugaaugcgccg

SEQ ID NO: 26964 - RNA, 20 nt, Artificial Sequence
  GATA2 Guide RNA
cggcgcauucagcacggccg

SEQ ID NO: 26965 - RNA, 20 nt, Artificial Sequence
  GATA2 Guide RNA
cggggugcggcgcauucagc

SEQ ID NO: 26966 - RNA, 20 nt, Artificial Sequence
  GATA2 Guide RNA
cggguggugugagucggggu

SEQ ID NO: 26967 - RNA, 20 nt, Artificial Sequence
  GATA2 Guide RNA
cgugcugaaugcgccgcacc

SEQ ID NO: 26968 - RNA, 20 nt, Artificial Sequence
  GATA2 Guide RNA
cugaaugcgccgcaccccga

SEQ ID NO: 26969 - RNA, 20 nt, Artificial Sequence
  GATA2 Guide RNA
gaaugcgccgcaccccgacu

SEQ ID NO: 26970 - RNA, 20 nt, Artificial Sequence
  GATA2 Guide RNA
gagucggggugcggcgcauu

SEQ ID NO: 26971 - RNA, 20 nt, Artificial Sequence
  GATA2 Guide RNA
gcacccggccgugcugaaug

SEQ ID NO: 26972 - RNA, 20 nt, Artificial Sequence
  GATA2 Guide RNA
gccgcaccccgacucacacc

SEQ ID NO: 26973 - RNA, 20 nt, Artificial Sequence
  GATA2 Guide RNA
gccgugcugaaugcgccgca

SEQ ID NO: 26974 - RNA, 20 nt, Artificial Sequence
  GATA2 Guide RNA
gcgccgcaccccgacucaca

SEQ ID NO: 26975 - RNA, 20 nt, Artificial Sequence
  GATA2 Guide RNA
gcggcgcauucagcacggcc

SEQ ID NO: 26976 - RNA, 20 nt, Artificial Sequence
  GATA2 Guide RNA
gcugaaugcgccgcaccccg

SEQ ID NO: 26977 - RNA, 20 nt, Artificial Sequence
  GATA2 Guide RNA
ggccgugcugaaugcgccgc

SEQ ID NO: 26978 - RNA, 20 nt, Artificial Sequence
  GATA2 Guide RNA
ggcgcauucagcacggccgg

SEQ ID NO: 26979 - RNA, 20 nt, Artificial Sequence
  GATA2 Guide RNA
ggggugcggcgcauucagca

SEQ ID NO: 26980 - RNA, 20 nt, Artificial Sequence
  GATA2 Guide RNA
gggugcggcgcauucagcac

SEQ ID NO: 26981 - RNA, 20 nt, Artificial Sequence
  GATA2 Guide RNA
ggguggugugagucggggug

SEQ ID NO: 26982 - RNA, 20 nt, Artificial Sequence
  GATA2 Guide RNA
ggugcggcgcauucagcacg

SEQ ID NO: 26983 - RNA, 20 nt, Artificial Sequence
  GATA2 Guide RNA
gguggugugagucggggugc

SEQ ID NO: 26984 - RNA, 20 nt, Artificial Sequence
  GATA2 Guide RNA
ggugugagucggggugcggc

SEQ ID NO: 26985 - RNA, 20 nt, Artificial Sequence
  GATA2 Guide RNA
gucggggugcggcgcauuca

SEQ ID NO: 26986 - RNA, 20 nt, Artificial Sequence
  GATA2 Guide RNA
gugagucggggugcggcgca

SEQ ID NO: 26987 - RNA, 20 nt, Artificial Sequence
  GATA2 Guide RNA
gugcggcgcauucagcacgg

SEQ ID NO: 26988 - RNA, 20 nt, Artificial Sequence
  GATA2 Guide RNA
gugcugaaugcgccgcaccc

SEQ ID NO: 26989 - RNA, 20 nt, Artificial Sequence
  GATA2 Guide RNA
guggugugagucggggugcg

SEQ ID NO: 26990 - RNA, 20 nt, Artificial Sequence
  GATA2 Guide RNA
gugugagucggggugcggcg

SEQ ID NO: 26991 - RNA, 20 nt, Artificial Sequence
  GATA2 Guide RNA
ucggggugcggcgcauucag

SEQ ID NO: 26992 - RNA, 20 nt, Artificial Sequence
  GATA2 Guide RNA
ugaaugcgccgcaccccgac

SEQ ID NO: 26993 - RNA, 20 nt, Artificial Sequence
  GATA2 Guide RNA
ugagucggggugcggcgcau

SEQ ID NO: 26994 - RNA, 20 nt, Artificial Sequence
  GATA2 Guide RNA
ugcgccgcaccccgacucac

SEQ ID NO: 26995 - RNA, 20 nt, Artificial Sequence
  GATA2 Guide RNA
ugcggcgcauucagcacggc

SEQ ID NO: 26996 - RNA, 20 nt, Artificial Sequence
  GATA2 Guide RNA
ugcugaaugcgccgcacccc

SEQ ID NO: 26997 - RNA, 20 nt, Artificial Sequence
  GATA2 Guide RNA
uggugugagucggggugcgg

SEQ ID NO: 26998 - RNA, 20 nt, Artificial Sequence
  GATA2 Guide RNA
ugugagucggggugcggcgc

SEQ ID NO: 26999 - RNA, 21 nt, Artificial Sequence
  GATA2 Guide RNA
aaugcgccgcaccccgacuca

SEQ ID NO: 27000 - RNA, 21 nt, Artificial Sequence
  GATA2 Guide RNA
agucggggugcggcgcauuca

SEQ ID NO: 27001 - RNA, 21 nt, Artificial Sequence
  GATA2 Guide RNA
augcgccgcaccccgacucac

SEQ ID NO: 27002 - RNA, 21 nt, Artificial Sequence
  GATA2 Guide RNA
cacccggccgugcugaaugcg

SEQ ID NO: 27003 - RNA, 21 nt, Artificial Sequence
  GATA2 Guide RNA
cccggccgugcugaaugcgcc

SEQ ID NO: 27004 - RNA, 21 nt, Artificial Sequence
  GATA2 Guide RNA
ccgcaccccgacucacaccac

SEQ ID NO: 27005 - RNA, 21 nt, Artificial Sequence
  GATA2 Guide RNA
ccggccgugcugaaugcgccg

SEQ ID NO: 27006 - RNA, 21 nt, Artificial Sequence
  GATA2 Guide RNA
ccggguggugugagucggggu

SEQ ID NO: 27007 - RNA, 21 nt, Artificial Sequence
  GATA2 Guide RNA
ccgugcugaaugcgccgcacc

SEQ ID NO: 27008 - RNA, 21 nt, Artificial Sequence
  GATA2 Guide RNA
cgcacccggccgugcugaaug

SEQ ID NO: 27009 - RNA, 21 nt, Artificial Sequence
  GATA2 Guide RNA
cgccgcaccccgacucacacc

SEQ ID NO: 27010 - RNA, 21 nt, Artificial Sequence
  GATA2 Guide RNA
cggccgugcugaaugcgccgc

SEQ ID NO: 27011 - RNA, 21 nt, Artificial Sequence
  GATA2 Guide RNA
cggcgcauucagcacggccgg

SEQ ID NO: 27012 - RNA, 21 nt, Artificial Sequence
  GATA2 Guide RNA
cggggugcggcgcauucagca

SEQ ID NO: 27013 - RNA, 21 nt, Artificial Sequence
  GATA2 Guide RNA
cggguggugugagucggggug

SEQ ID NO: 27014 - RNA, 21 nt, Artificial Sequence
  GATA2 Guide RNA
cgugcugaaugcgccgcaccc

SEQ ID NO: 27015 - RNA, 21 nt, Artificial Sequence
  GATA2 Guide RNA
cugaaugcgccgcaccccgac

SEQ ID NO: 27016 - RNA, 21 nt, Artificial Sequence
  GATA2 Guide RNA
gaaugcgccgcaccccgacuc

SEQ ID NO: 27017 - RNA, 21 nt, Artificial Sequence
  GATA2 Guide RNA
gagucggggugcggcgcauuc

SEQ ID NO: 27018 - RNA, 21 nt, Artificial Sequence
  GATA2 Guide RNA
gcacccggccgugcugaaugc

SEQ ID NO: 27019 - RNA, 21 nt, Artificial Sequence
  GATA2 Guide RNA
gccgcaccccgacucacacca

SEQ ID NO: 27020 - RNA, 21 nt, Artificial Sequence
  GATA2 Guide RNA
gccgugcugaaugcgccgcac

SEQ ID NO: 27021 - RNA, 21 nt, Artificial Sequence
  GATA2 Guide RNA
gcgccgcaccccgacucacac

SEQ ID NO: 27022 - RNA, 21 nt, Artificial Sequence
  GATA2 Guide RNA
gcggcgcauucagcacggccg

SEQ ID NO: 27023 - RNA, 21 nt, Artificial Sequence
  GATA2 Guide RNA
gcugaaugcgccgcaccccga

SEQ ID NO: 27024 - RNA, 21 nt, Artificial Sequence
  GATA2 Guide RNA
ggccgugcugaaugcgccgca

SEQ ID NO: 27025 - RNA, 21 nt, Artificial Sequence
  GATA2 Guide RNA
ggcgcauucagcacggccggg

SEQ ID NO: 27026 - RNA, 21 nt, Artificial Sequence
  GATA2 Guide RNA
ggggugcggcgcauucagcac

SEQ ID NO: 27027 - RNA, 21 nt, Artificial Sequence
  GATA2 Guide RNA
gggugcggcgcauucagcacg

SEQ ID NO: 27028 - RNA, 21 nt, Artificial Sequence
  GATA2 Guide RNA
ggguggugugagucggggugc

SEQ ID NO: 27029 - RNA, 21 nt, Artificial Sequence
  GATA2 Guide RNA
ggugcggcgcauucagcacgg

SEQ ID NO: 27030 - RNA, 21 nt, Artificial Sequence
  GATA2 Guide RNA
gguggugugagucggggugcg

SEQ ID NO: 27031 - RNA, 21 nt, Artificial Sequence
  GATA2 Guide RNA
ggugugagucggggugcggcg

SEQ ID NO: 27032 - RNA, 21 nt, Artificial Sequence
  GATA2 Guide RNA
gucggggugcggcgcauucag

SEQ ID NO: 27033 - RNA, 21 nt, Artificial Sequence
  GATA2 Guide RNA
gugagucggggugcggcgcau

SEQ ID NO: 27034 - RNA, 21 nt, Artificial Sequence
  GATA2 Guide RNA
gugcggcgcauucagcacggc

SEQ ID NO: 27035 - RNA, 21 nt, Artificial Sequence
  GATA2 Guide RNA
gugcugaaugcgccgcacccc

SEQ ID NO: 27036 - RNA, 21 nt, Artificial Sequence
  GATA2 Guide RNA
guggugugagucggggugcgg

SEQ ID NO: 27037 - RNA, 21 nt, Artificial Sequence
  GATA2 Guide RNA
gugugagucggggugcggcgc

SEQ ID NO: 27038 - RNA, 21 nt, Artificial Sequence
  GATA2 Guide RNA
ucggggugcggcgcauucagc

SEQ ID NO: 27039 - RNA, 21 nt, Artificial Sequence
  GATA2 Guide RNA
ugaaugcgccgcaccccgacu

SEQ ID NO: 27040 - RNA, 21 nt, Artificial Sequence
  GATA2 Guide RNA
ugagucggggugcggcgcauu

SEQ ID NO: 27041 - RNA, 21 nt, Artificial Sequence
  GATA2 Guide RNA
ugcgccgcaccccgacucaca

SEQ ID NO: 27042 - RNA, 21 nt, Artificial Sequence
  GATA2 Guide RNA
ugcggcgcauucagcacggcc

SEQ ID NO: 27043 - RNA, 21 nt, Artificial Sequence
  GATA2 Guide RNA
ugcugaaugcgccgcaccccg

SEQ ID NO: 27044 - RNA, 21 nt, Artificial Sequence
  GATA2 Guide RNA
uggugugagucggggugcggc

SEQ ID NO: 27045 - RNA, 21 nt, Artificial Sequence
  GATA2 Guide RNA
ugugagucggggugcggcgca

SEQ ID NO: 27046 - RNA, 22 nt, Artificial Sequence
  GATA2 Guide RNA
aaugcgccgcaccccgacucac

SEQ ID NO: 27047 - RNA, 22 nt, Artificial Sequence
  GATA2 Guide RNA
acccggccgugcugaaugcgcc

SEQ ID NO: 27048 - RNA, 22 nt, Artificial Sequence
  GATA2 Guide RNA
agucggggugcggcgcauucag

SEQ ID NO: 27049 - RNA, 22 nt, Artificial Sequence
  GATA2 Guide RNA
augcgccgcaccccgacucaca

SEQ ID NO: 27050 - RNA, 22 nt, Artificial Sequence
  GATA2 Guide RNA
cccggccgugcugaaugcgccg

SEQ ID NO: 27051 - RNA, 22 nt, Artificial Sequence
  GATA2 Guide RNA
cccggguggugugagucggggu

SEQ ID NO: 27052 - RNA, 22 nt, Artificial Sequence
  GATA2 Guide RNA
ccgcaccccgacucacaccacc

SEQ ID NO: 27053 - RNA, 22 nt, Artificial Sequence
  GATA2 Guide RNA
ccggccgugcugaaugcgccgc

SEQ ID NO: 27054 - RNA, 22 nt, Artificial Sequence
  GATA2 Guide RNA
ccggguggugugagucggggug

SEQ ID NO: 27055 - RNA, 22 nt, Artificial Sequence
  GATA2 Guide RNA
ccgugcugaaugcgccgcaccc

SEQ ID NO: 27056 - RNA, 22 nt, Artificial Sequence
  GATA2 Guide RNA
cgcacccggccgugcugaaugc

SEQ ID NO: 27057 - RNA, 22 nt, Artificial Sequence
  GATA2 Guide RNA
cgccgcaccccgacucacacca

SEQ ID NO: 27058 - RNA, 22 nt, Artificial Sequence
  GATA2 Guide RNA
cggccgugcugaaugcgccgca

SEQ ID NO: 27059 - RNA, 22 nt, Artificial Sequence
  GATA2 Guide RNA
cggcgcauucagcacggccggg

SEQ ID NO: 27060 - RNA, 22 nt, Artificial Sequence
  GATA2 Guide RNA
cggggugcggcgcauucagcac

SEQ ID NO: 27061 - RNA, 22 nt, Artificial Sequence
  GATA2 Guide RNA
cggguggugugagucggggugc

SEQ ID NO: 27062 - RNA, 22 nt, Artificial Sequence
  GATA2 Guide RNA
cgugcugaaugcgccgcacccc

SEQ ID NO: 27063 - RNA, 22 nt, Artificial Sequence
  GATA2 Guide RNA
cugaaugcgccgcaccccgacu

SEQ ID NO: 27064 - RNA, 22 nt, Artificial Sequence
  GATA2 Guide RNA
gaaugcgccgcaccccgacuca

SEQ ID NO: 27065 - RNA, 22 nt, Artificial Sequence
  GATA2 Guide RNA
gagucggggugcggcgcauuca

SEQ ID NO: 27066 - RNA, 22 nt, Artificial Sequence
  GATA2 Guide RNA
gcacccggccgugcugaaugcg

SEQ ID NO: 27067 - RNA, 22 nt, Artificial Sequence
  GATA2 Guide RNA
gccgcaccccgacucacaccac

SEQ ID NO: 27068 - RNA, 22 nt, Artificial Sequence
  GATA2 Guide RNA
gccgugcugaaugcgccgcacc

SEQ ID NO: 27069 - RNA, 22 nt, Artificial Sequence
  GATA2 Guide RNA
gcgcacccggccgugcugaaug

SEQ ID NO: 27070 - RNA, 22 nt, Artificial Sequence
  GATA2 Guide RNA
gcgccgcaccccgacucacacc

SEQ ID NO: 27071 - RNA, 22 nt, Artificial Sequence
  GATA2 Guide RNA
gcggcgcauucagcacggccgg

SEQ ID NO: 27072 - RNA, 22 nt, Artificial Sequence
  GATA2 Guide RNA
gcugaaugcgccgcaccccgac

SEQ ID NO: 27073 - RNA, 22 nt, Artificial Sequence
  GATA2 Guide RNA
ggccgugcugaaugcgccgcac

SEQ ID NO: 27074 - RNA, 22 nt, Artificial Sequence
  GATA2 Guide RNA
ggcgcauucagcacggccgggu

SEQ ID NO: 27075 - RNA, 22 nt, Artificial Sequence
  GATA2 Guide RNA
ggggugcggcgcauucagcacg

SEQ ID NO: 27076 - RNA, 22 nt, Artificial Sequence
  GATA2 Guide RNA
gggugcggcgcauucagcacgg

SEQ ID NO: 27077 - RNA, 22 nt, Artificial Sequence
  GATA2 Guide RNA
ggguggugugagucggggugcg

SEQ ID NO: 27078 - RNA, 22 nt, Artificial Sequence
  GATA2 Guide RNA
ggugcggcgcauucagcacggc

SEQ ID NO: 27079 - RNA, 22 nt, Artificial Sequence
  GATA2 Guide RNA
gguggugugagucggggugcgg

SEQ ID NO: 27080 - RNA, 22 nt, Artificial Sequence
  GATA2 Guide RNA
ggugugagucggggugcggcgc

SEQ ID NO: 27081 - RNA, 22 nt, Artificial Sequence
  GATA2 Guide RNA
gucggggugcggcgcauucagc

SEQ ID NO: 27082 - RNA, 22 nt, Artificial Sequence
  GATA2 Guide RNA
gugagucggggugcggcgcauu

SEQ ID NO: 27083 - RNA, 22 nt, Artificial Sequence
  GATA2 Guide RNA
gugcggcgcauucagcacggcc

SEQ ID NO: 27084 - RNA, 22 nt, Artificial Sequence
  GATA2 Guide RNA
gugcugaaugcgccgcaccccg

SEQ ID NO: 27085 - RNA, 22 nt, Artificial Sequence
  GATA2 Guide RNA
guggugugagucggggugcggc

SEQ ID NO: 27086 - RNA, 22 nt, Artificial Sequence
  GATA2 Guide RNA
gugugagucggggugcggcgca

SEQ ID NO: 27087 - RNA, 22 nt, Artificial Sequence
  GATA2 Guide RNA
ucggggugcggcgcauucagca

SEQ ID NO: 27088 - RNA, 22 nt, Artificial Sequence
  GATA2 Guide RNA
ugaaugcgccgcaccccgacuc

SEQ ID NO: 27089 - RNA, 22 nt, Artificial Sequence
  GATA2 Guide RNA
ugagucggggugcggcgcauuc

SEQ ID NO: 27090 - RNA, 22 nt, Artificial Sequence
  GATA2 Guide RNA
ugcgccgcaccccgacucacac

SEQ ID NO: 27091 - RNA, 22 nt, Artificial Sequence
  GATA2 Guide RNA
ugcggcgcauucagcacggccg

SEQ ID NO: 27092 - RNA, 22 nt, Artificial Sequence
  GATA2 Guide RNA
ugcugaaugcgccgcaccccga

SEQ ID NO: 27093 - RNA, 22 nt, Artificial Sequence
  GATA2 Guide RNA
uggugugagucggggugcggcg

SEQ ID NO: 27094 - RNA, 22 nt, Artificial Sequence
  GATA2 Guide RNA
ugugagucggggugcggcgcau

SEQ ID NO: 27095 - RNA, 20 nt, Artificial Sequence
  GATA2 Guide RNA
acccggccgugcagaaugcg

SEQ ID NO: 27096 - RNA, 20 nt, Artificial Sequence
  GATA2 Guide RNA
agucggggugcugcgcauuc

SEQ ID NO: 27097 - RNA, 20 nt, Artificial Sequence
  GATA2 Guide RNA
auggcgcacccggccgugca

SEQ ID NO: 27098 - RNA, 20 nt, Artificial Sequence
  GATA2 Guide RNA
auucugcacggccgggugcg

SEQ ID NO: 27099 - RNA, 20 nt, Artificial Sequence
  GATA2 Guide RNA
cacccggccgugcagaaugc

SEQ ID NO: 27100 - RNA, 20 nt, Artificial Sequence
  GATA2 Guide RNA
cagaaugcgcagcaccccga

SEQ ID NO: 27101 - RNA, 20 nt, Artificial Sequence
  GATA2 Guide RNA
cauucugcacggccgggugc

SEQ ID NO: 27102 - RNA, 20 nt, Artificial Sequence
  GATA2 Guide RNA
cccggccgugcagaaugcgc

SEQ ID NO: 27103 - RNA, 20 nt, Artificial Sequence
  GATA2 Guide RNA
ccggccgugcagaaugcgca

SEQ ID NO: 27104 - RNA, 20 nt, Artificial Sequence
  GATA2 Guide RNA
ccgugcagaaugcgcagcac

SEQ ID NO: 27105 - RNA, 20 nt, Artificial Sequence
  GATA2 Guide RNA
cgcacccggccgugcagaau

SEQ ID NO: 27106 - RNA, 20 nt, Artificial Sequence
  GATA2 Guide RNA
cgcauucugcacggccgggu

SEQ ID NO: 27107 - RNA, 20 nt, Artificial Sequence
  GATA2 Guide RNA
cggccgugcagaaugcgcag

SEQ ID NO: 27108 - RNA, 20 nt, Artificial Sequence
  GATA2 Guide RNA
cggggugcugcgcauucugc

SEQ ID NO: 27109 - RNA, 20 nt, Artificial Sequence
  GATA2 Guide RNA
cgugcagaaugcgcagcacc

SEQ ID NO: 27110 - RNA, 20 nt, Artificial Sequence
  GATA2 Guide RNA
cugcacggccgggugcgcca

SEQ ID NO: 27111 - RNA, 20 nt, Artificial Sequence
  GATA2 Guide RNA
cugcgcauucugcacggccg

SEQ ID NO: 27112 - RNA, 20 nt, Artificial Sequence
  GATA2 Guide RNA
cuggauggcgcacccggccg

SEQ ID NO: 27113 - RNA, 20 nt, Artificial Sequence
  GATA2 Guide RNA
gagucggggugcugcgcauu

SEQ ID NO: 27114 - RNA, 20 nt, Artificial Sequence
  GATA2 Guide RNA
gauggcgcacccggccgugc

SEQ ID NO: 27115 - RNA, 20 nt, Artificial Sequence
  GATA2 Guide RNA
gcacccggccgugcagaaug

SEQ ID NO: 27116 - RNA, 20 nt, Artificial Sequence
  GATA2 Guide RNA
gcagaaugcgcagcaccccg

SEQ ID NO: 27117 - RNA, 20 nt, Artificial Sequence
  GATA2 Guide RNA
gcauucugcacggccgggug

SEQ ID NO: 27118 - RNA, 20 nt, Artificial Sequence
  GATA2 Guide RNA
gccgugcagaaugcgcagca

SEQ ID NO: 27119 - RNA, 20 nt, Artificial Sequence
  GATA2 Guide RNA
gcgcacccggccgugcagaa

SEQ ID NO: 27120 - RNA, 20 nt, Artificial Sequence
  GATA2 Guide RNA
gcgcauucugcacggccggg

SEQ ID NO: 27121 - RNA, 20 nt, Artificial Sequence
  GATA2 Guide RNA
gcugcgcauucugcacggcc

SEQ ID NO: 27122 - RNA, 20 nt, Artificial Sequence
  GATA2 Guide RNA
ggauggcgcacccggccgug

SEQ ID NO: 27123 - RNA, 20 nt, Artificial Sequence
  GATA2 Guide RNA
ggccgugcagaaugcgcagc

SEQ ID NO: 27124 - RNA, 20 nt, Artificial Sequence
  GATA2 Guide RNA
ggcgcacccggccgugcaga

SEQ ID NO: 27125 - RNA, 20 nt, Artificial Sequence
  GATA2 Guide RNA
ggggugcugcgcauucugca

SEQ ID NO: 27126 - RNA, 20 nt, Artificial Sequence
  GATA2 Guide RNA
gggugcugcgcauucugcac

SEQ ID NO: 27127 - RNA, 20 nt, Artificial Sequence
  GATA2 Guide RNA
ggugcugcgcauucugcacg

SEQ ID NO: 27128 - RNA, 20 nt, Artificial Sequence
  GATA2 Guide RNA
gucggggugcugcgcauucu

SEQ ID NO: 27129 - RNA, 20 nt, Artificial Sequence
  GATA2 Guide RNA
gugcagaaugcgcagcaccc

SEQ ID NO: 27130 - RNA, 20 nt, Artificial Sequence
  GATA2 Guide RNA
gugcugcgcauucugcacgg

SEQ ID NO: 27131 - RNA, 20 nt, Artificial Sequence
  GATA2 Guide RNA
ucggggugcugcgcauucug

SEQ ID NO: 27132 - RNA, 20 nt, Artificial Sequence
  GATA2 Guide RNA
ucugcacggccgggugcgcc

SEQ ID NO: 27133 - RNA, 20 nt, Artificial Sequence
  GATA2 Guide RNA
ugagucggggugcugcgcau

SEQ ID NO: 27134 - RNA, 20 nt, Artificial Sequence
  GATA2 Guide RNA
ugcacggccgggugcgccau

SEQ ID NO: 27135 - RNA, 20 nt, Artificial Sequence
  GATA2 Guide RNA
ugcagaaugcgcagcacccc

SEQ ID NO: 27136 - RNA, 20 nt, Artificial Sequence
  GATA2 Guide RNA
ugcgcauucugcacggccgg

SEQ ID NO: 27137 - RNA, 20 nt, Artificial Sequence
  GATA2 Guide RNA
ugcugcgcauucugcacggc

SEQ ID NO: 27138 - RNA, 20 nt, Artificial Sequence
  GATA2 Guide RNA
uggauggcgcacccggccgu

SEQ ID NO: 27139 - RNA, 20 nt, Artificial Sequence
  GATA2 Guide RNA
uggcgcacccggccgugcag

SEQ ID NO: 27140 - RNA, 20 nt, Artificial Sequence
  GATA2 Guide RNA
uucugcacggccgggugcgc

SEQ ID NO: 27141 - RNA, 21 nt, Artificial Sequence
  GATA2 Guide RNA
acccggccgugcagaaugcgc

SEQ ID NO: 27142 - RNA, 21 nt, Artificial Sequence
  GATA2 Guide RNA
agucggggugcugcgcauucu

SEQ ID NO: 27143 - RNA, 21 nt, Artificial Sequence
  GATA2 Guide RNA
auggcgcacccggccgugcag

SEQ ID NO: 27144 - RNA, 21 nt, Artificial Sequence
  GATA2 Guide RNA
auucugcacggccgggugcgc

SEQ ID NO: 27145 - RNA, 21 nt, Artificial Sequence
  GATA2 Guide RNA
cacccggccgugcagaaugcg

SEQ ID NO: 27146 - RNA, 21 nt, Artificial Sequence
  GATA2 Guide RNA
cagaaugcgcagcaccccgac

SEQ ID NO: 27147 - RNA, 21 nt, Artificial Sequence
  GATA2 Guide RNA
cauucugcacggccgggugcg

SEQ ID NO: 27148 - RNA, 21 nt, Artificial Sequence
  GATA2 Guide RNA
cccggccgugcagaaugcgca

SEQ ID NO: 27149 - RNA, 21 nt, Artificial Sequence
  GATA2 Guide RNA
ccggccgugcagaaugcgcag

SEQ ID NO: 27150 - RNA, 21 nt, Artificial Sequence
  GATA2 Guide RNA
ccgugcagaaugcgcagcacc

SEQ ID NO: 27151 - RNA, 21 nt, Artificial Sequence
  GATA2 Guide RNA
cgcacccggccgugcagaaug

SEQ ID NO: 27152 - RNA, 21 nt, Artificial Sequence
  GATA2 Guide RNA
cgcauucugcacggccgggug

SEQ ID NO: 27153 - RNA, 21 nt, Artificial Sequence
  GATA2 Guide RNA
cggccgugcagaaugcgcagc

SEQ ID NO: 27154 - RNA, 21 nt, Artificial Sequence
  GATA2 Guide RNA
cggggugcugcgcauucugca

SEQ ID NO: 27155 - RNA, 21 nt, Artificial Sequence
  GATA2 Guide RNA
cgugcagaaugcgcagcaccc

SEQ ID NO: 27156 - RNA, 21 nt, Artificial Sequence
  GATA2 Guide RNA
cugcacggccgggugcgccau

SEQ ID NO: 27157 - RNA, 21 nt, Artificial Sequence
  GATA2 Guide RNA
cugcgcauucugcacggccgg

SEQ ID NO: 27158 - RNA, 21 nt, Artificial Sequence
  GATA2 Guide RNA
cuggauggcgcacccggccgu

SEQ ID NO: 27159 - RNA, 21 nt, Artificial Sequence
  GATA2 Guide RNA
gagucggggugcugcgcauuc

SEQ ID NO: 27160 - RNA, 21 nt, Artificial Sequence
  GATA2 Guide RNA
gauggcgcacccggccgugca

SEQ ID NO: 27161 - RNA, 21 nt, Artificial Sequence
  GATA2 Guide RNA
gcacccggccgugcagaaugc

SEQ ID NO: 27162 - RNA, 21 nt, Artificial Sequence
  GATA2 Guide RNA
gcagaaugcgcagcaccccga

SEQ ID NO: 27163 - RNA, 21 nt, Artificial Sequence
  GATA2 Guide RNA
gcauucugcacggccgggugc

SEQ ID NO: 27164 - RNA, 21 nt, Artificial Sequence
  GATA2 Guide RNA
gccgugcagaaugcgcagcac

SEQ ID NO: 27165 - RNA, 21 nt, Artificial Sequence
  GATA2 Guide RNA
gcgcacccggccgugcagaau

SEQ ID NO: 27166 - RNA, 21 nt, Artificial Sequence
  GATA2 Guide RNA
gcgcauucugcacggccgggu

SEQ ID NO: 27167 - RNA, 21 nt, Artificial Sequence
  GATA2 Guide RNA
gcugcgcauucugcacggccg

SEQ ID NO: 27168 - RNA, 21 nt, Artificial Sequence
  GATA2 Guide RNA
ggccgugcagaaugcgcagca

SEQ ID NO: 27169 - RNA, 21 nt, Artificial Sequence
  GATA2 Guide RNA
ggcgcacccggccgugcagaa

SEQ ID NO: 27170 - RNA, 21 nt, Artificial Sequence
  GATA2 Guide RNA
ggggugcugcgcauucugcac

SEQ ID NO: 27171 - RNA, 21 nt, Artificial Sequence
  GATA2 Guide RNA
gggugcugcgcauucugcacg

SEQ ID NO: 27172 - RNA, 21 nt, Artificial Sequence
  GATA2 Guide RNA
ggugcugcgcauucugcacgg

SEQ ID NO: 27173 - RNA, 21 nt, Artificial Sequence
  GATA2 Guide RNA
gucggggugcugcgcauucug

SEQ ID NO: 27174 - RNA, 21 nt, Artificial Sequence
  GATA2 Guide RNA
gugagucggggugcugcgcau

SEQ ID NO: 27175 - RNA, 21 nt, Artificial Sequence
  GATA2 Guide RNA
gugcagaaugcgcagcacccc

SEQ ID NO: 27176 - RNA, 21 nt, Artificial Sequence
  GATA2 Guide RNA
gugcugcgcauucugcacggc

SEQ ID NO: 27177 - RNA, 21 nt, Artificial Sequence
  GATA2 Guide RNA
ucggggugcugcgcauucugc

SEQ ID NO: 27178 - RNA, 21 nt, Artificial Sequence
  GATA2 Guide RNA
ucugcacggccgggugcgcca

SEQ ID NO: 27179 - RNA, 21 nt, Artificial Sequence
  GATA2 Guide RNA
ugagucggggugcugcgcauu

SEQ ID NO: 27180 - RNA, 21 nt, Artificial Sequence
  GATA2 Guide RNA
ugcacggccgggugcgccauc

SEQ ID NO: 27181 - RNA, 21 nt, Artificial Sequence
  GATA2 Guide RNA
ugcagaaugcgcagcaccccg

SEQ ID NO: 27182 - RNA, 21 nt, Artificial Sequence
  GATA2 Guide RNA
ugcgcauucugcacggccggg

SEQ ID NO: 27183 - RNA, 21 nt, Artificial Sequence
  GATA2 Guide RNA
ugcugcgcauucugcacggcc

SEQ ID NO: 27184 - RNA, 21 nt, Artificial Sequence
  GATA2 Guide RNA
uggauggcgcacccggccgug

SEQ ID NO: 27185 - RNA, 21 nt, Artificial Sequence
  GATA2 Guide RNA
uggcgcacccggccgugcaga

SEQ ID NO: 27186 - RNA, 21 nt, Artificial Sequence
  GATA2 Guide RNA
uucugcacggccgggugcgcc

SEQ ID NO: 27187 - RNA, 22 nt, Artificial Sequence
  GATA2 Guide RNA
acccggccgugcagaaugcgca

SEQ ID NO: 27188 - RNA, 22 nt, Artificial Sequence
  GATA2 Guide RNA
agucggggugcugcgcauucug

SEQ ID NO: 27189 - RNA, 22 nt, Artificial Sequence
  GATA2 Guide RNA
auggcgcacccggccgugcaga

SEQ ID NO: 27190 - RNA, 22 nt, Artificial Sequence
  GATA2 Guide RNA
auucugcacggccgggugcgcc

SEQ ID NO: 27191 - RNA, 22 nt, Artificial Sequence
  GATA2 Guide RNA
cacccggccgugcagaaugcgc

SEQ ID NO: 27192 - RNA, 22 nt, Artificial Sequence
  GATA2 Guide RNA
cagaaugcgcagcaccccgacu

SEQ ID NO: 27193 - RNA, 22 nt, Artificial Sequence
  GATA2 Guide RNA
cauucugcacggccgggugcgc

SEQ ID NO: 27194 - RNA, 22 nt, Artificial Sequence
  GATA2 Guide RNA
cccggccgugcagaaugcgcag

SEQ ID NO: 27195 - RNA, 22 nt, Artificial Sequence
  GATA2 Guide RNA
ccggccgugcagaaugcgcagc

SEQ ID NO: 27196 - RNA, 22 nt, Artificial Sequence
  GATA2 Guide RNA
ccgugcagaaugcgcagcaccc

SEQ ID NO: 27197 - RNA, 22 nt, Artificial Sequence
  GATA2 Guide RNA
cgcacccggccgugcagaaugc

SEQ ID NO: 27198 - RNA, 22 nt, Artificial Sequence
  GATA2 Guide RNA
cgcauucugcacggccgggugc

SEQ ID NO: 27199 - RNA, 22 nt, Artificial Sequence
  GATA2 Guide RNA
cggccgugcagaaugcgcagca

SEQ ID NO: 27200 - RNA, 22 nt, Artificial Sequence
  GATA2 Guide RNA
cggggugcugcgcauucugcac

SEQ ID NO: 27201 - RNA, 22 nt, Artificial Sequence
  GATA2 Guide RNA
cgugcagaaugcgcagcacccc

SEQ ID NO: 27202 - RNA, 22 nt, Artificial Sequence
  GATA2 Guide RNA
cugcacggccgggugcgccauc

SEQ ID NO: 27203 - RNA, 22 nt, Artificial Sequence
  GATA2 Guide RNA
cugcgcauucugcacggccggg

SEQ ID NO: 27204 - RNA, 22 nt, Artificial Sequence
  GATA2 Guide RNA
cuggauggcgcacccggccgug

SEQ ID NO: 27205 - RNA, 22 nt, Artificial Sequence
  GATA2 Guide RNA
gagucggggugcugcgcauucu

SEQ ID NO: 27206 - RNA, 22 nt, Artificial Sequence
  GATA2 Guide RNA
gauggcgcacccggccgugcag

SEQ ID NO: 27207 - RNA, 22 nt, Artificial Sequence
  GATA2 Guide RNA
gcacccggccgugcagaaugcg

SEQ ID NO: 27208 - RNA, 22 nt, Artificial Sequence
  GATA2 Guide RNA
gcagaaugcgcagcaccccgac

SEQ ID NO: 27209 - RNA, 22 nt, Artificial Sequence
  GATA2 Guide RNA
gcauucugcacggccgggugcg

SEQ ID NO: 27210 - RNA, 22 nt, Artificial Sequence
  GATA2 Guide RNA
gccgugcagaaugcgcagcacc

SEQ ID NO: 27211 - RNA, 22 nt, Artificial Sequence
  GATA2 Guide RNA
gcgcacccggccgugcagaaug

SEQ ID NO: 27212 - RNA, 22 nt, Artificial Sequence
  GATA2 Guide RNA
gcgcauucugcacggccgggug

SEQ ID NO: 27213 - RNA, 22 nt, Artificial Sequence
  GATA2 Guide RNA
gcugcgcauucugcacggccgg

SEQ ID NO: 27214 - RNA, 22 nt, Artificial Sequence
  GATA2 Guide RNA
gcuggauggcgcacccggccgu

SEQ ID NO: 27215 - RNA, 22 nt, Artificial Sequence
  GATA2 Guide RNA
ggauggcgcacccggccgugca

SEQ ID NO: 27216 - RNA, 22 nt, Artificial Sequence
  GATA2 Guide RNA
ggccgugcagaaugcgcagcac

SEQ ID NO: 27217 - RNA, 22 nt, Artificial Sequence
  GATA2 Guide RNA
ggcgcacccggccgugcagaau

SEQ ID NO: 27218 - RNA, 22 nt, Artificial Sequence
  GATA2 Guide RNA
ggggugcugcgcauucugcacg

SEQ ID NO: 27219 - RNA, 22 nt, Artificial Sequence
  GATA2 Guide RNA
gggugcugcgcauucugcacgg

SEQ ID NO: 27220 - RNA, 22 nt, Artificial Sequence
  GATA2 Guide RNA
ggugcugcgcauucugcacggc

SEQ ID NO: 27221 - RNA, 22 nt, Artificial Sequence
  GATA2 Guide RNA
gucggggugcugcgcauucugc

SEQ ID NO: 27222 - RNA, 22 nt, Artificial Sequence
  GATA2 Guide RNA
gugagucggggugcugcgcauu

SEQ ID NO: 27223 - RNA, 22 nt, Artificial Sequence
  GATA2 Guide RNA
gugcagaaugcgcagcaccccg

SEQ ID NO: 27224 - RNA, 22 nt, Artificial Sequence
  GATA2 Guide RNA
gugcugcgcauucugcacggcc

SEQ ID NO: 27225 - RNA, 22 nt, Artificial Sequence
  GATA2 Guide RNA
ucggggugcugcgcauucugca

SEQ ID NO: 27226 - RNA, 22 nt, Artificial Sequence
  GATA2 Guide RNA
ucugcacggccgggugcgccau

SEQ ID NO: 27227 - RNA, 22 nt, Artificial Sequence
  GATA2 Guide RNA
ugagucggggugcugcgcauuc

SEQ ID NO: 27228 - RNA, 22 nt, Artificial Sequence
  GATA2 Guide RNA
ugcacggccgggugcgccaucc

SEQ ID NO: 27229 - RNA, 22 nt, Artificial Sequence
  GATA2 Guide RNA
ugcagaaugcgcagcaccccga

SEQ ID NO: 27230 - RNA, 22 nt, Artificial Sequence
  GATA2 Guide RNA
ugcgcauucugcacggccgggu

SEQ ID NO: 27231 - RNA, 22 nt, Artificial Sequence
  GATA2 Guide RNA
ugcugcgcauucugcacggccg

SEQ ID NO: 27232 - RNA, 22 nt, Artificial Sequence
  GATA2 Guide RNA
uggauggcgcacccggccgugc

SEQ ID NO: 27233 - RNA, 22 nt, Artificial Sequence
  GATA2 Guide RNA
uggcgcacccggccgugcagaa

SEQ ID NO: 27234 - RNA, 22 nt, Artificial Sequence
  GATA2 Guide RNA
ugugagucggggugcugcgcau

SEQ ID NO: 27235 - RNA, 22 nt, Artificial Sequence
  GATA2 Guide RNA
uucugcacggccgggugcgcca

SEQ ID NO: 27236 - RNA, 20 nt, Artificial Sequence
  GATA2 Guide RNA
acggccgagugcgccaucca

SEQ ID NO: 27237 - RNA, 20 nt, Artificial Sequence
  GATA2 Guide RNA
acucggccgugcugaaugcg

SEQ ID NO: 27238 - RNA, 20 nt, Artificial Sequence
  GATA2 Guide RNA
agcacggccgagugcgccau

SEQ ID NO: 27239 - RNA, 20 nt, Artificial Sequence
  GATA2 Guide RNA
agcagccgcgcuggauggcg

SEQ ID NO: 27240 - RNA, 20 nt, Artificial Sequence
  GATA2 Guide RNA
agccgcgcuggauggcgcac

SEQ ID NO: 27241 - RNA, 20 nt, Artificial Sequence
  GATA2 Guide RNA
agugcgccauccagcgcggc

SEQ ID NO: 27242 - RNA, 20 nt, Artificial Sequence
  GATA2 Guide RNA
auggcgcacucggccgugcu

SEQ ID NO: 27243 - RNA, 20 nt, Artificial Sequence
  GATA2 Guide RNA
auucagcacggccgagugcg

SEQ ID NO: 27244 - RNA, 20 nt, Artificial Sequence
  GATA2 Guide RNA
cacggccgagugcgccaucc

SEQ ID NO: 27245 - RNA, 20 nt, Artificial Sequence
  GATA2 Guide RNA
cacucggccgugcugaaugc

SEQ ID NO: 27246 - RNA, 20 nt, Artificial Sequence
  GATA2 Guide RNA
cagcacggccgagugcgcca

SEQ ID NO: 27247 - RNA, 20 nt, Artificial Sequence
  GATA2 Guide RNA
cagccgcgcuggauggcgca

SEQ ID NO: 27248 - RNA, 20 nt, Artificial Sequence
  GATA2 Guide RNA
cauucagcacggccgagugc

SEQ ID NO: 27249 - RNA, 20 nt, Artificial Sequence
  GATA2 Guide RNA
ccgagugcgccauccagcgc

SEQ ID NO: 27250 - RNA, 20 nt, Artificial Sequence
  GATA2 Guide RNA
ccgcgcuggauggcgcacuc

SEQ ID NO: 27251 - RNA, 20 nt, Artificial Sequence
  GATA2 Guide RNA
cgagugcgccauccagcgcg

SEQ ID NO: 27252 - RNA, 20 nt, Artificial Sequence
  GATA2 Guide RNA
cgcacucggccgugcugaau

SEQ ID NO: 27253 - RNA, 20 nt, Artificial Sequence
  GATA2 Guide RNA
cgcauucagcacggccgagu

SEQ ID NO: 27254 - RNA, 20 nt, Artificial Sequence
  GATA2 Guide RNA
cgcgcuggauggcgcacucg

SEQ ID NO: 27255 - RNA, 20 nt, Artificial Sequence
  GATA2 Guide RNA
cgcuggauggcgcacucggc

SEQ ID NO: 27256 - RNA, 20 nt, Artificial Sequence
  GATA2 Guide RNA
cggccgagugcgccauccag

SEQ ID NO: 27257 - RNA, 20 nt, Artificial Sequence
  GATA2 Guide RNA
cucggccgugcugaaugcgc

SEQ ID NO: 27258 - RNA, 20 nt, Artificial Sequence
  GATA2 Guide RNA
cugcgcauucagcacggccg

SEQ ID NO: 27259 - RNA, 20 nt, Artificial Sequence
  GATA2 Guide RNA
cuggauggcgcacucggccg

SEQ ID NO: 27260 - RNA, 20 nt, Artificial Sequence
  GATA2 Guide RNA
gagugcgccauccagcgcgg

SEQ ID NO: 27261 - RNA, 20 nt, Artificial Sequence
  GATA2 Guide RNA
gauggcgcacucggccgugc

SEQ ID NO: 27262 - RNA, 20 nt, Artificial Sequence
  GATA2 Guide RNA
gcacggccgagugcgccauc

SEQ ID NO: 27263 - RNA, 20 nt, Artificial Sequence
  GATA2 Guide RNA
gcacucggccgugcugaaug

SEQ ID NO: 27264 - RNA, 20 nt, Artificial Sequence
  GATA2 Guide RNA
gcagccgcgcuggauggcgc

SEQ ID NO: 27265 - RNA, 20 nt, Artificial Sequence
  GATA2 Guide RNA
gcauucagcacggccgagug

SEQ ID NO: 27266 - RNA, 20 nt, Artificial Sequence
  GATA2 Guide RNA
gccgagugcgccauccagcg

SEQ ID NO: 27267 - RNA, 20 nt, Artificial Sequence
  GATA2 Guide RNA
gccgcgcuggauggcgcacu

SEQ ID NO: 27268 - RNA, 20 nt, Artificial Sequence
  GATA2 Guide RNA
gcgcacucggccgugcugaa

SEQ ID NO: 27269 - RNA, 20 nt, Artificial Sequence
  GATA2 Guide RNA
gcgcauucagcacggccgag

SEQ ID NO: 27270 - RNA, 20 nt, Artificial Sequence
  GATA2 Guide RNA
gcgcuggauggcgcacucgg

SEQ ID NO: 27271 - RNA, 20 nt, Artificial Sequence
  GATA2 Guide RNA
gcugcgcauucagcacggcc

SEQ ID NO: 27272 - RNA, 20 nt, Artificial Sequence
  GATA2 Guide RNA
gcuggauggcgcacucggcc

SEQ ID NO: 27273 - RNA, 20 nt, Artificial Sequence
  GATA2 Guide RNA
ggauggcgcacucggccgug

SEQ ID NO: 27274 - RNA, 20 nt, Artificial Sequence
  GATA2 Guide RNA
ggccgagugcgccauccagc

SEQ ID NO: 27275 - RNA, 20 nt, Artificial Sequence
  GATA2 Guide RNA
ggcgcacucggccgugcuga

SEQ ID NO: 27276 - RNA, 20 nt, Artificial Sequence
  GATA2 Guide RNA
ucagcacggccgagugcgcc

SEQ ID NO: 27277 - RNA, 20 nt, Artificial Sequence
  GATA2 Guide RNA
ugcgcauucagcacggccga

SEQ ID NO: 27278 - RNA, 20 nt, Artificial Sequence
  GATA2 Guide RNA
ugcugcgcauucagcacggc

SEQ ID NO: 27279 - RNA, 20 nt, Artificial Sequence
  GATA2 Guide RNA
uggauggcgcacucggccgu

SEQ ID NO: 27280 - RNA, 20 nt, Artificial Sequence
  GATA2 Guide RNA
uggcgcacucggccgugcug

SEQ ID NO: 27281 - RNA, 20 nt, Artificial Sequence
  GATA2 Guide RNA
uucagcacggccgagugcgc

SEQ ID NO: 27282 - RNA, 21 nt, Artificial Sequence
  GATA2 Guide RNA
acggccgagugcgccauccag

SEQ ID NO: 27283 - RNA, 21 nt, Artificial Sequence
  GATA2 Guide RNA
acucggccgugcugaaugcgc

SEQ ID NO: 27284 - RNA, 21 nt, Artificial Sequence
  GATA2 Guide RNA
agcacggccgagugcgccauc

SEQ ID NO: 27285 - RNA, 21 nt, Artificial Sequence
  GATA2 Guide RNA
agcagccgcgcuggauggcgc

SEQ ID NO: 27286 - RNA, 21 nt, Artificial Sequence
  GATA2 Guide RNA
agccgcgcuggauggcgcacu

SEQ ID NO: 27287 - RNA, 21 nt, Artificial Sequence
  GATA2 Guide RNA
agugcgccauccagcgcggcu

SEQ ID NO: 27288 - RNA, 21 nt, Artificial Sequence
  GATA2 Guide RNA
auggcgcacucggccgugcug

SEQ ID NO: 27289 - RNA, 21 nt, Artificial Sequence
  GATA2 Guide RNA
auucagcacggccgagugcgc

SEQ ID NO: 27290 - RNA, 21 nt, Artificial Sequence
  GATA2 Guide RNA
cacggccgagugcgccaucca

SEQ ID NO: 27291 - RNA, 21 nt, Artificial Sequence
  GATA2 Guide RNA
cacucggccgugcugaaugcg

SEQ ID NO: 27292 - RNA, 21 nt, Artificial Sequence
  GATA2 Guide RNA
cagcacggccgagugcgccau

SEQ ID NO: 27293 - RNA, 21 nt, Artificial Sequence
  GATA2 Guide RNA
cagccgcgcuggauggcgcac

SEQ ID NO: 27294 - RNA, 21 nt, Artificial Sequence
  GATA2 Guide RNA
cauucagcacggccgagugcg

SEQ ID NO: 27295 - RNA, 21 nt, Artificial Sequence
  GATA2 Guide RNA
ccgagugcgccauccagcgcg

SEQ ID NO: 27296 - RNA, 21 nt, Artificial Sequence
  GATA2 Guide RNA
ccgcgcuggauggcgcacucg

SEQ ID NO: 27297 - RNA, 21 nt, Artificial Sequence
  GATA2 Guide RNA
cgagugcgccauccagcgcgg

SEQ ID NO: 27298 - RNA, 21 nt, Artificial Sequence
  GATA2 Guide RNA
cgcacucggccgugcugaaug

SEQ ID NO: 27299 - RNA, 21 nt, Artificial Sequence
  GATA2 Guide RNA
cgcauucagcacggccgagug

SEQ ID NO: 27300 - RNA, 21 nt, Artificial Sequence
  GATA2 Guide RNA
cgcgcuggauggcgcacucgg

SEQ ID NO: 27301 - RNA, 21 nt, Artificial Sequence
  GATA2 Guide RNA
cgcuggauggcgcacucggcc

SEQ ID NO: 27302 - RNA, 21 nt, Artificial Sequence
  GATA2 Guide RNA
cggccgagugcgccauccagc

SEQ ID NO: 27303 - RNA, 21 nt, Artificial Sequence
  GATA2 Guide RNA
cucggccgugcugaaugcgca

SEQ ID NO: 27304 - RNA, 21 nt, Artificial Sequence
  GATA2 Guide RNA
cugcgcauucagcacggccga

SEQ ID NO: 27305 - RNA, 21 nt, Artificial Sequence
  GATA2 Guide RNA
cuggauggcgcacucggccgu

SEQ ID NO: 27306 - RNA, 21 nt, Artificial Sequence
  GATA2 Guide RNA
gagcagccgcgcuggauggcg

SEQ ID NO: 27307 - RNA, 21 nt, Artificial Sequence
  GATA2 Guide RNA
gagugcgccauccagcgcggc

SEQ ID NO: 27308 - RNA, 21 nt, Artificial Sequence
  GATA2 Guide RNA
gauggcgcacucggccgugcu

SEQ ID NO: 27309 - RNA, 21 nt, Artificial Sequence
  GATA2 Guide RNA
gcacggccgagugcgccaucc

SEQ ID NO: 27310 - RNA, 21 nt, Artificial Sequence
  GATA2 Guide RNA
gcacucggccgugcugaaugc

SEQ ID NO: 27311 - RNA, 21 nt, Artificial Sequence
  GATA2 Guide RNA
gcagccgcgcuggauggcgca

SEQ ID NO: 27312 - RNA, 21 nt, Artificial Sequence
  GATA2 Guide RNA
gcauucagcacggccgagugc

SEQ ID NO: 27313 - RNA, 21 nt, Artificial Sequence
  GATA2 Guide RNA
gccgagugcgccauccagcgc

SEQ ID NO: 27314 - RNA, 21 nt, Artificial Sequence
  GATA2 Guide RNA
gccgcgcuggauggcgcacuc

SEQ ID NO: 27315 - RNA, 21 nt, Artificial Sequence
  GATA2 Guide RNA
gcgcacucggccgugcugaau

SEQ ID NO: 27316 - RNA, 21 nt, Artificial Sequence
  GATA2 Guide RNA
gcgcauucagcacggccgagu

SEQ ID NO: 27317 - RNA, 21 nt, Artificial Sequence
  GATA2 Guide RNA
gcgcuggauggcgcacucggc

SEQ ID NO: 27318 - RNA, 21 nt, Artificial Sequence
  GATA2 Guide RNA
gcugcgcauucagcacggccg

SEQ ID NO: 27319 - RNA, 21 nt, Artificial Sequence
  GATA2 Guide RNA
gcuggauggcgcacucggccg

SEQ ID NO: 27320 - RNA, 21 nt, Artificial Sequence
  GATA2 Guide RNA
ggauggcgcacucggccgugc

SEQ ID NO: 27321 - RNA, 21 nt, Artificial Sequence
  GATA2 Guide RNA
ggccgagugcgccauccagcg

SEQ ID NO: 27322 - RNA, 21 nt, Artificial Sequence
  GATA2 Guide RNA
ggcgcacucggccgugcugaa

SEQ ID NO: 27323 - RNA, 21 nt, Artificial Sequence
  GATA2 Guide RNA
gugcugcgcauucagcacggc

SEQ ID NO: 27324 - RNA, 21 nt, Artificial Sequence
  GATA2 Guide RNA
ucagcacggccgagugcgcca

SEQ ID NO: 27325 - RNA, 21 nt, Artificial Sequence
  GATA2 Guide RNA
ugcgcauucagcacggccgag

SEQ ID NO: 27326 - RNA, 21 nt, Artificial Sequence
  GATA2 Guide RNA
ugcugcgcauucagcacggcc

SEQ ID NO: 27327 - RNA, 21 nt, Artificial Sequence
  GATA2 Guide RNA
uggauggcgcacucggccgug

SEQ ID NO: 27328 - RNA, 21 nt, Artificial Sequence
  GATA2 Guide RNA
uggcgcacucggccgugcuga

SEQ ID NO: 27329 - RNA, 21 nt, Artificial Sequence
  GATA2 Guide RNA
uucagcacggccgagugcgcc

SEQ ID NO: 27330 - RNA, 22 nt, Artificial Sequence
  GATA2 Guide RNA
acggccgagugcgccauccagc

SEQ ID NO: 27331 - RNA, 22 nt, Artificial Sequence
  GATA2 Guide RNA
acucggccgugcugaaugcgca

SEQ ID NO: 27332 - RNA, 22 nt, Artificial Sequence
  GATA2 Guide RNA
agcacggccgagugcgccaucc

SEQ ID NO: 27333 - RNA, 22 nt, Artificial Sequence
  GATA2 Guide RNA
agcagccgcgcuggauggcgca

SEQ ID NO: 27334 - RNA, 22 nt, Artificial Sequence
  GATA2 Guide RNA
agccgcgcuggauggcgcacuc

SEQ ID NO: 27335 - RNA, 22 nt, Artificial Sequence
  GATA2 Guide RNA
agugcgccauccagcgcggcug

SEQ ID NO: 27336 - RNA, 22 nt, Artificial Sequence
  GATA2 Guide RNA
auggcgcacucggccgugcuga

SEQ ID NO: 27337 - RNA, 22 nt, Artificial Sequence
  GATA2 Guide RNA
auucagcacggccgagugcgcc

SEQ ID NO: 27338 - RNA, 22 nt, Artificial Sequence
  GATA2 Guide RNA
cacggccgagugcgccauccag

SEQ ID NO: 27339 - RNA, 22 nt, Artificial Sequence
  GATA2 Guide RNA
cacucggccgugcugaaugcgc

SEQ ID NO: 27340 - RNA, 22 nt, Artificial Sequence
  GATA2 Guide RNA
cagcacggccgagugcgccauc

SEQ ID NO: 27341 - RNA, 22 nt, Artificial Sequence
  GATA2 Guide RNA
cagccgcgcuggauggcgcacu

SEQ ID NO: 27342 - RNA, 22 nt, Artificial Sequence
  GATA2 Guide RNA
cauucagcacggccgagugcgc

SEQ ID NO: 27343 - RNA, 22 nt, Artificial Sequence
  GATA2 Guide RNA
ccgagugcgccauccagcgcgg

SEQ ID NO: 27344 - RNA, 22 nt, Artificial Sequence
  GATA2 Guide RNA
ccgcgcuggauggcgcacucgg

SEQ ID NO: 27345 - RNA, 22 nt, Artificial Sequence
  GATA2 Guide RNA
cgagcagccgcgcuggauggcg

SEQ ID NO: 27346 - RNA, 22 nt, Artificial Sequence
  GATA2 Guide RNA
cgagugcgccauccagcgcggc

SEQ ID NO: 27347 - RNA, 22 nt, Artificial Sequence
  GATA2 Guide RNA
cgcacucggccgugcugaaugc

SEQ ID NO: 27348 - RNA, 22 nt, Artificial Sequence
  GATA2 Guide RNA
cgcauucagcacggccgagugc

SEQ ID NO: 27349 - RNA, 22 nt, Artificial Sequence
  GATA2 Guide RNA
cgcgcuggauggcgcacucggc

SEQ ID NO: 27350 - RNA, 22 nt, Artificial Sequence
  GATA2 Guide RNA
cgcuggauggcgcacucggccg

SEQ ID NO: 27351 - RNA, 22 nt, Artificial Sequence
  GATA2 Guide RNA
cggccgagugcgccauccagcg

SEQ ID NO: 27352 - RNA, 22 nt, Artificial Sequence
  GATA2 Guide RNA
cucggccgugcugaaugcgcag

SEQ ID NO: 27353 - RNA, 22 nt, Artificial Sequence
  GATA2 Guide RNA
cugcgcauucagcacggccgag

SEQ ID NO: 27354 - RNA, 22 nt, Artificial Sequence
  GATA2 Guide RNA
cuggauggcgcacucggccgug

SEQ ID NO: 27355 - RNA, 22 nt, Artificial Sequence
  GATA2 Guide RNA
gagcagccgcgcuggauggcgc

SEQ ID NO: 27356 - RNA, 22 nt, Artificial Sequence
  GATA2 Guide RNA
gagugcgccauccagcgcggcu

SEQ ID NO: 27357 - RNA, 22 nt, Artificial Sequence
  GATA2 Guide RNA
gauggcgcacucggccgugcug

SEQ ID NO: 27358 - RNA, 22 nt, Artificial Sequence
  GATA2 Guide RNA
gcacggccgagugcgccaucca

SEQ ID NO: 27359 - RNA, 22 nt, Artificial Sequence
  GATA2 Guide RNA
gcacucggccgugcugaaugcg

SEQ ID NO: 27360 - RNA, 22 nt, Artificial Sequence
  GATA2 Guide RNA
gcagccgcgcuggauggcgcac

SEQ ID NO: 27361 - RNA, 22 nt, Artificial Sequence
  GATA2 Guide RNA
gcauucagcacggccgagugcg

SEQ ID NO: 27362 - RNA, 22 nt, Artificial Sequence
  GATA2 Guide RNA
gccgagugcgccauccagcgcg

SEQ ID NO: 27363 - RNA, 22 nt, Artificial Sequence
  GATA2 Guide RNA
gccgcgcuggauggcgcacucg

SEQ ID NO: 27364 - RNA, 22 nt, Artificial Sequence
  GATA2 Guide RNA
gcgcacucggccgugcugaaug

SEQ ID NO: 27365 - RNA, 22 nt, Artificial Sequence
  GATA2 Guide RNA
gcgcauucagcacggccgagug

SEQ ID NO: 27366 - RNA, 22 nt, Artificial Sequence
  GATA2 Guide RNA
gcgcuggauggcgcacucggcc

SEQ ID NO: 27367 - RNA, 22 nt, Artificial Sequence
  GATA2 Guide RNA
gcugcgcauucagcacggccga

SEQ ID NO: 27368 - RNA, 22 nt, Artificial Sequence
  GATA2 Guide RNA
gcuggauggcgcacucggccgu

SEQ ID NO: 27369 - RNA, 22 nt, Artificial Sequence
  GATA2 Guide RNA
ggauggcgcacucggccgugcu

SEQ ID NO: 27370 - RNA, 22 nt, Artificial Sequence
  GATA2 Guide RNA
ggccgagugcgccauccagcgc

SEQ ID NO: 27371 - RNA, 22 nt, Artificial Sequence
  GATA2 Guide RNA
ggcgcacucggccgugcugaau

SEQ ID NO: 27372 - RNA, 22 nt, Artificial Sequence
  GATA2 Guide RNA
ggugcugcgcauucagcacggc

SEQ ID NO: 27373 - RNA, 22 nt, Artificial Sequence
  GATA2 Guide RNA
gugcugcgcauucagcacggcc

SEQ ID NO: 27374 - RNA, 22 nt, Artificial Sequence
  GATA2 Guide RNA
ucagcacggccgagugcgccau

SEQ ID NO: 27375 - RNA, 22 nt, Artificial Sequence
  GATA2 Guide RNA
ugcgcauucagcacggccgagu

SEQ ID NO: 27376 - RNA, 22 nt, Artificial Sequence
  GATA2 Guide RNA
ugcugcgcauucagcacggccg

SEQ ID NO: 27377 - RNA, 22 nt, Artificial Sequence
  GATA2 Guide RNA
uggauggcgcacucggccgugc

SEQ ID NO: 27378 - RNA, 22 nt, Artificial Sequence
  GATA2 Guide RNA
uggcgcacucggccgugcugaa

SEQ ID NO: 27379 - RNA, 22 nt, Artificial Sequence
  GATA2 Guide RNA
uucagcacggccgagugcgcca

SEQ ID NO: 27380 - RNA, 20 nt, Artificial Sequence
  GATA2 Guide RNA
acagcgcggcugcucgggcg

SEQ ID NO: 27381 - RNA, 20 nt, Artificial Sequence
  GATA2 Guide RNA
acggccgggugcgccauaca

SEQ ID NO: 27382 - RNA, 20 nt, Artificial Sequence
  GATA2 Guide RNA
agcacggccgggugcgccau

SEQ ID NO: 27383 - RNA, 20 nt, Artificial Sequence
  GATA2 Guide RNA
agcagccgcgcuguauggcg

SEQ ID NO: 27384 - RNA, 20 nt, Artificial Sequence
  GATA2 Guide RNA
agccgcgcuguauggcgcac

SEQ ID NO: 27385 - RNA, 20 nt, Artificial Sequence
  GATA2 Guide RNA
auacagcgcggcugcucggg

SEQ ID NO: 27386 - RNA, 20 nt, Artificial Sequence
  GATA2 Guide RNA
cacggccgggugcgccauac

SEQ ID NO: 27387 - RNA, 20 nt, Artificial Sequence
  GATA2 Guide RNA
cagcacggccgggugcgcca

SEQ ID NO: 27388 - RNA, 20 nt, Artificial Sequence
  GATA2 Guide RNA
cagccgcgcuguauggcgca

SEQ ID NO: 27389 - RNA, 20 nt, Artificial Sequence
  GATA2 Guide RNA
cauacagcgcggcugcucgg

SEQ ID NO: 27390 - RNA, 20 nt, Artificial Sequence
  GATA2 Guide RNA
ccauacagcgcggcugcucg

SEQ ID NO: 27391 - RNA, 20 nt, Artificial Sequence
  GATA2 Guide RNA
cccgagcagccgcgcuguau

SEQ ID NO: 27392 - RNA, 20 nt, Artificial Sequence
  GATA2 Guide RNA
ccgagcagccgcgcuguaug

SEQ ID NO: 27393 - RNA, 20 nt, Artificial Sequence
  GATA2 Guide RNA
ccgcgcuguauggcgcaccc

SEQ ID NO: 27394 - RNA, 20 nt, Artificial Sequence
  GATA2 Guide RNA
ccgggugcgccauacagcgc

SEQ ID NO: 27395 - RNA, 20 nt, Artificial Sequence
  GATA2 Guide RNA
cgagcagccgcgcuguaugg

SEQ ID NO: 27396 - RNA, 20 nt, Artificial Sequence
  GATA2 Guide RNA
cgccauacagcgcggcugcu

SEQ ID NO: 27397 - RNA, 20 nt, Artificial Sequence
  GATA2 Guide RNA
cgcccgagcagccgcgcugu

SEQ ID NO: 27398 - RNA, 20 nt, Artificial Sequence
  GATA2 Guide RNA
cgcgcuguauggcgcacccg

SEQ ID NO: 27399 - RNA, 20 nt, Artificial Sequence
  GATA2 Guide RNA
cgcuguauggcgcacccggc

SEQ ID NO: 27400 - RNA, 20 nt, Artificial Sequence
  GATA2 Guide RNA
cggccgggugcgccauacag

SEQ ID NO: 27401 - RNA, 20 nt, Artificial Sequence
  GATA2 Guide RNA
cgggugcgccauacagcgcg

SEQ ID NO: 27402 - RNA, 20 nt, Artificial Sequence
  GATA2 Guide RNA
cuguauggcgcacccggccg

SEQ ID NO: 27403 - RNA, 20 nt, Artificial Sequence
  GATA2 Guide RNA
gagcagccgcgcuguauggc

SEQ ID NO: 27404 - RNA, 20 nt, Artificial Sequence
  GATA2 Guide RNA
gcacggccgggugcgccaua

SEQ ID NO: 27405 - RNA, 20 nt, Artificial Sequence
  GATA2 Guide RNA
gcagccgcgcuguauggcgc

SEQ ID NO: 27406 - RNA, 20 nt, Artificial Sequence
  GATA2 Guide RNA
gccauacagcgcggcugcuc

SEQ ID NO: 27407 - RNA, 20 nt, Artificial Sequence
  GATA2 Guide RNA
gcccgagcagccgcgcugua

SEQ ID NO: 27408 - RNA, 20 nt, Artificial Sequence
  GATA2 Guide RNA
gccgcgcuguauggcgcacc

SEQ ID NO: 27409 - RNA, 20 nt, Artificial Sequence
  GATA2 Guide RNA
gccgggugcgccauacagcg

SEQ ID NO: 27410 - RNA, 20 nt, Artificial Sequence
  GATA2 Guide RNA
gcgccauacagcgcggcugc

SEQ ID NO: 27411 - RNA, 20 nt, Artificial Sequence
  GATA2 Guide RNA
gcgcuguauggcgcacccgg

SEQ ID NO: 27412 - RNA, 20 nt, Artificial Sequence
  GATA2 Guide RNA
gcuguauggcgcacccggcc

SEQ ID NO: 27413 - RNA, 20 nt, Artificial Sequence
  GATA2 Guide RNA
ggccgggugcgccauacagc

SEQ ID NO: 27414 - RNA, 20 nt, Artificial Sequence
  GATA2 Guide RNA
gggugcgccauacagcgcgg

SEQ ID NO: 27415 - RNA, 20 nt, Artificial Sequence
  GATA2 Guide RNA
ggugcgccauacagcgcggc

SEQ ID NO: 27416 - RNA, 20 nt, Artificial Sequence
  GATA2 Guide RNA
guauggcgcacccggccgug

SEQ ID NO: 27417 - RNA, 20 nt, Artificial Sequence
  GATA2 Guide RNA
gugcgccauacagcgcggcu

SEQ ID NO: 27418 - RNA, 20 nt, Artificial Sequence
  GATA2 Guide RNA
uacagcgcggcugcucgggc

SEQ ID NO: 27419 - RNA, 20 nt, Artificial Sequence
  GATA2 Guide RNA
ucagcacggccgggugcgcc

SEQ ID NO: 27420 - RNA, 20 nt, Artificial Sequence
  GATA2 Guide RNA
ugcgccauacagcgcggcug

SEQ ID NO: 27421 - RNA, 20 nt, Artificial Sequence
  GATA2 Guide RNA
uguauggcgcacccggccgu

SEQ ID NO: 27422 - RNA, 21 nt, Artificial Sequence
  GATA2 Guide RNA
acggccgggugcgccauacag

SEQ ID NO: 27423 - RNA, 21 nt, Artificial Sequence
  GATA2 Guide RNA
agcacggccgggugcgccaua

SEQ ID NO: 27424 - RNA, 21 nt, Artificial Sequence
  GATA2 Guide RNA
agcagccgcgcuguauggcgc

SEQ ID NO: 27425 - RNA, 21 nt, Artificial Sequence
  GATA2 Guide RNA
agccgcgcuguauggcgcacc

SEQ ID NO: 27426 - RNA, 21 nt, Artificial Sequence
  GATA2 Guide RNA
auacagcgcggcugcucgggc

SEQ ID NO: 27427 - RNA, 21 nt, Artificial Sequence
  GATA2 Guide RNA
cacggccgggugcgccauaca

SEQ ID NO: 27428 - RNA, 21 nt, Artificial Sequence
  GATA2 Guide RNA
cagcacggccgggugcgccau

SEQ ID NO: 27429 - RNA, 21 nt, Artificial Sequence
  GATA2 Guide RNA
cagccgcgcuguauggcgcac

SEQ ID NO: 27430 - RNA, 21 nt, Artificial Sequence
  GATA2 Guide RNA
cauacagcgcggcugcucggg

SEQ ID NO: 27431 - RNA, 21 nt, Artificial Sequence
  GATA2 Guide RNA
ccauacagcgcggcugcucgg

SEQ ID NO: 27432 - RNA, 21 nt, Artificial Sequence
  GATA2 Guide RNA
cccgagcagccgcgcuguaug

SEQ ID NO: 27433 - RNA, 21 nt, Artificial Sequence
  GATA2 Guide RNA
ccgagcagccgcgcuguaugg

SEQ ID NO: 27434 - RNA, 21 nt, Artificial Sequence
  GATA2 Guide RNA
ccgcgcuguauggcgcacccg

SEQ ID NO: 27435 - RNA, 21 nt, Artificial Sequence
  GATA2 Guide RNA
ccgggugcgccauacagcgcg

SEQ ID NO: 27436 - RNA, 21 nt, Artificial Sequence
  GATA2 Guide RNA
cgagcagccgcgcuguauggc

SEQ ID NO: 27437 - RNA, 21 nt, Artificial Sequence
  GATA2 Guide RNA
cgccauacagcgcggcugcuc

SEQ ID NO: 27438 - RNA, 21 nt, Artificial Sequence
  GATA2 Guide RNA
cgcccgagcagccgcgcugua

SEQ ID NO: 27439 - RNA, 21 nt, Artificial Sequence
  GATA2 Guide RNA
cgcgcuguauggcgcacccgg

SEQ ID NO: 27440 - RNA, 21 nt, Artificial Sequence
  GATA2 Guide RNA
cgcuguauggcgcacccggcc

SEQ ID NO: 27441 - RNA, 21 nt, Artificial Sequence
  GATA2 Guide RNA
cggccgggugcgccauacagc

SEQ ID NO: 27442 - RNA, 21 nt, Artificial Sequence
  GATA2 Guide RNA
cgggugcgccauacagcgcgg

SEQ ID NO: 27443 - RNA, 21 nt, Artificial Sequence
  GATA2 Guide RNA
cuguauggcgcacccggccgu

SEQ ID NO: 27444 - RNA, 21 nt, Artificial Sequence
  GATA2 Guide RNA
gagcagccgcgcuguauggcg

SEQ ID NO: 27445 - RNA, 21 nt, Artificial Sequence
  GATA2 Guide RNA
gcacggccgggugcgccauac

SEQ ID NO: 27446 - RNA, 21 nt, Artificial Sequence
  GATA2 Guide RNA
gcagccgcgcuguauggcgca

SEQ ID NO: 27447 - RNA, 21 nt, Artificial Sequence
  GATA2 Guide RNA
gccauacagcgcggcugcucg

SEQ ID NO: 27448 - RNA, 21 nt, Artificial Sequence
  GATA2 Guide RNA
gcccgagcagccgcgcuguau

SEQ ID NO: 27449 - RNA, 21 nt, Artificial Sequence
  GATA2 Guide RNA
gccgcgcuguauggcgcaccc

SEQ ID NO: 27450 - RNA, 21 nt, Artificial Sequence
  GATA2 Guide RNA
gccgggugcgccauacagcgc

SEQ ID NO: 27451 - RNA, 21 nt, Artificial Sequence
  GATA2 Guide RNA
gcgccauacagcgcggcugcu

SEQ ID NO: 27452 - RNA, 21 nt, Artificial Sequence
  GATA2 Guide RNA
gcgcuguauggcgcacccggc

SEQ ID NO: 27453 - RNA, 21 nt, Artificial Sequence
  GATA2 Guide RNA
gcuguauggcgcacccggccg

SEQ ID NO: 27454 - RNA, 21 nt, Artificial Sequence
  GATA2 Guide RNA
ggccgggugcgccauacagcg

SEQ ID NO: 27455 - RNA, 21 nt, Artificial Sequence
  GATA2 Guide RNA
gggugcgccauacagcgcggc

SEQ ID NO: 27456 - RNA, 21 nt, Artificial Sequence
  GATA2 Guide RNA
ggugcgccauacagcgcggcu

SEQ ID NO: 27457 - RNA, 21 nt, Artificial Sequence
  GATA2 Guide RNA
guauggcgcacccggccgugc

SEQ ID NO: 27458 - RNA, 21 nt, Artificial Sequence
  GATA2 Guide RNA
gugcgccauacagcgcggcug

SEQ ID NO: 27459 - RNA, 21 nt, Artificial Sequence
  GATA2 Guide RNA
uacagcgcggcugcucgggcg

SEQ ID NO: 27460 - RNA, 21 nt, Artificial Sequence
  GATA2 Guide RNA
ucagcacggccgggugcgcca

SEQ ID NO: 27461 - RNA, 21 nt, Artificial Sequence
  GATA2 Guide RNA
ugcgccauacagcgcggcugc

SEQ ID NO: 27462 - RNA, 21 nt, Artificial Sequence
  GATA2 Guide RNA
uguauggcgcacccggccgug

SEQ ID NO: 27463 - RNA, 21 nt, Artificial Sequence
  GATA2 Guide RNA
uucagcacggccgggugcgcc

SEQ ID NO: 27464 - RNA, 22 nt, Artificial Sequence
  GATA2 Guide RNA
acggccgggugcgccauacagc

SEQ ID NO: 27465 - RNA, 22 nt, Artificial Sequence
  GATA2 Guide RNA
agcacggccgggugcgccauac

SEQ ID NO: 27466 - RNA, 22 nt, Artificial Sequence
  GATA2 Guide RNA
agcagccgcgcuguauggcgca

SEQ ID NO: 27467 - RNA, 22 nt, Artificial Sequence
  GATA2 Guide RNA
agccgcgcuguauggcgcaccc

SEQ ID NO: 27468 - RNA, 22 nt, Artificial Sequence
  GATA2 Guide RNA
auacagcgcggcugcucgggcg

SEQ ID NO: 27469 - RNA, 22 nt, Artificial Sequence
  GATA2 Guide RNA
auucagcacggccgggugcgcc

SEQ ID NO: 27470 - RNA, 22 nt, Artificial Sequence
  GATA2 Guide RNA
cacggccgggugcgccauacag

SEQ ID NO: 27471 - RNA, 22 nt, Artificial Sequence
  GATA2 Guide RNA
cagcacggccgggugcgccaua

SEQ ID NO: 27472 - RNA, 22 nt, Artificial Sequence
  GATA2 Guide RNA
cagccgcgcuguauggcgcacc

SEQ ID NO: 27473 - RNA, 22 nt, Artificial Sequence
  GATA2 Guide RNA
cauacagcgcggcugcucgggc

SEQ ID NO: 27474 - RNA, 22 nt, Artificial Sequence
  GATA2 Guide RNA
ccauacagcgcggcugcucggg

SEQ ID NO: 27475 - RNA, 22 nt, Artificial Sequence
  GATA2 Guide RNA
cccgagcagccgcgcuguaugg

SEQ ID NO: 27476 - RNA, 22 nt, Artificial Sequence
  GATA2 Guide RNA
ccgagcagccgcgcuguauggc

SEQ ID NO: 27477 - RNA, 22 nt, Artificial Sequence
  GATA2 Guide RNA
ccgcgcuguauggcgcacccgg

SEQ ID NO: 27478 - RNA, 22 nt, Artificial Sequence
  GATA2 Guide RNA
ccgggugcgccauacagcgcgg

SEQ ID NO: 27479 - RNA, 22 nt, Artificial Sequence
  GATA2 Guide RNA
cgagcagccgcgcuguauggcg

SEQ ID NO: 27480 - RNA, 22 nt, Artificial Sequence
  GATA2 Guide RNA
cgccauacagcgcggcugcucg

SEQ ID NO: 27481 - RNA, 22 nt, Artificial Sequence
  GATA2 Guide RNA
cgcccgagcagccgcgcuguau

SEQ ID NO: 27482 - RNA, 22 nt, Artificial Sequence
  GATA2 Guide RNA
cgcgcuguauggcgcacccggc

SEQ ID NO: 27483 - RNA, 22 nt, Artificial Sequence
  GATA2 Guide RNA
cgcuguauggcgcacccggccg

SEQ ID NO: 27484 - RNA, 22 nt, Artificial Sequence
  GATA2 Guide RNA
cggccgggugcgccauacagcg

SEQ ID NO: 27485 - RNA, 22 nt, Artificial Sequence
  GATA2 Guide RNA
cgggugcgccauacagcgcggc

SEQ ID NO: 27486 - RNA, 22 nt, Artificial Sequence
  GATA2 Guide RNA
cuguauggcgcacccggccgug

SEQ ID NO: 27487 - RNA, 22 nt, Artificial Sequence
  GATA2 Guide RNA
gagcagccgcgcuguauggcgc

SEQ ID NO: 27488 - RNA, 22 nt, Artificial Sequence
  GATA2 Guide RNA
gcacggccgggugcgccauaca

SEQ ID NO: 27489 - RNA, 22 nt, Artificial Sequence
  GATA2 Guide RNA
gcagccgcgcuguauggcgcac

SEQ ID NO: 27490 - RNA, 22 nt, Artificial Sequence
  GATA2 Guide RNA
gccauacagcgcggcugcucgg

SEQ ID NO: 27491 - RNA, 22 nt, Artificial Sequence
  GATA2 Guide RNA
gcccgagcagccgcgcuguaug

SEQ ID NO: 27492 - RNA, 22 nt, Artificial Sequence
  GATA2 Guide RNA
gccgcgcuguauggcgcacccg

SEQ ID NO: 27493 - RNA, 22 nt, Artificial Sequence
  GATA2 Guide RNA
gccgggugcgccauacagcgcg

SEQ ID NO: 27494 - RNA, 22 nt, Artificial Sequence
  GATA2 Guide RNA
gcgccauacagcgcggcugcuc

SEQ ID NO: 27495 - RNA, 22 nt, Artificial Sequence
  GATA2 Guide RNA
gcgcccgagcagccgcgcugua

SEQ ID NO: 27496 - RNA, 22 nt, Artificial Sequence
  GATA2 Guide RNA
gcgcuguauggcgcacccggcc

SEQ ID NO: 27497 - RNA, 22 nt, Artificial Sequence
  GATA2 Guide RNA
gcuguauggcgcacccggccgu

SEQ ID NO: 27498 - RNA, 22 nt, Artificial Sequence
  GATA2 Guide RNA
ggccgggugcgccauacagcgc

SEQ ID NO: 27499 - RNA, 22 nt, Artificial Sequence
  GATA2 Guide RNA
gggugcgccauacagcgcggcu

SEQ ID NO: 27500 - RNA, 22 nt, Artificial Sequence
  GATA2 Guide RNA
ggugcgccauacagcgcggcug

SEQ ID NO: 27501 - RNA, 22 nt, Artificial Sequence
  GATA2 Guide RNA
guauggcgcacccggccgugcu

SEQ ID NO: 27502 - RNA, 22 nt, Artificial Sequence
  GATA2 Guide RNA
gugcgccauacagcgcggcugc

SEQ ID NO: 27503 - RNA, 22 nt, Artificial Sequence
  GATA2 Guide RNA
uacagcgcggcugcucgggcgc

SEQ ID NO: 27504 - RNA, 22 nt, Artificial Sequence
  GATA2 Guide RNA
ucagcacggccgggugcgccau

SEQ ID NO: 27505 - RNA, 22 nt, Artificial Sequence
  GATA2 Guide RNA
ugcgccauacagcgcggcugcu

SEQ ID NO: 27506 - RNA, 22 nt, Artificial Sequence
  GATA2 Guide RNA
uguauggcgcacccggccgugc

SEQ ID NO: 27507 - RNA, 22 nt, Artificial Sequence
  GATA2 Guide RNA
uucagcacggccgggugcgcca

SEQ ID NO: 27508 - RNA, 20 nt, Artificial Sequence
  GATA2 Guide RNA
acggccgggugcgccauccg

SEQ ID NO: 27509 - RNA, 20 nt, Artificial Sequence
  GATA2 Guide RNA
agcagccgcgccggauggcg

SEQ ID NO: 27510 - RNA, 20 nt, Artificial Sequence
  GATA2 Guide RNA
agccgcgccggauggcgcac

SEQ ID NO: 27511 - RNA, 20 nt, Artificial Sequence
  GATA2 Guide RNA
agguggcgcccgagcagccg

SEQ ID NO: 27512 - RNA, 20 nt, Artificial Sequence
  GATA2 Guide RNA
auccggcgcggcugcucggg

SEQ ID NO: 27513 - RNA, 20 nt, Artificial Sequence
  GATA2 Guide RNA
cacggccgggugcgccaucc

SEQ ID NO: 27514 - RNA, 20 nt, Artificial Sequence
  GATA2 Guide RNA
cagccgcgccggauggcgca

SEQ ID NO: 27515 - RNA, 20 nt, Artificial Sequence
  GATA2 Guide RNA
cauccggcgcggcugcucgg

SEQ ID NO: 27516 - RNA, 20 nt, Artificial Sequence
  GATA2 Guide RNA
ccauccggcgcggcugcucg

SEQ ID NO: 27517 - RNA, 20 nt, Artificial Sequence
  GATA2 Guide RNA
cccgagcagccgcgccggau

SEQ ID NO: 27518 - RNA, 20 nt, Artificial Sequence
  GATA2 Guide RNA
ccgagcagccgcgccggaug

SEQ ID NO: 27519 - RNA, 20 nt, Artificial Sequence
  GATA2 Guide RNA
cgagcagccgcgccggaugg

SEQ ID NO: 27520 - RNA, 20 nt, Artificial Sequence
  GATA2 Guide RNA
cgccauccggcgcggcugcu

SEQ ID NO: 27521 - RNA, 20 nt, Artificial Sequence
  GATA2 Guide RNA
gagcagccgcgccggauggc

SEQ ID NO: 27522 - RNA, 20 nt, Artificial Sequence
  GATA2 Guide RNA
gcacggccgggugcgccauc

SEQ ID NO: 27523 - RNA, 20 nt, Artificial Sequence
  GATA2 Guide RNA
gccauccggcgcggcugcuc

SEQ ID NO: 27524 - RNA, 20 nt, Artificial Sequence
  GATA2 Guide RNA
gugcgccauccggcgcggcu

SEQ ID NO: 27525 - RNA, 20 nt, Artificial Sequence
  GATA2 Guide RNA
ugcgccauccggcgcggcug

SEQ ID NO: 27526 - RNA, 21 nt, Artificial Sequence
  GATA2 Guide RNA
agcacggccgggugcgccauc

SEQ ID NO: 27527 - RNA, 22 nt, Artificial Sequence
  GATA2 Guide RNA
agcacggccgggugcgccaucc

SEQ ID NO: 27528 - RNA, 22 nt, Artificial Sequence
  GATA2 Guide RNA
agcagccgcgccggauggcgca

SEQ ID NO: 27529 - RNA, 22 nt, Artificial Sequence
  GATA2 Guide RNA
cagcacggccgggugcgccauc

SEQ ID NO: 27530 - RNA, 22 nt, Artificial Sequence
  GATA2 Guide RNA
ugcgccauccggcgcggcugcu

SEQ ID NO: 27531 - RNA, 20 nt, Artificial Sequence
  GATA2 Guide RNA
agcagcagcgcuggauggcg

SEQ ID NO: 27532 - RNA, 20 nt, Artificial Sequence
  GATA2 Guide RNA
agcagcgcuggauggcgcac

SEQ ID NO: 27533 - RNA, 20 nt, Artificial Sequence
  GATA2 Guide RNA
agcgcugcugcucgggcgcc

SEQ ID NO: 27534 - RNA, 20 nt, Artificial Sequence
  GATA2 Guide RNA
agguggcgcccgagcagcag

SEQ ID NO: 27535 - RNA, 20 nt, Artificial Sequence
  GATA2 Guide RNA
auccagcgcugcugcucggg

SEQ ID NO: 27536 - RNA, 20 nt, Artificial Sequence
  GATA2 Guide RNA
auggagguggcgcccgagca

SEQ ID NO: 27537 - RNA, 20 nt, Artificial Sequence
  GATA2 Guide RNA
cagcagcgcuggauggcgca

SEQ ID NO: 27538 - RNA, 20 nt, Artificial Sequence
  GATA2 Guide RNA
cagcgcugcugcucgggcgc

SEQ ID NO: 27539 - RNA, 20 nt, Artificial Sequence
  GATA2 Guide RNA
cagcgcuggauggcgcaccc

SEQ ID NO: 27540 - RNA, 20 nt, Artificial Sequence
  GATA2 Guide RNA
cauccagcgcugcugcucgg

SEQ ID NO: 27541 - RNA, 20 nt, Artificial Sequence
  GATA2 Guide RNA
cauggagguggcgcccgagc

SEQ ID NO: 27542 - RNA, 20 nt, Artificial Sequence
  GATA2 Guide RNA
ccagcgcugcugcucgggcg

SEQ ID NO: 27543 - RNA, 20 nt, Artificial Sequence
  GATA2 Guide RNA
ccauccagcgcugcugcucg

SEQ ID NO: 27544 - RNA, 20 nt, Artificial Sequence
  GATA2 Guide RNA
cccgagcagcagcgcuggau

SEQ ID NO: 27545 - RNA, 20 nt, Artificial Sequence
  GATA2 Guide RNA
ccgagcagcagcgcuggaug

SEQ ID NO: 27546 - RNA, 20 nt, Artificial Sequence
  GATA2 Guide RNA
ccgggugcgccauccagcgc

SEQ ID NO: 27547 - RNA, 20 nt, Artificial Sequence
  GATA2 Guide RNA
cgagcagcagcgcuggaugg

SEQ ID NO: 27548 - RNA, 20 nt, Artificial Sequence
  GATA2 Guide RNA
cgccauccagcgcugcugcu

SEQ ID NO: 27549 - RNA, 20 nt, Artificial Sequence
  GATA2 Guide RNA
cgcccgagcagcagcgcugg

SEQ ID NO: 27550 - RNA, 20 nt, Artificial Sequence
  GATA2 Guide RNA
cgcugcugcucgggcgccac

SEQ ID NO: 27551 - RNA, 20 nt, Artificial Sequence
  GATA2 Guide RNA
cgggugcgccauccagcgcu

SEQ ID NO: 27552 - RNA, 20 nt, Artificial Sequence
  GATA2 Guide RNA
cugcugcucgggcgccaccu

SEQ ID NO: 27553 - RNA, 20 nt, Artificial Sequence
  GATA2 Guide RNA
gagcagcagcgcuggauggc

SEQ ID NO: 27554 - RNA, 20 nt, Artificial Sequence
  GATA2 Guide RNA
gagguggcgcccgagcagca

SEQ ID NO: 27555 - RNA, 20 nt, Artificial Sequence
  GATA2 Guide RNA
gcagcagcgcuggauggcgc

SEQ ID NO: 27556 - RNA, 20 nt, Artificial Sequence
  GATA2 Guide RNA
gcagcgcuggauggcgcacc

SEQ ID NO: 27557 - RNA, 20 nt, Artificial Sequence
  GATA2 Guide RNA
gccauccagcgcugcugcuc

SEQ ID NO: 27558 - RNA, 20 nt, Artificial Sequence
  GATA2 Guide RNA
gcccgagcagcagcgcugga

SEQ ID NO: 27559 - RNA, 20 nt, Artificial Sequence
  GATA2 Guide RNA
gccgggugcgccauccagcg

SEQ ID NO: 27560 - RNA, 20 nt, Artificial Sequence
  GATA2 Guide RNA
gcgccauccagcgcugcugc

SEQ ID NO: 27561 - RNA, 20 nt, Artificial Sequence
  GATA2 Guide RNA
gcgcccgagcagcagcgcug

SEQ ID NO: 27562 - RNA, 20 nt, Artificial Sequence
  GATA2 Guide RNA
gcgcugcugcucgggcgcca

SEQ ID NO: 27563 - RNA, 20 nt, Artificial Sequence
  GATA2 Guide RNA
gcugcugcucgggcgccacc

SEQ ID NO: 27564 - RNA, 20 nt, Artificial Sequence
  GATA2 Guide RNA
ggagguggcgcccgagcagc

SEQ ID NO: 27565 - RNA, 20 nt, Artificial Sequence
  GATA2 Guide RNA
ggccgggugcgccauccagc

SEQ ID NO: 27566 - RNA, 20 nt, Artificial Sequence
  GATA2 Guide RNA
ggcgcccgagcagcagcgcu

SEQ ID NO: 27567 - RNA, 20 nt, Artificial Sequence
  GATA2 Guide RNA
gggugcgccauccagcgcug

SEQ ID NO: 27568 - RNA, 20 nt, Artificial Sequence
  GATA2 Guide RNA
ggugcgccauccagcgcugc

SEQ ID NO: 27569 - RNA, 20 nt, Artificial Sequence
  GATA2 Guide RNA
gguggcgcccgagcagcagc

SEQ ID NO: 27570 - RNA, 20 nt, Artificial Sequence
  GATA2 Guide RNA
gugcgccauccagcgcugcu

SEQ ID NO: 27571 - RNA, 20 nt, Artificial Sequence
  GATA2 Guide RNA
guggcgcccgagcagcagcg

SEQ ID NO: 27572 - RNA, 20 nt, Artificial Sequence
  GATA2 Guide RNA
uccagcgcugcugcucgggc

SEQ ID NO: 27573 - RNA, 20 nt, Artificial Sequence
  GATA2 Guide RNA
ugcgccauccagcgcugcug

SEQ ID NO: 27574 - RNA, 20 nt, Artificial Sequence
  GATA2 Guide RNA
ugcugcucgggcgccaccuc

SEQ ID NO: 27575 - RNA, 20 nt, Artificial Sequence
  GATA2 Guide RNA
uggagguggcgcccgagcag

SEQ ID NO: 27576 - RNA, 20 nt, Artificial Sequence
  GATA2 Guide RNA
uggcgcccgagcagcagcgc

SEQ ID NO: 27577 - RNA, 21 nt, Artificial Sequence
  GATA2 Guide RNA
agcagcagcgcuggauggcgc

SEQ ID NO: 27578 - RNA, 21 nt, Artificial Sequence
  GATA2 Guide RNA
agcagcgcuggauggcgcacc

SEQ ID NO: 27579 - RNA, 21 nt, Artificial Sequence
  GATA2 Guide RNA
agcgcugcugcucgggcgcca

SEQ ID NO: 27580 - RNA, 21 nt, Artificial Sequence
  GATA2 Guide RNA
agguggcgcccgagcagcagc

SEQ ID NO: 27581 - RNA, 21 nt, Artificial Sequence
  GATA2 Guide RNA
auccagcgcugcugcucgggc

SEQ ID NO: 27582 - RNA, 21 nt, Artificial Sequence
  GATA2 Guide RNA
auggagguggcgcccgagcag

SEQ ID NO: 27583 - RNA, 21 nt, Artificial Sequence
  GATA2 Guide RNA
cagcagcgcuggauggcgcac

SEQ ID NO: 27584 - RNA, 21 nt, Artificial Sequence
  GATA2 Guide RNA
cagcgcuggauggcgcacccg

SEQ ID NO: 27585 - RNA, 21 nt, Artificial Sequence
  GATA2 Guide RNA
cauccagcgcugcugcucggg

SEQ ID NO: 27586 - RNA, 21 nt, Artificial Sequence
  GATA2 Guide RNA
cauggagguggcgcccgagca

SEQ ID NO: 27587 - RNA, 21 nt, Artificial Sequence
  GATA2 Guide RNA
ccauccagcgcugcugcucgg

SEQ ID NO: 27588 - RNA, 21 nt, Artificial Sequence
  GATA2 Guide RNA
ccauggagguggcgcccgagc

SEQ ID NO: 27589 - RNA, 21 nt, Artificial Sequence
  GATA2 Guide RNA
cccgagcagcagcgcuggaug

SEQ ID NO: 27590 - RNA, 21 nt, Artificial Sequence
  GATA2 Guide RNA
ccgagcagcagcgcuggaugg

SEQ ID NO: 27591 - RNA, 21 nt, Artificial Sequence
  GATA2 Guide RNA
ccgggugcgccauccagcgcu

SEQ ID NO: 27592 - RNA, 21 nt, Artificial Sequence
  GATA2 Guide RNA
cgagcagcagcgcuggauggc

SEQ ID NO: 27593 - RNA, 21 nt, Artificial Sequence
  GATA2 Guide RNA
cgccauccagcgcugcugcuc

SEQ ID NO: 27594 - RNA, 21 nt, Artificial Sequence
  GATA2 Guide RNA
cgcccgagcagcagcgcugga

SEQ ID NO: 27595 - RNA, 21 nt, Artificial Sequence
  GATA2 Guide RNA
cgggugcgccauccagcgcug

SEQ ID NO: 27596 - RNA, 21 nt, Artificial Sequence
  GATA2 Guide RNA
cugcugcucgggcgccaccuc

SEQ ID NO: 27597 - RNA, 21 nt, Artificial Sequence
  GATA2 Guide RNA
gagcagcagcgcuggauggcg

SEQ ID NO: 27598 - RNA, 21 nt, Artificial Sequence
  GATA2 Guide RNA
gagguggcgcccgagcagcag

SEQ ID NO: 27599 - RNA, 21 nt, Artificial Sequence
  GATA2 Guide RNA
gcagcagcgcuggauggcgca

SEQ ID NO: 27600 - RNA, 21 nt, Artificial Sequence
  GATA2 Guide RNA
gcagcgcuggauggcgcaccc

SEQ ID NO: 27601 - RNA, 21 nt, Artificial Sequence
  GATA2 Guide RNA
gccauccagcgcugcugcucg

SEQ ID NO: 27602 - RNA, 21 nt, Artificial Sequence
  GATA2 Guide RNA
gcccgagcagcagcgcuggau

SEQ ID NO: 27603 - RNA, 21 nt, Artificial Sequence
  GATA2 Guide RNA
gcgccauccagcgcugcugcu

SEQ ID NO: 27604 - RNA, 21 nt, Artificial Sequence
  GATA2 Guide RNA
gcugcugcucgggcgccaccu

SEQ ID NO: 27605 - RNA, 21 nt, Artificial Sequence
  GATA2 Guide RNA
ggagguggcgcccgagcagca

SEQ ID NO: 27606 - RNA, 21 nt, Artificial Sequence
  GATA2 Guide RNA
gggugcgccauccagcgcugc

SEQ ID NO: 27607 - RNA, 21 nt, Artificial Sequence
  GATA2 Guide RNA
ggugcgccauccagcgcugcu

SEQ ID NO: 27608 - RNA, 21 nt, Artificial Sequence
  GATA2 Guide RNA
gugcgccauccagcgcugcug

SEQ ID NO: 27609 - RNA, 21 nt, Artificial Sequence
  GATA2 Guide RNA
uccagcgcugcugcucgggcg

SEQ ID NO: 27610 - RNA, 21 nt, Artificial Sequence
  GATA2 Guide RNA
ugcgccauccagcgcugcugc

SEQ ID NO: 27611 - RNA, 21 nt, Artificial Sequence
  GATA2 Guide RNA
ugcugcucgggcgccaccucc

SEQ ID NO: 27612 - RNA, 21 nt, Artificial Sequence
  GATA2 Guide RNA
uggagguggcgcccgagcagc

SEQ ID NO: 27613 - RNA, 21 nt, Artificial Sequence
  GATA2 Guide RNA
uggcgcccgagcagcagcgcu

SEQ ID NO: 27614 - RNA, 22 nt, Artificial Sequence
  GATA2 Guide RNA
acggccgggugcgccauccagc

SEQ ID NO: 27615 - RNA, 22 nt, Artificial Sequence
  GATA2 Guide RNA
agcagcagcgcuggauggcgca

SEQ ID NO: 27616 - RNA, 22 nt, Artificial Sequence
  GATA2 Guide RNA
agcagcgcuggauggcgcaccc

SEQ ID NO: 27617 - RNA, 22 nt, Artificial Sequence
  GATA2 Guide RNA
agcgcugcugcucgggcgccac

SEQ ID NO: 27618 - RNA, 22 nt, Artificial Sequence
  GATA2 Guide RNA
agguggcgcccgagcagcagcg

SEQ ID NO: 27619 - RNA, 22 nt, Artificial Sequence
  GATA2 Guide RNA
auccagcgcugcugcucgggcg

SEQ ID NO: 27620 - RNA, 22 nt, Artificial Sequence
  GATA2 Guide RNA
auggagguggcgcccgagcagc

SEQ ID NO: 27621 - RNA, 22 nt, Artificial Sequence
  GATA2 Guide RNA
cagcagcgcuggauggcgcacc

SEQ ID NO: 27622 - RNA, 22 nt, Artificial Sequence
  GATA2 Guide RNA
cagcgcugcugcucgggcgcca

SEQ ID NO: 27623 - RNA, 22 nt, Artificial Sequence
  GATA2 Guide RNA
cagcgcuggauggcgcacccgg

SEQ ID NO: 27624 - RNA, 22 nt, Artificial Sequence
  GATA2 Guide RNA
cauccagcgcugcugcucgggc

SEQ ID NO: 27625 - RNA, 22 nt, Artificial Sequence
  GATA2 Guide RNA
cauggagguggcgcccgagcag

SEQ ID NO: 27626 - RNA, 22 nt, Artificial Sequence
  GATA2 Guide RNA
ccauccagcgcugcugcucggg

SEQ ID NO: 27627 - RNA, 22 nt, Artificial Sequence
  GATA2 Guide RNA
ccauggagguggcgcccgagca

SEQ ID NO: 27628 - RNA, 22 nt, Artificial Sequence
  GATA2 Guide RNA
cccgagcagcagcgcuggaugg

SEQ ID NO: 27629 - RNA, 22 nt, Artificial Sequence
  GATA2 Guide RNA
ccgagcagcagcgcuggauggc

SEQ ID NO: 27630 - RNA, 22 nt, Artificial Sequence
  GATA2 Guide RNA
ccgggugcgccauccagcgcug

SEQ ID NO: 27631 - RNA, 22 nt, Artificial Sequence
  GATA2 Guide RNA
cgagcagcagcgcuggauggcg

SEQ ID NO: 27632 - RNA, 22 nt, Artificial Sequence
  GATA2 Guide RNA
cgccauccagcgcugcugcucg

SEQ ID NO: 27633 - RNA, 22 nt, Artificial Sequence
  GATA2 Guide RNA
cgcccgagcagcagcgcuggau

SEQ ID NO: 27634 - RNA, 22 nt, Artificial Sequence
  GATA2 Guide RNA
cgcugcugcucgggcgccaccu

SEQ ID NO: 27635 - RNA, 22 nt, Artificial Sequence
  GATA2 Guide RNA
cgggugcgccauccagcgcugc

SEQ ID NO: 27636 - RNA, 22 nt, Artificial Sequence
  GATA2 Guide RNA
cugcugcucgggcgccaccucc

SEQ ID NO: 27637 - RNA, 22 nt, Artificial Sequence
  GATA2 Guide RNA
gagcagcagcgcuggauggcgc

SEQ ID NO: 27638 - RNA, 22 nt, Artificial Sequence
  GATA2 Guide RNA
gagguggcgcccgagcagcagc

SEQ ID NO: 27639 - RNA, 22 nt, Artificial Sequence
  GATA2 Guide RNA
gcagcagcgcuggauggcgcac

SEQ ID NO: 27640 - RNA, 22 nt, Artificial Sequence
  GATA2 Guide RNA
gcagcgcuggauggcgcacccg

SEQ ID NO: 27641 - RNA, 22 nt, Artificial Sequence
  GATA2 Guide RNA
gccauccagcgcugcugcucgg

SEQ ID NO: 27642 - RNA, 22 nt, Artificial Sequence
  GATA2 Guide RNA
gccauggagguggcgcccgagc

SEQ ID NO: 27643 - RNA, 22 nt, Artificial Sequence
  GATA2 Guide RNA
gcccgagcagcagcgcuggaug

SEQ ID NO: 27644 - RNA, 22 nt, Artificial Sequence
  GATA2 Guide RNA
gccgggugcgccauccagcgcu

SEQ ID NO: 27645 - RNA, 22 nt, Artificial Sequence
  GATA2 Guide RNA
gcgccauccagcgcugcugcuc

SEQ ID NO: 27646 - RNA, 22 nt, Artificial Sequence
  GATA2 Guide RNA
gcgcccgagcagcagcgcugga

SEQ ID NO: 27647 - RNA, 22 nt, Artificial Sequence
  GATA2 Guide RNA
gcugcugcucgggcgccaccuc

SEQ ID NO: 27648 - RNA, 22 nt, Artificial Sequence
  GATA2 Guide RNA
ggagguggcgcccgagcagcag

SEQ ID NO: 27649 - RNA, 22 nt, Artificial Sequence
  GATA2 Guide RNA
gggugcgccauccagcgcugcu

SEQ ID NO: 27650 - RNA, 22 nt, Artificial Sequence
  GATA2 Guide RNA
ggugcgccauccagcgcugcug

SEQ ID NO: 27651 - RNA, 22 nt, Artificial Sequence
  GATA2 Guide RNA
gugcgccauccagcgcugcugc

SEQ ID NO: 27652 - RNA, 22 nt, Artificial Sequence
  GATA2 Guide RNA
guggcgcccgagcagcagcgcu

SEQ ID NO: 27653 - RNA, 22 nt, Artificial Sequence
  GATA2 Guide RNA
uccagcgcugcugcucgggcgc

SEQ ID NO: 27654 - RNA, 22 nt, Artificial Sequence
  GATA2 Guide RNA
ugcgccauccagcgcugcugcu

SEQ ID NO: 27655 - RNA, 22 nt, Artificial Sequence
  GATA2 Guide RNA
ugcugcucgggcgccaccucca

SEQ ID NO: 27656 - RNA, 22 nt, Artificial Sequence
  GATA2 Guide RNA
uggagguggcgcccgagcagca

SEQ ID NO: 27657 - RNA, 22 nt, Artificial Sequence
  GATA2 Guide RNA
uggcgcccgagcagcagcgcug

SEQ ID NO: 27658 - RNA, 20 nt, Artificial Sequence
  GATA2 Guide RNA
agguggcgccgcagcagccg

SEQ ID NO: 27659 - RNA, 20 nt, Artificial Sequence
  GATA2 Guide RNA
auccagcgcggcugcugcgg

SEQ ID NO: 27660 - RNA, 20 nt, Artificial Sequence
  GATA2 Guide RNA
auggagguggcgccgcagca

SEQ ID NO: 27661 - RNA, 20 nt, Artificial Sequence
  GATA2 Guide RNA
cauccagcgcggcugcugcg

SEQ ID NO: 27662 - RNA, 20 nt, Artificial Sequence
  GATA2 Guide RNA
cauggagguggcgccgcagc

SEQ ID NO: 27663 - RNA, 20 nt, Artificial Sequence
  GATA2 Guide RNA
ccauccagcgcggcugcugc

SEQ ID NO: 27664 - RNA, 20 nt, Artificial Sequence
  GATA2 Guide RNA
ccauggagguggcgccgcag

SEQ ID NO: 27665 - RNA, 20 nt, Artificial Sequence
  GATA2 Guide RNA
ccgcagcagccgcgcuggau

SEQ ID NO: 27666 - RNA, 20 nt, Artificial Sequence
  GATA2 Guide RNA
ccggccauggagguggcgcc

SEQ ID NO: 27667 - RNA, 20 nt, Artificial Sequence
  GATA2 Guide RNA
cgcagcagccgcgcuggaug

SEQ ID NO: 27668 - RNA, 20 nt, Artificial Sequence
  GATA2 Guide RNA
cgccauccagcgcggcugcu

SEQ ID NO: 27669 - RNA, 20 nt, Artificial Sequence
  GATA2 Guide RNA
cgccggccauggagguggcg

SEQ ID NO: 27670 - RNA, 20 nt, Artificial Sequence
  GATA2 Guide RNA
cggccauggagguggcgccg

SEQ ID NO: 27671 - RNA, 20 nt, Artificial Sequence
  GATA2 Guide RNA
cggcugcugcggcgccaccu

SEQ ID NO: 27672 - RNA, 20 nt, Artificial Sequence
  GATA2 Guide RNA
cugcggcgccaccuccaugg

SEQ ID NO: 27673 - RNA, 20 nt, Artificial Sequence
  GATA2 Guide RNA
cugcugcggcgccaccucca

SEQ ID NO: 27674 - RNA, 20 nt, Artificial Sequence
  GATA2 Guide RNA
gagguggcgccgcagcagcc

SEQ ID NO: 27675 - RNA, 20 nt, Artificial Sequence
  GATA2 Guide RNA
gcagcagccgcgcuggaugg

SEQ ID NO: 27676 - RNA, 20 nt, Artificial Sequence
  GATA2 Guide RNA
gccauccagcgcggcugcug

SEQ ID NO: 27677 - RNA, 20 nt, Artificial Sequence
  GATA2 Guide RNA
gccauggagguggcgccgca

SEQ ID NO: 27678 - RNA, 20 nt, Artificial Sequence
  GATA2 Guide RNA
gccgcagcagccgcgcugga

SEQ ID NO: 27679 - RNA, 20 nt, Artificial Sequence
  GATA2 Guide RNA
gccggccauggagguggcgc

SEQ ID NO: 27680 - RNA, 20 nt, Artificial Sequence
  GATA2 Guide RNA
gcgccauccagcgcggcugc

SEQ ID NO: 27681 - RNA, 20 nt, Artificial Sequence
  GATA2 Guide RNA
gcggcgccaccuccauggcc

SEQ ID NO: 27682 - RNA, 20 nt, Artificial Sequence
  GATA2 Guide RNA
gcugcggcgccaccuccaug

SEQ ID NO: 27683 - RNA, 20 nt, Artificial Sequence
  GATA2 Guide RNA
gcugcugcggcgccaccucc

SEQ ID NO: 27684 - RNA, 20 nt, Artificial Sequence
  GATA2 Guide RNA
ggagguggcgccgcagcagc

SEQ ID NO: 27685 - RNA, 20 nt, Artificial Sequence
  GATA2 Guide RNA
ggccauggagguggcgccgc

SEQ ID NO: 27686 - RNA, 20 nt, Artificial Sequence
  GATA2 Guide RNA
ggcugcugcggcgccaccuc

SEQ ID NO: 27687 - RNA, 20 nt, Artificial Sequence
  GATA2 Guide RNA
uccagcgcggcugcugcggc

SEQ ID NO: 27688 - RNA, 20 nt, Artificial Sequence
  GATA2 Guide RNA
ugcgccauccagcgcggcug

SEQ ID NO: 27689 - RNA, 20 nt, Artificial Sequence
  GATA2 Guide RNA
ugcggcgccaccuccauggc

SEQ ID NO: 27690 - RNA, 20 nt, Artificial Sequence
  GATA2 Guide RNA
ugcugcggcgccaccuccau

SEQ ID NO: 27691 - RNA, 20 nt, Artificial Sequence
  GATA2 Guide RNA
uggagguggcgccgcagcag

SEQ ID NO: 27692 - RNA, 21 nt, Artificial Sequence
  GATA2 Guide RNA
auccagcgcggcugcugcggc

SEQ ID NO: 27693 - RNA, 21 nt, Artificial Sequence
  GATA2 Guide RNA
auggagguggcgccgcagcag

SEQ ID NO: 27694 - RNA, 21 nt, Artificial Sequence
  GATA2 Guide RNA
cauccagcgcggcugcugcgg

SEQ ID NO: 27695 - RNA, 21 nt, Artificial Sequence
  GATA2 Guide RNA
cauggagguggcgccgcagca

SEQ ID NO: 27696 - RNA, 21 nt, Artificial Sequence
  GATA2 Guide RNA
ccauccagcgcggcugcugcg

SEQ ID NO: 27697 - RNA, 21 nt, Artificial Sequence
  GATA2 Guide RNA
ccauggagguggcgccgcagc

SEQ ID NO: 27698 - RNA, 21 nt, Artificial Sequence
  GATA2 Guide RNA
ccgcagcagccgcgcuggaug

SEQ ID NO: 27699 - RNA, 21 nt, Artificial Sequence
  GATA2 Guide RNA
cgcagcagccgcgcuggaugg

SEQ ID NO: 27700 - RNA, 21 nt, Artificial Sequence
  GATA2 Guide RNA
cgccauccagcgcggcugcug

SEQ ID NO: 27701 - RNA, 21 nt, Artificial Sequence
  GATA2 Guide RNA
cugcggcgccaccuccauggc

SEQ ID NO: 27702 - RNA, 21 nt, Artificial Sequence
  GATA2 Guide RNA
cugcugcggcgccaccuccau

SEQ ID NO: 27703 - RNA, 21 nt, Artificial Sequence
  GATA2 Guide RNA
gcagcagccgcgcuggauggc

SEQ ID NO: 27704 - RNA, 21 nt, Artificial Sequence
  GATA2 Guide RNA
gccauccagcgcggcugcugc

SEQ ID NO: 27705 - RNA, 21 nt, Artificial Sequence
  GATA2 Guide RNA
gccauggagguggcgccgcag

SEQ ID NO: 27706 - RNA, 21 nt, Artificial Sequence
  GATA2 Guide RNA
gccgcagcagccgcgcuggau

SEQ ID NO: 27707 - RNA, 21 nt, Artificial Sequence
  GATA2 Guide RNA
gcgccauccagcgcggcugcu

SEQ ID NO: 27708 - RNA, 21 nt, Artificial Sequence
  GATA2 Guide RNA
gcugcggcgccaccuccaugg

SEQ ID NO: 27709 - RNA, 21 nt, Artificial Sequence
  GATA2 Guide RNA
gcugcugcggcgccaccucca

SEQ ID NO: 27710 - RNA, 21 nt, Artificial Sequence
  GATA2 Guide RNA
ggccauggagguggcgccgca

SEQ ID NO: 27711 - RNA, 21 nt, Artificial Sequence
  GATA2 Guide RNA
gugcgccauccagcgcggcug

SEQ ID NO: 27712 - RNA, 21 nt, Artificial Sequence
  GATA2 Guide RNA
ugcgccauccagcgcggcugc

SEQ ID NO: 27713 - RNA, 21 nt, Artificial Sequence
  GATA2 Guide RNA
ugcggcgccaccuccauggcc

SEQ ID NO: 27714 - RNA, 21 nt, Artificial Sequence
  GATA2 Guide RNA
ugcugcggcgccaccuccaug

SEQ ID NO: 27715 - RNA, 21 nt, Artificial Sequence
  GATA2 Guide RNA
uggagguggcgccgcagcagc

SEQ ID NO: 27716 - RNA, 22 nt, Artificial Sequence
  GATA2 Guide RNA
auccagcgcggcugcugcggcg

SEQ ID NO: 27717 - RNA, 22 nt, Artificial Sequence
  GATA2 Guide RNA
auggagguggcgccgcagcagc

SEQ ID NO: 27718 - RNA, 22 nt, Artificial Sequence
  GATA2 Guide RNA
cauccagcgcggcugcugcggc

SEQ ID NO: 27719 - RNA, 22 nt, Artificial Sequence
  GATA2 Guide RNA
cauggagguggcgccgcagcag

SEQ ID NO: 27720 - RNA, 22 nt, Artificial Sequence
  GATA2 Guide RNA
ccauccagcgcggcugcugcgg

SEQ ID NO: 27721 - RNA, 22 nt, Artificial Sequence
  GATA2 Guide RNA
ccauggagguggcgccgcagca

SEQ ID NO: 27722 - RNA, 22 nt, Artificial Sequence
  GATA2 Guide RNA
ccgcagcagccgcgcuggaugg

SEQ ID NO: 27723 - RNA, 22 nt, Artificial Sequence
  GATA2 Guide RNA
cgcagcagccgcgcuggauggc

SEQ ID NO: 27724 - RNA, 22 nt, Artificial Sequence
  GATA2 Guide RNA
cgccauccagcgcggcugcugc

SEQ ID NO: 27725 - RNA, 22 nt, Artificial Sequence
  GATA2 Guide RNA
cgccgcagcagccgcgcuggau

SEQ ID NO: 27726 - RNA, 22 nt, Artificial Sequence
  GATA2 Guide RNA
cggccauggagguggcgccgca

SEQ ID NO: 27727 - RNA, 22 nt, Artificial Sequence
  GATA2 Guide RNA
cugcggcgccaccuccauggcc

SEQ ID NO: 27728 - RNA, 22 nt, Artificial Sequence
  GATA2 Guide RNA
cugcugcggcgccaccuccaug

SEQ ID NO: 27729 - RNA, 22 nt, Artificial Sequence
  GATA2 Guide RNA
gcagcagccgcgcuggauggcg

SEQ ID NO: 27730 - RNA, 22 nt, Artificial Sequence
  GATA2 Guide RNA
gccauccagcgcggcugcugcg

SEQ ID NO: 27731 - RNA, 22 nt, Artificial Sequence
  GATA2 Guide RNA
gccauggagguggcgccgcagc

SEQ ID NO: 27732 - RNA, 22 nt, Artificial Sequence
  GATA2 Guide RNA
gccgcagcagccgcgcuggaug

SEQ ID NO: 27733 - RNA, 22 nt, Artificial Sequence
  GATA2 Guide RNA
gcgccauccagcgcggcugcug

SEQ ID NO: 27734 - RNA, 22 nt, Artificial Sequence
  GATA2 Guide RNA
gcugcggcgccaccuccauggc

SEQ ID NO: 27735 - RNA, 22 nt, Artificial Sequence
  GATA2 Guide RNA
gcugcugcggcgccaccuccau

SEQ ID NO: 27736 - RNA, 22 nt, Artificial Sequence
  GATA2 Guide RNA
ggccauggagguggcgccgcag

SEQ ID NO: 27737 - RNA, 22 nt, Artificial Sequence
  GATA2 Guide RNA
ggcugcugcggcgccaccucca

SEQ ID NO: 27738 - RNA, 22 nt, Artificial Sequence
  GATA2 Guide RNA
ggugcgccauccagcgcggcug

SEQ ID NO: 27739 - RNA, 22 nt, Artificial Sequence
  GATA2 Guide RNA
gugcgccauccagcgcggcugc

SEQ ID NO: 27740 - RNA, 22 nt, Artificial Sequence
  GATA2 Guide RNA
ugcgccauccagcgcggcugcu

SEQ ID NO: 27741 - RNA, 22 nt, Artificial Sequence
  GATA2 Guide RNA
ugcggcgccaccuccauggccg

SEQ ID NO: 27742 - RNA, 22 nt, Artificial Sequence
  GATA2 Guide RNA
ugcugcggcgccaccuccaugg

SEQ ID NO: 27743 - RNA, 22 nt, Artificial Sequence
  GATA2 Guide RNA
uggagguggcgccgcagcagcc

SEQ ID NO: 27744 - RNA, 20 nt, Artificial Sequence
  GATA2 Guide RNA
agcgcggcugcuugggcgcc

SEQ ID NO: 27745 - RNA, 20 nt, Artificial Sequence
  GATA2 Guide RNA
agguggcgcccaagcagccg

SEQ ID NO: 27746 - RNA, 20 nt, Artificial Sequence
  GATA2 Guide RNA
auccagcgcggcugcuuggg

SEQ ID NO: 27747 - RNA, 20 nt, Artificial Sequence
  GATA2 Guide RNA
auggagguggcgcccaagca

SEQ ID NO: 27748 - RNA, 20 nt, Artificial Sequence
  GATA2 Guide RNA
caagcagccgcgcuggaugg

SEQ ID NO: 27749 - RNA, 20 nt, Artificial Sequence
  GATA2 Guide RNA
cagcgcggcugcuugggcgc

SEQ ID NO: 27750 - RNA, 20 nt, Artificial Sequence
  GATA2 Guide RNA
cauccagcgcggcugcuugg

SEQ ID NO: 27751 - RNA, 20 nt, Artificial Sequence
  GATA2 Guide RNA
cauggagguggcgcccaagc

SEQ ID NO: 27752 - RNA, 20 nt, Artificial Sequence
  GATA2 Guide RNA
ccaagcagccgcgcuggaug

SEQ ID NO: 27753 - RNA, 20 nt, Artificial Sequence
  GATA2 Guide RNA
ccagcgcggcugcuugggcg

SEQ ID NO: 27754 - RNA, 20 nt, Artificial Sequence
  GATA2 Guide RNA
ccauccagcgcggcugcuug

SEQ ID NO: 27755 - RNA, 20 nt, Artificial Sequence
  GATA2 Guide RNA
ccauggagguggcgcccaag

SEQ ID NO: 27756 - RNA, 20 nt, Artificial Sequence
  GATA2 Guide RNA
cccaagcagccgcgcuggau

SEQ ID NO: 27757 - RNA, 20 nt, Artificial Sequence
  GATA2 Guide RNA
cgcccaagcagccgcgcugg

SEQ ID NO: 27758 - RNA, 20 nt, Artificial Sequence
  GATA2 Guide RNA
cgcggcugcuugggcgccac

SEQ ID NO: 27759 - RNA, 20 nt, Artificial Sequence
  GATA2 Guide RNA
cggccauggagguggcgccc

SEQ ID NO: 27760 - RNA, 20 nt, Artificial Sequence
  GATA2 Guide RNA
cggcugcuugggcgccaccu

SEQ ID NO: 27761 - RNA, 20 nt, Artificial Sequence
  GATA2 Guide RNA
cugcuugggcgccaccucca

SEQ ID NO: 27762 - RNA, 20 nt, Artificial Sequence
  GATA2 Guide RNA
cuugggcgccaccuccaugg

SEQ ID NO: 27763 - RNA, 20 nt, Artificial Sequence
  GATA2 Guide RNA
gagguggcgcccaagcagcc

SEQ ID NO: 27764 - RNA, 20 nt, Artificial Sequence
  GATA2 Guide RNA
gccauccagcgcggcugcuu

SEQ ID NO: 27765 - RNA, 20 nt, Artificial Sequence
  GATA2 Guide RNA
gccauggagguggcgcccaa

SEQ ID NO: 27766 - RNA, 20 nt, Artificial Sequence
  GATA2 Guide RNA
gcccaagcagccgcgcugga

SEQ ID NO: 27767 - RNA, 20 nt, Artificial Sequence
  GATA2 Guide RNA
gcgcccaagcagccgcgcug

SEQ ID NO: 27768 - RNA, 20 nt, Artificial Sequence
  GATA2 Guide RNA
gcgcggcugcuugggcgcca

SEQ ID NO: 27769 - RNA, 20 nt, Artificial Sequence
  GATA2 Guide RNA
gcggcugcuugggcgccacc

SEQ ID NO: 27770 - RNA, 20 nt, Artificial Sequence
  GATA2 Guide RNA
gcugcuugggcgccaccucc

SEQ ID NO: 27771 - RNA, 20 nt, Artificial Sequence
  GATA2 Guide RNA
gcuugggcgccaccuccaug

SEQ ID NO: 27772 - RNA, 20 nt, Artificial Sequence
  GATA2 Guide RNA
ggagguggcgcccaagcagc

SEQ ID NO: 27773 - RNA, 20 nt, Artificial Sequence
  GATA2 Guide RNA
ggccauggagguggcgccca

SEQ ID NO: 27774 - RNA, 20 nt, Artificial Sequence
  GATA2 Guide RNA
ggcgcccaagcagccgcgcu

SEQ ID NO: 27775 - RNA, 20 nt, Artificial Sequence
  GATA2 Guide RNA
ggcugcuugggcgccaccuc

SEQ ID NO: 27776 - RNA, 20 nt, Artificial Sequence
  GATA2 Guide RNA
gguggcgcccaagcagccgc

SEQ ID NO: 27777 - RNA, 20 nt, Artificial Sequence
  GATA2 Guide RNA
guggcgcccaagcagccgcg

SEQ ID NO: 27778 - RNA, 20 nt, Artificial Sequence
  GATA2 Guide RNA
uccagcgcggcugcuugggc

SEQ ID NO: 27779 - RNA, 20 nt, Artificial Sequence
  GATA2 Guide RNA
ugcuugggcgccaccuccau

SEQ ID NO: 27780 - RNA, 20 nt, Artificial Sequence
  GATA2 Guide RNA
uggagguggcgcccaagcag

SEQ ID NO: 27781 - RNA, 20 nt, Artificial Sequence
  GATA2 Guide RNA
uggcgcccaagcagccgcgc

SEQ ID NO: 27782 - RNA, 20 nt, Artificial Sequence
  GATA2 Guide RNA
ugggcgccaccuccauggcc

SEQ ID NO: 27783 - RNA, 20 nt, Artificial Sequence
  GATA2 Guide RNA
uugggcgccaccuccauggc

SEQ ID NO: 27784 - RNA, 21 nt, Artificial Sequence
  GATA2 Guide RNA
agcgcggcugcuugggcgcca

SEQ ID NO: 27785 - RNA, 21 nt, Artificial Sequence
  GATA2 Guide RNA
agguggcgcccaagcagccgc

SEQ ID NO: 27786 - RNA, 21 nt, Artificial Sequence
  GATA2 Guide RNA
auccagcgcggcugcuugggc

SEQ ID NO: 27787 - RNA, 21 nt, Artificial Sequence
  GATA2 Guide RNA
auggagguggcgcccaagcag

SEQ ID NO: 27788 - RNA, 21 nt, Artificial Sequence
  GATA2 Guide RNA
caagcagccgcgcuggauggc

SEQ ID NO: 27789 - RNA, 21 nt, Artificial Sequence
  GATA2 Guide RNA
cauccagcgcggcugcuuggg

SEQ ID NO: 27790 - RNA, 21 nt, Artificial Sequence
  GATA2 Guide RNA
cauggagguggcgcccaagca

SEQ ID NO: 27791 - RNA, 21 nt, Artificial Sequence
  GATA2 Guide RNA
ccaagcagccgcgcuggaugg

SEQ ID NO: 27792 - RNA, 21 nt, Artificial Sequence
  GATA2 Guide RNA
ccauccagcgcggcugcuugg

SEQ ID NO: 27793 - RNA, 21 nt, Artificial Sequence
  GATA2 Guide RNA
ccauggagguggcgcccaagc

SEQ ID NO: 27794 - RNA, 21 nt, Artificial Sequence
  GATA2 Guide RNA
cccaagcagccgcgcuggaug

SEQ ID NO: 27795 - RNA, 21 nt, Artificial Sequence
  GATA2 Guide RNA
cgccauccagcgcggcugcuu

SEQ ID NO: 27796 - RNA, 21 nt, Artificial Sequence
  GATA2 Guide RNA
cgcccaagcagccgcgcugga

SEQ ID NO: 27797 - RNA, 21 nt, Artificial Sequence
  GATA2 Guide RNA
cggccauggagguggcgccca

SEQ ID NO: 27798 - RNA, 21 nt, Artificial Sequence
  GATA2 Guide RNA
cggcugcuugggcgccaccuc

SEQ ID NO: 27799 - RNA, 21 nt, Artificial Sequence
  GATA2 Guide RNA
cugcuugggcgccaccuccau

SEQ ID NO: 27800 - RNA, 21 nt, Artificial Sequence
  GATA2 Guide RNA
cuugggcgccaccuccauggc

SEQ ID NO: 27801 - RNA, 21 nt, Artificial Sequence
  GATA2 Guide RNA
gagguggcgcccaagcagccg

SEQ ID NO: 27802 - RNA, 21 nt, Artificial Sequence
  GATA2 Guide RNA
gccauccagcgcggcugcuug

SEQ ID NO: 27803 - RNA, 21 nt, Artificial Sequence
  GATA2 Guide RNA
gccauggagguggcgcccaag

SEQ ID NO: 27804 - RNA, 21 nt, Artificial Sequence
  GATA2 Guide RNA
gcccaagcagccgcgcuggau

SEQ ID NO: 27805 - RNA, 21 nt, Artificial Sequence
  GATA2 Guide RNA
gcggcugcuugggcgccaccu

SEQ ID NO: 27806 - RNA, 21 nt, Artificial Sequence
  GATA2 Guide RNA
gcugcuugggcgccaccucca

SEQ ID NO: 27807 - RNA, 21 nt, Artificial Sequence
  GATA2 Guide RNA
gcuugggcgccaccuccaugg

SEQ ID NO: 27808 - RNA, 21 nt, Artificial Sequence
  GATA2 Guide RNA
ggagguggcgcccaagcagcc

SEQ ID NO: 27809 - RNA, 21 nt, Artificial Sequence
  GATA2 Guide RNA
ggccauggagguggcgcccaa

SEQ ID NO: 27810 - RNA, 21 nt, Artificial Sequence
  GATA2 Guide RNA
ggcugcuugggcgccaccucc

SEQ ID NO: 27811 - RNA, 21 nt, Artificial Sequence
  GATA2 Guide RNA
uccagcgcggcugcuugggcg

SEQ ID NO: 27812 - RNA, 21 nt, Artificial Sequence
  GATA2 Guide RNA
ugcuugggcgccaccuccaug

SEQ ID NO: 27813 - RNA, 21 nt, Artificial Sequence
  GATA2 Guide RNA
uggagguggcgcccaagcagc

SEQ ID NO: 27814 - RNA, 21 nt, Artificial Sequence
  GATA2 Guide RNA
uggcgcccaagcagccgcgcu

SEQ ID NO: 27815 - RNA, 21 nt, Artificial Sequence
  GATA2 Guide RNA
ugggcgccaccuccauggccg

SEQ ID NO: 27816 - RNA, 21 nt, Artificial Sequence
  GATA2 Guide RNA
uugggcgccaccuccauggcc

SEQ ID NO: 27817 - RNA, 22 nt, Artificial Sequence
  GATA2 Guide RNA
agcgcggcugcuugggcgccac

SEQ ID NO: 27818 - RNA, 22 nt, Artificial Sequence
  GATA2 Guide RNA
agguggcgcccaagcagccgcg

SEQ ID NO: 27819 - RNA, 22 nt, Artificial Sequence
  GATA2 Guide RNA
auccagcgcggcugcuugggcg

SEQ ID NO: 27820 - RNA, 22 nt, Artificial Sequence
  GATA2 Guide RNA
auggagguggcgcccaagcagc

SEQ ID NO: 27821 - RNA, 22 nt, Artificial Sequence
  GATA2 Guide RNA
caagcagccgcgcuggauggcg

SEQ ID NO: 27822 - RNA, 22 nt, Artificial Sequence
  GATA2 Guide RNA
cagcgcggcugcuugggcgcca

SEQ ID NO: 27823 - RNA, 22 nt, Artificial Sequence
  GATA2 Guide RNA
cauccagcgcggcugcuugggc

SEQ ID NO: 27824 - RNA, 22 nt, Artificial Sequence
  GATA2 Guide RNA
cauggagguggcgcccaagcag

SEQ ID NO: 27825 - RNA, 22 nt, Artificial Sequence
  GATA2 Guide RNA
ccaagcagccgcgcuggauggc

SEQ ID NO: 27826 - RNA, 22 nt, Artificial Sequence
  GATA2 Guide RNA
ccauccagcgcggcugcuuggg

SEQ ID NO: 27827 - RNA, 22 nt, Artificial Sequence
  GATA2 Guide RNA
ccauggagguggcgcccaagca

SEQ ID NO: 27828 - RNA, 22 nt, Artificial Sequence
  GATA2 Guide RNA
cccaagcagccgcgcuggaugg

SEQ ID NO: 27829 - RNA, 22 nt, Artificial Sequence
  GATA2 Guide RNA
ccggccauggagguggcgccca

SEQ ID NO: 27830 - RNA, 22 nt, Artificial Sequence
  GATA2 Guide RNA
cgccauccagcgcggcugcuug

SEQ ID NO: 27831 - RNA, 22 nt, Artificial Sequence
  GATA2 Guide RNA
cgcccaagcagccgcgcuggau

SEQ ID NO: 27832 - RNA, 22 nt, Artificial Sequence
  GATA2 Guide RNA
cgcggcugcuugggcgccaccu

SEQ ID NO: 27833 - RNA, 22 nt, Artificial Sequence
  GATA2 Guide RNA
cggccauggagguggcgcccaa

SEQ ID NO: 27834 - RNA, 22 nt, Artificial Sequence
  GATA2 Guide RNA
cggcugcuugggcgccaccucc

SEQ ID NO: 27835 - RNA, 22 nt, Artificial Sequence
  GATA2 Guide RNA
cugcuugggcgccaccuccaug

SEQ ID NO: 27836 - RNA, 22 nt, Artificial Sequence
  GATA2 Guide RNA
cuugggcgccaccuccauggcc

SEQ ID NO: 27837 - RNA, 22 nt, Artificial Sequence
  GATA2 Guide RNA
gagguggcgcccaagcagccgc

SEQ ID NO: 27838 - RNA, 22 nt, Artificial Sequence
  GATA2 Guide RNA
gccauccagcgcggcugcuugg

SEQ ID NO: 27839 - RNA, 22 nt, Artificial Sequence
  GATA2 Guide RNA
gccauggagguggcgcccaagc

SEQ ID NO: 27840 - RNA, 22 nt, Artificial Sequence
  GATA2 Guide RNA
gcccaagcagccgcgcuggaug

SEQ ID NO: 27841 - RNA, 22 nt, Artificial Sequence
  GATA2 Guide RNA
gcgccauccagcgcggcugcuu

SEQ ID NO: 27842 - RNA, 22 nt, Artificial Sequence
  GATA2 Guide RNA
gcgcccaagcagccgcgcugga

SEQ ID NO: 27843 - RNA, 22 nt, Artificial Sequence
  GATA2 Guide RNA
gcggcugcuugggcgccaccuc

SEQ ID NO: 27844 - RNA, 22 nt, Artificial Sequence
  GATA2 Guide RNA
gcugcuugggcgccaccuccau

SEQ ID NO: 27845 - RNA, 22 nt, Artificial Sequence
  GATA2 Guide RNA
gcuugggcgccaccuccauggc

SEQ ID NO: 27846 - RNA, 22 nt, Artificial Sequence
  GATA2 Guide RNA
ggagguggcgcccaagcagccg

SEQ ID NO: 27847 - RNA, 22 nt, Artificial Sequence
  GATA2 Guide RNA
ggccauggagguggcgcccaag

SEQ ID NO: 27848 - RNA, 22 nt, Artificial Sequence
  GATA2 Guide RNA
ggcugcuugggcgccaccucca

SEQ ID NO: 27849 - RNA, 22 nt, Artificial Sequence
  GATA2 Guide RNA
guggcgcccaagcagccgcgcu

SEQ ID NO: 27850 - RNA, 22 nt, Artificial Sequence
  GATA2 Guide RNA
uccagcgcggcugcuugggcgc

SEQ ID NO: 27851 - RNA, 22 nt, Artificial Sequence
  GATA2 Guide RNA
ugcuugggcgccaccuccaugg

SEQ ID NO: 27852 - RNA, 22 nt, Artificial Sequence
  GATA2 Guide RNA
uggagguggcgcccaagcagcc

SEQ ID NO: 27853 - RNA, 22 nt, Artificial Sequence
  GATA2 Guide RNA
uggcgcccaagcagccgcgcug

SEQ ID NO: 27854 - RNA, 22 nt, Artificial Sequence
  GATA2 Guide RNA
ugggcgccaccuccauggccgg

SEQ ID NO: 27855 - RNA, 22 nt, Artificial Sequence
  GATA2 Guide RNA
uugggcgccaccuccauggccg

SEQ ID NO: 27856 - RNA, 20 nt, Artificial Sequence
  GATA2 Guide RNA
agcgcggcugcucgggcucc

SEQ ID NO: 27857 - RNA, 20 nt, Artificial Sequence
  GATA2 Guide RNA
agguggagcccgagcagccg

SEQ ID NO: 27858 - RNA, 20 nt, Artificial Sequence
  GATA2 Guide RNA
auccagcgcggcugcucggg

SEQ ID NO: 27859 - RNA, 20 nt, Artificial Sequence
  GATA2 Guide RNA
auggagguggagcccgagca

SEQ ID NO: 27860 - RNA, 20 nt, Artificial Sequence
  GATA2 Guide RNA
cagcgcggcugcucgggcuc

SEQ ID NO: 27861 - RNA, 20 nt, Artificial Sequence
  GATA2 Guide RNA
cauccagcgcggcugcucgg

SEQ ID NO: 27862 - RNA, 20 nt, Artificial Sequence
  GATA2 Guide RNA
cauggagguggagcccgagc

SEQ ID NO: 27863 - RNA, 20 nt, Artificial Sequence
  GATA2 Guide RNA
ccagcgcggcugcucgggcu

SEQ ID NO: 27864 - RNA, 20 nt, Artificial Sequence
  GATA2 Guide RNA
ccauggagguggagcccgag

SEQ ID NO: 27865 - RNA, 20 nt, Artificial Sequence
  GATA2 Guide RNA
ccgccgccggccauggaggu

SEQ ID NO: 27866 - RNA, 20 nt, Artificial Sequence
  GATA2 Guide RNA
ccgccggccauggaggugga

SEQ ID NO: 27867 - RNA, 20 nt, Artificial Sequence
  GATA2 Guide RNA
ccggccauggagguggagcc

SEQ ID NO: 27868 - RNA, 20 nt, Artificial Sequence
  GATA2 Guide RNA
cgccgccggccauggaggug

SEQ ID NO: 27869 - RNA, 20 nt, Artificial Sequence
  GATA2 Guide RNA
cgccggccauggagguggag

SEQ ID NO: 27870 - RNA, 20 nt, Artificial Sequence
  GATA2 Guide RNA
cgcggcugcucgggcuccac

SEQ ID NO: 27871 - RNA, 20 nt, Artificial Sequence
  GATA2 Guide RNA
cggccauggagguggagccc

SEQ ID NO: 27872 - RNA, 20 nt, Artificial Sequence
  GATA2 Guide RNA
cggcugcucgggcuccaccu

SEQ ID NO: 27873 - RNA, 20 nt, Artificial Sequence
  GATA2 Guide RNA
cgggcuccaccuccauggcc

SEQ ID NO: 27874 - RNA, 20 nt, Artificial Sequence
  GATA2 Guide RNA
cuccaccuccauggccggcg

SEQ ID NO: 27875 - RNA, 20 nt, Artificial Sequence
  GATA2 Guide RNA
cucgggcuccaccuccaugg

SEQ ID NO: 27876 - RNA, 20 nt, Artificial Sequence
  GATA2 Guide RNA
cugcucgggcuccaccucca

SEQ ID NO: 27877 - RNA, 20 nt, Artificial Sequence
  GATA2 Guide RNA
gagcccgagcagccgcgcug

SEQ ID NO: 27878 - RNA, 20 nt, Artificial Sequence
  GATA2 Guide RNA
gagguggagcccgagcagcc

SEQ ID NO: 27879 - RNA, 20 nt, Artificial Sequence
  GATA2 Guide RNA
gccauggagguggagcccga

SEQ ID NO: 27880 - RNA, 20 nt, Artificial Sequence
  GATA2 Guide RNA
gccgccggccauggaggugg

SEQ ID NO: 27881 - RNA, 20 nt, Artificial Sequence
  GATA2 Guide RNA
gccggccauggagguggagc

SEQ ID NO: 27882 - RNA, 20 nt, Artificial Sequence
  GATA2 Guide RNA
gcgcggcugcucgggcucca

SEQ ID NO: 27883 - RNA, 20 nt, Artificial Sequence
  GATA2 Guide RNA
gcggcugcucgggcuccacc

SEQ ID NO: 27884 - RNA, 20 nt, Artificial Sequence
  GATA2 Guide RNA
gcuccaccuccauggccggc

SEQ ID NO: 27885 - RNA, 20 nt, Artificial Sequence
  GATA2 Guide RNA
gcucgggcuccaccuccaug

SEQ ID NO: 27886 - RNA, 20 nt, Artificial Sequence
  GATA2 Guide RNA
gcugcucgggcuccaccucc

SEQ ID NO: 27887 - RNA, 20 nt, Artificial Sequence
  GATA2 Guide RNA
ggagcccgagcagccgcgcu

SEQ ID NO: 27888 - RNA, 20 nt, Artificial Sequence
  GATA2 Guide RNA
ggagguggagcccgagcagc

SEQ ID NO: 27889 - RNA, 20 nt, Artificial Sequence
  GATA2 Guide RNA
ggccauggagguggagcccg

SEQ ID NO: 27890 - RNA, 20 nt, Artificial Sequence
  GATA2 Guide RNA
ggcuccaccuccauggccgg

SEQ ID NO: 27891 - RNA, 20 nt, Artificial Sequence
  GATA2 Guide RNA
ggcugcucgggcuccaccuc

SEQ ID NO: 27892 - RNA, 20 nt, Artificial Sequence
  GATA2 Guide RNA
gggcuccaccuccauggccg

SEQ ID NO: 27893 - RNA, 20 nt, Artificial Sequence
  GATA2 Guide RNA
gguggagcccgagcagccgc

SEQ ID NO: 27894 - RNA, 20 nt, Artificial Sequence
  GATA2 Guide RNA
guggagcccgagcagccgcg

SEQ ID NO: 27895 - RNA, 20 nt, Artificial Sequence
  GATA2 Guide RNA
uccaccuccauggccggcgg

SEQ ID NO: 27896 - RNA, 20 nt, Artificial Sequence
  GATA2 Guide RNA
uccagcgcggcugcucgggc

SEQ ID NO: 27897 - RNA, 20 nt, Artificial Sequence
  GATA2 Guide RNA
ucgggcuccaccuccauggc

SEQ ID NO: 27898 - RNA, 20 nt, Artificial Sequence
  GATA2 Guide RNA
ugcucgggcuccaccuccau

SEQ ID NO: 27899 - RNA, 20 nt, Artificial Sequence
  GATA2 Guide RNA
uggagcccgagcagccgcgc

SEQ ID NO: 27900 - RNA, 20 nt, Artificial Sequence
  GATA2 Guide RNA
uggagguggagcccgagcag

SEQ ID NO: 27901 - RNA, 21 nt, Artificial Sequence
  GATA2 Guide RNA
agcgcggcugcucgggcucca

SEQ ID NO: 27902 - RNA, 21 nt, Artificial Sequence
  GATA2 Guide RNA
agguggagcccgagcagccgc

SEQ ID NO: 27903 - RNA, 21 nt, Artificial Sequence
  GATA2 Guide RNA
auccagcgcggcugcucgggc

SEQ ID NO: 27904 - RNA, 21 nt, Artificial Sequence
  GATA2 Guide RNA
auggagguggagcccgagcag

SEQ ID NO: 27905 - RNA, 21 nt, Artificial Sequence
  GATA2 Guide RNA
cauccagcgcggcugcucggg

SEQ ID NO: 27906 - RNA, 21 nt, Artificial Sequence
  GATA2 Guide RNA
cauggagguggagcccgagca

SEQ ID NO: 27907 - RNA, 21 nt, Artificial Sequence
  GATA2 Guide RNA
ccauccagcgcggcugcucgg

SEQ ID NO: 27908 - RNA, 21 nt, Artificial Sequence
  GATA2 Guide RNA
ccauggagguggagcccgagc

SEQ ID NO: 27909 - RNA, 21 nt, Artificial Sequence
  GATA2 Guide RNA
ccgccggccauggagguggag

SEQ ID NO: 27910 - RNA, 21 nt, Artificial Sequence
  GATA2 Guide RNA
ccggccauggagguggagccc

SEQ ID NO: 27911 - RNA, 21 nt, Artificial Sequence
  GATA2 Guide RNA
cgccggccauggagguggagc

SEQ ID NO: 27912 - RNA, 21 nt, Artificial Sequence
  GATA2 Guide RNA
cggccauggagguggagcccg

SEQ ID NO: 27913 - RNA, 21 nt, Artificial Sequence
  GATA2 Guide RNA
cggcugcucgggcuccaccuc

SEQ ID NO: 27914 - RNA, 21 nt, Artificial Sequence
  GATA2 Guide RNA
cgggcuccaccuccauggccg

SEQ ID NO: 27915 - RNA, 21 nt, Artificial Sequence
  GATA2 Guide RNA
cuccaccuccauggccggcgg

SEQ ID NO: 27916 - RNA, 21 nt, Artificial Sequence
  GATA2 Guide RNA
cucgggcuccaccuccauggc

SEQ ID NO: 27917 - RNA, 21 nt, Artificial Sequence
  GATA2 Guide RNA
cugcucgggcuccaccuccau

SEQ ID NO: 27918 - RNA, 21 nt, Artificial Sequence
  GATA2 Guide RNA
gagguggagcccgagcagccg

SEQ ID NO: 27919 - RNA, 21 nt, Artificial Sequence
  GATA2 Guide RNA
gccauggagguggagcccgag

SEQ ID NO: 27920 - RNA, 21 nt, Artificial Sequence
  GATA2 Guide RNA
gccgccggccauggaggugga

SEQ ID NO: 27921 - RNA, 21 nt, Artificial Sequence
  GATA2 Guide RNA
gccggccauggagguggagcc

SEQ ID NO: 27922 - RNA, 21 nt, Artificial Sequence
  GATA2 Guide RNA
gcggcugcucgggcuccaccu

SEQ ID NO: 27923 - RNA, 21 nt, Artificial Sequence
  GATA2 Guide RNA
gcuccaccuccauggccggcg

SEQ ID NO: 27924 - RNA, 21 nt, Artificial Sequence
  GATA2 Guide RNA
gcucgggcuccaccuccaugg

SEQ ID NO: 27925 - RNA, 21 nt, Artificial Sequence
  GATA2 Guide RNA
gcugcucgggcuccaccucca

SEQ ID NO: 27926 - RNA, 21 nt, Artificial Sequence
  GATA2 Guide RNA
ggagguggagcccgagcagcc

SEQ ID NO: 27927 - RNA, 21 nt, Artificial Sequence
  GATA2 Guide RNA
ggccauggagguggagcccga

SEQ ID NO: 27928 - RNA, 21 nt, Artificial Sequence
  GATA2 Guide RNA
ggcuccaccuccauggccggc

SEQ ID NO: 27929 - RNA, 21 nt, Artificial Sequence
  GATA2 Guide RNA
ggcugcucgggcuccaccucc

SEQ ID NO: 27930 - RNA, 21 nt, Artificial Sequence
  GATA2 Guide RNA
gggcuccaccuccauggccgg

SEQ ID NO: 27931 - RNA, 21 nt, Artificial Sequence
  GATA2 Guide RNA
uccaccuccauggccggcggc

SEQ ID NO: 27932 - RNA, 21 nt, Artificial Sequence
  GATA2 Guide RNA
uccagcgcggcugcucgggcu

SEQ ID NO: 27933 - RNA, 21 nt, Artificial Sequence
  GATA2 Guide RNA
ucgggcuccaccuccauggcc

SEQ ID NO: 27934 - RNA, 21 nt, Artificial Sequence
  GATA2 Guide RNA
ugcucgggcuccaccuccaug

SEQ ID NO: 27935 - RNA, 21 nt, Artificial Sequence
  GATA2 Guide RNA
uggagcccgagcagccgcgcu

SEQ ID NO: 27936 - RNA, 21 nt, Artificial Sequence
  GATA2 Guide RNA
uggagguggagcccgagcagc

SEQ ID NO: 27937 - RNA, 22 nt, Artificial Sequence
  GATA2 Guide RNA
agcgcggcugcucgggcuccac

SEQ ID NO: 27938 - RNA, 22 nt, Artificial Sequence
  GATA2 Guide RNA
agguggagcccgagcagccgcg

SEQ ID NO: 27939 - RNA, 22 nt, Artificial Sequence
  GATA2 Guide RNA
auccagcgcggcugcucgggcu

SEQ ID NO: 27940 - RNA, 22 nt, Artificial Sequence
  GATA2 Guide RNA
auggagguggagcccgagcagc

SEQ ID NO: 27941 - RNA, 22 nt, Artificial Sequence
  GATA2 Guide RNA
cagcgcggcugcucgggcucca

SEQ ID NO: 27942 - RNA, 22 nt, Artificial Sequence
  GATA2 Guide RNA
cauccagcgcggcugcucgggc

SEQ ID NO: 27943 - RNA, 22 nt, Artificial Sequence
  GATA2 Guide RNA
cauggagguggagcccgagcag

SEQ ID NO: 27944 - RNA, 22 nt, Artificial Sequence
  GATA2 Guide RNA
ccauccagcgcggcugcucggg

SEQ ID NO: 27945 - RNA, 22 nt, Artificial Sequence
  GATA2 Guide RNA
ccauggagguggagcccgagca

SEQ ID NO: 27946 - RNA, 22 nt, Artificial Sequence
  GATA2 Guide RNA
ccgccggccauggagguggagc

SEQ ID NO: 27947 - RNA, 22 nt, Artificial Sequence
  GATA2 Guide RNA
ccggccauggagguggagcccg

SEQ ID NO: 27948 - RNA, 22 nt, Artificial Sequence
  GATA2 Guide RNA
cgccgccggccauggaggugga

SEQ ID NO: 27949 - RNA, 22 nt, Artificial Sequence
  GATA2 Guide RNA
cgccggccauggagguggagcc

SEQ ID NO: 27950 - RNA, 22 nt, Artificial Sequence
  GATA2 Guide RNA
cgcggcugcucgggcuccaccu

SEQ ID NO: 27951 - RNA, 22 nt, Artificial Sequence
  GATA2 Guide RNA
cggccauggagguggagcccga

SEQ ID NO: 27952 - RNA, 22 nt, Artificial Sequence
  GATA2 Guide RNA
cggcugcucgggcuccaccucc

SEQ ID NO: 27953 - RNA, 22 nt, Artificial Sequence
  GATA2 Guide RNA
cgggcuccaccuccauggccgg

SEQ ID NO: 27954 - RNA, 22 nt, Artificial Sequence
  GATA2 Guide RNA
cuccaccuccauggccggcggc

SEQ ID NO: 27955 - RNA, 22 nt, Artificial Sequence
  GATA2 Guide RNA
cucgggcuccaccuccauggcc

SEQ ID NO: 27956 - RNA, 22 nt, Artificial Sequence
  GATA2 Guide RNA
cugcucgggcuccaccuccaug

SEQ ID NO: 27957 - RNA, 22 nt, Artificial Sequence
  GATA2 Guide RNA
gagcccgagcagccgcgcugga

SEQ ID NO: 27958 - RNA, 22 nt, Artificial Sequence
  GATA2 Guide RNA
gagguggagcccgagcagccgc

SEQ ID NO: 27959 - RNA, 22 nt, Artificial Sequence
  GATA2 Guide RNA
gccauccagcgcggcugcucgg

SEQ ID NO: 27960 - RNA, 22 nt, Artificial Sequence
  GATA2 Guide RNA
gccauggagguggagcccgagc

SEQ ID NO: 27961 - RNA, 22 nt, Artificial Sequence
  GATA2 Guide RNA
gccgccggccauggagguggag

SEQ ID NO: 27962 - RNA, 22 nt, Artificial Sequence
  GATA2 Guide RNA
gccggccauggagguggagccc

SEQ ID NO: 27963 - RNA, 22 nt, Artificial Sequence
  GATA2 Guide RNA
gcggcugcucgggcuccaccuc

SEQ ID NO: 27964 - RNA, 22 nt, Artificial Sequence
  GATA2 Guide RNA
gcuccaccuccauggccggcgg

SEQ ID NO: 27965 - RNA, 22 nt, Artificial Sequence
  GATA2 Guide RNA
gcucgggcuccaccuccauggc

SEQ ID NO: 27966 - RNA, 22 nt, Artificial Sequence
  GATA2 Guide RNA
gcugcucgggcuccaccuccau

SEQ ID NO: 27967 - RNA, 22 nt, Artificial Sequence
  GATA2 Guide RNA
ggagguggagcccgagcagccg

SEQ ID NO: 27968 - RNA, 22 nt, Artificial Sequence
  GATA2 Guide RNA
ggccauggagguggagcccgag

SEQ ID NO: 27969 - RNA, 22 nt, Artificial Sequence
  GATA2 Guide RNA
ggcuccaccuccauggccggcg

SEQ ID NO: 27970 - RNA, 22 nt, Artificial Sequence
  GATA2 Guide RNA
ggcugcucgggcuccaccucca

SEQ ID NO: 27971 - RNA, 22 nt, Artificial Sequence
  GATA2 Guide RNA
gggcuccaccuccauggccggc

SEQ ID NO: 27972 - RNA, 22 nt, Artificial Sequence
  GATA2 Guide RNA
guggagcccgagcagccgcgcu

SEQ ID NO: 27973 - RNA, 22 nt, Artificial Sequence
  GATA2 Guide RNA
uccaccuccauggccggcggcg

SEQ ID NO: 27974 - RNA, 22 nt, Artificial Sequence
  GATA2 Guide RNA
uccagcgcggcugcucgggcuc

SEQ ID NO: 27975 - RNA, 22 nt, Artificial Sequence
  GATA2 Guide RNA
ucgggcuccaccuccauggccg

SEQ ID NO: 27976 - RNA, 22 nt, Artificial Sequence
  GATA2 Guide RNA
ugcucgggcuccaccuccaugg

SEQ ID NO: 27977 - RNA, 22 nt, Artificial Sequence
  GATA2 Guide RNA
uggagcccgagcagccgcgcug

SEQ ID NO: 27978 - RNA, 22 nt, Artificial Sequence
  GATA2 Guide RNA
uggagguggagcccgagcagcc

SEQ ID NO: 27979 - RNA, 20 nt, Artificial Sequence
  GATA2 Guide RNA
acccugagccgccgccgcug

SEQ ID NO: 27980 - RNA, 20 nt, Artificial Sequence
  GATA2 Guide RNA
accuccauggccagcggcgg

SEQ ID NO: 27981 - RNA, 20 nt, Artificial Sequence
  GATA2 Guide RNA
agacccugagccgccgccgc

SEQ ID NO: 27982 - RNA, 20 nt, Artificial Sequence
  GATA2 Guide RNA
agccgccgccgcuggccaug

SEQ ID NO: 27983 - RNA, 20 nt, Artificial Sequence
  GATA2 Guide RNA
agcggcggcggcucaggguc

SEQ ID NO: 27984 - RNA, 20 nt, Artificial Sequence
  GATA2 Guide RNA
auggccagcggcggcggcuc

SEQ ID NO: 27985 - RNA, 20 nt, Artificial Sequence
  GATA2 Guide RNA
caccuccauggccagcggcg

SEQ ID NO: 27986 - RNA, 20 nt, Artificial Sequence
  GATA2 Guide RNA
cagacccugagccgccgccg

SEQ ID NO: 27987 - RNA, 20 nt, Artificial Sequence
  GATA2 Guide RNA
cagcggcggcggcucagggu

SEQ ID NO: 27988 - RNA, 20 nt, Artificial Sequence
  GATA2 Guide RNA
cauggccagcggcggcggcu

SEQ ID NO: 27989 - RNA, 20 nt, Artificial Sequence
  GATA2 Guide RNA
ccaccuccauggccagcggc

SEQ ID NO: 27990 - RNA, 20 nt, Artificial Sequence
  GATA2 Guide RNA
ccagacccugagccgccgcc

SEQ ID NO: 27991 - RNA, 20 nt, Artificial Sequence
  GATA2 Guide RNA
cccagacccugagccgccgc

SEQ ID NO: 27992 - RNA, 20 nt, Artificial Sequence
  GATA2 Guide RNA
ccgccgccgcuggccaugga

SEQ ID NO: 27993 - RNA, 20 nt, Artificial Sequence
  GATA2 Guide RNA
ccgccgcuggccauggaggu

SEQ ID NO: 27994 - RNA, 20 nt, Artificial Sequence
  GATA2 Guide RNA
ccgcuggccauggagguggc

SEQ ID NO: 27995 - RNA, 20 nt, Artificial Sequence
  GATA2 Guide RNA
ccuccauggccagcggcggc

SEQ ID NO: 27996 - RNA, 20 nt, Artificial Sequence
  GATA2 Guide RNA
cgccaccuccauggccagcg

SEQ ID NO: 27997 - RNA, 20 nt, Artificial Sequence
  GATA2 Guide RNA
cgccgccgcuggccauggag

SEQ ID NO: 27998 - RNA, 20 nt, Artificial Sequence
  GATA2 Guide RNA
cgccgcuggccauggaggug

SEQ ID NO: 27999 - RNA, 20 nt, Artificial Sequence
  GATA2 Guide RNA
cgcuggccauggagguggcg

SEQ ID NO: 28000 - RNA, 20 nt, Artificial Sequence
  GATA2 Guide RNA
cgggcgccaccuccauggcc

SEQ ID NO: 28001 - RNA, 20 nt, Artificial Sequence
  GATA2 Guide RNA
cuccauggccagcggcggcg

SEQ ID NO: 28002 - RNA, 20 nt, Artificial Sequence
  GATA2 Guide RNA
cucgggcgccaccuccaugg

SEQ ID NO: 28003 - RNA, 20 nt, Artificial Sequence
  GATA2 Guide RNA
cuggccauggagguggcgcc

SEQ ID NO: 28004 - RNA, 20 nt, Artificial Sequence
  GATA2 Guide RNA
gacccugagccgccgccgcu

SEQ ID NO: 28005 - RNA, 20 nt, Artificial Sequence
  GATA2 Guide RNA
gagccgccgccgcuggccau

SEQ ID NO: 28006 - RNA, 20 nt, Artificial Sequence
  GATA2 Guide RNA
gccaccuccauggccagcgg

SEQ ID NO: 28007 - RNA, 20 nt, Artificial Sequence
  GATA2 Guide RNA
gccgccgcuggccauggagg

SEQ ID NO: 28008 - RNA, 20 nt, Artificial Sequence
  GATA2 Guide RNA
gccgcuggccauggaggugg

SEQ ID NO: 28009 - RNA, 20 nt, Artificial Sequence
  GATA2 Guide RNA
gcgccaccuccauggccagc

SEQ ID NO: 28010 - RNA, 20 nt, Artificial Sequence
  GATA2 Guide RNA
gcuggccauggagguggcgc

SEQ ID NO: 28011 - RNA, 20 nt, Artificial Sequence
  GATA2 Guide RNA
ggcgccaccuccauggccag

SEQ ID NO: 28012 - RNA, 20 nt, Artificial Sequence
  GATA2 Guide RNA
gggcgccaccuccauggcca

SEQ ID NO: 28013 - RNA, 20 nt, Artificial Sequence
  GATA2 Guide RNA
uccauggccagcggcggcgg

SEQ ID NO: 28014 - RNA, 20 nt, Artificial Sequence
  GATA2 Guide RNA
ucgggcgccaccuccauggc

SEQ ID NO: 28015 - RNA, 20 nt, Artificial Sequence
  GATA2 Guide RNA
ugagccgccgccgcuggcca

SEQ ID NO: 28016 - RNA, 20 nt, Artificial Sequence
  GATA2 Guide RNA
uggccagcggcggcggcuca

SEQ ID NO: 28017 - RNA, 21 nt, Artificial Sequence
  GATA2 Guide RNA
acccagacccugagccgccgc

SEQ ID NO: 28018 - RNA, 21 nt, Artificial Sequence
  GATA2 Guide RNA
accuccauggccagcggcggc

SEQ ID NO: 28019 - RNA, 21 nt, Artificial Sequence
  GATA2 Guide RNA
agacccugagccgccgccgcu

SEQ ID NO: 28020 - RNA, 21 nt, Artificial Sequence
  GATA2 Guide RNA
agcggcggcggcucagggucu

SEQ ID NO: 28021 - RNA, 21 nt, Artificial Sequence
  GATA2 Guide RNA
auggccagcggcggcggcuca

SEQ ID NO: 28022 - RNA, 21 nt, Artificial Sequence
  GATA2 Guide RNA
caccuccauggccagcggcgg

SEQ ID NO: 28023 - RNA, 21 nt, Artificial Sequence
  GATA2 Guide RNA
ccaccuccauggccagcggcg

SEQ ID NO: 28024 - RNA, 21 nt, Artificial Sequence
  GATA2 Guide RNA
ccgccgcuggccauggaggug

SEQ ID NO: 28025 - RNA, 21 nt, Artificial Sequence
  GATA2 Guide RNA
ccgcuggccauggagguggcg

SEQ ID NO: 28026 - RNA, 21 nt, Artificial Sequence
  GATA2 Guide RNA
cgccaccuccauggccagcgg

SEQ ID NO: 28027 - RNA, 21 nt, Artificial Sequence
  GATA2 Guide RNA
cgccgcuggccauggaggugg

SEQ ID NO: 28028 - RNA, 21 nt, Artificial Sequence
  GATA2 Guide RNA
cgcuggccauggagguggcgc

SEQ ID NO: 28029 - RNA, 21 nt, Artificial Sequence
  GATA2 Guide RNA
cgggcgccaccuccauggcca

SEQ ID NO: 28030 - RNA, 21 nt, Artificial Sequence
  GATA2 Guide RNA
cucgggcgccaccuccauggc

SEQ ID NO: 28031 - RNA, 21 nt, Artificial Sequence
  GATA2 Guide RNA
cuggccauggagguggcgccc

SEQ ID NO: 28032 - RNA, 21 nt, Artificial Sequence
  GATA2 Guide RNA
gccaccuccauggccagcggc

SEQ ID NO: 28033 - RNA, 21 nt, Artificial Sequence
  GATA2 Guide RNA
gccgccgcuggccauggaggu

SEQ ID NO: 28034 - RNA, 21 nt, Artificial Sequence
  GATA2 Guide RNA
gccgcuggccauggagguggc

SEQ ID NO: 28035 - RNA, 21 nt, Artificial Sequence
  GATA2 Guide RNA
gcgccaccuccauggccagcg

SEQ ID NO: 28036 - RNA, 21 nt, Artificial Sequence
  GATA2 Guide RNA
gcucgggcgccaccuccaugg

SEQ ID NO: 28037 - RNA, 21 nt, Artificial Sequence
  GATA2 Guide RNA
gcuggccauggagguggcgcc

SEQ ID NO: 28038 - RNA, 21 nt, Artificial Sequence
  GATA2 Guide RNA
ggcgccaccuccauggccagc

SEQ ID NO: 28039 - RNA, 21 nt, Artificial Sequence
  GATA2 Guide RNA
gggcgccaccuccauggccag

SEQ ID NO: 28040 - RNA, 21 nt, Artificial Sequence
  GATA2 Guide RNA
ucgggcgccaccuccauggcc

SEQ ID NO: 28041 - RNA, 21 nt, Artificial Sequence
  GATA2 Guide RNA
ugagccgccgccgcuggccau

SEQ ID NO: 28042 - RNA, 22 nt, Artificial Sequence
  GATA2 Guide RNA
acccagacccugagccgccgcc

SEQ ID NO: 28043 - RNA, 22 nt, Artificial Sequence
  GATA2 Guide RNA
accuccauggccagcggcggcg

SEQ ID NO: 28044 - RNA, 22 nt, Artificial Sequence
  GATA2 Guide RNA
agacccugagccgccgccgcug

SEQ ID NO: 28045 - RNA, 22 nt, Artificial Sequence
  GATA2 Guide RNA
agccgccgccgcuggccaugga

SEQ ID NO: 28046 - RNA, 22 nt, Artificial Sequence
  GATA2 Guide RNA
agcggcggcggcucagggucug

SEQ ID NO: 28047 - RNA, 22 nt, Artificial Sequence
  GATA2 Guide RNA
auggccagcggcggcggcucag

SEQ ID NO: 28048 - RNA, 22 nt, Artificial Sequence
  GATA2 Guide RNA
cacccagacccugagccgccgc

SEQ ID NO: 28049 - RNA, 22 nt, Artificial Sequence
  GATA2 Guide RNA
caccuccauggccagcggcggc

SEQ ID NO: 28050 - RNA, 22 nt, Artificial Sequence
  GATA2 Guide RNA
cagacccugagccgccgccgcu

SEQ ID NO: 28051 - RNA, 22 nt, Artificial Sequence
  GATA2 Guide RNA
cagcggcggcggcucagggucu

SEQ ID NO: 28052 - RNA, 22 nt, Artificial Sequence
  GATA2 Guide RNA
cauggccagcggcggcggcuca

SEQ ID NO: 28053 - RNA, 22 nt, Artificial Sequence
  GATA2 Guide RNA
ccaccuccauggccagcggcgg

SEQ ID NO: 28054 - RNA, 22 nt, Artificial Sequence
  GATA2 Guide RNA
ccgccgcuggccauggaggugg

SEQ ID NO: 28055 - RNA, 22 nt, Artificial Sequence
  GATA2 Guide RNA
ccgcuggccauggagguggcgc

SEQ ID NO: 28056 - RNA, 22 nt, Artificial Sequence
  GATA2 Guide RNA
cgccaccuccauggccagcggc

SEQ ID NO: 28057 - RNA, 22 nt, Artificial Sequence
  GATA2 Guide RNA
cgccgccgcuggccauggaggu

SEQ ID NO: 28058 - RNA, 22 nt, Artificial Sequence
  GATA2 Guide RNA
cgccgcuggccauggagguggc

SEQ ID NO: 28059 - RNA, 22 nt, Artificial Sequence
  GATA2 Guide RNA
cgcuggccauggagguggcgcc

SEQ ID NO: 28060 - RNA, 22 nt, Artificial Sequence
  GATA2 Guide RNA
cgggcgccaccuccauggccag

SEQ ID NO: 28061 - RNA, 22 nt, Artificial Sequence
  GATA2 Guide RNA
cucgggcgccaccuccauggcc

SEQ ID NO: 28062 - RNA, 22 nt, Artificial Sequence
  GATA2 Guide RNA
cugagccgccgccgcuggccau

SEQ ID NO: 28063 - RNA, 22 nt, Artificial Sequence
  GATA2 Guide RNA
cuggccauggagguggcgcccg

SEQ ID NO: 28064 - RNA, 22 nt, Artificial Sequence
  GATA2 Guide RNA
gccaccuccauggccagcggcg

SEQ ID NO: 28065 - RNA, 22 nt, Artificial Sequence
  GATA2 Guide RNA
gccgccgcuggccauggaggug

SEQ ID NO: 28066 - RNA, 22 nt, Artificial Sequence
  GATA2 Guide RNA
gccgcuggccauggagguggcg

SEQ ID NO: 28067 - RNA, 22 nt, Artificial Sequence
  GATA2 Guide RNA
gcgccaccuccauggccagcgg

SEQ ID NO: 28068 - RNA, 22 nt, Artificial Sequence
  GATA2 Guide RNA
gcucgggcgccaccuccauggc

SEQ ID NO: 28069 - RNA, 22 nt, Artificial Sequence
  GATA2 Guide RNA
gcuggccauggagguggcgccc

SEQ ID NO: 28070 - RNA, 22 nt, Artificial Sequence
  GATA2 Guide RNA
ggcgccaccuccauggccagcg

SEQ ID NO: 28071 - RNA, 22 nt, Artificial Sequence
  GATA2 Guide RNA
gggcgccaccuccauggccagc

SEQ ID NO: 28072 - RNA, 22 nt, Artificial Sequence
  GATA2 Guide RNA
uccauggccagcggcggcggcu

SEQ ID NO: 28073 - RNA, 22 nt, Artificial Sequence
  GATA2 Guide RNA
ucgggcgccaccuccauggcca

SEQ ID NO: 28074 - RNA, 22 nt, Artificial Sequence
  GATA2 Guide RNA
ugagccgccgccgcuggccaug

SEQ ID NO: 28075 - RNA, 22 nt, Artificial Sequence
  GATA2 Guide RNA
ugcucgggcgccaccuccaugg

SEQ ID NO: 28076 - RNA, 20 nt, Artificial Sequence
  GATA2 Guide RNA
aaccgcccugcgcgaggaag

SEQ ID NO: 28077 - RNA, 20 nt, Artificial Sequence
  GATA2 Guide RNA
accgcccugcgcgaggaagg

SEQ ID NO: 28078 - RNA, 20 nt, Artificial Sequence
  GATA2 Guide RNA
acggcaaccgcccugcgcga

SEQ ID NO: 28079 - RNA, 20 nt, Artificial Sequence
  GATA2 Guide RNA
acucccccuuccucgcgcag

SEQ ID NO: 28080 - RNA, 20 nt, Artificial Sequence
  GATA2 Guide RNA
agacggcaaccgcccugcgc

SEQ ID NO: 28081 - RNA, 20 nt, Artificial Sequence
  GATA2 Guide RNA
agggcgguugccgucugcac

SEQ ID NO: 28082 - RNA, 20 nt, Artificial Sequence
  GATA2 Guide RNA
caaccgcccugcgcgaggaa

SEQ ID NO: 28083 - RNA, 20 nt, Artificial Sequence
  GATA2 Guide RNA
cagacggcaaccgcccugcg

SEQ ID NO: 28084 - RNA, 20 nt, Artificial Sequence
  GATA2 Guide RNA
cagggcgguugccgucugca

SEQ ID NO: 28085 - RNA, 20 nt, Artificial Sequence
  GATA2 Guide RNA
cccccuuccucgcgcagggc

SEQ ID NO: 28086 - RNA, 20 nt, Artificial Sequence
  GATA2 Guide RNA
ccccuuccucgcgcagggcg

SEQ ID NO: 28087 - RNA, 20 nt, Artificial Sequence
  GATA2 Guide RNA
cccuuccucgcgcagggcgg

SEQ ID NO: 28088 - RNA, 20 nt, Artificial Sequence
  GATA2 Guide RNA
ccgcccugcgcgaggaaggg

SEQ ID NO: 28089 - RNA, 20 nt, Artificial Sequence
  GATA2 Guide RNA
ccucgcgcagggcgguugcc

SEQ ID NO: 28090 - RNA, 20 nt, Artificial Sequence
  GATA2 Guide RNA
ccuuccucgcgcagggcggu

SEQ ID NO: 28091 - RNA, 20 nt, Artificial Sequence
  GATA2 Guide RNA
cgcagggcgguugccgucug

SEQ ID NO: 28092 - RNA, 20 nt, Artificial Sequence
  GATA2 Guide RNA
cgcccugcgcgaggaagggg

SEQ ID NO: 28093 - RNA, 20 nt, Artificial Sequence
  GATA2 Guide RNA
cgcgcagggcgguugccguc

SEQ ID NO: 28094 - RNA, 20 nt, Artificial Sequence
  GATA2 Guide RNA
cggcaaccgcccugcgcgag

SEQ ID NO: 28095 - RNA, 20 nt, Artificial Sequence
  GATA2 Guide RNA
cgguugccgucugcacccag

SEQ ID NO: 28096 - RNA, 20 nt, Artificial Sequence
  GATA2 Guide RNA
cucccccuuccucgcgcagg

SEQ ID NO: 28097 - RNA, 20 nt, Artificial Sequence
  GATA2 Guide RNA
cucgcgcagggcgguugccg

SEQ ID NO: 28098 - RNA, 20 nt, Artificial Sequence
  GATA2 Guide RNA
cugggugcagacggcaaccg

SEQ ID NO: 28099 - RNA, 20 nt, Artificial Sequence
  GATA2 Guide RNA
cuuccucgcgcagggcgguu

SEQ ID NO: 28100 - RNA, 20 nt, Artificial Sequence
  GATA2 Guide RNA
gacggcaaccgcccugcgcg

SEQ ID NO: 28101 - RNA, 20 nt, Artificial Sequence
  GATA2 Guide RNA
gcaaccgcccugcgcgagga

SEQ ID NO: 28102 - RNA, 20 nt, Artificial Sequence
  GATA2 Guide RNA
gcagacggcaaccgcccugc

SEQ ID NO: 28103 - RNA, 20 nt, Artificial Sequence
  GATA2 Guide RNA
gcagggcgguugccgucugc

SEQ ID NO: 28104 - RNA, 20 nt, Artificial Sequence
  GATA2 Guide RNA
gcgcagggcgguugccgucu

SEQ ID NO: 28105 - RNA, 20 nt, Artificial Sequence
  GATA2 Guide RNA
gcgguugccgucugcaccca

SEQ ID NO: 28106 - RNA, 20 nt, Artificial Sequence
  GATA2 Guide RNA
ggcaaccgcccugcgcgagg

SEQ ID NO: 28107 - RNA, 20 nt, Artificial Sequence
  GATA2 Guide RNA
ggcgguugccgucugcaccc

SEQ ID NO: 28108 - RNA, 20 nt, Artificial Sequence
  GATA2 Guide RNA
gggcgguugccgucugcacc

SEQ ID NO: 28109 - RNA, 20 nt, Artificial Sequence
  GATA2 Guide RNA
gggucugggugcagacggca

SEQ ID NO: 28110 - RNA, 20 nt, Artificial Sequence
  GATA2 Guide RNA
gggugcagacggcaaccgcc

SEQ ID NO: 28111 - RNA, 20 nt, Artificial Sequence
  GATA2 Guide RNA
ggucugggugcagacggcaa

SEQ ID NO: 28112 - RNA, 20 nt, Artificial Sequence
  GATA2 Guide RNA
ggugcagacggcaaccgccc

SEQ ID NO: 28113 - RNA, 20 nt, Artificial Sequence
  GATA2 Guide RNA
gucugggugcagacggcaac

SEQ ID NO: 28114 - RNA, 20 nt, Artificial Sequence
  GATA2 Guide RNA
gugcagacggcaaccgcccu

SEQ ID NO: 28115 - RNA, 20 nt, Artificial Sequence
  GATA2 Guide RNA
ucccccuuccucgcgcaggg

SEQ ID NO: 28116 - RNA, 20 nt, Artificial Sequence
  GATA2 Guide RNA
uccucgcgcagggcgguugc

SEQ ID NO: 28117 - RNA, 20 nt, Artificial Sequence
  GATA2 Guide RNA
ucgcgcagggcgguugccgu

SEQ ID NO: 28118 - RNA, 20 nt, Artificial Sequence
  GATA2 Guide RNA
ucugggugcagacggcaacc

SEQ ID NO: 28119 - RNA, 20 nt, Artificial Sequence
  GATA2 Guide RNA
ugcagacggcaaccgcccug

SEQ ID NO: 28120 - RNA, 20 nt, Artificial Sequence
  GATA2 Guide RNA
ugggugcagacggcaaccgc

SEQ ID NO: 28121 - RNA, 20 nt, Artificial Sequence
  GATA2 Guide RNA
uuccucgcgcagggcgguug

SEQ ID NO: 28122 - RNA, 21 nt, Artificial Sequence
  GATA2 Guide RNA
aaccgcccugcgcgaggaagg

SEQ ID NO: 28123 - RNA, 21 nt, Artificial Sequence
  GATA2 Guide RNA
accgcccugcgcgaggaaggg

SEQ ID NO: 28124 - RNA, 21 nt, Artificial Sequence
  GATA2 Guide RNA
acggcaaccgcccugcgcgag

SEQ ID NO: 28125 - RNA, 21 nt, Artificial Sequence
  GATA2 Guide RNA
acucccccuuccucgcgcagg

SEQ ID NO: 28126 - RNA, 21 nt, Artificial Sequence
  GATA2 Guide RNA
agacggcaaccgcccugcgcg

SEQ ID NO: 28127 - RNA, 21 nt, Artificial Sequence
  GATA2 Guide RNA
agggcgguugccgucugcacc

SEQ ID NO: 28128 - RNA, 21 nt, Artificial Sequence
  GATA2 Guide RNA
agggucugggugcagacggca

SEQ ID NO: 28129 - RNA, 21 nt, Artificial Sequence
  GATA2 Guide RNA
caaccgcccugcgcgaggaag

SEQ ID NO: 28130 - RNA, 21 nt, Artificial Sequence
  GATA2 Guide RNA
cacucccccuuccucgcgcag

SEQ ID NO: 28131 - RNA, 21 nt, Artificial Sequence
  GATA2 Guide RNA
cagacggcaaccgcccugcgc

SEQ ID NO: 28132 - RNA, 21 nt, Artificial Sequence
  GATA2 Guide RNA
cagggcgguugccgucugcac

SEQ ID NO: 28133 - RNA, 21 nt, Artificial Sequence
  GATA2 Guide RNA
cccuuccucgcgcagggcggu

SEQ ID NO: 28134 - RNA, 21 nt, Artificial Sequence
  GATA2 Guide RNA
ccuuccucgcgcagggcgguu

SEQ ID NO: 28135 - RNA, 21 nt, Artificial Sequence
  GATA2 Guide RNA
cgcagggcgguugccgucugc

SEQ ID NO: 28136 - RNA, 21 nt, Artificial Sequence
  GATA2 Guide RNA
cgcgcagggcgguugccgucu

SEQ ID NO: 28137 - RNA, 21 nt, Artificial Sequence
  GATA2 Guide RNA
cgguugccgucugcacccaga

SEQ ID NO: 28138 - RNA, 21 nt, Artificial Sequence
  GATA2 Guide RNA
cucccccuuccucgcgcaggg

SEQ ID NO: 28139 - RNA, 21 nt, Artificial Sequence
  GATA2 Guide RNA
cucgcgcagggcgguugccgu

SEQ ID NO: 28140 - RNA, 21 nt, Artificial Sequence
  GATA2 Guide RNA
cugggugcagacggcaaccgc

SEQ ID NO: 28141 - RNA, 21 nt, Artificial Sequence
  GATA2 Guide RNA
cuuccucgcgcagggcgguug

SEQ ID NO: 28142 - RNA, 21 nt, Artificial Sequence
  GATA2 Guide RNA
gacggcaaccgcccugcgcga

SEQ ID NO: 28143 - RNA, 21 nt, Artificial Sequence
  GATA2 Guide RNA
gcaaccgcccugcgcgaggaa

SEQ ID NO: 28144 - RNA, 21 nt, Artificial Sequence
  GATA2 Guide RNA
gcagacggcaaccgcccugcg

SEQ ID NO: 28145 - RNA, 21 nt, Artificial Sequence
  GATA2 Guide RNA
gcagggcgguugccgucugca

SEQ ID NO: 28146 - RNA, 21 nt, Artificial Sequence
  GATA2 Guide RNA
gcgcagggcgguugccgucug

SEQ ID NO: 28147 - RNA, 21 nt, Artificial Sequence
  GATA2 Guide RNA
gcgguugccgucugcacccag

SEQ ID NO: 28148 - RNA, 21 nt, Artificial Sequence
  GATA2 Guide RNA
ggcaaccgcccugcgcgagga

SEQ ID NO: 28149 - RNA, 21 nt, Artificial Sequence
  GATA2 Guide RNA
ggcgguugccgucugcaccca

SEQ ID NO: 28150 - RNA, 21 nt, Artificial Sequence
  GATA2 Guide RNA
gggcgguugccgucugcaccc

SEQ ID NO: 28151 - RNA, 21 nt, Artificial Sequence
  GATA2 Guide RNA
gggucugggugcagacggcaa

SEQ ID NO: 28152 - RNA, 21 nt, Artificial Sequence
  GATA2 Guide RNA
gggugcagacggcaaccgccc

SEQ ID NO: 28153 - RNA, 21 nt, Artificial Sequence
  GATA2 Guide RNA
ggucugggugcagacggcaac

SEQ ID NO: 28154 - RNA, 21 nt, Artificial Sequence
  GATA2 Guide RNA
ggugcagacggcaaccgcccu

SEQ ID NO: 28155 - RNA, 21 nt, Artificial Sequence
  GATA2 Guide RNA
gucugggugcagacggcaacc

SEQ ID NO: 28156 - RNA, 21 nt, Artificial Sequence
  GATA2 Guide RNA
gugcagacggcaaccgcccug

SEQ ID NO: 28157 - RNA, 21 nt, Artificial Sequence
  GATA2 Guide RNA
ucccccuuccucgcgcagggc

SEQ ID NO: 28158 - RNA, 21 nt, Artificial Sequence
  GATA2 Guide RNA
uccucgcgcagggcgguugcc

SEQ ID NO: 28159 - RNA, 21 nt, Artificial Sequence
  GATA2 Guide RNA
ucgcgcagggcgguugccguc

SEQ ID NO: 28160 - RNA, 21 nt, Artificial Sequence
  GATA2 Guide RNA
ucugggugcagacggcaaccg

SEQ ID NO: 28161 - RNA, 21 nt, Artificial Sequence
  GATA2 Guide RNA
ugcagacggcaaccgcccugc

SEQ ID NO: 28162 - RNA, 21 nt, Artificial Sequence
  GATA2 Guide RNA
ugggugcagacggcaaccgcc

SEQ ID NO: 28163 - RNA, 21 nt, Artificial Sequence
  GATA2 Guide RNA
uuccucgcgcagggcgguugc

SEQ ID NO: 28164 - RNA, 22 nt, Artificial Sequence
  GATA2 Guide RNA
aaccgcccugcgcgaggaaggg

SEQ ID NO: 28165 - RNA, 22 nt, Artificial Sequence
  GATA2 Guide RNA
accgcccugcgcgaggaagggg

SEQ ID NO: 28166 - RNA, 22 nt, Artificial Sequence
  GATA2 Guide RNA
acggcaaccgcccugcgcgagg

SEQ ID NO: 28167 - RNA, 22 nt, Artificial Sequence
  GATA2 Guide RNA
acucccccuuccucgcgcaggg

SEQ ID NO: 28168 - RNA, 22 nt, Artificial Sequence
  GATA2 Guide RNA
agacggcaaccgcccugcgcga

SEQ ID NO: 28169 - RNA, 22 nt, Artificial Sequence
  GATA2 Guide RNA
agggcgguugccgucugcaccc

SEQ ID NO: 28170 - RNA, 22 nt, Artificial Sequence
  GATA2 Guide RNA
agggucugggugcagacggcaa

SEQ ID NO: 28171 - RNA, 22 nt, Artificial Sequence
  GATA2 Guide RNA
caaccgcccugcgcgaggaagg

SEQ ID NO: 28172 - RNA, 22 nt, Artificial Sequence
  GATA2 Guide RNA
cacucccccuuccucgcgcagg

SEQ ID NO: 28173 - RNA, 22 nt, Artificial Sequence
  GATA2 Guide RNA
cagacggcaaccgcccugcgcg

SEQ ID NO: 28174 - RNA, 22 nt, Artificial Sequence
  GATA2 Guide RNA
cagggcgguugccgucugcacc

SEQ ID NO: 28175 - RNA, 22 nt, Artificial Sequence
  GATA2 Guide RNA
cagggucugggugcagacggca

SEQ ID NO: 28176 - RNA, 22 nt, Artificial Sequence
  GATA2 Guide RNA
ccccuuccucgcgcagggcggu

SEQ ID NO: 28177 - RNA, 22 nt, Artificial Sequence
  GATA2 Guide RNA
cccuuccucgcgcagggcgguu

SEQ ID NO: 28178 - RNA, 22 nt, Artificial Sequence
  GATA2 Guide RNA
ccucgcgcagggcgguugccgu

SEQ ID NO: 28179 - RNA, 22 nt, Artificial Sequence
  GATA2 Guide RNA
ccuuccucgcgcagggcgguug

SEQ ID NO: 28180 - RNA, 22 nt, Artificial Sequence
  GATA2 Guide RNA
cgcagggcgguugccgucugca

SEQ ID NO: 28181 - RNA, 22 nt, Artificial Sequence
  GATA2 Guide RNA
cgcccugcgcgaggaaggggga

SEQ ID NO: 28182 - RNA, 22 nt, Artificial Sequence
  GATA2 Guide RNA
cgcgcagggcgguugccgucug

SEQ ID NO: 28183 - RNA, 22 nt, Artificial Sequence
  GATA2 Guide RNA
cggcaaccgcccugcgcgagga

SEQ ID NO: 28184 - RNA, 22 nt, Artificial Sequence
  GATA2 Guide RNA
cgguugccgucugcacccagac

SEQ ID NO: 28185 - RNA, 22 nt, Artificial Sequence
  GATA2 Guide RNA
cucccccuuccucgcgcagggc

SEQ ID NO: 28186 - RNA, 22 nt, Artificial Sequence
  GATA2 Guide RNA
cucgcgcagggcgguugccguc

SEQ ID NO: 28187 - RNA, 22 nt, Artificial Sequence
  GATA2 Guide RNA
cugggugcagacggcaaccgcc

SEQ ID NO: 28188 - RNA, 22 nt, Artificial Sequence
  GATA2 Guide RNA
cuuccucgcgcagggcgguugc

SEQ ID NO: 28189 - RNA, 22 nt, Artificial Sequence
  GATA2 Guide RNA
gacggcaaccgcccugcgcgag

SEQ ID NO: 28190 - RNA, 22 nt, Artificial Sequence
  GATA2 Guide RNA
gcaaccgcccugcgcgaggaag

SEQ ID NO: 28191 - RNA, 22 nt, Artificial Sequence
  GATA2 Guide RNA
gcagacggcaaccgcccugcgc

SEQ ID NO: 28192 - RNA, 22 nt, Artificial Sequence
  GATA2 Guide RNA
gcagggcgguugccgucugcac

SEQ ID NO: 28193 - RNA, 22 nt, Artificial Sequence
  GATA2 Guide RNA
gcgcagggcgguugccgucugc

SEQ ID NO: 28194 - RNA, 22 nt, Artificial Sequence
  GATA2 Guide RNA
gcgguugccgucugcacccaga

SEQ ID NO: 28195 - RNA, 22 nt, Artificial Sequence
  GATA2 Guide RNA
ggcaaccgcccugcgcgaggaa

SEQ ID NO: 28196 - RNA, 22 nt, Artificial Sequence
  GATA2 Guide RNA
ggcgguugccgucugcacccag

SEQ ID NO: 28197 - RNA, 22 nt, Artificial Sequence
  GATA2 Guide RNA
gggcgguugccgucugcaccca

SEQ ID NO: 28198 - RNA, 22 nt, Artificial Sequence
  GATA2 Guide RNA
gggucugggugcagacggcaac

SEQ ID NO: 28199 - RNA, 22 nt, Artificial Sequence
  GATA2 Guide RNA
gggugcagacggcaaccgcccu

SEQ ID NO: 28200 - RNA, 22 nt, Artificial Sequence
  GATA2 Guide RNA
ggucugggugcagacggcaacc

SEQ ID NO: 28201 - RNA, 22 nt, Artificial Sequence
  GATA2 Guide RNA
ggugcagacggcaaccgcccug

SEQ ID NO: 28202 - RNA, 22 nt, Artificial Sequence
  GATA2 Guide RNA
gucugggugcagacggcaaccg

SEQ ID NO: 28203 - RNA, 22 nt, Artificial Sequence
  GATA2 Guide RNA
gugcagacggcaaccgcccugc

SEQ ID NO: 28204 - RNA, 22 nt, Artificial Sequence
  GATA2 Guide RNA
ucacucccccuuccucgcgcag

SEQ ID NO: 28205 - RNA, 22 nt, Artificial Sequence
  GATA2 Guide RNA
ucccccuuccucgcgcagggcg

SEQ ID NO: 28206 - RNA, 22 nt, Artificial Sequence
  GATA2 Guide RNA
uccucgcgcagggcgguugccg

SEQ ID NO: 28207 - RNA, 22 nt, Artificial Sequence
  GATA2 Guide RNA
ucgcgcagggcgguugccgucu

SEQ ID NO: 28208 - RNA, 22 nt, Artificial Sequence
  GATA2 Guide RNA
ucugggugcagacggcaaccgc

SEQ ID NO: 28209 - RNA, 22 nt, Artificial Sequence
  GATA2 Guide RNA
ugcagacggcaaccgcccugcg

SEQ ID NO: 28210 - RNA, 22 nt, Artificial Sequence
  GATA2 Guide RNA
ugggugcagacggcaaccgccc

SEQ ID NO: 28211 - RNA, 22 nt, Artificial Sequence
  GATA2 Guide RNA
uuccucgcgcagggcgguugcc

SEQ ID NO: 28212 - RNA, 20 nt, Artificial Sequence
  GATA2 Guide RNA
aagguggaaguagaagaaac

SEQ ID NO: 28213 - RNA, 20 nt, Artificial Sequence
  GATA2 Guide RNA
aaguagaagaaacucaccga

SEQ ID NO: 28214 - RNA, 20 nt, Artificial Sequence
  GATA2 Guide RNA
agaagaaacucaccgagcga

SEQ ID NO: 28215 - RNA, 20 nt, Artificial Sequence
  GATA2 Guide RNA
agggaagguggaaguagaag

SEQ ID NO: 28216 - RNA, 20 nt, Artificial Sequence
  GATA2 Guide RNA
agguggaaguagaagaaacu

SEQ ID NO: 28217 - RNA, 20 nt, Artificial Sequence
  GATA2 Guide RNA
aguagaagaaacucaccgag

SEQ ID NO: 28218 - RNA, 20 nt, Artificial Sequence
  GATA2 Guide RNA
aguuucuucuacuuccaccu

SEQ ID NO: 28219 - RNA, 20 nt, Artificial Sequence
  GATA2 Guide RNA
cagggaagguggaaguagaa

SEQ ID NO: 28220 - RNA, 20 nt, Artificial Sequence
  GATA2 Guide RNA
ccagggaagguggaaguaga

SEQ ID NO: 28221 - RNA, 20 nt, Artificial Sequence
  GATA2 Guide RNA
cccagggaagguggaaguag

SEQ ID NO: 28222 - RNA, 20 nt, Artificial Sequence
  GATA2 Guide RNA
ccucgcucggugaguuucuu

SEQ ID NO: 28223 - RNA, 20 nt, Artificial Sequence
  GATA2 Guide RNA
cgccucgcucggugaguuuc

SEQ ID NO: 28224 - RNA, 20 nt, Artificial Sequence
  GATA2 Guide RNA
cgcucggugaguuucuucua

SEQ ID NO: 28225 - RNA, 20 nt, Artificial Sequence
  GATA2 Guide RNA
cgggcccagggaagguggaa

SEQ ID NO: 28226 - RNA, 20 nt, Artificial Sequence
  GATA2 Guide RNA
cggugaguuucuucuacuuc

SEQ ID NO: 28227 - RNA, 20 nt, Artificial Sequence
  GATA2 Guide RNA
cuacuuccaccuucccuggg

SEQ ID NO: 28228 - RNA, 20 nt, Artificial Sequence
  GATA2 Guide RNA
cucgcucggugaguuucuuc

SEQ ID NO: 28229 - RNA, 20 nt, Artificial Sequence
  GATA2 Guide RNA
cucggugaguuucuucuacu

SEQ ID NO: 28230 - RNA, 20 nt, Artificial Sequence
  GATA2 Guide RNA
cuucuacuuccaccuucccu

SEQ ID NO: 28231 - RNA, 20 nt, Artificial Sequence
  GATA2 Guide RNA
gaagguggaaguagaagaaa

SEQ ID NO: 28232 - RNA, 20 nt, Artificial Sequence
  GATA2 Guide RNA
gaaguagaagaaacucaccg

SEQ ID NO: 28233 - RNA, 20 nt, Artificial Sequence
  GATA2 Guide RNA
gaguuucuucuacuuccacc

SEQ ID NO: 28234 - RNA, 20 nt, Artificial Sequence
  GATA2 Guide RNA
gcccagggaagguggaagua

SEQ ID NO: 28235 - RNA, 20 nt, Artificial Sequence
  GATA2 Guide RNA
gccucgcucggugaguuucu

SEQ ID NO: 28236 - RNA, 20 nt, Artificial Sequence
  GATA2 Guide RNA
gcucggugaguuucuucuac

SEQ ID NO: 28237 - RNA, 20 nt, Artificial Sequence
  GATA2 Guide RNA
ggaagguggaaguagaagaa

SEQ ID NO: 28238 - RNA, 20 nt, Artificial Sequence
  GATA2 Guide RNA
ggaaguagaagaaacucacc

SEQ ID NO: 28239 - RNA, 20 nt, Artificial Sequence
  GATA2 Guide RNA
ggcccagggaagguggaagu

SEQ ID NO: 28240 - RNA, 20 nt, Artificial Sequence
  GATA2 Guide RNA
gggaagguggaaguagaaga

SEQ ID NO: 28241 - RNA, 20 nt, Artificial Sequence
  GATA2 Guide RNA
gggcccagggaagguggaag

SEQ ID NO: 28242 - RNA, 20 nt, Artificial Sequence
  GATA2 Guide RNA
ggugaguuucuucuacuucc

SEQ ID NO: 28243 - RNA, 20 nt, Artificial Sequence
  GATA2 Guide RNA
gguggaaguagaagaaacuc

SEQ ID NO: 28244 - RNA, 20 nt, Artificial Sequence
  GATA2 Guide RNA
guagaagaaacucaccgagc

SEQ ID NO: 28245 - RNA, 20 nt, Artificial Sequence
  GATA2 Guide RNA
gugaguuucuucuacuucca

SEQ ID NO: 28246 - RNA, 20 nt, Artificial Sequence
  GATA2 Guide RNA
guggaaguagaagaaacuca

SEQ ID NO: 28247 - RNA, 20 nt, Artificial Sequence
  GATA2 Guide RNA
guuucuucuacuuccaccuu

SEQ ID NO: 28248 - RNA, 20 nt, Artificial Sequence
  GATA2 Guide RNA
uagaagaaacucaccgagcg

SEQ ID NO: 28249 - RNA, 20 nt, Artificial Sequence
  GATA2 Guide RNA
ucgcucggugaguuucuucu

SEQ ID NO: 28250 - RNA, 20 nt, Artificial Sequence
  GATA2 Guide RNA
ucggugaguuucuucuacuu

SEQ ID NO: 28251 - RNA, 20 nt, Artificial Sequence
  GATA2 Guide RNA
ucuacuuccaccuucccugg

SEQ ID NO: 28252 - RNA, 20 nt, Artificial Sequence
  GATA2 Guide RNA
ucuucuacuuccaccuuccc

SEQ ID NO: 28253 - RNA, 20 nt, Artificial Sequence
  GATA2 Guide RNA
ugaguuucuucuacuuccac

SEQ ID NO: 28254 - RNA, 20 nt, Artificial Sequence
  GATA2 Guide RNA
uggaaguagaagaaacucac

SEQ ID NO: 28255 - RNA, 20 nt, Artificial Sequence
  GATA2 Guide RNA
uucuacuuccaccuucccug

SEQ ID NO: 28256 - RNA, 20 nt, Artificial Sequence
  GATA2 Guide RNA
uucuucuacuuccaccuucc

SEQ ID NO: 28257 - RNA, 20 nt, Artificial Sequence
  GATA2 Guide RNA
uuucuucuacuuccaccuuc

SEQ ID NO: 28258 - RNA, 21 nt, Artificial Sequence
  GATA2 Guide RNA
aagguggaaguagaagaaacu

SEQ ID NO: 28259 - RNA, 21 nt, Artificial Sequence
  GATA2 Guide RNA
aaguagaagaaacucaccgag

SEQ ID NO: 28260 - RNA, 21 nt, Artificial Sequence
  GATA2 Guide RNA
agaagaaacucaccgagcgag

SEQ ID NO: 28261 - RNA, 21 nt, Artificial Sequence
  GATA2 Guide RNA
agggaagguggaaguagaaga

SEQ ID NO: 28262 - RNA, 21 nt, Artificial Sequence
  GATA2 Guide RNA
agguggaaguagaagaaacuc

SEQ ID NO: 28263 - RNA, 21 nt, Artificial Sequence
  GATA2 Guide RNA
aguagaagaaacucaccgagc

SEQ ID NO: 28264 - RNA, 21 nt, Artificial Sequence
  GATA2 Guide RNA
aguuucuucuacuuccaccuu

SEQ ID NO: 28265 - RNA, 21 nt, Artificial Sequence
  GATA2 Guide RNA
cagggaagguggaaguagaag

SEQ ID NO: 28266 - RNA, 21 nt, Artificial Sequence
  GATA2 Guide RNA
ccagggaagguggaaguagaa

SEQ ID NO: 28267 - RNA, 21 nt, Artificial Sequence
  GATA2 Guide RNA
cccagggaagguggaaguaga

SEQ ID NO: 28268 - RNA, 21 nt, Artificial Sequence
  GATA2 Guide RNA
ccgggcccagggaagguggaa

SEQ ID NO: 28269 - RNA, 21 nt, Artificial Sequence
  GATA2 Guide RNA
ccucgcucggugaguuucuuc

SEQ ID NO: 28270 - RNA, 21 nt, Artificial Sequence
  GATA2 Guide RNA
cgccucgcucggugaguuucu

SEQ ID NO: 28271 - RNA, 21 nt, Artificial Sequence
  GATA2 Guide RNA
cgcucggugaguuucuucuac

SEQ ID NO: 28272 - RNA, 21 nt, Artificial Sequence
  GATA2 Guide RNA
cgggcccagggaagguggaag

SEQ ID NO: 28273 - RNA, 21 nt, Artificial Sequence
  GATA2 Guide RNA
cggugaguuucuucuacuucc

SEQ ID NO: 28274 - RNA, 21 nt, Artificial Sequence
  GATA2 Guide RNA
cuacuuccaccuucccugggc

SEQ ID NO: 28275 - RNA, 21 nt, Artificial Sequence
  GATA2 Guide RNA
cucgcucggugaguuucuucu

SEQ ID NO: 28276 - RNA, 21 nt, Artificial Sequence
  GATA2 Guide RNA
cucggugaguuucuucuacuu

SEQ ID NO: 28277 - RNA, 21 nt, Artificial Sequence
  GATA2 Guide RNA
cuucuacuuccaccuucccug

SEQ ID NO: 28278 - RNA, 21 nt, Artificial Sequence
  GATA2 Guide RNA
gaagguggaaguagaagaaac

SEQ ID NO: 28279 - RNA, 21 nt, Artificial Sequence
  GATA2 Guide RNA
gaaguagaagaaacucaccga

SEQ ID NO: 28280 - RNA, 21 nt, Artificial Sequence
  GATA2 Guide RNA
gaguuucuucuacuuccaccu

SEQ ID NO: 28281 - RNA, 21 nt, Artificial Sequence
  GATA2 Guide RNA
gcccagggaagguggaaguag

SEQ ID NO: 28282 - RNA, 21 nt, Artificial Sequence
  GATA2 Guide RNA
gccucgcucggugaguuucuu

SEQ ID NO: 28283 - RNA, 21 nt, Artificial Sequence
  GATA2 Guide RNA
gcgccucgcucggugaguuuc

SEQ ID NO: 28284 - RNA, 21 nt, Artificial Sequence
  GATA2 Guide RNA
gcucggugaguuucuucuacu

SEQ ID NO: 28285 - RNA, 21 nt, Artificial Sequence
  GATA2 Guide RNA
ggaagguggaaguagaagaaa

SEQ ID NO: 28286 - RNA, 21 nt, Artificial Sequence
  GATA2 Guide RNA
ggaaguagaagaaacucaccg

SEQ ID NO: 28287 - RNA, 21 nt, Artificial Sequence
  GATA2 Guide RNA
ggcccagggaagguggaagua

SEQ ID NO: 28288 - RNA, 21 nt, Artificial Sequence
  GATA2 Guide RNA
gggaagguggaaguagaagaa

SEQ ID NO: 28289 - RNA, 21 nt, Artificial Sequence
  GATA2 Guide RNA
gggcccagggaagguggaagu

SEQ ID NO: 28290 - RNA, 21 nt, Artificial Sequence
  GATA2 Guide RNA
ggugaguuucuucuacuucca

SEQ ID NO: 28291 - RNA, 21 nt, Artificial Sequence
  GATA2 Guide RNA
gguggaaguagaagaaacuca

SEQ ID NO: 28292 - RNA, 21 nt, Artificial Sequence
  GATA2 Guide RNA
guagaagaaacucaccgagcg

SEQ ID NO: 28293 - RNA, 21 nt, Artificial Sequence
  GATA2 Guide RNA
gugaguuucuucuacuuccac

SEQ ID NO: 28294 - RNA, 21 nt, Artificial Sequence
  GATA2 Guide RNA
guggaaguagaagaaacucac

SEQ ID NO: 28295 - RNA, 21 nt, Artificial Sequence
  GATA2 Guide RNA
guuucuucuacuuccaccuuc

SEQ ID NO: 28296 - RNA, 21 nt, Artificial Sequence
  GATA2 Guide RNA
uagaagaaacucaccgagcga

SEQ ID NO: 28297 - RNA, 21 nt, Artificial Sequence
  GATA2 Guide RNA
ucgcucggugaguuucuucua

SEQ ID NO: 28298 - RNA, 21 nt, Artificial Sequence
  GATA2 Guide RNA
ucggugaguuucuucuacuuc

SEQ ID NO: 28299 - RNA, 21 nt, Artificial Sequence
  GATA2 Guide RNA
ucuacuuccaccuucccuggg

SEQ ID NO: 28300 - RNA, 21 nt, Artificial Sequence
  GATA2 Guide RNA
ucuucuacuuccaccuucccu

SEQ ID NO: 28301 - RNA, 21 nt, Artificial Sequence
  GATA2 Guide RNA
ugaguuucuucuacuuccacc

SEQ ID NO: 28302 - RNA, 21 nt, Artificial Sequence
  GATA2 Guide RNA
uggaaguagaagaaacucacc

SEQ ID NO: 28303 - RNA, 21 nt, Artificial Sequence
  GATA2 Guide RNA
uucuacuuccaccuucccugg

SEQ ID NO: 28304 - RNA, 21 nt, Artificial Sequence
  GATA2 Guide RNA
uucuucuacuuccaccuuccc

SEQ ID NO: 28305 - RNA, 21 nt, Artificial Sequence
  GATA2 Guide RNA
uuucuucuacuuccaccuucc

SEQ ID NO: 28306 - RNA, 22 nt, Artificial Sequence
  GATA2 Guide RNA
aagguggaaguagaagaaacuc

SEQ ID NO: 28307 - RNA, 22 nt, Artificial Sequence
  GATA2 Guide RNA
aaguagaagaaacucaccgagc

SEQ ID NO: 28308 - RNA, 22 nt, Artificial Sequence
  GATA2 Guide RNA
agaagaaacucaccgagcgagg

SEQ ID NO: 28309 - RNA, 22 nt, Artificial Sequence
  GATA2 Guide RNA
agggaagguggaaguagaagaa

SEQ ID NO: 28310 - RNA, 22 nt, Artificial Sequence
  GATA2 Guide RNA
agguggaaguagaagaaacuca

SEQ ID NO: 28311 - RNA, 22 nt, Artificial Sequence
  GATA2 Guide RNA
aguagaagaaacucaccgagcg

SEQ ID NO: 28312 - RNA, 22 nt, Artificial Sequence
  GATA2 Guide RNA
aguuucuucuacuuccaccuuc

SEQ ID NO: 28313 - RNA, 22 nt, Artificial Sequence
  GATA2 Guide RNA
cagggaagguggaaguagaaga

SEQ ID NO: 28314 - RNA, 22 nt, Artificial Sequence
  GATA2 Guide RNA
ccagggaagguggaaguagaag

SEQ ID NO: 28315 - RNA, 22 nt, Artificial Sequence
  GATA2 Guide RNA
cccagggaagguggaaguagaa

SEQ ID NO: 28316 - RNA, 22 nt, Artificial Sequence
  GATA2 Guide RNA
ccgggcccagggaagguggaag

SEQ ID NO: 28317 - RNA, 22 nt, Artificial Sequence
  GATA2 Guide RNA
ccucgcucggugaguuucuucu

SEQ ID NO: 28318 - RNA, 22 nt, Artificial Sequence
  GATA2 Guide RNA
cgccucgcucggugaguuucuu

SEQ ID NO: 28319 - RNA, 22 nt, Artificial Sequence
  GATA2 Guide RNA
cgcgccucgcucggugaguuuc

SEQ ID NO: 28320 - RNA, 22 nt, Artificial Sequence
  GATA2 Guide RNA
cgcucggugaguuucuucuacu

SEQ ID NO: 28321 - RNA, 22 nt, Artificial Sequence
  GATA2 Guide RNA
cgggcccagggaagguggaagu

SEQ ID NO: 28322 - RNA, 22 nt, Artificial Sequence
  GATA2 Guide RNA
cggugaguuucuucuacuucca

SEQ ID NO: 28323 - RNA, 22 nt, Artificial Sequence
  GATA2 Guide RNA
cuacuuccaccuucccugggcc

SEQ ID NO: 28324 - RNA, 22 nt, Artificial Sequence
  GATA2 Guide RNA
cucgcucggugaguuucuucua

SEQ ID NO: 28325 - RNA, 22 nt, Artificial Sequence
  GATA2 Guide RNA
cucggugaguuucuucuacuuc

SEQ ID NO: 28326 - RNA, 22 nt, Artificial Sequence
  GATA2 Guide RNA
cuucuacuuccaccuucccugg

SEQ ID NO: 28327 - RNA, 22 nt, Artificial Sequence
  GATA2 Guide RNA
gaagguggaaguagaagaaacu

SEQ ID NO: 28328 - RNA, 22 nt, Artificial Sequence
  GATA2 Guide RNA
gaaguagaagaaacucaccgag

SEQ ID NO: 28329 - RNA, 22 nt, Artificial Sequence
  GATA2 Guide RNA
gaguuucuucuacuuccaccuu

SEQ ID NO: 28330 - RNA, 22 nt, Artificial Sequence
  GATA2 Guide RNA
gcccagggaagguggaaguaga

SEQ ID NO: 28331 - RNA, 22 nt, Artificial Sequence
  GATA2 Guide RNA
gccgggcccagggaagguggaa

SEQ ID NO: 28332 - RNA, 22 nt, Artificial Sequence
  GATA2 Guide RNA
gccucgcucggugaguuucuuc

SEQ ID NO: 28333 - RNA, 22 nt, Artificial Sequence
  GATA2 Guide RNA
gcgccucgcucggugaguuucu

SEQ ID NO: 28334 - RNA, 22 nt, Artificial Sequence
  GATA2 Guide RNA
gcucggugaguuucuucuacuu

SEQ ID NO: 28335 - RNA, 22 nt, Artificial Sequence
  GATA2 Guide RNA
ggaagguggaaguagaagaaac

SEQ ID NO: 28336 - RNA, 22 nt, Artificial Sequence
  GATA2 Guide RNA
ggaaguagaagaaacucaccga

SEQ ID NO: 28337 - RNA, 22 nt, Artificial Sequence
  GATA2 Guide RNA
ggcccagggaagguggaaguag

SEQ ID NO: 28338 - RNA, 22 nt, Artificial Sequence
  GATA2 Guide RNA
gggaagguggaaguagaagaaa

SEQ ID NO: 28339 - RNA, 22 nt, Artificial Sequence
  GATA2 Guide RNA
gggcccagggaagguggaagua

SEQ ID NO: 28340 - RNA, 22 nt, Artificial Sequence
  GATA2 Guide RNA
ggugaguuucuucuacuuccac

SEQ ID NO: 28341 - RNA, 22 nt, Artificial Sequence
  GATA2 Guide RNA
gguggaaguagaagaaacucac

SEQ ID NO: 28342 - RNA, 22 nt, Artificial Sequence
  GATA2 Guide RNA
guagaagaaacucaccgagcga

SEQ ID NO: 28343 - RNA, 22 nt, Artificial Sequence
  GATA2 Guide RNA
gugaguuucuucuacuuccacc

SEQ ID NO: 28344 - RNA, 22 nt, Artificial Sequence
  GATA2 Guide RNA
guggaaguagaagaaacucacc

SEQ ID NO: 28345 - RNA, 22 nt, Artificial Sequence
  GATA2 Guide RNA
guuucuucuacuuccaccuucc

SEQ ID NO: 28346 - RNA, 22 nt, Artificial Sequence
  GATA2 Guide RNA
uagaagaaacucaccgagcgag

SEQ ID NO: 28347 - RNA, 22 nt, Artificial Sequence
  GATA2 Guide RNA
ucgcucggugaguuucuucuac

SEQ ID NO: 28348 - RNA, 22 nt, Artificial Sequence
  GATA2 Guide RNA
ucggugaguuucuucuacuucc

SEQ ID NO: 28349 - RNA, 22 nt, Artificial Sequence
  GATA2 Guide RNA
ucuacuuccaccuucccugggc

SEQ ID NO: 28350 - RNA, 22 nt, Artificial Sequence
  GATA2 Guide RNA
ucuucuacuuccaccuucccug

SEQ ID NO: 28351 - RNA, 22 nt, Artificial Sequence
  GATA2 Guide RNA
ugaguuucuucuacuuccaccu

SEQ ID NO: 28352 - RNA, 22 nt, Artificial Sequence
  GATA2 Guide RNA
uggaaguagaagaaacucaccg

SEQ ID NO: 28353 - RNA, 22 nt, Artificial Sequence
  GATA2 Guide RNA
uucuacuuccaccuucccuggg

SEQ ID NO: 28354 - RNA, 22 nt, Artificial Sequence
  GATA2 Guide RNA
uucuucuacuuccaccuucccu

SEQ ID NO: 28355 - RNA, 22 nt, Artificial Sequence
  GATA2 Guide RNA
uuucuucuacuuccaccuuccc

SEQ ID NO: 28356 - RNA, 20 nt, Artificial Sequence
  GATA2 Guide RNA
accucgcccggcucccagcu

SEQ ID NO: 28357 - RNA, 20 nt, Artificial Sequence
  GATA2 Guide RNA
agagcugggagccgggcgag

SEQ ID NO: 28358 - RNA, 20 nt, Artificial Sequence
  GATA2 Guide RNA
agcugggagccgggcgaggu

SEQ ID NO: 28359 - RNA, 20 nt, Artificial Sequence
  GATA2 Guide RNA
aguagagcugggagccgggc

SEQ ID NO: 28360 - RNA, 20 nt, Artificial Sequence
  GATA2 Guide RNA
caccucgcccggcucccagc

SEQ ID NO: 28361 - RNA, 20 nt, Artificial Sequence
  GATA2 Guide RNA
cccggcucccagcucuacuc

SEQ ID NO: 28362 - RNA, 20 nt, Artificial Sequence
  GATA2 Guide RNA
ccggcucccagcucuacucc

SEQ ID NO: 28363 - RNA, 20 nt, Artificial Sequence
  GATA2 Guide RNA
ccucgcccggcucccagcuc

SEQ ID NO: 28364 - RNA, 20 nt, Artificial Sequence
  GATA2 Guide RNA
ccuggaguagagcugggagc

SEQ ID NO: 28365 - RNA, 20 nt, Artificial Sequence
  GATA2 Guide RNA
cgcaccucgcccggcuccca

SEQ ID NO: 28366 - RNA, 20 nt, Artificial Sequence
  GATA2 Guide RNA
cgcccggcucccagcucuac

SEQ ID NO: 28367 - RNA, 20 nt, Artificial Sequence
  GATA2 Guide RNA
cggcucccagcucuacucca

SEQ ID NO: 28368 - RNA, 20 nt, Artificial Sequence
  GATA2 Guide RNA
cucgcccggcucccagcucu

SEQ ID NO: 28369 - RNA, 20 nt, Artificial Sequence
  GATA2 Guide RNA
cuggaguagagcugggagcc

SEQ ID NO: 28370 - RNA, 20 nt, Artificial Sequence
  GATA2 Guide RNA
cugggagccgggcgaggugc

SEQ ID NO: 28371 - RNA, 20 nt, Artificial Sequence
  GATA2 Guide RNA
gagcugggagccgggcgagg

SEQ ID NO: 28372 - RNA, 20 nt, Artificial Sequence
  GATA2 Guide RNA
gaguagagcugggagccggg

SEQ ID NO: 28373 - RNA, 20 nt, Artificial Sequence
  GATA2 Guide RNA
gcaccucgcccggcucccag

SEQ ID NO: 28374 - RNA, 20 nt, Artificial Sequence
  GATA2 Guide RNA
gcccggcucccagcucuacu

SEQ ID NO: 28375 - RNA, 20 nt, Artificial Sequence
  GATA2 Guide RNA
gccuggaguagagcugggag

SEQ ID NO: 28376 - RNA, 20 nt, Artificial Sequence
  GATA2 Guide RNA
gcugggagccgggcgaggug

SEQ ID NO: 28377 - RNA, 20 nt, Artificial Sequence
  GATA2 Guide RNA
ggaguagagcugggagccgg

SEQ ID NO: 28378 - RNA, 20 nt, Artificial Sequence
  GATA2 Guide RNA
ggccuggaguagagcuggga

SEQ ID NO: 28379 - RNA, 20 nt, Artificial Sequence
  GATA2 Guide RNA
guagagcugggagccgggcg

SEQ ID NO: 28380 - RNA, 20 nt, Artificial Sequence
  GATA2 Guide RNA
uagagcugggagccgggcga

SEQ ID NO: 28381 - RNA, 20 nt, Artificial Sequence
  GATA2 Guide RNA
ucgcccggcucccagcucua

SEQ ID NO: 28382 - RNA, 20 nt, Artificial Sequence
  GATA2 Guide RNA
uggaguagagcugggagccg

SEQ ID NO: 28383 - RNA, 20 nt, Artificial Sequence
  GATA2 Guide RNA
ugggagccgggcgaggugcg

SEQ ID NO: 28384 - RNA, 21 nt, Artificial Sequence
  GATA2 Guide RNA
accucgcccggcucccagcuc

SEQ ID NO: 28385 - RNA, 21 nt, Artificial Sequence
  GATA2 Guide RNA
agagcugggagccgggcgagg

SEQ ID NO: 28386 - RNA, 21 nt, Artificial Sequence
  GATA2 Guide RNA
agcugggagccgggcgaggug

SEQ ID NO: 28387 - RNA, 21 nt, Artificial Sequence
  GATA2 Guide RNA
aguagagcugggagccgggcg

SEQ ID NO: 28388 - RNA, 21 nt, Artificial Sequence
  GATA2 Guide RNA
caccucgcccggcucccagcu

SEQ ID NO: 28389 - RNA, 21 nt, Artificial Sequence
  GATA2 Guide RNA
cccggcucccagcucuacucc

SEQ ID NO: 28390 - RNA, 21 nt, Artificial Sequence
  GATA2 Guide RNA
ccggcucccagcucuacucca

SEQ ID NO: 28391 - RNA, 21 nt, Artificial Sequence
  GATA2 Guide RNA
ccucgcccggcucccagcucu

SEQ ID NO: 28392 - RNA, 21 nt, Artificial Sequence
  GATA2 Guide RNA
ccuggaguagagcugggagcc

SEQ ID NO: 28393 - RNA, 21 nt, Artificial Sequence
  GATA2 Guide RNA
cgcccggcucccagcucuacu

SEQ ID NO: 28394 - RNA, 21 nt, Artificial Sequence
  GATA2 Guide RNA
cggcucccagcucuacuccag

SEQ ID NO: 28395 - RNA, 21 nt, Artificial Sequence
  GATA2 Guide RNA
cucgcccggcucccagcucua

SEQ ID NO: 28396 - RNA, 21 nt, Artificial Sequence
  GATA2 Guide RNA
cuggaguagagcugggagccg

SEQ ID NO: 28397 - RNA, 21 nt, Artificial Sequence
  GATA2 Guide RNA
gagcugggagccgggcgaggu

SEQ ID NO: 28398 - RNA, 21 nt, Artificial Sequence
  GATA2 Guide RNA
gaguagagcugggagccgggc

SEQ ID NO: 28399 - RNA, 21 nt, Artificial Sequence
  GATA2 Guide RNA
gcccggcucccagcucuacuc

SEQ ID NO: 28400 - RNA, 21 nt, Artificial Sequence
  GATA2 Guide RNA
gccuggaguagagcugggagc

SEQ ID NO: 28401 - RNA, 21 nt, Artificial Sequence
  GATA2 Guide RNA
ggaguagagcugggagccggg

SEQ ID NO: 28402 - RNA, 21 nt, Artificial Sequence
  GATA2 Guide RNA
ggccuggaguagagcugggag

SEQ ID NO: 28403 - RNA, 21 nt, Artificial Sequence
  GATA2 Guide RNA
gggccuggaguagagcuggga

SEQ ID NO: 28404 - RNA, 21 nt, Artificial Sequence
  GATA2 Guide RNA
guagagcugggagccgggcga

SEQ ID NO: 28405 - RNA, 21 nt, Artificial Sequence
  GATA2 Guide RNA
uagagcugggagccgggcgag

SEQ ID NO: 28406 - RNA, 21 nt, Artificial Sequence
  GATA2 Guide RNA
ucgcccggcucccagcucuac

SEQ ID NO: 28407 - RNA, 21 nt, Artificial Sequence
  GATA2 Guide RNA
uggaguagagcugggagccgg

SEQ ID NO: 28408 - RNA, 22 nt, Artificial Sequence
  GATA2 Guide RNA
accucgcccggcucccagcucu

SEQ ID NO: 28409 - RNA, 22 nt, Artificial Sequence
  GATA2 Guide RNA
agagcugggagccgggcgaggu

SEQ ID NO: 28410 - RNA, 22 nt, Artificial Sequence
  GATA2 Guide RNA
agcugggagccgggcgaggugc

SEQ ID NO: 28411 - RNA, 22 nt, Artificial Sequence
  GATA2 Guide RNA
aguagagcugggagccgggcga

SEQ ID NO: 28412 - RNA, 22 nt, Artificial Sequence
  GATA2 Guide RNA
caccucgcccggcucccagcuc

SEQ ID NO: 28413 - RNA, 22 nt, Artificial Sequence
  GATA2 Guide RNA
cccggcucccagcucuacucca

SEQ ID NO: 28414 - RNA, 22 nt, Artificial Sequence
  GATA2 Guide RNA
ccggcucccagcucuacuccag

SEQ ID NO: 28415 - RNA, 22 nt, Artificial Sequence
  GATA2 Guide RNA
ccucgcccggcucccagcucua

SEQ ID NO: 28416 - RNA, 22 nt, Artificial Sequence
  GATA2 Guide RNA
ccuggaguagagcugggagccg

SEQ ID NO: 28417 - RNA, 22 nt, Artificial Sequence
  GATA2 Guide RNA
cgcccggcucccagcucuacuc

SEQ ID NO: 28418 - RNA, 22 nt, Artificial Sequence
  GATA2 Guide RNA
cggcucccagcucuacuccagg

SEQ ID NO: 28419 - RNA, 22 nt, Artificial Sequence
  GATA2 Guide RNA
cucgcccggcucccagcucuac

SEQ ID NO: 28420 - RNA, 22 nt, Artificial Sequence
  GATA2 Guide RNA
cuggaguagagcugggagccgg

SEQ ID NO: 28421 - RNA, 22 nt, Artificial Sequence
  GATA2 Guide RNA
gagcugggagccgggcgaggug

SEQ ID NO: 28422 - RNA, 22 nt, Artificial Sequence
  GATA2 Guide RNA
gaguagagcugggagccgggcg

SEQ ID NO: 28423 - RNA, 22 nt, Artificial Sequence
  GATA2 Guide RNA
gcaccucgcccggcucccagcu

SEQ ID NO: 28424 - RNA, 22 nt, Artificial Sequence
  GATA2 Guide RNA
gcccggcucccagcucuacucc

SEQ ID NO: 28425 - RNA, 22 nt, Artificial Sequence
  GATA2 Guide RNA
gccuggaguagagcugggagcc

SEQ ID NO: 28426 - RNA, 22 nt, Artificial Sequence
  GATA2 Guide RNA
ggaguagagcugggagccgggc

SEQ ID NO: 28427 - RNA, 22 nt, Artificial Sequence
  GATA2 Guide RNA
ggccuggaguagagcugggagc

SEQ ID NO: 28428 - RNA, 22 nt, Artificial Sequence
  GATA2 Guide RNA
gggccuggaguagagcugggag

SEQ ID NO: 28429 - RNA, 22 nt, Artificial Sequence
  GATA2 Guide RNA
ggggccuggaguagagcuggga

SEQ ID NO: 28430 - RNA, 22 nt, Artificial Sequence
  GATA2 Guide RNA
guagagcugggagccgggcgag

SEQ ID NO: 28431 - RNA, 22 nt, Artificial Sequence
  GATA2 Guide RNA
uagagcugggagccgggcgagg

SEQ ID NO: 28432 - RNA, 22 nt, Artificial Sequence
  GATA2 Guide RNA
ucgcccggcucccagcucuacu

SEQ ID NO: 28433 - RNA, 22 nt, Artificial Sequence
  GATA2 Guide RNA
uggaguagagcugggagccggg

SEQ ID NO: 28434 - RNA, 20 nt, Artificial Sequence
  GATA2 Guide RNA
accagcagagccugggcugc

SEQ ID NO: 28435 - RNA, 20 nt, Artificial Sequence
  GATA2 Guide RNA
accaugcggccgcucggcgu

SEQ ID NO: 28436 - RNA, 20 nt, Artificial Sequence
  GATA2 Guide RNA
agagccugggcugcacgccg

SEQ ID NO: 28437 - RNA, 20 nt, Artificial Sequence
  GATA2 Guide RNA
agcagagccugggcugcacg

SEQ ID NO: 28438 - RNA, 20 nt, Artificial Sequence
  GATA2 Guide RNA
agccugggcugcacgccgag

SEQ ID NO: 28439 - RNA, 20 nt, Artificial Sequence
  GATA2 Guide RNA
augcggccgcucggcgugca

SEQ ID NO: 28440 - RNA, 20 nt, Artificial Sequence
  GATA2 Guide RNA
caccagcagagccugggcug

SEQ ID NO: 28441 - RNA, 20 nt, Artificial Sequence
  GATA2 Guide RNA
caccaugcggccgcucggcg

SEQ ID NO: 28442 - RNA, 20 nt, Artificial Sequence
  GATA2 Guide RNA
cagagccugggcugcacgcc

SEQ ID NO: 28443 - RNA, 20 nt, Artificial Sequence
  GATA2 Guide RNA
cagcagagccugggcugcac

SEQ ID NO: 28444 - RNA, 20 nt, Artificial Sequence
  GATA2 Guide RNA
cagcccaggcucugcuggug

SEQ ID NO: 28445 - RNA, 20 nt, Artificial Sequence
  GATA2 Guide RNA
caugcggccgcucggcgugc

SEQ ID NO: 28446 - RNA, 20 nt, Artificial Sequence
  GATA2 Guide RNA
ccagcagagccugggcugca

SEQ ID NO: 28447 - RNA, 20 nt, Artificial Sequence
  GATA2 Guide RNA
ccaugcggccgcucggcgug

SEQ ID NO: 28448 - RNA, 20 nt, Artificial Sequence
  GATA2 Guide RNA
ccgcucggcgugcagcccag

SEQ ID NO: 28449 - RNA, 20 nt, Artificial Sequence
  GATA2 Guide RNA
ccugggcugcacgccgagcg

SEQ ID NO: 28450 - RNA, 20 nt, Artificial Sequence
  GATA2 Guide RNA
cgcucaccagcagagccugg

SEQ ID NO: 28451 - RNA, 20 nt, Artificial Sequence
  GATA2 Guide RNA
cgcucggcgugcagcccagg

SEQ ID NO: 28452 - RNA, 20 nt, Artificial Sequence
  GATA2 Guide RNA
cggcgugcagcccaggcucu

SEQ ID NO: 28453 - RNA, 20 nt, Artificial Sequence
  GATA2 Guide RNA
cgugcagcccaggcucugcu

SEQ ID NO: 28454 - RNA, 20 nt, Artificial Sequence
  GATA2 Guide RNA
cucaccagcagagccugggc

SEQ ID NO: 28455 - RNA, 20 nt, Artificial Sequence
  GATA2 Guide RNA
cucggcgugcagcccaggcu

SEQ ID NO: 28456 - RNA, 20 nt, Artificial Sequence
  GATA2 Guide RNA
cugcacgccgagcggccgca

SEQ ID NO: 28457 - RNA, 20 nt, Artificial Sequence
  GATA2 Guide RNA
cugggcugcacgccgagcgg

SEQ ID NO: 28458 - RNA, 20 nt, Artificial Sequence
  GATA2 Guide RNA
gagccugggcugcacgccga

SEQ ID NO: 28459 - RNA, 20 nt, Artificial Sequence
  GATA2 Guide RNA
gcagagccugggcugcacgc

SEQ ID NO: 28460 - RNA, 20 nt, Artificial Sequence
  GATA2 Guide RNA
gcagcccaggcucugcuggu

SEQ ID NO: 28461 - RNA, 20 nt, Artificial Sequence
  GATA2 Guide RNA
gccgcucggcgugcagccca

SEQ ID NO: 28462 - RNA, 20 nt, Artificial Sequence
  GATA2 Guide RNA
gccugggcugcacgccgagc

SEQ ID NO: 28463 - RNA, 20 nt, Artificial Sequence
  GATA2 Guide RNA
gcgugcagcccaggcucugc

SEQ ID NO: 28464 - RNA, 20 nt, Artificial Sequence
  GATA2 Guide RNA
gcucaccagcagagccuggg

SEQ ID NO: 28465 - RNA, 20 nt, Artificial Sequence
  GATA2 Guide RNA
gcucggcgugcagcccaggc

SEQ ID NO: 28466 - RNA, 20 nt, Artificial Sequence
  GATA2 Guide RNA
ggcgugcagcccaggcucug

SEQ ID NO: 28467 - RNA, 20 nt, Artificial Sequence
  GATA2 Guide RNA
gugcagcccaggcucugcug

SEQ ID NO: 28468 - RNA, 20 nt, Artificial Sequence
  GATA2 Guide RNA
ucaccagcagagccugggcu

SEQ ID NO: 28469 - RNA, 20 nt, Artificial Sequence
  GATA2 Guide RNA
ucggcgugcagcccaggcuc

SEQ ID NO: 28470 - RNA, 20 nt, Artificial Sequence
  GATA2 Guide RNA
ugcacgccgagcggccgcau

SEQ ID NO: 28471 - RNA, 20 nt, Artificial Sequence
  GATA2 Guide RNA
ugcagcccaggcucugcugg

SEQ ID NO: 28472 - RNA, 20 nt, Artificial Sequence
  GATA2 Guide RNA
ugcggccgcucggcgugcag

SEQ ID NO: 28473 - RNA, 20 nt, Artificial Sequence
  GATA2 Guide RNA
ugggcugcacgccgagcggc

SEQ ID NO: 28474 - RNA, 21 nt, Artificial Sequence
  GATA2 Guide RNA
acaccaugcggccgcucggcg

SEQ ID NO: 28475 - RNA, 21 nt, Artificial Sequence
  GATA2 Guide RNA
accagcagagccugggcugca

SEQ ID NO: 28476 - RNA, 21 nt, Artificial Sequence
  GATA2 Guide RNA
accaugcggccgcucggcgug

SEQ ID NO: 28477 - RNA, 21 nt, Artificial Sequence
  GATA2 Guide RNA
agagccugggcugcacgccga

SEQ ID NO: 28478 - RNA, 21 nt, Artificial Sequence
  GATA2 Guide RNA
agcagagccugggcugcacgc

SEQ ID NO: 28479 - RNA, 21 nt, Artificial Sequence
  GATA2 Guide RNA
agccugggcugcacgccgagc

SEQ ID NO: 28480 - RNA, 21 nt, Artificial Sequence
  GATA2 Guide RNA
augcggccgcucggcgugcag

SEQ ID NO: 28481 - RNA, 21 nt, Artificial Sequence
  GATA2 Guide RNA
caccagcagagccugggcugc

SEQ ID NO: 28482 - RNA, 21 nt, Artificial Sequence
  GATA2 Guide RNA
caccaugcggccgcucggcgu

SEQ ID NO: 28483 - RNA, 21 nt, Artificial Sequence
  GATA2 Guide RNA
cagagccugggcugcacgccg

SEQ ID NO: 28484 - RNA, 21 nt, Artificial Sequence
  GATA2 Guide RNA
cagcagagccugggcugcacg

SEQ ID NO: 28485 - RNA, 21 nt, Artificial Sequence
  GATA2 Guide RNA
cagcccaggcucugcugguga

SEQ ID NO: 28486 - RNA, 21 nt, Artificial Sequence
  GATA2 Guide RNA
caugcggccgcucggcgugca

SEQ ID NO: 28487 - RNA, 21 nt, Artificial Sequence
  GATA2 Guide RNA
ccagcagagccugggcugcac

SEQ ID NO: 28488 - RNA, 21 nt, Artificial Sequence
  GATA2 Guide RNA
cgcucaccagcagagccuggg

SEQ ID NO: 28489 - RNA, 21 nt, Artificial Sequence
  GATA2 Guide RNA
cggcgugcagcccaggcucug

SEQ ID NO: 28490 - RNA, 21 nt, Artificial Sequence
  GATA2 Guide RNA
cgugcagcccaggcucugcug

SEQ ID NO: 28491 - RNA, 21 nt, Artificial Sequence
  GATA2 Guide RNA
cucaccagcagagccugggcu

SEQ ID NO: 28492 - RNA, 21 nt, Artificial Sequence
  GATA2 Guide RNA
cucggcgugcagcccaggcuc

SEQ ID NO: 28493 - RNA, 21 nt, Artificial Sequence
  GATA2 Guide RNA
cugcacgccgagcggccgcau

SEQ ID NO: 28494 - RNA, 21 nt, Artificial Sequence
  GATA2 Guide RNA
gagccugggcugcacgccgag

SEQ ID NO: 28495 - RNA, 21 nt, Artificial Sequence
  GATA2 Guide RNA
gcagagccugggcugcacgcc

SEQ ID NO: 28496 - RNA, 21 nt, Artificial Sequence
  GATA2 Guide RNA
gcagcccaggcucugcuggug

SEQ ID NO: 28497 - RNA, 21 nt, Artificial Sequence
  GATA2 Guide RNA
gcgcucaccagcagagccugg

SEQ ID NO: 28498 - RNA, 21 nt, Artificial Sequence
  GATA2 Guide RNA
gcgugcagcccaggcucugcu

SEQ ID NO: 28499 - RNA, 21 nt, Artificial Sequence
  GATA2 Guide RNA
gcucaccagcagagccugggc

SEQ ID NO: 28500 - RNA, 21 nt, Artificial Sequence
  GATA2 Guide RNA
gcucggcgugcagcccaggcu

SEQ ID NO: 28501 - RNA, 21 nt, Artificial Sequence
  GATA2 Guide RNA
ggcgugcagcccaggcucugc

SEQ ID NO: 28502 - RNA, 21 nt, Artificial Sequence
  GATA2 Guide RNA
gugcagcccaggcucugcugg

SEQ ID NO: 28503 - RNA, 21 nt, Artificial Sequence
  GATA2 Guide RNA
ucaccagcagagccugggcug

SEQ ID NO: 28504 - RNA, 21 nt, Artificial Sequence
  GATA2 Guide RNA
ucggcgugcagcccaggcucu

SEQ ID NO: 28505 - RNA, 21 nt, Artificial Sequence
  GATA2 Guide RNA
ugcacgccgagcggccgcaug

SEQ ID NO: 28506 - RNA, 21 nt, Artificial Sequence
  GATA2 Guide RNA
ugcagcccaggcucugcuggu

SEQ ID NO: 28507 - RNA, 22 nt, Artificial Sequence
  GATA2 Guide RNA
aacaccaugcggccgcucggcg

SEQ ID NO: 28508 - RNA, 22 nt, Artificial Sequence
  GATA2 Guide RNA
acaccaugcggccgcucggcgu

SEQ ID NO: 28509 - RNA, 22 nt, Artificial Sequence
  GATA2 Guide RNA
accagcagagccugggcugcac

SEQ ID NO: 28510 - RNA, 22 nt, Artificial Sequence
  GATA2 Guide RNA
accaugcggccgcucggcgugc

SEQ ID NO: 28511 - RNA, 22 nt, Artificial Sequence
  GATA2 Guide RNA
agagccugggcugcacgccgag

SEQ ID NO: 28512 - RNA, 22 nt, Artificial Sequence
  GATA2 Guide RNA
agcagagccugggcugcacgcc

SEQ ID NO: 28513 - RNA, 22 nt, Artificial Sequence
  GATA2 Guide RNA
agccugggcugcacgccgagcg

SEQ ID NO: 28514 - RNA, 22 nt, Artificial Sequence
  GATA2 Guide RNA
augcggccgcucggcgugcagc

SEQ ID NO: 28515 - RNA, 22 nt, Artificial Sequence
  GATA2 Guide RNA
caccagcagagccugggcugca

SEQ ID NO: 28516 - RNA, 22 nt, Artificial Sequence
  GATA2 Guide RNA
caccaugcggccgcucggcgug

SEQ ID NO: 28517 - RNA, 22 nt, Artificial Sequence
  GATA2 Guide RNA
cagagccugggcugcacgccga

SEQ ID NO: 28518 - RNA, 22 nt, Artificial Sequence
  GATA2 Guide RNA
cagcagagccugggcugcacgc

SEQ ID NO: 28519 - RNA, 22 nt, Artificial Sequence
  GATA2 Guide RNA
cagcccaggcucugcuggugag

SEQ ID NO: 28520 - RNA, 22 nt, Artificial Sequence
  GATA2 Guide RNA
caugcggccgcucggcgugcag

SEQ ID NO: 28521 - RNA, 22 nt, Artificial Sequence
  GATA2 Guide RNA
ccagcagagccugggcugcacg

SEQ ID NO: 28522 - RNA, 22 nt, Artificial Sequence
  GATA2 Guide RNA
ccaugcggccgcucggcgugca

SEQ ID NO: 28523 - RNA, 22 nt, Artificial Sequence
  GATA2 Guide RNA
cgcucaccagcagagccugggc

SEQ ID NO: 28524 - RNA, 22 nt, Artificial Sequence
  GATA2 Guide RNA
cgcucggcgugcagcccaggcu

SEQ ID NO: 28525 - RNA, 22 nt, Artificial Sequence
  GATA2 Guide RNA
cggcgugcagcccaggcucugc

SEQ ID NO: 28526 - RNA, 22 nt, Artificial Sequence
  GATA2 Guide RNA
cgugcagcccaggcucugcugg

SEQ ID NO: 28527 - RNA, 22 nt, Artificial Sequence
  GATA2 Guide RNA
cucaccagcagagccugggcug

SEQ ID NO: 28528 - RNA, 22 nt, Artificial Sequence
  GATA2 Guide RNA
cucggcgugcagcccaggcucu

SEQ ID NO: 28529 - RNA, 22 nt, Artificial Sequence
  GATA2 Guide RNA
cugcacgccgagcggccgcaug

SEQ ID NO: 28530 - RNA, 22 nt, Artificial Sequence
  GATA2 Guide RNA
gagccugggcugcacgccgagc

SEQ ID NO: 28531 - RNA, 22 nt, Artificial Sequence
  GATA2 Guide RNA
gcagagccugggcugcacgccg

SEQ ID NO: 28532 - RNA, 22 nt, Artificial Sequence
  GATA2 Guide RNA
gcagcccaggcucugcugguga

SEQ ID NO: 28533 - RNA, 22 nt, Artificial Sequence
  GATA2 Guide RNA
gcgcucaccagcagagccuggg

SEQ ID NO: 28534 - RNA, 22 nt, Artificial Sequence
  GATA2 Guide RNA
gcgugcagcccaggcucugcug

SEQ ID NO: 28535 - RNA, 22 nt, Artificial Sequence
  GATA2 Guide RNA
gcucaccagcagagccugggcu

SEQ ID NO: 28536 - RNA, 22 nt, Artificial Sequence
  GATA2 Guide RNA
gcucggcgugcagcccaggcuc

SEQ ID NO: 28537 - RNA, 22 nt, Artificial Sequence
  GATA2 Guide RNA
gcugcacgccgagcggccgcau

SEQ ID NO: 28538 - RNA, 22 nt, Artificial Sequence
  GATA2 Guide RNA
ggcgcucaccagcagagccugg

SEQ ID NO: 28539 - RNA, 22 nt, Artificial Sequence
  GATA2 Guide RNA
ggcgugcagcccaggcucugcu

SEQ ID NO: 28540 - RNA, 22 nt, Artificial Sequence
  GATA2 Guide RNA
gugcagcccaggcucugcuggu

SEQ ID NO: 28541 - RNA, 22 nt, Artificial Sequence
  GATA2 Guide RNA
ucaccagcagagccugggcugc

SEQ ID NO: 28542 - RNA, 22 nt, Artificial Sequence
  GATA2 Guide RNA
ucggcgugcagcccaggcucug

SEQ ID NO: 28543 - RNA, 22 nt, Artificial Sequence
  GATA2 Guide RNA
ugcacgccgagcggccgcaugg

SEQ ID NO: 28544 - RNA, 22 nt, Artificial Sequence
  GATA2 Guide RNA
ugcagcccaggcucugcuggug

SEQ ID NO: 28545 - RNA, 20 nt, Artificial Sequence
  GATA2 Guide RNA
aacaccaugcggucgcucgg

SEQ ID NO: 28546 - RNA, 20 nt, Artificial Sequence
  GATA2 Guide RNA
acaccaugcggucgcucggc

SEQ ID NO: 28547 - RNA, 20 nt, Artificial Sequence
  GATA2 Guide RNA
accaugcggucgcucggcgu

SEQ ID NO: 28548 - RNA, 20 nt, Artificial Sequence
  GATA2 Guide RNA
accgcaugguguucagcgga

SEQ ID NO: 28549 - RNA, 20 nt, Artificial Sequence
  GATA2 Guide RNA
acgccgagcgaccgcauggu

SEQ ID NO: 28550 - RNA, 20 nt, Artificial Sequence
  GATA2 Guide RNA
agccugggcggcacgccgag

SEQ ID NO: 28551 - RNA, 20 nt, Artificial Sequence
  GATA2 Guide RNA
agcgaccgcaugguguucag

SEQ ID NO: 28552 - RNA, 20 nt, Artificial Sequence
  GATA2 Guide RNA
augcggucgcucggcgugcc

SEQ ID NO: 28553 - RNA, 20 nt, Artificial Sequence
  GATA2 Guide RNA
caccaugcggucgcucggcg

SEQ ID NO: 28554 - RNA, 20 nt, Artificial Sequence
  GATA2 Guide RNA
cacgccgagcgaccgcaugg

SEQ ID NO: 28555 - RNA, 20 nt, Artificial Sequence
  GATA2 Guide RNA
caugcggucgcucggcgugc

SEQ ID NO: 28556 - RNA, 20 nt, Artificial Sequence
  GATA2 Guide RNA
ccaugcggucgcucggcgug

SEQ ID NO: 28557 - RNA, 20 nt, Artificial Sequence
  GATA2 Guide RNA
ccgagcgaccgcaugguguu

SEQ ID NO: 28558 - RNA, 20 nt, Artificial Sequence
  GATA2 Guide RNA
ccgcugaacaccaugcgguc

SEQ ID NO: 28559 - RNA, 20 nt, Artificial Sequence
  GATA2 Guide RNA
cgaccgcaugguguucagcg

SEQ ID NO: 28560 - RNA, 20 nt, Artificial Sequence
  GATA2 Guide RNA
cgagcgaccgcaugguguuc

SEQ ID NO: 28561 - RNA, 20 nt, Artificial Sequence
  GATA2 Guide RNA
cgccgagcgaccgcauggug

SEQ ID NO: 28562 - RNA, 20 nt, Artificial Sequence
  GATA2 Guide RNA
cgcugaacaccaugcggucg

SEQ ID NO: 28563 - RNA, 20 nt, Artificial Sequence
  GATA2 Guide RNA
cggcacgccgagcgaccgca

SEQ ID NO: 28564 - RNA, 20 nt, Artificial Sequence
  GATA2 Guide RNA
cgguccgcugaacaccaugc

SEQ ID NO: 28565 - RNA, 20 nt, Artificial Sequence
  GATA2 Guide RNA
cugaacaccaugcggucgcu

SEQ ID NO: 28566 - RNA, 20 nt, Artificial Sequence
  GATA2 Guide RNA
cugggcggcacgccgagcga

SEQ ID NO: 28567 - RNA, 20 nt, Artificial Sequence
  GATA2 Guide RNA
gaacaccaugcggucgcucg

SEQ ID NO: 28568 - RNA, 20 nt, Artificial Sequence
  GATA2 Guide RNA
gaccgcaugguguucagcgg

SEQ ID NO: 28569 - RNA, 20 nt, Artificial Sequence
  GATA2 Guide RNA
gagcgaccgcaugguguuca

SEQ ID NO: 28570 - RNA, 20 nt, Artificial Sequence
  GATA2 Guide RNA
gcacgccgagcgaccgcaug

SEQ ID NO: 28571 - RNA, 20 nt, Artificial Sequence
  GATA2 Guide RNA
gccgagcgaccgcauggugu

SEQ ID NO: 28572 - RNA, 20 nt, Artificial Sequence
  GATA2 Guide RNA
gcgaccgcaugguguucagc

SEQ ID NO: 28573 - RNA, 20 nt, Artificial Sequence
  GATA2 Guide RNA
gcgguccgcugaacaccaug

SEQ ID NO: 28574 - RNA, 20 nt, Artificial Sequence
  GATA2 Guide RNA
gcugaacaccaugcggucgc

SEQ ID NO: 28575 - RNA, 20 nt, Artificial Sequence
  GATA2 Guide RNA
ggcacgccgagcgaccgcau

SEQ ID NO: 28576 - RNA, 20 nt, Artificial Sequence
  GATA2 Guide RNA
gguccgcugaacaccaugcg

SEQ ID NO: 28577 - RNA, 20 nt, Artificial Sequence
  GATA2 Guide RNA
guccgcugaacaccaugcgg

SEQ ID NO: 28578 - RNA, 20 nt, Artificial Sequence
  GATA2 Guide RNA
gucgcucggcgugccgccca

SEQ ID NO: 28579 - RNA, 20 nt, Artificial Sequence
  GATA2 Guide RNA
uccgcugaacaccaugcggu

SEQ ID NO: 28580 - RNA, 20 nt, Artificial Sequence
  GATA2 Guide RNA
ugaacaccaugcggucgcuc

SEQ ID NO: 28581 - RNA, 20 nt, Artificial Sequence
  GATA2 Guide RNA
ugcggucgcucggcgugccg

SEQ ID NO: 28582 - RNA, 20 nt, Artificial Sequence
  GATA2 Guide RNA
ugggcggcacgccgagcgac

SEQ ID NO: 28583 - RNA, 21 nt, Artificial Sequence
  GATA2 Guide RNA
aacaccaugcggucgcucggc

SEQ ID NO: 28584 - RNA, 21 nt, Artificial Sequence
  GATA2 Guide RNA
acaccaugcggucgcucggcg

SEQ ID NO: 28585 - RNA, 21 nt, Artificial Sequence
  GATA2 Guide RNA
accaugcggucgcucggcgug

SEQ ID NO: 28586 - RNA, 21 nt, Artificial Sequence
  GATA2 Guide RNA
accgcaugguguucagcggac

SEQ ID NO: 28587 - RNA, 21 nt, Artificial Sequence
  GATA2 Guide RNA
acgccgagcgaccgcauggug

SEQ ID NO: 28588 - RNA, 21 nt, Artificial Sequence
  GATA2 Guide RNA
agcgaccgcaugguguucagc

SEQ ID NO: 28589 - RNA, 21 nt, Artificial Sequence
  GATA2 Guide RNA
agcgguccgcugaacaccaug

SEQ ID NO: 28590 - RNA, 21 nt, Artificial Sequence
  GATA2 Guide RNA
augcggucgcucggcgugccg

SEQ ID NO: 28591 - RNA, 21 nt, Artificial Sequence
  GATA2 Guide RNA
caccaugcggucgcucggcgu

SEQ ID NO: 28592 - RNA, 21 nt, Artificial Sequence
  GATA2 Guide RNA
cacgccgagcgaccgcauggu

SEQ ID NO: 28593 - RNA, 21 nt, Artificial Sequence
  GATA2 Guide RNA
caugcggucgcucggcgugcc

SEQ ID NO: 28594 - RNA, 21 nt, Artificial Sequence
  GATA2 Guide RNA
ccaugcggucgcucggcgugc

SEQ ID NO: 28595 - RNA, 21 nt, Artificial Sequence
  GATA2 Guide RNA
ccgagcgaccgcaugguguuc

SEQ ID NO: 28596 - RNA, 21 nt, Artificial Sequence
  GATA2 Guide RNA
ccgcugaacaccaugcggucg

SEQ ID NO: 28597 - RNA, 21 nt, Artificial Sequence
  GATA2 Guide RNA
cgaccgcaugguguucagcgg

SEQ ID NO: 28598 - RNA, 21 nt, Artificial Sequence
  GATA2 Guide RNA
cgagcgaccgcaugguguuca

SEQ ID NO: 28599 - RNA, 21 nt, Artificial Sequence
  GATA2 Guide RNA
cgccgagcgaccgcauggugu

SEQ ID NO: 28600 - RNA, 21 nt, Artificial Sequence
  GATA2 Guide RNA
cgcugaacaccaugcggucgc

SEQ ID NO: 28601 - RNA, 21 nt, Artificial Sequence
  GATA2 Guide RNA
cggcacgccgagcgaccgcau

SEQ ID NO: 28602 - RNA, 21 nt, Artificial Sequence
  GATA2 Guide RNA
cgguccgcugaacaccaugcg

SEQ ID NO: 28603 - RNA, 21 nt, Artificial Sequence
  GATA2 Guide RNA
cugaacaccaugcggucgcuc

SEQ ID NO: 28604 - RNA, 21 nt, Artificial Sequence
  GATA2 Guide RNA
gaacaccaugcggucgcucgg

SEQ ID NO: 28605 - RNA, 21 nt, Artificial Sequence
  GATA2 Guide RNA
gaccgcaugguguucagcgga

SEQ ID NO: 28606 - RNA, 21 nt, Artificial Sequence
  GATA2 Guide RNA
gagcgaccgcaugguguucag

SEQ ID NO: 28607 - RNA, 21 nt, Artificial Sequence
  GATA2 Guide RNA
gcacgccgagcgaccgcaugg

SEQ ID NO: 28608 - RNA, 21 nt, Artificial Sequence
  GATA2 Guide RNA
gccgagcgaccgcaugguguu

SEQ ID NO: 28609 - RNA, 21 nt, Artificial Sequence
  GATA2 Guide RNA
gcgaccgcaugguguucagcg

SEQ ID NO: 28610 - RNA, 21 nt, Artificial Sequence
  GATA2 Guide RNA
gcgguccgcugaacaccaugc

SEQ ID NO: 28611 - RNA, 21 nt, Artificial Sequence
  GATA2 Guide RNA
gcugaacaccaugcggucgcu

SEQ ID NO: 28612 - RNA, 21 nt, Artificial Sequence
  GATA2 Guide RNA
ggcacgccgagcgaccgcaug

SEQ ID NO: 28613 - RNA, 21 nt, Artificial Sequence
  GATA2 Guide RNA
gguccgcugaacaccaugcgg

SEQ ID NO: 28614 - RNA, 21 nt, Artificial Sequence
  GATA2 Guide RNA
guccgcugaacaccaugcggu

SEQ ID NO: 28615 - RNA, 21 nt, Artificial Sequence
  GATA2 Guide RNA
uccgcugaacaccaugcgguc

SEQ ID NO: 28616 - RNA, 21 nt, Artificial Sequence
  GATA2 Guide RNA
ugaacaccaugcggucgcucg

SEQ ID NO: 28617 - RNA, 22 nt, Artificial Sequence
  GATA2 Guide RNA
aacaccaugcggucgcucggcg

SEQ ID NO: 28618 - RNA, 22 nt, Artificial Sequence
  GATA2 Guide RNA
aagcgguccgcugaacaccaug

SEQ ID NO: 28619 - RNA, 22 nt, Artificial Sequence
  GATA2 Guide RNA
acaccaugcggucgcucggcgu

SEQ ID NO: 28620 - RNA, 22 nt, Artificial Sequence
  GATA2 Guide RNA
accaugcggucgcucggcgugc

SEQ ID NO: 28621 - RNA, 22 nt, Artificial Sequence
  GATA2 Guide RNA
accgcaugguguucagcggacc

SEQ ID NO: 28622 - RNA, 22 nt, Artificial Sequence
  GATA2 Guide RNA
acgccgagcgaccgcauggugu

SEQ ID NO: 28623 - RNA, 22 nt, Artificial Sequence
  GATA2 Guide RNA
agagccugggcggcacgccgag

SEQ ID NO: 28624 - RNA, 22 nt, Artificial Sequence
  GATA2 Guide RNA
agcgaccgcaugguguucagcg

SEQ ID NO: 28625 - RNA, 22 nt, Artificial Sequence
  GATA2 Guide RNA
agcgguccgcugaacaccaugc

SEQ ID NO: 28626 - RNA, 22 nt, Artificial Sequence
  GATA2 Guide RNA
augcggucgcucggcgugccgc

SEQ ID NO: 28627 - RNA, 22 nt, Artificial Sequence
  GATA2 Guide RNA
caccaugcggucgcucggcgug

SEQ ID NO: 28628 - RNA, 22 nt, Artificial Sequence
  GATA2 Guide RNA
cacgccgagcgaccgcauggug

SEQ ID NO: 28629 - RNA, 22 nt, Artificial Sequence
  GATA2 Guide RNA
caugcggucgcucggcgugccg

SEQ ID NO: 28630 - RNA, 22 nt, Artificial Sequence
  GATA2 Guide RNA
ccaugcggucgcucggcgugcc

SEQ ID NO: 28631 - RNA, 22 nt, Artificial Sequence
  GATA2 Guide RNA
ccgagcgaccgcaugguguuca

SEQ ID NO: 28632 - RNA, 22 nt, Artificial Sequence
  GATA2 Guide RNA
ccgcugaacaccaugcggucgc

SEQ ID NO: 28633 - RNA, 22 nt, Artificial Sequence
  GATA2 Guide RNA
cgaccgcaugguguucagcgga

SEQ ID NO: 28634 - RNA, 22 nt, Artificial Sequence
  GATA2 Guide RNA
cgagcgaccgcaugguguucag

SEQ ID NO: 28635 - RNA, 22 nt, Artificial Sequence
  GATA2 Guide RNA
cgccgagcgaccgcaugguguu

SEQ ID NO: 28636 - RNA, 22 nt, Artificial Sequence
  GATA2 Guide RNA
cgcugaacaccaugcggucgcu

SEQ ID NO: 28637 - RNA, 22 nt, Artificial Sequence
  GATA2 Guide RNA
cggcacgccgagcgaccgcaug

SEQ ID NO: 28638 - RNA, 22 nt, Artificial Sequence
  GATA2 Guide RNA
cgguccgcugaacaccaugcgg

SEQ ID NO: 28639 - RNA, 22 nt, Artificial Sequence
  GATA2 Guide RNA
cugaacaccaugcggucgcucg

SEQ ID NO: 28640 - RNA, 22 nt, Artificial Sequence
  GATA2 Guide RNA
gaacaccaugcggucgcucggc

SEQ ID NO: 28641 - RNA, 22 nt, Artificial Sequence
  GATA2 Guide RNA
gaccgcaugguguucagcggac

SEQ ID NO: 28642 - RNA, 22 nt, Artificial Sequence
  GATA2 Guide RNA
gagcgaccgcaugguguucagc

SEQ ID NO: 28643 - RNA, 22 nt, Artificial Sequence
  GATA2 Guide RNA
gcacgccgagcgaccgcauggu

SEQ ID NO: 28644 - RNA, 22 nt, Artificial Sequence
  GATA2 Guide RNA
gccgagcgaccgcaugguguuc

SEQ ID NO: 28645 - RNA, 22 nt, Artificial Sequence
  GATA2 Guide RNA
gcgaccgcaugguguucagcgg

SEQ ID NO: 28646 - RNA, 22 nt, Artificial Sequence
  GATA2 Guide RNA
gcggcacgccgagcgaccgcau

SEQ ID NO: 28647 - RNA, 22 nt, Artificial Sequence
  GATA2 Guide RNA
gcgguccgcugaacaccaugcg

SEQ ID NO: 28648 - RNA, 22 nt, Artificial Sequence
  GATA2 Guide RNA
gcugaacaccaugcggucgcuc

SEQ ID NO: 28649 - RNA, 22 nt, Artificial Sequence
  GATA2 Guide RNA
ggcacgccgagcgaccgcaugg

SEQ ID NO: 28650 - RNA, 22 nt, Artificial Sequence
  GATA2 Guide RNA
gguccgcugaacaccaugcggu

SEQ ID NO: 28651 - RNA, 22 nt, Artificial Sequence
  GATA2 Guide RNA
guccgcugaacaccaugcgguc

SEQ ID NO: 28652 - RNA, 22 nt, Artificial Sequence
  GATA2 Guide RNA
uccgcugaacaccaugcggucg

SEQ ID NO: 28653 - RNA, 22 nt, Artificial Sequence
  GATA2 Guide RNA
ugaacaccaugcggucgcucgg

SEQ ID NO: 28654 - RNA, 20 nt, Artificial Sequence
  GATA2 Guide RNA
aaaagugguccgcugaacac

SEQ ID NO: 28655 - RNA, 20 nt, Artificial Sequence
  GATA2 Guide RNA
aaagugguccgcugaacacc

SEQ ID NO: 28656 - RNA, 20 nt, Artificial Sequence
  GATA2 Guide RNA
aagugguccgcugaacacca

SEQ ID NO: 28657 - RNA, 20 nt, Artificial Sequence
  GATA2 Guide RNA
acaaaagugguccgcugaac

SEQ ID NO: 28658 - RNA, 20 nt, Artificial Sequence
  GATA2 Guide RNA
accacuuuuguccgccuggu

SEQ ID NO: 28659 - RNA, 20 nt, Artificial Sequence
  GATA2 Guide RNA
accaggcggacaaaaguggu

SEQ ID NO: 28660 - RNA, 20 nt, Artificial Sequence
  GATA2 Guide RNA
acuuuuguccgccugguggg

SEQ ID NO: 28661 - RNA, 20 nt, Artificial Sequence
  GATA2 Guide RNA
agcggaccacuuuuguccgc

SEQ ID NO: 28662 - RNA, 20 nt, Artificial Sequence
  GATA2 Guide RNA
aggcggacaaaagugguccg

SEQ ID NO: 28663 - RNA, 20 nt, Artificial Sequence
  GATA2 Guide RNA
agugguccgcugaacaccau

SEQ ID NO: 28664 - RNA, 20 nt, Artificial Sequence
  GATA2 Guide RNA
augguguucagcggaccacu

SEQ ID NO: 28665 - RNA, 20 nt, Artificial Sequence
  GATA2 Guide RNA
caaaagugguccgcugaaca

SEQ ID NO: 28666 - RNA, 20 nt, Artificial Sequence
  GATA2 Guide RNA
caccaggcggacaaaagugg

SEQ ID NO: 28667 - RNA, 20 nt, Artificial Sequence
  GATA2 Guide RNA
cacuuuuguccgccuggugg

SEQ ID NO: 28668 - RNA, 20 nt, Artificial Sequence
  GATA2 Guide RNA
cagcggaccacuuuuguccg

SEQ ID NO: 28669 - RNA, 20 nt, Artificial Sequence
  GATA2 Guide RNA
caggcggacaaaaguggucc

SEQ ID NO: 28670 - RNA, 20 nt, Artificial Sequence
  GATA2 Guide RNA
caugguguucagcggaccac

SEQ ID NO: 28671 - RNA, 20 nt, Artificial Sequence
  GATA2 Guide RNA
ccaccaggcggacaaaagug

SEQ ID NO: 28672 - RNA, 20 nt, Artificial Sequence
  GATA2 Guide RNA
ccacuuuuguccgccuggug

SEQ ID NO: 28673 - RNA, 20 nt, Artificial Sequence
  GATA2 Guide RNA
ccaggcggacaaaagugguc

SEQ ID NO: 28674 - RNA, 20 nt, Artificial Sequence
  GATA2 Guide RNA
cccaccaggcggacaaaagu

SEQ ID NO: 28675 - RNA, 20 nt, Artificial Sequence
  GATA2 Guide RNA
ccgcaugguguucagcggac

SEQ ID NO: 28676 - RNA, 20 nt, Artificial Sequence
  GATA2 Guide RNA
cgcaugguguucagcggacc

SEQ ID NO: 28677 - RNA, 20 nt, Artificial Sequence
  GATA2 Guide RNA
cgcccaccaggcggacaaaa

SEQ ID NO: 28678 - RNA, 20 nt, Artificial Sequence
  GATA2 Guide RNA
cggacaaaagugguccgcug

SEQ ID NO: 28679 - RNA, 20 nt, Artificial Sequence
  GATA2 Guide RNA
cggaccacuuuuguccgccu

SEQ ID NO: 28680 - RNA, 20 nt, Artificial Sequence
  GATA2 Guide RNA
gacaaaagugguccgcugaa

SEQ ID NO: 28681 - RNA, 20 nt, Artificial Sequence
  GATA2 Guide RNA
gaccacuuuuguccgccugg

SEQ ID NO: 28682 - RNA, 20 nt, Artificial Sequence
  GATA2 Guide RNA
gcaugguguucagcggacca

SEQ ID NO: 28683 - RNA, 20 nt, Artificial Sequence
  GATA2 Guide RNA
gcccaccaggcggacaaaag

SEQ ID NO: 28684 - RNA, 20 nt, Artificial Sequence
  GATA2 Guide RNA
gccgcaugguguucagcgga

SEQ ID NO: 28685 - RNA, 20 nt, Artificial Sequence
  GATA2 Guide RNA
gcggacaaaagugguccgcu

SEQ ID NO: 28686 - RNA, 20 nt, Artificial Sequence
  GATA2 Guide RNA
gcggaccacuuuuguccgcc

SEQ ID NO: 28687 - RNA, 20 nt, Artificial Sequence
  GATA2 Guide RNA
ggacaaaagugguccgcuga

SEQ ID NO: 28688 - RNA, 20 nt, Artificial Sequence
  GATA2 Guide RNA
ggaccacuuuuguccgccug

SEQ ID NO: 28689 - RNA, 20 nt, Artificial Sequence
  GATA2 Guide RNA
ggcggacaaaagugguccgc

SEQ ID NO: 28690 - RNA, 20 nt, Artificial Sequence
  GATA2 Guide RNA
gguguucagcggaccacuuu

SEQ ID NO: 28691 - RNA, 20 nt, Artificial Sequence
  GATA2 Guide RNA
gucgcccaccaggcggacaa

SEQ ID NO: 28692 - RNA, 20 nt, Artificial Sequence
  GATA2 Guide RNA
gugguccgcugaacaccaug

SEQ ID NO: 28693 - RNA, 20 nt, Artificial Sequence
  GATA2 Guide RNA
guguucagcggaccacuuuu

SEQ ID NO: 28694 - RNA, 20 nt, Artificial Sequence
  GATA2 Guide RNA
guucagcggaccacuuuugu

SEQ ID NO: 28695 - RNA, 20 nt, Artificial Sequence
  GATA2 Guide RNA
ucagcggaccacuuuugucc

SEQ ID NO: 28696 - RNA, 20 nt, Artificial Sequence
  GATA2 Guide RNA
ucgcccaccaggcggacaaa

SEQ ID NO: 28697 - RNA, 20 nt, Artificial Sequence
  GATA2 Guide RNA
ugguguucagcggaccacuu

SEQ ID NO: 28698 - RNA, 20 nt, Artificial Sequence
  GATA2 Guide RNA
uguucagcggaccacuuuug

SEQ ID NO: 28699 - RNA, 20 nt, Artificial Sequence
  GATA2 Guide RNA
uucagcggaccacuuuuguc

SEQ ID NO: 28700 - RNA, 21 nt, Artificial Sequence
  GATA2 Guide RNA
aaaagugguccgcugaacacc

SEQ ID NO: 28701 - RNA, 21 nt, Artificial Sequence
  GATA2 Guide RNA
aaagugguccgcugaacacca

SEQ ID NO: 28702 - RNA, 21 nt, Artificial Sequence
  GATA2 Guide RNA
aagugguccgcugaacaccau

SEQ ID NO: 28703 - RNA, 21 nt, Artificial Sequence
  GATA2 Guide RNA
acaaaagugguccgcugaaca

SEQ ID NO: 28704 - RNA, 21 nt, Artificial Sequence
  GATA2 Guide RNA
accacuuuuguccgccuggug

SEQ ID NO: 28705 - RNA, 21 nt, Artificial Sequence
  GATA2 Guide RNA
accaggcggacaaaagugguc

SEQ ID NO: 28706 - RNA, 21 nt, Artificial Sequence
  GATA2 Guide RNA
acuuuuguccgccuggugggc

SEQ ID NO: 28707 - RNA, 21 nt, Artificial Sequence
  GATA2 Guide RNA
agcggaccacuuuuguccgcc

SEQ ID NO: 28708 - RNA, 21 nt, Artificial Sequence
  GATA2 Guide RNA
aggcggacaaaagugguccgc

SEQ ID NO: 28709 - RNA, 21 nt, Artificial Sequence
  GATA2 Guide RNA
agugguccgcugaacaccaug

SEQ ID NO: 28710 - RNA, 21 nt, Artificial Sequence
  GATA2 Guide RNA
augguguucagcggaccacuu

SEQ ID NO: 28711 - RNA, 21 nt, Artificial Sequence
  GATA2 Guide RNA
caaaagugguccgcugaacac

SEQ ID NO: 28712 - RNA, 21 nt, Artificial Sequence
  GATA2 Guide RNA
caccaggcggacaaaaguggu

SEQ ID NO: 28713 - RNA, 21 nt, Artificial Sequence
  GATA2 Guide RNA
cacuuuuguccgccugguggg

SEQ ID NO: 28714 - RNA, 21 nt, Artificial Sequence
  GATA2 Guide RNA
cagcggaccacuuuuguccgc

SEQ ID NO: 28715 - RNA, 21 nt, Artificial Sequence
  GATA2 Guide RNA
caggcggacaaaagugguccg

SEQ ID NO: 28716 - RNA, 21 nt, Artificial Sequence
  GATA2 Guide RNA
caugguguucagcggaccacu

SEQ ID NO: 28717 - RNA, 21 nt, Artificial Sequence
  GATA2 Guide RNA
ccaccaggcggacaaaagugg

SEQ ID NO: 28718 - RNA, 21 nt, Artificial Sequence
  GATA2 Guide RNA
ccacuuuuguccgccuggugg

SEQ ID NO: 28719 - RNA, 21 nt, Artificial Sequence
  GATA2 Guide RNA
ccaggcggacaaaaguggucc

SEQ ID NO: 28720 - RNA, 21 nt, Artificial Sequence
  GATA2 Guide RNA
cccaccaggcggacaaaagug

SEQ ID NO: 28721 - RNA, 21 nt, Artificial Sequence
  GATA2 Guide RNA
ccgcaugguguucagcggacc

SEQ ID NO: 28722 - RNA, 21 nt, Artificial Sequence
  GATA2 Guide RNA
cgcaugguguucagcggacca

SEQ ID NO: 28723 - RNA, 21 nt, Artificial Sequence
  GATA2 Guide RNA
cgcccaccaggcggacaaaag

SEQ ID NO: 28724 - RNA, 21 nt, Artificial Sequence
  GATA2 Guide RNA
cggacaaaagugguccgcuga

SEQ ID NO: 28725 - RNA, 21 nt, Artificial Sequence
  GATA2 Guide RNA
cggaccacuuuuguccgccug

SEQ ID NO: 28726 - RNA, 21 nt, Artificial Sequence
  GATA2 Guide RNA
cgucgcccaccaggcggacaa

SEQ ID NO: 28727 - RNA, 21 nt, Artificial Sequence
  GATA2 Guide RNA
gacaaaagugguccgcugaac

SEQ ID NO: 28728 - RNA, 21 nt, Artificial Sequence
  GATA2 Guide RNA
gaccacuuuuguccgccuggu

SEQ ID NO: 28729 - RNA, 21 nt, Artificial Sequence
  GATA2 Guide RNA
gcaugguguucagcggaccac

SEQ ID NO: 28730 - RNA, 21 nt, Artificial Sequence
  GATA2 Guide RNA
gcccaccaggcggacaaaagu

SEQ ID NO: 28731 - RNA, 21 nt, Artificial Sequence
  GATA2 Guide RNA
gccgcaugguguucagcggac

SEQ ID NO: 28732 - RNA, 21 nt, Artificial Sequence
  GATA2 Guide RNA
gcggacaaaagugguccgcug

SEQ ID NO: 28733 - RNA, 21 nt, Artificial Sequence
  GATA2 Guide RNA
gcggaccacuuuuguccgccu

SEQ ID NO: 28734 - RNA, 21 nt, Artificial Sequence
  GATA2 Guide RNA
ggacaaaagugguccgcugaa

SEQ ID NO: 28735 - RNA, 21 nt, Artificial Sequence
  GATA2 Guide RNA
ggaccacuuuuguccgccugg

SEQ ID NO: 28736 - RNA, 21 nt, Artificial Sequence
  GATA2 Guide RNA
ggccgcaugguguucagcgga

SEQ ID NO: 28737 - RNA, 21 nt, Artificial Sequence
  GATA2 Guide RNA
ggcggacaaaagugguccgcu

SEQ ID NO: 28738 - RNA, 21 nt, Artificial Sequence
  GATA2 Guide RNA
gguguucagcggaccacuuuu

SEQ ID NO: 28739 - RNA, 21 nt, Artificial Sequence
  GATA2 Guide RNA
gucgcccaccaggcggacaaa

SEQ ID NO: 28740 - RNA, 21 nt, Artificial Sequence
  GATA2 Guide RNA
gugguccgcugaacaccaugc

SEQ ID NO: 28741 - RNA, 21 nt, Artificial Sequence
  GATA2 Guide RNA
guguucagcggaccacuuuug

SEQ ID NO: 28742 - RNA, 21 nt, Artificial Sequence
  GATA2 Guide RNA
guucagcggaccacuuuuguc

SEQ ID NO: 28743 - RNA, 21 nt, Artificial Sequence
  GATA2 Guide RNA
ucagcggaccacuuuuguccg

SEQ ID NO: 28744 - RNA, 21 nt, Artificial Sequence
  GATA2 Guide RNA
ucgcccaccaggcggacaaaa

SEQ ID NO: 28745 - RNA, 21 nt, Artificial Sequence
  GATA2 Guide RNA
ugguguucagcggaccacuuu

SEQ ID NO: 28746 - RNA, 21 nt, Artificial Sequence
  GATA2 Guide RNA
uguucagcggaccacuuuugu

SEQ ID NO: 28747 - RNA, 21 nt, Artificial Sequence
  GATA2 Guide RNA
uucagcggaccacuuuugucc

SEQ ID NO: 28748 - RNA, 22 nt, Artificial Sequence
  GATA2 Guide RNA
aaaagugguccgcugaacacca

SEQ ID NO: 28749 - RNA, 22 nt, Artificial Sequence
  GATA2 Guide RNA
aaagugguccgcugaacaccau

SEQ ID NO: 28750 - RNA, 22 nt, Artificial Sequence
  GATA2 Guide RNA
aagugguccgcugaacaccaug

SEQ ID NO: 28751 - RNA, 22 nt, Artificial Sequence
  GATA2 Guide RNA
acaaaagugguccgcugaacac

SEQ ID NO: 28752 - RNA, 22 nt, Artificial Sequence
  GATA2 Guide RNA
accacuuuuguccgccuggugg

SEQ ID NO: 28753 - RNA, 22 nt, Artificial Sequence
  GATA2 Guide RNA
accaggcggacaaaaguggucc

SEQ ID NO: 28754 - RNA, 22 nt, Artificial Sequence
  GATA2 Guide RNA
acuuuuguccgccuggugggcg

SEQ ID NO: 28755 - RNA, 22 nt, Artificial Sequence
  GATA2 Guide RNA
agcggaccacuuuuguccgccu

SEQ ID NO: 28756 - RNA, 22 nt, Artificial Sequence
  GATA2 Guide RNA
aggcggacaaaagugguccgcu

SEQ ID NO: 28757 - RNA, 22 nt, Artificial Sequence
  GATA2 Guide RNA
agugguccgcugaacaccaugc

SEQ ID NO: 28758 - RNA, 22 nt, Artificial Sequence
  GATA2 Guide RNA
augguguucagcggaccacuuu

SEQ ID NO: 28759 - RNA, 22 nt, Artificial Sequence
  GATA2 Guide RNA
caaaagugguccgcugaacacc

SEQ ID NO: 28760 - RNA, 22 nt, Artificial Sequence
  GATA2 Guide RNA
caccaggcggacaaaagugguc

SEQ ID NO: 28761 - RNA, 22 nt, Artificial Sequence
  GATA2 Guide RNA
cacuuuuguccgccuggugggc

SEQ ID NO: 28762 - RNA, 22 nt, Artificial Sequence
  GATA2 Guide RNA
cagcggaccacuuuuguccgcc

SEQ ID NO: 28763 - RNA, 22 nt, Artificial Sequence
  GATA2 Guide RNA
caggcggacaaaagugguccgc

SEQ ID NO: 28764 - RNA, 22 nt, Artificial Sequence
  GATA2 Guide RNA
caugguguucagcggaccacuu

SEQ ID NO: 28765 - RNA, 22 nt, Artificial Sequence
  GATA2 Guide RNA
ccaccaggcggacaaaaguggu

SEQ ID NO: 28766 - RNA, 22 nt, Artificial Sequence
  GATA2 Guide RNA
ccacuuuuguccgccugguggg

SEQ ID NO: 28767 - RNA, 22 nt, Artificial Sequence
  GATA2 Guide RNA
ccaggcggacaaaagugguccg

SEQ ID NO: 28768 - RNA, 22 nt, Artificial Sequence
  GATA2 Guide RNA
cccaccaggcggacaaaagugg

SEQ ID NO: 28769 - RNA, 22 nt, Artificial Sequence
  GATA2 Guide RNA
ccgcaugguguucagcggacca

SEQ ID NO: 28770 - RNA, 22 nt, Artificial Sequence
  GATA2 Guide RNA
ccgucgcccaccaggcggacaa

SEQ ID NO: 28771 - RNA, 22 nt, Artificial Sequence
  GATA2 Guide RNA
cgcaugguguucagcggaccac

SEQ ID NO: 28772 - RNA, 22 nt, Artificial Sequence
  GATA2 Guide RNA
cgcccaccaggcggacaaaagu

SEQ ID NO: 28773 - RNA, 22 nt, Artificial Sequence
  GATA2 Guide RNA
cggacaaaagugguccgcugaa

SEQ ID NO: 28774 - RNA, 22 nt, Artificial Sequence
  GATA2 Guide RNA
cggaccacuuuuguccgccugg

SEQ ID NO: 28775 - RNA, 22 nt, Artificial Sequence
  GATA2 Guide RNA
cggccgcaugguguucagcgga

SEQ ID NO: 28776 - RNA, 22 nt, Artificial Sequence
  GATA2 Guide RNA
cgucgcccaccaggcggacaaa

SEQ ID NO: 28777 - RNA, 22 nt, Artificial Sequence
  GATA2 Guide RNA
gacaaaagugguccgcugaaca

SEQ ID NO: 28778 - RNA, 22 nt, Artificial Sequence
  GATA2 Guide RNA
gaccacuuuuguccgccuggug

SEQ ID NO: 28779 - RNA, 22 nt, Artificial Sequence
  GATA2 Guide RNA
gcaugguguucagcggaccacu

SEQ ID NO: 28780 - RNA, 22 nt, Artificial Sequence
  GATA2 Guide RNA
gcccaccaggcggacaaaagug

SEQ ID NO: 28781 - RNA, 22 nt, Artificial Sequence
  GATA2 Guide RNA
gccgcaugguguucagcggacc

SEQ ID NO: 28782 - RNA, 22 nt, Artificial Sequence
  GATA2 Guide RNA
gcggacaaaagugguccgcuga

SEQ ID NO: 28783 - RNA, 22 nt, Artificial Sequence
  GATA2 Guide RNA
gcggaccacuuuuguccgccug

SEQ ID NO: 28784 - RNA, 22 nt, Artificial Sequence
  GATA2 Guide RNA
ggacaaaagugguccgcugaac

SEQ ID NO: 28785 - RNA, 22 nt, Artificial Sequence
  GATA2 Guide RNA
ggaccacuuuuguccgccuggu

SEQ ID NO: 28786 - RNA, 22 nt, Artificial Sequence
  GATA2 Guide RNA
ggccgcaugguguucagcggac

SEQ ID NO: 28787 - RNA, 22 nt, Artificial Sequence
  GATA2 Guide RNA
ggcggacaaaagugguccgcug

SEQ ID NO: 28788 - RNA, 22 nt, Artificial Sequence
  GATA2 Guide RNA
gguguucagcggaccacuuuug

SEQ ID NO: 28789 - RNA, 22 nt, Artificial Sequence
  GATA2 Guide RNA
gucgcccaccaggcggacaaaa

SEQ ID NO: 28790 - RNA, 22 nt, Artificial Sequence
  GATA2 Guide RNA
gugguccgcugaacaccaugcg

SEQ ID NO: 28791 - RNA, 22 nt, Artificial Sequence
  GATA2 Guide RNA
guguucagcggaccacuuuugu

SEQ ID NO: 28792 - RNA, 22 nt, Artificial Sequence
  GATA2 Guide RNA
guucagcggaccacuuuugucc

SEQ ID NO: 28793 - RNA, 22 nt, Artificial Sequence
  GATA2 Guide RNA
ucagcggaccacuuuuguccgc

SEQ ID NO: 28794 - RNA, 22 nt, Artificial Sequence
  GATA2 Guide RNA
ucgcccaccaggcggacaaaag

SEQ ID NO: 28795 - RNA, 22 nt, Artificial Sequence
  GATA2 Guide RNA
ugguguucagcggaccacuuuu

SEQ ID NO: 28796 - RNA, 22 nt, Artificial Sequence
  GATA2 Guide RNA
uguucagcggaccacuuuuguc

SEQ ID NO: 28797 - RNA, 22 nt, Artificial Sequence
  GATA2 Guide RNA
uucagcggaccacuuuuguccg

SEQ ID NO: 28798 - RNA, 20 nt, Artificial Sequence
  GATA2 Guide RNA
aaaccccaccugggcagcgg

SEQ ID NO: 28799 - RNA, 20 nt, Artificial Sequence
  GATA2 Guide RNA
aaccccaccugggcagcggu

SEQ ID NO: 28800 - RNA, 20 nt, Artificial Sequence
  GATA2 Guide RNA
accccaccugggcagcgguc

SEQ ID NO: 28801 - RNA, 20 nt, Artificial Sequence
  GATA2 Guide RNA
accgcugcccaggugggguu

SEQ ID NO: 28802 - RNA, 20 nt, Artificial Sequence
  GATA2 Guide RNA
accugaccgcugcccaggug

SEQ ID NO: 28803 - RNA, 20 nt, Artificial Sequence
  GATA2 Guide RNA
agaggcugccuccgcaccug

SEQ ID NO: 28804 - RNA, 20 nt, Artificial Sequence
  GATA2 Guide RNA
agcggucaggugcggaggca

SEQ ID NO: 28805 - RNA, 20 nt, Artificial Sequence
  GATA2 Guide RNA
aggaaaccccaccugggcag

SEQ ID NO: 28806 - RNA, 20 nt, Artificial Sequence
  GATA2 Guide RNA
aggcugccuccgcaccugac

SEQ ID NO: 28807 - RNA, 20 nt, Artificial Sequence
  GATA2 Guide RNA
caccugaccgcugcccaggu

SEQ ID NO: 28808 - RNA, 20 nt, Artificial Sequence
  GATA2 Guide RNA
cagcggucaggugcggaggc

SEQ ID NO: 28809 - RNA, 20 nt, Artificial Sequence
  GATA2 Guide RNA
caggaaaccccaccugggca

SEQ ID NO: 28810 - RNA, 20 nt, Artificial Sequence
  GATA2 Guide RNA
ccaccugggcagcggucagg

SEQ ID NO: 28811 - RNA, 20 nt, Artificial Sequence
  GATA2 Guide RNA
cccaccugggcagcggucag

SEQ ID NO: 28812 - RNA, 20 nt, Artificial Sequence
  GATA2 Guide RNA
ccccaccugggcagcgguca

SEQ ID NO: 28813 - RNA, 20 nt, Artificial Sequence
  GATA2 Guide RNA
ccgcaccugaccgcugccca

SEQ ID NO: 28814 - RNA, 20 nt, Artificial Sequence
  GATA2 Guide RNA
ccgcugcccaggugggguuu

SEQ ID NO: 28815 - RNA, 20 nt, Artificial Sequence
  GATA2 Guide RNA
ccuccgcaccugaccgcugc

SEQ ID NO: 28816 - RNA, 20 nt, Artificial Sequence
  GATA2 Guide RNA
ccugaccgcugcccaggugg

SEQ ID NO: 28817 - RNA, 20 nt, Artificial Sequence
  GATA2 Guide RNA
cgcaccugaccgcugcccag

SEQ ID NO: 28818 - RNA, 20 nt, Artificial Sequence
  GATA2 Guide RNA
cggucaggugcggaggcagc

SEQ ID NO: 28819 - RNA, 20 nt, Artificial Sequence
  GATA2 Guide RNA
cuccgcaccugaccgcugcc

SEQ ID NO: 28820 - RNA, 20 nt, Artificial Sequence
  GATA2 Guide RNA
cugaccgcugcccagguggg

SEQ ID NO: 28821 - RNA, 20 nt, Artificial Sequence
  GATA2 Guide RNA
cugccuccgcaccugaccgc

SEQ ID NO: 28822 - RNA, 20 nt, Artificial Sequence
  GATA2 Guide RNA
cugggcagcggucaggugcg

SEQ ID NO: 28823 - RNA, 20 nt, Artificial Sequence
  GATA2 Guide RNA
gaaaccccaccugggcagcg

SEQ ID NO: 28824 - RNA, 20 nt, Artificial Sequence
  GATA2 Guide RNA
gaccgcugcccagguggggu

SEQ ID NO: 28825 - RNA, 20 nt, Artificial Sequence
  GATA2 Guide RNA
gagaggcugccuccgcaccu

SEQ ID NO: 28826 - RNA, 20 nt, Artificial Sequence
  GATA2 Guide RNA
gaggcugccuccgcaccuga

SEQ ID NO: 28827 - RNA, 20 nt, Artificial Sequence
  GATA2 Guide RNA
gcaccugaccgcugcccagg

SEQ ID NO: 28828 - RNA, 20 nt, Artificial Sequence
  GATA2 Guide RNA
gcagcggucaggugcggagg

SEQ ID NO: 28829 - RNA, 20 nt, Artificial Sequence
  GATA2 Guide RNA
gccuccgcaccugaccgcug

SEQ ID NO: 28830 - RNA, 20 nt, Artificial Sequence
  GATA2 Guide RNA
gcggucaggugcggaggcag

SEQ ID NO: 28831 - RNA, 20 nt, Artificial Sequence
  GATA2 Guide RNA
gcugccuccgcaccugaccg

SEQ ID NO: 28832 - RNA, 20 nt, Artificial Sequence
  GATA2 Guide RNA
ggaaaccccaccugggcagc

SEQ ID NO: 28833 - RNA, 20 nt, Artificial Sequence
  GATA2 Guide RNA
ggcagcggucaggugcggag

SEQ ID NO: 28834 - RNA, 20 nt, Artificial Sequence
  GATA2 Guide RNA
ggcugccuccgcaccugacc

SEQ ID NO: 28835 - RNA, 20 nt, Artificial Sequence
  GATA2 Guide RNA
gggcagcggucaggugcgga

SEQ ID NO: 28836 - RNA, 20 nt, Artificial Sequence
  GATA2 Guide RNA
ggucaggugcggaggcagcc

SEQ ID NO: 28837 - RNA, 20 nt, Artificial Sequence
  GATA2 Guide RNA
uccgcaccugaccgcugccc

SEQ ID NO: 28838 - RNA, 20 nt, Artificial Sequence
  GATA2 Guide RNA
ugaccgcugcccaggugggg

SEQ ID NO: 28839 - RNA, 20 nt, Artificial Sequence
  GATA2 Guide RNA
ugccuccgcaccugaccgcu

SEQ ID NO: 28840 - RNA, 20 nt, Artificial Sequence
  GATA2 Guide RNA
ugggcagcggucaggugcgg

SEQ ID NO: 28841 - RNA, 21 nt, Artificial Sequence
  GATA2 Guide RNA
aaaccccaccugggcagcggu

SEQ ID NO: 28842 - RNA, 21 nt, Artificial Sequence
  GATA2 Guide RNA
aaccccaccugggcagcgguc

SEQ ID NO: 28843 - RNA, 21 nt, Artificial Sequence
  GATA2 Guide RNA
accccaccugggcagcgguca

SEQ ID NO: 28844 - RNA, 21 nt, Artificial Sequence
  GATA2 Guide RNA
accgcugcccaggugggguuu

SEQ ID NO: 28845 - RNA, 21 nt, Artificial Sequence
  GATA2 Guide RNA
accugaccgcugcccaggugg

SEQ ID NO: 28846 - RNA, 21 nt, Artificial Sequence
  GATA2 Guide RNA
agaggcugccuccgcaccuga

SEQ ID NO: 28847 - RNA, 21 nt, Artificial Sequence
  GATA2 Guide RNA
agcggucaggugcggaggcag

SEQ ID NO: 28848 - RNA, 21 nt, Artificial Sequence
  GATA2 Guide RNA
aggaaaccccaccugggcagc

SEQ ID NO: 28849 - RNA, 21 nt, Artificial Sequence
  GATA2 Guide RNA
aggcugccuccgcaccugacc

SEQ ID NO: 28850 - RNA, 21 nt, Artificial Sequence
  GATA2 Guide RNA
caccugaccgcugcccaggug

SEQ ID NO: 28851 - RNA, 21 nt, Artificial Sequence
  GATA2 Guide RNA
cagcggucaggugcggaggca

SEQ ID NO: 28852 - RNA, 21 nt, Artificial Sequence
  GATA2 Guide RNA
caggaaaccccaccugggcag

SEQ ID NO: 28853 - RNA, 21 nt, Artificial Sequence
  GATA2 Guide RNA
cccaccugggcagcggucagg

SEQ ID NO: 28854 - RNA, 21 nt, Artificial Sequence
  GATA2 Guide RNA
ccccaccugggcagcggucag

SEQ ID NO: 28855 - RNA, 21 nt, Artificial Sequence
  GATA2 Guide RNA
ccgcaccugaccgcugcccag

SEQ ID NO: 28856 - RNA, 21 nt, Artificial Sequence
  GATA2 Guide RNA
ccgcugcccaggugggguuuc

SEQ ID NO: 28857 - RNA, 21 nt, Artificial Sequence
  GATA2 Guide RNA
ccuccgcaccugaccgcugcc

SEQ ID NO: 28858 - RNA, 21 nt, Artificial Sequence
  GATA2 Guide RNA
ccugaccgcugcccagguggg

SEQ ID NO: 28859 - RNA, 21 nt, Artificial Sequence
  GATA2 Guide RNA
ccugggcagcggucaggugcg

SEQ ID NO: 28860 - RNA, 21 nt, Artificial Sequence
  GATA2 Guide RNA
cgcaccugaccgcugcccagg

SEQ ID NO: 28861 - RNA, 21 nt, Artificial Sequence
  GATA2 Guide RNA
cggucaggugcggaggcagcc

SEQ ID NO: 28862 - RNA, 21 nt, Artificial Sequence
  GATA2 Guide RNA
cuccgcaccugaccgcugccc

SEQ ID NO: 28863 - RNA, 21 nt, Artificial Sequence
  GATA2 Guide RNA
cugaccgcugcccaggugggg

SEQ ID NO: 28864 - RNA, 21 nt, Artificial Sequence
  GATA2 Guide RNA
cugccuccgcaccugaccgcu

SEQ ID NO: 28865 - RNA, 21 nt, Artificial Sequence
  GATA2 Guide RNA
cugggcagcggucaggugcgg

SEQ ID NO: 28866 - RNA, 21 nt, Artificial Sequence
  GATA2 Guide RNA
gaaaccccaccugggcagcgg

SEQ ID NO: 28867 - RNA, 21 nt, Artificial Sequence
  GATA2 Guide RNA
gaccgcugcccaggugggguu

SEQ ID NO: 28868 - RNA, 21 nt, Artificial Sequence
  GATA2 Guide RNA
gagaggcugccuccgcaccug

SEQ ID NO: 28869 - RNA, 21 nt, Artificial Sequence
  GATA2 Guide RNA
gaggcugccuccgcaccugac

SEQ ID NO: 28870 - RNA, 21 nt, Artificial Sequence
  GATA2 Guide RNA
gcaccugaccgcugcccaggu

SEQ ID NO: 28871 - RNA, 21 nt, Artificial Sequence
  GATA2 Guide RNA
gcagcggucaggugcggaggc

SEQ ID NO: 28872 - RNA, 21 nt, Artificial Sequence
  GATA2 Guide RNA
gcaggaaaccccaccugggca

SEQ ID NO: 28873 - RNA, 21 nt, Artificial Sequence
  GATA2 Guide RNA
gccuccgcaccugaccgcugc

SEQ ID NO: 28874 - RNA, 21 nt, Artificial Sequence
  GATA2 Guide RNA
gcggucaggugcggaggcagc

SEQ ID NO: 28875 - RNA, 21 nt, Artificial Sequence
  GATA2 Guide RNA
gcugccuccgcaccugaccgc

SEQ ID NO: 28876 - RNA, 21 nt, Artificial Sequence
  GATA2 Guide RNA
ggaaaccccaccugggcagcg

SEQ ID NO: 28877 - RNA, 21 nt, Artificial Sequence
  GATA2 Guide RNA
ggcagcggucaggugcggagg

SEQ ID NO: 28878 - RNA, 21 nt, Artificial Sequence
  GATA2 Guide RNA
ggcugccuccgcaccugaccg

SEQ ID NO: 28879 - RNA, 21 nt, Artificial Sequence
  GATA2 Guide RNA
gggcagcggucaggugcggag

SEQ ID NO: 28880 - RNA, 21 nt, Artificial Sequence
  GATA2 Guide RNA
ggucaggugcggaggcagccu

SEQ ID NO: 28881 - RNA, 21 nt, Artificial Sequence
  GATA2 Guide RNA
uccgcaccugaccgcugccca

SEQ ID NO: 28882 - RNA, 21 nt, Artificial Sequence
  GATA2 Guide RNA
ugaccgcugcccagguggggu

SEQ ID NO: 28883 - RNA, 21 nt, Artificial Sequence
  GATA2 Guide RNA
ugagaggcugccuccgcaccu

SEQ ID NO: 28884 - RNA, 21 nt, Artificial Sequence
  GATA2 Guide RNA
ugccuccgcaccugaccgcug

SEQ ID NO: 28885 - RNA, 21 nt, Artificial Sequence
  GATA2 Guide RNA
ugggcagcggucaggugcgga

SEQ ID NO: 28886 - RNA, 22 nt, Artificial Sequence
  GATA2 Guide RNA
aaaccccaccugggcagcgguc

SEQ ID NO: 28887 - RNA, 22 nt, Artificial Sequence
  GATA2 Guide RNA
aaccccaccugggcagcgguca

SEQ ID NO: 28888 - RNA, 22 nt, Artificial Sequence
  GATA2 Guide RNA
accccaccugggcagcggucag

SEQ ID NO: 28889 - RNA, 22 nt, Artificial Sequence
  GATA2 Guide RNA
accgcugcccaggugggguuuc

SEQ ID NO: 28890 - RNA, 22 nt, Artificial Sequence
  GATA2 Guide RNA
accugaccgcugcccagguggg

SEQ ID NO: 28891 - RNA, 22 nt, Artificial Sequence
  GATA2 Guide RNA
accugggcagcggucaggugcg

SEQ ID NO: 28892 - RNA, 22 nt, Artificial Sequence
  GATA2 Guide RNA
agaggcugccuccgcaccugac

SEQ ID NO: 28893 - RNA, 22 nt, Artificial Sequence
  GATA2 Guide RNA
agcggucaggugcggaggcagc

SEQ ID NO: 28894 - RNA, 22 nt, Artificial Sequence
  GATA2 Guide RNA
aggaaaccccaccugggcagcg

SEQ ID NO: 28895 - RNA, 22 nt, Artificial Sequence
  GATA2 Guide RNA
aggcugccuccgcaccugaccg

SEQ ID NO: 28896 - RNA, 22 nt, Artificial Sequence
  GATA2 Guide RNA
caccugaccgcugcccaggugg

SEQ ID NO: 28897 - RNA, 22 nt, Artificial Sequence
  GATA2 Guide RNA
cagcggucaggugcggaggcag

SEQ ID NO: 28898 - RNA, 22 nt, Artificial Sequence
  GATA2 Guide RNA
caggaaaccccaccugggcagc

SEQ ID NO: 28899 - RNA, 22 nt, Artificial Sequence
  GATA2 Guide RNA
ccccaccugggcagcggucagg

SEQ ID NO: 28900 - RNA, 22 nt, Artificial Sequence
  GATA2 Guide RNA
ccgcaccugaccgcugcccagg

SEQ ID NO: 28901 - RNA, 22 nt, Artificial Sequence
  GATA2 Guide RNA
ccgcugcccaggugggguuucc

SEQ ID NO: 28902 - RNA, 22 nt, Artificial Sequence
  GATA2 Guide RNA
ccuccgcaccugaccgcugccc

SEQ ID NO: 28903 - RNA, 22 nt, Artificial Sequence
  GATA2 Guide RNA
ccugaccgcugcccaggugggg

SEQ ID NO: 28904 - RNA, 22 nt, Artificial Sequence
  GATA2 Guide RNA
ccugggcagcggucaggugcgg

SEQ ID NO: 28905 - RNA, 22 nt, Artificial Sequence
  GATA2 Guide RNA
cgcaccugaccgcugcccaggu

SEQ ID NO: 28906 - RNA, 22 nt, Artificial Sequence
  GATA2 Guide RNA
cggucaggugcggaggcagccu

SEQ ID NO: 28907 - RNA, 22 nt, Artificial Sequence
  GATA2 Guide RNA
cuccgcaccugaccgcugccca

SEQ ID NO: 28908 - RNA, 22 nt, Artificial Sequence
  GATA2 Guide RNA
cugaccgcugcccagguggggu

SEQ ID NO: 28909 - RNA, 22 nt, Artificial Sequence
  GATA2 Guide RNA
cugagaggcugccuccgcaccu

SEQ ID NO: 28910 - RNA, 22 nt, Artificial Sequence
  GATA2 Guide RNA
cugccuccgcaccugaccgcug

SEQ ID NO: 28911 - RNA, 22 nt, Artificial Sequence
  GATA2 Guide RNA
cugggcagcggucaggugcgga

SEQ ID NO: 28912 - RNA, 22 nt, Artificial Sequence
  GATA2 Guide RNA
gaaaccccaccugggcagcggu

SEQ ID NO: 28913 - RNA, 22 nt, Artificial Sequence
  GATA2 Guide RNA
gaccgcugcccaggugggguuu

SEQ ID NO: 28914 - RNA, 22 nt, Artificial Sequence
  GATA2 Guide RNA
gagaggcugccuccgcaccuga

SEQ ID NO: 28915 - RNA, 22 nt, Artificial Sequence
  GATA2 Guide RNA
gaggcugccuccgcaccugacc

SEQ ID NO: 28916 - RNA, 22 nt, Artificial Sequence
  GATA2 Guide RNA
gcaccugaccgcugcccaggug

SEQ ID NO: 28917 - RNA, 22 nt, Artificial Sequence
  GATA2 Guide RNA
gcagcggucaggugcggaggca

SEQ ID NO: 28918 - RNA, 22 nt, Artificial Sequence
  GATA2 Guide RNA
gcaggaaaccccaccugggcag

SEQ ID NO: 28919 - RNA, 22 nt, Artificial Sequence
  GATA2 Guide RNA
gccuccgcaccugaccgcugcc

SEQ ID NO: 28920 - RNA, 22 nt, Artificial Sequence
  GATA2 Guide RNA
gcggucaggugcggaggcagcc

SEQ ID NO: 28921 - RNA, 22 nt, Artificial Sequence
  GATA2 Guide RNA
gcugccuccgcaccugaccgcu

SEQ ID NO: 28922 - RNA, 22 nt, Artificial Sequence
  GATA2 Guide RNA
ggaaaccccaccugggcagcgg

SEQ ID NO: 28923 - RNA, 22 nt, Artificial Sequence
  GATA2 Guide RNA
ggcagcggucaggugcggaggc

SEQ ID NO: 28924 - RNA, 22 nt, Artificial Sequence
  GATA2 Guide RNA
ggcugccuccgcaccugaccgc

SEQ ID NO: 28925 - RNA, 22 nt, Artificial Sequence
  GATA2 Guide RNA
gggcagcggucaggugcggagg

SEQ ID NO: 28926 - RNA, 22 nt, Artificial Sequence
  GATA2 Guide RNA
ggucaggugcggaggcagccuc

SEQ ID NO: 28927 - RNA, 22 nt, Artificial Sequence
  GATA2 Guide RNA
uccgcaccugaccgcugcccag

SEQ ID NO: 28928 - RNA, 22 nt, Artificial Sequence
  GATA2 Guide RNA
ugaccgcugcccaggugggguu

SEQ ID NO: 28929 - RNA, 22 nt, Artificial Sequence
  GATA2 Guide RNA
ugagaggcugccuccgcaccug

SEQ ID NO: 28930 - RNA, 22 nt, Artificial Sequence
  GATA2 Guide RNA
ugcaggaaaccccaccugggca

SEQ ID NO: 28931 - RNA, 22 nt, Artificial Sequence
  GATA2 Guide RNA
ugccuccgcaccugaccgcugc

SEQ ID NO: 28932 - RNA, 22 nt, Artificial Sequence
  GATA2 Guide RNA
ugggcagcggucaggugcggag

SEQ ID NO: 28933 - RNA, 20 nt, Artificial Sequence
  GATA2 Guide RNA
aaaccccaccugggcagcag

SEQ ID NO: 28934 - RNA, 20 nt, Artificial Sequence
  GATA2 Guide RNA
aaccccaccugggcagcagu

SEQ ID NO: 28935 - RNA, 20 nt, Artificial Sequence
  GATA2 Guide RNA
accccaccugggcagcaguc

SEQ ID NO: 28936 - RNA, 20 nt, Artificial Sequence
  GATA2 Guide RNA
accugacugcugcccaggug

SEQ ID NO: 28937 - RNA, 20 nt, Artificial Sequence
  GATA2 Guide RNA
accugggcagcagucaggug

SEQ ID NO: 28938 - RNA, 20 nt, Artificial Sequence
  GATA2 Guide RNA
acugcugcccaggugggguu

SEQ ID NO: 28939 - RNA, 20 nt, Artificial Sequence
  GATA2 Guide RNA
agcagucaggugcggaggca

SEQ ID NO: 28940 - RNA, 20 nt, Artificial Sequence
  GATA2 Guide RNA
agucaggugcggaggcagcc

SEQ ID NO: 28941 - RNA, 20 nt, Artificial Sequence
  GATA2 Guide RNA
caccugacugcugcccaggu

SEQ ID NO: 28942 - RNA, 20 nt, Artificial Sequence
  GATA2 Guide RNA
caccugggcagcagucaggu

SEQ ID NO: 28943 - RNA, 20 nt, Artificial Sequence
  GATA2 Guide RNA
cagcagucaggugcggaggc

SEQ ID NO: 28944 - RNA, 20 nt, Artificial Sequence
  GATA2 Guide RNA
cagucaggugcggaggcagc

SEQ ID NO: 28945 - RNA, 20 nt, Artificial Sequence
  GATA2 Guide RNA
ccaccugggcagcagucagg

SEQ ID NO: 28946 - RNA, 20 nt, Artificial Sequence
  GATA2 Guide RNA
cccaccugggcagcagucag

SEQ ID NO: 28947 - RNA, 20 nt, Artificial Sequence
  GATA2 Guide RNA
ccccaccugggcagcaguca

SEQ ID NO: 28948 - RNA, 20 nt, Artificial Sequence
  GATA2 Guide RNA
ccgcaccugacugcugccca

SEQ ID NO: 28949 - RNA, 20 nt, Artificial Sequence
  GATA2 Guide RNA
ccuccgcaccugacugcugc

SEQ ID NO: 28950 - RNA, 20 nt, Artificial Sequence
  GATA2 Guide RNA
ccugacugcugcccaggugg

SEQ ID NO: 28951 - RNA, 20 nt, Artificial Sequence
  GATA2 Guide RNA
ccugggcagcagucaggugc

SEQ ID NO: 28952 - RNA, 20 nt, Artificial Sequence
  GATA2 Guide RNA
cgcaccugacugcugcccag

SEQ ID NO: 28953 - RNA, 20 nt, Artificial Sequence
  GATA2 Guide RNA
cuccgcaccugacugcugcc

SEQ ID NO: 28954 - RNA, 20 nt, Artificial Sequence
  GATA2 Guide RNA
cugacugcugcccagguggg

SEQ ID NO: 28955 - RNA, 20 nt, Artificial Sequence
  GATA2 Guide RNA
cugccuccgcaccugacugc

SEQ ID NO: 28956 - RNA, 20 nt, Artificial Sequence
  GATA2 Guide RNA
cugcugcccaggugggguuu

SEQ ID NO: 28957 - RNA, 20 nt, Artificial Sequence
  GATA2 Guide RNA
cugggcagcagucaggugcg

SEQ ID NO: 28958 - RNA, 20 nt, Artificial Sequence
  GATA2 Guide RNA
gaaaccccaccugggcagca

SEQ ID NO: 28959 - RNA, 20 nt, Artificial Sequence
  GATA2 Guide RNA
gacugcugcccagguggggu

SEQ ID NO: 28960 - RNA, 20 nt, Artificial Sequence
  GATA2 Guide RNA
gcaccugacugcugcccagg

SEQ ID NO: 28961 - RNA, 20 nt, Artificial Sequence
  GATA2 Guide RNA
gcagcagucaggugcggagg

SEQ ID NO: 28962 - RNA, 20 nt, Artificial Sequence
  GATA2 Guide RNA
gcagucaggugcggaggcag

SEQ ID NO: 28963 - RNA, 20 nt, Artificial Sequence
  GATA2 Guide RNA
gccuccgcaccugacugcug

SEQ ID NO: 28964 - RNA, 20 nt, Artificial Sequence
  GATA2 Guide RNA
gcugccuccgcaccugacug

SEQ ID NO: 28965 - RNA, 20 nt, Artificial Sequence
  GATA2 Guide RNA
ggcagcagucaggugcggag

SEQ ID NO: 28966 - RNA, 20 nt, Artificial Sequence
  GATA2 Guide RNA
ggcugccuccgcaccugacu

SEQ ID NO: 28967 - RNA, 20 nt, Artificial Sequence
  GATA2 Guide RNA
gggcagcagucaggugcgga

SEQ ID NO: 28968 - RNA, 20 nt, Artificial Sequence
  GATA2 Guide RNA
uccgcaccugacugcugccc

SEQ ID NO: 28969 - RNA, 20 nt, Artificial Sequence
  GATA2 Guide RNA
ugacugcugcccaggugggg

SEQ ID NO: 28970 - RNA, 20 nt, Artificial Sequence
  GATA2 Guide RNA
ugccuccgcaccugacugcu

SEQ ID NO: 28971 - RNA, 20 nt, Artificial Sequence
  GATA2 Guide RNA
ugggcagcagucaggugcgg

SEQ ID NO: 28972 - RNA, 21 nt, Artificial Sequence
  GATA2 Guide RNA
aaaccccaccugggcagcagu

SEQ ID NO: 28973 - RNA, 21 nt, Artificial Sequence
  GATA2 Guide RNA
aaccccaccugggcagcaguc

SEQ ID NO: 28974 - RNA, 21 nt, Artificial Sequence
  GATA2 Guide RNA
accccaccugggcagcaguca

SEQ ID NO: 28975 - RNA, 21 nt, Artificial Sequence
  GATA2 Guide RNA
accugacugcugcccaggugg

SEQ ID NO: 28976 - RNA, 21 nt, Artificial Sequence
  GATA2 Guide RNA
accugggcagcagucaggugc

SEQ ID NO: 28977 - RNA, 21 nt, Artificial Sequence
  GATA2 Guide RNA
acugcugcccaggugggguuu

SEQ ID NO: 28978 - RNA, 21 nt, Artificial Sequence
  GATA2 Guide RNA
agcagucaggugcggaggcag

SEQ ID NO: 28979 - RNA, 21 nt, Artificial Sequence
  GATA2 Guide RNA
aggcugccuccgcaccugacu

SEQ ID NO: 28980 - RNA, 21 nt, Artificial Sequence
  GATA2 Guide RNA
agucaggugcggaggcagccu

SEQ ID NO: 28981 - RNA, 21 nt, Artificial Sequence
  GATA2 Guide RNA
caccugacugcugcccaggug

SEQ ID NO: 28982 - RNA, 21 nt, Artificial Sequence
  GATA2 Guide RNA
caccugggcagcagucaggug

SEQ ID NO: 28983 - RNA, 21 nt, Artificial Sequence
  GATA2 Guide RNA
cagcagucaggugcggaggca

SEQ ID NO: 28984 - RNA, 21 nt, Artificial Sequence
  GATA2 Guide RNA
cagucaggugcggaggcagcc

SEQ ID NO: 28985 - RNA, 21 nt, Artificial Sequence
  GATA2 Guide RNA
ccaccugggcagcagucaggu

SEQ ID NO: 28986 - RNA, 21 nt, Artificial Sequence
  GATA2 Guide RNA
cccaccugggcagcagucagg

SEQ ID NO: 28987 - RNA, 21 nt, Artificial Sequence
  GATA2 Guide RNA
ccccaccugggcagcagucag

SEQ ID NO: 28988 - RNA, 21 nt, Artificial Sequence
  GATA2 Guide RNA
ccgcaccugacugcugcccag

SEQ ID NO: 28989 - RNA, 21 nt, Artificial Sequence
  GATA2 Guide RNA
ccuccgcaccugacugcugcc

SEQ ID NO: 28990 - RNA, 21 nt, Artificial Sequence
  GATA2 Guide RNA
ccugacugcugcccagguggg

SEQ ID NO: 28991 - RNA, 21 nt, Artificial Sequence
  GATA2 Guide RNA
ccugggcagcagucaggugcg

SEQ ID NO: 28992 - RNA, 21 nt, Artificial Sequence
  GATA2 Guide RNA
cgcaccugacugcugcccagg

SEQ ID NO: 28993 - RNA, 21 nt, Artificial Sequence
  GATA2 Guide RNA
cuccgcaccugacugcugccc

SEQ ID NO: 28994 - RNA, 21 nt, Artificial Sequence
  GATA2 Guide RNA
cugacugcugcccaggugggg

SEQ ID NO: 28995 - RNA, 21 nt, Artificial Sequence
  GATA2 Guide RNA
cugccuccgcaccugacugcu

SEQ ID NO: 28996 - RNA, 21 nt, Artificial Sequence
  GATA2 Guide RNA
cugcugcccaggugggguuuc

SEQ ID NO: 28997 - RNA, 21 nt, Artificial Sequence
  GATA2 Guide RNA
cugggcagcagucaggugcgg

SEQ ID NO: 28998 - RNA, 21 nt, Artificial Sequence
  GATA2 Guide RNA
gaaaccccaccugggcagcag

SEQ ID NO: 28999 - RNA, 21 nt, Artificial Sequence
  GATA2 Guide RNA
gacugcugcccaggugggguu

SEQ ID NO: 29000 - RNA, 21 nt, Artificial Sequence
  GATA2 Guide RNA
gcaccugacugcugcccaggu

SEQ ID NO: 29001 - RNA, 21 nt, Artificial Sequence
  GATA2 Guide RNA
gcagcagucaggugcggaggc

SEQ ID NO: 29002 - RNA, 21 nt, Artificial Sequence
  GATA2 Guide RNA
gcagucaggugcggaggcagc

SEQ ID NO: 29003 - RNA, 21 nt, Artificial Sequence
  GATA2 Guide RNA
gccuccgcaccugacugcugc

SEQ ID NO: 29004 - RNA, 21 nt, Artificial Sequence
  GATA2 Guide RNA
gcugccuccgcaccugacugc

SEQ ID NO: 29005 - RNA, 21 nt, Artificial Sequence
  GATA2 Guide RNA
ggaaaccccaccugggcagca

SEQ ID NO: 29006 - RNA, 21 nt, Artificial Sequence
  GATA2 Guide RNA
ggcagcagucaggugcggagg

SEQ ID NO: 29007 - RNA, 21 nt, Artificial Sequence
  GATA2 Guide RNA
ggcugccuccgcaccugacug

SEQ ID NO: 29008 - RNA, 21 nt, Artificial Sequence
  GATA2 Guide RNA
gggcagcagucaggugcggag

SEQ ID NO: 29009 - RNA, 21 nt, Artificial Sequence
  GATA2 Guide RNA
uccgcaccugacugcugccca

SEQ ID NO: 29010 - RNA, 21 nt, Artificial Sequence
  GATA2 Guide RNA
ugacugcugcccagguggggu

SEQ ID NO: 29011 - RNA, 21 nt, Artificial Sequence
  GATA2 Guide RNA
ugccuccgcaccugacugcug

SEQ ID NO: 29012 - RNA, 21 nt, Artificial Sequence
  GATA2 Guide RNA
ugggcagcagucaggugcgga

SEQ ID NO: 29013 - RNA, 22 nt, Artificial Sequence
  GATA2 Guide RNA
aaaccccaccugggcagcaguc

SEQ ID NO: 29014 - RNA, 22 nt, Artificial Sequence
  GATA2 Guide RNA
aaccccaccugggcagcaguca

SEQ ID NO: 29015 - RNA, 22 nt, Artificial Sequence
  GATA2 Guide RNA
accccaccugggcagcagucag

SEQ ID NO: 29016 - RNA, 22 nt, Artificial Sequence
  GATA2 Guide RNA
accugacugcugcccagguggg

SEQ ID NO: 29017 - RNA, 22 nt, Artificial Sequence
  GATA2 Guide RNA
accugggcagcagucaggugcg

SEQ ID NO: 29018 - RNA, 22 nt, Artificial Sequence
  GATA2 Guide RNA
acugcugcccaggugggguuuc

SEQ ID NO: 29019 - RNA, 22 nt, Artificial Sequence
  GATA2 Guide RNA
agcagucaggugcggaggcagc

SEQ ID NO: 29020 - RNA, 22 nt, Artificial Sequence
  GATA2 Guide RNA
aggaaaccccaccugggcagca

SEQ ID NO: 29021 - RNA, 22 nt, Artificial Sequence
  GATA2 Guide RNA
aggcugccuccgcaccugacug

SEQ ID NO: 29022 - RNA, 22 nt, Artificial Sequence
  GATA2 Guide RNA
agucaggugcggaggcagccuc

SEQ ID NO: 29023 - RNA, 22 nt, Artificial Sequence
  GATA2 Guide RNA
caccugacugcugcccaggugg

SEQ ID NO: 29024 - RNA, 22 nt, Artificial Sequence
  GATA2 Guide RNA
caccugggcagcagucaggugc

SEQ ID NO: 29025 - RNA, 22 nt, Artificial Sequence
  GATA2 Guide RNA
cagcagucaggugcggaggcag

SEQ ID NO: 29026 - RNA, 22 nt, Artificial Sequence
  GATA2 Guide RNA
cagucaggugcggaggcagccu

SEQ ID NO: 29027 - RNA, 22 nt, Artificial Sequence
  GATA2 Guide RNA
ccaccugggcagcagucaggug

SEQ ID NO: 29028 - RNA, 22 nt, Artificial Sequence
  GATA2 Guide RNA
cccaccugggcagcagucaggu

SEQ ID NO: 29029 - RNA, 22 nt, Artificial Sequence
  GATA2 Guide RNA
ccccaccugggcagcagucagg

SEQ ID NO: 29030 - RNA, 22 nt, Artificial Sequence
  GATA2 Guide RNA
ccgcaccugacugcugcccagg

SEQ ID NO: 29031 - RNA, 22 nt, Artificial Sequence
  GATA2 Guide RNA
ccuccgcaccugacugcugccc

SEQ ID NO: 29032 - RNA, 22 nt, Artificial Sequence
  GATA2 Guide RNA
ccugacugcugcccaggugggg

SEQ ID NO: 29033 - RNA, 22 nt, Artificial Sequence
  GATA2 Guide RNA
ccugggcagcagucaggugcgg

SEQ ID NO: 29034 - RNA, 22 nt, Artificial Sequence
  GATA2 Guide RNA
cgcaccugacugcugcccaggu

SEQ ID NO: 29035 - RNA, 22 nt, Artificial Sequence
  GATA2 Guide RNA
cuccgcaccugacugcugccca

SEQ ID NO: 29036 - RNA, 22 nt, Artificial Sequence
  GATA2 Guide RNA
cugacugcugcccagguggggu

SEQ ID NO: 29037 - RNA, 22 nt, Artificial Sequence
  GATA2 Guide RNA
cugccuccgcaccugacugcug

SEQ ID NO: 29038 - RNA, 22 nt, Artificial Sequence
  GATA2 Guide RNA
cugcugcccaggugggguuucc

SEQ ID NO: 29039 - RNA, 22 nt, Artificial Sequence
  GATA2 Guide RNA
cugggcagcagucaggugcgga

SEQ ID NO: 29040 - RNA, 22 nt, Artificial Sequence
  GATA2 Guide RNA
gaaaccccaccugggcagcagu

SEQ ID NO: 29041 - RNA, 22 nt, Artificial Sequence
  GATA2 Guide RNA
gacugcugcccaggugggguuu

SEQ ID NO: 29042 - RNA, 22 nt, Artificial Sequence
  GATA2 Guide RNA
gaggcugccuccgcaccugacu

SEQ ID NO: 29043 - RNA, 22 nt, Artificial Sequence
  GATA2 Guide RNA
gcaccugacugcugcccaggug

SEQ ID NO: 29044 - RNA, 22 nt, Artificial Sequence
  GATA2 Guide RNA
gcagcagucaggugcggaggca

SEQ ID NO: 29045 - RNA, 22 nt, Artificial Sequence
  GATA2 Guide RNA
gcagucaggugcggaggcagcc

SEQ ID NO: 29046 - RNA, 22 nt, Artificial Sequence
  GATA2 Guide RNA
gccuccgcaccugacugcugcc

SEQ ID NO: 29047 - RNA, 22 nt, Artificial Sequence
  GATA2 Guide RNA
gcugccuccgcaccugacugcu

SEQ ID NO: 29048 - RNA, 22 nt, Artificial Sequence
  GATA2 Guide RNA
ggaaaccccaccugggcagcag

SEQ ID NO: 29049 - RNA, 22 nt, Artificial Sequence
  GATA2 Guide RNA
ggcagcagucaggugcggaggc

SEQ ID NO: 29050 - RNA, 22 nt, Artificial Sequence
  GATA2 Guide RNA
ggcugccuccgcaccugacugc

SEQ ID NO: 29051 - RNA, 22 nt, Artificial Sequence
  GATA2 Guide RNA
gggcagcagucaggugcggagg

SEQ ID NO: 29052 - RNA, 22 nt, Artificial Sequence
  GATA2 Guide RNA
uccgcaccugacugcugcccag

SEQ ID NO: 29053 - RNA, 22 nt, Artificial Sequence
  GATA2 Guide RNA
ugacugcugcccaggugggguu

SEQ ID NO: 29054 - RNA, 22 nt, Artificial Sequence
  GATA2 Guide RNA
ugccuccgcaccugacugcugc

SEQ ID NO: 29055 - RNA, 22 nt, Artificial Sequence
  GATA2 Guide RNA
ugggcagcagucaggugcggag

SEQ ID NO: 29056 - RNA, 20 nt, Artificial Sequence
  GATA2 Guide RNA
aaaccacuucccuaguccga

SEQ ID NO: 29057 - RNA, 20 nt, Artificial Sequence
  GATA2 Guide RNA
aaccacuucccuaguccgag

SEQ ID NO: 29058 - RNA, 20 nt, Artificial Sequence
  GATA2 Guide RNA
acagggucucggacuaggga

SEQ ID NO: 29059 - RNA, 20 nt, Artificial Sequence
  GATA2 Guide RNA
accacuucccuaguccgaga

SEQ ID NO: 29060 - RNA, 20 nt, Artificial Sequence
  GATA2 Guide RNA
acuucccuaguccgagaccc

SEQ ID NO: 29061 - RNA, 20 nt, Artificial Sequence
  GATA2 Guide RNA
agaaaccacuucccuagucc

SEQ ID NO: 29062 - RNA, 20 nt, Artificial Sequence
  GATA2 Guide RNA
agagaaaccacuucccuagu

SEQ ID NO: 29063 - RNA, 20 nt, Artificial Sequence
  GATA2 Guide RNA
agcagagaaaccacuucccu

SEQ ID NO: 29064 - RNA, 20 nt, Artificial Sequence
  GATA2 Guide RNA
agcuggcuaggacagggucu

SEQ ID NO: 29065 - RNA, 20 nt, Artificial Sequence
  GATA2 Guide RNA
aggacagggucucggacuag

SEQ ID NO: 29066 - RNA, 20 nt, Artificial Sequence
  GATA2 Guide RNA
agggucucggacuagggaag

SEQ ID NO: 29067 - RNA, 20 nt, Artificial Sequence
  GATA2 Guide RNA
aguccgagacccuguccuag

SEQ ID NO: 29068 - RNA, 20 nt, Artificial Sequence
  GATA2 Guide RNA
cacuucccuaguccgagacc

SEQ ID NO: 29069 - RNA, 20 nt, Artificial Sequence
  GATA2 Guide RNA
cagagaaaccacuucccuag

SEQ ID NO: 29070 - RNA, 20 nt, Artificial Sequence
  GATA2 Guide RNA
cagggucucggacuagggaa

SEQ ID NO: 29071 - RNA, 20 nt, Artificial Sequence
  GATA2 Guide RNA
ccacuucccuaguccgagac

SEQ ID NO: 29072 - RNA, 20 nt, Artificial Sequence
  GATA2 Guide RNA
cccuaguccgagacccuguc

SEQ ID NO: 29073 - RNA, 20 nt, Artificial Sequence
  GATA2 Guide RNA
ccuaguccgagacccugucc

SEQ ID NO: 29074 - RNA, 20 nt, Artificial Sequence
  GATA2 Guide RNA
cggacuagggaagugguuuc

SEQ ID NO: 29075 - RNA, 20 nt, Artificial Sequence
  GATA2 Guide RNA
cuaggacagggucucggacu

SEQ ID NO: 29076 - RNA, 20 nt, Artificial Sequence
  GATA2 Guide RNA
cuaguccgagacccuguccu

SEQ ID NO: 29077 - RNA, 20 nt, Artificial Sequence
  GATA2 Guide RNA
cucggacuagggaagugguu

SEQ ID NO: 29078 - RNA, 20 nt, Artificial Sequence
  GATA2 Guide RNA
cuggcuaggacagggucucg

SEQ ID NO: 29079 - RNA, 20 nt, Artificial Sequence
  GATA2 Guide RNA
cuucccuaguccgagacccu

SEQ ID NO: 29080 - RNA, 20 nt, Artificial Sequence
  GATA2 Guide RNA
gaaaccacuucccuaguccg

SEQ ID NO: 29081 - RNA, 20 nt, Artificial Sequence
  GATA2 Guide RNA
gacagggucucggacuaggg

SEQ ID NO: 29082 - RNA, 20 nt, Artificial Sequence
  GATA2 Guide RNA
gacuagggaagugguuucuc

SEQ ID NO: 29083 - RNA, 20 nt, Artificial Sequence
  GATA2 Guide RNA
gagaaaccacuucccuaguc

SEQ ID NO: 29084 - RNA, 20 nt, Artificial Sequence
  GATA2 Guide RNA
gcagagaaaccacuucccua

SEQ ID NO: 29085 - RNA, 20 nt, Artificial Sequence
  GATA2 Guide RNA
gcuaggacagggucucggac

SEQ ID NO: 29086 - RNA, 20 nt, Artificial Sequence
  GATA2 Guide RNA
gcuggcuaggacagggucuc

SEQ ID NO: 29087 - RNA, 20 nt, Artificial Sequence
  GATA2 Guide RNA
ggacagggucucggacuagg

SEQ ID NO: 29088 - RNA, 20 nt, Artificial Sequence
  GATA2 Guide RNA
ggacuagggaagugguuucu

SEQ ID NO: 29089 - RNA, 20 nt, Artificial Sequence
  GATA2 Guide RNA
ggcuaggacagggucucgga

SEQ ID NO: 29090 - RNA, 20 nt, Artificial Sequence
  GATA2 Guide RNA
gggucucggacuagggaagu

SEQ ID NO: 29091 - RNA, 20 nt, Artificial Sequence
  GATA2 Guide RNA
ggucucggacuagggaagug

SEQ ID NO: 29092 - RNA, 20 nt, Artificial Sequence
  GATA2 Guide RNA
guccgagacccuguccuagc

SEQ ID NO: 29093 - RNA, 20 nt, Artificial Sequence
  GATA2 Guide RNA
gucucggacuagggaagugg

SEQ ID NO: 29094 - RNA, 20 nt, Artificial Sequence
  GATA2 Guide RNA
uaggacagggucucggacua

SEQ ID NO: 29095 - RNA, 20 nt, Artificial Sequence
  GATA2 Guide RNA
uaguccgagacccuguccua

SEQ ID NO: 29096 - RNA, 20 nt, Artificial Sequence
  GATA2 Guide RNA
ucccuaguccgagacccugu

SEQ ID NO: 29097 - RNA, 20 nt, Artificial Sequence
  GATA2 Guide RNA
uccgagacccuguccuagcc

SEQ ID NO: 29098 - RNA, 20 nt, Artificial Sequence
  GATA2 Guide RNA
ucggacuagggaagugguuu

SEQ ID NO: 29099 - RNA, 20 nt, Artificial Sequence
  GATA2 Guide RNA
ucucggacuagggaaguggu

SEQ ID NO: 29100 - RNA, 20 nt, Artificial Sequence
  GATA2 Guide RNA
uggcuaggacagggucucgg

SEQ ID NO: 29101 - RNA, 20 nt, Artificial Sequence
  GATA2 Guide RNA
uucccuaguccgagacccug

SEQ ID NO: 29102 - RNA, 21 nt, Artificial Sequence
  GATA2 Guide RNA
aaaccacuucccuaguccgag

SEQ ID NO: 29103 - RNA, 21 nt, Artificial Sequence
  GATA2 Guide RNA
aaccacuucccuaguccgaga

SEQ ID NO: 29104 - RNA, 21 nt, Artificial Sequence
  GATA2 Guide RNA
aagcagagaaaccacuucccu

SEQ ID NO: 29105 - RNA, 21 nt, Artificial Sequence
  GATA2 Guide RNA
acagggucucggacuagggaa

SEQ ID NO: 29106 - RNA, 21 nt, Artificial Sequence
  GATA2 Guide RNA
accacuucccuaguccgagac

SEQ ID NO: 29107 - RNA, 21 nt, Artificial Sequence
  GATA2 Guide RNA
acuucccuaguccgagacccu

SEQ ID NO: 29108 - RNA, 21 nt, Artificial Sequence
  GATA2 Guide RNA
agaaaccacuucccuaguccg

SEQ ID NO: 29109 - RNA, 21 nt, Artificial Sequence
  GATA2 Guide RNA
agagaaaccacuucccuaguc

SEQ ID NO: 29110 - RNA, 21 nt, Artificial Sequence
  GATA2 Guide RNA
agcagagaaaccacuucccua

SEQ ID NO: 29111 - RNA, 21 nt, Artificial Sequence
  GATA2 Guide RNA
agcuggcuaggacagggucuc

SEQ ID NO: 29112 - RNA, 21 nt, Artificial Sequence
  GATA2 Guide RNA
aggacagggucucggacuagg

SEQ ID NO: 29113 - RNA, 21 nt, Artificial Sequence
  GATA2 Guide RNA
agggucucggacuagggaagu

SEQ ID NO: 29114 - RNA, 21 nt, Artificial Sequence
  GATA2 Guide RNA
aguccgagacccuguccuagc

SEQ ID NO: 29115 - RNA, 21 nt, Artificial Sequence
  GATA2 Guide RNA
cacuucccuaguccgagaccc

SEQ ID NO: 29116 - RNA, 21 nt, Artificial Sequence
  GATA2 Guide RNA
cagagaaaccacuucccuagu

SEQ ID NO: 29117 - RNA, 21 nt, Artificial Sequence
  GATA2 Guide RNA
cagggucucggacuagggaag

SEQ ID NO: 29118 - RNA, 21 nt, Artificial Sequence
  GATA2 Guide RNA
ccacuucccuaguccgagacc

SEQ ID NO: 29119 - RNA, 21 nt, Artificial Sequence
  GATA2 Guide RNA
cccuaguccgagacccugucc

SEQ ID NO: 29120 - RNA, 21 nt, Artificial Sequence
  GATA2 Guide RNA
ccuaguccgagacccuguccu

SEQ ID NO: 29121 - RNA, 21 nt, Artificial Sequence
  GATA2 Guide RNA
cggacuagggaagugguuucu

SEQ ID NO: 29122 - RNA, 21 nt, Artificial Sequence
  GATA2 Guide RNA
cuaggacagggucucggacua

SEQ ID NO: 29123 - RNA, 21 nt, Artificial Sequence
  GATA2 Guide RNA
cuaguccgagacccuguccua

SEQ ID NO: 29124 - RNA, 21 nt, Artificial Sequence
  GATA2 Guide RNA
cucggacuagggaagugguuu

SEQ ID NO: 29125 - RNA, 21 nt, Artificial Sequence
  GATA2 Guide RNA
cuggcuaggacagggucucgg

SEQ ID NO: 29126 - RNA, 21 nt, Artificial Sequence
  GATA2 Guide RNA
cuucccuaguccgagacccug

SEQ ID NO: 29127 - RNA, 21 nt, Artificial Sequence
  GATA2 Guide RNA
gaaaccacuucccuaguccga

SEQ ID NO: 29128 - RNA, 21 nt, Artificial Sequence
  GATA2 Guide RNA
gacagggucucggacuaggga

SEQ ID NO: 29129 - RNA, 21 nt, Artificial Sequence
  GATA2 Guide RNA
gacuagggaagugguuucucu

SEQ ID NO: 29130 - RNA, 21 nt, Artificial Sequence
  GATA2 Guide RNA
gagaaaccacuucccuagucc

SEQ ID NO: 29131 - RNA, 21 nt, Artificial Sequence
  GATA2 Guide RNA
gagcuggcuaggacagggucu

SEQ ID NO: 29132 - RNA, 21 nt, Artificial Sequence
  GATA2 Guide RNA
gcagagaaaccacuucccuag

SEQ ID NO: 29133 - RNA, 21 nt, Artificial Sequence
  GATA2 Guide RNA
gcuaggacagggucucggacu

SEQ ID NO: 29134 - RNA, 21 nt, Artificial Sequence
  GATA2 Guide RNA
gcuggcuaggacagggucucg

SEQ ID NO: 29135 - RNA, 21 nt, Artificial Sequence
  GATA2 Guide RNA
ggacagggucucggacuaggg

SEQ ID NO: 29136 - RNA, 21 nt, Artificial Sequence
  GATA2 Guide RNA
ggacuagggaagugguuucuc

SEQ ID NO: 29137 - RNA, 21 nt, Artificial Sequence
  GATA2 Guide RNA
ggcuaggacagggucucggac

SEQ ID NO: 29138 - RNA, 21 nt, Artificial Sequence
  GATA2 Guide RNA
gggucucggacuagggaagug

SEQ ID NO: 29139 - RNA, 21 nt, Artificial Sequence
  GATA2 Guide RNA
ggucucggacuagggaagugg

SEQ ID NO: 29140 - RNA, 21 nt, Artificial Sequence
  GATA2 Guide RNA
guccgagacccuguccuagcc

SEQ ID NO: 29141 - RNA, 21 nt, Artificial Sequence
  GATA2 Guide RNA
gucucggacuagggaaguggu

SEQ ID NO: 29142 - RNA, 21 nt, Artificial Sequence
  GATA2 Guide RNA
uaggacagggucucggacuag

SEQ ID NO: 29143 - RNA, 21 nt, Artificial Sequence
  GATA2 Guide RNA
uaguccgagacccuguccuag

SEQ ID NO: 29144 - RNA, 21 nt, Artificial Sequence
  GATA2 Guide RNA
ucccuaguccgagacccuguc

SEQ ID NO: 29145 - RNA, 21 nt, Artificial Sequence
  GATA2 Guide RNA
uccgagacccuguccuagcca

SEQ ID NO: 29146 - RNA, 21 nt, Artificial Sequence
  GATA2 Guide RNA
ucggacuagggaagugguuuc

SEQ ID NO: 29147 - RNA, 21 nt, Artificial Sequence
  GATA2 Guide RNA
ucucggacuagggaagugguu

SEQ ID NO: 29148 - RNA, 21 nt, Artificial Sequence
  GATA2 Guide RNA
uggcuaggacagggucucgga

SEQ ID NO: 29149 - RNA, 21 nt, Artificial Sequence
  GATA2 Guide RNA
uucccuaguccgagacccugu

SEQ ID NO: 29150 - RNA, 22 nt, Artificial Sequence
  GATA2 Guide RNA
aaaccacuucccuaguccgaga

SEQ ID NO: 29151 - RNA, 22 nt, Artificial Sequence
  GATA2 Guide RNA
aaccacuucccuaguccgagac

SEQ ID NO: 29152 - RNA, 22 nt, Artificial Sequence
  GATA2 Guide RNA
aagcagagaaaccacuucccua

SEQ ID NO: 29153 - RNA, 22 nt, Artificial Sequence
  GATA2 Guide RNA
acagggucucggacuagggaag

SEQ ID NO: 29154 - RNA, 22 nt, Artificial Sequence
  GATA2 Guide RNA
accacuucccuaguccgagacc

SEQ ID NO: 29155 - RNA, 22 nt, Artificial Sequence
  GATA2 Guide RNA
acuucccuaguccgagacccug

SEQ ID NO: 29156 - RNA, 22 nt, Artificial Sequence
  GATA2 Guide RNA
agaaaccacuucccuaguccga

SEQ ID NO: 29157 - RNA, 22 nt, Artificial Sequence
  GATA2 Guide RNA
agagaaaccacuucccuagucc

SEQ ID NO: 29158 - RNA, 22 nt, Artificial Sequence
  GATA2 Guide RNA
agcagagaaaccacuucccuag

SEQ ID NO: 29159 - RNA, 22 nt, Artificial Sequence
  GATA2 Guide RNA
agcuggcuaggacagggucucg

SEQ ID NO: 29160 - RNA, 22 nt, Artificial Sequence
  GATA2 Guide RNA
aggacagggucucggacuaggg

SEQ ID NO: 29161 - RNA, 22 nt, Artificial Sequence
  GATA2 Guide RNA
agggucucggacuagggaagug

SEQ ID NO: 29162 - RNA, 22 nt, Artificial Sequence
  GATA2 Guide RNA
aguccgagacccuguccuagcc

SEQ ID NO: 29163 - RNA, 22 nt, Artificial Sequence
  GATA2 Guide RNA
cacuucccuaguccgagacccu

SEQ ID NO: 29164 - RNA, 22 nt, Artificial Sequence
  GATA2 Guide RNA
cagagaaaccacuucccuaguc

SEQ ID NO: 29165 - RNA, 22 nt, Artificial Sequence
  GATA2 Guide RNA
cagggucucggacuagggaagu

SEQ ID NO: 29166 - RNA, 22 nt, Artificial Sequence
  GATA2 Guide RNA
ccacuucccuaguccgagaccc

SEQ ID NO: 29167 - RNA, 22 nt, Artificial Sequence
  GATA2 Guide RNA
cccuaguccgagacccuguccu

SEQ ID NO: 29168 - RNA, 22 nt, Artificial Sequence
  GATA2 Guide RNA
ccuaguccgagacccuguccua

SEQ ID NO: 29169 - RNA, 22 nt, Artificial Sequence
  GATA2 Guide RNA
cggacuagggaagugguuucuc

SEQ ID NO: 29170 - RNA, 22 nt, Artificial Sequence
  GATA2 Guide RNA
cuaggacagggucucggacuag

SEQ ID NO: 29171 - RNA, 22 nt, Artificial Sequence
  GATA2 Guide RNA
cuaguccgagacccuguccuag

SEQ ID NO: 29172 - RNA, 22 nt, Artificial Sequence
  GATA2 Guide RNA
cucggacuagggaagugguuuc

SEQ ID NO: 29173 - RNA, 22 nt, Artificial Sequence
  GATA2 Guide RNA
cuggcuaggacagggucucgga

SEQ ID NO: 29174 - RNA, 22 nt, Artificial Sequence
  GATA2 Guide RNA
cuucccuaguccgagacccugu

SEQ ID NO: 29175 - RNA, 22 nt, Artificial Sequence
  GATA2 Guide RNA
gaaaccacuucccuaguccgag

SEQ ID NO: 29176 - RNA, 22 nt, Artificial Sequence
  GATA2 Guide RNA
gacagggucucggacuagggaa

SEQ ID NO: 29177 - RNA, 22 nt, Artificial Sequence
  GATA2 Guide RNA
gacuagggaagugguuucucug

SEQ ID NO: 29178 - RNA, 22 nt, Artificial Sequence
  GATA2 Guide RNA
gagaaaccacuucccuaguccg

SEQ ID NO: 29179 - RNA, 22 nt, Artificial Sequence
  GATA2 Guide RNA
gagcuggcuaggacagggucuc

SEQ ID NO: 29180 - RNA, 22 nt, Artificial Sequence
  GATA2 Guide RNA
gcagagaaaccacuucccuagu

SEQ ID NO: 29181 - RNA, 22 nt, Artificial Sequence
  GATA2 Guide RNA
gcuaggacagggucucggacua

SEQ ID NO: 29182 - RNA, 22 nt, Artificial Sequence
  GATA2 Guide RNA
gcuggcuaggacagggucucgg

SEQ ID NO: 29183 - RNA, 22 nt, Artificial Sequence
  GATA2 Guide RNA
ggacagggucucggacuaggga

SEQ ID NO: 29184 - RNA, 22 nt, Artificial Sequence
  GATA2 Guide RNA
ggacuagggaagugguuucucu

SEQ ID NO: 29185 - RNA, 22 nt, Artificial Sequence
  GATA2 Guide RNA
ggagcuggcuaggacagggucu

SEQ ID NO: 29186 - RNA, 22 nt, Artificial Sequence
  GATA2 Guide RNA
ggcuaggacagggucucggacu

SEQ ID NO: 29187 - RNA, 22 nt, Artificial Sequence
  GATA2 Guide RNA
gggucucggacuagggaagugg

SEQ ID NO: 29188 - RNA, 22 nt, Artificial Sequence
  GATA2 Guide RNA
ggucucggacuagggaaguggu

SEQ ID NO: 29189 - RNA, 22 nt, Artificial Sequence
  GATA2 Guide RNA
guccgagacccuguccuagcca

SEQ ID NO: 29190 - RNA, 22 nt, Artificial Sequence
  GATA2 Guide RNA
gucucggacuagggaagugguu

SEQ ID NO: 29191 - RNA, 22 nt, Artificial Sequence
  GATA2 Guide RNA
uaagcagagaaaccacuucccu

SEQ ID NO: 29192 - RNA, 22 nt, Artificial Sequence
  GATA2 Guide RNA
uaggacagggucucggacuagg

SEQ ID NO: 29193 - RNA, 22 nt, Artificial Sequence
  GATA2 Guide RNA
uaguccgagacccuguccuagc

SEQ ID NO: 29194 - RNA, 22 nt, Artificial Sequence
  GATA2 Guide RNA
ucccuaguccgagacccugucc

SEQ ID NO: 29195 - RNA, 22 nt, Artificial Sequence
  GATA2 Guide RNA
uccgagacccuguccuagccag

SEQ ID NO: 29196 - RNA, 22 nt, Artificial Sequence
  GATA2 Guide RNA
ucggacuagggaagugguuucu

SEQ ID NO: 29197 - RNA, 22 nt, Artificial Sequence
  GATA2 Guide RNA
ucucggacuagggaagugguuu

SEQ ID NO: 29198 - RNA, 22 nt, Artificial Sequence
  GATA2 Guide RNA
uggcuaggacagggucucggac

SEQ ID NO: 29199 - RNA, 22 nt, Artificial Sequence
  GATA2 Guide RNA
uucccuaguccgagacccuguc

SEQ ID NO: 29200 - RNA, 20 nt, Artificial Sequence
  GATA2 Guide RNA
aaaccacuucccuagcccga

SEQ ID NO: 29201 - RNA, 20 nt, Artificial Sequence
  GATA2 Guide RNA
aaccacuucccuagcccgag

SEQ ID NO: 29202 - RNA, 20 nt, Artificial Sequence
  GATA2 Guide RNA
acagggucucgggcuaggga

SEQ ID NO: 29203 - RNA, 20 nt, Artificial Sequence
  GATA2 Guide RNA
accacuucccuagcccgaga

SEQ ID NO: 29204 - RNA, 20 nt, Artificial Sequence
  GATA2 Guide RNA
acuucccuagcccgagaccc

SEQ ID NO: 29205 - RNA, 20 nt, Artificial Sequence
  GATA2 Guide RNA
agaaaccacuucccuagccc

SEQ ID NO: 29206 - RNA, 20 nt, Artificial Sequence
  GATA2 Guide RNA
agagaaaccacuucccuagc

SEQ ID NO: 29207 - RNA, 20 nt, Artificial Sequence
  GATA2 Guide RNA
agcccgagacccuguccuag

SEQ ID NO: 29208 - RNA, 20 nt, Artificial Sequence
  GATA2 Guide RNA
aggacagggucucgggcuag

SEQ ID NO: 29209 - RNA, 20 nt, Artificial Sequence
  GATA2 Guide RNA
agggucucgggcuagggaag

SEQ ID NO: 29210 - RNA, 20 nt, Artificial Sequence
  GATA2 Guide RNA
cacuucccuagcccgagacc

SEQ ID NO: 29211 - RNA, 20 nt, Artificial Sequence
  GATA2 Guide RNA
cagggucucgggcuagggaa

SEQ ID NO: 29212 - RNA, 20 nt, Artificial Sequence
  GATA2 Guide RNA
ccacuucccuagcccgagac

SEQ ID NO: 29213 - RNA, 20 nt, Artificial Sequence
  GATA2 Guide RNA
cccgagacccuguccuagcc

SEQ ID NO: 29214 - RNA, 20 nt, Artificial Sequence
  GATA2 Guide RNA
cccuagcccgagacccuguc

SEQ ID NO: 29215 - RNA, 20 nt, Artificial Sequence
  GATA2 Guide RNA
ccuagcccgagacccugucc

SEQ ID NO: 29216 - RNA, 20 nt, Artificial Sequence
  GATA2 Guide RNA
cgggcuagggaagugguuuc

SEQ ID NO: 29217 - RNA, 20 nt, Artificial Sequence
  GATA2 Guide RNA
cuagcccgagacccuguccu

SEQ ID NO: 29218 - RNA, 20 nt, Artificial Sequence
  GATA2 Guide RNA
cuaggacagggucucgggcu

SEQ ID NO: 29219 - RNA, 20 nt, Artificial Sequence
  GATA2 Guide RNA
cucgggcuagggaagugguu

SEQ ID NO: 29220 - RNA, 20 nt, Artificial Sequence
  GATA2 Guide RNA
cuucccuagcccgagacccu

SEQ ID NO: 29221 - RNA, 20 nt, Artificial Sequence
  GATA2 Guide RNA
gaaaccacuucccuagcccg

SEQ ID NO: 29222 - RNA, 20 nt, Artificial Sequence
  GATA2 Guide RNA
gacagggucucgggcuaggg

SEQ ID NO: 29223 - RNA, 20 nt, Artificial Sequence
  GATA2 Guide RNA
gagaaaccacuucccuagcc

SEQ ID NO: 29224 - RNA, 20 nt, Artificial Sequence
  GATA2 Guide RNA
gcccgagacccuguccuagc

SEQ ID NO: 29225 - RNA, 20 nt, Artificial Sequence
  GATA2 Guide RNA
gcuaggacagggucucgggc

SEQ ID NO: 29226 - RNA, 20 nt, Artificial Sequence
  GATA2 Guide RNA
ggacagggucucgggcuagg

SEQ ID NO: 29227 - RNA, 20 nt, Artificial Sequence
  GATA2 Guide RNA
ggcuaggacagggucucggg

SEQ ID NO: 29228 - RNA, 20 nt, Artificial Sequence
  GATA2 Guide RNA
ggcuagggaagugguuucuc

SEQ ID NO: 29229 - RNA, 20 nt, Artificial Sequence
  GATA2 Guide RNA
gggcuagggaagugguuucu

SEQ ID NO: 29230 - RNA, 20 nt, Artificial Sequence
  GATA2 Guide RNA
gggucucgggcuagggaagu

SEQ ID NO: 29231 - RNA, 20 nt, Artificial Sequence
  GATA2 Guide RNA
ggucucgggcuagggaagug

SEQ ID NO: 29232 - RNA, 20 nt, Artificial Sequence
  GATA2 Guide RNA
gucucgggcuagggaagugg

SEQ ID NO: 29233 - RNA, 20 nt, Artificial Sequence
  GATA2 Guide RNA
uagcccgagacccuguccua

SEQ ID NO: 29234 - RNA, 20 nt, Artificial Sequence
  GATA2 Guide RNA
uaggacagggucucgggcua

SEQ ID NO: 29235 - RNA, 20 nt, Artificial Sequence
  GATA2 Guide RNA
ucccuagcccgagacccugu

SEQ ID NO: 29236 - RNA, 20 nt, Artificial Sequence
  GATA2 Guide RNA
ucgggcuagggaagugguuu

SEQ ID NO: 29237 - RNA, 20 nt, Artificial Sequence
  GATA2 Guide RNA
ucucgggcuagggaaguggu

SEQ ID NO: 29238 - RNA, 20 nt, Artificial Sequence
  GATA2 Guide RNA
uucccuagcccgagacccug

SEQ ID NO: 29239 - RNA, 21 nt, Artificial Sequence
  GATA2 Guide RNA
aaaccacuucccuagcccgag

SEQ ID NO: 29240 - RNA, 21 nt, Artificial Sequence
  GATA2 Guide RNA
aaccacuucccuagcccgaga

SEQ ID NO: 29241 - RNA, 21 nt, Artificial Sequence
  GATA2 Guide RNA
acagggucucgggcuagggaa

SEQ ID NO: 29242 - RNA, 21 nt, Artificial Sequence
  GATA2 Guide RNA
accacuucccuagcccgagac

SEQ ID NO: 29243 - RNA, 21 nt, Artificial Sequence
  GATA2 Guide RNA
acuucccuagcccgagacccu

SEQ ID NO: 29244 - RNA, 21 nt, Artificial Sequence
  GATA2 Guide RNA
agaaaccacuucccuagcccg

SEQ ID NO: 29245 - RNA, 21 nt, Artificial Sequence
  GATA2 Guide RNA
agagaaaccacuucccuagcc

SEQ ID NO: 29246 - RNA, 21 nt, Artificial Sequence
  GATA2 Guide RNA
agcccgagacccuguccuagc

SEQ ID NO: 29247 - RNA, 21 nt, Artificial Sequence
  GATA2 Guide RNA
aggacagggucucgggcuagg

SEQ ID NO: 29248 - RNA, 21 nt, Artificial Sequence
  GATA2 Guide RNA
agggucucgggcuagggaagu

SEQ ID NO: 29249 - RNA, 21 nt, Artificial Sequence
  GATA2 Guide RNA
cacuucccuagcccgagaccc

SEQ ID NO: 29250 - RNA, 21 nt, Artificial Sequence
  GATA2 Guide RNA
cagagaaaccacuucccuagc

SEQ ID NO: 29251 - RNA, 21 nt, Artificial Sequence
  GATA2 Guide RNA
cagggucucgggcuagggaag

SEQ ID NO: 29252 - RNA, 21 nt, Artificial Sequence
  GATA2 Guide RNA
ccacuucccuagcccgagacc

SEQ ID NO: 29253 - RNA, 21 nt, Artificial Sequence
  GATA2 Guide RNA
cccgagacccuguccuagcca

SEQ ID NO: 29254 - RNA, 21 nt, Artificial Sequence
  GATA2 Guide RNA
cccuagcccgagacccugucc

SEQ ID NO: 29255 - RNA, 21 nt, Artificial Sequence
  GATA2 Guide RNA
ccuagcccgagacccuguccu

SEQ ID NO: 29256 - RNA, 21 nt, Artificial Sequence
  GATA2 Guide RNA
cgggcuagggaagugguuucu

SEQ ID NO: 29257 - RNA, 21 nt, Artificial Sequence
  GATA2 Guide RNA
cuagcccgagacccuguccua

SEQ ID NO: 29258 - RNA, 21 nt, Artificial Sequence
  GATA2 Guide RNA
cuaggacagggucucgggcua

SEQ ID NO: 29259 - RNA, 21 nt, Artificial Sequence
  GATA2 Guide RNA
cucgggcuagggaagugguuu

SEQ ID NO: 29260 - RNA, 21 nt, Artificial Sequence
  GATA2 Guide RNA
cuucccuagcccgagacccug

SEQ ID NO: 29261 - RNA, 21 nt, Artificial Sequence
  GATA2 Guide RNA
gaaaccacuucccuagcccga

SEQ ID NO: 29262 - RNA, 21 nt, Artificial Sequence
  GATA2 Guide RNA
gacagggucucgggcuaggga

SEQ ID NO: 29263 - RNA, 21 nt, Artificial Sequence
  GATA2 Guide RNA
gagaaaccacuucccuagccc

SEQ ID NO: 29264 - RNA, 21 nt, Artificial Sequence
  GATA2 Guide RNA
gcccgagacccuguccuagcc

SEQ ID NO: 29265 - RNA, 21 nt, Artificial Sequence
  GATA2 Guide RNA
gcuaggacagggucucgggcu

SEQ ID NO: 29266 - RNA, 21 nt, Artificial Sequence
  GATA2 Guide RNA
ggacagggucucgggcuaggg

SEQ ID NO: 29267 - RNA, 21 nt, Artificial Sequence
  GATA2 Guide RNA
ggcuaggacagggucucgggc

SEQ ID NO: 29268 - RNA, 21 nt, Artificial Sequence
  GATA2 Guide RNA
ggcuagggaagugguuucucu

SEQ ID NO: 29269 - RNA, 21 nt, Artificial Sequence
  GATA2 Guide RNA
gggcuagggaagugguuucuc

SEQ ID NO: 29270 - RNA, 21 nt, Artificial Sequence
  GATA2 Guide RNA
gggucucgggcuagggaagug

SEQ ID NO: 29271 - RNA, 21 nt, Artificial Sequence
  GATA2 Guide RNA
ggucucgggcuagggaagugg

SEQ ID NO: 29272 - RNA, 21 nt, Artificial Sequence
  GATA2 Guide RNA
gucucgggcuagggaaguggu

SEQ ID NO: 29273 - RNA, 21 nt, Artificial Sequence
  GATA2 Guide RNA
uagcccgagacccuguccuag

SEQ ID NO: 29274 - RNA, 21 nt, Artificial Sequence
  GATA2 Guide RNA
uaggacagggucucgggcuag

SEQ ID NO: 29275 - RNA, 21 nt, Artificial Sequence
  GATA2 Guide RNA
ucccuagcccgagacccuguc

SEQ ID NO: 29276 - RNA, 21 nt, Artificial Sequence
  GATA2 Guide RNA
ucgggcuagggaagugguuuc

SEQ ID NO: 29277 - RNA, 21 nt, Artificial Sequence
  GATA2 Guide RNA
ucucgggcuagggaagugguu

SEQ ID NO: 29278 - RNA, 21 nt, Artificial Sequence
  GATA2 Guide RNA
uggcuaggacagggucucggg

SEQ ID NO: 29279 - RNA, 21 nt, Artificial Sequence
  GATA2 Guide RNA
uucccuagcccgagacccugu

SEQ ID NO: 29280 - RNA, 22 nt, Artificial Sequence
  GATA2 Guide RNA
aaaccacuucccuagcccgaga

SEQ ID NO: 29281 - RNA, 22 nt, Artificial Sequence
  GATA2 Guide RNA
aaccacuucccuagcccgagac

SEQ ID NO: 29282 - RNA, 22 nt, Artificial Sequence
  GATA2 Guide RNA
acagggucucgggcuagggaag

SEQ ID NO: 29283 - RNA, 22 nt, Artificial Sequence
  GATA2 Guide RNA
accacuucccuagcccgagacc

SEQ ID NO: 29284 - RNA, 22 nt, Artificial Sequence
  GATA2 Guide RNA
acuucccuagcccgagacccug

SEQ ID NO: 29285 - RNA, 22 nt, Artificial Sequence
  GATA2 Guide RNA
agaaaccacuucccuagcccga

SEQ ID NO: 29286 - RNA, 22 nt, Artificial Sequence
  GATA2 Guide RNA
agagaaaccacuucccuagccc

SEQ ID NO: 29287 - RNA, 22 nt, Artificial Sequence
  GATA2 Guide RNA
agcccgagacccuguccuagcc

SEQ ID NO: 29288 - RNA, 22 nt, Artificial Sequence
  GATA2 Guide RNA
aggacagggucucgggcuaggg

SEQ ID NO: 29289 - RNA, 22 nt, Artificial Sequence
  GATA2 Guide RNA
agggucucgggcuagggaagug

SEQ ID NO: 29290 - RNA, 22 nt, Artificial Sequence
  GATA2 Guide RNA
cacuucccuagcccgagacccu

SEQ ID NO: 29291 - RNA, 22 nt, Artificial Sequence
  GATA2 Guide RNA
cagagaaaccacuucccuagcc

SEQ ID NO: 29292 - RNA, 22 nt, Artificial Sequence
  GATA2 Guide RNA
cagggucucgggcuagggaagu

SEQ ID NO: 29293 - RNA, 22 nt, Artificial Sequence
  GATA2 Guide RNA
ccacuucccuagcccgagaccc

SEQ ID NO: 29294 - RNA, 22 nt, Artificial Sequence
  GATA2 Guide RNA
cccgagacccuguccuagccag

SEQ ID NO: 29295 - RNA, 22 nt, Artificial Sequence
  GATA2 Guide RNA
cccuagcccgagacccuguccu

SEQ ID NO: 29296 - RNA, 22 nt, Artificial Sequence
  GATA2 Guide RNA
ccuagcccgagacccuguccua

SEQ ID NO: 29297 - RNA, 22 nt, Artificial Sequence
  GATA2 Guide RNA
cgggcuagggaagugguuucuc

SEQ ID NO: 29298 - RNA, 22 nt, Artificial Sequence
  GATA2 Guide RNA
cuagcccgagacccuguccuag

SEQ ID NO: 29299 - RNA, 22 nt, Artificial Sequence
  GATA2 Guide RNA
cuaggacagggucucgggcuag

SEQ ID NO: 29300 - RNA, 22 nt, Artificial Sequence
  GATA2 Guide RNA
cucgggcuagggaagugguuuc

SEQ ID NO: 29301 - RNA, 22 nt, Artificial Sequence
  GATA2 Guide RNA
cuggcuaggacagggucucggg

SEQ ID NO: 29302 - RNA, 22 nt, Artificial Sequence
  GATA2 Guide RNA
cuucccuagcccgagacccugu

SEQ ID NO: 29303 - RNA, 22 nt, Artificial Sequence
  GATA2 Guide RNA
gaaaccacuucccuagcccgag

SEQ ID NO: 29304 - RNA, 22 nt, Artificial Sequence
  GATA2 Guide RNA
gacagggucucgggcuagggaa

SEQ ID NO: 29305 - RNA, 22 nt, Artificial Sequence
  GATA2 Guide RNA
gagaaaccacuucccuagcccg

SEQ ID NO: 29306 - RNA, 22 nt, Artificial Sequence
  GATA2 Guide RNA
gcagagaaaccacuucccuagc

SEQ ID NO: 29307 - RNA, 22 nt, Artificial Sequence
  GATA2 Guide RNA
gcccgagacccuguccuagcca

SEQ ID NO: 29308 - RNA, 22 nt, Artificial Sequence
  GATA2 Guide RNA
gcuaggacagggucucgggcua

SEQ ID NO: 29309 - RNA, 22 nt, Artificial Sequence
  GATA2 Guide RNA
ggacagggucucgggcuaggga

SEQ ID NO: 29310 - RNA, 22 nt, Artificial Sequence
  GATA2 Guide RNA
ggcuaggacagggucucgggcu

SEQ ID NO: 29311 - RNA, 22 nt, Artificial Sequence
  GATA2 Guide RNA
ggcuagggaagugguuucucug

SEQ ID NO: 29312 - RNA, 22 nt, Artificial Sequence
  GATA2 Guide RNA
gggcuagggaagugguuucucu

SEQ ID NO: 29313 - RNA, 22 nt, Artificial Sequence
  GATA2 Guide RNA
gggucucgggcuagggaagugg

SEQ ID NO: 29314 - RNA, 22 nt, Artificial Sequence
  GATA2 Guide RNA
ggucucgggcuagggaaguggu

SEQ ID NO: 29315 - RNA, 22 nt, Artificial Sequence
  GATA2 Guide RNA
gucucgggcuagggaagugguu

SEQ ID NO: 29316 - RNA, 22 nt, Artificial Sequence
  GATA2 Guide RNA
uagcccgagacccuguccuagc

SEQ ID NO: 29317 - RNA, 22 nt, Artificial Sequence
  GATA2 Guide RNA
uaggacagggucucgggcuagg

SEQ ID NO: 29318 - RNA, 22 nt, Artificial Sequence
  GATA2 Guide RNA
ucccuagcccgagacccugucc

SEQ ID NO: 29319 - RNA, 22 nt, Artificial Sequence
  GATA2 Guide RNA
ucgggcuagggaagugguuucu

SEQ ID NO: 29320 - RNA, 22 nt, Artificial Sequence
  GATA2 Guide RNA
ucucgggcuagggaagugguuu

SEQ ID NO: 29321 - RNA, 22 nt, Artificial Sequence
  GATA2 Guide RNA
uggcuaggacagggucucgggc

SEQ ID NO: 29322 - RNA, 22 nt, Artificial Sequence
  GATA2 Guide RNA
uucccuagcccgagacccuguc

SEQ ID NO: 29323 - RNA, 20 nt, Artificial Sequence
  GATA2 Guide RNA
aagcccuucuggcgcucacu

SEQ ID NO: 29324 - RNA, 20 nt, Artificial Sequence
  GATA2 Guide RNA
aagcugcugcccugagugag

SEQ ID NO: 29325 - RNA, 20 nt, Artificial Sequence
  GATA2 Guide RNA
acgggaagcccuucuggcgc

SEQ ID NO: 29326 - RNA, 20 nt, Artificial Sequence
  GATA2 Guide RNA
agcccuucuggcgcucacuc

SEQ ID NO: 29327 - RNA, 20 nt, Artificial Sequence
  GATA2 Guide RNA
agcgccagaagggcuucccg

SEQ ID NO: 29328 - RNA, 20 nt, Artificial Sequence
  GATA2 Guide RNA
agcugcugcccugagugagc

SEQ ID NO: 29329 - RNA, 20 nt, Artificial Sequence
  GATA2 Guide RNA
agugagcgccagaagggcuu

SEQ ID NO: 29330 - RNA, 20 nt, Artificial Sequence
  GATA2 Guide RNA
cccugagugagcgccagaag

SEQ ID NO: 29331 - RNA, 20 nt, Artificial Sequence
  GATA2 Guide RNA
cccuucuggcgcucacucag

SEQ ID NO: 29332 - RNA, 20 nt, Artificial Sequence
  GATA2 Guide RNA
ccugagugagcgccagaagg

SEQ ID NO: 29333 - RNA, 20 nt, Artificial Sequence
  GATA2 Guide RNA
ccuucuggcgcucacucagg

SEQ ID NO: 29334 - RNA, 20 nt, Artificial Sequence
  GATA2 Guide RNA
cgcucacucagggcagcagc

SEQ ID NO: 29335 - RNA, 20 nt, Artificial Sequence
  GATA2 Guide RNA
cgggaagcccuucuggcgcu

SEQ ID NO: 29336 - RNA, 20 nt, Artificial Sequence
  GATA2 Guide RNA
cugagugagcgccagaaggg

SEQ ID NO: 29337 - RNA, 20 nt, Artificial Sequence
  GATA2 Guide RNA
cugcccugagugagcgccag

SEQ ID NO: 29338 - RNA, 20 nt, Artificial Sequence
  GATA2 Guide RNA
cugcugcccugagugagcgc

SEQ ID NO: 29339 - RNA, 20 nt, Artificial Sequence
  GATA2 Guide RNA
cuggcgcucacucagggcag

SEQ ID NO: 29340 - RNA, 20 nt, Artificial Sequence
  GATA2 Guide RNA
cuuacgggaagcccuucugg

SEQ ID NO: 29341 - RNA, 20 nt, Artificial Sequence
  GATA2 Guide RNA
cuucuggcgcucacucaggg

SEQ ID NO: 29342 - RNA, 20 nt, Artificial Sequence
  GATA2 Guide RNA
gaagcccuucuggcgcucac

SEQ ID NO: 29343 - RNA, 20 nt, Artificial Sequence
  GATA2 Guide RNA
gaagcugcugcccugaguga

SEQ ID NO: 29344 - RNA, 20 nt, Artificial Sequence
  GATA2 Guide RNA
gagcgccagaagggcuuccc

SEQ ID NO: 29345 - RNA, 20 nt, Artificial Sequence
  GATA2 Guide RNA
gagugagcgccagaagggcu

SEQ ID NO: 29346 - RNA, 20 nt, Artificial Sequence
  GATA2 Guide RNA
gcccugagugagcgccagaa

SEQ ID NO: 29347 - RNA, 20 nt, Artificial Sequence
  GATA2 Guide RNA
gcccuucuggcgcucacuca

SEQ ID NO: 29348 - RNA, 20 nt, Artificial Sequence
  GATA2 Guide RNA
gcgccagaagggcuucccgu

SEQ ID NO: 29349 - RNA, 20 nt, Artificial Sequence
  GATA2 Guide RNA
gcgcucacucagggcagcag

SEQ ID NO: 29350 - RNA, 20 nt, Artificial Sequence
  GATA2 Guide RNA
gcucacucagggcagcagcu

SEQ ID NO: 29351 - RNA, 20 nt, Artificial Sequence
  GATA2 Guide RNA
gcugcccugagugagcgcca

SEQ ID NO: 29352 - RNA, 20 nt, Artificial Sequence
  GATA2 Guide RNA
gcugcugcccugagugagcg

SEQ ID NO: 29353 - RNA, 20 nt, Artificial Sequence
  GATA2 Guide RNA
ggaagcccuucuggcgcuca

SEQ ID NO: 29354 - RNA, 20 nt, Artificial Sequence
  GATA2 Guide RNA
ggaagcugcugcccugagug

SEQ ID NO: 29355 - RNA, 20 nt, Artificial Sequence
  GATA2 Guide RNA
ggcgcucacucagggcagca

SEQ ID NO: 29356 - RNA, 20 nt, Artificial Sequence
  GATA2 Guide RNA
gggaagcccuucuggcgcuc

SEQ ID NO: 29357 - RNA, 20 nt, Artificial Sequence
  GATA2 Guide RNA
gggaagcugcugcccugagu

SEQ ID NO: 29358 - RNA, 20 nt, Artificial Sequence
  GATA2 Guide RNA
gugagcgccagaagggcuuc

SEQ ID NO: 29359 - RNA, 20 nt, Artificial Sequence
  GATA2 Guide RNA
uacgggaagcccuucuggcg

SEQ ID NO: 29360 - RNA, 20 nt, Artificial Sequence
  GATA2 Guide RNA
ucuggcgcucacucagggca

SEQ ID NO: 29361 - RNA, 20 nt, Artificial Sequence
  GATA2 Guide RNA
ucuuacgggaagcccuucug

SEQ ID NO: 29362 - RNA, 20 nt, Artificial Sequence
  GATA2 Guide RNA
ugagcgccagaagggcuucc

SEQ ID NO: 29363 - RNA, 20 nt, Artificial Sequence
  GATA2 Guide RNA
ugagugagcgccagaagggc

SEQ ID NO: 29364 - RNA, 20 nt, Artificial Sequence
  GATA2 Guide RNA
ugcccugagugagcgccaga

SEQ ID NO: 29365 - RNA, 20 nt, Artificial Sequence
  GATA2 Guide RNA
ugcugcccugagugagcgcc

SEQ ID NO: 29366 - RNA, 20 nt, Artificial Sequence
  GATA2 Guide RNA
uggcgcucacucagggcagc

SEQ ID NO: 29367 - RNA, 20 nt, Artificial Sequence
  GATA2 Guide RNA
uuacgggaagcccuucuggc

SEQ ID NO: 29368 - RNA, 20 nt, Artificial Sequence
  GATA2 Guide RNA
uucuggcgcucacucagggc

SEQ ID NO: 29369 - RNA, 21 nt, Artificial Sequence
  GATA2 Guide RNA
aagcccuucuggcgcucacuc

SEQ ID NO: 29370 - RNA, 21 nt, Artificial Sequence
  GATA2 Guide RNA
aagcugcugcccugagugagc

SEQ ID NO: 29371 - RNA, 21 nt, Artificial Sequence
  GATA2 Guide RNA
acgggaagcccuucuggcgcu

SEQ ID NO: 29372 - RNA, 21 nt, Artificial Sequence
  GATA2 Guide RNA
agcccuucuggcgcucacuca

SEQ ID NO: 29373 - RNA, 21 nt, Artificial Sequence
  GATA2 Guide RNA
agcgccagaagggcuucccgu

SEQ ID NO: 29374 - RNA, 21 nt, Artificial Sequence
  GATA2 Guide RNA
agcugcugcccugagugagcg

SEQ ID NO: 29375 - RNA, 21 nt, Artificial Sequence
  GATA2 Guide RNA
agugagcgccagaagggcuuc

SEQ ID NO: 29376 - RNA, 21 nt, Artificial Sequence
  GATA2 Guide RNA
cccugagugagcgccagaagg

SEQ ID NO: 29377 - RNA, 21 nt, Artificial Sequence
  GATA2 Guide RNA
cccuucuggcgcucacucagg

SEQ ID NO: 29378 - RNA, 21 nt, Artificial Sequence
  GATA2 Guide RNA
ccugagugagcgccagaaggg

SEQ ID NO: 29379 - RNA, 21 nt, Artificial Sequence
  GATA2 Guide RNA
ccuucuggcgcucacucaggg

SEQ ID NO: 29380 - RNA, 21 nt, Artificial Sequence
  GATA2 Guide RNA
cgcucacucagggcagcagcu

SEQ ID NO: 29381 - RNA, 21 nt, Artificial Sequence
  GATA2 Guide RNA
cgggaagcccuucuggcgcuc

SEQ ID NO: 29382 - RNA, 21 nt, Artificial Sequence
  GATA2 Guide RNA
cucuuacgggaagcccuucug

SEQ ID NO: 29383 - RNA, 21 nt, Artificial Sequence
  GATA2 Guide RNA
cugagugagcgccagaagggc

SEQ ID NO: 29384 - RNA, 21 nt, Artificial Sequence
  GATA2 Guide RNA
cugcccugagugagcgccaga

SEQ ID NO: 29385 - RNA, 21 nt, Artificial Sequence
  GATA2 Guide RNA
cugcugcccugagugagcgcc

SEQ ID NO: 29386 - RNA, 21 nt, Artificial Sequence
  GATA2 Guide RNA
cuggcgcucacucagggcagc

SEQ ID NO: 29387 - RNA, 21 nt, Artificial Sequence
  GATA2 Guide RNA
cuuacgggaagcccuucuggc

SEQ ID NO: 29388 - RNA, 21 nt, Artificial Sequence
  GATA2 Guide RNA
cuucuggcgcucacucagggc

SEQ ID NO: 29389 - RNA, 21 nt, Artificial Sequence
  GATA2 Guide RNA
gaagcccuucuggcgcucacu

SEQ ID NO: 29390 - RNA, 21 nt, Artificial Sequence
  GATA2 Guide RNA
gaagcugcugcccugagugag

SEQ ID NO: 29391 - RNA, 21 nt, Artificial Sequence
  GATA2 Guide RNA
gagcgccagaagggcuucccg

SEQ ID NO: 29392 - RNA, 21 nt, Artificial Sequence
  GATA2 Guide RNA
gagugagcgccagaagggcuu

SEQ ID NO: 29393 - RNA, 21 nt, Artificial Sequence
  GATA2 Guide RNA
gcccugagugagcgccagaag

SEQ ID NO: 29394 - RNA, 21 nt, Artificial Sequence
  GATA2 Guide RNA
gcccuucuggcgcucacucag

SEQ ID NO: 29395 - RNA, 21 nt, Artificial Sequence
  GATA2 Guide RNA
gcgccagaagggcuucccgua

SEQ ID NO: 29396 - RNA, 21 nt, Artificial Sequence
  GATA2 Guide RNA
gcgcucacucagggcagcagc

SEQ ID NO: 29397 - RNA, 21 nt, Artificial Sequence
  GATA2 Guide RNA
gcucacucagggcagcagcuu

SEQ ID NO: 29398 - RNA, 21 nt, Artificial Sequence
  GATA2 Guide RNA
gcugcccugagugagcgccag

SEQ ID NO: 29399 - RNA, 21 nt, Artificial Sequence
  GATA2 Guide RNA
gcugcugcccugagugagcgc

SEQ ID NO: 29400 - RNA, 21 nt, Artificial Sequence
  GATA2 Guide RNA
ggaagcccuucuggcgcucac

SEQ ID NO: 29401 - RNA, 21 nt, Artificial Sequence
  GATA2 Guide RNA
ggaagcugcugcccugaguga

SEQ ID NO: 29402 - RNA, 21 nt, Artificial Sequence
  GATA2 Guide RNA
ggcgcucacucagggcagcag

SEQ ID NO: 29403 - RNA, 21 nt, Artificial Sequence
  GATA2 Guide RNA
gggaagcccuucuggcgcuca

SEQ ID NO: 29404 - RNA, 21 nt, Artificial Sequence
  GATA2 Guide RNA
gggaagcugcugcccugagug

SEQ ID NO: 29405 - RNA, 21 nt, Artificial Sequence
  GATA2 Guide RNA
gugagcgccagaagggcuucc

SEQ ID NO: 29406 - RNA, 21 nt, Artificial Sequence
  GATA2 Guide RNA
uacgggaagcccuucuggcgc

SEQ ID NO: 29407 - RNA, 21 nt, Artificial Sequence
  GATA2 Guide RNA
ucuggcgcucacucagggcag

SEQ ID NO: 29408 - RNA, 21 nt, Artificial Sequence
  GATA2 Guide RNA
ucuuacgggaagcccuucugg

SEQ ID NO: 29409 - RNA, 21 nt, Artificial Sequence
  GATA2 Guide RNA
ugagcgccagaagggcuuccc

SEQ ID NO: 29410 - RNA, 21 nt, Artificial Sequence
  GATA2 Guide RNA
ugagugagcgccagaagggcu

SEQ ID NO: 29411 - RNA, 21 nt, Artificial Sequence
  GATA2 Guide RNA
ugcccugagugagcgccagaa

SEQ ID NO: 29412 - RNA, 21 nt, Artificial Sequence
  GATA2 Guide RNA
ugcugcccugagugagcgcca

SEQ ID NO: 29413 - RNA, 21 nt, Artificial Sequence
  GATA2 Guide RNA
uggcgcucacucagggcagca

SEQ ID NO: 29414 - RNA, 21 nt, Artificial Sequence
  GATA2 Guide RNA
ugggaagcugcugcccugagu

SEQ ID NO: 29415 - RNA, 21 nt, Artificial Sequence
  GATA2 Guide RNA
uuacgggaagcccuucuggcg

SEQ ID NO: 29416 - RNA, 21 nt, Artificial Sequence
  GATA2 Guide RNA
uucuggcgcucacucagggca

SEQ ID NO: 29417 - RNA, 22 nt, Artificial Sequence
  GATA2 Guide RNA
aagcccuucuggcgcucacuca

SEQ ID NO: 29418 - RNA, 22 nt, Artificial Sequence
  GATA2 Guide RNA
aagcugcugcccugagugagcg

SEQ ID NO: 29419 - RNA, 22 nt, Artificial Sequence
  GATA2 Guide RNA
acgggaagcccuucuggcgcuc

SEQ ID NO: 29420 - RNA, 22 nt, Artificial Sequence
  GATA2 Guide RNA
agcccuucuggcgcucacucag

SEQ ID NO: 29421 - RNA, 22 nt, Artificial Sequence
  GATA2 Guide RNA
agcgccagaagggcuucccgua

SEQ ID NO: 29422 - RNA, 22 nt, Artificial Sequence
  GATA2 Guide RNA
agcugcugcccugagugagcgc

SEQ ID NO: 29423 - RNA, 22 nt, Artificial Sequence
  GATA2 Guide RNA
agugagcgccagaagggcuucc

SEQ ID NO: 29424 - RNA, 22 nt, Artificial Sequence
  GATA2 Guide RNA
cccugagugagcgccagaaggg

SEQ ID NO: 29425 - RNA, 22 nt, Artificial Sequence
  GATA2 Guide RNA
cccuucuggcgcucacucaggg

SEQ ID NO: 29426 - RNA, 22 nt, Artificial Sequence
  GATA2 Guide RNA
ccucuuacgggaagcccuucug

SEQ ID NO: 29427 - RNA, 22 nt, Artificial Sequence
  GATA2 Guide RNA
ccugagugagcgccagaagggc

SEQ ID NO: 29428 - RNA, 22 nt, Artificial Sequence
  GATA2 Guide RNA
ccuucuggcgcucacucagggc

SEQ ID NO: 29429 - RNA, 22 nt, Artificial Sequence
  GATA2 Guide RNA
cgcucacucagggcagcagcuu

SEQ ID NO: 29430 - RNA, 22 nt, Artificial Sequence
  GATA2 Guide RNA
cgggaagcccuucuggcgcuca

SEQ ID NO: 29431 - RNA, 22 nt, Artificial Sequence
  GATA2 Guide RNA
cucuuacgggaagcccuucugg

SEQ ID NO: 29432 - RNA, 22 nt, Artificial Sequence
  GATA2 Guide RNA
cugagugagcgccagaagggcu

SEQ ID NO: 29433 - RNA, 22 nt, Artificial Sequence
  GATA2 Guide RNA
cugcccugagugagcgccagaa

SEQ ID NO: 29434 - RNA, 22 nt, Artificial Sequence
  GATA2 Guide RNA
cugcugcccugagugagcgcca

SEQ ID NO: 29435 - RNA, 22 nt, Artificial Sequence
  GATA2 Guide RNA
cuggcgcucacucagggcagca

SEQ ID NO: 29436 - RNA, 22 nt, Artificial Sequence
  GATA2 Guide RNA
cuuacgggaagcccuucuggcg

SEQ ID NO: 29437 - RNA, 22 nt, Artificial Sequence
  GATA2 Guide RNA
cuucuggcgcucacucagggca

SEQ ID NO: 29438 - RNA, 22 nt, Artificial Sequence
  GATA2 Guide RNA
gaagcccuucuggcgcucacuc

SEQ ID NO: 29439 - RNA, 22 nt, Artificial Sequence
  GATA2 Guide RNA
gaagcugcugcccugagugagc

SEQ ID NO: 29440 - RNA, 22 nt, Artificial Sequence
  GATA2 Guide RNA
gagcgccagaagggcuucccgu

SEQ ID NO: 29441 - RNA, 22 nt, Artificial Sequence
  GATA2 Guide RNA
gagugagcgccagaagggcuuc

SEQ ID NO: 29442 - RNA, 22 nt, Artificial Sequence
  GATA2 Guide RNA
gcccugagugagcgccagaagg

SEQ ID NO: 29443 - RNA, 22 nt, Artificial Sequence
  GATA2 Guide RNA
gcccuucuggcgcucacucagg

SEQ ID NO: 29444 - RNA, 22 nt, Artificial Sequence
  GATA2 Guide RNA
gcgccagaagggcuucccguaa

SEQ ID NO: 29445 - RNA, 22 nt, Artificial Sequence
  GATA2 Guide RNA
gcgcucacucagggcagcagcu

SEQ ID NO: 29446 - RNA, 22 nt, Artificial Sequence
  GATA2 Guide RNA
gcucacucagggcagcagcuuc

SEQ ID NO: 29447 - RNA, 22 nt, Artificial Sequence
  GATA2 Guide RNA
gcugcccugagugagcgccaga

SEQ ID NO: 29448 - RNA, 22 nt, Artificial Sequence
  GATA2 Guide RNA
gcugcugcccugagugagcgcc

SEQ ID NO: 29449 - RNA, 22 nt, Artificial Sequence
  GATA2 Guide RNA
ggaagcccuucuggcgcucacu

SEQ ID NO: 29450 - RNA, 22 nt, Artificial Sequence
  GATA2 Guide RNA
ggaagcugcugcccugagugag

SEQ ID NO: 29451 - RNA, 22 nt, Artificial Sequence
  GATA2 Guide RNA
ggcgcucacucagggcagcagc

SEQ ID NO: 29452 - RNA, 22 nt, Artificial Sequence
  GATA2 Guide RNA
gggaagcccuucuggcgcucac

SEQ ID NO: 29453 - RNA, 22 nt, Artificial Sequence
  GATA2 Guide RNA
gggaagcugcugcccugaguga

SEQ ID NO: 29454 - RNA, 22 nt, Artificial Sequence
  GATA2 Guide RNA
gugagcgccagaagggcuuccc

SEQ ID NO: 29455 - RNA, 22 nt, Artificial Sequence
  GATA2 Guide RNA
uacgggaagcccuucuggcgcu

SEQ ID NO: 29456 - RNA, 22 nt, Artificial Sequence
  GATA2 Guide RNA
ucuggcgcucacucagggcagc

SEQ ID NO: 29457 - RNA, 22 nt, Artificial Sequence
  GATA2 Guide RNA
ucuuacgggaagcccuucuggc

SEQ ID NO: 29458 - RNA, 22 nt, Artificial Sequence
  GATA2 Guide RNA
ugagcgccagaagggcuucccg

SEQ ID NO: 29459 - RNA, 22 nt, Artificial Sequence
  GATA2 Guide RNA
ugagugagcgccagaagggcuu

SEQ ID NO: 29460 - RNA, 22 nt, Artificial Sequence
  GATA2 Guide RNA
ugcccugagugagcgccagaag

SEQ ID NO: 29461 - RNA, 22 nt, Artificial Sequence
  GATA2 Guide RNA
ugcugcccugagugagcgccag

SEQ ID NO: 29462 - RNA, 22 nt, Artificial Sequence
  GATA2 Guide RNA
uggcgcucacucagggcagcag

SEQ ID NO: 29463 - RNA, 22 nt, Artificial Sequence
  GATA2 Guide RNA
ugggaagcugcugcccugagug

SEQ ID NO: 29464 - RNA, 22 nt, Artificial Sequence
  GATA2 Guide RNA
uuacgggaagcccuucuggcgc

SEQ ID NO: 29465 - RNA, 22 nt, Artificial Sequence
  GATA2 Guide RNA
uucuggcgcucacucagggcag

SEQ ID NO: 29466 - RNA, 22 nt, Artificial Sequence
  GATA2 Guide RNA
uugggaagcugcugcccugagu

SEQ ID NO: 29467 - RNA, 20 nt, Artificial Sequence
  GATA2 Guide RNA
aagcccuucuggcacucacu

SEQ ID NO: 29468 - RNA, 20 nt, Artificial Sequence
  GATA2 Guide RNA
acgggaagcccuucuggcac

SEQ ID NO: 29469 - RNA, 20 nt, Artificial Sequence
  GATA2 Guide RNA
acucacucagggcagcagcu

SEQ ID NO: 29470 - RNA, 20 nt, Artificial Sequence
  GATA2 Guide RNA
agcccuucuggcacucacuc

SEQ ID NO: 29471 - RNA, 20 nt, Artificial Sequence
  GATA2 Guide RNA
agcugcugcccugagugagu

SEQ ID NO: 29472 - RNA, 20 nt, Artificial Sequence
  GATA2 Guide RNA
agugagugccagaagggcuu

SEQ ID NO: 29473 - RNA, 20 nt, Artificial Sequence
  GATA2 Guide RNA
agugccagaagggcuucccg

SEQ ID NO: 29474 - RNA, 20 nt, Artificial Sequence
  GATA2 Guide RNA
cacucacucagggcagcagc

SEQ ID NO: 29475 - RNA, 20 nt, Artificial Sequence
  GATA2 Guide RNA
cccugagugagugccagaag

SEQ ID NO: 29476 - RNA, 20 nt, Artificial Sequence
  GATA2 Guide RNA
cccuucuggcacucacucag

SEQ ID NO: 29477 - RNA, 20 nt, Artificial Sequence
  GATA2 Guide RNA
ccugagugagugccagaagg

SEQ ID NO: 29478 - RNA, 20 nt, Artificial Sequence
  GATA2 Guide RNA
ccuucuggcacucacucagg

SEQ ID NO: 29479 - RNA, 20 nt, Artificial Sequence
  GATA2 Guide RNA
cgggaagcccuucuggcacu

SEQ ID NO: 29480 - RNA, 20 nt, Artificial Sequence
  GATA2 Guide RNA
cugagugagugccagaaggg

SEQ ID NO: 29481 - RNA, 20 nt, Artificial Sequence
  GATA2 Guide RNA
cugcccugagugagugccag

SEQ ID NO: 29482 - RNA, 20 nt, Artificial Sequence
  GATA2 Guide RNA
cugcugcccugagugagugc

SEQ ID NO: 29483 - RNA, 20 nt, Artificial Sequence
  GATA2 Guide RNA
cuggcacucacucagggcag

SEQ ID NO: 29484 - RNA, 20 nt, Artificial Sequence
  GATA2 Guide RNA
cuucuggcacucacucaggg

SEQ ID NO: 29485 - RNA, 20 nt, Artificial Sequence
  GATA2 Guide RNA
gaagcccuucuggcacucac

SEQ ID NO: 29486 - RNA, 20 nt, Artificial Sequence
  GATA2 Guide RNA
gagugagugccagaagggcu

SEQ ID NO: 29487 - RNA, 20 nt, Artificial Sequence
  GATA2 Guide RNA
gagugccagaagggcuuccc

SEQ ID NO: 29488 - RNA, 20 nt, Artificial Sequence
  GATA2 Guide RNA
gcacucacucagggcagcag

SEQ ID NO: 29489 - RNA, 20 nt, Artificial Sequence
  GATA2 Guide RNA
gcccugagugagugccagaa

SEQ ID NO: 29490 - RNA, 20 nt, Artificial Sequence
  GATA2 Guide RNA
gcccuucuggcacucacuca

SEQ ID NO: 29491 - RNA, 20 nt, Artificial Sequence
  GATA2 Guide RNA
gcugcccugagugagugcca

SEQ ID NO: 29492 - RNA, 20 nt, Artificial Sequence
  GATA2 Guide RNA
gcugcugcccugagugagug

SEQ ID NO: 29493 - RNA, 20 nt, Artificial Sequence
  GATA2 Guide RNA
ggaagcccuucuggcacuca

SEQ ID NO: 29494 - RNA, 20 nt, Artificial Sequence
  GATA2 Guide RNA
ggcacucacucagggcagca

SEQ ID NO: 29495 - RNA, 20 nt, Artificial Sequence
  GATA2 Guide RNA
gggaagcccuucuggcacuc

SEQ ID NO: 29496 - RNA, 20 nt, Artificial Sequence
  GATA2 Guide RNA
gugagugccagaagggcuuc

SEQ ID NO: 29497 - RNA, 20 nt, Artificial Sequence
  GATA2 Guide RNA
gugccagaagggcuucccgu

SEQ ID NO: 29498 - RNA, 20 nt, Artificial Sequence
  GATA2 Guide RNA
uacgggaagcccuucuggca

SEQ ID NO: 29499 - RNA, 20 nt, Artificial Sequence
  GATA2 Guide RNA
ucuggcacucacucagggca

SEQ ID NO: 29500 - RNA, 20 nt, Artificial Sequence
  GATA2 Guide RNA
ugagugagugccagaagggc

SEQ ID NO: 29501 - RNA, 20 nt, Artificial Sequence
  GATA2 Guide RNA
ugagugccagaagggcuucc

SEQ ID NO: 29502 - RNA, 20 nt, Artificial Sequence
  GATA2 Guide RNA
ugcccugagugagugccaga

SEQ ID NO: 29503 - RNA, 20 nt, Artificial Sequence
  GATA2 Guide RNA
ugcugcccugagugagugcc

SEQ ID NO: 29504 - RNA, 20 nt, Artificial Sequence
  GATA2 Guide RNA
uggcacucacucagggcagc

SEQ ID NO: 29505 - RNA, 20 nt, Artificial Sequence
  GATA2 Guide RNA
uucuggcacucacucagggc

SEQ ID NO: 29506 - RNA, 21 nt, Artificial Sequence
  GATA2 Guide RNA
aagcccuucuggcacucacuc

SEQ ID NO: 29507 - RNA, 21 nt, Artificial Sequence
  GATA2 Guide RNA
aagcugcugcccugagugagu

SEQ ID NO: 29508 - RNA, 21 nt, Artificial Sequence
  GATA2 Guide RNA
acgggaagcccuucuggcacu

SEQ ID NO: 29509 - RNA, 21 nt, Artificial Sequence
  GATA2 Guide RNA
acucacucagggcagcagcuu

SEQ ID NO: 29510 - RNA, 21 nt, Artificial Sequence
  GATA2 Guide RNA
agcccuucuggcacucacuca

SEQ ID NO: 29511 - RNA, 21 nt, Artificial Sequence
  GATA2 Guide RNA
agcugcugcccugagugagug

SEQ ID NO: 29512 - RNA, 21 nt, Artificial Sequence
  GATA2 Guide RNA
agugagugccagaagggcuuc

SEQ ID NO: 29513 - RNA, 21 nt, Artificial Sequence
  GATA2 Guide RNA
agugccagaagggcuucccgu

SEQ ID NO: 29514 - RNA, 21 nt, Artificial Sequence
  GATA2 Guide RNA
cacucacucagggcagcagcu

SEQ ID NO: 29515 - RNA, 21 nt, Artificial Sequence
  GATA2 Guide RNA
cccugagugagugccagaagg

SEQ ID NO: 29516 - RNA, 21 nt, Artificial Sequence
  GATA2 Guide RNA
cccuucuggcacucacucagg

SEQ ID NO: 29517 - RNA, 21 nt, Artificial Sequence
  GATA2 Guide RNA
ccugagugagugccagaaggg

SEQ ID NO: 29518 - RNA, 21 nt, Artificial Sequence
  GATA2 Guide RNA
ccuucuggcacucacucaggg

SEQ ID NO: 29519 - RNA, 21 nt, Artificial Sequence
  GATA2 Guide RNA
cgggaagcccuucuggcacuc

SEQ ID NO: 29520 - RNA, 21 nt, Artificial Sequence
  GATA2 Guide RNA
cugagugagugccagaagggc

SEQ ID NO: 29521 - RNA, 21 nt, Artificial Sequence
  GATA2 Guide RNA
cugcccugagugagugccaga

SEQ ID NO: 29522 - RNA, 21 nt, Artificial Sequence
  GATA2 Guide RNA
cugcugcccugagugagugcc

SEQ ID NO: 29523 - RNA, 21 nt, Artificial Sequence
  GATA2 Guide RNA
cuggcacucacucagggcagc

SEQ ID NO: 29524 - RNA, 21 nt, Artificial Sequence
  GATA2 Guide RNA
cuucuggcacucacucagggc

SEQ ID NO: 29525 - RNA, 21 nt, Artificial Sequence
  GATA2 Guide RNA
gaagcccuucuggcacucacu

SEQ ID NO: 29526 - RNA, 21 nt, Artificial Sequence
  GATA2 Guide RNA
gagugagugccagaagggcuu

SEQ ID NO: 29527 - RNA, 21 nt, Artificial Sequence
  GATA2 Guide RNA
gagugccagaagggcuucccg

SEQ ID NO: 29528 - RNA, 21 nt, Artificial Sequence
  GATA2 Guide RNA
gcacucacucagggcagcagc

SEQ ID NO: 29529 - RNA, 21 nt, Artificial Sequence
  GATA2 Guide RNA
gcccugagugagugccagaag

SEQ ID NO: 29530 - RNA, 21 nt, Artificial Sequence
  GATA2 Guide RNA
gcccuucuggcacucacucag

SEQ ID NO: 29531 - RNA, 21 nt, Artificial Sequence
  GATA2 Guide RNA
gcugcccugagugagugccag

SEQ ID NO: 29532 - RNA, 21 nt, Artificial Sequence
  GATA2 Guide RNA
gcugcugcccugagugagugc

SEQ ID NO: 29533 - RNA, 21 nt, Artificial Sequence
  GATA2 Guide RNA
ggaagcccuucuggcacucac

SEQ ID NO: 29534 - RNA, 21 nt, Artificial Sequence
  GATA2 Guide RNA
ggcacucacucagggcagcag

SEQ ID NO: 29535 - RNA, 21 nt, Artificial Sequence
  GATA2 Guide RNA
gggaagcccuucuggcacuca

SEQ ID NO: 29536 - RNA, 21 nt, Artificial Sequence
  GATA2 Guide RNA
gugagugccagaagggcuucc

SEQ ID NO: 29537 - RNA, 21 nt, Artificial Sequence
  GATA2 Guide RNA
gugccagaagggcuucccgua

SEQ ID NO: 29538 - RNA, 21 nt, Artificial Sequence
  GATA2 Guide RNA
uacgggaagcccuucuggcac

SEQ ID NO: 29539 - RNA, 21 nt, Artificial Sequence
  GATA2 Guide RNA
ucuggcacucacucagggcag

SEQ ID NO: 29540 - RNA, 21 nt, Artificial Sequence
  GATA2 Guide RNA
ugagugagugccagaagggcu

SEQ ID NO: 29541 - RNA, 21 nt, Artificial Sequence
  GATA2 Guide RNA
ugagugccagaagggcuuccc

SEQ ID NO: 29542 - RNA, 21 nt, Artificial Sequence
  GATA2 Guide RNA
ugcccugagugagugccagaa

SEQ ID NO: 29543 - RNA, 21 nt, Artificial Sequence
  GATA2 Guide RNA
ugcugcccugagugagugcca

SEQ ID NO: 29544 - RNA, 21 nt, Artificial Sequence
  GATA2 Guide RNA
uggcacucacucagggcagca

SEQ ID NO: 29545 - RNA, 21 nt, Artificial Sequence
  GATA2 Guide RNA
uuacgggaagcccuucuggca

SEQ ID NO: 29546 - RNA, 21 nt, Artificial Sequence
  GATA2 Guide RNA
uucuggcacucacucagggca

SEQ ID NO: 29547 - RNA, 22 nt, Artificial Sequence
  GATA2 Guide RNA
aagcccuucuggcacucacuca

SEQ ID NO: 29548 - RNA, 22 nt, Artificial Sequence
  GATA2 Guide RNA
aagcugcugcccugagugagug

SEQ ID NO: 29549 - RNA, 22 nt, Artificial Sequence
  GATA2 Guide RNA
acgggaagcccuucuggcacuc

SEQ ID NO: 29550 - RNA, 22 nt, Artificial Sequence
  GATA2 Guide RNA
acucacucagggcagcagcuuc

SEQ ID NO: 29551 - RNA, 22 nt, Artificial Sequence
  GATA2 Guide RNA
agcccuucuggcacucacucag

SEQ ID NO: 29552 - RNA, 22 nt, Artificial Sequence
  GATA2 Guide RNA
agcugcugcccugagugagugc

SEQ ID NO: 29553 - RNA, 22 nt, Artificial Sequence
  GATA2 Guide RNA
agugagugccagaagggcuucc

SEQ ID NO: 29554 - RNA, 22 nt, Artificial Sequence
  GATA2 Guide RNA
agugccagaagggcuucccgua

SEQ ID NO: 29555 - RNA, 22 nt, Artificial Sequence
  GATA2 Guide RNA
cacucacucagggcagcagcuu

SEQ ID NO: 29556 - RNA, 22 nt, Artificial Sequence
  GATA2 Guide RNA
cccugagugagugccagaaggg

SEQ ID NO: 29557 - RNA, 22 nt, Artificial Sequence
  GATA2 Guide RNA
cccuucuggcacucacucaggg

SEQ ID NO: 29558 - RNA, 22 nt, Artificial Sequence
  GATA2 Guide RNA
ccugagugagugccagaagggc

SEQ ID NO: 29559 - RNA, 22 nt, Artificial Sequence
  GATA2 Guide RNA
ccuucuggcacucacucagggc

SEQ ID NO: 29560 - RNA, 22 nt, Artificial Sequence
  GATA2 Guide RNA
cgggaagcccuucuggcacuca

SEQ ID NO: 29561 - RNA, 22 nt, Artificial Sequence
  GATA2 Guide RNA
cugagugagugccagaagggcu

SEQ ID NO: 29562 - RNA, 22 nt, Artificial Sequence
  GATA2 Guide RNA
cugcccugagugagugccagaa

SEQ ID NO: 29563 - RNA, 22 nt, Artificial Sequence
  GATA2 Guide RNA
cugcugcccugagugagugcca

SEQ ID NO: 29564 - RNA, 22 nt, Artificial Sequence
  GATA2 Guide RNA
cuggcacucacucagggcagca

SEQ ID NO: 29565 - RNA, 22 nt, Artificial Sequence
  GATA2 Guide RNA
cuuacgggaagcccuucuggca

SEQ ID NO: 29566 - RNA, 22 nt, Artificial Sequence
  GATA2 Guide RNA
cuucuggcacucacucagggca

SEQ ID NO: 29567 - RNA, 22 nt, Artificial Sequence
  GATA2 Guide RNA
gaagcccuucuggcacucacuc

SEQ ID NO: 29568 - RNA, 22 nt, Artificial Sequence
  GATA2 Guide RNA
gaagcugcugcccugagugagu

SEQ ID NO: 29569 - RNA, 22 nt, Artificial Sequence
  GATA2 Guide RNA
gagugagugccagaagggcuuc

SEQ ID NO: 29570 - RNA, 22 nt, Artificial Sequence
  GATA2 Guide RNA
gagugccagaagggcuucccgu

SEQ ID NO: 29571 - RNA, 22 nt, Artificial Sequence
  GATA2 Guide RNA
gcacucacucagggcagcagcu

SEQ ID NO: 29572 - RNA, 22 nt, Artificial Sequence
  GATA2 Guide RNA
gcccugagugagugccagaagg

SEQ ID NO: 29573 - RNA, 22 nt, Artificial Sequence
  GATA2 Guide RNA
gcccuucuggcacucacucagg

SEQ ID NO: 29574 - RNA, 22 nt, Artificial Sequence
  GATA2 Guide RNA
gcugcccugagugagugccaga

SEQ ID NO: 29575 - RNA, 22 nt, Artificial Sequence
  GATA2 Guide RNA
gcugcugcccugagugagugcc

SEQ ID NO: 29576 - RNA, 22 nt, Artificial Sequence
  GATA2 Guide RNA
ggaagcccuucuggcacucacu

SEQ ID NO: 29577 - RNA, 22 nt, Artificial Sequence
  GATA2 Guide RNA
ggcacucacucagggcagcagc

SEQ ID NO: 29578 - RNA, 22 nt, Artificial Sequence
  GATA2 Guide RNA
gggaagcccuucuggcacucac

SEQ ID NO: 29579 - RNA, 22 nt, Artificial Sequence
  GATA2 Guide RNA
gugagugccagaagggcuuccc

SEQ ID NO: 29580 - RNA, 22 nt, Artificial Sequence
  GATA2 Guide RNA
gugccagaagggcuucccguaa

SEQ ID NO: 29581 - RNA, 22 nt, Artificial Sequence
  GATA2 Guide RNA
uacgggaagcccuucuggcacu

SEQ ID NO: 29582 - RNA, 22 nt, Artificial Sequence
  GATA2 Guide RNA
ucuggcacucacucagggcagc

SEQ ID NO: 29583 - RNA, 22 nt, Artificial Sequence
  GATA2 Guide RNA
ugagugagugccagaagggcuu

SEQ ID NO: 29584 - RNA, 22 nt, Artificial Sequence
  GATA2 Guide RNA
ugagugccagaagggcuucccg

SEQ ID NO: 29585 - RNA, 22 nt, Artificial Sequence
  GATA2 Guide RNA
ugcccugagugagugccagaag

SEQ ID NO: 29586 - RNA, 22 nt, Artificial Sequence
  GATA2 Guide RNA
ugcugcccugagugagugccag

SEQ ID NO: 29587 - RNA, 22 nt, Artificial Sequence
  GATA2 Guide RNA
uggcacucacucagggcagcag

SEQ ID NO: 29588 - RNA, 22 nt, Artificial Sequence
  GATA2 Guide RNA
uuacgggaagcccuucuggcac

SEQ ID NO: 29589 - RNA, 22 nt, Artificial Sequence
  GATA2 Guide RNA
uucuggcacucacucagggcag

SEQ ID NO: 29590 - RNA, 20 nt, Artificial Sequence
  GATA2 Guide RNA
aaggcagcgucagcaggcug

SEQ ID NO: 29591 - RNA, 20 nt, Artificial Sequence
  GATA2 Guide RNA
acugggagggcaaggcagcg

SEQ ID NO: 29592 - RNA, 20 nt, Artificial Sequence
  GATA2 Guide RNA
agccugcugacgcugccuug

SEQ ID NO: 29593 - RNA, 20 nt, Artificial Sequence
  GATA2 Guide RNA
agcgucagcaggcuggacuc

SEQ ID NO: 29594 - RNA, 20 nt, Artificial Sequence
  GATA2 Guide RNA
aggcagcgucagcaggcugg

SEQ ID NO: 29595 - RNA, 20 nt, Artificial Sequence
  GATA2 Guide RNA
agggcaaggcagcgucagca

SEQ ID NO: 29596 - RNA, 20 nt, Artificial Sequence
  GATA2 Guide RNA
aguccagccugcugacgcug

SEQ ID NO: 29597 - RNA, 20 nt, Artificial Sequence
  GATA2 Guide RNA
caaggcagcgucagcaggcu

SEQ ID NO: 29598 - RNA, 20 nt, Artificial Sequence
  GATA2 Guide RNA
cagccugcugacgcugccuu

SEQ ID NO: 29599 - RNA, 20 nt, Artificial Sequence
  GATA2 Guide RNA
cagcgucagcaggcuggacu

SEQ ID NO: 29600 - RNA, 20 nt, Artificial Sequence
  GATA2 Guide RNA
ccagccugcugacgcugccu

SEQ ID NO: 29601 - RNA, 20 nt, Artificial Sequence
  GATA2 Guide RNA
ccugcugacgcugccuugcc

SEQ ID NO: 29602 - RNA, 20 nt, Artificial Sequence
  GATA2 Guide RNA
cgacugggagggcaaggcag

SEQ ID NO: 29603 - RNA, 20 nt, Artificial Sequence
  GATA2 Guide RNA
cgucagcaggcuggacuccc

SEQ ID NO: 29604 - RNA, 20 nt, Artificial Sequence
  GATA2 Guide RNA
cgugggaguccagccugcug

SEQ ID NO: 29605 - RNA, 20 nt, Artificial Sequence
  GATA2 Guide RNA
cugcugacgcugccuugccc

SEQ ID NO: 29606 - RNA, 20 nt, Artificial Sequence
  GATA2 Guide RNA
cugggagggcaaggcagcgu

SEQ ID NO: 29607 - RNA, 20 nt, Artificial Sequence
  GATA2 Guide RNA
gacugggagggcaaggcagc

SEQ ID NO: 29608 - RNA, 20 nt, Artificial Sequence
  GATA2 Guide RNA
gagggcaaggcagcgucagc

SEQ ID NO: 29609 - RNA, 20 nt, Artificial Sequence
  GATA2 Guide RNA
gaguccagccugcugacgcu

SEQ ID NO: 29610 - RNA, 20 nt, Artificial Sequence
  GATA2 Guide RNA
gcaaggcagcgucagcaggc

SEQ ID NO: 29611 - RNA, 20 nt, Artificial Sequence
  GATA2 Guide RNA
gcagcgucagcaggcuggac

SEQ ID NO: 29612 - RNA, 20 nt, Artificial Sequence
  GATA2 Guide RNA
gccugcugacgcugccuugc

SEQ ID NO: 29613 - RNA, 20 nt, Artificial Sequence
  GATA2 Guide RNA
gcgucagcaggcuggacucc

SEQ ID NO: 29614 - RNA, 20 nt, Artificial Sequence
  GATA2 Guide RNA
gcgugggaguccagccugcu

SEQ ID NO: 29615 - RNA, 20 nt, Artificial Sequence
  GATA2 Guide RNA
ggagggcaaggcagcgucag

SEQ ID NO: 29616 - RNA, 20 nt, Artificial Sequence
  GATA2 Guide RNA
ggaguccagccugcugacgc

SEQ ID NO: 29617 - RNA, 20 nt, Artificial Sequence
  GATA2 Guide RNA
ggcaaggcagcgucagcagg

SEQ ID NO: 29618 - RNA, 20 nt, Artificial Sequence
  GATA2 Guide RNA
ggcagcgucagcaggcugga

SEQ ID NO: 29619 - RNA, 20 nt, Artificial Sequence
  GATA2 Guide RNA
ggcgugggaguccagccugc

SEQ ID NO: 29620 - RNA, 20 nt, Artificial Sequence
  GATA2 Guide RNA
gggagggcaaggcagcguca

SEQ ID NO: 29621 - RNA, 20 nt, Artificial Sequence
  GATA2 Guide RNA
gggaguccagccugcugacg

SEQ ID NO: 29622 - RNA, 20 nt, Artificial Sequence
  GATA2 Guide RNA
gggcaaggcagcgucagcag

SEQ ID NO: 29623 - RNA, 20 nt, Artificial Sequence
  GATA2 Guide RNA
gucagcaggcuggacuccca

SEQ ID NO: 29624 - RNA, 20 nt, Artificial Sequence
  GATA2 Guide RNA
guccagccugcugacgcugc

SEQ ID NO: 29625 - RNA, 20 nt, Artificial Sequence
  GATA2 Guide RNA
gugggaguccagccugcuga

SEQ ID NO: 29626 - RNA, 20 nt, Artificial Sequence
  GATA2 Guide RNA
uccagccugcugacgcugcc

SEQ ID NO: 29627 - RNA, 20 nt, Artificial Sequence
  GATA2 Guide RNA
ugcugacgcugccuugcccu

SEQ ID NO: 29628 - RNA, 20 nt, Artificial Sequence
  GATA2 Guide RNA
ugggagggcaaggcagcguc

SEQ ID NO: 29629 - RNA, 20 nt, Artificial Sequence
  GATA2 Guide RNA
ugggaguccagccugcugac

SEQ ID NO: 29630 - RNA, 21 nt, Artificial Sequence
  GATA2 Guide RNA
aaggcagcgucagcaggcugg

SEQ ID NO: 29631 - RNA, 21 nt, Artificial Sequence
  GATA2 Guide RNA
acugggagggcaaggcagcgu

SEQ ID NO: 29632 - RNA, 21 nt, Artificial Sequence
  GATA2 Guide RNA
agccugcugacgcugccuugc

SEQ ID NO: 29633 - RNA, 21 nt, Artificial Sequence
  GATA2 Guide RNA
agcgucagcaggcuggacucc

SEQ ID NO: 29634 - RNA, 21 nt, Artificial Sequence
  GATA2 Guide RNA
aggcagcgucagcaggcugga

SEQ ID NO: 29635 - RNA, 21 nt, Artificial Sequence
  GATA2 Guide RNA
agggcaaggcagcgucagcag

SEQ ID NO: 29636 - RNA, 21 nt, Artificial Sequence
  GATA2 Guide RNA
aguccagccugcugacgcugc

SEQ ID NO: 29637 - RNA, 21 nt, Artificial Sequence
  GATA2 Guide RNA
caaggcagcgucagcaggcug

SEQ ID NO: 29638 - RNA, 21 nt, Artificial Sequence
  GATA2 Guide RNA
cagccugcugacgcugccuug

SEQ ID NO: 29639 - RNA, 21 nt, Artificial Sequence
  GATA2 Guide RNA
cagcgucagcaggcuggacuc

SEQ ID NO: 29640 - RNA, 21 nt, Artificial Sequence
  GATA2 Guide RNA
ccagccugcugacgcugccuu

SEQ ID NO: 29641 - RNA, 21 nt, Artificial Sequence
  GATA2 Guide RNA
ccugcugacgcugccuugccc

SEQ ID NO: 29642 - RNA, 21 nt, Artificial Sequence
  GATA2 Guide RNA
cgacugggagggcaaggcagc

SEQ ID NO: 29643 - RNA, 21 nt, Artificial Sequence
  GATA2 Guide RNA
cgucagcaggcuggacuccca

SEQ ID NO: 29644 - RNA, 21 nt, Artificial Sequence
  GATA2 Guide RNA
cgugggaguccagccugcuga

SEQ ID NO: 29645 - RNA, 21 nt, Artificial Sequence
  GATA2 Guide RNA
cugcugacgcugccuugcccu

SEQ ID NO: 29646 - RNA, 21 nt, Artificial Sequence
  GATA2 Guide RNA
cugggagggcaaggcagcguc

SEQ ID NO: 29647 - RNA, 21 nt, Artificial Sequence
  GATA2 Guide RNA
gacugggagggcaaggcagcg

SEQ ID NO: 29648 - RNA, 21 nt, Artificial Sequence
  GATA2 Guide RNA
gagggcaaggcagcgucagca

SEQ ID NO: 29649 - RNA, 21 nt, Artificial Sequence
  GATA2 Guide RNA
gaguccagccugcugacgcug

SEQ ID NO: 29650 - RNA, 21 nt, Artificial Sequence
  GATA2 Guide RNA
gcaaggcagcgucagcaggcu

SEQ ID NO: 29651 - RNA, 21 nt, Artificial Sequence
  GATA2 Guide RNA
gcagcgucagcaggcuggacu

SEQ ID NO: 29652 - RNA, 21 nt, Artificial Sequence
  GATA2 Guide RNA
gccugcugacgcugccuugcc

SEQ ID NO: 29653 - RNA, 21 nt, Artificial Sequence
  GATA2 Guide RNA
gcgucagcaggcuggacuccc

SEQ ID NO: 29654 - RNA, 21 nt, Artificial Sequence
  GATA2 Guide RNA
gcgugggaguccagccugcug

SEQ ID NO: 29655 - RNA, 21 nt, Artificial Sequence
  GATA2 Guide RNA
ggagggcaaggcagcgucagc

SEQ ID NO: 29656 - RNA, 21 nt, Artificial Sequence
  GATA2 Guide RNA
ggaguccagccugcugacgcu

SEQ ID NO: 29657 - RNA, 21 nt, Artificial Sequence
  GATA2 Guide RNA
ggcaaggcagcgucagcaggc

SEQ ID NO: 29658 - RNA, 21 nt, Artificial Sequence
  GATA2 Guide RNA
ggcagcgucagcaggcuggac

SEQ ID NO: 29659 - RNA, 21 nt, Artificial Sequence
  GATA2 Guide RNA
ggcgugggaguccagccugcu

SEQ ID NO: 29660 - RNA, 21 nt, Artificial Sequence
  GATA2 Guide RNA
gggagggcaaggcagcgucag

SEQ ID NO: 29661 - RNA, 21 nt, Artificial Sequence
  GATA2 Guide RNA
gggaguccagccugcugacgc

SEQ ID NO: 29662 - RNA, 21 nt, Artificial Sequence
  GATA2 Guide RNA
gggcaaggcagcgucagcagg

SEQ ID NO: 29663 - RNA, 21 nt, Artificial Sequence
  GATA2 Guide RNA
gggcgugggaguccagccugc

SEQ ID NO: 29664 - RNA, 21 nt, Artificial Sequence
  GATA2 Guide RNA
gucagcaggcuggacucccac

SEQ ID NO: 29665 - RNA, 21 nt, Artificial Sequence
  GATA2 Guide RNA
guccagccugcugacgcugcc

SEQ ID NO: 29666 - RNA, 21 nt, Artificial Sequence
  GATA2 Guide RNA
gugggaguccagccugcugac

SEQ ID NO: 29667 - RNA, 21 nt, Artificial Sequence
  GATA2 Guide RNA
uccagccugcugacgcugccu

SEQ ID NO: 29668 - RNA, 21 nt, Artificial Sequence
  GATA2 Guide RNA
ugggagggcaaggcagcguca

SEQ ID NO: 29669 - RNA, 21 nt, Artificial Sequence
  GATA2 Guide RNA
ugggaguccagccugcugacg

SEQ ID NO: 29670 - RNA, 22 nt, Artificial Sequence
  GATA2 Guide RNA
aaggcagcgucagcaggcugga

SEQ ID NO: 29671 - RNA, 22 nt, Artificial Sequence
  GATA2 Guide RNA
acugggagggcaaggcagcguc

SEQ ID NO: 29672 - RNA, 22 nt, Artificial Sequence
  GATA2 Guide RNA
agccugcugacgcugccuugcc

SEQ ID NO: 29673 - RNA, 22 nt, Artificial Sequence
  GATA2 Guide RNA
agcgucagcaggcuggacuccc

SEQ ID NO: 29674 - RNA, 22 nt, Artificial Sequence
  GATA2 Guide RNA
aggcagcgucagcaggcuggac

SEQ ID NO: 29675 - RNA, 22 nt, Artificial Sequence
  GATA2 Guide RNA
agggcaaggcagcgucagcagg

SEQ ID NO: 29676 - RNA, 22 nt, Artificial Sequence
  GATA2 Guide RNA
aguccagccugcugacgcugcc

SEQ ID NO: 29677 - RNA, 22 nt, Artificial Sequence
  GATA2 Guide RNA
caaggcagcgucagcaggcugg

SEQ ID NO: 29678 - RNA, 22 nt, Artificial Sequence
  GATA2 Guide RNA
cagccugcugacgcugccuugc

SEQ ID NO: 29679 - RNA, 22 nt, Artificial Sequence
  GATA2 Guide RNA
cagcgucagcaggcuggacucc

SEQ ID NO: 29680 - RNA, 22 nt, Artificial Sequence
  GATA2 Guide RNA
ccagccugcugacgcugccuug

SEQ ID NO: 29681 - RNA, 22 nt, Artificial Sequence
  GATA2 Guide RNA
ccugcugacgcugccuugcccu

SEQ ID NO: 29682 - RNA, 22 nt, Artificial Sequence
  GATA2 Guide RNA
cgacugggagggcaaggcagcg

SEQ ID NO: 29683 - RNA, 22 nt, Artificial Sequence
  GATA2 Guide RNA
cgucagcaggcuggacucccac

SEQ ID NO: 29684 - RNA, 22 nt, Artificial Sequence
  GATA2 Guide RNA
cgugggaguccagccugcugac

SEQ ID NO: 29685 - RNA, 22 nt, Artificial Sequence
  GATA2 Guide RNA
cugggagggcaaggcagcguca

SEQ ID NO: 29686 - RNA, 22 nt, Artificial Sequence
  GATA2 Guide RNA
gacugggagggcaaggcagcgu

SEQ ID NO: 29687 - RNA, 22 nt, Artificial Sequence
  GATA2 Guide RNA
gagggcaaggcagcgucagcag

SEQ ID NO: 29688 - RNA, 22 nt, Artificial Sequence
  GATA2 Guide RNA
gaguccagccugcugacgcugc

SEQ ID NO: 29689 - RNA, 22 nt, Artificial Sequence
  GATA2 Guide RNA
gcaaggcagcgucagcaggcug

SEQ ID NO: 29690 - RNA, 22 nt, Artificial Sequence
  GATA2 Guide RNA
gcagcgucagcaggcuggacuc

SEQ ID NO: 29691 - RNA, 22 nt, Artificial Sequence
  GATA2 Guide RNA
gccugcugacgcugccuugccc

SEQ ID NO: 29692 - RNA, 22 nt, Artificial Sequence
  GATA2 Guide RNA
gcgucagcaggcuggacuccca

SEQ ID NO: 29693 - RNA, 22 nt, Artificial Sequence
  GATA2 Guide RNA
gcgugggaguccagccugcuga

SEQ ID NO: 29694 - RNA, 22 nt, Artificial Sequence
  GATA2 Guide RNA
ggagggcaaggcagcgucagca

SEQ ID NO: 29695 - RNA, 22 nt, Artificial Sequence
  GATA2 Guide RNA
ggaguccagccugcugacgcug

SEQ ID NO: 29696 - RNA, 22 nt, Artificial Sequence
  GATA2 Guide RNA
ggcaaggcagcgucagcaggcu

SEQ ID NO: 29697 - RNA, 22 nt, Artificial Sequence
  GATA2 Guide RNA
ggcagcgucagcaggcuggacu

SEQ ID NO: 29698 - RNA, 22 nt, Artificial Sequence
  GATA2 Guide RNA
ggcgugggaguccagccugcug

SEQ ID NO: 29699 - RNA, 22 nt, Artificial Sequence
  GATA2 Guide RNA
gggagggcaaggcagcgucagc

SEQ ID NO: 29700 - RNA, 22 nt, Artificial Sequence
  GATA2 Guide RNA
gggaguccagccugcugacgcu

SEQ ID NO: 29701 - RNA, 22 nt, Artificial Sequence
  GATA2 Guide RNA
gggcaaggcagcgucagcaggc

SEQ ID NO: 29702 - RNA, 22 nt, Artificial Sequence
  GATA2 Guide RNA
gggcgugggaguccagccugcu

SEQ ID NO: 29703 - RNA, 22 nt, Artificial Sequence
  GATA2 Guide RNA
gucagcaggcuggacucccacg

SEQ ID NO: 29704 - RNA, 22 nt, Artificial Sequence
  GATA2 Guide RNA
guccagccugcugacgcugccu

SEQ ID NO: 29705 - RNA, 22 nt, Artificial Sequence
  GATA2 Guide RNA
gugggaguccagccugcugacg

SEQ ID NO: 29706 - RNA, 22 nt, Artificial Sequence
  GATA2 Guide RNA
uccagccugcugacgcugccuu

SEQ ID NO: 29707 - RNA, 22 nt, Artificial Sequence
  GATA2 Guide RNA
ugggagggcaaggcagcgucag

SEQ ID NO: 29708 - RNA, 22 nt, Artificial Sequence
  GATA2 Guide RNA
ugggaguccagccugcugacgc

SEQ ID NO: 29709 - RNA, 22 nt, Artificial Sequence
  GATA2 Guide RNA
ugggcgugggaguccagccugc

SEQ ID NO: 29710 - RNA, 20 nt, Artificial Sequence
  GATA2 Guide RNA
aaggcagcaucagcaggcug

SEQ ID NO: 29711 - RNA, 20 nt, Artificial Sequence
  GATA2 Guide RNA
acugggagggcaaggcagca

SEQ ID NO: 29712 - RNA, 20 nt, Artificial Sequence
  GATA2 Guide RNA
agcaucagcaggcuggacuc

SEQ ID NO: 29713 - RNA, 20 nt, Artificial Sequence
  GATA2 Guide RNA
agccugcugaugcugccuug

SEQ ID NO: 29714 - RNA, 20 nt, Artificial Sequence
  GATA2 Guide RNA
aggcagcaucagcaggcugg

SEQ ID NO: 29715 - RNA, 20 nt, Artificial Sequence
  GATA2 Guide RNA
agggcaaggcagcaucagca

SEQ ID NO: 29716 - RNA, 20 nt, Artificial Sequence
  GATA2 Guide RNA
aguccagccugcugaugcug

SEQ ID NO: 29717 - RNA, 20 nt, Artificial Sequence
  GATA2 Guide RNA
aucagcaggcuggacuccca

SEQ ID NO: 29718 - RNA, 20 nt, Artificial Sequence
  GATA2 Guide RNA
augcugccuugcccucccag

SEQ ID NO: 29719 - RNA, 20 nt, Artificial Sequence
  GATA2 Guide RNA
caaggcagcaucagcaggcu

SEQ ID NO: 29720 - RNA, 20 nt, Artificial Sequence
  GATA2 Guide RNA
cagcaucagcaggcuggacu

SEQ ID NO: 29721 - RNA, 20 nt, Artificial Sequence
  GATA2 Guide RNA
cagccugcugaugcugccuu

SEQ ID NO: 29722 - RNA, 20 nt, Artificial Sequence
  GATA2 Guide RNA
caucagcaggcuggacuccc

SEQ ID NO: 29723 - RNA, 20 nt, Artificial Sequence
  GATA2 Guide RNA
ccagccugcugaugcugccu

SEQ ID NO: 29724 - RNA, 20 nt, Artificial Sequence
  GATA2 Guide RNA
ccugcugaugcugccuugcc

SEQ ID NO: 29725 - RNA, 20 nt, Artificial Sequence
  GATA2 Guide RNA
cugaugcugccuugcccucc

SEQ ID NO: 29726 - RNA, 20 nt, Artificial Sequence
  GATA2 Guide RNA
cugcugaugcugccuugccc

SEQ ID NO: 29727 - RNA, 20 nt, Artificial Sequence
  GATA2 Guide RNA
cugggagggcaaggcagcau

SEQ ID NO: 29728 - RNA, 20 nt, Artificial Sequence
  GATA2 Guide RNA
gagggcaaggcagcaucagc

SEQ ID NO: 29729 - RNA, 20 nt, Artificial Sequence
  GATA2 Guide RNA
gaguccagccugcugaugcu

SEQ ID NO: 29730 - RNA, 20 nt, Artificial Sequence
  GATA2 Guide RNA
gaugcugccuugcccuccca

SEQ ID NO: 29731 - RNA, 20 nt, Artificial Sequence
  GATA2 Guide RNA
gcaaggcagcaucagcaggc

SEQ ID NO: 29732 - RNA, 20 nt, Artificial Sequence
  GATA2 Guide RNA
gcagcaucagcaggcuggac

SEQ ID NO: 29733 - RNA, 20 nt, Artificial Sequence
  GATA2 Guide RNA
gcaucagcaggcuggacucc

SEQ ID NO: 29734 - RNA, 20 nt, Artificial Sequence
  GATA2 Guide RNA
gccugcugaugcugccuugc

SEQ ID NO: 29735 - RNA, 20 nt, Artificial Sequence
  GATA2 Guide RNA
gcugaugcugccuugcccuc

SEQ ID NO: 29736 - RNA, 20 nt, Artificial Sequence
  GATA2 Guide RNA
ggagggcaaggcagcaucag

SEQ ID NO: 29737 - RNA, 20 nt, Artificial Sequence
  GATA2 Guide RNA
ggaguccagccugcugaugc

SEQ ID NO: 29738 - RNA, 20 nt, Artificial Sequence
  GATA2 Guide RNA
ggcaaggcagcaucagcagg

SEQ ID NO: 29739 - RNA, 20 nt, Artificial Sequence
  GATA2 Guide RNA
ggcagcaucagcaggcugga

SEQ ID NO: 29740 - RNA, 20 nt, Artificial Sequence
  GATA2 Guide RNA
gggagggcaaggcagcauca

SEQ ID NO: 29741 - RNA, 20 nt, Artificial Sequence
  GATA2 Guide RNA
gggaguccagccugcugaug

SEQ ID NO: 29742 - RNA, 20 nt, Artificial Sequence
  GATA2 Guide RNA
gggcaaggcagcaucagcag

SEQ ID NO: 29743 - RNA, 20 nt, Artificial Sequence
  GATA2 Guide RNA
guccagccugcugaugcugc

SEQ ID NO: 29744 - RNA, 20 nt, Artificial Sequence
  GATA2 Guide RNA
uccagccugcugaugcugcc

SEQ ID NO: 29745 - RNA, 20 nt, Artificial Sequence
  GATA2 Guide RNA
ugaugcugccuugcccuccc

SEQ ID NO: 29746 - RNA, 20 nt, Artificial Sequence
  GATA2 Guide RNA
ugcugaugcugccuugcccu

SEQ ID NO: 29747 - RNA, 20 nt, Artificial Sequence
  GATA2 Guide RNA
ugggagggcaaggcagcauc

SEQ ID NO: 29748 - RNA, 20 nt, Artificial Sequence
  GATA2 Guide RNA
ugggaguccagccugcugau

SEQ ID NO: 29749 - RNA, 21 nt, Artificial Sequence
  GATA2 Guide RNA
aaggcagcaucagcaggcugg

SEQ ID NO: 29750 - RNA, 21 nt, Artificial Sequence
  GATA2 Guide RNA
acugggagggcaaggcagcau

SEQ ID NO: 29751 - RNA, 21 nt, Artificial Sequence
  GATA2 Guide RNA
agcaucagcaggcuggacucc

SEQ ID NO: 29752 - RNA, 21 nt, Artificial Sequence
  GATA2 Guide RNA
agccugcugaugcugccuugc

SEQ ID NO: 29753 - RNA, 21 nt, Artificial Sequence
  GATA2 Guide RNA
aggcagcaucagcaggcugga

SEQ ID NO: 29754 - RNA, 21 nt, Artificial Sequence
  GATA2 Guide RNA
agggcaaggcagcaucagcag

SEQ ID NO: 29755 - RNA, 21 nt, Artificial Sequence
  GATA2 Guide RNA
aguccagccugcugaugcugc

SEQ ID NO: 29756 - RNA, 21 nt, Artificial Sequence
  GATA2 Guide RNA
aucagcaggcuggacucccac

SEQ ID NO: 29757 - RNA, 21 nt, Artificial Sequence
  GATA2 Guide RNA
augcugccuugcccucccagu

SEQ ID NO: 29758 - RNA, 21 nt, Artificial Sequence
  GATA2 Guide RNA
caaggcagcaucagcaggcug

SEQ ID NO: 29759 - RNA, 21 nt, Artificial Sequence
  GATA2 Guide RNA
cagcaucagcaggcuggacuc

SEQ ID NO: 29760 - RNA, 21 nt, Artificial Sequence
  GATA2 Guide RNA
cagccugcugaugcugccuug

SEQ ID NO: 29761 - RNA, 21 nt, Artificial Sequence
  GATA2 Guide RNA
caucagcaggcuggacuccca

SEQ ID NO: 29762 - RNA, 21 nt, Artificial Sequence
  GATA2 Guide RNA
ccagccugcugaugcugccuu

SEQ ID NO: 29763 - RNA, 21 nt, Artificial Sequence
  GATA2 Guide RNA
ccugcugaugcugccuugccc

SEQ ID NO: 29764 - RNA, 21 nt, Artificial Sequence
  GATA2 Guide RNA
cugaugcugccuugcccuccc

SEQ ID NO: 29765 - RNA, 21 nt, Artificial Sequence
  GATA2 Guide RNA
cugcugaugcugccuugcccu

SEQ ID NO: 29766 - RNA, 21 nt, Artificial Sequence
  GATA2 Guide RNA
cugggagggcaaggcagcauc

SEQ ID NO: 29767 - RNA, 21 nt, Artificial Sequence
  GATA2 Guide RNA
gacugggagggcaaggcagca

SEQ ID NO: 29768 - RNA, 21 nt, Artificial Sequence
  GATA2 Guide RNA
gagggcaaggcagcaucagca

SEQ ID NO: 29769 - RNA, 21 nt, Artificial Sequence
  GATA2 Guide RNA
gaguccagccugcugaugcug

SEQ ID NO: 29770 - RNA, 21 nt, Artificial Sequence
  GATA2 Guide RNA
gaugcugccuugcccucccag

SEQ ID NO: 29771 - RNA, 21 nt, Artificial Sequence
  GATA2 Guide RNA
gcaaggcagcaucagcaggcu

SEQ ID NO: 29772 - RNA, 21 nt, Artificial Sequence
  GATA2 Guide RNA
gcagcaucagcaggcuggacu

SEQ ID NO: 29773 - RNA, 21 nt, Artificial Sequence
  GATA2 Guide RNA
gcaucagcaggcuggacuccc

SEQ ID NO: 29774 - RNA, 21 nt, Artificial Sequence
  GATA2 Guide RNA
gccugcugaugcugccuugcc

SEQ ID NO: 29775 - RNA, 21 nt, Artificial Sequence
  GATA2 Guide RNA
gcugaugcugccuugcccucc

SEQ ID NO: 29776 - RNA, 21 nt, Artificial Sequence
  GATA2 Guide RNA
ggagggcaaggcagcaucagc

SEQ ID NO: 29777 - RNA, 21 nt, Artificial Sequence
  GATA2 Guide RNA
ggaguccagccugcugaugcu

SEQ ID NO: 29778 - RNA, 21 nt, Artificial Sequence
  GATA2 Guide RNA
ggcaaggcagcaucagcaggc

SEQ ID NO: 29779 - RNA, 21 nt, Artificial Sequence
  GATA2 Guide RNA
ggcagcaucagcaggcuggac

SEQ ID NO: 29780 - RNA, 21 nt, Artificial Sequence
  GATA2 Guide RNA
gggagggcaaggcagcaucag

SEQ ID NO: 29781 - RNA, 21 nt, Artificial Sequence
  GATA2 Guide RNA
gggaguccagccugcugaugc

SEQ ID NO: 29782 - RNA, 21 nt, Artificial Sequence
  GATA2 Guide RNA
gggcaaggcagcaucagcagg

SEQ ID NO: 29783 - RNA, 21 nt, Artificial Sequence
  GATA2 Guide RNA
guccagccugcugaugcugcc

SEQ ID NO: 29784 - RNA, 21 nt, Artificial Sequence
  GATA2 Guide RNA
gugggaguccagccugcugau

SEQ ID NO: 29785 - RNA, 21 nt, Artificial Sequence
  GATA2 Guide RNA
uccagccugcugaugcugccu

SEQ ID NO: 29786 - RNA, 21 nt, Artificial Sequence
  GATA2 Guide RNA
ugaugcugccuugcccuccca

SEQ ID NO: 29787 - RNA, 21 nt, Artificial Sequence
  GATA2 Guide RNA
ugcugaugcugccuugcccuc

SEQ ID NO: 29788 - RNA, 21 nt, Artificial Sequence
  GATA2 Guide RNA
ugggagggcaaggcagcauca

SEQ ID NO: 29789 - RNA, 21 nt, Artificial Sequence
  GATA2 Guide RNA
ugggaguccagccugcugaug

SEQ ID NO: 29790 - RNA, 22 nt, Artificial Sequence
  GATA2 Guide RNA
aaggcagcaucagcaggcugga

SEQ ID NO: 29791 - RNA, 22 nt, Artificial Sequence
  GATA2 Guide RNA
acugggagggcaaggcagcauc

SEQ ID NO: 29792 - RNA, 22 nt, Artificial Sequence
  GATA2 Guide RNA
agcaucagcaggcuggacuccc

SEQ ID NO: 29793 - RNA, 22 nt, Artificial Sequence
  GATA2 Guide RNA
agccugcugaugcugccuugcc

SEQ ID NO: 29794 - RNA, 22 nt, Artificial Sequence
  GATA2 Guide RNA
aggcagcaucagcaggcuggac

SEQ ID NO: 29795 - RNA, 22 nt, Artificial Sequence
  GATA2 Guide RNA
agggcaaggcagcaucagcagg

SEQ ID NO: 29796 - RNA, 22 nt, Artificial Sequence
  GATA2 Guide RNA
aguccagccugcugaugcugcc

SEQ ID NO: 29797 - RNA, 22 nt, Artificial Sequence
  GATA2 Guide RNA
aucagcaggcuggacucccacg

SEQ ID NO: 29798 - RNA, 22 nt, Artificial Sequence
  GATA2 Guide RNA
augcugccuugcccucccaguc

SEQ ID NO: 29799 - RNA, 22 nt, Artificial Sequence
  GATA2 Guide RNA
caaggcagcaucagcaggcugg

SEQ ID NO: 29800 - RNA, 22 nt, Artificial Sequence
  GATA2 Guide RNA
cagcaucagcaggcuggacucc

SEQ ID NO: 29801 - RNA, 22 nt, Artificial Sequence
  GATA2 Guide RNA
cagccugcugaugcugccuugc

SEQ ID NO: 29802 - RNA, 22 nt, Artificial Sequence
  GATA2 Guide RNA
caucagcaggcuggacucccac

SEQ ID NO: 29803 - RNA, 22 nt, Artificial Sequence
  GATA2 Guide RNA
ccagccugcugaugcugccuug

SEQ ID NO: 29804 - RNA, 22 nt, Artificial Sequence
  GATA2 Guide RNA
ccugcugaugcugccuugcccu

SEQ ID NO: 29805 - RNA, 22 nt, Artificial Sequence
  GATA2 Guide RNA
cgacugggagggcaaggcagca

SEQ ID NO: 29806 - RNA, 22 nt, Artificial Sequence
  GATA2 Guide RNA
cgugggaguccagccugcugau

SEQ ID NO: 29807 - RNA, 22 nt, Artificial Sequence
  GATA2 Guide RNA
cugaugcugccuugcccuccca

SEQ ID NO: 29808 - RNA, 22 nt, Artificial Sequence
  GATA2 Guide RNA
cugcugaugcugccuugcccuc

SEQ ID NO: 29809 - RNA, 22 nt, Artificial Sequence
  GATA2 Guide RNA
cugggagggcaaggcagcauca

SEQ ID NO: 29810 - RNA, 22 nt, Artificial Sequence
  GATA2 Guide RNA
gacugggagggcaaggcagcau

SEQ ID NO: 29811 - RNA, 22 nt, Artificial Sequence
  GATA2 Guide RNA
gagggcaaggcagcaucagcag

SEQ ID NO: 29812 - RNA, 22 nt, Artificial Sequence
  GATA2 Guide RNA
gaguccagccugcugaugcugc

SEQ ID NO: 29813 - RNA, 22 nt, Artificial Sequence
  GATA2 Guide RNA
gaugcugccuugcccucccagu

SEQ ID NO: 29814 - RNA, 22 nt, Artificial Sequence
  GATA2 Guide RNA
gcaaggcagcaucagcaggcug

SEQ ID NO: 29815 - RNA, 22 nt, Artificial Sequence
  GATA2 Guide RNA
gcagcaucagcaggcuggacuc

SEQ ID NO: 29816 - RNA, 22 nt, Artificial Sequence
  GATA2 Guide RNA
gcaucagcaggcuggacuccca

SEQ ID NO: 29817 - RNA, 22 nt, Artificial Sequence
  GATA2 Guide RNA
gccugcugaugcugccuugccc

SEQ ID NO: 29818 - RNA, 22 nt, Artificial Sequence
  GATA2 Guide RNA
gcugaugcugccuugcccuccc

SEQ ID NO: 29819 - RNA, 22 nt, Artificial Sequence
  GATA2 Guide RNA
ggagggcaaggcagcaucagca

SEQ ID NO: 29820 - RNA, 22 nt, Artificial Sequence
  GATA2 Guide RNA
ggaguccagccugcugaugcug

SEQ ID NO: 29821 - RNA, 22 nt, Artificial Sequence
  GATA2 Guide RNA
ggcaaggcagcaucagcaggcu

SEQ ID NO: 29822 - RNA, 22 nt, Artificial Sequence
  GATA2 Guide RNA
ggcagcaucagcaggcuggacu

SEQ ID NO: 29823 - RNA, 22 nt, Artificial Sequence
  GATA2 Guide RNA
gggagggcaaggcagcaucagc

SEQ ID NO: 29824 - RNA, 22 nt, Artificial Sequence
  GATA2 Guide RNA
gggaguccagccugcugaugcu

SEQ ID NO: 29825 - RNA, 22 nt, Artificial Sequence
  GATA2 Guide RNA
gggcaaggcagcaucagcaggc

SEQ ID NO: 29826 - RNA, 22 nt, Artificial Sequence
  GATA2 Guide RNA
guccagccugcugaugcugccu

SEQ ID NO: 29827 - RNA, 22 nt, Artificial Sequence
  GATA2 Guide RNA
gugggaguccagccugcugaug

SEQ ID NO: 29828 - RNA, 22 nt, Artificial Sequence
  GATA2 Guide RNA
uccagccugcugaugcugccuu

SEQ ID NO: 29829 - RNA, 22 nt, Artificial Sequence
  GATA2 Guide RNA
ugaugcugccuugcccucccag

SEQ ID NO: 29830 - RNA, 22 nt, Artificial Sequence
  GATA2 Guide RNA
ugcugaugcugccuugcccucc

SEQ ID NO: 29831 - RNA, 22 nt, Artificial Sequence
  GATA2 Guide RNA
ugggagggcaaggcagcaucag

SEQ ID NO: 29832 - RNA, 22 nt, Artificial Sequence
  GATA2 Guide RNA
ugggaguccagccugcugaugc

SEQ ID NO: 29833 - RNA, 20 nt, Artificial Sequence
  GATA2 Guide RNA
aagccugauguuagaaucaa

SEQ ID NO: 29834 - RNA, 20 nt, Artificial Sequence
  GATA2 Guide RNA
aaucaacgggauugcaagag

SEQ ID NO: 29835 - RNA, 20 nt, Artificial Sequence
  GATA2 Guide RNA
aaucccguugauucuaacau

SEQ ID NO: 29836 - RNA, 20 nt, Artificial Sequence
  GATA2 Guide RNA
agaagccugauguuagaauc

SEQ ID NO: 29837 - RNA, 20 nt, Artificial Sequence
  GATA2 Guide RNA
agaaucaacgggauugcaag

SEQ ID NO: 29838 - RNA, 20 nt, Artificial Sequence
  GATA2 Guide RNA
agccugauguuagaaucaac

SEQ ID NO: 29839 - RNA, 20 nt, Artificial Sequence
  GATA2 Guide RNA
agcucuugcaaucccguuga

SEQ ID NO: 29840 - RNA, 20 nt, Artificial Sequence
  GATA2 Guide RNA
aucaacgggauugcaagagc

SEQ ID NO: 29841 - RNA, 20 nt, Artificial Sequence
  GATA2 Guide RNA
aucccguugauucuaacauc

SEQ ID NO: 29842 - RNA, 20 nt, Artificial Sequence
  GATA2 Guide RNA
auguuagaaucaacgggauu

SEQ ID NO: 29843 - RNA, 20 nt, Artificial Sequence
  GATA2 Guide RNA
auucuaacaucaggcuucug

SEQ ID NO: 29844 - RNA, 20 nt, Artificial Sequence
  GATA2 Guide RNA
caaucccguugauucuaaca

SEQ ID NO: 29845 - RNA, 20 nt, Artificial Sequence
  GATA2 Guide RNA
cagaagccugauguuagaau

SEQ ID NO: 29846 - RNA, 20 nt, Artificial Sequence
  GATA2 Guide RNA
cccguugauucuaacaucag

SEQ ID NO: 29847 - RNA, 20 nt, Artificial Sequence
  GATA2 Guide RNA
ccguugauucuaacaucagg

SEQ ID NO: 29848 - RNA, 20 nt, Artificial Sequence
  GATA2 Guide RNA
ccugauguuagaaucaacgg

SEQ ID NO: 29849 - RNA, 20 nt, Artificial Sequence
  GATA2 Guide RNA
cguugauucuaacaucaggc

SEQ ID NO: 29850 - RNA, 20 nt, Artificial Sequence
  GATA2 Guide RNA
cucagaagccugauguuaga

SEQ ID NO: 29851 - RNA, 20 nt, Artificial Sequence
  GATA2 Guide RNA
cucucagaagccugauguua

SEQ ID NO: 29852 - RNA, 20 nt, Artificial Sequence
  GATA2 Guide RNA
cucuugcaaucccguugauu

SEQ ID NO: 29853 - RNA, 20 nt, Artificial Sequence
  GATA2 Guide RNA
cugauguuagaaucaacggg

SEQ ID NO: 29854 - RNA, 20 nt, Artificial Sequence
  GATA2 Guide RNA
cuugcaaucccguugauucu

SEQ ID NO: 29855 - RNA, 20 nt, Artificial Sequence
  GATA2 Guide RNA
gaagccugauguuagaauca

SEQ ID NO: 29856 - RNA, 20 nt, Artificial Sequence
  GATA2 Guide RNA
gaaucaacgggauugcaaga

SEQ ID NO: 29857 - RNA, 20 nt, Artificial Sequence
  GATA2 Guide RNA
gauguuagaaucaacgggau

SEQ ID NO: 29858 - RNA, 20 nt, Artificial Sequence
  GATA2 Guide RNA
gauucuaacaucaggcuucu

SEQ ID NO: 29859 - RNA, 20 nt, Artificial Sequence
  GATA2 Guide RNA
gcaaucccguugauucuaac

SEQ ID NO: 29860 - RNA, 20 nt, Artificial Sequence
  GATA2 Guide RNA
gccugauguuagaaucaacg

SEQ ID NO: 29861 - RNA, 20 nt, Artificial Sequence
  GATA2 Guide RNA
gcucuugcaaucccguugau

SEQ ID NO: 29862 - RNA, 20 nt, Artificial Sequence
  GATA2 Guide RNA
guagcucuugcaaucccguu

SEQ ID NO: 29863 - RNA, 20 nt, Artificial Sequence
  GATA2 Guide RNA
guuagaaucaacgggauugc

SEQ ID NO: 29864 - RNA, 20 nt, Artificial Sequence
  GATA2 Guide RNA
guugauucuaacaucaggcu

SEQ ID NO: 29865 - RNA, 20 nt, Artificial Sequence
  GATA2 Guide RNA
uagaaucaacgggauugcaa

SEQ ID NO: 29866 - RNA, 20 nt, Artificial Sequence
  GATA2 Guide RNA
uagcucuugcaaucccguug

SEQ ID NO: 29867 - RNA, 20 nt, Artificial Sequence
  GATA2 Guide RNA
ucagaagccugauguuagaa

SEQ ID NO: 29868 - RNA, 20 nt, Artificial Sequence
  GATA2 Guide RNA
ucccguugauucuaacauca

SEQ ID NO: 29869 - RNA, 20 nt, Artificial Sequence
  GATA2 Guide RNA
ucucagaagccugauguuag

SEQ ID NO: 29870 - RNA, 20 nt, Artificial Sequence
  GATA2 Guide RNA
ucuugcaaucccguugauuc

SEQ ID NO: 29871 - RNA, 20 nt, Artificial Sequence
  GATA2 Guide RNA
ugauguuagaaucaacggga

SEQ ID NO: 29872 - RNA, 20 nt, Artificial Sequence
  GATA2 Guide RNA
ugauucuaacaucaggcuuc

SEQ ID NO: 29873 - RNA, 20 nt, Artificial Sequence
  GATA2 Guide RNA
ugcaaucccguugauucuaa

SEQ ID NO: 29874 - RNA, 20 nt, Artificial Sequence
  GATA2 Guide RNA
uguagcucuugcaaucccgu

SEQ ID NO: 29875 - RNA, 20 nt, Artificial Sequence
  GATA2 Guide RNA
uguuagaaucaacgggauug

SEQ ID NO: 29876 - RNA, 20 nt, Artificial Sequence
  GATA2 Guide RNA
uuagaaucaacgggauugca

SEQ ID NO: 29877 - RNA, 20 nt, Artificial Sequence
  GATA2 Guide RNA
uugauucuaacaucaggcuu

SEQ ID NO: 29878 - RNA, 20 nt, Artificial Sequence
  GATA2 Guide RNA
uugcaaucccguugauucua

SEQ ID NO: 29879 - RNA, 21 nt, Artificial Sequence
  GATA2 Guide RNA
aagccugauguuagaaucaac

SEQ ID NO: 29880 - RNA, 21 nt, Artificial Sequence
  GATA2 Guide RNA
aaucaacgggauugcaagagc

SEQ ID NO: 29881 - RNA, 21 nt, Artificial Sequence
  GATA2 Guide RNA
aaucccguugauucuaacauc

SEQ ID NO: 29882 - RNA, 21 nt, Artificial Sequence
  GATA2 Guide RNA
acucucagaagccugauguua

SEQ ID NO: 29883 - RNA, 21 nt, Artificial Sequence
  GATA2 Guide RNA
agaagccugauguuagaauca

SEQ ID NO: 29884 - RNA, 21 nt, Artificial Sequence
  GATA2 Guide RNA
agaaucaacgggauugcaaga

SEQ ID NO: 29885 - RNA, 21 nt, Artificial Sequence
  GATA2 Guide RNA
agccugauguuagaaucaacg

SEQ ID NO: 29886 - RNA, 21 nt, Artificial Sequence
  GATA2 Guide RNA
agcucuugcaaucccguugau

SEQ ID NO: 29887 - RNA, 21 nt, Artificial Sequence
  GATA2 Guide RNA
aucaacgggauugcaagagcu

SEQ ID NO: 29888 - RNA, 21 nt, Artificial Sequence
  GATA2 Guide RNA
aucccguugauucuaacauca

SEQ ID NO: 29889 - RNA, 21 nt, Artificial Sequence
  GATA2 Guide RNA
auguuagaaucaacgggauug

SEQ ID NO: 29890 - RNA, 21 nt, Artificial Sequence
  GATA2 Guide RNA
auucuaacaucaggcuucuga

SEQ ID NO: 29891 - RNA, 21 nt, Artificial Sequence
  GATA2 Guide RNA
caaucccguugauucuaacau

SEQ ID NO: 29892 - RNA, 21 nt, Artificial Sequence
  GATA2 Guide RNA
cagaagccugauguuagaauc

SEQ ID NO: 29893 - RNA, 21 nt, Artificial Sequence
  GATA2 Guide RNA
cccguugauucuaacaucagg

SEQ ID NO: 29894 - RNA, 21 nt, Artificial Sequence
  GATA2 Guide RNA
ccguugauucuaacaucaggc

SEQ ID NO: 29895 - RNA, 21 nt, Artificial Sequence
  GATA2 Guide RNA
ccugauguuagaaucaacggg

SEQ ID NO: 29896 - RNA, 21 nt, Artificial Sequence
  GATA2 Guide RNA
cguugauucuaacaucaggcu

SEQ ID NO: 29897 - RNA, 21 nt, Artificial Sequence
  GATA2 Guide RNA
cucagaagccugauguuagaa

SEQ ID NO: 29898 - RNA, 21 nt, Artificial Sequence
  GATA2 Guide RNA
cucucagaagccugauguuag

SEQ ID NO: 29899 - RNA, 21 nt, Artificial Sequence
  GATA2 Guide RNA
cucuugcaaucccguugauuc

SEQ ID NO: 29900 - RNA, 21 nt, Artificial Sequence
  GATA2 Guide RNA
cugauguuagaaucaacggga

SEQ ID NO: 29901 - RNA, 21 nt, Artificial Sequence
  GATA2 Guide RNA
cuguagcucuugcaaucccgu

SEQ ID NO: 29902 - RNA, 21 nt, Artificial Sequence
  GATA2 Guide RNA
cuugcaaucccguugauucua

SEQ ID NO: 29903 - RNA, 21 nt, Artificial Sequence
  GATA2 Guide RNA
gaagccugauguuagaaucaa

SEQ ID NO: 29904 - RNA, 21 nt, Artificial Sequence
  GATA2 Guide RNA
gaaucaacgggauugcaagag

SEQ ID NO: 29905 - RNA, 21 nt, Artificial Sequence
  GATA2 Guide RNA
gauguuagaaucaacgggauu

SEQ ID NO: 29906 - RNA, 21 nt, Artificial Sequence
  GATA2 Guide RNA
gauucuaacaucaggcuucug

SEQ ID NO: 29907 - RNA, 21 nt, Artificial Sequence
  GATA2 Guide RNA
gcaaucccguugauucuaaca

SEQ ID NO: 29908 - RNA, 21 nt, Artificial Sequence
  GATA2 Guide RNA
gccugauguuagaaucaacgg

SEQ ID NO: 29909 - RNA, 21 nt, Artificial Sequence
  GATA2 Guide RNA
gcucuugcaaucccguugauu

SEQ ID NO: 29910 - RNA, 21 nt, Artificial Sequence
  GATA2 Guide RNA
guagcucuugcaaucccguug

SEQ ID NO: 29911 - RNA, 21 nt, Artificial Sequence
  GATA2 Guide RNA
guuagaaucaacgggauugca

SEQ ID NO: 29912 - RNA, 21 nt, Artificial Sequence
  GATA2 Guide RNA
guugauucuaacaucaggcuu

SEQ ID NO: 29913 - RNA, 21 nt, Artificial Sequence
  GATA2 Guide RNA
uagaaucaacgggauugcaag

SEQ ID NO: 29914 - RNA, 21 nt, Artificial Sequence
  GATA2 Guide RNA
uagcucuugcaaucccguuga

SEQ ID NO: 29915 - RNA, 21 nt, Artificial Sequence
  GATA2 Guide RNA
ucagaagccugauguuagaau

SEQ ID NO: 29916 - RNA, 21 nt, Artificial Sequence
  GATA2 Guide RNA
ucccguugauucuaacaucag

SEQ ID NO: 29917 - RNA, 21 nt, Artificial Sequence
  GATA2 Guide RNA
ucucagaagccugauguuaga

SEQ ID NO: 29918 - RNA, 21 nt, Artificial Sequence
  GATA2 Guide RNA
ucuugcaaucccguugauucu

SEQ ID NO: 29919 - RNA, 21 nt, Artificial Sequence
  GATA2 Guide RNA
ugauguuagaaucaacgggau

SEQ ID NO: 29920 - RNA, 21 nt, Artificial Sequence
  GATA2 Guide RNA
ugauucuaacaucaggcuucu

SEQ ID NO: 29921 - RNA, 21 nt, Artificial Sequence
  GATA2 Guide RNA
ugcaaucccguugauucuaac

SEQ ID NO: 29922 - RNA, 21 nt, Artificial Sequence
  GATA2 Guide RNA
uguagcucuugcaaucccguu

SEQ ID NO: 29923 - RNA, 21 nt, Artificial Sequence
  GATA2 Guide RNA
uguuagaaucaacgggauugc

SEQ ID NO: 29924 - RNA, 21 nt, Artificial Sequence
  GATA2 Guide RNA
uuagaaucaacgggauugcaa

SEQ ID NO: 29925 - RNA, 21 nt, Artificial Sequence
  GATA2 Guide RNA
uugauucuaacaucaggcuuc

SEQ ID NO: 29926 - RNA, 21 nt, Artificial Sequence
  GATA2 Guide RNA
uugcaaucccguugauucuaa

SEQ ID NO: 29927 - RNA, 22 nt, Artificial Sequence
  GATA2 Guide RNA
aacucucagaagccugauguua

SEQ ID NO: 29928 - RNA, 22 nt, Artificial Sequence
  GATA2 Guide RNA
aagccugauguuagaaucaacg

SEQ ID NO: 29929 - RNA, 22 nt, Artificial Sequence
  GATA2 Guide RNA
aaucaacgggauugcaagagcu

SEQ ID NO: 29930 - RNA, 22 nt, Artificial Sequence
  GATA2 Guide RNA
aaucccguugauucuaacauca

SEQ ID NO: 29931 - RNA, 22 nt, Artificial Sequence
  GATA2 Guide RNA
acucucagaagccugauguuag

SEQ ID NO: 29932 - RNA, 22 nt, Artificial Sequence
  GATA2 Guide RNA
agaagccugauguuagaaucaa

SEQ ID NO: 29933 - RNA, 22 nt, Artificial Sequence
  GATA2 Guide RNA
agaaucaacgggauugcaagag

SEQ ID NO: 29934 - RNA, 22 nt, Artificial Sequence
  GATA2 Guide RNA
agccugauguuagaaucaacgg

SEQ ID NO: 29935 - RNA, 22 nt, Artificial Sequence
  GATA2 Guide RNA
agcucuugcaaucccguugauu

SEQ ID NO: 29936 - RNA, 22 nt, Artificial Sequence
  GATA2 Guide RNA
aucaacgggauugcaagagcua

SEQ ID NO: 29937 - RNA, 22 nt, Artificial Sequence
  GATA2 Guide RNA
aucccguugauucuaacaucag

SEQ ID NO: 29938 - RNA, 22 nt, Artificial Sequence
  GATA2 Guide RNA
auguuagaaucaacgggauugc

SEQ ID NO: 29939 - RNA, 22 nt, Artificial Sequence
  GATA2 Guide RNA
auucuaacaucaggcuucugag

SEQ ID NO: 29940 - RNA, 22 nt, Artificial Sequence
  GATA2 Guide RNA
caaucccguugauucuaacauc

SEQ ID NO: 29941 - RNA, 22 nt, Artificial Sequence
  GATA2 Guide RNA
cagaagccugauguuagaauca

SEQ ID NO: 29942 - RNA, 22 nt, Artificial Sequence
  GATA2 Guide RNA
cccguugauucuaacaucaggc

SEQ ID NO: 29943 - RNA, 22 nt, Artificial Sequence
  GATA2 Guide RNA
ccguugauucuaacaucaggcu

SEQ ID NO: 29944 - RNA, 22 nt, Artificial Sequence
  GATA2 Guide RNA
ccugauguuagaaucaacggga

SEQ ID NO: 29945 - RNA, 22 nt, Artificial Sequence
  GATA2 Guide RNA
cguugauucuaacaucaggcuu

SEQ ID NO: 29946 - RNA, 22 nt, Artificial Sequence
  GATA2 Guide RNA
cucagaagccugauguuagaau

SEQ ID NO: 29947 - RNA, 22 nt, Artificial Sequence
  GATA2 Guide RNA
cucucagaagccugauguuaga

SEQ ID NO: 29948 - RNA, 22 nt, Artificial Sequence
  GATA2 Guide RNA
cucuugcaaucccguugauucu

SEQ ID NO: 29949 - RNA, 22 nt, Artificial Sequence
  GATA2 Guide RNA
cugauguuagaaucaacgggau

SEQ ID NO: 29950 - RNA, 22 nt, Artificial Sequence
  GATA2 Guide RNA
cuguagcucuugcaaucccguu

SEQ ID NO: 29951 - RNA, 22 nt, Artificial Sequence
  GATA2 Guide RNA
cuugcaaucccguugauucuaa

SEQ ID NO: 29952 - RNA, 22 nt, Artificial Sequence
  GATA2 Guide RNA
gaagccugauguuagaaucaac

SEQ ID NO: 29953 - RNA, 22 nt, Artificial Sequence
  GATA2 Guide RNA
gaaucaacgggauugcaagagc

SEQ ID NO: 29954 - RNA, 22 nt, Artificial Sequence
  GATA2 Guide RNA
gauguuagaaucaacgggauug

SEQ ID NO: 29955 - RNA, 22 nt, Artificial Sequence
  GATA2 Guide RNA
gauucuaacaucaggcuucuga

SEQ ID NO: 29956 - RNA, 22 nt, Artificial Sequence
  GATA2 Guide RNA
gcaaucccguugauucuaacau

SEQ ID NO: 29957 - RNA, 22 nt, Artificial Sequence
  GATA2 Guide RNA
gccugauguuagaaucaacggg

SEQ ID NO: 29958 - RNA, 22 nt, Artificial Sequence
  GATA2 Guide RNA
gcucuugcaaucccguugauuc

SEQ ID NO: 29959 - RNA, 22 nt, Artificial Sequence
  GATA2 Guide RNA
guagcucuugcaaucccguuga

SEQ ID NO: 29960 - RNA, 22 nt, Artificial Sequence
  GATA2 Guide RNA
guuagaaucaacgggauugcaa

SEQ ID NO: 29961 - RNA, 22 nt, Artificial Sequence
  GATA2 Guide RNA
guugauucuaacaucaggcuuc

SEQ ID NO: 29962 - RNA, 22 nt, Artificial Sequence
  GATA2 Guide RNA
uagaaucaacgggauugcaaga

SEQ ID NO: 29963 - RNA, 22 nt, Artificial Sequence
  GATA2 Guide RNA
uagcucuugcaaucccguugau

SEQ ID NO: 29964 - RNA, 22 nt, Artificial Sequence
  GATA2 Guide RNA
ucagaagccugauguuagaauc

SEQ ID NO: 29965 - RNA, 22 nt, Artificial Sequence
  GATA2 Guide RNA
ucccguugauucuaacaucagg

SEQ ID NO: 29966 - RNA, 22 nt, Artificial Sequence
  GATA2 Guide RNA
ucucagaagccugauguuagaa

SEQ ID NO: 29967 - RNA, 22 nt, Artificial Sequence
  GATA2 Guide RNA
ucuguagcucuugcaaucccgu

SEQ ID NO: 29968 - RNA, 22 nt, Artificial Sequence
  GATA2 Guide RNA
ucuugcaaucccguugauucua

SEQ ID NO: 29969 - RNA, 22 nt, Artificial Sequence
  GATA2 Guide RNA
ugauguuagaaucaacgggauu

SEQ ID NO: 29970 - RNA, 22 nt, Artificial Sequence
  GATA2 Guide RNA
ugauucuaacaucaggcuucug

SEQ ID NO: 29971 - RNA, 22 nt, Artificial Sequence
  GATA2 Guide RNA
ugcaaucccguugauucuaaca

SEQ ID NO: 29972 - RNA, 22 nt, Artificial Sequence
  GATA2 Guide RNA
uguagcucuugcaaucccguug

SEQ ID NO: 29973 - RNA, 22 nt, Artificial Sequence
  GATA2 Guide RNA
uguuagaaucaacgggauugca

SEQ ID NO: 29974 - RNA, 22 nt, Artificial Sequence
  GATA2 Guide RNA
uuagaaucaacgggauugcaag

SEQ ID NO: 29975 - RNA, 22 nt, Artificial Sequence
  GATA2 Guide RNA
uugauucuaacaucaggcuucu

SEQ ID NO: 29976 - RNA, 22 nt, Artificial Sequence
  GATA2 Guide RNA
uugcaaucccguugauucuaac

SEQ ID NO: 29977 - RNA, 20 nt, Artificial Sequence
  GATA2 Guide RNA
aagccugauguuagacucaa

SEQ ID NO: 29978 - RNA, 20 nt, Artificial Sequence
  GATA2 Guide RNA
aaucccguugagucuaacau

SEQ ID NO: 29979 - RNA, 20 nt, Artificial Sequence
  GATA2 Guide RNA
acucaacgggauugcaagag

SEQ ID NO: 29980 - RNA, 20 nt, Artificial Sequence
  GATA2 Guide RNA
agaagccugauguuagacuc

SEQ ID NO: 29981 - RNA, 20 nt, Artificial Sequence
  GATA2 Guide RNA
agacucaacgggauugcaag

SEQ ID NO: 29982 - RNA, 20 nt, Artificial Sequence
  GATA2 Guide RNA
agccugauguuagacucaac

SEQ ID NO: 29983 - RNA, 20 nt, Artificial Sequence
  GATA2 Guide RNA
agucuaacaucaggcuucug

SEQ ID NO: 29984 - RNA, 20 nt, Artificial Sequence
  GATA2 Guide RNA
aucccguugagucuaacauc

SEQ ID NO: 29985 - RNA, 20 nt, Artificial Sequence
  GATA2 Guide RNA
auguuagacucaacgggauu

SEQ ID NO: 29986 - RNA, 20 nt, Artificial Sequence
  GATA2 Guide RNA
caaucccguugagucuaaca

SEQ ID NO: 29987 - RNA, 20 nt, Artificial Sequence
  GATA2 Guide RNA
cagaagccugauguuagacu

SEQ ID NO: 29988 - RNA, 20 nt, Artificial Sequence
  GATA2 Guide RNA
cccguugagucuaacaucag

SEQ ID NO: 29989 - RNA, 20 nt, Artificial Sequence
  GATA2 Guide RNA
ccguugagucuaacaucagg

SEQ ID NO: 29990 - RNA, 20 nt, Artificial Sequence
  GATA2 Guide RNA
ccugauguuagacucaacgg

SEQ ID NO: 29991 - RNA, 20 nt, Artificial Sequence
  GATA2 Guide RNA
cguugagucuaacaucaggc

SEQ ID NO: 29992 - RNA, 20 nt, Artificial Sequence
  GATA2 Guide RNA
cucaacgggauugcaagagc

SEQ ID NO: 29993 - RNA, 20 nt, Artificial Sequence
  GATA2 Guide RNA
cucuugcaaucccguugagu

SEQ ID NO: 29994 - RNA, 20 nt, Artificial Sequence
  GATA2 Guide RNA
cugauguuagacucaacggg

SEQ ID NO: 29995 - RNA, 20 nt, Artificial Sequence
  GATA2 Guide RNA
cuugcaaucccguugagucu

SEQ ID NO: 29996 - RNA, 20 nt, Artificial Sequence
  GATA2 Guide RNA
gaagccugauguuagacuca

SEQ ID NO: 29997 - RNA, 20 nt, Artificial Sequence
  GATA2 Guide RNA
gacucaacgggauugcaaga

SEQ ID NO: 29998 - RNA, 20 nt, Artificial Sequence
  GATA2 Guide RNA
gagucuaacaucaggcuucu

SEQ ID NO: 29999 - RNA, 20 nt, Artificial Sequence
  GATA2 Guide RNA
gauguuagacucaacgggau

SEQ ID NO: 30000 - RNA, 20 nt, Artificial Sequence
  GATA2 Guide RNA
gcaaucccguugagucuaac

SEQ ID NO: 30001 - RNA, 20 nt, Artificial Sequence
  GATA2 Guide RNA
gccugauguuagacucaacg

SEQ ID NO: 30002 - RNA, 20 nt, Artificial Sequence
  GATA2 Guide RNA
gcucuugcaaucccguugag

SEQ ID NO: 30003 - RNA, 20 nt, Artificial Sequence
  GATA2 Guide RNA
guuagacucaacgggauugc

SEQ ID NO: 30004 - RNA, 20 nt, Artificial Sequence
  GATA2 Guide RNA
guugagucuaacaucaggcu

SEQ ID NO: 30005 - RNA, 20 nt, Artificial Sequence
  GATA2 Guide RNA
uagacucaacgggauugcaa

SEQ ID NO: 30006 - RNA, 20 nt, Artificial Sequence
  GATA2 Guide RNA
ucagaagccugauguuagac

SEQ ID NO: 30007 - RNA, 20 nt, Artificial Sequence
  GATA2 Guide RNA
ucccguugagucuaacauca

SEQ ID NO: 30008 - RNA, 20 nt, Artificial Sequence
  GATA2 Guide RNA
ucuugcaaucccguugaguc

SEQ ID NO: 30009 - RNA, 20 nt, Artificial Sequence
  GATA2 Guide RNA
ugagucuaacaucaggcuuc

SEQ ID NO: 30010 - RNA, 20 nt, Artificial Sequence
  GATA2 Guide RNA
ugauguuagacucaacggga

SEQ ID NO: 30011 - RNA, 20 nt, Artificial Sequence
  GATA2 Guide RNA
ugcaaucccguugagucuaa

SEQ ID NO: 30012 - RNA, 20 nt, Artificial Sequence
  GATA2 Guide RNA
uguuagacucaacgggauug

SEQ ID NO: 30013 - RNA, 20 nt, Artificial Sequence
  GATA2 Guide RNA
uuagacucaacgggauugca

SEQ ID NO: 30014 - RNA, 20 nt, Artificial Sequence
  GATA2 Guide RNA
uugagucuaacaucaggcuu

SEQ ID NO: 30015 - RNA, 20 nt, Artificial Sequence
  GATA2 Guide RNA
uugcaaucccguugagucua

SEQ ID NO: 30016 - RNA, 21 nt, Artificial Sequence
  GATA2 Guide RNA
aagccugauguuagacucaac

SEQ ID NO: 30017 - RNA, 21 nt, Artificial Sequence
  GATA2 Guide RNA
aaucccguugagucuaacauc

SEQ ID NO: 30018 - RNA, 21 nt, Artificial Sequence
  GATA2 Guide RNA
acucaacgggauugcaagagc

SEQ ID NO: 30019 - RNA, 21 nt, Artificial Sequence
  GATA2 Guide RNA
agaagccugauguuagacuca

SEQ ID NO: 30020 - RNA, 21 nt, Artificial Sequence
  GATA2 Guide RNA
agacucaacgggauugcaaga

SEQ ID NO: 30021 - RNA, 21 nt, Artificial Sequence
  GATA2 Guide RNA
agccugauguuagacucaacg

SEQ ID NO: 30022 - RNA, 21 nt, Artificial Sequence
  GATA2 Guide RNA
agcucuugcaaucccguugag

SEQ ID NO: 30023 - RNA, 21 nt, Artificial Sequence
  GATA2 Guide RNA
agucuaacaucaggcuucuga

SEQ ID NO: 30024 - RNA, 21 nt, Artificial Sequence
  GATA2 Guide RNA
aucccguugagucuaacauca

SEQ ID NO: 30025 - RNA, 21 nt, Artificial Sequence
  GATA2 Guide RNA
auguuagacucaacgggauug

SEQ ID NO: 30026 - RNA, 21 nt, Artificial Sequence
  GATA2 Guide RNA
caaucccguugagucuaacau

SEQ ID NO: 30027 - RNA, 21 nt, Artificial Sequence
  GATA2 Guide RNA
cagaagccugauguuagacuc

SEQ ID NO: 30028 - RNA, 21 nt, Artificial Sequence
  GATA2 Guide RNA
cccguugagucuaacaucagg

SEQ ID NO: 30029 - RNA, 21 nt, Artificial Sequence
  GATA2 Guide RNA
ccguugagucuaacaucaggc

SEQ ID NO: 30030 - RNA, 21 nt, Artificial Sequence
  GATA2 Guide RNA
ccugauguuagacucaacggg

SEQ ID NO: 30031 - RNA, 21 nt, Artificial Sequence
  GATA2 Guide RNA
cguugagucuaacaucaggcu

SEQ ID NO: 30032 - RNA, 21 nt, Artificial Sequence
  GATA2 Guide RNA
cucaacgggauugcaagagcu

SEQ ID NO: 30033 - RNA, 21 nt, Artificial Sequence
  GATA2 Guide RNA
cucagaagccugauguuagac

SEQ ID NO: 30034 - RNA, 21 nt, Artificial Sequence
  GATA2 Guide RNA
cucuugcaaucccguugaguc

SEQ ID NO: 30035 - RNA, 21 nt, Artificial Sequence
  GATA2 Guide RNA
cugauguuagacucaacggga

SEQ ID NO: 30036 - RNA, 21 nt, Artificial Sequence
  GATA2 Guide RNA
cuugcaaucccguugagucua

SEQ ID NO: 30037 - RNA, 21 nt, Artificial Sequence
  GATA2 Guide RNA
gaagccugauguuagacucaa

SEQ ID NO: 30038 - RNA, 21 nt, Artificial Sequence
  GATA2 Guide RNA
gacucaacgggauugcaagag

SEQ ID NO: 30039 - RNA, 21 nt, Artificial Sequence
  GATA2 Guide RNA
gagucuaacaucaggcuucug

SEQ ID NO: 30040 - RNA, 21 nt, Artificial Sequence
  GATA2 Guide RNA
gauguuagacucaacgggauu

SEQ ID NO: 30041 - RNA, 21 nt, Artificial Sequence
  GATA2 Guide RNA
gcaaucccguugagucuaaca

SEQ ID NO: 30042 - RNA, 21 nt, Artificial Sequence
  GATA2 Guide RNA
gccugauguuagacucaacgg

SEQ ID NO: 30043 - RNA, 21 nt, Artificial Sequence
  GATA2 Guide RNA
gcucuugcaaucccguugagu

SEQ ID NO: 30044 - RNA, 21 nt, Artificial Sequence
  GATA2 Guide RNA
guuagacucaacgggauugca

SEQ ID NO: 30045 - RNA, 21 nt, Artificial Sequence
  GATA2 Guide RNA
guugagucuaacaucaggcuu

SEQ ID NO: 30046 - RNA, 21 nt, Artificial Sequence
  GATA2 Guide RNA
uagacucaacgggauugcaag

SEQ ID NO: 30047 - RNA, 21 nt, Artificial Sequence
  GATA2 Guide RNA
ucagaagccugauguuagacu

SEQ ID NO: 30048 - RNA, 21 nt, Artificial Sequence
  GATA2 Guide RNA
ucccguugagucuaacaucag

SEQ ID NO: 30049 - RNA, 21 nt, Artificial Sequence
  GATA2 Guide RNA
ucuugcaaucccguugagucu

SEQ ID NO: 30050 - RNA, 21 nt, Artificial Sequence
  GATA2 Guide RNA
ugagucuaacaucaggcuucu

SEQ ID NO: 30051 - RNA, 21 nt, Artificial Sequence
  GATA2 Guide RNA
ugauguuagacucaacgggau

SEQ ID NO: 30052 - RNA, 21 nt, Artificial Sequence
  GATA2 Guide RNA
ugcaaucccguugagucuaac

SEQ ID NO: 30053 - RNA, 21 nt, Artificial Sequence
  GATA2 Guide RNA
uguuagacucaacgggauugc

SEQ ID NO: 30054 - RNA, 21 nt, Artificial Sequence
  GATA2 Guide RNA
uuagacucaacgggauugcaa

SEQ ID NO: 30055 - RNA, 21 nt, Artificial Sequence
  GATA2 Guide RNA
uugagucuaacaucaggcuuc

SEQ ID NO: 30056 - RNA, 21 nt, Artificial Sequence
  GATA2 Guide RNA
uugcaaucccguugagucuaa

SEQ ID NO: 30057 - RNA, 22 nt, Artificial Sequence
  GATA2 Guide RNA
aagccugauguuagacucaacg

SEQ ID NO: 30058 - RNA, 22 nt, Artificial Sequence
  GATA2 Guide RNA
aaucccguugagucuaacauca

SEQ ID NO: 30059 - RNA, 22 nt, Artificial Sequence
  GATA2 Guide RNA
acucaacgggauugcaagagcu

SEQ ID NO: 30060 - RNA, 22 nt, Artificial Sequence
  GATA2 Guide RNA
agaagccugauguuagacucaa

SEQ ID NO: 30061 - RNA, 22 nt, Artificial Sequence
  GATA2 Guide RNA
agacucaacgggauugcaagag

SEQ ID NO: 30062 - RNA, 22 nt, Artificial Sequence
  GATA2 Guide RNA
agccugauguuagacucaacgg

SEQ ID NO: 30063 - RNA, 22 nt, Artificial Sequence
  GATA2 Guide RNA
agcucuugcaaucccguugagu

SEQ ID NO: 30064 - RNA, 22 nt, Artificial Sequence
  GATA2 Guide RNA
agucuaacaucaggcuucugag

SEQ ID NO: 30065 - RNA, 22 nt, Artificial Sequence
  GATA2 Guide RNA
aucccguugagucuaacaucag

SEQ ID NO: 30066 - RNA, 22 nt, Artificial Sequence
  GATA2 Guide RNA
auguuagacucaacgggauugc

SEQ ID NO: 30067 - RNA, 22 nt, Artificial Sequence
  GATA2 Guide RNA
caaucccguugagucuaacauc

SEQ ID NO: 30068 - RNA, 22 nt, Artificial Sequence
  GATA2 Guide RNA
cagaagccugauguuagacuca

SEQ ID NO: 30069 - RNA, 22 nt, Artificial Sequence
  GATA2 Guide RNA
cccguugagucuaacaucaggc

SEQ ID NO: 30070 - RNA, 22 nt, Artificial Sequence
  GATA2 Guide RNA
ccguugagucuaacaucaggcu

SEQ ID NO: 30071 - RNA, 22 nt, Artificial Sequence
  GATA2 Guide RNA
ccugauguuagacucaacggga

SEQ ID NO: 30072 - RNA, 22 nt, Artificial Sequence
  GATA2 Guide RNA
cguugagucuaacaucaggcuu

SEQ ID NO: 30073 - RNA, 22 nt, Artificial Sequence
  GATA2 Guide RNA
cucaacgggauugcaagagcua

SEQ ID NO: 30074 - RNA, 22 nt, Artificial Sequence
  GATA2 Guide RNA
cucagaagccugauguuagacu

SEQ ID NO: 30075 - RNA, 22 nt, Artificial Sequence
  GATA2 Guide RNA
cucuugcaaucccguugagucu

SEQ ID NO: 30076 - RNA, 22 nt, Artificial Sequence
  GATA2 Guide RNA
cugauguuagacucaacgggau

SEQ ID NO: 30077 - RNA, 22 nt, Artificial Sequence
  GATA2 Guide RNA
cuugcaaucccguugagucuaa

SEQ ID NO: 30078 - RNA, 22 nt, Artificial Sequence
  GATA2 Guide RNA
gaagccugauguuagacucaac

SEQ ID NO: 30079 - RNA, 22 nt, Artificial Sequence
  GATA2 Guide RNA
gacucaacgggauugcaagagc

SEQ ID NO: 30080 - RNA, 22 nt, Artificial Sequence
  GATA2 Guide RNA
gagucuaacaucaggcuucuga

SEQ ID NO: 30081 - RNA, 22 nt, Artificial Sequence
  GATA2 Guide RNA
gauguuagacucaacgggauug

SEQ ID NO: 30082 - RNA, 22 nt, Artificial Sequence
  GATA2 Guide RNA
gcaaucccguugagucuaacau

SEQ ID NO: 30083 - RNA, 22 nt, Artificial Sequence
  GATA2 Guide RNA
gccugauguuagacucaacggg

SEQ ID NO: 30084 - RNA, 22 nt, Artificial Sequence
  GATA2 Guide RNA
gcucuugcaaucccguugaguc

SEQ ID NO: 30085 - RNA, 22 nt, Artificial Sequence
  GATA2 Guide RNA
guuagacucaacgggauugcaa

SEQ ID NO: 30086 - RNA, 22 nt, Artificial Sequence
  GATA2 Guide RNA
guugagucuaacaucaggcuuc

SEQ ID NO: 30087 - RNA, 22 nt, Artificial Sequence
  GATA2 Guide RNA
uagacucaacgggauugcaaga

SEQ ID NO: 30088 - RNA, 22 nt, Artificial Sequence
  GATA2 Guide RNA
uagcucuugcaaucccguugag

SEQ ID NO: 30089 - RNA, 22 nt, Artificial Sequence
  GATA2 Guide RNA
ucagaagccugauguuagacuc

SEQ ID NO: 30090 - RNA, 22 nt, Artificial Sequence
  GATA2 Guide RNA
ucccguugagucuaacaucagg

SEQ ID NO: 30091 - RNA, 22 nt, Artificial Sequence
  GATA2 Guide RNA
ucucagaagccugauguuagac

SEQ ID NO: 30092 - RNA, 22 nt, Artificial Sequence
  GATA2 Guide RNA
ucuugcaaucccguugagucua

SEQ ID NO: 30093 - RNA, 22 nt, Artificial Sequence
  GATA2 Guide RNA
ugagucuaacaucaggcuucug

SEQ ID NO: 30094 - RNA, 22 nt, Artificial Sequence
  GATA2 Guide RNA
ugauguuagacucaacgggauu

SEQ ID NO: 30095 - RNA, 22 nt, Artificial Sequence
  GATA2 Guide RNA
ugcaaucccguugagucuaaca

SEQ ID NO: 30096 - RNA, 22 nt, Artificial Sequence
  GATA2 Guide RNA
uguuagacucaacgggauugca

SEQ ID NO: 30097 - RNA, 22 nt, Artificial Sequence
  GATA2 Guide RNA
uuagacucaacgggauugcaag

SEQ ID NO: 30098 - RNA, 22 nt, Artificial Sequence
  GATA2 Guide RNA
uugagucuaacaucaggcuucu

SEQ ID NO: 30099 - RNA, 22 nt, Artificial Sequence
  GATA2 Guide RNA
uugcaaucccguugagucuaac

SEQ ID NO: 30100 - RNA, 20 nt, Artificial Sequence
  GATA2 Guide RNA
aagagggacgagagggucuc

SEQ ID NO: 30101 - RNA, 20 nt, Artificial Sequence
  GATA2 Guide RNA
acccucucgucccucuuccu

SEQ ID NO: 30102 - RNA, 20 nt, Artificial Sequence
  GATA2 Guide RNA
acgagagggucucccacaug

SEQ ID NO: 30103 - RNA, 20 nt, Artificial Sequence
  GATA2 Guide RNA
agacccucucgucccucuuc

SEQ ID NO: 30104 - RNA, 20 nt, Artificial Sequence
  GATA2 Guide RNA
agagggacgagagggucucc

SEQ ID NO: 30105 - RNA, 20 nt, Artificial Sequence
  GATA2 Guide RNA
agccugggcaggaagaggga

SEQ ID NO: 30106 - RNA, 20 nt, Artificial Sequence
  GATA2 Guide RNA
aggaagagggacgagagggu

SEQ ID NO: 30107 - RNA, 20 nt, Artificial Sequence
  GATA2 Guide RNA
agggacgagagggucuccca

SEQ ID NO: 30108 - RNA, 20 nt, Artificial Sequence
  GATA2 Guide RNA
augugggagacccucucguc

SEQ ID NO: 30109 - RNA, 20 nt, Artificial Sequence
  GATA2 Guide RNA
cagccugggcaggaagaggg

SEQ ID NO: 30110 - RNA, 20 nt, Artificial Sequence
  GATA2 Guide RNA
caggaagagggacgagaggg

SEQ ID NO: 30111 - RNA, 20 nt, Artificial Sequence
  GATA2 Guide RNA
caugugggagacccucucgu

SEQ ID NO: 30112 - RNA, 20 nt, Artificial Sequence
  GATA2 Guide RNA
ccaugugggagacccucucg

SEQ ID NO: 30113 - RNA, 20 nt, Artificial Sequence
  GATA2 Guide RNA
cccaugugggagacccucuc

SEQ ID NO: 30114 - RNA, 20 nt, Artificial Sequence
  GATA2 Guide RNA
cccucccaugugggagaccc

SEQ ID NO: 30115 - RNA, 20 nt, Artificial Sequence
  GATA2 Guide RNA
cccucucgucccucuuccug

SEQ ID NO: 30116 - RNA, 20 nt, Artificial Sequence
  GATA2 Guide RNA
ccucccaugugggagacccu

SEQ ID NO: 30117 - RNA, 20 nt, Artificial Sequence
  GATA2 Guide RNA
ccucucgucccucuuccugc

SEQ ID NO: 30118 - RNA, 20 nt, Artificial Sequence
  GATA2 Guide RNA
ccugggcaggaagagggacg

SEQ ID NO: 30119 - RNA, 20 nt, Artificial Sequence
  GATA2 Guide RNA
cgagagggucucccacaugg

SEQ ID NO: 30120 - RNA, 20 nt, Artificial Sequence
  GATA2 Guide RNA
cucccaugugggagacccuc

SEQ ID NO: 30121 - RNA, 20 nt, Artificial Sequence
  GATA2 Guide RNA
cucgucccucuuccugccca

SEQ ID NO: 30122 - RNA, 20 nt, Artificial Sequence
  GATA2 Guide RNA
cucucgucccucuuccugcc

SEQ ID NO: 30123 - RNA, 20 nt, Artificial Sequence
  GATA2 Guide RNA
cugggcaggaagagggacga

SEQ ID NO: 30124 - RNA, 20 nt, Artificial Sequence
  GATA2 Guide RNA
gaagagggacgagagggucu

SEQ ID NO: 30125 - RNA, 20 nt, Artificial Sequence
  GATA2 Guide RNA
gacccucucgucccucuucc

SEQ ID NO: 30126 - RNA, 20 nt, Artificial Sequence
  GATA2 Guide RNA
gacgagagggucucccacau

SEQ ID NO: 30127 - RNA, 20 nt, Artificial Sequence
  GATA2 Guide RNA
gagacccucucgucccucuu

SEQ ID NO: 30128 - RNA, 20 nt, Artificial Sequence
  GATA2 Guide RNA
gagagggucucccacauggg

SEQ ID NO: 30129 - RNA, 20 nt, Artificial Sequence
  GATA2 Guide RNA
gagggacgagagggucuccc

SEQ ID NO: 30130 - RNA, 20 nt, Artificial Sequence
  GATA2 Guide RNA
gcaggaagagggacgagagg

SEQ ID NO: 30131 - RNA, 20 nt, Artificial Sequence
  GATA2 Guide RNA
gccugggcaggaagagggac

SEQ ID NO: 30132 - RNA, 20 nt, Artificial Sequence
  GATA2 Guide RNA
ggaagagggacgagaggguc

SEQ ID NO: 30133 - RNA, 20 nt, Artificial Sequence
  GATA2 Guide RNA
ggacgagagggucucccaca

SEQ ID NO: 30134 - RNA, 20 nt, Artificial Sequence
  GATA2 Guide RNA
ggagacccucucgucccucu

SEQ ID NO: 30135 - RNA, 20 nt, Artificial Sequence
  GATA2 Guide RNA
ggcaggaagagggacgagag

SEQ ID NO: 30136 - RNA, 20 nt, Artificial Sequence
  GATA2 Guide RNA
gggacgagagggucucccac

SEQ ID NO: 30137 - RNA, 20 nt, Artificial Sequence
  GATA2 Guide RNA
gggagacccucucgucccuc

SEQ ID NO: 30138 - RNA, 20 nt, Artificial Sequence
  GATA2 Guide RNA
gggcaggaagagggacgaga

SEQ ID NO: 30139 - RNA, 20 nt, Artificial Sequence
  GATA2 Guide RNA
gugggagacccucucguccc

SEQ ID NO: 30140 - RNA, 20 nt, Artificial Sequence
  GATA2 Guide RNA
ucccaugugggagacccucu

SEQ ID NO: 30141 - RNA, 20 nt, Artificial Sequence
  GATA2 Guide RNA
ucgucccucuuccugcccag

SEQ ID NO: 30142 - RNA, 20 nt, Artificial Sequence
  GATA2 Guide RNA
ucucgucccucuuccugccc

SEQ ID NO: 30143 - RNA, 20 nt, Artificial Sequence
  GATA2 Guide RNA
ugggagacccucucgucccu

SEQ ID NO: 30144 - RNA, 20 nt, Artificial Sequence
  GATA2 Guide RNA
ugggcaggaagagggacgag

SEQ ID NO: 30145 - RNA, 20 nt, Artificial Sequence
  GATA2 Guide RNA
ugugggagacccucucgucc

SEQ ID NO: 30146 - RNA, 21 nt, Artificial Sequence
  GATA2 Guide RNA
aagagggacgagagggucucc

SEQ ID NO: 30147 - RNA, 21 nt, Artificial Sequence
  GATA2 Guide RNA
acagccugggcaggaagaggg

SEQ ID NO: 30148 - RNA, 21 nt, Artificial Sequence
  GATA2 Guide RNA
acccucucgucccucuuccug

SEQ ID NO: 30149 - RNA, 21 nt, Artificial Sequence
  GATA2 Guide RNA
acgagagggucucccacaugg

SEQ ID NO: 30150 - RNA, 21 nt, Artificial Sequence
  GATA2 Guide RNA
agacccucucgucccucuucc

SEQ ID NO: 30151 - RNA, 21 nt, Artificial Sequence
  GATA2 Guide RNA
agagggacgagagggucuccc

SEQ ID NO: 30152 - RNA, 21 nt, Artificial Sequence
  GATA2 Guide RNA
agccugggcaggaagagggac

SEQ ID NO: 30153 - RNA, 21 nt, Artificial Sequence
  GATA2 Guide RNA
aggaagagggacgagaggguc

SEQ ID NO: 30154 - RNA, 21 nt, Artificial Sequence
  GATA2 Guide RNA
agggacgagagggucucccac

SEQ ID NO: 30155 - RNA, 21 nt, Artificial Sequence
  GATA2 Guide RNA
augugggagacccucucgucc

SEQ ID NO: 30156 - RNA, 21 nt, Artificial Sequence
  GATA2 Guide RNA
cagccugggcaggaagaggga

SEQ ID NO: 30157 - RNA, 21 nt, Artificial Sequence
  GATA2 Guide RNA
caggaagagggacgagagggu

SEQ ID NO: 30158 - RNA, 21 nt, Artificial Sequence
  GATA2 Guide RNA
caugugggagacccucucguc

SEQ ID NO: 30159 - RNA, 21 nt, Artificial Sequence
  GATA2 Guide RNA
ccaugugggagacccucucgu

SEQ ID NO: 30160 - RNA, 21 nt, Artificial Sequence
  GATA2 Guide RNA
cccaugugggagacccucucg

SEQ ID NO: 30161 - RNA, 21 nt, Artificial Sequence
  GATA2 Guide RNA
ccccucccaugugggagaccc

SEQ ID NO: 30162 - RNA, 21 nt, Artificial Sequence
  GATA2 Guide RNA
cccucccaugugggagacccu

SEQ ID NO: 30163 - RNA, 21 nt, Artificial Sequence
  GATA2 Guide RNA
cccucucgucccucuuccugc

SEQ ID NO: 30164 - RNA, 21 nt, Artificial Sequence
  GATA2 Guide RNA
ccucccaugugggagacccuc

SEQ ID NO: 30165 - RNA, 21 nt, Artificial Sequence
  GATA2 Guide RNA
ccucucgucccucuuccugcc

SEQ ID NO: 30166 - RNA, 21 nt, Artificial Sequence
  GATA2 Guide RNA
ccugggcaggaagagggacga

SEQ ID NO: 30167 - RNA, 21 nt, Artificial Sequence
  GATA2 Guide RNA
cgagagggucucccacauggg

SEQ ID NO: 30168 - RNA, 21 nt, Artificial Sequence
  GATA2 Guide RNA
cucccaugugggagacccucu

SEQ ID NO: 30169 - RNA, 21 nt, Artificial Sequence
  GATA2 Guide RNA
cucgucccucuuccugcccag

SEQ ID NO: 30170 - RNA, 21 nt, Artificial Sequence
  GATA2 Guide RNA
cucucgucccucuuccugccc

SEQ ID NO: 30171 - RNA, 21 nt, Artificial Sequence
  GATA2 Guide RNA
cugggcaggaagagggacgag

SEQ ID NO: 30172 - RNA, 21 nt, Artificial Sequence
  GATA2 Guide RNA
gaagagggacgagagggucuc

SEQ ID NO: 30173 - RNA, 21 nt, Artificial Sequence
  GATA2 Guide RNA
gacccucucgucccucuuccu

SEQ ID NO: 30174 - RNA, 21 nt, Artificial Sequence
  GATA2 Guide RNA
gacgagagggucucccacaug

SEQ ID NO: 30175 - RNA, 21 nt, Artificial Sequence
  GATA2 Guide RNA
gagacccucucgucccucuuc

SEQ ID NO: 30176 - RNA, 21 nt, Artificial Sequence
  GATA2 Guide RNA
gagagggucucccacauggga

SEQ ID NO: 30177 - RNA, 21 nt, Artificial Sequence
  GATA2 Guide RNA
gagggacgagagggucuccca

SEQ ID NO: 30178 - RNA, 21 nt, Artificial Sequence
  GATA2 Guide RNA
gcaggaagagggacgagaggg

SEQ ID NO: 30179 - RNA, 21 nt, Artificial Sequence
  GATA2 Guide RNA
gccugggcaggaagagggacg

SEQ ID NO: 30180 - RNA, 21 nt, Artificial Sequence
  GATA2 Guide RNA
ggaagagggacgagagggucu

SEQ ID NO: 30181 - RNA, 21 nt, Artificial Sequence
  GATA2 Guide RNA
ggacgagagggucucccacau

SEQ ID NO: 30182 - RNA, 21 nt, Artificial Sequence
  GATA2 Guide RNA
ggagacccucucgucccucuu

SEQ ID NO: 30183 - RNA, 21 nt, Artificial Sequence
  GATA2 Guide RNA
ggcaggaagagggacgagagg

SEQ ID NO: 30184 - RNA, 21 nt, Artificial Sequence
  GATA2 Guide RNA
gggacgagagggucucccaca

SEQ ID NO: 30185 - RNA, 21 nt, Artificial Sequence
  GATA2 Guide RNA
gggagacccucucgucccucu

SEQ ID NO: 30186 - RNA, 21 nt, Artificial Sequence
  GATA2 Guide RNA
gggcaggaagagggacgagag

SEQ ID NO: 30187 - RNA, 21 nt, Artificial Sequence
  GATA2 Guide RNA
gugggagacccucucgucccu

SEQ ID NO: 30188 - RNA, 21 nt, Artificial Sequence
  GATA2 Guide RNA
ucccaugugggagacccucuc

SEQ ID NO: 30189 - RNA, 21 nt, Artificial Sequence
  GATA2 Guide RNA
ucgucccucuuccugcccagg

SEQ ID NO: 30190 - RNA, 21 nt, Artificial Sequence
  GATA2 Guide RNA
ucucgucccucuuccugccca

SEQ ID NO: 30191 - RNA, 21 nt, Artificial Sequence
  GATA2 Guide RNA
ugggagacccucucgucccuc

SEQ ID NO: 30192 - RNA, 21 nt, Artificial Sequence
  GATA2 Guide RNA
ugggcaggaagagggacgaga

SEQ ID NO: 30193 - RNA, 21 nt, Artificial Sequence
  GATA2 Guide RNA
ugugggagacccucucguccc

SEQ ID NO: 30194 - RNA, 22 nt, Artificial Sequence
  GATA2 Guide RNA
aacagccugggcaggaagaggg

SEQ ID NO: 30195 - RNA, 22 nt, Artificial Sequence
  GATA2 Guide RNA
aagagggacgagagggucuccc

SEQ ID NO: 30196 - RNA, 22 nt, Artificial Sequence
  GATA2 Guide RNA
acagccugggcaggaagaggga

SEQ ID NO: 30197 - RNA, 22 nt, Artificial Sequence
  GATA2 Guide RNA
acccucucgucccucuuccugc

SEQ ID NO: 30198 - RNA, 22 nt, Artificial Sequence
  GATA2 Guide RNA
acgagagggucucccacauggg

SEQ ID NO: 30199 - RNA, 22 nt, Artificial Sequence
  GATA2 Guide RNA
agacccucucgucccucuuccu

SEQ ID NO: 30200 - RNA, 22 nt, Artificial Sequence
  GATA2 Guide RNA
agagggacgagagggucuccca

SEQ ID NO: 30201 - RNA, 22 nt, Artificial Sequence
  GATA2 Guide RNA
agccugggcaggaagagggacg

SEQ ID NO: 30202 - RNA, 22 nt, Artificial Sequence
  GATA2 Guide RNA
aggaagagggacgagagggucu

SEQ ID NO: 30203 - RNA, 22 nt, Artificial Sequence
  GATA2 Guide RNA
agggacgagagggucucccaca

SEQ ID NO: 30204 - RNA, 22 nt, Artificial Sequence
  GATA2 Guide RNA
augugggagacccucucguccc

SEQ ID NO: 30205 - RNA, 22 nt, Artificial Sequence
  GATA2 Guide RNA
cagccugggcaggaagagggac

SEQ ID NO: 30206 - RNA, 22 nt, Artificial Sequence
  GATA2 Guide RNA
caggaagagggacgagaggguc

SEQ ID NO: 30207 - RNA, 22 nt, Artificial Sequence
  GATA2 Guide RNA
caugugggagacccucucgucc

SEQ ID NO: 30208 - RNA, 22 nt, Artificial Sequence
  GATA2 Guide RNA
ccaugugggagacccucucguc

SEQ ID NO: 30209 - RNA, 22 nt, Artificial Sequence
  GATA2 Guide RNA
cccaugugggagacccucucgu

SEQ ID NO: 30210 - RNA, 22 nt, Artificial Sequence
  GATA2 Guide RNA
cccccucccaugugggagaccc

SEQ ID NO: 30211 - RNA, 22 nt, Artificial Sequence
  GATA2 Guide RNA
ccccucccaugugggagacccu

SEQ ID NO: 30212 - RNA, 22 nt, Artificial Sequence
  GATA2 Guide RNA
cccucccaugugggagacccuc

SEQ ID NO: 30213 - RNA, 22 nt, Artificial Sequence
  GATA2 Guide RNA
cccucucgucccucuuccugcc

SEQ ID NO: 30214 - RNA, 22 nt, Artificial Sequence
  GATA2 Guide RNA
ccucccaugugggagacccucu

SEQ ID NO: 30215 - RNA, 22 nt, Artificial Sequence
  GATA2 Guide RNA
ccucucgucccucuuccugccc

SEQ ID NO: 30216 - RNA, 22 nt, Artificial Sequence
  GATA2 Guide RNA
ccugggcaggaagagggacgag

SEQ ID NO: 30217 - RNA, 22 nt, Artificial Sequence
  GATA2 Guide RNA
cgagagggucucccacauggga

SEQ ID NO: 30218 - RNA, 22 nt, Artificial Sequence
  GATA2 Guide RNA
cucccaugugggagacccucuc

SEQ ID NO: 30219 - RNA, 22 nt, Artificial Sequence
  GATA2 Guide RNA
cucgucccucuuccugcccagg

SEQ ID NO: 30220 - RNA, 22 nt, Artificial Sequence
  GATA2 Guide RNA
cucucgucccucuuccugccca

SEQ ID NO: 30221 - RNA, 22 nt, Artificial Sequence
  GATA2 Guide RNA
cugggcaggaagagggacgaga

SEQ ID NO: 30222 - RNA, 22 nt, Artificial Sequence
  GATA2 Guide RNA
gaagagggacgagagggucucc

SEQ ID NO: 30223 - RNA, 22 nt, Artificial Sequence
  GATA2 Guide RNA
gacccucucgucccucuuccug

SEQ ID NO: 30224 - RNA, 22 nt, Artificial Sequence
  GATA2 Guide RNA
gacgagagggucucccacaugg

SEQ ID NO: 30225 - RNA, 22 nt, Artificial Sequence
  GATA2 Guide RNA
gagacccucucgucccucuucc

SEQ ID NO: 30226 - RNA, 22 nt, Artificial Sequence
  GATA2 Guide RNA
gagagggucucccacaugggag

SEQ ID NO: 30227 - RNA, 22 nt, Artificial Sequence
  GATA2 Guide RNA
gagggacgagagggucucccac

SEQ ID NO: 30228 - RNA, 22 nt, Artificial Sequence
  GATA2 Guide RNA
gcaggaagagggacgagagggu

SEQ ID NO: 30229 - RNA, 22 nt, Artificial Sequence
  GATA2 Guide RNA
gccugggcaggaagagggacga

SEQ ID NO: 30230 - RNA, 22 nt, Artificial Sequence
  GATA2 Guide RNA
ggaagagggacgagagggucuc

SEQ ID NO: 30231 - RNA, 22 nt, Artificial Sequence
  GATA2 Guide RNA
ggacgagagggucucccacaug

SEQ ID NO: 30232 - RNA, 22 nt, Artificial Sequence
  GATA2 Guide RNA
ggagacccucucgucccucuuc

SEQ ID NO: 30233 - RNA, 22 nt, Artificial Sequence
  GATA2 Guide RNA
ggcaggaagagggacgagaggg

SEQ ID NO: 30234 - RNA, 22 nt, Artificial Sequence
  GATA2 Guide RNA
gggacgagagggucucccacau

SEQ ID NO: 30235 - RNA, 22 nt, Artificial Sequence
  GATA2 Guide RNA
gggagacccucucgucccucuu

SEQ ID NO: 30236 - RNA, 22 nt, Artificial Sequence
  GATA2 Guide RNA
gggcaggaagagggacgagagg

SEQ ID NO: 30237 - RNA, 22 nt, Artificial Sequence
  GATA2 Guide RNA
gugggagacccucucgucccuc

SEQ ID NO: 30238 - RNA, 22 nt, Artificial Sequence
  GATA2 Guide RNA
ucccaugugggagacccucucg

SEQ ID NO: 30239 - RNA, 22 nt, Artificial Sequence
  GATA2 Guide RNA
ucgucccucuuccugcccaggc

SEQ ID NO: 30240 - RNA, 22 nt, Artificial Sequence
  GATA2 Guide RNA
ucucgucccucuuccugcccag

SEQ ID NO: 30241 - RNA, 22 nt, Artificial Sequence
  GATA2 Guide RNA
ugggagacccucucgucccucu

SEQ ID NO: 30242 - RNA, 22 nt, Artificial Sequence
  GATA2 Guide RNA
ugggcaggaagagggacgagag

SEQ ID NO: 30243 - RNA, 22 nt, Artificial Sequence
  GATA2 Guide RNA
ugugggagacccucucgucccu

SEQ ID NO: 30244 - RNA, 20 nt, Artificial Sequence
  GATA2 Guide RNA
aagagggacuagagggucuc

SEQ ID NO: 30245 - RNA, 20 nt, Artificial Sequence
  GATA2 Guide RNA
acccucuagucccucuuccu

SEQ ID NO: 30246 - RNA, 20 nt, Artificial Sequence
  GATA2 Guide RNA
acuagagggucucccacaug

SEQ ID NO: 30247 - RNA, 20 nt, Artificial Sequence
  GATA2 Guide RNA
agacccucuagucccucuuc

SEQ ID NO: 30248 - RNA, 20 nt, Artificial Sequence
  GATA2 Guide RNA
agagggacuagagggucucc

SEQ ID NO: 30249 - RNA, 20 nt, Artificial Sequence
  GATA2 Guide RNA
aggaagagggacuagagggu

SEQ ID NO: 30250 - RNA, 20 nt, Artificial Sequence
  GATA2 Guide RNA
agggacuagagggucuccca

SEQ ID NO: 30251 - RNA, 20 nt, Artificial Sequence
  GATA2 Guide RNA
augugggagacccucuaguc

SEQ ID NO: 30252 - RNA, 20 nt, Artificial Sequence
  GATA2 Guide RNA
caggaagagggacuagaggg

SEQ ID NO: 30253 - RNA, 20 nt, Artificial Sequence
  GATA2 Guide RNA
caugugggagacccucuagu

SEQ ID NO: 30254 - RNA, 20 nt, Artificial Sequence
  GATA2 Guide RNA
ccaugugggagacccucuag

SEQ ID NO: 30255 - RNA, 20 nt, Artificial Sequence
  GATA2 Guide RNA
cccaugugggagacccucua

SEQ ID NO: 30256 - RNA, 20 nt, Artificial Sequence
  GATA2 Guide RNA
cccucuagucccucuuccug

SEQ ID NO: 30257 - RNA, 20 nt, Artificial Sequence
  GATA2 Guide RNA
ccucuagucccucuuccugc

SEQ ID NO: 30258 - RNA, 20 nt, Artificial Sequence
  GATA2 Guide RNA
ccugggcaggaagagggacu

SEQ ID NO: 30259 - RNA, 20 nt, Artificial Sequence
  GATA2 Guide RNA
cuagagggucucccacaugg

SEQ ID NO: 30260 - RNA, 20 nt, Artificial Sequence
  GATA2 Guide RNA
cuagucccucuuccugccca

SEQ ID NO: 30261 - RNA, 20 nt, Artificial Sequence
  GATA2 Guide RNA
cucuagucccucuuccugcc

SEQ ID NO: 30262 - RNA, 20 nt, Artificial Sequence
  GATA2 Guide RNA
cugggcaggaagagggacua

SEQ ID NO: 30263 - RNA, 20 nt, Artificial Sequence
  GATA2 Guide RNA
gaagagggacuagagggucu

SEQ ID NO: 30264 - RNA, 20 nt, Artificial Sequence
  GATA2 Guide RNA
gacccucuagucccucuucc

SEQ ID NO: 30265 - RNA, 20 nt, Artificial Sequence
  GATA2 Guide RNA
gacuagagggucucccacau

SEQ ID NO: 30266 - RNA, 20 nt, Artificial Sequence
  GATA2 Guide RNA
gagacccucuagucccucuu

SEQ ID NO: 30267 - RNA, 20 nt, Artificial Sequence
  GATA2 Guide RNA
gagggacuagagggucuccc

SEQ ID NO: 30268 - RNA, 20 nt, Artificial Sequence
  GATA2 Guide RNA
gcaggaagagggacuagagg

SEQ ID NO: 30269 - RNA, 20 nt, Artificial Sequence
  GATA2 Guide RNA
ggaagagggacuagaggguc

SEQ ID NO: 30270 - RNA, 20 nt, Artificial Sequence
  GATA2 Guide RNA
ggacuagagggucucccaca

SEQ ID NO: 30271 - RNA, 20 nt, Artificial Sequence
  GATA2 Guide RNA
ggagacccucuagucccucu

SEQ ID NO: 30272 - RNA, 20 nt, Artificial Sequence
  GATA2 Guide RNA
ggcaggaagagggacuagag

SEQ ID NO: 30273 - RNA, 20 nt, Artificial Sequence
  GATA2 Guide RNA
gggacuagagggucucccac

SEQ ID NO: 30274 - RNA, 20 nt, Artificial Sequence
  GATA2 Guide RNA
gggagacccucuagucccuc

SEQ ID NO: 30275 - RNA, 20 nt, Artificial Sequence
  GATA2 Guide RNA
gggcaggaagagggacuaga

SEQ ID NO: 30276 - RNA, 20 nt, Artificial Sequence
  GATA2 Guide RNA
gugggagacccucuaguccc

SEQ ID NO: 30277 - RNA, 20 nt, Artificial Sequence
  GATA2 Guide RNA
uagagggucucccacauggg

SEQ ID NO: 30278 - RNA, 20 nt, Artificial Sequence
  GATA2 Guide RNA
uagucccucuuccugcccag

SEQ ID NO: 30279 - RNA, 20 nt, Artificial Sequence
  GATA2 Guide RNA
ucuagucccucuuccugccc

SEQ ID NO: 30280 - RNA, 20 nt, Artificial Sequence
  GATA2 Guide RNA
ugggagacccucuagucccu

SEQ ID NO: 30281 - RNA, 20 nt, Artificial Sequence
  GATA2 Guide RNA
ugggcaggaagagggacuag

SEQ ID NO: 30282 - RNA, 20 nt, Artificial Sequence
  GATA2 Guide RNA
ugugggagacccucuagucc

SEQ ID NO: 30283 - RNA, 21 nt, Artificial Sequence
  GATA2 Guide RNA
aagagggacuagagggucucc

SEQ ID NO: 30284 - RNA, 21 nt, Artificial Sequence
  GATA2 Guide RNA
acccucuagucccucuuccug

SEQ ID NO: 30285 - RNA, 21 nt, Artificial Sequence
  GATA2 Guide RNA
acuagagggucucccacaugg

SEQ ID NO: 30286 - RNA, 21 nt, Artificial Sequence
  GATA2 Guide RNA
agacccucuagucccucuucc

SEQ ID NO: 30287 - RNA, 21 nt, Artificial Sequence
  GATA2 Guide RNA
agagggacuagagggucuccc

SEQ ID NO: 30288 - RNA, 21 nt, Artificial Sequence
  GATA2 Guide RNA
aggaagagggacuagaggguc

SEQ ID NO: 30289 - RNA, 21 nt, Artificial Sequence
  GATA2 Guide RNA
agggacuagagggucucccac

SEQ ID NO: 30290 - RNA, 21 nt, Artificial Sequence
  GATA2 Guide RNA
augugggagacccucuagucc

SEQ ID NO: 30291 - RNA, 21 nt, Artificial Sequence
  GATA2 Guide RNA
caggaagagggacuagagggu

SEQ ID NO: 30292 - RNA, 21 nt, Artificial Sequence
  GATA2 Guide RNA
caugugggagacccucuaguc

SEQ ID NO: 30293 - RNA, 21 nt, Artificial Sequence
  GATA2 Guide RNA
ccaugugggagacccucuagu

SEQ ID NO: 30294 - RNA, 21 nt, Artificial Sequence
  GATA2 Guide RNA
cccaugugggagacccucuag

SEQ ID NO: 30295 - RNA, 21 nt, Artificial Sequence
  GATA2 Guide RNA
cccucuagucccucuuccugc

SEQ ID NO: 30296 - RNA, 21 nt, Artificial Sequence
  GATA2 Guide RNA
ccucuagucccucuuccugcc

SEQ ID NO: 30297 - RNA, 21 nt, Artificial Sequence
  GATA2 Guide RNA
ccugggcaggaagagggacua

SEQ ID NO: 30298 - RNA, 21 nt, Artificial Sequence
  GATA2 Guide RNA
cuagagggucucccacauggg

SEQ ID NO: 30299 - RNA, 21 nt, Artificial Sequence
  GATA2 Guide RNA
cuagucccucuuccugcccag

SEQ ID NO: 30300 - RNA, 21 nt, Artificial Sequence
  GATA2 Guide RNA
cucuagucccucuuccugccc

SEQ ID NO: 30301 - RNA, 21 nt, Artificial Sequence
  GATA2 Guide RNA
cugggcaggaagagggacuag

SEQ ID NO: 30302 - RNA, 21 nt, Artificial Sequence
  GATA2 Guide RNA
gaagagggacuagagggucuc

SEQ ID NO: 30303 - RNA, 21 nt, Artificial Sequence
  GATA2 Guide RNA
gacccucuagucccucuuccu

SEQ ID NO: 30304 - RNA, 21 nt, Artificial Sequence
  GATA2 Guide RNA
gacuagagggucucccacaug

SEQ ID NO: 30305 - RNA, 21 nt, Artificial Sequence
  GATA2 Guide RNA
gagacccucuagucccucuuc

SEQ ID NO: 30306 - RNA, 21 nt, Artificial Sequence
  GATA2 Guide RNA
gagggacuagagggucuccca

SEQ ID NO: 30307 - RNA, 21 nt, Artificial Sequence
  GATA2 Guide RNA
gcaggaagagggacuagaggg

SEQ ID NO: 30308 - RNA, 21 nt, Artificial Sequence
  GATA2 Guide RNA
gccugggcaggaagagggacu

SEQ ID NO: 30309 - RNA, 21 nt, Artificial Sequence
  GATA2 Guide RNA
ggaagagggacuagagggucu

SEQ ID NO: 30310 - RNA, 21 nt, Artificial Sequence
  GATA2 Guide RNA
ggacuagagggucucccacau

SEQ ID NO: 30311 - RNA, 21 nt, Artificial Sequence
  GATA2 Guide RNA
ggagacccucuagucccucuu

SEQ ID NO: 30312 - RNA, 21 nt, Artificial Sequence
  GATA2 Guide RNA
ggcaggaagagggacuagagg

SEQ ID NO: 30313 - RNA, 21 nt, Artificial Sequence
  GATA2 Guide RNA
gggacuagagggucucccaca

SEQ ID NO: 30314 - RNA, 21 nt, Artificial Sequence
  GATA2 Guide RNA
gggagacccucuagucccucu

SEQ ID NO: 30315 - RNA, 21 nt, Artificial Sequence
  GATA2 Guide RNA
gggcaggaagagggacuagag

SEQ ID NO: 30316 - RNA, 21 nt, Artificial Sequence
  GATA2 Guide RNA
gugggagacccucuagucccu

SEQ ID NO: 30317 - RNA, 21 nt, Artificial Sequence
  GATA2 Guide RNA
uagagggucucccacauggga

SEQ ID NO: 30318 - RNA, 21 nt, Artificial Sequence
  GATA2 Guide RNA
uagucccucuuccugcccagg

SEQ ID NO: 30319 - RNA, 21 nt, Artificial Sequence
  GATA2 Guide RNA
ucccaugugggagacccucua

SEQ ID NO: 30320 - RNA, 21 nt, Artificial Sequence
  GATA2 Guide RNA
ucuagucccucuuccugccca

SEQ ID NO: 30321 - RNA, 21 nt, Artificial Sequence
  GATA2 Guide RNA
ugggagacccucuagucccuc

SEQ ID NO: 30322 - RNA, 21 nt, Artificial Sequence
  GATA2 Guide RNA
ugggcaggaagagggacuaga

SEQ ID NO: 30323 - RNA, 21 nt, Artificial Sequence
  GATA2 Guide RNA
ugugggagacccucuaguccc

SEQ ID NO: 30324 - RNA, 22 nt, Artificial Sequence
  GATA2 Guide RNA
aagagggacuagagggucuccc

SEQ ID NO: 30325 - RNA, 22 nt, Artificial Sequence
  GATA2 Guide RNA
acccucuagucccucuuccugc

SEQ ID NO: 30326 - RNA, 22 nt, Artificial Sequence
  GATA2 Guide RNA
acuagagggucucccacauggg

SEQ ID NO: 30327 - RNA, 22 nt, Artificial Sequence
  GATA2 Guide RNA
agacccucuagucccucuuccu

SEQ ID NO: 30328 - RNA, 22 nt, Artificial Sequence
  GATA2 Guide RNA
agagggacuagagggucuccca

SEQ ID NO: 30329 - RNA, 22 nt, Artificial Sequence
  GATA2 Guide RNA
agccugggcaggaagagggacu

SEQ ID NO: 30330 - RNA, 22 nt, Artificial Sequence
  GATA2 Guide RNA
aggaagagggacuagagggucu

SEQ ID NO: 30331 - RNA, 22 nt, Artificial Sequence
  GATA2 Guide RNA
agggacuagagggucucccaca

SEQ ID NO: 30332 - RNA, 22 nt, Artificial Sequence
  GATA2 Guide RNA
augugggagacccucuaguccc

SEQ ID NO: 30333 - RNA, 22 nt, Artificial Sequence
  GATA2 Guide RNA
caggaagagggacuagaggguc

SEQ ID NO: 30334 - RNA, 22 nt, Artificial Sequence
  GATA2 Guide RNA
caugugggagacccucuagucc

SEQ ID NO: 30335 - RNA, 22 nt, Artificial Sequence
  GATA2 Guide RNA
ccaugugggagacccucuaguc

SEQ ID NO: 30336 - RNA, 22 nt, Artificial Sequence
  GATA2 Guide RNA
cccaugugggagacccucuagu

SEQ ID NO: 30337 - RNA, 22 nt, Artificial Sequence
  GATA2 Guide RNA
cccucuagucccucuuccugcc

SEQ ID NO: 30338 - RNA, 22 nt, Artificial Sequence
  GATA2 Guide RNA
ccucuagucccucuuccugccc

SEQ ID NO: 30339 - RNA, 22 nt, Artificial Sequence
  GATA2 Guide RNA
ccugggcaggaagagggacuag

SEQ ID NO: 30340 - RNA, 22 nt, Artificial Sequence
  GATA2 Guide RNA
cuagagggucucccacauggga

SEQ ID NO: 30341 - RNA, 22 nt, Artificial Sequence
  GATA2 Guide RNA
cuagucccucuuccugcccagg

SEQ ID NO: 30342 - RNA, 22 nt, Artificial Sequence
  GATA2 Guide RNA
cucccaugugggagacccucua

SEQ ID NO: 30343 - RNA, 22 nt, Artificial Sequence
  GATA2 Guide RNA
cucuagucccucuuccugccca

SEQ ID NO: 30344 - RNA, 22 nt, Artificial Sequence
  GATA2 Guide RNA
cugggcaggaagagggacuaga

SEQ ID NO: 30345 - RNA, 22 nt, Artificial Sequence
  GATA2 Guide RNA
gaagagggacuagagggucucc

SEQ ID NO: 30346 - RNA, 22 nt, Artificial Sequence
  GATA2 Guide RNA
gacccucuagucccucuuccug

SEQ ID NO: 30347 - RNA, 22 nt, Artificial Sequence
  GATA2 Guide RNA
gacuagagggucucccacaugg

SEQ ID NO: 30348 - RNA, 22 nt, Artificial Sequence
  GATA2 Guide RNA
gagacccucuagucccucuucc

SEQ ID NO: 30349 - RNA, 22 nt, Artificial Sequence
  GATA2 Guide RNA
gagggacuagagggucucccac

SEQ ID NO: 30350 - RNA, 22 nt, Artificial Sequence
  GATA2 Guide RNA
gcaggaagagggacuagagggu

SEQ ID NO: 30351 - RNA, 22 nt, Artificial Sequence
  GATA2 Guide RNA
gccugggcaggaagagggacua

SEQ ID NO: 30352 - RNA, 22 nt, Artificial Sequence
  GATA2 Guide RNA
ggaagagggacuagagggucuc

SEQ ID NO: 30353 - RNA, 22 nt, Artificial Sequence
  GATA2 Guide RNA
ggacuagagggucucccacaug

SEQ ID NO: 30354 - RNA, 22 nt, Artificial Sequence
  GATA2 Guide RNA
ggagacccucuagucccucuuc

SEQ ID NO: 30355 - RNA, 22 nt, Artificial Sequence
  GATA2 Guide RNA
ggcaggaagagggacuagaggg

SEQ ID NO: 30356 - RNA, 22 nt, Artificial Sequence
  GATA2 Guide RNA
gggacuagagggucucccacau

SEQ ID NO: 30357 - RNA, 22 nt, Artificial Sequence
  GATA2 Guide RNA
gggagacccucuagucccucuu

SEQ ID NO: 30358 - RNA, 22 nt, Artificial Sequence
  GATA2 Guide RNA
gggcaggaagagggacuagagg

SEQ ID NO: 30359 - RNA, 22 nt, Artificial Sequence
  GATA2 Guide RNA
gugggagacccucuagucccuc

SEQ ID NO: 30360 - RNA, 22 nt, Artificial Sequence
  GATA2 Guide RNA
uagagggucucccacaugggag

SEQ ID NO: 30361 - RNA, 22 nt, Artificial Sequence
  GATA2 Guide RNA
uagucccucuuccugcccaggc

(The sequence listing continues in the following parts.)

1. A method for modifying in a cell a mutant allele of the GATA2 gene having a mutation associated with MonoMAC syndrome, the method comprising
introducing to the cell a composition comprising:
a CRISPR nuclease or a nucleotide sequence encoding the CRISPR nuclease; and
an RNA molecule comprising a guide sequence portion having 17-25 nucleotides or a nucleotide sequence encoding the same,
wherein a complex of the CRISPR nuclease and the RNA molecule affects a double strand break in the mutant allele of the GATA2 gene.

2. The method of claim 1, wherein the RNA molecule targets the CRISPR nuclease to the mutation associated with MonoMAC syndrome,
wherein the mutation associated with MonoMAC syndrome is selected from the group consisting of 3:128479475_T_C; 3:128479476_A_G; 3:128479846_C_A; 3:128479875_C_T; 3:128480135_T_A; 3:128480322_G_A; 3:128480449_G_A; 3:128480599_C_T; 3:128480829_G_A; 3:128480845_C_T; 3:128480918_C_T; 3:128480935_T_C; 3:128480946_G_A; 3:128481039_T_A; 3:128481047_G_A; 3:128481055_G_T; 3:128481060_C_T; 3:128481071_C_A; 3:128481077_G_T; 3:128481090_G_A; 3:128481092_G_A; 3:128481095_G_A; 3:128481102_G_A; 3:128481115_G_T; 3:128481131_G_A; 3:128481136_G_A; 3:128481142_C_T; 3:128481147_G_A; 3:128481150_C_A; 3:128481162_C_G; 3:128481176_C_G; 3:128481180_A_T; 3:128481188_G_A; 3:128481189_A_G; 3:128481199_C_T; 3:128481214_C_G; 3:128481219_C_T; 3:128481220_G_C; 3:128481224_C_T; 3:128481226_C_A; 3:128481230_G_A; 3:128481230_G_T; 3:128481232_C_A; 3:128481245_T_A; 3:128481262_C_T; 3:128481270_G_A; 3:128481275_C_T; 3:128481276_G_A; 3:128481283_G_C; 3:128481299_A_G; 3:128481302_G_T; 3:128481315_T_AACC_T; 3:128481318_C_A; 3:128481819_A_G; 3:128481836_A_AGAGG; 3:128481841_C_T; 3:128481845_A_G; 3:128481849_G_T; 3:128481866_CGTTGGCGTTTCG_C; 3:128481872_C_T; 3:128481877_C_T; 3:128481878_G_A; 3:128481880_C_A; 3:128481881_G_A; 3:128481881_G_C; 3:128481887_A_C; 3:128481897_TGTCG_AAGGC; 3:128481898_G_T; 3:128481901_G_A; 3:128481908_A_G; 3:128481923_T_TGCCGGCTCTTCTGGCG; 3:128481924_G_A; 3:128481926_C_T; 3:128481927_G_A; 3:128481937_G_A; 3:128481937_G_GCGGC; 3:128481938_C_A; 3:128481938_C_T; 3:128481939_GGCCG_AAGGC; 3:128481942_C_T; 3:128481945_C_A; 3:128483288_G_A; 3:128483333_C_T; 3:128483347_C_T; 3:128483375_T_A; 3:128483868_G_A; 3:128483889_G_A; 3:128483905_CT_C; 3:128483906_T_C; 3:128483925_C_CATTGCACAGGT; 3:128483957_C_T; 3:128483973_C_CTGTGGCCCCACAGT; 3:128484010_A_C; 3:128485738_C_T; 3:128485741_G_A; 3:128485746_G_A; 3:128485750_C_T; 3:128485758_AG_A; 3:128485766_A_T; 3:128485769_T_C; 3:128485779_T_TC; 3:128485780_C_A; 3:128485783_C_T; 3:128485789_A_C; 3:128485795_C_A; 3:128485798_G_A; 3:128485811_C_T; 3:128485819 T_TAGTCGTGGGC; 3:128485837_G_A; 3:128485837_G_C; 3:128485843_T_C; 3:128485850_G_A; 3:128485855_G_A; 3:128485869_G_C; 3:128485871_G_A; 3:128485874_T_C; 3:128485891_A_G; 3:128485892_T_C; 3:128485892_T_G; 3:128485909_C_T; 3:128485910_G_A; 3:128485916_G_T; 3:128485924_C_T; 3:128485929_C_T; 3:128485937_T_G; 3:128485944_C_CGTCAG; 3:128485944_C_T; 3:128485962_C_A; 3:128485966_A_ACGC; 3:128485967_C_G; 3:128485970_C_T; 3:128485973_C_T; 3:128485982_C_G; 3:128485998_A_AC; 3:128485999_C_T; 3:128486002_C_A; 3:128486004_C_CGCGGAAGA; 3:128486005_G_A; 3:128486006_C_T; 3:128486023_G_A; 3:128486030_C_T; 3:128486031_C_A; 3:128486038_G_C; 3:128486057_C_T; 3:128486059_T_G; 3:128486066_G_A; 3:128486072_T_G; 3:128486075_G_A; 3:128486103_G_T; 3:128486104_T_A; 3:128486117_G_A; 3:128486129_C_A; 3:128486141_C_T; 3:128486142_G_T; 3:128486143_C_T; 3:128486153_C_T; 3:128486173_G_A; 3:128486179_A_G; 3:128486185_A_G; 3:128486189_G_A; 3:128486201_C_T; 3:128486218_T_C; 3:128486227_G_T; 3:128486240_G_A; 3:128486252_A_AG; 3:128486260_T_C; 3:128486271_C_T; 3:128486284_A_AGG; 3:128486287_G_A; 3:128486288_C_A; 3:128486295_GC_G; 3:128486296_C_T; 3:128486298_CC_AA; 3:128486320_G_T; 3:128486355_T_GC; 3:128486356_C_G; 3:128486365_C_CG; 3:128486805_T_C; 3:128486808_G_C; 3:128486826_C_T; 3:128486828_C_A; 3:128486850_G_A; 3:128486856_T_C; 3:128486872_A_C; 3:128486883_T_C; 3:128486890_A_T; 3:128486893_C_T; 3:128486896_C_T; 3:128486911_G_C; 3:128486931_A_G; 3:128486948_G_A; 3:128486956_G_T; 3:128486961_G_GACA; 3:128486967_G_C; 3:128486970_T_A; 3:128486973_T_G; 3:128486982_A_T; 3:128486992_G_A; 3:128487002_C_A; 3:128487004_A_G; 3:128487009_G_T; 3:128487016_CG_GC; 3:128487016_C_T; 3:128487021_G_T; 3:128487036_G_A; 3:128487073_G_C; 3:128492886_G_A; 3:128492959_A_C; 3:128493033_G_T; 3:128493046_G_A; 3:128493068_G_A,
wherein the guide sequence portion of the RNA molecule comprises 17-25 contiguous nucleotides containing nucleotides in the sequence set forth in any one of SEQ ID NOs: 1-44348 which targets a mutation associated with MonoMAC syndrome.

3-4. (canceled)

5. The method of claim 1, wherein the RNA molecule targets the CRISPR nuclease to a SNP position of the mutant allele,
wherein the SNP position is located at any one of rs10934857; rs2713604; rs2713603; rs11708606; rs11717152; rs2659689; rs2713602; rs2335052; rs4577488; or rs1573858, and
wherein the guide sequence portion of the RNA molecule comprises 17-25 contiguous nucleotides containing nucleotides in the sequence set forth in any one of SEQ ID NOs: 1-44348 which targets a SNP position of the mutant allele.

6. The method of claim 5, wherein the SNP position is in a non-coding region of the GATA2 gene at a location that is 250 or fewer nucleotides from the first or the last nucleotide of a coding region of the GATA2 gene containing the mutation associated with MonoMAC syndrome.

7-8. (canceled)

9. The method of claim 5, wherein the SNP position contains a heterozygous SNP.

10. The method of claim 1, wherein a complex of the CRISPR nuclease and the RNA molecule affects a double strand break in a non-coding region of the GATA2 gene at a location that is 250 or fewer nucleotides from the first or the last nucleotide of a coding region of the GATA2 gene containing the mutation associated with MonoMAC syndrome,
wherein the coding region is any one of Exon 2, Exon 3, Exon 4, Exon 5, or Exon 6 of the GATA2 gene, and
wherein the non-coding region is any one of the 3′UTR, Intron 1, Intron 2, Intron 3, Intron 4, or Intron 5 of the GATA2 gene.

11-12. (canceled)

13. The method of claim 10, wherein the non-coding region is any one of the 3:128480417-128480717; 3:128487000-128487300; 3:128486500-128486800; 3:128486375-128486675; 3:128485421-128485721; 3:128484028-128484328; 3:128483533-128483833; 3:128481949-128482249; 3:128481516-128481816; or 3:128481320-128481620.

14. The method of claim 13, wherein the guide sequence portion of the RNA molecule comprises 17-25 contiguous nucleotides containing nucleotides in the sequence set forth in any one of SEQ ID NOs: 1-44348 which targets a non-coding region of the GATA2 gene.

15. The method of claim 1, further comprising introducing to the cell a donor template for homology directed repair (HDR), alteration, or replacement of a sequence of the GATA2 allele, wherein the modifying results in correction of the mutant allele of the GATA2 gene from the mutant phenotype to a non-mutant phenotype.

16. (canceled)

17. The method of claim 1, comprising first obtaining a cell with a GATA2 gene mutation associated with MonoMAC syndrome from a subject with a GATA2 gene mutation related to MonoMAC syndrome and/or suffering from MonoMAC syndrome.

18. (canceled)

19. A composition comprising a modified cell obtained by the method of claim 1.

20. The composition of claim 19, further comprising a pharmaceutically acceptable carrier.

21. (canceled)

22. An in vitro or ex vivo method of preparing a composition comprising a modified cell, the method comprising:
a) isolating HSPCs from cells obtained from a subject with a GATA2 gene mutation related to MonoMAC syndrome and/or suffering from MonoMAC syndrome, and obtaining the cell from the subject;
b) introducing to the cells of step (a) a composition comprising:
a CRISPR nuclease or a nucleotide sequence encoding the CRISPR nuclease; and
an RNA molecule comprising a guide sequence portion having 17-25 nucleotides,
wherein a complex of the CRISPR nuclease and the RNA molecule affects a double strand break in the mutant allele of the GATA2 gene according to the method of claim 1,
optionally, introducing to the cells a donor template for homology directed repair (HDR), alteration, or replacement of a target sequence of the GATA2 allele
so as to modify the mutant allele of the GATA2 gene in one or more cells thereby obtaining modified cells;
optionally further comprising the step of
c) culture expanding the modified cells of step (b), wherein the modified cells are capable of engraftment and giving rise to progeny cells after engraftment.

23. (canceled)

24. A method of treating a subject afflicted with MonoMAC syndrome, comprising administration of a therapeutically effective amount of the modified cells of the composition of claim 19.

25. A method for treating MonoMAC syndrome in a subject with a GATA2 gene mutation relating to MonoMAC syndrome in need thereof, the method comprising:
a) isolating HSPCs from cells obtained from the subject;
b) introducing to the cells of step (a) a composition comprising:
a CRISPR nuclease or a nucleotide sequence encoding the CRISPR nuclease; and
an RNA molecule comprising a guide sequence portion having 17-25 nucleotides,
wherein a complex of the CRISPR nuclease and the RNA molecule affects a double strand break in the mutant allele of the GATA2 gene according to the method of claim 1,
optionally, introducing to the cells a donor template for homology directed repair (HDR), alteration, or replacement of a target sequence of the GATA2 allele
so as to modify the mutant allele of the GATA2 gene in one or more cells thereby obtaining modified cells;
optionally further comprising an additional step of
c) culture expanding the cells of step (b) wherein the modified cells are capable of engraftment and giving rise to progeny cells after engraftment; and
d) administering to the subject the cells of step (b) or step (c)
thereby treating the MonoMAC syndrome in the subject.

26. A method for treating MonoMAC syndrome in a subject with a GATA2 gene mutation relating to MonoMAC syndrome in need thereof, the method comprising
administering to the subject autologous modified cells or progeny of autologous modified cells, wherein the autologous modified cells are modified so as to have a correction of the mutant allele of the GATA2 gene from the mutant phenotype to a non-mutant phenotype,
wherein said double strand break results from introduction to the cells of a composition comprising a CRISPR nuclease or sequence encoding the CRISPR nuclease and an RNA molecule wherein a complex of the CRISPR nuclease and the RNA molecule affects a double strand break in the mutant allele of the GATA2 gene according to the method of claim 1,
thereby treating the MonoMAC syndrome in the subject.

27. A composition comprising an RNA molecule, the RNA molecule comprising a guide sequence portion having 17-25 contiguous nucleotides containing nucleotides in the sequence set forth in any one of SEQ ID NOs: 1-44348.

28. The composition of claim 27, further comprising a donor template for homology directed repair (HDR), alteration, or replacement of a target sequence of the GATA2 allele and one or more CRISPR nucleases or polynucleotide molecules encoding the one or more CRISPR nucleases.

29. (canceled)

30. A method for modifying in a cell a mutant allele of the GATA2 gene, the method comprising delivering to the cell the composition of claim 27.

31. A method for treating MonoMAC syndrome, the method comprising delivering to a subject having MonoMAC syndrome the composition of claim 27.

32-34. (canceled)
